United States Patent Application Publication US 2022/0211838 A1 - sequence listing, part 9

SEQ ID NO: 12449 - RNA, 3806 nt, Artificial Sequence
  SARS-CoV-2/Wuhan/WIV05/2019__EPI_ISL_402128 spike protein mRNA gc (1-1147)(I714C_Y1110C) Foldon construct
aggagagucccgcagucggcguccagcggcucugcuuguucgugugugugucguugcaggccuuauucaagcuuaccauguucguguuccugguccuccugccccuggugagcucccagugcgugaaccucaccacccgcacgcagcugccgcccgccuacaccaacagcuucacccggggcgucuacuaccccgacaagguguuccgcuccagcgugcugcacuccacccaggaccucuuccugcccuucuucagcaacgucacgugguuccacgccauccacguguccgggaccaacggcaccaagcgguucgacaacccggugcugcccuucaacgacggggucuacuucgcgagcaccgagaaguccaacaucauccgcggcuggaucuucgggacgacccucgacagcaagacccagucccugcugaucgugaacaacgccaccaacguggucaucaaggugugcgaguuccaguucugcaacgaccccuuccucggcguguacuaccacaagaacaacaagagcuggauggaguccgaguuccgggucuacagcuccgccaacaacugcacguucgaguacgugagccagcccuuccugauggaccuggagggcaagcaggggaacuucaagaaccuccgcgaguucguguucaagaacaucgacggcuacuucaagaucuacuccaagcacaccccgaucaaccugguccgggaccugccccagggguucagcgcccucgagccccugguggaccugcccaucggcaucaacaucacccgcuuccagacccuccuggcccugcaccgguccuaccucacgccgggggacagcagcuccggcuggaccgcgggcgccgccgccuacuacgugggguaccugcagccccgcaccuuccugcucaaguacaacgagaacggcaccaucacggacgcggucgacugcgcccuggacccccugagcgagaccaagugcacccucaaguccuucaccguggagaaggggaucuaccagacgagcaacuuccgggugcagcccaccgaguccaucguccgcuucccgaacaucaccaaccugugccccuucggcgagguguucaacgccacccgguucgccagcgucuacgccuggaaccgcaagcggaucuccaacugcguggcggacuacagcgugcuguacaacuccgccagcuucuccacguucaagugcuacggcgucagccccaccaagcucaacgaccugugcuucaccaacguguacgccgacuccuucgugauccgcggggacgagguccggcagaucgcccccggccagaccgggaagaucgccgacuacaacuacaagcugccggacgacuucacgggcugcgugaucgcguggaacagcaacaaccucgacuccaaggucgggggcaacuacaacuaccuguaccgccuguuccgcaagagcaaccucaagcccuucgagcgggacaucuccaccgagaucuaccaggccggcagcacccccugcaacgggguggagggcuucaacugcuacuucccccugcaguccuacggguuccagccgaccaacggcgugggguaccagcccuaccggguggucgugcugagcuucgagcuccugcacgcccccgccacggugugcggccccaagaaguccaccaaccuggucaagaacaagugcgugaacuucaacuucaacggccucaccgggaccggcgugcugaccgagagcaacaagaaguuccugccguuccagcaguucgggcgcgacaucgccgacacgaccgacgcgguccgcgacccccagacccuggagauccucgacaucacccccugcagcuucggcgggguguccgugaucacgccgggcaccaacaccagcaaccaggucgccgugcuguaccaggacgugaacugcaccgagguccccguggccauccacgccgaccagcugacgcccaccuggcggguguacuccaccggcagcaacgucuuccagacccgcgccgggugccucaucggcgcggagcacgugaacaacuccuacgagugcgacauccccaucggggccggcaucugcgccagcuaccagacgcagaccaacuccccgcggcgcgcccggagcguggcgucccagagcaucaucgccuacaccaugucccugggcgccgagaacagcgucgccuacuccaacaacagcaucgccugccccaccaacuucacgaucuccgugaccaccgagauccugcccgugagcaugaccaagacgagcgucgacugcaccauguacaucugcggggacuccaccgagugcagcaaccuccugcugcaguacggcuccuucugcacccagcucaaccgcgcgcugacggggaucgccguggagcaggacaagaacacccaggagguguucgcccaggucaagcagaucuacaagacgcccccgaucaaggacuucggcggguucaacuucagccagauccugcccgaccccuccaagcccagcaagcgguccuucaucgaggaccuccuguucaacaaggugacccuggccgacgccggcuucaucaagcaguacggcgacugccucggggacaucgcggcccgcgaccugaucugcgcccagaaguucaacggccugaccgugcucccgccccugcugaccgacgagaugaucgcccaguacaccagcgcccuccuggcggggaccaucacguccggcuggaccuucggggccggcgccgcccugcagauccccuucgcgaugcagauggccuaccgguucaacggcaucggggucacccagaacgugcucuacgagaaccagaagcugaucgccaaccaguucaacagcgccaucggcaagauccaggacucccugagcuccaccgccagcgcgcucgggaagcugcaggacguggucaaccagaacgcccaggcccugaacacgcucgugaagcagcuguccagcaacuucggcgccaucuccagcgugcugaacgacauccucucccgccuggacaaggucgaggccgaggugcagaucgaccggcugaucaccgggcgccuccagagccugcagaccuacgugacccagcagcugauccgggcggccgagauccgcgccagcgccaaccucgccgcgaccaagauguccgagugcguccugggccagagcaagcggguggacuucugcggcaagggguaccaccugauguccuucccccagagcgccccgcacggcguggucuuccuccacgugacguacguccccgcccaggagaagaacuucaccaccgcccccgcgaucugccacgacgggaaggcccacuucccccgcgagggcguguucguguccaacgggacccacugguucgucacgcagcggaacuucugcgagccgcagaucaucaccaccgacaacaccuucgugagcggcaacugcgacguggucaucggcaucgugaacaacacgguguacgacccccugcagcccgagcuggacuccggcgggagcggcuacauccccgaggccccgcgcgacgggcaggccuacgugcggaaggacggcgaguggguccugcucagcaccuuccugugaggacuagucccuguucccagagcccacuuuuuuuucuuuuuuugaaauaaaauagccugucuuucagaucucaaaggcucuuuucagagccaccaaaaaaaaaaaaaaaaaaaaaaaaaaaaaaaaaaaaaaaaaaaaaaaaaaaaaaaaaaaaaaaaaaaaaaaaaaaaaaaaaaaaaaaaaaaaaaaaaaaaa

SEQ ID NO: 12450 - RNA, 3806 nt, Artificial Sequence
  SARS-CoV-2/Wuhan/WIV05/2019__EPI_ISL_402128 spike protein mRNA gc (1-1147)(P715C_P1069C) Foldon construct
aggagagucccgcagucggcguccagcggcucugcuuguucgugugugugucguugcaggccuuauucaagcuuaccauguucguguuccugguccuccugccccuggugagcucccagugcgugaaccucaccacccgcacgcagcugccgcccgccuacaccaacagcuucacccggggcgucuacuaccccgacaagguguuccgcuccagcgugcugcacuccacccaggaccucuuccugcccuucuucagcaacgucacgugguuccacgccauccacguguccgggaccaacggcaccaagcgguucgacaacccggugcugcccuucaacgacggggucuacuucgcgagcaccgagaaguccaacaucauccgcggcuggaucuucgggacgacccucgacagcaagacccagucccugcugaucgugaacaacgccaccaacguggucaucaaggugugcgaguuccaguucugcaacgaccccuuccucggcguguacuaccacaagaacaacaagagcuggauggaguccgaguuccgggucuacagcuccgccaacaacugcacguucgaguacgugagccagcccuuccugauggaccuggagggcaagcaggggaacuucaagaaccuccgcgaguucguguucaagaacaucgacggcuacuucaagaucuacuccaagcacaccccgaucaaccugguccgggaccugccccagggguucagcgcccucgagccccugguggaccugcccaucggcaucaacaucacccgcuuccagacccuccuggcccugcaccgguccuaccucacgccgggggacagcagcuccggcuggaccgcgggcgccgccgccuacuacgugggguaccugcagccccgcaccuuccugcucaaguacaacgagaacggcaccaucacggacgcggucgacugcgcccuggacccccugagcgagaccaagugcacccucaaguccuucaccguggagaaggggaucuaccagacgagcaacuuccgggugcagcccaccgaguccaucguccgcuucccgaacaucaccaaccugugccccuucggcgagguguucaacgccacccgguucgccagcgucuacgccuggaaccgcaagcggaucuccaacugcguggcggacuacagcgugcuguacaacuccgccagcuucuccacguucaagugcuacggcgucagccccaccaagcucaacgaccugugcuucaccaacguguacgccgacuccuucgugauccgcggggacgagguccggcagaucgcccccggccagaccgggaagaucgccgacuacaacuacaagcugccggacgacuucacgggcugcgugaucgcguggaacagcaacaaccucgacuccaaggucgggggcaacuacaacuaccuguaccgccuguuccgcaagagcaaccucaagcccuucgagcgggacaucuccaccgagaucuaccaggccggcagcacccccugcaacgggguggagggcuucaacugcuacuucccccugcaguccuacggguuccagccgaccaacggcgugggguaccagcccuaccggguggucgugcugagcuucgagcuccugcacgcccccgccacggugugcggccccaagaaguccaccaaccuggucaagaacaagugcgugaacuucaacuucaacggccucaccgggaccggcgugcugaccgagagcaacaagaaguuccugccguuccagcaguucgggcgcgacaucgccgacacgaccgacgcgguccgcgacccccagacccuggagauccucgacaucacccccugcagcuucggcgggguguccgugaucacgccgggcaccaacaccagcaaccaggucgccgugcuguaccaggacgugaacugcaccgagguccccguggccauccacgccgaccagcugacgcccaccuggcggguguacuccaccggcagcaacgucuuccagacccgcgccgggugccucaucggcgcggagcacgugaacaacuccuacgagugcgacauccccaucggggccggcaucugcgccagcuaccagacgcagaccaacuccccgcggcgcgcccggagcguggcgucccagagcaucaucgccuacaccaugucccugggcgccgagaacagcgucgccuacuccaacaacagcaucgccaucugcaccaacuucacgaucuccgugaccaccgagauccugcccgugagcaugaccaagacgagcgucgacugcaccauguacaucugcggggacuccaccgagugcagcaaccuccugcugcaguacggcuccuucugcacccagcucaaccgcgcgcugacggggaucgccguggagcaggacaagaacacccaggagguguucgcccaggucaagcagaucuacaagacgcccccgaucaaggacuucggcggguucaacuucagccagauccugcccgaccccuccaagcccagcaagcgguccuucaucgaggaccuccuguucaacaaggugacccuggccgacgccggcuucaucaagcaguacggcgacugccucggggacaucgcggcccgcgaccugaucugcgcccagaaguucaacggccugaccgugcucccgccccugcugaccgacgagaugaucgcccaguacaccagcgcccuccuggcggggaccaucacguccggcuggaccuucggggccggcgccgcccugcagauccccuucgcgaugcagauggccuaccgguucaacggcaucggggucacccagaacgugcucuacgagaaccagaagcugaucgccaaccaguucaacagcgccaucggcaagauccaggacucccugagcuccaccgccagcgcgcucgggaagcugcaggacguggucaaccagaacgcccaggcccugaacacgcucgugaagcagcuguccagcaacuucggcgccaucuccagcgugcugaacgacauccucucccgccuggacaaggucgaggccgaggugcagaucgaccggcugaucaccgggcgccuccagagccugcagaccuacgugacccagcagcugauccgggcggccgagauccgcgccagcgccaaccucgccgcgaccaagauguccgagugcguccugggccagagcaagcggguggacuucugcggcaagggguaccaccugauguccuucccccagagcgccccgcacggcguggucuuccuccacgugacguacgucugcgcccaggagaagaacuucaccaccgcccccgcgaucugccacgacgggaaggcccacuucccccgcgagggcguguucguguccaacgggacccacugguucgucacgcagcggaacuucuacgagccgcagaucaucaccaccgacaacaccuucgugagcggcaacugcgacguggucaucggcaucgugaacaacacgguguacgacccccugcagcccgagcuggacuccggcgggagcggcuacauccccgaggccccgcgcgacgggcaggccuacgugcggaaggacggcgaguggguccugcucagcaccuuccugugaggacuagucccuguucccagagcccacuuuuuuuucuuuuuuugaaauaaaauagccugucuuucagaucucaaaggcucuuuucagagccaccaaaaaaaaaaaaaaaaaaaaaaaaaaaaaaaaaaaaaaaaaaaaaaaaaaaaaaaaaaaaaaaaaaaaaaaaaaaaaaaaaaaaaaaaaaaaaaaaaaaaa

SEQ ID NO: 12451 - RNA, 3806 nt, Artificial Sequence
  SARS-CoV-2/Wuhan/WIV05/2019__EPI_ISL_402128 spike protein mRNA gc (1-1147)(G889C_L1034C) Foldon construct
aggagagucccgcagucggcguccagcggcucugcuuguucgugugugugucguugcaggccuuauucaagcuuaccauguucguguuccugguccuccugccccuggugagcucccagugcgugaaccucaccacccgcacgcagcugccgcccgccuacaccaacagcuucacccggggcgucuacuaccccgacaagguguuccgcuccagcgugcugcacuccacccaggaccucuuccugcccuucuucagcaacgucacgugguuccacgccauccacguguccgggaccaacggcaccaagcgguucgacaacccggugcugcccuucaacgacggggucuacuucgcgagcaccgagaaguccaacaucauccgcggcuggaucuucgggacgacccucgacagcaagacccagucccugcugaucgugaacaacgccaccaacguggucaucaaggugugcgaguuccaguucugcaacgaccccuuccucggcguguacuaccacaagaacaacaagagcuggauggaguccgaguuccgggucuacagcuccgccaacaacugcacguucgaguacgugagccagcccuuccugauggaccuggagggcaagcaggggaacuucaagaaccuccgcgaguucguguucaagaacaucgacggcuacuucaagaucuacuccaagcacaccccgaucaaccugguccgggaccugccccagggguucagcgcccucgagccccugguggaccugcccaucggcaucaacaucacccgcuuccagacccuccuggcccugcaccgguccuaccucacgccgggggacagcagcuccggcuggaccgcgggcgccgccgccuacuacgugggguaccugcagccccgcaccuuccugcucaaguacaacgagaacggcaccaucacggacgcggucgacugcgcccuggacccccugagcgagaccaagugcacccucaaguccuucaccguggagaaggggaucuaccagacgagcaacuuccgggugcagcccaccgaguccaucguccgcuucccgaacaucaccaaccugugccccuucggcgagguguucaacgccacccgguucgccagcgucuacgccuggaaccgcaagcggaucuccaacugcguggcggacuacagcgugcuguacaacuccgccagcuucuccacguucaagugcuacggcgucagccccaccaagcucaacgaccugugcuucaccaacguguacgccgacuccuucgugauccgcggggacgagguccggcagaucgcccccggccagaccgggaagaucgccgacuacaacuacaagcugccggacgacuucacgggcugcgugaucgcguggaacagcaacaaccucgacuccaaggucgggggcaacuacaacuaccuguaccgccuguuccgcaagagcaaccucaagcccuucgagcgggacaucuccaccgagaucuaccaggccggcagcacccccugcaacgggguggagggcuucaacugcuacuucccccugcaguccuacggguuccagccgaccaacggcgugggguaccagcccuaccggguggucgugcugagcuucgagcuccugcacgcccccgccacggugugcggccccaagaaguccaccaaccuggucaagaacaagugcgugaacuucaacuucaacggccucaccgggaccggcgugcugaccgagagcaacaagaaguuccugccguuccagcaguucgggcgcgacaucgccgacacgaccgacgcgguccgcgacccccagacccuggagauccucgacaucacccccugcagcuucggcgggguguccgugaucacgccgggcaccaacaccagcaaccaggucgccgugcuguaccaggacgugaacugcaccgagguccccguggccauccacgccgaccagcugacgcccaccuggcggguguacuccaccggcagcaacgucuuccagacccgcgccgggugccucaucggcgcggagcacgugaacaacuccuacgagugcgacauccccaucggggccggcaucugcgccagcuaccagacgcagaccaacuccccgcggcgcgcccggagcguggcgucccagagcaucaucgccuacaccaugucccugggcgccgagaacagcgucgccuacuccaacaacagcaucgccauccccaccaacuucacgaucuccgugaccaccgagauccugcccgugagcaugaccaagacgagcgucgacugcaccauguacaucugcggggacuccaccgagugcagcaaccuccugcugcaguacggcuccuucugcacccagcucaaccgcgcgcugacggggaucgccguggagcaggacaagaacacccaggagguguucgcccaggucaagcagaucuacaagacgcccccgaucaaggacuucggcggguucaacuucagccagauccugcccgaccccuccaagcccagcaagcgguccuucaucgaggaccuccuguucaacaaggugacccuggccgacgccggcuucaucaagcaguacggcgacugccucggggacaucgcggcccgcgaccugaucugcgcccagaaguucaacggccugaccgugcucccgccccugcugaccgacgagaugaucgcccaguacaccagcgcccuccuggcggggaccaucacguccggcuggaccuucugcgccggcgccgcccugcagauccccuucgcgaugcagauggccuaccgguucaacggcaucggggucacccagaacgugcucuacgagaaccagaagcugaucgccaaccaguucaacagcgccaucggcaagauccaggacucccugagcuccaccgccagcgcgcucgggaagcugcaggacguggucaaccagaacgcccaggcccugaacacgcucgugaagcagcuguccagcaacuucggcgccaucuccagcgugcugaacgacauccucucccgccuggacaaggucgaggccgaggugcagaucgaccggcugaucaccgggcgccuccagagccugcagaccuacgugacccagcagcugauccgggcggccgagauccgcgccagcgccaaccucgccgcgaccaagauguccgagugcgucugcggccagagcaagcggguggacuucugcggcaagggguaccaccugauguccuucccccagagcgccccgcacggcguggucuuccuccacgugacguacguccccgcccaggagaagaacuucaccaccgcccccgcgaucugccacgacgggaaggcccacuucccccgcgagggcguguucguguccaacgggacccacugguucgucacgcagcggaacuucuacgagccgcagaucaucaccaccgacaacaccuucgugagcggcaacugcgacguggucaucggcaucgugaacaacacgguguacgacccccugcagcccgagcuggacuccggcgggagcggcuacauccccgaggccccgcgcgacgggcaggccuacgugcggaaggacggcgaguggguccugcucagcaccuuccugugaggacuagucccuguucccagagcccacuuuuuuuucuuuuuuugaaauaaaauagccugucuuucagaucucaaaggcucuuuucagagccaccaaaaaaaaaaaaaaaaaaaaaaaaaaaaaaaaaaaaaaaaaaaaaaaaaaaaaaaaaaaaaaaaaaaaaaaaaaaaaaaaaaaaaaaaaaaaaaaaaaaaa

SEQ ID NO: 12452 - RNA, 3806 nt, Artificial Sequence
  SARS-CoV-2/Wuhan/WIV05/2019__EPI_ISL_402128 spike protein mRNA gc (1-1147)(I909C_Y1047C) Foldon construct
aggagagucccgcagucggcguccagcggcucugcuuguucgugugugugucguugcaggccuuauucaagcuuaccauguucguguuccugguccuccugccccuggugagcucccagugcgugaaccucaccacccgcacgcagcugccgcccgccuacaccaacagcuucacccggggcgucuacuaccccgacaagguguuccgcuccagcgugcugcacuccacccaggaccucuuccugcccuucuucagcaacgucacgugguuccacgccauccacguguccgggaccaacggcaccaagcgguucgacaacccggugcugcccuucaacgacggggucuacuucgcgagcaccgagaaguccaacaucauccgcggcuggaucuucgggacgacccucgacagcaagacccagucccugcugaucgugaacaacgccaccaacguggucaucaaggugugcgaguuccaguucugcaacgaccccuuccucggcguguacuaccacaagaacaacaagagcuggauggaguccgaguuccgggucuacagcuccgccaacaacugcacguucgaguacgugagccagcccuuccugauggaccuggagggcaagcaggggaacuucaagaaccuccgcgaguucguguucaagaacaucgacggcuacuucaagaucuacuccaagcacaccccgaucaaccugguccgggaccugccccagggguucagcgcccucgagccccugguggaccugcccaucggcaucaacaucacccgcuuccagacccuccuggcccugcaccgguccuaccucacgccgggggacagcagcuccggcuggaccgcgggcgccgccgccuacuacgugggguaccugcagccccgcaccuuccugcucaaguacaacgagaacggcaccaucacggacgcggucgacugcgcccuggacccccugagcgagaccaagugcacccucaaguccuucaccguggagaaggggaucuaccagacgagcaacuuccgggugcagcccaccgaguccaucguccgcuucccgaacaucaccaaccugugccccuucggcgagguguucaacgccacccgguucgccagcgucuacgccuggaaccgcaagcggaucuccaacugcguggcggacuacagcgugcuguacaacuccgccagcuucuccacguucaagugcuacggcgucagccccaccaagcucaacgaccugugcuucaccaacguguacgccgacuccuucgugauccgcggggacgagguccggcagaucgcccccggccagaccgggaagaucgccgacuacaacuacaagcugccggacgacuucacgggcugcgugaucgcguggaacagcaacaaccucgacuccaaggucgggggcaacuacaacuaccuguaccgccuguuccgcaagagcaaccucaagcccuucgagcgggacaucuccaccgagaucuaccaggccggcagcacccccugcaacgggguggagggcuucaacugcuacuucccccugcaguccuacggguuccagccgaccaacggcgugggguaccagcccuaccggguggucgugcugagcuucgagcuccugcacgcccccgccacggugugcggccccaagaaguccaccaaccuggucaagaacaagugcgugaacuucaacuucaacggccucaccgggaccggcgugcugaccgagagcaacaagaaguuccugccguuccagcaguucgggcgcgacaucgccgacacgaccgacgcgguccgcgacccccagacccuggagauccucgacaucacccccugcagcuucggcgggguguccgugaucacgccgggcaccaacaccagcaaccaggucgccgugcuguaccaggacgugaacugcaccgagguccccguggccauccacgccgaccagcugacgcccaccuggcggguguacuccaccggcagcaacgucuuccagacccgcgccgggugccucaucggcgcggagcacgugaacaacuccuacgagugcgacauccccaucggggccggcaucugcgccagcuaccagacgcagaccaacuccccgcggcgcgcccggagcguggcgucccagagcaucaucgccuacaccaugucccugggcgccgagaacagcgucgccuacuccaacaacagcaucgccauccccaccaacuucacgaucuccgugaccaccgagauccugcccgugagcaugaccaagacgagcgucgacugcaccauguacaucugcggggacuccaccgagugcagcaaccuccugcugcaguacggcuccuucugcacccagcucaaccgcgcgcugacggggaucgccguggagcaggacaagaacacccaggagguguucgcccaggucaagcagaucuacaagacgcccccgaucaaggacuucggcggguucaacuucagccagauccugcccgaccccuccaagcccagcaagcgguccuucaucgaggaccuccuguucaacaaggugacccuggccgacgccggcuucaucaagcaguacggcgacugccucggggacaucgcggcccgcgaccugaucugcgcccagaaguucaacggccugaccgugcucccgccccugcugaccgacgagaugaucgcccaguacaccagcgcccuccuggcggggaccaucacguccggcuggaccuucggggccggcgccgcccugcagauccccuucgcgaugcagauggccuaccgguucaacggcugcggggucacccagaacgugcucuacgagaaccagaagcugaucgccaaccaguucaacagcgccaucggcaagauccaggacucccugagcuccaccgccagcgcgcucgggaagcugcaggacguggucaaccagaacgcccaggcccugaacacgcucgugaagcagcuguccagcaacuucggcgccaucuccagcgugcugaacgacauccucucccgccuggacaaggucgaggccgaggugcagaucgaccggcugaucaccgggcgccuccagagccugcagaccuacgugacccagcagcugauccgggcggccgagauccgcgccagcgccaaccucgccgcgaccaagauguccgagugcguccugggccagagcaagcggguggacuucugcggcaaggggugccaccugauguccuucccccagagcgccccgcacggcguggucuuccuccacgugacguacguccccgcccaggagaagaacuucaccaccgcccccgcgaucugccacgacgggaaggcccacuucccccgcgagggcguguucguguccaacgggacccacugguucgucacgcagcggaacuucuacgagccgcagaucaucaccaccgacaacaccuucgugagcggcaacugcgacguggucaucggcaucgugaacaacacgguguacgacccccugcagcccgagcuggacuccggcgggagcggcuacauccccgaggccccgcgcgacgggcaggccuacgugcggaaggacggcgaguggguccugcucagcaccuuccugugaggacuagucccuguucccagagcccacuuuuuuuucuuuuuuugaaauaaaauagccugucuuucagaucucaaaggcucuuuucagagccaccaaaaaaaaaaaaaaaaaaaaaaaaaaaaaaaaaaaaaaaaaaaaaaaaaaaaaaaaaaaaaaaaaaaaaaaaaaaaaaaaaaaaaaaaaaaaaaaaaaaaa

SEQ ID NO: 12453 - RNA, 3806 nt, Artificial Sequence
  SARS-CoV-2/Wuhan/WIV05/2019__EPI_ISL_402128 spike protein mRNA gc (1-1147)(Q965C_S1003C) Foldon construct
aggagagucccgcagucggcguccagcggcucugcuuguucgugugugugucguugcaggccuuauucaagcuuaccauguucguguuccugguccuccugccccuggugagcucccagugcgugaaccucaccacccgcacgcagcugccgcccgccuacaccaacagcuucacccggggcgucuacuaccccgacaagguguuccgcuccagcgugcugcacuccacccaggaccucuuccugcccuucuucagcaacgucacgugguuccacgccauccacguguccgggaccaacggcaccaagcgguucgacaacccggugcugcccuucaacgacggggucuacuucgcgagcaccgagaaguccaacaucauccgcggcuggaucuucgggacgacccucgacagcaagacccagucccugcugaucgugaacaacgccaccaacguggucaucaaggugugcgaguuccaguucugcaacgaccccuuccucggcguguacuaccacaagaacaacaagagcuggauggaguccgaguuccgggucuacagcuccgccaacaacugcacguucgaguacgugagccagcccuuccugauggaccuggagggcaagcaggggaacuucaagaaccuccgcgaguucguguucaagaacaucgacggcuacuucaagaucuacuccaagcacaccccgaucaaccugguccgggaccugccccagggguucagcgcccucgagccccugguggaccugcccaucggcaucaacaucacccgcuuccagacccuccuggcccugcaccgguccuaccucacgccgggggacagcagcuccggcuggaccgcgggcgccgccgccuacuacgugggguaccugcagccccgcaccuuccugcucaaguacaacgagaacggcaccaucacggacgcggucgacugcgcccuggacccccugagcgagaccaagugcacccucaaguccuucaccguggagaaggggaucuaccagacgagcaacuuccgggugcagcccaccgaguccaucguccgcuucccgaacaucaccaaccugugccccuucggcgagguguucaacgccacccgguucgccagcgucuacgccuggaaccgcaagcggaucuccaacugcguggcggacuacagcgugcuguacaacuccgccagcuucuccacguucaagugcuacggcgucagccccaccaagcucaacgaccugugcuucaccaacguguacgccgacuccuucgugauccgcggggacgagguccggcagaucgcccccggccagaccgggaagaucgccgacuacaacuacaagcugccggacgacuucacgggcugcgugaucgcguggaacagcaacaaccucgacuccaaggucgggggcaacuacaacuaccuguaccgccuguuccgcaagagcaaccucaagcccuucgagcgggacaucuccaccgagaucuaccaggccggcagcacccccugcaacgggguggagggcuucaacugcuacuucccccugcaguccuacggguuccagccgaccaacggcgugggguaccagcccuaccggguggucgugcugagcuucgagcuccugcacgcccccgccacggugugcggccccaagaaguccaccaaccuggucaagaacaagugcgugaacuucaacuucaacggccucaccgggaccggcgugcugaccgagagcaacaagaaguuccugccguuccagcaguucgggcgcgacaucgccgacacgaccgacgcgguccgcgacccccagacccuggagauccucgacaucacccccugcagcuucggcgggguguccgugaucacgccgggcaccaacaccagcaaccaggucgccgugcuguaccaggacgugaacugcaccgagguccccguggccauccacgccgaccagcugacgcccaccuggcggguguacuccaccggcagcaacgucuuccagacccgcgccgggugccucaucggcgcggagcacgugaacaacuccuacgagugcgacauccccaucggggccggcaucugcgccagcuaccagacgcagaccaacuccccgcggcgcgcccggagcguggcgucccagagcaucaucgccuacaccaugucccugggcgccgagaacagcgucgccuacuccaacaacagcaucgccauccccaccaacuucacgaucuccgugaccaccgagauccugcccgugagcaugaccaagacgagcgucgacugcaccauguacaucugcggggacuccaccgagugcagcaaccuccugcugcaguacggcuccuucugcacccagcucaaccgcgcgcugacggggaucgccguggagcaggacaagaacacccaggagguguucgcccaggucaagcagaucuacaagacgcccccgaucaaggacuucggcggguucaacuucagccagauccugcccgaccccuccaagcccagcaagcgguccuucaucgaggaccuccuguucaacaaggugacccuggccgacgccggcuucaucaagcaguacggcgacugccucggggacaucgcggcccgcgaccugaucugcgcccagaaguucaacggccugaccgugcucccgccccugcugaccgacgagaugaucgcccaguacaccagcgcccuccuggcggggaccaucacguccggcuggaccuucggggccggcgccgcccugcagauccccuucgcgaugcagauggccuaccgguucaacggcaucggggucacccagaacgugcucuacgagaaccagaagcugaucgccaaccaguucaacagcgccaucggcaagauccaggacucccugagcuccaccgccagcgcgcucgggaagcugcaggacguggucaaccagaacgcccaggcccugaacacgcucgugaagugccuguccagcaacuucggcgccaucuccagcgugcugaacgacauccucucccgccuggacaaggucgaggccgaggugcagaucgaccggcugaucaccgggcgccuccagugccugcagaccuacgugacccagcagcugauccgggcggccgagauccgcgccagcgccaaccucgccgcgaccaagauguccgagugcguccugggccagagcaagcggguggacuucugcggcaagggguaccaccugauguccuucccccagagcgccccgcacggcguggucuuccuccacgugacguacguccccgcccaggagaagaacuucaccaccgcccccgcgaucugccacgacgggaaggcccacuucccccgcgagggcguguucguguccaacgggacccacugguucgucacgcagcggaacuucuacgagccgcagaucaucaccaccgacaacaccuucgugagcggcaacugcgacguggucaucggcaucgugaacaacacgguguacgacccccugcagcccgagcuggacuccggcgggagcggcuacauccccgaggccccgcgcgacgggcaggccuacgugcggaaggacggcgaguggguccugcucagcaccuuccugugaggacuagucccuguucccagagcccacuuuuuuuucuuuuuuugaaauaaaauagccugucuuucagaucucaaaggcucuuuucagagccaccaaaaaaaaaaaaaaaaaaaaaaaaaaaaaaaaaaaaaaaaaaaaaaaaaaaaaaaaaaaaaaaaaaaaaaaaaaaaaaaaaaaaaaaaaaaaaaaaaaaaa

SEQ ID NO: 12454 - RNA, 3806 nt, Artificial Sequence
  SARS-CoV-2/Wuhan/WIV05/2019__EPI_ISL_402128 spike protein mRNA gc (1-1147)(F970C_G999C) Foldon construct
aggagagucccgcagucggcguccagcggcucugcuuguucgugugugugucguugcaggccuuauucaagcuuaccauguucguguuccugguccuccugccccuggugagcucccagugcgugaaccucaccacccgcacgcagcugccgcccgccuacaccaacagcuucacccggggcgucuacuaccccgacaagguguuccgcuccagcgugcugcacuccacccaggaccucuuccugcccuucuucagcaacgucacgugguuccacgccauccacguguccgggaccaacggcaccaagcgguucgacaacccggugcugcccuucaacgacggggucuacuucgcgagcaccgagaaguccaacaucauccgcggcuggaucuucgggacgacccucgacagcaagacccagucccugcugaucgugaacaacgccaccaacguggucaucaaggugugcgaguuccaguucugcaacgaccccuuccucggcguguacuaccacaagaacaacaagagcuggauggaguccgaguuccgggucuacagcuccgccaacaacugcacguucgaguacgugagccagcccuuccugauggaccuggagggcaagcaggggaacuucaagaaccuccgcgaguucguguucaagaacaucgacggcuacuucaagaucuacuccaagcacaccccgaucaaccugguccgggaccugccccagggguucagcgcccucgagccccugguggaccugcccaucggcaucaacaucacccgcuuccagacccuccuggcccugcaccgguccuaccucacgccgggggacagcagcuccggcuggaccgcgggcgccgccgccuacuacgugggguaccugcagccccgcaccuuccugcucaaguacaacgagaacggcaccaucacggacgcggucgacugcgcccuggacccccugagcgagaccaagugcacccucaaguccuucaccguggagaaggggaucuaccagacgagcaacuuccgggugcagcccaccgaguccaucguccgcuucccgaacaucaccaaccugugccccuucggcgagguguucaacgccacccgguucgccagcgucuacgccuggaaccgcaagcggaucuccaacugcguggcggacuacagcgugcuguacaacuccgccagcuucuccacguucaagugcuacggcgucagccccaccaagcucaacgaccugugcuucaccaacguguacgccgacuccuucgugauccgcggggacgagguccggcagaucgcccccggccagaccgggaagaucgccgacuacaacuacaagcugccggacgacuucacgggcugcgugaucgcguggaacagcaacaaccucgacuccaaggucgggggcaacuacaacuaccuguaccgccuguuccgcaagagcaaccucaagcccuucgagcgggacaucuccaccgagaucuaccaggccggcagcacccccugcaacgggguggagggcuucaacugcuacuucccccugcaguccuacggguuccagccgaccaacggcgugggguaccagcccuaccggguggucgugcugagcuucgagcuccugcacgcccccgccacggugugcggccccaagaaguccaccaaccuggucaagaacaagugcgugaacuucaacuucaacggccucaccgggaccggcgugcugaccgagagcaacaagaaguuccugccguuccagcaguucgggcgcgacaucgccgacacgaccgacgcgguccgcgacccccagacccuggagauccucgacaucacccccugcagcuucggcgggguguccgugaucacgccgggcaccaacaccagcaaccaggucgccgugcuguaccaggacgugaacugcaccgagguccccguggccauccacgccgaccagcugacgcccaccuggcggguguacuccaccggcagcaacgucuuccagacccgcgccgggugccucaucggcgcggagcacgugaacaacuccuacgagugcgacauccccaucggggccggcaucugcgccagcuaccagacgcagaccaacuccccgcggcgcgcccggagcguggcgucccagagcaucaucgccuacaccaugucccugggcgccgagaacagcgucgccuacuccaacaacagcaucgccauccccaccaacuucacgaucuccgugaccaccgagauccugcccgugagcaugaccaagacgagcgucgacugcaccauguacaucugcggggacuccaccgagugcagcaaccuccugcugcaguacggcuccuucugcacccagcucaaccgcgcgcugacggggaucgccguggagcaggacaagaacacccaggagguguucgcccaggucaagcagaucuacaagacgcccccgaucaaggacuucggcggguucaacuucagccagauccugcccgaccccuccaagcccagcaagcgguccuucaucgaggaccuccuguucaacaaggugacccuggccgacgccggcuucaucaagcaguacggcgacugccucggggacaucgcggcccgcgaccugaucugcgcccagaaguucaacggccugaccgugcucccgccccugcugaccgacgagaugaucgcccaguacaccagcgcccuccuggcggggaccaucacguccggcuggaccuucggggccggcgccgcccugcagauccccuucgcgaugcagauggccuaccgguucaacggcaucggggucacccagaacgugcucuacgagaaccagaagcugaucgccaaccaguucaacagcgccaucggcaagauccaggacucccugagcuccaccgccagcgcgcucgggaagcugcaggacguggucaaccagaacgcccaggcccugaacacgcucgugaagcagcuguccagcaacugcggcgccaucuccagcgugcugaacgacauccucucccgccuggacaaggucgaggccgaggugcagaucgaccggcugaucaccugucgccuccagagccugcagaccuacgugacccagcagcugauccgggcggccgagauccgcgccagcgccaaccucgccgcgaccaagauguccgagugcguccugggccagagcaagcggguggacuucugcggcaagggguaccaccugauguccuucccccagagcgccccgcacggcguggucuuccuccacgugacguacguccccgcccaggagaagaacuucaccaccgcccccgcgaucugccacgacgggaaggcccacuucccccgcgagggcguguucguguccaacgggacccacugguucgucacgcagcggaacuucuacgagccgcagaucaucaccaccgacaacaccuucgugagcggcaacugcgacguggucaucggcaucgugaacaacacgguguacgacccccugcagcccgagcuggacuccggcgggagcggcuacauccccgaggccccgcgcgacgggcaggccuacgugcggaaggacggcgaguggguccugcucagcaccuuccugugaggacuagucccuguucccagagcccacuuuuuuuucuuuuuuugaaauaaaauagccugucuuucagaucucaaaggcucuuuucagagccaccaaaaaaaaaaaaaaaaaaaaaaaaaaaaaaaaaaaaaaaaaaaaaaaaaaaaaaaaaaaaaaaaaaaaaaaaaaaaaaaaaaaaaaaaaaaaaaaaaaaaa

SEQ ID NO: 12455 - RNA, 3806 nt, Artificial Sequence
  SARS-CoV-2/Wuhan/WIV05/2019__EPI_ISL_402128 spike protein mRNA gc (1-1147)(A972C_R995C) Foldon construct
aggagagucccgcagucggcguccagcggcucugcuuguucgugugugugucguugcaggccuuauucaagcuuaccauguucguguuccugguccuccugccccuggugagcucccagugcgugaaccucaccacccgcacgcagcugccgcccgccuacaccaacagcuucacccggggcgucuacuaccccgacaagguguuccgcuccagcgugcugcacuccacccaggaccucuuccugcccuucuucagcaacgucacgugguuccacgccauccacguguccgggaccaacggcaccaagcgguucgacaacccggugcugcccuucaacgacggggucuacuucgcgagcaccgagaaguccaacaucauccgcggcuggaucuucgggacgacccucgacagcaagacccagucccugcugaucgugaacaacgccaccaacguggucaucaaggugugcgaguuccaguucugcaacgaccccuuccucggcguguacuaccacaagaacaacaagagcuggauggaguccgaguuccgggucuacagcuccgccaacaacugcacguucgaguacgugagccagcccuuccugauggaccuggagggcaagcaggggaacuucaagaaccuccgcgaguucguguucaagaacaucgacggcuacuucaagaucuacuccaagcacaccccgaucaaccugguccgggaccugccccagggguucagcgcccucgagccccugguggaccugcccaucggcaucaacaucacccgcuuccagacccuccuggcccugcaccgguccuaccucacgccgggggacagcagcuccggcuggaccgcgggcgccgccgccuacuacgugggguaccugcagccccgcaccuuccugcucaaguacaacgagaacggcaccaucacggacgcggucgacugcgcccuggacccccugagcgagaccaagugcacccucaaguccuucaccguggagaaggggaucuaccagacgagcaacuuccgggugcagcccaccgaguccaucguccgcuucccgaacaucaccaaccugugccccuucggcgagguguucaacgccacccgguucgccagcgucuacgccuggaaccgcaagcggaucuccaacugcguggcggacuacagcgugcuguacaacuccgccagcuucuccacguucaagugcuacggcgucagccccaccaagcucaacgaccugugcuucaccaacguguacgccgacuccuucgugauccgcggggacgagguccggcagaucgcccccggccagaccgggaagaucgccgacuacaacuacaagcugccggacgacuucacgggcugcgugaucgcguggaacagcaacaaccucgacuccaaggucgggggcaacuacaacuaccuguaccgccuguuccgcaagagcaaccucaagcccuucgagcgggacaucuccaccgagaucuaccaggccggcagcacccccugcaacgggguggagggcuucaacugcuacuucccccugcaguccuacggguuccagccgaccaacggcgugggguaccagcccuaccggguggucgugcugagcuucgagcuccugcacgcccccgccacggugugcggccccaagaaguccaccaaccuggucaagaacaagugcgugaacuucaacuucaacggccucaccgggaccggcgugcugaccgagagcaacaagaaguuccugccguuccagcaguucgggcgcgacaucgccgacacgaccgacgcgguccgcgacccccagacccuggagauccucgacaucacccccugcagcuucggcgggguguccgugaucacgccgggcaccaacaccagcaaccaggucgccgugcuguaccaggacgugaacugcaccgagguccccguggccauccacgccgaccagcugacgcccaccuggcggguguacuccaccggcagcaacgucuuccagacccgcgccgggugccucaucggcgcggagcacgugaacaacuccuacgagugcgacauccccaucggggccggcaucugcgccagcuaccagacgcagaccaacuccccgcggcgcgcccggagcguggcgucccagagcaucaucgccuacaccaugucccugggcgccgagaacagcgucgccuacuccaacaacagcaucgccauccccaccaacuucacgaucuccgugaccaccgagauccugcccgugagcaugaccaagacgagcgucgacugcaccauguacaucugcggggacuccaccgagugcagcaaccuccugcugcaguacggcuccuucugcacccagcucaaccgcgcgcugacggggaucgccguggagcaggacaagaacacccaggagguguucgcccaggucaagcagaucuacaagacgcccccgaucaaggacuucggcggguucaacuucagccagauccugcccgaccccuccaagcccagcaagcgguccuucaucgaggaccuccuguucaacaaggugacccuggccgacgccggcuucaucaagcaguacggcgacugccucggggacaucgcggcccgcgaccugaucugcgcccagaaguucaacggccugaccgugcucccgccccugcugaccgacgagaugaucgcccaguacaccagcgcccuccuggcggggaccaucacguccggcuggaccuucggggccggcgccgcccugcagauccccuucgcgaugcagauggccuaccgguucaacggcaucggggucacccagaacgugcucuacgagaaccagaagcugaucgccaaccaguucaacagcgccaucggcaagauccaggacucccugagcuccaccgccagcgcgcucgggaagcugcaggacguggucaaccagaacgcccaggcccugaacacgcucgugaagcagcuguccagcaacuucggcugcaucuccagcgugcugaacgacauccucucccgccuggacaaggucgaggccgaggugcagaucgacugccugaucaccgggcgccuccagagccugcagaccuacgugacccagcagcugauccgggcggccgagauccgcgccagcgccaaccucgccgcgaccaagauguccgagugcguccugggccagagcaagcggguggacuucugcggcaagggguaccaccugauguccuucccccagagcgccccgcacggcguggucuuccuccacgugacguacguccccgcccaggagaagaacuucaccaccgcccccgcgaucugccacgacgggaaggcccacuucccccgcgagggcguguucguguccaacgggacccacugguucgucacgcagcggaacuucuacgagccgcagaucaucaccaccgacaacaccuucgugagcggcaacugcgacguggucaucggcaucgugaacaacacgguguacgacccccugcagcccgagcuggacuccggcgggagcggcuacauccccgaggccccgcgcgacgggcaggccuacgugcggaaggacggcgaguggguccugcucagcaccuuccugugaggacuagucccuguucccagagcccacuuuuuuuucuuuuuuugaaauaaaauagccugucuuucagaucucaaaggcucuuuucagagccaccaaaaaaaaaaaaaaaaaaaaaaaaaaaaaaaaaaaaaaaaaaaaaaaaaaaaaaaaaaaaaaaaaaaaaaaaaaaaaaaaaaaaaaaaaaaaaaaaaaaaa

SEQ ID NO: 12456 - RNA, 3806 nt, Artificial Sequence
  SARS-CoV-2/Wuhan/WIV05/2019__EPI_ISL_402128 spike protein mRNA gc (1-1147)(A890C_V1040C) Foldon construct
aggagagucccgcagucggcguccagcggcucugcuuguucgugugugugucguugcaggccuuauucaagcuuaccauguucguguuccugguccuccugccccuggugagcucccagugcgugaaccucaccacccgcacgcagcugccgcccgccuacaccaacagcuucacccggggcgucuacuaccccgacaagguguuccgcuccagcgugcugcacuccacccaggaccucuuccugcccuucuucagcaacgucacgugguuccacgccauccacguguccgggaccaacggcaccaagcgguucgacaacccggugcugcccuucaacgacggggucuacuucgcgagcaccgagaaguccaacaucauccgcggcuggaucuucgggacgacccucgacagcaagacccagucccugcugaucgugaacaacgccaccaacguggucaucaaggugugcgaguuccaguucugcaacgaccccuuccucggcguguacuaccacaagaacaacaagagcuggauggaguccgaguuccgggucuacagcuccgccaacaacugcacguucgaguacgugagccagcccuuccugauggaccuggagggcaagcaggggaacuucaagaaccuccgcgaguucguguucaagaacaucgacggcuacuucaagaucuacuccaagcacaccccgaucaaccugguccgggaccugccccagggguucagcgcccucgagccccugguggaccugcccaucggcaucaacaucacccgcuuccagacccuccuggcccugcaccgguccuaccucacgccgggggacagcagcuccggcuggaccgcgggcgccgccgccuacuacgugggguaccugcagccccgcaccuuccugcucaaguacaacgagaacggcaccaucacggacgcggucgacugcgcccuggacccccugagcgagaccaagugcacccucaaguccuucaccguggagaaggggaucuaccagacgagcaacuuccgggugcagcccaccgaguccaucguccgcuucccgaacaucaccaaccugugccccuucggcgagguguucaacgccacccgguucgccagcgucuacgccuggaaccgcaagcggaucuccaacugcguggcggacuacagcgugcuguacaacuccgccagcuucuccacguucaagugcuacggcgucagccccaccaagcucaacgaccugugcuucaccaacguguacgccgacuccuucgugauccgcggggacgagguccggcagaucgcccccggccagaccgggaagaucgccgacuacaacuacaagcugccggacgacuucacgggcugcgugaucgcguggaacagcaacaaccucgacuccaaggucgggggcaacuacaacuaccuguaccgccuguuccgcaagagcaaccucaagcccuucgagcgggacaucuccaccgagaucuaccaggccggcagcacccccugcaacgggguggagggcuucaacugcuacuucccccugcaguccuacggguuccagccgaccaacggcgugggguaccagcccuaccggguggucgugcugagcuucgagcuccugcacgcccccgccacggugugcggccccaagaaguccaccaaccuggucaagaacaagugcgugaacuucaacuucaacggccucaccgggaccggcgugcugaccgagagcaacaagaaguuccugccguuccagcaguucgggcgcgacaucgccgacacgaccgacgcgguccgcgacccccagacccuggagauccucgacaucacccccugcagcuucggcgggguguccgugaucacgccgggcaccaacaccagcaaccaggucgccgugcuguaccaggacgugaacugcaccgagguccccguggccauccacgccgaccagcugacgcccaccuggcggguguacuccaccggcagcaacgucuuccagacccgcgccgggugccucaucggcgcggagcacgugaacaacuccuacgagugcgacauccccaucggggccggcaucugcgccagcuaccagacgcagaccaacuccccgcggcgcgcccggagcguggcgucccagagcaucaucgccuacaccaugucccugggcgccgagaacagcgucgccuacuccaacaacagcaucgccauccccaccaacuucacgaucuccgugaccaccgagauccugcccgugagcaugaccaagacgagcgucgacugcaccauguacaucugcggggacuccaccgagugcagcaaccuccugcugcaguacggcuccuucugcacccagcucaaccgcgcgcugacggggaucgccguggagcaggacaagaacacccaggagguguucgcccaggucaagcagaucuacaagacgcccccgaucaaggacuucggcggguucaacuucagccagauccugcccgaccccuccaagcccagcaagcgguccuucaucgaggaccuccuguucaacaaggugacccuggccgacgccggcuucaucaagcaguacggcgacugccucggggacaucgcggcccgcgaccugaucugcgcccagaaguucaacggccugaccgugcucccgccccugcugaccgacgagaugaucgcccaguacaccagcgcccuccuggcggggaccaucacguccggcuggaccuucgggugcggcgccgcccugcagauccccuucgcgaugcagauggccuaccgguucaacggcaucggggucacccagaacgugcucuacgagaaccagaagcugaucgccaaccaguucaacagcgccaucggcaagauccaggacucccugagcuccaccgccagcgcgcucgggaagcugcaggacguggucaaccagaacgcccaggcccugaacacgcucgugaagcagcuguccagcaacuucggcgccaucuccagcgugcugaacgacauccucucccgccuggacaaggucgaggccgaggugcagaucgaccggcugaucaccgggcgccuccagagccugcagaccuacgugacccagcagcugauccgggcggccgagauccgcgccagcgccaaccucgccgcgaccaagauguccgagugcguccugggccagagcaagcggugcgacuucugcggcaagggguaccaccugauguccuucccccagagcgccccgcacggcguggucuuccuccacgugacguacguccccgcccaggagaagaacuucaccaccgcccccgcgaucugccacgacgggaaggcccacuucccccgcgagggcguguucguguccaacgggacccacugguucgucacgcagcggaacuucuacgagccgcagaucaucaccaccgacaacaccuucgugagcggcaacugcgacguggucaucggcaucgugaacaacacgguguacgacccccugcagcccgagcuggacuccggcgggagcggcuacauccccgaggccccgcgcgacgggcaggccuacgugcggaaggacggcgaguggguccugcucagcaccuuccugugaggacuagucccuguucccagagcccacuuuuuuuucuuuuuuugaaauaaaauagccugucuuucagaucucaaaggcucuuuucagagccaccaaaaaaaaaaaaaaaaaaaaaaaaaaaaaaaaaaaaaaaaaaaaaaaaaaaaaaaaaaaaaaaaaaaaaaaaaaaaaaaaaaaaaaaaaaaaaaaaaaaaa

SEQ ID NO: 12457 - RNA, 3806 nt, Artificial Sequence
  SARS-CoV-2/Wuhan/WIV05/2019__EPI_ISL_402128 spike protein mRNA gc (1-1147)(T874C_S1055C) Foldon construct
aggagagucccgcagucggcguccagcggcucugcuuguucgugugugugucguugcaggccuuauucaagcuuaccauguucguguuccugguccuccugccccuggugagcucccagugcgugaaccucaccacccgcacgcagcugccgcccgccuacaccaacagcuucacccggggcgucuacuaccccgacaagguguuccgcuccagcgugcugcacuccacccaggaccucuuccugcccuucuucagcaacgucacgugguuccacgccauccacguguccgggaccaacggcaccaagcgguucgacaacccggugcugcccuucaacgacggggucuacuucgcgagcaccgagaaguccaacaucauccgcggcuggaucuucgggacgacccucgacagcaagacccagucccugcugaucgugaacaacgccaccaacguggucaucaaggugugcgaguuccaguucugcaacgaccccuuccucggcguguacuaccacaagaacaacaagagcuggauggaguccgaguuccgggucuacagcuccgccaacaacugcacguucgaguacgugagccagcccuuccugauggaccuggagggcaagcaggggaacuucaagaaccuccgcgaguucguguucaagaacaucgacggcuacuucaagaucuacuccaagcacaccccgaucaaccugguccgggaccugccccagggguucagcgcccucgagccccugguggaccugcccaucggcaucaacaucacccgcuuccagacccuccuggcccugcaccgguccuaccucacgccgggggacagcagcuccggcuggaccgcgggcgccgccgccuacuacgugggguaccugcagccccgcaccuuccugcucaaguacaacgagaacggcaccaucacggacgcggucgacugcgcccuggacccccugagcgagaccaagugcacccucaaguccuucaccguggagaaggggaucuaccagacgagcaacuuccgggugcagcccaccgaguccaucguccgcuucccgaacaucaccaaccugugccccuucggcgagguguucaacgccacccgguucgccagcgucuacgccuggaaccgcaagcggaucuccaacugcguggcggacuacagcgugcuguacaacuccgccagcuucuccacguucaagugcuacggcgucagccccaccaagcucaacgaccugugcuucaccaacguguacgccgacuccuucgugauccgcggggacgagguccggcagaucgcccccggccagaccgggaagaucgccgacuacaacuacaagcugccggacgacuucacgggcugcgugaucgcguggaacagcaacaaccucgacuccaaggucgggggcaacuacaacuaccuguaccgccuguuccgcaagagcaaccucaagcccuucgagcgggacaucuccaccgagaucuaccaggccggcagcacccccugcaacgggguggagggcuucaacugcuacuucccccugcaguccuacggguuccagccgaccaacggcgugggguaccagcccuaccggguggucgugcugagcuucgagcuccugcacgcccccgccacggugugcggccccaagaaguccaccaaccuggucaagaacaagugcgugaacuucaacuucaacggccucaccgggaccggcgugcugaccgagagcaacaagaaguuccugccguuccagcaguucgggcgcgacaucgccgacacgaccgacgcgguccgcgacccccagacccuggagauccucgacaucacccccugcagcuucggcgggguguccgugaucacgccgggcaccaacaccagcaaccaggucgccgugcuguaccaggacgugaacugcaccgagguccccguggccauccacgccgaccagcugacgcccaccuggcggguguacuccaccggcagcaacgucuuccagacccgcgccgggugccucaucggcgcggagcacgugaacaacuccuacgagugcgacauccccaucggggccggcaucugcgccagcuaccagacgcagaccaacuccccgcggcgcgcccggagcguggcgucccagagcaucaucgccuacaccaugucccugggcgccgagaacagcgucgccuacuccaacaacagcaucgccauccccaccaacuucacgaucuccgugaccaccgagauccugcccgugagcaugaccaagacgagcgucgacugcaccauguacaucugcggggacuccaccgagugcagcaaccuccugcugcaguacggcuccuucugcacccagcucaaccgcgcgcugacggggaucgccguggagcaggacaagaacacccaggagguguucgcccaggucaagcagaucuacaagacgcccccgaucaaggacuucggcggguucaacuucagccagauccugcccgaccccuccaagcccagcaagcgguccuucaucgaggaccuccuguucaacaaggugacccuggccgacgccggcuucaucaagcaguacggcgacugccucggggacaucgcggcccgcgaccugaucugcgcccagaaguucaacggccugaccgugcucccgccccugcugaccgacgagaugaucgcccaguacugcagcgcccuccuggcggggaccaucacguccggcuggaccuucggggccggcgccgcccugcagauccccuucgcgaugcagauggccuaccgguucaacggcaucggggucacccagaacgugcucuacgagaaccagaagcugaucgccaaccaguucaacagcgccaucggcaagauccaggacucccugagcuccaccgccagcgcgcucgggaagcugcaggacguggucaaccagaacgcccaggcccugaacacgcucgugaagcagcuguccagcaacuucggcgccaucuccagcgugcugaacgacauccucucccgccuggacaaggucgaggccgaggugcagaucgaccggcugaucaccgggcgccuccagagccugcagaccuacgugacccagcagcugauccgggcggccgagauccgcgccagcgccaaccucgccgcgaccaagauguccgagugcguccugggccagagcaagcggguggacuucugcggcaagggguaccaccugauguccuucccccagugcgccccgcacggcguggucuuccuccacgugacguacguccccgcccaggagaagaacuucaccaccgcccccgcgaucugccacgacgggaaggcccacuucccccgcgagggcguguucguguccaacgggacccacugguucgucacgcagcggaacuucuacgagccgcagaucaucaccaccgacaacaccuucgugagcggcaacugcgacguggucaucggcaucgugaacaacacgguguacgacccccugcagcccgagcuggacuccggcgggagcggcuacauccccgaggccccgcgcgacgggcaggccuacgugcggaaggacggcgaguggguccugcucagcaccuuccugugaggacuagucccuguucccagagcccacuuuuuuuucuuuuuuugaaauaaaauagccugucuuucagaucucaaaggcucuuuucagagccaccaaaaaaaaaaaaaaaaaaaaaaaaaaaaaaaaaaaaaaaaaaaaaaaaaaaaaaaaaaaaaaaaaaaaaaaaaaaaaaaaaaaaaaaaaaaaaaaaaaaaa

SEQ ID NO: 12458 - RNA, 4178 nt, Artificial Sequence
  SARS-CoV-2/Wuhan/WIV05/2019__EPI_ISL_402128 spike protein mRNA gc (1-1147) WhcAg construct
aggagagucccgcagucggcguccagcggcucugcuuguucgugugugugucguugcaggccuuauucaagcuuaccauguucguguuccugguccuccugccccuggugagcucccagugcgugaaccucaccacccgcacgcagcugccgcccgccuacaccaacagcuucacccggggcgucuacuaccccgacaagguguuccgcuccagcgugcugcacuccacccaggaccucuuccugcccuucuucagcaacgucacgugguuccacgccauccacguguccgggaccaacggcaccaagcgguucgacaacccggugcugcccuucaacgacggggucuacuucgcgagcaccgagaaguccaacaucauccgcggcuggaucuucgggacgacccucgacagcaagacccagucccugcugaucgugaacaacgccaccaacguggucaucaaggugugcgaguuccaguucugcaacgaccccuuccucggcguguacuaccacaagaacaacaagagcuggauggaguccgaguuccgggucuacagcuccgccaacaacugcacguucgaguacgugagccagcccuuccugauggaccuggagggcaagcaggggaacuucaagaaccuccgcgaguucguguucaagaacaucgacggcuacuucaagaucuacuccaagcacaccccgaucaaccugguccgggaccugccccagggguucagcgcccucgagccccugguggaccugcccaucggcaucaacaucacccgcuuccagacccuccuggcccugcaccgguccuaccucacgccgggggacagcagcuccggcuggaccgcgggcgccgccgccuacuacgugggguaccugcagccccgcaccuuccugcucaaguacaacgagaacggcaccaucacggacgcggucgacugcgcccuggacccccugagcgagaccaagugcacccucaaguccuucaccguggagaaggggaucuaccagacgagcaacuuccgggugcagcccaccgaguccaucguccgcuucccgaacaucaccaaccugugccccuucggcgagguguucaacgccacccgguucgccagcgucuacgccuggaaccgcaagcggaucuccaacugcguggcggacuacagcgugcuguacaacuccgccagcuucuccacguucaagugcuacggcgucagccccaccaagcucaacgaccugugcuucaccaacguguacgccgacuccuucgugauccgcggggacgagguccggcagaucgcccccggccagaccgggaagaucgccgacuacaacuacaagcugccggacgacuucacgggcugcgugaucgcguggaacagcaacaaccucgacuccaaggucgggggcaacuacaacuaccuguaccgccuguuccgcaagagcaaccucaagcccuucgagcgggacaucuccaccgagaucuaccaggccggcagcacccccugcaacgggguggagggcuucaacugcuacuucccccugcaguccuacggguuccagccgaccaacggcgugggguaccagcccuaccggguggucgugcugagcuucgagcuccugcacgcccccgccacggugugcggccccaagaaguccaccaaccuggucaagaacaagugcgugaacuucaacuucaacggccucaccgggaccggcgugcugaccgagagcaacaagaaguuccugccguuccagcaguucgggcgcgacaucgccgacacgaccgacgcgguccgcgacccccagacccuggagauccucgacaucacccccugcagcuucggcgggguguccgugaucacgccgggcaccaacaccagcaaccaggucgccgugcuguaccaggacgugaacugcaccgagguccccguggccauccacgccgaccagcugacgcccaccuggcggguguacuccaccggcagcaacgucuuccagacccgcgccgggugccucaucggcgcggagcacgugaacaacuccuacgagugcgacauccccaucggggccggcaucugcgccagcuaccagacgcagaccaacuccccgcggcgcgcccggagcguggcgucccagagcaucaucgccuacaccaugucccugggcgccgagaacagcgucgccuacuccaacaacagcaucgccauccccaccaacuucacgaucuccgugaccaccgagauccugcccgugagcaugaccaagacgagcgucgacugcaccauguacaucugcggggacuccaccgagugcagcaaccuccugcugcaguacggcuccuucugcacccagcucaaccgcgcgcugacggggaucgccguggagcaggacaagaacacccaggagguguucgcccaggucaagcagaucuacaagacgcccccgaucaaggacuucggcggguucaacuucagccagauccugcccgaccccuccaagcccagcaagcgguccuucaucgaggaccuccuguucaacaaggugacccuggccgacgccggcuucaucaagcaguacggcgacugccucggggacaucgcggcccgcgaccugaucugcgcccagaaguucaacggccugaccgugcucccgccccugcugaccgacgagaugaucgcccaguacaccagcgcccuccuggcggggaccaucacguccggcuggaccuucggggccggcgccgcccugcagauccccuucgcgaugcagauggccuaccgguucaacggcaucggggucacccagaacgugcucuacgagaaccagaagcugaucgccaaccaguucaacagcgccaucggcaagauccaggacucccugagcuccaccgccagcgcgcucgggaagcugcaggacguggucaaccagaacgcccaggcccugaacacgcucgugaagcagcuguccagcaacuucggcgccaucuccagcgugcugaacgacauccucucccgccuggacaaggucgaggccgaggugcagaucgaccggcugaucaccgggcgccuccagagccugcagaccuacgugacccagcagcugauccgggcggccgagauccgcgccagcgccaaccucgccgcgaccaagauguccgagugcguccugggccagagcaagcggguggacuucugcggcaagggguaccaccugauguccuucccccagagcgccccgcacggcguggucuuccuccacgugacguacguccccgcccaggagaagaacuucaccaccgcccccgcgaucugccacgacgggaaggcccacuucccccgcgagggcguguucguguccaacgggacccacugguucgucacgcagcggaacuucuacgagccgcagaucaucaccaccgacaacaccuucgugagcggcaacugcgacguggucaucggcaucgugaacaacacgguguacgacccccugcagcccgagcuggacuccggcgggggcgggagcgacaucgaccccuacaaggaguucggcagcuccuaccagcugcucaacuuccugccccuggacuucuuccccgaccucaacgcccugguggacaccgccaccgcgcuguacgaggaggagcucacggggcgcgagcacugcagcccccaccacaccgccauccggcaggcccuggucugcugggacgagcugaccaagcucaucgccuggauguccagcaacaucaccuccgagcagguccgcacgaucaucgugaaccacgucaacgacaccuggggccugaaggugcggcagagccugugguuccaccucuccugccugaccuucgggcagcacaccgugcaggaguuccuggucagcuucggcguguggauccgcacgcccgccccguaccggccgcccaacgcgccgauccucuccacccugccggagcacaccgugaucugcugaggacuagucccuguucccagagcccacuuuuuuuucuuuuuuugaaauaaaauagccugucuuucagaucucaaaggcucuuuucagagccaccaaaaaaaaaaaaaaaaaaaaaaaaaaaaaaaaaaaaaaaaaaaaaaaaaaaaaaaaaaaaaaaaaaaaaaaaaaaaaaaaaaaaaaaaaaaaaaaaaaaaa

SEQ ID NO: 12459 - RNA, 4178 nt, Artificial Sequence
  SARS-CoV-2/Wuhan/WIV05/2019__EPI_ISL_402128 spike protein mRNA gc (1-1147)(K986P_V987P) WhcAg construct
aggagagucccgcagucggcguccagcggcucugcuuguucgugugugugucguugcaggccuuauucaagcuuaccauguucguguuccugguccuccugccccuggugagcucccagugcgugaaccucaccacccgcacgcagcugccgcccgccuacaccaacagcuucacccggggcgucuacuaccccgacaagguguuccgcuccagcgugcugcacuccacccaggaccucuuccugcccuucuucagcaacgucacgugguuccacgccauccacguguccgggaccaacggcaccaagcgguucgacaacccggugcugcccuucaacgacggggucuacuucgcgagcaccgagaaguccaacaucauccgcggcuggaucuucgggacgacccucgacagcaagacccagucccugcugaucgugaacaacgccaccaacguggucaucaaggugugcgaguuccaguucugcaacgaccccuuccucggcguguacuaccacaagaacaacaagagcuggauggaguccgaguuccgggucuacagcuccgccaacaacugcacguucgaguacgugagccagcccuuccugauggaccuggagggcaagcaggggaacuucaagaaccuccgcgaguucguguucaagaacaucgacggcuacuucaagaucuacuccaagcacaccccgaucaaccugguccgggaccugccccagggguucagcgcccucgagccccugguggaccugcccaucggcaucaacaucacccgcuuccagacccuccuggcccugcaccgguccuaccucacgccgggggacagcagcuccggcuggaccgcgggcgccgccgccuacuacgugggguaccugcagccccgcaccuuccugcucaaguacaacgagaacggcaccaucacggacgcggucgacugcgcccuggacccccugagcgagaccaagugcacccucaaguccuucaccguggagaaggggaucuaccagacgagcaacuuccgggugcagcccaccgaguccaucguccgcuucccgaacaucaccaaccugugccccuucggcgagguguucaacgccacccgguucgccagcgucuacgccuggaaccgcaagcggaucuccaacugcguggcggacuacagcgugcuguacaacuccgccagcuucuccacguucaagugcuacggcgucagccccaccaagcucaacgaccugugcuucaccaacguguacgccgacuccuucgugauccgcggggacgagguccggcagaucgcccccggccagaccgggaagaucgccgacuacaacuacaagcugccggacgacuucacgggcugcgugaucgcguggaacagcaacaaccucgacuccaaggucgggggcaacuacaacuaccuguaccgccuguuccgcaagagcaaccucaagcccuucgagcgggacaucuccaccgagaucuaccaggccggcagcacccccugcaacgggguggagggcuucaacugcuacuucccccugcaguccuacggguuccagccgaccaacggcgugggguaccagcccuaccggguggucgugcugagcuucgagcuccugcacgcccccgccacggugugcggccccaagaaguccaccaaccuggucaagaacaagugcgugaacuucaacuucaacggccucaccgggaccggcgugcugaccgagagcaacaagaaguuccugccguuccagcaguucgggcgcgacaucgccgacacgaccgacgcgguccgcgacccccagacccuggagauccucgacaucacccccugcagcuucggcgggguguccgugaucacgccgggcaccaacaccagcaaccaggucgccgugcuguaccaggacgugaacugcaccgagguccccguggccauccacgccgaccagcugacgcccaccuggcggguguacuccaccggcagcaacgucuuccagacccgcgccgggugccucaucggcgcggagcacgugaacaacuccuacgagugcgacauccccaucggggccggcaucugcgccagcuaccagacgcagaccaacuccccgcggcgcgcccggagcguggcgucccagagcaucaucgccuacaccaugucccugggcgccgagaacagcgucgccuacuccaacaacagcaucgccauccccaccaacuucacgaucuccgugaccaccgagauccugcccgugagcaugaccaagacgagcgucgacugcaccauguacaucugcggggacuccaccgagugcagcaaccuccugcugcaguacggcuccuucugcacccagcucaaccgcgcgcugacggggaucgccguggagcaggacaagaacacccaggagguguucgcccaggucaagcagaucuacaagacgcccccgaucaaggacuucggcggguucaacuucagccagauccugcccgaccccuccaagcccagcaagcgguccuucaucgaggaccuccuguucaacaaggugacccuggccgacgccggcuucaucaagcaguacggcgacugccucggggacaucgcggcccgcgaccugaucugcgcccagaaguucaacggccugaccgugcucccgccccugcugaccgacgagaugaucgcccaguacaccagcgcccuccuggcggggaccaucacguccggcuggaccuucggggccggcgccgcccugcagauccccuucgcgaugcagauggccuaccgguucaacggcaucggggucacccagaacgugcucuacgagaaccagaagcugaucgccaaccaguucaacagcgccaucggcaagauccaggacucccugagcuccaccgccagcgcgcucgggaagcugcaggacguggucaaccagaacgcccaggcccugaacacgcucgugaagcagcuguccagcaacuucggcgccaucuccagcgugcugaacgacauccucucccgccuggacccgcccgaggccgaggugcagaucgaccggcugaucaccgggcgccuccagagccugcagaccuacgugacccagcagcugauccgggcggccgagauccgcgccagcgccaaccucgccgcgaccaagauguccgagugcguccugggccagagcaagcggguggacuucugcggcaagggguaccaccugauguccuucccccagagcgccccgcacggcguggucuuccuccacgugacguacguccccgcccaggagaagaacuucaccaccgcccccgcgaucugccacgacgggaaggcccacuucccccgcgagggcguguucguguccaacgggacccacugguucgucacgcagcggaacuucuacgagccgcagaucaucaccaccgacaacaccuucgugagcggcaacugcgacguggucaucggcaucgugaacaacacgguguacgacccccugcagcccgagcuggacuccggcgggggcgggagcgacaucgaccccuacaaggaguucggcagcuccuaccagcugcucaacuuccugccccuggacuucuuccccgaccucaacgcccugguggacaccgccaccgcgcuguacgaggaggagcucacggggcgcgagcacugcagcccccaccacaccgccauccggcaggcccuggucugcugggacgagcugaccaagcucaucgccuggauguccagcaacaucaccuccgagcagguccgcacgaucaucgugaaccacgucaacgacaccuggggccugaaggugcggcagagccugugguuccaccucuccugccugaccuucgggcagcacaccgugcaggaguuccuggucagcuucggcguguggauccgcacgcccgccccguaccggccgcccaacgcgccgauccucuccacccugccggagcacaccgugaucugcugaggacuagucccuguucccagagcccacuuuuuuuucuuuuuuugaaauaaaauagccugucuuucagaucucaaaggcucuuuucagagccaccaaaaaaaaaaaaaaaaaaaaaaaaaaaaaaaaaaaaaaaaaaaaaaaaaaaaaaaaaaaaaaaaaaaaaaaaaaaaaaaaaaaaaaaaaaaaaaaaaaaaa

SEQ ID NO: 12460 - RNA, 4178 nt, Artificial Sequence
  SARS-CoV-2/Wuhan/WIV05/2019__EPI_ISL_402128 spike protein mRNA gc (1-1147)(K986P_V987P_T887WN_A1020W) WhcAg construct
aggagagucccgcagucggcguccagcggcucugcuuguucgugugugugucguugcaggccuuauucaagcuuaccauguucguguuccugguccuccugccccuggugagcucccagugcgugaaccucaccacccgcacgcagcugccgcccgccuacaccaacagcuucacccggggcgucuacuaccccgacaagguguuccgcuccagcgugcugcacuccacccaggaccucuuccugcccuucuucagcaacgucacgugguuccacgccauccacguguccgggaccaacggcaccaagcgguucgacaacccggugcugcccuucaacgacggggucuacuucgcgagcaccgagaaguccaacaucauccgcggcuggaucuucgggacgacccucgacagcaagacccagucccugcugaucgugaacaacgccaccaacguggucaucaaggugugcgaguuccaguucugcaacgaccccuuccucggcguguacuaccacaagaacaacaagagcuggauggaguccgaguuccgggucuacagcuccgccaacaacugcacguucgaguacgugagccagcccuuccugauggaccuggagggcaagcaggggaacuucaagaaccuccgcgaguucguguucaagaacaucgacggcuacuucaagaucuacuccaagcacaccccgaucaaccugguccgggaccugccccagggguucagcgcccucgagccccugguggaccugcccaucggcaucaacaucacccgcuuccagacccuccuggcccugcaccgguccuaccucacgccgggggacagcagcuccggcuggaccgcgggcgccgccgccuacuacgugggguaccugcagccccgcaccuuccugcucaaguacaacgagaacggcaccaucacggacgcggucgacugcgcccuggacccccugagcgagaccaagugcacccucaaguccuucaccguggagaaggggaucuaccagacgagcaacuuccgggugcagcccaccgaguccaucguccgcuucccgaacaucaccaaccugugccccuucggcgagguguucaacgccacccgguucgccagcgucuacgccuggaaccgcaagcggaucuccaacugcguggcggacuacagcgugcuguacaacuccgccagcuucuccacguucaagugcuacggcgucagccccaccaagcucaacgaccugugcuucaccaacguguacgccgacuccuucgugauccgcggggacgagguccggcagaucgcccccggccagaccgggaagaucgccgacuacaacuacaagcugccggacgacuucacgggcugcgugaucgcguggaacagcaacaaccucgacuccaaggucgggggcaacuacaacuaccuguaccgccuguuccgcaagagcaaccucaagcccuucgagcgggacaucuccaccgagaucuaccaggccggcagcacccccugcaacgggguggagggcuucaacugcuacuucccccugcaguccuacggguuccagccgaccaacggcgugggguaccagcccuaccggguggucgugcugagcuucgagcuccugcacgcccccgccacggugugcggccccaagaaguccaccaaccuggucaagaacaagugcgugaacuucaacuucaacggccucaccgggaccggcgugcugaccgagagcaacaagaaguuccugccguuccagcaguucgggcgcgacaucgccgacacgaccgacgcgguccgcgacccccagacccuggagauccucgacaucacccccugcagcuucggcgggguguccgugaucacgccgggcaccaacaccagcaaccaggucgccgugcuguaccaggacgugaacugcaccgagguccccguggccauccacgccgaccagcugacgcccaccuggcggguguacuccaccggcagcaacgucuuccagacccgcgccgggugccucaucggcgcggagcacgugaacaacuccuacgagugcgacauccccaucggggccggcaucugcgccagcuaccagacgcagaccaacuccccgcggcgcgcccggagcguggcgucccagagcaucaucgccuacaccaugucccugggcgccgagaacagcgucgccuacuccaacaacagcaucgccauccccaccaacuucacgaucuccgugaccaccgagauccugcccgugagcaugaccaagacgagcgucgacugcaccauguacaucugcggggacuccaccgagugcagcaaccuccugcugcaguacggcuccuucugcacccagcucaaccgcgcgcugacggggaucgccguggagcaggacaagaacacccaggagguguucgcccaggucaagcagaucuacaagacgcccccgaucaaggacuucggcggguucaacuucagccagauccugcccgaccccuccaagcccagcaagcgguccuucaucgaggaccuccuguucaacaaggugacccuggccgacgccggcuucaucaagcaguacggcgacugccucggggacaucgcggcccgcgaccugaucugcgcccagaaguucaacggccugaccgugcucccgccccugcugaccgacgagaugaucgcccaguacaccagcgcccuccuggcggggaccaucacguccggcuggugguucggggccggcgccgcccugcagauccccuucgcgaugcagauggccuaccgguucaacggcaucggggucacccagaacgugcucuacgagaaccagaagcugaucgccaaccaguucaacagcgccaucggcaagauccaggacucccugagcuccaccgccagcgcgcucgggaagcugcaggacguggucaaccagaacgcccaggcccugaacacgcucgugaagcagcuguccagcaacuucggcgccaucuccagcgugcugaacgacauccucucccgccuggacccgcccgaggccgaggugcagaucgaccggcugaucaccgggcgccuccagagccugcagaccuacgugacccagcagcugauccgggcggccgagauccgcuggagcgccaaccucgccgcgaccaagauguccgagugcguccugggccagagcaagcggguggacuucugcggcaagggguaccaccugauguccuucccccagagcgccccgcacggcguggucuuccuccacgugacguacguccccgcccaggagaagaacuucaccaccgcccccgcgaucugccacgacgggaaggcccacuucccccgcgagggcguguucguguccaacgggacccacugguucgucacgcagcggaacuucuacgagccgcagaucaucaccaccgacaacaccuucgugagcggcaacugcgacguggucaucggcaucgugaacaacacgguguacgacccccugcagcccgagcuggacuccggcgggggcgggagcgacaucgaccccuacaaggaguucggcagcuccuaccagcugcucaacuuccugccccuggacuucuuccccgaccucaacgcccugguggacaccgccaccgcgcuguacgaggaggagcucacggggcgcgagcacugcagcccccaccacaccgccauccggcaggcccuggucugcugggacgagcugaccaagcucaucgccuggauguccagcaacaucaccuccgagcagguccgcacgaucaucgugaaccacgucaacgacaccuggggccugaaggugcggcagagccugugguuccaccucuccugccugaccuucgggcagcacaccgugcaggaguuccuggucagcuucggcguguggauccgcacgcccgccccguaccggccgcccaacgcgccgauccucuccacccugccggagcacaccgugaucugcugaggacuagucccuguucccagagcccacuuuuuuuucuuuuuuugaaauaaaauagccugucuuucagaucucaaaggcucuuuucagagccaccaaaaaaaaaaaaaaaaaaaaaaaaaaaaaaaaaaaaaaaaaaaaaaaaaaaaaaaaaaaaaaaaaaaaaaaaaaaaaaaaaaaaaaaaaaaaaaaaaaaaa

SEQ ID NO: 12461 - RNA, 4178 nt, Artificial Sequence
  SARS-CoV-2/Wuhan/WIV05/2019__EPI_ISL_402128 spike protein mRNA gc (1-1147)(K986P_V987P_P1069F) WhcAg construct
aggagagucccgcagucggcguccagcggcucugcuuguucgugugugugucguugcaggccuuauucaagcuuaccauguucguguuccugguccuccugccccuggugagcucccagugcgugaaccucaccacccgcacgcagcugccgcccgccuacaccaacagcuucacccggggcgucuacuaccccgacaagguguuccgcuccagcgugcugcacuccacccaggaccucuuccugcccuucuucagcaacgucacgugguuccacgccauccacguguccgggaccaacggcaccaagcgguucgacaacccggugcugcccuucaacgacggggucuacuucgcgagcaccgagaaguccaacaucauccgcggcuggaucuucgggacgacccucgacagcaagacccagucccugcugaucgugaacaacgccaccaacguggucaucaaggugugcgaguuccaguucugcaacgaccccuuccucggcguguacuaccacaagaacaacaagagcuggauggaguccgaguuccgggucuacagcuccgccaacaacugcacguucgaguacgugagccagcccuuccugauggaccuggagggcaagcaggggaacuucaagaaccuccgcgaguucguguucaagaacaucgacggcuacuucaagaucuacuccaagcacaccccgaucaaccugguccgggaccugccccagggguucagcgcccucgagccccugguggaccugcccaucggcaucaacaucacccgcuuccagacccuccuggcccugcaccgguccuaccucacgccgggggacagcagcuccggcuggaccgcgggcgccgccgccuacuacgugggguaccugcagccccgcaccuuccugcucaaguacaacgagaacggcaccaucacggacgcggucgacugcgcccuggacccccugagcgagaccaagugcacccucaaguccuucaccguggagaaggggaucuaccagacgagcaacuuccgggugcagcccaccgaguccaucguccgcuucccgaacaucaccaaccugugccccuucggcgagguguucaacgccacccgguucgccagcgucuacgccuggaaccgcaagcggaucuccaacugcguggcggacuacagcgugcuguacaacuccgccagcuucuccacguucaagugcuacggcgucagccccaccaagcucaacgaccugugcuucaccaacguguacgccgacuccuucgugauccgcggggacgagguccggcagaucgcccccggccagaccgggaagaucgccgacuacaacuacaagcugccggacgacuucacgggcugcgugaucgcguggaacagcaacaaccucgacuccaaggucgggggcaacuacaacuaccuguaccgccuguuccgcaagagcaaccucaagcccuucgagcgggacaucuccaccgagaucuaccaggccggcagcacccccugcaacgggguggagggcuucaacugcuacuucccccugcaguccuacggguuccagccgaccaacggcgugggguaccagcccuaccggguggucgugcugagcuucgagcuccugcacgcccccgccacggugugcggccccaagaaguccaccaaccuggucaagaacaagugcgugaacuucaacuucaacggccucaccgggaccggcgugcugaccgagagcaacaagaaguuccugccguuccagcaguucgggcgcgacaucgccgacacgaccgacgcgguccgcgacccccagacccuggagauccucgacaucacccccugcagcuucggcgggguguccgugaucacgccgggcaccaacaccagcaaccaggucgccgugcuguaccaggacgugaacugcaccgagguccccguggccauccacgccgaccagcugacgcccaccuggcggguguacuccaccggcagcaacgucuuccagacccgcgccgggugccucaucggcgcggagcacgugaacaacuccuacgagugcgacauccccaucggggccggcaucugcgccagcuaccagacgcagaccaacuccccgcggcgcgcccggagcguggcgucccagagcaucaucgccuacaccaugucccugggcgccgagaacagcgucgccuacuccaacaacagcaucgccauccccaccaacuucacgaucuccgugaccaccgagauccugcccgugagcaugaccaagacgagcgucgacugcaccauguacaucugcggggacuccaccgagugcagcaaccuccugcugcaguacggcuccuucugcacccagcucaaccgcgcgcugacggggaucgccguggagcaggacaagaacacccaggagguguucgcccaggucaagcagaucuacaagacgcccccgaucaaggacuucggcggguucaacuucagccagauccugcccgaccccuccaagcccagcaagcgguccuucaucgaggaccuccuguucaacaaggugacccuggccgacgccggcuucaucaagcaguacggcgacugccucggggacaucgcggcccgcgaccugaucugcgcccagaaguucaacggccugaccgugcucccgccccugcugaccgacgagaugaucgcccaguacaccagcgcccuccuggcggggaccaucacguccggcuggaccuucggggccggcgccgcccugcagauccccuucgcgaugcagauggccuaccgguucaacggcaucggggucacccagaacgugcucuacgagaaccagaagcugaucgccaaccaguucaacagcgccaucggcaagauccaggacucccugagcuccaccgccagcgcgcucgggaagcugcaggacguggucaaccagaacgcccaggcccugaacacgcucgugaagcagcuguccagcaacuucggcgccaucuccagcgugcugaacgacauccucucccgccuggacccgcccgaggccgaggugcagaucgaccggcugaucaccgggcgccuccagagccugcagaccuacgugacccagcagcugauccgggcggccgagauccgcgccagcgccaaccucgccgcgaccaagauguccgagugcguccugggccagagcaagcggguggacuucugcggcaagggguaccaccugauguccuucccccagagcgccccgcacggcguggucuuccuccacgugacguacgucuucgcccaggagaagaacuucaccaccgcccccgcgaucugccacgacgggaaggcccacuucccccgcgagggcguguucguguccaacgggacccacugguucgucacgcagcggaacuucuacgagccgcagaucaucaccaccgacaacaccuucgugagcggcaacugcgacguggucaucggcaucgugaacaacacgguguacgacccccugcagcccgagcuggacuccggcgggggcgggagcgacaucgaccccuacaaggaguucggcagcuccuaccagcugcucaacuuccugccccuggacuucuuccccgaccucaacgcccugguggacaccgccaccgcgcuguacgaggaggagcucacggggcgcgagcacugcagcccccaccacaccgccauccggcaggcccuggucugcugggacgagcugaccaagcucaucgccuggauguccagcaacaucaccuccgagcagguccgcacgaucaucgugaaccacgucaacgacaccuggggccugaaggugcggcagagccugugguuccaccucuccugccugaccuucgggcagcacaccgugcaggaguuccuggucagcuucggcguguggauccgcacgcccgccccguaccggccgcccaacgcgccgauccucuccacccugccggagcacaccgugaucugcugaggacuagucccuguucccagagcccacuuuuuuuucuuuuuuugaaauaaaauagccugucuuucagaucucaaaggcucuuuucagagccaccaaaaaaaaaaaaaaaaaaaaaaaaaaaaaaaaaaaaaaaaaaaaaaaaaaaaaaaaaaaaaaaaaaaaaaaaaaaaaaaaaaaaaaaaaaaaaaaaaaaaa

SEQ ID NO: 12462 - RNA, 4178 nt, Artificial Sequence
  SARS-CoV-2/Wuhan/WIV05/2019__EPI_ISL_402128 spike protein mRNA gc (1-1147)(K986P_V987P_ H1048Q_H1064N_ H1083N_H1101N) WhcAg construct
aggagagucccgcagucggcguccagcggcucugcuuguucgugugugugucguugcaggccuuauucaagcuuaccauguucguguuccugguccuccugccccuggugagcucccagugcgugaaccucaccacccgcacgcagcugccgcccgccuacaccaacagcuucacccggggcgucuacuaccccgacaagguguuccgcuccagcgugcugcacuccacccaggaccucuuccugcccuucuucagcaacgucacgugguuccacgccauccacguguccgggaccaacggcaccaagcgguucgacaacccggugcugcccuucaacgacggggucuacuucgcgagcaccgagaaguccaacaucauccgcggcuggaucuucgggacgacccucgacagcaagacccagucccugcugaucgugaacaacgccaccaacguggucaucaaggugugcgaguuccaguucugcaacgaccccuuccucggcguguacuaccacaagaacaacaagagcuggauggaguccgaguuccgggucuacagcuccgccaacaacugcacguucgaguacgugagccagcccuuccugauggaccuggagggcaagcaggggaacuucaagaaccuccgcgaguucguguucaagaacaucgacggcuacuucaagaucuacuccaagcacaccccgaucaaccugguccgggaccugccccagggguucagcgcccucgagccccugguggaccugcccaucggcaucaacaucacccgcuuccagacccuccuggcccugcaccgguccuaccucacgccgggggacagcagcuccggcuggaccgcgggcgccgccgccuacuacgugggguaccugcagccccgcaccuuccugcucaaguacaacgagaacggcaccaucacggacgcggucgacugcgcccuggacccccugagcgagaccaagugcacccucaaguccuucaccguggagaaggggaucuaccagacgagcaacuuccgggugcagcccaccgaguccaucguccgcuucccgaacaucaccaaccugugccccuucggcgagguguucaacgccacccgguucgccagcgucuacgccuggaaccgcaagcggaucuccaacugcguggcggacuacagcgugcuguacaacuccgccagcuucuccacguucaagugcuacggcgucagccccaccaagcucaacgaccugugcuucaccaacguguacgccgacuccuucgugauccgcggggacgagguccggcagaucgcccccggccagaccgggaagaucgccgacuacaacuacaagcugccggacgacuucacgggcugcgugaucgcguggaacagcaacaaccucgacuccaaggucgggggcaacuacaacuaccuguaccgccuguuccgcaagagcaaccucaagcccuucgagcgggacaucuccaccgagaucuaccaggccggcagcacccccugcaacgggguggagggcuucaacugcuacuucccccugcaguccuacggguuccagccgaccaacggcgugggguaccagcccuaccggguggucgugcugagcuucgagcuccugcacgcccccgccacggugugcggccccaagaaguccaccaaccuggucaagaacaagugcgugaacuucaacuucaacggccucaccgggaccggcgugcugaccgagagcaacaagaaguuccugccguuccagcaguucgggcgcgacaucgccgacacgaccgacgcgguccgcgacccccagacccuggagauccucgacaucacccccugcagcuucggcgggguguccgugaucacgccgggcaccaacaccagcaaccaggucgccgugcuguaccaggacgugaacugcaccgagguccccguggccauccacgccgaccagcugacgcccaccuggcggguguacuccaccggcagcaacgucuuccagacccgcgccgggugccucaucggcgcggagcacgugaacaacuccuacgagugcgacauccccaucggggccggcaucugcgccagcuaccagacgcagaccaacuccccgcggcgcgcccggagcguggcgucccagagcaucaucgccuacaccaugucccugggcgccgagaacagcgucgccuacuccaacaacagcaucgccauccccaccaacuucacgaucuccgugaccaccgagauccugcccgugagcaugaccaagacgagcgucgacugcaccauguacaucugcggggacuccaccgagugcagcaaccuccugcugcaguacggcuccuucugcacccagcucaaccgcgcgcugacggggaucgccguggagcaggacaagaacacccaggagguguucgcccaggucaagcagaucuacaagacgcccccgaucaaggacuucggcggguucaacuucagccagauccugcccgaccccuccaagcccagcaagcgguccuucaucgaggaccuccuguucaacaaggugacccuggccgacgccggcuucaucaagcaguacggcgacugccucggggacaucgcggcccgcgaccugaucugcgcccagaaguucaacggccugaccgugcucccgccccugcugaccgacgagaugaucgcccaguacaccagcgcccuccuggcggggaccaucacguccggcuggaccuucggggccggcgccgcccugcagauccccuucgcgaugcagauggccuaccgguucaacggcaucggggucacccagaacgugcucuacgagaaccagaagcugaucgccaaccaguucaacagcgccaucggcaagauccaggacucccugagcuccaccgccagcgcgcucgggaagcugcaggacguggucaaccagaacgcccaggcccugaacacgcucgugaagcagcuguccagcaacuucggcgccaucuccagcgugcugaacgacauccucucccgccuggacccgcccgaggccgaggugcagaucgaccggcugaucaccgggcgccuccagagccugcagaccuacgugacccagcagcugauccgggcggccgagauccgcgccagcgccaaccucgccgcgaccaagauguccgagugcguccugggccagagcaagcggguggacuucugcggcaagggguaccagcugauguccuucccccagagcgccccgcacggcguggucuuccucaacgugacguacguccccgcccaggagaagaacuucaccaccgcccccgcgaucugcaacgacgggaaggcccacuucccccgcgagggcguguucguguccaacgggaccaacugguucgucacgcagcggaacuucuacgagccgcagaucaucaccaccgacaacaccuucgugagcggcaacugcgacguggucaucggcaucgugaacaacacgguguacgacccccugcagcccgagcuggacuccggcgggggcgggagcgacaucgaccccuacaaggaguucggcagcuccuaccagcugcucaacuuccugccccuggacuucuuccccgaccucaacgcccugguggacaccgccaccgcgcuguacgaggaggagcucacggggcgcgagcacugcagcccccaccacaccgccauccggcaggcccuggucugcugggacgagcugaccaagcucaucgccuggauguccagcaacaucaccuccgagcagguccgcacgaucaucgugaaccacgucaacgacaccuggggccugaaggugcggcagagccugugguuccaccucuccugccugaccuucgggcagcacaccgugcaggaguuccuggucagcuucggcguguggauccgcacgcccgccccguaccggccgcccaacgcgccgauccucuccacccugccggagcacaccgugaucugcugaggacuagucccuguucccagagcccacuuuuuuuucuuuuuuugaaauaaaauagccugucuuucagaucucaaaggcucuuuucagagccaccaaaaaaaaaaaaaaaaaaaaaaaaaaaaaaaaaaaaaaaaaaaaaaaaaaaaaaaaaaaaaaaaaaaaaaaaaaaaaaaaaaaaaaaaaaaaaaaaaaaaa

SEQ ID NO: 12463 - RNA, 4178 nt, Artificial Sequence
  SARS-CoV-2/Wuhan/WIV05/2019__EPI_ISL_402128 spike protein mRNA gc (1-1147)(I712C_T1077C) WhcAg construct
aggagagucccgcagucggcguccagcggcucugcuuguucgugugugugucguugcaggccuuauucaagcuuaccauguucguguuccugguccuccugccccuggugagcucccagugcgugaaccucaccacccgcacgcagcugccgcccgccuacaccaacagcuucacccggggcgucuacuaccccgacaagguguuccgcuccagcgugcugcacuccacccaggaccucuuccugcccuucuucagcaacgucacgugguuccacgccauccacguguccgggaccaacggcaccaagcgguucgacaacccggugcugcccuucaacgacggggucuacuucgcgagcaccgagaaguccaacaucauccgcggcuggaucuucgggacgacccucgacagcaagacccagucccugcugaucgugaacaacgccaccaacguggucaucaaggugugcgaguuccaguucugcaacgaccccuuccucggcguguacuaccacaagaacaacaagagcuggauggaguccgaguuccgggucuacagcuccgccaacaacugcacguucgaguacgugagccagcccuuccugauggaccuggagggcaagcaggggaacuucaagaaccuccgcgaguucguguucaagaacaucgacggcuacuucaagaucuacuccaagcacaccccgaucaaccugguccgggaccugccccagggguucagcgcccucgagccccugguggaccugcccaucggcaucaacaucacccgcuuccagacccuccuggcccugcaccgguccuaccucacgccgggggacagcagcuccggcuggaccgcgggcgccgccgccuacuacgugggguaccugcagccccgcaccuuccugcucaaguacaacgagaacggcaccaucacggacgcggucgacugcgcccuggacccccugagcgagaccaagugcacccucaaguccuucaccguggagaaggggaucuaccagacgagcaacuuccgggugcagcccaccgaguccaucguccgcuucccgaacaucaccaaccugugccccuucggcgagguguucaacgccacccgguucgccagcgucuacgccuggaaccgcaagcggaucuccaacugcguggcggacuacagcgugcuguacaacuccgccagcuucuccacguucaagugcuacggcgucagccccaccaagcucaacgaccugugcuucaccaacguguacgccgacuccuucgugauccgcggggacgagguccggcagaucgcccccggccagaccgggaagaucgccgacuacaacuacaagcugccggacgacuucacgggcugcgugaucgcguggaacagcaacaaccucgacuccaaggucgggggcaacuacaacuaccuguaccgccuguuccgcaagagcaaccucaagcccuucgagcgggacaucuccaccgagaucuaccaggccggcagcacccccugcaacgggguggagggcuucaacugcuacuucccccugcaguccuacggguuccagccgaccaacggcgugggguaccagcccuaccggguggucgugcugagcuucgagcuccugcacgcccccgccacggugugcggccccaagaaguccaccaaccuggucaagaacaagugcgugaacuucaacuucaacggccucaccgggaccggcgugcugaccgagagcaacaagaaguuccugccguuccagcaguucgggcgcgacaucgccgacacgaccgacgcgguccgcgacccccagacccuggagauccucgacaucacccccugcagcuucggcgggguguccgugaucacgccgggcaccaacaccagcaaccaggucgccgugcuguaccaggacgugaacugcaccgagguccccguggccauccacgccgaccagcugacgcccaccuggcggguguacuccaccggcagcaacgucuuccagacccgcgccgggugccucaucggcgcggagcacgugaacaacuccuacgagugcgacauccccaucggggccggcaucugcgccagcuaccagacgcagaccaacuccccgcggcgcgcccggagcguggcgucccagagcaucaucgccuacaccaugucccugggcgccgagaacagcgucgccuacuccaacaacagcugcgccauccccaccaacuucacgaucuccgugaccaccgagauccugcccgugagcaugaccaagacgagcgucgacugcaccauguacaucugcggggacuccaccgagugcagcaaccuccugcugcaguacggcuccuucugcacccagcucaaccgcgcgcugacggggaucgccguggagcaggacaagaacacccaggagguguucgcccaggucaagcagaucuacaagacgcccccgaucaaggacuucggcggguucaacuucagccagauccugcccgaccccuccaagcccagcaagcgguccuucaucgaggaccuccuguucaacaaggugacccuggccgacgccggcuucaucaagcaguacggcgacugccucggggacaucgcggcccgcgaccugaucugcgcccagaaguucaacggccugaccgugcucccgccccugcugaccgacgagaugaucgcccaguacaccagcgcccuccuggcggggaccaucacguccggcuggaccuucggggccggcgccgcccugcagauccccuucgcgaugcagauggccuaccgguucaacggcaucggggucacccagaacgugcucuacgagaaccagaagcugaucgccaaccaguucaacagcgccaucggcaagauccaggacucccugagcuccaccgccagcgcgcucgggaagcugcaggacguggucaaccagaacgcccaggcccugaacacgcucgugaagcagcuguccagcaacuucggcgccaucuccagcgugcugaacgacauccucucccgccuggacaaggucgaggccgaggugcagaucgaccggcugaucaccgggcgccuccagagccugcagaccuacgugacccagcagcugauccgggcggccgagauccgcgccagcgccaaccucgccgcgaccaagauguccgagugcguccugggccagagcaagcggguggacuucugcggcaagggguaccaccugauguccuucccccagagcgccccgcacggcguggucuuccuccacgugacguacguccccgcccaggagaagaacuucaccugcgcccccgcgaucugccacgacgggaaggcccacuucccccgcgagggcguguucguguccaacgggacccacugguucgucacgcagcggaacuucuacgagccgcagaucaucaccaccgacaacaccuucgugagcggcaacugcgacguggucaucggcaucgugaacaacacgguguacgacccccugcagcccgagcuggacuccggcgggggcgggagcgacaucgaccccuacaaggaguucggcagcuccuaccagcugcucaacuuccugccccuggacuucuuccccgaccucaacgcccugguggacaccgccaccgcgcuguacgaggaggagcucacggggcgcgagcacugcagcccccaccacaccgccauccggcaggcccuggucugcugggacgagcugaccaagcucaucgccuggauguccagcaacaucaccuccgagcagguccgcacgaucaucgugaaccacgucaacgacaccuggggccugaaggugcggcagagccugugguuccaccucuccugccugaccuucgggcagcacaccgugcaggaguuccuggucagcuucggcguguggauccgcacgcccgccccguaccggccgcccaacgcgccgauccucuccacccugccggagcacaccgugaucugcugaggacuagucccuguucccagagcccacuuuuuuuucuuuuuuugaaauaaaauagccugucuuucagaucucaaaggcucuuuucagagccaccaaaaaaaaaaaaaaaaaaaaaaaaaaaaaaaaaaaaaaaaaaaaaaaaaaaaaaaaaaaaaaaaaaaaaaaaaaaaaaaaaaaaaaaaaaaaaaaaaaaaa

SEQ ID NO: 12464 - RNA, 4178 nt, Artificial Sequence
  SARS-CoV-2/Wuhan/WIV05/2019__EPI_ISL_402128 spike protein mRNA gc (1-1147)(I714C_Y1110C) WhcAg construct
aggagagucccgcagucggcguccagcggcucugcuuguucgugugugugucguugcaggccuuauucaagcuuaccauguucguguuccugguccuccugccccuggugagcucccagugcgugaaccucaccacccgcacgcagcugccgcccgccuacaccaacagcuucacccggggcgucuacuaccccgacaagguguuccgcuccagcgugcugcacuccacccaggaccucuuccugcccuucuucagcaacgucacgugguuccacgccauccacguguccgggaccaacggcaccaagcgguucgacaacccggugcugcccuucaacgacggggucuacuucgcgagcaccgagaaguccaacaucauccgcggcuggaucuucgggacgacccucgacagcaagacccagucccugcugaucgugaacaacgccaccaacguggucaucaaggugugcgaguuccaguucugcaacgaccccuuccucggcguguacuaccacaagaacaacaagagcuggauggaguccgaguuccgggucuacagcuccgccaacaacugcacguucgaguacgugagccagcccuuccugauggaccuggagggcaagcaggggaacuucaagaaccuccgcgaguucguguucaagaacaucgacggcuacuucaagaucuacuccaagcacaccccgaucaaccugguccgggaccugccccagggguucagcgcccucgagccccugguggaccugcccaucggcaucaacaucacccgcuuccagacccuccuggcccugcaccgguccuaccucacgccgggggacagcagcuccggcuggaccgcgggcgccgccgccuacuacgugggguaccugcagccccgcaccuuccugcucaaguacaacgagaacggcaccaucacggacgcggucgacugcgcccuggacccccugagcgagaccaagugcacccucaaguccuucaccguggagaaggggaucuaccagacgagcaacuuccgggugcagcccaccgaguccaucguccgcuucccgaacaucaccaaccugugccccuucggcgagguguucaacgccacccgguucgccagcgucuacgccuggaaccgcaagcggaucuccaacugcguggcggacuacagcgugcuguacaacuccgccagcuucuccacguucaagugcuacggcgucagccccaccaagcucaacgaccugugcuucaccaacguguacgccgacuccuucgugauccgcggggacgagguccggcagaucgcccccggccagaccgggaagaucgccgacuacaacuacaagcugccggacgacuucacgggcugcgugaucgcguggaacagcaacaaccucgacuccaaggucgggggcaacuacaacuaccuguaccgccuguuccgcaagagcaaccucaagcccuucgagcgggacaucuccaccgagaucuaccaggccggcagcacccccugcaacgggguggagggcuucaacugcuacuucccccugcaguccuacggguuccagccgaccaacggcgugggguaccagcccuaccggguggucgugcugagcuucgagcuccugcacgcccccgccacggugugcggccccaagaaguccaccaaccuggucaagaacaagugcgugaacuucaacuucaacggccucaccgggaccggcgugcugaccgagagcaacaagaaguuccugccguuccagcaguucgggcgcgacaucgccgacacgaccgacgcgguccgcgacccccagacccuggagauccucgacaucacccccugcagcuucggcgggguguccgugaucacgccgggcaccaacaccagcaaccaggucgccgugcuguaccaggacgugaacugcaccgagguccccguggccauccacgccgaccagcugacgcccaccuggcggguguacuccaccggcagcaacgucuuccagacccgcgccgggugccucaucggcgcggagcacgugaacaacuccuacgagugcgacauccccaucggggccggcaucugcgccagcuaccagacgcagaccaacuccccgcggcgcgcccggagcguggcgucccagagcaucaucgccuacaccaugucccugggcgccgagaacagcgucgccuacuccaacaacagcaucgccugccccaccaacuucacgaucuccgugaccaccgagauccugcccgugagcaugaccaagacgagcgucgacugcaccauguacaucugcggggacuccaccgagugcagcaaccuccugcugcaguacggcuccuucugcacccagcucaaccgcgcgcugacggggaucgccguggagcaggacaagaacacccaggagguguucgcccaggucaagcagaucuacaagacgcccccgaucaaggacuucggcggguucaacuucagccagauccugcccgaccccuccaagcccagcaagcgguccuucaucgaggaccuccuguucaacaaggugacccuggccgacgccggcuucaucaagcaguacggcgacugccucggggacaucgcggcccgcgaccugaucugcgcccagaaguucaacggccugaccgugcucccgccccugcugaccgacgagaugaucgcccaguacaccagcgcccuccuggcggggaccaucacguccggcuggaccuucggggccggcgccgcccugcagauccccuucgcgaugcagauggccuaccgguucaacggcaucggggucacccagaacgugcucuacgagaaccagaagcugaucgccaaccaguucaacagcgccaucggcaagauccaggacucccugagcuccaccgccagcgcgcucgggaagcugcaggacguggucaaccagaacgcccaggcccugaacacgcucgugaagcagcuguccagcaacuucggcgccaucuccagcgugcugaacgacauccucucccgccuggacaaggucgaggccgaggugcagaucgaccggcugaucaccgggcgccuccagagccugcagaccuacgugacccagcagcugauccgggcggccgagauccgcgccagcgccaaccucgccgcgaccaagauguccgagugcguccugggccagagcaagcggguggacuucugcggcaagggguaccaccugauguccuucccccagagcgccccgcacggcguggucuuccuccacgugacguacguccccgcccaggagaagaacuucaccaccgcccccgcgaucugccacgacgggaaggcccacuucccccgcgagggcguguucguguccaacgggacccacugguucgucacgcagcggaacuucugcgagccgcagaucaucaccaccgacaacaccuucgugagcggcaacugcgacguggucaucggcaucgugaacaacacgguguacgacccccugcagcccgagcuggacuccggcgggggcgggagcgacaucgaccccuacaaggaguucggcagcuccuaccagcugcucaacuuccugccccuggacuucuuccccgaccucaacgcccugguggacaccgccaccgcgcuguacgaggaggagcucacggggcgcgagcacugcagcccccaccacaccgccauccggcaggcccuggucugcugggacgagcugaccaagcucaucgccuggauguccagcaacaucaccuccgagcagguccgcacgaucaucgugaaccacgucaacgacaccuggggccugaaggugcggcagagccugugguuccaccucuccugccugaccuucgggcagcacaccgugcaggaguuccuggucagcuucggcguguggauccgcacgcccgccccguaccggccgcccaacgcgccgauccucuccacccugccggagcacaccgugaucugcugaggacuagucccuguucccagagcccacuuuuuuuucuuuuuuugaaauaaaauagccugucuuucagaucucaaaggcucuuuucagagccaccaaaaaaaaaaaaaaaaaaaaaaaaaaaaaaaaaaaaaaaaaaaaaaaaaaaaaaaaaaaaaaaaaaaaaaaaaaaaaaaaaaaaaaaaaaaaaaaaaaaaa

SEQ ID NO: 12465 - RNA, 4178 nt, Artificial Sequence
  SARS-CoV-2/Wuhan/WIV05/2019__EPI_ISL_402128 spike protein mRNA gc (1-1147)(P715C_P1069C) WhcAg construct
aggagagucccgcagucggcguccagcggcucugcuuguucgugugugugucguugcaggccuuauucaagcuuaccauguucguguuccugguccuccugccccuggugagcucccagugcgugaaccucaccacccgcacgcagcugccgcccgccuacaccaacagcuucacccggggcgucuacuaccccgacaagguguuccgcuccagcgugcugcacuccacccaggaccucuuccugcccuucuucagcaacgucacgugguuccacgccauccacguguccgggaccaacggcaccaagcgguucgacaacccggugcugcccuucaacgacggggucuacuucgcgagcaccgagaaguccaacaucauccgcggcuggaucuucgggacgacccucgacagcaagacccagucccugcugaucgugaacaacgccaccaacguggucaucaaggugugcgaguuccaguucugcaacgaccccuuccucggcguguacuaccacaagaacaacaagagcuggauggaguccgaguuccgggucuacagcuccgccaacaacugcacguucgaguacgugagccagcccuuccugauggaccuggagggcaagcaggggaacuucaagaaccuccgcgaguucguguucaagaacaucgacggcuacuucaagaucuacuccaagcacaccccgaucaaccugguccgggaccugccccagggguucagcgcccucgagccccugguggaccugcccaucggcaucaacaucacccgcuuccagacccuccuggcccugcaccgguccuaccucacgccgggggacagcagcuccggcuggaccgcgggcgccgccgccuacuacgugggguaccugcagccccgcaccuuccugcucaaguacaacgagaacggcaccaucacggacgcggucgacugcgcccuggacccccugagcgagaccaagugcacccucaaguccuucaccguggagaaggggaucuaccagacgagcaacuuccgggugcagcccaccgaguccaucguccgcuucccgaacaucaccaaccugugccccuucggcgagguguucaacgccacccgguucgccagcgucuacgccuggaaccgcaagcggaucuccaacugcguggcggacuacagcgugcuguacaacuccgccagcuucuccacguucaagugcuacggcgucagccccaccaagcucaacgaccugugcuucaccaacguguacgccgacuccuucgugauccgcggggacgagguccggcagaucgcccccggccagaccgggaagaucgccgacuacaacuacaagcugccggacgacuucacgggcugcgugaucgcguggaacagcaacaaccucgacuccaaggucgggggcaacuacaacuaccuguaccgccuguuccgcaagagcaaccucaagcccuucgagcgggacaucuccaccgagaucuaccaggccggcagcacccccugcaacgggguggagggcuucaacugcuacuucccccugcaguccuacggguuccagccgaccaacggcgugggguaccagcccuaccggguggucgugcugagcuucgagcuccugcacgcccccgccacggugugcggccccaagaaguccaccaaccuggucaagaacaagugcgugaacuucaacuucaacggccucaccgggaccggcgugcugaccgagagcaacaagaaguuccugccguuccagcaguucgggcgcgacaucgccgacacgaccgacgcgguccgcgacccccagacccuggagauccucgacaucacccccugcagcuucggcgggguguccgugaucacgccgggcaccaacaccagcaaccaggucgccgugcuguaccaggacgugaacugcaccgagguccccguggccauccacgccgaccagcugacgcccaccuggcggguguacuccaccggcagcaacgucuuccagacccgcgccgggugccucaucggcgcggagcacgugaacaacuccuacgagugcgacauccccaucggggccggcaucugcgccagcuaccagacgcagaccaacuccccgcggcgcgcccggagcguggcgucccagagcaucaucgccuacaccaugucccugggcgccgagaacagcgucgccuacuccaacaacagcaucgccaucugcaccaacuucacgaucuccgugaccaccgagauccugcccgugagcaugaccaagacgagcgucgacugcaccauguacaucugcggggacuccaccgagugcagcaaccuccugcugcaguacggcuccuucugcacccagcucaaccgcgcgcugacggggaucgccguggagcaggacaagaacacccaggagguguucgcccaggucaagcagaucuacaagacgcccccgaucaaggacuucggcggguucaacuucagccagauccugcccgaccccuccaagcccagcaagcgguccuucaucgaggaccuccuguucaacaaggugacccuggccgacgccggcuucaucaagcaguacggcgacugccucggggacaucgcggcccgcgaccugaucugcgcccagaaguucaacggccugaccgugcucccgccccugcugaccgacgagaugaucgcccaguacaccagcgcccuccuggcggggaccaucacguccggcuggaccuucggggccggcgccgcccugcagauccccuucgcgaugcagauggccuaccgguucaacggcaucggggucacccagaacgugcucuacgagaaccagaagcugaucgccaaccaguucaacagcgccaucggcaagauccaggacucccugagcuccaccgccagcgcgcucgggaagcugcaggacguggucaaccagaacgcccaggcccugaacacgcucgugaagcagcuguccagcaacuucggcgccaucuccagcgugcugaacgacauccucucccgccuggacaaggucgaggccgaggugcagaucgaccggcugaucaccgggcgccuccagagccugcagaccuacgugacccagcagcugauccgggcggccgagauccgcgccagcgccaaccucgccgcgaccaagauguccgagugcguccugggccagagcaagcggguggacuucugcggcaagggguaccaccugauguccuucccccagagcgccccgcacggcguggucuuccuccacgugacguacgucugcgcccaggagaagaacuucaccaccgcccccgcgaucugccacgacgggaaggcccacuucccccgcgagggcguguucguguccaacgggacccacugguucgucacgcagcggaacuucuacgagccgcagaucaucaccaccgacaacaccuucgugagcggcaacugcgacguggucaucggcaucgugaacaacacgguguacgacccccugcagcccgagcuggacuccggcgggggcgggagcgacaucgaccccuacaaggaguucggcagcuccuaccagcugcucaacuuccugccccuggacuucuuccccgaccucaacgcccugguggacaccgccaccgcgcuguacgaggaggagcucacggggcgcgagcacugcagcccccaccacaccgccauccggcaggcccuggucugcugggacgagcugaccaagcucaucgccuggauguccagcaacaucaccuccgagcagguccgcacgaucaucgugaaccacgucaacgacaccuggggccugaaggugcggcagagccugugguuccaccucuccugccugaccuucgggcagcacaccgugcaggaguuccuggucagcuucggcguguggauccgcacgcccgccccguaccggccgcccaacgcgccgauccucuccacccugccggagcacaccgugaucugcugaggacuagucccuguucccagagcccacuuuuuuuucuuuuuuugaaauaaaauagccugucuuucagaucucaaaggcucuuuucagagccaccaaaaaaaaaaaaaaaaaaaaaaaaaaaaaaaaaaaaaaaaaaaaaaaaaaaaaaaaaaaaaaaaaaaaaaaaaaaaaaaaaaaaaaaaaaaaaaaaaaaaa

SEQ ID NO: 12466 - RNA, 4178 nt, Artificial Sequence
  SARS-CoV-2/Wuhan/WIV05/2019__EPI_ISL_402128 spike protein mRNA gc (1-1147)(G889C_L1034C) WhcAg construct
aggagagucccgcagucggcguccagcggcucugcuuguucgugugugugucguugcaggccuuauucaagcuuaccauguucguguuccugguccuccugccccuggugagcucccagugcgugaaccucaccacccgcacgcagcugccgcccgccuacaccaacagcuucacccggggcgucuacuaccccgacaagguguuccgcuccagcgugcugcacuccacccaggaccucuuccugcccuucuucagcaacgucacgugguuccacgccauccacguguccgggaccaacggcaccaagcgguucgacaacccggugcugcccuucaacgacggggucuacuucgcgagcaccgagaaguccaacaucauccgcggcuggaucuucgggacgacccucgacagcaagacccagucccugcugaucgugaacaacgccaccaacguggucaucaaggugugcgaguuccaguucugcaacgaccccuuccucggcguguacuaccacaagaacaacaagagcuggauggaguccgaguuccgggucuacagcuccgccaacaacugcacguucgaguacgugagccagcccuuccugauggaccuggagggcaagcaggggaacuucaagaaccuccgcgaguucguguucaagaacaucgacggcuacuucaagaucuacuccaagcacaccccgaucaaccugguccgggaccugccccagggguucagcgcccucgagccccugguggaccugcccaucggcaucaacaucacccgcuuccagacccuccuggcccugcaccgguccuaccucacgccgggggacagcagcuccggcuggaccgcgggcgccgccgccuacuacgugggguaccugcagccccgcaccuuccugcucaaguacaacgagaacggcaccaucacggacgcggucgacugcgcccuggacccccugagcgagaccaagugcacccucaaguccuucaccguggagaaggggaucuaccagacgagcaacuuccgggugcagcccaccgaguccaucguccgcuucccgaacaucaccaaccugugccccuucggcgagguguucaacgccacccgguucgccagcgucuacgccuggaaccgcaagcggaucuccaacugcguggcggacuacagcgugcuguacaacuccgccagcuucuccacguucaagugcuacggcgucagccccaccaagcucaacgaccugugcuucaccaacguguacgccgacuccuucgugauccgcggggacgagguccggcagaucgcccccggccagaccgggaagaucgccgacuacaacuacaagcugccggacgacuucacgggcugcgugaucgcguggaacagcaacaaccucgacuccaaggucgggggcaacuacaacuaccuguaccgccuguuccgcaagagcaaccucaagcccuucgagcgggacaucuccaccgagaucuaccaggccggcagcacccccugcaacgggguggagggcuucaacugcuacuucccccugcaguccuacggguuccagccgaccaacggcgugggguaccagcccuaccggguggucgugcugagcuucgagcuccugcacgcccccgccacggugugcggccccaagaaguccaccaaccuggucaagaacaagugcgugaacuucaacuucaacggccucaccgggaccggcgugcugaccgagagcaacaagaaguuccugccguuccagcaguucgggcgcgacaucgccgacacgaccgacgcgguccgcgacccccagacccuggagauccucgacaucacccccugcagcuucggcgggguguccgugaucacgccgggcaccaacaccagcaaccaggucgccgugcuguaccaggacgugaacugcaccgagguccccguggccauccacgccgaccagcugacgcccaccuggcggguguacuccaccggcagcaacgucuuccagacccgcgccgggugccucaucggcgcggagcacgugaacaacuccuacgagugcgacauccccaucggggccggcaucugcgccagcuaccagacgcagaccaacuccccgcggcgcgcccggagcguggcgucccagagcaucaucgccuacaccaugucccugggcgccgagaacagcgucgccuacuccaacaacagcaucgccauccccaccaacuucacgaucuccgugaccaccgagauccugcccgugagcaugaccaagacgagcgucgacugcaccauguacaucugcggggacuccaccgagugcagcaaccuccugcugcaguacggcuccuucugcacccagcucaaccgcgcgcugacggggaucgccguggagcaggacaagaacacccaggagguguucgcccaggucaagcagaucuacaagacgcccccgaucaaggacuucggcggguucaacuucagccagauccugcccgaccccuccaagcccagcaagcgguccuucaucgaggaccuccuguucaacaaggugacccuggccgacgccggcuucaucaagcaguacggcgacugccucggggacaucgcggcccgcgaccugaucugcgcccagaaguucaacggccugaccgugcucccgccccugcugaccgacgagaugaucgcccaguacaccagcgcccuccuggcggggaccaucacguccggcuggaccuucugcgccggcgccgcccugcagauccccuucgcgaugcagauggccuaccgguucaacggcaucggggucacccagaacgugcucuacgagaaccagaagcugaucgccaaccaguucaacagcgccaucggcaagauccaggacucccugagcuccaccgccagcgcgcucgggaagcugcaggacguggucaaccagaacgcccaggcccugaacacgcucgugaagcagcuguccagcaacuucggcgccaucuccagcgugcugaacgacauccucucccgccuggacaaggucgaggccgaggugcagaucgaccggcugaucaccgggcgccuccagagccugcagaccuacgugacccagcagcugauccgggcggccgagauccgcgccagcgccaaccucgccgcgaccaagauguccgagugcgucugcggccagagcaagcggguggacuucugcggcaagggguaccaccugauguccuucccccagagcgccccgcacggcguggucuuccuccacgugacguacguccccgcccaggagaagaacuucaccaccgcccccgcgaucugccacgacgggaaggcccacuucccccgcgagggcguguucguguccaacgggacccacugguucgucacgcagcggaacuucuacgagccgcagaucaucaccaccgacaacaccuucgugagcggcaacugcgacguggucaucggcaucgugaacaacacgguguacgacccccugcagcccgagcuggacuccggcgggggcgggagcgacaucgaccccuacaaggaguucggcagcuccuaccagcugcucaacuuccugccccuggacuucuuccccgaccucaacgcccugguggacaccgccaccgcgcuguacgaggaggagcucacggggcgcgagcacugcagcccccaccacaccgccauccggcaggcccuggucugcugggacgagcugaccaagcucaucgccuggauguccagcaacaucaccuccgagcagguccgcacgaucaucgugaaccacgucaacgacaccuggggccugaaggugcggcagagccugugguuccaccucuccugccugaccuucgggcagcacaccgugcaggaguuccuggucagcuucggcguguggauccgcacgcccgccccguaccggccgcccaacgcgccgauccucuccacccugccggagcacaccgugaucugcugaggacuagucccuguucccagagcccacuuuuuuuucuuuuuuugaaauaaaauagccugucuuucagaucucaaaggcucuuuucagagccaccaaaaaaaaaaaaaaaaaaaaaaaaaaaaaaaaaaaaaaaaaaaaaaaaaaaaaaaaaaaaaaaaaaaaaaaaaaaaaaaaaaaaaaaaaaaaaaaaaaaaa

SEQ ID NO: 12467 - RNA, 4178 nt, Artificial Sequence
  SARS-CoV-2/Wuhan/WIV05/2019__EPI_ISL_402128 spike protein mRNA gc (1-1147)(I909C_Y1047C) WhcAg construct
aggagagucccgcagucggcguccagcggcucugcuuguucgugugugugucguugcaggccuuauucaagcuuaccauguucguguuccugguccuccugccccuggugagcucccagugcgugaaccucaccacccgcacgcagcugccgcccgccuacaccaacagcuucacccggggcgucuacuaccccgacaagguguuccgcuccagcgugcugcacuccacccaggaccucuuccugcccuucuucagcaacgucacgugguuccacgccauccacguguccgggaccaacggcaccaagcgguucgacaacccggugcugcccuucaacgacggggucuacuucgcgagcaccgagaaguccaacaucauccgcggcuggaucuucgggacgacccucgacagcaagacccagucccugcugaucgugaacaacgccaccaacguggucaucaaggugugcgaguuccaguucugcaacgaccccuuccucggcguguacuaccacaagaacaacaagagcuggauggaguccgaguuccgggucuacagcuccgccaacaacugcacguucgaguacgugagccagcccuuccugauggaccuggagggcaagcaggggaacuucaagaaccuccgcgaguucguguucaagaacaucgacggcuacuucaagaucuacuccaagcacaccccgaucaaccugguccgggaccugccccagggguucagcgcccucgagccccugguggaccugcccaucggcaucaacaucacccgcuuccagacccuccuggcccugcaccgguccuaccucacgccgggggacagcagcuccggcuggaccgcgggcgccgccgccuacuacgugggguaccugcagccccgcaccuuccugcucaaguacaacgagaacggcaccaucacggacgcggucgacugcgcccuggacccccugagcgagaccaagugcacccucaaguccuucaccguggagaaggggaucuaccagacgagcaacuuccgggugcagcccaccgaguccaucguccgcuucccgaacaucaccaaccugugccccuucggcgagguguucaacgccacccgguucgccagcgucuacgccuggaaccgcaagcggaucuccaacugcguggcggacuacagcgugcuguacaacuccgccagcuucuccacguucaagugcuacggcgucagccccaccaagcucaacgaccugugcuucaccaacguguacgccgacuccuucgugauccgcggggacgagguccggcagaucgcccccggccagaccgggaagaucgccgacuacaacuacaagcugccggacgacuucacgggcugcgugaucgcguggaacagcaacaaccucgacuccaaggucgggggcaacuacaacuaccuguaccgccuguuccgcaagagcaaccucaagcccuucgagcgggacaucuccaccgagaucuaccaggccggcagcacccccugcaacgggguggagggcuucaacugcuacuucccccugcaguccuacggguuccagccgaccaacggcgugggguaccagcccuaccggguggucgugcugagcuucgagcuccugcacgcccccgccacggugugcggccccaagaaguccaccaaccuggucaagaacaagugcgugaacuucaacuucaacggccucaccgggaccggcgugcugaccgagagcaacaagaaguuccugccguuccagcaguucgggcgcgacaucgccgacacgaccgacgcgguccgcgacccccagacccuggagauccucgacaucacccccugcagcuucggcgggguguccgugaucacgccgggcaccaacaccagcaaccaggucgccgugcuguaccaggacgugaacugcaccgagguccccguggccauccacgccgaccagcugacgcccaccuggcggguguacuccaccggcagcaacgucuuccagacccgcgccgggugccucaucggcgcggagcacgugaacaacuccuacgagugcgacauccccaucggggccggcaucugcgccagcuaccagacgcagaccaacuccccgcggcgcgcccggagcguggcgucccagagcaucaucgccuacaccaugucccugggcgccgagaacagcgucgccuacuccaacaacagcaucgccauccccaccaacuucacgaucuccgugaccaccgagauccugcccgugagcaugaccaagacgagcgucgacugcaccauguacaucugcggggacuccaccgagugcagcaaccuccugcugcaguacggcuccuucugcacccagcucaaccgcgcgcugacggggaucgccguggagcaggacaagaacacccaggagguguucgcccaggucaagcagaucuacaagacgcccccgaucaaggacuucggcggguucaacuucagccagauccugcccgaccccuccaagcccagcaagcgguccuucaucgaggaccuccuguucaacaaggugacccuggccgacgccggcuucaucaagcaguacggcgacugccucggggacaucgcggcccgcgaccugaucugcgcccagaaguucaacggccugaccgugcucccgccccugcugaccgacgagaugaucgcccaguacaccagcgcccuccuggcggggaccaucacguccggcuggaccuucggggccggcgccgcccugcagauccccuucgcgaugcagauggccuaccgguucaacggcugcggggucacccagaacgugcucuacgagaaccagaagcugaucgccaaccaguucaacagcgccaucggcaagauccaggacucccugagcuccaccgccagcgcgcucgggaagcugcaggacguggucaaccagaacgcccaggcccugaacacgcucgugaagcagcuguccagcaacuucggcgccaucuccagcgugcugaacgacauccucucccgccuggacaaggucgaggccgaggugcagaucgaccggcugaucaccgggcgccuccagagccugcagaccuacgugacccagcagcugauccgggcggccgagauccgcgccagcgccaaccucgccgcgaccaagauguccgagugcguccugggccagagcaagcggguggacuucugcggcaaggggugccaccugauguccuucccccagagcgccccgcacggcguggucuuccuccacgugacguacguccccgcccaggagaagaacuucaccaccgcccccgcgaucugccacgacgggaaggcccacuucccccgcgagggcguguucguguccaacgggacccacugguucgucacgcagcggaacuucuacgagccgcagaucaucaccaccgacaacaccuucgugagcggcaacugcgacguggucaucggcaucgugaacaacacgguguacgacccccugcagcccgagcuggacuccggcgggggcgggagcgacaucgaccccuacaaggaguucggcagcuccuaccagcugcucaacuuccugccccuggacuucuuccccgaccucaacgcccugguggacaccgccaccgcgcuguacgaggaggagcucacggggcgcgagcacugcagcccccaccacaccgccauccggcaggcccuggucugcugggacgagcugaccaagcucaucgccuggauguccagcaacaucaccuccgagcagguccgcacgaucaucgugaaccacgucaacgacaccuggggccugaaggugcggcagagccugugguuccaccucuccugccugaccuucgggcagcacaccgugcaggaguuccuggucagcuucggcguguggauccgcacgcccgccccguaccggccgcccaacgcgccgauccucuccacccugccggagcacaccgugaucugcugaggacuagucccuguucccagagcccacuuuuuuuucuuuuuuugaaauaaaauagccugucuuucagaucucaaaggcucuuuucagagccaccaaaaaaaaaaaaaaaaaaaaaaaaaaaaaaaaaaaaaaaaaaaaaaaaaaaaaaaaaaaaaaaaaaaaaaaaaaaaaaaaaaaaaaaaaaaaaaaaaaaaa

SEQ ID NO: 12468 - RNA, 4178 nt, Artificial Sequence
  SARS-CoV-2/Wuhan/WIV05/2019__EPI_ISL_402128 spike protein mRNA gc (1-1147)(Q965C_S1003C) WhcAg construct
aggagagucccgcagucggcguccagcggcucugcuuguucgugugugugucguugcaggccuuauucaagcuuaccauguucguguuccugguccuccugccccuggugagcucccagugcgugaaccucaccacccgcacgcagcugccgcccgccuacaccaacagcuucacccggggcgucuacuaccccgacaagguguuccgcuccagcgugcugcacuccacccaggaccucuuccugcccuucuucagcaacgucacgugguuccacgccauccacguguccgggaccaacggcaccaagcgguucgacaacccggugcugcccuucaacgacggggucuacuucgcgagcaccgagaaguccaacaucauccgcggcuggaucuucgggacgacccucgacagcaagacccagucccugcugaucgugaacaacgccaccaacguggucaucaaggugugcgaguuccaguucugcaacgaccccuuccucggcguguacuaccacaagaacaacaagagcuggauggaguccgaguuccgggucuacagcuccgccaacaacugcacguucgaguacgugagccagcccuuccugauggaccuggagggcaagcaggggaacuucaagaaccuccgcgaguucguguucaagaacaucgacggcuacuucaagaucuacuccaagcacaccccgaucaaccugguccgggaccugccccagggguucagcgcccucgagccccugguggaccugcccaucggcaucaacaucacccgcuuccagacccuccuggcccugcaccgguccuaccucacgccgggggacagcagcuccggcuggaccgcgggcgccgccgccuacuacgugggguaccugcagccccgcaccuuccugcucaaguacaacgagaacggcaccaucacggacgcggucgacugcgcccuggacccccugagcgagaccaagugcacccucaaguccuucaccguggagaaggggaucuaccagacgagcaacuuccgggugcagcccaccgaguccaucguccgcuucccgaacaucaccaaccugugccccuucggcgagguguucaacgccacccgguucgccagcgucuacgccuggaaccgcaagcggaucuccaacugcguggcggacuacagcgugcuguacaacuccgccagcuucuccacguucaagugcuacggcgucagccccaccaagcucaacgaccugugcuucaccaacguguacgccgacuccuucgugauccgcggggacgagguccggcagaucgcccccggccagaccgggaagaucgccgacuacaacuacaagcugccggacgacuucacgggcugcgugaucgcguggaacagcaacaaccucgacuccaaggucgggggcaacuacaacuaccuguaccgccuguuccgcaagagcaaccucaagcccuucgagcgggacaucuccaccgagaucuaccaggccggcagcacccccugcaacgggguggagggcuucaacugcuacuucccccugcaguccuacggguuccagccgaccaacggcgugggguaccagcccuaccggguggucgugcugagcuucgagcuccugcacgcccccgccacggugugcggccccaagaaguccaccaaccuggucaagaacaagugcgugaacuucaacuucaacggccucaccgggaccggcgugcugaccgagagcaacaagaaguuccugccguuccagcaguucgggcgcgacaucgccgacacgaccgacgcgguccgcgacccccagacccuggagauccucgacaucacccccugcagcuucggcgggguguccgugaucacgccgggcaccaacaccagcaaccaggucgccgugcuguaccaggacgugaacugcaccgagguccccguggccauccacgccgaccagcugacgcccaccuggcggguguacuccaccggcagcaacgucuuccagacccgcgccgggugccucaucggcgcggagcacgugaacaacuccuacgagugcgacauccccaucggggccggcaucugcgccagcuaccagacgcagaccaacuccccgcggcgcgcccggagcguggcgucccagagcaucaucgccuacaccaugucccugggcgccgagaacagcgucgccuacuccaacaacagcaucgccauccccaccaacuucacgaucuccgugaccaccgagauccugcccgugagcaugaccaagacgagcgucgacugcaccauguacaucugcggggacuccaccgagugcagcaaccuccugcugcaguacggcuccuucugcacccagcucaaccgcgcgcugacggggaucgccguggagcaggacaagaacacccaggagguguucgcccaggucaagcagaucuacaagacgcccccgaucaaggacuucggcggguucaacuucagccagauccugcccgaccccuccaagcccagcaagcgguccuucaucgaggaccuccuguucaacaaggugacccuggccgacgccggcuucaucaagcaguacggcgacugccucggggacaucgcggcccgcgaccugaucugcgcccagaaguucaacggccugaccgugcucccgccccugcugaccgacgagaugaucgcccaguacaccagcgcccuccuggcggggaccaucacguccggcuggaccuucggggccggcgccgcccugcagauccccuucgcgaugcagauggccuaccgguucaacggcaucggggucacccagaacgugcucuacgagaaccagaagcugaucgccaaccaguucaacagcgccaucggcaagauccaggacucccugagcuccaccgccagcgcgcucgggaagcugcaggacguggucaaccagaacgcccaggcccugaacacgcucgugaagugccuguccagcaacuucggcgccaucuccagcgugcugaacgacauccucucccgccuggacaaggucgaggccgaggugcagaucgaccggcugaucaccgggcgccuccagugccugcagaccuacgugacccagcagcugauccgggcggccgagauccgcgccagcgccaaccucgccgcgaccaagauguccgagugcguccugggccagagcaagcggguggacuucugcggcaagggguaccaccugauguccuucccccagagcgccccgcacggcguggucuuccuccacgugacguacguccccgcccaggagaagaacuucaccaccgcccccgcgaucugccacgacgggaaggcccacuucccccgcgagggcguguucguguccaacgggacccacugguucgucacgcagcggaacuucuacgagccgcagaucaucaccaccgacaacaccuucgugagcggcaacugcgacguggucaucggcaucgugaacaacacgguguacgacccccugcagcccgagcuggacuccggcgggggcgggagcgacaucgaccccuacaaggaguucggcagcuccuaccagcugcucaacuuccugccccuggacuucuuccccgaccucaacgcccugguggacaccgccaccgcgcuguacgaggaggagcucacggggcgcgagcacugcagcccccaccacaccgccauccggcaggcccuggucugcugggacgagcugaccaagcucaucgccuggauguccagcaacaucaccuccgagcagguccgcacgaucaucgugaaccacgucaacgacaccuggggccugaaggugcggcagagccugugguuccaccucuccugccugaccuucgggcagcacaccgugcaggaguuccuggucagcuucggcguguggauccgcacgcccgccccguaccggccgcccaacgcgccgauccucuccacccugccggagcacaccgugaucugcugaggacuagucccuguucccagagcccacuuuuuuuucuuuuuuugaaauaaaauagccugucuuucagaucucaaaggcucuuuucagagccaccaaaaaaaaaaaaaaaaaaaaaaaaaaaaaaaaaaaaaaaaaaaaaaaaaaaaaaaaaaaaaaaaaaaaaaaaaaaaaaaaaaaaaaaaaaaaaaaaaaaaa

SEQ ID NO: 12469 - RNA, 4178 nt, Artificial Sequence
  SARS-CoV-2/Wuhan/WIV05/2019__EPI_ISL_402128 spike protein mRNA gc (1-1147)(F970C_G999C) WhcAg construct
aggagagucccgcagucggcguccagcggcucugcuuguucgugugugugucguugcaggccuuauucaagcuuaccauguucguguuccugguccuccugccccuggugagcucccagugcgugaaccucaccacccgcacgcagcugccgcccgccuacaccaacagcuucacccggggcgucuacuaccccgacaagguguuccgcuccagcgugcugcacuccacccaggaccucuuccugcccuucuucagcaacgucacgugguuccacgccauccacguguccgggaccaacggcaccaagcgguucgacaacccggugcugcccuucaacgacggggucuacuucgcgagcaccgagaaguccaacaucauccgcggcuggaucuucgggacgacccucgacagcaagacccagucccugcugaucgugaacaacgccaccaacguggucaucaaggugugcgaguuccaguucugcaacgaccccuuccucggcguguacuaccacaagaacaacaagagcuggauggaguccgaguuccgggucuacagcuccgccaacaacugcacguucgaguacgugagccagcccuuccugauggaccuggagggcaagcaggggaacuucaagaaccuccgcgaguucguguucaagaacaucgacggcuacuucaagaucuacuccaagcacaccccgaucaaccugguccgggaccugccccagggguucagcgcccucgagccccugguggaccugcccaucggcaucaacaucacccgcuuccagacccuccuggcccugcaccgguccuaccucacgccgggggacagcagcuccggcuggaccgcgggcgccgccgccuacuacgugggguaccugcagccccgcaccuuccugcucaaguacaacgagaacggcaccaucacggacgcggucgacugcgcccuggacccccugagcgagaccaagugcacccucaaguccuucaccguggagaaggggaucuaccagacgagcaacuuccgggugcagcccaccgaguccaucguccgcuucccgaacaucaccaaccugugccccuucggcgagguguucaacgccacccgguucgccagcgucuacgccuggaaccgcaagcggaucuccaacugcguggcggacuacagcgugcuguacaacuccgccagcuucuccacguucaagugcuacggcgucagccccaccaagcucaacgaccugugcuucaccaacguguacgccgacuccuucgugauccgcggggacgagguccggcagaucgcccccggccagaccgggaagaucgccgacuacaacuacaagcugccggacgacuucacgggcugcgugaucgcguggaacagcaacaaccucgacuccaaggucgggggcaacuacaacuaccuguaccgccuguuccgcaagagcaaccucaagcccuucgagcgggacaucuccaccgagaucuaccaggccggcagcacccccugcaacgggguggagggcuucaacugcuacuucccccugcaguccuacggguuccagccgaccaacggcgugggguaccagcccuaccggguggucgugcugagcuucgagcuccugcacgcccccgccacggugugcggccccaagaaguccaccaaccuggucaagaacaagugcgugaacuucaacuucaacggccucaccgggaccggcgugcugaccgagagcaacaagaaguuccugccguuccagcaguucgggcgcgacaucgccgacacgaccgacgcgguccgcgacccccagacccuggagauccucgacaucacccccugcagcuucggcgggguguccgugaucacgccgggcaccaacaccagcaaccaggucgccgugcuguaccaggacgugaacugcaccgagguccccguggccauccacgccgaccagcugacgcccaccuggcggguguacuccaccggcagcaacgucuuccagacccgcgccgggugccucaucggcgcggagcacgugaacaacuccuacgagugcgacauccccaucggggccggcaucugcgccagcuaccagacgcagaccaacuccccgcggcgcgcccggagcguggcgucccagagcaucaucgccuacaccaugucccugggcgccgagaacagcgucgccuacuccaacaacagcaucgccauccccaccaacuucacgaucuccgugaccaccgagauccugcccgugagcaugaccaagacgagcgucgacugcaccauguacaucugcggggacuccaccgagugcagcaaccuccugcugcaguacggcuccuucugcacccagcucaaccgcgcgcugacggggaucgccguggagcaggacaagaacacccaggagguguucgcccaggucaagcagaucuacaagacgcccccgaucaaggacuucggcggguucaacuucagccagauccugcccgaccccuccaagcccagcaagcgguccuucaucgaggaccuccuguucaacaaggugacccuggccgacgccggcuucaucaagcaguacggcgacugccucggggacaucgcggcccgcgaccugaucugcgcccagaaguucaacggccugaccgugcucccgccccugcugaccgacgagaugaucgcccaguacaccagcgcccuccuggcggggaccaucacguccggcuggaccuucggggccggcgccgcccugcagauccccuucgcgaugcagauggccuaccgguucaacggcaucggggucacccagaacgugcucuacgagaaccagaagcugaucgccaaccaguucaacagcgccaucggcaagauccaggacucccugagcuccaccgccagcgcgcucgggaagcugcaggacguggucaaccagaacgcccaggcccugaacacgcucgugaagcagcuguccagcaacugcggcgccaucuccagcgugcugaacgacauccucucccgccuggacaaggucgaggccgaggugcagaucgaccggcugaucaccugucgccuccagagccugcagaccuacgugacccagcagcugauccgggcggccgagauccgcgccagcgccaaccucgccgcgaccaagauguccgagugcguccugggccagagcaagcggguggacuucugcggcaagggguaccaccugauguccuucccccagagcgccccgcacggcguggucuuccuccacgugacguacguccccgcccaggagaagaacuucaccaccgcccccgcgaucugccacgacgggaaggcccacuucccccgcgagggcguguucguguccaacgggacccacugguucgucacgcagcggaacuucuacgagccgcagaucaucaccaccgacaacaccuucgugagcggcaacugcgacguggucaucggcaucgugaacaacacgguguacgacccccugcagcccgagcuggacuccggcgggggcgggagcgacaucgaccccuacaaggaguucggcagcuccuaccagcugcucaacuuccugccccuggacuucuuccccgaccucaacgcccugguggacaccgccaccgcgcuguacgaggaggagcucacggggcgcgagcacugcagcccccaccacaccgccauccggcaggcccuggucugcugggacgagcugaccaagcucaucgccuggauguccagcaacaucaccuccgagcagguccgcacgaucaucgugaaccacgucaacgacaccuggggccugaaggugcggcagagccugugguuccaccucuccugccugaccuucgggcagcacaccgugcaggaguuccuggucagcuucggcguguggauccgcacgcccgccccguaccggccgcccaacgcgccgauccucuccacccugccggagcacaccgugaucugcugaggacuagucccuguucccagagcccacuuuuuuuucuuuuuuugaaauaaaauagccugucuuucagaucucaaaggcucuuuucagagccaccaaaaaaaaaaaaaaaaaaaaaaaaaaaaaaaaaaaaaaaaaaaaaaaaaaaaaaaaaaaaaaaaaaaaaaaaaaaaaaaaaaaaaaaaaaaaaaaaaaaaa

SEQ ID NO: 12470 - RNA, 4178 nt, Artificial Sequence
  SARS-CoV-2/Wuhan/WIV05/2019__EPI_ISL_402128 spike protein mRNA gc (1-1147)(A972C_R995C) WhcAg construct
aggagagucccgcagucggcguccagcggcucugcuuguucgugugugugucguugcaggccuuauucaagcuuaccauguucguguuccugguccuccugccccuggugagcucccagugcgugaaccucaccacccgcacgcagcugccgcccgccuacaccaacagcuucacccggggcgucuacuaccccgacaagguguuccgcuccagcgugcugcacuccacccaggaccucuuccugcccuucuucagcaacgucacgugguuccacgccauccacguguccgggaccaacggcaccaagcgguucgacaacccggugcugcccuucaacgacggggucuacuucgcgagcaccgagaaguccaacaucauccgcggcuggaucuucgggacgacccucgacagcaagacccagucccugcugaucgugaacaacgccaccaacguggucaucaaggugugcgaguuccaguucugcaacgaccccuuccucggcguguacuaccacaagaacaacaagagcuggauggaguccgaguuccgggucuacagcuccgccaacaacugcacguucgaguacgugagccagcccuuccugauggaccuggagggcaagcaggggaacuucaagaaccuccgcgaguucguguucaagaacaucgacggcuacuucaagaucuacuccaagcacaccccgaucaaccugguccgggaccugccccagggguucagcgcccucgagccccugguggaccugcccaucggcaucaacaucacccgcuuccagacccuccuggcccugcaccgguccuaccucacgccgggggacagcagcuccggcuggaccgcgggcgccgccgccuacuacgugggguaccugcagccccgcaccuuccugcucaaguacaacgagaacggcaccaucacggacgcggucgacugcgcccuggacccccugagcgagaccaagugcacccucaaguccuucaccguggagaaggggaucuaccagacgagcaacuuccgggugcagcccaccgaguccaucguccgcuucccgaacaucaccaaccugugccccuucggcgagguguucaacgccacccgguucgccagcgucuacgccuggaaccgcaagcggaucuccaacugcguggcggacuacagcgugcuguacaacuccgccagcuucuccacguucaagugcuacggcgucagccccaccaagcucaacgaccugugcuucaccaacguguacgccgacuccuucgugauccgcggggacgagguccggcagaucgcccccggccagaccgggaagaucgccgacuacaacuacaagcugccggacgacuucacgggcugcgugaucgcguggaacagcaacaaccucgacuccaaggucgggggcaacuacaacuaccuguaccgccuguuccgcaagagcaaccucaagcccuucgagcgggacaucuccaccgagaucuaccaggccggcagcacccccugcaacgggguggagggcuucaacugcuacuucccccugcaguccuacggguuccagccgaccaacggcgugggguaccagcccuaccggguggucgugcugagcuucgagcuccugcacgcccccgccacggugugcggccccaagaaguccaccaaccuggucaagaacaagugcgugaacuucaacuucaacggccucaccgggaccggcgugcugaccgagagcaacaagaaguuccugccguuccagcaguucgggcgcgacaucgccgacacgaccgacgcgguccgcgacccccagacccuggagauccucgacaucacccccugcagcuucggcgggguguccgugaucacgccgggcaccaacaccagcaaccaggucgccgugcuguaccaggacgugaacugcaccgagguccccguggccauccacgccgaccagcugacgcccaccuggcggguguacuccaccggcagcaacgucuuccagacccgcgccgggugccucaucggcgcggagcacgugaacaacuccuacgagugcgacauccccaucggggccggcaucugcgccagcuaccagacgcagaccaacuccccgcggcgcgcccggagcguggcgucccagagcaucaucgccuacaccaugucccugggcgccgagaacagcgucgccuacuccaacaacagcaucgccauccccaccaacuucacgaucuccgugaccaccgagauccugcccgugagcaugaccaagacgagcgucgacugcaccauguacaucugcggggacuccaccgagugcagcaaccuccugcugcaguacggcuccuucugcacccagcucaaccgcgcgcugacggggaucgccguggagcaggacaagaacacccaggagguguucgcccaggucaagcagaucuacaagacgcccccgaucaaggacuucggcggguucaacuucagccagauccugcccgaccccuccaagcccagcaagcgguccuucaucgaggaccuccuguucaacaaggugacccuggccgacgccggcuucaucaagcaguacggcgacugccucggggacaucgcggcccgcgaccugaucugcgcccagaaguucaacggccugaccgugcucccgccccugcugaccgacgagaugaucgcccaguacaccagcgcccuccuggcggggaccaucacguccggcuggaccuucggggccggcgccgcccugcagauccccuucgcgaugcagauggccuaccgguucaacggcaucggggucacccagaacgugcucuacgagaaccagaagcugaucgccaaccaguucaacagcgccaucggcaagauccaggacucccugagcuccaccgccagcgcgcucgggaagcugcaggacguggucaaccagaacgcccaggcccugaacacgcucgugaagcagcuguccagcaacuucggcugcaucuccagcgugcugaacgacauccucucccgccuggacaaggucgaggccgaggugcagaucgacugccugaucaccgggcgccuccagagccugcagaccuacgugacccagcagcugauccgggcggccgagauccgcgccagcgccaaccucgccgcgaccaagauguccgagugcguccugggccagagcaagcggguggacuucugcggcaagggguaccaccugauguccuucccccagagcgccccgcacggcguggucuuccuccacgugacguacguccccgcccaggagaagaacuucaccaccgcccccgcgaucugccacgacgggaaggcccacuucccccgcgagggcguguucguguccaacgggacccacugguucgucacgcagcggaacuucuacgagccgcagaucaucaccaccgacaacaccuucgugagcggcaacugcgacguggucaucggcaucgugaacaacacgguguacgacccccugcagcccgagcuggacuccggcgggggcgggagcgacaucgaccccuacaaggaguucggcagcuccuaccagcugcucaacuuccugccccuggacuucuuccccgaccucaacgcccugguggacaccgccaccgcgcuguacgaggaggagcucacggggcgcgagcacugcagcccccaccacaccgccauccggcaggcccuggucugcugggacgagcugaccaagcucaucgccuggauguccagcaacaucaccuccgagcagguccgcacgaucaucgugaaccacgucaacgacaccuggggccugaaggugcggcagagccugugguuccaccucuccugccugaccuucgggcagcacaccgugcaggaguuccuggucagcuucggcguguggauccgcacgcccgccccguaccggccgcccaacgcgccgauccucuccacccugccggagcacaccgugaucugcugaggacuagucccuguucccagagcccacuuuuuuuucuuuuuuugaaauaaaauagccugucuuucagaucucaaaggcucuuuucagagccaccaaaaaaaaaaaaaaaaaaaaaaaaaaaaaaaaaaaaaaaaaaaaaaaaaaaaaaaaaaaaaaaaaaaaaaaaaaaaaaaaaaaaaaaaaaaaaaaaaaaaa

SEQ ID NO: 12471 - RNA, 4178 nt, Artificial Sequence
  SARS-CoV-2/Wuhan/WIV05/2019__EPI_ISL_402128 spike protein mRNA gc (1-1147)(A890C_V1040C) WhcAg construct
aggagagucccgcagucggcguccagcggcucugcuuguucgugugugugucguugcaggccuuauucaagcuuaccauguucguguuccugguccuccugccccuggugagcucccagugcgugaaccucaccacccgcacgcagcugccgcccgccuacaccaacagcuucacccggggcgucuacuaccccgacaagguguuccgcuccagcgugcugcacuccacccaggaccucuuccugcccuucuucagcaacgucacgugguuccacgccauccacguguccgggaccaacggcaccaagcgguucgacaacccggugcugcccuucaacgacggggucuacuucgcgagcaccgagaaguccaacaucauccgcggcuggaucuucgggacgacccucgacagcaagacccagucccugcugaucgugaacaacgccaccaacguggucaucaaggugugcgaguuccaguucugcaacgaccccuuccucggcguguacuaccacaagaacaacaagagcuggauggaguccgaguuccgggucuacagcuccgccaacaacugcacguucgaguacgugagccagcccuuccugauggaccuggagggcaagcaggggaacuucaagaaccuccgcgaguucguguucaagaacaucgacggcuacuucaagaucuacuccaagcacaccccgaucaaccugguccgggaccugccccagggguucagcgcccucgagccccugguggaccugcccaucggcaucaacaucacccgcuuccagacccuccuggcccugcaccgguccuaccucacgccgggggacagcagcuccggcuggaccgcgggcgccgccgccuacuacgugggguaccugcagccccgcaccuuccugcucaaguacaacgagaacggcaccaucacggacgcggucgacugcgcccuggacccccugagcgagaccaagugcacccucaaguccuucaccguggagaaggggaucuaccagacgagcaacuuccgggugcagcccaccgaguccaucguccgcuucccgaacaucaccaaccugugccccuucggcgagguguucaacgccacccgguucgccagcgucuacgccuggaaccgcaagcggaucuccaacugcguggcggacuacagcgugcuguacaacuccgccagcuucuccacguucaagugcuacggcgucagccccaccaagcucaacgaccugugcuucaccaacguguacgccgacuccuucgugauccgcggggacgagguccggcagaucgcccccggccagaccgggaagaucgccgacuacaacuacaagcugccggacgacuucacgggcugcgugaucgcguggaacagcaacaaccucgacuccaaggucgggggcaacuacaacuaccuguaccgccuguuccgcaagagcaaccucaagcccuucgagcgggacaucuccaccgagaucuaccaggccggcagcacccccugcaacgggguggagggcuucaacugcuacuucccccugcaguccuacggguuccagccgaccaacggcgugggguaccagcccuaccggguggucgugcugagcuucgagcuccugcacgcccccgccacggugugcggccccaagaaguccaccaaccuggucaagaacaagugcgugaacuucaacuucaacggccucaccgggaccggcgugcugaccgagagcaacaagaaguuccugccguuccagcaguucgggcgcgacaucgccgacacgaccgacgcgguccgcgacccccagacccuggagauccucgacaucacccccugcagcuucggcgggguguccgugaucacgccgggcaccaacaccagcaaccaggucgccgugcuguaccaggacgugaacugcaccgagguccccguggccauccacgccgaccagcugacgcccaccuggcggguguacuccaccggcagcaacgucuuccagacccgcgccgggugccucaucggcgcggagcacgugaacaacuccuacgagugcgacauccccaucggggccggcaucugcgccagcuaccagacgcagaccaacuccccgcggcgcgcccggagcguggcgucccagagcaucaucgccuacaccaugucccugggcgccgagaacagcgucgccuacuccaacaacagcaucgccauccccaccaacuucacgaucuccgugaccaccgagauccugcccgugagcaugaccaagacgagcgucgacugcaccauguacaucugcggggacuccaccgagugcagcaaccuccugcugcaguacggcuccuucugcacccagcucaaccgcgcgcugacggggaucgccguggagcaggacaagaacacccaggagguguucgcccaggucaagcagaucuacaagacgcccccgaucaaggacuucggcggguucaacuucagccagauccugcccgaccccuccaagcccagcaagcgguccuucaucgaggaccuccuguucaacaaggugacccuggccgacgccggcuucaucaagcaguacggcgacugccucggggacaucgcggcccgcgaccugaucugcgcccagaaguucaacggccugaccgugcucccgccccugcugaccgacgagaugaucgcccaguacaccagcgcccuccuggcggggaccaucacguccggcuggaccuucgggugcggcgccgcccugcagauccccuucgcgaugcagauggccuaccgguucaacggcaucggggucacccagaacgugcucuacgagaaccagaagcugaucgccaaccaguucaacagcgccaucggcaagauccaggacucccugagcuccaccgccagcgcgcucgggaagcugcaggacguggucaaccagaacgcccaggcccugaacacgcucgugaagcagcuguccagcaacuucggcgccaucuccagcgugcugaacgacauccucucccgccuggacaaggucgaggccgaggugcagaucgaccggcugaucaccgggcgccuccagagccugcagaccuacgugacccagcagcugauccgggcggccgagauccgcgccagcgccaaccucgccgcgaccaagauguccgagugcguccugggccagagcaagcggugcgacuucugcggcaagggguaccaccugauguccuucccccagagcgccccgcacggcguggucuuccuccacgugacguacguccccgcccaggagaagaacuucaccaccgcccccgcgaucugccacgacgggaaggcccacuucccccgcgagggcguguucguguccaacgggacccacugguucgucacgcagcggaacuucuacgagccgcagaucaucaccaccgacaacaccuucgugagcggcaacugcgacguggucaucggcaucgugaacaacacgguguacgacccccugcagcccgagcuggacuccggcgggggcgggagcgacaucgaccccuacaaggaguucggcagcuccuaccagcugcucaacuuccugccccuggacuucuuccccgaccucaacgcccugguggacaccgccaccgcgcuguacgaggaggagcucacggggcgcgagcacugcagcccccaccacaccgccauccggcaggcccuggucugcugggacgagcugaccaagcucaucgccuggauguccagcaacaucaccuccgagcagguccgcacgaucaucgugaaccacgucaacgacaccuggggccugaaggugcggcagagccugugguuccaccucuccugccugaccuucgggcagcacaccgugcaggaguuccuggucagcuucggcguguggauccgcacgcccgccccguaccggccgcccaacgcgccgauccucuccacccugccggagcacaccgugaucugcugaggacuagucccuguucccagagcccacuuuuuuuucuuuuuuugaaauaaaauagccugucuuucagaucucaaaggcucuuuucagagccaccaaaaaaaaaaaaaaaaaaaaaaaaaaaaaaaaaaaaaaaaaaaaaaaaaaaaaaaaaaaaaaaaaaaaaaaaaaaaaaaaaaaaaaaaaaaaaaaaaaaaa

SEQ ID NO: 12472 - RNA, 4178 nt, Artificial Sequence
  SARS-CoV-2/Wuhan/WIV05/2019__EPI_ISL_402128 spike protein mRNA gc (1-1147)(T874C_S1055C) WhcAg construct
aggagagucccgcagucggcguccagcggcucugcuuguucgugugugugucguugcaggccuuauucaagcuuaccauguucguguuccugguccuccugccccuggugagcucccagugcgugaaccucaccacccgcacgcagcugccgcccgccuacaccaacagcuucacccggggcgucuacuaccccgacaagguguuccgcuccagcgugcugcacuccacccaggaccucuuccugcccuucuucagcaacgucacgugguuccacgccauccacguguccgggaccaacggcaccaagcgguucgacaacccggugcugcccuucaacgacggggucuacuucgcgagcaccgagaaguccaacaucauccgcggcuggaucuucgggacgacccucgacagcaagacccagucccugcugaucgugaacaacgccaccaacguggucaucaaggugugcgaguuccaguucugcaacgaccccuuccucggcguguacuaccacaagaacaacaagagcuggauggaguccgaguuccgggucuacagcuccgccaacaacugcacguucgaguacgugagccagcccuuccugauggaccuggagggcaagcaggggaacuucaagaaccuccgcgaguucguguucaagaacaucgacggcuacuucaagaucuacuccaagcacaccccgaucaaccugguccgggaccugccccagggguucagcgcccucgagccccugguggaccugcccaucggcaucaacaucacccgcuuccagacccuccuggcccugcaccgguccuaccucacgccgggggacagcagcuccggcuggaccgcgggcgccgccgccuacuacgugggguaccugcagccccgcaccuuccugcucaaguacaacgagaacggcaccaucacggacgcggucgacugcgcccuggacccccugagcgagaccaagugcacccucaaguccuucaccguggagaaggggaucuaccagacgagcaacuuccgggugcagcccaccgaguccaucguccgcuucccgaacaucaccaaccugugccccuucggcgagguguucaacgccacccgguucgccagcgucuacgccuggaaccgcaagcggaucuccaacugcguggcggacuacagcgugcuguacaacuccgccagcuucuccacguucaagugcuacggcgucagccccaccaagcucaacgaccugugcuucaccaacguguacgccgacuccuucgugauccgcggggacgagguccggcagaucgcccccggccagaccgggaagaucgccgacuacaacuacaagcugccggacgacuucacgggcugcgugaucgcguggaacagcaacaaccucgacuccaaggucgggggcaacuacaacuaccuguaccgccuguuccgcaagagcaaccucaagcccuucgagcgggacaucuccaccgagaucuaccaggccggcagcacccccugcaacgggguggagggcuucaacugcuacuucccccugcaguccuacggguuccagccgaccaacggcgugggguaccagcccuaccggguggucgugcugagcuucgagcuccugcacgcccccgccacggugugcggccccaagaaguccaccaaccuggucaagaacaagugcgugaacuucaacuucaacggccucaccgggaccggcgugcugaccgagagcaacaagaaguuccugccguuccagcaguucgggcgcgacaucgccgacacgaccgacgcgguccgcgacccccagacccuggagauccucgacaucacccccugcagcuucggcgggguguccgugaucacgccgggcaccaacaccagcaaccaggucgccgugcuguaccaggacgugaacugcaccgagguccccguggccauccacgccgaccagcugacgcccaccuggcggguguacuccaccggcagcaacgucuuccagacccgcgccgggugccucaucggcgcggagcacgugaacaacuccuacgagugcgacauccccaucggggccggcaucugcgccagcuaccagacgcagaccaacuccccgcggcgcgcccggagcguggcgucccagagcaucaucgccuacaccaugucccugggcgccgagaacagcgucgccuacuccaacaacagcaucgccauccccaccaacuucacgaucuccgugaccaccgagauccugcccgugagcaugaccaagacgagcgucgacugcaccauguacaucugcggggacuccaccgagugcagcaaccuccugcugcaguacggcuccuucugcacccagcucaaccgcgcgcugacggggaucgccguggagcaggacaagaacacccaggagguguucgcccaggucaagcagaucuacaagacgcccccgaucaaggacuucggcggguucaacuucagccagauccugcccgaccccuccaagcccagcaagcgguccuucaucgaggaccuccuguucaacaaggugacccuggccgacgccggcuucaucaagcaguacggcgacugccucggggacaucgcggcccgcgaccugaucugcgcccagaaguucaacggccugaccgugcucccgccccugcugaccgacgagaugaucgcccaguacugcagcgcccuccuggcggggaccaucacguccggcuggaccuucggggccggcgccgcccugcagauccccuucgcgaugcagauggccuaccgguucaacggcaucggggucacccagaacgugcucuacgagaaccagaagcugaucgccaaccaguucaacagcgccaucggcaagauccaggacucccugagcuccaccgccagcgcgcucgggaagcugcaggacguggucaaccagaacgcccaggcccugaacacgcucgugaagcagcuguccagcaacuucggcgccaucuccagcgugcugaacgacauccucucccgccuggacaaggucgaggccgaggugcagaucgaccggcugaucaccgggcgccuccagagccugcagaccuacgugacccagcagcugauccgggcggccgagauccgcgccagcgccaaccucgccgcgaccaagauguccgagugcguccugggccagagcaagcggguggacuucugcggcaagggguaccaccugauguccuucccccagugcgccccgcacggcguggucuuccuccacgugacguacguccccgcccaggagaagaacuucaccaccgcccccgcgaucugccacgacgggaaggcccacuucccccgcgagggcguguucguguccaacgggacccacugguucgucacgcagcggaacuucuacgagccgcagaucaucaccaccgacaacaccuucgugagcggcaacugcgacguggucaucggcaucgugaacaacacgguguacgacccccugcagcccgagcuggacuccggcgggggcgggagcgacaucgaccccuacaaggaguucggcagcuccuaccagcugcucaacuuccugccccuggacuucuuccccgaccucaacgcccugguggacaccgccaccgcgcuguacgaggaggagcucacggggcgcgagcacugcagcccccaccacaccgccauccggcaggcccuggucugcugggacgagcugaccaagcucaucgccuggauguccagcaacaucaccuccgagcagguccgcacgaucaucgugaaccacgucaacgacaccuggggccugaaggugcggcagagccugugguuccaccucuccugccugaccuucgggcagcacaccgugcaggaguuccuggucagcuucggcguguggauccgcacgcccgccccguaccggccgcccaacgcgccgauccucuccacccugccggagcacaccgugaucugcugaggacuagucccuguucccagagcccacuuuuuuuucuuuuuuugaaauaaaauagccugucuuucagaucucaaaggcucuuuucagagccaccaaaaaaaaaaaaaaaaaaaaaaaaaaaaaaaaaaaaaaaaaaaaaaaaaaaaaaaaaaaaaaaaaaaaaaaaaaaaaaaaaaaaaaaaaaaaaaaaaaaaa

SEQ ID NO: 12473 - RNA, 4094 nt, Artificial Sequence
  SARS-CoV-2/Wuhan/WIV05/2019__EPI_ISL_402128 spike protein mRNA human (1-1273)
aggagagucccgcagucggcguccagcggcucugcuuguucgugugugugucguugcaggccuuauucaagcuuaccauguucguguuucugguccuccuuccccugguuagcucccagugcgugaacuugaccacaagaacucaauuaccuccagccuacacuaauucuuucaccaggggcguauauuacccggacaagguguuucggucaaguguccugcacagcacacaggaucuauuccuccccuuuuucuccaacgugacuugguuucaugcuauccacguuucugggaccaauggaacaaaacgcuucgacaacccugugcugccauuuaaugauggugucuauuucgcaucgaccgagaagucaaacauuauacgaggcuggaucuuugggacuacacuugacagcaaaacccagagucuguugauugugaauaacgccacgaauguaguuaucaaggugugugaguuccaguuuugcaacgaucccuuccucggagucuacuaucauaaaaauaacaaguccuggauggagucugaguuccguguguacagcuccgcgaauaacuguacuuuugaauaugugucacaaccuuuccugauggaccuggaaggcaagcaggguaauuuuaaaaaccucagagaguucgucuuuaagaacauugauggguacuucaaaaucuacaguaagcacaccccaauaaauuuaguuagggaccugccccagggauuuagcgcucuugagccuuugguggaucugccaaucggcauuaacaucacacgguuccagacucuacucgcccugcaucgcucuuaucuuaccccgggcgacuccucaagcggguggacagcaggagccgcugcauacuauguagguuaccugcaacccagaaccuuuuugcucaaauauaaugaaaacggcacgauuacugaugccguggacugcgcucuggauccuuuaagugagacaaaguguacccugaagucuuucacugucgaaaaagggaucuaccagacauccaauuuuagggugcagccaaccgagagcauaguucgguuccccaacauuacgaaucucugcccuuuuggagagguguucaacgccacccgcuucgcgucggucuaugcauggaaucgaaagagaaucucuaacuguguggccgacuacuccguacuuuacaauucagcuaguuuuagcacauucaaaugcuauggcguuuccccaacuaagcugaacgacuuguguuuuaccaauguguacgccgauucuuucgucauuaggggugacgaagugcggcagaucgcacccgggcaaacaggaaaaaucgcugauuauaacuacaagcuaccggacgauuuuacuggcugcgucauugccuggaauagcaacaaccuggacucaaaagugggcgggaauuauaacuaccucuaucgucuguuccgcaagaguaaucuuaagccuuuugagagagauauauccaccgaaaucuaccaggcgggaagcacacccuguaacgguguugagggcuucaauugcuacuuuccacugcagucuuauggguuccaaccuaccaacggagugggcuaccagcccuauaggguagucguguugucauuugaacuccugcacgccccagcaacuguuugcggucccaaaaagaguacgaauuuagugaaaaacaagugugucaauuucaacuuuaaugggcugacaggcaccggagugcuaacugagagcaacaaaaaguuccucccuuuccagcaguuuggccgggacauugcugauaccacagacgccguacgagauccacaaacccuggagauccuugacauaacuccgugcuccuucgggggagugucuguuauuacacccgguacgaauaccucgaaccaggucgcuguguuguaccaggacgugaauuguacugaagucccuguugccauccacgcagaucagcugacaccaaccuggcgcguguauagcacaggcuccaacguguuucaaacuagagccgggugccucaucggagcugagcauguaaacaauucauacgaaugugacauucccaucggcgcggguauuugcgcaaguuaucagacccagacgaacucuccuaggcgggcccgcagcgucgcuucccagucaauaaucgccuacaccaugagccugggggcagaaaauucuguggccuacuccaacaauaguauugcuaucccaacaaacuucacuaucagcguuaccacagaaauucuucccgugucuaugacuaagaccuccgucgauuguacgauguauauaugcggcgacucaacagaguguaguaaucuguugcuccaauacggcagcuuuugcacccagcugaacagagccuuaacuggaaucgcaguggagcaggauaaaaauacacaggaaguuuucgcgcaagugaagcagauuuauaaaaccccgccuaucaaggacuuugggggauucaacuuuucgcagauucugccagaucccuccaaaccuucuaagaggagcuucaucgaggaccuacucuuuaauaagguaacucuggcugaugccgguuucauaaaacaauacggcgacugucuuggggauaucgcagcccgugacuugauuugcgcucagaaguucaacggacugaccguccugcccccacucuuaacagaugaaaugaucgcccaguauacgucagcacugcuugcuggcaccauuacgagugguuggacauuuggggccggcgcggccuugcagaucccuuucgcuaugcaaauggcauaccgguuuaauggaauaggcgugacccagaacgugcucuaugagaaucagaaacugauugccaaccaguucaacuccgcuaucgggaagauucaagacucucuaagcuccacagccucagcacugggaaaacuccaggacgucguuaaucagaacgcgcaggcccugaauacucuugugaagcaauugagcaguaacuuuggcgcuaucucuuccguacugaaugauauauuaagccgacucgacaagguggaagccgagguccagaucgauagacugauuaccgguaggcuucagucgcugcaaacguacgugacacagcaguugauccgcgcagcugagauucgggccucagcaaaccucgccgcuaccaaaaugucugaaugcguucuggggcagaguaagagaguggacuucuguggaaaaggcuaccaccuaauguccuuuccccaaagcgcgccacauggugucguguuccugcacguuacuuaugugccggcccaggagaagaauuuuaccacagcuccugcaaucugccacgauggcaaagcccauuuccccagggaaggggucuuuguaucuaacggaacucacugguucgugacccagcgcaauuuuuacgagccacagauaauuacaacggacaacaccuucguuagcggcaauugugauguggucaucgggaucgugaacaauacuguauaugacccccuccaaccugagcuggauuccuucaaggaggaacuugacaaauacuuuaagaaccauacaucaccagauguggacuugggagauauuaguggcaucaaugccagcgucguuaacauucagaaggaaauagaccgacugaaugagguggcuaaaaacuuaaacgaaucucucaucgaccugcaggagcuugguaaguaugagcaguacauuaaauggcccugguauaucuggcugggguucauugcaggacuaaucgccauagugauggucaccaucaugcucugcuguaugacuuccugcuguucaugccugaagggcuguugcaguugugguagcugcugcaaauuugaugaagacgauuccgagccuguguugaagggcguuaagcugcacuacacaugaggacuagucccuguucccagagcccacuuuuuuuucuuuuuuugaaauaaaauagccugucuuucagaucucaaaggcucuuuucagagccaccaaaaaaaaaaaaaaaaaaaaaaaaaaaaaaaaaaaaaaaaaaaaaaaaaaaaaaaaaaaaaaaaaaaaaaaaaaaaaaaaaaaaaaaaaaaaaaaaaaaaa

SEQ ID NO: 12474 - RNA, 4082 nt, Artificial Sequence
  SARS-CoV-2/bat/Yunnan/RaTG13/2013__EPI_ISL_402131 spike protein mRNA human (1-1269)
aggagagucccgcagucggcguccagcggcucugcuuguucgugugugugucguugcaggccuuauucaagcuuaccauguucguguuucugguccuccuuccccugguuagcucccagugcgugaacuugaccacaagaacucaauuaccuccagccuacaccaauucuucaacgaggggcguauauuacccggacaagguguuccggaguagcguccugcaccuaacacaggaucucuuucugcccuucuuuuccaacgugacuugguuccaugcuauccacguuucugggaccaauggaauuaaacgcuuugacaacccugugcuuccauucaaugauggugucuauuuugcaucgacagagaagucaaacauaauccgaggcuggauuuucgggaccacucuggacagcaaaacacagaguuugcucaucgugaauaacgccaccaauguaguuauuaaggugugugaauuucaguucugcaacgaucccuuucugggagucuacuaucauaaaaauaacaaguccuggauggagucugaguuccguguguacagcuccgcgaauaacuguacguucgaauaugugucacaaccuuuucugauggaccucgaaggcaagcaggguaauuucaaaaacuuaagagaguuugucuucaagaacaucgauggguacuuuaaaauauacaguaagcacacuccaaucaaucugguuagggaccuucccccuggauucagcgcuuuggagccacugguggaucuaccgauuggcaucaacauuacccgguuucagacacuccuggcccuucaucgcucuuaucugacucccggcgacuccucaagcggguggaccgcaggagccgcugcauacuauguagguuacuugcagccuagaacauuccuccugaaauauaaugaaaacggcaccaucacggaugccguggacugcgcuuuagauccacugagugagacuaaguguacacucaagucuuuuaccgucgaaaaagggauauaccaaacuuccaauuucagggugcagcccacagacagcauuguucgguuuccuaacaucaccaaucuuugcccauucggagagguguuuaacgccacgaccuucgcgucggucuaugcauggaaucgcaagcgaauuucuaacuguguggccgacuacuccguacuguacaauucaacaaguuucagcacuuuuaaaugcuauggcguuucccccaccaaguugaacgaucuauguuucacaaauguguacgcugacucuuuugucaucacuggugaugaggugagacagaucgccccggggcagaccggaaaaauugcagacuauaacuacaagcugccugaugacuucacaggcugcgucauagcuuggaauagcaaacacaucgaugccaaggaaggcgggaacuuuaacuaucucuacaggcuguuccggaaggcgaaucuuaaacccuuugagcgugacauuucaaccgaaaucuaucaagccggaaguaagccauguaacggucagacuggccugaauugcuacuacccuuuguaucgcuacggguucuaucccacggauggagugggccaccagccauacagaguugugguacucuccuuugagcuguuaaacgcacccgcuacagucugcgguccuaaaaagagcaccaaucuggugaaaaacaaguguguuaauuucaacuuuaaugggcuaacuggcaccggagugcucacagaaucuaacaagaaauuccugccauuucaacaguucggcagggacauagccgauaccacugacgcuguccgggacccgcagacacuugagauuuuggauaucacgcccugcucauucgggggagugaguguaaucaccccugguacuaaugccagcaaccagguggcaguucuguaucaagacgucaauuguacagaggugccaguggccauucaugcugaucagcucacccccacauggcgagucuacuccacuggcucuaacguuuuucagacccgcgcggggugccugaucggagcagaacacgugaauaacucguaugagugugacauuccuauaggcgccgguaucugcgcuagcuaccagacgcaaaccaacuccagaucaguggccagucagucuauuaucgcauacacaaugagccuuggggccgaaaauuccguagcuuauucaaacaauagcaucgccauuccaacuaacuucaccauaucugucacaacugagauccugcccguguccaugaccaagacgaguguugauuguacaauguacauuugcggcgacagcaccgaauguucuaauuugcuccugcaguauggauccuuuugcacucaguuaaacagggcacugacaggcaucgcgguggagcaagauaaaaauacccaggaggucuucgcucaggugaagcagauuuacaaaacuccgccuaucaaggacuuugggggauucaacuuuucacaaauacuaccagaucccaguaagccuagcaaacggucguucaucgaagaccuccuguuuaauaagguuacccuugccgaugcagguuucauuaaacaguauggcgacuguuugggggauaucgccgcucgcgaccugauuugcgcccagaaguuuaacggacucacagugcugcccccauuacugacggacgagaugaucgcacaauacaccuccgcucuuuuggccggcacuauaacaucugguuggaccuucggggcgggcgccgcucuccagauuccuuucgcaaugcagauggccuauagauuuaauggaaucggcguaacacagaacguccuguacgaaaaucaaaaacuaauugcuaaccaguucaauagcgccaucgggaagauacaggauucacugaguuccacugcaucugcgcucggaaagcugcaggacguggugaaccaaaacgcccaggcucuuaauaccuuggucaaacagcugagcuccaacuuuggcgccaucucaagcguuuuaaaugauauucucaguaggcuggacaagguggaggcagaaguacagaucgaucgucuuauuacgggucggcugcaaucuuugcagacauacgugacccagcaacucauccgagcugccgagauaagagcauccgccaaccuggcugcgacuaaaaugagcgagugcguccuagggcagucgaagaggguggacuucuguggaaaaggcuaucaucugaugucauuuccccagucugccccacacgguguuguguuccuccacgucaccuacgugccggcacaggaaaagaauuuuacaacugcuccugccauuugccaugauggcaaagcccacuucccccgcgaggggguuuuugugaguaacggaacccauugguucgucacacaacggaauuuuuaugaaccacagaucaucacgaccgacaacacuuucguauccggcagcugugaugugguuauugggaucgugaauaacacagucuacgacccccugcagccugagcuugauucuuuuaaggaggaauuggacaaguauuucaaaaaucacaccagcccagauguggaccugggagacauuuccggcauaaacgcuucaguagugaauauccagaaggagauugauagauuaaacgaagucgccaaaaaucucaacgagagucugaucgaccuucaagaacuggguaaguacgagcaguauauuaaauggcccugguacaucuggcuaggguucauagcaggacucaucgcgauuaucaugguuacuauuaugcugugcuguaugacaagcugcuguucuugcuugaagggcuguugcuccugugguucaugcugcaaguuugaugaggacgauagugaaccugugcugaaaggcgugaaguuacauuacaccugaggacuagucccuguucccagagcccacuuuuuuuucuuuuuuugaaauaaaauagccugucuuucagaucucaaaggcucuuuucagagccaccaaaaaaaaaaaaaaaaaaaaaaaaaaaaaaaaaaaaaaaaaaaaaaaaaaaaaaaaaaaaaaaaaaaaaaaaaaaaaaaaaaaaaaaaaaaaaaaaaaaaa

SEQ ID NO: 12475 - RNA, 4094 nt, Artificial Sequence
  SARS-CoV-2/Wuhan/HBCDC-HB-01/2019__EPI_ISL_402132 spike protein mRNA human (1-1273)
aggagagucccgcagucggcguccagcggcucugcuuguucgugugugugucguugcaggccuuauucaagcuuaccauguucguguuucugguccuccuuccccugguuagcucccagugcgugaacuugaccacaagaacucaauuaccuccagccuacacuaauucuaucaccaggggcguauauuacccggacaagguguuccggucaaguguccugcacagcacacaggaucuauuucuccccuucuuuuccaacgugacuugguuccaugcuauucacguuucugggaccaauggaacaaaacgcuuugacaacccugugcugccauucaaugauggugucuauuuugcaucgaccgagaagucaaacauaauccgaggcuggauuuucgggacuacacuugacagcaaaacccagagucuguugaucgugaauaacgccacgaauguaguuauuaaggugugugaauuucaguucugcaacgaucccuuucucggagucuacuaucauaaaaauaacaaguccuggauggagucugaguuccguguguacagcuccgcgaauaacuguacuuucgaguaugugucacaaccuuuucugauggaccuggaaggcaagcaggguaauuucaaaaaccucagagaguuugucuucaagaacaucgauggguacuuuaaaauauacaguaagcacaccccaaucaauuuaguuagggaccugccccagggauucagcgcucuugagccuuugguggaucugccaauuggcaucaacauuacacgguuucagacucuacucgcccugcaucgcucuuaucuuaccccgggcgacuccucaagcggguggacagcaggagccgcugcauacuauguagguuaccugcaacccagaaccuucuugcucaaauauaaugaaaacggcacgaucacugaugccguggacugcgcucuggauccuuuaagugagacaaaguguacccugaagucuuuuacugucgaaaaagggauauaccagacauccaauuucagggugcagccaaccgagagcauuguucgguuucccaacaucacgaaucucugcccuuucggagagguguuuaacgccacccgcuucgcgucggucuaugcauggaaucgaaagagaauuucuaacuguguggccgacuacuccguacuuuacaauucagcuaguuucagcacauuuaaaugcuauggcguuuccccaacuaagcugaacgacuuguguuucaccaauguguacgccgauucuuuugucaucaggggugacgaagugcggcagaucgcacccgggcaaacaggaaaaauugcugauuauaacuacaagcuaccggacgauuucacuggcugcgucauagccuggaauagcaacaaccuggacucaaaagugggcgggaauuauaacuaccucuaucgucuguuucgcaagaguaaucuuaagccuuucgagagagauaucuccaccgaaauuuaccaggcgggaagcacacccuguaacgguguugagggcuuuaauugcuacuucccacugcagucuuauggguuucaaccuaccaacggagugggcuaccagcccuauaggguagucguguugucauucgaacuccugcacgccccagcaacuguuugcggucccaaaaagaguacgaauuuagugaaaaacaagugugucaauuuuaacuucaaugggcugacaggcaccggagugcuaacugagagcaacaaaaaguuucucccuuuccagcaguucggccgggacaucgcugauaccacagacgccguacgagauccacaaacccuggagauacuugacauuacuccgugcuccuuugggggagugucuguuaucacacccgguacgaauaccucgaaccaggucgcuguguuguaccaggacgugaauuguacugaagucccuguugccauccacgcagaucagcugacaccaaccuggcgcguguauagcacaggcuccaacguguuccaaacuagagccgggugccucauuggagcugagcauguaaacaauucauacgaaugugacauccccauuggcgcggguauaugcgcaaguuaucagacccagacgaacucuccuaggcgggcccgcagcgucgcuucccagucaaucauugccuacaccaugagccugggggcagaaaauucuguggccuacuccaacaauaguaucgcuaucccaacaaacuuuacuauuagcguuaccacagaaauacuucccgugucuaugacuaagaccuccgucgauuguacgauguauaucugcggcgacucaacagaguguaguaaucuguugcuccaauacggcagcuucugcacccagcugaacagagccuuaacuggaauugcaguggagcaggauaaaaauacacaggaaguuuuugcgcaagugaagcagaucuauaaaaccccgccuauuaaggacuucgggggauuuaacuucucgcagauccugccagaucccuccaaaccuucuaagaggagcuuuauagaggaccuacucuucaauaagguaacucuggcugaugccgguuuuaucaaacaauacggcgacugucuuggggauauugcagcccgugacuugaucugcgcucagaaguucaacggacugaccguccugcccccacucuuaacagaugaaaugauugcccaguauacgucagcacugcuugcuggcaccaucacgagugguuggacauucggggccggcgcggccuugcagauaccuuuugcuaugcaaauggcauaccgguucaauggaauuggcgugacccagaacgugcucuaugagaaucagaaacugaucgccaaccaguuuaacuccgcuauugggaagauccaagacucucuaagcuccacagccucagcacugggaaaacuccaggacgucguuaaucagaacgcgcaggcccugaauacucuugugaagcaauugagcaguaacuucggcgcuauaucuuccguacugaaugauaucuuaagccgacucgacaagguggaagccgagguccagauugauagacugaucaccgguaggcuucagucgcugcaaacguacgugacacagcaguugauucgcgcagcugagauccgggccucagcaaaccucgccgcuaccaaaaugucugaaugcguucuggggcagaguaagagaguggacuuuuguggaaaaggcuaccaccuaauguccuucccccaaagcgcgccacauggugucguguuucugcacguuacuuaugugccggcccaggagaagaauuucaccacagcuccugcaauaugccacgauggcaaagcccauuuucccagggaaggggucuucguaucuaacggaacucacugguuugugacccagcgcaauuucuacgagccacagauuaucacaacggacaacaccuuuguuagcggcaauugugauguggucaucgggauugugaacaauacuguauaugacccccuccaaccugagcuggauuccuucaaggaggaacuugacaaauacuucaagaaccauacaucaccagauguggacuugggagauaucaguggcauuaaugccagcgucguuaacauacagaaggaaaucgaccgacugaaugagguggcuaaaaacuuaaacgaaucucucauugaccugcaggagcuugguaaguaugagcaguacaucaaauggcccugguauauuuggcugggguuuaucgcaggacuaauagccaucgugauggucaccauuaugcucugcuguaugacuuccugcuguucaugccugaagggcuguugcaguugugguagcugcugcaaauucgaugaagacgauuccgagccuguguugaagggcguuaagcugcacuacacaugaggacuagucccuguucccagagcccacuuuuuuuucuuuuuuugaaauaaaauagccugucuuucagaucucaaaggcucuuuucagagccaccaaaaaaaaaaaaaaaaaaaaaaaaaaaaaaaaaaaaaaaaaaaaaaaaaaaaaaaaaaaaaaaaaaaaaaaaaaaaaaaaaaaaaaaaaaaaaaaaaaaaa

SEQ ID NO: 12476 - RNA, 4094 nt, Artificial Sequence
  SARS-CoV-2/Guangdong/20SF028/2020__EPI_ISL_403936 spike protein mRNA human (1-1273)
aggagagucccgcagucggcguccagcggcucugcuuguucgugugugugucguugcaggccuuauucaagcuuaccauguucguguuucugguccuccuuccccugguuagcucccagugcgugaacuugaccacaagaacucaauuaccuccagccuacacuaauucuuucaccaggggcguauauuacccggacaagguguuucggucaaguguccuguauagcacacaggaucuauuccuccccuuuuucuccaacgugacuugguuucacgcuauccauguuucugggaccaauggaacaaaacgcuucgacaacccugugcugccauuuaaugauggugucuacuucgcaucgaccgagaagucaaacauuauacgaggcuggaucuuugggacuacacuugacagcaaaacccagagucuguugauugugaauaacgccacgaauguaguuaucaaggugugugaguuccaguuuugcaacgaucccuuccucggagucuauuaccacaaaaauaacaaguccuggauggagucugaguuccguguguauagcuccgcgaauaacuguacuuuugaauacgugucacaaccuuuccugauggaccuggaaggcaagcaggguaauuuuaaaaaccucagagaguucgucuuuaagaacauugauggguacuucaaaaucuauaguaagcauaccccaauaaauuuaguuagggaccugccccagggauuuagcgcucuugagccuuugguggaucugccaaucggcauuaacaucacacgguuccagacucuacucgcccugcaccgcucuuaccuuaccccgggcgacuccucaagcggguggacagcaggagccgcugcauauuacguagguuaucugcaacccagaaccuuuuugcucaaauacaaugaaaacggcacgauuacugaugccguggacugcgcucuggauccuuuaagugagacaaaguguacccugaagucuuucacugucgaaaaagggaucuaucagacauccaauuuuagggugcagccaaccgagagcauaguucgguuccccaacauuacgaaucucugcccuuuuggagagguguucaacgccacccgcuucgcgucggucuacgcauggaaucgaaagagaaucucuaacuguguggccgacuacuccguacuuuauaauucagcuaguuuuagcacauucaaaugcuacggcguuuccccaacuaagcugaacgacuuguguuuuaccaauguguaugccgauucuuucgucauuaggggugacgaagugcggcagaucgcacccgggcaaacaggaaaaaucgcugauuacaacuauaagcuaccggacgauuuuacuggcugcgucauugccuggaauagcaacaaccuggacucaaaagugggcgggaauuacaacuaucucuaccgucuguuccgcaagaguaaucuuaagccuuuugagagagauauauccaccgaaaucuaccaggcgggaagcacacccuguaacgguguugagggcuucaauugcuauuuuccacugcagucuuacggguuccaaccuaccaacggagugggcuaucagcccuacaggguagucguguugucauuugaacuccugcaugccccagcaacuguuugcggucccaaaaagaguacgaauuuagugaaaaacaagugugucaauuucaacuuuaaugggcugacaggcaccggagugcuaacugagagcaacaaaaaguuccucccuuuccagcaguuuggccgggacauugcugauaccacagacgccguacgagauccacaaacccuggagauccuugacauaacuccgugcuccuucgggggagugucuguuauuacacccgguacgaauaccucgaaccaggucgcuguguuguaucaggacgugaauuguacugaagucccuguugccauccacgcagaucagcugacaccaaccuggcgcguguacagcacaggcuccaacguguuucaaacuagagccgggugccucaucggagcugagcacguaaacaauucauaugaaugugacauucccaucggcgcggguauuugcgcaaguuaccagacccagacgaacucuccuaggcgggcccgcagcgucgcuucccagucaauaaucgccuacaccaugagccugggggcagaaaauucuguggccuauuccaacaauaguauugcuaucccaacaaacuucacuaucagcguuaccacagaaauucuucccgugucuaugacuaagaccuccgucgauuguacgauguacauaugcggcgacucaacagaguguaguaaucuguugcuccaauauggcagcuuuugcacccagcugaacagagccuuaacuggaaucgcaguggagcaggauaaaaauacacaggaaguuuucgcgcaagugaagcagauuuacaaaaccccgccuaucaaggacuuugggggauucaacuuuucgcagauucugccagaucccuccaaaccuucuaagaggagcuucaucgaggaccuacucuuuaauaagguaacucuggcugaugccgguuucauaaaacaauauggcgacugucuuggggauaucgcagcccgugacuugauuugcgcucagaaguucaacggacugaccguccugcccccacucuuaacagaugaaaugaucgcccaguacacgucagcacugcuugcuggcaccauuacgagugguuggacauuuggggccggcgcggccuugcagaucccuuucgcuaugcaaauggcauaucgguuuaauggaauaggcgugacccagaacgugcucuacgagaaucagaaacugauugccaaccaguucaacuccgcuaucgggaagauucaagacucucuaagcuccacagccucagcacugggaaaacuccaggacgucguuaaucagaacgcgcaggcccugaauacucuugugaagcaauugagcaguaacuuuggcgcuaucucuuccguacugaaugauauauuaagccgacucgacaagguggaagccgagguccagaucgauagacugauuaccgguaggcuucagucgcugcaaacguacgugacacagcaguugauccgcgcagcugagauucgggccucagcaaaccucgccgcuaccaaaaugucugaaugcguucuggggcagaguaagagaguggacuucuguggaaaaggcuaucaucuaauguccuuuccccaaagcgcgccacacggugucguguuccugcauguuacuuacgugccggcccaggagaagaauuuuaccacagcuccugcaaucugccacgauggcaaagcccacuuccccagggaaggggucuuuguaucuaacggaacucauugguucgugacccagcgcaauuuuuaugagccacagauaauuacaacggacaacaccuucguuagcggcaauugugauguggucaucgggaucgugaacaauacuguauacgacccccuccaaccugagcuggauuccuucaaggaggaacuugacaaauauuuuaagaaccacacaucaccagauguggacuugggagauauuaguggcaucaaugccagcgucguuaacauucagaaggaaauagaccgacugaaugagguggcuaaaaacuuaaacgaaucucucaucgaccugcaggagcuugguaaguacgagcaguauauuaaauggcccugguacaucuggcugggguucauugcaggacuaaucgccauagugauggucaccaucaugcucugcuguaugacuuccugcuguucaugccugaagggcuguugcaguugugguagcugcugcaaauuugaugaagacgauuccgagccuguguugaagggcguuaagcugcauuacacaugaggacuagucccuguucccagagcccacuuuuuuuucuuuuuuugaaauaaaauagccugucuuucagaucucaaaggcucuuuucagagccaccaaaaaaaaaaaaaaaaaaaaaaaaaaaaaaaaaaaaaaaaaaaaaaaaaaaaaaaaaaaaaaaaaaaaaaaaaaaaaaaaaaaaaaaaaaaaaaaaaaaaa

SEQ ID NO: 12477 - RNA, 4094 nt, Artificial Sequence
  SARS-CoV-2/Shenzhen/SZTH-001/2020__EPI_ISL_406592 spike protein mRNA human (1-1273)
aggagagucccgcagucggcguccagcggcucugcuuguucgugugugugucguugcaggccuuauucaagcuuaccauguucguguuucugguccuccuuccccugguuagcucccagugcgugaacuugaccacaagaacucaauuaccuccagccuacacuaauucuuucaccaggggcguauauuacccggacaagguguuucggucaaguguccugcacagcacacaggaucuauuccuccccuuuuucuccaacgugacuugguuucaugcuauccacguuucugggaccaauggaacaaaacgcuucgacaacccugugcugccauuuaaugauggugucuauuucgcaucgaccgagaagucaaacauuauacgaggcuggaucuuugggacuacacuugacagcaaaacccagagucuguugauugugaauaacgccacgaauguaguuaucaaggugugugaguuccaguuuugcaacgaucccuuccucggagucuacuaucauaaaaauaacaaguccuggauggagucugaguuccguguguacagcuccgcgaauaacuguacuuuugaauaugugucacaaccuuuccugauggaccuggaaggcaagcaggguaauuuuaaaaaccucagagaguucgucuuuaagaacauugauggguacuucaaaaucuacaguaagcacaccccaauaaauuuaguuagggaccugccccagggauuuagcgcucuugagccuuugguggaucugccaaucggcauuaacaucacacgguuccagacucuacucgcccugcaucgcucuuaucuuaccccgggcgacuccucaagcggguggacagcaggagccgcugcauacuauguagguuaccugcaacccagaaccuuuuugcucaaauauaaugaaaacggcacgauuacugaugccguggacugcgcucuggauccuuuaagugagacaaaguguacccugaagucuuucacugucgaaaaagggaucuaccagacauccaauuuuagggugcagccaaccgagagcauaguucgguuccccaacauuacgaaucucugcccuuuuggagagguguucaacgccacccgcuucgcgucggucuaugcauggaaucgaaagagaaucucuaacuguguggccgacuacuccguacuuuacaauucagcuaguuuuagcacauucaaaugcuauggcguuuccccaacuaagcugaacgacuuguguuuuaccaauguguacgccgauucuuucgucauuaggggugacgaagugcggcagaucgcacccgggcaaacaggaaaaaucgcugauuauaacuacaagcuaccggacgauuuuacuggcugcgucauugccuggaauagcaacaaccuggacucaaaagugggcgggaauuauaacuaccucuaucgucuguuccgcaagaguaaucuuaagccuuuugagagagauauauccaccgaaaucuaccaggcgggaagcacacccuguaacgguguugagggcuucaauugcuacuuuccacugcagucuuauggguuccaaccuaccaacggagugggcuaccagcccuauaggguagucguguugucauuugaacuccugcacgccccagcaacuguuugcggucccaaaaagaguacgaauuuagugaaaaacaagugugucaauuucaacuuuaaugggcugacaggcaccggagugcuaacugagagcaacaaaaaguuccucccuuuccagcaguuuggccgggacauugcugauaccacagacgccguacgagauccacaaacccuggagauccuugacauaacuccgugcuccuucgggggagugucuguuauuacacccgguacgaauaccucgaaccaggucgcuguguuguaccaggacgugaauuguacugaagucccuguugccauccacgcagaucagcugacaccaaccuggcgcguguauagcacaggcuccaacguguuucaaacuagagccgggugccucaucggagcugagcauguaaacaauucauacgaaugugacauucccaucggcgcggguauuugcgcaaguuaucagacccagacgaacucuccuaggcgggcccgcagcgucgcuucccagucaauaaucgccuacaccaugagccugggggcagaaaauucuguggccuacuccaacaauaguauugcuaucccaacaaacuucacuaucagcguuaccacagaaauucuucccgugucuaugacuaagaccuccgucgauuguacgauguauauaugcggcgacucaacagaguguaguaaucuguugcuccaauacggcagcuuuugcacccagcugaacagagccuuaacuggaaucgcaguggagcaggauaaaaauacacaggaaguuuucgcgcaagugaagcagauuuauaaaaccccgccuaucaaggacuuugggggauucaacuuuucgcagauucugccagaucccuccaaaccuucuaagaggagcuucaucgaggaccuacucuuuaauaagguaacucuggcugaugccgguuucauaaaacaauacggcgacugucuuggggauaucgcagcccgugacuugauuugcgcucagaaguucaacggacugaccguccugcccccacucuuaacagaugaaaugaucgcccaguauacgucagcacugcuugcuggcaccauuacgagugguuggacauuuggggccggcgcggccuugcagaucccuuucgcuaugcaaauggcauaccgguuuaauggaauaggcgugacccagaacgugcucuaugagaaucagaaacugauugccaaccaguucaacuccgcuaucgggaagauucaagacucucuaagcuccacagccucagcacugggaaaacuccaggacgucguuaaucagaacgcgcaggcccugaauacucuugugaagcaauugagcaguaacuuuggcgcuaucucuuccguacugaaugauauauuaagccgacucgacaagguggaagccgagguccagaucgauagacugauuaccgguaggcuucagucgcugcaaacguacgugacacagcaguugauccgcgcagcugagauucgggccucagcaaaccucgccgcuaccaaaaugucugaaugcguucuggggcagaguaagagaguggacuucuguggaaaaggcuaccaccuaauguccuuuccccaaagcgcgccacauggugucguguuccugcacguuacuuaugugccggcccaggagaagaauuuuaccacagcuccugcaaucugccacgauggcaaagcccauuuccccagggaaggggucuuuguaucuaacggaacucacugguucgugacccagcgcaauuuuuacgagccacagauaauuacaacggacaacaccuucguuagcggcaauugugaugugcucaucgggaucgucaacaauacuguguaugacccccugcaaccugagcuugauuccuucaaggaagaguuggacaaauacuuuaagaaccauacaucaccagauguagaccugggagauauuaguggcaucaaugccagcguggucaacauucagaaggaaauagaccgauuaaaugagguugcuaaaaaccucaacgaaucucugaucgaccuucaggagcuggguaaguaugagcaguacauuaaauggcccugguauaucuggcuaggguucauugcaggacucaucgccauagugauggugaccaucaugcugugcuguaugacuuccugcuguucaugcuugaagggcuguugcaguugugguagcugcugcaaauuugaugaagacgauuccggcccuguccugaagggggugaaguuacacuacacaugaggacuagucccuguucccagagcccacuuuuuuuucuuuuuuugaaauaaaauagccugucuuucagaucucaaaggcucuuuucagagccaccaaaaaaaaaaaaaaaaaaaaaaaaaaaaaaaaaaaaaaaaaaaaaaaaaaaaaaaaaaaaaaaaaaaaaaaaaaaaaaaaaaaaaaaaaaaaaaaaaaaaa

SEQ ID NO: 12478 - RNA, 4094 nt, Artificial Sequence
  SARS-CoV-2/Shenzhen/SZTH-004/2020__EPI_ISL_406595 spike protein mRNA human (1-1273)
aggagagucccgcagucggcguccagcggcucugcuuguucgugugugugucguugcaggccuuauucaagcuuaccauguucguguuucugguccuccuuccccugguuagcucccagugcgugaacuugaccacaagaacucaauuaccuccagccuacacgaauagcuucaccaggggcguauauuacccggacaagguguuucggucaaguguccugcacagcacacaggaucuauuccuccccuuuuucuccaacgugacuugguuucaugcuauccacguuucugggaccaauggaacaaaacgcuucgacaacccugugcugccauuuaaugauggugucuauuucgcaucgaccgagaagucaaacauuauacgaggcuggaucuuugggacuacacuugacagcaaaacccagagucuguugauugugaauaacgccacgaauguaguuaucaaggugugugaguuccaguuuugcaacgaucccuuccucggagucuacuaucauaaaaauaacaaguccuggauggagucugaguuccguguguacagcuccgcgaauaacuguacuuuugaauaugugucacaaccuuuccugauggaccuggaaggcaagcaggguaauuuuaaaaaccucagagaguucgucuuuaagaacauugauggguacuucaaaaucuacaguaagcacaccccaauaaauuuaguuagggaccugccccagggauuuagcgcucuugagccuuugguggaucugccaaucggcauuaacaucacacgguuccagacucuacucgcccugcaucgcucuuaucuuaccccgggcgacuccucaagcggguggacagcaggagccgcugcauacuauguagguuaccugcaacccagaaccuuuuugcucaaauauaaugaaaacggcacgauuacugaugccguggacugcgcucuggauccuuuaagugagacaaaguguacccugaagucuuucacugucgaaaaagggaucuaccagacauccaauuuuagggugcagccaaccgagagcauaguucgguuccccaacauuacgaaucucugcccuuuuggagagguguucaacgccacccgcuucgcgucggucuaugcaugggaccgaaagagaaucucuaauuguguggccuacuacuccguacuuuauaacucagcuaguuuuagcacauucaaaugcuacggcguuuccccaacuaagcugaaugacuuguguuuuaccaacguguaugccgauucuuucgucauuaggggugacgaagugcggcagaucgcacccgggcaaacaggaaaaaucgcugauuacaauuauaagcuaccggacgauuuuacuggcugcgucauugccuggaacagcaauaaccuggacucaaaagugggcgggaacuacaauuaucucuaccgucuguuccgcaagaguaaccuuaagccuuuugagagagauauauccaccgaaaucuaccaggcgggaagcacacccuguaaugguguugagggcuucaacugcuauuuuccacugcagucuuacggguuccaaccuaccaauggagugggcuaucagcccuacaggguagucguguugucauuugaacuccugcacgccccagcaacuguuugcggucccaaaaagaguacgaacuuagugaaaaauaagugugucaacuucaauuuuaacgggcugacaggcaccggagugcuaacugagagcaauaaaaaguuccucccuuuccagcaguuuggccgggacauugcugauaccacagacgccguacgagauccacaaacccuggagauccuugacauaacuccgugcuccuucgggggagugucuguuauuacacccgguacgaacaccucgaaucaggucgcuguguuguaucaggacgugaacuguacugaagucccuguugccauccacgcagaucagcugacaccaaccuggcgcguguacagcacaggcuccaauguguuucaaacuagagccgggugccucaucggagcugagcauguaaacaacucauaugaaugugacauucccaucggcgcggguauuugcgcaaguuaccagacccagacuaauucuccuaggcgggcccgcagcgucgcuucccagucaauaaucgccuacaccaugagccugggggcagagaacucuguggccuauuccaauaacaguauugcuaucccaacaaauuucacuaucagcguuaccacagaaauucuucccgugucuaugacuaagaccuccgucgauuguacgauguacauaugcggcgacucaacagaguguaguaaccuguugcuccaauauggaucuuuuugcacccagcugaauagagccuuaacuggcaucgcaguggagcaggauaaaaacacacaggaaguuuucgcgcaagugaagcagauuuacaaaaccccgccuaucaaggacuuugggggauucaauuuuucgcagauucugccagaucccuccaaaccuucuaagaggagcuucaucgaggaccuacucuuuaacaagguaacucuggcugaugccgguuucauaaaacaauauggcgacugucuuggggauaucgcagcccgugacuugauuugcgcucagaaguucaauggacugaccguccugcccccacucuuaacagaugaaaugaucgcccaguacacgucagcacugcuugcuggcaccauuacgagugguuggacauuuggggccggcgcggccuugcagaucccuuucgcuaugcaaauggcauaucgguuuaacggaauaggcgugacccagaaugugcucuacgagaaccagaaacugauugccaaucaguucaacuccgcuaucgggaagauucaagacucucuaagcuccacagccucagcacugggaaaacuccaggacgucguuaaccagaaugcgcaggcccugaacacucuugugaagcaauugagcaguaauuuuggcgcuaucucuuccguacugaacgauauauuaagccgacucgacaagguggaagccgagguccagaucgauagacugauuaccgguaggcuucagucgcugcaaacguacgugacacagcaguugauccgcgcagcugagauucgggccucagcaaaucucgccgcuaccaaaaugucugaaugcguucuggggcagaguaagagaguggacuucuguggaaaaggcuaucaccuaauguccuuuccccaaagcgcgccacauggugucguguuccugcacguuacuuacgugccggcccaggagaagaacuuuaccacagcuccugcaaucugccacgauggcaaagcccauuuccccagggaaggggucuuuguaucuaauggaacucacugguucgugacccagcgcaacuuuuaugagccacagauaauuacaacggacaauaccuucguuagcggcaacugugauguggucaucgggaucgugaauaacacuguauacgacccccuccaaccugagcuggauuccuucaaggaagaacuugacaaauauuuuaagaaucauacaucaccagauguggacuugggagauauuaguggcaucaacgccagcgucguuaauauucagaaggaaauagaccgacugaacgagguggcuaaaaauuuaaacgaaucucucaucgaccugcaggagcuugguaaguacgagcaguauauuaaauggcccugguacaucuggcugggguucauugcaggacuaaucgccauagugauggucaccaucaugcucugcuguaugacuuccugcuguucaugccugaagggcuguugcaguugugguagcugcugcaaauuugaugaagacgauuccgagccuguguugaagggcguuaagcugcacuacacaugaggacuagucccuguucccagagcccacuuuuuuuucuuuuuuugaaauaaaauagccugucuuucagaucucaaaggcucuuuucagagccaccaaaaaaaaaaaaaaaaaaaaaaaaaaaaaaaaaaaaaaaaaaaaaaaaaaaaaaaaaaaaaaaaaaaaaaaaaaaaaaaaaaaaaaaaaaaaaaaaaaaaa

SEQ ID NO: 12479 - RNA, 4094 nt, Artificial Sequence
  SARS-CoV-2/France/IDF0372/2020__EPI_ISL_406596 spike protein mRNA human (1-1273)
aggagagucccgcagucggcguccagcggcucugcuuguucgugugugugucguugcaggccuuauucaagcuuaccauguucguguuucugguccuccuuccccugguuagcucccagugcgugaacuugaccacaagaacucaauuaccuccagccuacacuaauucuuucaccaggggcguauauuacccggacaagguguuucggucaaguguccugcacagcacacaggaucuauuccuccccuuuuucuccaacgugacuugguuucaugcuauccacguuucugggaccaauggaacaaaacgcuucgacaacccugugcugccauuuaaugauggugucuauuucgcaucgaccgagaagucaaacauuauacgaggcuggaucuuugggacuacacuugacagcaaaacccagagucuguugauugugaauaacgccacgaauguaguuaucaaggugugugaguuccaguuuugcaacgaucccuuccucggagucuacuaucauaaaaauaacaaguccuggauggagucugaguuccguguguacagcuccgcgaauaacuguacuuuugaauaugugucacaaccuuuccugauggaccuggaaggcaagcaggguaauuuuaaaaaccucagagaguucgucuuuaagaacauugauggguacuucaaaaucuacaguaagcacaccccaauaaauuuaguuagggaccugccccagggauuuagcgcucuugagccuuugguggaucugccaaucggcauuaacaucacacgguuccagacucuacucgcccugcaucgcucuuaucuuaccccgggcgacuccucaagcggguggacagcaggagccgcugcauacuauguagguuaccugcaacccagaaccuuuuugcucaaauauaaugaaaacggcacgauuacugaugccguggacugcgcucuggauccuuuaagugagacaaaguguacccugaagucuuucacugucgaaaaagggaucuaccagacauccaauuuuagggugcagccaaccgagagcauaguucgguuccccaacauuacgaaucucugcccuuuuggagagguguucaacgccacccgcuucgcgucggucuaugcauggaaucgaaagagaaucucuaacuguguggccgacuacuccuuucuuuacaauucagcuaguuucagcacauuuaaaugcuauggcguauccccaacuaagcugaacgacuuguguuucaccaauguuuacgccgauucuuuugugauuaggggugacgaaguccggcagaucgcacccgggcaaacaggaaaaaucgcugauuauaacuacaagcuaccggacgauuucacuggcugcgugauugccuggaauagcaacaaccuggacucaaaagucggcgggaauuauaacuaccucuaucgucuguuucgcaagaguaaucuuaagccuuucgagagagauauauccaccgaaaucuaccaggcgggaagcacacccuguaacgguguggagggcuuuaauugcuacuucccacugcagucuuauggguuucaaccuaccaacggaguuggcuaccagcccuauagggugguagucuugucauucgaacuccugcacgccccagcaacugugugcggucccaaaaagaguacgaauuuaguuaaaaacaagugugugaauuuuaacuucaaugggcugacaggcaccggaguccuaacugagagcaacaaaaaguuccucccuuuucagcaguucggccgggacauugcugauaccacagacgccgugcgagauccacaaacccuggagauccuugacauaacuccgugcuccuuugggggaguaucugugauuacacccgguacgaauaccucgaaccagguugcugucuuguaccaggacgugaauuguacugaagugccugucgccauccacgcagaucagcugacaccaaccuggcgcguuuauagcacaggcuccaacguguuccaaacuagagccgggugccucaucggagcugagcaugugaacaauucauacgaaugugacauucccaucggcgcggguauuugcgcaaguuaucagacccagacgaacucuccuaggcgggcccgcagcguagcuucccagucaauaaucgccuacaccaugagccugggggcagaaaauucugucgccuacuccaacaauaguauugcuaucccaacaaacuuuacuaucagcgugaccacagaaauucuucccguuucuaugacuaagaccuccguggauuguacgauguauauaugcggcgacucaacagaguguaguaaucuguugcuccaauacggcagcuucugcacccagcugaacagagccuuaacuggaaucgcagucgagcaggauaaaaauacacaggaaguguuugcgcaaguuaagcagauuuauaaaaccccgccuaucaaggacuucgggggauuuaacuucucgcagauucugccagaucccuccaaaccuucuaagaggagcuuuaucgaggaccuacucuucaauaaggugacucuggcugaugccgguuucauaaaacaauacggcgacugucuuggggauaucgcagcccgugacuugauuugcgcucagaaguuuaacggacugaccguacugcccccacucuuaacagaugaaaugaucgcccaguauacgucagcacugcuugcuggcaccauuacgagugguuggacauucggggccggcgcggccuugcagaucccuuuugcuaugcaaauggcauaccgguucaauggaauaggcgucacccagaacgugcucuaugagaaucagaaacugauugccaaccaguuuaacuccgcuaucgggaagauucaagacucucuaagcuccacagccucagcacugggaaaacuccaggacguggucaaucagaacgcgcaggcccugaauacucuuguuaagcaauugagcaguaacuucggcgcuaucucuuccgugcugaaugauauauuaagccgacucgacaagguagaagccgaggugcagaucgauagacugauuaccgguaggcuucagucgcugcaaacguacgucacacagcaguugauccgcgcagcugagauucgggccucagcaaaccucgccgcuaccaaaaugucugaaugcgugcuggggcagaguaagagaguugacuuuuguggaaaaggcuaccaccuaauguccuucccccaaagcgcgccacaugguguggucuuucugcacgugacuuauguuccggcccaggagaagaauuucaccacagcuccugcaaucugccacgauggcaaagcccauuuucccagggaagggguguucgucucuaacggaacucacugguuuguaacccagcgcaauuucuacgagccacagauaauuacaacggacaacaccuucgugagcggcaauugugauguugugaucgggaucgucaacaauacuguguaugacccccuccaaccugagcuggauuccuuuaaggaggaacuugacaaauacuucaagaaccauacaucaccagauguagacuugggagauauuaguggcaucaaugccagcguggucaacauucagaaggaaauagaccgacugaaugagguugcuaaaaacuuaaacgaaucucucaucgaccugcaggagcuugguaaguaugagcaguacauuaaauggcccugguauaucuggcugggguuuauugcaggacuaaucgccauagugauggugaccaucaugcucugcuguaugacuuccugcuguucaugccugaagggcuguugcaguugugguagcugcugcaaauucgaugaagacgauuccgagccugucuugaagggcgugaagcugcacuacacaugaggacuagucccuguucccagagcccacuuuuuuuucuuuuuuugaaauaaaauagccugucuuucagaucucaaaggcucuuuucagagccaccaaaaaaaaaaaaaaaaaaaaaaaaaaaaaaaaaaaaaaaaaaaaaaaaaaaaaaaaaaaaaaaaaaaaaaaaaaaaaaaaaaaaaaaaaaaaaaaaaaaaa

SEQ ID NO: 12480 - RNA, 4094 nt, Artificial Sequence
  SARS-CoV-2/Australia/VIC01/2020__EPI_ISL_406844 spike protein mRNA human (1-1273)
aggagagucccgcagucggcguccagcggcucugcuuguucgugugugugucguugcaggccuuauucaagcuuaccauguucguguuucugguccuccuuccccugguuagcucccagugcgugaacuugaccacaagaacucaauuaccuccagccuacaccaauucuuucacgaggggcguauauuacccggacaagguguuucggucaaguguccugcacagcacacaggaucuauuccuccccuuuuucuccaacgugacuugguuucaugcuauccacguuucugggaccaauggaacaaaacgcuucgacaacccugugcugccauuuaaugauggugucuauuucgcaucgaccgagaagucaaacauuauacgaggcuggaucuuugggacuacacuugacagcaaaacccagagucuguugauugugaauaacgccacgaauguaguuaucaaggugugugaguuccaguuuugcaacgaucccuuccucggagucuacuaucauaaaaauaacaaguccuggauggagucugaguuccguguguacagcuccgcgaauaacuguacuuuugaauaugugucacaaccuuuccugauggaccuggaaggcaagcaggguaauuuuaaaaaccucagagaguucgucuuuaagaacauugauggguacuucaaaaucuacaguaagcacaccccaauaaauuuaguuagggaccugccccagggauuuagcgcucuugagccuuugguggaucugccaaucggcauuaacaucacacgguuccagacucuacucgcccugcaucgcagauaucuuaccccgggcgacucuuccucaggguggacagcaggagccgcugcauacuauguagguuaccugcaacccaggaccuuuuugcucaaauauaaugaaaacggcacgauuacugaugccguggacugcgcucuggauccuuuaagcgagacaaaguguacccugaagaguuucacugucgaaaaagggaucuaccagacaucuaauuuucgggugcagccaaccgaguccauaguucgcuuccccaacauuacgaaucucugcccuuuuggagagguguucaacgccacccgauucgcgagcgucuaugcauggaauagaaagaggaucucgaacuguguggccgacuacucuguacuuuacaauuccgcuucauuuaguacauucaaaugcuauggcguuagcccaacuaagcugaacgacuuguguuuuaccaauguguacgccgauuccuucgucauucggggugacgaagugcgucagaucgcacccgggcaaacaggaaaaaucgcugauuauaacuacaagcuaccggacgauuuuacuggcugcgucauugccuggaacucuaauaaccuggacagcaaagugggcgggaauuauaacuaccucuaucgccuguucagaaagucaaaucuuaagccuuuugagagggauauaaguaccgaaaucuaccaggcgggauccacacccuguaacgguguugagggcuucaauugcuacuuuccacugcagagcuauggguuccaaccuaccaacggagugggcuaccagcccuaucggguagucguguugucuuuugaacuccugcacgccccagcaacuguuugcggucccaaaaagucaacgaauuuagugaaaaacaagugugucaauuucaacuuuaaugggcugacaggcaccggagugcuaacugagaguaacaaaaaguuccucccuuuccagcaguuuggccgagacauugcugauaccacagacgccguacgcgauccacaaacccuggagauccuugacauaacuccgugcagcuucgggggaguguccguuauuacacccgguacgaauaccucuaaccaggucgcuguguuguaccaggacgugaauuguacugaagucccuguugccauccacgcagaucagcugacaccaaccuggagaguguauucgacaggcagcaacguguuucaaacuagggccgggugccucaucggagcugagcauguaaacaauuccuacgaaugugacauucccaucggcgcggguauuugcgcaucauaucagacccagacgaacaguccucggcgcgccagaucugucgcuagccaguccauaaucgccuacaccaugucacugggggcagagaauagcguggccuacucuaacaauuccauugcuaucccaacaaacuucacuaucaguguuaccacagaaauucuucccgugagcaugacuaagaccucugucgauuguacgauguauauaugcggcgacuccacagaguguucaaaucuguugcuccaauacggaaguuuuugcacccagcugaacagggccuuaacuggcaucgcaguggagcaggauaaaaauacacaggaaguuuucgcgcaagugaagcagauuuauaaaaccccgccuaucaaggacuuugggggauucaacuuuagccagauucugccagaucccucgaaaccuuccaagcguucuuucaucgaggaccuacucuuuaauaagguaacucuggcugaugccgguuucauaaaacaauacggcgacugucuuggggauaucgcagcccgggacuugauuugcgcucagaaguucaacggacugaccguccucccuccacuguuaacagaugaaaugaucgcccaguauacgagcgcacugcuugcuggcaccauuacuucagguuggacauuuggggccggcgcggccuugcagaucccuuucgcuaugcaaauggcauaccgauuuaauggaauaggcgugacccagaacgugcucuaugagaaucagaaacugauugccaaccaguucaacagugcuaucgggaagauucaagacucccuaucuagcacagccuccgcacugggaaaacuccaggacgucguuaaucagaacgcgcaggcccugaauacucuugugaagcaauugucaagcaacuuuggcgcuaucaguucuguacugaaugauauauuauccagacucgacaagguggaagccgagguccagaucgauaggcugauuaccggucgccuucagagccugcaaacguacgugacacagcaguugauccgggcagcugagauuagagccucggcaaaccucgccgcuaccaaaaugucagaaugcguucuggggcagucuaagaggguggacuucuguggaaaaggcuaccaccuaaugaguuuuccccaauccgcgccacauggugucguguuccugcacguuacuuaugugccggcccaggagaagaauuuuaccacagcacccgcuaucugccacgauggcaaagcccauuucccccgcgaaggggucuuuguaagcaacggaacucacugguucgugacccagcgaaauuuuuacgagccacagauaauuacaacggacaacaccuucguuucuggcaauugugauguggucaucgggaucgugaacaauacuguauaugacccccuccaaccugagcuggauagcuucaaggaagaacuugacaaauacuuuaagaaccauacauccccagauguggacuugggagauauuucaggcaucaaugccagugucguuaacauucagaaggaaauagaccggcugaaugagguggcuaaaaacuuaaacgaaagccucaucgaccugcaggagcuugguaaguaugagcaguacauuaaauggcccugguauaucuggcugggguucauugcaggacuaaucgccauagugauggucaccaucaugcucugcuguaugacuucuugcuguuccugccugaagggcuguugcucaugugguaguugcugcaaauuugaugaagacgauagcgagccuguguugaagggcguuaagcugcacuacacaugaggacuagucccuguucccagagcccacuuuuuuuucuuuuuuugaaauaaaauagccugucuuucagaucucaaaggcucuuuucagagccaccaaaaaaaaaaaaaaaaaaaaaaaaaaaaaaaaaaaaaaaaaaaaaaaaaaaaaaaaaaaaaaaaaaaaaaaaaaaaaaaaaaaaaaaaaaaaaaaaaaaaa

SEQ ID NO: 12481 - RNA, 4094 nt, Artificial Sequence
  SARS-CoV-2/Germany/BavPat1/2020__EPI_ISL_406862 spike protein mRNA human (1-1273)
aggagagucccgcagucggcguccagcggcucugcuuguucgugugugugucguugcaggccuuauucaagcuuaccauguucguguuucugguccuccuuccccugguuagcucccagugcgugaacuugaccacaagaacucaauuaccuccagccuacacuaauucuuucaccaggggcguauauuacccggacaagguguuucggucaaguguccugcacagcacacaggaucuauuccuccccuuuuucuccaacgugacuugguuucaugcuauccacguuucugggaccaauggaacaaaacgcuucgacaacccugugcugccauuuaaugauggugucuauuucgcaucgaccgagaagucaaacauuauacgaggcuggaucuuugggacuacacuugacagcaaaacccagagucuguugauugugaauaacgccacgaauguaguuaucaaggugugugaguuccaguuuugcaacgaucccuuccucggagucuacuaucauaaaaauaacaaguccuggauggagucugaguuccguguguacagcuccgcgaauaacuguacuuuugaguaugugucacaaccuuuccugauggaccuggaaggcaagcaggguaauuuuaaaaaccucagagaguucgucuuuaagaacauugauggguacuucaaaaucuacaguaagcacaccccaauaaauuuaguuagggaccugccccagggauuuagcgcucuugagccuuugguggaucugccaaucggcauuaacaucacacgguuccagacucuacucgcccugcaucgcucuuaucuuaccccgggcgacuccucaagcggguggacagcaggagccgcugcauacuauguagguuaccugcaacccagaaccuuuuugcucaaauauaaugaaaacggcacgauuacugaugccguggacugcgcucuggauccuuuaagugagacaaaguguacccugaagucuuucacugucgaaaaagggaucuaccagacauccaauuuuagggugcagccaaccgagagcauaguucgguuccccaacauuacgaaucucugcccuuuuggagagguguucaacgccacccgcuucgcgucggucuaugcauggaaucgaaagagaaucucuaacuguguggccgacuacuccguacuuuacaauucagcuaguuuuagcacauucaaaugcuauggcguuuccccaacuaagcugaacgacuuguguuuuaccaauguguacgccgauucuuucgucauuaggggugacgaagugcggcagaucgcacccgggcaaacaggaaaaaucgcugauuauaacuacaagcuaccggacgauuuuacuggcugcgucauugccuggaauagcaacaaccuggacucaaaagugggcgggaauuauaacuaccucuaucgucuguuccgcaagaguaaucuuaagccuuuugagagagauauauccaccgaaaucuaccaggcgggaagcacacccuguaacgguguugagggcuucaauugcuacuuuccacugcagucuuauggguuccaaccuaccaacggagugggcuaccagcccuauaggguagucguguugucauuugaacuccugcacgccccagcaacuguuugcggucccaaaaagaguacgaauuuagugaaaaacaagugugucaauuucaacuuuaaugggcugacaggcaccggagugcuaacugagagcaacaaaaaguuccucccuuuccagcaguuuggccgggacauugcugauaccacagacgccguacgagauccacaaacccuggagauccuugacauaacuccgugcuccuucgggggagugucuguuauuacacccgguacgaauaccucgaaccaggucgcuguguuguaccagggcgugaauuguacugaagucccuguugccauccacgcagaccagcugacaccaaccuggcgcguguauagcacaggguccaacguguuucaaacuagagccggaugccucaucggcgcugagcauguaaacaauucauacgaaugugauauucccaucggugcggggauuugcgcaaguuaucagacccagacgaacucuccuaggcgggcccgcagcgucgcuucccagucaauaaucgccuacaccaugagccugggcgcagaaaauucuguggccuacuccaacaauaguauugcuaucccaacaaacuucacuaucagcguuaccacagaaauucuucccgugucuaugacuaagaccuccgucgacuguacgauguauauaugcggagauucaacagaguguaguaaucuguugcuccaauacggcagcuuuugcacccagcugaacagagccuuaacugggaucgcaguggagcaggacaaaaauacacaggaaguuuucgcgcaagugaagcagauuuauaaaaccccgccuaucaaggauuuuggagguuucaacuuuucgcagauucugccagaccccuccaaaccuucuaagaggagcuucaucgaggaucuacucuuuaauaagguaacucuggcugacgccggcuucauaaaacaauacggggauugucuuggagacaucgcagcccgugauuugauuugcgcucagaaguucaacggccugaccguccugcccccacucuuaacagacgaaaugaucgcccaguauacgucagcacugcuugcugguaccauuacgaguggguggacauuuggcgccggagcggccuugcagaucccuuucgcuaugcaaauggcauaccgguuuaauggcauaggggugacccagaacgugcucuaugagaaucagaaacugauugccaaccaguucaacuccgcuaucggaaagauucaagauucucuaagcuccacagccucagcacugggcaaacuccaggacgucguuaaucagaacgcgcaggcccugaauacucuugugaagcaauugagcaguaacuuuggugcuaucucuuccguacugaaugacauauuaagccgacucgauaagguggaagccgagguccagaucgacagacugauuaccgggaggcuucagucgcugcaaacguacgugacacagcaguugauccgcgcagcugagauucgggccucagcaaaccucgccgcuaccaaaaugucugaaugcguucugggacagaguaagagaguggauuucuguggcaaagguuaccaccuaauguccuuuccccaaagcgcgccacauggcgucguguuccugcacguuacuuaugugccggcccaggagaagaauuuuaccacagcuccugcaaucugccacgacgggaaagcccauuuccccagggaaggagucuuuguaucuaacggcacucacugguucgugacccagcgcaauuuuuacgagccacagauaauuacaacggauaacaccuucguuagcgggaauugugacguggucaucggaaucgugaacaauacuguauaugauccccuccaaccugagcuggacuccuucaaggaagaacuugauaaauacuuuaagaaccauacaucaccagacguggauuugggcgacauuagugguaucaaugccagcgucguuaacauucagaaggaaauagaucgacugaaugagguggcuaaaaacuuaaacgaaucucucaucgaccugcaggagcuugggaaguaugagcaguacauuaaauggcccugguauaucuggcugggauucauugcaggccuaaucgccauagugauggucaccaucaugcucugcuguaugacuuccugcuguucaugccugaaggguuguugcaguuguggcagcugcugcaaauuugacgaagaugacuccgagccuguguugaaggggguuaagcugcacuacacaugaggacuagucccuguucccagagcccacuuuuuuuucuuuuuuugaaauaaaauagccugucuuucagaucucaaaggcucuuuucagagccaccaaaaaaaaaaaaaaaaaaaaaaaaaaaaaaaaaaaaaaaaaaaaaaaaaaaaaaaaaaaaaaaaaaaaaaaaaaaaaaaaaaaaaaaaaaaaaaaaaaaaa

SEQ ID NO: 12482 - RNA, 4094 nt, Artificial Sequence
  SARS-CoV-2/Wuhan/HBCDC-HB-02/2020__EPI_ISL_412978 spike protein mRNA human (1-1273)
aggagagucccgcagucggcguccagcggcucugcuuguucgugugugugucguugcaggccuuauucaagcuuaccauguucguguuucugguccuccuuccccugguuagcucccagugcgugaacuugaccacaagaacucaauuaccuccagccuacacuaauucuuucaccaggggcguauauuacccggacaagguguuucggucaaguguccugcacagcacacaggaucuauuccuccccuuuuucuccaacgugacuugguuucaugcuauccacguuucugggaccaauggaacaaaacgcuucgacaacccugugcugccauuuaaugauggugucuauuucgcaucgaccgagaagucaaacauuauacgaggcuggaucuuugggacuacacuugacagcaaaacccagagucuguugauugugaauaacgccacgaauguaguuaucaaggugugugaguuccaguuuugcaacgaucccuuccucggagucuacuaucauaaaaauaacaaguccuggauggagucugaguuccguguguacagcuccgcgaauaacuguacuuuugaguaugugucacaaccuuuccugauggaccuggaaggcaagcaggguaauuuuaaaaaccucagagaguucgucuuuaagaacauugauggguacuucaaaaucuacaguaagcacaccccaauaaauuuaguuagggaccugccccagggauuuagcgcucuugagccuuugguggaucugccaaucggcauuaacaucacacgguuccagacucuacucgcccugcaucgcucuuaucuuaccccgggcgacuccucaagcggguggacagcaggagccgcugcauacuauguagguuaccugcaacccagaaccuuuuugcucaaauauaaugaaaacggcacgauuacugaugccguggacugcgcucuggauccuuuaagugagacaaaguguacccugaagucuuucacugucgaaaaagggaucuaccagacauccaauuuuagggugcagccaaccgagagcauaguucgguuccccaacauuacgaaucucugcccuuuuggagagguguucaacgccacccgcuucgcgucggucuaugcauggaaucgaaagagaaucucuaacuguguggccgacuacuccguacuuuacaauucagcuaguuuuagcacauucaaaugcuauggcguuuccccaacuaagcugaacgacuuguguuuuaccaauguguacgccgauucuuucgucauuaggggugacgaagugcggcagaucgcacccgggcaaacaggaaaaaucgcugauuauaacuacaagcuaccggacgauuuuacuggcugcgucauugccuggaauagcaacaaccuggacucaaaagugggcgggaauuauaacuaccucuaucgucuguuccgcaagaguaaucuuaagccuuuugagagagauauauccaccgaaaucuaccaggcgggaagcacacccuguaacgguguugagggcuucaauugcuacuuuccacugcagucuuauggguuccaaccuaccaacggagugggcuaccagcccuauaggguagucguguugucauuugaacuccugcacgccccagcaacuguuugcggucccaaaaagaguacgaauuuagugaaaaacaagugugucaauuucaacuuuaaugggcugacaggcaccggagugcuaacugagagcaacaaaaaguuccucccuuuccagcaguuuggccgggacauugcugauaccacagacgccguacgagauccacaaacccuggagauccuugacauaacuccgugcuccuucgggggagugucuguuauuacacccgguacgaauaccucgaaccaggucgcuguguuguaccaggacgugaauuguacugaagucccuguugccauccacgcagaucagcugacaccaaccuggcgcguguauagcacaggcuccaacguguuucaaacuagagccgggugccucaucggagcugagcauguaaacaauucauacgaaugugacauucccaucggcgcggguauuugcgcaaguuaucagacccagacgaacucuccuaggcgggcccgcagcgucgcuucccagucaauaaucgccuacaccaugagccugggggcagaaaauucuguggccuacuccaacaauaguauugcuaucccaacaaacuucacuaucagcguuaccacagaaauucuucccgugucuaugacuaagaccuccgucgauuguacgauguauauaugcggcgacucaacagaguguaguaauuuucuguugcaauacggcagcuucugcacccagcucaacagagcccugacuggaaucgcaguggagcaggauaaaaauacacaggaaguuuuugcgcaagugaagcagauuuauaaaaccccgccuaucaaggacuucgggggauuuaacuucucgcagauuuuaccagaucccuccaaaccuucuaagaggagcuuuaucgaggaccugcuauucaauaagguaacucucgcugaugccgguuucauaaaacaauacggcgacugucugggggauaucgcagcccgugaccuuauuugcgcucagaaguuuaacggauugaccguccugcccccacuccugacagaugaaaugaucgcccaguauacgucagcauuacuggcuggcaccauuacgagugguuggacauucggggccggcgcggcccuucagaucccuuuugcuaugcaaauggcauaccgguucaauggaauaggcgugacccagaacguguuguaugagaaucagaaacucauugccaaccaguuuaacuccgcuaucgggaagauucaagacucucugagcuccacagccucagcacuaggaaaacugcaggacgucguuaaucagaacgcgcaggcccucaauacucuggugaagcaacuuagcaguaacuucggcgcuaucucuuccguauugaaugauauacugagccgauuagacaagguggaagccgagguccagaucgauagacucauuaccgguaggcugcagucgcuucaaacguacgugacacagcagcugauccgcgcagcugagauucgggccucagcaaacuuggccgcuaccaaaaugucugaaugcguucucgggcagaguaagagaguggacuuuuguggaaaaggcuaccaccugauguccuucccccaaagcgcgccacauggugucguguuucuacacguuacuuaugugccggcccaggagaagaauuucaccacagcuccugcaaucugccacgauggcaaagcccauuuucccagggaaggggucuucguaucuaacggaacucacugguuugugacccagcgcaauuucuacgagccacagauaauuacaacggacaacaccuucguuagcggcaauugugauguggucaucgggaucgugaacaauacuguauaugacccccugcaaccugagcucgauuccuuuaaggaagaacuggacaaauacuucaagaaccauacaucaccagauguggaccuuggagauauuaguggcaucaaugccagcgucguuaacauucagaaggaaauagaccgauugaaugagguggcuaaaaaccugaacgaaucuuuaaucgaccuccaggagcuggguaaguaugagcaguacauuaaauggcccugguauaucuggcuuggguuuauugcaggacugaucgccauagugauggucaccaucaugcuaugcuguaugacuuccugcuguucaugccucaagggcuguugcaguugugguagcugcugcaaauucgaugaagacgauuccgagccugugcugaagggcguuaaguugcacuacacaugaggacuagucccuguucccagagcccacuuuuuuuucuuuuuuugaaauaaaauagccugucuuucagaucucaaaggcucuuuucagagccaccaaaaaaaaaaaaaaaaaaaaaaaaaaaaaaaaaaaaaaaaaaaaaaaaaaaaaaaaaaaaaaaaaaaaaaaaaaaaaaaaaaaaaaaaaaaaaaaaaaaaa

SEQ ID NO: 12483 - RNA, 4094 nt, Artificial Sequence
  SARS-CoV-2/Australia/QLD02/2020__EPI_ISL_407896 spike protein mRNA human (1-1273)
aggagagucccgcagucggcguccagcggcucugcuuguucgugugugugucguugcaggccuuauucaagcuuaccauguucguguuucugguccuccuuccccugguuagcucccagugcgugaacuugaccacaagaacucaauuaccuccagccuacacuaauucuuucaccaggggcguauauuacccggacaagguguuucggucaaguguccugcacagcacacaggaucuauuccuccccuuuuucuccaacgugacuugguuucaugcuauccacguuucugggaccaauggaacaaaacgcuucgacaacccugugcugccauuuaaugauggugucuauuucgcaucgaccgagaagucaaacauuauacgaggcuggaucuuugggacuacacuugacagcaaaacccagagucuguugauugugaauaacgccacgaauguaguuaucaaggugugugaguuccaguuuugcaacgaucccuuccucggagucuacuaucauaaaaauaacaaguccuggauggagucugaguuccguguguacagcuccgcgaauaacuguacuuuugaauaugugucacaaccuuuccugauggaccuggaaggcaagcaggguaauuuuaaaaaccucagagaguucgucuuuaagaacauugauggguacuucaaaaucuacaguaagcacaccccaauaaauuuaguuagggaccugccccagggauuuagcgcucuugagccuuugguggaucugccaaucggcauuaacaucacacgguuccagacucuacucgcccugcaucgcucuuaucuuaccccgggcgacuccucaagcggguggacagcaggagccgcugcauacuauguagguuaccugcaacccagaaccuuuuugcucaaauauaaugaaaacggcacgauuacugaugccguggacugcgcucuggauccuuuaagugagacaaaguguacccugaagucuuucacugucgaaaaagggaucuaccagacauccaauuuuagggugcagccaaccgagagcauaguucgguuccccaacauuacgaaucucugcccuuuuggagagguguucaacgccacccgcuucgcgucggucuaugcauggaaucgaaagagaaucucuaacuguguggccgacuacuccguacuuuacaauucagcuaguuuuagcacauucaaaugcuauggcguuuccccaacuaagcugaacgacuuguguuuuaccaauguguacgccgauucuuucgucauuaggggugacgaagugcggcagaucgcacccgggcaaacaggaaaaaucgcugauuauaacuacaagcuaccggacgauuuuacuggcugcgucauugccuggaauagcaacaaccuggacucaaaagugggcgggaauuauaacuaccucuaucgucuguuccgcaagaguaaucuuaagccuuuugagagagauauauccaccgaaaucuaccaggcgggaagcacacccuguaacgguguugagggcuucaauugcuacuuuccacugcagucuuauggguuccaaccuaccaacggagugggcuaccagcccuauaggguagucguguugucauuugaacuccugcacgccccagcaacuguuugcggucccaaaaagaguacgaauuuagugaaaaacaagugugucaauuucaacuuuaaugggcugacaggcaccggagugcuaacugagagcaacaaaaaguuccucccuuuccagcaguuuggccgggacauugcugauaccacagacgccguacgagauccacaaacccuggagauccuugacauaacuccgugcuccuucgggggagugucuguuauuacacccgguacgaauaccucgaaccaggucgcuguguuguaccaggacgugaauuguacugaagucccuguugccauccacgcagaucagcugacaccaaccuggcgcguguauagcacaggcuccaacguguuucaaacuagagccgggugccucaucggagcugagcauguaaacaauucauacgaaugugacauucccaucggcgcggguauuugcgcaaguuaucagacccagacgaacucuccuaggcgggcccgcagcgucgcuucccagucaauaaucgccuacaccaugagccugggggcagaaaauucuguggccuacuccaacaauaguauugcuaucccaacaaacuucacuaucagcguuaccacagaaauucuucccgugucuaugacuaagaccuccgucgauuguacgauguauauaugcggcgacucaacagaguguaguaaucuguugcuccaauacggcagcuuuugcacccagcugaacagagccuuaacuggaaucgcaguggagcaggauaaaaauacacaggaaguuuucgcgcaagugaagcagauuuauaaaaccccgccuaucaaggacuuugggggauucaacuuuucgcagauucugccagaucccuccaaaccuucuaagaggagcuucaucgaggaccuacucuuuaauaagguaacucuggcugaugccgguuucauaaaacaauacggcgacugucuuggggauaucgcagcccgugacuugauuugcgcucagaaguucaacggacugaccguccugcccccacucuuaacagaugaaaugaucgcccaguauacgucagcacugcuugcuggcaccauuacgagugguuggacauuuggggccggcgcggccuugcagaucccuuucgcuaugcaaauggcauaccgguuuaauggaauaggcgugacccagaacgugcucuaugagaaucagaaacugauugccaaccaguucaacuccgcuaucgggaagauucaagacucucuaagcuccacagccucagcacugggaaaacuccaggacgucguuaaucagaacgcgcaggcccugaauacucuugugaagcaauugagcaguaacuuuggcgcuaucucuuccguacugaaugauauauuaagccgacucgacaagguggaagccgagguccagaucgauagacugauuaccgguaggcuucagucgcugcaaacguacgugacacagcaguugauccgcgcagcugagauucgggccucagcaaaccucgccgcuaccaaaaugucugaaugcguucuggggcagaguaagagaguggacuucuguggaaaaggcuaccaccuaauguccuuuccccaaagcgcgccacauggugucguguuccugcacguuacuuaugugccggcccaggagaagaauuuuaccacagcuccugcaaucugccacgauggcaaagcccauuuccccagggaaggggucuuuguaucuaacggaacucacugguucgugacccagcgcaauuuuuacgagccacagauaauuacaacggacaacaccuucguuagcggcaauugugauguggucaucgggaucgugaacaauacuguauaugacccccuccaacuggagcuugauuccuucaaggaagaguuggacaaauacuuuaagaaccauacaucaccugauguggaccugggagauauuaguggcaucaaugccagcgucguuaacauucagaaggaaauagaccgauuaaaugagguggcuaaaaaccucaacgaaucucugaucgaccuucaggagcuggguaaguaugagcaguacauuaaauggccaugguauaucuggcuaggguucauugcaggacucaucgccauagugauggucaccaucaugcugugcuguaugacuuccugcuguucaugcuugaagggcuguugcaguugugguagcugcugcaaauuugaugaagacgauuccgagcccgugcugaagggcguuaaguuacacuacacaugaggacuagucccuguucccagagcccacuuuuuuuucuuuuuuugaaauaaaauagccugucuuucagaucucaaaggcucuuuucagagccaccaaaaaaaaaaaaaaaaaaaaaaaaaaaaaaaaaaaaaaaaaaaaaaaaaaaaaaaaaaaaaaaaaaaaaaaaaaaaaaaaaaaaaaaaaaaaaaaaaaaaa

SEQ ID NO: 12484 - RNA, 4094 nt, Artificial Sequence
  SARS-CoV-2/India/1-31/2020__EPI_ISL_413523 spike protein mRNA human (1-1273)
aggagagucccgcagucggcguccagcggcucugcuuguucgugugugugucguugcaggccuuauucaagcuuaccauguucguguuucugguccuccuuccccugguuagcucccagugcgugaacuugaccacaagaacucaauuaccuccagccuacacuaauucuuucaccaggggcguauauuacccggacaagguguuucggucaaguguccugcacagcacacaggaucuauuccuccccuuuuucuccaacgugacuugguuucaugcuauccacguuucugggaccaauggaacaaaacgcuucgacaacccugugcugccauuuaaugauggugucuauuucgcaucgaccgagaagucaaacauuauacgaggcuggaucuuugggacuacacuugacagcaaaacccagagucuguugauugugaauaacgccacgaauguaguuaucaaggugugugaguuccaguuuugcaacgaucccuuccucggagucuacuaucauaaaaauaacaaguccuggauggagucugaguuccguguguacagcuccgcgaauaacuguacuuuugaauaugugucacaaccuuuccugauggaccuggaaggcaagcaggguaauuuuaaaaaccucagagaguucgucuuuaagaacauugauggguacuucaaaaucuacaguaagcacaccccaauaaauuuaguuagggaccugccccagggauuuagcgcucuugagccuuugguggaucugccaaucggcauuaacaucacacgguuccagacucuacucgcccugcaucgcucuuaucuuaccccgggcgacuccucaagcggguggacagcaggagccgcugcauacuauguagguuaccugcaacccagaaccuuuuugcucaaauauaaugaaaacggcacgauuacugaugccguggacugcgcucuggauccuuuaagugagacaaaguguacccugaagucuuucacugucgaaaaagggaucuaccagacauccaauuuuagggugcagccaaccgagagcauaguucgguuccccaacauuacgaaucucugcccuuuuggagagguguucaacgccacccgcuucgcgucggucuaugcauggaaucgaaagagaaucucuaacuguguggccgacuacuccguacuuuacaauucagcuaguuuuagcacauucaaaugcuauggcguuuccccaacuaagcugaacgacuuguguuuuaccaauguguacgccgauucuuucgucauuaggggugacgaagugcggcagaucgcacccgggcaaacaggaaaaaucgcugauuauaacuacaagcuaccggacgauuuuacuggcugcgucauugccuggaauagcaacaaccuggacucaaaagugggcgggaauuauaacuaccucuaucgucuguuccgcaagaguaaucuuaagccuuuugagagagauauauccaccgaaaucuaccaggcgggaagcacacccuguaacgguguugagggcuucaauugcuacuuuccacugcagucuuauggguuccaaccuaccaacggagugggcuaccagcccuauaggguagucguguugucauuugaacuccugcacgccccagcaacuguuugcggucccaaaaagaguacgaauuuagugaaaaacaagugugucaauuucaacuuuaaugggcugacaggcaccggagugcuaacugagagcaacaaaaaguuccucccuuuccagcaguuuggccgggacauugcugauaccacagacgccguacgagauccacaaacccuggagauccuugacauaacuccgugcuccuucgggggagugucuguuauuacacccgguacgaauaccucgaaccaggucgcuguguuguaccaggacgugaauuguacugaagucccuguugccauccacgcagaucagcugacaccaaccuggcgcguguauagcacaggcuccaacguguuucaaacuagagccgggugccucaucggagcugagcauguaaacaauucauacgaaugugacauucccaucggcgcggguauuugcgcaaguuaucagacccagacgaacucuccuaggcgggcccgcagcgucgcuucccagucaauaaucgccuacaccaugagccugggggcagaaaauucuguggccuacuccaacaauaguauugcuaucccaacaaacuucacuaucagcguuaccacagaaauucuucccgugucuaugacuaagaccuccgucgauuguacgauguauauaugcggcgacucaacagaguguaguaaucuguugcuccaauacggcagcuuuugcacccagcugaacagagccuuaacuggaaucgcaguggagcaggauaaaaauacacaggaaguuuucgcgcaagugaagcagauuuauaaaaccccgccuaucaaggacuuugggggauucaacuuuucgcagauucugccagaucccuccaaaccuucuaagaggagcuucaucgaggaccuacucuuuaauaagguaacucuggcugaugccgguuucauaaaacaauacggcgacugucuuggggauaucgcagcccgugacuugauuugcgcucagaaguucaacggacugaccguccugcccccacucuuaacagaugaaaugaucgcccaguauacgucagcacugcuugcuggcaccauuacgagugguuggacauuuggggccggcgcggccuugcagaucccuuucgcuaugcaaauggcauaccgguuuaauggaauaggcgugacccagaacgugcucuaugagaaucagaaacugauugccaaccaguucaacuccgucaucgggaagauucaagacucucuaagcuccacagcuucagcccugggaaaacuccaggacguugugaaucagaacgcacaggcgcugaauacucuuguaaagcaauugagcaguaacuuuggcgccaucucuuccgugcugaaugauauauuaagccgacucgacaaggucgaagcugaggugcagaucgauagacugauuaccgguaggcuucagucgcugcaaacguacguuacacagcaguugauccgcgccgcagagauucgggcuucagccaaccucgcagccaccaaaaugucugaaugcgugcuggggcagaguaagagagucgacuucuguggaaaaggcuaccaccuaauguccuuuccccaaagcgcuccacauggugugguuuuccugcacgugacuuaugucccggcgcaggagaagaauuuuaccacagccccugcaaucugccacgauggcaaagcucauuuccccagggaagggguauuugugucuaacggaacucacugguucguuacccagcgcaauuuuuacgagccacagauaauuacaacggacaacaccuucgugagcggcaauugugaugucgugaucgggaucguaaacaauacuguguaugacccccuccaaccugagcuggauuccuucaaggaggaacuugacaaauacuuuaagaaccauacaucaccagaugucgacuugggagauauuaguggcaucaaugccagcguugugaacauucagaaggaaauagaccgacugaaugagguggccaaaaacuuaaacgaaucucucaucgaccugcaggagcuugguaaguaugagcaguacauuaaauggcccugguauaucuggcugggguucauugcuggacuaaucgcaauagucauggugaccaucaugcucugcuguaugacuuccugcuguucaugccugaagggcuguugcaguugugguagcugcugcaaauuugaugaagacgauuccgagccuguuuugaagggcguaaagcugcacuacacaugaggacuagucccuguucccagagcccacuuuuuuuucuuuuuuugaaauaaaauagccugucuuucagaucucaaaggcucuuuucagagccaccaaaaaaaaaaaaaaaaaaaaaaaaaaaaaaaaaaaaaaaaaaaaaaaaaaaaaaaaaaaaaaaaaaaaaaaaaaaaaaaaaaaaaaaaaaaaaaaaaaaaa

SEQ ID NO: 12485 - RNA, 4094 nt, Artificial Sequence
  SARS-CoV-2/Guangdong/GD2020087-P0008/2020__EPI_ISL_413863 spike protein mRNA human (1-1273)
aggagagucccgcagucggcguccagcggcucugcuuguucgugugugugucguugcaggccuuauucaagcuuaccauguucguguuucugguccuccuuccccugguuagcucccagugcgugaacuugaccacaagaacucaauuaccuccagccuacacuaauucuuucaccaggggcguauauuacccggacaagguguuucggucaaguguccugcacagcacacaggaucuauuccuccccuuuuucuccaacgugacuugguuucaugcuauccacguuucugggaccaauggaacaaaacgcuucgacaacccugugcugccauuuaaugauggugucuauuucgcaucgaccgagaagucaaacauuauacgaggcuggaucuuugggacuacacuugacagcaaaacccagagucuguugauugugaauaacgccacgaauguaguuaucaaggugugugaguuccaguuuugcaacgaucccuuccucggagucuacuaucauaaaaauaacaaguccuggauggaaucugaguuccguguguacagcuccgcgaauaacuguacuuuugaauaugugucacaaccuuuccugauggaccuggaaggcaagcaggguaauuuuaaaaaccucagagaguucgucuuuaagaacauugauggguacuucaaaaucuacaguaagcacaccccaauaaauuuaguuagggaccugccccagggauuuagcgcucuugagccuuugguggaucugccaaucggcauuaacaucacacgguuccagacucuacucgcccugcaucgcucuuaucuuaccccgggcgacuccucaagcggguggacagcaggagccgcugcauacuauguagguuaccugcaacccagaaccuuuuugcucaaauauaaugaaaacggcacgauuacugaugccguggacugcgcucuggauccuuuaagugagacaaaguguacccugaagucuuucacugucgaaaaagggaucuaccagacauccaauuuuagggugcagccaaccgagagcauaguucgguuccccaacauuacgaaucucugcccuuuuggagagguguucaacgccacccgcuucgcgucggucuaugcauggaaucgaaagagaaucucuaacuguguggccgacuacuccguacuuuacaauucagcuaguuuuagcacauucaaaugcuauggcguuuccccaacuaagcugaacgacuuguguuuuaccaauguguacgccgauucuuucgucauuaggggugacgaagugcgggagaucgcacccgggcagacaggaaaaaucgcugauuauaacuacaagcuaccggacgauuuuacuggcugcgucauugccuggaauagcaacaaccuggacucaaaagugggcgggaauuauaacuaccucuaucgucuguuccgcaagaguaaucuuaagccuuuugaaagagauauauccaccgagaucuaccaagcgggaagcacacccuguaacgguguugaaggcuucaauugcuacuuuccacugcagucuuauggguuccagccuaccaacggagugggcuaccaacccuauaggguagucguguugucauuugagcuccugcacgccccagcaacuguuugcggucccaaaaagaguacgaauuuagugaaaaacaagugugucaauuucaacuuuaaugggcugacaggcaccggagugcuaacugagagcaacaaaaaguuccucccuuuccagcaguuuggccgggacauugcugauaccacagacgccguacgagauccacagacccuggaaauccuugacauaacuccgugcuccuucgggggagugucuguuauuacacccgguacgaauaccucgaaccaagucgcuguguuguaccaggacgugaauuguacugaggucccuguugccauccacgcagaucagcugacaccaaccuggcgcguguauagcacaggcuccaacguguuucagacuagagccgggugccucaucggagcugaacauguaaacaauucauacgagugugacauucccaucggcgcggguauuugcgcaaguuaucaaacccagacgaacucuccuaggcgggcccgcagcgucgcuucccagucaauaaucgccuacaccaugagccugggggcagaaaauucuguggccuacuccaacaauaguauugcuaucccaacaaacuucacuaucagcguuaccacagagauucuucccgugucuaugacuaagaccuccgucgauuguacgauguauauaugcggcgacucaacagaguguaguaaucuguugcuccaguacggcagcuuuugcacccaacugaacagagccuuaacuggaaucgcaguggaacaggauaaaaauacacaggagguuuucgcacaggugaagcaaauuuauaaaaccccgccuaucaaggacuuugggggauucaacuuuucgcagauucugccagaucccuccaaaccuucuaagaggagcuucaucgaagaccuacucuuuaauaagguaacucuggcugaugccgguuucauaaaacaguacggcgacugucuuggggauaucgcagcccgugacuugauuugcgcucaaaaguucaacggacugaccguccugcccccacucuuaacagaugagaugaucgcccaguauacgucagcacugcuugcuggcaccauuacgagugguuggacauuuggggccggcgcggccuugcagaucccuuucgcuaugcagauggcauaccgguuuaauggaauaggcgugacccaaaacgugcucuaugaaaaucagaaacugauugccaaccaguucaacuccgcuaucgggaagauucaggacucucuaagcuccacagccucagcacugggaaaacuccaagacgucguuaaucagaacgcgcaggcccugaauacucuugugaagcaguugagcaguaacuuuggcgcuaucucuuccguacugaaugauauauuaagccgacucgacaagguggaggccgagguccaaaucgauagacugauuaccgguaggcuucagucgcugcagacguacgugacacaacaguugauccgcgcagcugaaauucgggccucagcaaaccucgccgcuaccaaaaugucugagugcguucuggggcagaguaagagaguggacuucuguggaaaaggcuaccaccuaauguccuuuccccagagcgcgccacauggugucguguuccugcacguuacuuaugugccggcccaagaaaagaauuuuaccacagcgccugcuaucugccacgauggcaaagcccauuuccccagggagggggucuuuguaucuaacggaacucacugguucgugacccagcgcaauuuuuacgagccacagauaauuacaacggacaacaccuucguuagcggcaauugugauguggucaucgggaucgugaacaauacuguauaugacccccuccagccugaacuggauuccuucaaggaggaacuugacaaauacuuuaagaaccauacaucaccagauguggacuugggagauauuaguggcaucaaugccagcgucguuaacauucaaaaggagauagaccgacugaaugaaguggcuaaaaacuuaaacgagucucucaucgaccugcaggagcuugguaaguaugaacaguacauuaaauggcccugguauaucuggcugggguucauugcaggacuaaucgccauagugauggucaccaucaugcucugcuguaugacuuccugcuguucaugccugaagggcuguugcaguugugguagcugcugcaaauuugaugaggacgauuccgaaccuguguugaagggcguuaagcugcacuacacaugaggacuagucccuguucccagagcccacuuuuuuuucuuuuuuugaaauaaaauagccugucuuucagaucucaaaggcucuuuucagagccaccaaaaaaaaaaaaaaaaaaaaaaaaaaaaaaaaaaaaaaaaaaaaaaaaaaaaaaaaaaaaaaaaaaaaaaaaaaaaaaaaaaaaaaaaaaaaaaaaaaaaa

SEQ ID NO: 12486 - RNA, 4094 nt, Artificial Sequence
  SARS-CoV-2/Sweden/01/2020__EPI_ISL_411951 spike protein mRNA human (1-1273)
aggagagucccgcagucggcguccagcggcucugcuuguucgugugugugucguugcaggccuuauucaagcuuaccauguucguguuucugguccuccuuccccugguuagcucccagugcgugaacuugaccacaagaacucaauuaccuccagccuacacuaauucuuucaccaggggcguauauuacccggacaagguguuucggucaaguguccugcacagcacacaggaucuauuccuccccuuuuucuccaacgugacuugguuucaugcuauccacguuucugggaccaauggaacaaaacgcuucgacaacccugugcugccauuuaaugauggugucuauuucgcaucgaccgagaagucaaacauuauacgaggcuggaucuuugggacuacacuugacagcaaaacccagagucuguugauugugaauaacgccacgaauguaguuaucaaggugugugaguuccaguuuugcaacgaucccuuccucggagucuacuaucauaaaaauaacaaguccuggauggagucugaguuccguguguacagcuccgcgaauaacuguacuuuugaauaugugucacaaccuuuccugauggaccuggaaggcaagcaggguaauuuuaaaaaccucagagaguucgucuuuaagaacauugauggguacuucaaaaucuacaguaagcacaccccaauaaauuuaguuagggaccugccccagggauuuagcgcucuugagccuuugguggaucugccaaucggcauuaacaucacacgguuccagacucuacucgcccugcaucgcucuuaucuuaccccgggcgacuccucaagcggguggacagcaggagccgcugcauacuauguagguuaccugcaacccagaaccuuuuugcucaaauauaaugaaaacggcacgauuacugaugccguggacugcgcucuggauccuuuaagugagacaaaguguacccugaagucuuucacugucgaaaaagggaucuaccagacauccaauuuuagggugcagccaaccgagagcauaguucgguuccccaacauuacgaaucucugcccuuuuggagagguguucaacgccacccgcuucgcgucggucuaugcauggaaucgaaagagaaucucuaacuguguggccgacuacuccguacuuuacaauucagcuaguuuuagcacauucaaaugcuauggcguuuccccaacuaagcugaacgacuuguguuuuaccaauguguacgccgauucuuucgucauuaggggugacgaagugcggcagaucgcacccgggcaaacaggaaaaaucgcugauuauaacuacaagcuaccggacgauuuuacuggcugcgucauugccuggaauagcaacaaccuggacucaaaagugggcgggaauuauaacuaccucuaucgucuguuccgcaagaguaaucuuaagccuuuugagagagauauauccaccgaaaucuaccaggcgggaagcacacccuguaacgguguugagggcuucaauugcuacuuuccacugcagucuuauggguuccaaccuaccaacggagugggcuaccagcccuauaggguagucguguugucauuugaacuccugcacgccccagcaacuguuugcggucccaaaaagaguacgaauuuagugaaaaacaagugugucaauuucaacuuuaaugggcugacaggcaccggagugcuaacugagagcaacaaaaaguuccucccuuuccagcaguuuggccgggacauugcugauaccacagacgccguacgagauccacaaacccuggagauccuugacauaacuccgugcuccuucgggggagugucuguuauuacacccgguacgaauaccucgaaccaggucgcuguguuguaccaggacgugaauuguacugaagucccuguugccauccacgcagaucagcugacaccaaccuggcgcguguauagcacaggcuccaacguguuucaaacuagagccgggugccucaucggagcugagcauguaaacaauucauacgaaugugacauucccaucggcgcggguauuugcgcaaguuaucagacccagacgaacucuccuaggcgggcccgcagcgucgcuucccagucaauaaucgccuacaccaugagccugggggcagaaaauucuguggccuacuccaacaauaguauugcuaucccaacaaacuucacuaucagcguuaccacagaaauucuucccgugucuaugacuaagaccuccgucgauuguacgauguauauaugcggcgacucaacagaguguaguaaucuguugcuccaauacggcagcuuuugcacccagcugaacagagccuuaacuggaaucgcaguggagcaggauaaaaauacacaggaaguuuucgcgcaagugaagcagauuuauaaaaccccgccuaucaaggacugugggggauuuaacuucucgcagauucugccagaucccuccaaaccuucuaagaggagcuuuaucgaggaccuacucuucaauaagguaacucuggcugaugccgguuuuauaaaacaauacggcgacugccuuggggauaucgcagcccgugacuugauuugcgcucagaaguucaacggacugaccguccugcccccacucuuaacagaugaaaugaucgcccaguauacgucagcacugcuugcuggcaccauuacgagugguuggacauucggggccggcgcggccuugcagaucccuuuugcuaugcaaauggcauaccgguucaauggaauaggcgugacccagaacgugcucuaugagaaucagaaacugauugccaaccaguuuaacuccgcuaucgggaagauucaagacucucuaagcuccacagccucagcacugggaaaacuccaggacgucguuaaucagaacgcgcaggcccugaauacucuugugaagcaauugagcaguaacuucggcgcuaucucuuccguacugaaugauauauuaagccgacucgacaagguggaagccgagguccagaucgauagacugauuaccgguaggcuucagucgcugcaaacguacgugacacagcaguugauccgcgcagcugagauucgggccucagcaaaccucgccgcuaccaaaaugucugaauguguucuggggcagaguaagagaguggacuuuugcggaaaaggcuaccaccuaauguccuucccccaaagcgcgccacauggugucguguuucugcacguuacuuaugugccggcccaggagaagaauuucaccacagcuccugcaaucugucacgauggcaaagcccauuuucccagggaaggggucuucguaucuaacggaacucacugguuugugacccagcgcaauuucuacgagccacagauaauuacaacggacaacaccuuuguuagcggcaauugcgauguggucaucgggaucgugaacaauacuguauaugacccccuccaaccugagcuggauuccuucaaggaggaacuugacaaauacuucaagaaccauacaucaccagauguggacuugggagauauuaguggcaucaaugccagcgucguuaacauucagaaggaaauagaccgacugaaugagguggcuaaaaacuuaaacgaaucucucaucgaccugcaggagcuugguaaguaugagcaguacauuaaauggcccugguauaucuggcugggguuuauugcaggacuaaucgccauagugauggucaccaucaugcucuguugcaugacuuccuguugcucaugucugaagggcugcuguaguugcgguagcugcuguaaauucgaugaagacgauuccgagccuguguugaagggcguuaagcugcacuacacaugaggacuagucccuguucccagagcccacuuuuuuuucuuuuuuugaaauaaaauagccugucuuucagaucucaaaggcucuuuucagagccaccaaaaaaaaaaaaaaaaaaaaaaaaaaaaaaaaaaaaaaaaaaaaaaaaaaaaaaaaaaaaaaaaaaaaaaaaaaaaaaaaaaaaaaaaaaaaaaaaaaaaa

SEQ ID NO: 12487 - RNA, 4094 nt, Artificial Sequence
  SARS-CoV-2/Tianmen/HBCDC-HB-07/2020__EPI_ISL_412983 spike protein mRNA human (1-1273)
aggagagucccgcagucggcguccagcggcucugcuuguucgugugugugucguugcaggccuuauucaagcuuaccauguucguguuucugguccuccuuccccugguuagcucccagugcgugaacuugaccacaagaacucaauuaccuccagccuacacuaauucuuucaccaggggcguauauuacccggacaagguguuucggucaaguguccugcacagcacacaggaucuauuccuccccuuuuucuccaacgugacuugguuucaugcuauccacguuucugggaccaauggaacaaaacgcuucgacaacccugugcugccauuuaaugauggugucuauuucgcaucgaccgagaagucaaacauuauacgaggcuggaucuuugggacuacacuugacagcaaaacccagagucuguugauugugaauaacgccacgaauguaguuaucaaggugugugaguuccaguuuugcaacgaucccuuccucggagucuacuaucauaaaaauaacaaguccuggauggagucugaguuccguguguacagcuccgcgaauaacuguacuuuugaauaugugucacaaccuuuccugauggaccuggaaggcaagcaggguaauuuuaaaaaccucagagaguucgucuuuaagaacauugauggguacuucaaaaucuacaguaagcacaccccaauaaauuuaguuagggaccugccccagggauuuagcgcucuugagccuuugguggaucugccaaucggcauuaacaucacacgguuccagacucuacucgcccugcaucgcucuuaucuuaccccgggcgacuccucaagcggguggacagcaggagccgcugcauacuauguagguuaccugcaacccagaaccuuuuugcucaaauauaaugaaaacggcacgauuacugaugccguggacugcgcucuggauccuuuaagugagacaaaguguacccugaagucuuucacugucgaaaaagggaucuaccagacauccaauuuuagggugcagccaaccgagagcauaguucgguuccccaacauuacgaaucucugcccuuuuggagagguguucaacgccacccgcuucgcgucggucuaugcauggaaucgaaagagaaucucuaacuguguggccgacuacuccguacuuuacaauucagcuaguuuuagcacauucaaaugcuauggcguuuccccaacuaagcugaacgacuuguguuuuaccaauguguacgccgauucuuucgucauuaggggugacgaagugcggcagaucgcacccgggcaaacaggaaaaaucgcugauuauaacuacaagcuaccggacgauuuuacuggcugcgucauugccuggaauagcaacaaccuggacucaaaagugggcgggaauuauaacuaccucuaucgucuguuccgcaagaguaaucuuaagccuuuugagagagauauauccaccgaaaucuaccaggcgggaagcacacccuguaacgguguugagggcuucaauugcuacuuuccacugcagucuuauggguuccaaccuaccaacggagugggcuaccagcccuauaggguagucguguugucauuugaacuccugcacgccccagcaacuguuugcggucccaaaaagaguacgaauuuagugaaaaacaagugugucaauuucaacuuuaaugggcugacaggcaccggagugcuaacugagagcaacaaaaaguuccucccuuuccagcaguuuggccgggacauugcugauaccacagacgccguacgagauccacaaacccuggagauccuugacauaacuccgugcuccuucgggggagugucuguuauuacacccgguacgaauaccucgaaccaggucgcuguguuguaccaggaccugaauuguacugaagugccugucgccauccacgcagaucagcucacaccaaccuggcgcguuuauagcacaggcuccaacguguuucaaacuagagccgggugccugaucggagcugagcaugugaacaauucauacgaaugugacauucccaucggcgcggguauuugcgcaaguuaucagacccagacgaacucuccuaggcgggcccgcagcguagcuucccagucaauaaucgccuacaccaugagccuuggggcagaaaauucugucgccuacuccaacaauaguauugcuaucccaacaaacuucacuaucagcgugaccacagaaauucugcccguuucuaugacuaagaccuccguggauuguacgauguauauaugcggcgacucaacagaguguaguaauuugcuccugcaauacggcagcuuuugcacccaguuaaacagagcccugacuggaaucgcagucgagcaggauaaaaauacacaggaaguguucgcgcaaguuaagcagauuuauaaaaccccgccuaucaaggacuuugggggauucaacuuuucgcagauucuaccagaucccuccaaaccuucuaagaggagcuucaucgaggaccuccuguuuaauaaggugacucuugcugaugccgguuucauaaaacaauacggcgacuguuugggggauaucgcagcccgugaccugauuugcgcucagaaguucaacggacucaccguacugcccccauuacugacagaugaaaugaucgcccaguauacgucagcacuuuuggcuggcaccauuacgagugguuggacauuuggggccggcgcggcccuccagaucccuuucgcuaugcaaauggcauaccgguuuaauggaauaggcgucacccagaacgugcuguaugagaaucagaaacuaauugccaaccaguucaacuccgcuaucgggaagauucaagacucucugagcuccacagccucagcacucggaaaacugcaggacguggucaaucagaacgcgcaggcccuuaauacuuugguuaagcaacugagcaguaacuuuggcgcuaucucuuccguguuaaaugauauacucagccgacuggacaagguagaagccgaggugcagaucgauagacuuauuaccgguaggcugcagucguugcaaacguacgucacacagcagcucauccgcgcagcugagauucgggccucagcaaaccuggccgcuaccaaaaugucugaaugcgugcuagggcagaguaagagaguugacuucuguggaaaaggcuaccaccugauguccuuuccccaaagcgcgccacaugguguggucuuccuccacgugacuuauguuccggcccaggagaagaauuuuaccacagcuccugcaaucugccacgauggcaaagcccauuuccccagggaagggguguuugucucuaacggaacucacugguucguaacccagcgcaauuuuuacgagccacagauaauuacaacggacaacaccuucgugagcggcaauugugauguugugaucgggaucgucaacaauacuguguaugacccccugcaaccugagcuugauuccuucaaggaagaguuggacaaauacuuuaagaaccauacaucaccagauguagaccugggagauauuaguggcaucaaugccagcguggucaacauucagaaggaaauagaccgauuaaaugagguugcuaaaaaccucaacgaaucucugaucgaccuucaggagcuggguaaguaugagcaguacauuaaauggcccugguauaucuggcuaggguucauugcaggacucaucgccauagugauggugaccaucaugcugugcuguaugacuuccugcuguucaugcuugaagggcuguugcaguugugguagcugcugcaaauuugaugaagacgauuccgagccuguccugaagggcgugaaguuacacuacacaugaggacuagucccuguucccagagcccacuuuuuuuucuuuuuuugaaauaaaauagccugucuuucagaucucaaaggcucuuuucagagccaccaaaaaaaaaaaaaaaaaaaaaaaaaaaaaaaaaaaaaaaaaaaaaaaaaaaaaaaaaaaaaaaaaaaaaaaaaaaaaaaaaaaaaaaaaaaaaaaaaaaaa

SEQ ID NO: 12488 - RNA, 4094 nt, Artificial Sequence
  SARS-CoV-2/Hong Kong/case42_VM20002493/2020__EPI_ISL_414527 spike protein mRNA human (1-1273)
aggagagucccgcagucggcguccagcggcucugcuuguucgugugugugucguugcaggccuuauucaagcuuaccauguucguguuucugguccuccuuccccugguuagcucccagugcgugaacuugaccacaagaacucaauuaccuccagccuacacgaauagcuucaccaggggcguauauuacccggacaagguguuucggucaaguguccugcacagcacacaggaucuauuccuccccuuuuucuccaacgugacuugguuucaugcuauccacguuucugggaccaauggaacaaaacgcuucgacaacccugugcugccauuuaaugauggugucuauuucgcaucgaccgagaagucaaacauuauacgaggcuggaucuuugggacuacacuugacagcaaaacccagagucuguugauugugaauaacgccacgaauguaguuaucaaggugugugaguuccaguuuugcaacgaucccuuccucggagucuacuaucauaaaaauaacaaguccuggauggagucugaguuccguguguacagcuccgcgaauaacuguacuuuugaauaugugucacaaccuuuccugauggaccuggaaggcaagcaggguaauuuuaaaaaccucagagaguucgucuuuaagaacauugauggguacuucaaaaucuacaguaagcacaccccaauaaauuuaguuagggaccugccccagggauuuagcgcucuugagccuuugguggaucugccaaucggcauuaacaucacacgguuccagacucuacucgcccugcaucgcucuuaucuuaccccgggcgacuccucaagcggguggacagcaggagccgcugcauacuauguagguuaccugcaacccagaaccuuuuugcucaaauauaaugaaaacggcacgauuacugaugccguggacugcgcucuggauccuuuaagugagacaaaguguacccugaagucuuucacugucgaaaaagggaucuaccagacauccaauuuuagggugcagccaaccgagagcauaguucgguuccccaacauuacgaaucucugcccuuuuggagagguguucaacgccacccgcuucgcgucggucuaugcauggaaucgaaagagaaucucuaacuguguggccgacuacuccguacuuuacaauucagcuaguuuuagcacauucaaaugcuauggcguuuccccaacuaagcugaacgacuuguguuuuaccaauguguacgccgauucuuucgucauuaggggugacgaagugcggcagaucgcacccgggcaaacaggaaaaaucgcugauuauaacuacaagcuaccggacgauuuuacuggcugcgucauugccuggaauagcaacaaccuggacucaaaagugggcgggaauuauaacuaccucuaucgucuguuccgcaagaguaaucuuaagccuuuugagagagauauauccaccgaaaucuaccaggcgggaagcacacccuguaacgguguugagggcuucaauugcuacuuuccacugcagucuuauggguuccaaccuaccaacggagugggcuaccagcccuauaggguagucguguugucauuugaacuccugcacgccccagcaacuguuugcggucccaaaaagaguacgaauuuagugaaaaacaagugugucaauuucaacuuuaaugggcugacaggcaccggagugcuaacugagagcaacaaaaaguuccucccuuuccagcaguuuggccgggacauugcugauaccacagacgccguacgagauccacaaacccuggagauccuugacauaacuccgugcuccuucgggggagugucuguuauuacacccgguacgaauaccucgaaccaggucgcuguguuguaccaggacgugaauuguacugaagucccuguugccauccacgcagaucagcugacaccaaccuggcgcguguauagcacaggcuccaacguguuucaaacuagagccgggugccucaucggagcugagcauguaaacaauucauacgaaugugacauucccaucggcgcggguauuugcgcaaguuaucagacccagacgaacucuccuaggcgggcccgcagcgucgcuucccagucaauaaucgccuacaccaugagccugggggcagaaaauucuguggccuacuccaacaauaguauugcuaucccaacaaacuucgccaucagcguuacuaccgaaauucuucccgugucuaugacaaagacuuccgucgauuguaccauguauauaugcggcgacucaacggaguguaguaaucuguugcuccaauacggaucuuuuugcacacagcugaacagagcauuaaccggcaucgcgguggagcaggauaaaaauacucaggaaguuuucgcucaagugaagcagauuuauaaaacaccgccuaucaaggacuuugggggauucaacuuuucgcagauucugccagaucccuccaaaccuucuaagaggagcuucaucgaggaccuacucuuuaauaagguaacccuggccgaugcagguuucauaaaacaauacggcgacugucuuggggauaucgccgcucgugacuugauuugcgcccagaaguucaacggacugacuguccugcccccacucuuaaccgaugaaaugaucgcacaguauacaucagcucugcuugccggcacgauuaccagugguuggacuuuuggggcgggcgccgcuuugcagaucccuuucgcaaugcaaauggccuaccgguuuaauggaauaggcgugacacagaacgugcucuaugagaaucagaaacugauugcuaaccaguucaacuccgccaucgggaagauucaagacucucuaagcuccaccgcaucagcgcugggaaaacuccaggacgucguuaaucagaacgcccaggcucugaauacacuugugaagcaauugagcaguaacuuuggcgccaucucuuccguacugaaugauauauuaagccgacucgacaagguggaagcagagguccagaucgauagacugauuacugguaggcuucagucgcugcaaaccuacgugacgcagcaguugauccgcgcugccgagauucgggcaucagccaaccucgcugcgacaaaaaugucugaaugcguucuggggcagaguaagagaguggacuucuguggaaaaggcuaccaccuaauguccuuuccccaaagcgccccacauggugucguguuccugcacguuaccuaugugccggcacaggagaagaauuuuacuaccgcuccugccaucugccacgauggcaaagcccauuuccccagggaaggggucuuuguaucuaacggaacacacugguucgugacucagcgcaauuuuuacgagccacagauaauuaccacagacaacacguucguuagcggcaauugugauguggucaucgggaucgugaacaauaccguauaugacccccuccaaccugagcuggauuccuucaaggaggaacuugacaaauacuuuaagaaccauacuucaccagauguggacuugggagauauuaguggcaucaaugcuagcgucguuaacauucagaaggaaauagaccgacugaaugagguggccaaaaacuuaaacgaaucucucaucgaccugcaggagcuugguaaguaugagcaguacauuaaauggcccugguauaucuggcugggguucauugcaggacuaaucgcgauagugauggucacaaucaugcucugcuguaugaccuccugcuguucaugccugaagggcuguugcaguugugguagcugcugcaaauuugaugaagacgauuccgagccuguguugaagggcguuaagcugcacuacacuugaggacuagucccuguucccagagcccacuuuuuuuucuuuuuuugaaauaaaauagccugucuuucagaucucaaaggcucuuuucagagccaccaaaaaaaaaaaaaaaaaaaaaaaaaaaaaaaaaaaaaaaaaaaaaaaaaaaaaaaaaaaaaaaaaaaaaaaaaaaaaaaaaaaaaaaaaaaaaaaaaaaaa

SEQ ID NO: 12489 - RNA, 4094 nt, Artificial Sequence
  SARS-CoV-2/USA/CruiseA-23/2020__EPI_ISL_414482 spike protein mRNA human (1-1273)
aggagagucccgcagucggcguccagcggcucugcuuguucgugugugugucguugcaggccuuauucaagcuuaccauguucguguuucugguccuccuuccccugguuagcucccagugcgugaacuugaccacaagaacucaauuaccuccagccuacacuaauucuuucaccaggggcguauauuacccggacaagguguuucggucaaguguccugcacagcacacaggaucuauuccuccccuuuuucuccaacgugacuugguuucaugcuauccacguuucugggaccaauggaacaaaacgcuucgacaacccugugcugccauuuaaugauggugucuauuucgcaucgaccgagaagucaaacauuauacgaggcuggaucuuugggacuacacuugacagcaaaacccagagucuguugauugugaauaacgccacgaauguaguuaucaaggugugugaguuccaguuuugcaacgaucccuuccucggagucuacuaucauaaaaauaacaaguccuggauggagucugaguuccguguguacagcuccgcgaauaacuguacuuuugaguaugugucacaaccuuuccugauggaccuggaagucaagcagggcaauuuuaaaaaccucagagaguucguuuuuaagaacauugaugguuacuucaaaaucuacaguaagcacaccccaauaaauuuagugagggaccugccccagggguuuagcgcucuugagccuuugguagaucugccaaucggaauuaacaucacacgguuccagacucuacucgcccugcaucgcucuuaucuuaccccgggcgacuccucaagcggcuggacagcaggggccgcugcauacuaugugggauaccugcaacccagaaccuuuuugcucaaauauaaugaaaacgguacgauuacugaugccgucgacugcgcucuggauccuuuaagugagacaaaguguacccugaagucuuucacuguggaaaaaggcaucuaccagacauccaauuuuaggguucagccaaccgagagcauagugcgguuccccaacauuacgaaucucugcccuuuuggggaggucuucaacgccacccgcuucgcgucgguguaugcauggaaucgaaagagaaucucuaacuguguagccgacuacuccguucuuuacaauucagcuaguuuuagcacauucaaaugcuauggaguguccccaacuaagcugaacgacuuguguuuuaccaaugucuacgccgauucuuucgugauuaggggcgacgaaguccggcagaucgcacccggucaaacagggaaaaucgcugauuauaacuacaagcuaccggacgauuuuacuggaugcgugauugccuggaauagcaacaaccuggacucaaaaguuggcggcaauuauaacuaccucuaucgucuguuccgcaagaguaaucuuaagccuuuugagagagauauauccaccgaaaucuaccaggcggggagcacacccuguaacggaguggaggguuucaauugcuacuuuccacugcagucuuauggcuuccaaccuaccaacgggguaggauaccagcccuauagggucgugguuuugucauuugaacuccugcacgccccagcaacugugugcggccccaaaaagaguacgaauuuagucaaaaacaagugugugaauuucaacuuuaauggucugacagggaccggcguacuaacugagagcaacaaaaaguuccucccuuuccagcaguuuggacgggacauugcugauaccacagacgccgugcgagauccacaaacccuggagauccuugacauaacuccgugcuccuucggcgggguuucugucauuacacccggaacgaauaccucgaaccagguggcuguguuguaccaggacgucaauuguacugaaguuccuguggccauccacgcagaucagcugacaccaaccuggcgcguguauagcacagguuccaacguauuucaaacuagagccggcugccucaucggggcugagcaugucaacaauucauacgaaugugacauucccaucggagcgggcauuugcgcaaguuaucagacccagacgaacucuccuaggcgggcccgcagcguggcuucccagucaauaaucgccuacaccaugagccugggugcagaaaauucuguugccuacuccaacaauaguauugcuaucccaacaaacuucacuaucagcgugaccacagaaauucuucccgucucuaugacuaagaccuccguggauuguacgauguauauaugcggggacucaacagaguguaguaaucuguugcuccaauacggcagcuuuugcacccagcugaacagagccuuaacuggaaucgcaguugagcaggauaaaaauacacaggaaguguucgcgcaaguaaagcagauuuauaaaaccccgccuaucaaggacuuuggcggguucaacuuuucgcagauucugccagaucccuccaaaccuucuaagaggagcuucaucgaggaccuacucuuuaauaaggucacucuggcugaugccggauucauaaaacaauacggugacugucuuggcgauaucgcagcccgugacuugauuugcgcucagaaguucaacgggcugaccgugcugcccccacucuuaacagaugaaaugaucgcccaguauacgucagcacugcuugcuggaaccauuacgaguggcuggacauuuggugccggggcggccuugcagaucccuuucgcuaugcaaauggcauaccgguuuaauggcauaggagugacccagaacguccucuaugagaaucagaaacugauugccaaccaguucaacuccgcuaucggcaagauucaagacucucuaagcuccacagccucagcacuggggaaacuccaggacguugugaaucagaacgcgcaggcccugaauacucuuguaaagcaauugagcaguaacuuuggagcuaucucuuccgugcugaaugauauauuaagccgacucgacaaggucgaagccgaggugcagaucgauagacugauuaccggcaggcuucagucgcugcaaacguacguuacacagcaguugauccgcgcagcugagauucgggccucagcaaaccucgccgcuaccaaaaugucugaaugcgugcugggucagaguaagagagucgacuucugugggaaaggauaccaccuaauguccuuuccccaaagcgcgccacauggcgugguuuuccugcacgugacuuaugucccggcccaggagaagaauuuuaccacagcuccugcaaucugccacgaugguaaagcccauuuccccagggaaggcguauuugugucuaacgggacucacugguucguuacccagcgcaauuuuuacgagccacagauaauuacaacggacaacaccuucgugagcggaaauugugaugucgugaucggcaucguaaacaauacuguguaugacccccuccaaccugagcuggauuccuucaaggaagaacuugacaaauacuuuaagaaccauacaucaccagaugucgacuugggggauauuaguggaaucaaugccagcguugugaacauucagaaggaaauagaccgacugaaugagguggcuaaaaacuuaaacgaaucucucaucgaccugcaggagcuuggcaaguaugagcaguacauuaaauggcccugguauaucuggcuggguuucauugcagggcuaaucgccauagucauggugaccaucaugcucugcuguaugacuuccugcuguucaugccugaagggauguugcaguuguggcagcugcugcaaauuugaugaagacgauuccgagccuguuuugaaggguguaaagcugcacuacacaugaggacuagucccuguucccagagcccacuuuuuuuucuuuuuuugaaauaaaauagccugucuuucagaucucaaaggcucuuuucagagccaccaaaaaaaaaaaaaaaaaaaaaaaaaaaaaaaaaaaaaaaaaaaaaaaaaaaaaaaaaaaaaaaaaaaaaaaaaaaaaaaaaaaaaaaaaaaaaaaaaaaaa

SEQ ID NO: 12490 - RNA, 4094 nt, Artificial Sequence
  SARS-CoV-2/Hong Kong/case85_VM20002868/2020__EPI_ISL_414519 spike protein mRNA human (1-1273)
aggagagucccgcagucggcguccagcggcucugcuuguucgugugugugucguugcaggccuuauucaagcuuaccauguucguguuucugguccucguuccccuugugagcucccagugcguaaaccugaccacaagaacucaauugccuccagccuacacuaauucuuucaccaggggcguguauuacccggacaaggucuuucggucaaguguguuacacagcacacaggaucuguuccuacccuuuuucuccaacguuacuugguuucaugcuauccacgugucugggaccaauggaacaaaacgcuucgacaacccuguccucccauuuaaugaugguguguauuucgcaucgaccgagaagucaaacauuauacgaggcuggaucuuugggacuacacuggacagcaaaacccagagucuucugauuguaaauaacgccacgaauguugugaucaaggucugugaguuccaguuuugcaacgaucccuucuugggaguguacuaucauaaaaauaacaaguccuggauggagucugaguuccguguguacagcuccgcgaauaacuguacuuuugaauaugucucacaaccuuuccucauggaccuggaaggcaagcaggguaauuuuaaaaaccugagagaguucguuuuuaagaacauugauggguacuucaaaaucuacaguaagcacaccccaauaaaucucgugagggacuuaccccagggauuuagcgcucuggagccucuuguagauuugccaaucggcauuaacaucacacgguuccagacucugcuagcccuccaucgcucuuaucugaccccgggcgacuccucaagcggguggacagcaggagccgcugcauacuauguggguuaccuucaacccagaaccuuucuguugaaauauaaugaaaacggcacgauuacugaugccgucgacugcgcucucgauccucugagugagacaaaguguaccuuaaagucuuucacuguggaaaaagggaucuaccagacauccaauuuuaggguucagccaaccgagagcauagugcgguuccccaacauuacgaaucugugcccuuuuggagaggucuucaacgccacccgcuucgcgucgguguaugcauggaaucgaaagagaaucucuaacuguguagccgacuacuccguucucuacaauucagcuaguuuuagcacauucaaaugcuauggcguguccccaacuaaacuuaacgaccuguguuuuaccaaugucuacgccgauucuuucgugauuaggggugacgaaguccggcagaucgcacccgggcaaacaggaaagaucgcugauuauaacuacaaguugccggacgauuuuacuggcugcgugauugccuggaauagcaacaaccuagacucaaaaguuggcgggaauuauaacuaccuguaucgucucuuccgcaagaguaaucugaagccuuuugagagagauauauccaccgaaaucuaccaggcgggaagcacacccuguaacgguguggagggcuucaauugcuacuuuccacuucagucuuauggguuccaaccuaccaacggaguaggcuaccagcccuauagggucgugguucugucauuugaauugcuccacgccccagcaacugugugcggucccaaaaagaguacgaaucuggucaaaaacaagugugugaauuucaacuuuaauggguuaacaggcaccggaguacugacugagagcaacaaaaaguuccuaccuuuccagcaguuuggccgggacauugcugauaccacagacgccgugcgagauccacaaacccucgagauccuggacauaacuccgugcuccuucgggggaguuucugucauuacacccgguacgaauaccucgaaccagguggcugugcuuuaccaggacgucaauuguacugaaguuccuguggccauccacgcagaucaguugacaccaaccuggcgcguguauagcacaggcuccaacguauuucaaacuagagccgggugccugaucggagcugagcaugucaacaauucauacgaaugugacauucccaucggcgcggguauuugcgcaaguuaucagacccagacgaacucuccuaggcgggcccgcagcguggcuucccagucaauaaucgccuacaccaugagccucggggcagaaaauucuguugccuacuccaacaauaguauugcuaucccaacaaacuucacuaucagcgugaccacagaaauucugcccgucucuaugacuaagaccuccguggauuguacgauguauauaugcggcgacucaacagaguguaguaaucuucuguugcaauacggcagcuuuugcacccagcucaacagagcccugacuggaaucgcaguugagcaggauaaaaauacacaggaaguguucgcgcaaguaaagcagauuuauaaaaccccgccuaucaaggacuuugggggauucaacuuuucgcagauuuuaccagaucccuccaaaccuucuaagaggagcuucaucgaggaccugcuauuuaauaaggucacucucgcugaugccgguuucauaaaacaauacggcgacugucugggggauaucgcagcccgugaccuuauuugcgcucagaaguucaacggauugaccgugcugcccccacuccugacagaugaaaugaucgcccaguauacgucagcauuacuggcuggcaccauuacgagugguuggacauuuggggccggcgcggcccuucagaucccuuucgcuaugcaaauggcauaccgguuuaauggaauaggcgugacccagaacgucuuguaugagaaucagaaacucauugccaaccaguucaacuccgcuaucgggaagauucaagacucucugagcuccacagccucagcacuaggaaaacugcaggacguugugaaucagaacgcgcaggcccucaauacucugguaaagcaacuuagcaguaacuuuggcgcuaucucuuccguguugaaugauauacugagccgauuagacaaggucgaagccgaggugcagaucgauagacucauuaccgguaggcugcagucgcuucaaacguacguuacacagcagcugauccgcgcagcugagauucgggccucagcaaacuuggccgcuaccaaaaugucugaaugcgugcucgggcagaguaagagagucgacuucuguggaaaaggcuaccaccugauguccuuuccccaaagcgcgccacauggugugguuuuccuacacgugacuuaugucccggcccaggagaagaauuuuaccacagcuccugcaaucugccacgauggcaaagcccauuuccccagggaagggguauuugugucuaacggaacucacugguucguuacccagcgcaauuuuuacgagccacagauaauuacaacggacaacaccuucgugagcggcaauugugaugucgugaucgggaucguaaacaauacuguguaugacccccugcaaccugagcucgauuccuucaaggaggaacuggacaaauacuuuaagaaccauacaucaccagaugucgaccuuggagauauuaguggcaucaaugccagcguugugaacauucagaaggaaauagaccgauugaaugagguggcuaaaaaccugaacgaaucuuuaaucgaccuccaggagcuggguaaguaugagcaguacauuaaauggcccugguauaucuggcuuggguucauugcaggacugaucgccauagucauggugaccaucaugcuaugcuguaugacuuccugcuguucaugccucaagggcuguugcaguugugguagcugcugcaaauuugaugaagacgauuccgagccuguucugaagggcguaaaguugcacuacacaugaggacuagucccuguucccagagcccacuuuuuuuucuuuuuuugaaauaaaauagccugucuuucagaucucaaaggcucuuuucagagccaccaaaaaaaaaaaaaaaaaaaaaaaaaaaaaaaaaaaaaaaaaaaaaaaaaaaaaaaaaaaaaaaaaaaaaaaaaaaaaaaaaaaaaaaaaaaaaaaaaaaaa

SEQ ID NO: 12491 - RNA, 4094 nt, Artificial Sequence
  SARS-CoV-2/England/200990660/2020__EPI_ISL_414523 spike protein mRNA human (1-1273)
aggagagucccgcagucggcguccagcggcucugcuuguucgugugugugucguugcaggccuuauucaagcuuaccauguucguguuucugguccuccuuccccugguuagcucccagugcgugaacuugaccacaagaacucaauuaccuccagccuacacuaauucuuucaccaggggcguauauuacccggacaagguguuucggucaaguguccugcacagcacacaggaucuauuccuccccuuuuucuccaacgugacuugguuucaugcuauccacguuucugggaccaauggaacaaaacgcuucgacaacccugugcugccauuuaaugauggugucuauuucgcaucgaccgagaagucaaacauuauacgaggcuggaucuuugggacuacacuugacagcaaaacccagagucuguugauugugaauaacgccacgaauguaguuaucaaggugugugaguuccaguuuugcaacgaucccuuccucggagucuacuaucauaaaaauaacaaguccuggauggagucugaguuccguguguacagcuccgcgaauaacuguacuuuugaguaugugucacaaccuuuccugauggaccuggaaggcaagcaggguaauuuuaaaaaccucagagaguucgucuuuaagaacauugauggguacuucaaaaucuacaguaagcacaccccaauaaauuuaguuagggaccugccccagggauuuagcgcucuugagccuuugguggaucugccaaucggcauuaacaucacacgguuccagacucuacucgcccugcaucgcucuuaucuuaccccgggcgacuccucaagcggguggacagcaggagccgcugcauacuauguagguuaccugcaacccagaaccuuuuugcucaaauauaaugaaaacggcacgauuacugaugccguggacugcgcucuggauccuuuaagugagacaaaguguacccugaagucuuucacugucgaaaaagggaucuaccagacauccaauuuuagggugcagccaaccgagagcauaguucgguuccccaacauuacgaaucucugcccuuuuggagagguguucaacgccacccgcuucgcgucggucuaugcauggaaucgaaagagaaucucuaacuguguggccgacuacuccguacuuuacaauucagcuaguuuuagcacauucaaaugcuauggcguuuccccaacuaagcugaacgacuuguguuuuaccaauguguacgccgauucuuucgucauuaggggugacgaagugcggcagaucgcacccgggcaaacaggaaaaaucgcugauuauaacuacaagcuaccggacgauuuuacuggcugcgucauugccuggaauagcaacaaccuggacucaaaagugggcgggaauuauaacuaccucuaucgucuguuccgcaagaguaaucuuaagccuuuugagagagauauauccaccgaaaucuaccaggcgggaagcacacccuguaacgguguugagggcuucaauugcuacuuuccacugcagucuuauggguuccaaccuaccaacggagugggcuaccagcccuauaggguagucguguugucauuugaacuccugcacgccccagcaacuguuugcggucccaaaaagaguacgaauuuagugaaaaacaagugugucaauuucaacuuuaaugggcugacaggcaccggagugcuaacugagagcaacaaaaaguuccucccuuuccagcaguuuggccgggacauugcugauaccacagacgccguacgagauccacaaacccuggagauccuugacauaacuccgugcuccuucgggggagugucuguuauuacacccgguacgaauaccucgaaccaggucgcuguguuguaccagggcgugaauuguacugaagucccuguugccauccacgcagaccagcugacaccaaccuggcgcguguauagcacaggguccaacguguuucaaacuagagccggaugccucaucggcgcugagcauguaaacaauucauacgaaugugauauucccaucggugcggggauuugcgcaaguuaucagacccagacgaacucuccuaggcgggcccgcagcgucgcuucccagucaauaaucgccuacaccaugagccugggcgcagaaaauucuguggccuacuccaacaauaguauugcuaucccaacaaacuucacuaucagcguuaccacagaaauucuucccgugucuaugacuaagaccuccgucgacuguacgauguauauaugcggagauucaacagaguguaguaaucuguugcuccaauacggcagcuuuugcacccagcugaacagagccuuaacugggaucgcaguggagcaggacaaaaauacacaggaaguuuucgcgcaagugaagcagauuuauaaaaccccgccuaucaaggauuuuggagguuucaacuuuucgcagauucugccagaccccuccaaaccuucuaagaggagcuucaucgaggaucuacucuuuaauaagguaacucuggcugacgccggcuucauaaaacaauacggggauugucuuggagacaucgcagcccgugauuugauuugcgcucagaaguucaacggccugaccguccugcccccacucuuaacagacgaaaugaucgcccaguauacgucagcacugcuugcugguaccauuacgaguggguggacauuuggcgccggagcggccuugcagaucccuuucgcuaugcaaauggcauaccgguuuaauggcauaggggugacccagaacgugcucuaugagaaucagaaacugauugccaaccaguucaacuccgcuaucggaaagauucaagauucucuaagcuccacagccucagcacugggcaaacuccaggacgucguuaaucagaacgcgcaggcccugaauacucuugugaagcaauugagcaguaacuuuggugcuaucucuuccguacugaaugacauauuaagccgacucgauaagguggaagccgagguccagaucgacagacugauuaccgggaggcuucagucgcugcaaacguacgugacacagcaguugauccgcgcagcugagauucgggccucagcaaaccucgccgcuaccaaaaugucugaaugcguucugggacagaguaagagaguggauuucuguggcaaagguuaccaccuaauguccuuuccccaaagcgcgccacauggcgucguguuccugcacguuacuuaugugccggcccaggagaagaauuuuaccacagcuccugcaaucugccacgacgggaaagcccauuuccccagggaaggagucuuuguaucuaacggcacucacugguucgugacccagcgcaauuuuuacgagccacagauaauuacaacggauaacaccuucguuagcgggaauugugacguggucaucggaaucgugaacaauacuguauaugauccccuccaaccugagcuggacuccuucaaggaagaacuugauaaauacuuuaagaaccauacaucaccagacguggauuugggcgacauuagugguaucaaugccagcgucguuaacauucagaaggaaauagaucgacugaaugagguggcuaaaaacuuaaacgaaucucucaucgaccugcaggagcuugggaaguaugagcaguacauuaaauggcccugguauaucuggcugggauucauugcaggccuaaucgccauagugauggucaccaucaugcucugcuguaugacuuccugcuguucaugccugaaggguuguugcaguuguggcagcugcugcaaauuugacgaagaugacuccgaguuggugcugaaggggguuaaguuacacuacacaugaggacuagucccuguucccagagcccacuuuuuuuucuuuuuuugaaauaaaauagccugucuuucagaucucaaaggcucuuuucagagccaccaaaaaaaaaaaaaaaaaaaaaaaaaaaaaaaaaaaaaaaaaaaaaaaaaaaaaaaaaaaaaaaaaaaaaaaaaaaaaaaaaaaaaaaaaaaaaaaaaaaaa

SEQ ID NO: 12492 - RNA, 4094 nt, Artificial Sequence
  SARS-CoV-2/Australia/NSW09/2020__EPI_ISL_413595 spike protein mRNA human (1-1273)
aggagagucccgcagucggcguccagcggcucugcuuguucgugugugugucguugcaggccuuauucaagcuuaccauguucguguuucugguccuccuuccccugguuagcucccagugcgugaacuugaccacaagaacucaauuaccuccagccuacacuaauucuuucaccaggggcguauauuacccggacaagguguuucggucaaguguccugcacagcacacaggaucuauuccuccccuuuuucuccaacgugacuugguuucaugcuauccacguuucugggaccaauggaacaaaacgcuucgacaacccugugcugccauuuaaugauggugucuauuucgcaucgaccgagaagucaaacauuauacgaggcuggaucuuugggacuacacuugacagcaaaacccagagucuguugauugugaauaacgccacgaauguaguuaucaaggugugugaguuccaguuuugcaacgaucccuuccucggagucuacuaucauaaaaauaacaaguccuggauggagucugaguuccguguguacagcuccgcgaauaacuguacuuuugaauaugugucacaaccuuuccugauggaccuggaaggcaagcaggguaauuuuaaaaaccucagagaguucgucuuuaagaacauugauggguacuucaaaaucuacaguaagcacaccccaauaaauuuaguuagggaccugccccagggauuuagcgcucuugagccuuugguggaucugccaaucggcauuaacaucacacgguuccagacucuacucgcccugcaucgcucuuaucuuaccccgggcgacuccucaagcggguggacagcaggagccgcugcauacuauguagguuaccugcaacccagaaccuuuuugcucaaauauaaugaaaacggcacgauuacugaugccguggacugcgcucuggauccuuuaagugagacaaaguguacccugaagucuuucacugucgaaaaagggaucuaccagacauccaauuuuagggugcagccaaccgagagcauaguucgguuccccaacauuacgaaucucugcccuuuuggagagguguucaacgccacccgcuucgcgucggucuaugcauggaaucgaaagagaaucucuaacuguguggccgacuacuccguacuuuacaauucagcuaguuuuagcacauucaaaugcuauggcguuuccccaacuaagcugaacgacuuguguuuuaccaauguguacgccgauucuuucgucauuaggggugacgaagugcggcagaucgcacccgggcaaacaggaaaaaucgcugauuauaacuacaagcuaccggacgauuuuacuggcugcgucauugccuggaauagcaacaaccuggacucaaaagugggcgggaauuauaacuaccucuaucgucuguuccgcaagaguaaucuuaagccuuuugagagagauauauccaccgaaaucuaccaggcgggaagcacacccuguaacgguguugagggcuucaauugcuacuuuccacugcagucuuauggguuccaaccuaccaacggagugggcuaccagcccuauaggguagucguguugucauuugaacuccugcacgccccagcaacuguuugcggucccaaaaagaguacgaauuuagugaaaaacaagugugucaauuucaacuuuaaugggcugacaggcaccggagugcuaacugagagcaacaaaaaguuccucccuuuccagcaguuuggccgggacauugcugauaccacagacgccguacgagauccacaaacccuggagauccuugacauaacuccgugcuccuucgggggagugucuguuauuacacccgguacgaauaccucgaaccaggucgcuguguuguaccaggacgugaauuguacugaagucccuguugccauccacgcagaucagcugacaccaaccuggcgcguguauagcacaggcuccaacguguuucaaacuagagccgggugccucaucggagcugagcauguaaacaauucauacgaaugugacauucccaucggcgcggguauuugcgcaaguuaucagacccagacgaacucuccuaggcgggcccgcagcgucgcuucccagucaauaaucgccuacaccaugagccugggggcagaaaauucuguggccuacuccaacaauaguauugcuaucccaacaaacuucacuaucagcguuaccacagaaauucuucccgugucuaugacuaagaccuccgucgauuguacgauguauauaugcggcgacucaacagaguguaguaaucuguugcuccaauacggcagcuuuugcacccagcugaacagagccuuaacuggaaucgcaguggagcaggauaaaaauacacaggaaguuuucgcgcaagugaagcagauuuauaaaaccccgccuaucaaggacuuugggggauucaacuuuucgcagauucugccagaucccuccaaaccuucuaagaggagcuucaucgaggaccuacucuuuaauaagguaacucuggcugaugccgguuucauaaaacaauacggcgacugucuuggggauaucgcagcccgugacuugauuugcgcucagaaguucaacggacugaccguccuacccccacuguuaacagaugaaaugaucgcccaguauacgucagcacugcuugcuggcaccauuacgagugguuggacauuuggggccggcgcggccuugcagaucccuuucgcuaugcaaauggcauaccgguuuaauggaauaggcgugacccagaacgugcucuaugagaaucagaaacugauugccaaccaguucaacuccgcuaucgggaagauucaagacucucucagcuuuacagccuccgcacugggaaaacuccaggacgucguuaaucagaacgcgcaggcccugaauacucuugugaagcaauugucaagcaacuucggcgcuaucaguucuguacugaaugauauauuaucccgacucgacaagguggaagccgagguccagaucgauagacugauuaccgguaggcuucagagccugcaaacguacgugacacagcaguugauccgcgcagcugagauucgggccucggcaaaccucgccgcuaccaaaaugucagaaugcguucuggggcagucuaagagaguggacuuuuguggaaaaggcuaccaccuaaugaguuucccccaauccgcgccacauggugucguguuucugcacguuacuuaugugccggcccaggagaagaauuucaccacagcuccugcaaucugccacgauggcaaagcccauuuucccagggaaggggucuucguaagcaacggaacucacugguuugugacccagcgcaauuucuacgagccacagauaauuacaacggacaacaccuucguuucuggcaauugugauguggucaucgggaucgugaacaauacuguauaugacccccuccaaccugagcuggauagcuuuaaggaggaacuugacaaauacuucaagaaccauacauccccagauguggacuugggagauauuucaggcaucaaugccagugucguuaacauucagaaggaaauagaccgacugaaugagguggcuaaaaacuuaaacgaaagccucaucgaccugcaggagcuugguaaguaugagcaguacauuaaauggcccugguauaucuggcugggguuuauugcaggacuaaucgccauagugauggucaccaucaugcucugcuguaugacuucuugcuguuccugccugaagggcuguugcucaugugguaguugcugcaaauucgaugaagacgauagcgagccuguguugaagggcguuaagcugcacuacacaugaggacuagucccuguucccagagcccacuuuuuuuucuuuuuuugaaauaaaauagccugucuuucagaucucaaaggcucuuuucagagccaccaaaaaaaaaaaaaaaaaaaaaaaaaaaaaaaaaaaaaaaaaaaaaaaaaaaaaaaaaaaaaaaaaaaaaaaaaaaaaaaaaaaaaaaaaaaaaaaaaaaaa

SEQ ID NO: 12493 - RNA, 4094 nt, Artificial Sequence
  SARS-CoV-2/Australia/NSW10/2020__EPI_ISL_413596 spike protein mRNA human (1-1273)
aggagagucccgcagucggcguccagcggcucugcuuguucgugugugugucguugcaggccuuauucaagcuuaccauguucguguuucugguccuccuuccccugguuagcucccagugcgugaacuugaccacaagaacucaauuaccuccagccuacacuaauucuuucaccaggggcguauauuacccggacaagguguuucggucaaguguccugcacagcacacaggaucuauuccuccccuuuuucuccaacgugacuugguuucaugcuauccacguuucugggaccaauggaacaaaacgcuucgacaacccugugcugccauuuaaugauggugucuauuucgcaucgaccgagaagucaaacauuauacgaggcuggaucuuugggacuacacuugacagcaaaacccagagucuguugauugugaauaacgccacgaauguaguuaucaaggugugugaguuccaguuuugcaacgaucccuuccucggagucuacuaucauaaaaauaacaaguccuggauggagucugaguuccguguguacagcuccgcgaauaacuguacuuuugaauaugugucacaaccuuuccugauggaccuggaaggcaagcaggguaauuuuaaaaaccucagagaguucgucuuuaagaacauugauggguacuucaaaaucuacaguaagcacaccccaauaaauuuaguuagggaccugccccagggauuuagcgcucuugagccuuugguggaucugccaaucggcauuaacaucacacgguuccagacucuacucgcccugcaucgcucuuaucuuaccccgggcgacuccucaagcggguggacagcaggagccgcugcauacuauguagguuaccugcaacccagaaccuuuuugcucaaauauaaugaaaacggcacgauuacugaugccguggacugcgcucuggauccuuuaagugagacaaaguguacccugaagucuuucacugucgaaaaagggaucuaccagacauccaauuuuagggugcagccaaccgagagcauaguucgguuccccaacauuacgaaucucugcccuuuuggagagguguucaacgccacccgcuucgcgucggucuaugcauggaaucgaaagagaaucucuaacuguguggccgacuacuccguacuuuacaauucagcuaguuuuagcacauucaaaugcuauggcguuuccccaacuaagcugaacgacuuguguuuuaccaauguguacgccgauucuuucgucauuaggggugacgaagugcggcagaucgcacccgggcaaacaggaaaaaucgcugauuauaacuacaagcuaccggacgauuuuacuggcugcgucauugccuggaauagcaacaaccuggacucaaaagugggcgggaauuauaacuaccucuaucgucuguuccgcaagaguaaucuuaagccuuuugagagagauauauccaccgaaaucuaccaggcgggaagcacacccuguaacgguguugagggcuucaauugcuacuuuccacugcagucuuauggguuccaaccuaccaacggagugggcuaccagcccuauaggguagucguguugucauuugaacuccugcacgccccagcaacuguuugcggucccaaaaagaguacgaauuuagugaaaaacaagugugucaauuucaacuuuaaugggcugacaggcaccggagugcuaacugagagcaacaaaaaguuccucccuuuccagcaguuuggccgggacauugcugauaccacagacgccguacgagauccacaaacccuggagauccuugacauaacuccgugcuccuucgggggagugucuguuauuacacccgguacgaauaccucgaaccaggucgcuguguuguaccaggacgugaauuguacugaagucccuguugccauccacgcagaucagcugacaccaaccuggcgcguguauagcacaggcuccaacguguuucaaacuagagccgggugccucaucggagcugagcauguaaacaauucauacgaaugugacauucccaucggcgcggguauuugcgcaaguuaucagacccagacgaacucuccuaggcgggcccgcagcgucgcuucccagucaauaaucgccuacaccaugagccugggggcagaaaauucuguggccuacuccaacaauaguauugcuaucccaacaaacuucacuaucagcguuaccacagaaauucuucccgugucuaugacuaagaccuccgucgauuguacgauguauauaugcggcgacucaacagaguguaguaaucuguugcuccaauacggcagcuuuugcacccagcugaacagagccuuaacuggaaucgcaguggagcaggauaaaaauacacaggaaguuuucgcgcaagugaagcagauuuauaaaaccccgccuaucaaggacuuugggggauucaacuuuucgcagauucugccagaucccuccaaaccuucuaagaggagcuucaucgaggaccuacucuuuaauaagguaacucuggcugaugccgguuucauaaaacaauacggcgacugucuuggggauaucgcagcccgugacuugauuugcgcucagaaguucaacggacugaccguccugcccccacucuuaacagaugaaaugaucgcccaguauacgucagcacugcuugcuggcaccauuacgagugguuggacauuuggggccggcgcggccuugcagaucccuuucgcuaugcaaauggcauaccgguuuaauggaauaggcgugacccagaacgugcucuaugagaaucagaaacugauugccaaccaguucaacuccgcuaucgggaagauucaagacucucuaagcuccacagccucagcacugggaaaacuccaggacgucguuaaucagaacgcgcaggcccugaauacucuugugaagcaauugagcaguaacuuuggcgcuaucucuuccguacugaaugauauauuaagccgacucgacaagguggaagccgagguccagaucgauagacugauuaccgguaggcuucagucgcugcaaacguacgugacacagcaguugauccgcgcagcugagauucgggccucagcaaaccucgccgcuaccaaaaugucugaaugcguucuggggcagaguaagagaguggacuucuguggaaaaggcuaccaccuaauguccuuuccccaaagcgcgccacauggugucguguuccugcacguuacuuaugugccggcccaggagaagaauuuuaccacagcuccugcaaucugccacgauggcaaagcccauuuccccagggaaggggucuuuguaucuaacggaacucacugguucgugacccagcgcaauuuuuacgagccacagauaauuacaacggacaacaccuucguuagcggcaauugugauguggucaucgggaucgugaacaauacuguauaugacccccuccaaccugagcuggauuccuucaaggaggaacuugacaaauacuuuaagaaccauacaucaccagauguggacuugggagauauuaguggcaucaaugccagcgucguuaacauucagaaggaaauagaccgacugaaugagguggcuaaaaacuuaaacgaaucucucaucgaccugcaggagcuugguaaguaugagcaguacauuaaauggcccugguauaucuggcugggguucauugcaggacuaaucgccauagugauggucaccaucaugcucugcuguaugacuuccugcuguucaugccugaagggcuguugcaguugugguagcugcuuuaaauucgaugaagacgauuccgagccuguguugaagggcguuaagcugcacuacacaugaggacuagucccuguucccagagcccacuuuuuuuucuuuuuuugaaauaaaauagccugucuuucagaucucaaaggcucuuuucagagccaccaaaaaaaaaaaaaaaaaaaaaaaaaaaaaaaaaaaaaaaaaaaaaaaaaaaaaaaaaaaaaaaaaaaaaaaaaaaaaaaaaaaaaaaaaaaaaaaaaaaaa

SEQ ID NO: 12494 - RNA, 4094 nt, Artificial Sequence
  SARS-CoV-2/Switzerland/1000477797/2020__EPI_ISL_413023 spike protein mRNA human (1-1273)
aggagagucccgcagucggcguccagcggcucugcuuguucgugugugugucguugcaggccuuauucaagcuuaccauguucguguuucugguccuccuuccccugguuagcucccagugcgugaacuugaccacaagaacucaauuaccuccagccuacacuaauucuuucaccaggggcguauauuacccggacaagguguuucggucaaguguccugcacagcacacaggaucuauuccuccccuuuuucuccaacgugacuugguuucaugcuauccacguuucugggaccaauggaacaaaacgcuucgacaacccugugcugccauuuaaugauggugucuauuucgcaucgaccgagaagucaaacauuauacgaggcuggaucuuugggacuacacuugacagcaaaacccagagucuguugauugugaauaacgccacgaauguaguuaucaaggugugugaguuccaguuuugcaacgaucccuuccucggagucuacuaucauaaaaauaacaaguccuggauggagucugaguuccguguguacagcuccgcgaauaacuguacuuuugaauaugugucacaaccuuuccugauggaccuggaaggcaagcaggguaauuuuaaaaaccucagagaguucgucuuuaagaacauugauggguacuucaauaucuacaguaaacacaccccaauaaacuuaguuagggaccugccccagggauuuagcgcucuugagccuuugguggaucugccaaucggcauuaauaucacacgguuccagacucuacucgcccugcaucgcucuuaucuuaccccgggcgacuccucaagcggguggacagcaggagccgcugcauacuauguagguuaccugcaacccagaaccuuuuugcucaaguauaacgaaaauggcacgauuacugaugccguggacugcgcucuggauccuuuaagugagacaaaauguacccugaagucuuucacugucgaaaaggggaucuaccagacauccaacuuuagggugcagccaaccgagagcauaguucgguuccccaauauuacgaaccucugcccuuuuggagagguguucaaugccacccgcuucgcgucggucuaugcauggaaccgaaaaagaaucucuaauuguguggccgacuacuccguacuuuacaacucagcuaguuuuagcacauucaagugcuauggcguuuccccaacuaaacugaaugacuuguguuuuaccaacguguacgccgauucuuucgucauuaggggugacgaagugcggcagaucgcacccgggcaaacaggaaagaucgcugauuauaauuacaaacuaccggacgauuuuacuggcugcgucauugccuggaacagcaacaaucuggacucaaaggugggcgggaacuauaauuaccucuaucgucuguuccgcaaaaguaaccuuaagccuuuugagagagauauauccaccgaaaucuaccaggcgggaagcacacccuguaaugguguugagggcuucaacugcuacuuuccacugcagucuuauggguuccaaccuaccaauggagugggcuaccagcccuauaggguagucguguugucauuugaacuccugcacgccccagcaacuguuugcggucccaagaaaaguacgaacuuagugaagaauaaaugugucaacuucaauuuuaacgggcugacaggcaccggagugcuaacugagagcaauaagaaauuccucccuuuccagcaguuuggccgggacauugcugauaccacagacgccguacgagauccacaaacccuggagauccuugacauaacuccgugcuccuucgggggagugucuguuauuacacccgguacgaacaccucgaaucaggucgcuguguuguaccagggcgugaacuguacugaagucccuguugccauccacgcagaccagcugacaccaaccuggcgcguguauagcacaggguccaacguguuucaaacuagagccggaugccucaucggcgcugagcauguaaauaacucauacgaaugugauauucccaucggugcggggauuugcgcaaguuaucagacccagaccaauucuccuaggcgggcccgcagcgucgcuucccagucaauaaucgccuacacgaugagccugggcgcagagaacucuguggccuacuccaauaacaguauugcuaucccaacaaauuucacuaucagcguuaccacagaaauucuucccgugucuaugacuaagaccuccgucgacuguacgauguauauaugcggagauucaacagaguguaguaaccuguugcuccaauacggcagcuuuugcacccagcugaauagagccuuaacugggaucgcaguggagcaggacaagaacacacaggaaguuuucgcgcaagugaaacagauuuauaagaccccgccuaucaaagauuuuggagguuucaauuuuucgcagauucugccagaccccuccaagccuucuaaaaggagcuucaucgaggaucuacucuuuaacaagguaacucuggcugacgccggcuucauaaagcaauacggggauugucuuggagacaucgcagcccgugauuugauuugcgcucagaaauucaauggccugaccguccugcccccacucuuaacagacgaaaugaucgcccaguauacgucagcacugcuugcugguaccauuacgaguggguggacauuuggcgccggagcggccuugcagaucccuuucgcuaugcaaauggcauaccgguuuaacggcauaggggugacccagaaugugcucuaugagaaccagaagcugauugccaaccaguucaauuccgcuaucggaaaaauucaagauucucuaagcuccacagccucagcacugggcaagcuccaggacgucguuaaccagaaugcgcaggcccugaacacucuugugaaacaauugagcaguaauuuuggugcuaucucuuccguacugaacgacauauuaagccgacucgauaagguggaagccgagguccagaucgacagacugauuaccgggaggcuucagucgcugcaaacguacgugacacagcaguugauccgcgcagcugagauucgggccucagcaaaucucgccgcuaccaagaugucugaaugcguucugggacagaguaaaagaguggauuucuguggcaaggguuaccaccuaauguccuuuccccaaagcgcgccacauggcgucguguuccugcacguuacuuaugugccggcccaggagaaaaacuuuaccacagcuccugcaaucugccacgacgggaaggcccauuuccccagggaaggagucuuuguaucuaauggcacucacugguucgugacccagcgcaacuuuuacgagccacagauaauuacaacggauaauaccuucguuagcgggaacugugacguggucaucggaaucgugaauaacacuguauaugauccccuccaaccugagcuggacuccuucaaagaagaacuugauaaguacuuuaaaaaucauacaucaccagacguggauuugggcgacauuagugguaucaacgccagcgucguuaauauucagaaggaaauagaucgacugaacgagguggcuaagaacuuaaaugaaucucucaucgaccugcaggagcuugggaaauaugagcaguacauuaaguggcccugguauaucuggcugggauucauugcaggccuaaucgccauagugauggucaccaucaugcucugcuguaugacuuccugcuguucaugccugaaagguuguugcaguuguggcagcugcugcaaguuugacgaagaugacuccgagccuguguugaaagggguuaagcugcacuacacaugaggacuagucccuguucccagagcccacuuuuuuuucuuuuuuugaaauaaaauagccugucuuucagaucucaaaggcucuuuucagagccaccaaaaaaaaaaaaaaaaaaaaaaaaaaaaaaaaaaaaaaaaaaaaaaaaaaaaaaaaaaaaaaaaaaaaaaaaaaaaaaaaaaaaaaaaaaaaaaaaaaaaa

SEQ ID NO: 12495 - RNA, 4094 nt, Artificial Sequence
  SARS-CoV-2/Belgium/BA-02291/2020__EPI_ISL_415159 spike protein mRNA human (1-1273)
aggagagucccgcagucggcguccagcggcucugcuuguucgugugugugucguugcaggccuuauucaagcuuaccauguucguguuucugguccuccuuccccugguuagcucccagugcgugaacuugaccacaagaacucaauuaccuccagccuacacuaauucuuucaccaggggcguauauuacccggacaagguguuucggucaaguguccugcacagcacacaggaucuauuccuccccuuuuucuccaacgugacuugguuucaugcuauccacguuucugggaccaauggaacaaaacgcuucgacaacccugugcugccauuuaaugauggugucuauuucgcaucgaccgagaagucaaacauuauacgaggcuggaucuuugggacuacacuugacagcaaaacccagagucuguugauugugaauaacgccacgaauguaguuaucaaggugugugaguuccaguuuugcaacgaucccuuccucggagucuacuaucauaaaaauaacaaguccuggauggagucugaguuccguguguacagcuccgcgaauaacuguacuuuugaguaugugucacaaccuuuccugauggaccuggaaggcaagcaggguaauuuuaaaaaccucagagaguucgucuuuaagaacauugauggguacuucaaaaucuacaguaagcacaccccaauaaauuuaguuagggaccugccccagggauuuagcgcucuugagccuuugguggaucugccaaucggcauuaacaucacacgguuccagacucuacucgcccugcaucgcucuuaucuuaccccgggcgacuccucaagcggguggacagcaggagccgcugcauacuauguagguuaccugcaacccagaaccuuuuugcucaaauauaaugaaaacggcacgauuacugaugccguggacugcgcucuggauccuuuaagugagacaaaguguacccugaagucuuucacugucgaaaaagggaucuaccagacauccaauuuuagggugcagccaaccgagagcauaguucgguuccccaacauuacgaaucucugcccuuuuggagagguguucaacgccacccgcuucgcgucggucuaugcauggaaucgaaagagaaucucuaacuguguggccgacuacuccguacuuuacaauucagcuaguuuuagcacauucaaaugcuauggcguuuccccaacuaagcugaacgacuuguguuuuaccaauguguacgccgauucuuucgucauuaggggugacgaagugcggcagaucgcacccgggcaaacaggaaaaaucgcugauuauaacuacaagcuaccggacgauuuuacuggcugcgucauugccuggaauagcaacaaccuggacucaaaagugggcgggaauuauaacuaccucuaucgucuguuccgcagaaguaaucuuaagccuuuugagagggauauauccaccgaaaucuaccaggcgggaagcacacccuguaacgguguugagggcuucaauugcuacuuuccacugcagucuuauggguuccaaccuaccaacggagugggcuaccagcccuaucggguagucguguugucauuugaacuccugccagcccccgcaacuguuugcgguccuaagaaaaguacgaauuuagugaagaacaaaugugucaauuucaacuuuaaugggcugacaggcaccggagugcuaacugagagcaacaagaaauuccucccauuccagcaguuuggccgagacauugcugauaccacagacgccguacgcgauccgcaaacccuggagauccuugacauaacucccugcuccuucgggggagugucuguuauuacaccugguacgaauaccucgaaccaggucgcuguguuguaccagggcgugaauuguacugaagucccaguugccauccacgcagaccagcugacacccaccuggagaguguauagcacaggguccaacguguuucaaacuagggccggaugccucaucggcgcugagcacguaaacaauucauacgaaugugauauuccuaucggugcggggauuugcgcaaguuaucagacccagacgaacucuccacggcgcgccagaagcgucgcuucccagucaauaaucgccuacaccaugagccugggcgcagaaaauucuguggccuacuccaacaauaguauugcuauccccacaaacuucacuaucagcguuaccacagaaauucuuccggugucuaugacuaagaccuccgucgacuguacgauguauauaugcggagauucaacagaguguaguaaucuguugcuccaauacggcagcuuuugcacccagcugaacagggccuuaacugggaucgcaguggagcaggacaagaauacacaggaaguuuucgcgcaagugaaacagauuuauaagaccccuccaaucaaagauuuuggagguuucaacuuuucgcagauucugcccgacccuuccaagcccucuaaacguagcuucaucgaggaucuacucuuuaauaagguaacucuggcugacgccggcuucauaaagcaauacggggauugucuuggagacaucgcagcccgggauuugauuugcgcucagaaauucaacggccugaccguccucccaccucuguuaacagacgaaaugaucgcccaguauacgucagcacugcuugcugguaccauuacgaguggguggacauuuggcgccggagcggccuugcagauccccuucgcuaugcaaauggcauaccgauuuaauggcauaggggugacccagaacgugcucuaugagaaucagaagcugauugccaaccaguucaacuccgcuaucggaaaaauucaagauucucuaagcuccgccgcaccagcgcugggcaagcuccaggacgucguuaaucagaacgcccaggcucugaauacacuugugaaacaauugucaagcaacuuuggugccaucaguucuguacugaaugacauauuauccagacucgauaagguggaagcagagguccagaucgacaggcugauuacugggcgccuucagagccugcaaaccuacgugacgcagcaguugauccgggcugccgagauuagagcaucggccaaccucgcugcgacaaagaugucagaaugcguucugggacagucuaaaaggguggauuucuguggcaaggguuaccaucuaaugaguuuuccgcaauccgccccucacggcgucguguuccugcauguuaccuaugugcccgcacaggagaaaaauuuuacuaccgcuccagccaucugccacgacgggaaggcccacuucccccgcgaaggagucuuuguaagcaacggcacacauugguucgugacucagcgaaauuuuuacgagccucagauaauuaccacagauaacacguucguuucugggaauugugacguggucaucggaaucgugaacaauaccguauaugauccacuccaacccgagcuggacagcuucaaagaagaacuugauaaguacuuuaaaaaccacacuuccccugacguggauuugggcgacauuucagguaucaaugcuagugucguuaacauucagaaggaaauagaucggcugaaugagguggcaaagaacuuaaacgaaagccucaucgaccugcaggagcuugggaaauaugagcaguacauuaaguggccgugguauaucuggcugggauucauugccggccuaaucgcgauagugauggucacaaucaugcucugcuguaugaccucuugcuguuccugccugaaagguuguugcucauguggcaguugcugcaaguuugacgaagaugacagcgagccaguguugaaagggguuaagcugcauuacacuugaggacuagucccuguucccagagcccacuuuuuuuucuuuuuuugaaauaaaauagccugucuuucagaucucaaaggcucuuuucagagccaccaaaaaaaaaaaaaaaaaaaaaaaaaaaaaaaaaaaaaaaaaaaaaaaaaaaaaaaaaaaaaaaaaaaaaaaaaaaaaaaaaaaaaaaaaaaaaaaaaaaaa

SEQ ID NO: 12496 - RNA, 4094 nt, Artificial Sequence
  SARS-CoV-2/USA/WA8-UW5/2020__EPI_ISL_413486 spike protein mRNA human (1-1273)
aggagagucccgcagucggcguccagcggcucugcuuguucgugugugugucguugcaggccuuauucaagcuuaccauguucguguuucugguccuccuuccccugguuagcucccagugcgugaacuugaccacaagaacucaauuaccuccagccuacacuaauucuuucaccaggggcguauauuacccggacaagguguuucggucaaguguccugcacagcacacaggaucuauuccuccccuuuuucuccaacgugacuugguuucaugcuauccacguuucugggaccaauggaacaaaacgcuucgacaacccugugcugccauuuaaugauggugucuauuucgcaucgaccgagaagucaaacauuauacgaggcuggaucuuugggacuacacuugacagcaaaacccagagucuguugauugugaauaacgccacgaauguaguuaucaaggugugugaguuccaguuuugcaacgaucccuuccucggagucuacuaucauaaaaauaacaaguccuggauggagucugaguuccguguguacagcuccgcgaauaacuguacuuuugaauaugugucacaaccuuuccugauggaccuggaaggcaagcaggguaauuuuaaaaaccucagagaguucgucuuuaagaacauugauggguacuucaaaaucuacaguaagcacaccccaauaaauuuaguuagggaccugccccagggauuuagcgcucuugagccuuugguggaucugccaaucggcauuaacaucacacgguuccagacucuacucgcccugcaucgcucuuaucuuaccccgggcgacuccucaagcggguggacagcaggagccgcugcauacuauguagguuaccugcaacccagaaccuuuuugcucaaauauaaugaaaacggcacgauuacugaugccguggacugcgcucuggauccuuuaagugagacaaaguguacccugaagucuuucacugucgaaaaagggaucuaccagacauccaauuuuagggugcagccaaccgagagcauaguucgguuccccaacauuacgaaucucugcccuuuuggagagguguucaacgccacccgcuucgcgucggucuaugcauggaaucgaaagagaaucucuaacuguguggccgacuacuccguacuuuacaauucagcuaguuuuagcacauucaaaugcuauggcguuuccccaacuaagcugaacgacuuguguuuuaccaauguguacgccgauucuuucgucauuaggggugacgaagugcggcagaucgcacccgggcaaacaggaaaaaucgcugauuauaacuacaagcuaccggacgauuuuacuggcugcgucauugccuggaauagcaacaaccuggacucaaaagugggcgggaauuauaacuaccucuaucgucuguuccgcaagaguaaucuuaagccuuuugagagagauauauccaccgaaaucuaccaggcgggaagcacacccuguaacgguguugagggcuucaauugcuacuuuccacugcagucuuauggguuccaaccuaccaacggagugggcuaccagcccuauaggguagucguguugucauuugaacuccugcacgccccagcaacuguuugcggucccaaaaagaguacgaauuuagugaaaaacaagugugucaauuucaacuuuaaugggcugacaggcaccggagugcuaacugagagcaacaaaaaguuccucccuuuccagcaguuuggccgggacauugcugauaccacagacgccguacgagauccacaaacccuggagauccuugacauaacuccgugcuccuucgggggagugucuguuauuacacccgguacgaauaccucgaaccaggucgcuguguuguaccaggacgugaauuguacugaagucccuguugccauccacgcagaucagcugacaccaaccuggcgcguguauagcacaggcuccaacguguuucaaacuagagccgggugccucaucggagcugaguacguaaacaauucauaugaaugugacauucccaucggcgcggguauuugcgcaaguuaccagacccagacgaacucuccuaggcgggcccgcagcgucgcuucccagucaauaaucgccuacaccaugagccugggggcagaaaauucuguggccuauuccaacaauaguauugcuaucccaacaaacuucacuaucagcguuaccacagaaauucuucccgugucuaugacuaagaccuccgucgauuguacgauguacauaugcggcgacucaacagaguguaguaaucuguugcuccaauauggcagcuuuugcacccagcugaacagagccuuaacuggaaucgcaguggagcaggauaaaaauacacaggaaguuuucgcgcaagugaagcagauuuacaaaaccccgccuaucaaggacuuugggggauucaacuuuucgcagauucugccagaucccuccaaaccuucuaagaggagcuucaucgaggaccuacucuuuaauaagguaacucuggcugaugccgguuucauaaaacaauauggcgacugucuuggggauaucgcagcccgugacuugauuugcgcucagaaguucaacggacugaccguccugcccccacucuuaacagaugaaaugaucgcccaguacacgucagcacugcuugcuggcaccauuacgagugguuggacauuuggggccggcgcggccuugcagaucccuuucgcuaugcaaauggcauaucgguuuaauggaauaggcgugacccagaacgugcucuacgagaaucagaaacugauugccaaccaguucaacuccgcuaucgggaagauucaagacucucuaagcuccacagccucagcacugggaaaacuccaggacgucguuaaucagaacgcgcaggcccugaauacucuugugaagcaauugagcaguaacuuuggcgcuaucucuuccguacugaaugauauauuaagccgacucgacaagguggaagccgagguccagaucgauagacugauuaccgguaggcuucagucgcugcaaacguacgugacacagcaguugauccgcgcagcugagauucgggccucagcaaaccucgccgcuaccaaaaugucugaaugcguucuggggcagaguaagagaguggacuucuguggaaaaggcuaucaucuaauguccuuuccccaaagcgcgccacacggugucguguuccugcauguuacuuacgugccggcccaggagaagaauuuuaccacagcuccugcaaucugccacgauggcaaagcccacuuccccagggaaggggucuuuguaucuaacggaacucauugguucgugacccagcgcaauuuuuaugagccacagauaauuacaacggacaacaccuucguuagcggcaauugugauguggucaucgggaucgugaacaauacuguauacgacccccuccaaccugagcuggauuccuucaaggaggaacuugacaaauauuuuaagaaccacacaucaccagauguggacuugggagauauuaguggcaucaaugccagcgucguuaacauucagaaggaaauagaccgacugaaugagguggcuaaaaacuuaaacgaaucucucaucgaccugcaggagcuugguaaguacgagcaguauauuaaauggcccugguacaucuggcugggguucauugcaggacuaaucgccauagugauggucaccaucaugcucugcuguaugacuuccugcuguucaugccugaagggcuguugcaguugugguagcugcugcaaauuugaugaagacgauuccgagccuguguugaagggcguuaagcugcauuacacaugaggacuagucccuguucccagagcccacuuuuuuuucuuuuuuugaaauaaaauagccugucuuucagaucucaaaggcucuuuucagagccaccaaaaaaaaaaaaaaaaaaaaaaaaaaaaaaaaaaaaaaaaaaaaaaaaaaaaaaaaaaaaaaaaaaaaaaaaaaaaaaaaaaaaaaaaaaaaaaaaaaaaa

SEQ ID NO: 12497 - RNA, 4094 nt, Artificial Sequence
  SARS-CoV-2/England/20102000506/2020__EPI_ISL_415147 spike protein mRNA human (1-1273)
aggagagucccgcagucggcguccagcggcucugcuuguucgugugugugucguugcaggccuuauucaagcuuaccauguucguguuucugguccuccuuccccugguuagcucccagugcgugaacuugaccacaagaacucaauuaccuccagccuacacuaauucuuucaccaggggcguauauuacccggacaagguguuucggucaaguguccugcacagcacacaggaucuauuccuccccuuuuucuccaacgugacuugguuucaugcuauccacguuucugggaccaauggaacaaaacgcuucgacaacccugugcugccauuuaaugauggugucuauuucgcaucgaccgagaagucaaacauuauacgaggcuggaucuuugggacuacacuugacagcaaaacccagagucuguugauugugaauaacgccacgaauguaguuaucaaggugugugaguuccaguuuugcaacgaucccuuccucggagucuacuaucauaaaaauaacaaguccuggauggagucugaguuccguguguacagcuccgcgaauaacuguacuuuugaguaugugucacaaccuuuccugauggaccuggaaggcaagcaggguaauuuuaaaaaccucagagaguucgucuuuaagaacauugauggguacuucaaaaucuacaguaagcacaccccaauaaauuuaguuagggaccugccccagggauuuagcgcucuugagccuuugguggaucugccaaucggcauuaacaucacacgguuccagacucuacucgcccugcaucgcucuuaucuuaccccgggcgacuccucaagcggguggacagcaggagccgcugcauacuauguagguuaccugcaacccagaaccuuuuugcucaaauauaaugaaaacggcacgauuacugaugccguggacugcgcucuggauccuuuaagugagacaaaguguacccugaagucuuucacugucgaaaaagggaucuaccagacauccaauuuuagggugcagccaaccgagagcauaguucgguuccccaacauuacgaaucucugcccuuuuggagagguguucaacgccacccgcuucgcgucggucuaugcauggaaucgaaagagaaucucuaacuguguggccgacuacuccguacuuuacaauucagcuaguuuuagcacauucaaaugcuauggcguuuccccaacuaagcugaacgacuuguguuuuaccaauguguacgccgauucuuucgucauuaggggugacgaagugcggcagaucgcacccgggcaaacaggaaaaaucgcugauuauaacuacaagcuaccggacgauuuuacuggcugcgucauugccuggaauagcaacaaccuggacucaaaagugggcgggaauuauaacuaccucuaucgucuguuccgcaagaguaaucuuaagccuuuugagagagauauauccaccgaaaucuaccaggcgggaagcacacccuguaacgguguugagggcuucaauugcuacuuuccacugcagucuuauggguuccaaccuaccaacggagugggcuaccagcccuauaggguagucguguugucauuugaacuccugcacgccccagcaacuguuugcggucccaaaaagaguacgaauuuagugaaaaacaagugugucaauuucaacuuuaaugggcugacaggcaccggagugcuaacugagagcaacaaaaaguuccucccuuuccagcaguuuggccgggacauugcugauaccacagacgccguacgagauccacaaacccuggagauccuugacauaacuccgugcuccuucgggggagugucuguuauuacacccgguacgaauaccucgaaccaggucgcuguguuguaccagggcgugaauuguacugaagucccuguugccauccacgcagaccagcugacaccaaccuggcgcguguauagcacaggguccaacguguuucaaacuagagccggaugccucaucggcgcugagcauguaaacaauucauacgaaugugauauucccaucggugcggggauuugcgcaaguuaucagacccagacgaacucuccuaggcgggcccgcagcgucgcuucccagucaauaaucgccuacaccaugagccugggcgcagaaaauucuguggccuacuccaacaauaguauugcuaucccaacaaacuucacuaucagcguuaccacagaaauucuucccgugucuaugacuaagaccuccgucgacuguacgauguauauaugcggagauucaacagaguguaguaaucuguugcuccaauacggcagcuuuugcacccagcugaacagagccuuaacugggaucgcaguggagcaggacaaaaauacacaggaaguuuucgcgcaagugaagcagauuuauaaaaccccgccuaucaaggauuuuggagguuucaacuuuucgcagauucugccagaccccuccaaaccuucuaagaggagcuucaucgaggaucuacucuuuaauaagguaacucuggcugacgccggcuucauaaaacaauacggguauugucuuggagauaucgcagcccgugacuugauuugcgcucagaaguucaacggccugaccguccugcccccacucuuaacagaugaaaugaucgcccaguacacgucagcacugcuugcugguaccauuacgaguggguggacauuuggcgccggagcggccuugcagaucccuuucgcuaugcaaauggcauaucgguuuaauggcauaggggugacccagaacgugcucuacgagaaucagaaacugauugccaaccaguucaacuccgcuaucggaaagauucaagacucucuaagcuccacagccucagcacugggcaaacuccaggaugucguuaaucagaacgcgcaggcccugaauacucuugugaagcaauugagcaguaacuuuggugcuaucucuuccguacugaaugacauauuaagccgacucgacaagguggaagccgagguccagaucgauagacugauuaccgggaggcuucagucgcugcaaacguacgugacacagcaguugauccgcgcagcugagauucgggccucagcaaaccucgccgcuaccaaaaugucugaaugcguucugggacagaguaagagaguggacuucuguggcaaagguuaucaccuaauguccuuuccccaaagcgcgccacauggcgucguguuccugcacguuacuuacgugccggcccaggagaagaauuuuaccacagcuccugcaaucugccacgaugggaaagcccauuuccccagggaaggagucuuuguaucuaacggcacucacugguucgugacccagcgcaauuuuuaugagccacagauaauuacaacggacaacaccuucguuagcgggaauugugauguggucaucggaaucgugaacaauacuguauacgacccccuccaaccugagcuggauuccuucaaggaagaacuugacaaauauuuuaagaaccauacaucaccagauguggacuugggcgauauuagugguaucaaugccagcgucguuaacauucagaaggaaauagaccgacugaaugagguggcuaaaaacuuaaacgaaucucucaucgaucugcaggagcuugggaaguacgagcaguauauuaaauggcccugguacaucuggcugggauucauugcaggccuaaucgccauagugauggucaccaucaugcucugcuguaugacuuccugcuguucaugccugaaggguuguugcaguuguggcagcugcugcaaauuugacgaagacgauuccgagccuguguugaaggggguuaagcugcacuacacaugaggacuagucccuguucccagagcccacuuuuuuuucuuuuuuugaaauaaaauagccugucuuucagaucucaaaggcucuuuucagagccaccaaaaaaaaaaaaaaaaaaaaaaaaaaaaaaaaaaaaaaaaaaaaaaaaaaaaaaaaaaaaaaaaaaaaaaaaaaaaaaaaaaaaaaaaaaaaaaaaaaaaa

SEQ ID NO: 12498 - RNA, 4094 nt, Artificial Sequence
  SARS-CoV-2/Belgium/VAG-03013/2020__EPI_ISL_415155 spike protein mRNA human (1-1273)
aggagagucccgcagucggcguccagcggcucugcuuguucgugugugugucguugcaggccuuauucaagcuuaccauguucguguuucugguccuccuuccccugguuagcucccagugcgugaacuugaccacaagaacucaauuaccuccagccuacacuaauucuuucaccaggggcguauauuacccggacaagguguuucggucaaguguccugcacagcacacaggaucuauuccuccccuuuuucuccaacgugacuugguuucaugcuauccacguuucugggaccaauggaacaaaacgcuucgacaacccugugcugccauuuaaugauggugucuauuucgcaucgaccgagaagucaaacauuauacgaggcuggaucuuugggacuacacuugacagcaaaacccagagucuguugauugugaauaacgccacgaauguaguuaucaaggugugugaguuccaguuuugcaacgaucccuuccucggagucuacuaucauaaaaauaacaaguccuggauggagucugaguuccguguguacagcuccgcgaauaacuguacuuuugaguaugugucacaaccuuuccugauggaccuggaaggcaagcaggguaauuuuaaaaaccucagagaguucgucuuuaagaacauugauggguacuucaaaaucuacaguaagcacaccccaauaaauuuaguuagggaccugccccagggauuuagcgcucuugagccuuugguggaucugccaaucggcauuaacaucacacgguuccagacucuacucgcccugcaucgcucuuaucuuaccccgggcgacuccucaagcggguggacagcaggagccgcugcauacuauguagguuaccugcaacccagaaccuuuuugcucaaauauaaugaaaacggcacgauuacugaugccguggacugcgcucuggauccuuuaagugagacaaaguguacccugaagucuuucacugucgaaaaagggaucuaccagacauccaauuuuagggugcagccaaccgagagcauaguucgguuccccaacauuacgaaucucugcccuuuuggagagguguucaacgccacccgcuucgcgucggucuaugcauggaaucgaaagagaaucucuaacuguguggccgacuacuccguacuuuacaauucagcuaguuuuagcacauucaaaugcuauggcguuuccccaacuaagcugaacgacuuguguuuuaccaauguguacgccgauucuuucgucauuaggggugacgaagugcggcagaucgcacccgggcaaacaggaaaaaucgcugauuauaacuacaagcuaccggacgauuuuacuggcugcgucauugccuggaauagcaacaaccuggacucaaaagugggcgggaauuauaacuaccucuaucgucuguuccgcaagaguaaucuuaagccuuuugagagagauauauccaccgaaaucuaccaggcgggaagcacacccuguaacgguguugagggcuucaauugcuacuuuccacugcagucuuauggguuccaaccuaccaacggagugggcuaccagcccuauaggguagucguguugucauuugaacuccugcacgccccagcaacuguuugcggucccaaaaagaguacgaauuuagugaaaaacaagugugucaauuucaacuuuaaugggcugacaggcaccggagugcuaacugagagcaacaaaaaguuccucccuuuccagcaguuuggccgggacauugcugauaccacagacgccguacgagauccacaaacccuggagauccuugacauaacuccgugcuccuucgggggagugucuguuauuacacccgguacgaauaccucgaaccaggucgcuguguuguaccagggcgugaauuguacugaagucccuguugccauccacgcagaccagcugacaccaaccuggcgcguguauagcacaggguccaacguguuucaaacuagagccggaugccucaucggcgcugagcauguaaacaauucauacgaaugugauauucccaucggugcggggauuugcgcaaguuaucagacccagacgaacucuccuaggcgggcccgcagcgucgcuucccagucaauaaucgccuacaccaugagccugggcgcagaaaauucuguggccuacuccaacaauaguauugcuaucccaacaaacuucacuaucagcguuaccacagaaauucuucccgugucuaugacuaagaccuccgucgacuguacgauguauauaugcggagauucaacagaguguaguaaucuguugcuccaauacggcagcuuuugcacccagcugaacagagccuuaacugggaucgcaguggagcaggacaaaaauacacaggaaguuuucgcgcaagugaagcagauuuauaaaaccccgccuaucaaggauuuuggagguuucaacuuuucgcagauucugccagaccccuccaaaccuucuaagaggagcuucaucgaggaucuacucuuuaauaagguaacucuggcugacgccggcuucauaaaacaauacggggauugucuuggagacaucgcagcccgugauuugauuugcgcucagaaguucaacggccugaccguccugcccccacucuuaacagacgaaaugaucgcccaguauacgucagcacugcuugcugguaccauuacgaguggguggacauuuggcgccggagcggccuugcagaucccuuucgcuaugcaaauggcauaccgguuuaauggcauaggggugacccagaacgugcucuaugagaaucagaaacugauugccaaccaguucaacuccgcuaucggaaagauucaagauucucuaagcuccacagccacugcacugggcaaacuccaggacgucguuaaucagaacgcgcaggcccugaauacccuugugaagcaauugucaagcaacuuuggugcuaucaguucuguacugaaugacauauuaucccgacucgauaagguggaagccgagguccagaucgacagacugauuacggggaggcuucagagccugcaaacauacgugacccagcaguugauccgcgcagcugagauucgggccucggcaaaccucgccgcuacuaaaaugucagaaugcguucugggacagucuaagagaguggauuucuguggcaaagguuaccaccuaaugaguuuuccccaauccgcgccacauggcgucguguuccugcacguuaccuaugugccggcccaggagaagaauuuuacaacugcuccugcaaucugccacgacgggaaagcccauuuccccagggaaggagucuuuguaagcaacggcacccacugguucgugacacagcgcaauuuuuacgagccacagauaauuacgaccgauaacacuuucguuucugggaauugugacguggucaucggaaucgugaacaauacaguauaugauccccuccaaccugagcuggacagcuucaaggaagaacuugauaaauacuuuaagaaccauaccuccccagacguggauuugggcgacauuucagguaucaaugccagugucguuaacauucagaaggaaauagaucgacugaaugagguggcuaaaaacuuaaacgaaagccucaucgaccugcaggagcuugggaaguaugagcaguacauuaaauggcccugguauaucuggcugggauucauugcaggccuaaucgccauagugauggucacuaucaugcucugcuguaugacaucuugcuguuccugccugaaggguuguugcucauguggcaguugcugcaaauuugacgaagaugacagcgagccuguguugaaggggguuaagcugcacuacaccugaggacuagucccuguucccagagcccacuuuuuuuucuuuuuuugaaauaaaauagccugucuuucagaucucaaaggcucuuuucagagccaccaaaaaaaaaaaaaaaaaaaaaaaaaaaaaaaaaaaaaaaaaaaaaaaaaaaaaaaaaaaaaaaaaaaaaaaaaaaaaaaaaaaaaaaaaaaaaaaaaaaaa

SEQ ID NO: 12499 - RNA, 4094 nt, Artificial Sequence
  SARS-CoV-2/Belgium/BC-03016/2020__EPI_ISL_415157 spike protein mRNA human (1-1273)
aggagagucccgcagucggcguccagcggcucugcuuguucgugugugugucguugcaggccuuauucaagcuuaccauguucguguuucugguccuccuuccccugguuagcucccagugcgugaacuugaccacaagaacucaauuaccuccagccuacacuaauucuuucaccaggggcguauauuacccggacaagguguuucggucaaguguccugcacagcacacaggaucuauuccuccccuuuuucuccaacgugacuugguuucaugcuauccacguuucugggaccaauggaacaaaacgcuucgacaacccugugcugccauuuaaugauggugucuauuucgcaucgaccgagaagucaaacauuauacgaggcuggaucuuugggacuacacuugacagcaaaacccagagucuguugauugugaauaacgccacgaauguaguuaucaaggugugugaguuccaguuuugcaacgaucccuuccucggagucuacuaucauaaaaauaacaaguccuggauggagucugaguuccguguguacagcuccgcgaauaacuguacuuuugaguaugugucacaaccuuuccugauggaccuggaaggcaagcaggguaauuuuaaaaaccucagagaguucgucuuuaagaacauugauggguacuucaaaaucuacaguaagcacaccccaauaaauuuaguuagggaccugccccagggauuuagcgcucuugagccuuugguggaucugccaaucggcauuaacaucacacgguuccagacucuacucgcccugcaucgcucuuaucuuaccccgggcgacuccucaagcggguggacagcaggagccgcugcauacuauguagguuaccugcaacccagaaccuuuuugcucaaauauaaugaaaacggcacgauuacugaugccguggacugcgcucuggauccuuuaagugagacaaaguguacccugaagucuuucacugucgaaaaagggaucuaccagacauccaauuuuagggugcagccaaccgagagcauaguucgguuccccaacauuacgaaucucugcccuuuuggagagguguucaacgccacccgcuucgcgucggucuaugcauggaaucgaaagagaaucucuaacuguguggccgacuacuccguacuuuacaauucagcuaguuuuagcacauucaaaugcuauggcguuuccccaacuaagcugaacgacuuguguuuuaccaauguguacgccgauucuuucgucauuaggggugacgaagugcggcagaucgcacccgggcaaacaggaaaaaucgcugauuauaacuacaagcuaccggacgauuuuacuggcugcgucauugccuggaauagcaacaaccuggacucaaaagugggcgggaauuauaacuaccucuaucgucuguuccgcaagaguaaucuuaagccuuuugagagagauauauccaccgaaaucuaccaggcgggaagcacacccuguaacgguguugagggcuucaauugcuacuuuccacugcagucuuauggguuccaaccuaccaacggagugggcuaccagcccuauaggguagucguguugucauuugaacuccugcacgccccagcaacuguuugcggucccaaaaagaguacgaauuuagugaaaaacaagugugucaauuucaacuuuaaugggcugacaggcaccggagugcuaacugagagcaacaaaaaguuccucccuuuccagcaguuuggccgggacauugcugauaccacagacgccguacgagauccacaaacccuggagauccuugacauaacuccgugcuccuucgggggagugucuguuauuacacccgguacgaauaccucgaaccaggucgcuguguuguaccagggcgugaauuguacugaagucccuguugccauccacgcagaccagcugacaccaaccuggcgcguguauagcacaggguccaacguguuucaaacuagagccggaugccucaucggcgcugagcauguaaacaauucauacgaaugugauauucccaucggugcggggauuugcgcaaguuaucagacccagacgaacucuccuaggcgggcccgcagcgucgcuucccagucaauaaucgccuacaccaugagccugggcgcagaaaauucuguggccuacuccaacaauaguauugcuaucccaacaaacuucacuaucagcguuaccacagaaauucuucccgugucuaugacuaagaccuccgucgacuguacgauguauauaugcggagauucaacagaguguaguaaucuguugcuccaauacggcagcuuuugcacccagcugaacagagccuuaacugggaucgcaguggagcaggacaaaaauacacaggaaguuuucgcgcaagugaagcagauuuauaaaaccccgccuaucaaggauuuuggagguuucaacuuuucgcagauucugccagaccccuccaaaccuucuaagaggagcuucaucgaggaucuacucuuuaauaagguaacucuggcugacgccggcuucauaaaacaauacggggauugucuuggagacaucgcagcccgugauuugauuugcgcucagaaguucaacggccugaccguccugcccccacucuuaacagacgaaaugaucgcccaguauacgucagcacugcuugcugguaccauuacgaguggguggacauuuggcgccggagcggccuugcagaucccuuucgcuaugcaaauggcauaccgguuuaauggcauaggggugacccagaacgugcucuaugagaaucagaaacugauugccaaccaguucaacuccgcuaucggaaagauucaagauucucuaagcuccacagcccccgcacugggcaaacuccaggacgucguuaaucagaacgcgcaggcccugaauacucuugugaagcaauugucaagcaacuuuggugcuaucaguucuguacugaaugacauauuaucccgacucgauaagguggaagccgagguccagaucgacagacugauuaccgggaggcuucagagccugcaaacguacgugacacagcaguugauccgcgcagcugagauucgggccucggcaaaccucgccgcuaccaaaaugucagaaugcguucugggacagucuaagagaguggauuucuguggcaaagguuaccaccuaaugaguuuuccacaauccgcgccgcauggcgucguguuccugcacguuacuuaugugccugcccaggagaagaauuuuaccacagcacccgcuaucugccacgacgggaaagcccauuucccaagggaaggagucuuuguaagcaacggcacucacugguucgugacccagcgcaauuuuuacgagccccagauaauuacaacggauaacaccuucguuucugggaauugugacguggucaucggaaucgugaacaauacuguauaugauccucuccaaccagagcuggacagcuucaaggaagaacuugauaaauacuuuaagaaccauacaucccccgacguggauuugggcgacauuucagguaucaaugccagugucguuaacauucagaaggaaauagaucgacugaaugagguggcuaaaaacuuaaacgaaagccucaucgaccugcaggagcuugggaaguaugagcaguacauuaaauggccuugguauaucuggcugggauucauugcaggccuaaucgccauagugauggucaccaucaugcucugcuguaugacuucuugcuguuccugccugaaggguuguugcucauguggcaguugcugcaaauuugacgaagaugacagcgagccgguguugaaggggguuaagcugcacuacacaugaggacuagucccuguucccagagcccacuuuuuuuucuuuuuuugaaauaaaauagccugucuuucagaucucaaaggcucuuuucagagccaccaaaaaaaaaaaaaaaaaaaaaaaaaaaaaaaaaaaaaaaaaaaaaaaaaaaaaaaaaaaaaaaaaaaaaaaaaaaaaaaaaaaaaaaaaaaaaaaaaaaaa

SEQ ID NO: 12500 - RNA, 4094 nt, Artificial Sequence
  SARS-CoV-2/Germany/BavPat3/2020__EPI_ISL_414521 spike protein mRNA human (1-1273)
aggagagucccgcagucggcguccagcggcucugcuuguucgugugugugucguugcaggccuuauucaagcuuaccauguucguguuucugguccuccuuccccugguuagcucccagugcgugaacuugaccacaagaacucaauuaccuccagccuacacuaauucuuucaccaggggcguauauuacccggacaagguguuucggucaaguguccugcacagcacacaggaucuauuccuccccuuuuucuccaacgugacuugguuucaugcuauccacguuucugggaccaauggaacaaaacgcuucgacaacccugugcugccauuuaaugauggugucuauuucgcaucgaccgagaagucaaacauuauacgaggcuggaucuuugggacuacacuugacagcaaaacccagagucuguugauugugaauaacgccacgaauguaguuaucaaggugugugaguuccaguuuugcaacgaucccuuccucggagucuacuaucauaaaaauaacaaguccuggauggagucugaguuccguguguacagcuccgcgaauaacuguacuuuugaauaugugucacaaccuuuccugauggaccuggaaggcaagcaggguaauuuuaaaaaccucagagaguucgucuuuaagaacauugauggguacuucaaaaucuacaguaagcacaccccaauaaauuuaguuagggaccugccccagggauuuagcgcucuugagccuuugguggaucugccaaucggcauuaacaucacacgguuccagacucuacucgcccugcaucgcucuuaucuuaccccgggcgacuccucaagcggguggacagcaggagccgcugcauacuauguagguuaccugcaacccagaaccuuuuugcucaaauauaaugaaaacggcacgauuacugaugccguggacugcgcucuggauccuuuaagugagacaaaguguacccugaagucuuucacugucgaaaaagggaucuaccagacauccaauuuuagggugcagccaaccgagagcauaguucgguuccccaacauuacgaaucucugcccuuuuggagagguguucaacgccacccgcuucgcgucggucuaugcauggaaucgaaagagaaucucuaacuguguggccgacuacuccguacuuuacaauucagcuaguuuuagcacauucaaaugcuauggcguuuccccaacuaagcugaacgacuuguguuuuaccaauguguacgccgauucuuucgucauuaggggugacgaagugcggcagaucgcacccgggcaaacaggaaaaaucgcugauuauaacuacaagcuaccggacgauuuuacuggcugcgucauugccuggaauagcaacaaccuggacucaaaagugggcgggaauuauaacuaccucuaucgucuguuccgcaagaguaaucuuaagccuuuugagagagauauauccaccgaaaucuaccaggcgggaagcacacccuguaacgguguugagggcuucaauugcuacuuuccacugcagucuuauggguuccaaccuaccaacggagugggcuaccagcccuauaggguagucguguugucauuugaacuccugcacgccccagcaacuguuugcggucccaaaaagaguacgaauuuagugaaaaacaagugugucaauuucaacuuuaaugggcugacaggcaccggagugcuaacugagagcaacaaaaaguuccucccuuuccagcaguuuggccgggacauugcugauaccacagacgccguacgagauccacaaacccuggagauccuugacauaacuccgugcuccuucgggggagugucuguuauuacacccgguacgaauaccucgaaccaggucgcuguguuguaccaggacgugaauuguacugaagucccuguugccauccacgcagaucagcugacaccaaccuggcgcguguauagcacaggcuccaacguguuucaaacuagagccgggugccucaucggagcugagcauguaaacaauucauacgaaugugacauucccaucggcgcggguauuugcgcaaguuaucagacccagacgaacucuccuaggcgggcccgcagcgucgcuucccagucaauaaucgccuacaccaugagccugggggcagaaaauucuguggccuacuccaacaauaguauugcuaucccaacaaacuucacuaucagcguuaccacagaaauucuucccgugucuaugacuaagaccuccgucgauuguacgauguauauaugcggcgacucaacagaguguaguaaucuguugcuccaauacggcagcuuuugcacccagcugaacagagccuuaacuggaaucgcaguggagcaggauaaaaauacacagcaaguuuucgcacaggugaagcagauuuauaaaaccccgccuaucaaggacuuugggggauucaacuuuucgcaaauucugccagaucccuccaaaccuucuaagaggagcuucaucgaagaccuacucuuuaauaagguaacucuggcugaugccgguuucauaaaacaguacggcgacugucuuggggauaucgcagcccgugacuugauuugcgcucagaaguucaacggacugaccguccugcccccacucuuaacagaugagaugaucgcccaguauacgucagcacugcuugcuggcaccauuacgagugguuggacauuuggggccggcgcggccuugcaaaucccuuucgcuaugcagauggcauaccgguuuaauggaauaggcgugacccagaacgugcucuaugaaaaucagaaacugauugccaaccaauucaacuccgcuaucgggaagauucaggacucucuaagcuccacagccucagcacugggaaaacuccaggacgucguuaaucagaacgcgcaagcccugaauacucuugugaagcaguugagcaguaacuuuggcgcuaucucuuccguacugaaugauauauuaagccgacucgacaagguggaggccgaaguccagaucgauagacugauuaccgguaggcuucaaucgcugcagacguacgugacacagcaguugauccgcgcagcugagauucgggccucagcaaaccucgccgcuaccaaaaugucugagugcguucuggggcaaaguaagagaguggacuucuguggaaaaggcuaccaccuaauguccuuuccccagagcgcgccacauggugucguguuccugcacguuacuuaugugccggcccaggaaaagaauuuuaccacagcgccugcuaucugccacgauggcaaagcccauuuccccagggagggggucuuuguaucuaacggaacucacugguucgugacccagcgcaauuuuuacgaaccacaaauaauuacaacggacaacaccuucguuagcggcaauugugauguggucaucgggaucgugaacaauacuguauaugacccccuccagccugagcuggauuccuucaaggaggaacuugacaaauacuuuaagaaccauacaucaccagauguggacuugggagauauuaguggcaucaaugccagcgucguuaacauucagaaggagauagaccgacugaaugaaguggcuaaaaacuuaaacgagucucucaucgaccugcaggaacuugguaaguaugagcaauacauuaaauggcccugguauaucuggcugggguucauugcaggacuaaucgccauagugauggucaccaucaugcucugcuguaugacuuccugcuguucaugccugaagggcuguugcaguugugguagcugcugcaaauuugaugaggacgauuccgaaccuguguugaagggcguuaagcugcacuacacaugaggacuagucccuguucccagagcccacuuuuuuuucuuuuuuugaaauaaaauagccugucuuucagaucucaaaggcucuuuucagagccaccaaaaaaaaaaaaaaaaaaaaaaaaaaaaaaaaaaaaaaaaaaaaaaaaaaaaaaaaaaaaaaaaaaaaaaaaaaaaaaaaaaaaaaaaaaaaaaaaaaaaa

SEQ ID NO: 12501 - RNA, 4094 nt, Artificial Sequence
  SARS-CoV-2/France/HF1805/2020__EPI_ISL_414628 spike protein mRNA human (1-1273)
aggagagucccgcagucggcguccagcggcucugcuuguucgugugugugucguugcaggccuuauucaagcuuaccauguucguguuucugguccuccuuccccugguuagcucccagugcgugaacuugaccacaagaacucaauuaccuccagccuacacuaauucuuucaccaggggcguauauuacccggacaagguguuucggucaaguguccugcacagcacacaggaucuauuccuccccuuuuucuccaacgugacuugguuucaugcuauccacguuucugggaccaauggaacaaaacgcuucgacaacccugugcugccauuuaaugauggugucuauuucgcaucgaccgagaagucaaacauuauacgaggcuggaucuuugggacuacacuugacagcaaaacccagagucuguugauugugaauaacgccacgaauguaguuaucaaggugugugaguuccaguuuugcaacgaucccuuccucggagucuacuaucauaaaaauaacaaguccuggauggagucugaguuccguguguacagcuccgcgaauaacuguacuuuugaguaugugucacaaccuuuccugauggaccuggaaggcaagcaggguaauuuuaaaaaccucagagaguucgucuuuaagaacauugauggguacuucaaaaucuacaguaagcacaccccaauaaauuuaguuagggaccugccccagggauuuagcgcucuugagccuuugguggaucugccaaucggcauuaacaucacacgguuccagacucuacucgcccugcaucgcucuuaucuuaccccgggcgacuccucaagcggguggacagcaggagccgcugcauacuauguagguuaccugcaacccagaaccuuuuugcucaaauauaaugaaaacggcacgauuacugaugccguggacugcgcucuggauccuuuaagugagacaaaguguacccugaagucuuucacugucgaaaaagggaucuaccagacauccaauuuuagggugcagccaaccgagagcauaguucgguuccccaacauuacgaaucucugcccuuuuggagagguguucaacgccacccgcuucgcgucggucuaugcauggaaucgaaagagaaucucuaacuguguggccgacuacuccguacuuuacaauucagcuaguuuuagcacauucaaaugcuauggcguuuccccaacuaagcugaacgacuuguguuuuaccaauguguacgccgauucuuucgucauuaggggugacgaagugcggcagaucgcacccgggcaaacaggaaaaaucgcugauuauaacuacaagcuaccggacgauuuuacuggcugcgucauugccuggaauagcaacaaccuggacucaaaagugggcgggaauuauaacuaccucuaucgucuguuccgcaagaguaaucuuaagccuuuugagagagauauauccaccgaaaucuaccaggcgggaagcacacccuguaacgguguugagggcuucaauugcuacuuuccacugcagucuuauggguuccaaccuaccaacggagugggcuaccagcccuauaggguagucguguugucauuugaacuccugcacgccccagcaacuguuugcggucccaaaaagaguacgaauuuagugaaaaacaagugugucaauuucaacuuuaaugggcugacaggcaccggagugcuaacugagagcaacaaaaaguuccucccuuuccagcaguuuggccgggacauugcugauaccacagacgccguacgagauccacaaacccuggagauccuugacauaacuccgugcuccuucgggggagugucuguuauuacacccgguacgaauaccucgaaccaggucgcuguguuguaccagggcgugaauuguacugaagucccuguugccauccacgcagaccagcugacaccaaccuggcgcguguauagcacaggguccaacguguuucaaacuagagccggaugccucaucggcgcugagcauguaaacaauucauacgaaugugauauucccaucggugcggggauuugcgcaaguuaucagacccagacgaacucuccuaggcgggcccgcagcgucgcuucccagucaauaaucgccuacaccaugagccugggcgcagaaaauucuguggccuacuccaacaauaguauugcuaucccaacaaacuucacuaucagcguuaccacagaaauucuucccgugucuaugacuaagaccuccgucgacuguacgauguauauaugcggagauucaacagaguguaguaaucuguugcuccaauacggcagcuuuugcacccagcugaacagagccuuaacugggaucgcaguggagcaggacaaaaauacacaggaaguuuucgcgcaagugaagcagauuuauaaaaccccgccuaucaaggauuuuggagguuucaacuuuucgcagauucugccagaccccuccaaaccuucuaagaggagcuucaucgaggaucuacucuuuaauaagguaacucuggcugacgccggcuucauaaaacaauacggggauugucuuggagacaucgcagcccgugauuugauuugcgcucagaaguucaacggccugaccguccugcccccacucuuaacagacgaaaugaucgcccaguauacgucagcacugcuugcugguaccauuacgaguggguggacauuuggcgccggagcggccuugcagaucccuuucgcuaugcaaauggcauaccgguuuaauggcauaggggugacccagaacgugcucuaugagaaucagaaacugauugccaaccaguucaacuccgcuaucggaaagauucaagauucucuaagcuccacagccucagcacugggcaaacuccaggacgucguuaaucagaacgcgcaggcccugaauacucuugugaagcaauugagcaguaacuuuggugcuaucucuuccguacugaaugacauauuaagccgacucgauaagguggaagccgagguccagaucgacagacugauuaccgggaggcuucagucgcugcaaacguacgugacacagcaguugauccgcgcagcugagauucgggccucagcaaaccucgccgcuaccaaaaugucugaaugcguucugggacagaguaagagaguggauuucuguggcaaagguuaccaccuaauguccuuuccccaaagcgcgccacauggcgucguguuccugcacguuacuuaugugccggcccaggagaagaauuuuaccacagcuccugcaaucugccacgacgggaaagcccauuuccccagggaaggagucuuuguaucuaacggcacucacugguucgugacccagcgcaauuuuuacgagccacagauaauuacaacggauaacaccuucguuagcgggaauugugacguggucaucggagugguaaacaauacuguguaugauccccuccaaccugagcuggacuccuucaaggaagaacuugauaaauacuuuaagaaccauacaucaccagacgucgauuugggcgacaucagugguauuaaugccagcguugugaacauccagaaggaaauugaucgacugaaugagguggcuaaaaacuuaaacgaaucucucauagaccugcaggagcuugggaaguaugagcaguacaucaaauggcccugguauauuuggcugggauucaucgcaggccuaauugccaucgucauggugaccauaaugcucugcuguaugacuuccugcuguucaugccugaaggguuguugcaguuguggcagcugcugcaaauuugacgaagaugacuccgagccuguuuugaaggggguaaagcugcacuacacaugaggacuagucccuguucccagagcccacuuuuuuuucuuuuuuugaaauaaaauagccugucuuucagaucucaaaggcucuuuucagagccaccaaaaaaaaaaaaaaaaaaaaaaaaaaaaaaaaaaaaaaaaaaaaaaaaaaaaaaaaaaaaaaaaaaaaaaaaaaaaaaaaaaaaaaaaaaaaaaaaaaaaa

SEQ ID NO: 12502 - RNA, 4094 nt, Artificial Sequence
  SARS-CoV-2/Netherlands/ZuidHolland_9/2020__EPI_ISL_414445 spike protein mRNA human (1-1273)
aggagagucccgcagucggcguccagcggcucugcuuguucgugugugugucguugcaggccuuauucaagcuuaccauguucguguuucugguccuccuuccccugguuagcucccagugcgugaacuugaccacaagaacucaauuaccuccagccuacacuaauucuuucaccaggggcguauauuacccggacaagguguuucggucaaguguccugcacagcacacaggaucuauuccuccccuuuuucuccaacgugacuugguuucaugcuauccacguuucugggaccaauggaacaaaacgcuucgacaacccugugcugccauuuaaugauggugucuauuucgcaucgaccgagaagucaaacauuauacgaggcuggaucuuugggacuacacuugacagcaaaacccagagucuguugauugugaauaacgccacgaauguaguuaucaaggugugugaguuccaguuuugcaacgaucccuuccucggagucuacuaucauaaaaauaacaaguccuggauggagucugaguuccguguguacagcuccgcgaauaacuguacuuuugaguaugugucacaaccuuuccugauggaccuggaaggcaagcaggguaauuuuaaaaaccucagagaguucgucuuuaagaacauugauggguacuucaaaaucuacaguaagcacaccccaauaaauuuaguuagggaccugccccagggauuuagcgcucuugagccuuugguggaucugccaaucggcauuaacaucacacgguuccagacucuacucgcccugcaucgcucuuaucuuaccccgggcgacuccucaagcggguggacagcaggagccgcugcauacuauguagguuaccugcaacccagaaccuuuuugcucaaauauaaugaaaacggcacgauuacugaugccguggacugcgcucuggauccuuuaagugagacaaaguguacccugaagucuuucacugucgaaaaagggaucuaccagacauccaauuuuagggugcagccaaccgagagcauaguucgguuccccaacauuacgaaucucugcccuuuuggagagguguucaacgccacccgcuucgcgucggucuaugcauggaaucgaaagagaaucucuaacuguguggccgacuacuccguacuuuacaauucagcuaguuuuagcacauucaaaugcuauggcguuuccccaacuaagcugaacgacuuguguuuuaccaauguguacgccgauucuuucgucauuaggggugacgaagugcggcagaucgcacccgggcaaacaggaaaaaucgcugauuauaacuacaagcuaccggacgauuuuacuggcugcgucauugccuggaauagcaacaaccuggacucaaaagugggcgggaauuauaacuaccucuaucgucuguuccgcaagaguaaucuuaagccuuuugagagagauauauccaccgaaaucuaccaggcgggaagcacacccuguaacgguguugagggcuucaauugcuacuuuccacugcagucuuauggguuccaaccuaccaacggagugggcuaccagcccuauaggguagucguguugucauuugaacuccugcacgccccagcaacuguuugcggucccaaaaagaguacgaauuuagugaaaaacaagugugucaauuucaacuuuaaugggcugacaggcaccggagugcuaacugagagcaacaaaaaguuccucccuuuccagcaguuuggccgggacauugcugauaccacagacgccguacgagauccacaaacccuggagauccuugacauaacuccgugcuccuucgggggagugucuguuauuacacccgguacgaauaccucgaaccaggucgcuguguuguaccagggcgugaauuguacugaagucccuguugccauccacgcagaccagcugacaccaaccuggcgcguguauagcacaggguccaacguguuucaaacuagagccggaugccucaucggcgcugagcauguaaacaauucauacgaaugugauauucccaucggugcggggauuugcgcaaguuaucagacccagacgaacucuccuaggcgggcccgcagcgucgcuucccagucaauaaucgccuacaccaugagccugggcgcagaaaauucuguggccuacuccaacaauaguauugcuaucccaacaaacuucacuaucagcguuaccacagaaauucuucccgugucuaugacuaagaccuccgucgacuguacgauguauauaugcggagauucaacagaguguaguaaucuguugcuccaauacggcagcuuuugcacccagcugaacagagccuuaacugggaucgcaguggagcaggacaaaaauacacaggaaguuuucgcgcaagugaagcagauuuauaaaaccccgccuaucaaggauuuuggagguuucaacuuuucgcagauucugccagaccccuccaaaccuucuaagaggagcuucaucgaggaucuacucuuuaauaagguaacucuggcugacgccggcuucauaaaacaauacggggauugucuuggagacaucgcagcccgugauuugauuugcguccagaaguucaacggccugaccgugcugcccccacucuuaacagacgaaaugaucgcucaguauacgucagcccugcuugcagguaccauuacgaguggguggacauuuggcgcuggagccgcguugcagaucccuuucgccaugcaaauggcuuaccgguuuaauggcauaggggugacccagaacguccucuaugagaaucagaaacugauugcaaaccaguucaacuccgccaucggaaagauucaagauucucuaagcuccacagcuucagcccugggcaaacuccaggacguugugaaucagaacgcacaggcgcugaauacucuuguaaagcaauugagcaguaacuuuggugccaucucuuccgugcugaaugacauauuaagccgacucgauaaggucgaagcugaggugcagaucgacagacugauuaccgggaggcuucagucgcugcaaacguacguuacacagcaguugauccgcgccgcagagauucgggcuucagccaaccucgcagccaccaaaaugucugaaugcgugcugggacagaguaagagagucgauuucuguggcaaagguuaccaccuaauguccuuuccccaaagcgcuccacauggcgugguuuuccugcacgugacuuaugucccggcgcaggagaagaauuuuaccacagccccugcaaucugccacgacgggaaagcucauuuccccagggaaggaguauuugugucuaacggcacucacugguucguuacccagcgcaauuuuuacgagccacagauaauuacaacggauaacaccuucgugagcgggaauugugacgucgugaucggaaucguaaacaauacuguguaugauccccuccaaccugagcuggacuccuucaaggaagaacuugauaaauacuuuaagaaccauacaucaccagacgucgauuugggcgacauuagugguaucaaugccagcguugugaacauucagaaggaaauagaucgacugaaugagguggccaaaaacuuaaacgaaucucucaucgaccugcaggagcuugggaaguaugagcaguacauuaaauggcccugguauaucuggcugggauucauugcuggccuaaucgcaauagucauggugaccaucaugcucugcuguaugacuuccugcuguucaugccugaaggguuguugcaguuguggcagcugcugcaaauuugacgaagaugacuccgagccuguuuugaaggggguaaagcugcacuacacaugaggacuagucccuguucccagagcccacuuuuuuuucuuuuuuugaaauaaaauagccugucuuucagaucucaaaggcucuuuucagagccaccaaaaaaaaaaaaaaaaaaaaaaaaaaaaaaaaaaaaaaaaaaaaaaaaaaaaaaaaaaaaaaaaaaaaaaaaaaaaaaaaaaaaaaaaaaaaaaaaaaaaa

SEQ ID NO: 12503 - RNA, 4094 nt, Artificial Sequence
  SARS-CoV-2/Finland/FIN03032020A/2020__EPI_ISL_413602 spike protein mRNA human (1-1273)
aggagagucccgcagucggcguccagcggcucugcuuguucgugugugugucguugcaggccuuauucaagcuuaccauguucguguuucugguccuccuuccccugguuagcucccagugcgugaacuugaccacaagaacucaauuaccuccagccuacaccaauucuuucacgaggggcguauauuacccggacaagguguuucggucaaguguccugcacagcacacaggaucuauuccuccccuuuuucuccaacgugacuugguuucaugcuauccacguuucugggaccaauggaacaaaacgcuucgacaacccugugcugccauuuaaugauggugucuauuucgcaucgaccgagaagucaaacauuauacgaggcuggaucuuugggacuacacuugacagcaaaacccagagucuguugauugugaauaacgccacgaauguaguuaucaaggugugugaguuccaguuuugcaacgaucccuuccucggagucuacuaucauaaaaauaacaaguccuggauggagucugaguuccguguguacagcuccgcgaauaacuguacuuuugaguaugugucacaaccuuuccugauggaccuggaaggcaagcaggguaauuuuaaaaaccucagagaguucgucuuuaagaacauugauggguacuucaaaaucuacaguaagcacaccccaauaaauuuaguuagggaccugccccagggauuuagcgcucuugagccuuugguggaucugccaaucggcauuaacaucacacgguuccagacucuacucgcccugcaucgcucuuaucuuaccccgggcgacuccucaagcggguggacagcaggagccgcugcauacuauguagguuaccugcaacccagaaccuuuuugcucaaauauaaugaaaacggcacgauuacugaugccguggacugcgcucuggauccuuuaagugagacaaaguguacccugaagucuuucacugucgaaaaagggaucuaccagacauccaauuuuagggugcagccaaccgagagcauaguucgguuccccaacauuacgaaucucugcccuuuuggagagguguucaacgccacccgcuucgcgucggucuaugcauggaaucgaaagagaaucucuaacuguguggccgacuacuccguacuuuacaauucagcuaguuuuagcacauucaaaugcuauggcguuuccccaacuaagcugaacgacuuguguuuuaccaauguguacgccgauucuuucgucauuaggggugacgaagugcggcagaucgcacccgggcaaacaggaaaaaucgcugauuauaacuacaagcuaccggacgauuuuacuggcugcgucauuagcuggaacucaaauaaccuggacaguaaagugggcgggaauuauaacuaccucuaucgucuguuccgcaaguccaaucuuaagccuuuugagagagauauaagcaccgaaaucuaccaggccggaucuacacccuguaacgguguugagggcuucaauugcuacuuuccacugcagucauauggguuccaaccuaccaacggagugggcuaccagcccuauaggguagucguguugaguuuugaacuccugcacgcgccagccacuguuugcggucccaaaaagagcacgaauuuagugaaaaacaagugugucaauuucaacuuuaaugggcugacaggcaccggagugcuaacugaguccaacaaaaaguuccucccuuuccagcaguuuggccgggacauugcagauaccacagacgcuguacgagauccacaaacccuggagauccuugacauaacuccgugcucuuucgggggagugucgguuauuacacccgguacgaauaccagcaaccaggucgccguguuguaccagggcgugaauuguacugaagucccuguugcuauccacgccgaccagcugacaccaaccuggcgcguguauuccacagggucaaacguguuucaaacuagagcaggaugccucaucggcgccgagcauguaaacaauaguuacgaaugugauauucccaucggugcugggauuugcgcgucuuaucagacccagacgaacagcccuaggcgggcacgcuccgucgccucacagagcauaaucgcuuacaccaugucucugggcgccgaaaauuccguggcauacaguaacaauagcauugccaucccaacaaacuucacuaucucuguuaccacagaaauucuucccguguccaugacuaagaccucagucgacuguacgauguauauaugcggagauaguacagaguguagcaaucuguugcuccaauacggcucguuuugcacccagcugaacagagcuuuaacugggaucgccguggagcaggacaaaaauacacaggaaguuuucgcacaagugaagcagauuuauaaaaccccgccuaucaaggauuuuggagguuucaacuuuucccagauucugccagaccccucuaaaccuagcaagaggucauucaucgaggaucuacucuuuaauaagguaacucuggcggacgcuggcuucauaaaacaauacggggauugucuuggagacaucgccgcacgugauuugauuugcgcccagaaguucaacggccugaccguccugcccccacucuuaacagacgaaaugaucgcucaguauacgagugcccugcuugcagguaccauuacuuccggguggacauuuggcgcuggagccgcguugcagaucccuuucgccaugcaaauggcuuaccgguuuaauggcauaggggugacccagaacgugcucuaugagaaucagaaacugauugcaaaccaguucaacucugccaucggaaagauucaagauagccuauccucaacagcuagcgcccugggcaaacuccaggacgucguuaaucagaacgcacaggcgcugaauacucuugugaagcaauugaguucuaacuuuggugccaucuccagcguacugaaugacauauuaucgcgacucgauaagguggaagcugagguccagaucgacagacugauuaccgggaggcuucagucacugcaaacguacgugacacagcaguugauccgcgccgcagagauucgggcuucugccaaccucgcagccaccaaaaugagugaaugcguucugggacaguccaagagaguggauuucuguggcaaagguuaccaccuaaugagcuuuccccaaucugcuccacauggcgucguguuccugcacguuacuuaugugccggcgcaggagaagaauuuuaccacagccccugcaaucugccacgacgggaaagcucauuuccccagggaaggagucuuuguaagcaacggcacucacugguucgugacccagcgcaauuuuuacgagccacagauaauuacaacggauaacaccuucguuuccgggaauugugacguggucaucggaaucgugaacaauacuguauaugauccccuccaaccugagcuggacucauucaaggaagaacuugauaaauacuuuaagaaccauacaaguccagacguggauuugggcgacauuagcgguaucaaugccucugucguuaacauucagaaggaaauagaucgacugaaugagguggccaaaaacuuaaacgaaucccucaucgaccugcaggagcuugggaaguaugagcaguacauuaaauggcccugguauaucuggcugggauucauugcuggccuaaucgcaauagugauggucaccaucaugcucugcuguaugacuucaugcuguaguugccugaaggguuguugcagcuguggcuccugcugcaaauuugacgaagaugacucugagccuguguugaaggggguuaagcugcacuacacaugaggacuagucccuguucccagagcccacuuuuuuuucuuuuuuugaaauaaaauagccugucuuucagaucucaaaggcucuuuucagagccaccaaaaaaaaaaaaaaaaaaaaaaaaaaaaaaaaaaaaaaaaaaaaaaaaaaaaaaaaaaaaaaaaaaaaaaaaaaaaaaaaaaaaaaaaaaaaaaaaaaaaa

SEQ ID NO: 12504 - RNA, 4094 nt, Artificial Sequence
  SARS-CoV-2/France/GE1977/2020__EPI_ISL_414632 spike protein mRNA human (1-1273)
aggagagucccgcagucggcguccagcggcucugcuuguucgugugugugucguugcaggccuuauucaagcuuaccauguucguguuucugguccuccuuccccugguuagcucccagugcgugaacuugaccacaagaacucaauuaccuccagccuacacuaauucuuucaccaggggcguauauuacccggacaagguguuucggucaaguguccugcacagcacacaggaucuauuccuccccuuuuucuccaacgugacuugguuucaugcuauccacguuucugggaccaauggaacaaaacgcuucgacaacccugugcugccauuuaaugauggugucuauuucgcaucgaccgagaagucaaacauuauacgaggcuggaucuuugggacuacacuugacagcaaaacccagagucuguugauugugaauaacgccacgaauguaguuaucaaggugugugaguuccaguuuugcaacgaucccuuccucggagucuacuaucauaaaaauaacaaguccuggauggagucugaguuccguguguacagcuccgcgaauaacuguacuuuugaguaugugucacaaccuuuccugauggaccuggaaggcaagcaggguaauuuuaaaaaccucagagaguucgucuuuaagaacauugauggguacuucaaaaucuacaguaagcacaccccaauaaauuuaguuagggaccugccccagggauuuagcgcucuugagccuuugguggaucugccaaucggcauuaacaucacacgguuccagacucuacucgcccugcaucgcucuuaucuuaccccgggcgacuccucaagcggguggacagcaggagccgcugcauacuauguagguuaccugcaacccagaaccuuuuugcucaaauauaaugaaaacggcacgauuacugaugccguggacugcgcucuggauccuuuaagugagacaaaguguacccugaagucuuucacugucgaaaaagggaucuaccagacauccaauuuuagggugcagccaaccgagagcauaguucgguuccccaacauuacgaaucucugcccuuuuggagagguguucaacgccacccgcuucgcgucggucuaugcauggaaucgaaagagaaucucuaacuguguggccgacuacuccguacuuuacaauucagcuaguuuuagcacauucaaaugcuauggcguuuccccaacuaagcugaacgacuuguguuuuaccaauguguacgccgauucuuucgucauuaggggugacgaagugcggcagaucgcacccgggcaaacaggaaaaaucgcugauuauaacuacaagcuaccggacgauuuuacuggcugcgucauugccuggaauagcaacaaccuggacucaaaagugggcgggaauuauaacuaccucuaucgucuguuccgcaagaguaaucuuaagccuuuugagagagauauauccaccgaaaucuaccaggcgggaagcacacccuguaacgguguugagggcuucaauugcuacuuuccacugcagucuuauggguuccaaccuaccaacggagugggcuaccagcccuauaggguagucguguugucauuugaacuccugcacgccccagcaacuguuugcggucccaaaaagaguacgaauuuagugaaaaacaagugugucaauuucaacuuuaaugggcugacaggcaccggagugcuaacugagagcaacaaaaaguuccucccuuuccagcaguuuggccgggacauugcugauaccacagacgccguacgagauccacaaacccuggagauccuugacauaacuccgugcuccuucgggggagugucuguuauuacacccgguacgaauaccucgaaccaggucgcuguguuguaccagggcgugaauuguacugaagucccuguugccauccacgcagaccagcugacaccaaccuggcgcguguauagcacaggguccaacguguuucaaacuagagccggaugccucaucggcgcugagcauguaaacaauucauacgaaugugauauucccaucggugcggggauuugcgcaaguuaucagacccagacgaacucuccuaggcgggcccgcagcgucgcuucccagucaauaaucgccuacaccaugagccugggcgcagaaaauucuguggccuacuccaacaauaguauugcuaucccaacaaacuucacuaucagcguuaccacagaaauucuucccgugucuaugacuaagaccuccgucgacuguacgauguauauaugcggagauucaacagaguguaguaaucuguugcuccaauacggcagcuuuugcacccagcugaacagagccuuaacugggaucgcaguggagcaggacaaaaauacacaggaaguuuucgcgcaagugaagcagauuuauaaaaccccgccuaucaaggauuuuggagguuucaacuuuucgcagauucugccagaccccuccaaaccuucuaagaggagcuucaucgaggaucuacucuuuaauaagguaacucuggcugacgccggcuucauaaaacaauacggggauugucuuggagacaucgcagcccgugauuugauuugcgcucagaaguucaacggccugaccguccugcccccacucuuaacagacgaaaugaucgcccaguauacgucagcacugcuugcugguaccauuacgaguggguggacauuuggcgccggagcggccuugcagaucccuuucgcuaugcaaauggcauaccgguuuaauggcauaggggugacccagaacgugcucuaugagaaucagaaacugauugccaaccaguucaacuccgcuaucggaaagauucaagauucucuauuuagcacagccuccgcacugggcaaacuccaggacgucguuaaucagaacgcgcaggcccugaauacucuugugaagcaauugucaagcaacuucggugcuaucaguucuguacugaaugacauauuaucccgacucgauaagguggaagccgagguccagaucgacagacugauuaccgggaggcuucagagccugcaaacguacgugacacagcaguugauccgcgcagcugagauucgggccucggcaaaccucgccgcuaccaaaaugucagaaugcguucugggacagucuaagagaguggauuuuuguggcaaagguuaccaccuaaugaguuucccccaauccgcgccacauggcgucguguuucugcacguuacuuaugugccggcccaggagaagaauuucaccacagcuccugcaaucugccacgacgggaaagcccauuuucccagggaaggagucuucguaagcaacggcacucacugguuugugacccagcgcaauuucuacgagccacagauaauuacaacggauaacaccuucguuucugggaauugugacguggucaucggaaucgugaacaauacuguauaugauccccuccaaccugagcuggacagcuuuaaggaagaacuugauaaauacuucaagaaccauacauccccagacguggauuugggcgacauuucagguaucaaugccagugucguuaacauucagaaggaaauagaucgacugaaugagguggcuaaaaacuuaaacgaaagccucaucgaccugcaggagcuugggaaguaugagcaguacauuaaauggcccugguauaucuggcugggauuuauugcaggccuaaucgccauagugauggucaccaucaugcucugcuguaugacuucuugcuguuccugccugaaggguuguugcucauguggcaguugcugcaaauucgacgaagaugacagcgagccuguguugaaggggguuaagcugcacuacacaugaggacuagucccuguucccagagcccacuuuuuuuucuuuuuuugaaauaaaauagccugucuuucagaucucaaaggcucuuuucagagccaccaaaaaaaaaaaaaaaaaaaaaaaaaaaaaaaaaaaaaaaaaaaaaaaaaaaaaaaaaaaaaaaaaaaaaaaaaaaaaaaaaaaaaaaaaaaaaaaaaaaaa

SEQ ID NO: 12505 - RNA, 4094 nt, Artificial Sequence
  SARS-CoV-2/Finland/FIN-313/2020__EPI_ISL_414641 spike protein mRNA human (1-1273)
aggagagucccgcagucggcguccagcggcucugcuuguucgugugugugucguugcaggccuuauucaagcuuaccauguucguguuucugguccuccuuccccugguuagcucccagugcgugaacuugaccacaagaacucaauuaccuccagccuacacuaauucuuucaccaggggcguauauuacccggacaagguguuucggucaaguguccugcacagcacacaggaucuauuccuccccuuuuucuccaacgugacuugguuucaugcuauccacguuucugggaccaauggaacaaaacgcuucgacaacccugugcugccauuuaaugauggugucuauuucgcaucgaccgagaagucaaacauuauacgaggcuggaucuuugggacuacacuugacagcaaaacccagagucuguugauugugaauaacgccacgaauguaguuaucaaggugugugaguuccaguuuugcaacgaucccuuccucggagucuacuaucauaaaaauaacaaguccuggauggagucugaguuccguguguacagcuccgcgaauaacuguacuuuugaguaugugucacaaccuuuccugauggaccuggaaggcaagcaggguaauuuuaaaaaccucagagaguucgucuuuaagaacauugauggguacuucaaaaucuacaguaagcacaccccaauaaauuuaguuagggaccugccccagggauuuagcgcucuugagccuuugguggaucugccaaucggcauuaacaucacacgguucaaaacucuacucgcccugcaucgcucuuaucuuaccccgggcgacuccucaagcggguggacagcaggagccgcugcauacuauguagguuaccugcagcccagaaccuuuuugcucaaguauaaugaaaacggcacgauuacugaugccguggacugcgcucuggauccuuuaagugagacaaaguguacccugaaaucuuucacugucgaaaaggggaucuaccaaacauccaauuuuagggugcagccaaccgagagcauaguucgguuccccaacauuacgaaucucugcccuuuuggagagguguucaacgccacccgcuucgcgucggucuaugcauggaaucgaaaaagaaucucuaacuguguggccgacuacuccguacuuuacaauucagcuaguuuuagcacauucaagugcuauggcguuuccccaacuaaacugaacgacuuguguuuuaccaauguguacgccgauucuuucgucauuaggggugacgaagugcggcagaucgcacccgggcagacaggaaagaucgcugauuauaacuacaaacuaccggacgauuuuacuggcugcgucauugccuggaauagcaacaaccuggacucaaaggugggcgggaauuauaacuaccucuaucgucuguuccgcaagaguaaucuuaaaccuuuugagagagauauauccaccgaaaucuaccaagcgggaagcacacccuguaacgguguugagggcuucaauugcuacuuuccacugcagucuuauggguuccagccuaccaacggagugggcuaccaacccuauaggguagucguguugucauuugaacuccugcacgccccagcaacuguuugcggucccaagaaaaguacgaauuuagugaagaacaaaugugucaauuucaacuuuaaugggcugacaggcaccggagugcuaacugagagcaacaagaaguuccucccuuuccagcaguuuggccgggacauugcugauaccacagacgccguacgagauccacagacccuggagauccuugacauaacuccgugcuccuucgggggagugucuguuauuacacccgguacgaauaccucgaaccaagucgcuguguuguaccagggcgugaauuguacugaagucccuguugccauccacgcagaccagcugacaccaaccuggcgcguguauagcacaggguccaacguguuucagacuagagccggaugccucaucggcgcugagcauguaaacaauucauacgaaugugauauucccaucggugcggggauuugcgcaaguuaucaaacccagacgaacucuccuaggcgggcccgcagcgucgcuucccagucaauaaucgccuacaccaugagccugggcgcagaaaauucuguggccuacuccaacaauaguauugcuaucccaacaaacuucacuaucagcguuaccacagaaauucuucccgugucuaugacuaaaaccuccgucgacuguacgauguauauaugcggagauucaacagaguguaguaaucuguugcuccaguacggcagcuuuugcacccaacugaacagagccuuaacugggaucgcaguggagcaggacaagaauacacaggaaguuuucgcacaggugaaacaaauuuauaagaccccgccuaucaaagauuuuggagguuucaacuuuucgcagauucugccagaccccuccaagccuucuaagaggagcuucaucgaggaucuacucuuuaauaaaguaacucuggcugacgccggcuucauaaagcaguacggggauugucuuggagacaucgcagcccgugauuugauuugcgcucaaaaauucaacggccugaccguccugcccccacucuuaacagacgaaaugaucgcccaguauacgucagcacugcuugcugguaccauuacgaguggguggacauuuggcgccggagcggccuugcagaucccuuucgcuaugcagauggcauaccgguuuaauggcauaggggugacccaaaacgugcucuaugagaaucagaagcugauugccaaccaguucaacuccgcuaucggaaaaauucaggauucucuaagcuccacagccucagcacugggcaagcuccaagacgucguuaaucagaacgcgcaggcccugaauacucuugugaagcaguugagcaguaacuuuggugcuaucucuuccguacugaaugacauauuaagccgacucgauaaaguggaagccgagguccaaaucgacagacugauuaccgggaggcuucagucgcugcagacguacgugacacaacaguugauccgcgcagcugagauucgggccucagcaaaccucgccgcuaccaagaugucugaaugcguucugggacagaguaaaagaguggauuucuguggcaaggguuaccaccuaauguccuuuccccagagcgcgccacauggcgucguguuccugcacguuacuuaugugccggcccaagagaaaaauuuuaccacagcgccugcuaucugccacgacgggaaggcccauuuccccagggaaggagucuuuguaucuaacggcacucacugguucgugacccagcgcaauuuuuacgagccacagauaauuacaacggauaacaccuucguuagcgggaauugugacguggucaucggaaucgugaacaauacuguauaugauccccuccagccugagcuggacuccuucaaagaagaacuugauaaguacuuuaagaaccauacaucaccagacguggauuugggcgacauuagugguaucaaugccagcgucguuaacauucaaaaagaaauagaucgacugaaugagguggcuaagaacuuaaacgaaucucucaucgaccugcaggagcuugggaaauaugagcaguacauuaaguggcccugguauaucuggcugggauucauugcaggccuaaucgccauagugauggucaccaucaugcucugcuguaugacuuccugcuguucaugccugaaagguuguugcaguuguggcagcugcugcaaguuugacgaagaugacuccgagccuguguugaaggggguuaaacugcacuacacaugaggacuagucccuguucccagagcccacuuuuuuuucuuuuuuugaaauaaaauagccugucuuucagaucucaaaggcucuuuucagagccaccaaaaaaaaaaaaaaaaaaaaaaaaaaaaaaaaaaaaaaaaaaaaaaaaaaaaaaaaaaaaaaaaaaaaaaaaaaaaaaaaaaaaaaaaaaaaaaaaaaaaa

SEQ ID NO: 12506 - RNA, 4094 nt, Artificial Sequence
  SARS-CoV-2/Netherlands/ZuidHolland_2/2020__EPI_ISL_414556 spike protein mRNA human (1-1273)
aggagagucccgcagucggcguccagcggcucugcuuguucgugugugugucguugcaggccuuauucaagcuuaccauguucguguuucugguccuccuuccccugguuagcucccagugcgugaacuugaccacaagaacucaauuaccuccagccuacacuaauucuuucaccaggggcguauauuacccggacaagguguuucggucaaguguccugcacagcacacaggaucuauuccuccccuuuuucuccaacgugacuugguuucaugcuauccacguuucugggaccaauggaacaaaacgcuucgacaacccugugcugccauuuaaugauggugucuauuucgcaucgaccgagaagucaaacauuauacgaggcuggaucuuugggacuacacuugacagcaaaacccagagucuguugauugugaauaacgccacgaauguaguuaucaaggugugugaguuccaguuuugcaacgaucccuuccucggagucuacuaucauaaaaauaacaaguccuggauggagucugaguuccguguguacagcuccgcgaauaacuguacuuuugaauaugugucacaaccuuuccugauggaccuggaaggcaagcaggguaauuuuaaaaaccucagagaguucgucuuuaagaacauugauggguacuucaaaaucuacaguaagcacaccccaauaaauuuaguuagggaccugccccagggauuuagcgcucuugagccuuugguggaucugccaaucggcauuaacaucacacgguuccagacucuacucgcccugcaucgcucuuaucuuaccccgggcgacuccucaagcggguggacagcaggagccgcugcauacuauguagguuaccugcaacccagaaccuuuuugcucaaauauaaugaaaacggcacgauuacugaugccguggacugcgcucuggauccuuuaagugagacaaaguguacccugaagucuuucacugucgaaaaagggaucuaccagacauccaauuuuagggugcagccaaccgagagcauaguucgguuccccaacauuacgaaucucugcccuuuuggagagguguucaacgccacccgcuucgcgucggucuaugcauggaaucgaaagagaaucucuaacuguguggccgacuacuccguacuuuacaauucagcuaguuuuagcacauucaaaugcuauggcguuuccccaacuaagcugaacgacuuguguuuuaccaauguguacgccgauucuuucgucauuaggggugacgaagugcggcagaucgcacccgggcaaacaggaaaaaucgcugauuauaacuacaagcuaccggacgauuuuacuggcugcgucauugccuggaauagcaacaaccuggacucaaaagugggcgggaauuauaacuaccucuaucgucuguuccgcaagaguaaucuuaagccuuuugagagagauauauccaccgaaaucuaccaggcgggaagcacacccuguaacgguguugagggcuucaauugcuacuuuccacugcagucuuauggguuccaaccuaccaacggagugggcuaccagcccuauaggguagucguguugucauuugaacuccugcacgccccagcaacuguuugcggucccaaaaagaguacgaauuuagugaaaaacaagugugucaauuucaacuuuaaugggcugacaggcaccggagugcuaacugagagcaacaaaaaguuccucccuuuccagcaguuuggccgggacauugcugauaccacagacgccguacgagauccacaaacccuggagauccuugacauaacuccgugcuccuucgggggagugucuguuauuacacccgguacgaauaccucgaaccaggucgcuguguuguaccagggcgugaauuguacugaagucccuguugccauccacgcagaccagcugacaccaaccuggcgcguguauagcacaggguccaacguguuucaaacuagagccggaugccucaucggcgcugagcauguaaacaauucauacgaaugugauauucccaucggugcggggauuugcgcaaguuaucagacccagacgaacucuccuaggcgggcccgcagcgucgcuucccagucaauaaucgccuacaccaugagccugggcgcagaaaauucuguggccuacuccaacaauaguauugcuaucccaacaaacuucacuaucagcguuaccacagaaauucuucccgugucuaugacuaagaccuccgucgacuguacgauguauauaugcggagauucaacagaguguaguaaucuguugcuccaauacggcagcuuuugcacccagcugaacagagccuuaacugggaucgcacuggagcaggacaaaaauacacaggaaguguucgcgcaaguuaagcagauuuauaaaaccccgccuaucaaggauuuuggagguuucaacuuuucgcagauucuaccagaccccuccaaaccuucuaagaggagcuucaucgaggaucuccuguuuaauaaggugacucuugcugacgccggcuucauaaaacaauacggggauuguuugggagacaucgcagcccgugaucugauuugcgcucagaaguucaacggccucaccguacugcccccauuacugacagacgaaaugaucgcccaguauacgucagcacuuuuggcugguaccauuacgaguggguggacauuuggcgccggagcggcccuccagaucccuuucgcuaugcaaauggcauaccgguuuaauggcauaggggucacccagaacgugcuguaugagaaucagaaacuaauugccaaccaguucaacuccgcuaucggaaagauucaagauucucugagcuccacagccucagcacucggcaaacugcaggacguggucaaucagaacgcgcaggcccuuaauacuuugguuaagcaacugagcaguaacuuuggugcuaucucuuccguguuaaaugacauacucagccgacuggauaagguagaagccgaggugcagaucgacagacuuauuaccgggaggcugcagucguugcaaacguacgucacacagcagcucauccgcgcagcugagauucgggccucagcaaaccuggccgcuaccaaaaugucugaaugcgugcuaggacagaguaagagaguugauuucuguggcaaagguuaccaccugauguccuuuccccaaagcgcgccacauggcguggucuuccuccacgugacuuauguuccggcccaggagaagaauuuuaccacagcuccugcaaucugccacgacgggaaagcccauuuccccagggaaggaguguuugucucuaacggcacucacugguucguaacccagcgcaauuuuuacgagccacagauaauuacaacggauaacaccuucgugagcgggaauugugacguugugaucggaaucgucaacaauacuguguaugauccccugcaaccugagcuugacuccuucaaggaagaguuggauaaauacuuuaagaaccauacaucaccagacguagaucugggcgacauuagugguaucaaugccagcguggucaacauucagaaggaaauagaucgauuaaaugagguugcuaaaaaccucaacgaaucucugaucgaccuucaggagcuggggaaguaugagcaguacauuaaauggcccugguauaucuggcuaggauucauugcaggccucaucgccauagugauggugaccaucaugcugugcuguaugacuuccugcuguucaugcuugaaggguuguugcaguuguggcagcugcugcaaauuugacgaagaugacuccgagccuguccugaagggggugaaguuacacuacacaugaggacuagucccuguucccagagcccacuuuuuuuucuuuuuuugaaauaaaauagccugucuuucagaucucaaaggcucuuuucagagccaccaaaaaaaaaaaaaaaaaaaaaaaaaaaaaaaaaaaaaaaaaaaaaaaaaaaaaaaaaaaaaaaaaaaaaaaaaaaaaaaaaaaaaaaaaaaaaaaaaaaaa

SEQ ID NO: 12507 - RNA, 4094 nt, Artificial Sequence
  SARS-CoV-2/USA/WA-UW31/2020__EPI_ISL_414618 spike protein mRNA human (1-1273)
aggagagucccgcagucggcguccagcggcucugcuuguucgugugugugucguugcaggccuuauucaagcuuaccauguucguguuucugguccuccuuccccugguuagcucccagugcgugaacuugaccacaagaacucaauuaccuccagccuacacuaauucuuucaccaggggcguauauuacccggacaagguguuucggucaaguguccugcacagcacacaggaucuauuccuccccuuuuucuccaacgugacuugguuucaugcuauccacguuucugggaccaauggaacaaaacgcuucgacaacccugugcugccauuuaaugauggugucuauuucgcaucgaccgagaagucaaacauuauacgaggcuggaucuuugggacuacacuugacagcaaaacccagagucuguugauugugaauaacgccacgaauguaguuaucaaggugugugaguuccaguuuugcaacgaucccuuccucggagucuacuaucauaaaaauaacaaguccuggauggagucugaguuccguguguacagcuccgcgaauaacuguacuuuugaauaugugucacaaccuuuccugauggaccuggaaggcaagcaggguaauuuuaaaaaccucagagaguucgucuuuaagaacauugauggguacuucaaaaucuacaguaagcacaccccaauaaauuuaguuagggaccugccccagggauuuagcgcucuugagccuuugguggaucugccaaucggcauuaacaucacacgguuccagacucuacucgcccugcaucgcucuuaucuuaccccgggcgacuccucaagcggguggacagcaggagccgcugcauacuauguagguuaccugcaacccagaaccuuuuugcucaaauauaaugaaaacggcacgauuacugaugccguggacugcgcucuggauccuuuaagugagacaaaguguacccugaagucuuucacugucgaaaaagggaucuaccagacauccaauuuuagggugcagccaaccgagagcauaguucgguuccccaacauuacgaaucucugcccuuuuggagagguguucaacgccacccgcuucgcgucggucuaugcauggaaucgaaagagaaucucuaacuguguggccgacuacuccguacuuuacaauucagcuaguuuuagcacauucaaaugcuauggcguuuccccaacuaagcugaacgacuuguguuuuaccaauguguacgccgauucuuucgucauuaggggugacgaagugcggcagaucgcacccgggcaaacaggaaaaaucgcugauuauaacuacaagcuaccggacgauuuuacuggcugcgucauugccuggaauagcaacaaccuggacucaaaagugggcgggaauuauaacuaccucuaucgucuguuccgcaagaguaaucuuaagccuuuugagagagauauauccaccgaaaucuaccaggcgggaagcacacccuguaacggugccgagggcuucaauugcuacuuuccacugcagucuuauggguuccaaccuaccaacggaguuggcuaccagcccuauagggugguagucuugucauuugaacuccugcacgcaccagcuacugugugcggucccaaaaagaguacgaauuuaguuaaaaacaagugugugaauuucaacuuuaaugggcugacaggcaccggaguccuaacugagagcaacaaaaaguuccucccuuuccagcaguuuggccgggacauugccgauaccacagacgcugugcgagauccacaaacccuggagauccuugacauaacuccgugcuccuucgggggaguaucugugauuacacccgguacgaauaccucgaaccagguugccgucuuguaccaggacgugaauuguacugaagugccugucgcaauccacgccgaucagcugacaccaaccuggcgcguuuauagcacaggcuccaacguguuucaaacuagagcugggugccucaucggagcggagcaugugaacaauucauacgaaugugacauucccaucggcgcagguauuugcgccaguuaucagacccagacgaacucuccuaggcgggcucgcagcguagccucccagucaauaaucgcauacaccaugagccugggggccgaaaauucugucgcuuacuccaacaauaguauugccaucccaacaaacuucacuaucagcgugaccacagaaauucuucccguuucuaugacuaagaccuccguggauuguacgauguauauaugcggcgacucaacagaguguaguaaucuguugcuccaauacggcagcuuuugcacccagcugaacagagcauuaacuggaaucgcggucgagcaggauaaaaauacacaggaaguguucgcucaaguuaagcagauuuauaaaaccccgccuaucaaggacuuugggggauucaacuuuucgcagauucugccagaucccuccaaaccuucuaagaggagcuucaucgaggaccuacucuuuaauaaggugacucuggccgaugcagguuucauaaaacaauacggcgacugucuuggggauaucgccgcucgugacuugauuugcgcccagaaguucaacggacugaccguacugcccccacucuuaacagaugaaaugaucgcacaguauacgucagcucugcuugccggcaccauuacgagugguuggacauuuggggcgggcgccgcuuugcagaucccuuucgcaaugcaaauggccuaccgguuuaauggaauaggcgucacccagaacgugcucuaugagaaucagaaacugauugcuaaccaguucaacuccgccaucgggaagauucaagacucucuaagcuccacagcaucagcgcugggaaaacuccaggacguggucaaucagaacgcccaggcucugaauacucuuguuaagcaauugagcaguaacuuuggcgccaucucuuccgugcugaaugauauauuaagccgacucgacaagguagaagcagaggugcagaucgauagacugauuaccgguaggcuucagucgcugcaaacguacgucacacagcaguugauccgcgcugccgagauucgggcaucagccaaccucgcugcgaccaaaaugucugaaugcgugcuggggcagaguaagagaguugacuucuguggaaaaggcuaccaccuaauguccuuuccccaaagcgccccacaugguguggucuuccugcacgugacuuauguuccggcacaggagaagaauuuuaccacagcuccugccaucugccacgauggcaaagcccauuuccccagggaagggguguuugucucuaacggaacucacugguucguaacccagcgcaauuuuuacgagccacagauaauuacaacggacaacaccuucgugagcggcaauugugauguugugaucgggaucgucaacaauacuguguaugacccccuccaaccugagcuggauuccuucaaggaggaacuugacaaauacuuuaagaaccauacaucaccagauguagacuugggagauauuaguggcaucaaugcuagcguggucaacauucagaaggaaauagaccgacugaaugagguugccaaaaacuuaaacgaaucucucaucgaccugcaggagcuugguaaguaugagcaguacauuaaauggcccugguauaucuggcugggguucauugcaggacuaaucgcgauagugauggugaccaucaugcucugcuguaugacuuccugcuguucaugccugaagggcuguugcaguugugguagcugcugcaaauuugaugaagacgauuccgagccugucuugaagggcgugaagcugcacuacacaugaggacuagucccuguucccagagcccacuuuuuuuucuuuuuuugaaauaaaauagccugucuuucagaucucaaaggcucuuuucagagccaccaaaaaaaaaaaaaaaaaaaaaaaaaaaaaaaaaaaaaaaaaaaaaaaaaaaaaaaaaaaaaaaaaaaaaaaaaaaaaaaaaaaaaaaaaaaaaaaaaaaaa

SEQ ID NO: 12508 - RNA, 4094 nt, Artificial Sequence
  SARS-CoV-2/South Korea/SNU01/2020__EPI_ISL_411929 spike protein mRNA human (1-1273)
aggagagucccgcagucggcguccagcggcucugcuuguucgugugugugucguugcaggccuuauucaagcuuaccauguucguguuucugguccuccuuccccugguuagcucccagugcgugaacuugaccacaagaacucaauuaccuccagccuacaccaauucuuucacgaggggcguauauuacccggacaagguguuucggucaaguguccugcacagcacacaggaucuauuccuccccuuuuucuccaacgugacuugguuucaugcuauccacguuucugggaccaauggaacaaaacgcuucgacaacccugugcugccauuuaaugauggugucuauuucgcaucgaccgagaagucaaacauuauacgaggcuggaucuuugggacuacacuugacagcaaaacccagagucuguugauugugaauaacgccacgaauguaguuaucaaggugugugaguuccaguuuugcaacgaucccuuccucggagucuacuaucauaaaaauaacaaguccuggauggagucugaguuccguguguacagcuccgcgaauaacuguacuuuugaauaugugucacaaccuuuccugauggaccuggaaggcaagcaggguaauuuuaaaaaccucagagaguucgucuuuaagaacauugauggguacuucaaaaucuacaguaagcacaccccaauaaauuuaguuagggaccugccccagggauuuugggcucuugagccuuugguggaucugccaaucggcauuaacaucacacgguuccagacucuacucgcccugcaucgcagcuaucuuaccccgggcgacucuuccucaggguggacagcaggagccgcugcauacuauguagguuaccugcaacccagaaccuuuuugcucaaauauaaugaaaacggcacgauuacugaugccguggacugcgcucuggauccuuuaagcgagacaaaguguacccugaagaguuucacugucgaaaaagggaucuaccagacaucuaauuuuagggugcagccaaccgaguccauaguucgguuccccaacauuacgaaucucugcccuuuuggagagguguucaacgccacccgcuucgcgagcgucuaugcauggaaucgaaagagaaucucgaacuguguggccgacuacucuguacuuuacaauuccgcuucauuuaguacauucaaaugcuauggcguuagcccaacuaagcugaacgacuuguguuuuaccaauguguacgccgauuccuucgucauuaggggugacgaagugcggcagaucgcacccgggcaaacaggaaaaaucgcugauuauaacuacaagcuaccggacgauuuuacuggcugcgucauugccuggaacucuaauaaccuggacagcaaagugggcgggaauuauaacuaccucuaucgucuguuccgcaagucaaaucuuaagccuuuugagagagauauaaguaccgaaaucuaccaggcgggauccacacccuguaacgguguugagggcuucaauugcuacuuuccacugcagagcuauggguuccaaccuaccaacggagugggcuaccagcccuauaggguagucguguugucuuuugaacuccugcacgccccagcaacuguuugcggucccaaaaagucaacgaauuuagugaaaaacaagugugucaauuucaacuuuaaugggcugacaggcaccggagugcuaacugagaguaacaaaaaguuccucccuuuccagcaguuuggccgggacauugcugauaccacagacgccguacgagauccacaaacccuggagauccuugacauaacuccgugcagcuucgggggaguguccguuauuacacccgguacgaauaccucuaaccaggucgcuguguuguaccaggacgugaauuguacugaagucccuguugccauccacgcagaucagcugacaccaaccuggcgcguguauucgacaggcagcaacguguuucaaacuagagccgggugccucaucggagcugagcauguaaacaauuccuacgaaugugacauucccaucggcgcggguauuugcgcaucauaucagacccagacgaacaguccuaggcgggcccgcucugucgcuagccaguccauaaucgccuacaccaugucacugggggcagagaauagcguggccuacucuaacaauuccauugcuaucccaacaaacuucacuaucaguguuaccacagaaauucuucccgugagcaugacuaagaccucugucgauuguacgauguauauaugcggcgacuccacagaguguucaaaucuguugcuccaauacggaaguuuuugcacccagcugaacagagccuuaacuggcaucgcaguggagcaggauaaaaauacacaggaaguuuucgcgcaagugaagcagauuuauaaaaccccgccuaucaaggacuuugggggauucaacuuuagccagauucugccagaucccucgaaaccuuccaagaggucuuucaucgaggaccuacucuuuaauaagguaacucuggcugaugccgguuucauaaaacaauacggcgacugucuuggggauaucgcagcccgugacuugauuugcgcucagaaguucaacggacugaccguccucccuccacuguuaacagaugaaaugaucgcccaguauacgagcgcacugcuugcuggcaccauuacuucagguuggacauuuggggccggcgcggccuugcagaucccuuucgcuaugcaaauggcauaccgguuuaauggaauaggcgugacccagaacgugcucuaugagaaucagaaacugauugccaaccaguucaacagugcuaucgggaagauucaagacucccuaucuagcacagccuccgcacugggaaaacuccaggacgucguuaaucagaacgcgcaggcccugaauacucuugugaagcaauugucaagcaacuuuggcgcuaucaguucuguacugaaugauauauuaucccgacucgacaagguggaagccgagguccagaucgauagacugauuaccgguaggcuucagagccugcaaacguacgugacacagcaguugauccgcgcagcugagauucgggccucggcaaaccucgccgcuaccaaaaugucagaaugcguucuggggcagucuaagagaguggacuucuguggaaaaggcuaccaccuaaugaguuuuccccaauccgcgccacauggugucguguuccugcacguuacuuaugugccggcccaggagaagaauuuuaccacagcacccgcuaucugccacgauggcaaagcccauuuccccagggaaggggucuuuguaagcaacggaacucacugguucgugacccagcgcaauuuuuacgagccacagauaauuacaacggacaacaccuucguuucuggcaauugugauguggucaucgggaucgugaacaauacuguauaugacccccuccaaccugagcuggauagcuucaaggaagaacuugacaaauacuuuaagaaccauacauccccagauguggacuugggagauauuucaggcaucaaugccagugucguuaacauucagaaggaaauagaccgacugaaugagguggcuaaaaacuuaaacgaaagccucaucgaccugcaggagcuugguaaguaugagcaguacauuaaauggcccugguauaucuggcugggguucauugcaggacuaaucgccauagugauggucaccaucaugcucugcuguaugacuucuugcuguuccugccugaagggcuguugcucaugugguaguugcugcaaauuugaugaagacgauagcgagccuguguugaagggcguuaagcugcacuacacaugaggacuagucccuguucccagagcccacuuuuuuuucuuuuuuugaaauaaaauagccugucuuucagaucucaaaggcucuuuucagagccaccaaaaaaaaaaaaaaaaaaaaaaaaaaaaaaaaaaaaaaaaaaaaaaaaaaaaaaaaaaaaaaaaaaaaaaaaaaaaaaaaaaaaaaaaaaaaaaaaaaaaa

SEQ ID NO: 12509 - RNA, 4094 nt, Artificial Sequence
  SARS-CoV-2/China/WF0004/2020__EPI_ISL_413694 spike protein mRNA human (1-1273)
aggagagucccgcagucggcguccagcggcucugcuuguucgugugugugucguugcaggccuuauucaagcuuaccauguucguguuucugguccuccuuccccugguuagcucccagugcgugaacuugaccacaagaacucaauuaccuccagccuacacgaauagcuucaccaggggcguauauuacccggacaagguguuucggucaaguguccugcacagcacacaggaucuauuccuccccuuuuucuccaacgugacuugguuucaugcuauccacguuucugggaccaauggaacaaaacgcuucgacaacccugugcugccauuuaaugauggugucuauuucgcaucgaccgagaagucaaacauuauacgaggcuggaucuuugggacuacacuugacagcaaaacccagagucuguugauugugaauaacgccacgaauguaguuaucaaggugugugaguuccaguuuugcaacgaucccuuccucggagucuacuaucauaaaaauaacaaguccuggacugagucugaguuccguguguacagcuccgcgaauaacuguaccuuugaguaugugucacaaccuuuccugauggaccuggaaggcaagcaggguaauuuuaaaaaccucagagaguucgucuuuaagaacauugauggguacuucaaaaucuacaguaagcacacaccaauaaauuuaguuagggaccugccccagggauuuagcgcucuugagccuuugguggaucugccaaucggcauuaacaucacucgguuccagacccuacucgcccugcaucgcucuuaucuuacaccgggcgacuccucaagcggguggaccgcaggagccgcugcauacuauguagguuaccugcaacccagaacguuuuugcucaaauauaaugaaaacggcacuauuacagaugccguggacugcgcucuggauccuuuaagugagaccaaguguacucugaagucuuucacagucgaaaaagggaucuaccagaccuccaauuuuagggugcagccaacggagagcauaguucgguuccccaacauuaccaaucucugcccuuuuggagagguguucaacgccacacgcuucgcgucggucuaugcauggaaucgaaagagaaucucuaacuguguggccgacuacuccguacuuuacaauucagcuaguuuuagcacuuucaaaugcuauggcguuuccccaaccaagcugaacgacuuguguuuuacaaauguguacgccgauucuuucgucauuaggggugacgaagugcggcagaucgcacccgggcaaacuggaaaaaucgcugauuauaacuacaagcuaccggacgauuuuaccggcugcgucauugccuggaauagcaacaaccuggacucaaaagugggcgggaauuauaacuaccucuaucgucuguuccgcaagaguaaucuuaagccuuuugagagagauauauccacagaaaucuaccaggcgggaagcacccccuguaacgguguugagggcuucaauugcuacuuuccacugcagucuuauggguuccaaccuacuaacggagugggcuaccagcccuauaggguagucguguugucauuugaacuccugcacgccccagcaacgguuugcggucccaaaaagaguacaaauuuagugaaaaacaagugugucaauuucaacuuuaaugggcugaccggcacuggagugcuaaccgagagcaacaaaaaguuccucccuuuccagcaguuuggccgggacauugcugauacaaccgacgccguacgagauccacaaacucuggagauccuugacauaacaccgugcuccuucgggggagugucuguuauuacgcccgguaccaauacuucgaaccaggucgcuguguuguaccaggacgugaauuguacagaagucccuguugccauccacgcagaucagcugaccccaacauggcgcguguauagcacuggcuccaacguguuucaaaccagagccgggugccucaucggagcugagcauguaaacaauucauacgaaugugacauucccaucggcgcggguauuugcgcaaguuaucagacgcagaccaacucuccuaggcgggcccgcagcgucgcuucccagucaauaaucgccuacacaaugagccugggggcagaaaauucuguggccuacuccaacaauaguauugcuaucccaacuaacuucaccaucagcguuacaacugaaauucuucccgugucuaugaccaagacguccgucgauuguacaauguauauaugcggcgacucaaccgaguguaguaaucuguugcuccaauacggaucuuuuugcacucagcugaacagagccuuaacaggcaucgcaguggagcaggauaaaaauacccaggaaguuuucgcgcaagugaagcagauuuauaaaacuccgccuaucaaggacuuugggggauucaacuuuucgcagauucugccagaucccuccaaaccuucuaagaggagcuucaucgaggaccuacucuuuaauaagguaacccuggcugaugccgguuucauaaaacaauacggcgacugucuuggggauaucgcagcccgugacuugauuugcgcucagaaguucaacggacugacaguccugcccccacucuuaacggaugaaaugaucgcccaguauaccucagcacugcuugcuggcacuauuacaagugguuggaccuuuggggccggcgcggccuugcagaucccuuucgcuaugcaaauggcauaccgguuuaauggaauaggcgugacacagaacgugcucuaugagaaucagaaacugauugccaaccaguucaacuccgcuaucgggaagauucaagacucucuaagcuccacugccucagcacugggaaaacuccaggacgucguuaaucagaacgcgcaggcccugaauacccuugugaagcaauugagcaguaacuuuggcgcuaucucuuccguacugaaugauauauuaagccgacucgacaagguggaagccgagguccagaucgauagacugauuacggguaggcuucagucgcugcaaacauacgugacccagcaguugauccgcgcagcugagauucgggccucagcaaaccucgccgcuacuaaaaugucugaaugcguucuggggcagaguaagagauucgacuuuuguggaaaaggcuaccaccuaauguccuucccccaaagcgcgccacaugguguggucuuucugcacgugaccuauguuccggcccaggagaagaauuucacaacugcuccugcaaucugccacgauggcaaagcccauuuucccagggaagggguguucgucucuaacggaacccacugguuuguaacacagcgcaauuucuacgagccacagauaauuacgaccgacaacacuuucgugagcggcaauugugauguugugaucgggaucgucaacaauacaguguaugacccccuccaaccugagcuggauuccuuuaaggaagaacuugacaaauacuucaagaaccauaccucaccagauguagacuugggagauauuaguggcaucaaugccagcguggucaacauucagaaggaaauagaccgacugaaugagguugcuaaaaacuuaaacgaaucucucaucgaccugcaggagcuugguaaguaugagcaguacauuaaauggcccugguauaucuggcugggguuuauugcaggacuaaucgccauagugauggugacuaucaugcucugcuguaugacauccugcuguucaugccugaagggcuguugcaguugugguagcugcugcaaauucgaugaagacgauuccgagccugucuugaagggcgugaagcugcacuacaccugaggacuagucccuguucccagagcccacuuuuuuuucuuuuuuugaaauaaaauagccugucuuucagaucucaaaggcucuuuucagagccaccaaaaaaaaaaaaaaaaaaaaaaaaaaaaaaaaaaaaaaaaaaaaaaaaaaaaaaaaaaaaaaaaaaaaaaaaaaaaaaaaaaaaaaaaaaaaaaaaaaaaa

SEQ ID NO: 12510 - RNA, 4094 nt, Artificial Sequence
  SARS-CoV-2/China/WF0028/2020__EPI_ISL_413791 spike protein mRNA human (1-1273)
aggagagucccgcagucggcguccagcggcucugcuuguucgugugugugucguugcaggccuuauucaagcuuaccauguucguguuucugguccuccuuccccugguuagcucccagugcgugaacuugaccacaagaacucaauuaccuccagccuacacuaauucuuucaccaggggcguauauuacccggacaagguguuucggucaaguguccugcacagcacacaggaucuauuccuccccuuuuucuccaacgugacuugguuucaugcuauccacguuucugggaccaauggaacaaaacgcuucgacaacccugugcugccauuuaaugauggugucuauuucgcaucgaccgagaagucaaacauuauacgaggcuggaucuuugggacuacacuugacagcaaaacccagagucuguugauugugaauaacgccacgaauguaguuaucaaggugugugaguuccaguuuugcaacgaucccuuccucggagucuacuaucauaaaaauaacaaguccuggauggagucugaguuccguguguacagcuccgcgaauaacuguacuuuugaauaugugucacaaccuuuccugauggaccuggaaggcaagcaggguaauuuuaaaaaccucagagaguucgucuuuaagaacauugauggguacuucaaaaucuacaguaagcacaccccaauaaauuuaguuagggaccugccccagggauuuagcgcucuugagccuuugguggaucugccaaucggcauuaacaucacacgguuccagacucuacucgcccugcaucgcucuuaucuuaccccgggcgacuccucaagcggguggacagcaggagccgcugcauacuauguagguuaccugcaacccagaaccuuuuugcucaaauauaaugaaaacggcacgauuacugaugccguggacugcgcucuggauccuuuaagugagacaaaguguacccugaagucuuucacugucgaaaaagggaucuaccagacauccaauuuuagggugcagccaaccgagagcauaguucgguuccccaacauuacgaaucucugcccuuuuggagagguguucaacgccacccgcuucgcgucggucuaugcauggaaucgaaagagaaucucuaacuguguggccgacuacuccguacuuuacaauucagcuaguuuuagcacauucaaaugcuauggcguuuccccaacuaagcugaacgacuuguguuuuaccaauguguacgccgauucuuucgucauuaggggugacgaagugcggcagaucgcacccgggcaaacaggaaaaaucgcugauuauaacuacaagcuaccggacgauuuuacuggcugcgucauugccuggaauagcaacaaccuggacucaaaagugggcgggaauuauaacuaccucuaucgucuguuccgcaagaguaaucuuaagccuuuugagagagauauauccaccgaaaucuaccaggcgggaagcacacccuguaacgguguugagggcuucaauugcuacuuuccacugcagucuuauggguuccaaccuaccaacggagugggcuaccagcccuauaggguagucguguugucauuugaacuccugcacgccccagcaacuguuugcggucccaaaaagaguacgaauuuagugaaaaacaagugugucaauuucaacuuuaaugggcugacaggcaccggagugcuaacugagagcaacaaaaaguuccucccuuuccagcaguuuggccgggacauugcugauaccacagacgccguacgagauccacaaacccuggagauccuugacauaacuccgugcuccuucgggggagugucuguuauuacacccgguacgaauaccucgaaccaggucgcuguguuguaccaggacgugaauuguacugaagucccuguugccauccacgcagaucagcugacaccaaccuggcgcguguauagcacaggcuccaacguguuucaaacuagagccgggugccucaucggagcugagcauguaaacaauucauacgaaugugacauucccaucggcgcggguauuugcgcaaguuaucagacccagacgaacucuccuaggcgggcccgcagcgucgcuucccagucaauaaucgccuacaccaugagccugggggcagaaaauucuguggccuacuccaacaauaguauugcuaucccaacaaacuucacuaucagcguuaccacagaaauucuucccgugucuaugacuaagaccuccgucgauuguacgauguauauaugcggcgacucaacagaguguaguaaucuguugcuccaauacggcagcuuuugcacccagcugaacagagccuuaacuggaaucgcaguggagcaggauaaaaauacacaggaaguuuucgcgcaagugaagcagauuuauaaaaccccgccuaucaaggacuuugggggauucaacuuuucgcagauucugccagaucccuccaaaccuucuaagaggagcuucaucgaggaccuacucuuuaauaagguaacucuggcugaugccgguuucauaaaacaauacggcgacugucuuggggauaucgcagcccgugacuugauuugcgcucagaaguucaacggacugaccguccugcccccacucuuaacagaugaaaugaucgcccaguauacgucagcacugcuugcuggcaccauuacgagugguuggacauuuggggccggcgcggccuugcagaucccuuucgcuaugcaaauggcauaccgguuuaauggaauaggcgugacccagaacgugcucuaugagaaucagaaacugauugccaaccaguucaacuccgcuaucgggaagauucaagacucucuaagcuccacagccucagcacugggaaaacuccaggacgucguuaaucagaacgcgcaggcccugaauacucuugugaagcaauugagcaguaacuuuggcgcuaucucuuccguacugaaugauauauuaagccgacucgacaagguggaagccgagguccagaucgauagacugauuaccgguaggcuucagucgcugcaaacguacgugacacagcaguugauccgcgcagcugagauucgggccucagcaaaccucgccgcuaccaaaaugucugaaugcguucuggggcagaguaagagaguggacuucuguggaaaaggcuaccaccuaauguccuuuccccaaagcgcgccacauggugucguguuccugcacguuacuuaugugccggcccaggagaagaauuuuaccacagcuccugcaaucugccacgauggcaaagcccauuuccccagggaaggggucuuuguaucuaacggaacucacugguucgugacccagcgcaauuuuuacgagccacagauaauuacaacggacaacaccuucguuagcggcaauugugauguggucaucgggaucgugaacaauacuguauaugacccccuccaaccugagcuggaauccuucaaggaggaacuugauaaauacuuuaagaaccauacaucaccagacguggauuugggagacauuaguggcaucaaugccagcgucguuaacauucagaaggagauagaucgacugaaugaaguggcuaaaaacuuaaacgagucucucaucgaccugcaggagcuugguaaguaugaacaguacauuaaauggcccugguauaucuggcugggguucauugcaggacuaaucgccauagugauggucaccaucaugcucugcuguaugacuuccugcuguucaugccugaagggcuguugcaguugugguagcugcugcaaauuugacgaggaugacuccgaaccuguguugaagggcguuaagcugcacuacacaugaggacuagucccuguucccagagcccacuuuuuuuucuuuuuuugaaauaaaauagccugucuuucagaucucaaaggcucuuuucagagccaccaaaaaaaaaaaaaaaaaaaaaaaaaaaaaaaaaaaaaaaaaaaaaaaaaaaaaaaaaaaaaaaaaaaaaaaaaaaaaaaaaaaaaaaaaaaaaaaaaaaaa

SEQ ID NO: 12511 - RNA, 4094 nt, Artificial Sequence
  SARS-CoV-2/2019-nCoV/USA-CruiseA-18/2020__MT159716.1 spike protein mRNA human (1-1273)
aggagagucccgcagucggcguccagcggcucugcuuguucgugugugugucguugcaggccuuauucaagcuuaccauguucguguuucugguccuccuuccccugguuagcucccagugcgugaacuugaccacaagaacucaauuaccuccagccuacacuaauucuuucaccaggggcguauauuacccggacaagguguuucggucaaguguccugcacagcacacaggaucuauuccuccccuuuuucuccaacgugacuugguuucaugcuauccacguuucugggaccaauggaacaaaacgcuucgacaacccugugcugccauuuaaugauggugucuauuucgcaucgaccgagaagucaaacauuauacgaggcuggaucuuugggacuacacuugacagcaaaacccagagucuguugauugugaauaacgccacgaauguaguuaucaaggugugugaguuccaguuuugcaacgaucccuuccucggagucuacuaucauaaaaauaacaaguccuggauggagucugaacugcguguguacagcuccgcgaauaacuguacuuucgaguaugugucacaaccuuuucugauggaccucgaaggcaagcaggguaauuucaaaaacuuaagagaguuugucuucaagaacauugauggguacuuuaaaaucuacaguaagcacaccccaauaaaucugguuagggaccuuccccagggauucagcgcuuuggagccucugguggaucuaccaaucggcauuaacaucacacgguuucagacucuccuggcccuucaucgcucuuaucugaccccgggcgacuccucaagcggguggacagcaggagccgcugcauacuauguagguuacuugcaacccagaaccuuccuccugaaauauaaugaaaacggcacgauuacugaugccguggacugcgcuuuagauccucugagugagacaaaguguacccucaagucuuuuacugucgaaaaagggaucuaccagacauccaauuucagggugcagccaaccgagagcauaguucgguuucccaacauuacgaaucuuugcccuuucggagagguguuuaacgccacccgcuucgcgucggucuaugcauggaaucgaaagagaaucucuaacuguguggccgacuacuccguacuguacaauucagcuaguuucagcacauuuaaaugcuauggcguuuccccaacuaaguugaacgaccuauguuucaccaauguguacgccgauucuuuugucauuaggggugacgaagugcggcagaucgcacccgggcaaacaggaaaaaucgcugauuauaacuacaagcugccggacgauuucacuggcugcgucauugccuggaauagcaacaaccucgacucaaaagugggcgggaauuauaacuaccuguaucgucuuuuucgcaagaguaaucugaagccuuucgagagagauauauccaccgaaaucuaccaggcgggaagcacacccuguaacgguguugagggcuuuaauugcuacuucccauugcagucuuauggguuucaaccuaccaacggagugggcuaccagcccuauaggguagucgugcucucauucgaacuguuacacgccccagcaacuguuugcggucccaaaaagaguacgaaucuggugaaaaacaagugugucaauuuuaacuucaaugggcuaacaggcaccggagugcucacugagagcaacaaaaaguuucugccuuuccagcaguucggccgggacauugcugauaccacagacgccguacgagauccacaaacccuugagaucuuggacauaacuccgugcuccuuugggggagugucuguuauuacacccgguacgaauaccucgaaccaggucgcugugcuguaccaggacgugaauuguacugaagucccuguugccauccacgcagaucagcucacaccaaccuggcgcguguauagcacaggcuccaacguguuccaaacuagagccgggugccugaucggagcugagcauguaaacaauucauacgaaugugacauucccaucggcgcggguauuugcgcaaguuaucagacccagacgaacucuccuaggcgggcccgcagcgucgcuucccagucaauaaucgccuacaccaugagccuuggggcagaaaauucuguggccuacuccaacaauaguauugcuaucccaacaaacuuuacuaucagcguuaccacagaaauucugcccgugucuaugacuaagaccuccgucgauuguacgauguauauaugcggcgacucaacagaguguaguaauuugcuccugcaauacggcagcuucugcacccaguuaaacagagcccugacuggaaucgcaguggagcaggauaaaaauacacaggaaguuuuugcgcaagugaagcagauuuauaaaaccccgccuaucaaggacuucgggggauuuaacuucucgcagauucuaccagaucccuccaaaccuucuaagaggagcuuuaucgaggaccuccuguucaauaagguaacucuugcugaugccgguuuuauaaaacaauacggcgacuguuugggggauaucgcagcccgugaccugauuugcgcucagaaguucaacggacucaccguccugcccccauuacugacagaugaaaugaucgcccaguauacgucagcacuuuuggcuggcaccauuacgagugguuggacauucggggccggcgcggcccuccagaucccuuuugcuaugcaaauggcauaccgguucaauggaauaggcgugacccagaacgugcuguaugagaaucagaaacuaauugccaaccaguuuaacuccgcuaucgggaagauucaagacucucugagcuccacagccucagcacucggaaaacugcaggacgucguuaaucagaacgcgcaggcccuuaauacuuuggugaagcaacugagcaguaacuucggcgcuaucucuuccguauuaaaugauauacucagccgacuggacaagguggaagccgagguccagaucgauagacuuauuaccgguaggcugcagucguugcaaacguacgugacacagcagcucauccgcgcagcugagauucgggccucagcaaaccuggccgcuaccaaaaugucugaaugcguucuagggcagaguaagagaguggacuuuuguggaaaaggcuaccaccugauguccuucccccaaagcgcgccacauggugucguguuucuccacguuacuuaugugccggcccaggagaagaauuucaccacagcuccugcaaucugccacgauggcaaagcccauuuucccagggaaggggucuucguaucuaacggaacucacugguuugugacccagcgcaauuucuacgagccacagauaauuacaacggacaacaccuuuguuagcggcaauugugauguggucaucgggaucgugaacaauacuguauaugacccccugcaaccugagcuugauuccuucaaggaagaguuggacaaauacuucaagaaccauacaucaccagauguggaccugggagauauuaguggcaucaaugccagcgucguuaacauucagaaggaaauagaccgauuaaaugagguggcuaaaaaccucaacgaaucucugaucgaccuucaggagcuggguaaguaugagcaguacauuaaauggcccugguauaucuggcuaggguuuauugcaggacucaucgccauagugauggucaccaucaugcugugcuguaugacuuccugcuguucaugcuugaagggcuguugcaguugugguagcugcugcaaauucgaugaagacgauuccgagccugugcugaagggcguuaaguuacacuacacaugaggacuagucccuguucccagagcccacuuuuuuuucuuuuuuugaaauaaaauagccugucuuucagaucucaaaggcucuuuucagagccaccaaaaaaaaaaaaaaaaaaaaaaaaaaaaaaaaaaaaaaaaaaaaaaaaaaaaaaaaaaaaaaaaaaaaaaaaaaaaaaaaaaaaaaaaaaaaaaaaaaaaa

SEQ ID NO: 12512 - RNA, 4094 nt, Artificial Sequence
  SARS-CoV-2/SARS-CoV-2/Yunnan-01/human/2020/CHN__MT049951.1 spike protein mRNA human (1-1273)
aggagagucccgcagucggcguccagcggcucugcuuguucgugugugugucguugcaggccuuauucaagcuuaccauguucguguuucugguccuccuuccccugguuagcucccagugcgugaacuugaccacaagaacucaauuaccuccagccaauacgaacucuuucaccaggggcguauacuauccggacaagguguuucggucaaguguccugcacagcacacaggaucuauuccuccccuuuuucuccaaugugacuugguuucaugcuauccacguuucugggaccaacggaacaaaacgcuucgacaauccugugcugccauuuaacgauggugucuacuucgcaucgaccgagaagucaaauauuauacgaggcuggaucuuugggacuacacuugacagcaaaacccagagucuguugauugugaacaaugccacgaacguaguuaucaaggugugugaguuccaguuuugcaaugaucccuuccucggagucuauuaccauaaaaacaauaaguccuggauggagucugaguuccguguguauagcuccgcgaacaauuguacuuuugaauacgugucacaaccuuuccugauggaccuggaaggcaagcaggguaacuuuaaaaaccucagagaguucgucuuuaagaauauugauggguauuucaaaaucuacaguaagcacaccccaauaaacuuaguuagggaccugccccagggauuuagcgcucuugagccuuugguggaucugccaaucggcauuaauaucacacgguuccagacucuacucgcccugcaucgcucuuaccuuaccccgggcgacuccucaagcggguggacagcaggagccgcugcauauuacguagguuaucugcaacccagaaccuuuuugcucaaauacaacgaaaauggcacgauuacugaugccguggacugcgcucuggauccuuuaagugagacaaaguguacccugaagucuuucacugucgaaaaagggaucuaucagacauccaacuuuagggugcagccaaccgagagcauaguucgguuccccaauauuacgaaccucugcccuuuuggagagguguucaaugccacccgcuucgcgucggucuacgcauggaaccgaaagagaaucucuaauuguguggccgacuauuccguacuuuacaacucagcuaguuuuagcacauucaaaugcuacggcguuuccccaacuaagcugaaugacuuguguuuuaccaacguguaugccgauucuuucgucauuaggggugacgaagugcggcagaucgcacccgggcaaacaggaaaaaucgcugauuacaauuauaagcuaccggacgauuuuacuggcugcgucauugccuggaacagcaacaaucuggacucaaaagugggcgggaacuacaauuaucucuaccgucuguuccgcaagaguaaccuuaagccuuuugagagagauauauccaccgaaaucuaucaggcgggaagcacacccuguaaugguguugagggcuucaacugcuacuuuccacugcagucuuacggguuccaaccuaccaauggagugggcuaucagcccuacaggguagucguguugucauuugaacuccugcacgccccagcaacuguuugcggucccaaaaagaguacgaacuuagugaaaaauaagugugucaacuucaauuuuaacgggcugacaggcaccggagugcuaacugagagcaauaaaaaguuccucccuuuccagcaguuuggccgggacauugcugauaccacagacgccguacgagauccacaaacccuggagauccuugacauaacuccgugcuccuucgggggagugucuguuauuacacccgguacgaacaccucgaaucaggucgcuguguuguaucaggacgugaacuguacugaagucccuguugccauccacgcagaucagcugacaccaaccuggcgcguguacagcacaggcuccaacguguuucaaacuagagccgggugccucaucggagcugagcauguaaauaacucauaugaaugugacauucccaucggcgcggguauuugcgcaaguuaccagacccagacuaauucuccuaggcgggcccgcagcgucgcuucccagucaauaaucgccuauaccaugagccugggggcagagaacucuguggccuacuccaauaacaguauugcuaucccaacaaauuucacuaucagcguuaccacagaaauucuucccgugucuaugacuaagaccuccgucgauuguacgauguacauaugcggcgacucaacagaguguaguaaccuguugcuccaauauggcagcuuuugcacccagcugaauagagccuuaacuggaaucgcaguggagcaggauaaaaacacacaggaaguuuucgcgcaagugaagcagauuuacaaaaccccgccuaucaaggacuuugggggauucaauuuuucgcagauucugccagaucccuccaaaccuucuaagaggagcuucaucgaggaccuacucuuuaacaagguaacucuggcugaugccgguuucauaaaacaauauggcgacugucuuggggauaucgcagcccgugacuugauuugcgcucagaaguucaauggacugaccguccugcccccacucuuaacagaugaaaugaucgcccaguacacgucagcacugcuugcuggcaccauuacgagugguuggacauuuggggccggcgcggccuugcagaucccuuucgcuaugcaaauggcauaucgguuuaacggaauaggcgugacccagaaugugcucuacgagaaccagaaacugauugccaaccaguucaauuccgcuaucgggaagauucaagacucucuaagcuccacagccucagcacugggaaaacuccaggacgucguuaaccagaaugcgcaggcccugaacacucuugugaagcaauugagcaguaauuuuggcgcuaucucuuccguacugaacgauauauuaagccgacucgacaagguggaagccgagguccagaucgauagacugauuaccgguaggcuucagucgcugcaaacguaugugacacagcaguugauccgcgcagcugagauucgggccucagcaaaucucgccgcuaccaaaaugucugaaugcguucuggggcagaguaagagaguggacuucuguggaaaaggcuaccaccuaauguccuuuccccaaagcgcgccacauggugucguguuccugcacguuacuuacgugccggcccaggagaagaacuuuaccacagcuccugcaaucugccacgauggcaaagcccauuuccccagggaaggggucuuuguaucuaauggaacucacugguucgugacccagcgcaacuuuuaugagccacagauaauuacaacggacaauaccuucguuagcggcaacugugauguggucaucgggaucgugaauaacacuguauacgacccccuccaaccugagcuggauuccuucaaggaagaacuugacaaauauuuuaagaaucauacaucaccagauguggacuugggagauauuaguggcaucaacgccagcgucguuaauauucagaaggaaauagaccgacugaacgagguggcuaaaaacuuaaaugaaucucucaucgaccugcaggagcuugguaaguacgagcaguauauuaaauggcccugguacaucuggcugggguucauugcaggacuaaucgccauagugauggucaccaucaugcucugcuguaugacuuccugcuguucaugccugaagggcuguugcaguugugguagcugcugcaaauuugaugaagacgauuccgagccuguguugaagggcguuaagcugcacuauacaugaggacuagucccuguucccagagcccacuuuuuuuucuuuuuuugaaauaaaauagccugucuuucagaucucaaaggcucuuuucagagccaccaaaaaaaaaaaaaaaaaaaaaaaaaaaaaaaaaaaaaaaaaaaaaaaaaaaaaaaaaaaaaaaaaaaaaaaaaaaaaaaaaaaaaaaaaaaaaaaaaaaaa

SEQ ID NO: 12513 - RNA, 4094 nt, Artificial Sequence
  SARS-CoV-2/USA/WA-UW292/2020__EPI_ISL_418077 spike protein mRNA human (1-1273)
aggagagucccgcagucggcguccagcggcucugcuuguucgugugugugucguugcaggccuuauucaagcuuaccauguucguguuucugguccuccuuccccugguuagcucccagugcgugaacuugaccacaagaacucaauuaccuccagccuacaccaauucuuucacgaggggcguauauuacccggacaagguguuucggucaaguguccugcacagcacacaggaucuauuccuccccuuuuucuccaacgugacuugguuucaugcuauccacguuucugggaccaauggaacaaaacgcuucgacaacccugugcugccauuuaaugauggugucuauuucgcaucgaccgagaagucaaacauuauacgaggcuggaucuuugggacuacacuugacagcaaaacccagagucuguugauugugaauaacgccacgaauguaguuaucaaggugugugaguuccaguuuugcaacgaucccuuccucggagucuacuaucauaaaaauaacaaguccuggauggagucugaguuccguguguacagcuccgcgaauaacuguacuuuugaguaugugucacaaccuuuccugauggaccuggaaggcaagcaggguaauuuuaaaaaccucagagaguucgucuuuaagaacauugauggguacuucaaaaucuacaguaagcacaccccaauaaauuuaguuagggaccugccccagggauuuagcgcucuugagccuuugguggaucugccaaucggcauuaacaucacacgguuccagacucuacucgcccugcaucgcucuuaucuuaccccgggcgacuccucaagcggguggacagcaggagccgcugcauacuauguagguuaccugcaacccagaaccuuuuugcucaaauauaaugaaaacggcacgauuacugaugccguggacugcgcucuggauccuuuaagugagacaaaguguacccugaagucuuucacugucgaaaaagggaucuaccagacauccaauuuuagggugcagccaaccgagagcauaguucgguuccccaacauuacgaaucucugcccuuuuggagagguguucaacgccacccgcuucgcgucggucuaugcauggaaucgaaagagaaucucuaacuguguggccgacuacuccguacuuuacaauucagcuaguuuuagcacauucaaaugcuauggcguuuccccaacuaagcugaacgacuuguguuuuaccaauguguacgccgauucuuucgucauuaggggugacgaagugcggcagaucgcacccgggcaaacaggaaaaaucgcugauuauaacuacaagcuaccggacgauuuuacuggcugcgucauugccuggaauagcaacaaccuggacucaaaagugggcgggaauuauaacuaccucuaucgucuguuccgcaagaguaaucuuaagccuuuugagagagauauauccaccgaaaucuaccaggcgagcucuacacccuguaacggaguugaggguuucaauugcuacuuuccacugcagucauauggcuuccaaccuaccaacggggugggauaccagcccuauaggguagucguguugaguuuugaacuccugcacgccccagcaacuguuugcggccccaaaaagagcacgaauuuagugaaaaacaagugugucaauuucaacuuuaauggucugacagggaccggcgugcuaacugaguccaacaaaaaguuccucccuuuccagcaguuuggacgggacauugcugauaccacagacgccguacgagauccacaaacccuggagauccuugacauaacuccgugcucuuucggcggggugucgguuauuacacccggaacgaauaccagcaaccaggucgcuguguuguaccaggacgugaauuguacugaagucccuguugccauccacgcagaucagcugacaccaaccuggcgcguguauuccacagguucaaacguguuucaaacuagagccggcugccucaucggggcugagcauguaaacaauaguuacgaaugugacauucccaucggagcgggcauuugcgcaucuuaucagacccagacgaacagcccuaggcgggcccgcuccgucgcuucacagagcauaaucgccuacaccaugucucugggugcagaaaauuccguggccuacaguaacaauagcauugcuaucccaacaaacuucacuaucucuguuaccacagaaauucuucccguguccaugacuaagaccucagucgauuguacgauguauauaugcggggacaguacagaguguagcaaucuguugcuccaauacggcucguuuugcacccagcugaacagagccuuaacuggaaucgcaguggagcaggauaaaaauacacaggaaguuuucgcgcaagugaagcagauuuauaaaaccccgccuaucaaggacuuuggcggguucaacuuuucccagauucugccagaucccucuaaaccuagcaagaggucauucaucgaggaccuacucuuuaauaagguaacucuggcugaugccggauucauaaaacaauacggugacugucuuggcgauaucgcagcccgugacuugauuugcgcucagaaguucaacgggcugaccguccucccuccacuguuaacagaugaaaugaucgcccaguauacgagugcacugcuugcuggaaccauuacuuccggcuggacauuuggugccggggcggccuugcagaucccuuucgcuaugcaaauggcauaccgguuuaauggcauaggagugacccagaacgugcucuaugagaaucagaaacugauugccaaccaguucaacucugcuaucggcaagauucaagacagccuauccucaacagccagcgcacuggggaaacuccaggacgucguuaaucagaacgcgcaggcccugaauacucuugugaagcaauugaguucuaacuuuggagcuaucuccagcguacugaaugauauauuaucgcgacucgacaagguggaagccgagguccagaucgauagacugauuaccggcaggcuucagucacugcaaacguacgugacacagcaguugauccgcgcagcugagauucgggccucugcaaaccucgccgcuaccaaaaugagugaaugcguucugggucaguccaagagaguggacuucugugggaaaggauaccaccuaaugagcuuuccccaaucugcgccacauggcgucguguuccugcacguuacuuaugugccggcccaggagaagaauuuuaccacagcacccgcuaucugccacgaugguaaagcccauuuccccagggaaggcgucuuuguaagcaacgggacucacugguucgugacccagcgcaauuuuuacgagccacagauaauuacaacggacaacaccuucguuuccggaaauugugauguggucaucggcaucgugaacaauacuguauaugacccccuccaaccugagcuggauucauucaaggaagaacuugacaaauacuuuaagaaccauacaaguccagauguggacuugggggauauuagcggaaucaaugccucugucguuaacauucagaaggaaauagaccgacugaaugagguggcuaaaaacuuaaacgaaucccucaucgaccugcaggagcuuggcaaguaugagcaguacauuaaauggcccugguauaucuggcuggguuucauugcagggcuaaucgccauagugauggucaccaucaugcucugcuguaugacuucaugcuguaguugccugaagggauguugcagcuguggcuccugcugcaaauuugaugaagacgauucugagccuguguugaaggguguuaagcugcacuacacaugaggacuagucccuguucccagagcccacuuuuuuuucuuuuuuugaaauaaaauagccugucuuucagaucucaaaggcucuuuucagagccaccaaaaaaaaaaaaaaaaaaaaaaaaaaaaaaaaaaaaaaaaaaaaaaaaaaaaaaaaaaaaaaaaaaaaaaaaaaaaaaaaaaaaaaaaaaaaaaaaaaaaa

SEQ ID NO: 12514 - RNA, 4094 nt, Artificial Sequence
  SARS-CoV-2/Iceland/192/2020__EPI_ISL_417819 spike protein mRNA human (1-1273)
aggagagucccgcagucggcguccagcggcucugcuuguucgugugugugucguugcaggccuuauucaagcuuaccauguucguguuuuucguccugcucccccuuguuagcucccagugcgugaaccugaccacaagaacucaauugccuccagccuacacuaauucuuuuaccaggggcguauauuacccggacaagguguuccggucaagugucuuacacagcacacaggaucuguuucuacccuucuuuuccaacgugacuugguuccaugcuauccacguuucugggaccaauggaacaaaacgcuuugacaacccugugcucccauucaaugauggugucuauuuugcaucgaccgagaagucaaacauuauacgaggcuggaucuucgggacuacacuggacagcaaaacccagagucuucugauugugaauaacgccacgaauguaguuaucaaggugugugaauuucaguucugcaacgaucccuucuugggagucuacuaucauaaaaauaacaaguccuggauggagucugaauuucguguguacagcuccgcgaauaacuguacuuucgaguaugugucacaaccuuuucucauggaccuggaaggcaagcaggguaauuucaaaaaccugagagaguuugucuucaagaacauugauggguacuuuaaaaucuacaguaagcacaccccaauaaaucucguuagggacuuaccccagggauucagcgcucuggagccucuuguggauuugccaaucggcauuaacaucacacgguuucagacucugcuagcccuccaucgcucuuaucugaccccgggcgacuccucaagcggguggacagcaggagccgcugcauacuauguagguuaccuucaacccagaaccuuccuguugaaauauaaugaaaacggcacgauuacugaugccguggacugcgcucucgauccucugagugagacaaaguguaccuuaaagucuuuuacugucgaaaaagggaucuaccagacauccaauuucagggugcagccaaccgagagcauaguucgguuucccaacauuacgaaucugugcccuuucggagagguguucaacgccacccgcuuugcgucggucuaugcauggaaucgaaagagaaucucuaacuguguggccgacuacuccguacucuacaauucagcuaguuucagcacauuuaaaugcuauggcguuuccccaacuaaacuuaacgaccuguguuucaccaauguguacgccgauucuuuugucauuaggggugacgaagugcggcagaucgcacccgggcaaacaggaaagaucgcugauuauaacuacaaguugccggacgauuucacuggcugcgucauugccuggaauagcaacaaccuagacucaaaagugggcgggaauuauaacuaccuguaucgucucuuucgcaagaguaaucugaagccuuucgagagagauauauccaccgaaaucuaccaggcgggaagcacacccuguaacgguguugagggcuuuaauugcuacuucccacuucagucuuauggguuucaaccuaccaacggagugggcuaccagcccuauaggguagucgugcugucauucgaauugcuccacgccccagcaacuguuugcggucccaaaaagaguacgaaucuggugaaaaacaagugugucaauuuuaacuucaauggguuaacaggcaccggagugcugacugagagcaacaaaaaguuccuaccuuuucagcaguucggccgggacauugcugauaccacagacgccguacgagauccacaaacccucgagauccuggacauaacuccgugcuccuuugggggagugucuguuauuacacccgguacgaauaccucgaaccaggucgcugugcuuuaccagggcgugaauuguacugaagucccuguugccauccacgcagaccaguugacaccaaccuggcgcguguauagcacaggguccaacguguuccaaacuagagccggaugccugaucggcgcugagcauguaaacaauucauacgaaugugauauucccaucggugcggggauuugcgcaaguuaucagacccagacgaacucuccuaggcgggcccgcagcgucgcuucccagucaauaaucgccuacaccaugagccucggcgcagaaaauucuguggccuacuccaacaauaguauugcuaucccaacaaacuuuacuaucagcguuaccacagaaauucugcccgugucuaugacuaagaccuccgucgacuguacgauguauauaugcggagauucaacagaguguaguaaucuucuguugcaauacggcagcuucugcacccagcucaacagagcccugacugggaucgcaguggagcaggacaaaaauacacaggaaguuuuugcgcaagugaagcagauuuauaaaaccccgccuaucaaggauuucggagguuuuaacuucucgcagauuuuaccagaccccuccaaaccuucuaagaggagcuuuaucgaggaucugcuauucaauaagguaacucucgcugacgccggcuucauaaaacaauacggggauugucugggagacaucgcagcccgugaucuuauuugcgcucagaaguuuaacggcuugaccguccugcccccacuccugacagacgaaaugaucgcccaguauacgucagcauuacuggcugguaccauuacgaguggguggacauucggcgccggagcggcccuucagaucccuuuugcuaugcaaauggcauaccgguucaauggcauaggggugacccagaacguguuguaugagaaucagaaacucauugccaaccaguuuaacuccgcuaucggaaagauucaagauucucugagcuccacagccucagcacuaggcaaacugcaggacgucguuaaucagaacgcgcaggcccucaauacucuggugaagcaacuuagcaguaacuucggugcuaucucuuccguauugaaugacauacugagccgauuagauaagguggaagccgagguccagaucgacagacucauuaccgggaggcugcagucgcuucaaacguacgugacacagcagcugauccgcgcagcugagauucgggccucagcaaacuuggccgcuaccaaaaugucugaaugcguucucggacagaguaagagaguggauuuuuguggcaaagguuaccaccugauguccuucccccaaagcgcgccacauggcgucguguuucuacacguuacuuaugugccggcccaggagaagaauuucaccacagcuccugcaaucugccacgacgggaaagcccauuuucccagggaaggagucuucguaucuaacggcacucacugguuugugacccagcgcaauuucuacgagccacagauaauuacaacggauaacaccuucguuagcgggaauugugacguggucaucggaaucgugaacaauacuguauaugauccccugcaaccugagcucgacuccuuuaaggaggagcuggauaaauacuucaagaaccauacaucaccagacguggaucuuggcgacauuagugguaucaaugccagcgucguuaacauucagaaggaaauagaucgauugaaugagguggcuaaaaaccugaacgaaucuuuaaucgaccuccaggagcuggggaaguaugagcaguacauuaaauggcccugguauaucuggcuuggauuuauugcaggccugaucgccauagugauggucaccaucaugcuaugcuguaugacuuccugcuguucaugccucaaggguuguugcaguuguggcagcugcugcaaauucgacgaagaugacuccgagccugugcugaaggggguuaaguugcacuacacaugaggacuagucccuguucccagagcccacuuuuuuuucuuuuuuugaaauaaaauagccugucuuucagaucucaaaggcucuuuucagagccaccaaaaaaaaaaaaaaaaaaaaaaaaaaaaaaaaaaaaaaaaaaaaaaaaaaaaaaaaaaaaaaaaaaaaaaaaaaaaaaaaaaaaaaaaaaaaaaaaaaaaa

SEQ ID NO: 12515 - RNA, 4094 nt, Artificial Sequence
  SARS-CoV-2/Belgium/ULG-6939/2020__EPI_ISL_417020 spike protein mRNA human (1-1273)
aggagagucccgcagucggcguccagcggcucugcuuguucgugugugugucguugcaggccuuauucaagcuuaccauguucguguuucugguccuccuuccccugguuagcucccagugcgugaacuugaccacaagaacucaauuaccuccagccuacacuaauucuuucaccaggggcguauauuacccggacaagguguuucggucaaguguccugcacagcacacaggaucuauuccuccccuuuuucuccaacgugacuugguuucaugcuauccacguuucugggaccaauggaacaaaacgcuucgacaacccugugcugccauuuaaugauggugucuauuucgcaucgaccgagaagucaaacauuauacgaggcuggaucuuugggacuacacuugacagcaaaacccagagucuguugauugugaauaacgccacgaauguaguuaucaaggugugugaguuccaguuuugcaacgaucccuuccucggagucuacuaucauaaaaauaacaaguccuggauggagucugaguuccguguguacagcuccgcgaauaacuguacuuuugaguaugugucacaaccuuuccugauggaccuggaaggcaagcaggguaauuuuaaaaaccucagagaguucgucuuuaagaacauugauggguacuucaaaaucuacaguaagcacaccccaauaaauuuaguuagggaccugccccagggauuuagcgcucuugagccuuugguggaucugccaaucggcauuaacaucacacgguuccagacucuacucgcccugcaucgcucuuaucuuaccccgggcgacuccucaagcggguggacagcaggagccgcugcauacuauguagguuaccugcaacccagaaccuuuuugcucaaauauaaugaaaacggcacgauuacugaugccguggacugcgcucuggauccuuuaagugagacaaaguguacccugaagucuuucacugucgaaaaagggaucuaccagacauccaauuuuagggugcagccaaccgagagcauaguucgguuccccaacauuacgaaucucugcccuuuuggagagguguucaacgccacccgcuucgcgucggucuaugcauggaaucgaaagagaaucucuaacuguguggccgacuacuccguacuuuacaauucagcuaguuuuagcacauucaaaugcuauggcguuuccccaacuaagcugaacgacuuguguuuuaccaauguguacgccgauucuuucgucauuaggggugacgaagugcggcagaucgcacccgggcaaacaggaaaaaucgcugauuauaacuacaagcuaccggacgauuuuacuggcugcgucauugccuggaauagcaacaaccuggacucaaaagugggcgggaauuauaacuaccucuaucgucuguuccgcaagaguaaucuuaagccuuuugagagagauauauccaccgaaaucuaccaggcgggaagcacacccuguaacgguguugagggcuucaauugcuacuuuccacugcagucuuauggguuccaaccuaccaacggagugggcuaccagcccuauaggguagucguguugucauuugaacuccugcacgccccagcaacuguuugcggucccaaaaagaguacgaauuuagugaaaaacaagugugucaauuucaacuuuaaugggcugacaggcaccggagugcuaacugagagcaacaaaaaguuccucccuuuccagcaguuuggccgggacauugcugauaccacagacgccguacgagauccacaaacccuggagauccuugacauaacuccgugcuccuucgggggagugucuguuauuacacccgguacgaauaccucgaaccaggucgcuguguuguaccagggcgugaauuguacugaagucccuguugccauccacgcagaccagcugacaccaaccuggcgcguguauagcacaggguccaacguguuucaaacuagagccggaugccucaucggcgcugagcauguaaacaauucauacgaaugugauauucccaucggugcggggauuugcgcaaguuaucagacccagacgaacucuccuaggcgggcccgcagcgucgcuucccagucaauaaucgccuacaccaugagccugggcgcagaaaauucugugguuuacuccaacaauaguauugccaucccaacaaacuucacuaucagcgugaccacagaaauucuucccgucucuaugacuaagaccuccguggacuguacgauguauauaugcggagauucaacagaguguaguaaucuguugcuccaauacggcagcuuuugcacccagcugaacagagcuuuaacugggaucgccguugagcaggacaaaaauacacaggaaguguucgcacaaguaaagcagauuuauaaaaccccgccuaucaaggauuuuggagguuucaacuuuucgcagauucugccagaccccuccaaaccuucuaagaggagcuucaucgaggaucuacucuuuaauaaggucacucuggcggacgcuggcuucauaaaacaauacggggauugucuuggagacaucgccgcacgugauuugauuugcgcccagaaguucaacggccugaccgugcugcccccacucuuaacagacgaaaugaucgcucaguauacgucagcccugcuugcagguaccauuacgaguggguggacauuuggcgcuggagccgcguugcagaucccuuucgccaugcaaauggcuuaccgguuuaauggcauaggggugacccagaacguccucuaugagaaucagaaacugauugcaaaccaguucaacuccgccaucggaaagauucaagauucucuaagcuccacagcuucagcccugggcaaacuccaggacguugugaaucagaacgcacaggcgcugaauacucuuguaaagcaauugagcaguaacuuuggugccaucucuuccgugcugaaugacauauuaagccgacucgauaaggucgaagcugaggugcagaucgacagacugauuaccgggaggcuucagucgcugcaaacguacguuacacagcaguugauccgcgccgcagagauucgggcuucagccaaccucgcagccaccaaaaugucugaaugcgugcugggacagaguaagagagucgauuucuguggcaaagguuaccaccuaauguccuuuccccaaagcgcuccacauggcgugguuuuccugcacgugacuuaugucccggcgcaggagaagaauuuuaccacagccccugcaaucugccacgacgggaaagcucauuuccccagggaaggaguauuugugucuaacggcacucacugguucguuacccagcgcaauuuuuacgagccacagauaauuacaacggauaacaccuucgugagcgggaauugugacgucgugaucggaaucguaaacaauacuguguaugauccccuccaaccugagcuggacuccuucaaggaagaacuugauaaauacuuuaagaaccauacaucaccagacgucgauuugggcgacauuagugguaucaaugccagcguugugaacauucagaaggaaauagaucgacugaaugagguggccaaaaacuuaaacgaaucucucaucgaccugcaggagcuugggaaguaugagcaguacauuaaauggcccugguauaucuggcugggauucauugcuggccuaaucgcaauagucauggugaccaucaugcucugcuguaugacuuccugcuguucaugccugaaggguuguugcaguuguggcagcugcugcaaauuugacgaagaugacuccgagccuguuuugaaggggguaaagcugcacuacacaugaggacuagucccuguucccagagcccacuuuuuuuucuuuuuuugaaauaaaauagccugucuuucagaucucaaaggcucuuuucagagccaccaaaaaaaaaaaaaaaaaaaaaaaaaaaaaaaaaaaaaaaaaaaaaaaaaaaaaaaaaaaaaaaaaaaaaaaaaaaaaaaaaaaaaaaaaaaaaaaaaaaaa

SEQ ID NO: 12516 - RNA, 4094 nt, Artificial Sequence
  SARS-CoV-2/France/HF2496/2020__EPI_ISL_418231 spike protein mRNA human (1-1273)
aggagagucccgcagucggcguccagcggcucugcuuguucgugugugugucguugcaggccuuauucaagcuuaccauguucguguuucugguccuccuuccccugguuagcucccagugcgugaacuugaccacaagaacucaauuaccuccagccuacacuaauucuuucaccaggggcguauauuacccggacaagguguuucggucaaguguccugcacagcacacaggaucuauuccuccccuuuuucuccaacgugacuugguuucaugcuauccacguuucugggaccaauggaacaaaacgcuucgacaacccugugcugccauuuaaugauggugucuauuucgcaucgaccgagaagucaaacauuauacgaggcuggaucuuugggacuacacuugacagcaaaacccagagucuguugauugugaauaacgccacgaauguaguuaucaaggugugugaguuccaguuuugcaacgaucccuuccucggagucuacuaucauaaaaauaacaaguccuggauggagucugaguuccguguguacagcuccgcgaauaacuguacuuuugaguaugugucacaaccuuuccugauggaccuggaaggcaagcaggguaauuuuaaaaaccucagagaguucgucuuuaagaacauugauggguacuucaaaaucuacaguaagcacaccccaauaaauuuaguuagggaccugccccagggauuuagcgcucuugagccuuugguggaucugccaaucggcauuaacaucacacgguuccagacucuacucgcccugcaucgcucuuaucuuaccccgggcgacuccucaagcggguggacagcaggagccgcugcauacuauguagguuaccugcaacccagaaccuuuuugcucaaauauaaugaaaacggcacgauuacugaugccguggacugcgcucuggauccuuuaagugagacaaaguguacccugaagucuuucacugucgaaaaagggaucuaccagacauccaauuuuagggugcagccaaccgagagcauaguucgguuccccaacauuacgaaucucugcccuuuuggagagguguucaacgccacccgcuucgcgucggucuaugcauggaaucgaaagagaaucucuaacuguguggccgacuacuccguacuuuacaauucagcuaguuuuagcacauucaaaugcuauggcguuuccccaacuaagcugaacgacuuguguuuuaccaauguguacgccgauucuuucgucauuaggggugacgaagugcggcagaucgcacccgggcaaacaggaaaaaucgcugauuauaacuacaagcuaccggacgauuuuacuggcugcgucauugccuggaauagcaacaaccuggacucaaaagugggcgggaauuauaacuaccucuaucgucuguuccgcaagaguaaucuuaagccuuuugagagagauauauccaccgaaaucuaccaggcgggaagcacacccuguaacgguguugagggcuucaauugcuacuuuccacugcagucuuauggguuccaaccuaccaacggagugggcuaccagcccuauaggguagucguguugucauuugaacuccugcacgccccagcaacuguuugcggucccaaaaagaguacgaauuuagugaaaaacaagugugucaauuucaacuuuaaugggcugacaggcaccggagugcuaacugagagcaacaaaaaguuccucccuuuccagcaguuuggccgggacauugcugauaccacagacgccguacgagauccacaaacccuggagauccuugacauaacuccgugcuccuucgggggagugucuguuauuacacccgguacgaauaccucgaaccaggucgcuguguuguaccagggcgugaauuguacugaagucccuguugccauccacgcagaccagcugacaccaaccuggcgcguguauagcacaggguccaacguguuucaaacuagagccggaugccucaucggcgcugagcauguaaacaauucauacgaaugugauauucccaucggugcggggauuugcgcaaguuaucagacccagacgaacucuccuaggcgggcccgcagcgucgcuucccagucaauaaucgccuacaccaugagccugggcgcagaaaauucuguggccuacuccaacaauaguauugcuaucccaacaaacuucacuaucagcguuaccacagaaauucuucccgugucuaugacuaagaccuccgucgacuguacgauguauauaugcggagauucaacagaguguaguaaucuguugcuccaauacggcagcuuuugcacccagcugaacagagccuuaacugggaucgcaguggagcaggacaaaaauacacaggaaguuuucgcgcaagugaagcagauuuauaaaaccccgccuaucaaggauuuuggagguuucaacuuuucgcagauucugccagaccccuccaaaccuucuaagaggagcuucaucgaggaucuacucuuuaauaagguaacucuggcugacgccggcuucauaaaacaauacggggauugucuuggagacaucgucgcacgugauuugauuugcgcccagaaguucaacggccugaccgugcugcccccacucuuaacagacgaaaugaucgcucaguauacgucagcccugcuugcagguaccauuacgaguggguggacauuuggcgcuggagccgcguugcagaucccuuucgccaugcaaauggcuuaccgguuuaauggcauaggggugacccagaacguccucuaugagaaucagaaacugauugcaaaccaguucaacuccgccaucggaaagauucaagauucucuaagcuccacagcuucagcccugggcaaacuccaggacguugugaaucagaacgcacaggcgcugaauacucuuguaaagcaauugagcaguaacuuuggugccaucucuuccgugcugaaugacauauuaagccgacucgauaaggucgaagcugaggugcagaucgacagacugauuaccgggaggcuucagucgcugcaaacguacguuacacagcaguugauccgcgccgcagagauucgggcuucagccaaccucgcagccaccaaaaugucugaaugcgugcugggacagaguaagagagucgauuucuguggcaaagguuaccaccuaauguccuuuccccaaagcgcuccacauggcgugguuuuccugcacgugacuuaugucccggcgcaggagaagaauuuuaccacagccccugcaaucugccacgacgggaaagcucauuuccccagggaaggaguauuugugucuaacggcacucacugguucguuacccagcgcaauuuuuacgagccacagauaauuacaacggauaacaccuucgugagcgggaauugugacgucgugaucggaaucguaaacaauacuguguaugauccccuccaaccugagcuggacuccuucaaggaagaacuugauaaauacuuuaagaaccauacaucaccagacgucgauuugggcgacauuagugguaucaaugccagcguugugaacauucagaaggaaauagaucgacugaaugagguggccaaaaacuuaaacgaaucucucaucgaccugcaggagcuugggaaguaugagcaguacauuaaauggcccugguauaucuggcugggauucauugcuggccuaaucgcaauagucauggugaccaucaugcucugcuguaugacuuccugcuguucaugccugaaggguuguugcaguuguggcagcugcugcaaauuugacgaagaugacuccgagccuguuuugaaggggguaaagcugcacuacacaugaggacuagucccuguucccagagcccacuuuuuuuucuuuuuuugaaauaaaauagccugucuuucagaucucaaaggcucuuuucagagccaccaaaaaaaaaaaaaaaaaaaaaaaaaaaaaaaaaaaaaaaaaaaaaaaaaaaaaaaaaaaaaaaaaaaaaaaaaaaaaaaaaaaaaaaaaaaaaaaaaaaaa

SEQ ID NO: 12517 - RNA, 4094 nt, Artificial Sequence
  SARS-CoV-2/USA/WA-UW291/2020__EPI_ISL_418076 spike protein mRNA human (1-1273)
aggagagucccgcagucggcguccagcggcucugcuuguucgugugugugucguugcaggccuuauucaagcuuaccauguucguguuucugguccuccuuccccugguuagcucccagugcgugaacuugaccacaagaacucaauuaccuccagccuacacuaauucuuucaccaggggcguauauuacccggacaagguguuucggucaaguguccugcacagcacacaggaucuauuccuccccuuuuucuccaacgugacuugguuucaugcuauccacguuucugggaccaauggaacaaaacgcuucgacaacccugugcugccauuuaaugauggugucuauuucgcaucgaccgagaagucaaacauuauacgaggcuggaucuuugggacuacacuugacagcaaaacccagagucuguugauugugaauaacgccacgaauguaguuaucaaggugugugaguuccaguuuugcaacgaucccuuccucggagucuacuaucauaaaaauaacaaguccuggauggagucugaguuccguguguacagcuccgcgaauaacuguacuuuugaguaugugucacaaccuuuccugauggaccuggaaggcaagcaggguaauuuuaaaaaccucagagaguucgucuuuaagaacauugauggguacuucaaaaucuacaguaagcacaccccaauaaauuuaguuagggaccugccccagggauuuagcgcucuugagccuuugguggaucugccaaucggcauuaacaucacacgguuccagacucuacucgcccugcaucgcucuuaucuuaccccgggcgacuccucaagcggguggacagcaggagccgcugcauacuauguagguuaccugcaacccagaaccuuuuugcucaaauauaaugaaaacggcacgauuacugaugccguggacugcgcucuggauccuuuaagugagacaaaguguacccugaagucuuucacugucgaaaaagggaucuaccagacauccaauuuuagggugcagccaaccgagagcauaguucgguuccccaacauuacgaaucucugcccuuuuggagagguguucaacgccacccgcuucgcgucggucuaugcauggaaucgaaagagaaucucuaacuguguggccgacuacuccguacuuuacaauucagcuaguuuuagcacauucaaaugcuauggcguuuccccaacuaagcugaacgacuuguguuuuaccaauguguacgccgauucuuucgucauuaggggugacgaagugcggcagaucgcacccgggcaaacaggaaaaaucgcugauuauaacuacaagcuaccggacgauuuuacuggcugcgucauugccuggaauagcaacaaccuggacucaaaagugggcgggaauuauaacuaccucuaucgucuguuccgcaagaguaaucuuaagccuuuugagagagauauauccaccgaaaucuaccaggcgggaagcacacccuguaacgguguugagggcuucaauugcuacuuuccacugcagucuuauggguuccaaccuaccaacggagugggcuaccagcccuauaggguagucguguugucauuugaacuccugcacgccccagcaacuguuugcggucccaaaaagaguacgaauuuagugaaaaacaagugugucaauuucaacuuuaaugggcugacaggcaccggagugcuaacugagagcaacaaaaaguuccucccuuuccagcaguuuggccgggacauugcugauaccacagacgccguacgagauccacaaacccuggagauccuugacauaacuccgugcuccuucgggggagugucuguuauuacacccgguacgaauaccucgaaccaggucgcuguguuguaccagggcgugaauuguacugaagucccuguugccauccacgcagaccagcugacaccaaccuggcgcguguauagcacaggguccaacguguuucaaacuagagccggaugccucaucggcgcugagcauguaaacaauucauacgaaugugauauucccaucggugcggggauuugcgcaaguuaucagacccagacgaacucuccuaggcgggcccgcagcgucgcuucccagucaauaaucgccuacaccaugagccugggcgcagaaaauucuguggccuacuccaacaauaguauugcuaucccaacaaacuucacuaucagcguuaccacagaaauucuucccgugucuaugacuaagaccuccgucgacuguacgauguauauaugcggagauucaacagaguguaguaaucuguugcuccaauacggcagcuuuugcacccagcugaacagagccuuaacugggaucgcaguggagcaggacaaaaauacacaggaaguuuucgcgcaagugaagcagauuuauaaaaccccgccuaucaaggauuuuggagguuucaacuuuucgcagauucugccagaccccuccaaaccuucuaagaggagcuucaucgaggaucuacucuuuaauaagguaacucuggcugacgccggcuucauaaaacaauacggggauugucuuggagacaucgcagcccgugauuugauuugcgcucagaaguucaacggccugaccguccugcccccacucuuaacagacgaaaugaucgcccaguauacgucagcacugcuugcugguaccauuacgaguggguggacauuuggcgccggagcggccuugcagaucccuuucgcuaugcaaauggcauaccgguuuaauggcauaggggugacccagaacgugcucuaugagaaucagaaacugauugccaaccaguucaacuccgcuaucggaaagauucaauacucucuaagcuccacagccucagcacugggcaaacuccaggaugucguuaaucagaacgcgcaggcccugaauacucuugugaagcaauugagcaguaacuuuggugcuaucucuuccguacugaaugacauauuaagccgacucgacaagguggaagccgagguccagaucgauagacugauuaccgggaggcuucagucgcugcaaacguacgugacacagcaguugauccgcgcagcugagauucgggccucagcaaaccucgccgcuaccaaaaugucugaaugcguucugggacagaguaagagaguggacuucuguggcaaagguuaucaccuaauguccuuuccccaaagcgcgccacauggcgucguguuccugcacguuacuuacgugccggcccaggagaagaauuuuaccacagcuccugcaaucugccacgaugggaaagcccauuuccccagggaaggagucuuuguaucuaacggcacucacugguucgugacccagcgcaauuuuuaugagccacagauaauuacaacggacaacaccuucguuagcgggaauugugauguggucaucggaaucgugaacaauacuguauacgacccccuccaaccugagcuggauuccuucaaggaagaacuugacaaauauuuuaagaaccauacaucaccagauguggacuugggcgauauuagugguaucaaugccagcgucguuaacauucagaaggaaauagaccgacugaaugagguggcuaaaaacuuaaacgaaucucucaucgaucugcaggagcuugggaaguacgagcaguauauuaaauggcccugguacaucuggcugggauucauugcaggccuaaucgccauagugauggucaccaucaugcucugcuguaugacuuccugcuguucaugccugaaggguuguugcaguuguggcagcugcugcaaauuugacgaagacgauuccgagccuguguugaaggggguuaagcugcacuacacaugaggacuagucccuguucccagagcccacuuuuuuuucuuuuuuugaaauaaaauagccugucuuucagaucucaaaggcucuuuucagagccaccaaaaaaaaaaaaaaaaaaaaaaaaaaaaaaaaaaaaaaaaaaaaaaaaaaaaaaaaaaaaaaaaaaaaaaaaaaaaaaaaaaaaaaaaaaaaaaaaaaaaa

SEQ ID NO: 12518 - RNA, 4094 nt, Artificial Sequence
  SARS-CoV-2/Portugal/PT0034/2020__EPI_ISL_418019 spike protein mRNA human (1-1273)
aggagagucccgcagucggcguccagcggcucugcuuguucgugugugugucguugcaggccuuauucaagcuuaccauguucguguuucugguccuccuuccccugguuagcucccagugcgugaacuugaccacaagaacucaauuaccuccagccuacacuaauucuuucaccaggggcguauauuacccggacaagguguuucggucaaguguccugcacagcacacaggaucuauuccuccccuuuuucuccaacgugacuugguuucaugcuauccacguuucugggaccaauggaacaaaacgcuucgacaacccugugcugccauuuaaugauggugucuauuucgcaucgaccgagaagucaaacauuauacgaggcuggaucuuugggacuacacuugacagcaaaacccagagucuguugauugugaauaacgccacgaauguaguuaucaaggugugugaguuccaguuuugcaacgaucccuuccucggagucuacuaucauaaaaauaacaaguccuggauggagucugaguuccguguguacagcuccgcgaauaacuguacuuuugaguaugugucacaaccuuuccugauggaccuggaaggcaagcaggguaauuuuaaaaaccucagagaguucgucuuuaagaacauugauggguacuucaaaaucuacaguaagcacaccccaauaaauuuaguuagggaccugccccagggauuuagcgcucuugagccuuugguggaucugccaaucggcauuaacaucacacgguuccagacucuacucgcccugcaucgcucuuaucuuaccccgggcgacuccucaagcggguggacagcaggagccgcugcauacuauguagguuaccugcaacccagaaccuuuuugcucaaauauaaugaaaacggcacgauuacugaugccguggacugcgcucuggauccuuuaagugagacaaaguguacccugaagucuuucacugucgaaaaagggaucuaccagacauccaauuuuagggugcagccaaccgagagcauaguucgguuccccaacauuacgaaucucugcccuuuuggagagguguucaacgccacccgcuucgcgucggucuaugcauggaaucgaaagagaaucucuaacuguguggccgacuacuccguacuuuacaauucagcuaguuuuagcacauucaaaugcuauggcguuuccccaacuaagcugaacgacuuguguuuuaccaauguguacgccgauucuuucgucauuaggggugacgaagugcggcagaucgcacccgggcaaacaggaaaaaucgcugauuauaacuacaagcuaccggacgauuuuacuggcugcgucauugccuggaauagcaacaaccuggacucaaaagugggcgggaauuauaacuaccucuaucgucuguuccgcaagaguaaucuuaagccuuuugagagagauauauccaccgaaaucuaccaggcgggaagcacacccuguaacgguguugagggcuucaauugcuacuuuccacugcagucuuauggguuccaaccuaccaacggagugggcuaccagcccuauaggguagucguguugucauuugaacuccugcacgccccagcaacuguuugcggucccaaaaagaguacgaauuuagugaaaaacaagugugucaauuucaacuuuaaugggcugacaggcaccggagugcuaacugagagcaacaaaaaguuccucccuuuccagcaguuuggccgggacauugcugauaccacagacgccguacgagauccacaaacccuggagauccuugacauaacuccgugcuccuucgggggagugucuguuauuacacccgguacgaauaccucgaaccaggucgcuguguuguaccagggcgugaauuguacugaagucccuguugccauccacgcagaccagcugacaccaaccuggcgcguguauagcacaggguccaacguguuucaaacuagagccggaugccucaucggcgcugagcauguaaacaauucauacgaaugugauauucccaucggugcggggauuugcgcaaguuaucagacccagacgaacucuccuaggcgggcccgcagcgucgcuucccagucaauaaucgccuacaccaugagccugggcgcagaaaauucuguggccuacuccaacaauaguauugcuaucccaacaaacuucacuaucagcguuaccacagaaauucuucccgugucuaugacuaagaccuccgucgacuguacgauguauauaugcggagauucaacagaguguaguaaucuguugcuccaauacggcagcuuuugcacccagcugaacagagccuuaacugggaucgcaguggagcaggacaaaaauacacaggaaguuuucgcgcaagugaagcagauuuauaaaaccccgccuaucaaggauuuuggagguuucaacuuuucgcagauucugccagaccccuccaaaccuucuaagaggagcuucaucgaggaucuacucuuuaauaagguaacucuggcugacgccggcuucauaaaacaauacggggauugucuuggagacaucgcagcccgugauuugauuugcgcucagaaguucaacggccugaccguccugcccccacucuuaacagacgaaaugaucgcccaguauacgucagcacugcuugcugguaccauuacgaguggguggacauuuggcgccggagcggccuugcagaucccuuucgcuaugcaaauggcauaccgguuuaauggcauaggggugacccagaacgugcucuaugagaaucagaaacugauugccaaccaguucaacuccgcuaucggaaagauucaagauucucuaagcuccacagccucagcacugggcaaacuccaggacgucguuaaucagaacgcgcaggcccugaauacucuugugaagcaauugagcaguaacuuuggugcuaucucuuccguacugaaugacauauuaagccgacucgauaagguggaagccgagguccagaucgacagacugauuaccgggaggcuucagucgcugcaaacguacgugacacagcaguugauccgcgcagcugagauucgggccucagcaaaccucgccgcuaccaaaaugucugaaugcguucugggacagaguaagagaguggauuucuguggcaaagguuaccaccuaauguccuuuccccaaagcgcgccacauggcgucguguuccugcacguuacuuaugugccggcccaggagaagaauuuuaccacagcuccugcaaucugccacgacgggaaagcccauuuccccagggaaggagucuuuguaucuaacggcacucacugguucgugacccagcgcaauuuuuacgagccacagauaauuacaacggauaacaccuucguuagcgggaauugugacguggucaucggaaucgugaacaauacuguauaugauccccuccaaccugagcuggacuccuucaaggaagaacuugauaaauacuuuaagaaccauacaucaccagacguggauuugggcgacauuagugguaucaaugccagcgucguuaacauucagaaggaaauagaucgacugaaugagguggcuaaaaacuuaaacgaaucucucaucgaccugcaggagcuugggaaguaugagcaguacauuaaauggcccugguauaucuggcugggauucauugcaggccuaaucgccauagugauggucaccaucaugcucugcuguauuacuuccugcuguucaugccugaaggguuguugcaguuguggcagcugcugcaaauuugacgaagaugacuccgagccuguguugaaggggguuaagcugcacuacacaugaggacuagucccuguucccagagcccacuuuuuuuucuuuuuuugaaauaaaauagccugucuuucagaucucaaaggcucuuuucagagccaccaaaaaaaaaaaaaaaaaaaaaaaaaaaaaaaaaaaaaaaaaaaaaaaaaaaaaaaaaaaaaaaaaaaaaaaaaaaaaaaaaaaaaaaaaaaaaaaaaaaaa

SEQ ID NO: 12519 - RNA, 4094 nt, Artificial Sequence
  SARS-CoV-2/Iceland/202/2020__EPI_ISL_417750 spike protein mRNA human (1-1273)
aggagagucccgcagucggcguccagcggcucugcuuguucgugugugugucguugcaggccuuauucaagcuuaccauguucguguuucugguccuccuuccccugguuagcucccagugcgugaacuugaccacaagaacucaauuaccuccagccuacacuaauucuuucaccaggggcguauauuacccggacaagguguuucggucaaguguccugcacagcacacaggaucuauuccuccccuuuuucuccaacgugacuugguuucaugcuauccacguuucugggaccaauggaacaaaacgcuucgacaacccugugcugccauuuaaugauggugucuauuucgcaucgaccgagaagucaaacauuauacgaggcuggaucuuugggacuacacuugacagcaaaacccagagucuguugauugugaauaacgccacgaauguaguuaucaaggugugugaguuccaguuuugcaacgaucccuuccucggagucuacuaucauaaaaauaacaaguccuggauggagucugaguuccguguguacagcuccgcgaauaacuguacuuuugaauaugugucacaaccuuuccugauggaccuggaaggcaagcaggguaauuuuaaaaaccucagagaguucgucuuuaagaacauugauggguacuucaaaaucuacaguaagcacaccccaauaaauuuaguuagggaccugccccagggauuuagcgcucuugagccuuugguggaucugccaaucggcauuaacaucacacgguuccagacucuacucgcccugcaucgcucuuaucuuaccccgggcgacuccucaagcggguggacagcaggagccgcugcauacuauguagguuaccugcaacccagaaccuuuuugcucaaauauaaugaaaacggcacgauuacugaugccguggacugcgcucuggauccuuuaagugagacaaaguguacccugaagucuuucacugucgaaaaagggaucuaccagacauccaauuuuagggugcagccaaccgagagcauaguucgguuccccaacauuacgaaucucugcccuuuuggagagguguucaacgccacccgcuucgcgucggucuaugcauggaaucgaaagagaaucucuaacuguguggccgacuacuccguacuuuacaauucagcuaguuuuagcacauucaaaugcuauggcguuuccccaacuaagcugaacgacuuguguuuuaccaauguguacgccgauucuuucgucauuaggggugacgaagugcggcagaucgcacccgggcaaacaggaaaaaucgcugauuauaacuacaagcuaccggacgauuuuacuggcugcgucauugccuggaauagcaacaaccuggacucaaaagugggcgggaauuauaacuaccucuaucgucuguuccgcaagaguaaucuuaagccuuuugagagagauauauccaccgaaaucuaccaggcgggaagcacacccuguaacgguguugagggcuucaauugcuacuuuccacugcagucuuauggguuccaaccuaccaacggagugggcuaccagcccuauaggguagucguguugucauuugaacuccugcacgccccagcaacuguuugcggucccaaaaagaguacgaauuuagugaaaaacaagugugucaauuucaacuuuaaugggcugacaggcaccggagugcuaacugagagcaacaaaaaguuccucccuuuccagcaguuuggccgggacauugcugauaccacagacgccguacgagauccacaaacccuggagauccuugacauaacuccgugcuccuucgggggagugucuguuauuacacccgguacgaauaccucgaaccaggucgcuguguuguaccaggacgugaauuguacugaagucccuguugccauccacgcagaucagcugacaccaaccuggcgcguguauagcacaggcuccaacguguuucaaacuagagccgggugccucaucggagcugagcauguaaacaauucauacgaaugugacauucccaucggcgcggguauuugcgcaaguuaucagacccagacgaacucuccuaggcgggcccgcagcgucgcuucccagucaauaaucgccuacaccaugagccugggggcagaaaauucuguggccuacuccaacaauaguauugcuaucccaacaaacuucacuaucagcguuaccacagaaauucuucccgugucuaugacuaagaccuccgucgauuguacgauguauauaugcggcgacucaacagaguguaguaaucuguugcuccaauacggcagcuuuugcacccagcugaacagagccuuaacuggaaucgcaguggagcaggauaaaaauacacaggaaguuuucgcgcaagugaagcagauuuauaaaaccccgccuaucaaggacuuugggggauucaacuuuucgcagauucugccagaucccuccaaaccuucuaagaggagcuucaucgaggaccuacucuuuaauaagguaacucuggcugaugccgguuucauaaaacaauacggcgacugucuuggggauaucgcagcccgugacuugauuugcgcucagaaguucaacggacugaccguccugcccccacucuuaacagaugaaaugaucgcccaguauacgucagcacugcuugcuggcaccauuacgagugguuggacauuuggggccggcgcggccuugcagaucccuuucgcuaugcaaauggcauaccgguuuaauggaauaggcgugacccagaacgugcucuaugagaaucagaaacugauugccaaccaguucaacuccgcuaucgggaagauucaagacucucuaagcuccacagccucagcacugggaaaacuccaggacgucguuaaucagaacgcgcaggcccugaauacucuugugaagcaauugagcaguaacuuuggcgcuaucucuuccguacugaaugauauauuaagccgacucgacaagguggaagccgagguccagaucgauagacugauuaccgguaggcuucagucgcugcaaacguacgugacacagcaguugauccgcgcagcugagauucgggccucagcaaaccucgccgcuaccaaaaugucugaaugcguucuggggcagaguaagagaguggacuucuguggaaaaggcuaccaccuaauguccuuuccccaaagcgcgccacauggugucguguuccugcacguuacuuaugugccggcccaggagaagaauuuuaccacagcuccugcaaucugccacgauggcaaagcccauuuccccagggaaggggucuuuguaucuaacggaacucacugguucgugacccagcgcaauuuuuacgagccacagauaauuacaacggacaacaccuucguuagcggcaauugugauguggucaucgggaucgugaacaauacuguauaugacccccuccaaccugagcuggauuccuucaaggaggaacuugacaaauacuuuaagaaccauacaucaccagauguggacuugggagauauucccggcaucaaugccagugucguuaacauucagaaggaaauagaccgacugaaugagguggcuaaaaacuuaaacgaaagccucaucgaccugcaggagcuugguaaguaugagcaguacauuaaauggccuugguauaucuggcugggguucauugcaggacuaaucgccauagugauggucaccaucaugcucugcuguaugacuucuugcuguuccugccugaagggcuguugcucaugugguaguugcugcaaauuugaugaagacgauagcgagccgguguugaagggcguuaagcugcacuacacaugaggacuagucccuguucccagagcccacuuuuuuuucuuuuuuugaaauaaaauagccugucuuucagaucucaaaggcucuuuucagagccaccaaaaaaaaaaaaaaaaaaaaaaaaaaaaaaaaaaaaaaaaaaaaaaaaaaaaaaaaaaaaaaaaaaaaaaaaaaaaaaaaaaaaaaaaaaaaaaaaaaaaa

SEQ ID NO: 12520 - RNA, 4094 nt, Artificial Sequence
  SARS-CoV-2/USA/WA-UW261/2020__EPI_ISL_418046 spike protein mRNA human (1-1273)
aggagagucccgcagucggcguccagcggcucugcuuguucgugugugugucguugcaggccuuauucaagcuuaccauguucguguuucugguccuccuuccccugguuagcucccagugcgugaacuugaccacaagaacucaauuaccuccagccuacacgaauagcuucaccaggggcguauauuacccggacaagguguuucggucaaguguccugcacagcacacaggaucuauuccuccccuuuuucuccaacgugacuugguuucaugcuauccacguuucugggaccaauggaacaaaacgcuucgacaacccugugcugccauuuaaugauggugucuauuucgcaucgaccgagaagucaaacauuauacgaggcuggaucuuugggacuacacuugacagcaaaacccagagucuguugauugugaauaacgccacgaauguaguuaucaaggugugugaguuccaguuuugcaacgaucccuuccucggagucuacuaucauaaaaauaacaaguccuggauggagucugaguuccguguguacagcuccgcgaauaacuguacuuuugaguaugugucacaaccuuuccugauggaccuggaaggcaagcaggguaauuuuaaaaaccucagagaguucgucuuuaagaacauugauggguacuucaaaaucuacaguaagcacaccccaauaaauuuaguuagggaccugccccagggauuuagcgcucuugagccuuugguggaucugccaaucggcauuaacaucacacgguuccagacucuacucgcccugcaucgcucuuaucuuaccccgggcgacuccucaagcggguggacagcaggagccgcugcauacuauguagguuaccugcaacccagaaccuuuuugcucaaauauaaugaaaacggcacgauuacugaugccguggacugcgcucuggauccuuuaagugagacaaaguguacccugaagucuuucacugucgaaaaagggaucuaccagacauccaauuuuagggugcagccaaccgagagcauaguucgguuccccaacauuacgaaucucugcccuuuuggagagguguucaacgccacccgcuucacaucggucuaugcguggaaucgaaagagaaucucuaacuguguggcagacuacuccguacuuuacaauucagccaguuuuagcacuuucaaaugcuauggcguuuccccaaccaagcugaacgacuuguguuuuacaaauguguacgcugauucuuucgucauuaggggugacgaagugcggcagaucgcccccgggcaaacuggaaaaaucgcagauuauaacuacaagcuaccggacgauuuuaccggcugcgucauugcuuggaauagcaacaaccuggacucaaaagugggcgggaauuauaacuaccucuaucgucuguuccgcaagaguaaucuuaagccuuuugagagagauauauccacagaaaucuaccaggccggaagcacccccuguaacgguguugagggcuucaauugcuacuuuccacugcagucuuauggguuccaaccuacuaacggagugggcuaccagcccuauaggguagucguguugucauuugaacuccugcacgcgccagccacgguuugcggucccaaaaagaguacaaauuuagugaaaaacaagugugucaauuucaacuuuaaugggcugaccggcacuggagugcuaaccgagagcaacaaaaaguuccucccuuuccagcaguuuggccgggacauugcagauacaaccgacgcuguacgagauccacaaacucuggagauccuugacauaacaccgugcuccuucgggggagugucuguuauuacgcccgguaccaauacuucgaaccaggucgccguguuguaccaggacgugaauuguacagaagucccuguugcuauccacgccgaucagcugaccccaacauggcgcguguauagcacuggcuccaacguguuucaaaccagagcagggugccucaucggagccgagcauguaaacaauucauacgaaugugacauucccaucggcgcugguauuugcgcgaguuaucagacgcagaccaacucuccuaggcgggcacgcagcgucgccucccagucaauaaucgcuuacacaaugagccugggggccgaaaauucuguggcauacuccaacaauaguauugccaucccaacuaacuucaccaucagcguuacaacugaaauucuucccgugucuaugaccaagacguccgucgauuguacaauguauauaugcggcgacucaaccgaguguaguaaucuguugcuccaauacggaucuuuuugcacucagcugaacagagcuuuaacaggcaucgccguggagcaggauaaaaauacccaggaaguuuucgcacaagugaagcagauuuauaaaacuccgccuaucaaggacuuugggggauucaacuuuucgcagauucugccagaucccuccaaaccuucuaagaggagcuucaucgaggaccuacucuuuaauaagguaacccuggcggaugcugguuucauaaaacaauacggcgacugucuuggggauaucgccgcacgugacuugauuugcgcccagaaguucaacggacugacaguccugcccccacucuuaacggaugaaaugaucgcucaguauaccucagcccugcuugcaggcacuauuacaagugguuggaccuuuggggcuggcgccgcguugcagaucccuuucgccaugcaaauggcuuaccgguuuaauggaauaggcgugacacagaacgugcucuaugagaaucagaaacugauugcaaaccaguucaacuccgccaucgggaagauucaagacucucuaagcuccacugcuucagcccugggaaaacuccaggacgucguuaaucagaacgcacaggcgcugaauacccuugugaagcaauugagcaguaacuuuggcgccaucucuuccguacugaaugauauauuaagccgacucgacaagguggaagcugagguccagaucgauagacugauuacggguaggcuucagucgcugcaaacauacgugacccagcaguugauccgcgccgcagagauucgggcuucagccaaccucgcagccacuaaaaugucugaaugcguucuggggcagaguaagagaguggacuucuguggaaaaggcuaccaccuaauguccuuuccccaaagcgcuccacauggugucguguuccugcacguuaccuaugugccggcgcaggagaagaauuuuacaacugccccugcaaucugccacgauggcaaagcucauuuccccagggaaggggucuuuguaucuaacggaacccacugguucgugacacagcgcaauuuuuacgagccacagauaauuacgaccgacaacacuuucguuagcggcaauugugauguggucaucgggaucgugaacaauacaguauaugacccccuccaaccugagcuggauuccuucaaggaagaacuugacaaauacuuuaagaaccauaccucaccagauguggacuugggagauauuaguggcaucaaugccagcgucguuaacauucagaaggaaauagaccgacugaaugagguggccaaaaacuuaaacgaaucucucaucgaccugcaggagcuugguaaguaugagcaguacauuaaauggcccugguauaucuggcugggguucauugcuggacuaaucgcaauagugauggucacuaucaugcucugcuguaugacauccugcuguucaugccugaagggcuguugcaguugugguagcugcugcaaauuugaugaagacgauuccgagccuguguugaagggcguuaagcugcacuacaccugaggacuagucccuguucccagagcccacuuuuuuuucuuuuuuugaaauaaaauagccugucuuucagaucucaaaggcucuuuucagagccaccaaaaaaaaaaaaaaaaaaaaaaaaaaaaaaaaaaaaaaaaaaaaaaaaaaaaaaaaaaaaaaaaaaaaaaaaaaaaaaaaaaaaaaaaaaaaaaaaaaaaa

SEQ ID NO: 12521 - RNA, 4094 nt, Artificial Sequence
  SARS-CoV-2/Portugal/PT0035/2020__EPI_ISL_418020 spike protein mRNA human (1-1273)
aggagagucccgcagucggcguccagcggcucugcuuguucgugugugugucguugcaggccuuauucaagcuuaccauguucguguuucugguccuccuuccccugguuagcucccagugcgugaacuugaccacaagaacucaauuaccuccagccuacacgaauagcuucaccaggggcguauauuacccggacaagguguuucggucaaguguccugcacagcacacaggaucuauuccuccccuuuuucuccaacgugacuugguuucaugcuauccacguuucugggaccaauggaacaaaacgcuucgacaacccugugcugccauuuaaugauggugucuauuucgcaucgaccgagaagucaaacauuauacgaggcuggaucuuugggacuacacuugacagcaaaacccagagucuguugauugugaauaacgccacgaauguaguuaucaaggugugugaguuccaguuuugcaacgaucccuuccucggagucuacuaucauaaaaauaacaaguccuggauggagucugaguuccguguguacagcuccgcgaauaacuguacuuuugaguaugugucacaaccuuuccugauggaccuggaaggcaagcaggguaauuuuaaaaaccucagagaguucgucuuuaagaacauugauggguacuucaaaaucuacaguaagcacaccccaauaaauuuaguuagggaccugccccagggauuuagcgcucuugagccuuugguggaucugccaaucggcauuaacaucacacgguuccagacucuacucgcccugcaucgcucuuaucuuaccccgggcgacuccucaagcggguggacagcaggagccgcugcauacuauguagguuaccugcaacccagaaccuuuuugcucaaauauaaugaaaacggcacgauuacugaugccguggacugcgcucuggauccuuuaagugagacaaaguguacccugaagucuuucacugucgaaaaagggaucuaccagacauccaauuuuagggugcagccaaccgagagcauaguucgguuccccaacauuacgaaucucugcccuuuuggagagguguucaacgccacccgcuucgcgucggucuaugcauggaaucgaaagagaaucucuaacuguguggccgacuacuccguacuuuacaauucagcuaguuuuagcacauucaaaugcuauggcguuuccccaacuaagcugaacgacuuguguuuuaccaauguguacgccgauucuuucgucauuaggggugacgaagugcggcagaucgcacccgggcaaacaggaaaaaucgcugauuauaacuacaagcuaccggacgauuuuacuggcugcgucauugccuggaauagcaacaaccuggacucaaaagugggcgggaauuauaacuaccucuaucgucuguuccgcaagaguaaucuuaagccuuuugagagagauauauccaccgaaaucuaccaggcgggaagcacacccuguaacgguguugagggcuucaauugcuacuuuccacugcagucuuauggguuccaaccuaccaacggagugggcuaccagcccuauaggguagucguguugucauuugaacuccugcacgccccagcaacuguuugcggucccaaaaagaguacgaauuuagugaaaaacaagugugucaauuucaacuuuaaugggcugacaggcaccggagugcuaacugagagcaacaaaaaguuccucccuuuccagcaguuuggccgggacauugcugauaccacagacgccguacgagauccacaaacccuggagauccuugacauaacuccgugcuccuucgggggagugucuguuauuacacccgguacgaauaccucgaaccaggucgcuguguuguaccaggacgugaauuguacugaagucccuguugccauccacgcagaucagcugacaccaaccuggcgcguguauagcacaggcuccaacguguuucaaacuagagccgggugccucaucggagcugagcauguaaacaauucauacgaaugugacauucccaucggcgcggguauuugcgcaaguuaucagacccagacgaacucuccuaggcgggcccgcagcgucgcuucccagucaauaaucgccuacaccaugagccugggggcagaaaauucuguggccuacuccaacaauaguauugcuaucccaacaaacuucacuaucagcguuaccacagaaauucuucccgugucuaugacuaagaccuccgucgauuguacgauguauauaugcggcgacucaacagaguguaguaaucuguugcuccaauacggaucuuuuugcacccagcugaacagagccuuaacuggcaucgcaguggagcaggauaaaaauacacaggaaguuuucgcgcaagugaagcagauuuauaaaaccccgccuaucaaggacuuugggggauucaacuuuucgcagauucugccagaucccuccaaaccuucuaagaggagcuucaucgaggaccuacucuuuaauaagguaacucuggcugaugccgguuucauaaaacaauacggcgacugucuuggggauaucucagcacgugacuugauuugcgcccagaaguucaacggacugaccguccugcccccacucuuaacagaugaaaugaucgcucaguauacgagugcccugcuugcaggcaccauuacuuccgguuggacauuuggggcuggcgccgcguugcagaucccuuucgccaugcaaauggcuuaccgguuuaauggaauaggcgugacccagaacgugcucuaugagaaucagaaacugauugcaaaccaguucaacucugccaucgggaagauucaagacagccuauccucaacagcuagcgcccugggaaaacuccaggacgucguuaaucagaacgcacaggcgcugaauacucuugugaagcaauugaguucuaacuuuggcgccaucuccagcguacugaaugauauauuaucgcgacucgacaagguggaagcugagguccagaucgauagacugauuaccgguaggcuucagucacugcaaacguacgugacacagcaguugauccgcgccgcagagauucgggcuucugccaaccucgcagccaccaaaaugagugaaugcguucuggggcaguccaagagaguggacuucuguggaaaaggcuaccaccuaaugagcuuuccccaaucugcuccacauggugucguguuccugcacguuacuuaugugccggcgcaggagaagaauuuuaccacagccccugcaaucugccacgauggcaaagcucauuuccccagggaaggggucuuuguaagcaacggaacucacugguucgugacccagcgcaauuuuuacgagccacagauaauuacaacggacaacaccuucguuuccggcaauugugauguggucaucgggaucgugaacaauacuguauaugacccccuccaaccugagcuggauucauucaaggaagaacuugacaaauacuuuaagaaccauacaaguccagauguggacuugggagauauuagcggcaucaaugccucugucguuaacauucagaaggaaauagaccgacugaaugagguggccaaaaacuuaaacgaaucccucaucgaccugcaggagcuugguaaguaugagcaguacauuaaauggcccugguauaucuggcugggguucauugcuggacuaaucgcaauagugauggucaccaucaugcucugcuguaugacuucaugcuguaguugccugaagggcuguugcagcugugguuccugcugcaaauuugaugaagacgauucugagccuguguugaagggcguuaagcugcacuacacaugaggacuagucccuguucccagagcccacuuuuuuuucuuuuuuugaaauaaaauagccugucuuucagaucucaaaggcucuuuucagagccaccaaaaaaaaaaaaaaaaaaaaaaaaaaaaaaaaaaaaaaaaaaaaaaaaaaaaaaaaaaaaaaaaaaaaaaaaaaaaaaaaaaaaaaaaaaaaaaaaaaaaa

SEQ ID NO: 12522 - RNA, 4094 nt, Artificial Sequence
  SARS-CoV-2/USA/NY-NYUMC7/2020__EPI_ISL_418192 spike protein mRNA human (1-1273)
aggagagucccgcagucggcguccagcggcucugcuuguucgugugugugucguugcaggccuuauucaagcuuaccauguucguguuucugguccuccuuccccugguuagcucccagugcgugaacuugaccacaagaacucaauuaccuccagccuacacuaauucuuucaccaggggcguauauuacccggacaagguguuucggucaaguguccugcacagcacacaggaucuauuccuccccuuuuucuccaacgugacuugguuucaugcuauccacguuucugggaccaauggaacaaaacgcuucgacaacccugugcugccauuuaaugauggugucuauuucgcaucgaccgagaagucaaacauuauacgaggcuggaucuuugggacuacacuugacagcaaaacccagagucuguugauugugaauaacgccacgaauguaguuaucaaggugugugaguuccaguuuugcaacgaucccuuccucggagucuaccaucacaaaaauaacaaguccuggauggagucugaguuccguguguauagcuccgcgaauaacuguacuuuugaguacgugucacaaccuuuccugauggaccuggaaggcaagcaggguaauuuuaaaaaccucagagaguucgucuuuaagaacauugauggguauuucaaaaucuacaguaagcauaccccaauaaauuuaguuagggaccugccccagggauuuagcgcucuugagccuuugguggaucugccaaucggcauuaacaucacacgguuccagacucuacucgcccugcaccgcucuuaccuuaccccgggcgacuccucaagcggguggacagcaggagccgcugcauauuacguagguuaucugcaacccagaaccuuuuugcucaaauacaaugaaaacggcacgauuacugaugccguggacugcgcucuggauccuuuaagugagacaaaguguacccugaagucuuucacugucgaaaaagggaucuaucagacauccaauuuuagggugcagccaaccgagagcauaguucgguuccccaacauuacgaaucucugcccuuuuggagagguguucaacgccacccgcuucgcgucggucuacgcauggaaucgaaagagaaucucuaacuguguggccgacuauuccguacuuuacaauucagcuaguuuuagcacauucaaaugcuacggcguuuccccaacuaagcugaacgacuuguguuuuaccaauguguaugccgauucuuucgucauuaggggugacgaagugcggcagaucgcacccgggcaaacaggaaaaaucgcugauuacaacuauaagcuaccggacgauuuuacuggcugcgucauugccuggaauagcaacaaccuggacucaaaagugggcgggaauuacaacuaucucuaccgucuguuccgcaagaguaaucuuaagccuuuugagagagauauauccaccgaaaucuaucaggcgggaagcacacccuguaacgguguugagggcuucaauugcuacuuuccacugcagucuuacggguuccaaccuaccaacggagugggcuaucagcccuacaggguagucguguugucauuugaacuccugcacgccccagcaacuguuugcggucccaaaaagaguacgaauuuagugaaaaacaagugugucaauuucaacuuuaaugggcugacaggcaccggagugcuaacugagagcaacaaaaaguuccucccuuuccagcaguuuggccgggacauugcugauaccacagacgccguacgagauccacaaacccuggagauccuugacauaacuccgugcuccuucgggggagugucuguuauuacacccgguacgaauaccucgaaccaggucgcuguguuguaucagggcgugaauuguacugaagucccuguugccauccaugcagaccagcugacaccaaccuggcgcguguacagcacaggguccaacguguuucaaacuagagccggaugccucaucggcgcugagcacguaaacaauucauaugaaugugauauucccaucggugcggggauuugcgcaaguuaccagacccagacgaacucuccuaggcgggcccgcagcgucgcuucccagucaauaaucgccuauaccaugagccugggcgcagaaaauucuguggccuacuccaacaauaguauugcuaucccaacaaacuucacuaucagcguuaccacagaaauucuucccgugucuaugacuaagaccuccgucgacuguacgauguacauaugcggagauucaacagaguguaguaaucuguugcuccaauauggcagcuuuugcacccagcugaacagagccuuaacugggaucgcaguggagcaggacaaaaauacacaggaaguuuucgcgcaagugaagcagauuuacaaaaccccgccuaucaaggauuuuggagguuucaacuuuucgcagauucugccagaccccuccaaaccuucuaagaggagcuucaucgaggaucuacucuuuaauaagguaacucuggcugacgccggcuucauaaaacaauauggggauugucuuggagacaucgcagcccgugauuugauuugcgcucagaaguucaacggccugaccguccugcccccacucuuaacagacgaaaugaucgcccaguacacgucagcacugcuugcugguaccauuacgaguggguggacauuuggcgccggagcggccuugcagaucccuuucgcuaugcaaauggcauaucgguuuaauggcauaggggugacccagaacgugcucuacgagaaucagaaacugauugccaaccaguucaacuccgcuaucggaaagauucaagauucucuaagcuccacagccucagcacugggcaaacuccaggacgucguuaaucagaacgcgcaggcccugaauacucuugugaagcaauugagcaguaacuuuggugcuaucucuuccguacugaaugacauauuaagccgacucgauaagguggaagccgagguccagaucgacagacugauuaccgggaggcuucagucgcugcaaacguaugugacacagcaguugauccgcgcagcugagauucgggccucagcaaaccucgccgcuaccaaaaugucugaaugcguucugggacagaguaagagaguggauuucuguggcaaagguuaccaucuaauguccuuuccccaaagcgcgccacacggcgucguguuccugcacguuacuuacgugccggcccaggagaagaauuuuaccacagcuccugcaaucugccaugacgggaaagcccacuuccccagggaaggagucuuuguaucuaacggcacucauugguucgugacccagcgcaauuuuuaugagccacagauaauuacaacggauaacaccuucguuagcgggaauugugacguggucaucggaaucgugaacaauacuguauacgauccccuccaaccugagcuggacuccuucaaggaagaacuugauaaauauuuuaagaaccacacaucaccagacguggauuugggcgacauuagugguaucaaugccagcgucguuaacauucagaaggaaauagaucgacugaaugagguggcuaaaaacuuaaacgaaucucucaucgaccugcaggagcuugggaaguacgagcaguauauuaaauggcccugguacaucuggcugggauucauugcaggccuaaucgccauagugauggucaccaucaugcucugcuguaugacuuccugcuguucaugccugaaggguuguugcaguuguggcagcugcugcaaauuugacgaagaugacuccgagccuguguugaaggggguuaagcugcauuauacaugaggacuagucccuguucccagagcccacuuuuuuuucuuuuuuugaaauaaaauagccugucuuucagaucucaaaggcucuuuucagagccaccaaaaaaaaaaaaaaaaaaaaaaaaaaaaaaaaaaaaaaaaaaaaaaaaaaaaaaaaaaaaaaaaaaaaaaaaaaaaaaaaaaaaaaaaaaaaaaaaaaaaa

SEQ ID NO: 12523 - RNA, 4094 nt, Artificial Sequence
  SARS-CoV-2/Iceland/189/2020__EPI_ISL_417709 spike protein mRNA human (1-1273)
aggagagucccgcagucggcguccagcggcucugcuuguucgugugugugucguugcaggccuuauucaagcuuaccauguucguguuucugguccuccuuccccugguuagcucccagugcgugaacuugaccacaagaacucaauuaccuccagccuacaccaauucuuucacgaggggcguauauuacccggacaagguguuucggucaaguguccugcacagcacacaggaucuauuccuccccuuuuucuccaacgugacuugguuucaugcuauccacguuucugggaccaauggaacaaaacgcuucgacaacccugugcugccauuuaaugauggugucuauuucgcaucgaccgagaagucaaacauuauacgaggcuggaucuuugggacuacacuugacagcaaaacccagagucuguugauugugaauaacgccacgaauguaguuaucaaggugugugaguuccaguuuugcaacgaucccuuccucggagucuacuaucauaaaaauaacaaguccuggauggagucugaguuccguguguacagcuccgcgaauaacuguacuuuugaguaugugucacaaccuuuccugauggaccuggaaggcaagcaggguaauuuuaaaaaccucagagaguucgucuuuaagaacauugauggguacuucaaaaucuacaguaagcacaccccaauaaauuuaguuagggaccugccccagggauuuagcgcucuugagccuuugguggaucugccaaucggcauuaacaucacacgguuccagacucuacucgcccugcaucgcucuuaucuuaccccgggcgacuccucaagcggguggacagcaggagccgcugcauacuauguagguuaccugcaacccagaaccuuuuugcucaaauauaaugaaaacggcacgauuacugaugccguggacugcgcucuggauccuuuaagugagacaaaguguacccugaagucuuucacugucgaaaaagggaucuaccagacauccaauuuuagggugcagccaaccgagagcauaguucgguuccccaacauuacgaaucucugcccuuuuggagagguguucaacgccacccgcuucgcgucggucuaugcauggaaucgaaagagaaucucuaacuguguggccgacuacuccguacuuuacaauucagcuaguuuuagcacauucaaaugcuauggcguuuccccaacuaagcugaacgacuuguguuuuaccaauguguacgccgauucuuucgucauuaggggugacgaagugcggcagaucgcacccgggcaaacaggaaaaaucgcugauuauaacuacaagcuaccggacgauuuuacuggcugcgucauugccuggaauagcaacaaccuggacucaaaagugggcgggaauuauaacuaccucuaucgucuguuccgcaagaguaaucuuaagccuuuugagagagauauauccaccgaaaucuaccaggcgggaagcacacccuguaacgguguugagggcuucaauugcuacuuuccacugcagucuuauggguuccaaccuaccaacggagugggcuaccagcccuauaggguagucguguugucauuugaacuccugcacgccccagcaacuguuugcggucccaaaaagaguacgaauuuagugaaaaacaagugugucaauuucaacuuuaaugggcugacaggcaccggagugcuaacugagagcaacaaaaaguuccucccuuuccagcaguuuggccgggacauugcugauaccacagacgccguacgagauccacaaacccuggagauccuugacauaacuccgugcuccuucgggggagugucuguuauuacacccgguacgaauaccucgaaccaggucgcuguguuguaccagggcgugaauuguacugaagucccuguugccauccacgcagaccagcugacaccaaccuggcgcguguauagcacaggguccaacguguuucaaacuagagccggaugccucaucggcgcugagcauguaaacaauucauacgaaugugauauucccaucggugcggggauuugcgcaaguuaucagacccagacgaacucuccuaggcgggcccgcagcgucgcuucccagucaauaaucgccuacaccaugagccugggcgcagaaaauucuguggccuacuccaacaauaguauugcuaucccaacaaacuucacuaucagcguuaccacagaaauucuucccgugucuaugacuaagaccuccgucgacuguacgauguauauaugcggagauucaacagaguguaguaaucuguugcuccaauacggcagcuuuugcacccagcugaacagagccuuaacugggaucgcaguggagcaggacaaaaauacacaggaaguuuucgcgcaagugaagcagauuuauaaaaccccgccuaucaaggauuuuggagguuucaacuuuucgcagauucugccagaccccuccaaaccuucuaagaggagcuucaucgaggaucuacucuuuaauaagguaacucuggcugacgccggcuucaccaaacaauacggggauugucuuggagacauagcagcccgugauuugaucugcgcucagaaguucaacggccugacaguccucccuccacuguuaacggacgaaaugauugcccaguauaccucagcacugcuugcugguacuaucacaaguggguggaccuuuggcgccggagcggccuugcagauuccuuucgcuaugcaaauggcauaccgguuuaauggcaucggggugacacagaacgugcucuaugagaaucagaaacugauagccaaccaguucaacuccgcuauuggaaagauccaagauucucuaagcuccacugccucagcacugggcaaacuccaggacgucguuaaucagaacgcgcaggcccugaauacccuugugaagcaauugagcaguaacuuuggugcuauuucuuccguacugaaugacaucuuaagccgacucgauaagguggaagccgagguccagauagacagacugaucacggggaggcuucagucgcugcaaacauacgugacccagcaguugauucgcgcagcugagauccgggccucagcaaaccucgccgcuacuaaaaugucugaaugcguucugggacagaguaagagaguggauuucuguggcaaagguuaccaccuaauguccuuuccccaaagcgcgccacauggcgucguguuccugcacguuaccuaugugccggcccaggagaagaauuuuacaacugcacccgcuauuugccacgacgggaaagcccauuuccccagggaaggagucuuuguaucuaacggcacccacugguucgugacacagcgcaauuuuuacgagccacagaucauaacgaccgauaacacuuucguuagcgggaauugugacguggucauuggaaucgugaacaauacaguauaugauccccuccaaccugagcuggacuccuucaaggaagaacuugauaaauacuuuaagaaccauaccucaccagacguggauuugggcgacaucagugguauuaaugccagcgucguuaacauccagaaggaaauugaucgacugaaugagguggcuaaaaacuuaaacgaaucucucauagaccugcaggagcuugggaaguaugagcaguacaucaaauggcccugguauauuuggcugggauucaucgcaggccuaauugccaucgugauggucacuauaaugcucugcuguaugacauccugcuguucaugccugaaggguuguugcaguuguggcagcugcugcaaauuugacgaagaugacuccgagccuguguugaaggggguuaagcugcacuacaccugaggacuagucccuguucccagagcccacuuuuuuuucuuuuuuugaaauaaaauagccugucuuucagaucucaaaggcucuuuucagagccaccaaaaaaaaaaaaaaaaaaaaaaaaaaaaaaaaaaaaaaaaaaaaaaaaaaaaaaaaaaaaaaaaaaaaaaaaaaaaaaaaaaaaaaaaaaaaaaaaaaaaa

SEQ ID NO: 12524 - RNA, 4094 nt, Artificial Sequence
  SARS-CoV-2/Australia/NSW56/2020__EPI_ISL_417408 spike protein mRNA human (1-1273)
aggagagucccgcagucggcguccagcggcucugcuuguucgugugugugucguugcaggccuuauucaagcuuaccauguucguguuucugguccuccuuccccugguuagcucccagugcgugaacuugaccacaagaacucaauuaccuccagccuacacgaauagcuucaccaggggcguauauuacccggacaagguguuucggucaaguguccugcacagcacacaggaucuauuccuccccuuuuucuccaacgugacuugguuucaugcuauccacguuucugggaccaauggaacaaaacgcuucgacaacccugugcugccauuuaaugauggugucuauuucgcaucgaccgagaagucaaacauuauacgaggcuggaucuuugggacuacacuugacagcaaaacccagagucuguugauugugaauaacgccacgaauguaguuaucaaggugugugaguuccaguuuugcaacgaucccuuccucggagucuacuaucauaaaaauaacaaguccuggauggagucugaguuccguguguacagcuccgcgaauaacuguacuuuugaguaugugucacaaccuuuccugauggaccuggaaggcaagcaggguaauuuuaaaaaccucagagaguucgucuuuaagaacauugauggguacuucaaaaucuacaguaagcacaccccaauaaauuuaguuagggaccugccccagggauuuagcgcucuugagccuuugguggaucugccaaucggcauuaacaucacacgguuccagacucuacucgcccugcaucgcucuuaucuuaccccgggcgacuccucaagcggguggacagcaggagccgcugcauacuauguagguuaccugcaacccagaaccuuuuugcucaaauauaaugaaaacggcacgauuacugaugccguggacugcgcucuggauccuuuaagugagacaaaguguacccugaagucuuucacugucgaaaaagggaucuaccagacauccaauuuuagggugcagccaaccgagagcauaguucgguuccccaacauuacgaaucucugcccuuuuggagagguguucaacgccacccgcuucgcgucggucuaugcauggaaucgaaagagaaucucuaacuguguggccgacuacuccguacuuuacaauucagcuaguuuuagcacauucaaaugcuauggcguuuccccaacuaagcugaacgacuuguguuuuaccaauguguacgccgauucuuucgucauuaggggugacgaagugcggcagaucgcacccgggcaaacaggaaaaaucgcugauuauaacuacaagcuaccggacgauuuuacuggcugcgucauugccuggaauagcaacaaccuggacucaaaagugggcgggaauuauaacuaccucuaucgucuguuccgcaagaguaaucuuaagccuuuugagagagauauauccaccgaaaucuaccaggcgggaagcacacccuguaacgguguugagggcuucaauugcuacuuuccacugcagucuuauggguuccaaccuaccaacggagugggcuaccagcccuauaggguagucguguugucauuugaacuccugcacgccccagcaacuguuugcggucccaaaaagaguacgaauuuagugaaaaacaagugugucaauuucaacuuuaaugggcugacaggcaccggagugcuaacugagagcaacaaaaaguuccucccuuuccagcaguuuggccgggacauugcugauaccacagacgccguacgagauccacaaacccuggagauccuugacauaacuccgugcuccuucgggggagugucuguuauuacacccgguacgaauaccucgaaccaggucgcuguguuguaccaggacgugaauuguacugaagucccuguugccauccacgcagaucagcugacaccaaccuggcgcguguauagcacaggcuccaacguguuucaaacuagagccgggugccucaucggagcugagcauguaaacaauucauacgaaugugacauucccaucggcgcggguauuugcgcaaguuaucagacccagacgaacucuccuaggcgggcccgcagcgucgcuucccagucaauaaucgccuacaccaugagccugggggcagaaaauucuguggccuacuccaacaauaguauugcuaucccaacaaacuucacuaucagcguuaccacagaaauucuucccgugucuaugacuaagaccuccgucgauuguacgauguauauaugcggcgacucaacagaguguaguaaucuguugcuccaauacggaucuuuuugcacccagcugaacagagccuuaacuggcaucgcaguggagcaggauaaaaauacacaggaaguuuucgcgcaagugaagcagauuuauaaaaccccgccuaucaaggacuuugggggauucaacuuuucgcagauucugccagauuccucuaaacccagcaagaggucauucaucgaggaccuacucuuuaauaagguaacucuggcugaugccgguuucauaaaacaauacggcgacugucuuggggauaucgcagcccgugacuugauuugcgcucagaaguucaacggacugaccguccucccuccccuguuaacagaugaaaugaucgcccaguauacgagugcacugcuugcuggcaccauuacuuccgguuggacauuuggggccggcgcggccuugcagaucccauucgcuaugcaaauggcauaccgguuuaauggaauaggcgugacccagaacgugcucuaugagaaucagaaacugauugccaaccaguucaacucugcuaucgggaagauucaagacagccuauccucaacagccagcgcacugggaaaacuccaggacgucguuaaucagaacgcgcaggcccugaauacucuugugaagcaauugaguucuaacuuuggcgcuaucuccagcguacugaaugauauauuaucgcgacucgacaagguggaagccgagguccagaucgauagacugauuaccgguaggcuucagucacugcaaacguacgugacacagcaguugauccgcgcagcugagauucgggccucugcaaaccucgccgcuaccaaaaugagugaaugcguucuggggcaguccaagagaguggacuucuguggaaaaggcuaccaccuaaugagcuuuccucaaucugcgccccauggugucguguuccugcacguuacuuaugugccagcccaggagaagaauuuuaccacagcaccggcuaucugccacgauggcaaagcccauuucccuagggaaggggucuuuguaagcaacggaacucacugguucgugacccagcgcaauuuuuacgagccccagauaauuacaacggacaacaccuucguuuccggcaauugugauguggucaucgggaucgugaacaauacuguauaugacccacuccaacccgagcuggauucauucaaggaagaacuugacaaauacuuuaagaaccauacaaguccugauguggacuugggagauauuagcggcaucaaugccucugucguuaacauucagaaggaaauagaccgacugaaugagguggcuaaaaacuuaaacgaaucccucaucgaccugcaggagcuugguaaguaugagcaguacauuaaauggccaugguauaucuggcugggguucauugcaggacuaaucgccauagugauggucaccaucaugcucugcuguaugacuucaugcuguaguugccugaagggcuguugcagcugugguuccugcugcaaauuugaugaagacgauucugagcccguguugaagggcguuaagcugcacuacacaugaggacuagucccuguucccagagcccacuuuuuuuucuuuuuuugaaauaaaauagccugucuuucagaucucaaaggcucuuuucagagccaccaaaaaaaaaaaaaaaaaaaaaaaaaaaaaaaaaaaaaaaaaaaaaaaaaaaaaaaaaaaaaaaaaaaaaaaaaaaaaaaaaaaaaaaaaaaaaaaaaaaaa

SEQ ID NO: 12525 - RNA, 4094 nt, Artificial Sequence
  SARS-CoV-2/Iceland/280/2020__EPI_ISL_417608 spike protein mRNA human (1-1273)
aggagagucccgcagucggcguccagcggcucugcuuguucgugugugugucguugcaggccuuauucaagcuuaccauguucguguuucugguccuccuuccccugguuagcucccagugcgugaacuugaccacaagaacucaauuaccuccagccuacacuaauucuuucaccaggggcguauauuacccggacaagguguuucggucaaguguccugcacagcacacaggaucuauuccuccccuuuuucuccaacgugacuugguuucaugcuauccacguuucugggaccaauggaacaaaacgcuucgacaacccugugcugccauuuaaugauggugucuauuucgcaucgaccgagaagucaaacauuauacgaggcuggaucuuugggacuacacuugacagcaaaacccagagucuguugauugugaauaacgccacgaauguaguuaucaaggugugugaguuccaguuuugcaacgaucccuuccucggagucuacuaucauaaaaauaacaaguccuggauggagucugaguuccguguguacagcuccgcgaauaacuguacuuuugaguaugugucacaaccuuuccugauggaccuggaaggcaagcaggguaauuuuaaaaaccucagagaguucgucuuuaagaacauugauggguacuucaaaaucuacaguaagcacaccccaauaaauuuaguuagggaccugccccagggauuuagcgcucuugagccuuugguggaucugccaaucggcauuaacaucacacgguuccagacucuacucgcccugcaucgcucuuaucuuaccccgggcgacuccucaagcggguggacagcaggagccgcugcauacuauguagguuaccugcaacccagaaccuuuuugcucaaauauaaugaaaacggcacgauuacugaugccguggacugcgcucuggauccuuuaagugagacaaaguguacccugaagucuuucacugucgaaaaagggaucuaccagacauccaauuuuagggugcagccaaccgagagcauaguucgguuccccaacauuacgaaucucugcccuuuuggagagguguucaacgccacccgcuucgcgucggucuaugcauggaaucgaaagagaaucucuaacuguguggccgacuacuccguacuuuacaauucagcuaguuuuagcacauucaaaugcuauggcguuuccccaacuaagcugaacgacuuguguuuuaccaauguguacgccgauucuuucgucauuaggggugacgaagugcggcagaucgcacccgggcaaacaggaaaaaucgcugauuauaacuacaagcuaccggacgauuuuacuggcugcgucauugccuggaauagcaacaaccuggacucaaaagugggcgggaauuauaacuaccucuaucgucuguuccgcaagaguaaucuuaagccuuuugagagagauauauccaccgaaaucuaccaggcgggaagcacacccuguaacgguguugagggcuucaauugcuacuuuccacugcagucuuauggguuccaaccuaccaacggagugggcuaccagcccuauaggguagucguguugucauuugaacuccugcacgccccagcaacuguuugcggucccaaaaagaguacgaauuuagugaaaaacaagugugucaauuucaacuuuaaugggcugacaggcaccggagugcuaacugagagcaacaaaaaguuccucccuuuccagcaguuuggccgggacauugcugauaccacagacgccguacgagauccacaaacccuggagauccuugacauaacuccgugcuccuucgggggagugucuguuauuacacccgguacgaauaccucgaaccaggucgcuguguuguaccagggcgugaauuguacugaagucccuguugccauccacgcagaccagcugacaccaaccuggcgcguguauagcacaggguccaacguguuucaaacuagagccggaugccucaucggcgcugagcauguaaacaauucauacgaaugugauauucccaucggugcggggauuugcgcaaguuaucacacccagacgaacucuccuaggcgggcccgcagcgucgcuucccagucaauaaucgccuacaccaugagccugggcgcagaaaauucuguggccuacuccaacaauaguauugcuaucccaacaaacuucacuaucagcguuaccacagaaauucuucccgugucuaugacuaagaccuccgucgacuguacgauguauauaugcggagauucaacagaguguaguaaucuguugcuccaguacggcagcuuuugcacccaacugaacagagccuuaacugggaucgcaguggagcaggacaaaaauacacaggaaguuuucgcacaggugaagcaaauuuauaaaaccccgccuaucaaggauuuuggagguuucaacuuuucgcagauucugccagaccccuccaaaccuucuaagaggagcuucaucgaggaucuacucuuuaauaagguaacucuggcugacgccggcuucauaaaacaguacggggauugucuuggagacaucgcagcccgugauuugauuugcgcucaaaaguucaacggccugaccguccugcccccacucuuaacagacgaaaugaucgcccaguauacgucagcacugcuugcugguaccauuacgaguggguggacauuuggcgccggagcggccuugcagaucccuuucgcuaugcagauggcauaccgguuuaauggcauaggggugacccaaaacgugcucuaugagaaucagaaacugauugccaaccaguucaacuccgcuaucggaaagauucaggauucucuaagcuccacagccucagcacugggcaaacuccaagacgucguuaaucagaacgcgcaggcccugaauacucuugugaagcaguugagcaguaacuuuggugcuaucucuuccguacugaaugacauauuaagccgacucgauaagguggaagccgagguccaaaucgacagacugauuaccgggaggcuucagucgcugcagacguacgugacacaacaguugauccgcgcagcugagauucgggccucagcaaaccucgccgcuaccaaaaugucugaaugcguucugggacagaguaagagaguggauuucuguggcaaagguuaccaucuaauguccuuuccccagagcgcgccacacggcgucguguuccugcacguuacuuaugugccggcccaagagaagaauuuuaccacagcgccugcuaucugccaugacgggaaagcccacuuccccagggaaggagucuuuguaucuaacggcacucauugguucgugacccagcgcaauuuuuacgagccacagauaauuacaacggauaacaccuucguuagcgggaauugugacguggucaucggaaucgugaacaauacuguauaugauccccuccagccugagcuggacuccuucaaggaagaacuugauaaauacuuuaagaaccacacaucaccagacguggauuugggcgacauuagugguaucaaugccagcgucguuaacauucaaaaggaaauagaucgacugaaugagguggcuaaaaacuuaaacgaaucucucaucgaccugcaggagcuugggaaguaugagcaguacauuaaauggcccugguauaucuggcugggauucauugcaggccuaaucgccauagugauggucaccaucaugcucugcuguaugacuuccugcuguucaugccugaaggguuguugcaguuguggcagcugcugcaaauuugacgaagaugacuccgagccuguguugaaggggguuaagcugcauuacacaugaggacuagucccuguucccagagcccacuuuuuuuucuuuuuuugaaauaaaauagccugucuuucagaucucaaaggcucuuuucagagccaccaaaaaaaaaaaaaaaaaaaaaaaaaaaaaaaaaaaaaaaaaaaaaaaaaaaaaaaaaaaaaaaaaaaaaaaaaaaaaaaaaaaaaaaaaaaaaaaaaaaaa

SEQ ID NO: 12526 - RNA, 4094 nt, Artificial Sequence
  SARS-CoV-2/Iceland/247/2020__EPI_ISL_417575 spike protein mRNA human (1-1273)
aggagagucccgcagucggcguccagcggcucugcuuguucgugugugugucguugcaggccuuauucaagcuuaccauguucguguuucugguccuccuuccccugguuagcucccagugcgugaacuugaccacaagaacucaauuaccuccagccuacacuaauucuuucaccaggggcguauauuacccggacaagguguuucggucaaguguccugcacagcacacaggaucuauuccuccccuuuuucuccaacgugacuugguuucaugcuauccacguuucugggaccaauggaacaaaacgcuucgacaacccugugcugccauuuaaugauggugucuauuucgcaucgaccgagaagucaaacauuauacgaggcuggaucuuugggacuacacuugacagcaaaacccagagucuguugauugugaauaacgccacgaauguaguuaucaaggugugugaguuccaguuuugcaacgaucccuuccucggagucuacuaucauaaaaauaacaaguccuggauggagucugaguuccguguguacagcuccgcgaauaacuguacuuuugaguaugugucacaaccuuuccugauggaccuggaaggcaagcaggguaauuuuaaaaaccucagagaguucgucuuuaagaacauugauggguacuucaaaaucuacaguaagcacaccccaauaaauuuaguuagggaccugccccagggauuuagcgcucuugagccuuugguggaucugccaaucggcauuaacaucacacgguuccagacucuacucgcccugcaucgcucuuaucuuaccccgggcgacuccucaagcggguggacagcaggagccgcugcauacuauguagguuaccugcaacccagaaccuuuuugcucaaauauaaugaaaacggcacgauuacugaugccguggacugcgcucuggauccuuuaagugagacaaaguguacccugaagucuuucacugucgaaaaagggaucuaccagacauccaauuuuagggugcagccaaccgagagcauaguucgguuccccaacauuacgaaucucugcccuuuuggagagguguucaacgccacccgcuucgcgucggucuaugcauggaaucgaaagagaaucucuaacuguguggccgacuacuccguacuuuacaauucagcuaguuuuagcacauucaaaugcuauggcguuuccccaacuaagcugaacgacuuguguuuuaccaauguguacgccgauucuuucgucauuaggggugacgaagugcggcagaucgcacccgggcaaacaggaaaaaucgcugauuauaacuacaagcuaccggacgauuuuacuggcugcgucauugccuggaauagcaacaaccuggacucaaaagugggcgggaauuauaacuaccucuaucgucuguuccgcaagaguaaucuuaagccuuuugagagagauauauccaccgaaaucuaccaggcgggaagcacacccuguaacgguguugagggcuucaauugcuacuuuccacugcagucuuauggguuccaaccuaccaacggagugggcuaccagcccuauaggguagucguguugucauuugaacuccugcacgccccagcaacuguuugcggucccaaaaagaguacgaauuuagugaaaaacaagugugucaauuucaacuuuaaugggcugacaggcaccggagugcuaacugagagcaacaaaaaguuccucccuuuccagcaguuuggccgggacauugcugauaccacagacgccguacgagauccacaaacccuggagauccuugacauaacuccgugcuccuucgggggagugucuguuauuacacccgguacgaauaccucgaaccaggucgcuguguuguaccagggcgugaauuguacugaagucccuguugccauccacgcagaccagcugacaccaaccuggcgcguguauagcacaggguccaacguguuucaaacuagagccggaugccucaucggcgcugagcauguaaacaauucauacgaaugugauauucccaucggugcggggauuugcgcaaguuaucagacccagacgaacucuccuaggcgggcccgcagcgucgcuucccagucaauaaucgccuacaccaugagccugggcgcagaaaauucuguggccuacuccaacaauaguauugcuaucccaacaaacuucacuaucagcguuaccacagaaauucuucccgugucuaugacuaagaccuccgucgacuguacgauguauauaugcggagauucaacagaguguaguaaucuguugcuccaauacggcagcuuuugcacccagcugaacagagccuuaacugggaucgcaguggagcaggacaaaaauacacaggaaguuuucgcgcaagugaagcagauuuauaaaaccccgccuaucaaggauuuuggagguuucaacuuuucgcagauucugccagaccccuccaaaccuucuaagaggagcuucaucgaggaucuacucuuuaauaagguaacucuggcugacgccggcuucauaaaacaauacggggauugucuuggagacaucgcagcccgugauuugauuugcgcucagaaguucaacggccugaccguccugcccccacucuuaacagacgaaaugaucgcccaguauacgucagcacugcuugcugguaccauuacgaguggguggacauuuggcgccggagcggccuugcagaucccuuucgcuaugcaaauggcauaccgguuuaauggcauaggggugacccagaacgugcucuaugagaaucagaaacugauugccaaccaguucaacuccgcuaucggaaagauucaagauucucuaagcuccacagccucagcacugggcaaacuccaggacgucguuaaucagaacgcgcaggcccugaauacucuugugaagcaauugagcaguaacuuuggugcuaucucuuccguacugaaugacauauuaagccgacucgauaagguggaagccgagguccagaucgacagacugauuaccgggaggcuucagucgcugcaaacguacgugacacagcaguugauccgcgcagcugagauucgggccucagcaaaccucgccgcuaccaaaaugucugaaugcguucugggacagaguaagagaguggauuucuguggcaaagguuaccaccuaauguccuuuccccaaagcgcgccacauggcgucguguuccugcacguuacuuaugugccggcccaggagaagaauuuuaccacagcuccugcaaucugccacgacgggaaagcccauuuccccagggaaggagucuuuguaucuaacggcacucacugguucgugacccagcgcaauuuuuacgagccacagauaauuacaacggauaacaccuucguuagcgggaauugugacguggucaucggaaucgugaacaauacuguauaugauccccuccaaccugagcuggacuccuucaaggaagaacuugauaaauacuuuaagaaccauacaucaccagacguggauuugggcgacauuagugguaucaaugccagcgucguuaacauucagaaggaaauagaucgacugaaugagguggcuaaaaacuuaaacgaaucucucaucgaccugcaggagcuugggaaguaugagcaguacauuaaauggcccugguauaucuggcugggauucauugcaggccuaaucgccauagugaucgucaccauuaugcucugcuguaugacuuccugcuguucaugccugaaggguuguugcaguuguggcagcugcugcaaauuugacgaagaugacuccgagccuguguugaaggggguuaagcugcacuacacaugaggacuagucccuguucccagagcccacuuuuuuuucuuuuuuugaaauaaaauagccugucuuucagaucucaaaggcucuuuucagagccaccaaaaaaaaaaaaaaaaaaaaaaaaaaaaaaaaaaaaaaaaaaaaaaaaaaaaaaaaaaaaaaaaaaaaaaaaaaaaaaaaaaaaaaaaaaaaaaaaaaaaa

SEQ ID NO: 12527 - RNA, 4094 nt, Artificial Sequence
  SARS-CoV-2/Iceland/238/2020__EPI_ISL_417566 spike protein mRNA human (1-1273)
aggagagucccgcagucggcguccagcggcucugcuuguucgugugugugucguugcaggccuuauucaagcuuaccauguucguguuucugguccuccuuccccugguuagcucccagugcgugaacuugaccacaagaacucaauuaccuccagccuacacuaauucuuucaccaggggcguauauuacccggacaagguguuucggucaaguguccugcacagcacacaggaucuauuccuccccuuuuucuccaacgugacuugguuucaugcuauccacguuucugggaccaauggaacaaaacgcuucgacaacccugugcugccauuuaaugauggugucuauuucgcaucgaccgagaagucaaacauuauacgaggcuggaucuuugggacuacacuugacagcaaaacccagagucuguugauugugaauaacgccacgaauguaguuaucaaggugugugaguuccaguuuugcaacgaucccuuccucggagucuacuaucauaaaaauaacaaguccuggauggagucugaguuccguguguacagcuccgcgaauaacuguacuuuugaguaugugucacaaccuuuccugauggaccuggaaggcaagcaggguaauuuuaaaaaccucagagaguucgucuuuaagaacauugauggguacuucaaaaucuacaguaagcacaccccaauaaauuuaguuagggaccugccccagggauuuagcgcucuugagccuuugguggaucugccaaucggcauuaacaucacacgguuccagacucuacucgcccugcaucgcucuuaucuuaccccgggcgacuccucaagcggguggacagcaggagccgcugcauacuauguagguuaccugcaacccagaaccuuuuugcucaaauauaaugaaaacggcacgauuacugaugccguggacugcgcucuggauccuuuaagugagacaaaguguacccugaagucuuucacugucgaaaaagggaucuaccagacauccaauuuuagggugcagccaaccgagagcauaguucgguuccccaacauuacgaaucucugcccuuuuggagagguguucaacgccacccgcuucgcgucggucuaugcauggaaucgaaagagaaucucuaacuguguggccgacuacuccguacuuuacaauucagcuaguuuuagcacauucaaaugcuauggcguuuccccaacuaagcugaacgacuuguguuuuaccaauguguacgccgauucuuucgucauuaggggugacgaagugcggcagaucgcacccgggcaaacaggaaaaaucgcugauuauaacuacaagcuaccggacgauuuuacuggcugcgucauugccuggaauagcaacaaccuggacucaaaagugggcgggaauuauaacuaccucuaucgucuguuccgcaagaguaaucuuaagccuuuugagagagauauauccaccgaaaucuaccaggcgggaagcacacccuguaacgguguugagggcuucaauugcuacuuuccacugcagucuuauggguuccaaccuaccaacggagugggcuaccagcccuauaggguagucguguugucauuugaacuccugcacgccccagcaacuguuugcggucccaaaaagaguacgaauuuagugaaaaacaagugugucaauuucaacuuuaaugggcugacaggcaccggagugcuaacugagagcaacaaaaaguuccucccuuuccagcaguuuggccgggacauugcugauaccacagacgccguacgagauccacaaacccuggagauccuugacauaacuccgugcuccuucgggggagugucuguuauuacacccgguacgaauaccucgaaccaggucgcuguguuguaccagggcgugaauuguacugaagucccuguugccauccacgcagaccagcugacaccaaccuggcgcguguauagcacaggguccaacguguuucaaacuagagccggaugccucaucggcgcugagcauguaaacaauucauacgaaugugauauucccaucggugcggggauuugcgcaaguuaucagacccagacgaacucuccuaggcgggcccgcagcgucgcuucccagucaauaaucgccuacaccaugagccugggcgcagaaaauucuguggccuacuccaacaauaguauugcuaucccaacaaacuucacuaucagcguuaccacagaaauucuucccgugucuaugacuaagaccuccgucgacuguacgauguauauaugcggagauucaacagaguguaguaaucuguugcuccaauacggcagcuuuugcacccagcugaacagagccuuaacugggaucgcaguggagcaggacaaaaauacacaggaaguuuucgcgcaagugaagcagauuuauaaaaccccgccuaucaaggauuuuggagguuucaacuuuucgcagauucugccagaccccuccaaaccuucuaagaggagcuucaucgaggaucuacucuuuaauaagguaacucuggcugacgucggcuucauaaaacaauacggggauugucuuggagacaucgccgcacgugauuugauuugcgcccagaaguucaacggccugaccgugcugcccccacucuuaacagacgaaaugaucgcucaguauacgucagcccugcuugcagguaccauuacgaguggguggacauuuggcgcuggagccgcguugcagaucccuuucgccaugcaaauggcuuaccgguuuaauggcauaggggugacccagaacguccucuaugagaaucagaaacugauugcaaaccaguucaacuccgccaucggaaagauucaagauucucuaagcuccacagcuucagcccugggcaaacuccaggacguugugaaucagaacgcacaggcgcugaauacucuuguaaagcaauugagcaguaacuuuggugccaucucuuccgugcugaaugacauauuaagccgacucgauaaggucgaagcugaggugcagaucgacagacugauuaccgggaggcuucagucgcugcaaacguacguuacacagcaguugauccgcgccgcagagauucgggcuucagccaaccucgcagccaccaaaaugucugaaugcgugcugggacagaguaagagagucgauuucuguggcaaagguuaccaccuaauguccuuuccccaaagcgcuccacauggcgugguuuuccugcacgugacuuaugucccggcgcaggagaagaauuuuaccacagccccugcaaucugccacgacgggaaagcucauuuccccagggaaggaguauuugugucuaacggcacucacugguucguuacccagcgcaauuuuuacgagccacagauaauuacaacggauaacaccuucgugagcgggaauugugacgucgugaucggaaucguaaacaauacuguguaugauccccuccaaccugagcuggacuccuucaaggaagaacuugauaaauacuuuaagaaccauacaucaccagacgucgauuugggcgacauuagugguaucaaugccagcguugugaacauucagaaggaaauagaucgacugaaugagguggccaaaaacuuaaacgaaucucucaucgaccugcaggagcuugggaaguaugagcaguacauuaaauggcccugguauaucuggcugggauucauugcuggccuaaucgcaauagucauggugaccaucaugcucugcuguaugacuuccugcuguucaugccugaaggguuguugcaguuguggcagcugcugcaaauuugacgaagaugacuccgagccuguuuugaaggggguaaagcugcacuacacaugaggacuagucccuguucccagagcccacuuuuuuuucuuuuuuugaaauaaaauagccugucuuucagaucucaaaggcucuuuucagagccaccaaaaaaaaaaaaaaaaaaaaaaaaaaaaaaaaaaaaaaaaaaaaaaaaaaaaaaaaaaaaaaaaaaaaaaaaaaaaaaaaaaaaaaaaaaaaaaaaaaaaa

SEQ ID NO: 12528 - RNA, 4094 nt, Artificial Sequence
  SARS-CoV-2/Greece/16/2020__EPI_ISL_418265 spike protein mRNA human (1-1273)
aggagagucccgcagucggcguccagcggcucugcuuguucgugugugugucguugcaggccuuauucaagcuuaccauguucguguuucugguccuccuuccccugguuagcucccagugcgugaacuugaccacaagaacucaauuaccuccagccuacacuaauucuuucaccaggggcguauauuacccggacaagguguuucggucaaguguccugcacagcacacaggaucuauuccuccccuuuuucuccaacgugacuugguuucaugcuauccacguuucugggaccaauggaacaaaacgcuucgacaacccugugcugccauuuaaugauggugucuauuucgcaucgaccgagaagucaaacauuauacgaggcuggaucuuugggacuacacuugacagcaaaacccagagucuguugauugugaauaacgccacgaauguaguuaucaaggugugugaguuccaguuuugcaacgaucccuuccucggagucuacuaucauaaaaauaacaaguccuggauggagucugaguuccguguguacagcuccgcgaauaacuguacuuuugaauaugugucacaaccuuuccugauggaccuggaaggcaagcaggguaauuuuaaaaaccucagagaguucgucuuuaagaacguugauggguacuucaaaauuuacaguaagcacaccccaaucaauuuagugagggaccugccccagggauuuagcgcucuugagccuuugguagaucugccaauaggcaucaacauuacacgguuccagacucuacucgcccugcaucgcucuuaucuuaccccgggcgacuccucaagcggguggacagcaggagccgcugcauacuauguggguuaccugcaacccagaaccuuuuugcucaaauauaaugaaaacggcacgaucacugaugccgucgacugcgcucuggauccuuuaagugagacaaaguguacccugaagucuuucacuguggaaaaagggauuuaccagacauccaauuuuaggguucagccaaccgagagcaucgugcgguuccccaacauaacgaaucucugcccuuuuggagaggucuucaacgccacccgcuucgcgucgguguaugcauggaaucgaaagagaauuucuaacuguguagccgacuacuccguucuuuacaauucagcuaguuuuagcacauucaaaugcuauggcguguccccaacuaagcugaacgacuuguguuuuaccaaugucuacgccgauucuuucgugaucaggggugacgaaguccggcagauugcacccgggcaaacaggaaaaaucgcugauuauaacuacaagcuaccggacgauuuuacuggcugcgugaucgccuggaauagcaacaaccuggacucaaaaguuggcgggaauuauaacuaccucuaucgucuguuccgcaagaguaaucuuaagccuuuugagagagauauuuccaccgaaauauaccaggcgggaagcacacccuguaacgguguggagggcuucaauugcuacuuuccacugcagucuuauggguuccaaccuaccaacggaguaggcuaccagcccuauagggucgugguuuugucauuugaacuccugcacgccccagcaacugugugcggucccaaaaagaguacgaauuuagucaaaaacaagugugugaauuucaacuuuaaugggcugacaggcaccggaguacuaacugagagcaacaaaaaguuccucccuuuccagcaguuuggccgggacaucgcugauaccacagacgccgugcgagauccacaaacccuggagauucuugacaucacuccgugcuccuucgggggaguuucugucauaacacccgguacgaauaccucgaaccagguggcuguguuguaccaggacgucaauuguacugaaguuccuguggccauucacgcagaucagcugacaccaaccuggcgcguguauagcacaggcuccaacguauuucaaacuagagccgggugccucaucggagcugagcaugucaacaauucauacgaaugugacauccccauuggcgcggguaucugcgcaaguuaucagacccagacgaacucuccuaggcgggcccgcagcguggcuucccagucaauuauagccuacaccaugagccugggggcagaaaauucuguugccuacuccaacaauaguaucgcuauuccaacaaacuucacuaucagcgugaccacagaaauccuucccgucucuaugacuaagaccuccguggauuguacgauguauauuugcggcgacucaacagaguguaguaaucuguugcuccaauacggcagcuuuugcacccagcugaacagagccuuaacuggaauagcaguugagcaggauaaaaauacacaggaaguguucgcgcaaguaaagcagaucuauaaaaccccgccuauuaaggacuuugggggauucaacuuuucgcagauccugccagaucccuccaaaccuucuaagaggagcuucauugaggaccuacucuuuaauaaggucacucuggcugaugccgguuucaucaaacaauacggcgacugucuuggggauauagcagcccgugacuugaucugcgcucagaaguucaacggacugaccgugcugcccccacucuuaacagaugaaaugauugcccaguauacgucagcacugcuugcuggcaccaucacgagugguuggacauuuggggccggcgcggccuugcagauuccuuucgcuaugcaaauggcauaccgguuuaauggaaucggcgugacccagaacguccucuaugagaaucagaaacugauagccaaccaguucaacuccgcuauugggaagauccaagacucucuaagcuccacagccucagcacugggaaaacuccaggacguugugaaucagaacgcgcaggcccugaauacucuuguaaagcaauugagcaguaacuuuggcgcuauuucuuccgugcugaaugauaucuuaagccgacucgacaaggucgaagccgaggugcagauagauagacugaucaccgguaggcuucagucgcugcaaacguacguuacacagcaguugauucgcgcagcugagauccgggccucagcaaaccucgccgcuaccaaaaugucugaaugcgugcuggggcagaguaagagagucgacuucuguggaaaaggcuaccaccuaauguccuuuccccaaagcgcgccacauggugugguuuuccugcacgugacuuaugucccggcccaggagaagaauuuuaccacagcuccugcaauuugccacgauggcaaagcccauuuccccagggaagggguauuugugucuaacggaacucacugguucguuacccagcgcaauuuuuacgagccacagaucauaacaacggacaacaccuucgugagcggcaauugugaugucgugauugggaucguaaacaauacuguguaugacccccuccaaccugagcuggauuccuucaaggaggaacuugacaaauacuuuaagaaccauacaucaccagaugucgacuugggagauaucaguggcauuaaugccagcguugugaacauccagaaggaaauugaccgacugaaugagguggcuaaaaacuuaaacgaaucucucauagaccugcaggagcuugguaaguaugagcaguacaucaaauggcccugguauauuuggcugggguucaucgcaggacuaauugccaucgucauggugaccauaaugcucugcuguaugacuuccugcuguucaugccugaagggcuguugcaguugugguagcugcugcaaauuugaugaagacgauuccgagccuguuuugaagggcguaaagcugcacuacacaugaggacuagucccuguucccagagcccacuuuuuuuucuuuuuuugaaauaaaauagccugucuuucagaucucaaaggcucuuuucagagccaccaaaaaaaaaaaaaaaaaaaaaaaaaaaaaaaaaaaaaaaaaaaaaaaaaaaaaaaaaaaaaaaaaaaaaaaaaaaaaaaaaaaaaaaaaaaaaaaaaaaaa

SEQ ID NO: 12529 - RNA, 4094 nt, Artificial Sequence
  SARS-CoV-2/Iceland/319/2020__EPI_ISL_417648 spike protein mRNA human (1-1273)
aggagagucccgcagucggcguccagcggcucugcuuguucgugugugugucguugcaggccuuauucaagcuuaccauguucguguuucugguccuccuuccccugguuagcucccagugcgugaacuugaccacaagaacucaauuaccuccagccuacacuaauucuuucaccaggggcguauauuacccggacaagguguuucggucaaguguccugcacagcacacaggaucuauuccuccccuuuuucuccaacgugacuugguuucaugcuauccacguuucugggaccaauggaacaaaacgcuucgacaacccugugcugccauuuaaugauggugucuauuucgcaucgaccgagaagucaaacauuauacgaggcuggaucuuugggacuacacuugacagcaaaacccagagucuguugauugugaauaacgccacgaauguaguuaucaaggugugugaguuccaguuuugcaacgaucccuuccucggagucuacuaucauaaaaauaacaaguccuggauggagucugaguuccguguguacagcuccgcgaauaacuguacuuuugaguaugugucacaaccuuuccugauugaccuggaaggcaagcaggguaauuuuaaaaaccucagagaguucgucuuuaagaacaucgauggguacuucaaaauauacaguaagcacaccccaaucaauuuaguuagggaccugccccagggauuuagcgcucuugagccuuugguggaucugccaauuggcaucaacauuacacgguuccagacucuacucgcccugcaucgcucuuaucuuaccccgggcgacuccucaagcggguggacagcaggagccgcugcauacuauguagguuaccugcaacccagaaccuuuuugcucaaauauaaugaaaacggcacgaucacugaugccguggacugcgcucuggauccuuuaagugagacaaaguguacccugaagucuuucacugucgaaaaagggauauaccagacauccaauuuuagggugcagccaaccgagagcauuguucgguuccccaacaucacgaaucucugcccuuuuggagagguguucaacgccacccgcuucgcgucggucuaugcauggaaucgaaagagaauuucuaacuguguggccgacuacuccguacuuuacaauucagcuaguuuuagcacauucaaaugcuauggcguuuccccaacuaagcugaacgacuuguguuuuaccaauguguacgccgauucuuucgucaucaggggugacgaagugcggcagaucgcacccgggcaaacaggaaaaauugcugauuauaacuacaagcuaccggacgauuuuacuggcugcgucauagccuggaauagcaacaaccuggacucaaaagugggcgggaauuauaacuaccucuaucgucuguuccgcaagaguaaucuuaagccuuuugagagagauaucuccaccgaaauuuaccaggcgggaagcacacccuguaacgguguugagggcuucaauugcuacuuuccacugcagucuuauggguuccaaccuaccaacggagugggcuaccagcccuauaggguagucguguugucauuugaacuccugcacgccccagcaacuguuugcggucccaaaaagaguacgaauuuagugaaaaacaagugugucaauuucaacuuuaaugggcugacaggcaccggagugcuaacugagagcaacaaaaaguuccucccuuuccagcaguuuggccgggacaucgcugauaccacagacgccguacgagauccacaaacccuggagauacuugacauuacuccgugcuccuucgggggagugucuguuaucacacccgguacgaauaccucgaaccaggucgcuguguuguaccagggcgugaauuguacugaagucccuguugccauccacgcagaccagcugacaccaaccuggcgcguguauagcacaggguccaacguguuucaaacuagagccggaugccucauuggcgcugagcauguaaacaauucauacgaaugugauauccccauuggugcggggauaugcgcaaguuaucagacccagacgaacucuccuaggcgggcccgcagcgucgcuucccagucaaucauugccuacaccaugagccugggcgcagaaaauucuguggccuacuccaacaauaguaucgcuaucccaacaaacuucacuauuagcguuaccacagaaauacuucccgugucuaugacuaagaccuccgucgacuguacgauguauaucugcggagauucaacagaguguaguaaucuguugcuccaauacggcagcuuuugcacccagcugaacagagccuuaacugggauugcaguggagcaggacaaaaauacacaggaaguuuucgcgcaagugaagcagaucuauaaaaccccgccuauuaaggauuuuggagguuucaacuuuucgcagauccugccagaccccuccaaaccuucuaagaggagcuucauagaggaucuacucuuuaauaagguaacucuggcugacgccggcuucaucaaacaauacggggauugucuuggagacauugcagcccgugauuugaucugcgcucagaaguucaacggccugaccguccugcccccacucuuaacagacgaaaugauugcccaguauacgucagcacugcuugcugguaccaucacgaguggguggacauuuggcgccggagcggccuugcagauaccuuucgcuaugcaaauggcauaccgguuuaauggcauuggggugacccagaacgugcucuaugagaaucagaaacugaucgccaaccaguucaacuccgcuauuggaaagauccaagauucucuaagcuccacagccucagcacugggcaaacuccaggacgucguuaaucagaacgcgcaggcccugaauacucuugugaagcaauugagcaguaacuuuggugcuauaucuuccguacugaaugacaucuuaagccgacucgauaagguggaagccgagguccagauugacagacugaucaccgggaggcuucagucgcugcaaacguacgugacacagcaguugauucgcgcagcugagauccgggccucagcaaaccucgccgcuaccaaaaugucugaaugcguucugggacagaguaagagaguggauuucuguggcaaagguuaccaccuaauguccuuuccccaaagcgcgccacauggcgucguguuccugcacguuacuuaugugccggcccaggagaagaauuuuaccacagcuccugcaauaugccacgacgggaaagcccauuuccccagggaaggagucuuuguaucuaacggcacucacugguucgugacccagcgcaauuuuuacgagccacagauuaucacaacggauaacaccuucguuagcgggaauugugacguggucaucggaauugugaacaauacuguauaugauccccuccaaccugagcuggacuccuucaaggaagaacuugauaaauacuuuaagaaccauacaucaccagacguggauuugggcgacaucagugguauuaaugccagcgucguuaacauacagaaggaaaucgaucgacugaaugagguggcuaaaaacuuaaacgaaucucucauugaccugcaggagcuugggaaguaugagcaguacaucaaauggcccugguauauuuggcugggauucaucgcaggccuaauagccaucgugauggucaccauuaugcucugcuguaugacuuccugcuguucaugccugaaggguuguugcaguuguggcagcugcugcaaauuugacgaagaugacuccgagccuguguugaaggggguuaagcugcacuacacaugaggacuagucccuguucccagagcccacuuuuuuuucuuuuuuugaaauaaaauagccugucuuucagaucucaaaggcucuuuucagagccaccaaaaaaaaaaaaaaaaaaaaaaaaaaaaaaaaaaaaaaaaaaaaaaaaaaaaaaaaaaaaaaaaaaaaaaaaaaaaaaaaaaaaaaaaaaaaaaaaaaaaa

SEQ ID NO: 12530 - RNA, 4094 nt, Artificial Sequence
  SARS-CoV-2/Congo/94/2020__EPI_ISL_417947 spike protein mRNA human (1-1273)
aggagagucccgcagucggcguccagcggcucugcuuguucgugugugugucguugcaggccuuauucaagcuuaccauguucguguuucugguccuccuuccccugguuagcucccagugcgugaacuugaccacaagaacucaauuaccuccagccuacacuaauucuuucaccaggggcguauauuacccggacaagguguuucggucaaguguccugcacagcacacaggaucuauuccuccccuuuuucuccaacgugacuugguuucaugcuauccacguuucugggaccaauggaacaaaacgcuucgacaacccugugcugccauuuaaugauggugucuauuucgcaucgaccgagaagucaaacauuauacgaggcuggaucuuugggacuacacuugacagcaaaacccagagucuguugauugugaauaacgccacgaauguaguuaucaaggugugugaguuccaguuuugcaacgaucccuuccucggagucuacuaucauaaaaauaacaaguccuggauggagucugaguuccguguguacagcuccgcgaauaacuguacuuuugaguaugugucacaaccuuuccugauggaccuggaaggcaagcaggguaauuuuaaaaaccucagagaguucgucuuuaagaacauugauggguacuucaaaaucuacaguaagcacaccccaauaaauuuaguuagggaccugccccagggauuuagcgcucuugagccuuugguggaucugccaaucggcauuaacaucacacgguuccagacucuacucgcccugcaucgcucuuaucuuaccccgggcgacuccucaagcggguggacagcaggagccgcugcauacuauguagguuaccugcaacccagaaccuuuuugcucaaauauaaugaaaacggcacgauuacugaugccguggacugcgcucuggauccuuuaagugagacaaaguguacccugaagucuuucacugucgaaaaagggaucuaccagacauccaauuuuagggugcagccaaccgagagcauaguucgguuccccaacauuacgaaucucugcccuuuuggagagguguucaacgccacccgcuucgcgucggucuaugcauggaaucgaaagagaaucucuaacuguguggccgacuacuccguacuuuacaauucagcuaguuuuagcacauucaaaugcuauggcguuuccccaacuaagcugaacgacuuguguuuuaccaauguguacgccgauucuuucgucauuaggggugacgaagugcggcagaucgcacccgggcaaacaggaaaaaucgcugauuauaacuacaagcuaccggacgauuuuacuggcugcgucauugccuggaauagcaacaaccuggacucaaaagugggcgggaauuauaacuaccucuaucgucuguuccgcaagaguaaucuuaagccuuuugagagagauauauccaccgaaaucuaccaggcgggaagcacacccuguaacgguguugagggcuucaauugcuacuuuccacugcagucuuauggguuccaaccuaccaacggagugggcuaccagcccuauaggguagucguguugucauuugaacuccugcacgccccagcaacuguuugcggucccaaaaagaguacgaauuuagugaaaaacaagugugucaauuucaacuuuaaugggcugacaggcaccggagugcuaacugagagcaacaaaaaguuccucccuuuccagcaguuuggccgggacauugcugauaccacagacgccguacgagauccacaaacccuggagauccuugacauaacuccgugcuccuucgggggagugucuguuauuacacccgguacgaauaccucgaaccaggucgcuguguuguaccagggcgugaauuguacugaagucccuguugccauccacgcagaccagcugacaccaaccuggcgcguguauagcacaggguccaacguguuucaaacuagagccggaugccucaucggcgcugagcauguaaacaauucauacgaaugugauauucccaucggugcggggauuugcgcaaguuaucagacccagacgaacucuccuaggcgggcccgcagcgucgcuucccagucaauaaucgccuacaccaugagccugggcgcagaaaauucuguggccuacuccaacaauaguauugcuaucccaacaaacuucacuaucagcguuaccacagaaauucuucccgugucuaugacuaagaccuccgucgacuguacgauguauauaugcggagauucaacagaguguaguaaucuguugcuccaauacggcagcuuuugcacccagcugaacagagccuuaacugggaucgcaguggagcaggacaaaaauacacaggaaguuuucgcgcaagugaagcagauuuauaaaaccccgccuaucaaggauuuuggagguuucaacuuuucgcagauucugccagaccccuccaaaccuucuaagaggagcuucaucgaggauauacuauuuaauaagguaacucucgcugacgccggcuucaucaaacaauacggggauugucugggagacauugcagcccgugaucuuaucugcgcucagaaguucaacggcuugaccguccugcccccacuccugacagacgaaaugauugcccaguauacgucagcauuacuggcugguaccaucacgaguggguggacauuuggcgccggagcggcccuucagauaccuuucgcuaugcaaauggcauaccgguuuaauggcauuggggugacccagaacguguuguaugagaaucagaaacucaucgccaaccaguucaacuccgcuauuggaaagauccaagauucucugagcuccacagccucagcacuaggcaaacugcaggacgucguuaaucagaacgcgcaggcccucaauacucuggugaagcaacuuagcaguaacuuuggugcuauaucuuccguauugaaugacauccugagccgauuagauaagguggaagccgagguccagauugacagacucaucaccgggaggcugcagucgcuucaaacguacgugacacagcagcugauucgcgcagcugagauccgggccucagcaaacuuggccgcuaccaaaaugucugaaugcguucucggacagaguaagagaguggauuucuguggcaaagguuaccaccugauguccuuuccccaaagcgcgccacauggcgucguguuccuacacguuacuuaugugccggcccaggagaagaauuuuaccacagcuccugcaauaugccacgacgggaaagcccauuuccccagggaaggagucuuuguaucuaacggcacucacugguucgugacccagcgcaauuuuuacgagccacagauuaucacaacggauaacaccuucguuagcgggaauugugacguggucaucggaauugugaacaauacuguauaugauccccugcaaccugagcucgacuccuucaaggaagaacuggauaaauacuuuaagaaccauacaucaccagacguggaucuuggcgacaucagugguauuaaugccagcgucguuaacauacagaaggaaaucgaucgauugaaugagguggcuaaaaaccugaacgaaucuuuaauugaccuccaggagcuggggaaguaugagcaguacaucaaauggcccugguauauuuggcuuggauucaucgcaggccugauagccaucgugauggucaccauuaugcuaugcuguaugacuuccugcuguucaugccucaaggguuguugcaguuguggcagcugcugcaaauuugacgaagaugacuccgagccugugcugaaggggguuaaguugcacuacacaugaggacuagucccuguucccagagcccacuuuuuuuucuuuuuuugaaauaaaauagccugucuuucagaucucaaaggcucuuuucagagccaccaaaaaaaaaaaaaaaaaaaaaaaaaaaaaaaaaaaaaaaaaaaaaaaaaaaaaaaaaaaaaaaaaaaaaaaaaaaaaaaaaaaaaaaaaaaaaaaaaaaaa

SEQ ID NO: 12531 - RNA, 4094 nt, Artificial Sequence
  SARS-CoV-2/Congo/158/2020__EPI_ISL_417950 spike protein mRNA human (1-1273)
aggagagucccgcagucggcguccagcggcucugcuuguucgugugugugucguugcaggccuuauucaagcuuaccauguucguguuucugguccuccuuccccugguuagcucccagugcgugaacuugaccacaagaacucaauuaccuccagccuacacuaauucuuucaccaggggcguauauuacccggacaagguguuucggucaaguguccugcacagcacacaggaucuauuccuccccuuuuucuccaacgugacuugguuucaugcuauccacguuucugggaccaauggaacaaaacgcuucgacaacccugugcugccauuuaaugauggugucuauuucgcaucgaccgagaagucaaacauuauacgaggcuggaucuuugggacuacacuugacagcaaaacccagagucuguugauugugaauaacgccacgaauguaguuaucaaggugugugaguuccaguuuugcaacgaucccuuccucggagucuacuaucauaaaaauaacaaguccuggauggagucugaguuccguguguacagcuccgcgaauaacuguacuuuugaauaugugucacaaccuuuccugauggaccuggaaggcaagcaggguaauuuuaaaaaccucagagaguucgucuuuaagaacauugauggguacuucaaaaucuacaguaagcacaccccaauaaauuuaguuagggaccugccccagggauuuagcgcucuugagccuuugguggaucugccaaucggcauuaacaucacacgguuccagacucuacucgcccugcaucgcucuuaucuuaccccgggcgacuccucaagcggguggacagcaggagccgcugcauacuauguagguuaccugcaacccagaaccuuuuugcucaaauauaaugaaaacggcacgauuacugaugccguggacugcgcucuggauccuuuaagugagacaaaguguacccugaagucuuucacugucgaaaaagggaucuaccagacauccaauuuuagggugcagccaaccgagagcauaguucgguuccccaacauuacgaaucucugcccuuuuggagagguguucaacgccacccgcuucgcgucggucuaugcauggaaucgaaagagaaucucuaacuguguggccgacuacuccguacuuuacaauucagcuaguuuuagcacauucaaaugcuauggcguuuccccaacuaagcugaacgacuuguguuuuaccaauguguacgccgauucuuucgucauuaggggugacgaagugcggcagaucgcacccgggcaaacaggaaaaaucgcugauuauaacuacaagcuaccggacgauuuuacuggcugcgucauugccuggaauagcaacaaccuggacucaaaagugggcgggaauuauaacuaccucuaucgucuguuccgcaagaguaaucuuaagccuuuugagagagauauauccaccgaaaucuaccaggcgggaagcacacccuguaacgguguugagggcuucaauugcuacuuuccacugcagucuuauggguuccaaccuaccaacggagugggcuaccagcccuauaggguagucguguugucauuugaacuccugcacgccccagcaacuguuugcggucccaaaaagaguacgaauuuagugaaaaacaagugugucaauuucaacuuuaaugggcugacaggcaccggagugcuaacugagagcaacaaaaaguuccucccuuuccagcaguuuggccgggacauugcugauaccacagacgccguacgagauccacaaacccuggagauccuugacauaacuccgugcuccuucgggggagugucuguuauuacacccgguacgaauaccucgaaccaggucgcuguguuguaccaggacgugaauuguacugaagucccuguugccauccacgcagaucagcugacaccaaccuggcgcguguauagcacaggcuccaacguguuucaaacuagagccgggugccucaucggagcugagcauguaaacaauucauacgaaugugacauucccaucggcgcggguauuugcgcaaguuaucagacccagacgaacucuccuaggcgggcccgcagcgucgcuucccagucaauaaucgccuacaccaugagccugggggcagaaaauucuguggccuacuccaacaauaguauugcuaucccaacaaacuucacuaucagcguuaccacagaaauucuucccgugucuaugacuaagaccuccgucgauuguacgauguauauaugcggcgacucaacagaguguaguaaucuguugcuccaauacggcagcuuuugcacccagcugaacagagccuuaacuggaaucgcaguggagcaggauaaaaauacacaggaaguuuucgcgcaagugaagcagauuuauaaaaccccgccuaucaaggacuuugggggauucaacuuuucgcagauucugccagaucccuccaaaccuucuaagaggagcuucaucgaggaccuacucuuuaauaagguaacucuggcugaugccgguuucauaaaacaauacggcgacugucuuggggauaucgcagcccgugacuugauuugcgcucagaaguucaacggacugaccguccugcccccacucuuaacagaugaaaugaucgcccaguauacgucagcacugcuugcuggcaccauuacgagugguuggacauuuggggccggcgcggccuugcagaucccuuucgcuaugcaaauggcauaccgguuuaauggaauaggcgugacccagaacgugcucuaugagaaucagaaacugauugccaaccaguucaacuccgcuaucgggaagauucaagacucucuaagcuccacagccucagcacugggaaaacuccaggacgucguuaaucagaacgcgcaggcccugaauacucuugugaagcaauugagcaguaacuuuggcgcuaucucuuccguacugaaugauauauuaagccgacucgacaagguggaagccgagguccagaucgauagacugauuaccgguaggcuucagucgcugcaaacguacgugacacagcaguugauccgcgcagcugagauucgggccucagcaaaccucgccgcuaccaaaaugucugaaugcguucuggggcagaguaagagaguggacuucuguggaaaaggcuaccaccuaauguccuuuccccaaagcgcgccacauggugucguguuccugcacguuacuuaugugccggcccaggagaagaauuuuaccacagcuccugcaaucugccacgauggcaaagcccauuuccccagggaaggggucuuuguaucuaacggaacucacugguucgugacccagcgcaauuuuuacgagccacagauaauuacaacggacaacaccuuccucagcggcaauugugauguugugaucgggaucgucaacaauacuguguaugacccccugcaaccugagcuugauuccuucaaggaagaguuggacaaauacuuuaagaaccauacaucaccagauguagaccugggagauauuaguggcaucaaugccagcguggucaacauucagaaggaaauagaccgauuaaaugagguugcuaaaaaccucaacgaaucucugaucgaccuucaggagcuggguaaguaugagcaguacauuaaauggcccugguauaucuggcuaggguucauugcaggacucaucgccauagugauggugaccaucaugcugugcuguaugacuuccugcuguucaugcuugaagggcuguugcaguugugguagcugcugcaaauuugaugaagacgauuccgagccuguccugaagggcgugaaguuacacuacacaugaggacuagucccuguucccagagcccacuuuuuuuucuuuuuuugaaauaaaauagccugucuuucagaucucaaaggcucuuuucagagccaccaaaaaaaaaaaaaaaaaaaaaaaaaaaaaaaaaaaaaaaaaaaaaaaaaaaaaaaaaaaaaaaaaaaaaaaaaaaaaaaaaaaaaaaaaaaaaaaaaaaaa

SEQ ID NO: 12532 - RNA, 4094 nt, Artificial Sequence
  SARS-CoV-2/USA/UT-00034/2020__EPI_ISL_417977 spike protein mRNA human (1-1273)
aggagagucccgcagucggcguccagcggcucugcuuguucgugugugugucguugcaggccuuauucaagcuuaccauguucguguuucugguccuccuuccccugguuagcucccagugcgugaacuugaccacaagaacucaauuaccuccagccuacacuaauucuuucaccaggggcguauauuacccggacaagguguuucggucaaguguccugcacagcacacaggaucuauuccuccccuuuuucuccaacgugacuugguuucaugcuauccacguuucugggaccaauggaacaaaacgcuucgacaacccugugcugccauuuaaugauggugucuauuucgcaucgaccgagaagucaaacauuauacgaggcuggaucuuugggacuacacuugacagcaaaacccagagucuguugauugugaauaacgccacgaauguaguuaucaaggugugugaguuccaguuuugcaacgaucccuuccucggagucuacuauuacaaaaauaacaaguccuggauggagucugaguuccguguguauagcuccgcgaauaacuguacuuuugaguacgugucacaaccuuuccugauggaccuggaaggcaagcaggguaauuuuaaaaaccucagagaguucgucuuuaagaacauugauggguacuucaaaaucuauaguaagcauaccccaauaaauuuaguuagggaccugccccagggauuuagcgcucuugagccuuugguggaucugccaaucggcauuaacaucacacgguuccagacucuacucgcccugcaccgcucuuaccuuaccccgggcgacuccucaagcggguggacagcaggagccgcugcauauuacguagguuaucugcaacccagaaccuuuuugcucaaauacaaugaaaacggcacgauuacugaugccguggacugcgcucuggauccuuuaagugagacaaaguguacccugaagucuuucacugucgaaaaagggaucuaucagacauccaauuuuagggugcagccaaccgagagcauaguucgguuccccaacauuacgaaucucugcccuuuuggagagguguucaacgccacccgcuucgcgucggucuacgcauggaaucgaaagagaaucucuaacuguguggccgacuacuccguacuuuauaauucagcuaguuuuagcacauucaaaugcuacggcguuuccccaacuaagcugaacgacuuguguuuuaccaauguguaugccgauucuuucgucauuaggggugacgaagugcggcagaucgcacccgggcaaacaggaaaaaucgcugauuacaacuauaagcuaccggacgauuuuacuggcugcgucauugccuggaauagcaacaaccuggacucaaaagugggcgggaauuacaacuaucucuaccgucuguuccgcaagaguaaucuuaagccuuuugagagagauauauccaccgaaaucuaccaggcgggaagcacacccuguaacgguguugagggcuucaauugcuauuuuccacugcagucuuacggguuccaaccuaccaacggagugggcuaucagcccuacaggguagucguguugucauuugaacuccugcaugccccagcaacuguuugcggucccaaaaagaguacgaauuuagugaaaaacaagugugucaauuucaacuuuaaugggcugacaggcaccggagugcuaacugagagcaacaaaaaguuccucccuuuccagcaguuuggccgggacauugcugauaccacagacgccguacgagauccacaaacccuggagauccuugacauaacuccgugcuccuucgggggagugucuguuauuacacccgguacgaauaccucgaaccaggucgcuguguuguaucagggcgugaauuguacugaagucccuguugccauccacgcagaccagcugacaccaaccuggcgcguguacagcacaggguccaacguguuucaaacuagagccggaugccucaucggcgcugagcacguaaacaauucauaugaaugugauauucccaucggugcggggauuugcgcaaguuaccagacccagacgaacucuccuaggcgggcccgcagcgucgcuucccagucaauaaucgccuacaccaugagccugggcgcagaaaauucuguggccuauuccaacaauaguauugcuaucccaacaaacuucacuaucagcguuaccacagaaauucuucccgugucuaugacuaagaccuccgucgacuguacgauguacauaugcggagauucaacagaguguaguaaucuguugcuccaauauggcagcuuuugcacccagcugaacagagccuuaacugggaucgcaguggagcaggacaaaaauacacaggaaguuuucgcgcaagugaagcagauuuacaaaaccccgccuaucaaggauuuuggagguuucaacuuuucgcagauucugccagaccccuccaaaccuucuaagaggagcuucaucgaggaucuacucuuuaauaagguaacucuggcugacgccggcuucauaaaacaauauggggauugucuuggagacaucgcagcccgugauuugauuugcgcucagaaguucaacggccugaccguccugcccccacucuuaacagacgaaaugaucgcccaguacacgucagcacugcuugcugguaccauuacgaguggguggacauuuggcgccggagcggccuugcagaucccuuucgcuaugcaaauggcauaucgguuuaauggcauaggggugacccagaacgugcucuacgagaaucagaaacugauugccaaccaguucaacuccgcuaucggaaagauucaagauucucuaagcuccacagccucagcacugggcaaacuccaggacgucguuaaucagaacgcgcaggcccugaauacucuugugaagcaauugagcaguaacuuuggugcuaucucuuccguacugaaugacauauuaagccgacucgauaagguggaagccgagguccagaucgacagacugauuaccgggaggcuucagucgcugcaaacguacgugacacagcaguugauccgcgcagcugagauucgggccucagcaaaccucgccgcuaccaaaaugucugaaugcguucugggacagaguaagagaguggauuucuguggcaaagguuaucaucuaauguccuuuccccaaagcgcgccacacggcgucguguuccugcauguuacuuacgugccggcccaggagaagaauuuuaccacagcuccugcaaucugccacgacgggaaagcccacuuccccagggaaggagucuuuguaucuaacggcacucauugguucgugacccagcgcaauuuuuaugagccacagauaauuacaacggauaacaccuucguuagcgggaauugugacguggucaucggaaucgugaacaauacuguauacgauccccuccaaccugagcuggacuccuucaaggaagaacuugauaaauauuuuaagaaccacacaucaccagacguggauuugggcgacauuagugguaucaaugccagcgucguuaacauucagaaggaaauagaucgacugaaugagguggcuaaaaacuuaaacgaaucucucaucgaccugcaggagcuugggaaguacgagcaguauauuaaauggcccugguacaucuggcugggauucauugcaggccuaaucgccauagugauggucaccaucaugcucugcuguaugacuuccugcuguucaugccugaaggguuguugcaguuguggcagcugcugcaaauuugacgaagaugacuccgagccuguguugaaggggguuaagcugcauuacacaugaggacuagucccuguucccagagcccacuuuuuuuucuuuuuuugaaauaaaauagccugucuuucagaucucaaaggcucuuuucagagccaccaaaaaaaaaaaaaaaaaaaaaaaaaaaaaaaaaaaaaaaaaaaaaaaaaaaaaaaaaaaaaaaaaaaaaaaaaaaaaaaaaaaaaaaaaaaaaaaaaaaaa

SEQ ID NO: 12533 - RNA, 4094 nt, Artificial Sequence
  SARS-CoV-2/USA/UT-00033/2020__EPI_ISL_417976 spike protein mRNA human (1-1273)
aggagagucccgcagucggcguccagcggcucugcuuguucgugugugugucguugcaggccuuauucaagcuuaccauguucguguuucugguccuccuuccccugguuagcucccagugcgugaacuugaccacaagaacucaauuaccuccagccuacacuaauucuuucaccaggggcguauauuacccggacaagguguuucggucaaguguccugcacagcacacaggaucuauuccuccccuuuuucuccaacgugacuugguuucaugcuauccacguuucugggaccaauggaacaaaacgcuucgacaacccugugcugccauuuaaugauggugucuauuucgcaucgaccgagaagucaaacauuauacgaggcuggaucuuugggacuacacuugacagcaaaacccagagucuguugauugugaauaacgccacgaauguaguuaucaaggugugugaguuccaguuuugcaacgaucccuuccucggagucuacuaucauaaaaauaacaaguccuggauggagucugaguuccguguguacagcuccgcgaauaacuguacuuuugaauaugugucacaaccuuuccugauggaccuggaaggcaagcaggguaauuuuaaaaaccucagagaguucgucuuuaagaacauugauggguacuucaaaaucuacaguaagcacaccccaauaaauuuaguuagggaccugccccagggauuuagcgcucuugagccuuugguggaucugccaaucggcauuaacaucacacgguuccagacucuacucgcccugcaucgcucuuaucuuaccccgggcgacuccucaagcgggcugacagcaggagccgcugcauacuauguagguuacuugcaacccagaaccuuucuccugaaauauaaugaaaacggcacgauuacugaugccguggacugcgcuuuagauccucugagugagacaaaguguacccucaagucuuucacugucgaaaaagggaucuaccagacauccaauuuuagggugcagccaaccgagagcauaguucgguuccccaacauuacgaaucuuugcccuuuuggagagguguucaacgccacccgcuucgcgucggucuaugcauggaaucgaaagagaaucucuaacuguguggccgacuacuccguacuguacaauucagcuaguuuuagcacauucaaaugcuauggcguuuccccaacuaaguugaacgaccuauguuuuaccaauguguacgccgauucuuucgucauuaggggugacgaagugcggcagaucgcacccgggcaaacaggaaaaaucgcugauuauaacuacaagcugccggacgauuuuacuggcugcgucauugccuggaauagcaacaaccucgacucaaaagugggcgggaauuauaacuaccuguaucgucuuuuccgcaagaguaaucugaagccuuuugagagagauauauccaccgaaaucuaccaggcgggaagcacacccuguaacgguguugagggcuucaauugcuacuuuccauugcagucuuauggguuccaaccuaccaacggagugggcuaccagcccuauaggguagucgugcucucauuugaacuguuacacgccccagcaacuguuugcggucccaaaaagaguacgaaucuggugaaaaacaagugugucaauuucaacuuuaaugggcuaacaggcaccggagugcucacugagagcaacaaaaaguuccugccuuuccagcaguuuggccgggacauugcugauaccacagacgccguacgagauccacaaacccuugagaucuuggacauaacuccgugcuccuucgggggagugucuguuauuacacccgguacgaauaccucgaaccaggucgcugugcuguaccagggcgugaauuguacugaagucccuguugccauccacgcagaccagcucacaccaaccuggcgcguguauagcacaggguccaacguguuucaaacuagagccggaugccugaucggcgcugagcauguaaacaauucauacgaaugugauauucccaucggugcggggauuugcgcaaguuaucagacccagacgaacucuccuaggcgggcccgcagcgucgcuucccagucaauaaucgccuacaccaugagccuuggcgcagaaaauucuguggccuacuccaacaauaguauugcuaucccaacaaacuucacuaucagcguuaccacagaaauucugcccgugucuaugacuaagaccuccgucgacuguacgauguauauaugcggagauucaacagaguguaguaauuugcuccugcaauacggcagcuuuugcacccaguuaaacagagcccugacugggaucgcaguggagcaggacaaaaauacacaggaaguuuucgcgcaagugaagcagauuuauaaaaccccgccuaucaaggauuuuggagguuucaacuuuucgcagauucuaccagaccccuccaaaccuucuaagaggagcuucaucgaggaucuccuguuuaauaagguaacucuugcugacgccggcuucauaaaacaauacggggauuguuugggagacaucgcagcccgugaucugauuugcgcucagaaguucaacggccucaccguccugcccccauuacugacagacgaaaugaucgcccaguauacgucagcacuuuuggcugguaccauuacgaguggguggacauuuggcgccggagcggcccuccagaucccuuucgcuaugcaaauggcauaccgguuuaauggcauaggggugacccagaacgugcuguaugagaaucagaaacuaauugccaaccaguucaacuccgcuaucggaaagauucaagauucucugagcuccacagccucagcacucggcaaacugcaggacgucguuaaucagaacgcgcaggcccuuaauacuuuggugaagcaacugagcaguaacuuuggugcuaucucuuccguauuaaaugacauacucagccgacuggauaagguggaagccgagguccagaucgacagacuuauuaccgggaggcugcagucguugcaaacguacgugacacagcagcucauccgcgcagcugagauucgggccucagcaaaccuggccgcuaccaaaaugucugaaugcguucuaggacagaguaagagaguggauuucuguggcaaagguuaccaccugauguccuuuccccaaagcgcgccacauggcgucguguuccuccacguuacuuaugugccggcccaggagaagaauuuuaccacagcuccugcaaucugccacgacgggaaagcccauuuccccagggaaggagucuuuguaucuaacggcacucacugguucgugacccagcgcaauuuuuacgagccacagauaauuacaacggauaacaccuucguuagcgggaauugugacguggucaucggaaucgugaacaauacuguauaugauccccugcaaccugagcuugacuccuucaaggaagaguuggauaaauacuuuaagaaccauacaucaccagacguggaucugggcgacauuagugguaucaaugccagcgucguuaacauucagaaggaaauagaucgauuaaaugagguggcuaaaaaccucaacgaaucucugaucgaccuucaggagcuggggaaguaugagcaguacauuaaauggcccugguauaucuggcuaggauucauugcaggccucaucgccauagugauggucaccaucaugcugugcuguaugacuuccugcuguucaugcuugaaggguuguugcaguuguggcagcugcugcaaauuugacgaagaugacuccgagccugugcugaaggggguuaaguuacacuacacaugaggacuagucccuguucccagagcccacuuuuuuuucuuuuuuugaaauaaaauagccugucuuucagaucucaaaggcucuuuucagagccaccaaaaaaaaaaaaaaaaaaaaaaaaaaaaaaaaaaaaaaaaaaaaaaaaaaaaaaaaaaaaaaaaaaaaaaaaaaaaaaaaaaaaaaaaaaaaaaaaaaaaa

SEQ ID NO: 12534 - RNA, 4094 nt, Artificial Sequence
  SARS-CoV-2/USA/WI-13/2020__EPI_ISL_417516 spike protein mRNA human (1-1273)
aggagagucccgcagucggcguccagcggcucugcuuguucgugugugugucguugcaggccuuauucaagcuuaccauguucguguuucugguccuccuuccccugguuagcucccagugcgugaacuugaccacaagaacucaauuaccuccagccuacacuaauucuuucaccaggggcguauauuacccggacaagguguuucggucaaguguccugcacagcacacaggaucuauuccuccccuuuuucuccaacgugacuugguuucaugcuauccacguuucugggaccaauggaacaaaacgcuucgacaacccugugcugccauuuaaugauggugucuauuucgcaucgaccgagaagucaaacauuauacgaggcuggaucuuugggacuacacuugacagcaaaacccagagucuguugauugugaauaacgccacgaauguaguuaucaaggugugugaguuccaguuuugcaacgaucccuuccucggagucuacuaucauaaaaauaacaaguccuggauggagucugaguuccguguguacagcuccgcgaauaacuguacuuuugaauaugugucacaaccuuuccugauggaccuggaaggcaagcaggguaauuuuaaaaaccucagagaguucgucuuuaagaacauugauggguacuucaaaaucuacaguaagcacaccccaauaaauuuaguuagggaccugccccagggauuuagcgcucuugagccuuugguggaucugccaaucggcauuaacaucacacgguuccagacucuacucgcccugcaucgcucuuaucuuaccccgggcgacuccucaagcggguggacagcaggagccgcugcauacuauguagguuaccugcaacccagaaccuuuuugcucaaauauaaugaaaacggcacgauuacugaugccguggacugcgcucuggauccuuuaagugagacaaaguguacccugaagucuuucacugucgaaaaagggaucuaccagacauccaauuuuagggugcucccaaccgagagcauaguucgguuccccaacauuacgaaucuuugcccuuuuggagagguguucaacgccacccgcuucgcgucggucuaugcauggaaucgaaagagaaucucuaacuguguggccgacuacuccguacuguacaauucagcuaguuuuagcacauucaaaugcuauggcguuuccccaacuaaguugaacgaccuauguuuuaccaauguguacgccgauucuuucgucauuaggggugacgaagugcggcagaucgcacccgggcagacaggaaaaaucgcugauuauaacuacaagcugccggacgauuuuacuggcugcgucauugccuggaauagcaacaaccucgacucaaaagugggcgggaauuauaacuaccuguaucgucuuuuccgcaagaguaaucugaagccuuuugagagagauauauccaccgaaaucuaccaagcgggaagcacacccuguaacgguguugagggcuucaauugcuacuuuccauugcagucuuauggguuccagccuaccaacggagugggcuaccaacccuauaggguagucgugcucucauuugaacuguuacacgccccagcaacuguuugcggucccaaaaagaguacgaaucuggugaaaaacaagugugucaauuucaacuuuaaugggcuaacaggcaccggagugcucacugagagcaacaaaaaguuccugccuuuccagcaguuuggccgggacauugcugauaccacagacgccguacgagauccacagacccuugagaucuuggacauaacuccgugcuccuucgggggagugucuguuauuacacccgguacgaauaccucgaaccaagucgcugugcuguaccagggcgugaauuguacugaagucccuguugccauccacgcagaccagcucacaccaaccuggcgcguguauagcacaggguccaacguguuucagacuagagccggaugccugaucggcgcugagcauguaaacaauucauacgaaugugauauucccaucggugcggggauuugcgcaaguuaucaaacccagacgaacucuccuaggcgggcccgcagcgucgcuucccagucaauaaucgccuacaccaugagccuuggcgcagaaaauucuguggccuacuccaacaauaguauugcuaucccaacaaacuucacuaucagcguuaccacagaaauucugcccgugucuaugacuaagaccuccgucgacuguacgauguauauaugcggagauucaacagaguguaguaauuugcuccugcaguacggcagcuuuugcacccaauuaaacagagcccugacugggaucgcaguggagcaggacaaaaauacacaggaaguuuucgcacaggugaagcaaauuuauaaaaccccgccuaucaaggauuuuggagguuucaacuuuucgcagauucuaccagaccccuccaaaccuucuaagaggagcuucaucgaggaucuccuguuuaauaagguaacucuugcugacgccggcuucauaaaacaguacggggauuguuugggagacaucgcagcccgugaucugauuugcgcucaaaaguucaacggccucaccguccugcccccauuacugacagacgaaaugaucgcccaguauacgucagcacuuuuggcugguaccauuacgaguggguggacauuuggcgccggagcggcccuccagaucccuuucgcuaugcagauggcauaccgguuuaauggcauaggggugacccaaaacgugcuguaugagaaucagaaacuaauugccaaccaguucaacuccgcuaucggaaagauucaggauucucugagcuccacagccucagcacucggcaaacugcaagacgucguuaaucagaacgcgcaggcccuuaauacuuuggugaagcagcugagcaguaacuuuggugcuaucucuuccguauuaaaugacauacucagccgacuggauaagguggaagccgagguccaaaucgacagacuuauuaccgggaggcugcagucguugcagacguacgugacacaacagcucauccgcgcagcugagauucgggccucagcaaaccuggccgcuaccaaaaugucugaaugcguucuaggacagaguaagagaguggauuucuguggcaaagguuaccaccugauguccuuuccccagagcgcgccacauggcgucguguuccuccacguuacuuaugugccggcccaagagaagaauuuuaccacagcgccugcuaucugccacgacgggaaagcccauuuccccagggaaggagucuuuguaucuaacggcacucacugguucgugacccagcgcaauuuuuacgagccacagauaauuacaacggauaacaccuucguuagcgggaauugugacguggucaucggaaucgugaacaauacuguauaugauccccugcagccugagcuugacuccuucaaggaagaguuggauaaauacuuuaagaaccauacaucaccagacguggaucugggcgacauuagugguaucaaugccagcgucguuaacauucaaaaggaaauagaucgauuaaaugagguggcuaaaaaccucaacgaaucucugaucgaccuucaggagcuggggaaguaugagcaguacauuaaauggcccugguauaucuggcuaggauucauugcaggccucaucgccauagugauggucaccaucaugcugugcuguaugacuuccugcuguucaugcuugaaggguuguugcaguuguggcagcugcugcaaauuugacgaagaugacuccgagccugugcugaaggggguuaaguuacacuacacaugaggacuagucccuguucccagagcccacuuuuuuuucuuuuuuugaaauaaaauagccugucuuucagaucucaaaggcucuuuucagagccaccaaaaaaaaaaaaaaaaaaaaaaaaaaaaaaaaaaaaaaaaaaaaaaaaaaaaaaaaaaaaaaaaaaaaaaaaaaaaaaaaaaaaaaaaaaaaaaaaaaaaa

SEQ ID NO: 12535 - RNA, 4091 nt, Artificial Sequence
  SARS-CoV-2/India/1-27/2020__EPI_ISL_413522 spike protein mRNA human (1-1272)
aggagagucccgcagucggcguccagcggcucugcuuguucgugugugugucguugcaggccuuauucaagcuuaccauguucguguuucugguccuccuuccccugguuagcucccagugcgugaacuugaccacaagaacucaauuaccuccagccuacacgaauagcuucaccaggggcguauauuacccggacaagguguuucggucaaguguccugcacagcacacaggaucuauuccuccccuuuuucuccaacgugacuugguuucaugcuauccacguuucugggaccaauggaacaaaacgcuucgacaacccugugcugccauuuaaugauggugucuauuucgcaucgaccgagaagucaaacauuauacgaggcuggaucuuugggacuacacuugacagcaaaacccagagucuguugauugugaauaacgccacgaauguaguuaucaaggugugugaguuccaguuuugcaacgaucccuuccucggagucuaccauaaaaauaacaaguccuggauggagucugaguuccguguguauagcuccgcgaauaacuguacuuuugaauacgugucacaaccuuuccugauggaccuggaaggcaagcaggguaauuuuaaaaaccucagagaguucgucuuuaagaacauugauggguauuucaaaaucuacaguaagcacaccccaauaaauuuaguuagggaccugccccagggauuuagcgcucuugagccuuugguggaucugccaaucggcauuaacaucacacgguuccagacucuacucgcccugcaucgcucuuaccuuaccccgggcgacuccucaagcggguggacagcaggagccgcugcauauuacguagguuaucugcaacccagaaccuuuuugcucaaauacaaugaaaacggcacgauuacugaugccguggacugcgcucuggauccuuuaagugagacaaaguguacccugaagucuuucacugucgaaaaagggaucuaucagacauccaauuuuagggugcagccaaccgagagcauaguucgguuccccaacauuacgaaucucugcccuuuuggagagguguucaacgccacccgcuucgcgucggucuacgcauggaaucgaaagagaaucucuaacuguguggccgacuauuccguacuuuacaauucagcuaguuuuagcacauucaaaugcuacggcguuuccccaacuaagcugaacgacuuguguuuuaccaauguguaugccgauucuuucgucauuaggggugacgaagugauccagaucgcacccgggcaaacaggaaaaauugcugauuacaacuauaagcuaccggacgauuuuacuggcugcgucauagccuggaauagcaacaaccuggacucaaaagugggcgggaauuacaacuaucucuaccggcuguuccguaagaguaaucuuaagccuuuugagcgcgauaucuccaccgaaauuuaucaggcgggaagcacacccuguaacgguguugagggcuucaauugcuacuuuccacugcagucuuacggguuccaaccuaccaacggagugggcuaucagcccuacagaguagucguguugucauuugaacuccugcacgccccagcaacuguuugcggucccaaaaagaguacgaauuuagugaaaaacaagugugucaauuucaacuuuaaugggcugacaggcaccggagugcuaacugagagcaacaaaaaguuccucccuuuccagcaguuuggcagggacaucgcugauaccacagacgccguacgggauccacaaacccuggagauacuugacauuacuccgugcuccuucgggggagugucuguuaucacacccgguacgaauaccucgaaccaggucgcuguguuguaucaggacgugaauuguacugaagucccuguugccauccacgcagaucagcugacaccaaccuggcgaguguacagcacaggcuccaacguguuucaaacucgcgccgggugccucauuggagcugagcauguaaacaauucauaugaaugugacauccccauuggcgcggguauaugcgcaaguuaccagacccagacgaacucuccuagaagggcccggagcgucgcuucccagucaaucauugccuauaccaugagccugggggcagaaaauucuguggccuacuccaacaauaguaucgcuaucccaacaaacuucacuauuagcguuaccacagaaauacuucccgugucuaugacuaagaccuccgucgauuguacgauguacaucugcggcgacucaacagaguguaguaaucuguugcuccaauauggaucuuuuugcacccagcugaaccgcgccuuaacuggcauugcaguggagcaggauaaaaauacacaggaaguuuucgcgcaagugaagcagaucuacaaaaccccgccuauuaaggacuuugggggauucaacuuuucgcagauccugccagaucccuccaaaccuucuaagagaaguuucauagaggaccuacucuuuaauaagguaacucuggcugaugccgguuucaucaaacaauauggcgacugucuuggggauauugcagccagggacuugaucugcgcucagaaguucaacggacugaccguccugcccccacucuuaacagaugaaaugauugcccaguacacgucagcacugcuugcuggcaccaucacuagcgguuggacauuuggggccggcgcggccuugcagauaccuuucgcuaugcaaauggcauaucguuuuaauggaauuggcgugacccagaacgugcucuacgagaaucagaaacugaucgccaaccaguucaacuccgcuauugggaagauccaagacucucuaagcuccacagccucagcacugggaaaacuccaggacgucguuaaucagaacgcgcaggcccugaauacucuugugaagcaauugagcaguaacuuuggcgcuauaucuuccguacugaaugauaucuuaagccggcucgacaagguggaagccgagguccagauugaucgacugaucaccgguagacuucagucgcugcaaacguaugugacacagcaguugauuagggcagcugagauccgcgccucagcaaaccucgccgcuaccaaaaugucugaaugcguucuggggcagaguaagcggguggacuucuguggaaaaggcuaccaccuaauguccuuuccccaaagcgcgccacauggugucguguuccugcacguuacuuacgugccggcccaggagaagaauuuuaccacagcuccugcaauaugccacgauggcaaagcccauuuccccagagaaggggucuuuguaucuaacggaacucacugguucgugacccagaggaauuuuuaugagccacagauuaucacaacggacaacaccuucguuagcggcaauugugauguggucaucgggauugugaacaauacuguauacgacccccuccaaccugagcuggauuccuucaaggaggaacuugacaaauauuuuaagaaccauacaucaccagauguggacuugggagauaucaguggcauuaaugccagcgucguuaacauacagaaggaaaucgaccgccugaaugagguggcuaaaaacuuaaacgaaucucucauugaccugcaggagcuugguaaguacgagcaguauaucaaauggcccugguacauuuggcugggguucaucgcaggacuaauagccaucgugauggucaccauuaugcucugcuguaugacuuccugcuguucaugccugaagggcuguugcaguugugguagcugcugcaaauuugaugaagacgauuccgagccuguguugaagggcguuaagcugcacuauacaugaggacuagucccuguucccagagcccacuuuuuuuucuuuuuuugaaauaaaauagccugucuuucagaucucaaaggcucuuuucagagccaccaaaaaaaaaaaaaaaaaaaaaaaaaaaaaaaaaaaaaaaaaaaaaaaaaaaaaaaaaaaaaaaaaaaaaaaaaaaaaaaaaaaaaaaaaaaaaaaaaaaaa

SEQ ID NO: 12536 - RNA, 4076 nt, Artificial Sequence
  SARS-CoV-2/pangolin/Guangxi/P4L/2017__EPI_ISL_410538 spike protein mRNA human (1-1267)
aggagagucccgcagucggcguccagcggcucugcuuguucgugugugugucguugcaggccuuauucaagcuuaccauguucguguuucuguucguccucccccuuguuagcucccagugcgugaaccugaccacaagaacuggcaucccuccaggguacacgaauagcucaaccaggggaguauauuacccggacaagguguuucggaguagcauuuugcacuuaacacaagaucuguuccuacccuuuuucuccaacgucacuugguuuaauaccauaaacuaucaggguggcuucaaaaaguuugacaauccugugcucccauucaacgaugggguuuacuuugccucuacagagaaaucgaauaucauucgcggauggaucuucggcaccacucuggacgcucgaacacagucacuucugauugugaacaaugcaaccaacgucgugaucaagguaugugaauuucaguucugcacggaucccuucuuggguguuuauuaccauaauaacaauaaaacuuggguggagaacgaauuucgugucuauagcagugccaauaacuguaccuucgaguacauaucccaaccuuuucucauggaccuggaagggaagcagggaaacuucaagaaucugagagaguuuguguucaaaaacguggauggcuacuuuaagaucuauucuaaacacacaccaauugaccucgucagggauuuaccccggggcuucgcggcucuggagccucuuguugacuugccaaucgggauuaauaucacucgcuuucagacccugcuagcccuccauagaagcuaccugacaccgggaaaccuugaauccgguuggaccacgggcgcagccgcuuauuacgugggguaucugcagcaaaggacuuucuugcucucauacaaucagaacggaacaauaaccgaugcaguagacugcagucuggaucccuuaagcgagacuaaguguacacugaaaucucucaccguggaaaagggcauuuaucagacguccaauuuucggguccagccuaccaucucaauugugcgcuucccaaacaucacaaaucuuugccccuuuggugagguuuucaacgccagcaaguucgcuaguguguacgccuggaaucgaaaaagaaucucuaacugugucgcggacuacuccgugcuguauaauagcacuucguuuucuaccuucaagugcuacgggguauccccuacaaaauugaacgaccuauguuuuacuaauguuuaugcagauucauucguggucaagggagacgaggugaggcaaauugccccaggccagaccggcgucauagcugauuacaacuauaaacugcccgacgauuuuacagggugcgugaucgccuggaacaguguuaagcaggacgcacucaccggagguaauuacggcuaucuguaccggcuuuuccguaaaagcaagcugaagccguuugaacgcgauauuuccacugagaucuaccaagcugggucuacgccuuguaacggacaggugggcuugaauugcuauuacccccucgaaagauaugguuuccacccaacaaccgggguaaacuaccagccuuuuagggucgugguucugagcuucgaguuacugaauggccccgccacugugugcggaccaaaacuaucaaccacacucgucaaggacaaaugugugaacuuuaauuucaacggccugaccgggacuggaguacuuacaacgaguaagaaacaguuuuugcccuuccaacaguucggucgggauauauccgacaccacugaugcggugcgagacccucagacacuggaaauucucgacaucaccccaugcagcuuuggcgggguuucugucaucacaccgggaacuaauaccucaaaccagguggccgugcuguaucaagaugucaauuguacggagguucccauggcaauucaugcugagcagcuuaccccugccuggcgcguguacagugcuggcgccaacguguuccagacaagagcagguugccugguaggggccgaacacgucaauaacagcuaugagugugacaucccagugggcgcuggaauuugcgcguccuaccacucuaugucgagcuugagguccguuaaucagcggucaauaaucgcauacacuaugagucucggcgccgaaaacucuguggcuuauagcaacaauuccauugccauccccaccaacuuuacaaucucagucacuaccgagauucugccugugagcaugacgaagacaucuguugauuguaccauguacauaugcggggacuccaucgaauguaguaauuuacugcuacaauauggaucuuucugcacucagcucaaccgcgcacugacagguauugccguggagcaggauaagaauacccaggagguauuugcucaagucaaacagaucuacaagacuccacccauuaaagacuucggcggguuuaacuucucucagauccuuccggauccuuccaagccaucaaaaagaaguuuuauagaagacuugcuguucaauaaggugacccucgccgaugcaggauuuaucaagcaauauggcgacugucugggugauauugcggcuagggacuuaaucugcgcccagaaauucaacgggcugacagugcuucccccuuugcucacggaugagaugauugcacaguacaccagcgcccugcuagcuggcacuaucacaucgggauggaccuucggcgccggggcagcucugcagauacccuuugccaugcaaauggcguaucguuucaauggaauuggcgucacacagaacguucucuacgaaaaucagaagcugaucgccaaccaguuuaauuccgcuauugguaaaauccaagacucucuuagcucaacugcaagugccuuggggaagcugcaggacgugguaaaccagaaugcucaggccuuaaacacccucgugaaacaacuguccucuaacuucggagcaauaagcuccguccuuaaugauauccugucacgguuggacaagguggaggcggaaguucagauugaucgacucaucacgggcagacugcagagccuacaaacauacgugacccagcagcugauuagggccgcugagauccgcgccagugcaaaccucgcugccacuaagaugucugagugcguccugggucaguccaaacggguggacuuuuguggcaagggguaucaucuuaugagcuucccacaaucggcaccucacggaguuguguuuuugcaugucaccuacguacccgcccaggagaaaaauuucacaacugcuccagcgauaugccacgagggcaaggcccacuuuccgagagaagggguguucguuucaaacggaacccauugguuuauuacacagaggaauuucuaugagccucagaucaucacgaccgauaacacuuuugugucuggcaguugugacgucgugauugguaucguaaauaacacaguguacgauccccugcaaccagaguuagacuccuucaaagaagaacucgauaaguauuucaaaaaucacaccagccccgacgucgaucugggggacauuucuggaauaaacgcaagcguugugaauauccagaaggaaauugaucgccuuaacgagguggcuaagaaucugaacgaauccccuaucgaccuacaggagcucggcaaauacgagcaguauauuaaguggccaugguacaucuggcuggguuuuauagccggcuugaucgccauuaucauggucacuauuaugcugugcuguaugacaucaugcuguaguugcuuaaaaggguguugcagcuguggaucuugcugcaaguucgacgaagaugacuccgagcccgugcucaaaggcguuaagcugcauuacaccugaggacuagucccuguucccagagcccacuuuuuuuucuuuuuuugaaauaaaauagccugucuuucagaucucaaaggcucuuuucagagccaccaaaaaaaaaaaaaaaaaaaaaaaaaaaaaaaaaaaaaaaaaaaaaaaaaaaaaaaaaaaaaaaaaaaaaaaaaaaaaaaaaaaaaaaaaaaaaaaaaaaaa

SEQ ID NO: 12537 - RNA, 4076 nt, Artificial Sequence
  SARS-CoV-2/pangolin/Guangxi/P5L/2017__EPI_ISL_410540 spike protein mRNA human (1-1267)
aggagagucccgcagucggcguccagcggcucugcuuguucgugugugugucguugcaggccuuauucaagcuuaccauguucguguuucuguucguccucccccuuguuagcucccagugcgugaaccugaccacaagaacuggcaucccuccaggguacacgaauagcucaaccaggggaguauauuacccggacaagguguuucggaguagcauuuugcacuuaacacaagaucuguuccuacccuuuuucuccaacgucacuugguuuaauaccauaaacuaucaggguggcuucaaaaaguuugacaauccugugcucccauucaacgaugggguuuacuuugccucuacagagaaaucgaauaucauucgcggauggaucuucggcaccacucuggacgcucgaacacagucacuucugauugugaacaaugcaaccaacgucgugaucaagguaugugaauuucaguucugcacggaucccuucuuggguguuuauuaccauaauaacaauaaaacuuggguggagaacgaauuucgugucuauagcagugccaauaacuguaccuucgaguacauaucccaaccuuuucucauggaccuggaagggaagcagggaaacuucaagaaucugagagaguuuguguucaaaaacguggauggcuacuuuaagaucuauucuaaacacacaccaauugaccucgucagggauuuaccccggggcuucgcggcucuggagccucuuguugacuugccaaucgggauuaauaucacucgcuuucagacccugcuagcccuccauagaagcuaccugacaccgggaaaacuugaauccgguuggaccacgggcgcagccgcuuauuacgugggguaucugcagcaaaggacuuucuugcucucauacaaccagaauggaacaauaaccgaugcaguagacugcagucuggaucccuuaagcgagacuaaguguacacugaagucucucaccguggaaaagggcauuuaucagacguccaacuuucggguccagccuaccaucucaauugugcgcuucccaaauaucacaaaccuuugccccuuuggugagguuuucaaugccagcaaauucgcuaguguguacgccuggaaccgaaagagaaucucuaauugugucgcggacuacuccgugcuguauaacagcacuucguuuucuaccuucaaaugcuacgggguauccccuacaaaguugaaugaccuauguuuuacuaacguuuaugcagauucauucguggucaaaggagacgaggugaggcaaauugccccaggccagaccggcgucauagcugauuacaauuauaagcugcccgacgauuuuacagggugcgugaucgccuggaacaguguuaaacaggacgcacucaccggagguaacuacggcuaucuguaccggcuuuuccguaagagcaagcugaaaccguuugaacgcgauauuuccacugagaucuaccaagcugggucuacgccuuguaauggacaggugggcuugaacugcuauuacccccucgaaagauaugguuuccacccaacaaccgggguaaauuaccagccuuuuagggucgugguucugagcuucgaguuacugaacggccccgccacugugugcggaccaaagcuaucaaccacacucgucaaagacaagugugugaauuuuaacuucaauggccugaccgggacuggaguacuuacaacgaguaaaaagcaguuuuugcccuuccaacaguucggucgggauauauccgacaccacugaugcggugcgagacccucagacacuggaaauucucgacaucaccccaugcagcuuuggcgggguuucugucaucacaccgggaacuaacaccucaaaucagguggccgugcuguaucaagaugucaacuguacggagguucccauggcaauucaugcugagcagcuuaccccugccuggcgcguguacagugcuggcgccaauguguuccagacaagagcagguugccugguaggggccgaacacgucaacaauagcuaugagugugacaucccagugggcgcuggaauuugcgcguccuaccacucuaugucgagcuuuagguccguuaaccagcggucaauaaucgcauacacuaugaguuugggcgccgaaaauucuguggcuuauagcaacaacuccauugccauccccaccaauuucacaaucucagucacuaccgagauucucccugugagcaugacgaagacaucuguugauuguaccauguacauaugcggggacuccaucgaauguaguaaccuguuacugcaauauggaucuuuuugcacucagcuaaaucgcgcacucacagguauugccguggagcaggauaaaaacacccaggagguauucgcucaagucaagcagaucuacaaaacuccacccauuaaggacuuuggcggguucaauuuuucucagauccugccggauccuuccaaaccaucaaagagaaguuucauagaagaccuuuuguuuaacaaggugacccuggccgaugcaggauucaucaaacaauauggcgacugucucggugauauugcggcuagggaccugaucugcgcccagaaguucaauggguuaacagugcugcccccucuuuugacggaugagaugauugcacaguacaccagcgcccuccuggcuggcacuaucacaucgggauggaccuuuggcgccggggcagcucuacagauacccuucgccaugcaaauggcguaucguuuuaacggaauuggcgucacacagaauguucuguacgaaaaccagaaacucaucgccaaucaguucaacuccgcuauugguaagauccaagacucucugagcucaacugcaagugcccuugggaaauugcaggacgugguaaaucagaacgcucaggcccugaauaccuuagugaagcaacucuccucuaacuuuggagcaauaagcuccguccugaacgauauccuuucacggcuggacaagguggaggcggaaguucagauugaucgauugaucacgggcagacuccagagccugcaaacauacgugacccagcagcuaauuagggccgcugagauccgcgccagugcaaaucuggcugccacuaaaaugucugagugcguccucggucaguccaagcggguggacuucuguggcaaaggguaucaucugaugagcuuuccacaaucggcaccucacggaguuguguuccuucaugucaccuacguacccgcccaggaaaagaacuuuacaacugcuccagcgauaugccacgagggcaaagcccacuucccgagagaagggguguuuguuucaaauggaacccauugguucauuacacagaggaacuuuuaugagccucagaucaucacgaccgauaauacuuucgugucuggcaguugugacgucgugauugguaucguaaacaauacaguguacgaucccuugcaaccagagcuggacuccuucaaggaagaguuagauaaauauuuuaagaaccacaccagccccgacgucgaucucggggacauuucuggaauaaaugcaagcguugugaacauccagaaggaaauugaucgccugaaugagguggcuaaaaaccuuaaugaaucccugaucgaccuacaggagcucggcaaguacgagcaguauauuaaauggccuugguacaucuggcuggguuucauagccggcuugaucgccauuaucauggucacuauuaugcugugcuguaugacaucaugcuguaguugcuuaaagggguguugcagcuguggaucuugcugcaaauuugacgaagaugacuccgagccagugcucaagggcguuaagcugcauuacaccugaggacuagucccuguucccagagcccacuuuuuuuucuuuuuuugaaauaaaauagccugucuuucagaucucaaaggcucuuuucagagccaccaaaaaaaaaaaaaaaaaaaaaaaaaaaaaaaaaaaaaaaaaaaaaaaaaaaaaaaaaaaaaaaaaaaaaaaaaaaaaaaaaaaaaaaaaaaaaaaaaaaaa

SEQ ID NO: 12538 - RNA, 4076 nt, Artificial Sequence
  SARS-CoV-2/pangolin/Guangxi/P5E/2017__EPI_ISL_410541 spike protein mRNA human (1-1267)
aggagagucccgcagucggcguccagcggcucugcuuguucgugugugugucguugcaggccuuauucaagcuuaccauguucguguuucuguucguccucccccuuguuagcucccagugcgugaaccugaccacaagaacuggcaucccuccaggguacacaaauucuucaaccaggggaguauauuacccggacaagguguuucggaguagcauuuugcacuuaacacaagaucuguuccuacccuuuuucuccaacgucacuugguuuaauaccauaacauaucaggguggcucuaaaaaguucgacaacccugugcucccauuuaaugaugggguuuacuucgccucgaccgagaaaucaaacaucauucgcggauggaucuuuggcacuacacuggacgcucgaacccagagccuucugauugugaauaacgcaacgaaugucgugaucaagguaugugaguuccaguuuugcacugaucccuucuuggguguuuauuaccauaacaauaacaaaaccuggguggaaaaugaguuccgugucuauaguuccgccaacaauuguacauuugaauacauaucucaaccuuuccucauggaccuggaagggaagcagggaaacuuuaagaaccugagagaguucguguuuaaaaauguggauggcuacuucaagaucuauagcaaacacacuccaauugaccucgucagggauuuaccccggggcuuugcggcucuggagccucuuguugacuugccaaucgggauuaacaucacccgcuuccagacacugcuagcccuccauagauccuaccugaccccgggaaaacuugaaucagguuggacgacuggcgcagccgcuuauuacgugggguaucugcagcaaaggacauuuuugcucaguuacaaucagaacggaaccauaacugaugcaguagacugcagccuggaucccuuaucugagacaaaguguacccugaagucccucacgguggaaaagggcauuuaucagaccucaaauuuccggguccagccuacaaucagcauugugcgcuuuccaaacaucacuaaucuuugccccuucggugagguuuuuaacgccaguaaauucgcuucuguguacgccuggaaucgaaagagaaucuccaacugugucgcggacuacagcgugcuguauaauucgaccucuuucuccacauuuaaaugcuacgggguaucaccuacuaaguugaacgaccuauguuucaccaauguuuaugcagauaguuuuguggucaaaggagacgaggugaggcaaauugccccaggccagacaggcgucauagcugauuacaacuauaagcugcccgacgauuucaccgggugcgugaucgccuggaauagcguuaaacaggacgcacucacuggagauaacuacgguuaucuguaccggcuuuuucguaaguccaagcugaaaccguucgaacgcgacauuucuacggagaucuaccaagcuggcagcacaccuuguaacggacaggugggguugaauugcuauuacccccucgaaagauauggcuuucacccaaccacugguguaaacuaccagccuuucagggucgugguucugucauuugaguuacugaaugggcccgccaccgugugcggcccaaagcuaaguacaacccucgucaaagauaagugugugaacuucaauuuuaacggacugacuggcacagggguacuuacgaccuccaaaaagcaguucuugcccuuucaacaguucggacgggacauaagcgauacuacagacgcggugcgagacccucagacccuggaaauucucgauaucacaccaugcucuuucgguggcguuucagucaucacuccggggaccaauacgaguaaccagguggccgugcuguaucaagacgucaauuguaccgagguucccauggcaauucaugcugagcagcuuacgccugccuggcgcguguacagcgcuggagccaacguguuucagacuagagcaggcugccugguaggugccgaacacgucaauaacuccuaugagugugauaucccagugggggcuggcauuugcgcgucuuaccacucgaugagcuccuucaggucaguuaaucagcggaguauaaucgcauacaccaugucuuugggagccgaaaacagcguggcuuauuccaauaacucaauugccauccccacaaacuuuacuaucagcgucaccacggagauucucccugugucuaugacaaagaccuccguugacuguacuauguacauaugcggcgauaguaucgaauguagcaaucuguuacugcaauaugggucuuucugcacacagcuaaaccgcgcacucaccggaauugccguggagcaggacaaaaauacucaggagguauuugcucaagucaagcagaucuacaaaaccccacccauuaaggauuucgguggcuuuaacuucucccagauccugccggacccuucaaaaccaaguaagaggagcuuuauagaagaucuuuuguucaauaaggugacacuggccgacgcaggguuuaucaaacaauauggagauugucucggcgacauugcggcuagagaucugaucugcgcccagaaguucaacgguuuaacggugcugcccccucuuuugaccgacgagaugauugcacaguacacuucggcccuccuggcugggacaaucaccuccggcuggacauucggagccggcgcagcucuacagauacccuuugccaugcaaauggcguaucguuucaaugggauuggagucacucagaacguucuguacgaaaaucagaaacucaucgccaaccaguuuaauucugcuauuggcaagauccaagacagccugucaaguaccgcauccgcccuugguaaauugcaggaugugguaaaccagaaugcucaggcccugaacacguuagugaagcaacucucuagcaauuucggggcaauauccucaguccugaacgacauccuuagccggcuggauaagguggaggcggaaguucagauugaccgauugaucacaggaagacuccagagucugcaaaccuacgugacucagcagcuaauuagggccgcugagauccgcgccucugcaaaccuggcugccaccaaaauguccgagugcguccucggccagagcaagcggguggauuuuugugguaaaggcuaucaucugaugucguucccacaaucagcaccucacgggguuguguuucuucaugucacauacguacccgcccaggaaaagaauuucacuaccgcuccagcgauaugccacgagggaaaagcccacuuuccgagagaaggcguguucguuucuaacgggacacauugguuuauuacgcagaggaauuucuaugagccucagaucaucaccacugacaacacauuugugaguggauccugugaugucgugauuggcaucguaaauaacaccguguacgaccccuugcaaccagagcuggauagcuucaaggaagaguuagacaaauauuucaagaaucacacuucucccgaugucgaccucggugauauuagcgggauaaacgcauccguugugaauauccagaaggaaauugaccgccugaacgagguggcuaaaaaucuuaacgaaucacugaucgaccuacaggagcucggaaaguacgagcaguauauuaaauggccuugguacaucuggcugggcuuuauagccgguuugaucgccauuaucauggucacaauuaugcugugcuguaugaccaguugcuguagcugcuuaaagggcuguugcucuuguggguccugcugcaaauucgaugaagacgauucagagccagugcucaagggaguuaagcugcauuacacgugaggacuagucccuguucccagagcccacuuuuuuuucuuuuuuugaaauaaaauagccugucuuucagaucucaaaggcucuuuucagagccaccaaaaaaaaaaaaaaaaaaaaaaaaaaaaaaaaaaaaaaaaaaaaaaaaaaaaaaaaaaaaaaaaaaaaaaaaaaaaaaaaaaaaaaaaaaaaaaaaaaaaa

SEQ ID NO: 12539 - RNA, 4070 nt, Artificial Sequence
  SARS-CoV-2/pangolin/Guangxi/P1E/2017__EPI_ISL_410539 spike protein mRNA human (1-1265)
aggagagucccgcagucggcguccagcggcucugcuuguucgugugugugucguugcaggccuuauucaagcuuaccauguucguguuucuguucguccucccccuuguuagcucccagugcgugaaccugaccacaagaacuggcauccaaccuggguacaccaauucuucaacgaggggaguauauuacccagacaagguguuucggaguagcauuuugcacuuaacacaggaucuguuccuaccguuuuucuccaacgucacuugguuuaauaccauaaacuaucaggguggcuucaagaaguuugacaaucccgugcucccuuucaacgaugggguuuacuuugccucuacagagaaaucgaauaucauucgcggauggaucuucggcaccacucuggacgcucgaacacagucacuucugauugugaacaaugcaaccaacgucgugaucaagguaugugaauuucaauucugcacggauccauucuuggguguuuauuaccauaauaacaauaaaacuuggguggagaacgaauuucgugucuauagcagugccaauaacuguaccuucgaguacauaucccagcccuuucucauggaccuggaagggaagcagggaaacuucaagaaucugagagaguuuguguucaaaaacguggauggcuacuuuaagaucuauucuaaacacacaccuauugaccucgucagggauuuaccacggggcuucgcggcucuggagccccuuguugacuugccuaucgggauuaauaucacucgcuuucagacccugcuagcccuccauagaagcuaccugacaccaggaaaacuugaauccgguuggaccacgggcgcagccgcuuauuacgugggguaucugcaacagaggacuuucuugcucucauacaaccagaauggaacaauaaccgaugcaguagacugcagucuggauccguuaagcgagacuaaguguacacugaagucucucaccguggaaaagggcauuuaucagacguccaacuuucggguccaacccaccaucucaauugugcgcuucccuaauaucacaaaccuuugcccauuuggugagguuuucaaugccagcaaauucgcuaguguguacgccuggaaccgaaagagaaucucuaauugugucgcggacuacuccgugcuguauaacagcacuucguuuucuaccuucaaaugcuacgggguaucccccacaaaguugaaugaccuauguuuuacuaacguuuaugcagauucauucguggucaaaggagacgaggugaggcagauugccccuggccagaccggcgucauagcugauuacaauuauaagcugccagacgauuuuacagggugcgugaucgccuggaacaguguuaaacaagacgcacucaccggagguaacuaccuguaucggcuuuuccguaagagcaagcugaaacccuuugaacgcgauauuuccacugagaucuaccaggcuggcucuacgccguguaauggacaggugggguugaacugcuacuauccucucgaaagauacggcuuccaccccacaaccgguguaaauuaucagccauuuagggucgugguucugagcuucgaguuacugaacgggccugccacugugugcggccccaagcuaucaaccacacucgucaaagacaagugugugaauuuuaacuucaauggacugaccggcacugggguacuuacaacgaguaaaaagcaauuuuugccauuccagcaguucggacgggauauauccgacaccacugaugcggugcgagacccccagacacuggaaauucucgacaucaccccuugcagcuuugguggcguuucugucaucacaccagggacuaacaccucaaaucaaguggccgugcuguaccaggaugucaacuguacggagguuccgauggcaauucaugcugagcagcuuacccccgccuggcgcguguauagugcuggagccaauguguuccagacaagagcaggcugccugguaggugccgaacacgucaacaauagcuacgagugugacaucccugugggggcuggcauuugcgcguccuaucacucuaugucgagcuugagguccguuaaccaacggucaauaaucgcauacacuaugagucucggagccgaaaauucuguggcuuacagcaacaacuccauugccaucccaaccaauuuuacaaucucagucacuaccgagauucugcccgugagcaugacgaagacaucuguugauuguaccauguauauaugcggcgacuccaucgaauguaguaacuuacugcuacaguacgggagcuucugcacucagcucaaucgcgcacugacaggaauugccguggagcaggauaaaaacacccaagagguauuugcucaggucaagcagaucuauaaaacuccuccaauuaaggacuucgguggcuuuaauuucucucaaauccuucccgauccguccaaaccuucaaagagaaguuuuauagaagacuugcuguucaacaaggugacccucgccgaugcaggguuuaucaaacaguacggagacugucugggcgauauugcggcuagggacuuaaucugcgcccagaaguucaauggucugacagugcuuccacccuugcucacggaugagaugauugcacaguauaccagcgcccugcuagcugggacuaucacaucgggcuggaccuucggagccggcgcagcucugcaaauaccuuuugccaugcagauggcguaccguuucaacgggauuggagucacacagaauguucucuaugaaaaccagaaacugaucgccaaucaauuuaacuccgcuauuggcaagauccaggacucucuuagcucaacugcaagugccuuggguaaacugcaggacgugguaaaucagaacgcucaagccuuaaauacccucgugaagcagcuguccucuaacuucggggcaauaagcuccguccuuaacgauauccugucacgguuggacaagguggaggcggaaguucagauugaucgacucaucacgggaagacugcaaagccuacagacauacgugacccagcagcugauuagggccgcugagauccgcgccagugcaaaucucgcugccacuaaaaugucugagugcguccugggccaauccaagcggguggacuuuugugguaaaggcuaccaucuuaugagcuucccccagucggcaccacacgggguuguguuuuugcaugucaccuauguaccugcccaggaaaagaacuucacaacugcucccgcgauaugccacgagggaaaagcccacuuuccaagagaaggcguguucguuucaaaugggacccauugguuuauuacacagaggaacuucuacgagccgcaaaucaucacgaccgauaauacuuuugugucuggaaguugugacgucgugauuggcaucguaaacaauacaguguaugauccucugcagcccgaguuagacuccuucaaggaggaacucgauaaauacuucaagaaccacaccagcccagacgucgaucugggugacauuucugggauaaaugcaagcguugugaacauccagaaggaaauugaucgccuuaaugagguggcuaaaaaccugaaugaaucccuaaucgaccuccaggagcugggaaaguaugagcaauacauuaaauggcccugguauaucugguugggcuuuauagccggucugaucgccauuaucauggucacuauuauguuaugcuguaugacaucaugcuguaguugccucaagggcuguugcagcugugggucuugcugcaaauucgacgaagaugacuccgagccugugcugaagggaguuaaacuucauuacaccugaggacuagucccuguucccagagcccacuuuuuuuucuuuuuuugaaauaaaauagccugucuuucagaucucaaaggcucuuuucagagccaccaaaaaaaaaaaaaaaaaaaaaaaaaaaaaaaaaaaaaaaaaaaaaaaaaaaaaaaaaaaaaaaaaaaaaaaaaaaaaaaaaaaaaaaaaaaaaaaaaaaaa

SEQ ID NO: 12540 - RNA, 4094 nt, Artificial Sequence
  SARS-CoV-2/Wuhan/WIV05/2019__EPI_ISL_402128 spike protein mRNA gc mod (1-1273)
aggagagucccgcagucggcguccagcggcucugcuuguucgugugugugucguugcaggccuuauucaagcuuaccauguucguguuucuggugcugcugccccugguguccagccagugugugaaccugaccaccagaacacagcugccuccagccuacaccaacagcuucaccagaggcguguacuaccccgacaagguguucagauccagcgugcugcacucuacccaggaccuguuccugccuuucuucagcaacgugaccugguuccacgccauccacguguccggcaccaauggcaccaagagauucgacaaccccgugcugcccuucaacgacgggguguacuuugccagcaccgagaaguccaacaucaucagaggcuggaucuucggcaccacacuggacagcaagacccagagccugcugaucgugaacaacgccaccaacguggucaucaaagugugcgaguuccaguucugcaacgaccccuuccugggcgucuacuaccacaagaacaacaagagcuggauggaaagcgaguuccggguguacagcagcgccaacaacugcaccuucgaguacgugucccagccuuuccugauggaccuggaaggcaagcagggcaacuucaagaaccugcgcgaguucguguucaagaacaucgacggcuacuucaaaaucuacagcaagcacaccccuaucaaccucgugcgggaucugccucagggcuucucugcucuggaaccccugguggaucugcccaucggcaucaacaucacccgguuucagacacugcuggcccugcacagaagcuaccugacaccuggcgauagcagcagcggauggacagcuggugccgccgcuuacuaugugggcuaccugcagccuagaaccuuccugcugaaguacaacgagaacggcaccaucaccgacgccguggauugugcucuggauccucugagcgagacaaagugcacccugaaguccuucaccguggaaaagggcaucuaccagaccagcaacuuccgggugcagcccaccgaauccaucgugcgguuccccaauaucaccaaucugugccccuucggcgagguguucaaugccaccagauucgccucuguguacgccuggaaccggaagcggaucagcaauugcguggccgacuacuccgugcuguacaacuccgccagcuucagcaccuucaagugcuacggcguguccccuaccaagcugaacgaccugugcuucacaaacguguacgccgacagcuucgugauccggggagaugaagugcggcagauugccccuggacagacaggcaagaucgccgacuacaacuacaagcugcccgacgacuucaccggcugugugauugccuggaacagcaacaaccuggacuccaaagucggcggcaacuacaauuaccuguaccggcuguuccggaaguccaaucugaagcccuucgagcgggacaucagcaccgaaaucuaucaggccggcagcaccccuugcaacggcguggaaggcuucaacugcuacuucccacugcaguccuacggcuuucagcccacaaauggcgugggcuaucagcccuacagagugguggugcugagcuucgaacugcugcaugcuccugccacagugugcggcccuaagaaaagcaccaaucucgugaagaacaaaugcgugaacuucaacuucaacggccugaccggcaccggcgugcugacagagagcaacaagaaguuccugccauuccagcaguuuggccgggauaucgccgauaccacagacgccguuagagauccccagacacuggaaauccuggacaucaccccaugcagcuucggcggagugucugugaucaccccuggcaccaacaccagcaaucagguggcagugcuguaccaggacgugaacuguaccgaagugcccguggccauucacgccgaucagcugacaccuacauggcggguguacuccaccggcagcaauguguuucagaccagagccggcugucugaucggagccgagcacgugaacaauagcuacgagugcgacauccccaucggcgcuggcaucugugccagcuaccagacacagacaaacagccccagacgggcuagaagcguggccagccagagcaucauugccuacacaaugucucugggcgccgagaacagcguggccuacuccaacaacucuaucgcuauccccaccaacuucaccaucagcgugaccaccgagauccugccuguguccaugaccaagaccagcguggacugcaccauguacaucugcggcgauuccaccgagugcuccaaccugcugcugcaguacggcagcuucugcacccagcugaauagagcccugacagggaucgccguggaacaggacaagaacacccaagagguguucgcccaagugaagcaaaucuacaagaccccuccuaucaaggacuucggcggcuucaauuucagccagauucugcccgauccuagcaagcccagcaagcggagcuucaucgaggaccugcuguucaacaaagugacacuggccgacgccggcuucaucaagcaguauggcgauugucugggcgacauugccgccagggaucugauuugcgcccagaaguuuaacggacugacagugcugccuccucugcugaccgaugagaugaucgcccaguacacaucugcccugcuggccggcacaaucacaagcggcuggacauuuggagcuggcgccgcucugcagauccccuuugcuaugcagauggccuaccgguucaacggcaucggagugacccagaaugugcuguacgagaaccagaagcugaucgccaaccaguucaacagcgccaucggcaagauccaggacagccugagcagcacagcaagcgcccugggaaagcugcaggacguggucaaccagaaugcccaggcacugaacacccuggucaagcagcuguccuccaacuucggcgccaucagcucugugcugaacgauauccugagcagacuggacaaggucgaggccgaggugcagaucgacagacugaucacaggcagacugcagagccuccagacauacgugacccagcagcugaucagagccgccgagauuagagccucugccaaucuggccgccaccaagaugucugagugugugcugggccagagcaagagaguggacuuuugcggcaagggcuaccaccugaugagcuucccucagucugccccucacggcgugguguuucugcacgugacauaugugcccgcucaagagaagaauuucaccaccgcuccagccaucugccacgacggcaaagcccacuuuccuagagaaggcguguucguguccaacggcacccauugguucgugacacagcggaacuucuacgagccccagaucaucaccaccgacaacaccuucgugucuggcaacugcgacguugugaucggcauugugaacaauaccguguacgacccucugcagcccgagcuggacagcuucaaagaggaacuggacaaguacuuuaagaaccacacaagccccgacguggaccugggcgauaucagcggaaucaaugccagcgucgugaacauccagaaagagaucgaccggcugaacgagguggccaagaaucugaacgagagccugaucgaccugcaagaacuggggaaguacgagcaguacaucaaguggcccugguacaucuggcugggcuuuaucgccggacugauugccaucgugauggucacaaucaugcuguguugcaugaccagcugcuguagcugccugaagggcuguuguagcuguggcagcugcugcaaguucgacgaggacgauucugagcccgugcugaagggcgugaaacugcacuacaccugaggacuagucccuguucccagagcccacuuuuuuuucuuuuuuugaaauaaaauagccugucuuucagaucucaaaggcucuuuucagagccaccaaaaaaaaaaaaaaaaaaaaaaaaaaaaaaaaaaaaaaaaaaaaaaaaaaaaaaaaaaaaaaaaaaaaaaaaaaaaaaaaaaaaaaaaaaaaaaaaaaaaa

SEQ ID NO: 12541 - RNA, 4094 nt, Artificial Sequence; identical to SEQ ID NO: 151
  SARS-CoV-2/Wuhan/WIV05/2019__EPI_ISL_402128 spike protein mRNA gc mod (1-1273)(K986P_V987P) R10162

SEQ ID NO: 12542 - RNA, 4094 nt, Artificial Sequence
  SARS-CoV-2/Wuhan/WIV05/2019__EPI_ISL_402128 spike protein mRNA gc mod (1-1273)(K986P_V987P_T887WN_A1020W)
aggagagucccgcagucggcguccagcggcucugcuuguucgugugugugucguugcaggccuuauucaagcuuaccauguucguguuucuggugcugcugccccugguguccagccagugugugaaccugaccaccagaacacagcugccuccagccuacaccaacagcuucaccagaggcguguacuaccccgacaagguguucagauccagcgugcugcacucuacccaggaccuguuccugccuuucuucagcaacgugaccugguuccacgccauccacguguccggcaccaauggcaccaagagauucgacaaccccgugcugcccuucaacgacgggguguacuuugccagcaccgagaaguccaacaucaucagaggcuggaucuucggcaccacacuggacagcaagacccagagccugcugaucgugaacaacgccaccaacguggucaucaaagugugcgaguuccaguucugcaacgaccccuuccugggcgucuacuaccacaagaacaacaagagcuggauggaaagcgaguuccggguguacagcagcgccaacaacugcaccuucgaguacgugucccagccuuuccugauggaccuggaaggcaagcagggcaacuucaagaaccugcgcgaguucguguucaagaacaucgacggcuacuucaaaaucuacagcaagcacaccccuaucaaccucgugcgggaucugccucagggcuucucugcucuggaaccccugguggaucugcccaucggcaucaacaucacccgguuucagacacugcuggcccugcacagaagcuaccugacaccuggcgauagcagcagcggauggacagcuggugccgccgcuuacuaugugggcuaccugcagccuagaaccuuccugcugaaguacaacgagaacggcaccaucaccgacgccguggauugugcucuggauccucugagcgagacaaagugcacccugaaguccuucaccguggaaaagggcaucuaccagaccagcaacuuccgggugcagcccaccgaauccaucgugcgguuccccaauaucaccaaucugugccccuucggcgagguguucaaugccaccagauucgccucuguguacgccuggaaccggaagcggaucagcaauugcguggccgacuacuccgugcuguacaacuccgccagcuucagcaccuucaagugcuacggcguguccccuaccaagcugaacgaccugugcuucacaaacguguacgccgacagcuucgugauccggggagaugaagugcggcagauugccccuggacagacaggcaagaucgccgacuacaacuacaagcugcccgacgacuucaccggcugugugauugccuggaacagcaacaaccuggacuccaaagucggcggcaacuacaauuaccuguaccggcuguuccggaaguccaaucugaagcccuucgagcgggacaucagcaccgaaaucuaucaggccggcagcaccccuugcaacggcguggaaggcuucaacugcuacuucccacugcaguccuacggcuuucagcccacaaauggcgugggcuaucagcccuacagagugguggugcugagcuucgaacugcugcaugcuccugccacagugugcggcccuaagaaaagcaccaaucucgugaagaacaaaugcgugaacuucaacuucaacggccugaccggcaccggcgugcugacagagagcaacaagaaguuccugccauuccagcaguuuggccgggauaucgccgauaccacagacgccguuagagauccccagacacuggaaauccuggacaucaccccaugcagcuucggcggagugucugugaucaccccuggcaccaacaccagcaaucagguggcagugcuguaccaggacgugaacuguaccgaagugcccguggccauucacgccgaucagcugacaccuacauggcggguguacuccaccggcagcaauguguuucagaccagagccggcugucugaucggagccgagcacgugaacaauagcuacgagugcgacauccccaucggcgcuggcaucugugccagcuaccagacacagacaaacagccccagacgggcuagaagcguggccagccagagcaucauugccuacacaaugucucugggcgccgagaacagcguggccuacuccaacaacucuaucgcuauccccaccaacuucaccaucagcgugaccaccgagauccugccuguguccaugaccaagaccagcguggacugcaccauguacaucugcggcgauuccaccgagugcuccaaccugcugcugcaguacggcagcuucugcacccagcugaauagagcccugacagggaucgccguggaacaggacaagaacacccaagagguguucgcccaagugaagcaaaucuacaagaccccuccuaucaaggacuucggcggcuucaauuucagccagauucugcccgauccuagcaagcccagcaagcggagcuucaucgaggaccugcuguucaacaaagugacacuggccgacgccggcuucaucaagcaguauggcgauugucugggcgacauugccgccagggaucugauuugcgcccagaaguuuaacggacugacagugcugccuccucugcugaccgaugagaugaucgcccaguacacaucugcccugcuggccggcacaaucacaagcggcuggugguuuggagcuggcgccgcucugcagauccccuuugcuaugcagauggccuaccgguucaacggcaucggagugacccagaaugugcuguacgagaaccagaagcugaucgccaaccaguucaacagcgccaucggcaagauccaggacagccugagcagcacagcaagcgcccugggaaagcugcaggacguggucaaccagaaugcccaggcacugaacacccuggucaagcagcuguccuccaacuucggcgccaucagcucugugcugaacgauauccugagcagacuggacccuccugaggccgaggugcagaucgacagacugaucacaggcagacugcagagccuccagacauacgugacccagcagcugaucagagccgccgagauuagauggucugccaaucuggccgccaccaagaugucugagugugugcugggccagagcaagagaguggacuuuugcggcaagggcuaccaccugaugagcuucccucagucugccccucacggcgugguguuucugcacgugacauaugugcccgcucaagagaagaauuucaccaccgcuccagccaucugccacgacggcaaagcccacuuuccuagagaaggcguguucguguccaacggcacccauugguucgugacacagcggaacuucuacgagccccagaucaucaccaccgacaacaccuucgugucuggcaacugcgacguugugaucggcauugugaacaauaccguguacgacccucugcagcccgagcuggacagcuucaaagaggaacuggacaaguacuuuaagaaccacacaagccccgacguggaccugggcgauaucagcggaaucaaugccagcgucgugaacauccagaaagagaucgaccggcugaacgagguggccaagaaucugaacgagagccugaucgaccugcaagaacuggggaaguacgagcaguacaucaaguggcccugguacaucuggcugggcuuuaucgccggacugauugccaucgugauggucacaaucaugcuguguugcaugaccagcugcuguagcugccugaagggcuguuguagcuguggcagcugcugcaaguucgacgaggacgauucugagcccgugcugaagggcgugaaacugcacuacaccugaggacuagucccuguucccagagcccacuuuuuuuucuuuuuuugaaauaaaauagccugucuuucagaucucaaaggcucuuuucagagccaccaaaaaaaaaaaaaaaaaaaaaaaaaaaaaaaaaaaaaaaaaaaaaaaaaaaaaaaaaaaaaaaaaaaaaaaaaaaaaaaaaaaaaaaaaaaaaaaaaaaaa

SEQ ID NO: 12543 - RNA, 4094 nt, Artificial Sequence
  SARS-CoV-2/Wuhan/WIV05/2019__EPI_ISL_402128 spike protein mRNA gc mod (1-1273)(K986P_V987P_P1069F)
aggagagucccgcagucggcguccagcggcucugcuuguucgugugugugucguugcaggccuuauucaagcuuaccauguucguguuucuggugcugcugccccugguguccagccagugugugaaccugaccaccagaacacagcugccuccagccuacaccaacagcuucaccagaggcguguacuaccccgacaagguguucagauccagcgugcugcacucuacccaggaccuguuccugccuuucuucagcaacgugaccugguuccacgccauccacguguccggcaccaauggcaccaagagauucgacaaccccgugcugcccuucaacgacgggguguacuuugccagcaccgagaaguccaacaucaucagaggcuggaucuucggcaccacacuggacagcaagacccagagccugcugaucgugaacaacgccaccaacguggucaucaaagugugcgaguuccaguucugcaacgaccccuuccugggcgucuacuaccacaagaacaacaagagcuggauggaaagcgaguuccggguguacagcagcgccaacaacugcaccuucgaguacgugucccagccuuuccugauggaccuggaaggcaagcagggcaacuucaagaaccugcgcgaguucguguucaagaacaucgacggcuacuucaaaaucuacagcaagcacaccccuaucaaccucgugcgggaucugccucagggcuucucugcucuggaaccccugguggaucugcccaucggcaucaacaucacccgguuucagacacugcuggcccugcacagaagcuaccugacaccuggcgauagcagcagcggauggacagcuggugccgccgcuuacuaugugggcuaccugcagccuagaaccuuccugcugaaguacaacgagaacggcaccaucaccgacgccguggauugugcucuggauccucugagcgagacaaagugcacccugaaguccuucaccguggaaaagggcaucuaccagaccagcaacuuccgggugcagcccaccgaauccaucgugcgguuccccaauaucaccaaucugugccccuucggcgagguguucaaugccaccagauucgccucuguguacgccuggaaccggaagcggaucagcaauugcguggccgacuacuccgugcuguacaacuccgccagcuucagcaccuucaagugcuacggcguguccccuaccaagcugaacgaccugugcuucacaaacguguacgccgacagcuucgugauccggggagaugaagugcggcagauugccccuggacagacaggcaagaucgccgacuacaacuacaagcugcccgacgacuucaccggcugugugauugccuggaacagcaacaaccuggacuccaaagucggcggcaacuacaauuaccuguaccggcuguuccggaaguccaaucugaagcccuucgagcgggacaucagcaccgaaaucuaucaggccggcagcaccccuugcaacggcguggaaggcuucaacugcuacuucccacugcaguccuacggcuuucagcccacaaauggcgugggcuaucagcccuacagagugguggugcugagcuucgaacugcugcaugcuccugccacagugugcggcccuaagaaaagcaccaaucucgugaagaacaaaugcgugaacuucaacuucaacggccugaccggcaccggcgugcugacagagagcaacaagaaguuccugccauuccagcaguuuggccgggauaucgccgauaccacagacgccguuagagauccccagacacuggaaauccuggacaucaccccaugcagcuucggcggagugucugugaucaccccuggcaccaacaccagcaaucagguggcagugcuguaccaggacgugaacuguaccgaagugcccguggccauucacgccgaucagcugacaccuacauggcggguguacuccaccggcagcaauguguuucagaccagagccggcugucugaucggagccgagcacgugaacaauagcuacgagugcgacauccccaucggcgcuggcaucugugccagcuaccagacacagacaaacagccccagacgggcuagaagcguggccagccagagcaucauugccuacacaaugucucugggcgccgagaacagcguggccuacuccaacaacucuaucgcuauccccaccaacuucaccaucagcgugaccaccgagauccugccuguguccaugaccaagaccagcguggacugcaccauguacaucugcggcgauuccaccgagugcuccaaccugcugcugcaguacggcagcuucugcacccagcugaauagagcccugacagggaucgccguggaacaggacaagaacacccaagagguguucgcccaagugaagcaaaucuacaagaccccuccuaucaaggacuucggcggcuucaauuucagccagauucugcccgauccuagcaagcccagcaagcggagcuucaucgaggaccugcuguucaacaaagugacacuggccgacgccggcuucaucaagcaguauggcgauugucugggcgacauugccgccagggaucugauuugcgcccagaaguuuaacggacugacagugcugccuccucugcugaccgaugagaugaucgcccaguacacaucugcccugcuggccggcacaaucacaagcggcuggacauuuggagcuggcgccgcucugcagauccccuuugcuaugcagauggccuaccgguucaacggcaucggagugacccagaaugugcuguacgagaaccagaagcugaucgccaaccaguucaacagcgccaucggcaagauccaggacagccugagcagcacagcaagcgcccugggaaagcugcaggacguggucaaccagaaugcccaggcacugaacacccuggucaagcagcuguccuccaacuucggcgccaucagcucugugcugaacgauauccugagcagacuggacccuccugaggccgaggugcagaucgacagacugaucacaggcagacugcagagccuccagacauacgugacccagcagcugaucagagccgccgagauuagagccucugccaaucuggccgccaccaagaugucugagugugugcugggccagagcaagagaguggacuuuugcggcaagggcuaccaccugaugagcuucccucagucugccccucacggcgugguguuucugcacgugacauauguguucgcucaagagaagaauuucaccaccgcuccagccaucugccacgacggcaaagcccacuuuccuagagaaggcguguucguguccaacggcacccauugguucgugacacagcggaacuucuacgagccccagaucaucaccaccgacaacaccuucgugucuggcaacugcgacguugugaucggcauugugaacaauaccguguacgacccucugcagcccgagcuggacagcuucaaagaggaacuggacaaguacuuuaagaaccacacaagccccgacguggaccugggcgauaucagcggaaucaaugccagcgucgugaacauccagaaagagaucgaccggcugaacgagguggccaagaaucugaacgagagccugaucgaccugcaagaacuggggaaguacgagcaguacaucaaguggcccugguacaucuggcugggcuuuaucgccggacugauugccaucgugauggucacaaucaugcuguguugcaugaccagcugcuguagcugccugaagggcuguuguagcuguggcagcugcugcaaguucgacgaggacgauucugagcccgugcugaagggcgugaaacugcacuacaccugaggacuagucccuguucccagagcccacuuuuuuuucuuuuuuugaaauaaaauagccugucuuucagaucucaaaggcucuuuucagagccaccaaaaaaaaaaaaaaaaaaaaaaaaaaaaaaaaaaaaaaaaaaaaaaaaaaaaaaaaaaaaaaaaaaaaaaaaaaaaaaaaaaaaaaaaaaaaaaaaaaaaa

SEQ ID NO: 12544 - RNA, 4094 nt, Artificial Sequence
  SARS-CoV-2/Wuhan/WIV05/2019__EPI_ISL_402128 spike protein mRNA gc mod (1-1273)(K986P_V987P_ H1048Q_H1064N_ H1083N_H1101N)
aggagagucccgcagucggcguccagcggcucugcuuguucgugugugugucguugcaggccuuauucaagcuuaccauguucguguuucuggugcugcugccccugguguccagccagugugugaaccugaccaccagaacacagcugccuccagccuacaccaacagcuucaccagaggcguguacuaccccgacaagguguucagauccagcgugcugcacucuacccaggaccuguuccugccuuucuucagcaacgugaccugguuccacgccauccacguguccggcaccaauggcaccaagagauucgacaaccccgugcugcccuucaacgacgggguguacuuugccagcaccgagaaguccaacaucaucagaggcuggaucuucggcaccacacuggacagcaagacccagagccugcugaucgugaacaacgccaccaacguggucaucaaagugugcgaguuccaguucugcaacgaccccuuccugggcgucuacuaccacaagaacaacaagagcuggauggaaagcgaguuccggguguacagcagcgccaacaacugcaccuucgaguacgugucccagccuuuccugauggaccuggaaggcaagcagggcaacuucaagaaccugcgcgaguucguguucaagaacaucgacggcuacuucaaaaucuacagcaagcacaccccuaucaaccucgugcgggaucugccucagggcuucucugcucuggaaccccugguggaucugcccaucggcaucaacaucacccgguuucagacacugcuggcccugcacagaagcuaccugacaccuggcgauagcagcagcggauggacagcuggugccgccgcuuacuaugugggcuaccugcagccuagaaccuuccugcugaaguacaacgagaacggcaccaucaccgacgccguggauugugcucuggauccucugagcgagacaaagugcacccugaaguccuucaccguggaaaagggcaucuaccagaccagcaacuuccgggugcagcccaccgaauccaucgugcgguuccccaauaucaccaaucugugccccuucggcgagguguucaaugccaccagauucgccucuguguacgccuggaaccggaagcggaucagcaauugcguggccgacuacuccgugcuguacaacuccgccagcuucagcaccuucaagugcuacggcguguccccuaccaagcugaacgaccugugcuucacaaacguguacgccgacagcuucgugauccggggagaugaagugcggcagauugccccuggacagacaggcaagaucgccgacuacaacuacaagcugcccgacgacuucaccggcugugugauugccuggaacagcaacaaccuggacuccaaagucggcggcaacuacaauuaccuguaccggcuguuccggaaguccaaucugaagcccuucgagcgggacaucagcaccgaaaucuaucaggccggcagcaccccuugcaacggcguggaaggcuucaacugcuacuucccacugcaguccuacggcuuucagcccacaaauggcgugggcuaucagcccuacagagugguggugcugagcuucgaacugcugcaugcuccugccacagugugcggcccuaagaaaagcaccaaucucgugaagaacaaaugcgugaacuucaacuucaacggccugaccggcaccggcgugcugacagagagcaacaagaaguuccugccauuccagcaguuuggccgggauaucgccgauaccacagacgccguuagagauccccagacacuggaaauccuggacaucaccccaugcagcuucggcggagugucugugaucaccccuggcaccaacaccagcaaucagguggcagugcuguaccaggacgugaacuguaccgaagugcccguggccauucacgccgaucagcugacaccuacauggcggguguacuccaccggcagcaauguguuucagaccagagccggcugucugaucggagccgagcacgugaacaauagcuacgagugcgacauccccaucggcgcuggcaucugugccagcuaccagacacagacaaacagccccagacgggcuagaagcguggccagccagagcaucauugccuacacaaugucucugggcgccgagaacagcguggccuacuccaacaacucuaucgcuauccccaccaacuucaccaucagcgugaccaccgagauccugccuguguccaugaccaagaccagcguggacugcaccauguacaucugcggcgauuccaccgagugcuccaaccugcugcugcaguacggcagcuucugcacccagcugaauagagcccugacagggaucgccguggaacaggacaagaacacccaagagguguucgcccaagugaagcaaaucuacaagaccccuccuaucaaggacuucggcggcuucaauuucagccagauucugcccgauccuagcaagcccagcaagcggagcuucaucgaggaccugcuguucaacaaagugacacuggccgacgccggcuucaucaagcaguauggcgauugucugggcgacauugccgccagggaucugauuugcgcccagaaguuuaacggacugacagugcugccuccucugcugaccgaugagaugaucgcccaguacacaucugcccugcuggccggcacaaucacaagcggcuggacauuuggagcuggcgccgcucugcagauccccuuugcuaugcagauggccuaccgguucaacggcaucggagugacccagaaugugcuguacgagaaccagaagcugaucgccaaccaguucaacagcgccaucggcaagauccaggacagccugagcagcacagcaagcgcccugggaaagcugcaggacguggucaaccagaaugcccaggcacugaacacccuggucaagcagcuguccuccaacuucggcgccaucagcucugugcugaacgauauccugagcagacuggacccuccugaggccgaggugcagaucgacagacugaucacaggcagacugcagagccuccagacauacgugacccagcagcugaucagagccgccgagauuagagccucugccaaucuggccgccaccaagaugucugagugugugcugggccagagcaagagaguggacuuuugcggcaagggcuaccagcugaugagcuucccucagucugccccucacggcgugguguuucugaacgugacauaugugcccgcucaagagaagaauuucaccaccgcuccagccaucugcaacgacggcaaagcccacuuuccuagagaaggcguguucguguccaacggcaccaacugguucgugacacagcggaacuucuacgagccccagaucaucaccaccgacaacaccuucgugucuggcaacugcgacguugugaucggcauugugaacaauaccguguacgacccucugcagcccgagcuggacagcuucaaagaggaacuggacaaguacuuuaagaaccacacaagccccgacguggaccugggcgauaucagcggaaucaaugccagcgucgugaacauccagaaagagaucgaccggcugaacgagguggccaagaaucugaacgagagccugaucgaccugcaagaacuggggaaguacgagcaguacaucaaguggcccugguacaucuggcugggcuuuaucgccggacugauugccaucgugauggucacaaucaugcuguguugcaugaccagcugcuguagcugccugaagggcuguuguagcuguggcagcugcugcaaguucgacgaggacgauucugagcccgugcugaagggcgugaaacugcacuacaccugaggacuagucccuguucccagagcccacuuuuuuuucuuuuuuugaaauaaaauagccugucuuucagaucucaaaggcucuuuucagagccaccaaaaaaaaaaaaaaaaaaaaaaaaaaaaaaaaaaaaaaaaaaaaaaaaaaaaaaaaaaaaaaaaaaaaaaaaaaaaaaaaaaaaaaaaaaaaaaaaaaaaa

SEQ ID NO: 12545 - RNA, 4094 nt, Artificial Sequence
  SARS-CoV-2/Wuhan/WIV05/2019__EPI_ISL_402128 spike protein mRNA gc mod (1-1273)(I712C_T1077C)
aggagagucccgcagucggcguccagcggcucugcuuguucgugugugugucguugcaggccuuauucaagcuuaccauguucguguuucuggugcugcugccccugguguccagccagugugugaaccugaccaccagaacacagcugccuccagccuacaccaacagcuucaccagaggcguguacuaccccgacaagguguucagauccagcgugcugcacucuacccaggaccuguuccugccuuucuucagcaacgugaccugguuccacgccauccacguguccggcaccaauggcaccaagagauucgacaaccccgugcugcccuucaacgacgggguguacuuugccagcaccgagaaguccaacaucaucagaggcuggaucuucggcaccacacuggacagcaagacccagagccugcugaucgugaacaacgccaccaacguggucaucaaagugugcgaguuccaguucugcaacgaccccuuccugggcgucuacuaccacaagaacaacaagagcuggauggaaagcgaguuccggguguacagcagcgccaacaacugcaccuucgaguacgugucccagccuuuccugauggaccuggaaggcaagcagggcaacuucaagaaccugcgcgaguucguguucaagaacaucgacggcuacuucaaaaucuacagcaagcacaccccuaucaaccucgugcgggaucugccucagggcuucucugcucuggaaccccugguggaucugcccaucggcaucaacaucacccgguuucagacacugcuggcccugcacagaagcuaccugacaccuggcgauagcagcagcggauggacagcuggugccgccgcuuacuaugugggcuaccugcagccuagaaccuuccugcugaaguacaacgagaacggcaccaucaccgacgccguggauugugcucuggauccucugagcgagacaaagugcacccugaaguccuucaccguggaaaagggcaucuaccagaccagcaacuuccgggugcagcccaccgaauccaucgugcgguuccccaauaucaccaaucugugccccuucggcgagguguucaaugccaccagauucgccucuguguacgccuggaaccggaagcggaucagcaauugcguggccgacuacuccgugcuguacaacuccgccagcuucagcaccuucaagugcuacggcguguccccuaccaagcugaacgaccugugcuucacaaacguguacgccgacagcuucgugauccggggagaugaagugcggcagauugccccuggacagacaggcaagaucgccgacuacaacuacaagcugcccgacgacuucaccggcugugugauugccuggaacagcaacaaccuggacuccaaagucggcggcaacuacaauuaccuguaccggcuguuccggaaguccaaucugaagcccuucgagcgggacaucagcaccgaaaucuaucaggccggcagcaccccuugcaacggcguggaaggcuucaacugcuacuucccacugcaguccuacggcuuucagcccacaaauggcgugggcuaucagcccuacagagugguggugcugagcuucgaacugcugcaugcuccugccacagugugcggcccuaagaaaagcaccaaucucgugaagaacaaaugcgugaacuucaacuucaacggccugaccggcaccggcgugcugacagagagcaacaagaaguuccugccauuccagcaguuuggccgggauaucgccgauaccacagacgccguuagagauccccagacacuggaaauccuggacaucaccccaugcagcuucggcggagugucugugaucaccccuggcaccaacaccagcaaucagguggcagugcuguaccaggacgugaacuguaccgaagugcccguggccauucacgccgaucagcugacaccuacauggcggguguacuccaccggcagcaauguguuucagaccagagccggcugucugaucggagccgagcacgugaacaauagcuacgagugcgacauccccaucggcgcuggcaucugugccagcuaccagacacagacaaacagccccagacgggcuagaagcguggccagccagagcaucauugccuacacaaugucucugggcgccgagaacagcguggccuacuccaacaacucuugcgcuauccccaccaacuucaccaucagcgugaccaccgagauccugccuguguccaugaccaagaccagcguggacugcaccauguacaucugcggcgauuccaccgagugcuccaaccugcugcugcaguacggcagcuucugcacccagcugaauagagcccugacagggaucgccguggaacaggacaagaacacccaagagguguucgcccaagugaagcaaaucuacaagaccccuccuaucaaggacuucggcggcuucaauuucagccagauucugcccgauccuagcaagcccagcaagcggagcuucaucgaggaccugcuguucaacaaagugacacuggccgacgccggcuucaucaagcaguauggcgauugucugggcgacauugccgccagggaucugauuugcgcccagaaguuuaacggacugacagugcugccuccucugcugaccgaugagaugaucgcccaguacacaucugcccugcuggccggcacaaucacaagcggcuggacauuuggagcuggcgccgcucugcagauccccuuugcuaugcagauggccuaccgguucaacggcaucggagugacccagaaugugcuguacgagaaccagaagcugaucgccaaccaguucaacagcgccaucggcaagauccaggacagccugagcagcacagcaagcgcccugggaaagcugcaggacguggucaaccagaaugcccaggcacugaacacccuggucaagcagcuguccuccaacuucggcgccaucagcucugugcugaacgauauccugagcagacuggacaaggucgaggccgaggugcagaucgacagacugaucacaggcagacugcagagccuccagacauacgugacccagcagcugaucagagccgccgagauuagagccucugccaaucuggccgccaccaagaugucugagugugugcugggccagagcaagagaguggacuuuugcggcaagggcuaccaccugaugagcuucccucagucugccccucacggcgugguguuucugcacgugacauaugugcccgcucaagagaagaauuucaccugugcuccagccaucugccacgacggcaaagcccacuuuccuagagaaggcguguucguguccaacggcacccauugguucgugacacagcggaacuucuacgagccccagaucaucaccaccgacaacaccuucgugucuggcaacugcgacguugugaucggcauugugaacaauaccguguacgacccucugcagcccgagcuggacagcuucaaagaggaacuggacaaguacuuuaagaaccacacaagccccgacguggaccugggcgauaucagcggaaucaaugccagcgucgugaacauccagaaagagaucgaccggcugaacgagguggccaagaaucugaacgagagccugaucgaccugcaagaacuggggaaguacgagcaguacaucaaguggcccugguacaucuggcugggcuuuaucgccggacugauugccaucgugauggucacaaucaugcuguguugcaugaccagcugcuguagcugccugaagggcuguuguagcuguggcagcugcugcaaguucgacgaggacgauucugagcccgugcugaagggcgugaaacugcacuacaccugaggacuagucccuguucccagagcccacuuuuuuuucuuuuuuugaaauaaaauagccugucuuucagaucucaaaggcucuuuucagagccaccaaaaaaaaaaaaaaaaaaaaaaaaaaaaaaaaaaaaaaaaaaaaaaaaaaaaaaaaaaaaaaaaaaaaaaaaaaaaaaaaaaaaaaaaaaaaaaaaaaaaa

SEQ ID NO: 12546 - RNA, 4094 nt, Artificial Sequence
  SARS-CoV-2/Wuhan/WIV05/2019__EPI_ISL_402128 spike protein mRNA gc mod (1-1273)(I714C_Y1110C)
aggagagucccgcagucggcguccagcggcucugcuuguucgugugugugucguugcaggccuuauucaagcuuaccauguucguguuucuggugcugcugccccugguguccagccagugugugaaccugaccaccagaacacagcugccuccagccuacaccaacagcuucaccagaggcguguacuaccccgacaagguguucagauccagcgugcugcacucuacccaggaccuguuccugccuuucuucagcaacgugaccugguuccacgccauccacguguccggcaccaauggcaccaagagauucgacaaccccgugcugcccuucaacgacgggguguacuuugccagcaccgagaaguccaacaucaucagaggcuggaucuucggcaccacacuggacagcaagacccagagccugcugaucgugaacaacgccaccaacguggucaucaaagugugcgaguuccaguucugcaacgaccccuuccugggcgucuacuaccacaagaacaacaagagcuggauggaaagcgaguuccggguguacagcagcgccaacaacugcaccuucgaguacgugucccagccuuuccugauggaccuggaaggcaagcagggcaacuucaagaaccugcgcgaguucguguucaagaacaucgacggcuacuucaaaaucuacagcaagcacaccccuaucaaccucgugcgggaucugccucagggcuucucugcucuggaaccccugguggaucugcccaucggcaucaacaucacccgguuucagacacugcuggcccugcacagaagcuaccugacaccuggcgauagcagcagcggauggacagcuggugccgccgcuuacuaugugggcuaccugcagccuagaaccuuccugcugaaguacaacgagaacggcaccaucaccgacgccguggauugugcucuggauccucugagcgagacaaagugcacccugaaguccuucaccguggaaaagggcaucuaccagaccagcaacuuccgggugcagcccaccgaauccaucgugcgguuccccaauaucaccaaucugugccccuucggcgagguguucaaugccaccagauucgccucuguguacgccuggaaccggaagcggaucagcaauugcguggccgacuacuccgugcuguacaacuccgccagcuucagcaccuucaagugcuacggcguguccccuaccaagcugaacgaccugugcuucacaaacguguacgccgacagcuucgugauccggggagaugaagugcggcagauugccccuggacagacaggcaagaucgccgacuacaacuacaagcugcccgacgacuucaccggcugugugauugccuggaacagcaacaaccuggacuccaaagucggcggcaacuacaauuaccuguaccggcuguuccggaaguccaaucugaagcccuucgagcgggacaucagcaccgaaaucuaucaggccggcagcaccccuugcaacggcguggaaggcuucaacugcuacuucccacugcaguccuacggcuuucagcccacaaauggcgugggcuaucagcccuacagagugguggugcugagcuucgaacugcugcaugcuccugccacagugugcggcccuaagaaaagcaccaaucucgugaagaacaaaugcgugaacuucaacuucaacggccugaccggcaccggcgugcugacagagagcaacaagaaguuccugccauuccagcaguuuggccgggauaucgccgauaccacagacgccguuagagauccccagacacuggaaauccuggacaucaccccaugcagcuucggcggagugucugugaucaccccuggcaccaacaccagcaaucagguggcagugcuguaccaggacgugaacuguaccgaagugcccguggccauucacgccgaucagcugacaccuacauggcggguguacuccaccggcagcaauguguuucagaccagagccggcugucugaucggagccgagcacgugaacaauagcuacgagugcgacauccccaucggcgcuggcaucugugccagcuaccagacacagacaaacagccccagacgggcuagaagcguggccagccagagcaucauugccuacacaaugucucugggcgccgagaacagcguggccuacuccaacaacucuaucgcuugccccaccaacuucaccaucagcgugaccaccgagauccugccuguguccaugaccaagaccagcguggacugcaccauguacaucugcggcgauuccaccgagugcuccaaccugcugcugcaguacggcagcuucugcacccagcugaauagagcccugacagggaucgccguggaacaggacaagaacacccaagagguguucgcccaagugaagcaaaucuacaagaccccuccuaucaaggacuucggcggcuucaauuucagccagauucugcccgauccuagcaagcccagcaagcggagcuucaucgaggaccugcuguucaacaaagugacacuggccgacgccggcuucaucaagcaguauggcgauugucugggcgacauugccgccagggaucugauuugcgcccagaaguuuaacggacugacagugcugccuccucugcugaccgaugagaugaucgcccaguacacaucugcccugcuggccggcacaaucacaagcggcuggacauuuggagcuggcgccgcucugcagauccccuuugcuaugcagauggccuaccgguucaacggcaucggagugacccagaaugugcuguacgagaaccagaagcugaucgccaaccaguucaacagcgccaucggcaagauccaggacagccugagcagcacagcaagcgcccugggaaagcugcaggacguggucaaccagaaugcccaggcacugaacacccuggucaagcagcuguccuccaacuucggcgccaucagcucugugcugaacgauauccugagcagacuggacaaggucgaggccgaggugcagaucgacagacugaucacaggcagacugcagagccuccagacauacgugacccagcagcugaucagagccgccgagauuagagccucugccaaucuggccgccaccaagaugucugagugugugcugggccagagcaagagaguggacuuuugcggcaagggcuaccaccugaugagcuucccucagucugccccucacggcgugguguuucugcacgugacauaugugcccgcucaagagaagaauuucaccaccgcuccagccaucugccacgacggcaaagcccacuuuccuagagaaggcguguucguguccaacggcacccauugguucgugacacagcggaacuucugugagccccagaucaucaccaccgacaacaccuucgugucuggcaacugcgacguugugaucggcauugugaacaauaccguguacgacccucugcagcccgagcuggacagcuucaaagaggaacuggacaaguacuuuaagaaccacacaagccccgacguggaccugggcgauaucagcggaaucaaugccagcgucgugaacauccagaaagagaucgaccggcugaacgagguggccaagaaucugaacgagagccugaucgaccugcaagaacuggggaaguacgagcaguacaucaaguggcccugguacaucuggcugggcuuuaucgccggacugauugccaucgugauggucacaaucaugcuguguugcaugaccagcugcuguagcugccugaagggcuguuguagcuguggcagcugcugcaaguucgacgaggacgauucugagcccgugcugaagggcgugaaacugcacuacaccugaggacuagucccuguucccagagcccacuuuuuuuucuuuuuuugaaauaaaauagccugucuuucagaucucaaaggcucuuuucagagccaccaaaaaaaaaaaaaaaaaaaaaaaaaaaaaaaaaaaaaaaaaaaaaaaaaaaaaaaaaaaaaaaaaaaaaaaaaaaaaaaaaaaaaaaaaaaaaaaaaaaaa

SEQ ID NO: 12547 - RNA, 4094 nt, Artificial Sequence
  SARS-CoV-2/Wuhan/WIV05/2019__EPI_ISL_402128 spike protein mRNA gc mod (1-1273)(P715C_P1069C)
aggagagucccgcagucggcguccagcggcucugcuuguucgugugugugucguugcaggccuuauucaagcuuaccauguucguguuucuggugcugcugccccugguguccagccagugugugaaccugaccaccagaacacagcugccuccagccuacaccaacagcuucaccagaggcguguacuaccccgacaagguguucagauccagcgugcugcacucuacccaggaccuguuccugccuuucuucagcaacgugaccugguuccacgccauccacguguccggcaccaauggcaccaagagauucgacaaccccgugcugcccuucaacgacgggguguacuuugccagcaccgagaaguccaacaucaucagaggcuggaucuucggcaccacacuggacagcaagacccagagccugcugaucgugaacaacgccaccaacguggucaucaaagugugcgaguuccaguucugcaacgaccccuuccugggcgucuacuaccacaagaacaacaagagcuggauggaaagcgaguuccggguguacagcagcgccaacaacugcaccuucgaguacgugucccagccuuuccugauggaccuggaaggcaagcagggcaacuucaagaaccugcgcgaguucguguucaagaacaucgacggcuacuucaaaaucuacagcaagcacaccccuaucaaccucgugcgggaucugccucagggcuucucugcucuggaaccccugguggaucugcccaucggcaucaacaucacccgguuucagacacugcuggcccugcacagaagcuaccugacaccuggcgauagcagcagcggauggacagcuggugccgccgcuuacuaugugggcuaccugcagccuagaaccuuccugcugaaguacaacgagaacggcaccaucaccgacgccguggauugugcucuggauccucugagcgagacaaagugcacccugaaguccuucaccguggaaaagggcaucuaccagaccagcaacuuccgggugcagcccaccgaauccaucgugcgguuccccaauaucaccaaucugugccccuucggcgagguguucaaugccaccagauucgccucuguguacgccuggaaccggaagcggaucagcaauugcguggccgacuacuccgugcuguacaacuccgccagcuucagcaccuucaagugcuacggcguguccccuaccaagcugaacgaccugugcuucacaaacguguacgccgacagcuucgugauccggggagaugaagugcggcagauugccccuggacagacaggcaagaucgccgacuacaacuacaagcugcccgacgacuucaccggcugugugauugccuggaacagcaacaaccuggacuccaaagucggcggcaacuacaauuaccuguaccggcuguuccggaaguccaaucugaagcccuucgagcgggacaucagcaccgaaaucuaucaggccggcagcaccccuugcaacggcguggaaggcuucaacugcuacuucccacugcaguccuacggcuuucagcccacaaauggcgugggcuaucagcccuacagagugguggugcugagcuucgaacugcugcaugcuccugccacagugugcggcccuaagaaaagcaccaaucucgugaagaacaaaugcgugaacuucaacuucaacggccugaccggcaccggcgugcugacagagagcaacaagaaguuccugccauuccagcaguuuggccgggauaucgccgauaccacagacgccguuagagauccccagacacuggaaauccuggacaucaccccaugcagcuucggcggagugucugugaucaccccuggcaccaacaccagcaaucagguggcagugcuguaccaggacgugaacuguaccgaagugcccguggccauucacgccgaucagcugacaccuacauggcggguguacuccaccggcagcaauguguuucagaccagagccggcugucugaucggagccgagcacgugaacaauagcuacgagugcgacauccccaucggcgcuggcaucugugccagcuaccagacacagacaaacagccccagacgggcuagaagcguggccagccagagcaucauugccuacacaaugucucugggcgccgagaacagcguggccuacuccaacaacucuaucgcuaucugcaccaacuucaccaucagcgugaccaccgagauccugccuguguccaugaccaagaccagcguggacugcaccauguacaucugcggcgauuccaccgagugcuccaaccugcugcugcaguacggcagcuucugcacccagcugaauagagcccugacagggaucgccguggaacaggacaagaacacccaagagguguucgcccaagugaagcaaaucuacaagaccccuccuaucaaggacuucggcggcuucaauuucagccagauucugcccgauccuagcaagcccagcaagcggagcuucaucgaggaccugcuguucaacaaagugacacuggccgacgccggcuucaucaagcaguauggcgauugucugggcgacauugccgccagggaucugauuugcgcccagaaguuuaacggacugacagugcugccuccucugcugaccgaugagaugaucgcccaguacacaucugcccugcuggccggcacaaucacaagcggcuggacauuuggagcuggcgccgcucugcagauccccuuugcuaugcagauggccuaccgguucaacggcaucggagugacccagaaugugcuguacgagaaccagaagcugaucgccaaccaguucaacagcgccaucggcaagauccaggacagccugagcagcacagcaagcgcccugggaaagcugcaggacguggucaaccagaaugcccaggcacugaacacccuggucaagcagcuguccuccaacuucggcgccaucagcucugugcugaacgauauccugagcagacuggacaaggucgaggccgaggugcagaucgacagacugaucacaggcagacugcagagccuccagacauacgugacccagcagcugaucagagccgccgagauuagagccucugccaaucuggccgccaccaagaugucugagugugugcugggccagagcaagagaguggacuuuugcggcaagggcuaccaccugaugagcuucccucagucugccccucacggcgugguguuucugcacgugacauaugugugugcucaagagaagaauuucaccaccgcuccagccaucugccacgacggcaaagcccacuuuccuagagaaggcguguucguguccaacggcacccauugguucgugacacagcggaacuucuacgagccccagaucaucaccaccgacaacaccuucgugucuggcaacugcgacguugugaucggcauugugaacaauaccguguacgacccucugcagcccgagcuggacagcuucaaagaggaacuggacaaguacuuuaagaaccacacaagccccgacguggaccugggcgauaucagcggaaucaaugccagcgucgugaacauccagaaagagaucgaccggcugaacgagguggccaagaaucugaacgagagccugaucgaccugcaagaacuggggaaguacgagcaguacaucaaguggcccugguacaucuggcugggcuuuaucgccggacugauugccaucgugauggucacaaucaugcuguguugcaugaccagcugcuguagcugccugaagggcuguuguagcuguggcagcugcugcaaguucgacgaggacgauucugagcccgugcugaagggcgugaaacugcacuacaccugaggacuagucccuguucccagagcccacuuuuuuuucuuuuuuugaaauaaaauagccugucuuucagaucucaaaggcucuuuucagagccaccaaaaaaaaaaaaaaaaaaaaaaaaaaaaaaaaaaaaaaaaaaaaaaaaaaaaaaaaaaaaaaaaaaaaaaaaaaaaaaaaaaaaaaaaaaaaaaaaaaaaa

SEQ ID NO: 12548 - RNA, 4094 nt, Artificial Sequence
  SARS-CoV-2/Wuhan/WIV05/2019__EPI_ISL_402128 spike protein mRNA gc mod (1-1273)(G889C_L1034C)
aggagagucccgcagucggcguccagcggcucugcuuguucgugugugugucguugcaggccuuauucaagcuuaccauguucguguuucuggugcugcugccccugguguccagccagugugugaaccugaccaccagaacacagcugccuccagccuacaccaacagcuucaccagaggcguguacuaccccgacaagguguucagauccagcgugcugcacucuacccaggaccuguuccugccuuucuucagcaacgugaccugguuccacgccauccacguguccggcaccaauggcaccaagagauucgacaaccccgugcugcccuucaacgacgggguguacuuugccagcaccgagaaguccaacaucaucagaggcuggaucuucggcaccacacuggacagcaagacccagagccugcugaucgugaacaacgccaccaacguggucaucaaagugugcgaguuccaguucugcaacgaccccuuccugggcgucuacuaccacaagaacaacaagagcuggauggaaagcgaguuccggguguacagcagcgccaacaacugcaccuucgaguacgugucccagccuuuccugauggaccuggaaggcaagcagggcaacuucaagaaccugcgcgaguucguguucaagaacaucgacggcuacuucaaaaucuacagcaagcacaccccuaucaaccucgugcgggaucugccucagggcuucucugcucuggaaccccugguggaucugcccaucggcaucaacaucacccgguuucagacacugcuggcccugcacagaagcuaccugacaccuggcgauagcagcagcggauggacagcuggugccgccgcuuacuaugugggcuaccugcagccuagaaccuuccugcugaaguacaacgagaacggcaccaucaccgacgccguggauugugcucuggauccucugagcgagacaaagugcacccugaaguccuucaccguggaaaagggcaucuaccagaccagcaacuuccgggugcagcccaccgaauccaucgugcgguuccccaauaucaccaaucugugccccuucggcgagguguucaaugccaccagauucgccucuguguacgccuggaaccggaagcggaucagcaauugcguggccgacuacuccgugcuguacaacuccgccagcuucagcaccuucaagugcuacggcguguccccuaccaagcugaacgaccugugcuucacaaacguguacgccgacagcuucgugauccggggagaugaagugcggcagauugccccuggacagacaggcaagaucgccgacuacaacuacaagcugcccgacgacuucaccggcugugugauugccuggaacagcaacaaccuggacuccaaagucggcggcaacuacaauuaccuguaccggcuguuccggaaguccaaucugaagcccuucgagcgggacaucagcaccgaaaucuaucaggccggcagcaccccuugcaacggcguggaaggcuucaacugcuacuucccacugcaguccuacggcuuucagcccacaaauggcgugggcuaucagcccuacagagugguggugcugagcuucgaacugcugcaugcuccugccacagugugcggcccuaagaaaagcaccaaucucgugaagaacaaaugcgugaacuucaacuucaacggccugaccggcaccggcgugcugacagagagcaacaagaaguuccugccauuccagcaguuuggccgggauaucgccgauaccacagacgccguuagagauccccagacacuggaaauccuggacaucaccccaugcagcuucggcggagugucugugaucaccccuggcaccaacaccagcaaucagguggcagugcuguaccaggacgugaacuguaccgaagugcccguggccauucacgccgaucagcugacaccuacauggcggguguacuccaccggcagcaauguguuucagaccagagccggcugucugaucggagccgagcacgugaacaauagcuacgagugcgacauccccaucggcgcuggcaucugugccagcuaccagacacagacaaacagccccagacgggcuagaagcguggccagccagagcaucauugccuacacaaugucucugggcgccgagaacagcguggccuacuccaacaacucuaucgcuauccccaccaacuucaccaucagcgugaccaccgagauccugccuguguccaugaccaagaccagcguggacugcaccauguacaucugcggcgauuccaccgagugcuccaaccugcugcugcaguacggcagcuucugcacccagcugaauagagcccugacagggaucgccguggaacaggacaagaacacccaagagguguucgcccaagugaagcaaaucuacaagaccccuccuaucaaggacuucggcggcuucaauuucagccagauucugcccgauccuagcaagcccagcaagcggagcuucaucgaggaccugcuguucaacaaagugacacuggccgacgccggcuucaucaagcaguauggcgauugucugggcgacauugccgccagggaucugauuugcgcccagaaguuuaacggacugacagugcugccuccucugcugaccgaugagaugaucgcccaguacacaucugcccugcuggccggcacaaucacaagcggcuggacauuuugcgcuggcgccgcucugcagauccccuuugcuaugcagauggccuaccgguucaacggcaucggagugacccagaaugugcuguacgagaaccagaagcugaucgccaaccaguucaacagcgccaucggcaagauccaggacagccugagcagcacagcaagcgcccugggaaagcugcaggacguggucaaccagaaugcccaggcacugaacacccuggucaagcagcuguccuccaacuucggcgccaucagcucugugcugaacgauauccugagcagacuggacaaggucgaggccgaggugcagaucgacagacugaucacaggcagacugcagagccuccagacauacgugacccagcagcugaucagagccgccgagauuagagccucugccaaucuggccgccaccaagaugucugaguguguguguggccagagcaagagaguggacuuuugcggcaagggcuaccaccugaugagcuucccucagucugccccucacggcgugguguuucugcacgugacauaugugcccgcucaagagaagaauuucaccaccgcuccagccaucugccacgacggcaaagcccacuuuccuagagaaggcguguucguguccaacggcacccauugguucgugacacagcggaacuucuacgagccccagaucaucaccaccgacaacaccuucgugucuggcaacugcgacguugugaucggcauugugaacaauaccguguacgacccucugcagcccgagcuggacagcuucaaagaggaacuggacaaguacuuuaagaaccacacaagccccgacguggaccugggcgauaucagcggaaucaaugccagcgucgugaacauccagaaagagaucgaccggcugaacgagguggccaagaaucugaacgagagccugaucgaccugcaagaacuggggaaguacgagcaguacaucaaguggcccugguacaucuggcugggcuuuaucgccggacugauugccaucgugauggucacaaucaugcuguguugcaugaccagcugcuguagcugccugaagggcuguuguagcuguggcagcugcugcaaguucgacgaggacgauucugagcccgugcugaagggcgugaaacugcacuacaccugaggacuagucccuguucccagagcccacuuuuuuuucuuuuuuugaaauaaaauagccugucuuucagaucucaaaggcucuuuucagagccaccaaaaaaaaaaaaaaaaaaaaaaaaaaaaaaaaaaaaaaaaaaaaaaaaaaaaaaaaaaaaaaaaaaaaaaaaaaaaaaaaaaaaaaaaaaaaaaaaaaaaa

SEQ ID NO: 12549 - RNA, 4094 nt, Artificial Sequence
  SARS-CoV-2/Wuhan/WIV05/2019__EPI_ISL_402128 spike protein mRNA gc mod (1-1273)(I909C_Y1047C)
aggagagucccgcagucggcguccagcggcucugcuuguucgugugugugucguugcaggccuuauucaagcuuaccauguucguguuucuggugcugcugccccugguguccagccagugugugaaccugaccaccagaacacagcugccuccagccuacaccaacagcuucaccagaggcguguacuaccccgacaagguguucagauccagcgugcugcacucuacccaggaccuguuccugccuuucuucagcaacgugaccugguuccacgccauccacguguccggcaccaauggcaccaagagauucgacaaccccgugcugcccuucaacgacgggguguacuuugccagcaccgagaaguccaacaucaucagaggcuggaucuucggcaccacacuggacagcaagacccagagccugcugaucgugaacaacgccaccaacguggucaucaaagugugcgaguuccaguucugcaacgaccccuuccugggcgucuacuaccacaagaacaacaagagcuggauggaaagcgaguuccggguguacagcagcgccaacaacugcaccuucgaguacgugucccagccuuuccugauggaccuggaaggcaagcagggcaacuucaagaaccugcgcgaguucguguucaagaacaucgacggcuacuucaaaaucuacagcaagcacaccccuaucaaccucgugcgggaucugccucagggcuucucugcucuggaaccccugguggaucugcccaucggcaucaacaucacccgguuucagacacugcuggcccugcacagaagcuaccugacaccuggcgauagcagcagcggauggacagcuggugccgccgcuuacuaugugggcuaccugcagccuagaaccuuccugcugaaguacaacgagaacggcaccaucaccgacgccguggauugugcucuggauccucugagcgagacaaagugcacccugaaguccuucaccguggaaaagggcaucuaccagaccagcaacuuccgggugcagcccaccgaauccaucgugcgguuccccaauaucaccaaucugugccccuucggcgagguguucaaugccaccagauucgccucuguguacgccuggaaccggaagcggaucagcaauugcguggccgacuacuccgugcuguacaacuccgccagcuucagcaccuucaagugcuacggcguguccccuaccaagcugaacgaccugugcuucacaaacguguacgccgacagcuucgugauccggggagaugaagugcggcagauugccccuggacagacaggcaagaucgccgacuacaacuacaagcugcccgacgacuucaccggcugugugauugccuggaacagcaacaaccuggacuccaaagucggcggcaacuacaauuaccuguaccggcuguuccggaaguccaaucugaagcccuucgagcgggacaucagcaccgaaaucuaucaggccggcagcaccccuugcaacggcguggaaggcuucaacugcuacuucccacugcaguccuacggcuuucagcccacaaauggcgugggcuaucagcccuacagagugguggugcugagcuucgaacugcugcaugcuccugccacagugugcggcccuaagaaaagcaccaaucucgugaagaacaaaugcgugaacuucaacuucaacggccugaccggcaccggcgugcugacagagagcaacaagaaguuccugccauuccagcaguuuggccgggauaucgccgauaccacagacgccguuagagauccccagacacuggaaauccuggacaucaccccaugcagcuucggcggagugucugugaucaccccuggcaccaacaccagcaaucagguggcagugcuguaccaggacgugaacuguaccgaagugcccguggccauucacgccgaucagcugacaccuacauggcggguguacuccaccggcagcaauguguuucagaccagagccggcugucugaucggagccgagcacgugaacaauagcuacgagugcgacauccccaucggcgcuggcaucugugccagcuaccagacacagacaaacagccccagacgggcuagaagcguggccagccagagcaucauugccuacacaaugucucugggcgccgagaacagcguggccuacuccaacaacucuaucgcuauccccaccaacuucaccaucagcgugaccaccgagauccugccuguguccaugaccaagaccagcguggacugcaccauguacaucugcggcgauuccaccgagugcuccaaccugcugcugcaguacggcagcuucugcacccagcugaauagagcccugacagggaucgccguggaacaggacaagaacacccaagagguguucgcccaagugaagcaaaucuacaagaccccuccuaucaaggacuucggcggcuucaauuucagccagauucugcccgauccuagcaagcccagcaagcggagcuucaucgaggaccugcuguucaacaaagugacacuggccgacgccggcuucaucaagcaguauggcgauugucugggcgacauugccgccagggaucugauuugcgcccagaaguuuaacggacugacagugcugccuccucugcugaccgaugagaugaucgcccaguacacaucugcccugcuggccggcacaaucacaagcggcuggacauuuggagcuggcgccgcucugcagauccccuuugcuaugcagauggccuaccgguucaacggcugcggagugacccagaaugugcuguacgagaaccagaagcugaucgccaaccaguucaacagcgccaucggcaagauccaggacagccugagcagcacagcaagcgcccugggaaagcugcaggacguggucaaccagaaugcccaggcacugaacacccuggucaagcagcuguccuccaacuucggcgccaucagcucugugcugaacgauauccugagcagacuggacaaggucgaggccgaggugcagaucgacagacugaucacaggcagacugcagagccuccagacauacgugacccagcagcugaucagagccgccgagauuagagccucugccaaucuggccgccaccaagaugucugagugugugcugggccagagcaagagaguggacuuuugcggcaagggcugucaccugaugagcuucccucagucugccccucacggcgugguguuucugcacgugacauaugugcccgcucaagagaagaauuucaccaccgcuccagccaucugccacgacggcaaagcccacuuuccuagagaaggcguguucguguccaacggcacccauugguucgugacacagcggaacuucuacgagccccagaucaucaccaccgacaacaccuucgugucuggcaacugcgacguugugaucggcauugugaacaauaccguguacgacccucugcagcccgagcuggacagcuucaaagaggaacuggacaaguacuuuaagaaccacacaagccccgacguggaccugggcgauaucagcggaaucaaugccagcgucgugaacauccagaaagagaucgaccggcugaacgagguggccaagaaucugaacgagagccugaucgaccugcaagaacuggggaaguacgagcaguacaucaaguggcccugguacaucuggcugggcuuuaucgccggacugauugccaucgugauggucacaaucaugcuguguugcaugaccagcugcuguagcugccugaagggcuguuguagcuguggcagcugcugcaaguucgacgaggacgauucugagcccgugcugaagggcgugaaacugcacuacaccugaggacuagucccuguucccagagcccacuuuuuuuucuuuuuuugaaauaaaauagccugucuuucagaucucaaaggcucuuuucagagccaccaaaaaaaaaaaaaaaaaaaaaaaaaaaaaaaaaaaaaaaaaaaaaaaaaaaaaaaaaaaaaaaaaaaaaaaaaaaaaaaaaaaaaaaaaaaaaaaaaaaaa

SEQ ID NO: 12550 - RNA, 4094 nt, Artificial Sequence
  SARS-CoV-2/Wuhan/WIV05/2019__EPI_ISL_402128 spike protein mRNA gc mod (1-1273)(Q965C_S1003C)
aggagagucccgcagucggcguccagcggcucugcuuguucgugugugugucguugcaggccuuauucaagcuuaccauguucguguuucuggugcugcugccccugguguccagccagugugugaaccugaccaccagaacacagcugccuccagccuacaccaacagcuucaccagaggcguguacuaccccgacaagguguucagauccagcgugcugcacucuacccaggaccuguuccugccuuucuucagcaacgugaccugguuccacgccauccacguguccggcaccaauggcaccaagagauucgacaaccccgugcugcccuucaacgacgggguguacuuugccagcaccgagaaguccaacaucaucagaggcuggaucuucggcaccacacuggacagcaagacccagagccugcugaucgugaacaacgccaccaacguggucaucaaagugugcgaguuccaguucugcaacgaccccuuccugggcgucuacuaccacaagaacaacaagagcuggauggaaagcgaguuccggguguacagcagcgccaacaacugcaccuucgaguacgugucccagccuuuccugauggaccuggaaggcaagcagggcaacuucaagaaccugcgcgaguucguguucaagaacaucgacggcuacuucaaaaucuacagcaagcacaccccuaucaaccucgugcgggaucugccucagggcuucucugcucuggaaccccugguggaucugcccaucggcaucaacaucacccgguuucagacacugcuggcccugcacagaagcuaccugacaccuggcgauagcagcagcggauggacagcuggugccgccgcuuacuaugugggcuaccugcagccuagaaccuuccugcugaaguacaacgagaacggcaccaucaccgacgccguggauugugcucuggauccucugagcgagacaaagugcacccugaaguccuucaccguggaaaagggcaucuaccagaccagcaacuuccgggugcagcccaccgaauccaucgugcgguuccccaauaucaccaaucugugccccuucggcgagguguucaaugccaccagauucgccucuguguacgccuggaaccggaagcggaucagcaauugcguggccgacuacuccgugcuguacaacuccgccagcuucagcaccuucaagugcuacggcguguccccuaccaagcugaacgaccugugcuucacaaacguguacgccgacagcuucgugauccggggagaugaagugcggcagauugccccuggacagacaggcaagaucgccgacuacaacuacaagcugcccgacgacuucaccggcugugugauugccuggaacagcaacaaccuggacuccaaagucggcggcaacuacaauuaccuguaccggcuguuccggaaguccaaucugaagcccuucgagcgggacaucagcaccgaaaucuaucaggccggcagcaccccuugcaacggcguggaaggcuucaacugcuacuucccacugcaguccuacggcuuucagcccacaaauggcgugggcuaucagcccuacagagugguggugcugagcuucgaacugcugcaugcuccugccacagugugcggcccuaagaaaagcaccaaucucgugaagaacaaaugcgugaacuucaacuucaacggccugaccggcaccggcgugcugacagagagcaacaagaaguuccugccauuccagcaguuuggccgggauaucgccgauaccacagacgccguuagagauccccagacacuggaaauccuggacaucaccccaugcagcuucggcggagugucugugaucaccccuggcaccaacaccagcaaucagguggcagugcuguaccaggacgugaacuguaccgaagugcccguggccauucacgccgaucagcugacaccuacauggcggguguacuccaccggcagcaauguguuucagaccagagccggcugucugaucggagccgagcacgugaacaauagcuacgagugcgacauccccaucggcgcuggcaucugugccagcuaccagacacagacaaacagccccagacgggcuagaagcguggccagccagagcaucauugccuacacaaugucucugggcgccgagaacagcguggccuacuccaacaacucuaucgcuauccccaccaacuucaccaucagcgugaccaccgagauccugccuguguccaugaccaagaccagcguggacugcaccauguacaucugcggcgauuccaccgagugcuccaaccugcugcugcaguacggcagcuucugcacccagcugaauagagcccugacagggaucgccguggaacaggacaagaacacccaagagguguucgcccaagugaagcaaaucuacaagaccccuccuaucaaggacuucggcggcuucaauuucagccagauucugcccgauccuagcaagcccagcaagcggagcuucaucgaggaccugcuguucaacaaagugacacuggccgacgccggcuucaucaagcaguauggcgauugucugggcgacauugccgccagggaucugauuugcgcccagaaguuuaacggacugacagugcugccuccucugcugaccgaugagaugaucgcccaguacacaucugcccugcuggccggcacaaucacaagcggcuggacauuuggagcuggcgccgcucugcagauccccuuugcuaugcagauggccuaccgguucaacggcaucggagugacccagaaugugcuguacgagaaccagaagcugaucgccaaccaguucaacagcgccaucggcaagauccaggacagccugagcagcacagcaagcgcccugggaaagcugcaggacguggucaaccagaaugcccaggcacugaacacccuggucaagugccuguccuccaacuucggcgccaucagcucugugcugaacgauauccugagcagacuggacaaggucgaggccgaggugcagaucgacagacugaucacaggcagacugcagugucuccagacauacgugacccagcagcugaucagagccgccgagauuagagccucugccaaucuggccgccaccaagaugucugagugugugcugggccagagcaagagaguggacuuuugcggcaagggcuaccaccugaugagcuucccucagucugccccucacggcgugguguuucugcacgugacauaugugcccgcucaagagaagaauuucaccaccgcuccagccaucugccacgacggcaaagcccacuuuccuagagaaggcguguucguguccaacggcacccauugguucgugacacagcggaacuucuacgagccccagaucaucaccaccgacaacaccuucgugucuggcaacugcgacguugugaucggcauugugaacaauaccguguacgacccucugcagcccgagcuggacagcuucaaagaggaacuggacaaguacuuuaagaaccacacaagccccgacguggaccugggcgauaucagcggaaucaaugccagcgucgugaacauccagaaagagaucgaccggcugaacgagguggccaagaaucugaacgagagccugaucgaccugcaagaacuggggaaguacgagcaguacaucaaguggcccugguacaucuggcugggcuuuaucgccggacugauugccaucgugauggucacaaucaugcuguguugcaugaccagcugcuguagcugccugaagggcuguuguagcuguggcagcugcugcaaguucgacgaggacgauucugagcccgugcugaagggcgugaaacugcacuacaccugaggacuagucccuguucccagagcccacuuuuuuuucuuuuuuugaaauaaaauagccugucuuucagaucucaaaggcucuuuucagagccaccaaaaaaaaaaaaaaaaaaaaaaaaaaaaaaaaaaaaaaaaaaaaaaaaaaaaaaaaaaaaaaaaaaaaaaaaaaaaaaaaaaaaaaaaaaaaaaaaaaaaa

SEQ ID NO: 12551 - RNA, 4094 nt, Artificial Sequence
  SARS-CoV-2/Wuhan/WIV05/2019__EPI_ISL_402128 spike protein mRNA gc mod (1-1273)(F970C_G999C)
aggagagucccgcagucggcguccagcggcucugcuuguucgugugugugucguugcaggccuuauucaagcuuaccauguucguguuucuggugcugcugccccugguguccagccagugugugaaccugaccaccagaacacagcugccuccagccuacaccaacagcuucaccagaggcguguacuaccccgacaagguguucagauccagcgugcugcacucuacccaggaccuguuccugccuuucuucagcaacgugaccugguuccacgccauccacguguccggcaccaauggcaccaagagauucgacaaccccgugcugcccuucaacgacgggguguacuuugccagcaccgagaaguccaacaucaucagaggcuggaucuucggcaccacacuggacagcaagacccagagccugcugaucgugaacaacgccaccaacguggucaucaaagugugcgaguuccaguucugcaacgaccccuuccugggcgucuacuaccacaagaacaacaagagcuggauggaaagcgaguuccggguguacagcagcgccaacaacugcaccuucgaguacgugucccagccuuuccugauggaccuggaaggcaagcagggcaacuucaagaaccugcgcgaguucguguucaagaacaucgacggcuacuucaaaaucuacagcaagcacaccccuaucaaccucgugcgggaucugccucagggcuucucugcucuggaaccccugguggaucugcccaucggcaucaacaucacccgguuucagacacugcuggcccugcacagaagcuaccugacaccuggcgauagcagcagcggauggacagcuggugccgccgcuuacuaugugggcuaccugcagccuagaaccuuccugcugaaguacaacgagaacggcaccaucaccgacgccguggauugugcucuggauccucugagcgagacaaagugcacccugaaguccuucaccguggaaaagggcaucuaccagaccagcaacuuccgggugcagcccaccgaauccaucgugcgguuccccaauaucaccaaucugugccccuucggcgagguguucaaugccaccagauucgccucuguguacgccuggaaccggaagcggaucagcaauugcguggccgacuacuccgugcuguacaacuccgccagcuucagcaccuucaagugcuacggcguguccccuaccaagcugaacgaccugugcuucacaaacguguacgccgacagcuucgugauccggggagaugaagugcggcagauugccccuggacagacaggcaagaucgccgacuacaacuacaagcugcccgacgacuucaccggcugugugauugccuggaacagcaacaaccuggacuccaaagucggcggcaacuacaauuaccuguaccggcuguuccggaaguccaaucugaagcccuucgagcgggacaucagcaccgaaaucuaucaggccggcagcaccccuugcaacggcguggaaggcuucaacugcuacuucccacugcaguccuacggcuuucagcccacaaauggcgugggcuaucagcccuacagagugguggugcugagcuucgaacugcugcaugcuccugccacagugugcggcccuaagaaaagcaccaaucucgugaagaacaaaugcgugaacuucaacuucaacggccugaccggcaccggcgugcugacagagagcaacaagaaguuccugccauuccagcaguuuggccgggauaucgccgauaccacagacgccguuagagauccccagacacuggaaauccuggacaucaccccaugcagcuucggcggagugucugugaucaccccuggcaccaacaccagcaaucagguggcagugcuguaccaggacgugaacuguaccgaagugcccguggccauucacgccgaucagcugacaccuacauggcggguguacuccaccggcagcaauguguuucagaccagagccggcugucugaucggagccgagcacgugaacaauagcuacgagugcgacauccccaucggcgcuggcaucugugccagcuaccagacacagacaaacagccccagacgggcuagaagcguggccagccagagcaucauugccuacacaaugucucugggcgccgagaacagcguggccuacuccaacaacucuaucgcuauccccaccaacuucaccaucagcgugaccaccgagauccugccuguguccaugaccaagaccagcguggacugcaccauguacaucugcggcgauuccaccgagugcuccaaccugcugcugcaguacggcagcuucugcacccagcugaauagagcccugacagggaucgccguggaacaggacaagaacacccaagagguguucgcccaagugaagcaaaucuacaagaccccuccuaucaaggacuucggcggcuucaauuucagccagauucugcccgauccuagcaagcccagcaagcggagcuucaucgaggaccugcuguucaacaaagugacacuggccgacgccggcuucaucaagcaguauggcgauugucugggcgacauugccgccagggaucugauuugcgcccagaaguuuaacggacugacagugcugccuccucugcugaccgaugagaugaucgcccaguacacaucugcccugcuggccggcacaaucacaagcggcuggacauuuggagcuggcgccgcucugcagauccccuuugcuaugcagauggccuaccgguucaacggcaucggagugacccagaaugugcuguacgagaaccagaagcugaucgccaaccaguucaacagcgccaucggcaagauccaggacagccugagcagcacagcaagcgcccugggaaagcugcaggacguggucaaccagaaugcccaggcacugaacacccuggucaagcagcuguccuccaacugcggcgccaucagcucugugcugaacgauauccugagcagacuggacaaggucgaggccgaggugcagaucgacagacugaucacauguagacugcagagccuccagacauacgugacccagcagcugaucagagccgccgagauuagagccucugccaaucuggccgccaccaagaugucugagugugugcugggccagagcaagagaguggacuuuugcggcaagggcuaccaccugaugagcuucccucagucugccccucacggcgugguguuucugcacgugacauaugugcccgcucaagagaagaauuucaccaccgcuccagccaucugccacgacggcaaagcccacuuuccuagagaaggcguguucguguccaacggcacccauugguucgugacacagcggaacuucuacgagccccagaucaucaccaccgacaacaccuucgugucuggcaacugcgacguugugaucggcauugugaacaauaccguguacgacccucugcagcccgagcuggacagcuucaaagaggaacuggacaaguacuuuaagaaccacacaagccccgacguggaccugggcgauaucagcggaaucaaugccagcgucgugaacauccagaaagagaucgaccggcugaacgagguggccaagaaucugaacgagagccugaucgaccugcaagaacuggggaaguacgagcaguacaucaaguggcccugguacaucuggcugggcuuuaucgccggacugauugccaucgugauggucacaaucaugcuguguugcaugaccagcugcuguagcugccugaagggcuguuguagcuguggcagcugcugcaaguucgacgaggacgauucugagcccgugcugaagggcgugaaacugcacuacaccugaggacuagucccuguucccagagcccacuuuuuuuucuuuuuuugaaauaaaauagccugucuuucagaucucaaaggcucuuuucagagccaccaaaaaaaaaaaaaaaaaaaaaaaaaaaaaaaaaaaaaaaaaaaaaaaaaaaaaaaaaaaaaaaaaaaaaaaaaaaaaaaaaaaaaaaaaaaaaaaaaaaaa

SEQ ID NO: 12552 - RNA, 4094 nt, Artificial Sequence
  SARS-CoV-2/Wuhan/WIV05/2019__EPI_ISL_402128 spike protein mRNA gc mod (1-1273)(A972C_R995C)
aggagagucccgcagucggcguccagcggcucugcuuguucgugugugugucguugcaggccuuauucaagcuuaccauguucguguuucuggugcugcugccccugguguccagccagugugugaaccugaccaccagaacacagcugccuccagccuacaccaacagcuucaccagaggcguguacuaccccgacaagguguucagauccagcgugcugcacucuacccaggaccuguuccugccuuucuucagcaacgugaccugguuccacgccauccacguguccggcaccaauggcaccaagagauucgacaaccccgugcugcccuucaacgacgggguguacuuugccagcaccgagaaguccaacaucaucagaggcuggaucuucggcaccacacuggacagcaagacccagagccugcugaucgugaacaacgccaccaacguggucaucaaagugugcgaguuccaguucugcaacgaccccuuccugggcgucuacuaccacaagaacaacaagagcuggauggaaagcgaguuccggguguacagcagcgccaacaacugcaccuucgaguacgugucccagccuuuccugauggaccuggaaggcaagcagggcaacuucaagaaccugcgcgaguucguguucaagaacaucgacggcuacuucaaaaucuacagcaagcacaccccuaucaaccucgugcgggaucugccucagggcuucucugcucuggaaccccugguggaucugcccaucggcaucaacaucacccgguuucagacacugcuggcccugcacagaagcuaccugacaccuggcgauagcagcagcggauggacagcuggugccgccgcuuacuaugugggcuaccugcagccuagaaccuuccugcugaaguacaacgagaacggcaccaucaccgacgccguggauugugcucuggauccucugagcgagacaaagugcacccugaaguccuucaccguggaaaagggcaucuaccagaccagcaacuuccgggugcagcccaccgaauccaucgugcgguuccccaauaucaccaaucugugccccuucggcgagguguucaaugccaccagauucgccucuguguacgccuggaaccggaagcggaucagcaauugcguggccgacuacuccgugcuguacaacuccgccagcuucagcaccuucaagugcuacggcguguccccuaccaagcugaacgaccugugcuucacaaacguguacgccgacagcuucgugauccggggagaugaagugcggcagauugccccuggacagacaggcaagaucgccgacuacaacuacaagcugcccgacgacuucaccggcugugugauugccuggaacagcaacaaccuggacuccaaagucggcggcaacuacaauuaccuguaccggcuguuccggaaguccaaucugaagcccuucgagcgggacaucagcaccgaaaucuaucaggccggcagcaccccuugcaacggcguggaaggcuucaacugcuacuucccacugcaguccuacggcuuucagcccacaaauggcgugggcuaucagcccuacagagugguggugcugagcuucgaacugcugcaugcuccugccacagugugcggcccuaagaaaagcaccaaucucgugaagaacaaaugcgugaacuucaacuucaacggccugaccggcaccggcgugcugacagagagcaacaagaaguuccugccauuccagcaguuuggccgggauaucgccgauaccacagacgccguuagagauccccagacacuggaaauccuggacaucaccccaugcagcuucggcggagugucugugaucaccccuggcaccaacaccagcaaucagguggcagugcuguaccaggacgugaacuguaccgaagugcccguggccauucacgccgaucagcugacaccuacauggcggguguacuccaccggcagcaauguguuucagaccagagccggcugucugaucggagccgagcacgugaacaauagcuacgagugcgacauccccaucggcgcuggcaucugugccagcuaccagacacagacaaacagccccagacgggcuagaagcguggccagccagagcaucauugccuacacaaugucucugggcgccgagaacagcguggccuacuccaacaacucuaucgcuauccccaccaacuucaccaucagcgugaccaccgagauccugccuguguccaugaccaagaccagcguggacugcaccauguacaucugcggcgauuccaccgagugcuccaaccugcugcugcaguacggcagcuucugcacccagcugaauagagcccugacagggaucgccguggaacaggacaagaacacccaagagguguucgcccaagugaagcaaaucuacaagaccccuccuaucaaggacuucggcggcuucaauuucagccagauucugcccgauccuagcaagcccagcaagcggagcuucaucgaggaccugcuguucaacaaagugacacuggccgacgccggcuucaucaagcaguauggcgauugucugggcgacauugccgccagggaucugauuugcgcccagaaguuuaacggacugacagugcugccuccucugcugaccgaugagaugaucgcccaguacacaucugcccugcuggccggcacaaucacaagcggcuggacauuuggagcuggcgccgcucugcagauccccuuugcuaugcagauggccuaccgguucaacggcaucggagugacccagaaugugcuguacgagaaccagaagcugaucgccaaccaguucaacagcgccaucggcaagauccaggacagccugagcagcacagcaagcgcccugggaaagcugcaggacguggucaaccagaaugcccaggcacugaacacccuggucaagcagcuguccuccaacuucggcugcaucagcucugugcugaacgauauccugagcagacuggacaaggucgaggccgaggugcagaucgacugucugaucacaggcagacugcagagccuccagacauacgugacccagcagcugaucagagccgccgagauuagagccucugccaaucuggccgccaccaagaugucugagugugugcugggccagagcaagagaguggacuuuugcggcaagggcuaccaccugaugagcuucccucagucugccccucacggcgugguguuucugcacgugacauaugugcccgcucaagagaagaauuucaccaccgcuccagccaucugccacgacggcaaagcccacuuuccuagagaaggcguguucguguccaacggcacccauugguucgugacacagcggaacuucuacgagccccagaucaucaccaccgacaacaccuucgugucuggcaacugcgacguugugaucggcauugugaacaauaccguguacgacccucugcagcccgagcuggacagcuucaaagaggaacuggacaaguacuuuaagaaccacacaagccccgacguggaccugggcgauaucagcggaaucaaugccagcgucgugaacauccagaaagagaucgaccggcugaacgagguggccaagaaucugaacgagagccugaucgaccugcaagaacuggggaaguacgagcaguacaucaaguggcccugguacaucuggcugggcuuuaucgccggacugauugccaucgugauggucacaaucaugcuguguugcaugaccagcugcuguagcugccugaagggcuguuguagcuguggcagcugcugcaaguucgacgaggacgauucugagcccgugcugaagggcgugaaacugcacuacaccugaggacuagucccuguucccagagcccacuuuuuuuucuuuuuuugaaauaaaauagccugucuuucagaucucaaaggcucuuuucagagccaccaaaaaaaaaaaaaaaaaaaaaaaaaaaaaaaaaaaaaaaaaaaaaaaaaaaaaaaaaaaaaaaaaaaaaaaaaaaaaaaaaaaaaaaaaaaaaaaaaaaaa

SEQ ID NO: 12553 - RNA, 4094 nt, Artificial Sequence
  SARS-CoV-2/Wuhan/WIV05/2019__EPI_ISL_402128 spike protein mRNA gc mod (1-1273)(A890C_V1040C)
aggagagucccgcagucggcguccagcggcucugcuuguucgugugugugucguugcaggccuuauucaagcuuaccauguucguguuucuggugcugcugccccugguguccagccagugugugaaccugaccaccagaacacagcugccuccagccuacaccaacagcuucaccagaggcguguacuaccccgacaagguguucagauccagcgugcugcacucuacccaggaccuguuccugccuuucuucagcaacgugaccugguuccacgccauccacguguccggcaccaauggcaccaagagauucgacaaccccgugcugcccuucaacgacgggguguacuuugccagcaccgagaaguccaacaucaucagaggcuggaucuucggcaccacacuggacagcaagacccagagccugcugaucgugaacaacgccaccaacguggucaucaaagugugcgaguuccaguucugcaacgaccccuuccugggcgucuacuaccacaagaacaacaagagcuggauggaaagcgaguuccggguguacagcagcgccaacaacugcaccuucgaguacgugucccagccuuuccugauggaccuggaaggcaagcagggcaacuucaagaaccugcgcgaguucguguucaagaacaucgacggcuacuucaaaaucuacagcaagcacaccccuaucaaccucgugcgggaucugccucagggcuucucugcucuggaaccccugguggaucugcccaucggcaucaacaucacccgguuucagacacugcuggcccugcacagaagcuaccugacaccuggcgauagcagcagcggauggacagcuggugccgccgcuuacuaugugggcuaccugcagccuagaaccuuccugcugaaguacaacgagaacggcaccaucaccgacgccguggauugugcucuggauccucugagcgagacaaagugcacccugaaguccuucaccguggaaaagggcaucuaccagaccagcaacuuccgggugcagcccaccgaauccaucgugcgguuccccaauaucaccaaucugugccccuucggcgagguguucaaugccaccagauucgccucuguguacgccuggaaccggaagcggaucagcaauugcguggccgacuacuccgugcuguacaacuccgccagcuucagcaccuucaagugcuacggcguguccccuaccaagcugaacgaccugugcuucacaaacguguacgccgacagcuucgugauccggggagaugaagugcggcagauugccccuggacagacaggcaagaucgccgacuacaacuacaagcugcccgacgacuucaccggcugugugauugccuggaacagcaacaaccuggacuccaaagucggcggcaacuacaauuaccuguaccggcuguuccggaaguccaaucugaagcccuucgagcgggacaucagcaccgaaaucuaucaggccggcagcaccccuugcaacggcguggaaggcuucaacugcuacuucccacugcaguccuacggcuuucagcccacaaauggcgugggcuaucagcccuacagagugguggugcugagcuucgaacugcugcaugcuccugccacagugugcggcccuaagaaaagcaccaaucucgugaagaacaaaugcgugaacuucaacuucaacggccugaccggcaccggcgugcugacagagagcaacaagaaguuccugccauuccagcaguuuggccgggauaucgccgauaccacagacgccguuagagauccccagacacuggaaauccuggacaucaccccaugcagcuucggcggagugucugugaucaccccuggcaccaacaccagcaaucagguggcagugcuguaccaggacgugaacuguaccgaagugcccguggccauucacgccgaucagcugacaccuacauggcggguguacuccaccggcagcaauguguuucagaccagagccggcugucugaucggagccgagcacgugaacaauagcuacgagugcgacauccccaucggcgcuggcaucugugccagcuaccagacacagacaaacagccccagacgggcuagaagcguggccagccagagcaucauugccuacacaaugucucugggcgccgagaacagcguggccuacuccaacaacucuaucgcuauccccaccaacuucaccaucagcgugaccaccgagauccugccuguguccaugaccaagaccagcguggacugcaccauguacaucugcggcgauuccaccgagugcuccaaccugcugcugcaguacggcagcuucugcacccagcugaauagagcccugacagggaucgccguggaacaggacaagaacacccaagagguguucgcccaagugaagcaaaucuacaagaccccuccuaucaaggacuucggcggcuucaauuucagccagauucugcccgauccuagcaagcccagcaagcggagcuucaucgaggaccugcuguucaacaaagugacacuggccgacgccggcuucaucaagcaguauggcgauugucugggcgacauugccgccagggaucugauuugcgcccagaaguuuaacggacugacagugcugccuccucugcugaccgaugagaugaucgcccaguacacaucugcccugcuggccggcacaaucacaagcggcuggacauuuggaugcggcgccgcucugcagauccccuuugcuaugcagauggccuaccgguucaacggcaucggagugacccagaaugugcuguacgagaaccagaagcugaucgccaaccaguucaacagcgccaucggcaagauccaggacagccugagcagcacagcaagcgcccugggaaagcugcaggacguggucaaccagaaugcccaggcacugaacacccuggucaagcagcuguccuccaacuucggcgccaucagcucugugcugaacgauauccugagcagacuggacaaggucgaggccgaggugcagaucgacagacugaucacaggcagacugcagagccuccagacauacgugacccagcagcugaucagagccgccgagauuagagccucugccaaucuggccgccaccaagaugucugagugugugcugggccagagcaagagaugugacuuuugcggcaagggcuaccaccugaugagcuucccucagucugccccucacggcgugguguuucugcacgugacauaugugcccgcucaagagaagaauuucaccaccgcuccagccaucugccacgacggcaaagcccacuuuccuagagaaggcguguucguguccaacggcacccauugguucgugacacagcggaacuucuacgagccccagaucaucaccaccgacaacaccuucgugucuggcaacugcgacguugugaucggcauugugaacaauaccguguacgacccucugcagcccgagcuggacagcuucaaagaggaacuggacaaguacuuuaagaaccacacaagccccgacguggaccugggcgauaucagcggaaucaaugccagcgucgugaacauccagaaagagaucgaccggcugaacgagguggccaagaaucugaacgagagccugaucgaccugcaagaacuggggaaguacgagcaguacaucaaguggcccugguacaucuggcugggcuuuaucgccggacugauugccaucgugauggucacaaucaugcuguguugcaugaccagcugcuguagcugccugaagggcuguuguagcuguggcagcugcugcaaguucgacgaggacgauucugagcccgugcugaagggcgugaaacugcacuacaccugaggacuagucccuguucccagagcccacuuuuuuuucuuuuuuugaaauaaaauagccugucuuucagaucucaaaggcucuuuucagagccaccaaaaaaaaaaaaaaaaaaaaaaaaaaaaaaaaaaaaaaaaaaaaaaaaaaaaaaaaaaaaaaaaaaaaaaaaaaaaaaaaaaaaaaaaaaaaaaaaaaaaa

SEQ ID NO: 12554 - RNA, 4094 nt, Artificial Sequence
  SARS-CoV-2/Wuhan/WIV05/2019__EPI_ISL_402128 spike protein mRNA gc mod (1-1273)(T874C_S1055C)
aggagagucccgcagucggcguccagcggcucugcuuguucgugugugugucguugcaggccuuauucaagcuuaccauguucguguuucuggugcugcugccccugguguccagccagugugugaaccugaccaccagaacacagcugccuccagccuacaccaacagcuucaccagaggcguguacuaccccgacaagguguucagauccagcgugcugcacucuacccaggaccuguuccugccuuucuucagcaacgugaccugguuccacgccauccacguguccggcaccaauggcaccaagagauucgacaaccccgugcugcccuucaacgacgggguguacuuugccagcaccgagaaguccaacaucaucagaggcuggaucuucggcaccacacuggacagcaagacccagagccugcugaucgugaacaacgccaccaacguggucaucaaagugugcgaguuccaguucugcaacgaccccuuccugggcgucuacuaccacaagaacaacaagagcuggauggaaagcgaguuccggguguacagcagcgccaacaacugcaccuucgaguacgugucccagccuuuccugauggaccuggaaggcaagcagggcaacuucaagaaccugcgcgaguucguguucaagaacaucgacggcuacuucaaaaucuacagcaagcacaccccuaucaaccucgugcgggaucugccucagggcuucucugcucuggaaccccugguggaucugcccaucggcaucaacaucacccgguuucagacacugcuggcccugcacagaagcuaccugacaccuggcgauagcagcagcggauggacagcuggugccgccgcuuacuaugugggcuaccugcagccuagaaccuuccugcugaaguacaacgagaacggcaccaucaccgacgccguggauugugcucuggauccucugagcgagacaaagugcacccugaaguccuucaccguggaaaagggcaucuaccagaccagcaacuuccgggugcagcccaccgaauccaucgugcgguuccccaauaucaccaaucugugccccuucggcgagguguucaaugccaccagauucgccucuguguacgccuggaaccggaagcggaucagcaauugcguggccgacuacuccgugcuguacaacuccgccagcuucagcaccuucaagugcuacggcguguccccuaccaagcugaacgaccugugcuucacaaacguguacgccgacagcuucgugauccggggagaugaagugcggcagauugccccuggacagacaggcaagaucgccgacuacaacuacaagcugcccgacgacuucaccggcugugugauugccuggaacagcaacaaccuggacuccaaagucggcggcaacuacaauuaccuguaccggcuguuccggaaguccaaucugaagcccuucgagcgggacaucagcaccgaaaucuaucaggccggcagcaccccuugcaacggcguggaaggcuucaacugcuacuucccacugcaguccuacggcuuucagcccacaaauggcgugggcuaucagcccuacagagugguggugcugagcuucgaacugcugcaugcuccugccacagugugcggcccuaagaaaagcaccaaucucgugaagaacaaaugcgugaacuucaacuucaacggccugaccggcaccggcgugcugacagagagcaacaagaaguuccugccauuccagcaguuuggccgggauaucgccgauaccacagacgccguuagagauccccagacacuggaaauccuggacaucaccccaugcagcuucggcggagugucugugaucaccccuggcaccaacaccagcaaucagguggcagugcuguaccaggacgugaacuguaccgaagugcccguggccauucacgccgaucagcugacaccuacauggcggguguacuccaccggcagcaauguguuucagaccagagccggcugucugaucggagccgagcacgugaacaauagcuacgagugcgacauccccaucggcgcuggcaucugugccagcuaccagacacagacaaacagccccagacgggcuagaagcguggccagccagagcaucauugccuacacaaugucucugggcgccgagaacagcguggccuacuccaacaacucuaucgcuauccccaccaacuucaccaucagcgugaccaccgagauccugccuguguccaugaccaagaccagcguggacugcaccauguacaucugcggcgauuccaccgagugcuccaaccugcugcugcaguacggcagcuucugcacccagcugaauagagcccugacagggaucgccguggaacaggacaagaacacccaagagguguucgcccaagugaagcaaaucuacaagaccccuccuaucaaggacuucggcggcuucaauuucagccagauucugcccgauccuagcaagcccagcaagcggagcuucaucgaggaccugcuguucaacaaagugacacuggccgacgccggcuucaucaagcaguauggcgauugucugggcgacauugccgccagggaucugauuugcgcccagaaguuuaacggacugacagugcugccuccucugcugaccgaugagaugaucgcccaguacugcucugcccugcuggccggcacaaucacaagcggcuggacauuuggagcuggcgccgcucugcagauccccuuugcuaugcagauggccuaccgguucaacggcaucggagugacccagaaugugcuguacgagaaccagaagcugaucgccaaccaguucaacagcgccaucggcaagauccaggacagccugagcagcacagcaagcgcccugggaaagcugcaggacguggucaaccagaaugcccaggcacugaacacccuggucaagcagcuguccuccaacuucggcgccaucagcucugugcugaacgauauccugagcagacuggacaaggucgaggccgaggugcagaucgacagacugaucacaggcagacugcagagccuccagacauacgugacccagcagcugaucagagccgccgagauuagagccucugccaaucuggccgccaccaagaugucugagugugugcugggccagagcaagagaguggacuuuugcggcaagggcuaccaccugaugagcuucccucagugcgccccucacggcgugguguuucugcacgugacauaugugcccgcucaagagaagaauuucaccaccgcuccagccaucugccacgacggcaaagcccacuuuccuagagaaggcguguucguguccaacggcacccauugguucgugacacagcggaacuucuacgagccccagaucaucaccaccgacaacaccuucgugucuggcaacugcgacguugugaucggcauugugaacaauaccguguacgacccucugcagcccgagcuggacagcuucaaagaggaacuggacaaguacuuuaagaaccacacaagccccgacguggaccugggcgauaucagcggaaucaaugccagcgucgugaacauccagaaagagaucgaccggcugaacgagguggccaagaaucugaacgagagccugaucgaccugcaagaacuggggaaguacgagcaguacaucaaguggcccugguacaucuggcugggcuuuaucgccggacugauugccaucgugauggucacaaucaugcuguguugcaugaccagcugcuguagcugccugaagggcuguuguagcuguggcagcugcugcaaguucgacgaggacgauucugagcccgugcugaagggcgugaaacugcacuacaccugaggacuagucccuguucccagagcccacuuuuuuuucuuuuuuugaaauaaaauagccugucuuucagaucucaaaggcucuuuucagagccaccaaaaaaaaaaaaaaaaaaaaaaaaaaaaaaaaaaaaaaaaaaaaaaaaaaaaaaaaaaaaaaaaaaaaaaaaaaaaaaaaaaaaaaaaaaaaaaaaaaaaa

SEQ ID NO: 12555 - RNA, 2318 nt, Artificial Sequence; identical to SEQ ID NO: 154
  SARS-CoV-2/Wuhan/WIV05/2019__EPI_ISL_402128 spike protein mRNA gc mod (1-681)

SEQ ID NO: 12556 - RNA, 4388 nt, Artificial Sequence
  SARS-CoV-2/Wuhan/WIV05/2019__EPI_ISL_402128 spike protein mRNA gc mod (1-1211) LumSynth construct
aggagagucccgcagucggcguccagcggcucugcuuguucgugugugugucguugcaggccuuauucaagcuuaccauguucguguuucuggugcugcugccccugguguccagccagugugugaaccugaccaccagaacacagcugccuccagccuacaccaacagcuucaccagaggcguguacuaccccgacaagguguucagauccagcgugcugcacucuacccaggaccuguuccugccuuucuucagcaacgugaccugguuccacgccauccacguguccggcaccaauggcaccaagagauucgacaaccccgugcugcccuucaacgacgggguguacuuugccagcaccgagaaguccaacaucaucagaggcuggaucuucggcaccacacuggacagcaagacccagagccugcugaucgugaacaacgccaccaacguggucaucaaagugugcgaguuccaguucugcaacgaccccuuccugggcgucuacuaccacaagaacaacaagagcuggauggaaagcgaguuccggguguacagcagcgccaacaacugcaccuucgaguacgugucccagccuuuccugauggaccuggaaggcaagcagggcaacuucaagaaccugcgcgaguucguguucaagaacaucgacggcuacuucaaaaucuacagcaagcacaccccuaucaaccucgugcgggaucugccucagggcuucucugcucuggaaccccugguggaucugcccaucggcaucaacaucacccgguuucagacacugcuggcccugcacagaagcuaccugacaccuggcgauagcagcagcggauggacagcuggugccgccgcuuacuaugugggcuaccugcagccuagaaccuuccugcugaaguacaacgagaacggcaccaucaccgacgccguggauugugcucuggauccucugagcgagacaaagugcacccugaaguccuucaccguggaaaagggcaucuaccagaccagcaacuuccgggugcagcccaccgaauccaucgugcgguuccccaauaucaccaaucugugccccuucggcgagguguucaaugccaccagauucgccucuguguacgccuggaaccggaagcggaucagcaauugcguggccgacuacuccgugcuguacaacuccgccagcuucagcaccuucaagugcuacggcguguccccuaccaagcugaacgaccugugcuucacaaacguguacgccgacagcuucgugauccggggagaugaagugcggcagauugccccuggacagacaggcaagaucgccgacuacaacuacaagcugcccgacgacuucaccggcugugugauugccuggaacagcaacaaccuggacuccaaagucggcggcaacuacaauuaccuguaccggcuguuccggaaguccaaucugaagcccuucgagcgggacaucagcaccgaaaucuaucaggccggcagcaccccuugcaacggcguggaaggcuucaacugcuacuucccacugcaguccuacggcuuucagcccacaaauggcgugggcuaucagcccuacagagugguggugcugagcuucgaacugcugcaugcuccugccacagugugcggcccuaagaaaagcaccaaucucgugaagaacaaaugcgugaacuucaacuucaacggccugaccggcaccggcgugcugacagagagcaacaagaaguuccugccauuccagcaguuuggccgggauaucgccgauaccacagacgccguuagagauccccagacacuggaaauccuggacaucaccccaugcagcuucggcggagugucugugaucaccccuggcaccaacaccagcaaucagguggcagugcuguaccaggacgugaacuguaccgaagugcccguggccauucacgccgaucagcugacaccuacauggcggguguacuccaccggcagcaauguguuucagaccagagccggcugucugaucggagccgagcacgugaacaauagcuacgagugcgacauccccaucggcgcuggcaucugugccagcuaccagacacagacaaacagccccagacgggcuagaagcguggccagccagagcaucauugccuacacaaugucucugggcgccgagaacagcguggccuacuccaacaacucuaucgcuauccccaccaacuucaccaucagcgugaccaccgagauccugccuguguccaugaccaagaccagcguggacugcaccauguacaucugcggcgauuccaccgagugcuccaaccugcugcugcaguacggcagcuucugcacccagcugaauagagcccugacagggaucgccguggaacaggacaagaacacccaagagguguucgcccaagugaagcaaaucuacaagaccccuccuaucaaggacuucggcggcuucaauuucagccagauucugcccgauccuagcaagcccagcaagcggagcuucaucgaggaccugcuguucaacaaagugacacuggccgacgccggcuucaucaagcaguauggcgauugucugggcgacauugccgccagggaucugauuugcgcccagaaguuuaacggacugacagugcugccuccucugcugaccgaugagaugaucgcccaguacacaucugcccugcuggccggcacaaucacaagcggcuggacauuuggagcuggcgccgcucugcagauccccuuugcuaugcagauggccuaccgguucaacggcaucggagugacccagaaugugcuguacgagaaccagaagcugaucgccaaccaguucaacagcgccaucggcaagauccaggacagccugagcagcacagcaagcgcccugggaaagcugcaggacguggucaaccagaaugcccaggcacugaacacccuggucaagcagcuguccuccaacuucggcgccaucagcucugugcugaacgauauccugagcagacuggacaaggucgaggccgaggugcagaucgacagacugaucacaggcagacugcagagccuccagacauacgugacccagcagcugaucagagccgccgagauuagagccucugccaaucuggccgccaccaagaugucugagugugugcugggccagagcaagagaguggacuuuugcggcaagggcuaccaccugaugagcuucccucagucugccccucacggcgugguguuucugcacgugacauaugugcccgcucaagagaagaauuucaccaccgcuccagccaucugccacgacggcaaagcccacuuuccuagagaaggcguguucguguccaacggcacccauugguucgugacacagcggaacuucuacgagccccagaucaucaccaccgacaacaccuucgugucuggcaacugcgacguugugaucggcauugugaacaauaccguguacgacccucugcagcccgagcuggacagcuucaaagaggaacuggacaaguacuuuaagaaccacacaagccccgacguggaccugggcgauaucagcggaaucaaugccagcgucgugaacauccagaaagagaucgaccggcugaacgagguggccaagaaucugaacgagagccugaucgaccugcaagaacuggggaaguacgagcaguacaucaagggcggaggaucuggcggaggacagaucuacgagggcaagcugacagccgagggccugagauuuggaaucguggccagccgguucaaucacgcccugguggauagacugguggaaggcgccaucgaugccauugucagacacggcggcagagaagaggacaucacccucguuagagugcccggcucuugggagauuccuguggcugcuggcgagcuggcccggaaagaagauaucgacgccguuaucgccaucggcgugcugaucagaggcgccacaccucacuucgacuauaucgccagcgagguguccaaaggccuggccgaucugagccuggaacugagaaagcccaucaccuucggcgugaucaccgcugacacacuggaacaggccauugagagagccggcaccaagcacggcaacaaaggaugggaagccgcucuguccgccaucgagauggccaaccuguucaagagccugcggugaggacuagucccuguucccagagcccacuuuuuuuucuuuuuuugaaauaaaauagccugucuuucagaucucaaaggcucuuuucagagccaccaaaaaaaaaaaaaaaaaaaaaaaaaaaaaaaaaaaaaaaaaaaaaaaaaaaaaaaaaaaaaaaaaaaaaaaaaaaaaaaaaaaaaaaaaaaaaaaaaaaaa

SEQ ID NO: 12557 - RNA, 4388 nt, Artificial Sequence
  SARS-CoV-2/Wuhan/WIV05/2019__EPI_ISL_402128 spike protein mRNA gc mod (1-1211)(K986P_V987P) LumSynth construct
aggagagucccgcagucggcguccagcggcucugcuuguucgugugugugucguugcaggccuuauucaagcuuaccauguucguguuucuggugcugcugccccugguguccagccagugugugaaccugaccaccagaacacagcugccuccagccuacaccaacagcuucaccagaggcguguacuaccccgacaagguguucagauccagcgugcugcacucuacccaggaccuguuccugccuuucuucagcaacgugaccugguuccacgccauccacguguccggcaccaauggcaccaagagauucgacaaccccgugcugcccuucaacgacgggguguacuuugccagcaccgagaaguccaacaucaucagaggcuggaucuucggcaccacacuggacagcaagacccagagccugcugaucgugaacaacgccaccaacguggucaucaaagugugcgaguuccaguucugcaacgaccccuuccugggcgucuacuaccacaagaacaacaagagcuggauggaaagcgaguuccggguguacagcagcgccaacaacugcaccuucgaguacgugucccagccuuuccugauggaccuggaaggcaagcagggcaacuucaagaaccugcgcgaguucguguucaagaacaucgacggcuacuucaaaaucuacagcaagcacaccccuaucaaccucgugcgggaucugccucagggcuucucugcucuggaaccccugguggaucugcccaucggcaucaacaucacccgguuucagacacugcuggcccugcacagaagcuaccugacaccuggcgauagcagcagcggauggacagcuggugccgccgcuuacuaugugggcuaccugcagccuagaaccuuccugcugaaguacaacgagaacggcaccaucaccgacgccguggauugugcucuggauccucugagcgagacaaagugcacccugaaguccuucaccguggaaaagggcaucuaccagaccagcaacuuccgggugcagcccaccgaauccaucgugcgguuccccaauaucaccaaucugugccccuucggcgagguguucaaugccaccagauucgccucuguguacgccuggaaccggaagcggaucagcaauugcguggccgacuacuccgugcuguacaacuccgccagcuucagcaccuucaagugcuacggcguguccccuaccaagcugaacgaccugugcuucacaaacguguacgccgacagcuucgugauccggggagaugaagugcggcagauugccccuggacagacaggcaagaucgccgacuacaacuacaagcugcccgacgacuucaccggcugugugauugccuggaacagcaacaaccuggacuccaaagucggcggcaacuacaauuaccuguaccggcuguuccggaaguccaaucugaagcccuucgagcgggacaucagcaccgaaaucuaucaggccggcagcaccccuugcaacggcguggaaggcuucaacugcuacuucccacugcaguccuacggcuuucagcccacaaauggcgugggcuaucagcccuacagagugguggugcugagcuucgaacugcugcaugcuccugccacagugugcggcccuaagaaaagcaccaaucucgugaagaacaaaugcgugaacuucaacuucaacggccugaccggcaccggcgugcugacagagagcaacaagaaguuccugccauuccagcaguuuggccgggauaucgccgauaccacagacgccguuagagauccccagacacuggaaauccuggacaucaccccaugcagcuucggcggagugucugugaucaccccuggcaccaacaccagcaaucagguggcagugcuguaccaggacgugaacuguaccgaagugcccguggccauucacgccgaucagcugacaccuacauggcggguguacuccaccggcagcaauguguuucagaccagagccggcugucugaucggagccgagcacgugaacaauagcuacgagugcgacauccccaucggcgcuggcaucugugccagcuaccagacacagacaaacagccccagacgggcuagaagcguggccagccagagcaucauugccuacacaaugucucugggcgccgagaacagcguggccuacuccaacaacucuaucgcuauccccaccaacuucaccaucagcgugaccaccgagauccugccuguguccaugaccaagaccagcguggacugcaccauguacaucugcggcgauuccaccgagugcuccaaccugcugcugcaguacggcagcuucugcacccagcugaauagagcccugacagggaucgccguggaacaggacaagaacacccaagagguguucgcccaagugaagcaaaucuacaagaccccuccuaucaaggacuucggcggcuucaauuucagccagauucugcccgauccuagcaagcccagcaagcggagcuucaucgaggaccugcuguucaacaaagugacacuggccgacgccggcuucaucaagcaguauggcgauugucugggcgacauugccgccagggaucugauuugcgcccagaaguuuaacggacugacagugcugccuccucugcugaccgaugagaugaucgcccaguacacaucugcccugcuggccggcacaaucacaagcggcuggacauuuggagcuggcgccgcucugcagauccccuuugcuaugcagauggccuaccgguucaacggcaucggagugacccagaaugugcuguacgagaaccagaagcugaucgccaaccaguucaacagcgccaucggcaagauccaggacagccugagcagcacagcaagcgcccugggaaagcugcaggacguggucaaccagaaugcccaggcacugaacacccuggucaagcagcuguccuccaacuucggcgccaucagcucugugcugaacgauauccugagcagacuggacccuccugaggccgaggugcagaucgacagacugaucacaggcagacugcagagccuccagacauacgugacccagcagcugaucagagccgccgagauuagagccucugccaaucuggccgccaccaagaugucugagugugugcugggccagagcaagagaguggacuuuugcggcaagggcuaccaccugaugagcuucccucagucugccccucacggcgugguguuucugcacgugacauaugugcccgcucaagagaagaauuucaccaccgcuccagccaucugccacgacggcaaagcccacuuuccuagagaaggcguguucguguccaacggcacccauugguucgugacacagcggaacuucuacgagccccagaucaucaccaccgacaacaccuucgugucuggcaacugcgacguugugaucggcauugugaacaauaccguguacgacccucugcagcccgagcuggacagcuucaaagaggaacuggacaaguacuuuaagaaccacacaagccccgacguggaccugggcgauaucagcggaaucaaugccagcgucgugaacauccagaaagagaucgaccggcugaacgagguggccaagaaucugaacgagagccugaucgaccugcaagaacuggggaaguacgagcaguacaucaagggcggaggaucuggcggaggacagaucuacgagggcaagcugacagccgagggccugagauuuggaaucguggccagccgguucaaucacgcccugguggauagacugguggaaggcgccaucgaugccauugucagacacggcggcagagaagaggacaucacccucguuagagugcccggcucuugggagauuccuguggcugcuggcgagcuggcccggaaagaagauaucgacgccguuaucgccaucggcgugcugaucagaggcgccacaccucacuucgacuauaucgccagcgagguguccaaaggccuggccgaucugagccuggaacugagaaagcccaucaccuucggcgugaucaccgcugacacacuggaacaggccauugagagagccggcaccaagcacggcaacaaaggaugggaagccgcucuguccgccaucgagauggccaaccuguucaagagccugcggugaggacuagucccuguucccagagcccacuuuuuuuucuuuuuuugaaauaaaauagccugucuuucagaucucaaaggcucuuuucagagccaccaaaaaaaaaaaaaaaaaaaaaaaaaaaaaaaaaaaaaaaaaaaaaaaaaaaaaaaaaaaaaaaaaaaaaaaaaaaaaaaaaaaaaaaaaaaaaaaaaaaaa

SEQ ID NO: 12558 - RNA, 4388 nt, Artificial Sequence
  SARS-CoV-2/Wuhan/WIV05/2019__EPI_ISL_402128 spike protein mRNA gc mod (1-1211)(K986P_V987P_T887WN_A1020W) LumSynth construct
aggagagucccgcagucggcguccagcggcucugcuuguucgugugugugucguugcaggccuuauucaagcuuaccauguucguguuucuggugcugcugccccugguguccagccagugugugaaccugaccaccagaacacagcugccuccagccuacaccaacagcuucaccagaggcguguacuaccccgacaagguguucagauccagcgugcugcacucuacccaggaccuguuccugccuuucuucagcaacgugaccugguuccacgccauccacguguccggcaccaauggcaccaagagauucgacaaccccgugcugcccuucaacgacgggguguacuuugccagcaccgagaaguccaacaucaucagaggcuggaucuucggcaccacacuggacagcaagacccagagccugcugaucgugaacaacgccaccaacguggucaucaaagugugcgaguuccaguucugcaacgaccccuuccugggcgucuacuaccacaagaacaacaagagcuggauggaaagcgaguuccggguguacagcagcgccaacaacugcaccuucgaguacgugucccagccuuuccugauggaccuggaaggcaagcagggcaacuucaagaaccugcgcgaguucguguucaagaacaucgacggcuacuucaaaaucuacagcaagcacaccccuaucaaccucgugcgggaucugccucagggcuucucugcucuggaaccccugguggaucugcccaucggcaucaacaucacccgguuucagacacugcuggcccugcacagaagcuaccugacaccuggcgauagcagcagcggauggacagcuggugccgccgcuuacuaugugggcuaccugcagccuagaaccuuccugcugaaguacaacgagaacggcaccaucaccgacgccguggauugugcucuggauccucugagcgagacaaagugcacccugaaguccuucaccguggaaaagggcaucuaccagaccagcaacuuccgggugcagcccaccgaauccaucgugcgguuccccaauaucaccaaucugugccccuucggcgagguguucaaugccaccagauucgccucuguguacgccuggaaccggaagcggaucagcaauugcguggccgacuacuccgugcuguacaacuccgccagcuucagcaccuucaagugcuacggcguguccccuaccaagcugaacgaccugugcuucacaaacguguacgccgacagcuucgugauccggggagaugaagugcggcagauugccccuggacagacaggcaagaucgccgacuacaacuacaagcugcccgacgacuucaccggcugugugauugccuggaacagcaacaaccuggacuccaaagucggcggcaacuacaauuaccuguaccggcuguuccggaaguccaaucugaagcccuucgagcgggacaucagcaccgaaaucuaucaggccggcagcaccccuugcaacggcguggaaggcuucaacugcuacuucccacugcaguccuacggcuuucagcccacaaauggcgugggcuaucagcccuacagagugguggugcugagcuucgaacugcugcaugcuccugccacagugugcggcccuaagaaaagcaccaaucucgugaagaacaaaugcgugaacuucaacuucaacggccugaccggcaccggcgugcugacagagagcaacaagaaguuccugccauuccagcaguuuggccgggauaucgccgauaccacagacgccguuagagauccccagacacuggaaauccuggacaucaccccaugcagcuucggcggagugucugugaucaccccuggcaccaacaccagcaaucagguggcagugcuguaccaggacgugaacuguaccgaagugcccguggccauucacgccgaucagcugacaccuacauggcggguguacuccaccggcagcaauguguuucagaccagagccggcugucugaucggagccgagcacgugaacaauagcuacgagugcgacauccccaucggcgcuggcaucugugccagcuaccagacacagacaaacagccccagacgggcuagaagcguggccagccagagcaucauugccuacacaaugucucugggcgccgagaacagcguggccuacuccaacaacucuaucgcuauccccaccaacuucaccaucagcgugaccaccgagauccugccuguguccaugaccaagaccagcguggacugcaccauguacaucugcggcgauuccaccgagugcuccaaccugcugcugcaguacggcagcuucugcacccagcugaauagagcccugacagggaucgccguggaacaggacaagaacacccaagagguguucgcccaagugaagcaaaucuacaagaccccuccuaucaaggacuucggcggcuucaauuucagccagauucugcccgauccuagcaagcccagcaagcggagcuucaucgaggaccugcuguucaacaaagugacacuggccgacgccggcuucaucaagcaguauggcgauugucugggcgacauugccgccagggaucugauuugcgcccagaaguuuaacggacugacagugcugccuccucugcugaccgaugagaugaucgcccaguacacaucugcccugcuggccggcacaaucacaagcggcuggugguuuggagcuggcgccgcucugcagauccccuuugcuaugcagauggccuaccgguucaacggcaucggagugacccagaaugugcuguacgagaaccagaagcugaucgccaaccaguucaacagcgccaucggcaagauccaggacagccugagcagcacagcaagcgcccugggaaagcugcaggacguggucaaccagaaugcccaggcacugaacacccuggucaagcagcuguccuccaacuucggcgccaucagcucugugcugaacgauauccugagcagacuggacccuccugaggccgaggugcagaucgacagacugaucacaggcagacugcagagccuccagacauacgugacccagcagcugaucagagccgccgagauuagauggucugccaaucuggccgccaccaagaugucugagugugugcugggccagagcaagagaguggacuuuugcggcaagggcuaccaccugaugagcuucccucagucugccccucacggcgugguguuucugcacgugacauaugugcccgcucaagagaagaauuucaccaccgcuccagccaucugccacgacggcaaagcccacuuuccuagagaaggcguguucguguccaacggcacccauugguucgugacacagcggaacuucuacgagccccagaucaucaccaccgacaacaccuucgugucuggcaacugcgacguugugaucggcauugugaacaauaccguguacgacccucugcagcccgagcuggacagcuucaaagaggaacuggacaaguacuuuaagaaccacacaagccccgacguggaccugggcgauaucagcggaaucaaugccagcgucgugaacauccagaaagagaucgaccggcugaacgagguggccaagaaucugaacgagagccugaucgaccugcaagaacuggggaaguacgagcaguacaucaagggcggaggaucuggcggaggacagaucuacgagggcaagcugacagccgagggccugagauuuggaaucguggccagccgguucaaucacgcccugguggauagacugguggaaggcgccaucgaugccauugucagacacggcggcagagaagaggacaucacccucguuagagugcccggcucuugggagauuccuguggcugcuggcgagcuggcccggaaagaagauaucgacgccguuaucgccaucggcgugcugaucagaggcgccacaccucacuucgacuauaucgccagcgagguguccaaaggccuggccgaucugagccuggaacugagaaagcccaucaccuucggcgugaucaccgcugacacacuggaacaggccauugagagagccggcaccaagcacggcaacaaaggaugggaagccgcucuguccgccaucgagauggccaaccuguucaagagccugcggugaggacuagucccuguucccagagcccacuuuuuuuucuuuuuuugaaauaaaauagccugucuuucagaucucaaaggcucuuuucagagccaccaaaaaaaaaaaaaaaaaaaaaaaaaaaaaaaaaaaaaaaaaaaaaaaaaaaaaaaaaaaaaaaaaaaaaaaaaaaaaaaaaaaaaaaaaaaaaaaaaaaaa

SEQ ID NO: 12559 - RNA, 4388 nt, Artificial Sequence
  SARS-CoV-2/Wuhan/WIV05/2019__EPI_ISL_402128 spike protein mRNA gc mod (1-1211)(K986P_V987P_P1069F) LumSynth construct
aggagagucccgcagucggcguccagcggcucugcuuguucgugugugugucguugcaggccuuauucaagcuuaccauguucguguuucuggugcugcugccccugguguccagccagugugugaaccugaccaccagaacacagcugccuccagccuacaccaacagcuucaccagaggcguguacuaccccgacaagguguucagauccagcgugcugcacucuacccaggaccuguuccugccuuucuucagcaacgugaccugguuccacgccauccacguguccggcaccaauggcaccaagagauucgacaaccccgugcugcccuucaacgacgggguguacuuugccagcaccgagaaguccaacaucaucagaggcuggaucuucggcaccacacuggacagcaagacccagagccugcugaucgugaacaacgccaccaacguggucaucaaagugugcgaguuccaguucugcaacgaccccuuccugggcgucuacuaccacaagaacaacaagagcuggauggaaagcgaguuccggguguacagcagcgccaacaacugcaccuucgaguacgugucccagccuuuccugauggaccuggaaggcaagcagggcaacuucaagaaccugcgcgaguucguguucaagaacaucgacggcuacuucaaaaucuacagcaagcacaccccuaucaaccucgugcgggaucugccucagggcuucucugcucuggaaccccugguggaucugcccaucggcaucaacaucacccgguuucagacacugcuggcccugcacagaagcuaccugacaccuggcgauagcagcagcggauggacagcuggugccgccgcuuacuaugugggcuaccugcagccuagaaccuuccugcugaaguacaacgagaacggcaccaucaccgacgccguggauugugcucuggauccucugagcgagacaaagugcacccugaaguccuucaccguggaaaagggcaucuaccagaccagcaacuuccgggugcagcccaccgaauccaucgugcgguuccccaauaucaccaaucugugccccuucggcgagguguucaaugccaccagauucgccucuguguacgccuggaaccggaagcggaucagcaauugcguggccgacuacuccgugcuguacaacuccgccagcuucagcaccuucaagugcuacggcguguccccuaccaagcugaacgaccugugcuucacaaacguguacgccgacagcuucgugauccggggagaugaagugcggcagauugccccuggacagacaggcaagaucgccgacuacaacuacaagcugcccgacgacuucaccggcugugugauugccuggaacagcaacaaccuggacuccaaagucggcggcaacuacaauuaccuguaccggcuguuccggaaguccaaucugaagcccuucgagcgggacaucagcaccgaaaucuaucaggccggcagcaccccuugcaacggcguggaaggcuucaacugcuacuucccacugcaguccuacggcuuucagcccacaaauggcgugggcuaucagcccuacagagugguggugcugagcuucgaacugcugcaugcuccugccacagugugcggcccuaagaaaagcaccaaucucgugaagaacaaaugcgugaacuucaacuucaacggccugaccggcaccggcgugcugacagagagcaacaagaaguuccugccauuccagcaguuuggccgggauaucgccgauaccacagacgccguuagagauccccagacacuggaaauccuggacaucaccccaugcagcuucggcggagugucugugaucaccccuggcaccaacaccagcaaucagguggcagugcuguaccaggacgugaacuguaccgaagugcccguggccauucacgccgaucagcugacaccuacauggcggguguacuccaccggcagcaauguguuucagaccagagccggcugucugaucggagccgagcacgugaacaauagcuacgagugcgacauccccaucggcgcuggcaucugugccagcuaccagacacagacaaacagccccagacgggcuagaagcguggccagccagagcaucauugccuacacaaugucucugggcgccgagaacagcguggccuacuccaacaacucuaucgcuauccccaccaacuucaccaucagcgugaccaccgagauccugccuguguccaugaccaagaccagcguggacugcaccauguacaucugcggcgauuccaccgagugcuccaaccugcugcugcaguacggcagcuucugcacccagcugaauagagcccugacagggaucgccguggaacaggacaagaacacccaagagguguucgcccaagugaagcaaaucuacaagaccccuccuaucaaggacuucggcggcuucaauuucagccagauucugcccgauccuagcaagcccagcaagcggagcuucaucgaggaccugcuguucaacaaagugacacuggccgacgccggcuucaucaagcaguauggcgauugucugggcgacauugccgccagggaucugauuugcgcccagaaguuuaacggacugacagugcugccuccucugcugaccgaugagaugaucgcccaguacacaucugcccugcuggccggcacaaucacaagcggcuggacauuuggagcuggcgccgcucugcagauccccuuugcuaugcagauggccuaccgguucaacggcaucggagugacccagaaugugcuguacgagaaccagaagcugaucgccaaccaguucaacagcgccaucggcaagauccaggacagccugagcagcacagcaagcgcccugggaaagcugcaggacguggucaaccagaaugcccaggcacugaacacccuggucaagcagcuguccuccaacuucggcgccaucagcucugugcugaacgauauccugagcagacuggacccuccugaggccgaggugcagaucgacagacugaucacaggcagacugcagagccuccagacauacgugacccagcagcugaucagagccgccgagauuagagccucugccaaucuggccgccaccaagaugucugagugugugcugggccagagcaagagaguggacuuuugcggcaagggcuaccaccugaugagcuucccucagucugccccucacggcgugguguuucugcacgugacauauguguucgcucaagagaagaauuucaccaccgcuccagccaucugccacgacggcaaagcccacuuuccuagagaaggcguguucguguccaacggcacccauugguucgugacacagcggaacuucuacgagccccagaucaucaccaccgacaacaccuucgugucuggcaacugcgacguugugaucggcauugugaacaauaccguguacgacccucugcagcccgagcuggacagcuucaaagaggaacuggacaaguacuuuaagaaccacacaagccccgacguggaccugggcgauaucagcggaaucaaugccagcgucgugaacauccagaaagagaucgaccggcugaacgagguggccaagaaucugaacgagagccugaucgaccugcaagaacuggggaaguacgagcaguacaucaagggcggaggaucuggcggaggacagaucuacgagggcaagcugacagccgagggccugagauuuggaaucguggccagccgguucaaucacgcccugguggauagacugguggaaggcgccaucgaugccauugucagacacggcggcagagaagaggacaucacccucguuagagugcccggcucuugggagauuccuguggcugcuggcgagcuggcccggaaagaagauaucgacgccguuaucgccaucggcgugcugaucagaggcgccacaccucacuucgacuauaucgccagcgagguguccaaaggccuggccgaucugagccuggaacugagaaagcccaucaccuucggcgugaucaccgcugacacacuggaacaggccauugagagagccggcaccaagcacggcaacaaaggaugggaagccgcucuguccgccaucgagauggccaaccuguucaagagccugcggugaggacuagucccuguucccagagcccacuuuuuuuucuuuuuuugaaauaaaauagccugucuuucagaucucaaaggcucuuuucagagccaccaaaaaaaaaaaaaaaaaaaaaaaaaaaaaaaaaaaaaaaaaaaaaaaaaaaaaaaaaaaaaaaaaaaaaaaaaaaaaaaaaaaaaaaaaaaaaaaaaaaaa

SEQ ID NO: 12560 - RNA, 4388 nt, Artificial Sequence
  SARS-CoV-2/Wuhan/WIV05/2019__EPI_ISL_402128 spike protein mRNA gc mod (1-1211)(K986P_V987P_ H1048Q_H1064N_ H1083N_H1101N) LumSynth construct
aggagagucccgcagucggcguccagcggcucugcuuguucgugugugugucguugcaggccuuauucaagcuuaccauguucguguuucuggugcugcugccccugguguccagccagugugugaaccugaccaccagaacacagcugccuccagccuacaccaacagcuucaccagaggcguguacuaccccgacaagguguucagauccagcgugcugcacucuacccaggaccuguuccugccuuucuucagcaacgugaccugguuccacgccauccacguguccggcaccaauggcaccaagagauucgacaaccccgugcugcccuucaacgacgggguguacuuugccagcaccgagaaguccaacaucaucagaggcuggaucuucggcaccacacuggacagcaagacccagagccugcugaucgugaacaacgccaccaacguggucaucaaagugugcgaguuccaguucugcaacgaccccuuccugggcgucuacuaccacaagaacaacaagagcuggauggaaagcgaguuccggguguacagcagcgccaacaacugcaccuucgaguacgugucccagccuuuccugauggaccuggaaggcaagcagggcaacuucaagaaccugcgcgaguucguguucaagaacaucgacggcuacuucaaaaucuacagcaagcacaccccuaucaaccucgugcgggaucugccucagggcuucucugcucuggaaccccugguggaucugcccaucggcaucaacaucacccgguuucagacacugcuggcccugcacagaagcuaccugacaccuggcgauagcagcagcggauggacagcuggugccgccgcuuacuaugugggcuaccugcagccuagaaccuuccugcugaaguacaacgagaacggcaccaucaccgacgccguggauugugcucuggauccucugagcgagacaaagugcacccugaaguccuucaccguggaaaagggcaucuaccagaccagcaacuuccgggugcagcccaccgaauccaucgugcgguuccccaauaucaccaaucugugccccuucggcgagguguucaaugccaccagauucgccucuguguacgccuggaaccggaagcggaucagcaauugcguggccgacuacuccgugcuguacaacuccgccagcuucagcaccuucaagugcuacggcguguccccuaccaagcugaacgaccugugcuucacaaacguguacgccgacagcuucgugauccggggagaugaagugcggcagauugccccuggacagacaggcaagaucgccgacuacaacuacaagcugcccgacgacuucaccggcugugugauugccuggaacagcaacaaccuggacuccaaagucggcggcaacuacaauuaccuguaccggcuguuccggaaguccaaucugaagcccuucgagcgggacaucagcaccgaaaucuaucaggccggcagcaccccuugcaacggcguggaaggcuucaacugcuacuucccacugcaguccuacggcuuucagcccacaaauggcgugggcuaucagcccuacagagugguggugcugagcuucgaacugcugcaugcuccugccacagugugcggcccuaagaaaagcaccaaucucgugaagaacaaaugcgugaacuucaacuucaacggccugaccggcaccggcgugcugacagagagcaacaagaaguuccugccauuccagcaguuuggccgggauaucgccgauaccacagacgccguuagagauccccagacacuggaaauccuggacaucaccccaugcagcuucggcggagugucugugaucaccccuggcaccaacaccagcaaucagguggcagugcuguaccaggacgugaacuguaccgaagugcccguggccauucacgccgaucagcugacaccuacauggcggguguacuccaccggcagcaauguguuucagaccagagccggcugucugaucggagccgagcacgugaacaauagcuacgagugcgacauccccaucggcgcuggcaucugugccagcuaccagacacagacaaacagccccagacgggcuagaagcguggccagccagagcaucauugccuacacaaugucucugggcgccgagaacagcguggccuacuccaacaacucuaucgcuauccccaccaacuucaccaucagcgugaccaccgagauccugccuguguccaugaccaagaccagcguggacugcaccauguacaucugcggcgauuccaccgagugcuccaaccugcugcugcaguacggcagcuucugcacccagcugaauagagcccugacagggaucgccguggaacaggacaagaacacccaagagguguucgcccaagugaagcaaaucuacaagaccccuccuaucaaggacuucggcggcuucaauuucagccagauucugcccgauccuagcaagcccagcaagcggagcuucaucgaggaccugcuguucaacaaagugacacuggccgacgccggcuucaucaagcaguauggcgauugucugggcgacauugccgccagggaucugauuugcgcccagaaguuuaacggacugacagugcugccuccucugcugaccgaugagaugaucgcccaguacacaucugcccugcuggccggcacaaucacaagcggcuggacauuuggagcuggcgccgcucugcagauccccuuugcuaugcagauggccuaccgguucaacggcaucggagugacccagaaugugcuguacgagaaccagaagcugaucgccaaccaguucaacagcgccaucggcaagauccaggacagccugagcagcacagcaagcgcccugggaaagcugcaggacguggucaaccagaaugcccaggcacugaacacccuggucaagcagcuguccuccaacuucggcgccaucagcucugugcugaacgauauccugagcagacuggacccuccugaggccgaggugcagaucgacagacugaucacaggcagacugcagagccuccagacauacgugacccagcagcugaucagagccgccgagauuagagccucugccaaucuggccgccaccaagaugucugagugugugcugggccagagcaagagaguggacuuuugcggcaagggcuaccagcugaugagcuucccucagucugccccucacggcgugguguuucugaacgugacauaugugcccgcucaagagaagaauuucaccaccgcuccagccaucugcaacgacggcaaagcccacuuuccuagagaaggcguguucguguccaacggcaccaacugguucgugacacagcggaacuucuacgagccccagaucaucaccaccgacaacaccuucgugucuggcaacugcgacguugugaucggcauugugaacaauaccguguacgacccucugcagcccgagcuggacagcuucaaagaggaacuggacaaguacuuuaagaaccacacaagccccgacguggaccugggcgauaucagcggaaucaaugccagcgucgugaacauccagaaagagaucgaccggcugaacgagguggccaagaaucugaacgagagccugaucgaccugcaagaacuggggaaguacgagcaguacaucaagggcggaggaucuggcggaggacagaucuacgagggcaagcugacagccgagggccugagauuuggaaucguggccagccgguucaaucacgcccugguggauagacugguggaaggcgccaucgaugccauugucagacacggcggcagagaagaggacaucacccucguuagagugcccggcucuugggagauuccuguggcugcuggcgagcuggcccggaaagaagauaucgacgccguuaucgccaucggcgugcugaucagaggcgccacaccucacuucgacuauaucgccagcgagguguccaaaggccuggccgaucugagccuggaacugagaaagcccaucaccuucggcgugaucaccgcugacacacuggaacaggccauugagagagccggcaccaagcacggcaacaaaggaugggaagccgcucuguccgccaucgagauggccaaccuguucaagagccugcggugaggacuagucccuguucccagagcccacuuuuuuuucuuuuuuugaaauaaaauagccugucuuucagaucucaaaggcucuuuucagagccaccaaaaaaaaaaaaaaaaaaaaaaaaaaaaaaaaaaaaaaaaaaaaaaaaaaaaaaaaaaaaaaaaaaaaaaaaaaaaaaaaaaaaaaaaaaaaaaaaaaaaa

SEQ ID NO: 12561 - RNA, 4388 nt, Artificial Sequence
  SARS-CoV-2/Wuhan/WIV05/2019__EPI_ISL_402128 spike protein mRNA gc mod (1-1211)(I712C_T1077C) LumSynth construct
aggagagucccgcagucggcguccagcggcucugcuuguucgugugugugucguugcaggccuuauucaagcuuaccauguucguguuucuggugcugcugccccugguguccagccagugugugaaccugaccaccagaacacagcugccuccagccuacaccaacagcuucaccagaggcguguacuaccccgacaagguguucagauccagcgugcugcacucuacccaggaccuguuccugccuuucuucagcaacgugaccugguuccacgccauccacguguccggcaccaauggcaccaagagauucgacaaccccgugcugcccuucaacgacgggguguacuuugccagcaccgagaaguccaacaucaucagaggcuggaucuucggcaccacacuggacagcaagacccagagccugcugaucgugaacaacgccaccaacguggucaucaaagugugcgaguuccaguucugcaacgaccccuuccugggcgucuacuaccacaagaacaacaagagcuggauggaaagcgaguuccggguguacagcagcgccaacaacugcaccuucgaguacgugucccagccuuuccugauggaccuggaaggcaagcagggcaacuucaagaaccugcgcgaguucguguucaagaacaucgacggcuacuucaaaaucuacagcaagcacaccccuaucaaccucgugcgggaucugccucagggcuucucugcucuggaaccccugguggaucugcccaucggcaucaacaucacccgguuucagacacugcuggcccugcacagaagcuaccugacaccuggcgauagcagcagcggauggacagcuggugccgccgcuuacuaugugggcuaccugcagccuagaaccuuccugcugaaguacaacgagaacggcaccaucaccgacgccguggauugugcucuggauccucugagcgagacaaagugcacccugaaguccuucaccguggaaaagggcaucuaccagaccagcaacuuccgggugcagcccaccgaauccaucgugcgguuccccaauaucaccaaucugugccccuucggcgagguguucaaugccaccagauucgccucuguguacgccuggaaccggaagcggaucagcaauugcguggccgacuacuccgugcuguacaacuccgccagcuucagcaccuucaagugcuacggcguguccccuaccaagcugaacgaccugugcuucacaaacguguacgccgacagcuucgugauccggggagaugaagugcggcagauugccccuggacagacaggcaagaucgccgacuacaacuacaagcugcccgacgacuucaccggcugugugauugccuggaacagcaacaaccuggacuccaaagucggcggcaacuacaauuaccuguaccggcuguuccggaaguccaaucugaagcccuucgagcgggacaucagcaccgaaaucuaucaggccggcagcaccccuugcaacggcguggaaggcuucaacugcuacuucccacugcaguccuacggcuuucagcccacaaauggcgugggcuaucagcccuacagagugguggugcugagcuucgaacugcugcaugcuccugccacagugugcggcccuaagaaaagcaccaaucucgugaagaacaaaugcgugaacuucaacuucaacggccugaccggcaccggcgugcugacagagagcaacaagaaguuccugccauuccagcaguuuggccgggauaucgccgauaccacagacgccguuagagauccccagacacuggaaauccuggacaucaccccaugcagcuucggcggagugucugugaucaccccuggcaccaacaccagcaaucagguggcagugcuguaccaggacgugaacuguaccgaagugcccguggccauucacgccgaucagcugacaccuacauggcggguguacuccaccggcagcaauguguuucagaccagagccggcugucugaucggagccgagcacgugaacaauagcuacgagugcgacauccccaucggcgcuggcaucugugccagcuaccagacacagacaaacagccccagacgggcuagaagcguggccagccagagcaucauugccuacacaaugucucugggcgccgagaacagcguggccuacuccaacaacucuugcgcuauccccaccaacuucaccaucagcgugaccaccgagauccugccuguguccaugaccaagaccagcguggacugcaccauguacaucugcggcgauuccaccgagugcuccaaccugcugcugcaguacggcagcuucugcacccagcugaauagagcccugacagggaucgccguggaacaggacaagaacacccaagagguguucgcccaagugaagcaaaucuacaagaccccuccuaucaaggacuucggcggcuucaauuucagccagauucugcccgauccuagcaagcccagcaagcggagcuucaucgaggaccugcuguucaacaaagugacacuggccgacgccggcuucaucaagcaguauggcgauugucugggcgacauugccgccagggaucugauuugcgcccagaaguuuaacggacugacagugcugccuccucugcugaccgaugagaugaucgcccaguacacaucugcccugcuggccggcacaaucacaagcggcuggacauuuggagcuggcgccgcucugcagauccccuuugcuaugcagauggccuaccgguucaacggcaucggagugacccagaaugugcuguacgagaaccagaagcugaucgccaaccaguucaacagcgccaucggcaagauccaggacagccugagcagcacagcaagcgcccugggaaagcugcaggacguggucaaccagaaugcccaggcacugaacacccuggucaagcagcuguccuccaacuucggcgccaucagcucugugcugaacgauauccugagcagacuggacaaggucgaggccgaggugcagaucgacagacugaucacaggcagacugcagagccuccagacauacgugacccagcagcugaucagagccgccgagauuagagccucugccaaucuggccgccaccaagaugucugagugugugcugggccagagcaagagaguggacuuuugcggcaagggcuaccaccugaugagcuucccucagucugccccucacggcgugguguuucugcacgugacauaugugcccgcucaagagaagaauuucaccugugcuccagccaucugccacgacggcaaagcccacuuuccuagagaaggcguguucguguccaacggcacccauugguucgugacacagcggaacuucuacgagccccagaucaucaccaccgacaacaccuucgugucuggcaacugcgacguugugaucggcauugugaacaauaccguguacgacccucugcagcccgagcuggacagcuucaaagaggaacuggacaaguacuuuaagaaccacacaagccccgacguggaccugggcgauaucagcggaaucaaugccagcgucgugaacauccagaaagagaucgaccggcugaacgagguggccaagaaucugaacgagagccugaucgaccugcaagaacuggggaaguacgagcaguacaucaagggcggaggaucuggcggaggacagaucuacgagggcaagcugacagccgagggccugagauuuggaaucguggccagccgguucaaucacgcccugguggauagacugguggaaggcgccaucgaugccauugucagacacggcggcagagaagaggacaucacccucguuagagugcccggcucuugggagauuccuguggcugcuggcgagcuggcccggaaagaagauaucgacgccguuaucgccaucggcgugcugaucagaggcgccacaccucacuucgacuauaucgccagcgagguguccaaaggccuggccgaucugagccuggaacugagaaagcccaucaccuucggcgugaucaccgcugacacacuggaacaggccauugagagagccggcaccaagcacggcaacaaaggaugggaagccgcucuguccgccaucgagauggccaaccuguucaagagccugcggugaggacuagucccuguucccagagcccacuuuuuuuucuuuuuuugaaauaaaauagccugucuuucagaucucaaaggcucuuuucagagccaccaaaaaaaaaaaaaaaaaaaaaaaaaaaaaaaaaaaaaaaaaaaaaaaaaaaaaaaaaaaaaaaaaaaaaaaaaaaaaaaaaaaaaaaaaaaaaaaaaaaaa

SEQ ID NO: 12562 - RNA, 4388 nt, Artificial Sequence
  SARS-CoV-2/Wuhan/WIV05/2019__EPI_ISL_402128 spike protein mRNA gc mod (1-1211)(I714C_Y1110C) LumSynth construct
aggagagucccgcagucggcguccagcggcucugcuuguucgugugugugucguugcaggccuuauucaagcuuaccauguucguguuucuggugcugcugccccugguguccagccagugugugaaccugaccaccagaacacagcugccuccagccuacaccaacagcuucaccagaggcguguacuaccccgacaagguguucagauccagcgugcugcacucuacccaggaccuguuccugccuuucuucagcaacgugaccugguuccacgccauccacguguccggcaccaauggcaccaagagauucgacaaccccgugcugcccuucaacgacgggguguacuuugccagcaccgagaaguccaacaucaucagaggcuggaucuucggcaccacacuggacagcaagacccagagccugcugaucgugaacaacgccaccaacguggucaucaaagugugcgaguuccaguucugcaacgaccccuuccugggcgucuacuaccacaagaacaacaagagcuggauggaaagcgaguuccggguguacagcagcgccaacaacugcaccuucgaguacgugucccagccuuuccugauggaccuggaaggcaagcagggcaacuucaagaaccugcgcgaguucguguucaagaacaucgacggcuacuucaaaaucuacagcaagcacaccccuaucaaccucgugcgggaucugccucagggcuucucugcucuggaaccccugguggaucugcccaucggcaucaacaucacccgguuucagacacugcuggcccugcacagaagcuaccugacaccuggcgauagcagcagcggauggacagcuggugccgccgcuuacuaugugggcuaccugcagccuagaaccuuccugcugaaguacaacgagaacggcaccaucaccgacgccguggauugugcucuggauccucugagcgagacaaagugcacccugaaguccuucaccguggaaaagggcaucuaccagaccagcaacuuccgggugcagcccaccgaauccaucgugcgguuccccaauaucaccaaucugugccccuucggcgagguguucaaugccaccagauucgccucuguguacgccuggaaccggaagcggaucagcaauugcguggccgacuacuccgugcuguacaacuccgccagcuucagcaccuucaagugcuacggcguguccccuaccaagcugaacgaccugugcuucacaaacguguacgccgacagcuucgugauccggggagaugaagugcggcagauugccccuggacagacaggcaagaucgccgacuacaacuacaagcugcccgacgacuucaccggcugugugauugccuggaacagcaacaaccuggacuccaaagucggcggcaacuacaauuaccuguaccggcuguuccggaaguccaaucugaagcccuucgagcgggacaucagcaccgaaaucuaucaggccggcagcaccccuugcaacggcguggaaggcuucaacugcuacuucccacugcaguccuacggcuuucagcccacaaauggcgugggcuaucagcccuacagagugguggugcugagcuucgaacugcugcaugcuccugccacagugugcggcccuaagaaaagcaccaaucucgugaagaacaaaugcgugaacuucaacuucaacggccugaccggcaccggcgugcugacagagagcaacaagaaguuccugccauuccagcaguuuggccgggauaucgccgauaccacagacgccguuagagauccccagacacuggaaauccuggacaucaccccaugcagcuucggcggagugucugugaucaccccuggcaccaacaccagcaaucagguggcagugcuguaccaggacgugaacuguaccgaagugcccguggccauucacgccgaucagcugacaccuacauggcggguguacuccaccggcagcaauguguuucagaccagagccggcugucugaucggagccgagcacgugaacaauagcuacgagugcgacauccccaucggcgcuggcaucugugccagcuaccagacacagacaaacagccccagacgggcuagaagcguggccagccagagcaucauugccuacacaaugucucugggcgccgagaacagcguggccuacuccaacaacucuaucgcuugccccaccaacuucaccaucagcgugaccaccgagauccugccuguguccaugaccaagaccagcguggacugcaccauguacaucugcggcgauuccaccgagugcuccaaccugcugcugcaguacggcagcuucugcacccagcugaauagagcccugacagggaucgccguggaacaggacaagaacacccaagagguguucgcccaagugaagcaaaucuacaagaccccuccuaucaaggacuucggcggcuucaauuucagccagauucugcccgauccuagcaagcccagcaagcggagcuucaucgaggaccugcuguucaacaaagugacacuggccgacgccggcuucaucaagcaguauggcgauugucugggcgacauugccgccagggaucugauuugcgcccagaaguuuaacggacugacagugcugccuccucugcugaccgaugagaugaucgcccaguacacaucugcccugcuggccggcacaaucacaagcggcuggacauuuggagcuggcgccgcucugcagauccccuuugcuaugcagauggccuaccgguucaacggcaucggagugacccagaaugugcuguacgagaaccagaagcugaucgccaaccaguucaacagcgccaucggcaagauccaggacagccugagcagcacagcaagcgcccugggaaagcugcaggacguggucaaccagaaugcccaggcacugaacacccuggucaagcagcuguccuccaacuucggcgccaucagcucugugcugaacgauauccugagcagacuggacaaggucgaggccgaggugcagaucgacagacugaucacaggcagacugcagagccuccagacauacgugacccagcagcugaucagagccgccgagauuagagccucugccaaucuggccgccaccaagaugucugagugugugcugggccagagcaagagaguggacuuuugcggcaagggcuaccaccugaugagcuucccucagucugccccucacggcgugguguuucugcacgugacauaugugcccgcucaagagaagaauuucaccaccgcuccagccaucugccacgacggcaaagcccacuuuccuagagaaggcguguucguguccaacggcacccauugguucgugacacagcggaacuucugugagccccagaucaucaccaccgacaacaccuucgugucuggcaacugcgacguugugaucggcauugugaacaauaccguguacgacccucugcagcccgagcuggacagcuucaaagaggaacuggacaaguacuuuaagaaccacacaagccccgacguggaccugggcgauaucagcggaaucaaugccagcgucgugaacauccagaaagagaucgaccggcugaacgagguggccaagaaucugaacgagagccugaucgaccugcaagaacuggggaaguacgagcaguacaucaagggcggaggaucuggcggaggacagaucuacgagggcaagcugacagccgagggccugagauuuggaaucguggccagccgguucaaucacgcccugguggauagacugguggaaggcgccaucgaugccauugucagacacggcggcagagaagaggacaucacccucguuagagugcccggcucuugggagauuccuguggcugcuggcgagcuggcccggaaagaagauaucgacgccguuaucgccaucggcgugcugaucagaggcgccacaccucacuucgacuauaucgccagcgagguguccaaaggccuggccgaucugagccuggaacugagaaagcccaucaccuucggcgugaucaccgcugacacacuggaacaggccauugagagagccggcaccaagcacggcaacaaaggaugggaagccgcucuguccgccaucgagauggccaaccuguucaagagccugcggugaggacuagucccuguucccagagcccacuuuuuuuucuuuuuuugaaauaaaauagccugucuuucagaucucaaaggcucuuuucagagccaccaaaaaaaaaaaaaaaaaaaaaaaaaaaaaaaaaaaaaaaaaaaaaaaaaaaaaaaaaaaaaaaaaaaaaaaaaaaaaaaaaaaaaaaaaaaaaaaaaaaaa

SEQ ID NO: 12563 - RNA, 4388 nt, Artificial Sequence
  SARS-CoV-2/Wuhan/WIV05/2019__EPI_ISL_402128 spike protein mRNA gc mod (1-1211)(P715C_P1069C) LumSynth construct
aggagagucccgcagucggcguccagcggcucugcuuguucgugugugugucguugcaggccuuauucaagcuuaccauguucguguuucuggugcugcugccccugguguccagccagugugugaaccugaccaccagaacacagcugccuccagccuacaccaacagcuucaccagaggcguguacuaccccgacaagguguucagauccagcgugcugcacucuacccaggaccuguuccugccuuucuucagcaacgugaccugguuccacgccauccacguguccggcaccaauggcaccaagagauucgacaaccccgugcugcccuucaacgacgggguguacuuugccagcaccgagaaguccaacaucaucagaggcuggaucuucggcaccacacuggacagcaagacccagagccugcugaucgugaacaacgccaccaacguggucaucaaagugugcgaguuccaguucugcaacgaccccuuccugggcgucuacuaccacaagaacaacaagagcuggauggaaagcgaguuccggguguacagcagcgccaacaacugcaccuucgaguacgugucccagccuuuccugauggaccuggaaggcaagcagggcaacuucaagaaccugcgcgaguucguguucaagaacaucgacggcuacuucaaaaucuacagcaagcacaccccuaucaaccucgugcgggaucugccucagggcuucucugcucuggaaccccugguggaucugcccaucggcaucaacaucacccgguuucagacacugcuggcccugcacagaagcuaccugacaccuggcgauagcagcagcggauggacagcuggugccgccgcuuacuaugugggcuaccugcagccuagaaccuuccugcugaaguacaacgagaacggcaccaucaccgacgccguggauugugcucuggauccucugagcgagacaaagugcacccugaaguccuucaccguggaaaagggcaucuaccagaccagcaacuuccgggugcagcccaccgaauccaucgugcgguuccccaauaucaccaaucugugccccuucggcgagguguucaaugccaccagauucgccucuguguacgccuggaaccggaagcggaucagcaauugcguggccgacuacuccgugcuguacaacuccgccagcuucagcaccuucaagugcuacggcguguccccuaccaagcugaacgaccugugcuucacaaacguguacgccgacagcuucgugauccggggagaugaagugcggcagauugccccuggacagacaggcaagaucgccgacuacaacuacaagcugcccgacgacuucaccggcugugugauugccuggaacagcaacaaccuggacuccaaagucggcggcaacuacaauuaccuguaccggcuguuccggaaguccaaucugaagcccuucgagcgggacaucagcaccgaaaucuaucaggccggcagcaccccuugcaacggcguggaaggcuucaacugcuacuucccacugcaguccuacggcuuucagcccacaaauggcgugggcuaucagcccuacagagugguggugcugagcuucgaacugcugcaugcuccugccacagugugcggcccuaagaaaagcaccaaucucgugaagaacaaaugcgugaacuucaacuucaacggccugaccggcaccggcgugcugacagagagcaacaagaaguuccugccauuccagcaguuuggccgggauaucgccgauaccacagacgccguuagagauccccagacacuggaaauccuggacaucaccccaugcagcuucggcggagugucugugaucaccccuggcaccaacaccagcaaucagguggcagugcuguaccaggacgugaacuguaccgaagugcccguggccauucacgccgaucagcugacaccuacauggcggguguacuccaccggcagcaauguguuucagaccagagccggcugucugaucggagccgagcacgugaacaauagcuacgagugcgacauccccaucggcgcuggcaucugugccagcuaccagacacagacaaacagccccagacgggcuagaagcguggccagccagagcaucauugccuacacaaugucucugggcgccgagaacagcguggccuacuccaacaacucuaucgcuaucugcaccaacuucaccaucagcgugaccaccgagauccugccuguguccaugaccaagaccagcguggacugcaccauguacaucugcggcgauuccaccgagugcuccaaccugcugcugcaguacggcagcuucugcacccagcugaauagagcccugacagggaucgccguggaacaggacaagaacacccaagagguguucgcccaagugaagcaaaucuacaagaccccuccuaucaaggacuucggcggcuucaauuucagccagauucugcccgauccuagcaagcccagcaagcggagcuucaucgaggaccugcuguucaacaaagugacacuggccgacgccggcuucaucaagcaguauggcgauugucugggcgacauugccgccagggaucugauuugcgcccagaaguuuaacggacugacagugcugccuccucugcugaccgaugagaugaucgcccaguacacaucugcccugcuggccggcacaaucacaagcggcuggacauuuggagcuggcgccgcucugcagauccccuuugcuaugcagauggccuaccgguucaacggcaucggagugacccagaaugugcuguacgagaaccagaagcugaucgccaaccaguucaacagcgccaucggcaagauccaggacagccugagcagcacagcaagcgcccugggaaagcugcaggacguggucaaccagaaugcccaggcacugaacacccuggucaagcagcuguccuccaacuucggcgccaucagcucugugcugaacgauauccugagcagacuggacaaggucgaggccgaggugcagaucgacagacugaucacaggcagacugcagagccuccagacauacgugacccagcagcugaucagagccgccgagauuagagccucugccaaucuggccgccaccaagaugucugagugugugcugggccagagcaagagaguggacuuuugcggcaagggcuaccaccugaugagcuucccucagucugccccucacggcgugguguuucugcacgugacauaugugugugcucaagagaagaauuucaccaccgcuccagccaucugccacgacggcaaagcccacuuuccuagagaaggcguguucguguccaacggcacccauugguucgugacacagcggaacuucuacgagccccagaucaucaccaccgacaacaccuucgugucuggcaacugcgacguugugaucggcauugugaacaauaccguguacgacccucugcagcccgagcuggacagcuucaaagaggaacuggacaaguacuuuaagaaccacacaagccccgacguggaccugggcgauaucagcggaaucaaugccagcgucgugaacauccagaaagagaucgaccggcugaacgagguggccaagaaucugaacgagagccugaucgaccugcaagaacuggggaaguacgagcaguacaucaagggcggaggaucuggcggaggacagaucuacgagggcaagcugacagccgagggccugagauuuggaaucguggccagccgguucaaucacgcccugguggauagacugguggaaggcgccaucgaugccauugucagacacggcggcagagaagaggacaucacccucguuagagugcccggcucuugggagauuccuguggcugcuggcgagcuggcccggaaagaagauaucgacgccguuaucgccaucggcgugcugaucagaggcgccacaccucacuucgacuauaucgccagcgagguguccaaaggccuggccgaucugagccuggaacugagaaagcccaucaccuucggcgugaucaccgcugacacacuggaacaggccauugagagagccggcaccaagcacggcaacaaaggaugggaagccgcucuguccgccaucgagauggccaaccuguucaagagccugcggugaggacuagucccuguucccagagcccacuuuuuuuucuuuuuuugaaauaaaauagccugucuuucagaucucaaaggcucuuuucagagccaccaaaaaaaaaaaaaaaaaaaaaaaaaaaaaaaaaaaaaaaaaaaaaaaaaaaaaaaaaaaaaaaaaaaaaaaaaaaaaaaaaaaaaaaaaaaaaaaaaaaaa

SEQ ID NO: 12564 - RNA, 4388 nt, Artificial Sequence
  SARS-CoV-2/Wuhan/WIV05/2019__EPI_ISL_402128 spike protein mRNA gc mod (1-1211)(G889C_L1034C) LumSynth construct
aggagagucccgcagucggcguccagcggcucugcuuguucgugugugugucguugcaggccuuauucaagcuuaccauguucguguuucuggugcugcugccccugguguccagccagugugugaaccugaccaccagaacacagcugccuccagccuacaccaacagcuucaccagaggcguguacuaccccgacaagguguucagauccagcgugcugcacucuacccaggaccuguuccugccuuucuucagcaacgugaccugguuccacgccauccacguguccggcaccaauggcaccaagagauucgacaaccccgugcugcccuucaacgacgggguguacuuugccagcaccgagaaguccaacaucaucagaggcuggaucuucggcaccacacuggacagcaagacccagagccugcugaucgugaacaacgccaccaacguggucaucaaagugugcgaguuccaguucugcaacgaccccuuccugggcgucuacuaccacaagaacaacaagagcuggauggaaagcgaguuccggguguacagcagcgccaacaacugcaccuucgaguacgugucccagccuuuccugauggaccuggaaggcaagcagggcaacuucaagaaccugcgcgaguucguguucaagaacaucgacggcuacuucaaaaucuacagcaagcacaccccuaucaaccucgugcgggaucugccucagggcuucucugcucuggaaccccugguggaucugcccaucggcaucaacaucacccgguuucagacacugcuggcccugcacagaagcuaccugacaccuggcgauagcagcagcggauggacagcuggugccgccgcuuacuaugugggcuaccugcagccuagaaccuuccugcugaaguacaacgagaacggcaccaucaccgacgccguggauugugcucuggauccucugagcgagacaaagugcacccugaaguccuucaccguggaaaagggcaucuaccagaccagcaacuuccgggugcagcccaccgaauccaucgugcgguuccccaauaucaccaaucugugccccuucggcgagguguucaaugccaccagauucgccucuguguacgccuggaaccggaagcggaucagcaauugcguggccgacuacuccgugcuguacaacuccgccagcuucagcaccuucaagugcuacggcguguccccuaccaagcugaacgaccugugcuucacaaacguguacgccgacagcuucgugauccggggagaugaagugcggcagauugccccuggacagacaggcaagaucgccgacuacaacuacaagcugcccgacgacuucaccggcugugugauugccuggaacagcaacaaccuggacuccaaagucggcggcaacuacaauuaccuguaccggcuguuccggaaguccaaucugaagcccuucgagcgggacaucagcaccgaaaucuaucaggccggcagcaccccuugcaacggcguggaaggcuucaacugcuacuucccacugcaguccuacggcuuucagcccacaaauggcgugggcuaucagcccuacagagugguggugcugagcuucgaacugcugcaugcuccugccacagugugcggcccuaagaaaagcaccaaucucgugaagaacaaaugcgugaacuucaacuucaacggccugaccggcaccggcgugcugacagagagcaacaagaaguuccugccauuccagcaguuuggccgggauaucgccgauaccacagacgccguuagagauccccagacacuggaaauccuggacaucaccccaugcagcuucggcggagugucugugaucaccccuggcaccaacaccagcaaucagguggcagugcuguaccaggacgugaacuguaccgaagugcccguggccauucacgccgaucagcugacaccuacauggcggguguacuccaccggcagcaauguguuucagaccagagccggcugucugaucggagccgagcacgugaacaauagcuacgagugcgacauccccaucggcgcuggcaucugugccagcuaccagacacagacaaacagccccagacgggcuagaagcguggccagccagagcaucauugccuacacaaugucucugggcgccgagaacagcguggccuacuccaacaacucuaucgcuauccccaccaacuucaccaucagcgugaccaccgagauccugccuguguccaugaccaagaccagcguggacugcaccauguacaucugcggcgauuccaccgagugcuccaaccugcugcugcaguacggcagcuucugcacccagcugaauagagcccugacagggaucgccguggaacaggacaagaacacccaagagguguucgcccaagugaagcaaaucuacaagaccccuccuaucaaggacuucggcggcuucaauuucagccagauucugcccgauccuagcaagcccagcaagcggagcuucaucgaggaccugcuguucaacaaagugacacuggccgacgccggcuucaucaagcaguauggcgauugucugggcgacauugccgccagggaucugauuugcgcccagaaguuuaacggacugacagugcugccuccucugcugaccgaugagaugaucgcccaguacacaucugcccugcuggccggcacaaucacaagcggcuggacauuuugcgcuggcgccgcucugcagauccccuuugcuaugcagauggccuaccgguucaacggcaucggagugacccagaaugugcuguacgagaaccagaagcugaucgccaaccaguucaacagcgccaucggcaagauccaggacagccugagcagcacagcaagcgcccugggaaagcugcaggacguggucaaccagaaugcccaggcacugaacacccuggucaagcagcuguccuccaacuucggcgccaucagcucugugcugaacgauauccugagcagacuggacaaggucgaggccgaggugcagaucgacagacugaucacaggcagacugcagagccuccagacauacgugacccagcagcugaucagagccgccgagauuagagccucugccaaucuggccgccaccaagaugucugaguguguguguggccagagcaagagaguggacuuuugcggcaagggcuaccaccugaugagcuucccucagucugccccucacggcgugguguuucugcacgugacauaugugcccgcucaagagaagaauuucaccaccgcuccagccaucugccacgacggcaaagcccacuuuccuagagaaggcguguucguguccaacggcacccauugguucgugacacagcggaacuucuacgagccccagaucaucaccaccgacaacaccuucgugucuggcaacugcgacguugugaucggcauugugaacaauaccguguacgacccucugcagcccgagcuggacagcuucaaagaggaacuggacaaguacuuuaagaaccacacaagccccgacguggaccugggcgauaucagcggaaucaaugccagcgucgugaacauccagaaagagaucgaccggcugaacgagguggccaagaaucugaacgagagccugaucgaccugcaagaacuggggaaguacgagcaguacaucaagggcggaggaucuggcggaggacagaucuacgagggcaagcugacagccgagggccugagauuuggaaucguggccagccgguucaaucacgcccugguggauagacugguggaaggcgccaucgaugccauugucagacacggcggcagagaagaggacaucacccucguuagagugcccggcucuugggagauuccuguggcugcuggcgagcuggcccggaaagaagauaucgacgccguuaucgccaucggcgugcugaucagaggcgccacaccucacuucgacuauaucgccagcgagguguccaaaggccuggccgaucugagccuggaacugagaaagcccaucaccuucggcgugaucaccgcugacacacuggaacaggccauugagagagccggcaccaagcacggcaacaaaggaugggaagccgcucuguccgccaucgagauggccaaccuguucaagagccugcggugaggacuagucccuguucccagagcccacuuuuuuuucuuuuuuugaaauaaaauagccugucuuucagaucucaaaggcucuuuucagagccaccaaaaaaaaaaaaaaaaaaaaaaaaaaaaaaaaaaaaaaaaaaaaaaaaaaaaaaaaaaaaaaaaaaaaaaaaaaaaaaaaaaaaaaaaaaaaaaaaaaaaa

SEQ ID NO: 12565 - RNA, 4388 nt, Artificial Sequence
  SARS-CoV-2/Wuhan/WIV05/2019__EPI_ISL_402128 spike protein mRNA gc mod (1-1211)(I909C_Y1047C) LumSynth construct
aggagagucccgcagucggcguccagcggcucugcuuguucgugugugugucguugcaggccuuauucaagcuuaccauguucguguuucuggugcugcugccccugguguccagccagugugugaaccugaccaccagaacacagcugccuccagccuacaccaacagcuucaccagaggcguguacuaccccgacaagguguucagauccagcgugcugcacucuacccaggaccuguuccugccuuucuucagcaacgugaccugguuccacgccauccacguguccggcaccaauggcaccaagagauucgacaaccccgugcugcccuucaacgacgggguguacuuugccagcaccgagaaguccaacaucaucagaggcuggaucuucggcaccacacuggacagcaagacccagagccugcugaucgugaacaacgccaccaacguggucaucaaagugugcgaguuccaguucugcaacgaccccuuccugggcgucuacuaccacaagaacaacaagagcuggauggaaagcgaguuccggguguacagcagcgccaacaacugcaccuucgaguacgugucccagccuuuccugauggaccuggaaggcaagcagggcaacuucaagaaccugcgcgaguucguguucaagaacaucgacggcuacuucaaaaucuacagcaagcacaccccuaucaaccucgugcgggaucugccucagggcuucucugcucuggaaccccugguggaucugcccaucggcaucaacaucacccgguuucagacacugcuggcccugcacagaagcuaccugacaccuggcgauagcagcagcggauggacagcuggugccgccgcuuacuaugugggcuaccugcagccuagaaccuuccugcugaaguacaacgagaacggcaccaucaccgacgccguggauugugcucuggauccucugagcgagacaaagugcacccugaaguccuucaccguggaaaagggcaucuaccagaccagcaacuuccgggugcagcccaccgaauccaucgugcgguuccccaauaucaccaaucugugccccuucggcgagguguucaaugccaccagauucgccucuguguacgccuggaaccggaagcggaucagcaauugcguggccgacuacuccgugcuguacaacuccgccagcuucagcaccuucaagugcuacggcguguccccuaccaagcugaacgaccugugcuucacaaacguguacgccgacagcuucgugauccggggagaugaagugcggcagauugccccuggacagacaggcaagaucgccgacuacaacuacaagcugcccgacgacuucaccggcugugugauugccuggaacagcaacaaccuggacuccaaagucggcggcaacuacaauuaccuguaccggcuguuccggaaguccaaucugaagcccuucgagcgggacaucagcaccgaaaucuaucaggccggcagcaccccuugcaacggcguggaaggcuucaacugcuacuucccacugcaguccuacggcuuucagcccacaaauggcgugggcuaucagcccuacagagugguggugcugagcuucgaacugcugcaugcuccugccacagugugcggcccuaagaaaagcaccaaucucgugaagaacaaaugcgugaacuucaacuucaacggccugaccggcaccggcgugcugacagagagcaacaagaaguuccugccauuccagcaguuuggccgggauaucgccgauaccacagacgccguuagagauccccagacacuggaaauccuggacaucaccccaugcagcuucggcggagugucugugaucaccccuggcaccaacaccagcaaucagguggcagugcuguaccaggacgugaacuguaccgaagugcccguggccauucacgccgaucagcugacaccuacauggcggguguacuccaccggcagcaauguguuucagaccagagccggcugucugaucggagccgagcacgugaacaauagcuacgagugcgacauccccaucggcgcuggcaucugugccagcuaccagacacagacaaacagccccagacgggcuagaagcguggccagccagagcaucauugccuacacaaugucucugggcgccgagaacagcguggccuacuccaacaacucuaucgcuauccccaccaacuucaccaucagcgugaccaccgagauccugccuguguccaugaccaagaccagcguggacugcaccauguacaucugcggcgauuccaccgagugcuccaaccugcugcugcaguacggcagcuucugcacccagcugaauagagcccugacagggaucgccguggaacaggacaagaacacccaagagguguucgcccaagugaagcaaaucuacaagaccccuccuaucaaggacuucggcggcuucaauuucagccagauucugcccgauccuagcaagcccagcaagcggagcuucaucgaggaccugcuguucaacaaagugacacuggccgacgccggcuucaucaagcaguauggcgauugucugggcgacauugccgccagggaucugauuugcgcccagaaguuuaacggacugacagugcugccuccucugcugaccgaugagaugaucgcccaguacacaucugcccugcuggccggcacaaucacaagcggcuggacauuuggagcuggcgccgcucugcagauccccuuugcuaugcagauggccuaccgguucaacggcugcggagugacccagaaugugcuguacgagaaccagaagcugaucgccaaccaguucaacagcgccaucggcaagauccaggacagccugagcagcacagcaagcgcccugggaaagcugcaggacguggucaaccagaaugcccaggcacugaacacccuggucaagcagcuguccuccaacuucggcgccaucagcucugugcugaacgauauccugagcagacuggacaaggucgaggccgaggugcagaucgacagacugaucacaggcagacugcagagccuccagacauacgugacccagcagcugaucagagccgccgagauuagagccucugccaaucuggccgccaccaagaugucugagugugugcugggccagagcaagagaguggacuuuugcggcaagggcugucaccugaugagcuucccucagucugccccucacggcgugguguuucugcacgugacauaugugcccgcucaagagaagaauuucaccaccgcuccagccaucugccacgacggcaaagcccacuuuccuagagaaggcguguucguguccaacggcacccauugguucgugacacagcggaacuucuacgagccccagaucaucaccaccgacaacaccuucgugucuggcaacugcgacguugugaucggcauugugaacaauaccguguacgacccucugcagcccgagcuggacagcuucaaagaggaacuggacaaguacuuuaagaaccacacaagccccgacguggaccugggcgauaucagcggaaucaaugccagcgucgugaacauccagaaagagaucgaccggcugaacgagguggccaagaaucugaacgagagccugaucgaccugcaagaacuggggaaguacgagcaguacaucaagggcggaggaucuggcggaggacagaucuacgagggcaagcugacagccgagggccugagauuuggaaucguggccagccgguucaaucacgcccugguggauagacugguggaaggcgccaucgaugccauugucagacacggcggcagagaagaggacaucacccucguuagagugcccggcucuugggagauuccuguggcugcuggcgagcuggcccggaaagaagauaucgacgccguuaucgccaucggcgugcugaucagaggcgccacaccucacuucgacuauaucgccagcgagguguccaaaggccuggccgaucugagccuggaacugagaaagcccaucaccuucggcgugaucaccgcugacacacuggaacaggccauugagagagccggcaccaagcacggcaacaaaggaugggaagccgcucuguccgccaucgagauggccaaccuguucaagagccugcggugaggacuagucccuguucccagagcccacuuuuuuuucuuuuuuugaaauaaaauagccugucuuucagaucucaaaggcucuuuucagagccaccaaaaaaaaaaaaaaaaaaaaaaaaaaaaaaaaaaaaaaaaaaaaaaaaaaaaaaaaaaaaaaaaaaaaaaaaaaaaaaaaaaaaaaaaaaaaaaaaaaaaa

SEQ ID NO: 12566 - RNA, 4388 nt, Artificial Sequence
  SARS-CoV-2/Wuhan/WIV05/2019__EPI_ISL_402128 spike protein mRNA gc mod (1-1211)(Q965C_S1003C) LumSynth construct
aggagagucccgcagucggcguccagcggcucugcuuguucgugugugugucguugcaggccuuauucaagcuuaccauguucguguuucuggugcugcugccccugguguccagccagugugugaaccugaccaccagaacacagcugccuccagccuacaccaacagcuucaccagaggcguguacuaccccgacaagguguucagauccagcgugcugcacucuacccaggaccuguuccugccuuucuucagcaacgugaccugguuccacgccauccacguguccggcaccaauggcaccaagagauucgacaaccccgugcugcccuucaacgacgggguguacuuugccagcaccgagaaguccaacaucaucagaggcuggaucuucggcaccacacuggacagcaagacccagagccugcugaucgugaacaacgccaccaacguggucaucaaagugugcgaguuccaguucugcaacgaccccuuccugggcgucuacuaccacaagaacaacaagagcuggauggaaagcgaguuccggguguacagcagcgccaacaacugcaccuucgaguacgugucccagccuuuccugauggaccuggaaggcaagcagggcaacuucaagaaccugcgcgaguucguguucaagaacaucgacggcuacuucaaaaucuacagcaagcacaccccuaucaaccucgugcgggaucugccucagggcuucucugcucuggaaccccugguggaucugcccaucggcaucaacaucacccgguuucagacacugcuggcccugcacagaagcuaccugacaccuggcgauagcagcagcggauggacagcuggugccgccgcuuacuaugugggcuaccugcagccuagaaccuuccugcugaaguacaacgagaacggcaccaucaccgacgccguggauugugcucuggauccucugagcgagacaaagugcacccugaaguccuucaccguggaaaagggcaucuaccagaccagcaacuuccgggugcagcccaccgaauccaucgugcgguuccccaauaucaccaaucugugccccuucggcgagguguucaaugccaccagauucgccucuguguacgccuggaaccggaagcggaucagcaauugcguggccgacuacuccgugcuguacaacuccgccagcuucagcaccuucaagugcuacggcguguccccuaccaagcugaacgaccugugcuucacaaacguguacgccgacagcuucgugauccggggagaugaagugcggcagauugccccuggacagacaggcaagaucgccgacuacaacuacaagcugcccgacgacuucaccggcugugugauugccuggaacagcaacaaccuggacuccaaagucggcggcaacuacaauuaccuguaccggcuguuccggaaguccaaucugaagcccuucgagcgggacaucagcaccgaaaucuaucaggccggcagcaccccuugcaacggcguggaaggcuucaacugcuacuucccacugcaguccuacggcuuucagcccacaaauggcgugggcuaucagcccuacagagugguggugcugagcuucgaacugcugcaugcuccugccacagugugcggcccuaagaaaagcaccaaucucgugaagaacaaaugcgugaacuucaacuucaacggccugaccggcaccggcgugcugacagagagcaacaagaaguuccugccauuccagcaguuuggccgggauaucgccgauaccacagacgccguuagagauccccagacacuggaaauccuggacaucaccccaugcagcuucggcggagugucugugaucaccccuggcaccaacaccagcaaucagguggcagugcuguaccaggacgugaacuguaccgaagugcccguggccauucacgccgaucagcugacaccuacauggcggguguacuccaccggcagcaauguguuucagaccagagccggcugucugaucggagccgagcacgugaacaauagcuacgagugcgacauccccaucggcgcuggcaucugugccagcuaccagacacagacaaacagccccagacgggcuagaagcguggccagccagagcaucauugccuacacaaugucucugggcgccgagaacagcguggccuacuccaacaacucuaucgcuauccccaccaacuucaccaucagcgugaccaccgagauccugccuguguccaugaccaagaccagcguggacugcaccauguacaucugcggcgauuccaccgagugcuccaaccugcugcugcaguacggcagcuucugcacccagcugaauagagcccugacagggaucgccguggaacaggacaagaacacccaagagguguucgcccaagugaagcaaaucuacaagaccccuccuaucaaggacuucggcggcuucaauuucagccagauucugcccgauccuagcaagcccagcaagcggagcuucaucgaggaccugcuguucaacaaagugacacuggccgacgccggcuucaucaagcaguauggcgauugucugggcgacauugccgccagggaucugauuugcgcccagaaguuuaacggacugacagugcugccuccucugcugaccgaugagaugaucgcccaguacacaucugcccugcuggccggcacaaucacaagcggcuggacauuuggagcuggcgccgcucugcagauccccuuugcuaugcagauggccuaccgguucaacggcaucggagugacccagaaugugcuguacgagaaccagaagcugaucgccaaccaguucaacagcgccaucggcaagauccaggacagccugagcagcacagcaagcgcccugggaaagcugcaggacguggucaaccagaaugcccaggcacugaacacccuggucaagugccuguccuccaacuucggcgccaucagcucugugcugaacgauauccugagcagacuggacaaggucgaggccgaggugcagaucgacagacugaucacaggcagacugcagugucuccagacauacgugacccagcagcugaucagagccgccgagauuagagccucugccaaucuggccgccaccaagaugucugagugugugcugggccagagcaagagaguggacuuuugcggcaagggcuaccaccugaugagcuucccucagucugccccucacggcgugguguuucugcacgugacauaugugcccgcucaagagaagaauuucaccaccgcuccagccaucugccacgacggcaaagcccacuuuccuagagaaggcguguucguguccaacggcacccauugguucgugacacagcggaacuucuacgagccccagaucaucaccaccgacaacaccuucgugucuggcaacugcgacguugugaucggcauugugaacaauaccguguacgacccucugcagcccgagcuggacagcuucaaagaggaacuggacaaguacuuuaagaaccacacaagccccgacguggaccugggcgauaucagcggaaucaaugccagcgucgugaacauccagaaagagaucgaccggcugaacgagguggccaagaaucugaacgagagccugaucgaccugcaagaacuggggaaguacgagcaguacaucaagggcggaggaucuggcggaggacagaucuacgagggcaagcugacagccgagggccugagauuuggaaucguggccagccgguucaaucacgcccugguggauagacugguggaaggcgccaucgaugccauugucagacacggcggcagagaagaggacaucacccucguuagagugcccggcucuugggagauuccuguggcugcuggcgagcuggcccggaaagaagauaucgacgccguuaucgccaucggcgugcugaucagaggcgccacaccucacuucgacuauaucgccagcgagguguccaaaggccuggccgaucugagccuggaacugagaaagcccaucaccuucggcgugaucaccgcugacacacuggaacaggccauugagagagccggcaccaagcacggcaacaaaggaugggaagccgcucuguccgccaucgagauggccaaccuguucaagagccugcggugaggacuagucccuguucccagagcccacuuuuuuuucuuuuuuugaaauaaaauagccugucuuucagaucucaaaggcucuuuucagagccaccaaaaaaaaaaaaaaaaaaaaaaaaaaaaaaaaaaaaaaaaaaaaaaaaaaaaaaaaaaaaaaaaaaaaaaaaaaaaaaaaaaaaaaaaaaaaaaaaaaaaa

SEQ ID NO: 12567 - RNA, 4388 nt, Artificial Sequence
  SARS-CoV-2/Wuhan/WIV05/2019__EPI_ISL_402128 spike protein mRNA gc mod (1-1211)(F970C_G999C) LumSynth construct
aggagagucccgcagucggcguccagcggcucugcuuguucgugugugugucguugcaggccuuauucaagcuuaccauguucguguuucuggugcugcugccccugguguccagccagugugugaaccugaccaccagaacacagcugccuccagccuacaccaacagcuucaccagaggcguguacuaccccgacaagguguucagauccagcgugcugcacucuacccaggaccuguuccugccuuucuucagcaacgugaccugguuccacgccauccacguguccggcaccaauggcaccaagagauucgacaaccccgugcugcccuucaacgacgggguguacuuugccagcaccgagaaguccaacaucaucagaggcuggaucuucggcaccacacuggacagcaagacccagagccugcugaucgugaacaacgccaccaacguggucaucaaagugugcgaguuccaguucugcaacgaccccuuccugggcgucuacuaccacaagaacaacaagagcuggauggaaagcgaguuccggguguacagcagcgccaacaacugcaccuucgaguacgugucccagccuuuccugauggaccuggaaggcaagcagggcaacuucaagaaccugcgcgaguucguguucaagaacaucgacggcuacuucaaaaucuacagcaagcacaccccuaucaaccucgugcgggaucugccucagggcuucucugcucuggaaccccugguggaucugcccaucggcaucaacaucacccgguuucagacacugcuggcccugcacagaagcuaccugacaccuggcgauagcagcagcggauggacagcuggugccgccgcuuacuaugugggcuaccugcagccuagaaccuuccugcugaaguacaacgagaacggcaccaucaccgacgccguggauugugcucuggauccucugagcgagacaaagugcacccugaaguccuucaccguggaaaagggcaucuaccagaccagcaacuuccgggugcagcccaccgaauccaucgugcgguuccccaauaucaccaaucugugccccuucggcgagguguucaaugccaccagauucgccucuguguacgccuggaaccggaagcggaucagcaauugcguggccgacuacuccgugcuguacaacuccgccagcuucagcaccuucaagugcuacggcguguccccuaccaagcugaacgaccugugcuucacaaacguguacgccgacagcuucgugauccggggagaugaagugcggcagauugccccuggacagacaggcaagaucgccgacuacaacuacaagcugcccgacgacuucaccggcugugugauugccuggaacagcaacaaccuggacuccaaagucggcggcaacuacaauuaccuguaccggcuguuccggaaguccaaucugaagcccuucgagcgggacaucagcaccgaaaucuaucaggccggcagcaccccuugcaacggcguggaaggcuucaacugcuacuucccacugcaguccuacggcuuucagcccacaaauggcgugggcuaucagcccuacagagugguggugcugagcuucgaacugcugcaugcuccugccacagugugcggcccuaagaaaagcaccaaucucgugaagaacaaaugcgugaacuucaacuucaacggccugaccggcaccggcgugcugacagagagcaacaagaaguuccugccauuccagcaguuuggccgggauaucgccgauaccacagacgccguuagagauccccagacacuggaaauccuggacaucaccccaugcagcuucggcggagugucugugaucaccccuggcaccaacaccagcaaucagguggcagugcuguaccaggacgugaacuguaccgaagugcccguggccauucacgccgaucagcugacaccuacauggcggguguacuccaccggcagcaauguguuucagaccagagccggcugucugaucggagccgagcacgugaacaauagcuacgagugcgacauccccaucggcgcuggcaucugugccagcuaccagacacagacaaacagccccagacgggcuagaagcguggccagccagagcaucauugccuacacaaugucucugggcgccgagaacagcguggccuacuccaacaacucuaucgcuauccccaccaacuucaccaucagcgugaccaccgagauccugccuguguccaugaccaagaccagcguggacugcaccauguacaucugcggcgauuccaccgagugcuccaaccugcugcugcaguacggcagcuucugcacccagcugaauagagcccugacagggaucgccguggaacaggacaagaacacccaagagguguucgcccaagugaagcaaaucuacaagaccccuccuaucaaggacuucggcggcuucaauuucagccagauucugcccgauccuagcaagcccagcaagcggagcuucaucgaggaccugcuguucaacaaagugacacuggccgacgccggcuucaucaagcaguauggcgauugucugggcgacauugccgccagggaucugauuugcgcccagaaguuuaacggacugacagugcugccuccucugcugaccgaugagaugaucgcccaguacacaucugcccugcuggccggcacaaucacaagcggcuggacauuuggagcuggcgccgcucugcagauccccuuugcuaugcagauggccuaccgguucaacggcaucggagugacccagaaugugcuguacgagaaccagaagcugaucgccaaccaguucaacagcgccaucggcaagauccaggacagccugagcagcacagcaagcgcccugggaaagcugcaggacguggucaaccagaaugcccaggcacugaacacccuggucaagcagcuguccuccaacugcggcgccaucagcucugugcugaacgauauccugagcagacuggacaaggucgaggccgaggugcagaucgacagacugaucacauguagacugcagagccuccagacauacgugacccagcagcugaucagagccgccgagauuagagccucugccaaucuggccgccaccaagaugucugagugugugcugggccagagcaagagaguggacuuuugcggcaagggcuaccaccugaugagcuucccucagucugccccucacggcgugguguuucugcacgugacauaugugcccgcucaagagaagaauuucaccaccgcuccagccaucugccacgacggcaaagcccacuuuccuagagaaggcguguucguguccaacggcacccauugguucgugacacagcggaacuucuacgagccccagaucaucaccaccgacaacaccuucgugucuggcaacugcgacguugugaucggcauugugaacaauaccguguacgacccucugcagcccgagcuggacagcuucaaagaggaacuggacaaguacuuuaagaaccacacaagccccgacguggaccugggcgauaucagcggaaucaaugccagcgucgugaacauccagaaagagaucgaccggcugaacgagguggccaagaaucugaacgagagccugaucgaccugcaagaacuggggaaguacgagcaguacaucaagggcggaggaucuggcggaggacagaucuacgagggcaagcugacagccgagggccugagauuuggaaucguggccagccgguucaaucacgcccugguggauagacugguggaaggcgccaucgaugccauugucagacacggcggcagagaagaggacaucacccucguuagagugcccggcucuugggagauuccuguggcugcuggcgagcuggcccggaaagaagauaucgacgccguuaucgccaucggcgugcugaucagaggcgccacaccucacuucgacuauaucgccagcgagguguccaaaggccuggccgaucugagccuggaacugagaaagcccaucaccuucggcgugaucaccgcugacacacuggaacaggccauugagagagccggcaccaagcacggcaacaaaggaugggaagccgcucuguccgccaucgagauggccaaccuguucaagagccugcggugaggacuagucccuguucccagagcccacuuuuuuuucuuuuuuugaaauaaaauagccugucuuucagaucucaaaggcucuuuucagagccaccaaaaaaaaaaaaaaaaaaaaaaaaaaaaaaaaaaaaaaaaaaaaaaaaaaaaaaaaaaaaaaaaaaaaaaaaaaaaaaaaaaaaaaaaaaaaaaaaaaaaa

SEQ ID NO: 12568 - RNA, 4388 nt, Artificial Sequence
  SARS-CoV-2/Wuhan/WIV05/2019__EPI_ISL_402128 spike protein mRNA gc mod (1-1211)(A972C_R995C) LumSynth construct
aggagagucccgcagucggcguccagcggcucugcuuguucgugugugugucguugcaggccuuauucaagcuuaccauguucguguuucuggugcugcugccccugguguccagccagugugugaaccugaccaccagaacacagcugccuccagccuacaccaacagcuucaccagaggcguguacuaccccgacaagguguucagauccagcgugcugcacucuacccaggaccuguuccugccuuucuucagcaacgugaccugguuccacgccauccacguguccggcaccaauggcaccaagagauucgacaaccccgugcugcccuucaacgacgggguguacuuugccagcaccgagaaguccaacaucaucagaggcuggaucuucggcaccacacuggacagcaagacccagagccugcugaucgugaacaacgccaccaacguggucaucaaagugugcgaguuccaguucugcaacgaccccuuccugggcgucuacuaccacaagaacaacaagagcuggauggaaagcgaguuccggguguacagcagcgccaacaacugcaccuucgaguacgugucccagccuuuccugauggaccuggaaggcaagcagggcaacuucaagaaccugcgcgaguucguguucaagaacaucgacggcuacuucaaaaucuacagcaagcacaccccuaucaaccucgugcgggaucugccucagggcuucucugcucuggaaccccugguggaucugcccaucggcaucaacaucacccgguuucagacacugcuggcccugcacagaagcuaccugacaccuggcgauagcagcagcggauggacagcuggugccgccgcuuacuaugugggcuaccugcagccuagaaccuuccugcugaaguacaacgagaacggcaccaucaccgacgccguggauugugcucuggauccucugagcgagacaaagugcacccugaaguccuucaccguggaaaagggcaucuaccagaccagcaacuuccgggugcagcccaccgaauccaucgugcgguuccccaauaucaccaaucugugccccuucggcgagguguucaaugccaccagauucgccucuguguacgccuggaaccggaagcggaucagcaauugcguggccgacuacuccgugcuguacaacuccgccagcuucagcaccuucaagugcuacggcguguccccuaccaagcugaacgaccugugcuucacaaacguguacgccgacagcuucgugauccggggagaugaagugcggcagauugccccuggacagacaggcaagaucgccgacuacaacuacaagcugcccgacgacuucaccggcugugugauugccuggaacagcaacaaccuggacuccaaagucggcggcaacuacaauuaccuguaccggcuguuccggaaguccaaucugaagcccuucgagcgggacaucagcaccgaaaucuaucaggccggcagcaccccuugcaacggcguggaaggcuucaacugcuacuucccacugcaguccuacggcuuucagcccacaaauggcgugggcuaucagcccuacagagugguggugcugagcuucgaacugcugcaugcuccugccacagugugcggcccuaagaaaagcaccaaucucgugaagaacaaaugcgugaacuucaacuucaacggccugaccggcaccggcgugcugacagagagcaacaagaaguuccugccauuccagcaguuuggccgggauaucgccgauaccacagacgccguuagagauccccagacacuggaaauccuggacaucaccccaugcagcuucggcggagugucugugaucaccccuggcaccaacaccagcaaucagguggcagugcuguaccaggacgugaacuguaccgaagugcccguggccauucacgccgaucagcugacaccuacauggcggguguacuccaccggcagcaauguguuucagaccagagccggcugucugaucggagccgagcacgugaacaauagcuacgagugcgacauccccaucggcgcuggcaucugugccagcuaccagacacagacaaacagccccagacgggcuagaagcguggccagccagagcaucauugccuacacaaugucucugggcgccgagaacagcguggccuacuccaacaacucuaucgcuauccccaccaacuucaccaucagcgugaccaccgagauccugccuguguccaugaccaagaccagcguggacugcaccauguacaucugcggcgauuccaccgagugcuccaaccugcugcugcaguacggcagcuucugcacccagcugaauagagcccugacagggaucgccguggaacaggacaagaacacccaagagguguucgcccaagugaagcaaaucuacaagaccccuccuaucaaggacuucggcggcuucaauuucagccagauucugcccgauccuagcaagcccagcaagcggagcuucaucgaggaccugcuguucaacaaagugacacuggccgacgccggcuucaucaagcaguauggcgauugucugggcgacauugccgccagggaucugauuugcgcccagaaguuuaacggacugacagugcugccuccucugcugaccgaugagaugaucgcccaguacacaucugcccugcuggccggcacaaucacaagcggcuggacauuuggagcuggcgccgcucugcagauccccuuugcuaugcagauggccuaccgguucaacggcaucggagugacccagaaugugcuguacgagaaccagaagcugaucgccaaccaguucaacagcgccaucggcaagauccaggacagccugagcagcacagcaagcgcccugggaaagcugcaggacguggucaaccagaaugcccaggcacugaacacccuggucaagcagcuguccuccaacuucggcugcaucagcucugugcugaacgauauccugagcagacuggacaaggucgaggccgaggugcagaucgacugucugaucacaggcagacugcagagccuccagacauacgugacccagcagcugaucagagccgccgagauuagagccucugccaaucuggccgccaccaagaugucugagugugugcugggccagagcaagagaguggacuuuugcggcaagggcuaccaccugaugagcuucccucagucugccccucacggcgugguguuucugcacgugacauaugugcccgcucaagagaagaauuucaccaccgcuccagccaucugccacgacggcaaagcccacuuuccuagagaaggcguguucguguccaacggcacccauugguucgugacacagcggaacuucuacgagccccagaucaucaccaccgacaacaccuucgugucuggcaacugcgacguugugaucggcauugugaacaauaccguguacgacccucugcagcccgagcuggacagcuucaaagaggaacuggacaaguacuuuaagaaccacacaagccccgacguggaccugggcgauaucagcggaaucaaugccagcgucgugaacauccagaaagagaucgaccggcugaacgagguggccaagaaucugaacgagagccugaucgaccugcaagaacuggggaaguacgagcaguacaucaagggcggaggaucuggcggaggacagaucuacgagggcaagcugacagccgagggccugagauuuggaaucguggccagccgguucaaucacgcccugguggauagacugguggaaggcgccaucgaugccauugucagacacggcggcagagaagaggacaucacccucguuagagugcccggcucuugggagauuccuguggcugcuggcgagcuggcccggaaagaagauaucgacgccguuaucgccaucggcgugcugaucagaggcgccacaccucacuucgacuauaucgccagcgagguguccaaaggccuggccgaucugagccuggaacugagaaagcccaucaccuucggcgugaucaccgcugacacacuggaacaggccauugagagagccggcaccaagcacggcaacaaaggaugggaagccgcucuguccgccaucgagauggccaaccuguucaagagccugcggugaggacuagucccuguucccagagcccacuuuuuuuucuuuuuuugaaauaaaauagccugucuuucagaucucaaaggcucuuuucagagccaccaaaaaaaaaaaaaaaaaaaaaaaaaaaaaaaaaaaaaaaaaaaaaaaaaaaaaaaaaaaaaaaaaaaaaaaaaaaaaaaaaaaaaaaaaaaaaaaaaaaaa

SEQ ID NO: 12569 - RNA, 4388 nt, Artificial Sequence
  SARS-CoV-2/Wuhan/WIV05/2019__EPI_ISL_402128 spike protein mRNA gc mod (1-1211)(A890C_V1040C) LumSynth construct
aggagagucccgcagucggcguccagcggcucugcuuguucgugugugugucguugcaggccuuauucaagcuuaccauguucguguuucuggugcugcugccccugguguccagccagugugugaaccugaccaccagaacacagcugccuccagccuacaccaacagcuucaccagaggcguguacuaccccgacaagguguucagauccagcgugcugcacucuacccaggaccuguuccugccuuucuucagcaacgugaccugguuccacgccauccacguguccggcaccaauggcaccaagagauucgacaaccccgugcugcccuucaacgacgggguguacuuugccagcaccgagaaguccaacaucaucagaggcuggaucuucggcaccacacuggacagcaagacccagagccugcugaucgugaacaacgccaccaacguggucaucaaagugugcgaguuccaguucugcaacgaccccuuccugggcgucuacuaccacaagaacaacaagagcuggauggaaagcgaguuccggguguacagcagcgccaacaacugcaccuucgaguacgugucccagccuuuccugauggaccuggaaggcaagcagggcaacuucaagaaccugcgcgaguucguguucaagaacaucgacggcuacuucaaaaucuacagcaagcacaccccuaucaaccucgugcgggaucugccucagggcuucucugcucuggaaccccugguggaucugcccaucggcaucaacaucacccgguuucagacacugcuggcccugcacagaagcuaccugacaccuggcgauagcagcagcggauggacagcuggugccgccgcuuacuaugugggcuaccugcagccuagaaccuuccugcugaaguacaacgagaacggcaccaucaccgacgccguggauugugcucuggauccucugagcgagacaaagugcacccugaaguccuucaccguggaaaagggcaucuaccagaccagcaacuuccgggugcagcccaccgaauccaucgugcgguuccccaauaucaccaaucugugccccuucggcgagguguucaaugccaccagauucgccucuguguacgccuggaaccggaagcggaucagcaauugcguggccgacuacuccgugcuguacaacuccgccagcuucagcaccuucaagugcuacggcguguccccuaccaagcugaacgaccugugcuucacaaacguguacgccgacagcuucgugauccggggagaugaagugcggcagauugccccuggacagacaggcaagaucgccgacuacaacuacaagcugcccgacgacuucaccggcugugugauugccuggaacagcaacaaccuggacuccaaagucggcggcaacuacaauuaccuguaccggcuguuccggaaguccaaucugaagcccuucgagcgggacaucagcaccgaaaucuaucaggccggcagcaccccuugcaacggcguggaaggcuucaacugcuacuucccacugcaguccuacggcuuucagcccacaaauggcgugggcuaucagcccuacagagugguggugcugagcuucgaacugcugcaugcuccugccacagugugcggcccuaagaaaagcaccaaucucgugaagaacaaaugcgugaacuucaacuucaacggccugaccggcaccggcgugcugacagagagcaacaagaaguuccugccauuccagcaguuuggccgggauaucgccgauaccacagacgccguuagagauccccagacacuggaaauccuggacaucaccccaugcagcuucggcggagugucugugaucaccccuggcaccaacaccagcaaucagguggcagugcuguaccaggacgugaacuguaccgaagugcccguggccauucacgccgaucagcugacaccuacauggcggguguacuccaccggcagcaauguguuucagaccagagccggcugucugaucggagccgagcacgugaacaauagcuacgagugcgacauccccaucggcgcuggcaucugugccagcuaccagacacagacaaacagccccagacgggcuagaagcguggccagccagagcaucauugccuacacaaugucucugggcgccgagaacagcguggccuacuccaacaacucuaucgcuauccccaccaacuucaccaucagcgugaccaccgagauccugccuguguccaugaccaagaccagcguggacugcaccauguacaucugcggcgauuccaccgagugcuccaaccugcugcugcaguacggcagcuucugcacccagcugaauagagcccugacagggaucgccguggaacaggacaagaacacccaagagguguucgcccaagugaagcaaaucuacaagaccccuccuaucaaggacuucggcggcuucaauuucagccagauucugcccgauccuagcaagcccagcaagcggagcuucaucgaggaccugcuguucaacaaagugacacuggccgacgccggcuucaucaagcaguauggcgauugucugggcgacauugccgccagggaucugauuugcgcccagaaguuuaacggacugacagugcugccuccucugcugaccgaugagaugaucgcccaguacacaucugcccugcuggccggcacaaucacaagcggcuggacauuuggaugcggcgccgcucugcagauccccuuugcuaugcagauggccuaccgguucaacggcaucggagugacccagaaugugcuguacgagaaccagaagcugaucgccaaccaguucaacagcgccaucggcaagauccaggacagccugagcagcacagcaagcgcccugggaaagcugcaggacguggucaaccagaaugcccaggcacugaacacccuggucaagcagcuguccuccaacuucggcgccaucagcucugugcugaacgauauccugagcagacuggacaaggucgaggccgaggugcagaucgacagacugaucacaggcagacugcagagccuccagacauacgugacccagcagcugaucagagccgccgagauuagagccucugccaaucuggccgccaccaagaugucugagugugugcugggccagagcaagagaugugacuuuugcggcaagggcuaccaccugaugagcuucccucagucugccccucacggcgugguguuucugcacgugacauaugugcccgcucaagagaagaauuucaccaccgcuccagccaucugccacgacggcaaagcccacuuuccuagagaaggcguguucguguccaacggcacccauugguucgugacacagcggaacuucuacgagccccagaucaucaccaccgacaacaccuucgugucuggcaacugcgacguugugaucggcauugugaacaauaccguguacgacccucugcagcccgagcuggacagcuucaaagaggaacuggacaaguacuuuaagaaccacacaagccccgacguggaccugggcgauaucagcggaaucaaugccagcgucgugaacauccagaaagagaucgaccggcugaacgagguggccaagaaucugaacgagagccugaucgaccugcaagaacuggggaaguacgagcaguacaucaagggcggaggaucuggcggaggacagaucuacgagggcaagcugacagccgagggccugagauuuggaaucguggccagccgguucaaucacgcccugguggauagacugguggaaggcgccaucgaugccauugucagacacggcggcagagaagaggacaucacccucguuagagugcccggcucuugggagauuccuguggcugcuggcgagcuggcccggaaagaagauaucgacgccguuaucgccaucggcgugcugaucagaggcgccacaccucacuucgacuauaucgccagcgagguguccaaaggccuggccgaucugagccuggaacugagaaagcccaucaccuucggcgugaucaccgcugacacacuggaacaggccauugagagagccggcaccaagcacggcaacaaaggaugggaagccgcucuguccgccaucgagauggccaaccuguucaagagccugcggugaggacuagucccuguucccagagcccacuuuuuuuucuuuuuuugaaauaaaauagccugucuuucagaucucaaaggcucuuuucagagccaccaaaaaaaaaaaaaaaaaaaaaaaaaaaaaaaaaaaaaaaaaaaaaaaaaaaaaaaaaaaaaaaaaaaaaaaaaaaaaaaaaaaaaaaaaaaaaaaaaaaaa

SEQ ID NO: 12570 - RNA, 4388 nt, Artificial Sequence
  SARS-CoV-2/Wuhan/WIV05/2019__EPI_ISL_402128 spike protein mRNA gc mod (1-1211)(T874C_S1055C) LumSynth construct
aggagagucccgcagucggcguccagcggcucugcuuguucgugugugugucguugcaggccuuauucaagcuuaccauguucguguuucuggugcugcugccccugguguccagccagugugugaaccugaccaccagaacacagcugccuccagccuacaccaacagcuucaccagaggcguguacuaccccgacaagguguucagauccagcgugcugcacucuacccaggaccuguuccugccuuucuucagcaacgugaccugguuccacgccauccacguguccggcaccaauggcaccaagagauucgacaaccccgugcugcccuucaacgacgggguguacuuugccagcaccgagaaguccaacaucaucagaggcuggaucuucggcaccacacuggacagcaagacccagagccugcugaucgugaacaacgccaccaacguggucaucaaagugugcgaguuccaguucugcaacgaccccuuccugggcgucuacuaccacaagaacaacaagagcuggauggaaagcgaguuccggguguacagcagcgccaacaacugcaccuucgaguacgugucccagccuuuccugauggaccuggaaggcaagcagggcaacuucaagaaccugcgcgaguucguguucaagaacaucgacggcuacuucaaaaucuacagcaagcacaccccuaucaaccucgugcgggaucugccucagggcuucucugcucuggaaccccugguggaucugcccaucggcaucaacaucacccgguuucagacacugcuggcccugcacagaagcuaccugacaccuggcgauagcagcagcggauggacagcuggugccgccgcuuacuaugugggcuaccugcagccuagaaccuuccugcugaaguacaacgagaacggcaccaucaccgacgccguggauugugcucuggauccucugagcgagacaaagugcacccugaaguccuucaccguggaaaagggcaucuaccagaccagcaacuuccgggugcagcccaccgaauccaucgugcgguuccccaauaucaccaaucugugccccuucggcgagguguucaaugccaccagauucgccucuguguacgccuggaaccggaagcggaucagcaauugcguggccgacuacuccgugcuguacaacuccgccagcuucagcaccuucaagugcuacggcguguccccuaccaagcugaacgaccugugcuucacaaacguguacgccgacagcuucgugauccggggagaugaagugcggcagauugccccuggacagacaggcaagaucgccgacuacaacuacaagcugcccgacgacuucaccggcugugugauugccuggaacagcaacaaccuggacuccaaagucggcggcaacuacaauuaccuguaccggcuguuccggaaguccaaucugaagcccuucgagcgggacaucagcaccgaaaucuaucaggccggcagcaccccuugcaacggcguggaaggcuucaacugcuacuucccacugcaguccuacggcuuucagcccacaaauggcgugggcuaucagcccuacagagugguggugcugagcuucgaacugcugcaugcuccugccacagugugcggcccuaagaaaagcaccaaucucgugaagaacaaaugcgugaacuucaacuucaacggccugaccggcaccggcgugcugacagagagcaacaagaaguuccugccauuccagcaguuuggccgggauaucgccgauaccacagacgccguuagagauccccagacacuggaaauccuggacaucaccccaugcagcuucggcggagugucugugaucaccccuggcaccaacaccagcaaucagguggcagugcuguaccaggacgugaacuguaccgaagugcccguggccauucacgccgaucagcugacaccuacauggcggguguacuccaccggcagcaauguguuucagaccagagccggcugucugaucggagccgagcacgugaacaauagcuacgagugcgacauccccaucggcgcuggcaucugugccagcuaccagacacagacaaacagccccagacgggcuagaagcguggccagccagagcaucauugccuacacaaugucucugggcgccgagaacagcguggccuacuccaacaacucuaucgcuauccccaccaacuucaccaucagcgugaccaccgagauccugccuguguccaugaccaagaccagcguggacugcaccauguacaucugcggcgauuccaccgagugcuccaaccugcugcugcaguacggcagcuucugcacccagcugaauagagcccugacagggaucgccguggaacaggacaagaacacccaagagguguucgcccaagugaagcaaaucuacaagaccccuccuaucaaggacuucggcggcuucaauuucagccagauucugcccgauccuagcaagcccagcaagcggagcuucaucgaggaccugcuguucaacaaagugacacuggccgacgccggcuucaucaagcaguauggcgauugucugggcgacauugccgccagggaucugauuugcgcccagaaguuuaacggacugacagugcugccuccucugcugaccgaugagaugaucgcccaguacugcucugcccugcuggccggcacaaucacaagcggcuggacauuuggagcuggcgccgcucugcagauccccuuugcuaugcagauggccuaccgguucaacggcaucggagugacccagaaugugcuguacgagaaccagaagcugaucgccaaccaguucaacagcgccaucggcaagauccaggacagccugagcagcacagcaagcgcccugggaaagcugcaggacguggucaaccagaaugcccaggcacugaacacccuggucaagcagcuguccuccaacuucggcgccaucagcucugugcugaacgauauccugagcagacuggacaaggucgaggccgaggugcagaucgacagacugaucacaggcagacugcagagccuccagacauacgugacccagcagcugaucagagccgccgagauuagagccucugccaaucuggccgccaccaagaugucugagugugugcugggccagagcaagagaguggacuuuugcggcaagggcuaccaccugaugagcuucccucagugcgccccucacggcgugguguuucugcacgugacauaugugcccgcucaagagaagaauuucaccaccgcuccagccaucugccacgacggcaaagcccacuuuccuagagaaggcguguucguguccaacggcacccauugguucgugacacagcggaacuucuacgagccccagaucaucaccaccgacaacaccuucgugucuggcaacugcgacguugugaucggcauugugaacaauaccguguacgacccucugcagcccgagcuggacagcuucaaagaggaacuggacaaguacuuuaagaaccacacaagccccgacguggaccugggcgauaucagcggaaucaaugccagcgucgugaacauccagaaagagaucgaccggcugaacgagguggccaagaaucugaacgagagccugaucgaccugcaagaacuggggaaguacgagcaguacaucaagggcggaggaucuggcggaggacagaucuacgagggcaagcugacagccgagggccugagauuuggaaucguggccagccgguucaaucacgcccugguggauagacugguggaaggcgccaucgaugccauugucagacacggcggcagagaagaggacaucacccucguuagagugcccggcucuugggagauuccuguggcugcuggcgagcuggcccggaaagaagauaucgacgccguuaucgccaucggcgugcugaucagaggcgccacaccucacuucgacuauaucgccagcgagguguccaaaggccuggccgaucugagccuggaacugagaaagcccaucaccuucggcgugaucaccgcugacacacuggaacaggccauugagagagccggcaccaagcacggcaacaaaggaugggaagccgcucuguccgccaucgagauggccaaccuguucaagagccugcggugaggacuagucccuguucccagagcccacuuuuuuuucuuuuuuugaaauaaaauagccugucuuucagaucucaaaggcucuuuucagagccaccaaaaaaaaaaaaaaaaaaaaaaaaaaaaaaaaaaaaaaaaaaaaaaaaaaaaaaaaaaaaaaaaaaaaaaaaaaaaaaaaaaaaaaaaaaaaaaaaaaaaa

SEQ ID NO: 12571 - RNA, 4412 nt, Artificial Sequence
  SARS-CoV-2/Wuhan/WIV05/2019__EPI_ISL_402128 spike protein mRNA gc mod (1-1211) Ferritin construct
aggagagucccgcagucggcguccagcggcucugcuuguucgugugugugucguugcaggccuuauucaagcuuaccauguucguguuucuggugcugcugccccugguguccagccagugugugaaccugaccaccagaacacagcugccuccagccuacaccaacagcuucaccagaggcguguacuaccccgacaagguguucagauccagcgugcugcacucuacccaggaccuguuccugccuuucuucagcaacgugaccugguuccacgccauccacguguccggcaccaauggcaccaagagauucgacaaccccgugcugcccuucaacgacgggguguacuuugccagcaccgagaaguccaacaucaucagaggcuggaucuucggcaccacacuggacagcaagacccagagccugcugaucgugaacaacgccaccaacguggucaucaaagugugcgaguuccaguucugcaacgaccccuuccugggcgucuacuaccacaagaacaacaagagcuggauggaaagcgaguuccggguguacagcagcgccaacaacugcaccuucgaguacgugucccagccuuuccugauggaccuggaaggcaagcagggcaacuucaagaaccugcgcgaguucguguucaagaacaucgacggcuacuucaaaaucuacagcaagcacaccccuaucaaccucgugcgggaucugccucagggcuucucugcucuggaaccccugguggaucugcccaucggcaucaacaucacccgguuucagacacugcuggcccugcacagaagcuaccugacaccuggcgauagcagcagcggauggacagcuggugccgccgcuuacuaugugggcuaccugcagccuagaaccuuccugcugaaguacaacgagaacggcaccaucaccgacgccguggauugugcucuggauccucugagcgagacaaagugcacccugaaguccuucaccguggaaaagggcaucuaccagaccagcaacuuccgggugcagcccaccgaauccaucgugcgguuccccaauaucaccaaucugugccccuucggcgagguguucaaugccaccagauucgccucuguguacgccuggaaccggaagcggaucagcaauugcguggccgacuacuccgugcuguacaacuccgccagcuucagcaccuucaagugcuacggcguguccccuaccaagcugaacgaccugugcuucacaaacguguacgccgacagcuucgugauccggggagaugaagugcggcagauugccccuggacagacaggcaagaucgccgacuacaacuacaagcugcccgacgacuucaccggcugugugauugccuggaacagcaacaaccuggacuccaaagucggcggcaacuacaauuaccuguaccggcuguuccggaaguccaaucugaagcccuucgagcgggacaucagcaccgaaaucuaucaggccggcagcaccccuugcaacggcguggaaggcuucaacugcuacuucccacugcaguccuacggcuuucagcccacaaauggcgugggcuaucagcccuacagagugguggugcugagcuucgaacugcugcaugcuccugccacagugugcggcccuaagaaaagcaccaaucucgugaagaacaaaugcgugaacuucaacuucaacggccugaccggcaccggcgugcugacagagagcaacaagaaguuccugccauuccagcaguuuggccgggauaucgccgauaccacagacgccguuagagauccccagacacuggaaauccuggacaucaccccaugcagcuucggcggagugucugugaucaccccuggcaccaacaccagcaaucagguggcagugcuguaccaggacgugaacuguaccgaagugcccguggccauucacgccgaucagcugacaccuacauggcggguguacuccaccggcagcaauguguuucagaccagagccggcugucugaucggagccgagcacgugaacaauagcuacgagugcgacauccccaucggcgcuggcaucugugccagcuaccagacacagacaaacagccccagacgggcuagaagcguggccagccagagcaucauugccuacacaaugucucugggcgccgagaacagcguggccuacuccaacaacucuaucgcuauccccaccaacuucaccaucagcgugaccaccgagauccugccuguguccaugaccaagaccagcguggacugcaccauguacaucugcggcgauuccaccgagugcuccaaccugcugcugcaguacggcagcuucugcacccagcugaauagagcccugacagggaucgccguggaacaggacaagaacacccaagagguguucgcccaagugaagcaaaucuacaagaccccuccuaucaaggacuucggcggcuucaauuucagccagauucugcccgauccuagcaagcccagcaagcggagcuucaucgaggaccugcuguucaacaaagugacacuggccgacgccggcuucaucaagcaguauggcgauugucugggcgacauugccgccagggaucugauuugcgcccagaaguuuaacggacugacagugcugccuccucugcugaccgaugagaugaucgcccaguacacaucugcccugcuggccggcacaaucacaagcggcuggacauuuggagcuggcgccgcucugcagauccccuuugcuaugcagauggccuaccgguucaacggcaucggagugacccagaaugugcuguacgagaaccagaagcugaucgccaaccaguucaacagcgccaucggcaagauccaggacagccugagcagcacagcaagcgcccugggaaagcugcaggacguggucaaccagaaugcccaggcacugaacacccuggucaagcagcuguccuccaacuucggcgccaucagcucugugcugaacgauauccugagcagacuggacaaggucgaggccgaggugcagaucgacagacugaucacaggcagacugcagagccuccagacauacgugacccagcagcugaucagagccgccgagauuagagccucugccaaucuggccgccaccaagaugucugagugugugcugggccagagcaagagaguggacuuuugcggcaagggcuaccaccugaugagcuucccucagucugccccucacggcgugguguuucugcacgugacauaugugcccgcucaagagaagaauuucaccaccgcuccagccaucugccacgacggcaaagcccacuuuccuagagaaggcguguucguguccaacggcacccauugguucgugacacagcggaacuucuacgagccccagaucaucaccaccgacaacaccuucgugucuggcaacugcgacguugugaucggcauugugaacaauaccguguacgacccucugcagcccgagcuggacagcuucaaagaggaacuggacaaguacuuuaagaaccacacaagccccgacguggaccugggcgauaucagcggaaucaaugccagcgucgugaacauccagaaagagaucgaccggcugaacgagguggccaagaaucugaacgagagccugaucgaccugcaagaacuggggaaguacgagcaguacaucaagggaggcggaggaucugacaucaucaagcugcugaacgagcaagugaacaaagagaugcagagcagcaaccuguacaugagcaugagcagcuggugcuacacccacagccuugauggcgccggacuguuccuguuugaucacgccgccgaggaauacgagcacgccaagaagcugaucaucuuccugaacgagaacaacgugcccgugcagcugaccagcauuucugccccugagcacaaguucgagggccugacacagaucuuccagaaggccuacgaacacgagcagcacaucagcgagagcaucaacaacaucguggaccacgccauuaagagcaaggaucacgccaccuucaacuuucugcagugguacguggccgaacagcacgaggaagaggugcuguucaaggacauccuggacaagaucgagcugaucggcaacgagaaccacggccuguaucuggccgaccaguacgugaagggaaucgccaagagcagaaagagcugaggacuagucccuguucccagagcccacuuuuuuuucuuuuuuugaaauaaaauagccugucuuucagaucucaaaggcucuuuucagagccaccaaaaaaaaaaaaaaaaaaaaaaaaaaaaaaaaaaaaaaaaaaaaaaaaaaaaaaaaaaaaaaaaaaaaaaaaaaaaaaaaaaaaaaaaaaaaaaaaaaaaa

SEQ ID NO: 12572 - RNA, 4412 nt, Artificial Sequence
  SARS-CoV-2/Wuhan/WIV05/2019__EPI_ISL_402128 spike protein mRNA gc mod (1-1211)(K986P_V987P) Ferritin construct
aggagagucccgcagucggcguccagcggcucugcuuguucgugugugugucguugcaggccuuauucaagcuuaccauguucguguuucuggugcugcugccccugguguccagccagugugugaaccugaccaccagaacacagcugccuccagccuacaccaacagcuucaccagaggcguguacuaccccgacaagguguucagauccagcgugcugcacucuacccaggaccuguuccugccuuucuucagcaacgugaccugguuccacgccauccacguguccggcaccaauggcaccaagagauucgacaaccccgugcugcccuucaacgacgggguguacuuugccagcaccgagaaguccaacaucaucagaggcuggaucuucggcaccacacuggacagcaagacccagagccugcugaucgugaacaacgccaccaacguggucaucaaagugugcgaguuccaguucugcaacgaccccuuccugggcgucuacuaccacaagaacaacaagagcuggauggaaagcgaguuccggguguacagcagcgccaacaacugcaccuucgaguacgugucccagccuuuccugauggaccuggaaggcaagcagggcaacuucaagaaccugcgcgaguucguguucaagaacaucgacggcuacuucaaaaucuacagcaagcacaccccuaucaaccucgugcgggaucugccucagggcuucucugcucuggaaccccugguggaucugcccaucggcaucaacaucacccgguuucagacacugcuggcccugcacagaagcuaccugacaccuggcgauagcagcagcggauggacagcuggugccgccgcuuacuaugugggcuaccugcagccuagaaccuuccugcugaaguacaacgagaacggcaccaucaccgacgccguggauugugcucuggauccucugagcgagacaaagugcacccugaaguccuucaccguggaaaagggcaucuaccagaccagcaacuuccgggugcagcccaccgaauccaucgugcgguuccccaauaucaccaaucugugccccuucggcgagguguucaaugccaccagauucgccucuguguacgccuggaaccggaagcggaucagcaauugcguggccgacuacuccgugcuguacaacuccgccagcuucagcaccuucaagugcuacggcguguccccuaccaagcugaacgaccugugcuucacaaacguguacgccgacagcuucgugauccggggagaugaagugcggcagauugccccuggacagacaggcaagaucgccgacuacaacuacaagcugcccgacgacuucaccggcugugugauugccuggaacagcaacaaccuggacuccaaagucggcggcaacuacaauuaccuguaccggcuguuccggaaguccaaucugaagcccuucgagcgggacaucagcaccgaaaucuaucaggccggcagcaccccuugcaacggcguggaaggcuucaacugcuacuucccacugcaguccuacggcuuucagcccacaaauggcgugggcuaucagcccuacagagugguggugcugagcuucgaacugcugcaugcuccugccacagugugcggcccuaagaaaagcaccaaucucgugaagaacaaaugcgugaacuucaacuucaacggccugaccggcaccggcgugcugacagagagcaacaagaaguuccugccauuccagcaguuuggccgggauaucgccgauaccacagacgccguuagagauccccagacacuggaaauccuggacaucaccccaugcagcuucggcggagugucugugaucaccccuggcaccaacaccagcaaucagguggcagugcuguaccaggacgugaacuguaccgaagugcccguggccauucacgccgaucagcugacaccuacauggcggguguacuccaccggcagcaauguguuucagaccagagccggcugucugaucggagccgagcacgugaacaauagcuacgagugcgacauccccaucggcgcuggcaucugugccagcuaccagacacagacaaacagccccagacgggcuagaagcguggccagccagagcaucauugccuacacaaugucucugggcgccgagaacagcguggccuacuccaacaacucuaucgcuauccccaccaacuucaccaucagcgugaccaccgagauccugccuguguccaugaccaagaccagcguggacugcaccauguacaucugcggcgauuccaccgagugcuccaaccugcugcugcaguacggcagcuucugcacccagcugaauagagcccugacagggaucgccguggaacaggacaagaacacccaagagguguucgcccaagugaagcaaaucuacaagaccccuccuaucaaggacuucggcggcuucaauuucagccagauucugcccgauccuagcaagcccagcaagcggagcuucaucgaggaccugcuguucaacaaagugacacuggccgacgccggcuucaucaagcaguauggcgauugucugggcgacauugccgccagggaucugauuugcgcccagaaguuuaacggacugacagugcugccuccucugcugaccgaugagaugaucgcccaguacacaucugcccugcuggccggcacaaucacaagcggcuggacauuuggagcuggcgccgcucugcagauccccuuugcuaugcagauggccuaccgguucaacggcaucggagugacccagaaugugcuguacgagaaccagaagcugaucgccaaccaguucaacagcgccaucggcaagauccaggacagccugagcagcacagcaagcgcccugggaaagcugcaggacguggucaaccagaaugcccaggcacugaacacccuggucaagcagcuguccuccaacuucggcgccaucagcucugugcugaacgauauccugagcagacuggacccuccugaggccgaggugcagaucgacagacugaucacaggcagacugcagagccuccagacauacgugacccagcagcugaucagagccgccgagauuagagccucugccaaucuggccgccaccaagaugucugagugugugcugggccagagcaagagaguggacuuuugcggcaagggcuaccaccugaugagcuucccucagucugccccucacggcgugguguuucugcacgugacauaugugcccgcucaagagaagaauuucaccaccgcuccagccaucugccacgacggcaaagcccacuuuccuagagaaggcguguucguguccaacggcacccauugguucgugacacagcggaacuucuacgagccccagaucaucaccaccgacaacaccuucgugucuggcaacugcgacguugugaucggcauugugaacaauaccguguacgacccucugcagcccgagcuggacagcuucaaagaggaacuggacaaguacuuuaagaaccacacaagccccgacguggaccugggcgauaucagcggaaucaaugccagcgucgugaacauccagaaagagaucgaccggcugaacgagguggccaagaaucugaacgagagccugaucgaccugcaagaacuggggaaguacgagcaguacaucaagggaggcggaggaucugacaucaucaagcugcugaacgagcaagugaacaaagagaugcagagcagcaaccuguacaugagcaugagcagcuggugcuacacccacagccuugauggcgccggacuguuccuguuugaucacgccgccgaggaauacgagcacgccaagaagcugaucaucuuccugaacgagaacaacgugcccgugcagcugaccagcauuucugccccugagcacaaguucgagggccugacacagaucuuccagaaggccuacgaacacgagcagcacaucagcgagagcaucaacaacaucguggaccacgccauuaagagcaaggaucacgccaccuucaacuuucugcagugguacguggccgaacagcacgaggaagaggugcuguucaaggacauccuggacaagaucgagcugaucggcaacgagaaccacggccuguaucuggccgaccaguacgugaagggaaucgccaagagcagaaagagcugaggacuagucccuguucccagagcccacuuuuuuuucuuuuuuugaaauaaaauagccugucuuucagaucucaaaggcucuuuucagagccaccaaaaaaaaaaaaaaaaaaaaaaaaaaaaaaaaaaaaaaaaaaaaaaaaaaaaaaaaaaaaaaaaaaaaaaaaaaaaaaaaaaaaaaaaaaaaaaaaaaaaa

SEQ ID NO: 12573 - RNA, 4412 nt, Artificial Sequence
  SARS-CoV-2/Wuhan/WIV05/2019__EPI_ISL_402128 spike protein mRNA gc mod (1-1211)(K986P_V987P_T887WN_A1020W) Ferritin construct
aggagagucccgcagucggcguccagcggcucugcuuguucgugugugugucguugcaggccuuauucaagcuuaccauguucguguuucuggugcugcugccccugguguccagccagugugugaaccugaccaccagaacacagcugccuccagccuacaccaacagcuucaccagaggcguguacuaccccgacaagguguucagauccagcgugcugcacucuacccaggaccuguuccugccuuucuucagcaacgugaccugguuccacgccauccacguguccggcaccaauggcaccaagagauucgacaaccccgugcugcccuucaacgacgggguguacuuugccagcaccgagaaguccaacaucaucagaggcuggaucuucggcaccacacuggacagcaagacccagagccugcugaucgugaacaacgccaccaacguggucaucaaagugugcgaguuccaguucugcaacgaccccuuccugggcgucuacuaccacaagaacaacaagagcuggauggaaagcgaguuccggguguacagcagcgccaacaacugcaccuucgaguacgugucccagccuuuccugauggaccuggaaggcaagcagggcaacuucaagaaccugcgcgaguucguguucaagaacaucgacggcuacuucaaaaucuacagcaagcacaccccuaucaaccucgugcgggaucugccucagggcuucucugcucuggaaccccugguggaucugcccaucggcaucaacaucacccgguuucagacacugcuggcccugcacagaagcuaccugacaccuggcgauagcagcagcggauggacagcuggugccgccgcuuacuaugugggcuaccugcagccuagaaccuuccugcugaaguacaacgagaacggcaccaucaccgacgccguggauugugcucuggauccucugagcgagacaaagugcacccugaaguccuucaccguggaaaagggcaucuaccagaccagcaacuuccgggugcagcccaccgaauccaucgugcgguuccccaauaucaccaaucugugccccuucggcgagguguucaaugccaccagauucgccucuguguacgccuggaaccggaagcggaucagcaauugcguggccgacuacuccgugcuguacaacuccgccagcuucagcaccuucaagugcuacggcguguccccuaccaagcugaacgaccugugcuucacaaacguguacgccgacagcuucgugauccggggagaugaagugcggcagauugccccuggacagacaggcaagaucgccgacuacaacuacaagcugcccgacgacuucaccggcugugugauugccuggaacagcaacaaccuggacuccaaagucggcggcaacuacaauuaccuguaccggcuguuccggaaguccaaucugaagcccuucgagcgggacaucagcaccgaaaucuaucaggccggcagcaccccuugcaacggcguggaaggcuucaacugcuacuucccacugcaguccuacggcuuucagcccacaaauggcgugggcuaucagcccuacagagugguggugcugagcuucgaacugcugcaugcuccugccacagugugcggcccuaagaaaagcaccaaucucgugaagaacaaaugcgugaacuucaacuucaacggccugaccggcaccggcgugcugacagagagcaacaagaaguuccugccauuccagcaguuuggccgggauaucgccgauaccacagacgccguuagagauccccagacacuggaaauccuggacaucaccccaugcagcuucggcggagugucugugaucaccccuggcaccaacaccagcaaucagguggcagugcuguaccaggacgugaacuguaccgaagugcccguggccauucacgccgaucagcugacaccuacauggcggguguacuccaccggcagcaauguguuucagaccagagccggcugucugaucggagccgagcacgugaacaauagcuacgagugcgacauccccaucggcgcuggcaucugugccagcuaccagacacagacaaacagccccagacgggcuagaagcguggccagccagagcaucauugccuacacaaugucucugggcgccgagaacagcguggccuacuccaacaacucuaucgcuauccccaccaacuucaccaucagcgugaccaccgagauccugccuguguccaugaccaagaccagcguggacugcaccauguacaucugcggcgauuccaccgagugcuccaaccugcugcugcaguacggcagcuucugcacccagcugaauagagcccugacagggaucgccguggaacaggacaagaacacccaagagguguucgcccaagugaagcaaaucuacaagaccccuccuaucaaggacuucggcggcuucaauuucagccagauucugcccgauccuagcaagcccagcaagcggagcuucaucgaggaccugcuguucaacaaagugacacuggccgacgccggcuucaucaagcaguauggcgauugucugggcgacauugccgccagggaucugauuugcgcccagaaguuuaacggacugacagugcugccuccucugcugaccgaugagaugaucgcccaguacacaucugcccugcuggccggcacaaucacaagcggcuggugguuuggagcuggcgccgcucugcagauccccuuugcuaugcagauggccuaccgguucaacggcaucggagugacccagaaugugcuguacgagaaccagaagcugaucgccaaccaguucaacagcgccaucggcaagauccaggacagccugagcagcacagcaagcgcccugggaaagcugcaggacguggucaaccagaaugcccaggcacugaacacccuggucaagcagcuguccuccaacuucggcgccaucagcucugugcugaacgauauccugagcagacuggacccuccugaggccgaggugcagaucgacagacugaucacaggcagacugcagagccuccagacauacgugacccagcagcugaucagagccgccgagauuagauggucugccaaucuggccgccaccaagaugucugagugugugcugggccagagcaagagaguggacuuuugcggcaagggcuaccaccugaugagcuucccucagucugccccucacggcgugguguuucugcacgugacauaugugcccgcucaagagaagaauuucaccaccgcuccagccaucugccacgacggcaaagcccacuuuccuagagaaggcguguucguguccaacggcacccauugguucgugacacagcggaacuucuacgagccccagaucaucaccaccgacaacaccuucgugucuggcaacugcgacguugugaucggcauugugaacaauaccguguacgacccucugcagcccgagcuggacagcuucaaagaggaacuggacaaguacuuuaagaaccacacaagccccgacguggaccugggcgauaucagcggaaucaaugccagcgucgugaacauccagaaagagaucgaccggcugaacgagguggccaagaaucugaacgagagccugaucgaccugcaagaacuggggaaguacgagcaguacaucaagggaggcggaggaucugacaucaucaagcugcugaacgagcaagugaacaaagagaugcagagcagcaaccuguacaugagcaugagcagcuggugcuacacccacagccuugauggcgccggacuguuccuguuugaucacgccgccgaggaauacgagcacgccaagaagcugaucaucuuccugaacgagaacaacgugcccgugcagcugaccagcauuucugccccugagcacaaguucgagggccugacacagaucuuccagaaggccuacgaacacgagcagcacaucagcgagagcaucaacaacaucguggaccacgccauuaagagcaaggaucacgccaccuucaacuuucugcagugguacguggccgaacagcacgaggaagaggugcuguucaaggacauccuggacaagaucgagcugaucggcaacgagaaccacggccuguaucuggccgaccaguacgugaagggaaucgccaagagcagaaagagcugaggacuagucccuguucccagagcccacuuuuuuuucuuuuuuugaaauaaaauagccugucuuucagaucucaaaggcucuuuucagagccaccaaaaaaaaaaaaaaaaaaaaaaaaaaaaaaaaaaaaaaaaaaaaaaaaaaaaaaaaaaaaaaaaaaaaaaaaaaaaaaaaaaaaaaaaaaaaaaaaaaaaa

SEQ ID NO: 12574 - RNA, 4412 nt, Artificial Sequence
  SARS-CoV-2/Wuhan/WIV05/2019__EPI_ISL_402128 spike protein mRNA gc mod (1-1211)(K986P_V987P_P1069F) Ferritin construct
aggagagucccgcagucggcguccagcggcucugcuuguucgugugugugucguugcaggccuuauucaagcuuaccauguucguguuucuggugcugcugccccugguguccagccagugugugaaccugaccaccagaacacagcugccuccagccuacaccaacagcuucaccagaggcguguacuaccccgacaagguguucagauccagcgugcugcacucuacccaggaccuguuccugccuuucuucagcaacgugaccugguuccacgccauccacguguccggcaccaauggcaccaagagauucgacaaccccgugcugcccuucaacgacgggguguacuuugccagcaccgagaaguccaacaucaucagaggcuggaucuucggcaccacacuggacagcaagacccagagccugcugaucgugaacaacgccaccaacguggucaucaaagugugcgaguuccaguucugcaacgaccccuuccugggcgucuacuaccacaagaacaacaagagcuggauggaaagcgaguuccggguguacagcagcgccaacaacugcaccuucgaguacgugucccagccuuuccugauggaccuggaaggcaagcagggcaacuucaagaaccugcgcgaguucguguucaagaacaucgacggcuacuucaaaaucuacagcaagcacaccccuaucaaccucgugcgggaucugccucagggcuucucugcucuggaaccccugguggaucugcccaucggcaucaacaucacccgguuucagacacugcuggcccugcacagaagcuaccugacaccuggcgauagcagcagcggauggacagcuggugccgccgcuuacuaugugggcuaccugcagccuagaaccuuccugcugaaguacaacgagaacggcaccaucaccgacgccguggauugugcucuggauccucugagcgagacaaagugcacccugaaguccuucaccguggaaaagggcaucuaccagaccagcaacuuccgggugcagcccaccgaauccaucgugcgguuccccaauaucaccaaucugugccccuucggcgagguguucaaugccaccagauucgccucuguguacgccuggaaccggaagcggaucagcaauugcguggccgacuacuccgugcuguacaacuccgccagcuucagcaccuucaagugcuacggcguguccccuaccaagcugaacgaccugugcuucacaaacguguacgccgacagcuucgugauccggggagaugaagugcggcagauugccccuggacagacaggcaagaucgccgacuacaacuacaagcugcccgacgacuucaccggcugugugauugccuggaacagcaacaaccuggacuccaaagucggcggcaacuacaauuaccuguaccggcuguuccggaaguccaaucugaagcccuucgagcgggacaucagcaccgaaaucuaucaggccggcagcaccccuugcaacggcguggaaggcuucaacugcuacuucccacugcaguccuacggcuuucagcccacaaauggcgugggcuaucagcccuacagagugguggugcugagcuucgaacugcugcaugcuccugccacagugugcggcccuaagaaaagcaccaaucucgugaagaacaaaugcgugaacuucaacuucaacggccugaccggcaccggcgugcugacagagagcaacaagaaguuccugccauuccagcaguuuggccgggauaucgccgauaccacagacgccguuagagauccccagacacuggaaauccuggacaucaccccaugcagcuucggcggagugucugugaucaccccuggcaccaacaccagcaaucagguggcagugcuguaccaggacgugaacuguaccgaagugcccguggccauucacgccgaucagcugacaccuacauggcggguguacuccaccggcagcaauguguuucagaccagagccggcugucugaucggagccgagcacgugaacaauagcuacgagugcgacauccccaucggcgcuggcaucugugccagcuaccagacacagacaaacagccccagacgggcuagaagcguggccagccagagcaucauugccuacacaaugucucugggcgccgagaacagcguggccuacuccaacaacucuaucgcuauccccaccaacuucaccaucagcgugaccaccgagauccugccuguguccaugaccaagaccagcguggacugcaccauguacaucugcggcgauuccaccgagugcuccaaccugcugcugcaguacggcagcuucugcacccagcugaauagagcccugacagggaucgccguggaacaggacaagaacacccaagagguguucgcccaagugaagcaaaucuacaagaccccuccuaucaaggacuucggcggcuucaauuucagccagauucugcccgauccuagcaagcccagcaagcggagcuucaucgaggaccugcuguucaacaaagugacacuggccgacgccggcuucaucaagcaguauggcgauugucugggcgacauugccgccagggaucugauuugcgcccagaaguuuaacggacugacagugcugccuccucugcugaccgaugagaugaucgcccaguacacaucugcccugcuggccggcacaaucacaagcggcuggacauuuggagcuggcgccgcucugcagauccccuuugcuaugcagauggccuaccgguucaacggcaucggagugacccagaaugugcuguacgagaaccagaagcugaucgccaaccaguucaacagcgccaucggcaagauccaggacagccugagcagcacagcaagcgcccugggaaagcugcaggacguggucaaccagaaugcccaggcacugaacacccuggucaagcagcuguccuccaacuucggcgccaucagcucugugcugaacgauauccugagcagacuggacccuccugaggccgaggugcagaucgacagacugaucacaggcagacugcagagccuccagacauacgugacccagcagcugaucagagccgccgagauuagagccucugccaaucuggccgccaccaagaugucugagugugugcugggccagagcaagagaguggacuuuugcggcaagggcuaccaccugaugagcuucccucagucugccccucacggcgugguguuucugcacgugacauauguguucgcucaagagaagaauuucaccaccgcuccagccaucugccacgacggcaaagcccacuuuccuagagaaggcguguucguguccaacggcacccauugguucgugacacagcggaacuucuacgagccccagaucaucaccaccgacaacaccuucgugucuggcaacugcgacguugugaucggcauugugaacaauaccguguacgacccucugcagcccgagcuggacagcuucaaagaggaacuggacaaguacuuuaagaaccacacaagccccgacguggaccugggcgauaucagcggaaucaaugccagcgucgugaacauccagaaagagaucgaccggcugaacgagguggccaagaaucugaacgagagccugaucgaccugcaagaacuggggaaguacgagcaguacaucaagggaggcggaggaucugacaucaucaagcugcugaacgagcaagugaacaaagagaugcagagcagcaaccuguacaugagcaugagcagcuggugcuacacccacagccuugauggcgccggacuguuccuguuugaucacgccgccgaggaauacgagcacgccaagaagcugaucaucuuccugaacgagaacaacgugcccgugcagcugaccagcauuucugccccugagcacaaguucgagggccugacacagaucuuccagaaggccuacgaacacgagcagcacaucagcgagagcaucaacaacaucguggaccacgccauuaagagcaaggaucacgccaccuucaacuuucugcagugguacguggccgaacagcacgaggaagaggugcuguucaaggacauccuggacaagaucgagcugaucggcaacgagaaccacggccuguaucuggccgaccaguacgugaagggaaucgccaagagcagaaagagcugaggacuagucccuguucccagagcccacuuuuuuuucuuuuuuugaaauaaaauagccugucuuucagaucucaaaggcucuuuucagagccaccaaaaaaaaaaaaaaaaaaaaaaaaaaaaaaaaaaaaaaaaaaaaaaaaaaaaaaaaaaaaaaaaaaaaaaaaaaaaaaaaaaaaaaaaaaaaaaaaaaaaa

SEQ ID NO: 12575 - RNA, 4412 nt, Artificial Sequence
  SARS-CoV-2/Wuhan/WIV05/2019__EPI_ISL_402128 spike protein mRNA gc mod (1-1211)(K986P_V987P_ H1048Q_H1064N_ H1083N_H1101N) Ferritin construct
aggagagucccgcagucggcguccagcggcucugcuuguucgugugugugucguugcaggccuuauucaagcuuaccauguucguguuucuggugcugcugccccugguguccagccagugugugaaccugaccaccagaacacagcugccuccagccuacaccaacagcuucaccagaggcguguacuaccccgacaagguguucagauccagcgugcugcacucuacccaggaccuguuccugccuuucuucagcaacgugaccugguuccacgccauccacguguccggcaccaauggcaccaagagauucgacaaccccgugcugcccuucaacgacgggguguacuuugccagcaccgagaaguccaacaucaucagaggcuggaucuucggcaccacacuggacagcaagacccagagccugcugaucgugaacaacgccaccaacguggucaucaaagugugcgaguuccaguucugcaacgaccccuuccugggcgucuacuaccacaagaacaacaagagcuggauggaaagcgaguuccggguguacagcagcgccaacaacugcaccuucgaguacgugucccagccuuuccugauggaccuggaaggcaagcagggcaacuucaagaaccugcgcgaguucguguucaagaacaucgacggcuacuucaaaaucuacagcaagcacaccccuaucaaccucgugcgggaucugccucagggcuucucugcucuggaaccccugguggaucugcccaucggcaucaacaucacccgguuucagacacugcuggcccugcacagaagcuaccugacaccuggcgauagcagcagcggauggacagcuggugccgccgcuuacuaugugggcuaccugcagccuagaaccuuccugcugaaguacaacgagaacggcaccaucaccgacgccguggauugugcucuggauccucugagcgagacaaagugcacccugaaguccuucaccguggaaaagggcaucuaccagaccagcaacuuccgggugcagcccaccgaauccaucgugcgguuccccaauaucaccaaucugugccccuucggcgagguguucaaugccaccagauucgccucuguguacgccuggaaccggaagcggaucagcaauugcguggccgacuacuccgugcuguacaacuccgccagcuucagcaccuucaagugcuacggcguguccccuaccaagcugaacgaccugugcuucacaaacguguacgccgacagcuucgugauccggggagaugaagugcggcagauugccccuggacagacaggcaagaucgccgacuacaacuacaagcugcccgacgacuucaccggcugugugauugccuggaacagcaacaaccuggacuccaaagucggcggcaacuacaauuaccuguaccggcuguuccggaaguccaaucugaagcccuucgagcgggacaucagcaccgaaaucuaucaggccggcagcaccccuugcaacggcguggaaggcuucaacugcuacuucccacugcaguccuacggcuuucagcccacaaauggcgugggcuaucagcccuacagagugguggugcugagcuucgaacugcugcaugcuccugccacagugugcggcccuaagaaaagcaccaaucucgugaagaacaaaugcgugaacuucaacuucaacggccugaccggcaccggcgugcugacagagagcaacaagaaguuccugccauuccagcaguuuggccgggauaucgccgauaccacagacgccguuagagauccccagacacuggaaauccuggacaucaccccaugcagcuucggcggagugucugugaucaccccuggcaccaacaccagcaaucagguggcagugcuguaccaggacgugaacuguaccgaagugcccguggccauucacgccgaucagcugacaccuacauggcggguguacuccaccggcagcaauguguuucagaccagagccggcugucugaucggagccgagcacgugaacaauagcuacgagugcgacauccccaucggcgcuggcaucugugccagcuaccagacacagacaaacagccccagacgggcuagaagcguggccagccagagcaucauugccuacacaaugucucugggcgccgagaacagcguggccuacuccaacaacucuaucgcuauccccaccaacuucaccaucagcgugaccaccgagauccugccuguguccaugaccaagaccagcguggacugcaccauguacaucugcggcgauuccaccgagugcuccaaccugcugcugcaguacggcagcuucugcacccagcugaauagagcccugacagggaucgccguggaacaggacaagaacacccaagagguguucgcccaagugaagcaaaucuacaagaccccuccuaucaaggacuucggcggcuucaauuucagccagauucugcccgauccuagcaagcccagcaagcggagcuucaucgaggaccugcuguucaacaaagugacacuggccgacgccggcuucaucaagcaguauggcgauugucugggcgacauugccgccagggaucugauuugcgcccagaaguuuaacggacugacagugcugccuccucugcugaccgaugagaugaucgcccaguacacaucugcccugcuggccggcacaaucacaagcggcuggacauuuggagcuggcgccgcucugcagauccccuuugcuaugcagauggccuaccgguucaacggcaucggagugacccagaaugugcuguacgagaaccagaagcugaucgccaaccaguucaacagcgccaucggcaagauccaggacagccugagcagcacagcaagcgcccugggaaagcugcaggacguggucaaccagaaugcccaggcacugaacacccuggucaagcagcuguccuccaacuucggcgccaucagcucugugcugaacgauauccugagcagacuggacccuccugaggccgaggugcagaucgacagacugaucacaggcagacugcagagccuccagacauacgugacccagcagcugaucagagccgccgagauuagagccucugccaaucuggccgccaccaagaugucugagugugugcugggccagagcaagagaguggacuuuugcggcaagggcuaccagcugaugagcuucccucagucugccccucacggcgugguguuucugaacgugacauaugugcccgcucaagagaagaauuucaccaccgcuccagccaucugcaacgacggcaaagcccacuuuccuagagaaggcguguucguguccaacggcaccaacugguucgugacacagcggaacuucuacgagccccagaucaucaccaccgacaacaccuucgugucuggcaacugcgacguugugaucggcauugugaacaauaccguguacgacccucugcagcccgagcuggacagcuucaaagaggaacuggacaaguacuuuaagaaccacacaagccccgacguggaccugggcgauaucagcggaaucaaugccagcgucgugaacauccagaaagagaucgaccggcugaacgagguggccaagaaucugaacgagagccugaucgaccugcaagaacuggggaaguacgagcaguacaucaagggaggcggaggaucugacaucaucaagcugcugaacgagcaagugaacaaagagaugcagagcagcaaccuguacaugagcaugagcagcuggugcuacacccacagccuugauggcgccggacuguuccuguuugaucacgccgccgaggaauacgagcacgccaagaagcugaucaucuuccugaacgagaacaacgugcccgugcagcugaccagcauuucugccccugagcacaaguucgagggccugacacagaucuuccagaaggccuacgaacacgagcagcacaucagcgagagcaucaacaacaucguggaccacgccauuaagagcaaggaucacgccaccuucaacuuucugcagugguacguggccgaacagcacgaggaagaggugcuguucaaggacauccuggacaagaucgagcugaucggcaacgagaaccacggccuguaucuggccgaccaguacgugaagggaaucgccaagagcagaaagagcugaggacuagucccuguucccagagcccacuuuuuuuucuuuuuuugaaauaaaauagccugucuuucagaucucaaaggcucuuuucagagccaccaaaaaaaaaaaaaaaaaaaaaaaaaaaaaaaaaaaaaaaaaaaaaaaaaaaaaaaaaaaaaaaaaaaaaaaaaaaaaaaaaaaaaaaaaaaaaaaaaaaaa

SEQ ID NO: 12576 - RNA, 4412 nt, Artificial Sequence
  SARS-CoV-2/Wuhan/WIV05/2019__EPI_ISL_402128 spike protein mRNA gc mod (1-1211)(I712C_T1077C) Ferritin construct
aggagagucccgcagucggcguccagcggcucugcuuguucgugugugugucguugcaggccuuauucaagcuuaccauguucguguuucuggugcugcugccccugguguccagccagugugugaaccugaccaccagaacacagcugccuccagccuacaccaacagcuucaccagaggcguguacuaccccgacaagguguucagauccagcgugcugcacucuacccaggaccuguuccugccuuucuucagcaacgugaccugguuccacgccauccacguguccggcaccaauggcaccaagagauucgacaaccccgugcugcccuucaacgacgggguguacuuugccagcaccgagaaguccaacaucaucagaggcuggaucuucggcaccacacuggacagcaagacccagagccugcugaucgugaacaacgccaccaacguggucaucaaagugugcgaguuccaguucugcaacgaccccuuccugggcgucuacuaccacaagaacaacaagagcuggauggaaagcgaguuccggguguacagcagcgccaacaacugcaccuucgaguacgugucccagccuuuccugauggaccuggaaggcaagcagggcaacuucaagaaccugcgcgaguucguguucaagaacaucgacggcuacuucaaaaucuacagcaagcacaccccuaucaaccucgugcgggaucugccucagggcuucucugcucuggaaccccugguggaucugcccaucggcaucaacaucacccgguuucagacacugcuggcccugcacagaagcuaccugacaccuggcgauagcagcagcggauggacagcuggugccgccgcuuacuaugugggcuaccugcagccuagaaccuuccugcugaaguacaacgagaacggcaccaucaccgacgccguggauugugcucuggauccucugagcgagacaaagugcacccugaaguccuucaccguggaaaagggcaucuaccagaccagcaacuuccgggugcagcccaccgaauccaucgugcgguuccccaauaucaccaaucugugccccuucggcgagguguucaaugccaccagauucgccucuguguacgccuggaaccggaagcggaucagcaauugcguggccgacuacuccgugcuguacaacuccgccagcuucagcaccuucaagugcuacggcguguccccuaccaagcugaacgaccugugcuucacaaacguguacgccgacagcuucgugauccggggagaugaagugcggcagauugccccuggacagacaggcaagaucgccgacuacaacuacaagcugcccgacgacuucaccggcugugugauugccuggaacagcaacaaccuggacuccaaagucggcggcaacuacaauuaccuguaccggcuguuccggaaguccaaucugaagcccuucgagcgggacaucagcaccgaaaucuaucaggccggcagcaccccuugcaacggcguggaaggcuucaacugcuacuucccacugcaguccuacggcuuucagcccacaaauggcgugggcuaucagcccuacagagugguggugcugagcuucgaacugcugcaugcuccugccacagugugcggcccuaagaaaagcaccaaucucgugaagaacaaaugcgugaacuucaacuucaacggccugaccggcaccggcgugcugacagagagcaacaagaaguuccugccauuccagcaguuuggccgggauaucgccgauaccacagacgccguuagagauccccagacacuggaaauccuggacaucaccccaugcagcuucggcggagugucugugaucaccccuggcaccaacaccagcaaucagguggcagugcuguaccaggacgugaacuguaccgaagugcccguggccauucacgccgaucagcugacaccuacauggcggguguacuccaccggcagcaauguguuucagaccagagccggcugucugaucggagccgagcacgugaacaauagcuacgagugcgacauccccaucggcgcuggcaucugugccagcuaccagacacagacaaacagccccagacgggcuagaagcguggccagccagagcaucauugccuacacaaugucucugggcgccgagaacagcguggccuacuccaacaacucuugcgcuauccccaccaacuucaccaucagcgugaccaccgagauccugccuguguccaugaccaagaccagcguggacugcaccauguacaucugcggcgauuccaccgagugcuccaaccugcugcugcaguacggcagcuucugcacccagcugaauagagcccugacagggaucgccguggaacaggacaagaacacccaagagguguucgcccaagugaagcaaaucuacaagaccccuccuaucaaggacuucggcggcuucaauuucagccagauucugcccgauccuagcaagcccagcaagcggagcuucaucgaggaccugcuguucaacaaagugacacuggccgacgccggcuucaucaagcaguauggcgauugucugggcgacauugccgccagggaucugauuugcgcccagaaguuuaacggacugacagugcugccuccucugcugaccgaugagaugaucgcccaguacacaucugcccugcuggccggcacaaucacaagcggcuggacauuuggagcuggcgccgcucugcagauccccuuugcuaugcagauggccuaccgguucaacggcaucggagugacccagaaugugcuguacgagaaccagaagcugaucgccaaccaguucaacagcgccaucggcaagauccaggacagccugagcagcacagcaagcgcccugggaaagcugcaggacguggucaaccagaaugcccaggcacugaacacccuggucaagcagcuguccuccaacuucggcgccaucagcucugugcugaacgauauccugagcagacuggacaaggucgaggccgaggugcagaucgacagacugaucacaggcagacugcagagccuccagacauacgugacccagcagcugaucagagccgccgagauuagagccucugccaaucuggccgccaccaagaugucugagugugugcugggccagagcaagagaguggacuuuugcggcaagggcuaccaccugaugagcuucccucagucugccccucacggcgugguguuucugcacgugacauaugugcccgcucaagagaagaauuucaccugugcuccagccaucugccacgacggcaaagcccacuuuccuagagaaggcguguucguguccaacggcacccauugguucgugacacagcggaacuucuacgagccccagaucaucaccaccgacaacaccuucgugucuggcaacugcgacguugugaucggcauugugaacaauaccguguacgacccucugcagcccgagcuggacagcuucaaagaggaacuggacaaguacuuuaagaaccacacaagccccgacguggaccugggcgauaucagcggaaucaaugccagcgucgugaacauccagaaagagaucgaccggcugaacgagguggccaagaaucugaacgagagccugaucgaccugcaagaacuggggaaguacgagcaguacaucaagggaggcggaggaucugacaucaucaagcugcugaacgagcaagugaacaaagagaugcagagcagcaaccuguacaugagcaugagcagcuggugcuacacccacagccuugauggcgccggacuguuccuguuugaucacgccgccgaggaauacgagcacgccaagaagcugaucaucuuccugaacgagaacaacgugcccgugcagcugaccagcauuucugccccugagcacaaguucgagggccugacacagaucuuccagaaggccuacgaacacgagcagcacaucagcgagagcaucaacaacaucguggaccacgccauuaagagcaaggaucacgccaccuucaacuuucugcagugguacguggccgaacagcacgaggaagaggugcuguucaaggacauccuggacaagaucgagcugaucggcaacgagaaccacggccuguaucuggccgaccaguacgugaagggaaucgccaagagcagaaagagcugaggacuagucccuguucccagagcccacuuuuuuuucuuuuuuugaaauaaaauagccugucuuucagaucucaaaggcucuuuucagagccaccaaaaaaaaaaaaaaaaaaaaaaaaaaaaaaaaaaaaaaaaaaaaaaaaaaaaaaaaaaaaaaaaaaaaaaaaaaaaaaaaaaaaaaaaaaaaaaaaaaaaa

SEQ ID NO: 12577 - RNA, 4412 nt, Artificial Sequence
  SARS-CoV-2/Wuhan/WIV05/2019__EPI_ISL_402128 spike protein mRNA gc mod (1-1211)(I714C_Y1110C) Ferritin construct
aggagagucccgcagucggcguccagcggcucugcuuguucgugugugugucguugcaggccuuauucaagcuuaccauguucguguuucuggugcugcugccccugguguccagccagugugugaaccugaccaccagaacacagcugccuccagccuacaccaacagcuucaccagaggcguguacuaccccgacaagguguucagauccagcgugcugcacucuacccaggaccuguuccugccuuucuucagcaacgugaccugguuccacgccauccacguguccggcaccaauggcaccaagagauucgacaaccccgugcugcccuucaacgacgggguguacuuugccagcaccgagaaguccaacaucaucagaggcuggaucuucggcaccacacuggacagcaagacccagagccugcugaucgugaacaacgccaccaacguggucaucaaagugugcgaguuccaguucugcaacgaccccuuccugggcgucuacuaccacaagaacaacaagagcuggauggaaagcgaguuccggguguacagcagcgccaacaacugcaccuucgaguacgugucccagccuuuccugauggaccuggaaggcaagcagggcaacuucaagaaccugcgcgaguucguguucaagaacaucgacggcuacuucaaaaucuacagcaagcacaccccuaucaaccucgugcgggaucugccucagggcuucucugcucuggaaccccugguggaucugcccaucggcaucaacaucacccgguuucagacacugcuggcccugcacagaagcuaccugacaccuggcgauagcagcagcggauggacagcuggugccgccgcuuacuaugugggcuaccugcagccuagaaccuuccugcugaaguacaacgagaacggcaccaucaccgacgccguggauugugcucuggauccucugagcgagacaaagugcacccugaaguccuucaccguggaaaagggcaucuaccagaccagcaacuuccgggugcagcccaccgaauccaucgugcgguuccccaauaucaccaaucugugccccuucggcgagguguucaaugccaccagauucgccucuguguacgccuggaaccggaagcggaucagcaauugcguggccgacuacuccgugcuguacaacuccgccagcuucagcaccuucaagugcuacggcguguccccuaccaagcugaacgaccugugcuucacaaacguguacgccgacagcuucgugauccggggagaugaagugcggcagauugccccuggacagacaggcaagaucgccgacuacaacuacaagcugcccgacgacuucaccggcugugugauugccuggaacagcaacaaccuggacuccaaagucggcggcaacuacaauuaccuguaccggcuguuccggaaguccaaucugaagcccuucgagcgggacaucagcaccgaaaucuaucaggccggcagcaccccuugcaacggcguggaaggcuucaacugcuacuucccacugcaguccuacggcuuucagcccacaaauggcgugggcuaucagcccuacagagugguggugcugagcuucgaacugcugcaugcuccugccacagugugcggcccuaagaaaagcaccaaucucgugaagaacaaaugcgugaacuucaacuucaacggccugaccggcaccggcgugcugacagagagcaacaagaaguuccugccauuccagcaguuuggccgggauaucgccgauaccacagacgccguuagagauccccagacacuggaaauccuggacaucaccccaugcagcuucggcggagugucugugaucaccccuggcaccaacaccagcaaucagguggcagugcuguaccaggacgugaacuguaccgaagugcccguggccauucacgccgaucagcugacaccuacauggcggguguacuccaccggcagcaauguguuucagaccagagccggcugucugaucggagccgagcacgugaacaauagcuacgagugcgacauccccaucggcgcuggcaucugugccagcuaccagacacagacaaacagccccagacgggcuagaagcguggccagccagagcaucauugccuacacaaugucucugggcgccgagaacagcguggccuacuccaacaacucuaucgcuugccccaccaacuucaccaucagcgugaccaccgagauccugccuguguccaugaccaagaccagcguggacugcaccauguacaucugcggcgauuccaccgagugcuccaaccugcugcugcaguacggcagcuucugcacccagcugaauagagcccugacagggaucgccguggaacaggacaagaacacccaagagguguucgcccaagugaagcaaaucuacaagaccccuccuaucaaggacuucggcggcuucaauuucagccagauucugcccgauccuagcaagcccagcaagcggagcuucaucgaggaccugcuguucaacaaagugacacuggccgacgccggcuucaucaagcaguauggcgauugucugggcgacauugccgccagggaucugauuugcgcccagaaguuuaacggacugacagugcugccuccucugcugaccgaugagaugaucgcccaguacacaucugcccugcuggccggcacaaucacaagcggcuggacauuuggagcuggcgccgcucugcagauccccuuugcuaugcagauggccuaccgguucaacggcaucggagugacccagaaugugcuguacgagaaccagaagcugaucgccaaccaguucaacagcgccaucggcaagauccaggacagccugagcagcacagcaagcgcccugggaaagcugcaggacguggucaaccagaaugcccaggcacugaacacccuggucaagcagcuguccuccaacuucggcgccaucagcucugugcugaacgauauccugagcagacuggacaaggucgaggccgaggugcagaucgacagacugaucacaggcagacugcagagccuccagacauacgugacccagcagcugaucagagccgccgagauuagagccucugccaaucuggccgccaccaagaugucugagugugugcugggccagagcaagagaguggacuuuugcggcaagggcuaccaccugaugagcuucccucagucugccccucacggcgugguguuucugcacgugacauaugugcccgcucaagagaagaauuucaccaccgcuccagccaucugccacgacggcaaagcccacuuuccuagagaaggcguguucguguccaacggcacccauugguucgugacacagcggaacuucugugagccccagaucaucaccaccgacaacaccuucgugucuggcaacugcgacguugugaucggcauugugaacaauaccguguacgacccucugcagcccgagcuggacagcuucaaagaggaacuggacaaguacuuuaagaaccacacaagccccgacguggaccugggcgauaucagcggaaucaaugccagcgucgugaacauccagaaagagaucgaccggcugaacgagguggccaagaaucugaacgagagccugaucgaccugcaagaacuggggaaguacgagcaguacaucaagggaggcggaggaucugacaucaucaagcugcugaacgagcaagugaacaaagagaugcagagcagcaaccuguacaugagcaugagcagcuggugcuacacccacagccuugauggcgccggacuguuccuguuugaucacgccgccgaggaauacgagcacgccaagaagcugaucaucuuccugaacgagaacaacgugcccgugcagcugaccagcauuucugccccugagcacaaguucgagggccugacacagaucuuccagaaggccuacgaacacgagcagcacaucagcgagagcaucaacaacaucguggaccacgccauuaagagcaaggaucacgccaccuucaacuuucugcagugguacguggccgaacagcacgaggaagaggugcuguucaaggacauccuggacaagaucgagcugaucggcaacgagaaccacggccuguaucuggccgaccaguacgugaagggaaucgccaagagcagaaagagcugaggacuagucccuguucccagagcccacuuuuuuuucuuuuuuugaaauaaaauagccugucuuucagaucucaaaggcucuuuucagagccaccaaaaaaaaaaaaaaaaaaaaaaaaaaaaaaaaaaaaaaaaaaaaaaaaaaaaaaaaaaaaaaaaaaaaaaaaaaaaaaaaaaaaaaaaaaaaaaaaaaaaa

SEQ ID NO: 12578 - RNA, 4412 nt, Artificial Sequence
  SARS-CoV-2/Wuhan/WIV05/2019__EPI_ISL_402128 spike protein mRNA gc mod (1-1211)(P715C_P1069C) Ferritin construct
aggagagucccgcagucggcguccagcggcucugcuuguucgugugugugucguugcaggccuuauucaagcuuaccauguucguguuucuggugcugcugccccugguguccagccagugugugaaccugaccaccagaacacagcugccuccagccuacaccaacagcuucaccagaggcguguacuaccccgacaagguguucagauccagcgugcugcacucuacccaggaccuguuccugccuuucuucagcaacgugaccugguuccacgccauccacguguccggcaccaauggcaccaagagauucgacaaccccgugcugcccuucaacgacgggguguacuuugccagcaccgagaaguccaacaucaucagaggcuggaucuucggcaccacacuggacagcaagacccagagccugcugaucgugaacaacgccaccaacguggucaucaaagugugcgaguuccaguucugcaacgaccccuuccugggcgucuacuaccacaagaacaacaagagcuggauggaaagcgaguuccggguguacagcagcgccaacaacugcaccuucgaguacgugucccagccuuuccugauggaccuggaaggcaagcagggcaacuucaagaaccugcgcgaguucguguucaagaacaucgacggcuacuucaaaaucuacagcaagcacaccccuaucaaccucgugcgggaucugccucagggcuucucugcucuggaaccccugguggaucugcccaucggcaucaacaucacccgguuucagacacugcuggcccugcacagaagcuaccugacaccuggcgauagcagcagcggauggacagcuggugccgccgcuuacuaugugggcuaccugcagccuagaaccuuccugcugaaguacaacgagaacggcaccaucaccgacgccguggauugugcucuggauccucugagcgagacaaagugcacccugaaguccuucaccguggaaaagggcaucuaccagaccagcaacuuccgggugcagcccaccgaauccaucgugcgguuccccaauaucaccaaucugugccccuucggcgagguguucaaugccaccagauucgccucuguguacgccuggaaccggaagcggaucagcaauugcguggccgacuacuccgugcuguacaacuccgccagcuucagcaccuucaagugcuacggcguguccccuaccaagcugaacgaccugugcuucacaaacguguacgccgacagcuucgugauccggggagaugaagugcggcagauugccccuggacagacaggcaagaucgccgacuacaacuacaagcugcccgacgacuucaccggcugugugauugccuggaacagcaacaaccuggacuccaaagucggcggcaacuacaauuaccuguaccggcuguuccggaaguccaaucugaagcccuucgagcgggacaucagcaccgaaaucuaucaggccggcagcaccccuugcaacggcguggaaggcuucaacugcuacuucccacugcaguccuacggcuuucagcccacaaauggcgugggcuaucagcccuacagagugguggugcugagcuucgaacugcugcaugcuccugccacagugugcggcccuaagaaaagcaccaaucucgugaagaacaaaugcgugaacuucaacuucaacggccugaccggcaccggcgugcugacagagagcaacaagaaguuccugccauuccagcaguuuggccgggauaucgccgauaccacagacgccguuagagauccccagacacuggaaauccuggacaucaccccaugcagcuucggcggagugucugugaucaccccuggcaccaacaccagcaaucagguggcagugcuguaccaggacgugaacuguaccgaagugcccguggccauucacgccgaucagcugacaccuacauggcggguguacuccaccggcagcaauguguuucagaccagagccggcugucugaucggagccgagcacgugaacaauagcuacgagugcgacauccccaucggcgcuggcaucugugccagcuaccagacacagacaaacagccccagacgggcuagaagcguggccagccagagcaucauugccuacacaaugucucugggcgccgagaacagcguggccuacuccaacaacucuaucgcuaucugcaccaacuucaccaucagcgugaccaccgagauccugccuguguccaugaccaagaccagcguggacugcaccauguacaucugcggcgauuccaccgagugcuccaaccugcugcugcaguacggcagcuucugcacccagcugaauagagcccugacagggaucgccguggaacaggacaagaacacccaagagguguucgcccaagugaagcaaaucuacaagaccccuccuaucaaggacuucggcggcuucaauuucagccagauucugcccgauccuagcaagcccagcaagcggagcuucaucgaggaccugcuguucaacaaagugacacuggccgacgccggcuucaucaagcaguauggcgauugucugggcgacauugccgccagggaucugauuugcgcccagaaguuuaacggacugacagugcugccuccucugcugaccgaugagaugaucgcccaguacacaucugcccugcuggccggcacaaucacaagcggcuggacauuuggagcuggcgccgcucugcagauccccuuugcuaugcagauggccuaccgguucaacggcaucggagugacccagaaugugcuguacgagaaccagaagcugaucgccaaccaguucaacagcgccaucggcaagauccaggacagccugagcagcacagcaagcgcccugggaaagcugcaggacguggucaaccagaaugcccaggcacugaacacccuggucaagcagcuguccuccaacuucggcgccaucagcucugugcugaacgauauccugagcagacuggacaaggucgaggccgaggugcagaucgacagacugaucacaggcagacugcagagccuccagacauacgugacccagcagcugaucagagccgccgagauuagagccucugccaaucuggccgccaccaagaugucugagugugugcugggccagagcaagagaguggacuuuugcggcaagggcuaccaccugaugagcuucccucagucugccccucacggcgugguguuucugcacgugacauaugugugugcucaagagaagaauuucaccaccgcuccagccaucugccacgacggcaaagcccacuuuccuagagaaggcguguucguguccaacggcacccauugguucgugacacagcggaacuucuacgagccccagaucaucaccaccgacaacaccuucgugucuggcaacugcgacguugugaucggcauugugaacaauaccguguacgacccucugcagcccgagcuggacagcuucaaagaggaacuggacaaguacuuuaagaaccacacaagccccgacguggaccugggcgauaucagcggaaucaaugccagcgucgugaacauccagaaagagaucgaccggcugaacgagguggccaagaaucugaacgagagccugaucgaccugcaagaacuggggaaguacgagcaguacaucaagggaggcggaggaucugacaucaucaagcugcugaacgagcaagugaacaaagagaugcagagcagcaaccuguacaugagcaugagcagcuggugcuacacccacagccuugauggcgccggacuguuccuguuugaucacgccgccgaggaauacgagcacgccaagaagcugaucaucuuccugaacgagaacaacgugcccgugcagcugaccagcauuucugccccugagcacaaguucgagggccugacacagaucuuccagaaggccuacgaacacgagcagcacaucagcgagagcaucaacaacaucguggaccacgccauuaagagcaaggaucacgccaccuucaacuuucugcagugguacguggccgaacagcacgaggaagaggugcuguucaaggacauccuggacaagaucgagcugaucggcaacgagaaccacggccuguaucuggccgaccaguacgugaagggaaucgccaagagcagaaagagcugaggacuagucccuguucccagagcccacuuuuuuuucuuuuuuugaaauaaaauagccugucuuucagaucucaaaggcucuuuucagagccaccaaaaaaaaaaaaaaaaaaaaaaaaaaaaaaaaaaaaaaaaaaaaaaaaaaaaaaaaaaaaaaaaaaaaaaaaaaaaaaaaaaaaaaaaaaaaaaaaaaaaa

SEQ ID NO: 12579 - RNA, 4412 nt, Artificial Sequence
  SARS-CoV-2/Wuhan/WIV05/2019__EPI_ISL_402128 spike protein mRNA gc mod (1-1211)(G889C_L1034C) Ferritin construct
aggagagucccgcagucggcguccagcggcucugcuuguucgugugugugucguugcaggccuuauucaagcuuaccauguucguguuucuggugcugcugccccugguguccagccagugugugaaccugaccaccagaacacagcugccuccagccuacaccaacagcuucaccagaggcguguacuaccccgacaagguguucagauccagcgugcugcacucuacccaggaccuguuccugccuuucuucagcaacgugaccugguuccacgccauccacguguccggcaccaauggcaccaagagauucgacaaccccgugcugcccuucaacgacgggguguacuuugccagcaccgagaaguccaacaucaucagaggcuggaucuucggcaccacacuggacagcaagacccagagccugcugaucgugaacaacgccaccaacguggucaucaaagugugcgaguuccaguucugcaacgaccccuuccugggcgucuacuaccacaagaacaacaagagcuggauggaaagcgaguuccggguguacagcagcgccaacaacugcaccuucgaguacgugucccagccuuuccugauggaccuggaaggcaagcagggcaacuucaagaaccugcgcgaguucguguucaagaacaucgacggcuacuucaaaaucuacagcaagcacaccccuaucaaccucgugcgggaucugccucagggcuucucugcucuggaaccccugguggaucugcccaucggcaucaacaucacccgguuucagacacugcuggcccugcacagaagcuaccugacaccuggcgauagcagcagcggauggacagcuggugccgccgcuuacuaugugggcuaccugcagccuagaaccuuccugcugaaguacaacgagaacggcaccaucaccgacgccguggauugugcucuggauccucugagcgagacaaagugcacccugaaguccuucaccguggaaaagggcaucuaccagaccagcaacuuccgggugcagcccaccgaauccaucgugcgguuccccaauaucaccaaucugugccccuucggcgagguguucaaugccaccagauucgccucuguguacgccuggaaccggaagcggaucagcaauugcguggccgacuacuccgugcuguacaacuccgccagcuucagcaccuucaagugcuacggcguguccccuaccaagcugaacgaccugugcuucacaaacguguacgccgacagcuucgugauccggggagaugaagugcggcagauugccccuggacagacaggcaagaucgccgacuacaacuacaagcugcccgacgacuucaccggcugugugauugccuggaacagcaacaaccuggacuccaaagucggcggcaacuacaauuaccuguaccggcuguuccggaaguccaaucugaagcccuucgagcgggacaucagcaccgaaaucuaucaggccggcagcaccccuugcaacggcguggaaggcuucaacugcuacuucccacugcaguccuacggcuuucagcccacaaauggcgugggcuaucagcccuacagagugguggugcugagcuucgaacugcugcaugcuccugccacagugugcggcccuaagaaaagcaccaaucucgugaagaacaaaugcgugaacuucaacuucaacggccugaccggcaccggcgugcugacagagagcaacaagaaguuccugccauuccagcaguuuggccgggauaucgccgauaccacagacgccguuagagauccccagacacuggaaauccuggacaucaccccaugcagcuucggcggagugucugugaucaccccuggcaccaacaccagcaaucagguggcagugcuguaccaggacgugaacuguaccgaagugcccguggccauucacgccgaucagcugacaccuacauggcggguguacuccaccggcagcaauguguuucagaccagagccggcugucugaucggagccgagcacgugaacaauagcuacgagugcgacauccccaucggcgcuggcaucugugccagcuaccagacacagacaaacagccccagacgggcuagaagcguggccagccagagcaucauugccuacacaaugucucugggcgccgagaacagcguggccuacuccaacaacucuaucgcuauccccaccaacuucaccaucagcgugaccaccgagauccugccuguguccaugaccaagaccagcguggacugcaccauguacaucugcggcgauuccaccgagugcuccaaccugcugcugcaguacggcagcuucugcacccagcugaauagagcccugacagggaucgccguggaacaggacaagaacacccaagagguguucgcccaagugaagcaaaucuacaagaccccuccuaucaaggacuucggcggcuucaauuucagccagauucugcccgauccuagcaagcccagcaagcggagcuucaucgaggaccugcuguucaacaaagugacacuggccgacgccggcuucaucaagcaguauggcgauugucugggcgacauugccgccagggaucugauuugcgcccagaaguuuaacggacugacagugcugccuccucugcugaccgaugagaugaucgcccaguacacaucugcccugcuggccggcacaaucacaagcggcuggacauuuugcgcuggcgccgcucugcagauccccuuugcuaugcagauggccuaccgguucaacggcaucggagugacccagaaugugcuguacgagaaccagaagcugaucgccaaccaguucaacagcgccaucggcaagauccaggacagccugagcagcacagcaagcgcccugggaaagcugcaggacguggucaaccagaaugcccaggcacugaacacccuggucaagcagcuguccuccaacuucggcgccaucagcucugugcugaacgauauccugagcagacuggacaaggucgaggccgaggugcagaucgacagacugaucacaggcagacugcagagccuccagacauacgugacccagcagcugaucagagccgccgagauuagagccucugccaaucuggccgccaccaagaugucugaguguguguguggccagagcaagagaguggacuuuugcggcaagggcuaccaccugaugagcuucccucagucugccccucacggcgugguguuucugcacgugacauaugugcccgcucaagagaagaauuucaccaccgcuccagccaucugccacgacggcaaagcccacuuuccuagagaaggcguguucguguccaacggcacccauugguucgugacacagcggaacuucuacgagccccagaucaucaccaccgacaacaccuucgugucuggcaacugcgacguugugaucggcauugugaacaauaccguguacgacccucugcagcccgagcuggacagcuucaaagaggaacuggacaaguacuuuaagaaccacacaagccccgacguggaccugggcgauaucagcggaaucaaugccagcgucgugaacauccagaaagagaucgaccggcugaacgagguggccaagaaucugaacgagagccugaucgaccugcaagaacuggggaaguacgagcaguacaucaagggaggcggaggaucugacaucaucaagcugcugaacgagcaagugaacaaagagaugcagagcagcaaccuguacaugagcaugagcagcuggugcuacacccacagccuugauggcgccggacuguuccuguuugaucacgccgccgaggaauacgagcacgccaagaagcugaucaucuuccugaacgagaacaacgugcccgugcagcugaccagcauuucugccccugagcacaaguucgagggccugacacagaucuuccagaaggccuacgaacacgagcagcacaucagcgagagcaucaacaacaucguggaccacgccauuaagagcaaggaucacgccaccuucaacuuucugcagugguacguggccgaacagcacgaggaagaggugcuguucaaggacauccuggacaagaucgagcugaucggcaacgagaaccacggccuguaucuggccgaccaguacgugaagggaaucgccaagagcagaaagagcugaggacuagucccuguucccagagcccacuuuuuuuucuuuuuuugaaauaaaauagccugucuuucagaucucaaaggcucuuuucagagccaccaaaaaaaaaaaaaaaaaaaaaaaaaaaaaaaaaaaaaaaaaaaaaaaaaaaaaaaaaaaaaaaaaaaaaaaaaaaaaaaaaaaaaaaaaaaaaaaaaaaaa

SEQ ID NO: 12580 - RNA, 4412 nt, Artificial Sequence
  SARS-CoV-2/Wuhan/WIV05/2019__EPI_ISL_402128 spike protein mRNA gc mod (1-1211)(I909C_Y1047C) Ferritin construct
aggagagucccgcagucggcguccagcggcucugcuuguucgugugugugucguugcaggccuuauucaagcuuaccauguucguguuucuggugcugcugccccugguguccagccagugugugaaccugaccaccagaacacagcugccuccagccuacaccaacagcuucaccagaggcguguacuaccccgacaagguguucagauccagcgugcugcacucuacccaggaccuguuccugccuuucuucagcaacgugaccugguuccacgccauccacguguccggcaccaauggcaccaagagauucgacaaccccgugcugcccuucaacgacgggguguacuuugccagcaccgagaaguccaacaucaucagaggcuggaucuucggcaccacacuggacagcaagacccagagccugcugaucgugaacaacgccaccaacguggucaucaaagugugcgaguuccaguucugcaacgaccccuuccugggcgucuacuaccacaagaacaacaagagcuggauggaaagcgaguuccggguguacagcagcgccaacaacugcaccuucgaguacgugucccagccuuuccugauggaccuggaaggcaagcagggcaacuucaagaaccugcgcgaguucguguucaagaacaucgacggcuacuucaaaaucuacagcaagcacaccccuaucaaccucgugcgggaucugccucagggcuucucugcucuggaaccccugguggaucugcccaucggcaucaacaucacccgguuucagacacugcuggcccugcacagaagcuaccugacaccuggcgauagcagcagcggauggacagcuggugccgccgcuuacuaugugggcuaccugcagccuagaaccuuccugcugaaguacaacgagaacggcaccaucaccgacgccguggauugugcucuggauccucugagcgagacaaagugcacccugaaguccuucaccguggaaaagggcaucuaccagaccagcaacuuccgggugcagcccaccgaauccaucgugcgguuccccaauaucaccaaucugugccccuucggcgagguguucaaugccaccagauucgccucuguguacgccuggaaccggaagcggaucagcaauugcguggccgacuacuccgugcuguacaacuccgccagcuucagcaccuucaagugcuacggcguguccccuaccaagcugaacgaccugugcuucacaaacguguacgccgacagcuucgugauccggggagaugaagugcggcagauugccccuggacagacaggcaagaucgccgacuacaacuacaagcugcccgacgacuucaccggcugugugauugccuggaacagcaacaaccuggacuccaaagucggcggcaacuacaauuaccuguaccggcuguuccggaaguccaaucugaagcccuucgagcgggacaucagcaccgaaaucuaucaggccggcagcaccccuugcaacggcguggaaggcuucaacugcuacuucccacugcaguccuacggcuuucagcccacaaauggcgugggcuaucagcccuacagagugguggugcugagcuucgaacugcugcaugcuccugccacagugugcggcccuaagaaaagcaccaaucucgugaagaacaaaugcgugaacuucaacuucaacggccugaccggcaccggcgugcugacagagagcaacaagaaguuccugccauuccagcaguuuggccgggauaucgccgauaccacagacgccguuagagauccccagacacuggaaauccuggacaucaccccaugcagcuucggcggagugucugugaucaccccuggcaccaacaccagcaaucagguggcagugcuguaccaggacgugaacuguaccgaagugcccguggccauucacgccgaucagcugacaccuacauggcggguguacuccaccggcagcaauguguuucagaccagagccggcugucugaucggagccgagcacgugaacaauagcuacgagugcgacauccccaucggcgcuggcaucugugccagcuaccagacacagacaaacagccccagacgggcuagaagcguggccagccagagcaucauugccuacacaaugucucugggcgccgagaacagcguggccuacuccaacaacucuaucgcuauccccaccaacuucaccaucagcgugaccaccgagauccugccuguguccaugaccaagaccagcguggacugcaccauguacaucugcggcgauuccaccgagugcuccaaccugcugcugcaguacggcagcuucugcacccagcugaauagagcccugacagggaucgccguggaacaggacaagaacacccaagagguguucgcccaagugaagcaaaucuacaagaccccuccuaucaaggacuucggcggcuucaauuucagccagauucugcccgauccuagcaagcccagcaagcggagcuucaucgaggaccugcuguucaacaaagugacacuggccgacgccggcuucaucaagcaguauggcgauugucugggcgacauugccgccagggaucugauuugcgcccagaaguuuaacggacugacagugcugccuccucugcugaccgaugagaugaucgcccaguacacaucugcccugcuggccggcacaaucacaagcggcuggacauuuggagcuggcgccgcucugcagauccccuuugcuaugcagauggccuaccgguucaacggcugcggagugacccagaaugugcuguacgagaaccagaagcugaucgccaaccaguucaacagcgccaucggcaagauccaggacagccugagcagcacagcaagcgcccugggaaagcugcaggacguggucaaccagaaugcccaggcacugaacacccuggucaagcagcuguccuccaacuucggcgccaucagcucugugcugaacgauauccugagcagacuggacaaggucgaggccgaggugcagaucgacagacugaucacaggcagacugcagagccuccagacauacgugacccagcagcugaucagagccgccgagauuagagccucugccaaucuggccgccaccaagaugucugagugugugcugggccagagcaagagaguggacuuuugcggcaagggcugucaccugaugagcuucccucagucugccccucacggcgugguguuucugcacgugacauaugugcccgcucaagagaagaauuucaccaccgcuccagccaucugccacgacggcaaagcccacuuuccuagagaaggcguguucguguccaacggcacccauugguucgugacacagcggaacuucuacgagccccagaucaucaccaccgacaacaccuucgugucuggcaacugcgacguugugaucggcauugugaacaauaccguguacgacccucugcagcccgagcuggacagcuucaaagaggaacuggacaaguacuuuaagaaccacacaagccccgacguggaccugggcgauaucagcggaaucaaugccagcgucgugaacauccagaaagagaucgaccggcugaacgagguggccaagaaucugaacgagagccugaucgaccugcaagaacuggggaaguacgagcaguacaucaagggaggcggaggaucugacaucaucaagcugcugaacgagcaagugaacaaagagaugcagagcagcaaccuguacaugagcaugagcagcuggugcuacacccacagccuugauggcgccggacuguuccuguuugaucacgccgccgaggaauacgagcacgccaagaagcugaucaucuuccugaacgagaacaacgugcccgugcagcugaccagcauuucugccccugagcacaaguucgagggccugacacagaucuuccagaaggccuacgaacacgagcagcacaucagcgagagcaucaacaacaucguggaccacgccauuaagagcaaggaucacgccaccuucaacuuucugcagugguacguggccgaacagcacgaggaagaggugcuguucaaggacauccuggacaagaucgagcugaucggcaacgagaaccacggccuguaucuggccgaccaguacgugaagggaaucgccaagagcagaaagagcugaggacuagucccuguucccagagcccacuuuuuuuucuuuuuuugaaauaaaauagccugucuuucagaucucaaaggcucuuuucagagccaccaaaaaaaaaaaaaaaaaaaaaaaaaaaaaaaaaaaaaaaaaaaaaaaaaaaaaaaaaaaaaaaaaaaaaaaaaaaaaaaaaaaaaaaaaaaaaaaaaaaaa

SEQ ID NO: 12581 - RNA, 4412 nt, Artificial Sequence
  SARS-CoV-2/Wuhan/WIV05/2019__EPI_ISL_402128 spike protein mRNA gc mod (1-1211)(Q965C_S1003C) Ferritin construct
aggagagucccgcagucggcguccagcggcucugcuuguucgugugugugucguugcaggccuuauucaagcuuaccauguucguguuucuggugcugcugccccugguguccagccagugugugaaccugaccaccagaacacagcugccuccagccuacaccaacagcuucaccagaggcguguacuaccccgacaagguguucagauccagcgugcugcacucuacccaggaccuguuccugccuuucuucagcaacgugaccugguuccacgccauccacguguccggcaccaauggcaccaagagauucgacaaccccgugcugcccuucaacgacgggguguacuuugccagcaccgagaaguccaacaucaucagaggcuggaucuucggcaccacacuggacagcaagacccagagccugcugaucgugaacaacgccaccaacguggucaucaaagugugcgaguuccaguucugcaacgaccccuuccugggcgucuacuaccacaagaacaacaagagcuggauggaaagcgaguuccggguguacagcagcgccaacaacugcaccuucgaguacgugucccagccuuuccugauggaccuggaaggcaagcagggcaacuucaagaaccugcgcgaguucguguucaagaacaucgacggcuacuucaaaaucuacagcaagcacaccccuaucaaccucgugcgggaucugccucagggcuucucugcucuggaaccccugguggaucugcccaucggcaucaacaucacccgguuucagacacugcuggcccugcacagaagcuaccugacaccuggcgauagcagcagcggauggacagcuggugccgccgcuuacuaugugggcuaccugcagccuagaaccuuccugcugaaguacaacgagaacggcaccaucaccgacgccguggauugugcucuggauccucugagcgagacaaagugcacccugaaguccuucaccguggaaaagggcaucuaccagaccagcaacuuccgggugcagcccaccgaauccaucgugcgguuccccaauaucaccaaucugugccccuucggcgagguguucaaugccaccagauucgccucuguguacgccuggaaccggaagcggaucagcaauugcguggccgacuacuccgugcuguacaacuccgccagcuucagcaccuucaagugcuacggcguguccccuaccaagcugaacgaccugugcuucacaaacguguacgccgacagcuucgugauccggggagaugaagugcggcagauugccccuggacagacaggcaagaucgccgacuacaacuacaagcugcccgacgacuucaccggcugugugauugccuggaacagcaacaaccuggacuccaaagucggcggcaacuacaauuaccuguaccggcuguuccggaaguccaaucugaagcccuucgagcgggacaucagcaccgaaaucuaucaggccggcagcaccccuugcaacggcguggaaggcuucaacugcuacuucccacugcaguccuacggcuuucagcccacaaauggcgugggcuaucagcccuacagagugguggugcugagcuucgaacugcugcaugcuccugccacagugugcggcccuaagaaaagcaccaaucucgugaagaacaaaugcgugaacuucaacuucaacggccugaccggcaccggcgugcugacagagagcaacaagaaguuccugccauuccagcaguuuggccgggauaucgccgauaccacagacgccguuagagauccccagacacuggaaauccuggacaucaccccaugcagcuucggcggagugucugugaucaccccuggcaccaacaccagcaaucagguggcagugcuguaccaggacgugaacuguaccgaagugcccguggccauucacgccgaucagcugacaccuacauggcggguguacuccaccggcagcaauguguuucagaccagagccggcugucugaucggagccgagcacgugaacaauagcuacgagugcgacauccccaucggcgcuggcaucugugccagcuaccagacacagacaaacagccccagacgggcuagaagcguggccagccagagcaucauugccuacacaaugucucugggcgccgagaacagcguggccuacuccaacaacucuaucgcuauccccaccaacuucaccaucagcgugaccaccgagauccugccuguguccaugaccaagaccagcguggacugcaccauguacaucugcggcgauuccaccgagugcuccaaccugcugcugcaguacggcagcuucugcacccagcugaauagagcccugacagggaucgccguggaacaggacaagaacacccaagagguguucgcccaagugaagcaaaucuacaagaccccuccuaucaaggacuucggcggcuucaauuucagccagauucugcccgauccuagcaagcccagcaagcggagcuucaucgaggaccugcuguucaacaaagugacacuggccgacgccggcuucaucaagcaguauggcgauugucugggcgacauugccgccagggaucugauuugcgcccagaaguuuaacggacugacagugcugccuccucugcugaccgaugagaugaucgcccaguacacaucugcccugcuggccggcacaaucacaagcggcuggacauuuggagcuggcgccgcucugcagauccccuuugcuaugcagauggccuaccgguucaacggcaucggagugacccagaaugugcuguacgagaaccagaagcugaucgccaaccaguucaacagcgccaucggcaagauccaggacagccugagcagcacagcaagcgcccugggaaagcugcaggacguggucaaccagaaugcccaggcacugaacacccuggucaagugccuguccuccaacuucggcgccaucagcucugugcugaacgauauccugagcagacuggacaaggucgaggccgaggugcagaucgacagacugaucacaggcagacugcagugucuccagacauacgugacccagcagcugaucagagccgccgagauuagagccucugccaaucuggccgccaccaagaugucugagugugugcugggccagagcaagagaguggacuuuugcggcaagggcuaccaccugaugagcuucccucagucugccccucacggcgugguguuucugcacgugacauaugugcccgcucaagagaagaauuucaccaccgcuccagccaucugccacgacggcaaagcccacuuuccuagagaaggcguguucguguccaacggcacccauugguucgugacacagcggaacuucuacgagccccagaucaucaccaccgacaacaccuucgugucuggcaacugcgacguugugaucggcauugugaacaauaccguguacgacccucugcagcccgagcuggacagcuucaaagaggaacuggacaaguacuuuaagaaccacacaagccccgacguggaccugggcgauaucagcggaaucaaugccagcgucgugaacauccagaaagagaucgaccggcugaacgagguggccaagaaucugaacgagagccugaucgaccugcaagaacuggggaaguacgagcaguacaucaagggaggcggaggaucugacaucaucaagcugcugaacgagcaagugaacaaagagaugcagagcagcaaccuguacaugagcaugagcagcuggugcuacacccacagccuugauggcgccggacuguuccuguuugaucacgccgccgaggaauacgagcacgccaagaagcugaucaucuuccugaacgagaacaacgugcccgugcagcugaccagcauuucugccccugagcacaaguucgagggccugacacagaucuuccagaaggccuacgaacacgagcagcacaucagcgagagcaucaacaacaucguggaccacgccauuaagagcaaggaucacgccaccuucaacuuucugcagugguacguggccgaacagcacgaggaagaggugcuguucaaggacauccuggacaagaucgagcugaucggcaacgagaaccacggccuguaucuggccgaccaguacgugaagggaaucgccaagagcagaaagagcugaggacuagucccuguucccagagcccacuuuuuuuucuuuuuuugaaauaaaauagccugucuuucagaucucaaaggcucuuuucagagccaccaaaaaaaaaaaaaaaaaaaaaaaaaaaaaaaaaaaaaaaaaaaaaaaaaaaaaaaaaaaaaaaaaaaaaaaaaaaaaaaaaaaaaaaaaaaaaaaaaaaaa

SEQ ID NO: 12582 - RNA, 4412 nt, Artificial Sequence
  SARS-CoV-2/Wuhan/WIV05/2019__EPI_ISL_402128 spike protein mRNA gc mod (1-1211)(F970C_G999C) Ferritin construct
aggagagucccgcagucggcguccagcggcucugcuuguucgugugugugucguugcaggccuuauucaagcuuaccauguucguguuucuggugcugcugccccugguguccagccagugugugaaccugaccaccagaacacagcugccuccagccuacaccaacagcuucaccagaggcguguacuaccccgacaagguguucagauccagcgugcugcacucuacccaggaccuguuccugccuuucuucagcaacgugaccugguuccacgccauccacguguccggcaccaauggcaccaagagauucgacaaccccgugcugcccuucaacgacgggguguacuuugccagcaccgagaaguccaacaucaucagaggcuggaucuucggcaccacacuggacagcaagacccagagccugcugaucgugaacaacgccaccaacguggucaucaaagugugcgaguuccaguucugcaacgaccccuuccugggcgucuacuaccacaagaacaacaagagcuggauggaaagcgaguuccggguguacagcagcgccaacaacugcaccuucgaguacgugucccagccuuuccugauggaccuggaaggcaagcagggcaacuucaagaaccugcgcgaguucguguucaagaacaucgacggcuacuucaaaaucuacagcaagcacaccccuaucaaccucgugcgggaucugccucagggcuucucugcucuggaaccccugguggaucugcccaucggcaucaacaucacccgguuucagacacugcuggcccugcacagaagcuaccugacaccuggcgauagcagcagcggauggacagcuggugccgccgcuuacuaugugggcuaccugcagccuagaaccuuccugcugaaguacaacgagaacggcaccaucaccgacgccguggauugugcucuggauccucugagcgagacaaagugcacccugaaguccuucaccguggaaaagggcaucuaccagaccagcaacuuccgggugcagcccaccgaauccaucgugcgguuccccaauaucaccaaucugugccccuucggcgagguguucaaugccaccagauucgccucuguguacgccuggaaccggaagcggaucagcaauugcguggccgacuacuccgugcuguacaacuccgccagcuucagcaccuucaagugcuacggcguguccccuaccaagcugaacgaccugugcuucacaaacguguacgccgacagcuucgugauccggggagaugaagugcggcagauugccccuggacagacaggcaagaucgccgacuacaacuacaagcugcccgacgacuucaccggcugugugauugccuggaacagcaacaaccuggacuccaaagucggcggcaacuacaauuaccuguaccggcuguuccggaaguccaaucugaagcccuucgagcgggacaucagcaccgaaaucuaucaggccggcagcaccccuugcaacggcguggaaggcuucaacugcuacuucccacugcaguccuacggcuuucagcccacaaauggcgugggcuaucagcccuacagagugguggugcugagcuucgaacugcugcaugcuccugccacagugugcggcccuaagaaaagcaccaaucucgugaagaacaaaugcgugaacuucaacuucaacggccugaccggcaccggcgugcugacagagagcaacaagaaguuccugccauuccagcaguuuggccgggauaucgccgauaccacagacgccguuagagauccccagacacuggaaauccuggacaucaccccaugcagcuucggcggagugucugugaucaccccuggcaccaacaccagcaaucagguggcagugcuguaccaggacgugaacuguaccgaagugcccguggccauucacgccgaucagcugacaccuacauggcggguguacuccaccggcagcaauguguuucagaccagagccggcugucugaucggagccgagcacgugaacaauagcuacgagugcgacauccccaucggcgcuggcaucugugccagcuaccagacacagacaaacagccccagacgggcuagaagcguggccagccagagcaucauugccuacacaaugucucugggcgccgagaacagcguggccuacuccaacaacucuaucgcuauccccaccaacuucaccaucagcgugaccaccgagauccugccuguguccaugaccaagaccagcguggacugcaccauguacaucugcggcgauuccaccgagugcuccaaccugcugcugcaguacggcagcuucugcacccagcugaauagagcccugacagggaucgccguggaacaggacaagaacacccaagagguguucgcccaagugaagcaaaucuacaagaccccuccuaucaaggacuucggcggcuucaauuucagccagauucugcccgauccuagcaagcccagcaagcggagcuucaucgaggaccugcuguucaacaaagugacacuggccgacgccggcuucaucaagcaguauggcgauugucugggcgacauugccgccagggaucugauuugcgcccagaaguuuaacggacugacagugcugccuccucugcugaccgaugagaugaucgcccaguacacaucugcccugcuggccggcacaaucacaagcggcuggacauuuggagcuggcgccgcucugcagauccccuuugcuaugcagauggccuaccgguucaacggcaucggagugacccagaaugugcuguacgagaaccagaagcugaucgccaaccaguucaacagcgccaucggcaagauccaggacagccugagcagcacagcaagcgcccugggaaagcugcaggacguggucaaccagaaugcccaggcacugaacacccuggucaagcagcuguccuccaacugcggcgccaucagcucugugcugaacgauauccugagcagacuggacaaggucgaggccgaggugcagaucgacagacugaucacauguagacugcagagccuccagacauacgugacccagcagcugaucagagccgccgagauuagagccucugccaaucuggccgccaccaagaugucugagugugugcugggccagagcaagagaguggacuuuugcggcaagggcuaccaccugaugagcuucccucagucugccccucacggcgugguguuucugcacgugacauaugugcccgcucaagagaagaauuucaccaccgcuccagccaucugccacgacggcaaagcccacuuuccuagagaaggcguguucguguccaacggcacccauugguucgugacacagcggaacuucuacgagccccagaucaucaccaccgacaacaccuucgugucuggcaacugcgacguugugaucggcauugugaacaauaccguguacgacccucugcagcccgagcuggacagcuucaaagaggaacuggacaaguacuuuaagaaccacacaagccccgacguggaccugggcgauaucagcggaaucaaugccagcgucgugaacauccagaaagagaucgaccggcugaacgagguggccaagaaucugaacgagagccugaucgaccugcaagaacuggggaaguacgagcaguacaucaagggaggcggaggaucugacaucaucaagcugcugaacgagcaagugaacaaagagaugcagagcagcaaccuguacaugagcaugagcagcuggugcuacacccacagccuugauggcgccggacuguuccuguuugaucacgccgccgaggaauacgagcacgccaagaagcugaucaucuuccugaacgagaacaacgugcccgugcagcugaccagcauuucugccccugagcacaaguucgagggccugacacagaucuuccagaaggccuacgaacacgagcagcacaucagcgagagcaucaacaacaucguggaccacgccauuaagagcaaggaucacgccaccuucaacuuucugcagugguacguggccgaacagcacgaggaagaggugcuguucaaggacauccuggacaagaucgagcugaucggcaacgagaaccacggccuguaucuggccgaccaguacgugaagggaaucgccaagagcagaaagagcugaggacuagucccuguucccagagcccacuuuuuuuucuuuuuuugaaauaaaauagccugucuuucagaucucaaaggcucuuuucagagccaccaaaaaaaaaaaaaaaaaaaaaaaaaaaaaaaaaaaaaaaaaaaaaaaaaaaaaaaaaaaaaaaaaaaaaaaaaaaaaaaaaaaaaaaaaaaaaaaaaaaaa

SEQ ID NO: 12583 - RNA, 4412 nt, Artificial Sequence
  SARS-CoV-2/Wuhan/WIV05/2019__EPI_ISL_402128 spike protein mRNA gc mod (1-1211)(A972C_R995C) Ferritin construct
aggagagucccgcagucggcguccagcggcucugcuuguucgugugugugucguugcaggccuuauucaagcuuaccauguucguguuucuggugcugcugccccugguguccagccagugugugaaccugaccaccagaacacagcugccuccagccuacaccaacagcuucaccagaggcguguacuaccccgacaagguguucagauccagcgugcugcacucuacccaggaccuguuccugccuuucuucagcaacgugaccugguuccacgccauccacguguccggcaccaauggcaccaagagauucgacaaccccgugcugcccuucaacgacgggguguacuuugccagcaccgagaaguccaacaucaucagaggcuggaucuucggcaccacacuggacagcaagacccagagccugcugaucgugaacaacgccaccaacguggucaucaaagugugcgaguuccaguucugcaacgaccccuuccugggcgucuacuaccacaagaacaacaagagcuggauggaaagcgaguuccggguguacagcagcgccaacaacugcaccuucgaguacgugucccagccuuuccugauggaccuggaaggcaagcagggcaacuucaagaaccugcgcgaguucguguucaagaacaucgacggcuacuucaaaaucuacagcaagcacaccccuaucaaccucgugcgggaucugccucagggcuucucugcucuggaaccccugguggaucugcccaucggcaucaacaucacccgguuucagacacugcuggcccugcacagaagcuaccugacaccuggcgauagcagcagcggauggacagcuggugccgccgcuuacuaugugggcuaccugcagccuagaaccuuccugcugaaguacaacgagaacggcaccaucaccgacgccguggauugugcucuggauccucugagcgagacaaagugcacccugaaguccuucaccguggaaaagggcaucuaccagaccagcaacuuccgggugcagcccaccgaauccaucgugcgguuccccaauaucaccaaucugugccccuucggcgagguguucaaugccaccagauucgccucuguguacgccuggaaccggaagcggaucagcaauugcguggccgacuacuccgugcuguacaacuccgccagcuucagcaccuucaagugcuacggcguguccccuaccaagcugaacgaccugugcuucacaaacguguacgccgacagcuucgugauccggggagaugaagugcggcagauugccccuggacagacaggcaagaucgccgacuacaacuacaagcugcccgacgacuucaccggcugugugauugccuggaacagcaacaaccuggacuccaaagucggcggcaacuacaauuaccuguaccggcuguuccggaaguccaaucugaagcccuucgagcgggacaucagcaccgaaaucuaucaggccggcagcaccccuugcaacggcguggaaggcuucaacugcuacuucccacugcaguccuacggcuuucagcccacaaauggcgugggcuaucagcccuacagagugguggugcugagcuucgaacugcugcaugcuccugccacagugugcggcccuaagaaaagcaccaaucucgugaagaacaaaugcgugaacuucaacuucaacggccugaccggcaccggcgugcugacagagagcaacaagaaguuccugccauuccagcaguuuggccgggauaucgccgauaccacagacgccguuagagauccccagacacuggaaauccuggacaucaccccaugcagcuucggcggagugucugugaucaccccuggcaccaacaccagcaaucagguggcagugcuguaccaggacgugaacuguaccgaagugcccguggccauucacgccgaucagcugacaccuacauggcggguguacuccaccggcagcaauguguuucagaccagagccggcugucugaucggagccgagcacgugaacaauagcuacgagugcgacauccccaucggcgcuggcaucugugccagcuaccagacacagacaaacagccccagacgggcuagaagcguggccagccagagcaucauugccuacacaaugucucugggcgccgagaacagcguggccuacuccaacaacucuaucgcuauccccaccaacuucaccaucagcgugaccaccgagauccugccuguguccaugaccaagaccagcguggacugcaccauguacaucugcggcgauuccaccgagugcuccaaccugcugcugcaguacggcagcuucugcacccagcugaauagagcccugacagggaucgccguggaacaggacaagaacacccaagagguguucgcccaagugaagcaaaucuacaagaccccuccuaucaaggacuucggcggcuucaauuucagccagauucugcccgauccuagcaagcccagcaagcggagcuucaucgaggaccugcuguucaacaaagugacacuggccgacgccggcuucaucaagcaguauggcgauugucugggcgacauugccgccagggaucugauuugcgcccagaaguuuaacggacugacagugcugccuccucugcugaccgaugagaugaucgcccaguacacaucugcccugcuggccggcacaaucacaagcggcuggacauuuggagcuggcgccgcucugcagauccccuuugcuaugcagauggccuaccgguucaacggcaucggagugacccagaaugugcuguacgagaaccagaagcugaucgccaaccaguucaacagcgccaucggcaagauccaggacagccugagcagcacagcaagcgcccugggaaagcugcaggacguggucaaccagaaugcccaggcacugaacacccuggucaagcagcuguccuccaacuucggcugcaucagcucugugcugaacgauauccugagcagacuggacaaggucgaggccgaggugcagaucgacugucugaucacaggcagacugcagagccuccagacauacgugacccagcagcugaucagagccgccgagauuagagccucugccaaucuggccgccaccaagaugucugagugugugcugggccagagcaagagaguggacuuuugcggcaagggcuaccaccugaugagcuucccucagucugccccucacggcgugguguuucugcacgugacauaugugcccgcucaagagaagaauuucaccaccgcuccagccaucugccacgacggcaaagcccacuuuccuagagaaggcguguucguguccaacggcacccauugguucgugacacagcggaacuucuacgagccccagaucaucaccaccgacaacaccuucgugucuggcaacugcgacguugugaucggcauugugaacaauaccguguacgacccucugcagcccgagcuggacagcuucaaagaggaacuggacaaguacuuuaagaaccacacaagccccgacguggaccugggcgauaucagcggaaucaaugccagcgucgugaacauccagaaagagaucgaccggcugaacgagguggccaagaaucugaacgagagccugaucgaccugcaagaacuggggaaguacgagcaguacaucaagggaggcggaggaucugacaucaucaagcugcugaacgagcaagugaacaaagagaugcagagcagcaaccuguacaugagcaugagcagcuggugcuacacccacagccuugauggcgccggacuguuccuguuugaucacgccgccgaggaauacgagcacgccaagaagcugaucaucuuccugaacgagaacaacgugcccgugcagcugaccagcauuucugccccugagcacaaguucgagggccugacacagaucuuccagaaggccuacgaacacgagcagcacaucagcgagagcaucaacaacaucguggaccacgccauuaagagcaaggaucacgccaccuucaacuuucugcagugguacguggccgaacagcacgaggaagaggugcuguucaaggacauccuggacaagaucgagcugaucggcaacgagaaccacggccuguaucuggccgaccaguacgugaagggaaucgccaagagcagaaagagcugaggacuagucccuguucccagagcccacuuuuuuuucuuuuuuugaaauaaaauagccugucuuucagaucucaaaggcucuuuucagagccaccaaaaaaaaaaaaaaaaaaaaaaaaaaaaaaaaaaaaaaaaaaaaaaaaaaaaaaaaaaaaaaaaaaaaaaaaaaaaaaaaaaaaaaaaaaaaaaaaaaaaa

SEQ ID NO: 12584 - RNA, 4412 nt, Artificial Sequence
  SARS-CoV-2/Wuhan/WIV05/2019__EPI_ISL_402128 spike protein mRNA gc mod (1-1211)(A890C_V1040C) Ferritin construct
aggagagucccgcagucggcguccagcggcucugcuuguucgugugugugucguugcaggccuuauucaagcuuaccauguucguguuucuggugcugcugccccugguguccagccagugugugaaccugaccaccagaacacagcugccuccagccuacaccaacagcuucaccagaggcguguacuaccccgacaagguguucagauccagcgugcugcacucuacccaggaccuguuccugccuuucuucagcaacgugaccugguuccacgccauccacguguccggcaccaauggcaccaagagauucgacaaccccgugcugcccuucaacgacgggguguacuuugccagcaccgagaaguccaacaucaucagaggcuggaucuucggcaccacacuggacagcaagacccagagccugcugaucgugaacaacgccaccaacguggucaucaaagugugcgaguuccaguucugcaacgaccccuuccugggcgucuacuaccacaagaacaacaagagcuggauggaaagcgaguuccggguguacagcagcgccaacaacugcaccuucgaguacgugucccagccuuuccugauggaccuggaaggcaagcagggcaacuucaagaaccugcgcgaguucguguucaagaacaucgacggcuacuucaaaaucuacagcaagcacaccccuaucaaccucgugcgggaucugccucagggcuucucugcucuggaaccccugguggaucugcccaucggcaucaacaucacccgguuucagacacugcuggcccugcacagaagcuaccugacaccuggcgauagcagcagcggauggacagcuggugccgccgcuuacuaugugggcuaccugcagccuagaaccuuccugcugaaguacaacgagaacggcaccaucaccgacgccguggauugugcucuggauccucugagcgagacaaagugcacccugaaguccuucaccguggaaaagggcaucuaccagaccagcaacuuccgggugcagcccaccgaauccaucgugcgguuccccaauaucaccaaucugugccccuucggcgagguguucaaugccaccagauucgccucuguguacgccuggaaccggaagcggaucagcaauugcguggccgacuacuccgugcuguacaacuccgccagcuucagcaccuucaagugcuacggcguguccccuaccaagcugaacgaccugugcuucacaaacguguacgccgacagcuucgugauccggggagaugaagugcggcagauugccccuggacagacaggcaagaucgccgacuacaacuacaagcugcccgacgacuucaccggcugugugauugccuggaacagcaacaaccuggacuccaaagucggcggcaacuacaauuaccuguaccggcuguuccggaaguccaaucugaagcccuucgagcgggacaucagcaccgaaaucuaucaggccggcagcaccccuugcaacggcguggaaggcuucaacugcuacuucccacugcaguccuacggcuuucagcccacaaauggcgugggcuaucagcccuacagagugguggugcugagcuucgaacugcugcaugcuccugccacagugugcggcccuaagaaaagcaccaaucucgugaagaacaaaugcgugaacuucaacuucaacggccugaccggcaccggcgugcugacagagagcaacaagaaguuccugccauuccagcaguuuggccgggauaucgccgauaccacagacgccguuagagauccccagacacuggaaauccuggacaucaccccaugcagcuucggcggagugucugugaucaccccuggcaccaacaccagcaaucagguggcagugcuguaccaggacgugaacuguaccgaagugcccguggccauucacgccgaucagcugacaccuacauggcggguguacuccaccggcagcaauguguuucagaccagagccggcugucugaucggagccgagcacgugaacaauagcuacgagugcgacauccccaucggcgcuggcaucugugccagcuaccagacacagacaaacagccccagacgggcuagaagcguggccagccagagcaucauugccuacacaaugucucugggcgccgagaacagcguggccuacuccaacaacucuaucgcuauccccaccaacuucaccaucagcgugaccaccgagauccugccuguguccaugaccaagaccagcguggacugcaccauguacaucugcggcgauuccaccgagugcuccaaccugcugcugcaguacggcagcuucugcacccagcugaauagagcccugacagggaucgccguggaacaggacaagaacacccaagagguguucgcccaagugaagcaaaucuacaagaccccuccuaucaaggacuucggcggcuucaauuucagccagauucugcccgauccuagcaagcccagcaagcggagcuucaucgaggaccugcuguucaacaaagugacacuggccgacgccggcuucaucaagcaguauggcgauugucugggcgacauugccgccagggaucugauuugcgcccagaaguuuaacggacugacagugcugccuccucugcugaccgaugagaugaucgcccaguacacaucugcccugcuggccggcacaaucacaagcggcuggacauuuggaugcggcgccgcucugcagauccccuuugcuaugcagauggccuaccgguucaacggcaucggagugacccagaaugugcuguacgagaaccagaagcugaucgccaaccaguucaacagcgccaucggcaagauccaggacagccugagcagcacagcaagcgcccugggaaagcugcaggacguggucaaccagaaugcccaggcacugaacacccuggucaagcagcuguccuccaacuucggcgccaucagcucugugcugaacgauauccugagcagacuggacaaggucgaggccgaggugcagaucgacagacugaucacaggcagacugcagagccuccagacauacgugacccagcagcugaucagagccgccgagauuagagccucugccaaucuggccgccaccaagaugucugagugugugcugggccagagcaagagaugugacuuuugcggcaagggcuaccaccugaugagcuucccucagucugccccucacggcgugguguuucugcacgugacauaugugcccgcucaagagaagaauuucaccaccgcuccagccaucugccacgacggcaaagcccacuuuccuagagaaggcguguucguguccaacggcacccauugguucgugacacagcggaacuucuacgagccccagaucaucaccaccgacaacaccuucgugucuggcaacugcgacguugugaucggcauugugaacaauaccguguacgacccucugcagcccgagcuggacagcuucaaagaggaacuggacaaguacuuuaagaaccacacaagccccgacguggaccugggcgauaucagcggaaucaaugccagcgucgugaacauccagaaagagaucgaccggcugaacgagguggccaagaaucugaacgagagccugaucgaccugcaagaacuggggaaguacgagcaguacaucaagggaggcggaggaucugacaucaucaagcugcugaacgagcaagugaacaaagagaugcagagcagcaaccuguacaugagcaugagcagcuggugcuacacccacagccuugauggcgccggacuguuccuguuugaucacgccgccgaggaauacgagcacgccaagaagcugaucaucuuccugaacgagaacaacgugcccgugcagcugaccagcauuucugccccugagcacaaguucgagggccugacacagaucuuccagaaggccuacgaacacgagcagcacaucagcgagagcaucaacaacaucguggaccacgccauuaagagcaaggaucacgccaccuucaacuuucugcagugguacguggccgaacagcacgaggaagaggugcuguucaaggacauccuggacaagaucgagcugaucggcaacgagaaccacggccuguaucuggccgaccaguacgugaagggaaucgccaagagcagaaagagcugaggacuagucccuguucccagagcccacuuuuuuuucuuuuuuugaaauaaaauagccugucuuucagaucucaaaggcucuuuucagagccaccaaaaaaaaaaaaaaaaaaaaaaaaaaaaaaaaaaaaaaaaaaaaaaaaaaaaaaaaaaaaaaaaaaaaaaaaaaaaaaaaaaaaaaaaaaaaaaaaaaaaa

SEQ ID NO: 12585 - RNA, 4412 nt, Artificial Sequence
  SARS-CoV-2/Wuhan/WIV05/2019__EPI_ISL_402128 spike protein mRNA gc mod (1-1211)(T874C_S1055C) Ferritin construct
aggagagucccgcagucggcguccagcggcucugcuuguucgugugugugucguugcaggccuuauucaagcuuaccauguucguguuucuggugcugcugccccugguguccagccagugugugaaccugaccaccagaacacagcugccuccagccuacaccaacagcuucaccagaggcguguacuaccccgacaagguguucagauccagcgugcugcacucuacccaggaccuguuccugccuuucuucagcaacgugaccugguuccacgccauccacguguccggcaccaauggcaccaagagauucgacaaccccgugcugcccuucaacgacgggguguacuuugccagcaccgagaaguccaacaucaucagaggcuggaucuucggcaccacacuggacagcaagacccagagccugcugaucgugaacaacgccaccaacguggucaucaaagugugcgaguuccaguucugcaacgaccccuuccugggcgucuacuaccacaagaacaacaagagcuggauggaaagcgaguuccggguguacagcagcgccaacaacugcaccuucgaguacgugucccagccuuuccugauggaccuggaaggcaagcagggcaacuucaagaaccugcgcgaguucguguucaagaacaucgacggcuacuucaaaaucuacagcaagcacaccccuaucaaccucgugcgggaucugccucagggcuucucugcucuggaaccccugguggaucugcccaucggcaucaacaucacccgguuucagacacugcuggcccugcacagaagcuaccugacaccuggcgauagcagcagcggauggacagcuggugccgccgcuuacuaugugggcuaccugcagccuagaaccuuccugcugaaguacaacgagaacggcaccaucaccgacgccguggauugugcucuggauccucugagcgagacaaagugcacccugaaguccuucaccguggaaaagggcaucuaccagaccagcaacuuccgggugcagcccaccgaauccaucgugcgguuccccaauaucaccaaucugugccccuucggcgagguguucaaugccaccagauucgccucuguguacgccuggaaccggaagcggaucagcaauugcguggccgacuacuccgugcuguacaacuccgccagcuucagcaccuucaagugcuacggcguguccccuaccaagcugaacgaccugugcuucacaaacguguacgccgacagcuucgugauccggggagaugaagugcggcagauugccccuggacagacaggcaagaucgccgacuacaacuacaagcugcccgacgacuucaccggcugugugauugccuggaacagcaacaaccuggacuccaaagucggcggcaacuacaauuaccuguaccggcuguuccggaaguccaaucugaagcccuucgagcgggacaucagcaccgaaaucuaucaggccggcagcaccccuugcaacggcguggaaggcuucaacugcuacuucccacugcaguccuacggcuuucagcccacaaauggcgugggcuaucagcccuacagagugguggugcugagcuucgaacugcugcaugcuccugccacagugugcggcccuaagaaaagcaccaaucucgugaagaacaaaugcgugaacuucaacuucaacggccugaccggcaccggcgugcugacagagagcaacaagaaguuccugccauuccagcaguuuggccgggauaucgccgauaccacagacgccguuagagauccccagacacuggaaauccuggacaucaccccaugcagcuucggcggagugucugugaucaccccuggcaccaacaccagcaaucagguggcagugcuguaccaggacgugaacuguaccgaagugcccguggccauucacgccgaucagcugacaccuacauggcggguguacuccaccggcagcaauguguuucagaccagagccggcugucugaucggagccgagcacgugaacaauagcuacgagugcgacauccccaucggcgcuggcaucugugccagcuaccagacacagacaaacagccccagacgggcuagaagcguggccagccagagcaucauugccuacacaaugucucugggcgccgagaacagcguggccuacuccaacaacucuaucgcuauccccaccaacuucaccaucagcgugaccaccgagauccugccuguguccaugaccaagaccagcguggacugcaccauguacaucugcggcgauuccaccgagugcuccaaccugcugcugcaguacggcagcuucugcacccagcugaauagagcccugacagggaucgccguggaacaggacaagaacacccaagagguguucgcccaagugaagcaaaucuacaagaccccuccuaucaaggacuucggcggcuucaauuucagccagauucugcccgauccuagcaagcccagcaagcggagcuucaucgaggaccugcuguucaacaaagugacacuggccgacgccggcuucaucaagcaguauggcgauugucugggcgacauugccgccagggaucugauuugcgcccagaaguuuaacggacugacagugcugccuccucugcugaccgaugagaugaucgcccaguacugcucugcccugcuggccggcacaaucacaagcggcuggacauuuggagcuggcgccgcucugcagauccccuuugcuaugcagauggccuaccgguucaacggcaucggagugacccagaaugugcuguacgagaaccagaagcugaucgccaaccaguucaacagcgccaucggcaagauccaggacagccugagcagcacagcaagcgcccugggaaagcugcaggacguggucaaccagaaugcccaggcacugaacacccuggucaagcagcuguccuccaacuucggcgccaucagcucugugcugaacgauauccugagcagacuggacaaggucgaggccgaggugcagaucgacagacugaucacaggcagacugcagagccuccagacauacgugacccagcagcugaucagagccgccgagauuagagccucugccaaucuggccgccaccaagaugucugagugugugcugggccagagcaagagaguggacuuuugcggcaagggcuaccaccugaugagcuucccucagugcgccccucacggcgugguguuucugcacgugacauaugugcccgcucaagagaagaauuucaccaccgcuccagccaucugccacgacggcaaagcccacuuuccuagagaaggcguguucguguccaacggcacccauugguucgugacacagcggaacuucuacgagccccagaucaucaccaccgacaacaccuucgugucuggcaacugcgacguugugaucggcauugugaacaauaccguguacgacccucugcagcccgagcuggacagcuucaaagaggaacuggacaaguacuuuaagaaccacacaagccccgacguggaccugggcgauaucagcggaaucaaugccagcgucgugaacauccagaaagagaucgaccggcugaacgagguggccaagaaucugaacgagagccugaucgaccugcaagaacuggggaaguacgagcaguacaucaagggaggcggaggaucugacaucaucaagcugcugaacgagcaagugaacaaagagaugcagagcagcaaccuguacaugagcaugagcagcuggugcuacacccacagccuugauggcgccggacuguuccuguuugaucacgccgccgaggaauacgagcacgccaagaagcugaucaucuuccugaacgagaacaacgugcccgugcagcugaccagcauuucugccccugagcacaaguucgagggccugacacagaucuuccagaaggccuacgaacacgagcagcacaucagcgagagcaucaacaacaucguggaccacgccauuaagagcaaggaucacgccaccuucaacuuucugcagugguacguggccgaacagcacgaggaagaggugcuguucaaggacauccuggacaagaucgagcugaucggcaacgagaaccacggccuguaucuggccgaccaguacgugaagggaaucgccaagagcagaaagagcugaggacuagucccuguucccagagcccacuuuuuuuucuuuuuuugaaauaaaauagccugucuuucagaucucaaaggcucuuuucagagccaccaaaaaaaaaaaaaaaaaaaaaaaaaaaaaaaaaaaaaaaaaaaaaaaaaaaaaaaaaaaaaaaaaaaaaaaaaaaaaaaaaaaaaaaaaaaaaaaaaaaaa

SEQ ID NO: 12586 - RNA, 3998 nt, Artificial Sequence
  SARS-CoV-2/Wuhan/WIV05/2019__EPI_ISL_402128 spike protein mRNA gc mod (1-1211) Foldon construct
aggagagucccgcagucggcguccagcggcucugcuuguucgugugugugucguugcaggccuuauucaagcuuaccauguucguguuucuggugcugcugccccugguguccagccagugugugaaccugaccaccagaacacagcugccuccagccuacaccaacagcuucaccagaggcguguacuaccccgacaagguguucagauccagcgugcugcacucuacccaggaccuguuccugccuuucuucagcaacgugaccugguuccacgccauccacguguccggcaccaauggcaccaagagauucgacaaccccgugcugcccuucaacgacgggguguacuuugccagcaccgagaaguccaacaucaucagaggcuggaucuucggcaccacacuggacagcaagacccagagccugcugaucgugaacaacgccaccaacguggucaucaaagugugcgaguuccaguucugcaacgaccccuuccugggcgucuacuaccacaagaacaacaagagcuggauggaaagcgaguuccggguguacagcagcgccaacaacugcaccuucgaguacgugucccagccuuuccugauggaccuggaaggcaagcagggcaacuucaagaaccugcgcgaguucguguucaagaacaucgacggcuacuucaaaaucuacagcaagcacaccccuaucaaccucgugcgggaucugccucagggcuucucugcucuggaaccccugguggaucugcccaucggcaucaacaucacccgguuucagacacugcuggcccugcacagaagcuaccugacaccuggcgauagcagcagcggauggacagcuggugccgccgcuuacuaugugggcuaccugcagccuagaaccuuccugcugaaguacaacgagaacggcaccaucaccgacgccguggauugugcucuggauccucugagcgagacaaagugcacccugaaguccuucaccguggaaaagggcaucuaccagaccagcaacuuccgggugcagcccaccgaauccaucgugcgguuccccaauaucaccaaucugugccccuucggcgagguguucaaugccaccagauucgccucuguguacgccuggaaccggaagcggaucagcaauugcguggccgacuacuccgugcuguacaacuccgccagcuucagcaccuucaagugcuacggcguguccccuaccaagcugaacgaccugugcuucacaaacguguacgccgacagcuucgugauccggggagaugaagugcggcagauugccccuggacagacaggcaagaucgccgacuacaacuacaagcugcccgacgacuucaccggcugugugauugccuggaacagcaacaaccuggacuccaaagucggcggcaacuacaauuaccuguaccggcuguuccggaaguccaaucugaagcccuucgagcgggacaucagcaccgaaaucuaucaggccggcagcaccccuugcaacggcguggaaggcuucaacugcuacuucccacugcaguccuacggcuuucagcccacaaauggcgugggcuaucagcccuacagagugguggugcugagcuucgaacugcugcaugcuccugccacagugugcggcccuaagaaaagcaccaaucucgugaagaacaaaugcgugaacuucaacuucaacggccugaccggcaccggcgugcugacagagagcaacaagaaguuccugccauuccagcaguuuggccgggauaucgccgauaccacagacgccguuagagauccccagacacuggaaauccuggacaucaccccaugcagcuucggcggagugucugugaucaccccuggcaccaacaccagcaaucagguggcagugcuguaccaggacgugaacuguaccgaagugcccguggccauucacgccgaucagcugacaccuacauggcggguguacuccaccggcagcaauguguuucagaccagagccggcugucugaucggagccgagcacgugaacaauagcuacgagugcgacauccccaucggcgcuggcaucugugccagcuaccagacacagacaaacagccccagacgggcuagaagcguggccagccagagcaucauugccuacacaaugucucugggcgccgagaacagcguggccuacuccaacaacucuaucgcuauccccaccaacuucaccaucagcgugaccaccgagauccugccuguguccaugaccaagaccagcguggacugcaccauguacaucugcggcgauuccaccgagugcuccaaccugcugcugcaguacggcagcuucugcacccagcugaauagagcccugacagggaucgccguggaacaggacaagaacacccaagagguguucgcccaagugaagcaaaucuacaagaccccuccuaucaaggacuucggcggcuucaauuucagccagauucugcccgauccuagcaagcccagcaagcggagcuucaucgaggaccugcuguucaacaaagugacacuggccgacgccggcuucaucaagcaguauggcgauugucugggcgacauugccgccagggaucugauuugcgcccagaaguuuaacggacugacagugcugccuccucugcugaccgaugagaugaucgcccaguacacaucugcccugcuggccggcacaaucacaagcggcuggacauuuggagcuggcgccgcucugcagauccccuuugcuaugcagauggccuaccgguucaacggcaucggagugacccagaaugugcuguacgagaaccagaagcugaucgccaaccaguucaacagcgccaucggcaagauccaggacagccugagcagcacagcaagcgcccugggaaagcugcaggacguggucaaccagaaugcccaggcacugaacacccuggucaagcagcuguccuccaacuucggcgccaucagcucugugcugaacgauauccugagcagacuggacaaggucgaggccgaggugcagaucgacagacugaucacaggcagacugcagagccuccagacauacgugacccagcagcugaucagagccgccgagauuagagccucugccaaucuggccgccaccaagaugucugagugugugcugggccagagcaagagaguggacuuuugcggcaagggcuaccaccugaugagcuucccucagucugccccucacggcgugguguuucugcacgugacauaugugcccgcucaagagaagaauuucaccaccgcuccagccaucugccacgacggcaaagcccacuuuccuagagaaggcguguucguguccaacggcacccauugguucgugacacagcggaacuucuacgagccccagaucaucaccaccgacaacaccuucgugucuggcaacugcgacguugugaucggcauugugaacaauaccguguacgacccucugcagcccgagcuggacagcuucaaagaggaacuggacaaguacuuuaagaaccacacaagccccgacguggaccugggcgauaucagcggaaucaaugccagcgucgugaacauccagaaagagaucgaccggcugaacgagguggccaagaaucugaacgagagccugaucgaccugcaagaacuggggaaguacgagcaguacaucaagggaggaucuggcuauauccccgaggcuccuagagauggccaggccuauguucggaaggauggcgaaugggugcugcugagcaccuuccuuugaggacuagucccuguucccagagcccacuuuuuuuucuuuuuuugaaauaaaauagccugucuuucagaucucaaaggcucuuuucagagccaccaaaaaaaaaaaaaaaaaaaaaaaaaaaaaaaaaaaaaaaaaaaaaaaaaaaaaaaaaaaaaaaaaaaaaaaaaaaaaaaaaaaaaaaaaaaaaaaaaaaaa

SEQ ID NO: 12587 - RNA, 3998 nt, Artificial Sequence
  SARS-CoV-2/Wuhan/WIV05/2019__EPI_ISL_402128 spike protein mRNA gc mod (1-1211)(K986P_V987P) Foldon construct
aggagagucccgcagucggcguccagcggcucugcuuguucgugugugugucguugcaggccuuauucaagcuuaccauguucguguuucuggugcugcugccccugguguccagccagugugugaaccugaccaccagaacacagcugccuccagccuacaccaacagcuucaccagaggcguguacuaccccgacaagguguucagauccagcgugcugcacucuacccaggaccuguuccugccuuucuucagcaacgugaccugguuccacgccauccacguguccggcaccaauggcaccaagagauucgacaaccccgugcugcccuucaacgacgggguguacuuugccagcaccgagaaguccaacaucaucagaggcuggaucuucggcaccacacuggacagcaagacccagagccugcugaucgugaacaacgccaccaacguggucaucaaagugugcgaguuccaguucugcaacgaccccuuccugggcgucuacuaccacaagaacaacaagagcuggauggaaagcgaguuccggguguacagcagcgccaacaacugcaccuucgaguacgugucccagccuuuccugauggaccuggaaggcaagcagggcaacuucaagaaccugcgcgaguucguguucaagaacaucgacggcuacuucaaaaucuacagcaagcacaccccuaucaaccucgugcgggaucugccucagggcuucucugcucuggaaccccugguggaucugcccaucggcaucaacaucacccgguuucagacacugcuggcccugcacagaagcuaccugacaccuggcgauagcagcagcggauggacagcuggugccgccgcuuacuaugugggcuaccugcagccuagaaccuuccugcugaaguacaacgagaacggcaccaucaccgacgccguggauugugcucuggauccucugagcgagacaaagugcacccugaaguccuucaccguggaaaagggcaucuaccagaccagcaacuuccgggugcagcccaccgaauccaucgugcgguuccccaauaucaccaaucugugccccuucggcgagguguucaaugccaccagauucgccucuguguacgccuggaaccggaagcggaucagcaauugcguggccgacuacuccgugcuguacaacuccgccagcuucagcaccuucaagugcuacggcguguccccuaccaagcugaacgaccugugcuucacaaacguguacgccgacagcuucgugauccggggagaugaagugcggcagauugccccuggacagacaggcaagaucgccgacuacaacuacaagcugcccgacgacuucaccggcugugugauugccuggaacagcaacaaccuggacuccaaagucggcggcaacuacaauuaccuguaccggcuguuccggaaguccaaucugaagcccuucgagcgggacaucagcaccgaaaucuaucaggccggcagcaccccuugcaacggcguggaaggcuucaacugcuacuucccacugcaguccuacggcuuucagcccacaaauggcgugggcuaucagcccuacagagugguggugcugagcuucgaacugcugcaugcuccugccacagugugcggcccuaagaaaagcaccaaucucgugaagaacaaaugcgugaacuucaacuucaacggccugaccggcaccggcgugcugacagagagcaacaagaaguuccugccauuccagcaguuuggccgggauaucgccgauaccacagacgccguuagagauccccagacacuggaaauccuggacaucaccccaugcagcuucggcggagugucugugaucaccccuggcaccaacaccagcaaucagguggcagugcuguaccaggacgugaacuguaccgaagugcccguggccauucacgccgaucagcugacaccuacauggcggguguacuccaccggcagcaauguguuucagaccagagccggcugucugaucggagccgagcacgugaacaauagcuacgagugcgacauccccaucggcgcuggcaucugugccagcuaccagacacagacaaacagccccagacgggcuagaagcguggccagccagagcaucauugccuacacaaugucucugggcgccgagaacagcguggccuacuccaacaacucuaucgcuauccccaccaacuucaccaucagcgugaccaccgagauccugccuguguccaugaccaagaccagcguggacugcaccauguacaucugcggcgauuccaccgagugcuccaaccugcugcugcaguacggcagcuucugcacccagcugaauagagcccugacagggaucgccguggaacaggacaagaacacccaagagguguucgcccaagugaagcaaaucuacaagaccccuccuaucaaggacuucggcggcuucaauuucagccagauucugcccgauccuagcaagcccagcaagcggagcuucaucgaggaccugcuguucaacaaagugacacuggccgacgccggcuucaucaagcaguauggcgauugucugggcgacauugccgccagggaucugauuugcgcccagaaguuuaacggacugacagugcugccuccucugcugaccgaugagaugaucgcccaguacacaucugcccugcuggccggcacaaucacaagcggcuggacauuuggagcuggcgccgcucugcagauccccuuugcuaugcagauggccuaccgguucaacggcaucggagugacccagaaugugcuguacgagaaccagaagcugaucgccaaccaguucaacagcgccaucggcaagauccaggacagccugagcagcacagcaagcgcccugggaaagcugcaggacguggucaaccagaaugcccaggcacugaacacccuggucaagcagcuguccuccaacuucggcgccaucagcucugugcugaacgauauccugagcagacuggacccuccugaggccgaggugcagaucgacagacugaucacaggcagacugcagagccuccagacauacgugacccagcagcugaucagagccgccgagauuagagccucugccaaucuggccgccaccaagaugucugagugugugcugggccagagcaagagaguggacuuuugcggcaagggcuaccaccugaugagcuucccucagucugccccucacggcgugguguuucugcacgugacauaugugcccgcucaagagaagaauuucaccaccgcuccagccaucugccacgacggcaaagcccacuuuccuagagaaggcguguucguguccaacggcacccauugguucgugacacagcggaacuucuacgagccccagaucaucaccaccgacaacaccuucgugucuggcaacugcgacguugugaucggcauugugaacaauaccguguacgacccucugcagcccgagcuggacagcuucaaagaggaacuggacaaguacuuuaagaaccacacaagccccgacguggaccugggcgauaucagcggaaucaaugccagcgucgugaacauccagaaagagaucgaccggcugaacgagguggccaagaaucugaacgagagccugaucgaccugcaagaacuggggaaguacgagcaguacaucaagggaggaucuggcuauauccccgaggcuccuagagauggccaggccuauguucggaaggauggcgaaugggugcugcugagcaccuuccuuugaggacuagucccuguucccagagcccacuuuuuuuucuuuuuuugaaauaaaauagccugucuuucagaucucaaaggcucuuuucagagccaccaaaaaaaaaaaaaaaaaaaaaaaaaaaaaaaaaaaaaaaaaaaaaaaaaaaaaaaaaaaaaaaaaaaaaaaaaaaaaaaaaaaaaaaaaaaaaaaaaaaaa

SEQ ID NO: 12588 - RNA, 3998 nt, Artificial Sequence
  SARS-CoV-2/Wuhan/WIV05/2019__EPI_ISL_402128 spike protein mRNA gc mod (1-1211)(K986P_V987P_T887WN_A1020W) Foldon construct
aggagagucccgcagucggcguccagcggcucugcuuguucgugugugugucguugcaggccuuauucaagcuuaccauguucguguuucuggugcugcugccccugguguccagccagugugugaaccugaccaccagaacacagcugccuccagccuacaccaacagcuucaccagaggcguguacuaccccgacaagguguucagauccagcgugcugcacucuacccaggaccuguuccugccuuucuucagcaacgugaccugguuccacgccauccacguguccggcaccaauggcaccaagagauucgacaaccccgugcugcccuucaacgacgggguguacuuugccagcaccgagaaguccaacaucaucagaggcuggaucuucggcaccacacuggacagcaagacccagagccugcugaucgugaacaacgccaccaacguggucaucaaagugugcgaguuccaguucugcaacgaccccuuccugggcgucuacuaccacaagaacaacaagagcuggauggaaagcgaguuccggguguacagcagcgccaacaacugcaccuucgaguacgugucccagccuuuccugauggaccuggaaggcaagcagggcaacuucaagaaccugcgcgaguucguguucaagaacaucgacggcuacuucaaaaucuacagcaagcacaccccuaucaaccucgugcgggaucugccucagggcuucucugcucuggaaccccugguggaucugcccaucggcaucaacaucacccgguuucagacacugcuggcccugcacagaagcuaccugacaccuggcgauagcagcagcggauggacagcuggugccgccgcuuacuaugugggcuaccugcagccuagaaccuuccugcugaaguacaacgagaacggcaccaucaccgacgccguggauugugcucuggauccucugagcgagacaaagugcacccugaaguccuucaccguggaaaagggcaucuaccagaccagcaacuuccgggugcagcccaccgaauccaucgugcgguuccccaauaucaccaaucugugccccuucggcgagguguucaaugccaccagauucgccucuguguacgccuggaaccggaagcggaucagcaauugcguggccgacuacuccgugcuguacaacuccgccagcuucagcaccuucaagugcuacggcguguccccuaccaagcugaacgaccugugcuucacaaacguguacgccgacagcuucgugauccggggagaugaagugcggcagauugccccuggacagacaggcaagaucgccgacuacaacuacaagcugcccgacgacuucaccggcugugugauugccuggaacagcaacaaccuggacuccaaagucggcggcaacuacaauuaccuguaccggcuguuccggaaguccaaucugaagcccuucgagcgggacaucagcaccgaaaucuaucaggccggcagcaccccuugcaacggcguggaaggcuucaacugcuacuucccacugcaguccuacggcuuucagcccacaaauggcgugggcuaucagcccuacagagugguggugcugagcuucgaacugcugcaugcuccugccacagugugcggcccuaagaaaagcaccaaucucgugaagaacaaaugcgugaacuucaacuucaacggccugaccggcaccggcgugcugacagagagcaacaagaaguuccugccauuccagcaguuuggccgggauaucgccgauaccacagacgccguuagagauccccagacacuggaaauccuggacaucaccccaugcagcuucggcggagugucugugaucaccccuggcaccaacaccagcaaucagguggcagugcuguaccaggacgugaacuguaccgaagugcccguggccauucacgccgaucagcugacaccuacauggcggguguacuccaccggcagcaauguguuucagaccagagccggcugucugaucggagccgagcacgugaacaauagcuacgagugcgacauccccaucggcgcuggcaucugugccagcuaccagacacagacaaacagccccagacgggcuagaagcguggccagccagagcaucauugccuacacaaugucucugggcgccgagaacagcguggccuacuccaacaacucuaucgcuauccccaccaacuucaccaucagcgugaccaccgagauccugccuguguccaugaccaagaccagcguggacugcaccauguacaucugcggcgauuccaccgagugcuccaaccugcugcugcaguacggcagcuucugcacccagcugaauagagcccugacagggaucgccguggaacaggacaagaacacccaagagguguucgcccaagugaagcaaaucuacaagaccccuccuaucaaggacuucggcggcuucaauuucagccagauucugcccgauccuagcaagcccagcaagcggagcuucaucgaggaccugcuguucaacaaagugacacuggccgacgccggcuucaucaagcaguauggcgauugucugggcgacauugccgccagggaucugauuugcgcccagaaguuuaacggacugacagugcugccuccucugcugaccgaugagaugaucgcccaguacacaucugcccugcuggccggcacaaucacaagcggcuggugguuuggagcuggcgccgcucugcagauccccuuugcuaugcagauggccuaccgguucaacggcaucggagugacccagaaugugcuguacgagaaccagaagcugaucgccaaccaguucaacagcgccaucggcaagauccaggacagccugagcagcacagcaagcgcccugggaaagcugcaggacguggucaaccagaaugcccaggcacugaacacccuggucaagcagcuguccuccaacuucggcgccaucagcucugugcugaacgauauccugagcagacuggacccuccugaggccgaggugcagaucgacagacugaucacaggcagacugcagagccuccagacauacgugacccagcagcugaucagagccgccgagauuagauggucugccaaucuggccgccaccaagaugucugagugugugcugggccagagcaagagaguggacuuuugcggcaagggcuaccaccugaugagcuucccucagucugccccucacggcgugguguuucugcacgugacauaugugcccgcucaagagaagaauuucaccaccgcuccagccaucugccacgacggcaaagcccacuuuccuagagaaggcguguucguguccaacggcacccauugguucgugacacagcggaacuucuacgagccccagaucaucaccaccgacaacaccuucgugucuggcaacugcgacguugugaucggcauugugaacaauaccguguacgacccucugcagcccgagcuggacagcuucaaagaggaacuggacaaguacuuuaagaaccacacaagccccgacguggaccugggcgauaucagcggaaucaaugccagcgucgugaacauccagaaagagaucgaccggcugaacgagguggccaagaaucugaacgagagccugaucgaccugcaagaacuggggaaguacgagcaguacaucaagggaggaucuggcuauauccccgaggcuccuagagauggccaggccuauguucggaaggauggcgaaugggugcugcugagcaccuuccuuugaggacuagucccuguucccagagcccacuuuuuuuucuuuuuuugaaauaaaauagccugucuuucagaucucaaaggcucuuuucagagccaccaaaaaaaaaaaaaaaaaaaaaaaaaaaaaaaaaaaaaaaaaaaaaaaaaaaaaaaaaaaaaaaaaaaaaaaaaaaaaaaaaaaaaaaaaaaaaaaaaaaaa

SEQ ID NO: 12589 - RNA, 3998 nt, Artificial Sequence
  SARS-CoV-2/Wuhan/WIV05/2019__EPI_ISL_402128 spike protein mRNA gc mod (1-1211)(K986P_V987P_P1069F) Foldon construct
aggagagucccgcagucggcguccagcggcucugcuuguucgugugugugucguugcaggccuuauucaagcuuaccauguucguguuucuggugcugcugccccugguguccagccagugugugaaccugaccaccagaacacagcugccuccagccuacaccaacagcuucaccagaggcguguacuaccccgacaagguguucagauccagcgugcugcacucuacccaggaccuguuccugccuuucuucagcaacgugaccugguuccacgccauccacguguccggcaccaauggcaccaagagauucgacaaccccgugcugcccuucaacgacgggguguacuuugccagcaccgagaaguccaacaucaucagaggcuggaucuucggcaccacacuggacagcaagacccagagccugcugaucgugaacaacgccaccaacguggucaucaaagugugcgaguuccaguucugcaacgaccccuuccugggcgucuacuaccacaagaacaacaagagcuggauggaaagcgaguuccggguguacagcagcgccaacaacugcaccuucgaguacgugucccagccuuuccugauggaccuggaaggcaagcagggcaacuucaagaaccugcgcgaguucguguucaagaacaucgacggcuacuucaaaaucuacagcaagcacaccccuaucaaccucgugcgggaucugccucagggcuucucugcucuggaaccccugguggaucugcccaucggcaucaacaucacccgguuucagacacugcuggcccugcacagaagcuaccugacaccuggcgauagcagcagcggauggacagcuggugccgccgcuuacuaugugggcuaccugcagccuagaaccuuccugcugaaguacaacgagaacggcaccaucaccgacgccguggauugugcucuggauccucugagcgagacaaagugcacccugaaguccuucaccguggaaaagggcaucuaccagaccagcaacuuccgggugcagcccaccgaauccaucgugcgguuccccaauaucaccaaucugugccccuucggcgagguguucaaugccaccagauucgccucuguguacgccuggaaccggaagcggaucagcaauugcguggccgacuacuccgugcuguacaacuccgccagcuucagcaccuucaagugcuacggcguguccccuaccaagcugaacgaccugugcuucacaaacguguacgccgacagcuucgugauccggggagaugaagugcggcagauugccccuggacagacaggcaagaucgccgacuacaacuacaagcugcccgacgacuucaccggcugugugauugccuggaacagcaacaaccuggacuccaaagucggcggcaacuacaauuaccuguaccggcuguuccggaaguccaaucugaagcccuucgagcgggacaucagcaccgaaaucuaucaggccggcagcaccccuugcaacggcguggaaggcuucaacugcuacuucccacugcaguccuacggcuuucagcccacaaauggcgugggcuaucagcccuacagagugguggugcugagcuucgaacugcugcaugcuccugccacagugugcggcccuaagaaaagcaccaaucucgugaagaacaaaugcgugaacuucaacuucaacggccugaccggcaccggcgugcugacagagagcaacaagaaguuccugccauuccagcaguuuggccgggauaucgccgauaccacagacgccguuagagauccccagacacuggaaauccuggacaucaccccaugcagcuucggcggagugucugugaucaccccuggcaccaacaccagcaaucagguggcagugcuguaccaggacgugaacuguaccgaagugcccguggccauucacgccgaucagcugacaccuacauggcggguguacuccaccggcagcaauguguuucagaccagagccggcugucugaucggagccgagcacgugaacaauagcuacgagugcgacauccccaucggcgcuggcaucugugccagcuaccagacacagacaaacagccccagacgggcuagaagcguggccagccagagcaucauugccuacacaaugucucugggcgccgagaacagcguggccuacuccaacaacucuaucgcuauccccaccaacuucaccaucagcgugaccaccgagauccugccuguguccaugaccaagaccagcguggacugcaccauguacaucugcggcgauuccaccgagugcuccaaccugcugcugcaguacggcagcuucugcacccagcugaauagagcccugacagggaucgccguggaacaggacaagaacacccaagagguguucgcccaagugaagcaaaucuacaagaccccuccuaucaaggacuucggcggcuucaauuucagccagauucugcccgauccuagcaagcccagcaagcggagcuucaucgaggaccugcuguucaacaaagugacacuggccgacgccggcuucaucaagcaguauggcgauugucugggcgacauugccgccagggaucugauuugcgcccagaaguuuaacggacugacagugcugccuccucugcugaccgaugagaugaucgcccaguacacaucugcccugcuggccggcacaaucacaagcggcuggacauuuggagcuggcgccgcucugcagauccccuuugcuaugcagauggccuaccgguucaacggcaucggagugacccagaaugugcuguacgagaaccagaagcugaucgccaaccaguucaacagcgccaucggcaagauccaggacagccugagcagcacagcaagcgcccugggaaagcugcaggacguggucaaccagaaugcccaggcacugaacacccuggucaagcagcuguccuccaacuucggcgccaucagcucugugcugaacgauauccugagcagacuggacccuccugaggccgaggugcagaucgacagacugaucacaggcagacugcagagccuccagacauacgugacccagcagcugaucagagccgccgagauuagagccucugccaaucuggccgccaccaagaugucugagugugugcugggccagagcaagagaguggacuuuugcggcaagggcuaccaccugaugagcuucccucagucugccccucacggcgugguguuucugcacgugacauauguguucgcucaagagaagaauuucaccaccgcuccagccaucugccacgacggcaaagcccacuuuccuagagaaggcguguucguguccaacggcacccauugguucgugacacagcggaacuucuacgagccccagaucaucaccaccgacaacaccuucgugucuggcaacugcgacguugugaucggcauugugaacaauaccguguacgacccucugcagcccgagcuggacagcuucaaagaggaacuggacaaguacuuuaagaaccacacaagccccgacguggaccugggcgauaucagcggaaucaaugccagcgucgugaacauccagaaagagaucgaccggcugaacgagguggccaagaaucugaacgagagccugaucgaccugcaagaacuggggaaguacgagcaguacaucaagggaggaucuggcuauauccccgaggcuccuagagauggccaggccuauguucggaaggauggcgaaugggugcugcugagcaccuuccuuugaggacuagucccuguucccagagcccacuuuuuuuucuuuuuuugaaauaaaauagccugucuuucagaucucaaaggcucuuuucagagccaccaaaaaaaaaaaaaaaaaaaaaaaaaaaaaaaaaaaaaaaaaaaaaaaaaaaaaaaaaaaaaaaaaaaaaaaaaaaaaaaaaaaaaaaaaaaaaaaaaaaaa

SEQ ID NO: 12590 - RNA, 3998 nt, Artificial Sequence
  SARS-CoV-2/Wuhan/WIV05/2019__EPI_ISL_402128 spike protein mRNA gc mod (1-1211)(K986P_V987P_ H1048Q_H1064N_ H1083N_H1101N) Foldon construct
aggagagucccgcagucggcguccagcggcucugcuuguucgugugugugucguugcaggccuuauucaagcuuaccauguucguguuucuggugcugcugccccugguguccagccagugugugaaccugaccaccagaacacagcugccuccagccuacaccaacagcuucaccagaggcguguacuaccccgacaagguguucagauccagcgugcugcacucuacccaggaccuguuccugccuuucuucagcaacgugaccugguuccacgccauccacguguccggcaccaauggcaccaagagauucgacaaccccgugcugcccuucaacgacgggguguacuuugccagcaccgagaaguccaacaucaucagaggcuggaucuucggcaccacacuggacagcaagacccagagccugcugaucgugaacaacgccaccaacguggucaucaaagugugcgaguuccaguucugcaacgaccccuuccugggcgucuacuaccacaagaacaacaagagcuggauggaaagcgaguuccggguguacagcagcgccaacaacugcaccuucgaguacgugucccagccuuuccugauggaccuggaaggcaagcagggcaacuucaagaaccugcgcgaguucguguucaagaacaucgacggcuacuucaaaaucuacagcaagcacaccccuaucaaccucgugcgggaucugccucagggcuucucugcucuggaaccccugguggaucugcccaucggcaucaacaucacccgguuucagacacugcuggcccugcacagaagcuaccugacaccuggcgauagcagcagcggauggacagcuggugccgccgcuuacuaugugggcuaccugcagccuagaaccuuccugcugaaguacaacgagaacggcaccaucaccgacgccguggauugugcucuggauccucugagcgagacaaagugcacccugaaguccuucaccguggaaaagggcaucuaccagaccagcaacuuccgggugcagcccaccgaauccaucgugcgguuccccaauaucaccaaucugugccccuucggcgagguguucaaugccaccagauucgccucuguguacgccuggaaccggaagcggaucagcaauugcguggccgacuacuccgugcuguacaacuccgccagcuucagcaccuucaagugcuacggcguguccccuaccaagcugaacgaccugugcuucacaaacguguacgccgacagcuucgugauccggggagaugaagugcggcagauugccccuggacagacaggcaagaucgccgacuacaacuacaagcugcccgacgacuucaccggcugugugauugccuggaacagcaacaaccuggacuccaaagucggcggcaacuacaauuaccuguaccggcuguuccggaaguccaaucugaagcccuucgagcgggacaucagcaccgaaaucuaucaggccggcagcaccccuugcaacggcguggaaggcuucaacugcuacuucccacugcaguccuacggcuuucagcccacaaauggcgugggcuaucagcccuacagagugguggugcugagcuucgaacugcugcaugcuccugccacagugugcggcccuaagaaaagcaccaaucucgugaagaacaaaugcgugaacuucaacuucaacggccugaccggcaccggcgugcugacagagagcaacaagaaguuccugccauuccagcaguuuggccgggauaucgccgauaccacagacgccguuagagauccccagacacuggaaauccuggacaucaccccaugcagcuucggcggagugucugugaucaccccuggcaccaacaccagcaaucagguggcagugcuguaccaggacgugaacuguaccgaagugcccguggccauucacgccgaucagcugacaccuacauggcggguguacuccaccggcagcaauguguuucagaccagagccggcugucugaucggagccgagcacgugaacaauagcuacgagugcgacauccccaucggcgcuggcaucugugccagcuaccagacacagacaaacagccccagacgggcuagaagcguggccagccagagcaucauugccuacacaaugucucugggcgccgagaacagcguggccuacuccaacaacucuaucgcuauccccaccaacuucaccaucagcgugaccaccgagauccugccuguguccaugaccaagaccagcguggacugcaccauguacaucugcggcgauuccaccgagugcuccaaccugcugcugcaguacggcagcuucugcacccagcugaauagagcccugacagggaucgccguggaacaggacaagaacacccaagagguguucgcccaagugaagcaaaucuacaagaccccuccuaucaaggacuucggcggcuucaauuucagccagauucugcccgauccuagcaagcccagcaagcggagcuucaucgaggaccugcuguucaacaaagugacacuggccgacgccggcuucaucaagcaguauggcgauugucugggcgacauugccgccagggaucugauuugcgcccagaaguuuaacggacugacagugcugccuccucugcugaccgaugagaugaucgcccaguacacaucugcccugcuggccggcacaaucacaagcggcuggacauuuggagcuggcgccgcucugcagauccccuuugcuaugcagauggccuaccgguucaacggcaucggagugacccagaaugugcuguacgagaaccagaagcugaucgccaaccaguucaacagcgccaucggcaagauccaggacagccugagcagcacagcaagcgcccugggaaagcugcaggacguggucaaccagaaugcccaggcacugaacacccuggucaagcagcuguccuccaacuucggcgccaucagcucugugcugaacgauauccugagcagacuggacccuccugaggccgaggugcagaucgacagacugaucacaggcagacugcagagccuccagacauacgugacccagcagcugaucagagccgccgagauuagagccucugccaaucuggccgccaccaagaugucugagugugugcugggccagagcaagagaguggacuuuugcggcaagggcuaccagcugaugagcuucccucagucugccccucacggcgugguguuucugaacgugacauaugugcccgcucaagagaagaauuucaccaccgcuccagccaucugcaacgacggcaaagcccacuuuccuagagaaggcguguucguguccaacggcaccaacugguucgugacacagcggaacuucuacgagccccagaucaucaccaccgacaacaccuucgugucuggcaacugcgacguugugaucggcauugugaacaauaccguguacgacccucugcagcccgagcuggacagcuucaaagaggaacuggacaaguacuuuaagaaccacacaagccccgacguggaccugggcgauaucagcggaaucaaugccagcgucgugaacauccagaaagagaucgaccggcugaacgagguggccaagaaucugaacgagagccugaucgaccugcaagaacuggggaaguacgagcaguacaucaagggaggaucuggcuauauccccgaggcuccuagagauggccaggccuauguucggaaggauggcgaaugggugcugcugagcaccuuccuuugaggacuagucccuguucccagagcccacuuuuuuuucuuuuuuugaaauaaaauagccugucuuucagaucucaaaggcucuuuucagagccaccaaaaaaaaaaaaaaaaaaaaaaaaaaaaaaaaaaaaaaaaaaaaaaaaaaaaaaaaaaaaaaaaaaaaaaaaaaaaaaaaaaaaaaaaaaaaaaaaaaaaa

SEQ ID NO: 12591 - RNA, 3998 nt, Artificial Sequence
  SARS-CoV-2/Wuhan/WIV05/2019__EPI_ISL_402128 spike protein mRNA gc mod (1-1211)(I712C_T1077C) Foldon construct
aggagagucccgcagucggcguccagcggcucugcuuguucgugugugugucguugcaggccuuauucaagcuuaccauguucguguuucuggugcugcugccccugguguccagccagugugugaaccugaccaccagaacacagcugccuccagccuacaccaacagcuucaccagaggcguguacuaccccgacaagguguucagauccagcgugcugcacucuacccaggaccuguuccugccuuucuucagcaacgugaccugguuccacgccauccacguguccggcaccaauggcaccaagagauucgacaaccccgugcugcccuucaacgacgggguguacuuugccagcaccgagaaguccaacaucaucagaggcuggaucuucggcaccacacuggacagcaagacccagagccugcugaucgugaacaacgccaccaacguggucaucaaagugugcgaguuccaguucugcaacgaccccuuccugggcgucuacuaccacaagaacaacaagagcuggauggaaagcgaguuccggguguacagcagcgccaacaacugcaccuucgaguacgugucccagccuuuccugauggaccuggaaggcaagcagggcaacuucaagaaccugcgcgaguucguguucaagaacaucgacggcuacuucaaaaucuacagcaagcacaccccuaucaaccucgugcgggaucugccucagggcuucucugcucuggaaccccugguggaucugcccaucggcaucaacaucacccgguuucagacacugcuggcccugcacagaagcuaccugacaccuggcgauagcagcagcggauggacagcuggugccgccgcuuacuaugugggcuaccugcagccuagaaccuuccugcugaaguacaacgagaacggcaccaucaccgacgccguggauugugcucuggauccucugagcgagacaaagugcacccugaaguccuucaccguggaaaagggcaucuaccagaccagcaacuuccgggugcagcccaccgaauccaucgugcgguuccccaauaucaccaaucugugccccuucggcgagguguucaaugccaccagauucgccucuguguacgccuggaaccggaagcggaucagcaauugcguggccgacuacuccgugcuguacaacuccgccagcuucagcaccuucaagugcuacggcguguccccuaccaagcugaacgaccugugcuucacaaacguguacgccgacagcuucgugauccggggagaugaagugcggcagauugccccuggacagacaggcaagaucgccgacuacaacuacaagcugcccgacgacuucaccggcugugugauugccuggaacagcaacaaccuggacuccaaagucggcggcaacuacaauuaccuguaccggcuguuccggaaguccaaucugaagcccuucgagcgggacaucagcaccgaaaucuaucaggccggcagcaccccuugcaacggcguggaaggcuucaacugcuacuucccacugcaguccuacggcuuucagcccacaaauggcgugggcuaucagcccuacagagugguggugcugagcuucgaacugcugcaugcuccugccacagugugcggcccuaagaaaagcaccaaucucgugaagaacaaaugcgugaacuucaacuucaacggccugaccggcaccggcgugcugacagagagcaacaagaaguuccugccauuccagcaguuuggccgggauaucgccgauaccacagacgccguuagagauccccagacacuggaaauccuggacaucaccccaugcagcuucggcggagugucugugaucaccccuggcaccaacaccagcaaucagguggcagugcuguaccaggacgugaacuguaccgaagugcccguggccauucacgccgaucagcugacaccuacauggcggguguacuccaccggcagcaauguguuucagaccagagccggcugucugaucggagccgagcacgugaacaauagcuacgagugcgacauccccaucggcgcuggcaucugugccagcuaccagacacagacaaacagccccagacgggcuagaagcguggccagccagagcaucauugccuacacaaugucucugggcgccgagaacagcguggccuacuccaacaacucuugcgcuauccccaccaacuucaccaucagcgugaccaccgagauccugccuguguccaugaccaagaccagcguggacugcaccauguacaucugcggcgauuccaccgagugcuccaaccugcugcugcaguacggcagcuucugcacccagcugaauagagcccugacagggaucgccguggaacaggacaagaacacccaagagguguucgcccaagugaagcaaaucuacaagaccccuccuaucaaggacuucggcggcuucaauuucagccagauucugcccgauccuagcaagcccagcaagcggagcuucaucgaggaccugcuguucaacaaagugacacuggccgacgccggcuucaucaagcaguauggcgauugucugggcgacauugccgccagggaucugauuugcgcccagaaguuuaacggacugacagugcugccuccucugcugaccgaugagaugaucgcccaguacacaucugcccugcuggccggcacaaucacaagcggcuggacauuuggagcuggcgccgcucugcagauccccuuugcuaugcagauggccuaccgguucaacggcaucggagugacccagaaugugcuguacgagaaccagaagcugaucgccaaccaguucaacagcgccaucggcaagauccaggacagccugagcagcacagcaagcgcccugggaaagcugcaggacguggucaaccagaaugcccaggcacugaacacccuggucaagcagcuguccuccaacuucggcgccaucagcucugugcugaacgauauccugagcagacuggacaaggucgaggccgaggugcagaucgacagacugaucacaggcagacugcagagccuccagacauacgugacccagcagcugaucagagccgccgagauuagagccucugccaaucuggccgccaccaagaugucugagugugugcugggccagagcaagagaguggacuuuugcggcaagggcuaccaccugaugagcuucccucagucugccccucacggcgugguguuucugcacgugacauaugugcccgcucaagagaagaauuucaccugugcuccagccaucugccacgacggcaaagcccacuuuccuagagaaggcguguucguguccaacggcacccauugguucgugacacagcggaacuucuacgagccccagaucaucaccaccgacaacaccuucgugucuggcaacugcgacguugugaucggcauugugaacaauaccguguacgacccucugcagcccgagcuggacagcuucaaagaggaacuggacaaguacuuuaagaaccacacaagccccgacguggaccugggcgauaucagcggaaucaaugccagcgucgugaacauccagaaagagaucgaccggcugaacgagguggccaagaaucugaacgagagccugaucgaccugcaagaacuggggaaguacgagcaguacaucaagggaggaucuggcuauauccccgaggcuccuagagauggccaggccuauguucggaaggauggcgaaugggugcugcugagcaccuuccuuugaggacuagucccuguucccagagcccacuuuuuuuucuuuuuuugaaauaaaauagccugucuuucagaucucaaaggcucuuuucagagccaccaaaaaaaaaaaaaaaaaaaaaaaaaaaaaaaaaaaaaaaaaaaaaaaaaaaaaaaaaaaaaaaaaaaaaaaaaaaaaaaaaaaaaaaaaaaaaaaaaaaaa

SEQ ID NO: 12592 - RNA, 3998 nt, Artificial Sequence
  SARS-CoV-2/Wuhan/WIV05/2019__EPI_ISL_402128 spike protein mRNA gc mod (1-1211)(I714C_Y1110C) Foldon construct
aggagagucccgcagucggcguccagcggcucugcuuguucgugugugugucguugcaggccuuauucaagcuuaccauguucguguuucuggugcugcugccccugguguccagccagugugugaaccugaccaccagaacacagcugccuccagccuacaccaacagcuucaccagaggcguguacuaccccgacaagguguucagauccagcgugcugcacucuacccaggaccuguuccugccuuucuucagcaacgugaccugguuccacgccauccacguguccggcaccaauggcaccaagagauucgacaaccccgugcugcccuucaacgacgggguguacuuugccagcaccgagaaguccaacaucaucagaggcuggaucuucggcaccacacuggacagcaagacccagagccugcugaucgugaacaacgccaccaacguggucaucaaagugugcgaguuccaguucugcaacgaccccuuccugggcgucuacuaccacaagaacaacaagagcuggauggaaagcgaguuccggguguacagcagcgccaacaacugcaccuucgaguacgugucccagccuuuccugauggaccuggaaggcaagcagggcaacuucaagaaccugcgcgaguucguguucaagaacaucgacggcuacuucaaaaucuacagcaagcacaccccuaucaaccucgugcgggaucugccucagggcuucucugcucuggaaccccugguggaucugcccaucggcaucaacaucacccgguuucagacacugcuggcccugcacagaagcuaccugacaccuggcgauagcagcagcggauggacagcuggugccgccgcuuacuaugugggcuaccugcagccuagaaccuuccugcugaaguacaacgagaacggcaccaucaccgacgccguggauugugcucuggauccucugagcgagacaaagugcacccugaaguccuucaccguggaaaagggcaucuaccagaccagcaacuuccgggugcagcccaccgaauccaucgugcgguuccccaauaucaccaaucugugccccuucggcgagguguucaaugccaccagauucgccucuguguacgccuggaaccggaagcggaucagcaauugcguggccgacuacuccgugcuguacaacuccgccagcuucagcaccuucaagugcuacggcguguccccuaccaagcugaacgaccugugcuucacaaacguguacgccgacagcuucgugauccggggagaugaagugcggcagauugccccuggacagacaggcaagaucgccgacuacaacuacaagcugcccgacgacuucaccggcugugugauugccuggaacagcaacaaccuggacuccaaagucggcggcaacuacaauuaccuguaccggcuguuccggaaguccaaucugaagcccuucgagcgggacaucagcaccgaaaucuaucaggccggcagcaccccuugcaacggcguggaaggcuucaacugcuacuucccacugcaguccuacggcuuucagcccacaaauggcgugggcuaucagcccuacagagugguggugcugagcuucgaacugcugcaugcuccugccacagugugcggcccuaagaaaagcaccaaucucgugaagaacaaaugcgugaacuucaacuucaacggccugaccggcaccggcgugcugacagagagcaacaagaaguuccugccauuccagcaguuuggccgggauaucgccgauaccacagacgccguuagagauccccagacacuggaaauccuggacaucaccccaugcagcuucggcggagugucugugaucaccccuggcaccaacaccagcaaucagguggcagugcuguaccaggacgugaacuguaccgaagugcccguggccauucacgccgaucagcugacaccuacauggcggguguacuccaccggcagcaauguguuucagaccagagccggcugucugaucggagccgagcacgugaacaauagcuacgagugcgacauccccaucggcgcuggcaucugugccagcuaccagacacagacaaacagccccagacgggcuagaagcguggccagccagagcaucauugccuacacaaugucucugggcgccgagaacagcguggccuacuccaacaacucuaucgcuugccccaccaacuucaccaucagcgugaccaccgagauccugccuguguccaugaccaagaccagcguggacugcaccauguacaucugcggcgauuccaccgagugcuccaaccugcugcugcaguacggcagcuucugcacccagcugaauagagcccugacagggaucgccguggaacaggacaagaacacccaagagguguucgcccaagugaagcaaaucuacaagaccccuccuaucaaggacuucggcggcuucaauuucagccagauucugcccgauccuagcaagcccagcaagcggagcuucaucgaggaccugcuguucaacaaagugacacuggccgacgccggcuucaucaagcaguauggcgauugucugggcgacauugccgccagggaucugauuugcgcccagaaguuuaacggacugacagugcugccuccucugcugaccgaugagaugaucgcccaguacacaucugcccugcuggccggcacaaucacaagcggcuggacauuuggagcuggcgccgcucugcagauccccuuugcuaugcagauggccuaccgguucaacggcaucggagugacccagaaugugcuguacgagaaccagaagcugaucgccaaccaguucaacagcgccaucggcaagauccaggacagccugagcagcacagcaagcgcccugggaaagcugcaggacguggucaaccagaaugcccaggcacugaacacccuggucaagcagcuguccuccaacuucggcgccaucagcucugugcugaacgauauccugagcagacuggacaaggucgaggccgaggugcagaucgacagacugaucacaggcagacugcagagccuccagacauacgugacccagcagcugaucagagccgccgagauuagagccucugccaaucuggccgccaccaagaugucugagugugugcugggccagagcaagagaguggacuuuugcggcaagggcuaccaccugaugagcuucccucagucugccccucacggcgugguguuucugcacgugacauaugugcccgcucaagagaagaauuucaccaccgcuccagccaucugccacgacggcaaagcccacuuuccuagagaaggcguguucguguccaacggcacccauugguucgugacacagcggaacuucugugagccccagaucaucaccaccgacaacaccuucgugucuggcaacugcgacguugugaucggcauugugaacaauaccguguacgacccucugcagcccgagcuggacagcuucaaagaggaacuggacaaguacuuuaagaaccacacaagccccgacguggaccugggcgauaucagcggaaucaaugccagcgucgugaacauccagaaagagaucgaccggcugaacgagguggccaagaaucugaacgagagccugaucgaccugcaagaacuggggaaguacgagcaguacaucaagggaggaucuggcuauauccccgaggcuccuagagauggccaggccuauguucggaaggauggcgaaugggugcugcugagcaccuuccuuugaggacuagucccuguucccagagcccacuuuuuuuucuuuuuuugaaauaaaauagccugucuuucagaucucaaaggcucuuuucagagccaccaaaaaaaaaaaaaaaaaaaaaaaaaaaaaaaaaaaaaaaaaaaaaaaaaaaaaaaaaaaaaaaaaaaaaaaaaaaaaaaaaaaaaaaaaaaaaaaaaaaaa

SEQ ID NO: 12593 - RNA, 3998 nt, Artificial Sequence
  SARS-CoV-2/Wuhan/WIV05/2019__EPI_ISL_402128 spike protein mRNA gc mod (1-1211)(P715C_P1069C) Foldon construct
aggagagucccgcagucggcguccagcggcucugcuuguucgugugugugucguugcaggccuuauucaagcuuaccauguucguguuucuggugcugcugccccugguguccagccagugugugaaccugaccaccagaacacagcugccuccagccuacaccaacagcuucaccagaggcguguacuaccccgacaagguguucagauccagcgugcugcacucuacccaggaccuguuccugccuuucuucagcaacgugaccugguuccacgccauccacguguccggcaccaauggcaccaagagauucgacaaccccgugcugcccuucaacgacgggguguacuuugccagcaccgagaaguccaacaucaucagaggcuggaucuucggcaccacacuggacagcaagacccagagccugcugaucgugaacaacgccaccaacguggucaucaaagugugcgaguuccaguucugcaacgaccccuuccugggcgucuacuaccacaagaacaacaagagcuggauggaaagcgaguuccggguguacagcagcgccaacaacugcaccuucgaguacgugucccagccuuuccugauggaccuggaaggcaagcagggcaacuucaagaaccugcgcgaguucguguucaagaacaucgacggcuacuucaaaaucuacagcaagcacaccccuaucaaccucgugcgggaucugccucagggcuucucugcucuggaaccccugguggaucugcccaucggcaucaacaucacccgguuucagacacugcuggcccugcacagaagcuaccugacaccuggcgauagcagcagcggauggacagcuggugccgccgcuuacuaugugggcuaccugcagccuagaaccuuccugcugaaguacaacgagaacggcaccaucaccgacgccguggauugugcucuggauccucugagcgagacaaagugcacccugaaguccuucaccguggaaaagggcaucuaccagaccagcaacuuccgggugcagcccaccgaauccaucgugcgguuccccaauaucaccaaucugugccccuucggcgagguguucaaugccaccagauucgccucuguguacgccuggaaccggaagcggaucagcaauugcguggccgacuacuccgugcuguacaacuccgccagcuucagcaccuucaagugcuacggcguguccccuaccaagcugaacgaccugugcuucacaaacguguacgccgacagcuucgugauccggggagaugaagugcggcagauugccccuggacagacaggcaagaucgccgacuacaacuacaagcugcccgacgacuucaccggcugugugauugccuggaacagcaacaaccuggacuccaaagucggcggcaacuacaauuaccuguaccggcuguuccggaaguccaaucugaagcccuucgagcgggacaucagcaccgaaaucuaucaggccggcagcaccccuugcaacggcguggaaggcuucaacugcuacuucccacugcaguccuacggcuuucagcccacaaauggcgugggcuaucagcccuacagagugguggugcugagcuucgaacugcugcaugcuccugccacagugugcggcccuaagaaaagcaccaaucucgugaagaacaaaugcgugaacuucaacuucaacggccugaccggcaccggcgugcugacagagagcaacaagaaguuccugccauuccagcaguuuggccgggauaucgccgauaccacagacgccguuagagauccccagacacuggaaauccuggacaucaccccaugcagcuucggcggagugucugugaucaccccuggcaccaacaccagcaaucagguggcagugcuguaccaggacgugaacuguaccgaagugcccguggccauucacgccgaucagcugacaccuacauggcggguguacuccaccggcagcaauguguuucagaccagagccggcugucugaucggagccgagcacgugaacaauagcuacgagugcgacauccccaucggcgcuggcaucugugccagcuaccagacacagacaaacagccccagacgggcuagaagcguggccagccagagcaucauugccuacacaaugucucugggcgccgagaacagcguggccuacuccaacaacucuaucgcuaucugcaccaacuucaccaucagcgugaccaccgagauccugccuguguccaugaccaagaccagcguggacugcaccauguacaucugcggcgauuccaccgagugcuccaaccugcugcugcaguacggcagcuucugcacccagcugaauagagcccugacagggaucgccguggaacaggacaagaacacccaagagguguucgcccaagugaagcaaaucuacaagaccccuccuaucaaggacuucggcggcuucaauuucagccagauucugcccgauccuagcaagcccagcaagcggagcuucaucgaggaccugcuguucaacaaagugacacuggccgacgccggcuucaucaagcaguauggcgauugucugggcgacauugccgccagggaucugauuugcgcccagaaguuuaacggacugacagugcugccuccucugcugaccgaugagaugaucgcccaguacacaucugcccugcuggccggcacaaucacaagcggcuggacauuuggagcuggcgccgcucugcagauccccuuugcuaugcagauggccuaccgguucaacggcaucggagugacccagaaugugcuguacgagaaccagaagcugaucgccaaccaguucaacagcgccaucggcaagauccaggacagccugagcagcacagcaagcgcccugggaaagcugcaggacguggucaaccagaaugcccaggcacugaacacccuggucaagcagcuguccuccaacuucggcgccaucagcucugugcugaacgauauccugagcagacuggacaaggucgaggccgaggugcagaucgacagacugaucacaggcagacugcagagccuccagacauacgugacccagcagcugaucagagccgccgagauuagagccucugccaaucuggccgccaccaagaugucugagugugugcugggccagagcaagagaguggacuuuugcggcaagggcuaccaccugaugagcuucccucagucugccccucacggcgugguguuucugcacgugacauaugugugugcucaagagaagaauuucaccaccgcuccagccaucugccacgacggcaaagcccacuuuccuagagaaggcguguucguguccaacggcacccauugguucgugacacagcggaacuucuacgagccccagaucaucaccaccgacaacaccuucgugucuggcaacugcgacguugugaucggcauugugaacaauaccguguacgacccucugcagcccgagcuggacagcuucaaagaggaacuggacaaguacuuuaagaaccacacaagccccgacguggaccugggcgauaucagcggaaucaaugccagcgucgugaacauccagaaagagaucgaccggcugaacgagguggccaagaaucugaacgagagccugaucgaccugcaagaacuggggaaguacgagcaguacaucaagggaggaucuggcuauauccccgaggcuccuagagauggccaggccuauguucggaaggauggcgaaugggugcugcugagcaccuuccuuugaggacuagucccuguucccagagcccacuuuuuuuucuuuuuuugaaauaaaauagccugucuuucagaucucaaaggcucuuuucagagccaccaaaaaaaaaaaaaaaaaaaaaaaaaaaaaaaaaaaaaaaaaaaaaaaaaaaaaaaaaaaaaaaaaaaaaaaaaaaaaaaaaaaaaaaaaaaaaaaaaaaaa

SEQ ID NO: 12594 - RNA, 3998 nt, Artificial Sequence
  SARS-CoV-2/Wuhan/WIV05/2019__EPI_ISL_402128 spike protein mRNA gc mod (1-1211)(G889C_L1034C) Foldon construct
aggagagucccgcagucggcguccagcggcucugcuuguucgugugugugucguugcaggccuuauucaagcuuaccauguucguguuucuggugcugcugccccugguguccagccagugugugaaccugaccaccagaacacagcugccuccagccuacaccaacagcuucaccagaggcguguacuaccccgacaagguguucagauccagcgugcugcacucuacccaggaccuguuccugccuuucuucagcaacgugaccugguuccacgccauccacguguccggcaccaauggcaccaagagauucgacaaccccgugcugcccuucaacgacgggguguacuuugccagcaccgagaaguccaacaucaucagaggcuggaucuucggcaccacacuggacagcaagacccagagccugcugaucgugaacaacgccaccaacguggucaucaaagugugcgaguuccaguucugcaacgaccccuuccugggcgucuacuaccacaagaacaacaagagcuggauggaaagcgaguuccggguguacagcagcgccaacaacugcaccuucgaguacgugucccagccuuuccugauggaccuggaaggcaagcagggcaacuucaagaaccugcgcgaguucguguucaagaacaucgacggcuacuucaaaaucuacagcaagcacaccccuaucaaccucgugcgggaucugccucagggcuucucugcucuggaaccccugguggaucugcccaucggcaucaacaucacccgguuucagacacugcuggcccugcacagaagcuaccugacaccuggcgauagcagcagcggauggacagcuggugccgccgcuuacuaugugggcuaccugcagccuagaaccuuccugcugaaguacaacgagaacggcaccaucaccgacgccguggauugugcucuggauccucugagcgagacaaagugcacccugaaguccuucaccguggaaaagggcaucuaccagaccagcaacuuccgggugcagcccaccgaauccaucgugcgguuccccaauaucaccaaucugugccccuucggcgagguguucaaugccaccagauucgccucuguguacgccuggaaccggaagcggaucagcaauugcguggccgacuacuccgugcuguacaacuccgccagcuucagcaccuucaagugcuacggcguguccccuaccaagcugaacgaccugugcuucacaaacguguacgccgacagcuucgugauccggggagaugaagugcggcagauugccccuggacagacaggcaagaucgccgacuacaacuacaagcugcccgacgacuucaccggcugugugauugccuggaacagcaacaaccuggacuccaaagucggcggcaacuacaauuaccuguaccggcuguuccggaaguccaaucugaagcccuucgagcgggacaucagcaccgaaaucuaucaggccggcagcaccccuugcaacggcguggaaggcuucaacugcuacuucccacugcaguccuacggcuuucagcccacaaauggcgugggcuaucagcccuacagagugguggugcugagcuucgaacugcugcaugcuccugccacagugugcggcccuaagaaaagcaccaaucucgugaagaacaaaugcgugaacuucaacuucaacggccugaccggcaccggcgugcugacagagagcaacaagaaguuccugccauuccagcaguuuggccgggauaucgccgauaccacagacgccguuagagauccccagacacuggaaauccuggacaucaccccaugcagcuucggcggagugucugugaucaccccuggcaccaacaccagcaaucagguggcagugcuguaccaggacgugaacuguaccgaagugcccguggccauucacgccgaucagcugacaccuacauggcggguguacuccaccggcagcaauguguuucagaccagagccggcugucugaucggagccgagcacgugaacaauagcuacgagugcgacauccccaucggcgcuggcaucugugccagcuaccagacacagacaaacagccccagacgggcuagaagcguggccagccagagcaucauugccuacacaaugucucugggcgccgagaacagcguggccuacuccaacaacucuaucgcuauccccaccaacuucaccaucagcgugaccaccgagauccugccuguguccaugaccaagaccagcguggacugcaccauguacaucugcggcgauuccaccgagugcuccaaccugcugcugcaguacggcagcuucugcacccagcugaauagagcccugacagggaucgccguggaacaggacaagaacacccaagagguguucgcccaagugaagcaaaucuacaagaccccuccuaucaaggacuucggcggcuucaauuucagccagauucugcccgauccuagcaagcccagcaagcggagcuucaucgaggaccugcuguucaacaaagugacacuggccgacgccggcuucaucaagcaguauggcgauugucugggcgacauugccgccagggaucugauuugcgcccagaaguuuaacggacugacagugcugccuccucugcugaccgaugagaugaucgcccaguacacaucugcccugcuggccggcacaaucacaagcggcuggacauuuugcgcuggcgccgcucugcagauccccuuugcuaugcagauggccuaccgguucaacggcaucggagugacccagaaugugcuguacgagaaccagaagcugaucgccaaccaguucaacagcgccaucggcaagauccaggacagccugagcagcacagcaagcgcccugggaaagcugcaggacguggucaaccagaaugcccaggcacugaacacccuggucaagcagcuguccuccaacuucggcgccaucagcucugugcugaacgauauccugagcagacuggacaaggucgaggccgaggugcagaucgacagacugaucacaggcagacugcagagccuccagacauacgugacccagcagcugaucagagccgccgagauuagagccucugccaaucuggccgccaccaagaugucugaguguguguguggccagagcaagagaguggacuuuugcggcaagggcuaccaccugaugagcuucccucagucugccccucacggcgugguguuucugcacgugacauaugugcccgcucaagagaagaauuucaccaccgcuccagccaucugccacgacggcaaagcccacuuuccuagagaaggcguguucguguccaacggcacccauugguucgugacacagcggaacuucuacgagccccagaucaucaccaccgacaacaccuucgugucuggcaacugcgacguugugaucggcauugugaacaauaccguguacgacccucugcagcccgagcuggacagcuucaaagaggaacuggacaaguacuuuaagaaccacacaagccccgacguggaccugggcgauaucagcggaaucaaugccagcgucgugaacauccagaaagagaucgaccggcugaacgagguggccaagaaucugaacgagagccugaucgaccugcaagaacuggggaaguacgagcaguacaucaagggaggaucuggcuauauccccgaggcuccuagagauggccaggccuauguucggaaggauggcgaaugggugcugcugagcaccuuccuuugaggacuagucccuguucccagagcccacuuuuuuuucuuuuuuugaaauaaaauagccugucuuucagaucucaaaggcucuuuucagagccaccaaaaaaaaaaaaaaaaaaaaaaaaaaaaaaaaaaaaaaaaaaaaaaaaaaaaaaaaaaaaaaaaaaaaaaaaaaaaaaaaaaaaaaaaaaaaaaaaaaaaa

SEQ ID NO: 12595 - RNA, 3998 nt, Artificial Sequence
  SARS-CoV-2/Wuhan/WIV05/2019__EPI_ISL_402128 spike protein mRNA gc mod (1-1211)(I909C_Y1047C) Foldon construct
aggagagucccgcagucggcguccagcggcucugcuuguucgugugugugucguugcaggccuuauucaagcuuaccauguucguguuucuggugcugcugccccugguguccagccagugugugaaccugaccaccagaacacagcugccuccagccuacaccaacagcuucaccagaggcguguacuaccccgacaagguguucagauccagcgugcugcacucuacccaggaccuguuccugccuuucuucagcaacgugaccugguuccacgccauccacguguccggcaccaauggcaccaagagauucgacaaccccgugcugcccuucaacgacgggguguacuuugccagcaccgagaaguccaacaucaucagaggcuggaucuucggcaccacacuggacagcaagacccagagccugcugaucgugaacaacgccaccaacguggucaucaaagugugcgaguuccaguucugcaacgaccccuuccugggcgucuacuaccacaagaacaacaagagcuggauggaaagcgaguuccggguguacagcagcgccaacaacugcaccuucgaguacgugucccagccuuuccugauggaccuggaaggcaagcagggcaacuucaagaaccugcgcgaguucguguucaagaacaucgacggcuacuucaaaaucuacagcaagcacaccccuaucaaccucgugcgggaucugccucagggcuucucugcucuggaaccccugguggaucugcccaucggcaucaacaucacccgguuucagacacugcuggcccugcacagaagcuaccugacaccuggcgauagcagcagcggauggacagcuggugccgccgcuuacuaugugggcuaccugcagccuagaaccuuccugcugaaguacaacgagaacggcaccaucaccgacgccguggauugugcucuggauccucugagcgagacaaagugcacccugaaguccuucaccguggaaaagggcaucuaccagaccagcaacuuccgggugcagcccaccgaauccaucgugcgguuccccaauaucaccaaucugugccccuucggcgagguguucaaugccaccagauucgccucuguguacgccuggaaccggaagcggaucagcaauugcguggccgacuacuccgugcuguacaacuccgccagcuucagcaccuucaagugcuacggcguguccccuaccaagcugaacgaccugugcuucacaaacguguacgccgacagcuucgugauccggggagaugaagugcggcagauugccccuggacagacaggcaagaucgccgacuacaacuacaagcugcccgacgacuucaccggcugugugauugccuggaacagcaacaaccuggacuccaaagucggcggcaacuacaauuaccuguaccggcuguuccggaaguccaaucugaagcccuucgagcgggacaucagcaccgaaaucuaucaggccggcagcaccccuugcaacggcguggaaggcuucaacugcuacuucccacugcaguccuacggcuuucagcccacaaauggcgugggcuaucagcccuacagagugguggugcugagcuucgaacugcugcaugcuccugccacagugugcggcccuaagaaaagcaccaaucucgugaagaacaaaugcgugaacuucaacuucaacggccugaccggcaccggcgugcugacagagagcaacaagaaguuccugccauuccagcaguuuggccgggauaucgccgauaccacagacgccguuagagauccccagacacuggaaauccuggacaucaccccaugcagcuucggcggagugucugugaucaccccuggcaccaacaccagcaaucagguggcagugcuguaccaggacgugaacuguaccgaagugcccguggccauucacgccgaucagcugacaccuacauggcggguguacuccaccggcagcaauguguuucagaccagagccggcugucugaucggagccgagcacgugaacaauagcuacgagugcgacauccccaucggcgcuggcaucugugccagcuaccagacacagacaaacagccccagacgggcuagaagcguggccagccagagcaucauugccuacacaaugucucugggcgccgagaacagcguggccuacuccaacaacucuaucgcuauccccaccaacuucaccaucagcgugaccaccgagauccugccuguguccaugaccaagaccagcguggacugcaccauguacaucugcggcgauuccaccgagugcuccaaccugcugcugcaguacggcagcuucugcacccagcugaauagagcccugacagggaucgccguggaacaggacaagaacacccaagagguguucgcccaagugaagcaaaucuacaagaccccuccuaucaaggacuucggcggcuucaauuucagccagauucugcccgauccuagcaagcccagcaagcggagcuucaucgaggaccugcuguucaacaaagugacacuggccgacgccggcuucaucaagcaguauggcgauugucugggcgacauugccgccagggaucugauuugcgcccagaaguuuaacggacugacagugcugccuccucugcugaccgaugagaugaucgcccaguacacaucugcccugcuggccggcacaaucacaagcggcuggacauuuggagcuggcgccgcucugcagauccccuuugcuaugcagauggccuaccgguucaacggcugcggagugacccagaaugugcuguacgagaaccagaagcugaucgccaaccaguucaacagcgccaucggcaagauccaggacagccugagcagcacagcaagcgcccugggaaagcugcaggacguggucaaccagaaugcccaggcacugaacacccuggucaagcagcuguccuccaacuucggcgccaucagcucugugcugaacgauauccugagcagacuggacaaggucgaggccgaggugcagaucgacagacugaucacaggcagacugcagagccuccagacauacgugacccagcagcugaucagagccgccgagauuagagccucugccaaucuggccgccaccaagaugucugagugugugcugggccagagcaagagaguggacuuuugcggcaagggcugucaccugaugagcuucccucagucugccccucacggcgugguguuucugcacgugacauaugugcccgcucaagagaagaauuucaccaccgcuccagccaucugccacgacggcaaagcccacuuuccuagagaaggcguguucguguccaacggcacccauugguucgugacacagcggaacuucuacgagccccagaucaucaccaccgacaacaccuucgugucuggcaacugcgacguugugaucggcauugugaacaauaccguguacgacccucugcagcccgagcuggacagcuucaaagaggaacuggacaaguacuuuaagaaccacacaagccccgacguggaccugggcgauaucagcggaaucaaugccagcgucgugaacauccagaaagagaucgaccggcugaacgagguggccaagaaucugaacgagagccugaucgaccugcaagaacuggggaaguacgagcaguacaucaagggaggaucuggcuauauccccgaggcuccuagagauggccaggccuauguucggaaggauggcgaaugggugcugcugagcaccuuccuuugaggacuagucccuguucccagagcccacuuuuuuuucuuuuuuugaaauaaaauagccugucuuucagaucucaaaggcucuuuucagagccaccaaaaaaaaaaaaaaaaaaaaaaaaaaaaaaaaaaaaaaaaaaaaaaaaaaaaaaaaaaaaaaaaaaaaaaaaaaaaaaaaaaaaaaaaaaaaaaaaaaaaa

SEQ ID NO: 12596 - RNA, 3998 nt, Artificial Sequence
  SARS-CoV-2/Wuhan/WIV05/2019__EPI_ISL_402128 spike protein mRNA gc mod (1-1211)(Q965C_S1003C) Foldon construct
aggagagucccgcagucggcguccagcggcucugcuuguucgugugugugucguugcaggccuuauucaagcuuaccauguucguguuucuggugcugcugccccugguguccagccagugugugaaccugaccaccagaacacagcugccuccagccuacaccaacagcuucaccagaggcguguacuaccccgacaagguguucagauccagcgugcugcacucuacccaggaccuguuccugccuuucuucagcaacgugaccugguuccacgccauccacguguccggcaccaauggcaccaagagauucgacaaccccgugcugcccuucaacgacgggguguacuuugccagcaccgagaaguccaacaucaucagaggcuggaucuucggcaccacacuggacagcaagacccagagccugcugaucgugaacaacgccaccaacguggucaucaaagugugcgaguuccaguucugcaacgaccccuuccugggcgucuacuaccacaagaacaacaagagcuggauggaaagcgaguuccggguguacagcagcgccaacaacugcaccuucgaguacgugucccagccuuuccugauggaccuggaaggcaagcagggcaacuucaagaaccugcgcgaguucguguucaagaacaucgacggcuacuucaaaaucuacagcaagcacaccccuaucaaccucgugcgggaucugccucagggcuucucugcucuggaaccccugguggaucugcccaucggcaucaacaucacccgguuucagacacugcuggcccugcacagaagcuaccugacaccuggcgauagcagcagcggauggacagcuggugccgccgcuuacuaugugggcuaccugcagccuagaaccuuccugcugaaguacaacgagaacggcaccaucaccgacgccguggauugugcucuggauccucugagcgagacaaagugcacccugaaguccuucaccguggaaaagggcaucuaccagaccagcaacuuccgggugcagcccaccgaauccaucgugcgguuccccaauaucaccaaucugugccccuucggcgagguguucaaugccaccagauucgccucuguguacgccuggaaccggaagcggaucagcaauugcguggccgacuacuccgugcuguacaacuccgccagcuucagcaccuucaagugcuacggcguguccccuaccaagcugaacgaccugugcuucacaaacguguacgccgacagcuucgugauccggggagaugaagugcggcagauugccccuggacagacaggcaagaucgccgacuacaacuacaagcugcccgacgacuucaccggcugugugauugccuggaacagcaacaaccuggacuccaaagucggcggcaacuacaauuaccuguaccggcuguuccggaaguccaaucugaagcccuucgagcgggacaucagcaccgaaaucuaucaggccggcagcaccccuugcaacggcguggaaggcuucaacugcuacuucccacugcaguccuacggcuuucagcccacaaauggcgugggcuaucagcccuacagagugguggugcugagcuucgaacugcugcaugcuccugccacagugugcggcccuaagaaaagcaccaaucucgugaagaacaaaugcgugaacuucaacuucaacggccugaccggcaccggcgugcugacagagagcaacaagaaguuccugccauuccagcaguuuggccgggauaucgccgauaccacagacgccguuagagauccccagacacuggaaauccuggacaucaccccaugcagcuucggcggagugucugugaucaccccuggcaccaacaccagcaaucagguggcagugcuguaccaggacgugaacuguaccgaagugcccguggccauucacgccgaucagcugacaccuacauggcggguguacuccaccggcagcaauguguuucagaccagagccggcugucugaucggagccgagcacgugaacaauagcuacgagugcgacauccccaucggcgcuggcaucugugccagcuaccagacacagacaaacagccccagacgggcuagaagcguggccagccagagcaucauugccuacacaaugucucugggcgccgagaacagcguggccuacuccaacaacucuaucgcuauccccaccaacuucaccaucagcgugaccaccgagauccugccuguguccaugaccaagaccagcguggacugcaccauguacaucugcggcgauuccaccgagugcuccaaccugcugcugcaguacggcagcuucugcacccagcugaauagagcccugacagggaucgccguggaacaggacaagaacacccaagagguguucgcccaagugaagcaaaucuacaagaccccuccuaucaaggacuucggcggcuucaauuucagccagauucugcccgauccuagcaagcccagcaagcggagcuucaucgaggaccugcuguucaacaaagugacacuggccgacgccggcuucaucaagcaguauggcgauugucugggcgacauugccgccagggaucugauuugcgcccagaaguuuaacggacugacagugcugccuccucugcugaccgaugagaugaucgcccaguacacaucugcccugcuggccggcacaaucacaagcggcuggacauuuggagcuggcgccgcucugcagauccccuuugcuaugcagauggccuaccgguucaacggcaucggagugacccagaaugugcuguacgagaaccagaagcugaucgccaaccaguucaacagcgccaucggcaagauccaggacagccugagcagcacagcaagcgcccugggaaagcugcaggacguggucaaccagaaugcccaggcacugaacacccuggucaagugccuguccuccaacuucggcgccaucagcucugugcugaacgauauccugagcagacuggacaaggucgaggccgaggugcagaucgacagacugaucacaggcagacugcagugucuccagacauacgugacccagcagcugaucagagccgccgagauuagagccucugccaaucuggccgccaccaagaugucugagugugugcugggccagagcaagagaguggacuuuugcggcaagggcuaccaccugaugagcuucccucagucugccccucacggcgugguguuucugcacgugacauaugugcccgcucaagagaagaauuucaccaccgcuccagccaucugccacgacggcaaagcccacuuuccuagagaaggcguguucguguccaacggcacccauugguucgugacacagcggaacuucuacgagccccagaucaucaccaccgacaacaccuucgugucuggcaacugcgacguugugaucggcauugugaacaauaccguguacgacccucugcagcccgagcuggacagcuucaaagaggaacuggacaaguacuuuaagaaccacacaagccccgacguggaccugggcgauaucagcggaaucaaugccagcgucgugaacauccagaaagagaucgaccggcugaacgagguggccaagaaucugaacgagagccugaucgaccugcaagaacuggggaaguacgagcaguacaucaagggaggaucuggcuauauccccgaggcuccuagagauggccaggccuauguucggaaggauggcgaaugggugcugcugagcaccuuccuuugaggacuagucccuguucccagagcccacuuuuuuuucuuuuuuugaaauaaaauagccugucuuucagaucucaaaggcucuuuucagagccaccaaaaaaaaaaaaaaaaaaaaaaaaaaaaaaaaaaaaaaaaaaaaaaaaaaaaaaaaaaaaaaaaaaaaaaaaaaaaaaaaaaaaaaaaaaaaaaaaaaaaa

SEQ ID NO: 12597 - RNA, 3998 nt, Artificial Sequence
  SARS-CoV-2/Wuhan/WIV05/2019__EPI_ISL_402128 spike protein mRNA gc mod (1-1211)(F970C_G999C) Foldon construct
aggagagucccgcagucggcguccagcggcucugcuuguucgugugugugucguugcaggccuuauucaagcuuaccauguucguguuucuggugcugcugccccugguguccagccagugugugaaccugaccaccagaacacagcugccuccagccuacaccaacagcuucaccagaggcguguacuaccccgacaagguguucagauccagcgugcugcacucuacccaggaccuguuccugccuuucuucagcaacgugaccugguuccacgccauccacguguccggcaccaauggcaccaagagauucgacaaccccgugcugcccuucaacgacgggguguacuuugccagcaccgagaaguccaacaucaucagaggcuggaucuucggcaccacacuggacagcaagacccagagccugcugaucgugaacaacgccaccaacguggucaucaaagugugcgaguuccaguucugcaacgaccccuuccugggcgucuacuaccacaagaacaacaagagcuggauggaaagcgaguuccggguguacagcagcgccaacaacugcaccuucgaguacgugucccagccuuuccugauggaccuggaaggcaagcagggcaacuucaagaaccugcgcgaguucguguucaagaacaucgacggcuacuucaaaaucuacagcaagcacaccccuaucaaccucgugcgggaucugccucagggcuucucugcucuggaaccccugguggaucugcccaucggcaucaacaucacccgguuucagacacugcuggcccugcacagaagcuaccugacaccuggcgauagcagcagcggauggacagcuggugccgccgcuuacuaugugggcuaccugcagccuagaaccuuccugcugaaguacaacgagaacggcaccaucaccgacgccguggauugugcucuggauccucugagcgagacaaagugcacccugaaguccuucaccguggaaaagggcaucuaccagaccagcaacuuccgggugcagcccaccgaauccaucgugcgguuccccaauaucaccaaucugugccccuucggcgagguguucaaugccaccagauucgccucuguguacgccuggaaccggaagcggaucagcaauugcguggccgacuacuccgugcuguacaacuccgccagcuucagcaccuucaagugcuacggcguguccccuaccaagcugaacgaccugugcuucacaaacguguacgccgacagcuucgugauccggggagaugaagugcggcagauugccccuggacagacaggcaagaucgccgacuacaacuacaagcugcccgacgacuucaccggcugugugauugccuggaacagcaacaaccuggacuccaaagucggcggcaacuacaauuaccuguaccggcuguuccggaaguccaaucugaagcccuucgagcgggacaucagcaccgaaaucuaucaggccggcagcaccccuugcaacggcguggaaggcuucaacugcuacuucccacugcaguccuacggcuuucagcccacaaauggcgugggcuaucagcccuacagagugguggugcugagcuucgaacugcugcaugcuccugccacagugugcggcccuaagaaaagcaccaaucucgugaagaacaaaugcgugaacuucaacuucaacggccugaccggcaccggcgugcugacagagagcaacaagaaguuccugccauuccagcaguuuggccgggauaucgccgauaccacagacgccguuagagauccccagacacuggaaauccuggacaucaccccaugcagcuucggcggagugucugugaucaccccuggcaccaacaccagcaaucagguggcagugcuguaccaggacgugaacuguaccgaagugcccguggccauucacgccgaucagcugacaccuacauggcggguguacuccaccggcagcaauguguuucagaccagagccggcugucugaucggagccgagcacgugaacaauagcuacgagugcgacauccccaucggcgcuggcaucugugccagcuaccagacacagacaaacagccccagacgggcuagaagcguggccagccagagcaucauugccuacacaaugucucugggcgccgagaacagcguggccuacuccaacaacucuaucgcuauccccaccaacuucaccaucagcgugaccaccgagauccugccuguguccaugaccaagaccagcguggacugcaccauguacaucugcggcgauuccaccgagugcuccaaccugcugcugcaguacggcagcuucugcacccagcugaauagagcccugacagggaucgccguggaacaggacaagaacacccaagagguguucgcccaagugaagcaaaucuacaagaccccuccuaucaaggacuucggcggcuucaauuucagccagauucugcccgauccuagcaagcccagcaagcggagcuucaucgaggaccugcuguucaacaaagugacacuggccgacgccggcuucaucaagcaguauggcgauugucugggcgacauugccgccagggaucugauuugcgcccagaaguuuaacggacugacagugcugccuccucugcugaccgaugagaugaucgcccaguacacaucugcccugcuggccggcacaaucacaagcggcuggacauuuggagcuggcgccgcucugcagauccccuuugcuaugcagauggccuaccgguucaacggcaucggagugacccagaaugugcuguacgagaaccagaagcugaucgccaaccaguucaacagcgccaucggcaagauccaggacagccugagcagcacagcaagcgcccugggaaagcugcaggacguggucaaccagaaugcccaggcacugaacacccuggucaagcagcuguccuccaacugcggcgccaucagcucugugcugaacgauauccugagcagacuggacaaggucgaggccgaggugcagaucgacagacugaucacauguagacugcagagccuccagacauacgugacccagcagcugaucagagccgccgagauuagagccucugccaaucuggccgccaccaagaugucugagugugugcugggccagagcaagagaguggacuuuugcggcaagggcuaccaccugaugagcuucccucagucugccccucacggcgugguguuucugcacgugacauaugugcccgcucaagagaagaauuucaccaccgcuccagccaucugccacgacggcaaagcccacuuuccuagagaaggcguguucguguccaacggcacccauugguucgugacacagcggaacuucuacgagccccagaucaucaccaccgacaacaccuucgugucuggcaacugcgacguugugaucggcauugugaacaauaccguguacgacccucugcagcccgagcuggacagcuucaaagaggaacuggacaaguacuuuaagaaccacacaagccccgacguggaccugggcgauaucagcggaaucaaugccagcgucgugaacauccagaaagagaucgaccggcugaacgagguggccaagaaucugaacgagagccugaucgaccugcaagaacuggggaaguacgagcaguacaucaagggaggaucuggcuauauccccgaggcuccuagagauggccaggccuauguucggaaggauggcgaaugggugcugcugagcaccuuccuuugaggacuagucccuguucccagagcccacuuuuuuuucuuuuuuugaaauaaaauagccugucuuucagaucucaaaggcucuuuucagagccaccaaaaaaaaaaaaaaaaaaaaaaaaaaaaaaaaaaaaaaaaaaaaaaaaaaaaaaaaaaaaaaaaaaaaaaaaaaaaaaaaaaaaaaaaaaaaaaaaaaaaa

SEQ ID NO: 12598 - RNA, 3998 nt, Artificial Sequence
  SARS-CoV-2/Wuhan/WIV05/2019__EPI_ISL_402128 spike protein mRNA gc mod (1-1211)(A972C_R995C) Foldon construct
aggagagucccgcagucggcguccagcggcucugcuuguucgugugugugucguugcaggccuuauucaagcuuaccauguucguguuucuggugcugcugccccugguguccagccagugugugaaccugaccaccagaacacagcugccuccagccuacaccaacagcuucaccagaggcguguacuaccccgacaagguguucagauccagcgugcugcacucuacccaggaccuguuccugccuuucuucagcaacgugaccugguuccacgccauccacguguccggcaccaauggcaccaagagauucgacaaccccgugcugcccuucaacgacgggguguacuuugccagcaccgagaaguccaacaucaucagaggcuggaucuucggcaccacacuggacagcaagacccagagccugcugaucgugaacaacgccaccaacguggucaucaaagugugcgaguuccaguucugcaacgaccccuuccugggcgucuacuaccacaagaacaacaagagcuggauggaaagcgaguuccggguguacagcagcgccaacaacugcaccuucgaguacgugucccagccuuuccugauggaccuggaaggcaagcagggcaacuucaagaaccugcgcgaguucguguucaagaacaucgacggcuacuucaaaaucuacagcaagcacaccccuaucaaccucgugcgggaucugccucagggcuucucugcucuggaaccccugguggaucugcccaucggcaucaacaucacccgguuucagacacugcuggcccugcacagaagcuaccugacaccuggcgauagcagcagcggauggacagcuggugccgccgcuuacuaugugggcuaccugcagccuagaaccuuccugcugaaguacaacgagaacggcaccaucaccgacgccguggauugugcucuggauccucugagcgagacaaagugcacccugaaguccuucaccguggaaaagggcaucuaccagaccagcaacuuccgggugcagcccaccgaauccaucgugcgguuccccaauaucaccaaucugugccccuucggcgagguguucaaugccaccagauucgccucuguguacgccuggaaccggaagcggaucagcaauugcguggccgacuacuccgugcuguacaacuccgccagcuucagcaccuucaagugcuacggcguguccccuaccaagcugaacgaccugugcuucacaaacguguacgccgacagcuucgugauccggggagaugaagugcggcagauugccccuggacagacaggcaagaucgccgacuacaacuacaagcugcccgacgacuucaccggcugugugauugccuggaacagcaacaaccuggacuccaaagucggcggcaacuacaauuaccuguaccggcuguuccggaaguccaaucugaagcccuucgagcgggacaucagcaccgaaaucuaucaggccggcagcaccccuugcaacggcguggaaggcuucaacugcuacuucccacugcaguccuacggcuuucagcccacaaauggcgugggcuaucagcccuacagagugguggugcugagcuucgaacugcugcaugcuccugccacagugugcggcccuaagaaaagcaccaaucucgugaagaacaaaugcgugaacuucaacuucaacggccugaccggcaccggcgugcugacagagagcaacaagaaguuccugccauuccagcaguuuggccgggauaucgccgauaccacagacgccguuagagauccccagacacuggaaauccuggacaucaccccaugcagcuucggcggagugucugugaucaccccuggcaccaacaccagcaaucagguggcagugcuguaccaggacgugaacuguaccgaagugcccguggccauucacgccgaucagcugacaccuacauggcggguguacuccaccggcagcaauguguuucagaccagagccggcugucugaucggagccgagcacgugaacaauagcuacgagugcgacauccccaucggcgcuggcaucugugccagcuaccagacacagacaaacagccccagacgggcuagaagcguggccagccagagcaucauugccuacacaaugucucugggcgccgagaacagcguggccuacuccaacaacucuaucgcuauccccaccaacuucaccaucagcgugaccaccgagauccugccuguguccaugaccaagaccagcguggacugcaccauguacaucugcggcgauuccaccgagugcuccaaccugcugcugcaguacggcagcuucugcacccagcugaauagagcccugacagggaucgccguggaacaggacaagaacacccaagagguguucgcccaagugaagcaaaucuacaagaccccuccuaucaaggacuucggcggcuucaauuucagccagauucugcccgauccuagcaagcccagcaagcggagcuucaucgaggaccugcuguucaacaaagugacacuggccgacgccggcuucaucaagcaguauggcgauugucugggcgacauugccgccagggaucugauuugcgcccagaaguuuaacggacugacagugcugccuccucugcugaccgaugagaugaucgcccaguacacaucugcccugcuggccggcacaaucacaagcggcuggacauuuggagcuggcgccgcucugcagauccccuuugcuaugcagauggccuaccgguucaacggcaucggagugacccagaaugugcuguacgagaaccagaagcugaucgccaaccaguucaacagcgccaucggcaagauccaggacagccugagcagcacagcaagcgcccugggaaagcugcaggacguggucaaccagaaugcccaggcacugaacacccuggucaagcagcuguccuccaacuucggcugcaucagcucugugcugaacgauauccugagcagacuggacaaggucgaggccgaggugcagaucgacugucugaucacaggcagacugcagagccuccagacauacgugacccagcagcugaucagagccgccgagauuagagccucugccaaucuggccgccaccaagaugucugagugugugcugggccagagcaagagaguggacuuuugcggcaagggcuaccaccugaugagcuucccucagucugccccucacggcgugguguuucugcacgugacauaugugcccgcucaagagaagaauuucaccaccgcuccagccaucugccacgacggcaaagcccacuuuccuagagaaggcguguucguguccaacggcacccauugguucgugacacagcggaacuucuacgagccccagaucaucaccaccgacaacaccuucgugucuggcaacugcgacguugugaucggcauugugaacaauaccguguacgacccucugcagcccgagcuggacagcuucaaagaggaacuggacaaguacuuuaagaaccacacaagccccgacguggaccugggcgauaucagcggaaucaaugccagcgucgugaacauccagaaagagaucgaccggcugaacgagguggccaagaaucugaacgagagccugaucgaccugcaagaacuggggaaguacgagcaguacaucaagggaggaucuggcuauauccccgaggcuccuagagauggccaggccuauguucggaaggauggcgaaugggugcugcugagcaccuuccuuugaggacuagucccuguucccagagcccacuuuuuuuucuuuuuuugaaauaaaauagccugucuuucagaucucaaaggcucuuuucagagccaccaaaaaaaaaaaaaaaaaaaaaaaaaaaaaaaaaaaaaaaaaaaaaaaaaaaaaaaaaaaaaaaaaaaaaaaaaaaaaaaaaaaaaaaaaaaaaaaaaaaaa

SEQ ID NO: 12599 - RNA, 3998 nt, Artificial Sequence
  SARS-CoV-2/Wuhan/WIV05/2019__EPI_ISL_402128 spike protein mRNA gc mod (1-1211)(A890C_V1040C) Foldon construct
aggagagucccgcagucggcguccagcggcucugcuuguucgugugugugucguugcaggccuuauucaagcuuaccauguucguguuucuggugcugcugccccugguguccagccagugugugaaccugaccaccagaacacagcugccuccagccuacaccaacagcuucaccagaggcguguacuaccccgacaagguguucagauccagcgugcugcacucuacccaggaccuguuccugccuuucuucagcaacgugaccugguuccacgccauccacguguccggcaccaauggcaccaagagauucgacaaccccgugcugcccuucaacgacgggguguacuuugccagcaccgagaaguccaacaucaucagaggcuggaucuucggcaccacacuggacagcaagacccagagccugcugaucgugaacaacgccaccaacguggucaucaaagugugcgaguuccaguucugcaacgaccccuuccugggcgucuacuaccacaagaacaacaagagcuggauggaaagcgaguuccggguguacagcagcgccaacaacugcaccuucgaguacgugucccagccuuuccugauggaccuggaaggcaagcagggcaacuucaagaaccugcgcgaguucguguucaagaacaucgacggcuacuucaaaaucuacagcaagcacaccccuaucaaccucgugcgggaucugccucagggcuucucugcucuggaaccccugguggaucugcccaucggcaucaacaucacccgguuucagacacugcuggcccugcacagaagcuaccugacaccuggcgauagcagcagcggauggacagcuggugccgccgcuuacuaugugggcuaccugcagccuagaaccuuccugcugaaguacaacgagaacggcaccaucaccgacgccguggauugugcucuggauccucugagcgagacaaagugcacccugaaguccuucaccguggaaaagggcaucuaccagaccagcaacuuccgggugcagcccaccgaauccaucgugcgguuccccaauaucaccaaucugugccccuucggcgagguguucaaugccaccagauucgccucuguguacgccuggaaccggaagcggaucagcaauugcguggccgacuacuccgugcuguacaacuccgccagcuucagcaccuucaagugcuacggcguguccccuaccaagcugaacgaccugugcuucacaaacguguacgccgacagcuucgugauccggggagaugaagugcggcagauugccccuggacagacaggcaagaucgccgacuacaacuacaagcugcccgacgacuucaccggcugugugauugccuggaacagcaacaaccuggacuccaaagucggcggcaacuacaauuaccuguaccggcuguuccggaaguccaaucugaagcccuucgagcgggacaucagcaccgaaaucuaucaggccggcagcaccccuugcaacggcguggaaggcuucaacugcuacuucccacugcaguccuacggcuuucagcccacaaauggcgugggcuaucagcccuacagagugguggugcugagcuucgaacugcugcaugcuccugccacagugugcggcccuaagaaaagcaccaaucucgugaagaacaaaugcgugaacuucaacuucaacggccugaccggcaccggcgugcugacagagagcaacaagaaguuccugccauuccagcaguuuggccgggauaucgccgauaccacagacgccguuagagauccccagacacuggaaauccuggacaucaccccaugcagcuucggcggagugucugugaucaccccuggcaccaacaccagcaaucagguggcagugcuguaccaggacgugaacuguaccgaagugcccguggccauucacgccgaucagcugacaccuacauggcggguguacuccaccggcagcaauguguuucagaccagagccggcugucugaucggagccgagcacgugaacaauagcuacgagugcgacauccccaucggcgcuggcaucugugccagcuaccagacacagacaaacagccccagacgggcuagaagcguggccagccagagcaucauugccuacacaaugucucugggcgccgagaacagcguggccuacuccaacaacucuaucgcuauccccaccaacuucaccaucagcgugaccaccgagauccugccuguguccaugaccaagaccagcguggacugcaccauguacaucugcggcgauuccaccgagugcuccaaccugcugcugcaguacggcagcuucugcacccagcugaauagagcccugacagggaucgccguggaacaggacaagaacacccaagagguguucgcccaagugaagcaaaucuacaagaccccuccuaucaaggacuucggcggcuucaauuucagccagauucugcccgauccuagcaagcccagcaagcggagcuucaucgaggaccugcuguucaacaaagugacacuggccgacgccggcuucaucaagcaguauggcgauugucugggcgacauugccgccagggaucugauuugcgcccagaaguuuaacggacugacagugcugccuccucugcugaccgaugagaugaucgcccaguacacaucugcccugcuggccggcacaaucacaagcggcuggacauuuggaugcggcgccgcucugcagauccccuuugcuaugcagauggccuaccgguucaacggcaucggagugacccagaaugugcuguacgagaaccagaagcugaucgccaaccaguucaacagcgccaucggcaagauccaggacagccugagcagcacagcaagcgcccugggaaagcugcaggacguggucaaccagaaugcccaggcacugaacacccuggucaagcagcuguccuccaacuucggcgccaucagcucugugcugaacgauauccugagcagacuggacaaggucgaggccgaggugcagaucgacagacugaucacaggcagacugcagagccuccagacauacgugacccagcagcugaucagagccgccgagauuagagccucugccaaucuggccgccaccaagaugucugagugugugcugggccagagcaagagaugugacuuuugcggcaagggcuaccaccugaugagcuucccucagucugccccucacggcgugguguuucugcacgugacauaugugcccgcucaagagaagaauuucaccaccgcuccagccaucugccacgacggcaaagcccacuuuccuagagaaggcguguucguguccaacggcacccauugguucgugacacagcggaacuucuacgagccccagaucaucaccaccgacaacaccuucgugucuggcaacugcgacguugugaucggcauugugaacaauaccguguacgacccucugcagcccgagcuggacagcuucaaagaggaacuggacaaguacuuuaagaaccacacaagccccgacguggaccugggcgauaucagcggaaucaaugccagcgucgugaacauccagaaagagaucgaccggcugaacgagguggccaagaaucugaacgagagccugaucgaccugcaagaacuggggaaguacgagcaguacaucaagggaggaucuggcuauauccccgaggcuccuagagauggccaggccuauguucggaaggauggcgaaugggugcugcugagcaccuuccuuugaggacuagucccuguucccagagcccacuuuuuuuucuuuuuuugaaauaaaauagccugucuuucagaucucaaaggcucuuuucagagccaccaaaaaaaaaaaaaaaaaaaaaaaaaaaaaaaaaaaaaaaaaaaaaaaaaaaaaaaaaaaaaaaaaaaaaaaaaaaaaaaaaaaaaaaaaaaaaaaaaaaaa

SEQ ID NO: 12600 - RNA, 3998 nt, Artificial Sequence
  SARS-CoV-2/Wuhan/WIV05/2019__EPI_ISL_402128 spike protein mRNA gc mod (1-1211)(T874C_S1055C) Foldon construct
aggagagucccgcagucggcguccagcggcucugcuuguucgugugugugucguugcaggccuuauucaagcuuaccauguucguguuucuggugcugcugccccugguguccagccagugugugaaccugaccaccagaacacagcugccuccagccuacaccaacagcuucaccagaggcguguacuaccccgacaagguguucagauccagcgugcugcacucuacccaggaccuguuccugccuuucuucagcaacgugaccugguuccacgccauccacguguccggcaccaauggcaccaagagauucgacaaccccgugcugcccuucaacgacgggguguacuuugccagcaccgagaaguccaacaucaucagaggcuggaucuucggcaccacacuggacagcaagacccagagccugcugaucgugaacaacgccaccaacguggucaucaaagugugcgaguuccaguucugcaacgaccccuuccugggcgucuacuaccacaagaacaacaagagcuggauggaaagcgaguuccggguguacagcagcgccaacaacugcaccuucgaguacgugucccagccuuuccugauggaccuggaaggcaagcagggcaacuucaagaaccugcgcgaguucguguucaagaacaucgacggcuacuucaaaaucuacagcaagcacaccccuaucaaccucgugcgggaucugccucagggcuucucugcucuggaaccccugguggaucugcccaucggcaucaacaucacccgguuucagacacugcuggcccugcacagaagcuaccugacaccuggcgauagcagcagcggauggacagcuggugccgccgcuuacuaugugggcuaccugcagccuagaaccuuccugcugaaguacaacgagaacggcaccaucaccgacgccguggauugugcucuggauccucugagcgagacaaagugcacccugaaguccuucaccguggaaaagggcaucuaccagaccagcaacuuccgggugcagcccaccgaauccaucgugcgguuccccaauaucaccaaucugugccccuucggcgagguguucaaugccaccagauucgccucuguguacgccuggaaccggaagcggaucagcaauugcguggccgacuacuccgugcuguacaacuccgccagcuucagcaccuucaagugcuacggcguguccccuaccaagcugaacgaccugugcuucacaaacguguacgccgacagcuucgugauccggggagaugaagugcggcagauugccccuggacagacaggcaagaucgccgacuacaacuacaagcugcccgacgacuucaccggcugugugauugccuggaacagcaacaaccuggacuccaaagucggcggcaacuacaauuaccuguaccggcuguuccggaaguccaaucugaagcccuucgagcgggacaucagcaccgaaaucuaucaggccggcagcaccccuugcaacggcguggaaggcuucaacugcuacuucccacugcaguccuacggcuuucagcccacaaauggcgugggcuaucagcccuacagagugguggugcugagcuucgaacugcugcaugcuccugccacagugugcggcccuaagaaaagcaccaaucucgugaagaacaaaugcgugaacuucaacuucaacggccugaccggcaccggcgugcugacagagagcaacaagaaguuccugccauuccagcaguuuggccgggauaucgccgauaccacagacgccguuagagauccccagacacuggaaauccuggacaucaccccaugcagcuucggcggagugucugugaucaccccuggcaccaacaccagcaaucagguggcagugcuguaccaggacgugaacuguaccgaagugcccguggccauucacgccgaucagcugacaccuacauggcggguguacuccaccggcagcaauguguuucagaccagagccggcugucugaucggagccgagcacgugaacaauagcuacgagugcgacauccccaucggcgcuggcaucugugccagcuaccagacacagacaaacagccccagacgggcuagaagcguggccagccagagcaucauugccuacacaaugucucugggcgccgagaacagcguggccuacuccaacaacucuaucgcuauccccaccaacuucaccaucagcgugaccaccgagauccugccuguguccaugaccaagaccagcguggacugcaccauguacaucugcggcgauuccaccgagugcuccaaccugcugcugcaguacggcagcuucugcacccagcugaauagagcccugacagggaucgccguggaacaggacaagaacacccaagagguguucgcccaagugaagcaaaucuacaagaccccuccuaucaaggacuucggcggcuucaauuucagccagauucugcccgauccuagcaagcccagcaagcggagcuucaucgaggaccugcuguucaacaaagugacacuggccgacgccggcuucaucaagcaguauggcgauugucugggcgacauugccgccagggaucugauuugcgcccagaaguuuaacggacugacagugcugccuccucugcugaccgaugagaugaucgcccaguacugcucugcccugcuggccggcacaaucacaagcggcuggacauuuggagcuggcgccgcucugcagauccccuuugcuaugcagauggccuaccgguucaacggcaucggagugacccagaaugugcuguacgagaaccagaagcugaucgccaaccaguucaacagcgccaucggcaagauccaggacagccugagcagcacagcaagcgcccugggaaagcugcaggacguggucaaccagaaugcccaggcacugaacacccuggucaagcagcuguccuccaacuucggcgccaucagcucugugcugaacgauauccugagcagacuggacaaggucgaggccgaggugcagaucgacagacugaucacaggcagacugcagagccuccagacauacgugacccagcagcugaucagagccgccgagauuagagccucugccaaucuggccgccaccaagaugucugagugugugcugggccagagcaagagaguggacuuuugcggcaagggcuaccaccugaugagcuucccucagugcgccccucacggcgugguguuucugcacgugacauaugugcccgcucaagagaagaauuucaccaccgcuccagccaucugccacgacggcaaagcccacuuuccuagagaaggcguguucguguccaacggcacccauugguucgugacacagcggaacuucuacgagccccagaucaucaccaccgacaacaccuucgugucuggcaacugcgacguugugaucggcauugugaacaauaccguguacgacccucugcagcccgagcuggacagcuucaaagaggaacuggacaaguacuuuaagaaccacacaagccccgacguggaccugggcgauaucagcggaaucaaugccagcgucgugaacauccagaaagagaucgaccggcugaacgagguggccaagaaucugaacgagagccugaucgaccugcaagaacuggggaaguacgagcaguacaucaagggaggaucuggcuauauccccgaggcuccuagagauggccaggccuauguucggaaggauggcgaaugggugcugcugagcaccuuccuuugaggacuagucccuguucccagagcccacuuuuuuuucuuuuuuugaaauaaaauagccugucuuucagaucucaaaggcucuuuucagagccaccaaaaaaaaaaaaaaaaaaaaaaaaaaaaaaaaaaaaaaaaaaaaaaaaaaaaaaaaaaaaaaaaaaaaaaaaaaaaaaaaaaaaaaaaaaaaaaaaaaaaa

SEQ ID NO: 12601 - RNA, 4370 nt, Artificial Sequence
  SARS-CoV-2/Wuhan/WIV05/2019__EPI_ISL_402128 spike protein mRNA gc mod (1-1211) WhcAg construct
aggagagucccgcagucggcguccagcggcucugcuuguucgugugugugucguugcaggccuuauucaagcuuaccauguucguguuucuggugcugcugccccugguguccagccagugugugaaccugaccaccagaacacagcugccuccagccuacaccaacagcuucaccagaggcguguacuaccccgacaagguguucagauccagcgugcugcacucuacccaggaccuguuccugccuuucuucagcaacgugaccugguuccacgccauccacguguccggcaccaauggcaccaagagauucgacaaccccgugcugcccuucaacgacgggguguacuuugccagcaccgagaaguccaacaucaucagaggcuggaucuucggcaccacacuggacagcaagacccagagccugcugaucgugaacaacgccaccaacguggucaucaaagugugcgaguuccaguucugcaacgaccccuuccugggcgucuacuaccacaagaacaacaagagcuggauggaaagcgaguuccggguguacagcagcgccaacaacugcaccuucgaguacgugucccagccuuuccugauggaccuggaaggcaagcagggcaacuucaagaaccugcgcgaguucguguucaagaacaucgacggcuacuucaaaaucuacagcaagcacaccccuaucaaccucgugcgggaucugccucagggcuucucugcucuggaaccccugguggaucugcccaucggcaucaacaucacccgguuucagacacugcuggcccugcacagaagcuaccugacaccuggcgauagcagcagcggauggacagcuggugccgccgcuuacuaugugggcuaccugcagccuagaaccuuccugcugaaguacaacgagaacggcaccaucaccgacgccguggauugugcucuggauccucugagcgagacaaagugcacccugaaguccuucaccguggaaaagggcaucuaccagaccagcaacuuccgggugcagcccaccgaauccaucgugcgguuccccaauaucaccaaucugugccccuucggcgagguguucaaugccaccagauucgccucuguguacgccuggaaccggaagcggaucagcaauugcguggccgacuacuccgugcuguacaacuccgccagcuucagcaccuucaagugcuacggcguguccccuaccaagcugaacgaccugugcuucacaaacguguacgccgacagcuucgugauccggggagaugaagugcggcagauugccccuggacagacaggcaagaucgccgacuacaacuacaagcugcccgacgacuucaccggcugugugauugccuggaacagcaacaaccuggacuccaaagucggcggcaacuacaauuaccuguaccggcuguuccggaaguccaaucugaagcccuucgagcgggacaucagcaccgaaaucuaucaggccggcagcaccccuugcaacggcguggaaggcuucaacugcuacuucccacugcaguccuacggcuuucagcccacaaauggcgugggcuaucagcccuacagagugguggugcugagcuucgaacugcugcaugcuccugccacagugugcggcccuaagaaaagcaccaaucucgugaagaacaaaugcgugaacuucaacuucaacggccugaccggcaccggcgugcugacagagagcaacaagaaguuccugccauuccagcaguuuggccgggauaucgccgauaccacagacgccguuagagauccccagacacuggaaauccuggacaucaccccaugcagcuucggcggagugucugugaucaccccuggcaccaacaccagcaaucagguggcagugcuguaccaggacgugaacuguaccgaagugcccguggccauucacgccgaucagcugacaccuacauggcggguguacuccaccggcagcaauguguuucagaccagagccggcugucugaucggagccgagcacgugaacaauagcuacgagugcgacauccccaucggcgcuggcaucugugccagcuaccagacacagacaaacagccccagacgggcuagaagcguggccagccagagcaucauugccuacacaaugucucugggcgccgagaacagcguggccuacuccaacaacucuaucgcuauccccaccaacuucaccaucagcgugaccaccgagauccugccuguguccaugaccaagaccagcguggacugcaccauguacaucugcggcgauuccaccgagugcuccaaccugcugcugcaguacggcagcuucugcacccagcugaauagagcccugacagggaucgccguggaacaggacaagaacacccaagagguguucgcccaagugaagcaaaucuacaagaccccuccuaucaaggacuucggcggcuucaauuucagccagauucugcccgauccuagcaagcccagcaagcggagcuucaucgaggaccugcuguucaacaaagugacacuggccgacgccggcuucaucaagcaguauggcgauugucugggcgacauugccgccagggaucugauuugcgcccagaaguuuaacggacugacagugcugccuccucugcugaccgaugagaugaucgcccaguacacaucugcccugcuggccggcacaaucacaagcggcuggacauuuggagcuggcgccgcucugcagauccccuuugcuaugcagauggccuaccgguucaacggcaucggagugacccagaaugugcuguacgagaaccagaagcugaucgccaaccaguucaacagcgccaucggcaagauccaggacagccugagcagcacagcaagcgcccugggaaagcugcaggacguggucaaccagaaugcccaggcacugaacacccuggucaagcagcuguccuccaacuucggcgccaucagcucugugcugaacgauauccugagcagacuggacaaggucgaggccgaggugcagaucgacagacugaucacaggcagacugcagagccuccagacauacgugacccagcagcugaucagagccgccgagauuagagccucugccaaucuggccgccaccaagaugucugagugugugcugggccagagcaagagaguggacuuuugcggcaagggcuaccaccugaugagcuucccucagucugccccucacggcgugguguuucugcacgugacauaugugcccgcucaagagaagaauuucaccaccgcuccagccaucugccacgacggcaaagcccacuuuccuagagaaggcguguucguguccaacggcacccauugguucgugacacagcggaacuucuacgagccccagaucaucaccaccgacaacaccuucgugucuggcaacugcgacguugugaucggcauugugaacaauaccguguacgacccucugcagcccgagcuggacagcuucaaagaggaacuggacaaguacuuuaagaaccacacaagccccgacguggaccugggcgauaucagcggaaucaaugccagcgucgugaacauccagaaagagaucgaccggcugaacgagguggccaagaaucugaacgagagccugaucgaccugcaagaacuggggaaguacgagcaguacaucaagggaggcggaggaucugacaucgaccccuacaaagaguucggcagcagcuaccagcugcugaacuuccugccucuggacuucuuccccgaccugaacgcccugguggauacagccacagcucuguacgaggaagaacugaccggcagagagcacugcagcccucaccacacagccauuagacaggcccucgugugcugggacgagcugacaaaacugaucgccuggaugagcagcaacaucaccagcgagcaagugcggaccaucaucgugaaccacgugaacgauaccuggggccugaaagugcggcagagccugugguuucaccugagcugucugaccuucggccagcacaccgugcaagaguuucugguguccuucggcguguggaucagaaccccugcuccauacagaccuccaaacgcucccauccugagcacccugccugagcacacagugaucuguugaggacuagucccuguucccagagcccacuuuuuuuucuuuuuuugaaauaaaauagccugucuuucagaucucaaaggcucuuuucagagccaccaaaaaaaaaaaaaaaaaaaaaaaaaaaaaaaaaaaaaaaaaaaaaaaaaaaaaaaaaaaaaaaaaaaaaaaaaaaaaaaaaaaaaaaaaaaaaaaaaaaaa

SEQ ID NO: 12602 - RNA, 4370 nt, Artificial Sequence
  SARS-CoV-2/Wuhan/WIV05/2019__EPI_ISL_402128 spike protein mRNA gc mod (1-1211)(K986P_V987P) WhcAg construct
aggagagucccgcagucggcguccagcggcucugcuuguucgugugugugucguugcaggccuuauucaagcuuaccauguucguguuucuggugcugcugccccugguguccagccagugugugaaccugaccaccagaacacagcugccuccagccuacaccaacagcuucaccagaggcguguacuaccccgacaagguguucagauccagcgugcugcacucuacccaggaccuguuccugccuuucuucagcaacgugaccugguuccacgccauccacguguccggcaccaauggcaccaagagauucgacaaccccgugcugcccuucaacgacgggguguacuuugccagcaccgagaaguccaacaucaucagaggcuggaucuucggcaccacacuggacagcaagacccagagccugcugaucgugaacaacgccaccaacguggucaucaaagugugcgaguuccaguucugcaacgaccccuuccugggcgucuacuaccacaagaacaacaagagcuggauggaaagcgaguuccggguguacagcagcgccaacaacugcaccuucgaguacgugucccagccuuuccugauggaccuggaaggcaagcagggcaacuucaagaaccugcgcgaguucguguucaagaacaucgacggcuacuucaaaaucuacagcaagcacaccccuaucaaccucgugcgggaucugccucagggcuucucugcucuggaaccccugguggaucugcccaucggcaucaacaucacccgguuucagacacugcuggcccugcacagaagcuaccugacaccuggcgauagcagcagcggauggacagcuggugccgccgcuuacuaugugggcuaccugcagccuagaaccuuccugcugaaguacaacgagaacggcaccaucaccgacgccguggauugugcucuggauccucugagcgagacaaagugcacccugaaguccuucaccguggaaaagggcaucuaccagaccagcaacuuccgggugcagcccaccgaauccaucgugcgguuccccaauaucaccaaucugugccccuucggcgagguguucaaugccaccagauucgccucuguguacgccuggaaccggaagcggaucagcaauugcguggccgacuacuccgugcuguacaacuccgccagcuucagcaccuucaagugcuacggcguguccccuaccaagcugaacgaccugugcuucacaaacguguacgccgacagcuucgugauccggggagaugaagugcggcagauugccccuggacagacaggcaagaucgccgacuacaacuacaagcugcccgacgacuucaccggcugugugauugccuggaacagcaacaaccuggacuccaaagucggcggcaacuacaauuaccuguaccggcuguuccggaaguccaaucugaagcccuucgagcgggacaucagcaccgaaaucuaucaggccggcagcaccccuugcaacggcguggaaggcuucaacugcuacuucccacugcaguccuacggcuuucagcccacaaauggcgugggcuaucagcccuacagagugguggugcugagcuucgaacugcugcaugcuccugccacagugugcggcccuaagaaaagcaccaaucucgugaagaacaaaugcgugaacuucaacuucaacggccugaccggcaccggcgugcugacagagagcaacaagaaguuccugccauuccagcaguuuggccgggauaucgccgauaccacagacgccguuagagauccccagacacuggaaauccuggacaucaccccaugcagcuucggcggagugucugugaucaccccuggcaccaacaccagcaaucagguggcagugcuguaccaggacgugaacuguaccgaagugcccguggccauucacgccgaucagcugacaccuacauggcggguguacuccaccggcagcaauguguuucagaccagagccggcugucugaucggagccgagcacgugaacaauagcuacgagugcgacauccccaucggcgcuggcaucugugccagcuaccagacacagacaaacagccccagacgggcuagaagcguggccagccagagcaucauugccuacacaaugucucugggcgccgagaacagcguggccuacuccaacaacucuaucgcuauccccaccaacuucaccaucagcgugaccaccgagauccugccuguguccaugaccaagaccagcguggacugcaccauguacaucugcggcgauuccaccgagugcuccaaccugcugcugcaguacggcagcuucugcacccagcugaauagagcccugacagggaucgccguggaacaggacaagaacacccaagagguguucgcccaagugaagcaaaucuacaagaccccuccuaucaaggacuucggcggcuucaauuucagccagauucugcccgauccuagcaagcccagcaagcggagcuucaucgaggaccugcuguucaacaaagugacacuggccgacgccggcuucaucaagcaguauggcgauugucugggcgacauugccgccagggaucugauuugcgcccagaaguuuaacggacugacagugcugccuccucugcugaccgaugagaugaucgcccaguacacaucugcccugcuggccggcacaaucacaagcggcuggacauuuggagcuggcgccgcucugcagauccccuuugcuaugcagauggccuaccgguucaacggcaucggagugacccagaaugugcuguacgagaaccagaagcugaucgccaaccaguucaacagcgccaucggcaagauccaggacagccugagcagcacagcaagcgcccugggaaagcugcaggacguggucaaccagaaugcccaggcacugaacacccuggucaagcagcuguccuccaacuucggcgccaucagcucugugcugaacgauauccugagcagacuggacccuccugaggccgaggugcagaucgacagacugaucacaggcagacugcagagccuccagacauacgugacccagcagcugaucagagccgccgagauuagagccucugccaaucuggccgccaccaagaugucugagugugugcugggccagagcaagagaguggacuuuugcggcaagggcuaccaccugaugagcuucccucagucugccccucacggcgugguguuucugcacgugacauaugugcccgcucaagagaagaauuucaccaccgcuccagccaucugccacgacggcaaagcccacuuuccuagagaaggcguguucguguccaacggcacccauugguucgugacacagcggaacuucuacgagccccagaucaucaccaccgacaacaccuucgugucuggcaacugcgacguugugaucggcauugugaacaauaccguguacgacccucugcagcccgagcuggacagcuucaaagaggaacuggacaaguacuuuaagaaccacacaagccccgacguggaccugggcgauaucagcggaaucaaugccagcgucgugaacauccagaaagagaucgaccggcugaacgagguggccaagaaucugaacgagagccugaucgaccugcaagaacuggggaaguacgagcaguacaucaagggaggcggaggaucugacaucgaccccuacaaagaguucggcagcagcuaccagcugcugaacuuccugccucuggacuucuuccccgaccugaacgcccugguggauacagccacagcucuguacgaggaagaacugaccggcagagagcacugcagcccucaccacacagccauuagacaggcccucgugugcugggacgagcugacaaaacugaucgccuggaugagcagcaacaucaccagcgagcaagugcggaccaucaucgugaaccacgugaacgauaccuggggccugaaagugcggcagagccugugguuucaccugagcugucugaccuucggccagcacaccgugcaagaguuucugguguccuucggcguguggaucagaaccccugcuccauacagaccuccaaacgcucccauccugagcacccugccugagcacacagugaucuguugaggacuagucccuguucccagagcccacuuuuuuuucuuuuuuugaaauaaaauagccugucuuucagaucucaaaggcucuuuucagagccaccaaaaaaaaaaaaaaaaaaaaaaaaaaaaaaaaaaaaaaaaaaaaaaaaaaaaaaaaaaaaaaaaaaaaaaaaaaaaaaaaaaaaaaaaaaaaaaaaaaaaa

SEQ ID NO: 12603 - RNA, 4370 nt, Artificial Sequence
  SARS-CoV-2/Wuhan/WIV05/2019__EPI_ISL_402128 spike protein mRNA gc mod (1-1211)(K986P_V987P_T887WN_A1020W) WhcAg construct
aggagagucccgcagucggcguccagcggcucugcuuguucgugugugugucguugcaggccuuauucaagcuuaccauguucguguuucuggugcugcugccccugguguccagccagugugugaaccugaccaccagaacacagcugccuccagccuacaccaacagcuucaccagaggcguguacuaccccgacaagguguucagauccagcgugcugcacucuacccaggaccuguuccugccuuucuucagcaacgugaccugguuccacgccauccacguguccggcaccaauggcaccaagagauucgacaaccccgugcugcccuucaacgacgggguguacuuugccagcaccgagaaguccaacaucaucagaggcuggaucuucggcaccacacuggacagcaagacccagagccugcugaucgugaacaacgccaccaacguggucaucaaagugugcgaguuccaguucugcaacgaccccuuccugggcgucuacuaccacaagaacaacaagagcuggauggaaagcgaguuccggguguacagcagcgccaacaacugcaccuucgaguacgugucccagccuuuccugauggaccuggaaggcaagcagggcaacuucaagaaccugcgcgaguucguguucaagaacaucgacggcuacuucaaaaucuacagcaagcacaccccuaucaaccucgugcgggaucugccucagggcuucucugcucuggaaccccugguggaucugcccaucggcaucaacaucacccgguuucagacacugcuggcccugcacagaagcuaccugacaccuggcgauagcagcagcggauggacagcuggugccgccgcuuacuaugugggcuaccugcagccuagaaccuuccugcugaaguacaacgagaacggcaccaucaccgacgccguggauugugcucuggauccucugagcgagacaaagugcacccugaaguccuucaccguggaaaagggcaucuaccagaccagcaacuuccgggugcagcccaccgaauccaucgugcgguuccccaauaucaccaaucugugccccuucggcgagguguucaaugccaccagauucgccucuguguacgccuggaaccggaagcggaucagcaauugcguggccgacuacuccgugcuguacaacuccgccagcuucagcaccuucaagugcuacggcguguccccuaccaagcugaacgaccugugcuucacaaacguguacgccgacagcuucgugauccggggagaugaagugcggcagauugccccuggacagacaggcaagaucgccgacuacaacuacaagcugcccgacgacuucaccggcugugugauugccuggaacagcaacaaccuggacuccaaagucggcggcaacuacaauuaccuguaccggcuguuccggaaguccaaucugaagcccuucgagcgggacaucagcaccgaaaucuaucaggccggcagcaccccuugcaacggcguggaaggcuucaacugcuacuucccacugcaguccuacggcuuucagcccacaaauggcgugggcuaucagcccuacagagugguggugcugagcuucgaacugcugcaugcuccugccacagugugcggcccuaagaaaagcaccaaucucgugaagaacaaaugcgugaacuucaacuucaacggccugaccggcaccggcgugcugacagagagcaacaagaaguuccugccauuccagcaguuuggccgggauaucgccgauaccacagacgccguuagagauccccagacacuggaaauccuggacaucaccccaugcagcuucggcggagugucugugaucaccccuggcaccaacaccagcaaucagguggcagugcuguaccaggacgugaacuguaccgaagugcccguggccauucacgccgaucagcugacaccuacauggcggguguacuccaccggcagcaauguguuucagaccagagccggcugucugaucggagccgagcacgugaacaauagcuacgagugcgacauccccaucggcgcuggcaucugugccagcuaccagacacagacaaacagccccagacgggcuagaagcguggccagccagagcaucauugccuacacaaugucucugggcgccgagaacagcguggccuacuccaacaacucuaucgcuauccccaccaacuucaccaucagcgugaccaccgagauccugccuguguccaugaccaagaccagcguggacugcaccauguacaucugcggcgauuccaccgagugcuccaaccugcugcugcaguacggcagcuucugcacccagcugaauagagcccugacagggaucgccguggaacaggacaagaacacccaagagguguucgcccaagugaagcaaaucuacaagaccccuccuaucaaggacuucggcggcuucaauuucagccagauucugcccgauccuagcaagcccagcaagcggagcuucaucgaggaccugcuguucaacaaagugacacuggccgacgccggcuucaucaagcaguauggcgauugucugggcgacauugccgccagggaucugauuugcgcccagaaguuuaacggacugacagugcugccuccucugcugaccgaugagaugaucgcccaguacacaucugcccugcuggccggcacaaucacaagcggcuggugguuuggagcuggcgccgcucugcagauccccuuugcuaugcagauggccuaccgguucaacggcaucggagugacccagaaugugcuguacgagaaccagaagcugaucgccaaccaguucaacagcgccaucggcaagauccaggacagccugagcagcacagcaagcgcccugggaaagcugcaggacguggucaaccagaaugcccaggcacugaacacccuggucaagcagcuguccuccaacuucggcgccaucagcucugugcugaacgauauccugagcagacuggacccuccugaggccgaggugcagaucgacagacugaucacaggcagacugcagagccuccagacauacgugacccagcagcugaucagagccgccgagauuagauggucugccaaucuggccgccaccaagaugucugagugugugcugggccagagcaagagaguggacuuuugcggcaagggcuaccaccugaugagcuucccucagucugccccucacggcgugguguuucugcacgugacauaugugcccgcucaagagaagaauuucaccaccgcuccagccaucugccacgacggcaaagcccacuuuccuagagaaggcguguucguguccaacggcacccauugguucgugacacagcggaacuucuacgagccccagaucaucaccaccgacaacaccuucgugucuggcaacugcgacguugugaucggcauugugaacaauaccguguacgacccucugcagcccgagcuggacagcuucaaagaggaacuggacaaguacuuuaagaaccacacaagccccgacguggaccugggcgauaucagcggaaucaaugccagcgucgugaacauccagaaagagaucgaccggcugaacgagguggccaagaaucugaacgagagccugaucgaccugcaagaacuggggaaguacgagcaguacaucaagggaggcggaggaucugacaucgaccccuacaaagaguucggcagcagcuaccagcugcugaacuuccugccucuggacuucuuccccgaccugaacgcccugguggauacagccacagcucuguacgaggaagaacugaccggcagagagcacugcagcccucaccacacagccauuagacaggcccucgugugcugggacgagcugacaaaacugaucgccuggaugagcagcaacaucaccagcgagcaagugcggaccaucaucgugaaccacgugaacgauaccuggggccugaaagugcggcagagccugugguuucaccugagcugucugaccuucggccagcacaccgugcaagaguuucugguguccuucggcguguggaucagaaccccugcuccauacagaccuccaaacgcucccauccugagcacccugccugagcacacagugaucuguugaggacuagucccuguucccagagcccacuuuuuuuucuuuuuuugaaauaaaauagccugucuuucagaucucaaaggcucuuuucagagccaccaaaaaaaaaaaaaaaaaaaaaaaaaaaaaaaaaaaaaaaaaaaaaaaaaaaaaaaaaaaaaaaaaaaaaaaaaaaaaaaaaaaaaaaaaaaaaaaaaaaaa

SEQ ID NO: 12604 - RNA, 4370 nt, Artificial Sequence
  SARS-CoV-2/Wuhan/WIV05/2019__EPI_ISL_402128 spike protein mRNA gc mod (1-1211)(K986P_V987P_P1069F) WhcAg construct
aggagagucccgcagucggcguccagcggcucugcuuguucgugugugugucguugcaggccuuauucaagcuuaccauguucguguuucuggugcugcugccccugguguccagccagugugugaaccugaccaccagaacacagcugccuccagccuacaccaacagcuucaccagaggcguguacuaccccgacaagguguucagauccagcgugcugcacucuacccaggaccuguuccugccuuucuucagcaacgugaccugguuccacgccauccacguguccggcaccaauggcaccaagagauucgacaaccccgugcugcccuucaacgacgggguguacuuugccagcaccgagaaguccaacaucaucagaggcuggaucuucggcaccacacuggacagcaagacccagagccugcugaucgugaacaacgccaccaacguggucaucaaagugugcgaguuccaguucugcaacgaccccuuccugggcgucuacuaccacaagaacaacaagagcuggauggaaagcgaguuccggguguacagcagcgccaacaacugcaccuucgaguacgugucccagccuuuccugauggaccuggaaggcaagcagggcaacuucaagaaccugcgcgaguucguguucaagaacaucgacggcuacuucaaaaucuacagcaagcacaccccuaucaaccucgugcgggaucugccucagggcuucucugcucuggaaccccugguggaucugcccaucggcaucaacaucacccgguuucagacacugcuggcccugcacagaagcuaccugacaccuggcgauagcagcagcggauggacagcuggugccgccgcuuacuaugugggcuaccugcagccuagaaccuuccugcugaaguacaacgagaacggcaccaucaccgacgccguggauugugcucuggauccucugagcgagacaaagugcacccugaaguccuucaccguggaaaagggcaucuaccagaccagcaacuuccgggugcagcccaccgaauccaucgugcgguuccccaauaucaccaaucugugccccuucggcgagguguucaaugccaccagauucgccucuguguacgccuggaaccggaagcggaucagcaauugcguggccgacuacuccgugcuguacaacuccgccagcuucagcaccuucaagugcuacggcguguccccuaccaagcugaacgaccugugcuucacaaacguguacgccgacagcuucgugauccggggagaugaagugcggcagauugccccuggacagacaggcaagaucgccgacuacaacuacaagcugcccgacgacuucaccggcugugugauugccuggaacagcaacaaccuggacuccaaagucggcggcaacuacaauuaccuguaccggcuguuccggaaguccaaucugaagcccuucgagcgggacaucagcaccgaaaucuaucaggccggcagcaccccuugcaacggcguggaaggcuucaacugcuacuucccacugcaguccuacggcuuucagcccacaaauggcgugggcuaucagcccuacagagugguggugcugagcuucgaacugcugcaugcuccugccacagugugcggcccuaagaaaagcaccaaucucgugaagaacaaaugcgugaacuucaacuucaacggccugaccggcaccggcgugcugacagagagcaacaagaaguuccugccauuccagcaguuuggccgggauaucgccgauaccacagacgccguuagagauccccagacacuggaaauccuggacaucaccccaugcagcuucggcggagugucugugaucaccccuggcaccaacaccagcaaucagguggcagugcuguaccaggacgugaacuguaccgaagugcccguggccauucacgccgaucagcugacaccuacauggcggguguacuccaccggcagcaauguguuucagaccagagccggcugucugaucggagccgagcacgugaacaauagcuacgagugcgacauccccaucggcgcuggcaucugugccagcuaccagacacagacaaacagccccagacgggcuagaagcguggccagccagagcaucauugccuacacaaugucucugggcgccgagaacagcguggccuacuccaacaacucuaucgcuauccccaccaacuucaccaucagcgugaccaccgagauccugccuguguccaugaccaagaccagcguggacugcaccauguacaucugcggcgauuccaccgagugcuccaaccugcugcugcaguacggcagcuucugcacccagcugaauagagcccugacagggaucgccguggaacaggacaagaacacccaagagguguucgcccaagugaagcaaaucuacaagaccccuccuaucaaggacuucggcggcuucaauuucagccagauucugcccgauccuagcaagcccagcaagcggagcuucaucgaggaccugcuguucaacaaagugacacuggccgacgccggcuucaucaagcaguauggcgauugucugggcgacauugccgccagggaucugauuugcgcccagaaguuuaacggacugacagugcugccuccucugcugaccgaugagaugaucgcccaguacacaucugcccugcuggccggcacaaucacaagcggcuggacauuuggagcuggcgccgcucugcagauccccuuugcuaugcagauggccuaccgguucaacggcaucggagugacccagaaugugcuguacgagaaccagaagcugaucgccaaccaguucaacagcgccaucggcaagauccaggacagccugagcagcacagcaagcgcccugggaaagcugcaggacguggucaaccagaaugcccaggcacugaacacccuggucaagcagcuguccuccaacuucggcgccaucagcucugugcugaacgauauccugagcagacuggacccuccugaggccgaggugcagaucgacagacugaucacaggcagacugcagagccuccagacauacgugacccagcagcugaucagagccgccgagauuagagccucugccaaucuggccgccaccaagaugucugagugugugcugggccagagcaagagaguggacuuuugcggcaagggcuaccaccugaugagcuucccucagucugccccucacggcgugguguuucugcacgugacauauguguucgcucaagagaagaauuucaccaccgcuccagccaucugccacgacggcaaagcccacuuuccuagagaaggcguguucguguccaacggcacccauugguucgugacacagcggaacuucuacgagccccagaucaucaccaccgacaacaccuucgugucuggcaacugcgacguugugaucggcauugugaacaauaccguguacgacccucugcagcccgagcuggacagcuucaaagaggaacuggacaaguacuuuaagaaccacacaagccccgacguggaccugggcgauaucagcggaaucaaugccagcgucgugaacauccagaaagagaucgaccggcugaacgagguggccaagaaucugaacgagagccugaucgaccugcaagaacuggggaaguacgagcaguacaucaagggaggcggaggaucugacaucgaccccuacaaagaguucggcagcagcuaccagcugcugaacuuccugccucuggacuucuuccccgaccugaacgcccugguggauacagccacagcucuguacgaggaagaacugaccggcagagagcacugcagcccucaccacacagccauuagacaggcccucgugugcugggacgagcugacaaaacugaucgccuggaugagcagcaacaucaccagcgagcaagugcggaccaucaucgugaaccacgugaacgauaccuggggccugaaagugcggcagagccugugguuucaccugagcugucugaccuucggccagcacaccgugcaagaguuucugguguccuucggcguguggaucagaaccccugcuccauacagaccuccaaacgcucccauccugagcacccugccugagcacacagugaucuguugaggacuagucccuguucccagagcccacuuuuuuuucuuuuuuugaaauaaaauagccugucuuucagaucucaaaggcucuuuucagagccaccaaaaaaaaaaaaaaaaaaaaaaaaaaaaaaaaaaaaaaaaaaaaaaaaaaaaaaaaaaaaaaaaaaaaaaaaaaaaaaaaaaaaaaaaaaaaaaaaaaaaa

SEQ ID NO: 12605 - RNA, 4370 nt, Artificial Sequence
  SARS-CoV-2/Wuhan/WIV05/2019__EPI_ISL_402128 spike protein mRNA gc mod (1-1211)(K986P_V987P_ H1048Q_H1064N_ H1083N_H1101N) WhcAg construct
aggagagucccgcagucggcguccagcggcucugcuuguucgugugugugucguugcaggccuuauucaagcuuaccauguucguguuucuggugcugcugccccugguguccagccagugugugaaccugaccaccagaacacagcugccuccagccuacaccaacagcuucaccagaggcguguacuaccccgacaagguguucagauccagcgugcugcacucuacccaggaccuguuccugccuuucuucagcaacgugaccugguuccacgccauccacguguccggcaccaauggcaccaagagauucgacaaccccgugcugcccuucaacgacgggguguacuuugccagcaccgagaaguccaacaucaucagaggcuggaucuucggcaccacacuggacagcaagacccagagccugcugaucgugaacaacgccaccaacguggucaucaaagugugcgaguuccaguucugcaacgaccccuuccugggcgucuacuaccacaagaacaacaagagcuggauggaaagcgaguuccggguguacagcagcgccaacaacugcaccuucgaguacgugucccagccuuuccugauggaccuggaaggcaagcagggcaacuucaagaaccugcgcgaguucguguucaagaacaucgacggcuacuucaaaaucuacagcaagcacaccccuaucaaccucgugcgggaucugccucagggcuucucugcucuggaaccccugguggaucugcccaucggcaucaacaucacccgguuucagacacugcuggcccugcacagaagcuaccugacaccuggcgauagcagcagcggauggacagcuggugccgccgcuuacuaugugggcuaccugcagccuagaaccuuccugcugaaguacaacgagaacggcaccaucaccgacgccguggauugugcucuggauccucugagcgagacaaagugcacccugaaguccuucaccguggaaaagggcaucuaccagaccagcaacuuccgggugcagcccaccgaauccaucgugcgguuccccaauaucaccaaucugugccccuucggcgagguguucaaugccaccagauucgccucuguguacgccuggaaccggaagcggaucagcaauugcguggccgacuacuccgugcuguacaacuccgccagcuucagcaccuucaagugcuacggcguguccccuaccaagcugaacgaccugugcuucacaaacguguacgccgacagcuucgugauccggggagaugaagugcggcagauugccccuggacagacaggcaagaucgccgacuacaacuacaagcugcccgacgacuucaccggcugugugauugccuggaacagcaacaaccuggacuccaaagucggcggcaacuacaauuaccuguaccggcuguuccggaaguccaaucugaagcccuucgagcgggacaucagcaccgaaaucuaucaggccggcagcaccccuugcaacggcguggaaggcuucaacugcuacuucccacugcaguccuacggcuuucagcccacaaauggcgugggcuaucagcccuacagagugguggugcugagcuucgaacugcugcaugcuccugccacagugugcggcccuaagaaaagcaccaaucucgugaagaacaaaugcgugaacuucaacuucaacggccugaccggcaccggcgugcugacagagagcaacaagaaguuccugccauuccagcaguuuggccgggauaucgccgauaccacagacgccguuagagauccccagacacuggaaauccuggacaucaccccaugcagcuucggcggagugucugugaucaccccuggcaccaacaccagcaaucagguggcagugcuguaccaggacgugaacuguaccgaagugcccguggccauucacgccgaucagcugacaccuacauggcggguguacuccaccggcagcaauguguuucagaccagagccggcugucugaucggagccgagcacgugaacaauagcuacgagugcgacauccccaucggcgcuggcaucugugccagcuaccagacacagacaaacagccccagacgggcuagaagcguggccagccagagcaucauugccuacacaaugucucugggcgccgagaacagcguggccuacuccaacaacucuaucgcuauccccaccaacuucaccaucagcgugaccaccgagauccugccuguguccaugaccaagaccagcguggacugcaccauguacaucugcggcgauuccaccgagugcuccaaccugcugcugcaguacggcagcuucugcacccagcugaauagagcccugacagggaucgccguggaacaggacaagaacacccaagagguguucgcccaagugaagcaaaucuacaagaccccuccuaucaaggacuucggcggcuucaauuucagccagauucugcccgauccuagcaagcccagcaagcggagcuucaucgaggaccugcuguucaacaaagugacacuggccgacgccggcuucaucaagcaguauggcgauugucugggcgacauugccgccagggaucugauuugcgcccagaaguuuaacggacugacagugcugccuccucugcugaccgaugagaugaucgcccaguacacaucugcccugcuggccggcacaaucacaagcggcuggacauuuggagcuggcgccgcucugcagauccccuuugcuaugcagauggccuaccgguucaacggcaucggagugacccagaaugugcuguacgagaaccagaagcugaucgccaaccaguucaacagcgccaucggcaagauccaggacagccugagcagcacagcaagcgcccugggaaagcugcaggacguggucaaccagaaugcccaggcacugaacacccuggucaagcagcuguccuccaacuucggcgccaucagcucugugcugaacgauauccugagcagacuggacccuccugaggccgaggugcagaucgacagacugaucacaggcagacugcagagccuccagacauacgugacccagcagcugaucagagccgccgagauuagagccucugccaaucuggccgccaccaagaugucugagugugugcugggccagagcaagagaguggacuuuugcggcaagggcuaccagcugaugagcuucccucagucugccccucacggcgugguguuucugaacgugacauaugugcccgcucaagagaagaauuucaccaccgcuccagccaucugcaacgacggcaaagcccacuuuccuagagaaggcguguucguguccaacggcaccaacugguucgugacacagcggaacuucuacgagccccagaucaucaccaccgacaacaccuucgugucuggcaacugcgacguugugaucggcauugugaacaauaccguguacgacccucugcagcccgagcuggacagcuucaaagaggaacuggacaaguacuuuaagaaccacacaagccccgacguggaccugggcgauaucagcggaaucaaugccagcgucgugaacauccagaaagagaucgaccggcugaacgagguggccaagaaucugaacgagagccugaucgaccugcaagaacuggggaaguacgagcaguacaucaagggaggcggaggaucugacaucgaccccuacaaagaguucggcagcagcuaccagcugcugaacuuccugccucuggacuucuuccccgaccugaacgcccugguggauacagccacagcucuguacgaggaagaacugaccggcagagagcacugcagcccucaccacacagccauuagacaggcccucgugugcugggacgagcugacaaaacugaucgccuggaugagcagcaacaucaccagcgagcaagugcggaccaucaucgugaaccacgugaacgauaccuggggccugaaagugcggcagagccugugguuucaccugagcugucugaccuucggccagcacaccgugcaagaguuucugguguccuucggcguguggaucagaaccccugcuccauacagaccuccaaacgcucccauccugagcacccugccugagcacacagugaucuguugaggacuagucccuguucccagagcccacuuuuuuuucuuuuuuugaaauaaaauagccugucuuucagaucucaaaggcucuuuucagagccaccaaaaaaaaaaaaaaaaaaaaaaaaaaaaaaaaaaaaaaaaaaaaaaaaaaaaaaaaaaaaaaaaaaaaaaaaaaaaaaaaaaaaaaaaaaaaaaaaaaaaa

SEQ ID NO: 12606 - RNA, 4370 nt, Artificial Sequence
  SARS-CoV-2/Wuhan/WIV05/2019__EPI_ISL_402128 spike protein mRNA gc mod (1-1211)(I712C_T1077C) WhcAg construct
aggagagucccgcagucggcguccagcggcucugcuuguucgugugugugucguugcaggccuuauucaagcuuaccauguucguguuucuggugcugcugccccugguguccagccagugugugaaccugaccaccagaacacagcugccuccagccuacaccaacagcuucaccagaggcguguacuaccccgacaagguguucagauccagcgugcugcacucuacccaggaccuguuccugccuuucuucagcaacgugaccugguuccacgccauccacguguccggcaccaauggcaccaagagauucgacaaccccgugcugcccuucaacgacgggguguacuuugccagcaccgagaaguccaacaucaucagaggcuggaucuucggcaccacacuggacagcaagacccagagccugcugaucgugaacaacgccaccaacguggucaucaaagugugcgaguuccaguucugcaacgaccccuuccugggcgucuacuaccacaagaacaacaagagcuggauggaaagcgaguuccggguguacagcagcgccaacaacugcaccuucgaguacgugucccagccuuuccugauggaccuggaaggcaagcagggcaacuucaagaaccugcgcgaguucguguucaagaacaucgacggcuacuucaaaaucuacagcaagcacaccccuaucaaccucgugcgggaucugccucagggcuucucugcucuggaaccccugguggaucugcccaucggcaucaacaucacccgguuucagacacugcuggcccugcacagaagcuaccugacaccuggcgauagcagcagcggauggacagcuggugccgccgcuuacuaugugggcuaccugcagccuagaaccuuccugcugaaguacaacgagaacggcaccaucaccgacgccguggauugugcucuggauccucugagcgagacaaagugcacccugaaguccuucaccguggaaaagggcaucuaccagaccagcaacuuccgggugcagcccaccgaauccaucgugcgguuccccaauaucaccaaucugugccccuucggcgagguguucaaugccaccagauucgccucuguguacgccuggaaccggaagcggaucagcaauugcguggccgacuacuccgugcuguacaacuccgccagcuucagcaccuucaagugcuacggcguguccccuaccaagcugaacgaccugugcuucacaaacguguacgccgacagcuucgugauccggggagaugaagugcggcagauugccccuggacagacaggcaagaucgccgacuacaacuacaagcugcccgacgacuucaccggcugugugauugccuggaacagcaacaaccuggacuccaaagucggcggcaacuacaauuaccuguaccggcuguuccggaaguccaaucugaagcccuucgagcgggacaucagcaccgaaaucuaucaggccggcagcaccccuugcaacggcguggaaggcuucaacugcuacuucccacugcaguccuacggcuuucagcccacaaauggcgugggcuaucagcccuacagagugguggugcugagcuucgaacugcugcaugcuccugccacagugugcggcccuaagaaaagcaccaaucucgugaagaacaaaugcgugaacuucaacuucaacggccugaccggcaccggcgugcugacagagagcaacaagaaguuccugccauuccagcaguuuggccgggauaucgccgauaccacagacgccguuagagauccccagacacuggaaauccuggacaucaccccaugcagcuucggcggagugucugugaucaccccuggcaccaacaccagcaaucagguggcagugcuguaccaggacgugaacuguaccgaagugcccguggccauucacgccgaucagcugacaccuacauggcggguguacuccaccggcagcaauguguuucagaccagagccggcugucugaucggagccgagcacgugaacaauagcuacgagugcgacauccccaucggcgcuggcaucugugccagcuaccagacacagacaaacagccccagacgggcuagaagcguggccagccagagcaucauugccuacacaaugucucugggcgccgagaacagcguggccuacuccaacaacucuugcgcuauccccaccaacuucaccaucagcgugaccaccgagauccugccuguguccaugaccaagaccagcguggacugcaccauguacaucugcggcgauuccaccgagugcuccaaccugcugcugcaguacggcagcuucugcacccagcugaauagagcccugacagggaucgccguggaacaggacaagaacacccaagagguguucgcccaagugaagcaaaucuacaagaccccuccuaucaaggacuucggcggcuucaauuucagccagauucugcccgauccuagcaagcccagcaagcggagcuucaucgaggaccugcuguucaacaaagugacacuggccgacgccggcuucaucaagcaguauggcgauugucugggcgacauugccgccagggaucugauuugcgcccagaaguuuaacggacugacagugcugccuccucugcugaccgaugagaugaucgcccaguacacaucugcccugcuggccggcacaaucacaagcggcuggacauuuggagcuggcgccgcucugcagauccccuuugcuaugcagauggccuaccgguucaacggcaucggagugacccagaaugugcuguacgagaaccagaagcugaucgccaaccaguucaacagcgccaucggcaagauccaggacagccugagcagcacagcaagcgcccugggaaagcugcaggacguggucaaccagaaugcccaggcacugaacacccuggucaagcagcuguccuccaacuucggcgccaucagcucugugcugaacgauauccugagcagacuggacaaggucgaggccgaggugcagaucgacagacugaucacaggcagacugcagagccuccagacauacgugacccagcagcugaucagagccgccgagauuagagccucugccaaucuggccgccaccaagaugucugagugugugcugggccagagcaagagaguggacuuuugcggcaagggcuaccaccugaugagcuucccucagucugccccucacggcgugguguuucugcacgugacauaugugcccgcucaagagaagaauuucaccugugcuccagccaucugccacgacggcaaagcccacuuuccuagagaaggcguguucguguccaacggcacccauugguucgugacacagcggaacuucuacgagccccagaucaucaccaccgacaacaccuucgugucuggcaacugcgacguugugaucggcauugugaacaauaccguguacgacccucugcagcccgagcuggacagcuucaaagaggaacuggacaaguacuuuaagaaccacacaagccccgacguggaccugggcgauaucagcggaaucaaugccagcgucgugaacauccagaaagagaucgaccggcugaacgagguggccaagaaucugaacgagagccugaucgaccugcaagaacuggggaaguacgagcaguacaucaagggaggcggaggaucugacaucgaccccuacaaagaguucggcagcagcuaccagcugcugaacuuccugccucuggacuucuuccccgaccugaacgcccugguggauacagccacagcucuguacgaggaagaacugaccggcagagagcacugcagcccucaccacacagccauuagacaggcccucgugugcugggacgagcugacaaaacugaucgccuggaugagcagcaacaucaccagcgagcaagugcggaccaucaucgugaaccacgugaacgauaccuggggccugaaagugcggcagagccugugguuucaccugagcugucugaccuucggccagcacaccgugcaagaguuucugguguccuucggcguguggaucagaaccccugcuccauacagaccuccaaacgcucccauccugagcacccugccugagcacacagugaucuguugaggacuagucccuguucccagagcccacuuuuuuuucuuuuuuugaaauaaaauagccugucuuucagaucucaaaggcucuuuucagagccaccaaaaaaaaaaaaaaaaaaaaaaaaaaaaaaaaaaaaaaaaaaaaaaaaaaaaaaaaaaaaaaaaaaaaaaaaaaaaaaaaaaaaaaaaaaaaaaaaaaaaa

SEQ ID NO: 12607 - RNA, 4370 nt, Artificial Sequence
  SARS-CoV-2/Wuhan/WIV05/2019__EPI_ISL_402128 spike protein mRNA gc mod (1-1211)(I714C_Y1110C) WhcAg construct
aggagagucccgcagucggcguccagcggcucugcuuguucgugugugugucguugcaggccuuauucaagcuuaccauguucguguuucuggugcugcugccccugguguccagccagugugugaaccugaccaccagaacacagcugccuccagccuacaccaacagcuucaccagaggcguguacuaccccgacaagguguucagauccagcgugcugcacucuacccaggaccuguuccugccuuucuucagcaacgugaccugguuccacgccauccacguguccggcaccaauggcaccaagagauucgacaaccccgugcugcccuucaacgacgggguguacuuugccagcaccgagaaguccaacaucaucagaggcuggaucuucggcaccacacuggacagcaagacccagagccugcugaucgugaacaacgccaccaacguggucaucaaagugugcgaguuccaguucugcaacgaccccuuccugggcgucuacuaccacaagaacaacaagagcuggauggaaagcgaguuccggguguacagcagcgccaacaacugcaccuucgaguacgugucccagccuuuccugauggaccuggaaggcaagcagggcaacuucaagaaccugcgcgaguucguguucaagaacaucgacggcuacuucaaaaucuacagcaagcacaccccuaucaaccucgugcgggaucugccucagggcuucucugcucuggaaccccugguggaucugcccaucggcaucaacaucacccgguuucagacacugcuggcccugcacagaagcuaccugacaccuggcgauagcagcagcggauggacagcuggugccgccgcuuacuaugugggcuaccugcagccuagaaccuuccugcugaaguacaacgagaacggcaccaucaccgacgccguggauugugcucuggauccucugagcgagacaaagugcacccugaaguccuucaccguggaaaagggcaucuaccagaccagcaacuuccgggugcagcccaccgaauccaucgugcgguuccccaauaucaccaaucugugccccuucggcgagguguucaaugccaccagauucgccucuguguacgccuggaaccggaagcggaucagcaauugcguggccgacuacuccgugcuguacaacuccgccagcuucagcaccuucaagugcuacggcguguccccuaccaagcugaacgaccugugcuucacaaacguguacgccgacagcuucgugauccggggagaugaagugcggcagauugccccuggacagacaggcaagaucgccgacuacaacuacaagcugcccgacgacuucaccggcugugugauugccuggaacagcaacaaccuggacuccaaagucggcggcaacuacaauuaccuguaccggcuguuccggaaguccaaucugaagcccuucgagcgggacaucagcaccgaaaucuaucaggccggcagcaccccuugcaacggcguggaaggcuucaacugcuacuucccacugcaguccuacggcuuucagcccacaaauggcgugggcuaucagcccuacagagugguggugcugagcuucgaacugcugcaugcuccugccacagugugcggcccuaagaaaagcaccaaucucgugaagaacaaaugcgugaacuucaacuucaacggccugaccggcaccggcgugcugacagagagcaacaagaaguuccugccauuccagcaguuuggccgggauaucgccgauaccacagacgccguuagagauccccagacacuggaaauccuggacaucaccccaugcagcuucggcggagugucugugaucaccccuggcaccaacaccagcaaucagguggcagugcuguaccaggacgugaacuguaccgaagugcccguggccauucacgccgaucagcugacaccuacauggcggguguacuccaccggcagcaauguguuucagaccagagccggcugucugaucggagccgagcacgugaacaauagcuacgagugcgacauccccaucggcgcuggcaucugugccagcuaccagacacagacaaacagccccagacgggcuagaagcguggccagccagagcaucauugccuacacaaugucucugggcgccgagaacagcguggccuacuccaacaacucuaucgcuugccccaccaacuucaccaucagcgugaccaccgagauccugccuguguccaugaccaagaccagcguggacugcaccauguacaucugcggcgauuccaccgagugcuccaaccugcugcugcaguacggcagcuucugcacccagcugaauagagcccugacagggaucgccguggaacaggacaagaacacccaagagguguucgcccaagugaagcaaaucuacaagaccccuccuaucaaggacuucggcggcuucaauuucagccagauucugcccgauccuagcaagcccagcaagcggagcuucaucgaggaccugcuguucaacaaagugacacuggccgacgccggcuucaucaagcaguauggcgauugucugggcgacauugccgccagggaucugauuugcgcccagaaguuuaacggacugacagugcugccuccucugcugaccgaugagaugaucgcccaguacacaucugcccugcuggccggcacaaucacaagcggcuggacauuuggagcuggcgccgcucugcagauccccuuugcuaugcagauggccuaccgguucaacggcaucggagugacccagaaugugcuguacgagaaccagaagcugaucgccaaccaguucaacagcgccaucggcaagauccaggacagccugagcagcacagcaagcgcccugggaaagcugcaggacguggucaaccagaaugcccaggcacugaacacccuggucaagcagcuguccuccaacuucggcgccaucagcucugugcugaacgauauccugagcagacuggacaaggucgaggccgaggugcagaucgacagacugaucacaggcagacugcagagccuccagacauacgugacccagcagcugaucagagccgccgagauuagagccucugccaaucuggccgccaccaagaugucugagugugugcugggccagagcaagagaguggacuuuugcggcaagggcuaccaccugaugagcuucccucagucugccccucacggcgugguguuucugcacgugacauaugugcccgcucaagagaagaauuucaccaccgcuccagccaucugccacgacggcaaagcccacuuuccuagagaaggcguguucguguccaacggcacccauugguucgugacacagcggaacuucugugagccccagaucaucaccaccgacaacaccuucgugucuggcaacugcgacguugugaucggcauugugaacaauaccguguacgacccucugcagcccgagcuggacagcuucaaagaggaacuggacaaguacuuuaagaaccacacaagccccgacguggaccugggcgauaucagcggaaucaaugccagcgucgugaacauccagaaagagaucgaccggcugaacgagguggccaagaaucugaacgagagccugaucgaccugcaagaacuggggaaguacgagcaguacaucaagggaggcggaggaucugacaucgaccccuacaaagaguucggcagcagcuaccagcugcugaacuuccugccucuggacuucuuccccgaccugaacgcccugguggauacagccacagcucuguacgaggaagaacugaccggcagagagcacugcagcccucaccacacagccauuagacaggcccucgugugcugggacgagcugacaaaacugaucgccuggaugagcagcaacaucaccagcgagcaagugcggaccaucaucgugaaccacgugaacgauaccuggggccugaaagugcggcagagccugugguuucaccugagcugucugaccuucggccagcacaccgugcaagaguuucugguguccuucggcguguggaucagaaccccugcuccauacagaccuccaaacgcucccauccugagcacccugccugagcacacagugaucuguugaggacuagucccuguucccagagcccacuuuuuuuucuuuuuuugaaauaaaauagccugucuuucagaucucaaaggcucuuuucagagccaccaaaaaaaaaaaaaaaaaaaaaaaaaaaaaaaaaaaaaaaaaaaaaaaaaaaaaaaaaaaaaaaaaaaaaaaaaaaaaaaaaaaaaaaaaaaaaaaaaaaaa

SEQ ID NO: 12608 - RNA, 4370 nt, Artificial Sequence
  SARS-CoV-2/Wuhan/WIV05/2019__EPI_ISL_402128 spike protein mRNA gc mod (1-1211)(P715C_P1069C) WhcAg construct
aggagagucccgcagucggcguccagcggcucugcuuguucgugugugugucguugcaggccuuauucaagcuuaccauguucguguuucuggugcugcugccccugguguccagccagugugugaaccugaccaccagaacacagcugccuccagccuacaccaacagcuucaccagaggcguguacuaccccgacaagguguucagauccagcgugcugcacucuacccaggaccuguuccugccuuucuucagcaacgugaccugguuccacgccauccacguguccggcaccaauggcaccaagagauucgacaaccccgugcugcccuucaacgacgggguguacuuugccagcaccgagaaguccaacaucaucagaggcuggaucuucggcaccacacuggacagcaagacccagagccugcugaucgugaacaacgccaccaacguggucaucaaagugugcgaguuccaguucugcaacgaccccuuccugggcgucuacuaccacaagaacaacaagagcuggauggaaagcgaguuccggguguacagcagcgccaacaacugcaccuucgaguacgugucccagccuuuccugauggaccuggaaggcaagcagggcaacuucaagaaccugcgcgaguucguguucaagaacaucgacggcuacuucaaaaucuacagcaagcacaccccuaucaaccucgugcgggaucugccucagggcuucucugcucuggaaccccugguggaucugcccaucggcaucaacaucacccgguuucagacacugcuggcccugcacagaagcuaccugacaccuggcgauagcagcagcggauggacagcuggugccgccgcuuacuaugugggcuaccugcagccuagaaccuuccugcugaaguacaacgagaacggcaccaucaccgacgccguggauugugcucuggauccucugagcgagacaaagugcacccugaaguccuucaccguggaaaagggcaucuaccagaccagcaacuuccgggugcagcccaccgaauccaucgugcgguuccccaauaucaccaaucugugccccuucggcgagguguucaaugccaccagauucgccucuguguacgccuggaaccggaagcggaucagcaauugcguggccgacuacuccgugcuguacaacuccgccagcuucagcaccuucaagugcuacggcguguccccuaccaagcugaacgaccugugcuucacaaacguguacgccgacagcuucgugauccggggagaugaagugcggcagauugccccuggacagacaggcaagaucgccgacuacaacuacaagcugcccgacgacuucaccggcugugugauugccuggaacagcaacaaccuggacuccaaagucggcggcaacuacaauuaccuguaccggcuguuccggaaguccaaucugaagcccuucgagcgggacaucagcaccgaaaucuaucaggccggcagcaccccuugcaacggcguggaaggcuucaacugcuacuucccacugcaguccuacggcuuucagcccacaaauggcgugggcuaucagcccuacagagugguggugcugagcuucgaacugcugcaugcuccugccacagugugcggcccuaagaaaagcaccaaucucgugaagaacaaaugcgugaacuucaacuucaacggccugaccggcaccggcgugcugacagagagcaacaagaaguuccugccauuccagcaguuuggccgggauaucgccgauaccacagacgccguuagagauccccagacacuggaaauccuggacaucaccccaugcagcuucggcggagugucugugaucaccccuggcaccaacaccagcaaucagguggcagugcuguaccaggacgugaacuguaccgaagugcccguggccauucacgccgaucagcugacaccuacauggcggguguacuccaccggcagcaauguguuucagaccagagccggcugucugaucggagccgagcacgugaacaauagcuacgagugcgacauccccaucggcgcuggcaucugugccagcuaccagacacagacaaacagccccagacgggcuagaagcguggccagccagagcaucauugccuacacaaugucucugggcgccgagaacagcguggccuacuccaacaacucuaucgcuaucugcaccaacuucaccaucagcgugaccaccgagauccugccuguguccaugaccaagaccagcguggacugcaccauguacaucugcggcgauuccaccgagugcuccaaccugcugcugcaguacggcagcuucugcacccagcugaauagagcccugacagggaucgccguggaacaggacaagaacacccaagagguguucgcccaagugaagcaaaucuacaagaccccuccuaucaaggacuucggcggcuucaauuucagccagauucugcccgauccuagcaagcccagcaagcggagcuucaucgaggaccugcuguucaacaaagugacacuggccgacgccggcuucaucaagcaguauggcgauugucugggcgacauugccgccagggaucugauuugcgcccagaaguuuaacggacugacagugcugccuccucugcugaccgaugagaugaucgcccaguacacaucugcccugcuggccggcacaaucacaagcggcuggacauuuggagcuggcgccgcucugcagauccccuuugcuaugcagauggccuaccgguucaacggcaucggagugacccagaaugugcuguacgagaaccagaagcugaucgccaaccaguucaacagcgccaucggcaagauccaggacagccugagcagcacagcaagcgcccugggaaagcugcaggacguggucaaccagaaugcccaggcacugaacacccuggucaagcagcuguccuccaacuucggcgccaucagcucugugcugaacgauauccugagcagacuggacaaggucgaggccgaggugcagaucgacagacugaucacaggcagacugcagagccuccagacauacgugacccagcagcugaucagagccgccgagauuagagccucugccaaucuggccgccaccaagaugucugagugugugcugggccagagcaagagaguggacuuuugcggcaagggcuaccaccugaugagcuucccucagucugccccucacggcgugguguuucugcacgugacauaugugugugcucaagagaagaauuucaccaccgcuccagccaucugccacgacggcaaagcccacuuuccuagagaaggcguguucguguccaacggcacccauugguucgugacacagcggaacuucuacgagccccagaucaucaccaccgacaacaccuucgugucuggcaacugcgacguugugaucggcauugugaacaauaccguguacgacccucugcagcccgagcuggacagcuucaaagaggaacuggacaaguacuuuaagaaccacacaagccccgacguggaccugggcgauaucagcggaaucaaugccagcgucgugaacauccagaaagagaucgaccggcugaacgagguggccaagaaucugaacgagagccugaucgaccugcaagaacuggggaaguacgagcaguacaucaagggaggcggaggaucugacaucgaccccuacaaagaguucggcagcagcuaccagcugcugaacuuccugccucuggacuucuuccccgaccugaacgcccugguggauacagccacagcucuguacgaggaagaacugaccggcagagagcacugcagcccucaccacacagccauuagacaggcccucgugugcugggacgagcugacaaaacugaucgccuggaugagcagcaacaucaccagcgagcaagugcggaccaucaucgugaaccacgugaacgauaccuggggccugaaagugcggcagagccugugguuucaccugagcugucugaccuucggccagcacaccgugcaagaguuucugguguccuucggcguguggaucagaaccccugcuccauacagaccuccaaacgcucccauccugagcacccugccugagcacacagugaucuguugaggacuagucccuguucccagagcccacuuuuuuuucuuuuuuugaaauaaaauagccugucuuucagaucucaaaggcucuuuucagagccaccaaaaaaaaaaaaaaaaaaaaaaaaaaaaaaaaaaaaaaaaaaaaaaaaaaaaaaaaaaaaaaaaaaaaaaaaaaaaaaaaaaaaaaaaaaaaaaaaaaaaa

SEQ ID NO: 12609 - RNA, 4370 nt, Artificial Sequence
  SARS-CoV-2/Wuhan/WIV05/2019__EPI_ISL_402128 spike protein mRNA gc mod (1-1211)(G889C_L1034C) WhcAg construct
aggagagucccgcagucggcguccagcggcucugcuuguucgugugugugucguugcaggccuuauucaagcuuaccauguucguguuucuggugcugcugccccugguguccagccagugugugaaccugaccaccagaacacagcugccuccagccuacaccaacagcuucaccagaggcguguacuaccccgacaagguguucagauccagcgugcugcacucuacccaggaccuguuccugccuuucuucagcaacgugaccugguuccacgccauccacguguccggcaccaauggcaccaagagauucgacaaccccgugcugcccuucaacgacgggguguacuuugccagcaccgagaaguccaacaucaucagaggcuggaucuucggcaccacacuggacagcaagacccagagccugcugaucgugaacaacgccaccaacguggucaucaaagugugcgaguuccaguucugcaacgaccccuuccugggcgucuacuaccacaagaacaacaagagcuggauggaaagcgaguuccggguguacagcagcgccaacaacugcaccuucgaguacgugucccagccuuuccugauggaccuggaaggcaagcagggcaacuucaagaaccugcgcgaguucguguucaagaacaucgacggcuacuucaaaaucuacagcaagcacaccccuaucaaccucgugcgggaucugccucagggcuucucugcucuggaaccccugguggaucugcccaucggcaucaacaucacccgguuucagacacugcuggcccugcacagaagcuaccugacaccuggcgauagcagcagcggauggacagcuggugccgccgcuuacuaugugggcuaccugcagccuagaaccuuccugcugaaguacaacgagaacggcaccaucaccgacgccguggauugugcucuggauccucugagcgagacaaagugcacccugaaguccuucaccguggaaaagggcaucuaccagaccagcaacuuccgggugcagcccaccgaauccaucgugcgguuccccaauaucaccaaucugugccccuucggcgagguguucaaugccaccagauucgccucuguguacgccuggaaccggaagcggaucagcaauugcguggccgacuacuccgugcuguacaacuccgccagcuucagcaccuucaagugcuacggcguguccccuaccaagcugaacgaccugugcuucacaaacguguacgccgacagcuucgugauccggggagaugaagugcggcagauugccccuggacagacaggcaagaucgccgacuacaacuacaagcugcccgacgacuucaccggcugugugauugccuggaacagcaacaaccuggacuccaaagucggcggcaacuacaauuaccuguaccggcuguuccggaaguccaaucugaagcccuucgagcgggacaucagcaccgaaaucuaucaggccggcagcaccccuugcaacggcguggaaggcuucaacugcuacuucccacugcaguccuacggcuuucagcccacaaauggcgugggcuaucagcccuacagagugguggugcugagcuucgaacugcugcaugcuccugccacagugugcggcccuaagaaaagcaccaaucucgugaagaacaaaugcgugaacuucaacuucaacggccugaccggcaccggcgugcugacagagagcaacaagaaguuccugccauuccagcaguuuggccgggauaucgccgauaccacagacgccguuagagauccccagacacuggaaauccuggacaucaccccaugcagcuucggcggagugucugugaucaccccuggcaccaacaccagcaaucagguggcagugcuguaccaggacgugaacuguaccgaagugcccguggccauucacgccgaucagcugacaccuacauggcggguguacuccaccggcagcaauguguuucagaccagagccggcugucugaucggagccgagcacgugaacaauagcuacgagugcgacauccccaucggcgcuggcaucugugccagcuaccagacacagacaaacagccccagacgggcuagaagcguggccagccagagcaucauugccuacacaaugucucugggcgccgagaacagcguggccuacuccaacaacucuaucgcuauccccaccaacuucaccaucagcgugaccaccgagauccugccuguguccaugaccaagaccagcguggacugcaccauguacaucugcggcgauuccaccgagugcuccaaccugcugcugcaguacggcagcuucugcacccagcugaauagagcccugacagggaucgccguggaacaggacaagaacacccaagagguguucgcccaagugaagcaaaucuacaagaccccuccuaucaaggacuucggcggcuucaauuucagccagauucugcccgauccuagcaagcccagcaagcggagcuucaucgaggaccugcuguucaacaaagugacacuggccgacgccggcuucaucaagcaguauggcgauugucugggcgacauugccgccagggaucugauuugcgcccagaaguuuaacggacugacagugcugccuccucugcugaccgaugagaugaucgcccaguacacaucugcccugcuggccggcacaaucacaagcggcuggacauuuugcgcuggcgccgcucugcagauccccuuugcuaugcagauggccuaccgguucaacggcaucggagugacccagaaugugcuguacgagaaccagaagcugaucgccaaccaguucaacagcgccaucggcaagauccaggacagccugagcagcacagcaagcgcccugggaaagcugcaggacguggucaaccagaaugcccaggcacugaacacccuggucaagcagcuguccuccaacuucggcgccaucagcucugugcugaacgauauccugagcagacuggacaaggucgaggccgaggugcagaucgacagacugaucacaggcagacugcagagccuccagacauacgugacccagcagcugaucagagccgccgagauuagagccucugccaaucuggccgccaccaagaugucugaguguguguguggccagagcaagagaguggacuuuugcggcaagggcuaccaccugaugagcuucccucagucugccccucacggcgugguguuucugcacgugacauaugugcccgcucaagagaagaauuucaccaccgcuccagccaucugccacgacggcaaagcccacuuuccuagagaaggcguguucguguccaacggcacccauugguucgugacacagcggaacuucuacgagccccagaucaucaccaccgacaacaccuucgugucuggcaacugcgacguugugaucggcauugugaacaauaccguguacgacccucugcagcccgagcuggacagcuucaaagaggaacuggacaaguacuuuaagaaccacacaagccccgacguggaccugggcgauaucagcggaaucaaugccagcgucgugaacauccagaaagagaucgaccggcugaacgagguggccaagaaucugaacgagagccugaucgaccugcaagaacuggggaaguacgagcaguacaucaagggaggcggaggaucugacaucgaccccuacaaagaguucggcagcagcuaccagcugcugaacuuccugccucuggacuucuuccccgaccugaacgcccugguggauacagccacagcucuguacgaggaagaacugaccggcagagagcacugcagcccucaccacacagccauuagacaggcccucgugugcugggacgagcugacaaaacugaucgccuggaugagcagcaacaucaccagcgagcaagugcggaccaucaucgugaaccacgugaacgauaccuggggccugaaagugcggcagagccugugguuucaccugagcugucugaccuucggccagcacaccgugcaagaguuucugguguccuucggcguguggaucagaaccccugcuccauacagaccuccaaacgcucccauccugagcacccugccugagcacacagugaucuguugaggacuagucccuguucccagagcccacuuuuuuuucuuuuuuugaaauaaaauagccugucuuucagaucucaaaggcucuuuucagagccaccaaaaaaaaaaaaaaaaaaaaaaaaaaaaaaaaaaaaaaaaaaaaaaaaaaaaaaaaaaaaaaaaaaaaaaaaaaaaaaaaaaaaaaaaaaaaaaaaaaaaa

SEQ ID NO: 12610 - RNA, 4370 nt, Artificial Sequence
  SARS-CoV-2/Wuhan/WIV05/2019__EPI_ISL_402128 spike protein mRNA gc mod (1-1211)(I909C_Y1047C) WhcAg construct
aggagagucccgcagucggcguccagcggcucugcuuguucgugugugugucguugcaggccuuauucaagcuuaccauguucguguuucuggugcugcugccccugguguccagccagugugugaaccugaccaccagaacacagcugccuccagccuacaccaacagcuucaccagaggcguguacuaccccgacaagguguucagauccagcgugcugcacucuacccaggaccuguuccugccuuucuucagcaacgugaccugguuccacgccauccacguguccggcaccaauggcaccaagagauucgacaaccccgugcugcccuucaacgacgggguguacuuugccagcaccgagaaguccaacaucaucagaggcuggaucuucggcaccacacuggacagcaagacccagagccugcugaucgugaacaacgccaccaacguggucaucaaagugugcgaguuccaguucugcaacgaccccuuccugggcgucuacuaccacaagaacaacaagagcuggauggaaagcgaguuccggguguacagcagcgccaacaacugcaccuucgaguacgugucccagccuuuccugauggaccuggaaggcaagcagggcaacuucaagaaccugcgcgaguucguguucaagaacaucgacggcuacuucaaaaucuacagcaagcacaccccuaucaaccucgugcgggaucugccucagggcuucucugcucuggaaccccugguggaucugcccaucggcaucaacaucacccgguuucagacacugcuggcccugcacagaagcuaccugacaccuggcgauagcagcagcggauggacagcuggugccgccgcuuacuaugugggcuaccugcagccuagaaccuuccugcugaaguacaacgagaacggcaccaucaccgacgccguggauugugcucuggauccucugagcgagacaaagugcacccugaaguccuucaccguggaaaagggcaucuaccagaccagcaacuuccgggugcagcccaccgaauccaucgugcgguuccccaauaucaccaaucugugccccuucggcgagguguucaaugccaccagauucgccucuguguacgccuggaaccggaagcggaucagcaauugcguggccgacuacuccgugcuguacaacuccgccagcuucagcaccuucaagugcuacggcguguccccuaccaagcugaacgaccugugcuucacaaacguguacgccgacagcuucgugauccggggagaugaagugcggcagauugccccuggacagacaggcaagaucgccgacuacaacuacaagcugcccgacgacuucaccggcugugugauugccuggaacagcaacaaccuggacuccaaagucggcggcaacuacaauuaccuguaccggcuguuccggaaguccaaucugaagcccuucgagcgggacaucagcaccgaaaucuaucaggccggcagcaccccuugcaacggcguggaaggcuucaacugcuacuucccacugcaguccuacggcuuucagcccacaaauggcgugggcuaucagcccuacagagugguggugcugagcuucgaacugcugcaugcuccugccacagugugcggcccuaagaaaagcaccaaucucgugaagaacaaaugcgugaacuucaacuucaacggccugaccggcaccggcgugcugacagagagcaacaagaaguuccugccauuccagcaguuuggccgggauaucgccgauaccacagacgccguuagagauccccagacacuggaaauccuggacaucaccccaugcagcuucggcggagugucugugaucaccccuggcaccaacaccagcaaucagguggcagugcuguaccaggacgugaacuguaccgaagugcccguggccauucacgccgaucagcugacaccuacauggcggguguacuccaccggcagcaauguguuucagaccagagccggcugucugaucggagccgagcacgugaacaauagcuacgagugcgacauccccaucggcgcuggcaucugugccagcuaccagacacagacaaacagccccagacgggcuagaagcguggccagccagagcaucauugccuacacaaugucucugggcgccgagaacagcguggccuacuccaacaacucuaucgcuauccccaccaacuucaccaucagcgugaccaccgagauccugccuguguccaugaccaagaccagcguggacugcaccauguacaucugcggcgauuccaccgagugcuccaaccugcugcugcaguacggcagcuucugcacccagcugaauagagcccugacagggaucgccguggaacaggacaagaacacccaagagguguucgcccaagugaagcaaaucuacaagaccccuccuaucaaggacuucggcggcuucaauuucagccagauucugcccgauccuagcaagcccagcaagcggagcuucaucgaggaccugcuguucaacaaagugacacuggccgacgccggcuucaucaagcaguauggcgauugucugggcgacauugccgccagggaucugauuugcgcccagaaguuuaacggacugacagugcugccuccucugcugaccgaugagaugaucgcccaguacacaucugcccugcuggccggcacaaucacaagcggcuggacauuuggagcuggcgccgcucugcagauccccuuugcuaugcagauggccuaccgguucaacggcugcggagugacccagaaugugcuguacgagaaccagaagcugaucgccaaccaguucaacagcgccaucggcaagauccaggacagccugagcagcacagcaagcgcccugggaaagcugcaggacguggucaaccagaaugcccaggcacugaacacccuggucaagcagcuguccuccaacuucggcgccaucagcucugugcugaacgauauccugagcagacuggacaaggucgaggccgaggugcagaucgacagacugaucacaggcagacugcagagccuccagacauacgugacccagcagcugaucagagccgccgagauuagagccucugccaaucuggccgccaccaagaugucugagugugugcugggccagagcaagagaguggacuuuugcggcaagggcugucaccugaugagcuucccucagucugccccucacggcgugguguuucugcacgugacauaugugcccgcucaagagaagaauuucaccaccgcuccagccaucugccacgacggcaaagcccacuuuccuagagaaggcguguucguguccaacggcacccauugguucgugacacagcggaacuucuacgagccccagaucaucaccaccgacaacaccuucgugucuggcaacugcgacguugugaucggcauugugaacaauaccguguacgacccucugcagcccgagcuggacagcuucaaagaggaacuggacaaguacuuuaagaaccacacaagccccgacguggaccugggcgauaucagcggaaucaaugccagcgucgugaacauccagaaagagaucgaccggcugaacgagguggccaagaaucugaacgagagccugaucgaccugcaagaacuggggaaguacgagcaguacaucaagggaggcggaggaucugacaucgaccccuacaaagaguucggcagcagcuaccagcugcugaacuuccugccucuggacuucuuccccgaccugaacgcccugguggauacagccacagcucuguacgaggaagaacugaccggcagagagcacugcagcccucaccacacagccauuagacaggcccucgugugcugggacgagcugacaaaacugaucgccuggaugagcagcaacaucaccagcgagcaagugcggaccaucaucgugaaccacgugaacgauaccuggggccugaaagugcggcagagccugugguuucaccugagcugucugaccuucggccagcacaccgugcaagaguuucugguguccuucggcguguggaucagaaccccugcuccauacagaccuccaaacgcucccauccugagcacccugccugagcacacagugaucuguugaggacuagucccuguucccagagcccacuuuuuuuucuuuuuuugaaauaaaauagccugucuuucagaucucaaaggcucuuuucagagccaccaaaaaaaaaaaaaaaaaaaaaaaaaaaaaaaaaaaaaaaaaaaaaaaaaaaaaaaaaaaaaaaaaaaaaaaaaaaaaaaaaaaaaaaaaaaaaaaaaaaaa

SEQ ID NO: 12611 - RNA, 4370 nt, Artificial Sequence
  SARS-CoV-2/Wuhan/WIV05/2019__EPI_ISL_402128 spike protein mRNA gc mod (1-1211)(Q965C_S1003C) WhcAg construct
aggagagucccgcagucggcguccagcggcucugcuuguucgugugugugucguugcaggccuuauucaagcuuaccauguucguguuucuggugcugcugccccugguguccagccagugugugaaccugaccaccagaacacagcugccuccagccuacaccaacagcuucaccagaggcguguacuaccccgacaagguguucagauccagcgugcugcacucuacccaggaccuguuccugccuuucuucagcaacgugaccugguuccacgccauccacguguccggcaccaauggcaccaagagauucgacaaccccgugcugcccuucaacgacgggguguacuuugccagcaccgagaaguccaacaucaucagaggcuggaucuucggcaccacacuggacagcaagacccagagccugcugaucgugaacaacgccaccaacguggucaucaaagugugcgaguuccaguucugcaacgaccccuuccugggcgucuacuaccacaagaacaacaagagcuggauggaaagcgaguuccggguguacagcagcgccaacaacugcaccuucgaguacgugucccagccuuuccugauggaccuggaaggcaagcagggcaacuucaagaaccugcgcgaguucguguucaagaacaucgacggcuacuucaaaaucuacagcaagcacaccccuaucaaccucgugcgggaucugccucagggcuucucugcucuggaaccccugguggaucugcccaucggcaucaacaucacccgguuucagacacugcuggcccugcacagaagcuaccugacaccuggcgauagcagcagcggauggacagcuggugccgccgcuuacuaugugggcuaccugcagccuagaaccuuccugcugaaguacaacgagaacggcaccaucaccgacgccguggauugugcucuggauccucugagcgagacaaagugcacccugaaguccuucaccguggaaaagggcaucuaccagaccagcaacuuccgggugcagcccaccgaauccaucgugcgguuccccaauaucaccaaucugugccccuucggcgagguguucaaugccaccagauucgccucuguguacgccuggaaccggaagcggaucagcaauugcguggccgacuacuccgugcuguacaacuccgccagcuucagcaccuucaagugcuacggcguguccccuaccaagcugaacgaccugugcuucacaaacguguacgccgacagcuucgugauccggggagaugaagugcggcagauugccccuggacagacaggcaagaucgccgacuacaacuacaagcugcccgacgacuucaccggcugugugauugccuggaacagcaacaaccuggacuccaaagucggcggcaacuacaauuaccuguaccggcuguuccggaaguccaaucugaagcccuucgagcgggacaucagcaccgaaaucuaucaggccggcagcaccccuugcaacggcguggaaggcuucaacugcuacuucccacugcaguccuacggcuuucagcccacaaauggcgugggcuaucagcccuacagagugguggugcugagcuucgaacugcugcaugcuccugccacagugugcggcccuaagaaaagcaccaaucucgugaagaacaaaugcgugaacuucaacuucaacggccugaccggcaccggcgugcugacagagagcaacaagaaguuccugccauuccagcaguuuggccgggauaucgccgauaccacagacgccguuagagauccccagacacuggaaauccuggacaucaccccaugcagcuucggcggagugucugugaucaccccuggcaccaacaccagcaaucagguggcagugcuguaccaggacgugaacuguaccgaagugcccguggccauucacgccgaucagcugacaccuacauggcggguguacuccaccggcagcaauguguuucagaccagagccggcugucugaucggagccgagcacgugaacaauagcuacgagugcgacauccccaucggcgcuggcaucugugccagcuaccagacacagacaaacagccccagacgggcuagaagcguggccagccagagcaucauugccuacacaaugucucugggcgccgagaacagcguggccuacuccaacaacucuaucgcuauccccaccaacuucaccaucagcgugaccaccgagauccugccuguguccaugaccaagaccagcguggacugcaccauguacaucugcggcgauuccaccgagugcuccaaccugcugcugcaguacggcagcuucugcacccagcugaauagagcccugacagggaucgccguggaacaggacaagaacacccaagagguguucgcccaagugaagcaaaucuacaagaccccuccuaucaaggacuucggcggcuucaauuucagccagauucugcccgauccuagcaagcccagcaagcggagcuucaucgaggaccugcuguucaacaaagugacacuggccgacgccggcuucaucaagcaguauggcgauugucugggcgacauugccgccagggaucugauuugcgcccagaaguuuaacggacugacagugcugccuccucugcugaccgaugagaugaucgcccaguacacaucugcccugcuggccggcacaaucacaagcggcuggacauuuggagcuggcgccgcucugcagauccccuuugcuaugcagauggccuaccgguucaacggcaucggagugacccagaaugugcuguacgagaaccagaagcugaucgccaaccaguucaacagcgccaucggcaagauccaggacagccugagcagcacagcaagcgcccugggaaagcugcaggacguggucaaccagaaugcccaggcacugaacacccuggucaagugccuguccuccaacuucggcgccaucagcucugugcugaacgauauccugagcagacuggacaaggucgaggccgaggugcagaucgacagacugaucacaggcagacugcagugucuccagacauacgugacccagcagcugaucagagccgccgagauuagagccucugccaaucuggccgccaccaagaugucugagugugugcugggccagagcaagagaguggacuuuugcggcaagggcuaccaccugaugagcuucccucagucugccccucacggcgugguguuucugcacgugacauaugugcccgcucaagagaagaauuucaccaccgcuccagccaucugccacgacggcaaagcccacuuuccuagagaaggcguguucguguccaacggcacccauugguucgugacacagcggaacuucuacgagccccagaucaucaccaccgacaacaccuucgugucuggcaacugcgacguugugaucggcauugugaacaauaccguguacgacccucugcagcccgagcuggacagcuucaaagaggaacuggacaaguacuuuaagaaccacacaagccccgacguggaccugggcgauaucagcggaaucaaugccagcgucgugaacauccagaaagagaucgaccggcugaacgagguggccaagaaucugaacgagagccugaucgaccugcaagaacuggggaaguacgagcaguacaucaagggaggcggaggaucugacaucgaccccuacaaagaguucggcagcagcuaccagcugcugaacuuccugccucuggacuucuuccccgaccugaacgcccugguggauacagccacagcucuguacgaggaagaacugaccggcagagagcacugcagcccucaccacacagccauuagacaggcccucgugugcugggacgagcugacaaaacugaucgccuggaugagcagcaacaucaccagcgagcaagugcggaccaucaucgugaaccacgugaacgauaccuggggccugaaagugcggcagagccugugguuucaccugagcugucugaccuucggccagcacaccgugcaagaguuucugguguccuucggcguguggaucagaaccccugcuccauacagaccuccaaacgcucccauccugagcacccugccugagcacacagugaucuguugaggacuagucccuguucccagagcccacuuuuuuuucuuuuuuugaaauaaaauagccugucuuucagaucucaaaggcucuuuucagagccaccaaaaaaaaaaaaaaaaaaaaaaaaaaaaaaaaaaaaaaaaaaaaaaaaaaaaaaaaaaaaaaaaaaaaaaaaaaaaaaaaaaaaaaaaaaaaaaaaaaaaa

SEQ ID NO: 12612 - RNA, 4370 nt, Artificial Sequence
  SARS-CoV-2/Wuhan/WIV05/2019__EPI_ISL_402128 spike protein mRNA gc mod (1-1211)(F970C_G999C) WhcAg construct
aggagagucccgcagucggcguccagcggcucugcuuguucgugugugugucguugcaggccuuauucaagcuuaccauguucguguuucuggugcugcugccccugguguccagccagugugugaaccugaccaccagaacacagcugccuccagccuacaccaacagcuucaccagaggcguguacuaccccgacaagguguucagauccagcgugcugcacucuacccaggaccuguuccugccuuucuucagcaacgugaccugguuccacgccauccacguguccggcaccaauggcaccaagagauucgacaaccccgugcugcccuucaacgacgggguguacuuugccagcaccgagaaguccaacaucaucagaggcuggaucuucggcaccacacuggacagcaagacccagagccugcugaucgugaacaacgccaccaacguggucaucaaagugugcgaguuccaguucugcaacgaccccuuccugggcgucuacuaccacaagaacaacaagagcuggauggaaagcgaguuccggguguacagcagcgccaacaacugcaccuucgaguacgugucccagccuuuccugauggaccuggaaggcaagcagggcaacuucaagaaccugcgcgaguucguguucaagaacaucgacggcuacuucaaaaucuacagcaagcacaccccuaucaaccucgugcgggaucugccucagggcuucucugcucuggaaccccugguggaucugcccaucggcaucaacaucacccgguuucagacacugcuggcccugcacagaagcuaccugacaccuggcgauagcagcagcggauggacagcuggugccgccgcuuacuaugugggcuaccugcagccuagaaccuuccugcugaaguacaacgagaacggcaccaucaccgacgccguggauugugcucuggauccucugagcgagacaaagugcacccugaaguccuucaccguggaaaagggcaucuaccagaccagcaacuuccgggugcagcccaccgaauccaucgugcgguuccccaauaucaccaaucugugccccuucggcgagguguucaaugccaccagauucgccucuguguacgccuggaaccggaagcggaucagcaauugcguggccgacuacuccgugcuguacaacuccgccagcuucagcaccuucaagugcuacggcguguccccuaccaagcugaacgaccugugcuucacaaacguguacgccgacagcuucgugauccggggagaugaagugcggcagauugccccuggacagacaggcaagaucgccgacuacaacuacaagcugcccgacgacuucaccggcugugugauugccuggaacagcaacaaccuggacuccaaagucggcggcaacuacaauuaccuguaccggcuguuccggaaguccaaucugaagcccuucgagcgggacaucagcaccgaaaucuaucaggccggcagcaccccuugcaacggcguggaaggcuucaacugcuacuucccacugcaguccuacggcuuucagcccacaaauggcgugggcuaucagcccuacagagugguggugcugagcuucgaacugcugcaugcuccugccacagugugcggcccuaagaaaagcaccaaucucgugaagaacaaaugcgugaacuucaacuucaacggccugaccggcaccggcgugcugacagagagcaacaagaaguuccugccauuccagcaguuuggccgggauaucgccgauaccacagacgccguuagagauccccagacacuggaaauccuggacaucaccccaugcagcuucggcggagugucugugaucaccccuggcaccaacaccagcaaucagguggcagugcuguaccaggacgugaacuguaccgaagugcccguggccauucacgccgaucagcugacaccuacauggcggguguacuccaccggcagcaauguguuucagaccagagccggcugucugaucggagccgagcacgugaacaauagcuacgagugcgacauccccaucggcgcuggcaucugugccagcuaccagacacagacaaacagccccagacgggcuagaagcguggccagccagagcaucauugccuacacaaugucucugggcgccgagaacagcguggccuacuccaacaacucuaucgcuauccccaccaacuucaccaucagcgugaccaccgagauccugccuguguccaugaccaagaccagcguggacugcaccauguacaucugcggcgauuccaccgagugcuccaaccugcugcugcaguacggcagcuucugcacccagcugaauagagcccugacagggaucgccguggaacaggacaagaacacccaagagguguucgcccaagugaagcaaaucuacaagaccccuccuaucaaggacuucggcggcuucaauuucagccagauucugcccgauccuagcaagcccagcaagcggagcuucaucgaggaccugcuguucaacaaagugacacuggccgacgccggcuucaucaagcaguauggcgauugucugggcgacauugccgccagggaucugauuugcgcccagaaguuuaacggacugacagugcugccuccucugcugaccgaugagaugaucgcccaguacacaucugcccugcuggccggcacaaucacaagcggcuggacauuuggagcuggcgccgcucugcagauccccuuugcuaugcagauggccuaccgguucaacggcaucggagugacccagaaugugcuguacgagaaccagaagcugaucgccaaccaguucaacagcgccaucggcaagauccaggacagccugagcagcacagcaagcgcccugggaaagcugcaggacguggucaaccagaaugcccaggcacugaacacccuggucaagcagcuguccuccaacugcggcgccaucagcucugugcugaacgauauccugagcagacuggacaaggucgaggccgaggugcagaucgacagacugaucacauguagacugcagagccuccagacauacgugacccagcagcugaucagagccgccgagauuagagccucugccaaucuggccgccaccaagaugucugagugugugcugggccagagcaagagaguggacuuuugcggcaagggcuaccaccugaugagcuucccucagucugccccucacggcgugguguuucugcacgugacauaugugcccgcucaagagaagaauuucaccaccgcuccagccaucugccacgacggcaaagcccacuuuccuagagaaggcguguucguguccaacggcacccauugguucgugacacagcggaacuucuacgagccccagaucaucaccaccgacaacaccuucgugucuggcaacugcgacguugugaucggcauugugaacaauaccguguacgacccucugcagcccgagcuggacagcuucaaagaggaacuggacaaguacuuuaagaaccacacaagccccgacguggaccugggcgauaucagcggaaucaaugccagcgucgugaacauccagaaagagaucgaccggcugaacgagguggccaagaaucugaacgagagccugaucgaccugcaagaacuggggaaguacgagcaguacaucaagggaggcggaggaucugacaucgaccccuacaaagaguucggcagcagcuaccagcugcugaacuuccugccucuggacuucuuccccgaccugaacgcccugguggauacagccacagcucuguacgaggaagaacugaccggcagagagcacugcagcccucaccacacagccauuagacaggcccucgugugcugggacgagcugacaaaacugaucgccuggaugagcagcaacaucaccagcgagcaagugcggaccaucaucgugaaccacgugaacgauaccuggggccugaaagugcggcagagccugugguuucaccugagcugucugaccuucggccagcacaccgugcaagaguuucugguguccuucggcguguggaucagaaccccugcuccauacagaccuccaaacgcucccauccugagcacccugccugagcacacagugaucuguugaggacuagucccuguucccagagcccacuuuuuuuucuuuuuuugaaauaaaauagccugucuuucagaucucaaaggcucuuuucagagccaccaaaaaaaaaaaaaaaaaaaaaaaaaaaaaaaaaaaaaaaaaaaaaaaaaaaaaaaaaaaaaaaaaaaaaaaaaaaaaaaaaaaaaaaaaaaaaaaaaaaaa

SEQ ID NO: 12613 - RNA, 4370 nt, Artificial Sequence
  SARS-CoV-2/Wuhan/WIV05/2019__EPI_ISL_402128 spike protein mRNA gc mod (1-1211)(A972C_R995C) WhcAg construct
aggagagucccgcagucggcguccagcggcucugcuuguucgugugugugucguugcaggccuuauucaagcuuaccauguucguguuucuggugcugcugccccugguguccagccagugugugaaccugaccaccagaacacagcugccuccagccuacaccaacagcuucaccagaggcguguacuaccccgacaagguguucagauccagcgugcugcacucuacccaggaccuguuccugccuuucuucagcaacgugaccugguuccacgccauccacguguccggcaccaauggcaccaagagauucgacaaccccgugcugcccuucaacgacgggguguacuuugccagcaccgagaaguccaacaucaucagaggcuggaucuucggcaccacacuggacagcaagacccagagccugcugaucgugaacaacgccaccaacguggucaucaaagugugcgaguuccaguucugcaacgaccccuuccugggcgucuacuaccacaagaacaacaagagcuggauggaaagcgaguuccggguguacagcagcgccaacaacugcaccuucgaguacgugucccagccuuuccugauggaccuggaaggcaagcagggcaacuucaagaaccugcgcgaguucguguucaagaacaucgacggcuacuucaaaaucuacagcaagcacaccccuaucaaccucgugcgggaucugccucagggcuucucugcucuggaaccccugguggaucugcccaucggcaucaacaucacccgguuucagacacugcuggcccugcacagaagcuaccugacaccuggcgauagcagcagcggauggacagcuggugccgccgcuuacuaugugggcuaccugcagccuagaaccuuccugcugaaguacaacgagaacggcaccaucaccgacgccguggauugugcucuggauccucugagcgagacaaagugcacccugaaguccuucaccguggaaaagggcaucuaccagaccagcaacuuccgggugcagcccaccgaauccaucgugcgguuccccaauaucaccaaucugugccccuucggcgagguguucaaugccaccagauucgccucuguguacgccuggaaccggaagcggaucagcaauugcguggccgacuacuccgugcuguacaacuccgccagcuucagcaccuucaagugcuacggcguguccccuaccaagcugaacgaccugugcuucacaaacguguacgccgacagcuucgugauccggggagaugaagugcggcagauugccccuggacagacaggcaagaucgccgacuacaacuacaagcugcccgacgacuucaccggcugugugauugccuggaacagcaacaaccuggacuccaaagucggcggcaacuacaauuaccuguaccggcuguuccggaaguccaaucugaagcccuucgagcgggacaucagcaccgaaaucuaucaggccggcagcaccccuugcaacggcguggaaggcuucaacugcuacuucccacugcaguccuacggcuuucagcccacaaauggcgugggcuaucagcccuacagagugguggugcugagcuucgaacugcugcaugcuccugccacagugugcggcccuaagaaaagcaccaaucucgugaagaacaaaugcgugaacuucaacuucaacggccugaccggcaccggcgugcugacagagagcaacaagaaguuccugccauuccagcaguuuggccgggauaucgccgauaccacagacgccguuagagauccccagacacuggaaauccuggacaucaccccaugcagcuucggcggagugucugugaucaccccuggcaccaacaccagcaaucagguggcagugcuguaccaggacgugaacuguaccgaagugcccguggccauucacgccgaucagcugacaccuacauggcggguguacuccaccggcagcaauguguuucagaccagagccggcugucugaucggagccgagcacgugaacaauagcuacgagugcgacauccccaucggcgcuggcaucugugccagcuaccagacacagacaaacagccccagacgggcuagaagcguggccagccagagcaucauugccuacacaaugucucugggcgccgagaacagcguggccuacuccaacaacucuaucgcuauccccaccaacuucaccaucagcgugaccaccgagauccugccuguguccaugaccaagaccagcguggacugcaccauguacaucugcggcgauuccaccgagugcuccaaccugcugcugcaguacggcagcuucugcacccagcugaauagagcccugacagggaucgccguggaacaggacaagaacacccaagagguguucgcccaagugaagcaaaucuacaagaccccuccuaucaaggacuucggcggcuucaauuucagccagauucugcccgauccuagcaagcccagcaagcggagcuucaucgaggaccugcuguucaacaaagugacacuggccgacgccggcuucaucaagcaguauggcgauugucugggcgacauugccgccagggaucugauuugcgcccagaaguuuaacggacugacagugcugccuccucugcugaccgaugagaugaucgcccaguacacaucugcccugcuggccggcacaaucacaagcggcuggacauuuggagcuggcgccgcucugcagauccccuuugcuaugcagauggccuaccgguucaacggcaucggagugacccagaaugugcuguacgagaaccagaagcugaucgccaaccaguucaacagcgccaucggcaagauccaggacagccugagcagcacagcaagcgcccugggaaagcugcaggacguggucaaccagaaugcccaggcacugaacacccuggucaagcagcuguccuccaacuucggcugcaucagcucugugcugaacgauauccugagcagacuggacaaggucgaggccgaggugcagaucgacugucugaucacaggcagacugcagagccuccagacauacgugacccagcagcugaucagagccgccgagauuagagccucugccaaucuggccgccaccaagaugucugagugugugcugggccagagcaagagaguggacuuuugcggcaagggcuaccaccugaugagcuucccucagucugccccucacggcgugguguuucugcacgugacauaugugcccgcucaagagaagaauuucaccaccgcuccagccaucugccacgacggcaaagcccacuuuccuagagaaggcguguucguguccaacggcacccauugguucgugacacagcggaacuucuacgagccccagaucaucaccaccgacaacaccuucgugucuggcaacugcgacguugugaucggcauugugaacaauaccguguacgacccucugcagcccgagcuggacagcuucaaagaggaacuggacaaguacuuuaagaaccacacaagccccgacguggaccugggcgauaucagcggaaucaaugccagcgucgugaacauccagaaagagaucgaccggcugaacgagguggccaagaaucugaacgagagccugaucgaccugcaagaacuggggaaguacgagcaguacaucaagggaggcggaggaucugacaucgaccccuacaaagaguucggcagcagcuaccagcugcugaacuuccugccucuggacuucuuccccgaccugaacgcccugguggauacagccacagcucuguacgaggaagaacugaccggcagagagcacugcagcccucaccacacagccauuagacaggcccucgugugcugggacgagcugacaaaacugaucgccuggaugagcagcaacaucaccagcgagcaagugcggaccaucaucgugaaccacgugaacgauaccuggggccugaaagugcggcagagccugugguuucaccugagcugucugaccuucggccagcacaccgugcaagaguuucugguguccuucggcguguggaucagaaccccugcuccauacagaccuccaaacgcucccauccugagcacccugccugagcacacagugaucuguugaggacuagucccuguucccagagcccacuuuuuuuucuuuuuuugaaauaaaauagccugucuuucagaucucaaaggcucuuuucagagccaccaaaaaaaaaaaaaaaaaaaaaaaaaaaaaaaaaaaaaaaaaaaaaaaaaaaaaaaaaaaaaaaaaaaaaaaaaaaaaaaaaaaaaaaaaaaaaaaaaaaaa

SEQ ID NO: 12614 - RNA, 4370 nt, Artificial Sequence
  SARS-CoV-2/Wuhan/WIV05/2019__EPI_ISL_402128 spike protein mRNA gc mod (1-1211)(A890C_V1040C) WhcAg construct
aggagagucccgcagucggcguccagcggcucugcuuguucgugugugugucguugcaggccuuauucaagcuuaccauguucguguuucuggugcugcugccccugguguccagccagugugugaaccugaccaccagaacacagcugccuccagccuacaccaacagcuucaccagaggcguguacuaccccgacaagguguucagauccagcgugcugcacucuacccaggaccuguuccugccuuucuucagcaacgugaccugguuccacgccauccacguguccggcaccaauggcaccaagagauucgacaaccccgugcugcccuucaacgacgggguguacuuugccagcaccgagaaguccaacaucaucagaggcuggaucuucggcaccacacuggacagcaagacccagagccugcugaucgugaacaacgccaccaacguggucaucaaagugugcgaguuccaguucugcaacgaccccuuccugggcgucuacuaccacaagaacaacaagagcuggauggaaagcgaguuccggguguacagcagcgccaacaacugcaccuucgaguacgugucccagccuuuccugauggaccuggaaggcaagcagggcaacuucaagaaccugcgcgaguucguguucaagaacaucgacggcuacuucaaaaucuacagcaagcacaccccuaucaaccucgugcgggaucugccucagggcuucucugcucuggaaccccugguggaucugcccaucggcaucaacaucacccgguuucagacacugcuggcccugcacagaagcuaccugacaccuggcgauagcagcagcggauggacagcuggugccgccgcuuacuaugugggcuaccugcagccuagaaccuuccugcugaaguacaacgagaacggcaccaucaccgacgccguggauugugcucuggauccucugagcgagacaaagugcacccugaaguccuucaccguggaaaagggcaucuaccagaccagcaacuuccgggugcagcccaccgaauccaucgugcgguuccccaauaucaccaaucugugccccuucggcgagguguucaaugccaccagauucgccucuguguacgccuggaaccggaagcggaucagcaauugcguggccgacuacuccgugcuguacaacuccgccagcuucagcaccuucaagugcuacggcguguccccuaccaagcugaacgaccugugcuucacaaacguguacgccgacagcuucgugauccggggagaugaagugcggcagauugccccuggacagacaggcaagaucgccgacuacaacuacaagcugcccgacgacuucaccggcugugugauugccuggaacagcaacaaccuggacuccaaagucggcggcaacuacaauuaccuguaccggcuguuccggaaguccaaucugaagcccuucgagcgggacaucagcaccgaaaucuaucaggccggcagcaccccuugcaacggcguggaaggcuucaacugcuacuucccacugcaguccuacggcuuucagcccacaaauggcgugggcuaucagcccuacagagugguggugcugagcuucgaacugcugcaugcuccugccacagugugcggcccuaagaaaagcaccaaucucgugaagaacaaaugcgugaacuucaacuucaacggccugaccggcaccggcgugcugacagagagcaacaagaaguuccugccauuccagcaguuuggccgggauaucgccgauaccacagacgccguuagagauccccagacacuggaaauccuggacaucaccccaugcagcuucggcggagugucugugaucaccccuggcaccaacaccagcaaucagguggcagugcuguaccaggacgugaacuguaccgaagugcccguggccauucacgccgaucagcugacaccuacauggcggguguacuccaccggcagcaauguguuucagaccagagccggcugucugaucggagccgagcacgugaacaauagcuacgagugcgacauccccaucggcgcuggcaucugugccagcuaccagacacagacaaacagccccagacgggcuagaagcguggccagccagagcaucauugccuacacaaugucucugggcgccgagaacagcguggccuacuccaacaacucuaucgcuauccccaccaacuucaccaucagcgugaccaccgagauccugccuguguccaugaccaagaccagcguggacugcaccauguacaucugcggcgauuccaccgagugcuccaaccugcugcugcaguacggcagcuucugcacccagcugaauagagcccugacagggaucgccguggaacaggacaagaacacccaagagguguucgcccaagugaagcaaaucuacaagaccccuccuaucaaggacuucggcggcuucaauuucagccagauucugcccgauccuagcaagcccagcaagcggagcuucaucgaggaccugcuguucaacaaagugacacuggccgacgccggcuucaucaagcaguauggcgauugucugggcgacauugccgccagggaucugauuugcgcccagaaguuuaacggacugacagugcugccuccucugcugaccgaugagaugaucgcccaguacacaucugcccugcuggccggcacaaucacaagcggcuggacauuuggaugcggcgccgcucugcagauccccuuugcuaugcagauggccuaccgguucaacggcaucggagugacccagaaugugcuguacgagaaccagaagcugaucgccaaccaguucaacagcgccaucggcaagauccaggacagccugagcagcacagcaagcgcccugggaaagcugcaggacguggucaaccagaaugcccaggcacugaacacccuggucaagcagcuguccuccaacuucggcgccaucagcucugugcugaacgauauccugagcagacuggacaaggucgaggccgaggugcagaucgacagacugaucacaggcagacugcagagccuccagacauacgugacccagcagcugaucagagccgccgagauuagagccucugccaaucuggccgccaccaagaugucugagugugugcugggccagagcaagagaugugacuuuugcggcaagggcuaccaccugaugagcuucccucagucugccccucacggcgugguguuucugcacgugacauaugugcccgcucaagagaagaauuucaccaccgcuccagccaucugccacgacggcaaagcccacuuuccuagagaaggcguguucguguccaacggcacccauugguucgugacacagcggaacuucuacgagccccagaucaucaccaccgacaacaccuucgugucuggcaacugcgacguugugaucggcauugugaacaauaccguguacgacccucugcagcccgagcuggacagcuucaaagaggaacuggacaaguacuuuaagaaccacacaagccccgacguggaccugggcgauaucagcggaaucaaugccagcgucgugaacauccagaaagagaucgaccggcugaacgagguggccaagaaucugaacgagagccugaucgaccugcaagaacuggggaaguacgagcaguacaucaagggaggcggaggaucugacaucgaccccuacaaagaguucggcagcagcuaccagcugcugaacuuccugccucuggacuucuuccccgaccugaacgcccugguggauacagccacagcucuguacgaggaagaacugaccggcagagagcacugcagcccucaccacacagccauuagacaggcccucgugugcugggacgagcugacaaaacugaucgccuggaugagcagcaacaucaccagcgagcaagugcggaccaucaucgugaaccacgugaacgauaccuggggccugaaagugcggcagagccugugguuucaccugagcugucugaccuucggccagcacaccgugcaagaguuucugguguccuucggcguguggaucagaaccccugcuccauacagaccuccaaacgcucccauccugagcacccugccugagcacacagugaucuguugaggacuagucccuguucccagagcccacuuuuuuuucuuuuuuugaaauaaaauagccugucuuucagaucucaaaggcucuuuucagagccaccaaaaaaaaaaaaaaaaaaaaaaaaaaaaaaaaaaaaaaaaaaaaaaaaaaaaaaaaaaaaaaaaaaaaaaaaaaaaaaaaaaaaaaaaaaaaaaaaaaaaa

SEQ ID NO: 12615 - RNA, 4370 nt, Artificial Sequence
  SARS-CoV-2/Wuhan/WIV05/2019__EPI_ISL_402128 spike protein mRNA gc mod (1-1211)(T874C_S1055C) WhcAg construct
aggagagucccgcagucggcguccagcggcucugcuuguucgugugugugucguugcaggccuuauucaagcuuaccauguucguguuucuggugcugcugccccugguguccagccagugugugaaccugaccaccagaacacagcugccuccagccuacaccaacagcuucaccagaggcguguacuaccccgacaagguguucagauccagcgugcugcacucuacccaggaccuguuccugccuuucuucagcaacgugaccugguuccacgccauccacguguccggcaccaauggcaccaagagauucgacaaccccgugcugcccuucaacgacgggguguacuuugccagcaccgagaaguccaacaucaucagaggcuggaucuucggcaccacacuggacagcaagacccagagccugcugaucgugaacaacgccaccaacguggucaucaaagugugcgaguuccaguucugcaacgaccccuuccugggcgucuacuaccacaagaacaacaagagcuggauggaaagcgaguuccggguguacagcagcgccaacaacugcaccuucgaguacgugucccagccuuuccugauggaccuggaaggcaagcagggcaacuucaagaaccugcgcgaguucguguucaagaacaucgacggcuacuucaaaaucuacagcaagcacaccccuaucaaccucgugcgggaucugccucagggcuucucugcucuggaaccccugguggaucugcccaucggcaucaacaucacccgguuucagacacugcuggcccugcacagaagcuaccugacaccuggcgauagcagcagcggauggacagcuggugccgccgcuuacuaugugggcuaccugcagccuagaaccuuccugcugaaguacaacgagaacggcaccaucaccgacgccguggauugugcucuggauccucugagcgagacaaagugcacccugaaguccuucaccguggaaaagggcaucuaccagaccagcaacuuccgggugcagcccaccgaauccaucgugcgguuccccaauaucaccaaucugugccccuucggcgagguguucaaugccaccagauucgccucuguguacgccuggaaccggaagcggaucagcaauugcguggccgacuacuccgugcuguacaacuccgccagcuucagcaccuucaagugcuacggcguguccccuaccaagcugaacgaccugugcuucacaaacguguacgccgacagcuucgugauccggggagaugaagugcggcagauugccccuggacagacaggcaagaucgccgacuacaacuacaagcugcccgacgacuucaccggcugugugauugccuggaacagcaacaaccuggacuccaaagucggcggcaacuacaauuaccuguaccggcuguuccggaaguccaaucugaagcccuucgagcgggacaucagcaccgaaaucuaucaggccggcagcaccccuugcaacggcguggaaggcuucaacugcuacuucccacugcaguccuacggcuuucagcccacaaauggcgugggcuaucagcccuacagagugguggugcugagcuucgaacugcugcaugcuccugccacagugugcggcccuaagaaaagcaccaaucucgugaagaacaaaugcgugaacuucaacuucaacggccugaccggcaccggcgugcugacagagagcaacaagaaguuccugccauuccagcaguuuggccgggauaucgccgauaccacagacgccguuagagauccccagacacuggaaauccuggacaucaccccaugcagcuucggcggagugucugugaucaccccuggcaccaacaccagcaaucagguggcagugcuguaccaggacgugaacuguaccgaagugcccguggccauucacgccgaucagcugacaccuacauggcggguguacuccaccggcagcaauguguuucagaccagagccggcugucugaucggagccgagcacgugaacaauagcuacgagugcgacauccccaucggcgcuggcaucugugccagcuaccagacacagacaaacagccccagacgggcuagaagcguggccagccagagcaucauugccuacacaaugucucugggcgccgagaacagcguggccuacuccaacaacucuaucgcuauccccaccaacuucaccaucagcgugaccaccgagauccugccuguguccaugaccaagaccagcguggacugcaccauguacaucugcggcgauuccaccgagugcuccaaccugcugcugcaguacggcagcuucugcacccagcugaauagagcccugacagggaucgccguggaacaggacaagaacacccaagagguguucgcccaagugaagcaaaucuacaagaccccuccuaucaaggacuucggcggcuucaauuucagccagauucugcccgauccuagcaagcccagcaagcggagcuucaucgaggaccugcuguucaacaaagugacacuggccgacgccggcuucaucaagcaguauggcgauugucugggcgacauugccgccagggaucugauuugcgcccagaaguuuaacggacugacagugcugccuccucugcugaccgaugagaugaucgcccaguacugcucugcccugcuggccggcacaaucacaagcggcuggacauuuggagcuggcgccgcucugcagauccccuuugcuaugcagauggccuaccgguucaacggcaucggagugacccagaaugugcuguacgagaaccagaagcugaucgccaaccaguucaacagcgccaucggcaagauccaggacagccugagcagcacagcaagcgcccugggaaagcugcaggacguggucaaccagaaugcccaggcacugaacacccuggucaagcagcuguccuccaacuucggcgccaucagcucugugcugaacgauauccugagcagacuggacaaggucgaggccgaggugcagaucgacagacugaucacaggcagacugcagagccuccagacauacgugacccagcagcugaucagagccgccgagauuagagccucugccaaucuggccgccaccaagaugucugagugugugcugggccagagcaagagaguggacuuuugcggcaagggcuaccaccugaugagcuucccucagugcgccccucacggcgugguguuucugcacgugacauaugugcccgcucaagagaagaauuucaccaccgcuccagccaucugccacgacggcaaagcccacuuuccuagagaaggcguguucguguccaacggcacccauugguucgugacacagcggaacuucuacgagccccagaucaucaccaccgacaacaccuucgugucuggcaacugcgacguugugaucggcauugugaacaauaccguguacgacccucugcagcccgagcuggacagcuucaaagaggaacuggacaaguacuuuaagaaccacacaagccccgacguggaccugggcgauaucagcggaaucaaugccagcgucgugaacauccagaaagagaucgaccggcugaacgagguggccaagaaucugaacgagagccugaucgaccugcaagaacuggggaaguacgagcaguacaucaagggaggcggaggaucugacaucgaccccuacaaagaguucggcagcagcuaccagcugcugaacuuccugccucuggacuucuuccccgaccugaacgcccugguggauacagccacagcucuguacgaggaagaacugaccggcagagagcacugcagcccucaccacacagccauuagacaggcccucgugugcugggacgagcugacaaaacugaucgccuggaugagcagcaacaucaccagcgagcaagugcggaccaucaucgugaaccacgugaacgauaccuggggccugaaagugcggcagagccugugguuucaccugagcugucugaccuucggccagcacaccgugcaagaguuucugguguccuucggcguguggaucagaaccccugcuccauacagaccuccaaacgcucccauccugagcacccugccugagcacacagugaucuguugaggacuagucccuguucccagagcccacuuuuuuuucuuuuuuugaaauaaaauagccugucuuucagaucucaaaggcucuuuucagagccaccaaaaaaaaaaaaaaaaaaaaaaaaaaaaaaaaaaaaaaaaaaaaaaaaaaaaaaaaaaaaaaaaaaaaaaaaaaaaaaaaaaaaaaaaaaaaaaaaaaaaa

SEQ ID NO: 12616 - RNA, 4196 nt, Artificial Sequence
  SARS-CoV-2/Wuhan/WIV05/2019__EPI_ISL_402128 spike protein mRNA gc mod (1-1147) LumSynth construct
aggagagucccgcagucggcguccagcggcucugcuuguucgugugugugucguugcaggccuuauucaagcuuaccauguucguguuucuggugcugcugccccugguguccagccagugugugaaccugaccaccagaacacagcugccuccagccuacaccaacagcuucaccagaggcguguacuaccccgacaagguguucagauccagcgugcugcacucuacccaggaccuguuccugccuuucuucagcaacgugaccugguuccacgccauccacguguccggcaccaauggcaccaagagauucgacaaccccgugcugcccuucaacgacgggguguacuuugccagcaccgagaaguccaacaucaucagaggcuggaucuucggcaccacacuggacagcaagacccagagccugcugaucgugaacaacgccaccaacguggucaucaaagugugcgaguuccaguucugcaacgaccccuuccugggcgucuacuaccacaagaacaacaagagcuggauggaaagcgaguuccggguguacagcagcgccaacaacugcaccuucgaguacgugucccagccuuuccugauggaccuggaaggcaagcagggcaacuucaagaaccugcgcgaguucguguucaagaacaucgacggcuacuucaaaaucuacagcaagcacaccccuaucaaccucgugcgggaucugccucagggcuucucugcucuggaaccccugguggaucugcccaucggcaucaacaucacccgguuucagacacugcuggcccugcacagaagcuaccugacaccuggcgauagcagcagcggauggacagcuggugccgccgcuuacuaugugggcuaccugcagccuagaaccuuccugcugaaguacaacgagaacggcaccaucaccgacgccguggauugugcucuggauccucugagcgagacaaagugcacccugaaguccuucaccguggaaaagggcaucuaccagaccagcaacuuccgggugcagcccaccgaauccaucgugcgguuccccaauaucaccaaucugugccccuucggcgagguguucaaugccaccagauucgccucuguguacgccuggaaccggaagcggaucagcaauugcguggccgacuacuccgugcuguacaacuccgccagcuucagcaccuucaagugcuacggcguguccccuaccaagcugaacgaccugugcuucacaaacguguacgccgacagcuucgugauccggggagaugaagugcggcagauugccccuggacagacaggcaagaucgccgacuacaacuacaagcugcccgacgacuucaccggcugugugauugccuggaacagcaacaaccuggacuccaaagucggcggcaacuacaauuaccuguaccggcuguuccggaaguccaaucugaagcccuucgagcgggacaucagcaccgaaaucuaucaggccggcagcaccccuugcaacggcguggaaggcuucaacugcuacuucccacugcaguccuacggcuuucagcccacaaauggcgugggcuaucagcccuacagagugguggugcugagcuucgaacugcugcaugcuccugccacagugugcggcccuaagaaaagcaccaaucucgugaagaacaaaugcgugaacuucaacuucaacggccugaccggcaccggcgugcugacagagagcaacaagaaguuccugccauuccagcaguuuggccgggauaucgccgauaccacagacgccguuagagauccccagacacuggaaauccuggacaucaccccaugcagcuucggcggagugucugugaucaccccuggcaccaacaccagcaaucagguggcagugcuguaccaggacgugaacuguaccgaagugcccguggccauucacgccgaucagcugacaccuacauggcggguguacuccaccggcagcaauguguuucagaccagagccggcugucugaucggagccgagcacgugaacaauagcuacgagugcgacauccccaucggcgcuggcaucugugccagcuaccagacacagacaaacagccccagacgggcuagaagcguggccagccagagcaucauugccuacacaaugucucugggcgccgagaacagcguggccuacuccaacaacucuaucgcuauccccaccaacuucaccaucagcgugaccaccgagauccugccuguguccaugaccaagaccagcguggacugcaccauguacaucugcggcgauuccaccgagugcuccaaccugcugcugcaguacggcagcuucugcacccagcugaauagagcccugacagggaucgccguggaacaggacaagaacacccaagagguguucgcccaagugaagcaaaucuacaagaccccuccuaucaaggacuucggcggcuucaauuucagccagauucugcccgauccuagcaagcccagcaagcggagcuucaucgaggaccugcuguucaacaaagugacacuggccgacgccggcuucaucaagcaguauggcgauugucugggcgacauugccgccagggaucugauuugcgcccagaaguuuaacggacugacagugcugccuccucugcugaccgaugagaugaucgcccaguacacaucugcccugcuggccggcacaaucacaagcggcuggacauuuggagcuggcgccgcucugcagauccccuuugcuaugcagauggccuaccgguucaacggcaucggagugacccagaaugugcuguacgagaaccagaagcugaucgccaaccaguucaacagcgccaucggcaagauccaggacagccugagcagcacagcaagcgcccugggaaagcugcaggacguggucaaccagaaugcccaggcacugaacacccuggucaagcagcuguccuccaacuucggcgccaucagcucugugcugaacgauauccugagcagacuggacaaggucgaggccgaggugcagaucgacagacugaucacaggcagacugcagagccuccagacauacgugacccagcagcugaucagagccgccgagauuagagccucugccaaucuggccgccaccaagaugucugagugugugcugggccagagcaagagaguggacuuuugcggcaagggcuaccaccugaugagcuucccucagucugccccucacggcgugguguuucugcacgugacauaugugcccgcucaagagaagaauuucaccaccgcuccagccaucugccacgacggcaaagcccacuuuccuagagaaggcguguucguguccaacggcacccauugguucgugacacagcggaacuucuacgagccccagaucaucaccaccgacaacaccuucgugucuggcaacugcgacguugugaucggcauugugaacaauaccguguacgacccucugcagcccgagcuggacagcggcggaggaucuggcggaggacagaucuacgagggcaagcugacagccgagggccugagauuuggaaucguggccagccgguucaaucacgcccugguggauagacugguggaaggcgccaucgaugccauugucagacacggcggcagagaagaggacaucacccucguuagagugcccggcucuugggagauuccuguggcugcuggcgagcuggcccggaaagaagauaucgacgccguuaucgccaucggcgugcugaucagaggcgccacaccucacuucgacuauaucgccagcgagguguccaaaggccuggccgaucugagccuggaacugagaaagcccaucaccuucggcgugaucaccgcugacacacuggaacaggccauugagagagccggcaccaagcacggcaacaaaggaugggaagccgcucuguccgccaucgagauggccaaccuguucaagagccugcggugaggacuagucccuguucccagagcccacuuuuuuuucuuuuuuugaaauaaaauagccugucuuucagaucucaaaggcucuuuucagagccaccaaaaaaaaaaaaaaaaaaaaaaaaaaaaaaaaaaaaaaaaaaaaaaaaaaaaaaaaaaaaaaaaaaaaaaaaaaaaaaaaaaaaaaaaaaaaaaaaaaaaa

SEQ ID NO: 12617 - RNA, 4196 nt, Artificial Sequence
  SARS-CoV-2/Wuhan/WIV05/2019__EPI_ISL_402128 spike protein mRNA gc mod (1-1147)(K986P_V987P) LumSynth construct
aggagagucccgcagucggcguccagcggcucugcuuguucgugugugugucguugcaggccuuauucaagcuuaccauguucguguuucuggugcugcugccccugguguccagccagugugugaaccugaccaccagaacacagcugccuccagccuacaccaacagcuucaccagaggcguguacuaccccgacaagguguucagauccagcgugcugcacucuacccaggaccuguuccugccuuucuucagcaacgugaccugguuccacgccauccacguguccggcaccaauggcaccaagagauucgacaaccccgugcugcccuucaacgacgggguguacuuugccagcaccgagaaguccaacaucaucagaggcuggaucuucggcaccacacuggacagcaagacccagagccugcugaucgugaacaacgccaccaacguggucaucaaagugugcgaguuccaguucugcaacgaccccuuccugggcgucuacuaccacaagaacaacaagagcuggauggaaagcgaguuccggguguacagcagcgccaacaacugcaccuucgaguacgugucccagccuuuccugauggaccuggaaggcaagcagggcaacuucaagaaccugcgcgaguucguguucaagaacaucgacggcuacuucaaaaucuacagcaagcacaccccuaucaaccucgugcgggaucugccucagggcuucucugcucuggaaccccugguggaucugcccaucggcaucaacaucacccgguuucagacacugcuggcccugcacagaagcuaccugacaccuggcgauagcagcagcggauggacagcuggugccgccgcuuacuaugugggcuaccugcagccuagaaccuuccugcugaaguacaacgagaacggcaccaucaccgacgccguggauugugcucuggauccucugagcgagacaaagugcacccugaaguccuucaccguggaaaagggcaucuaccagaccagcaacuuccgggugcagcccaccgaauccaucgugcgguuccccaauaucaccaaucugugccccuucggcgagguguucaaugccaccagauucgccucuguguacgccuggaaccggaagcggaucagcaauugcguggccgacuacuccgugcuguacaacuccgccagcuucagcaccuucaagugcuacggcguguccccuaccaagcugaacgaccugugcuucacaaacguguacgccgacagcuucgugauccggggagaugaagugcggcagauugccccuggacagacaggcaagaucgccgacuacaacuacaagcugcccgacgacuucaccggcugugugauugccuggaacagcaacaaccuggacuccaaagucggcggcaacuacaauuaccuguaccggcuguuccggaaguccaaucugaagcccuucgagcgggacaucagcaccgaaaucuaucaggccggcagcaccccuugcaacggcguggaaggcuucaacugcuacuucccacugcaguccuacggcuuucagcccacaaauggcgugggcuaucagcccuacagagugguggugcugagcuucgaacugcugcaugcuccugccacagugugcggcccuaagaaaagcaccaaucucgugaagaacaaaugcgugaacuucaacuucaacggccugaccggcaccggcgugcugacagagagcaacaagaaguuccugccauuccagcaguuuggccgggauaucgccgauaccacagacgccguuagagauccccagacacuggaaauccuggacaucaccccaugcagcuucggcggagugucugugaucaccccuggcaccaacaccagcaaucagguggcagugcuguaccaggacgugaacuguaccgaagugcccguggccauucacgccgaucagcugacaccuacauggcggguguacuccaccggcagcaauguguuucagaccagagccggcugucugaucggagccgagcacgugaacaauagcuacgagugcgacauccccaucggcgcuggcaucugugccagcuaccagacacagacaaacagccccagacgggcuagaagcguggccagccagagcaucauugccuacacaaugucucugggcgccgagaacagcguggccuacuccaacaacucuaucgcuauccccaccaacuucaccaucagcgugaccaccgagauccugccuguguccaugaccaagaccagcguggacugcaccauguacaucugcggcgauuccaccgagugcuccaaccugcugcugcaguacggcagcuucugcacccagcugaauagagcccugacagggaucgccguggaacaggacaagaacacccaagagguguucgcccaagugaagcaaaucuacaagaccccuccuaucaaggacuucggcggcuucaauuucagccagauucugcccgauccuagcaagcccagcaagcggagcuucaucgaggaccugcuguucaacaaagugacacuggccgacgccggcuucaucaagcaguauggcgauugucugggcgacauugccgccagggaucugauuugcgcccagaaguuuaacggacugacagugcugccuccucugcugaccgaugagaugaucgcccaguacacaucugcccugcuggccggcacaaucacaagcggcuggacauuuggagcuggcgccgcucugcagauccccuuugcuaugcagauggccuaccgguucaacggcaucggagugacccagaaugugcuguacgagaaccagaagcugaucgccaaccaguucaacagcgccaucggcaagauccaggacagccugagcagcacagcaagcgcccugggaaagcugcaggacguggucaaccagaaugcccaggcacugaacacccuggucaagcagcuguccuccaacuucggcgccaucagcucugugcugaacgauauccugagcagacuggacccuccugaggccgaggugcagaucgacagacugaucacaggcagacugcagagccuccagacauacgugacccagcagcugaucagagccgccgagauuagagccucugccaaucuggccgccaccaagaugucugagugugugcugggccagagcaagagaguggacuuuugcggcaagggcuaccaccugaugagcuucccucagucugccccucacggcgugguguuucugcacgugacauaugugcccgcucaagagaagaauuucaccaccgcuccagccaucugccacgacggcaaagcccacuuuccuagagaaggcguguucguguccaacggcacccauugguucgugacacagcggaacuucuacgagccccagaucaucaccaccgacaacaccuucgugucuggcaacugcgacguugugaucggcauugugaacaauaccguguacgacccucugcagcccgagcuggacagcggcggaggaucuggcggaggacagaucuacgagggcaagcugacagccgagggccugagauuuggaaucguggccagccgguucaaucacgcccugguggauagacugguggaaggcgccaucgaugccauugucagacacggcggcagagaagaggacaucacccucguuagagugcccggcucuugggagauuccuguggcugcuggcgagcuggcccggaaagaagauaucgacgccguuaucgccaucggcgugcugaucagaggcgccacaccucacuucgacuauaucgccagcgagguguccaaaggccuggccgaucugagccuggaacugagaaagcccaucaccuucggcgugaucaccgcugacacacuggaacaggccauugagagagccggcaccaagcacggcaacaaaggaugggaagccgcucuguccgccaucgagauggccaaccuguucaagagccugcggugaggacuagucccuguucccagagcccacuuuuuuuucuuuuuuugaaauaaaauagccugucuuucagaucucaaaggcucuuuucagagccaccaaaaaaaaaaaaaaaaaaaaaaaaaaaaaaaaaaaaaaaaaaaaaaaaaaaaaaaaaaaaaaaaaaaaaaaaaaaaaaaaaaaaaaaaaaaaaaaaaaaaa

SEQ ID NO: 12618 - RNA, 4196 nt, Artificial Sequence
  SARS-CoV-2/Wuhan/WIV05/2019__EPI_ISL_402128 spike protein mRNA gc mod (1-1147)(K986P_V987P_T887WN_A1020W) LumSynth construct
aggagagucccgcagucggcguccagcggcucugcuuguucgugugugugucguugcaggccuuauucaagcuuaccauguucguguuucuggugcugcugccccugguguccagccagugugugaaccugaccaccagaacacagcugccuccagccuacaccaacagcuucaccagaggcguguacuaccccgacaagguguucagauccagcgugcugcacucuacccaggaccuguuccugccuuucuucagcaacgugaccugguuccacgccauccacguguccggcaccaauggcaccaagagauucgacaaccccgugcugcccuucaacgacgggguguacuuugccagcaccgagaaguccaacaucaucagaggcuggaucuucggcaccacacuggacagcaagacccagagccugcugaucgugaacaacgccaccaacguggucaucaaagugugcgaguuccaguucugcaacgaccccuuccugggcgucuacuaccacaagaacaacaagagcuggauggaaagcgaguuccggguguacagcagcgccaacaacugcaccuucgaguacgugucccagccuuuccugauggaccuggaaggcaagcagggcaacuucaagaaccugcgcgaguucguguucaagaacaucgacggcuacuucaaaaucuacagcaagcacaccccuaucaaccucgugcgggaucugccucagggcuucucugcucuggaaccccugguggaucugcccaucggcaucaacaucacccgguuucagacacugcuggcccugcacagaagcuaccugacaccuggcgauagcagcagcggauggacagcuggugccgccgcuuacuaugugggcuaccugcagccuagaaccuuccugcugaaguacaacgagaacggcaccaucaccgacgccguggauugugcucuggauccucugagcgagacaaagugcacccugaaguccuucaccguggaaaagggcaucuaccagaccagcaacuuccgggugcagcccaccgaauccaucgugcgguuccccaauaucaccaaucugugccccuucggcgagguguucaaugccaccagauucgccucuguguacgccuggaaccggaagcggaucagcaauugcguggccgacuacuccgugcuguacaacuccgccagcuucagcaccuucaagugcuacggcguguccccuaccaagcugaacgaccugugcuucacaaacguguacgccgacagcuucgugauccggggagaugaagugcggcagauugccccuggacagacaggcaagaucgccgacuacaacuacaagcugcccgacgacuucaccggcugugugauugccuggaacagcaacaaccuggacuccaaagucggcggcaacuacaauuaccuguaccggcuguuccggaaguccaaucugaagcccuucgagcgggacaucagcaccgaaaucuaucaggccggcagcaccccuugcaacggcguggaaggcuucaacugcuacuucccacugcaguccuacggcuuucagcccacaaauggcgugggcuaucagcccuacagagugguggugcugagcuucgaacugcugcaugcuccugccacagugugcggcccuaagaaaagcaccaaucucgugaagaacaaaugcgugaacuucaacuucaacggccugaccggcaccggcgugcugacagagagcaacaagaaguuccugccauuccagcaguuuggccgggauaucgccgauaccacagacgccguuagagauccccagacacuggaaauccuggacaucaccccaugcagcuucggcggagugucugugaucaccccuggcaccaacaccagcaaucagguggcagugcuguaccaggacgugaacuguaccgaagugcccguggccauucacgccgaucagcugacaccuacauggcggguguacuccaccggcagcaauguguuucagaccagagccggcugucugaucggagccgagcacgugaacaauagcuacgagugcgacauccccaucggcgcuggcaucugugccagcuaccagacacagacaaacagccccagacgggcuagaagcguggccagccagagcaucauugccuacacaaugucucugggcgccgagaacagcguggccuacuccaacaacucuaucgcuauccccaccaacuucaccaucagcgugaccaccgagauccugccuguguccaugaccaagaccagcguggacugcaccauguacaucugcggcgauuccaccgagugcuccaaccugcugcugcaguacggcagcuucugcacccagcugaauagagcccugacagggaucgccguggaacaggacaagaacacccaagagguguucgcccaagugaagcaaaucuacaagaccccuccuaucaaggacuucggcggcuucaauuucagccagauucugcccgauccuagcaagcccagcaagcggagcuucaucgaggaccugcuguucaacaaagugacacuggccgacgccggcuucaucaagcaguauggcgauugucugggcgacauugccgccagggaucugauuugcgcccagaaguuuaacggacugacagugcugccuccucugcugaccgaugagaugaucgcccaguacacaucugcccugcuggccggcacaaucacaagcggcuggugguuuggagcuggcgccgcucugcagauccccuuugcuaugcagauggccuaccgguucaacggcaucggagugacccagaaugugcuguacgagaaccagaagcugaucgccaaccaguucaacagcgccaucggcaagauccaggacagccugagcagcacagcaagcgcccugggaaagcugcaggacguggucaaccagaaugcccaggcacugaacacccuggucaagcagcuguccuccaacuucggcgccaucagcucugugcugaacgauauccugagcagacuggacccuccugaggccgaggugcagaucgacagacugaucacaggcagacugcagagccuccagacauacgugacccagcagcugaucagagccgccgagauuagauggucugccaaucuggccgccaccaagaugucugagugugugcugggccagagcaagagaguggacuuuugcggcaagggcuaccaccugaugagcuucccucagucugccccucacggcgugguguuucugcacgugacauaugugcccgcucaagagaagaauuucaccaccgcuccagccaucugccacgacggcaaagcccacuuuccuagagaaggcguguucguguccaacggcacccauugguucgugacacagcggaacuucuacgagccccagaucaucaccaccgacaacaccuucgugucuggcaacugcgacguugugaucggcauugugaacaauaccguguacgacccucugcagcccgagcuggacagcggcggaggaucuggcggaggacagaucuacgagggcaagcugacagccgagggccugagauuuggaaucguggccagccgguucaaucacgcccugguggauagacugguggaaggcgccaucgaugccauugucagacacggcggcagagaagaggacaucacccucguuagagugcccggcucuugggagauuccuguggcugcuggcgagcuggcccggaaagaagauaucgacgccguuaucgccaucggcgugcugaucagaggcgccacaccucacuucgacuauaucgccagcgagguguccaaaggccuggccgaucugagccuggaacugagaaagcccaucaccuucggcgugaucaccgcugacacacuggaacaggccauugagagagccggcaccaagcacggcaacaaaggaugggaagccgcucuguccgccaucgagauggccaaccuguucaagagccugcggugaggacuagucccuguucccagagcccacuuuuuuuucuuuuuuugaaauaaaauagccugucuuucagaucucaaaggcucuuuucagagccaccaaaaaaaaaaaaaaaaaaaaaaaaaaaaaaaaaaaaaaaaaaaaaaaaaaaaaaaaaaaaaaaaaaaaaaaaaaaaaaaaaaaaaaaaaaaaaaaaaaaaa

SEQ ID NO: 12619 - RNA, 4196 nt, Artificial Sequence
  SARS-CoV-2/Wuhan/WIV05/2019__EPI_ISL_402128 spike protein mRNA gc mod (1-1147)(K986P_V987P_P1069F) LumSynth construct
aggagagucccgcagucggcguccagcggcucugcuuguucgugugugugucguugcaggccuuauucaagcuuaccauguucguguuucuggugcugcugccccugguguccagccagugugugaaccugaccaccagaacacagcugccuccagccuacaccaacagcuucaccagaggcguguacuaccccgacaagguguucagauccagcgugcugcacucuacccaggaccuguuccugccuuucuucagcaacgugaccugguuccacgccauccacguguccggcaccaauggcaccaagagauucgacaaccccgugcugcccuucaacgacgggguguacuuugccagcaccgagaaguccaacaucaucagaggcuggaucuucggcaccacacuggacagcaagacccagagccugcugaucgugaacaacgccaccaacguggucaucaaagugugcgaguuccaguucugcaacgaccccuuccugggcgucuacuaccacaagaacaacaagagcuggauggaaagcgaguuccggguguacagcagcgccaacaacugcaccuucgaguacgugucccagccuuuccugauggaccuggaaggcaagcagggcaacuucaagaaccugcgcgaguucguguucaagaacaucgacggcuacuucaaaaucuacagcaagcacaccccuaucaaccucgugcgggaucugccucagggcuucucugcucuggaaccccugguggaucugcccaucggcaucaacaucacccgguuucagacacugcuggcccugcacagaagcuaccugacaccuggcgauagcagcagcggauggacagcuggugccgccgcuuacuaugugggcuaccugcagccuagaaccuuccugcugaaguacaacgagaacggcaccaucaccgacgccguggauugugcucuggauccucugagcgagacaaagugcacccugaaguccuucaccguggaaaagggcaucuaccagaccagcaacuuccgggugcagcccaccgaauccaucgugcgguuccccaauaucaccaaucugugccccuucggcgagguguucaaugccaccagauucgccucuguguacgccuggaaccggaagcggaucagcaauugcguggccgacuacuccgugcuguacaacuccgccagcuucagcaccuucaagugcuacggcguguccccuaccaagcugaacgaccugugcuucacaaacguguacgccgacagcuucgugauccggggagaugaagugcggcagauugccccuggacagacaggcaagaucgccgacuacaacuacaagcugcccgacgacuucaccggcugugugauugccuggaacagcaacaaccuggacuccaaagucggcggcaacuacaauuaccuguaccggcuguuccggaaguccaaucugaagcccuucgagcgggacaucagcaccgaaaucuaucaggccggcagcaccccuugcaacggcguggaaggcuucaacugcuacuucccacugcaguccuacggcuuucagcccacaaauggcgugggcuaucagcccuacagagugguggugcugagcuucgaacugcugcaugcuccugccacagugugcggcccuaagaaaagcaccaaucucgugaagaacaaaugcgugaacuucaacuucaacggccugaccggcaccggcgugcugacagagagcaacaagaaguuccugccauuccagcaguuuggccgggauaucgccgauaccacagacgccguuagagauccccagacacuggaaauccuggacaucaccccaugcagcuucggcggagugucugugaucaccccuggcaccaacaccagcaaucagguggcagugcuguaccaggacgugaacuguaccgaagugcccguggccauucacgccgaucagcugacaccuacauggcggguguacuccaccggcagcaauguguuucagaccagagccggcugucugaucggagccgagcacgugaacaauagcuacgagugcgacauccccaucggcgcuggcaucugugccagcuaccagacacagacaaacagccccagacgggcuagaagcguggccagccagagcaucauugccuacacaaugucucugggcgccgagaacagcguggccuacuccaacaacucuaucgcuauccccaccaacuucaccaucagcgugaccaccgagauccugccuguguccaugaccaagaccagcguggacugcaccauguacaucugcggcgauuccaccgagugcuccaaccugcugcugcaguacggcagcuucugcacccagcugaauagagcccugacagggaucgccguggaacaggacaagaacacccaagagguguucgcccaagugaagcaaaucuacaagaccccuccuaucaaggacuucggcggcuucaauuucagccagauucugcccgauccuagcaagcccagcaagcggagcuucaucgaggaccugcuguucaacaaagugacacuggccgacgccggcuucaucaagcaguauggcgauugucugggcgacauugccgccagggaucugauuugcgcccagaaguuuaacggacugacagugcugccuccucugcugaccgaugagaugaucgcccaguacacaucugcccugcuggccggcacaaucacaagcggcuggacauuuggagcuggcgccgcucugcagauccccuuugcuaugcagauggccuaccgguucaacggcaucggagugacccagaaugugcuguacgagaaccagaagcugaucgccaaccaguucaacagcgccaucggcaagauccaggacagccugagcagcacagcaagcgcccugggaaagcugcaggacguggucaaccagaaugcccaggcacugaacacccuggucaagcagcuguccuccaacuucggcgccaucagcucugugcugaacgauauccugagcagacuggacccuccugaggccgaggugcagaucgacagacugaucacaggcagacugcagagccuccagacauacgugacccagcagcugaucagagccgccgagauuagagccucugccaaucuggccgccaccaagaugucugagugugugcugggccagagcaagagaguggacuuuugcggcaagggcuaccaccugaugagcuucccucagucugccccucacggcgugguguuucugcacgugacauauguguucgcucaagagaagaauuucaccaccgcuccagccaucugccacgacggcaaagcccacuuuccuagagaaggcguguucguguccaacggcacccauugguucgugacacagcggaacuucuacgagccccagaucaucaccaccgacaacaccuucgugucuggcaacugcgacguugugaucggcauugugaacaauaccguguacgacccucugcagcccgagcuggacagcggcggaggaucuggcggaggacagaucuacgagggcaagcugacagccgagggccugagauuuggaaucguggccagccgguucaaucacgcccugguggauagacugguggaaggcgccaucgaugccauugucagacacggcggcagagaagaggacaucacccucguuagagugcccggcucuugggagauuccuguggcugcuggcgagcuggcccggaaagaagauaucgacgccguuaucgccaucggcgugcugaucagaggcgccacaccucacuucgacuauaucgccagcgagguguccaaaggccuggccgaucugagccuggaacugagaaagcccaucaccuucggcgugaucaccgcugacacacuggaacaggccauugagagagccggcaccaagcacggcaacaaaggaugggaagccgcucuguccgccaucgagauggccaaccuguucaagagccugcggugaggacuagucccuguucccagagcccacuuuuuuuucuuuuuuugaaauaaaauagccugucuuucagaucucaaaggcucuuuucagagccaccaaaaaaaaaaaaaaaaaaaaaaaaaaaaaaaaaaaaaaaaaaaaaaaaaaaaaaaaaaaaaaaaaaaaaaaaaaaaaaaaaaaaaaaaaaaaaaaaaaaaa

SEQ ID NO: 12620 - RNA, 4196 nt, Artificial Sequence
  SARS-CoV-2/Wuhan/WIV05/2019__EPI_ISL_402128 spike protein mRNA gc mod (1-1147)(K986P_V987P_ H1048Q_H1064N_ H1083N_H1101N) LumSynth construct
aggagagucccgcagucggcguccagcggcucugcuuguucgugugugugucguugcaggccuuauucaagcuuaccauguucguguuucuggugcugcugccccugguguccagccagugugugaaccugaccaccagaacacagcugccuccagccuacaccaacagcuucaccagaggcguguacuaccccgacaagguguucagauccagcgugcugcacucuacccaggaccuguuccugccuuucuucagcaacgugaccugguuccacgccauccacguguccggcaccaauggcaccaagagauucgacaaccccgugcugcccuucaacgacgggguguacuuugccagcaccgagaaguccaacaucaucagaggcuggaucuucggcaccacacuggacagcaagacccagagccugcugaucgugaacaacgccaccaacguggucaucaaagugugcgaguuccaguucugcaacgaccccuuccugggcgucuacuaccacaagaacaacaagagcuggauggaaagcgaguuccggguguacagcagcgccaacaacugcaccuucgaguacgugucccagccuuuccugauggaccuggaaggcaagcagggcaacuucaagaaccugcgcgaguucguguucaagaacaucgacggcuacuucaaaaucuacagcaagcacaccccuaucaaccucgugcgggaucugccucagggcuucucugcucuggaaccccugguggaucugcccaucggcaucaacaucacccgguuucagacacugcuggcccugcacagaagcuaccugacaccuggcgauagcagcagcggauggacagcuggugccgccgcuuacuaugugggcuaccugcagccuagaaccuuccugcugaaguacaacgagaacggcaccaucaccgacgccguggauugugcucuggauccucugagcgagacaaagugcacccugaaguccuucaccguggaaaagggcaucuaccagaccagcaacuuccgggugcagcccaccgaauccaucgugcgguuccccaauaucaccaaucugugccccuucggcgagguguucaaugccaccagauucgccucuguguacgccuggaaccggaagcggaucagcaauugcguggccgacuacuccgugcuguacaacuccgccagcuucagcaccuucaagugcuacggcguguccccuaccaagcugaacgaccugugcuucacaaacguguacgccgacagcuucgugauccggggagaugaagugcggcagauugccccuggacagacaggcaagaucgccgacuacaacuacaagcugcccgacgacuucaccggcugugugauugccuggaacagcaacaaccuggacuccaaagucggcggcaacuacaauuaccuguaccggcuguuccggaaguccaaucugaagcccuucgagcgggacaucagcaccgaaaucuaucaggccggcagcaccccuugcaacggcguggaaggcuucaacugcuacuucccacugcaguccuacggcuuucagcccacaaauggcgugggcuaucagcccuacagagugguggugcugagcuucgaacugcugcaugcuccugccacagugugcggcccuaagaaaagcaccaaucucgugaagaacaaaugcgugaacuucaacuucaacggccugaccggcaccggcgugcugacagagagcaacaagaaguuccugccauuccagcaguuuggccgggauaucgccgauaccacagacgccguuagagauccccagacacuggaaauccuggacaucaccccaugcagcuucggcggagugucugugaucaccccuggcaccaacaccagcaaucagguggcagugcuguaccaggacgugaacuguaccgaagugcccguggccauucacgccgaucagcugacaccuacauggcggguguacuccaccggcagcaauguguuucagaccagagccggcugucugaucggagccgagcacgugaacaauagcuacgagugcgacauccccaucggcgcuggcaucugugccagcuaccagacacagacaaacagccccagacgggcuagaagcguggccagccagagcaucauugccuacacaaugucucugggcgccgagaacagcguggccuacuccaacaacucuaucgcuauccccaccaacuucaccaucagcgugaccaccgagauccugccuguguccaugaccaagaccagcguggacugcaccauguacaucugcggcgauuccaccgagugcuccaaccugcugcugcaguacggcagcuucugcacccagcugaauagagcccugacagggaucgccguggaacaggacaagaacacccaagagguguucgcccaagugaagcaaaucuacaagaccccuccuaucaaggacuucggcggcuucaauuucagccagauucugcccgauccuagcaagcccagcaagcggagcuucaucgaggaccugcuguucaacaaagugacacuggccgacgccggcuucaucaagcaguauggcgauugucugggcgacauugccgccagggaucugauuugcgcccagaaguuuaacggacugacagugcugccuccucugcugaccgaugagaugaucgcccaguacacaucugcccugcuggccggcacaaucacaagcggcuggacauuuggagcuggcgccgcucugcagauccccuuugcuaugcagauggccuaccgguucaacggcaucggagugacccagaaugugcuguacgagaaccagaagcugaucgccaaccaguucaacagcgccaucggcaagauccaggacagccugagcagcacagcaagcgcccugggaaagcugcaggacguggucaaccagaaugcccaggcacugaacacccuggucaagcagcuguccuccaacuucggcgccaucagcucugugcugaacgauauccugagcagacuggacccuccugaggccgaggugcagaucgacagacugaucacaggcagacugcagagccuccagacauacgugacccagcagcugaucagagccgccgagauuagagccucugccaaucuggccgccaccaagaugucugagugugugcugggccagagcaagagaguggacuuuugcggcaagggcuaccagcugaugagcuucccucagucugccccucacggcgugguguuucugaacgugacauaugugcccgcucaagagaagaauuucaccaccgcuccagccaucugcaacgacggcaaagcccacuuuccuagagaaggcguguucguguccaacggcaccaacugguucgugacacagcggaacuucuacgagccccagaucaucaccaccgacaacaccuucgugucuggcaacugcgacguugugaucggcauugugaacaauaccguguacgacccucugcagcccgagcuggacagcggcggaggaucuggcggaggacagaucuacgagggcaagcugacagccgagggccugagauuuggaaucguggccagccgguucaaucacgcccugguggauagacugguggaaggcgccaucgaugccauugucagacacggcggcagagaagaggacaucacccucguuagagugcccggcucuugggagauuccuguggcugcuggcgagcuggcccggaaagaagauaucgacgccguuaucgccaucggcgugcugaucagaggcgccacaccucacuucgacuauaucgccagcgagguguccaaaggccuggccgaucugagccuggaacugagaaagcccaucaccuucggcgugaucaccgcugacacacuggaacaggccauugagagagccggcaccaagcacggcaacaaaggaugggaagccgcucuguccgccaucgagauggccaaccuguucaagagccugcggugaggacuagucccuguucccagagcccacuuuuuuuucuuuuuuugaaauaaaauagccugucuuucagaucucaaaggcucuuuucagagccaccaaaaaaaaaaaaaaaaaaaaaaaaaaaaaaaaaaaaaaaaaaaaaaaaaaaaaaaaaaaaaaaaaaaaaaaaaaaaaaaaaaaaaaaaaaaaaaaaaaaaa

SEQ ID NO: 12621 - RNA, 4196 nt, Artificial Sequence
  SARS-CoV-2/Wuhan/WIV05/2019__EPI_ISL_402128 spike protein mRNA gc mod (1-1147)(I712C_T1077C) LumSynth construct
aggagagucccgcagucggcguccagcggcucugcuuguucgugugugugucguugcaggccuuauucaagcuuaccauguucguguuucuggugcugcugccccugguguccagccagugugugaaccugaccaccagaacacagcugccuccagccuacaccaacagcuucaccagaggcguguacuaccccgacaagguguucagauccagcgugcugcacucuacccaggaccuguuccugccuuucuucagcaacgugaccugguuccacgccauccacguguccggcaccaauggcaccaagagauucgacaaccccgugcugcccuucaacgacgggguguacuuugccagcaccgagaaguccaacaucaucagaggcuggaucuucggcaccacacuggacagcaagacccagagccugcugaucgugaacaacgccaccaacguggucaucaaagugugcgaguuccaguucugcaacgaccccuuccugggcgucuacuaccacaagaacaacaagagcuggauggaaagcgaguuccggguguacagcagcgccaacaacugcaccuucgaguacgugucccagccuuuccugauggaccuggaaggcaagcagggcaacuucaagaaccugcgcgaguucguguucaagaacaucgacggcuacuucaaaaucuacagcaagcacaccccuaucaaccucgugcgggaucugccucagggcuucucugcucuggaaccccugguggaucugcccaucggcaucaacaucacccgguuucagacacugcuggcccugcacagaagcuaccugacaccuggcgauagcagcagcggauggacagcuggugccgccgcuuacuaugugggcuaccugcagccuagaaccuuccugcugaaguacaacgagaacggcaccaucaccgacgccguggauugugcucuggauccucugagcgagacaaagugcacccugaaguccuucaccguggaaaagggcaucuaccagaccagcaacuuccgggugcagcccaccgaauccaucgugcgguuccccaauaucaccaaucugugccccuucggcgagguguucaaugccaccagauucgccucuguguacgccuggaaccggaagcggaucagcaauugcguggccgacuacuccgugcuguacaacuccgccagcuucagcaccuucaagugcuacggcguguccccuaccaagcugaacgaccugugcuucacaaacguguacgccgacagcuucgugauccggggagaugaagugcggcagauugccccuggacagacaggcaagaucgccgacuacaacuacaagcugcccgacgacuucaccggcugugugauugccuggaacagcaacaaccuggacuccaaagucggcggcaacuacaauuaccuguaccggcuguuccggaaguccaaucugaagcccuucgagcgggacaucagcaccgaaaucuaucaggccggcagcaccccuugcaacggcguggaaggcuucaacugcuacuucccacugcaguccuacggcuuucagcccacaaauggcgugggcuaucagcccuacagagugguggugcugagcuucgaacugcugcaugcuccugccacagugugcggcccuaagaaaagcaccaaucucgugaagaacaaaugcgugaacuucaacuucaacggccugaccggcaccggcgugcugacagagagcaacaagaaguuccugccauuccagcaguuuggccgggauaucgccgauaccacagacgccguuagagauccccagacacuggaaauccuggacaucaccccaugcagcuucggcggagugucugugaucaccccuggcaccaacaccagcaaucagguggcagugcuguaccaggacgugaacuguaccgaagugcccguggccauucacgccgaucagcugacaccuacauggcggguguacuccaccggcagcaauguguuucagaccagagccggcugucugaucggagccgagcacgugaacaauagcuacgagugcgacauccccaucggcgcuggcaucugugccagcuaccagacacagacaaacagccccagacgggcuagaagcguggccagccagagcaucauugccuacacaaugucucugggcgccgagaacagcguggccuacuccaacaacucuugcgcuauccccaccaacuucaccaucagcgugaccaccgagauccugccuguguccaugaccaagaccagcguggacugcaccauguacaucugcggcgauuccaccgagugcuccaaccugcugcugcaguacggcagcuucugcacccagcugaauagagcccugacagggaucgccguggaacaggacaagaacacccaagagguguucgcccaagugaagcaaaucuacaagaccccuccuaucaaggacuucggcggcuucaauuucagccagauucugcccgauccuagcaagcccagcaagcggagcuucaucgaggaccugcuguucaacaaagugacacuggccgacgccggcuucaucaagcaguauggcgauugucugggcgacauugccgccagggaucugauuugcgcccagaaguuuaacggacugacagugcugccuccucugcugaccgaugagaugaucgcccaguacacaucugcccugcuggccggcacaaucacaagcggcuggacauuuggagcuggcgccgcucugcagauccccuuugcuaugcagauggccuaccgguucaacggcaucggagugacccagaaugugcuguacgagaaccagaagcugaucgccaaccaguucaacagcgccaucggcaagauccaggacagccugagcagcacagcaagcgcccugggaaagcugcaggacguggucaaccagaaugcccaggcacugaacacccuggucaagcagcuguccuccaacuucggcgccaucagcucugugcugaacgauauccugagcagacuggacaaggucgaggccgaggugcagaucgacagacugaucacaggcagacugcagagccuccagacauacgugacccagcagcugaucagagccgccgagauuagagccucugccaaucuggccgccaccaagaugucugagugugugcugggccagagcaagagaguggacuuuugcggcaagggcuaccaccugaugagcuucccucagucugccccucacggcgugguguuucugcacgugacauaugugcccgcucaagagaagaauuucaccugugcuccagccaucugccacgacggcaaagcccacuuuccuagagaaggcguguucguguccaacggcacccauugguucgugacacagcggaacuucuacgagccccagaucaucaccaccgacaacaccuucgugucuggcaacugcgacguugugaucggcauugugaacaauaccguguacgacccucugcagcccgagcuggacagcggcggaggaucuggcggaggacagaucuacgagggcaagcugacagccgagggccugagauuuggaaucguggccagccgguucaaucacgcccugguggauagacugguggaaggcgccaucgaugccauugucagacacggcggcagagaagaggacaucacccucguuagagugcccggcucuugggagauuccuguggcugcuggcgagcuggcccggaaagaagauaucgacgccguuaucgccaucggcgugcugaucagaggcgccacaccucacuucgacuauaucgccagcgagguguccaaaggccuggccgaucugagccuggaacugagaaagcccaucaccuucggcgugaucaccgcugacacacuggaacaggccauugagagagccggcaccaagcacggcaacaaaggaugggaagccgcucuguccgccaucgagauggccaaccuguucaagagccugcggugaggacuagucccuguucccagagcccacuuuuuuuucuuuuuuugaaauaaaauagccugucuuucagaucucaaaggcucuuuucagagccaccaaaaaaaaaaaaaaaaaaaaaaaaaaaaaaaaaaaaaaaaaaaaaaaaaaaaaaaaaaaaaaaaaaaaaaaaaaaaaaaaaaaaaaaaaaaaaaaaaaaaa

SEQ ID NO: 12622 - RNA, 4196 nt, Artificial Sequence
  SARS-CoV-2/Wuhan/WIV05/2019__EPI_ISL_402128 spike protein mRNA gc mod (1-1147)(I714C_Y1110C) LumSynth construct
aggagagucccgcagucggcguccagcggcucugcuuguucgugugugugucguugcaggccuuauucaagcuuaccauguucguguuucuggugcugcugccccugguguccagccagugugugaaccugaccaccagaacacagcugccuccagccuacaccaacagcuucaccagaggcguguacuaccccgacaagguguucagauccagcgugcugcacucuacccaggaccuguuccugccuuucuucagcaacgugaccugguuccacgccauccacguguccggcaccaauggcaccaagagauucgacaaccccgugcugcccuucaacgacgggguguacuuugccagcaccgagaaguccaacaucaucagaggcuggaucuucggcaccacacuggacagcaagacccagagccugcugaucgugaacaacgccaccaacguggucaucaaagugugcgaguuccaguucugcaacgaccccuuccugggcgucuacuaccacaagaacaacaagagcuggauggaaagcgaguuccggguguacagcagcgccaacaacugcaccuucgaguacgugucccagccuuuccugauggaccuggaaggcaagcagggcaacuucaagaaccugcgcgaguucguguucaagaacaucgacggcuacuucaaaaucuacagcaagcacaccccuaucaaccucgugcgggaucugccucagggcuucucugcucuggaaccccugguggaucugcccaucggcaucaacaucacccgguuucagacacugcuggcccugcacagaagcuaccugacaccuggcgauagcagcagcggauggacagcuggugccgccgcuuacuaugugggcuaccugcagccuagaaccuuccugcugaaguacaacgagaacggcaccaucaccgacgccguggauugugcucuggauccucugagcgagacaaagugcacccugaaguccuucaccguggaaaagggcaucuaccagaccagcaacuuccgggugcagcccaccgaauccaucgugcgguuccccaauaucaccaaucugugccccuucggcgagguguucaaugccaccagauucgccucuguguacgccuggaaccggaagcggaucagcaauugcguggccgacuacuccgugcuguacaacuccgccagcuucagcaccuucaagugcuacggcguguccccuaccaagcugaacgaccugugcuucacaaacguguacgccgacagcuucgugauccggggagaugaagugcggcagauugccccuggacagacaggcaagaucgccgacuacaacuacaagcugcccgacgacuucaccggcugugugauugccuggaacagcaacaaccuggacuccaaagucggcggcaacuacaauuaccuguaccggcuguuccggaaguccaaucugaagcccuucgagcgggacaucagcaccgaaaucuaucaggccggcagcaccccuugcaacggcguggaaggcuucaacugcuacuucccacugcaguccuacggcuuucagcccacaaauggcgugggcuaucagcccuacagagugguggugcugagcuucgaacugcugcaugcuccugccacagugugcggcccuaagaaaagcaccaaucucgugaagaacaaaugcgugaacuucaacuucaacggccugaccggcaccggcgugcugacagagagcaacaagaaguuccugccauuccagcaguuuggccgggauaucgccgauaccacagacgccguuagagauccccagacacuggaaauccuggacaucaccccaugcagcuucggcggagugucugugaucaccccuggcaccaacaccagcaaucagguggcagugcuguaccaggacgugaacuguaccgaagugcccguggccauucacgccgaucagcugacaccuacauggcggguguacuccaccggcagcaauguguuucagaccagagccggcugucugaucggagccgagcacgugaacaauagcuacgagugcgacauccccaucggcgcuggcaucugugccagcuaccagacacagacaaacagccccagacgggcuagaagcguggccagccagagcaucauugccuacacaaugucucugggcgccgagaacagcguggccuacuccaacaacucuaucgcuugccccaccaacuucaccaucagcgugaccaccgagauccugccuguguccaugaccaagaccagcguggacugcaccauguacaucugcggcgauuccaccgagugcuccaaccugcugcugcaguacggcagcuucugcacccagcugaauagagcccugacagggaucgccguggaacaggacaagaacacccaagagguguucgcccaagugaagcaaaucuacaagaccccuccuaucaaggacuucggcggcuucaauuucagccagauucugcccgauccuagcaagcccagcaagcggagcuucaucgaggaccugcuguucaacaaagugacacuggccgacgccggcuucaucaagcaguauggcgauugucugggcgacauugccgccagggaucugauuugcgcccagaaguuuaacggacugacagugcugccuccucugcugaccgaugagaugaucgcccaguacacaucugcccugcuggccggcacaaucacaagcggcuggacauuuggagcuggcgccgcucugcagauccccuuugcuaugcagauggccuaccgguucaacggcaucggagugacccagaaugugcuguacgagaaccagaagcugaucgccaaccaguucaacagcgccaucggcaagauccaggacagccugagcagcacagcaagcgcccugggaaagcugcaggacguggucaaccagaaugcccaggcacugaacacccuggucaagcagcuguccuccaacuucggcgccaucagcucugugcugaacgauauccugagcagacuggacaaggucgaggccgaggugcagaucgacagacugaucacaggcagacugcagagccuccagacauacgugacccagcagcugaucagagccgccgagauuagagccucugccaaucuggccgccaccaagaugucugagugugugcugggccagagcaagagaguggacuuuugcggcaagggcuaccaccugaugagcuucccucagucugccccucacggcgugguguuucugcacgugacauaugugcccgcucaagagaagaauuucaccaccgcuccagccaucugccacgacggcaaagcccacuuuccuagagaaggcguguucguguccaacggcacccauugguucgugacacagcggaacuucugugagccccagaucaucaccaccgacaacaccuucgugucuggcaacugcgacguugugaucggcauugugaacaauaccguguacgacccucugcagcccgagcuggacagcggcggaggaucuggcggaggacagaucuacgagggcaagcugacagccgagggccugagauuuggaaucguggccagccgguucaaucacgcccugguggauagacugguggaaggcgccaucgaugccauugucagacacggcggcagagaagaggacaucacccucguuagagugcccggcucuugggagauuccuguggcugcuggcgagcuggcccggaaagaagauaucgacgccguuaucgccaucggcgugcugaucagaggcgccacaccucacuucgacuauaucgccagcgagguguccaaaggccuggccgaucugagccuggaacugagaaagcccaucaccuucggcgugaucaccgcugacacacuggaacaggccauugagagagccggcaccaagcacggcaacaaaggaugggaagccgcucuguccgccaucgagauggccaaccuguucaagagccugcggugaggacuagucccuguucccagagcccacuuuuuuuucuuuuuuugaaauaaaauagccugucuuucagaucucaaaggcucuuuucagagccaccaaaaaaaaaaaaaaaaaaaaaaaaaaaaaaaaaaaaaaaaaaaaaaaaaaaaaaaaaaaaaaaaaaaaaaaaaaaaaaaaaaaaaaaaaaaaaaaaaaaaa

SEQ ID NO: 12623 - RNA, 4196 nt, Artificial Sequence
  SARS-CoV-2/Wuhan/WIV05/2019__EPI_ISL_402128 spike protein mRNA gc mod (1-1147)(P715C_P1069C) LumSynth construct
aggagagucccgcagucggcguccagcggcucugcuuguucgugugugugucguugcaggccuuauucaagcuuaccauguucguguuucuggugcugcugccccugguguccagccagugugugaaccugaccaccagaacacagcugccuccagccuacaccaacagcuucaccagaggcguguacuaccccgacaagguguucagauccagcgugcugcacucuacccaggaccuguuccugccuuucuucagcaacgugaccugguuccacgccauccacguguccggcaccaauggcaccaagagauucgacaaccccgugcugcccuucaacgacgggguguacuuugccagcaccgagaaguccaacaucaucagaggcuggaucuucggcaccacacuggacagcaagacccagagccugcugaucgugaacaacgccaccaacguggucaucaaagugugcgaguuccaguucugcaacgaccccuuccugggcgucuacuaccacaagaacaacaagagcuggauggaaagcgaguuccggguguacagcagcgccaacaacugcaccuucgaguacgugucccagccuuuccugauggaccuggaaggcaagcagggcaacuucaagaaccugcgcgaguucguguucaagaacaucgacggcuacuucaaaaucuacagcaagcacaccccuaucaaccucgugcgggaucugccucagggcuucucugcucuggaaccccugguggaucugcccaucggcaucaacaucacccgguuucagacacugcuggcccugcacagaagcuaccugacaccuggcgauagcagcagcggauggacagcuggugccgccgcuuacuaugugggcuaccugcagccuagaaccuuccugcugaaguacaacgagaacggcaccaucaccgacgccguggauugugcucuggauccucugagcgagacaaagugcacccugaaguccuucaccguggaaaagggcaucuaccagaccagcaacuuccgggugcagcccaccgaauccaucgugcgguuccccaauaucaccaaucugugccccuucggcgagguguucaaugccaccagauucgccucuguguacgccuggaaccggaagcggaucagcaauugcguggccgacuacuccgugcuguacaacuccgccagcuucagcaccuucaagugcuacggcguguccccuaccaagcugaacgaccugugcuucacaaacguguacgccgacagcuucgugauccggggagaugaagugcggcagauugccccuggacagacaggcaagaucgccgacuacaacuacaagcugcccgacgacuucaccggcugugugauugccuggaacagcaacaaccuggacuccaaagucggcggcaacuacaauuaccuguaccggcuguuccggaaguccaaucugaagcccuucgagcgggacaucagcaccgaaaucuaucaggccggcagcaccccuugcaacggcguggaaggcuucaacugcuacuucccacugcaguccuacggcuuucagcccacaaauggcgugggcuaucagcccuacagagugguggugcugagcuucgaacugcugcaugcuccugccacagugugcggcccuaagaaaagcaccaaucucgugaagaacaaaugcgugaacuucaacuucaacggccugaccggcaccggcgugcugacagagagcaacaagaaguuccugccauuccagcaguuuggccgggauaucgccgauaccacagacgccguuagagauccccagacacuggaaauccuggacaucaccccaugcagcuucggcggagugucugugaucaccccuggcaccaacaccagcaaucagguggcagugcuguaccaggacgugaacuguaccgaagugcccguggccauucacgccgaucagcugacaccuacauggcggguguacuccaccggcagcaauguguuucagaccagagccggcugucugaucggagccgagcacgugaacaauagcuacgagugcgacauccccaucggcgcuggcaucugugccagcuaccagacacagacaaacagccccagacgggcuagaagcguggccagccagagcaucauugccuacacaaugucucugggcgccgagaacagcguggccuacuccaacaacucuaucgcuaucugcaccaacuucaccaucagcgugaccaccgagauccugccuguguccaugaccaagaccagcguggacugcaccauguacaucugcggcgauuccaccgagugcuccaaccugcugcugcaguacggcagcuucugcacccagcugaauagagcccugacagggaucgccguggaacaggacaagaacacccaagagguguucgcccaagugaagcaaaucuacaagaccccuccuaucaaggacuucggcggcuucaauuucagccagauucugcccgauccuagcaagcccagcaagcggagcuucaucgaggaccugcuguucaacaaagugacacuggccgacgccggcuucaucaagcaguauggcgauugucugggcgacauugccgccagggaucugauuugcgcccagaaguuuaacggacugacagugcugccuccucugcugaccgaugagaugaucgcccaguacacaucugcccugcuggccggcacaaucacaagcggcuggacauuuggagcuggcgccgcucugcagauccccuuugcuaugcagauggccuaccgguucaacggcaucggagugacccagaaugugcuguacgagaaccagaagcugaucgccaaccaguucaacagcgccaucggcaagauccaggacagccugagcagcacagcaagcgcccugggaaagcugcaggacguggucaaccagaaugcccaggcacugaacacccuggucaagcagcuguccuccaacuucggcgccaucagcucugugcugaacgauauccugagcagacuggacaaggucgaggccgaggugcagaucgacagacugaucacaggcagacugcagagccuccagacauacgugacccagcagcugaucagagccgccgagauuagagccucugccaaucuggccgccaccaagaugucugagugugugcugggccagagcaagagaguggacuuuugcggcaagggcuaccaccugaugagcuucccucagucugccccucacggcgugguguuucugcacgugacauaugugugugcucaagagaagaauuucaccaccgcuccagccaucugccacgacggcaaagcccacuuuccuagagaaggcguguucguguccaacggcacccauugguucgugacacagcggaacuucuacgagccccagaucaucaccaccgacaacaccuucgugucuggcaacugcgacguugugaucggcauugugaacaauaccguguacgacccucugcagcccgagcuggacagcggcggaggaucuggcggaggacagaucuacgagggcaagcugacagccgagggccugagauuuggaaucguggccagccgguucaaucacgcccugguggauagacugguggaaggcgccaucgaugccauugucagacacggcggcagagaagaggacaucacccucguuagagugcccggcucuugggagauuccuguggcugcuggcgagcuggcccggaaagaagauaucgacgccguuaucgccaucggcgugcugaucagaggcgccacaccucacuucgacuauaucgccagcgagguguccaaaggccuggccgaucugagccuggaacugagaaagcccaucaccuucggcgugaucaccgcugacacacuggaacaggccauugagagagccggcaccaagcacggcaacaaaggaugggaagccgcucuguccgccaucgagauggccaaccuguucaagagccugcggugaggacuagucccuguucccagagcccacuuuuuuuucuuuuuuugaaauaaaauagccugucuuucagaucucaaaggcucuuuucagagccaccaaaaaaaaaaaaaaaaaaaaaaaaaaaaaaaaaaaaaaaaaaaaaaaaaaaaaaaaaaaaaaaaaaaaaaaaaaaaaaaaaaaaaaaaaaaaaaaaaaaaa

SEQ ID NO: 12624 - RNA, 4196 nt, Artificial Sequence
  SARS-CoV-2/Wuhan/WIV05/2019__EPI_ISL_402128 spike protein mRNA gc mod (1-1147)(G889C_L1034C) LumSynth construct
aggagagucccgcagucggcguccagcggcucugcuuguucgugugugugucguugcaggccuuauucaagcuuaccauguucguguuucuggugcugcugccccugguguccagccagugugugaaccugaccaccagaacacagcugccuccagccuacaccaacagcuucaccagaggcguguacuaccccgacaagguguucagauccagcgugcugcacucuacccaggaccuguuccugccuuucuucagcaacgugaccugguuccacgccauccacguguccggcaccaauggcaccaagagauucgacaaccccgugcugcccuucaacgacgggguguacuuugccagcaccgagaaguccaacaucaucagaggcuggaucuucggcaccacacuggacagcaagacccagagccugcugaucgugaacaacgccaccaacguggucaucaaagugugcgaguuccaguucugcaacgaccccuuccugggcgucuacuaccacaagaacaacaagagcuggauggaaagcgaguuccggguguacagcagcgccaacaacugcaccuucgaguacgugucccagccuuuccugauggaccuggaaggcaagcagggcaacuucaagaaccugcgcgaguucguguucaagaacaucgacggcuacuucaaaaucuacagcaagcacaccccuaucaaccucgugcgggaucugccucagggcuucucugcucuggaaccccugguggaucugcccaucggcaucaacaucacccgguuucagacacugcuggcccugcacagaagcuaccugacaccuggcgauagcagcagcggauggacagcuggugccgccgcuuacuaugugggcuaccugcagccuagaaccuuccugcugaaguacaacgagaacggcaccaucaccgacgccguggauugugcucuggauccucugagcgagacaaagugcacccugaaguccuucaccguggaaaagggcaucuaccagaccagcaacuuccgggugcagcccaccgaauccaucgugcgguuccccaauaucaccaaucugugccccuucggcgagguguucaaugccaccagauucgccucuguguacgccuggaaccggaagcggaucagcaauugcguggccgacuacuccgugcuguacaacuccgccagcuucagcaccuucaagugcuacggcguguccccuaccaagcugaacgaccugugcuucacaaacguguacgccgacagcuucgugauccggggagaugaagugcggcagauugccccuggacagacaggcaagaucgccgacuacaacuacaagcugcccgacgacuucaccggcugugugauugccuggaacagcaacaaccuggacuccaaagucggcggcaacuacaauuaccuguaccggcuguuccggaaguccaaucugaagcccuucgagcgggacaucagcaccgaaaucuaucaggccggcagcaccccuugcaacggcguggaaggcuucaacugcuacuucccacugcaguccuacggcuuucagcccacaaauggcgugggcuaucagcccuacagagugguggugcugagcuucgaacugcugcaugcuccugccacagugugcggcccuaagaaaagcaccaaucucgugaagaacaaaugcgugaacuucaacuucaacggccugaccggcaccggcgugcugacagagagcaacaagaaguuccugccauuccagcaguuuggccgggauaucgccgauaccacagacgccguuagagauccccagacacuggaaauccuggacaucaccccaugcagcuucggcggagugucugugaucaccccuggcaccaacaccagcaaucagguggcagugcuguaccaggacgugaacuguaccgaagugcccguggccauucacgccgaucagcugacaccuacauggcggguguacuccaccggcagcaauguguuucagaccagagccggcugucugaucggagccgagcacgugaacaauagcuacgagugcgacauccccaucggcgcuggcaucugugccagcuaccagacacagacaaacagccccagacgggcuagaagcguggccagccagagcaucauugccuacacaaugucucugggcgccgagaacagcguggccuacuccaacaacucuaucgcuauccccaccaacuucaccaucagcgugaccaccgagauccugccuguguccaugaccaagaccagcguggacugcaccauguacaucugcggcgauuccaccgagugcuccaaccugcugcugcaguacggcagcuucugcacccagcugaauagagcccugacagggaucgccguggaacaggacaagaacacccaagagguguucgcccaagugaagcaaaucuacaagaccccuccuaucaaggacuucggcggcuucaauuucagccagauucugcccgauccuagcaagcccagcaagcggagcuucaucgaggaccugcuguucaacaaagugacacuggccgacgccggcuucaucaagcaguauggcgauugucugggcgacauugccgccagggaucugauuugcgcccagaaguuuaacggacugacagugcugccuccucugcugaccgaugagaugaucgcccaguacacaucugcccugcuggccggcacaaucacaagcggcuggacauuuugcgcuggcgccgcucugcagauccccuuugcuaugcagauggccuaccgguucaacggcaucggagugacccagaaugugcuguacgagaaccagaagcugaucgccaaccaguucaacagcgccaucggcaagauccaggacagccugagcagcacagcaagcgcccugggaaagcugcaggacguggucaaccagaaugcccaggcacugaacacccuggucaagcagcuguccuccaacuucggcgccaucagcucugugcugaacgauauccugagcagacuggacaaggucgaggccgaggugcagaucgacagacugaucacaggcagacugcagagccuccagacauacgugacccagcagcugaucagagccgccgagauuagagccucugccaaucuggccgccaccaagaugucugaguguguguguggccagagcaagagaguggacuuuugcggcaagggcuaccaccugaugagcuucccucagucugccccucacggcgugguguuucugcacgugacauaugugcccgcucaagagaagaauuucaccaccgcuccagccaucugccacgacggcaaagcccacuuuccuagagaaggcguguucguguccaacggcacccauugguucgugacacagcggaacuucuacgagccccagaucaucaccaccgacaacaccuucgugucuggcaacugcgacguugugaucggcauugugaacaauaccguguacgacccucugcagcccgagcuggacagcggcggaggaucuggcggaggacagaucuacgagggcaagcugacagccgagggccugagauuuggaaucguggccagccgguucaaucacgcccugguggauagacugguggaaggcgccaucgaugccauugucagacacggcggcagagaagaggacaucacccucguuagagugcccggcucuugggagauuccuguggcugcuggcgagcuggcccggaaagaagauaucgacgccguuaucgccaucggcgugcugaucagaggcgccacaccucacuucgacuauaucgccagcgagguguccaaaggccuggccgaucugagccuggaacugagaaagcccaucaccuucggcgugaucaccgcugacacacuggaacaggccauugagagagccggcaccaagcacggcaacaaaggaugggaagccgcucuguccgccaucgagauggccaaccuguucaagagccugcggugaggacuagucccuguucccagagcccacuuuuuuuucuuuuuuugaaauaaaauagccugucuuucagaucucaaaggcucuuuucagagccaccaaaaaaaaaaaaaaaaaaaaaaaaaaaaaaaaaaaaaaaaaaaaaaaaaaaaaaaaaaaaaaaaaaaaaaaaaaaaaaaaaaaaaaaaaaaaaaaaaaaaa

SEQ ID NO: 12625 - RNA, 4196 nt, Artificial Sequence
  SARS-CoV-2/Wuhan/WIV05/2019__EPI_ISL_402128 spike protein mRNA gc mod (1-1147)(I909C_Y1047C) LumSynth construct
aggagagucccgcagucggcguccagcggcucugcuuguucgugugugugucguugcaggccuuauucaagcuuaccauguucguguuucuggugcugcugccccugguguccagccagugugugaaccugaccaccagaacacagcugccuccagccuacaccaacagcuucaccagaggcguguacuaccccgacaagguguucagauccagcgugcugcacucuacccaggaccuguuccugccuuucuucagcaacgugaccugguuccacgccauccacguguccggcaccaauggcaccaagagauucgacaaccccgugcugcccuucaacgacgggguguacuuugccagcaccgagaaguccaacaucaucagaggcuggaucuucggcaccacacuggacagcaagacccagagccugcugaucgugaacaacgccaccaacguggucaucaaagugugcgaguuccaguucugcaacgaccccuuccugggcgucuacuaccacaagaacaacaagagcuggauggaaagcgaguuccggguguacagcagcgccaacaacugcaccuucgaguacgugucccagccuuuccugauggaccuggaaggcaagcagggcaacuucaagaaccugcgcgaguucguguucaagaacaucgacggcuacuucaaaaucuacagcaagcacaccccuaucaaccucgugcgggaucugccucagggcuucucugcucuggaaccccugguggaucugcccaucggcaucaacaucacccgguuucagacacugcuggcccugcacagaagcuaccugacaccuggcgauagcagcagcggauggacagcuggugccgccgcuuacuaugugggcuaccugcagccuagaaccuuccugcugaaguacaacgagaacggcaccaucaccgacgccguggauugugcucuggauccucugagcgagacaaagugcacccugaaguccuucaccguggaaaagggcaucuaccagaccagcaacuuccgggugcagcccaccgaauccaucgugcgguuccccaauaucaccaaucugugccccuucggcgagguguucaaugccaccagauucgccucuguguacgccuggaaccggaagcggaucagcaauugcguggccgacuacuccgugcuguacaacuccgccagcuucagcaccuucaagugcuacggcguguccccuaccaagcugaacgaccugugcuucacaaacguguacgccgacagcuucgugauccggggagaugaagugcggcagauugccccuggacagacaggcaagaucgccgacuacaacuacaagcugcccgacgacuucaccggcugugugauugccuggaacagcaacaaccuggacuccaaagucggcggcaacuacaauuaccuguaccggcuguuccggaaguccaaucugaagcccuucgagcgggacaucagcaccgaaaucuaucaggccggcagcaccccuugcaacggcguggaaggcuucaacugcuacuucccacugcaguccuacggcuuucagcccacaaauggcgugggcuaucagcccuacagagugguggugcugagcuucgaacugcugcaugcuccugccacagugugcggcccuaagaaaagcaccaaucucgugaagaacaaaugcgugaacuucaacuucaacggccugaccggcaccggcgugcugacagagagcaacaagaaguuccugccauuccagcaguuuggccgggauaucgccgauaccacagacgccguuagagauccccagacacuggaaauccuggacaucaccccaugcagcuucggcggagugucugugaucaccccuggcaccaacaccagcaaucagguggcagugcuguaccaggacgugaacuguaccgaagugcccguggccauucacgccgaucagcugacaccuacauggcggguguacuccaccggcagcaauguguuucagaccagagccggcugucugaucggagccgagcacgugaacaauagcuacgagugcgacauccccaucggcgcuggcaucugugccagcuaccagacacagacaaacagccccagacgggcuagaagcguggccagccagagcaucauugccuacacaaugucucugggcgccgagaacagcguggccuacuccaacaacucuaucgcuauccccaccaacuucaccaucagcgugaccaccgagauccugccuguguccaugaccaagaccagcguggacugcaccauguacaucugcggcgauuccaccgagugcuccaaccugcugcugcaguacggcagcuucugcacccagcugaauagagcccugacagggaucgccguggaacaggacaagaacacccaagagguguucgcccaagugaagcaaaucuacaagaccccuccuaucaaggacuucggcggcuucaauuucagccagauucugcccgauccuagcaagcccagcaagcggagcuucaucgaggaccugcuguucaacaaagugacacuggccgacgccggcuucaucaagcaguauggcgauugucugggcgacauugccgccagggaucugauuugcgcccagaaguuuaacggacugacagugcugccuccucugcugaccgaugagaugaucgcccaguacacaucugcccugcuggccggcacaaucacaagcggcuggacauuuggagcuggcgccgcucugcagauccccuuugcuaugcagauggccuaccgguucaacggcugcggagugacccagaaugugcuguacgagaaccagaagcugaucgccaaccaguucaacagcgccaucggcaagauccaggacagccugagcagcacagcaagcgcccugggaaagcugcaggacguggucaaccagaaugcccaggcacugaacacccuggucaagcagcuguccuccaacuucggcgccaucagcucugugcugaacgauauccugagcagacuggacaaggucgaggccgaggugcagaucgacagacugaucacaggcagacugcagagccuccagacauacgugacccagcagcugaucagagccgccgagauuagagccucugccaaucuggccgccaccaagaugucugagugugugcugggccagagcaagagaguggacuuuugcggcaagggcugucaccugaugagcuucccucagucugccccucacggcgugguguuucugcacgugacauaugugcccgcucaagagaagaauuucaccaccgcuccagccaucugccacgacggcaaagcccacuuuccuagagaaggcguguucguguccaacggcacccauugguucgugacacagcggaacuucuacgagccccagaucaucaccaccgacaacaccuucgugucuggcaacugcgacguugugaucggcauugugaacaauaccguguacgacccucugcagcccgagcuggacagcggcggaggaucuggcggaggacagaucuacgagggcaagcugacagccgagggccugagauuuggaaucguggccagccgguucaaucacgcccugguggauagacugguggaaggcgccaucgaugccauugucagacacggcggcagagaagaggacaucacccucguuagagugcccggcucuugggagauuccuguggcugcuggcgagcuggcccggaaagaagauaucgacgccguuaucgccaucggcgugcugaucagaggcgccacaccucacuucgacuauaucgccagcgagguguccaaaggccuggccgaucugagccuggaacugagaaagcccaucaccuucggcgugaucaccgcugacacacuggaacaggccauugagagagccggcaccaagcacggcaacaaaggaugggaagccgcucuguccgccaucgagauggccaaccuguucaagagccugcggugaggacuagucccuguucccagagcccacuuuuuuuucuuuuuuugaaauaaaauagccugucuuucagaucucaaaggcucuuuucagagccaccaaaaaaaaaaaaaaaaaaaaaaaaaaaaaaaaaaaaaaaaaaaaaaaaaaaaaaaaaaaaaaaaaaaaaaaaaaaaaaaaaaaaaaaaaaaaaaaaaaaaa

SEQ ID NO: 12626 - RNA, 4196 nt, Artificial Sequence
  SARS-CoV-2/Wuhan/WIV05/2019__EPI_ISL_402128 spike protein mRNA gc mod (1-1147)(Q965C_S1003C) LumSynth construct
aggagagucccgcagucggcguccagcggcucugcuuguucgugugugugucguugcaggccuuauucaagcuuaccauguucguguuucuggugcugcugccccugguguccagccagugugugaaccugaccaccagaacacagcugccuccagccuacaccaacagcuucaccagaggcguguacuaccccgacaagguguucagauccagcgugcugcacucuacccaggaccuguuccugccuuucuucagcaacgugaccugguuccacgccauccacguguccggcaccaauggcaccaagagauucgacaaccccgugcugcccuucaacgacgggguguacuuugccagcaccgagaaguccaacaucaucagaggcuggaucuucggcaccacacuggacagcaagacccagagccugcugaucgugaacaacgccaccaacguggucaucaaagugugcgaguuccaguucugcaacgaccccuuccugggcgucuacuaccacaagaacaacaagagcuggauggaaagcgaguuccggguguacagcagcgccaacaacugcaccuucgaguacgugucccagccuuuccugauggaccuggaaggcaagcagggcaacuucaagaaccugcgcgaguucguguucaagaacaucgacggcuacuucaaaaucuacagcaagcacaccccuaucaaccucgugcgggaucugccucagggcuucucugcucuggaaccccugguggaucugcccaucggcaucaacaucacccgguuucagacacugcuggcccugcacagaagcuaccugacaccuggcgauagcagcagcggauggacagcuggugccgccgcuuacuaugugggcuaccugcagccuagaaccuuccugcugaaguacaacgagaacggcaccaucaccgacgccguggauugugcucuggauccucugagcgagacaaagugcacccugaaguccuucaccguggaaaagggcaucuaccagaccagcaacuuccgggugcagcccaccgaauccaucgugcgguuccccaauaucaccaaucugugccccuucggcgagguguucaaugccaccagauucgccucuguguacgccuggaaccggaagcggaucagcaauugcguggccgacuacuccgugcuguacaacuccgccagcuucagcaccuucaagugcuacggcguguccccuaccaagcugaacgaccugugcuucacaaacguguacgccgacagcuucgugauccggggagaugaagugcggcagauugccccuggacagacaggcaagaucgccgacuacaacuacaagcugcccgacgacuucaccggcugugugauugccuggaacagcaacaaccuggacuccaaagucggcggcaacuacaauuaccuguaccggcuguuccggaaguccaaucugaagcccuucgagcgggacaucagcaccgaaaucuaucaggccggcagcaccccuugcaacggcguggaaggcuucaacugcuacuucccacugcaguccuacggcuuucagcccacaaauggcgugggcuaucagcccuacagagugguggugcugagcuucgaacugcugcaugcuccugccacagugugcggcccuaagaaaagcaccaaucucgugaagaacaaaugcgugaacuucaacuucaacggccugaccggcaccggcgugcugacagagagcaacaagaaguuccugccauuccagcaguuuggccgggauaucgccgauaccacagacgccguuagagauccccagacacuggaaauccuggacaucaccccaugcagcuucggcggagugucugugaucaccccuggcaccaacaccagcaaucagguggcagugcuguaccaggacgugaacuguaccgaagugcccguggccauucacgccgaucagcugacaccuacauggcggguguacuccaccggcagcaauguguuucagaccagagccggcugucugaucggagccgagcacgugaacaauagcuacgagugcgacauccccaucggcgcuggcaucugugccagcuaccagacacagacaaacagccccagacgggcuagaagcguggccagccagagcaucauugccuacacaaugucucugggcgccgagaacagcguggccuacuccaacaacucuaucgcuauccccaccaacuucaccaucagcgugaccaccgagauccugccuguguccaugaccaagaccagcguggacugcaccauguacaucugcggcgauuccaccgagugcuccaaccugcugcugcaguacggcagcuucugcacccagcugaauagagcccugacagggaucgccguggaacaggacaagaacacccaagagguguucgcccaagugaagcaaaucuacaagaccccuccuaucaaggacuucggcggcuucaauuucagccagauucugcccgauccuagcaagcccagcaagcggagcuucaucgaggaccugcuguucaacaaagugacacuggccgacgccggcuucaucaagcaguauggcgauugucugggcgacauugccgccagggaucugauuugcgcccagaaguuuaacggacugacagugcugccuccucugcugaccgaugagaugaucgcccaguacacaucugcccugcuggccggcacaaucacaagcggcuggacauuuggagcuggcgccgcucugcagauccccuuugcuaugcagauggccuaccgguucaacggcaucggagugacccagaaugugcuguacgagaaccagaagcugaucgccaaccaguucaacagcgccaucggcaagauccaggacagccugagcagcacagcaagcgcccugggaaagcugcaggacguggucaaccagaaugcccaggcacugaacacccuggucaagugccuguccuccaacuucggcgccaucagcucugugcugaacgauauccugagcagacuggacaaggucgaggccgaggugcagaucgacagacugaucacaggcagacugcagugucuccagacauacgugacccagcagcugaucagagccgccgagauuagagccucugccaaucuggccgccaccaagaugucugagugugugcugggccagagcaagagaguggacuuuugcggcaagggcuaccaccugaugagcuucccucagucugccccucacggcgugguguuucugcacgugacauaugugcccgcucaagagaagaauuucaccaccgcuccagccaucugccacgacggcaaagcccacuuuccuagagaaggcguguucguguccaacggcacccauugguucgugacacagcggaacuucuacgagccccagaucaucaccaccgacaacaccuucgugucuggcaacugcgacguugugaucggcauugugaacaauaccguguacgacccucugcagcccgagcuggacagcggcggaggaucuggcggaggacagaucuacgagggcaagcugacagccgagggccugagauuuggaaucguggccagccgguucaaucacgcccugguggauagacugguggaaggcgccaucgaugccauugucagacacggcggcagagaagaggacaucacccucguuagagugcccggcucuugggagauuccuguggcugcuggcgagcuggcccggaaagaagauaucgacgccguuaucgccaucggcgugcugaucagaggcgccacaccucacuucgacuauaucgccagcgagguguccaaaggccuggccgaucugagccuggaacugagaaagcccaucaccuucggcgugaucaccgcugacacacuggaacaggccauugagagagccggcaccaagcacggcaacaaaggaugggaagccgcucuguccgccaucgagauggccaaccuguucaagagccugcggugaggacuagucccuguucccagagcccacuuuuuuuucuuuuuuugaaauaaaauagccugucuuucagaucucaaaggcucuuuucagagccaccaaaaaaaaaaaaaaaaaaaaaaaaaaaaaaaaaaaaaaaaaaaaaaaaaaaaaaaaaaaaaaaaaaaaaaaaaaaaaaaaaaaaaaaaaaaaaaaaaaaaa

SEQ ID NO: 12627 - RNA, 4196 nt, Artificial Sequence
  SARS-CoV-2/Wuhan/WIV05/2019__EPI_ISL_402128 spike protein mRNA gc mod (1-1147)(F970C_G999C) LumSynth construct
aggagagucccgcagucggcguccagcggcucugcuuguucgugugugugucguugcaggccuuauucaagcuuaccauguucguguuucuggugcugcugccccugguguccagccagugugugaaccugaccaccagaacacagcugccuccagccuacaccaacagcuucaccagaggcguguacuaccccgacaagguguucagauccagcgugcugcacucuacccaggaccuguuccugccuuucuucagcaacgugaccugguuccacgccauccacguguccggcaccaauggcaccaagagauucgacaaccccgugcugcccuucaacgacgggguguacuuugccagcaccgagaaguccaacaucaucagaggcuggaucuucggcaccacacuggacagcaagacccagagccugcugaucgugaacaacgccaccaacguggucaucaaagugugcgaguuccaguucugcaacgaccccuuccugggcgucuacuaccacaagaacaacaagagcuggauggaaagcgaguuccggguguacagcagcgccaacaacugcaccuucgaguacgugucccagccuuuccugauggaccuggaaggcaagcagggcaacuucaagaaccugcgcgaguucguguucaagaacaucgacggcuacuucaaaaucuacagcaagcacaccccuaucaaccucgugcgggaucugccucagggcuucucugcucuggaaccccugguggaucugcccaucggcaucaacaucacccgguuucagacacugcuggcccugcacagaagcuaccugacaccuggcgauagcagcagcggauggacagcuggugccgccgcuuacuaugugggcuaccugcagccuagaaccuuccugcugaaguacaacgagaacggcaccaucaccgacgccguggauugugcucuggauccucugagcgagacaaagugcacccugaaguccuucaccguggaaaagggcaucuaccagaccagcaacuuccgggugcagcccaccgaauccaucgugcgguuccccaauaucaccaaucugugccccuucggcgagguguucaaugccaccagauucgccucuguguacgccuggaaccggaagcggaucagcaauugcguggccgacuacuccgugcuguacaacuccgccagcuucagcaccuucaagugcuacggcguguccccuaccaagcugaacgaccugugcuucacaaacguguacgccgacagcuucgugauccggggagaugaagugcggcagauugccccuggacagacaggcaagaucgccgacuacaacuacaagcugcccgacgacuucaccggcugugugauugccuggaacagcaacaaccuggacuccaaagucggcggcaacuacaauuaccuguaccggcuguuccggaaguccaaucugaagcccuucgagcgggacaucagcaccgaaaucuaucaggccggcagcaccccuugcaacggcguggaaggcuucaacugcuacuucccacugcaguccuacggcuuucagcccacaaauggcgugggcuaucagcccuacagagugguggugcugagcuucgaacugcugcaugcuccugccacagugugcggcccuaagaaaagcaccaaucucgugaagaacaaaugcgugaacuucaacuucaacggccugaccggcaccggcgugcugacagagagcaacaagaaguuccugccauuccagcaguuuggccgggauaucgccgauaccacagacgccguuagagauccccagacacuggaaauccuggacaucaccccaugcagcuucggcggagugucugugaucaccccuggcaccaacaccagcaaucagguggcagugcuguaccaggacgugaacuguaccgaagugcccguggccauucacgccgaucagcugacaccuacauggcggguguacuccaccggcagcaauguguuucagaccagagccggcugucugaucggagccgagcacgugaacaauagcuacgagugcgacauccccaucggcgcuggcaucugugccagcuaccagacacagacaaacagccccagacgggcuagaagcguggccagccagagcaucauugccuacacaaugucucugggcgccgagaacagcguggccuacuccaacaacucuaucgcuauccccaccaacuucaccaucagcgugaccaccgagauccugccuguguccaugaccaagaccagcguggacugcaccauguacaucugcggcgauuccaccgagugcuccaaccugcugcugcaguacggcagcuucugcacccagcugaauagagcccugacagggaucgccguggaacaggacaagaacacccaagagguguucgcccaagugaagcaaaucuacaagaccccuccuaucaaggacuucggcggcuucaauuucagccagauucugcccgauccuagcaagcccagcaagcggagcuucaucgaggaccugcuguucaacaaagugacacuggccgacgccggcuucaucaagcaguauggcgauugucugggcgacauugccgccagggaucugauuugcgcccagaaguuuaacggacugacagugcugccuccucugcugaccgaugagaugaucgcccaguacacaucugcccugcuggccggcacaaucacaagcggcuggacauuuggagcuggcgccgcucugcagauccccuuugcuaugcagauggccuaccgguucaacggcaucggagugacccagaaugugcuguacgagaaccagaagcugaucgccaaccaguucaacagcgccaucggcaagauccaggacagccugagcagcacagcaagcgcccugggaaagcugcaggacguggucaaccagaaugcccaggcacugaacacccuggucaagcagcuguccuccaacugcggcgccaucagcucugugcugaacgauauccugagcagacuggacaaggucgaggccgaggugcagaucgacagacugaucacauguagacugcagagccuccagacauacgugacccagcagcugaucagagccgccgagauuagagccucugccaaucuggccgccaccaagaugucugagugugugcugggccagagcaagagaguggacuuuugcggcaagggcuaccaccugaugagcuucccucagucugccccucacggcgugguguuucugcacgugacauaugugcccgcucaagagaagaauuucaccaccgcuccagccaucugccacgacggcaaagcccacuuuccuagagaaggcguguucguguccaacggcacccauugguucgugacacagcggaacuucuacgagccccagaucaucaccaccgacaacaccuucgugucuggcaacugcgacguugugaucggcauugugaacaauaccguguacgacccucugcagcccgagcuggacagcggcggaggaucuggcggaggacagaucuacgagggcaagcugacagccgagggccugagauuuggaaucguggccagccgguucaaucacgcccugguggauagacugguggaaggcgccaucgaugccauugucagacacggcggcagagaagaggacaucacccucguuagagugcccggcucuugggagauuccuguggcugcuggcgagcuggcccggaaagaagauaucgacgccguuaucgccaucggcgugcugaucagaggcgccacaccucacuucgacuauaucgccagcgagguguccaaaggccuggccgaucugagccuggaacugagaaagcccaucaccuucggcgugaucaccgcugacacacuggaacaggccauugagagagccggcaccaagcacggcaacaaaggaugggaagccgcucuguccgccaucgagauggccaaccuguucaagagccugcggugaggacuagucccuguucccagagcccacuuuuuuuucuuuuuuugaaauaaaauagccugucuuucagaucucaaaggcucuuuucagagccaccaaaaaaaaaaaaaaaaaaaaaaaaaaaaaaaaaaaaaaaaaaaaaaaaaaaaaaaaaaaaaaaaaaaaaaaaaaaaaaaaaaaaaaaaaaaaaaaaaaaaa

SEQ ID NO: 12628 - RNA, 4196 nt, Artificial Sequence
  SARS-CoV-2/Wuhan/WIV05/2019__EPI_ISL_402128 spike protein mRNA gc mod (1-1147)(A972C_R995C) LumSynth construct
aggagagucccgcagucggcguccagcggcucugcuuguucgugugugugucguugcaggccuuauucaagcuuaccauguucguguuucuggugcugcugccccugguguccagccagugugugaaccugaccaccagaacacagcugccuccagccuacaccaacagcuucaccagaggcguguacuaccccgacaagguguucagauccagcgugcugcacucuacccaggaccuguuccugccuuucuucagcaacgugaccugguuccacgccauccacguguccggcaccaauggcaccaagagauucgacaaccccgugcugcccuucaacgacgggguguacuuugccagcaccgagaaguccaacaucaucagaggcuggaucuucggcaccacacuggacagcaagacccagagccugcugaucgugaacaacgccaccaacguggucaucaaagugugcgaguuccaguucugcaacgaccccuuccugggcgucuacuaccacaagaacaacaagagcuggauggaaagcgaguuccggguguacagcagcgccaacaacugcaccuucgaguacgugucccagccuuuccugauggaccuggaaggcaagcagggcaacuucaagaaccugcgcgaguucguguucaagaacaucgacggcuacuucaaaaucuacagcaagcacaccccuaucaaccucgugcgggaucugccucagggcuucucugcucuggaaccccugguggaucugcccaucggcaucaacaucacccgguuucagacacugcuggcccugcacagaagcuaccugacaccuggcgauagcagcagcggauggacagcuggugccgccgcuuacuaugugggcuaccugcagccuagaaccuuccugcugaaguacaacgagaacggcaccaucaccgacgccguggauugugcucuggauccucugagcgagacaaagugcacccugaaguccuucaccguggaaaagggcaucuaccagaccagcaacuuccgggugcagcccaccgaauccaucgugcgguuccccaauaucaccaaucugugccccuucggcgagguguucaaugccaccagauucgccucuguguacgccuggaaccggaagcggaucagcaauugcguggccgacuacuccgugcuguacaacuccgccagcuucagcaccuucaagugcuacggcguguccccuaccaagcugaacgaccugugcuucacaaacguguacgccgacagcuucgugauccggggagaugaagugcggcagauugccccuggacagacaggcaagaucgccgacuacaacuacaagcugcccgacgacuucaccggcugugugauugccuggaacagcaacaaccuggacuccaaagucggcggcaacuacaauuaccuguaccggcuguuccggaaguccaaucugaagcccuucgagcgggacaucagcaccgaaaucuaucaggccggcagcaccccuugcaacggcguggaaggcuucaacugcuacuucccacugcaguccuacggcuuucagcccacaaauggcgugggcuaucagcccuacagagugguggugcugagcuucgaacugcugcaugcuccugccacagugugcggcccuaagaaaagcaccaaucucgugaagaacaaaugcgugaacuucaacuucaacggccugaccggcaccggcgugcugacagagagcaacaagaaguuccugccauuccagcaguuuggccgggauaucgccgauaccacagacgccguuagagauccccagacacuggaaauccuggacaucaccccaugcagcuucggcggagugucugugaucaccccuggcaccaacaccagcaaucagguggcagugcuguaccaggacgugaacuguaccgaagugcccguggccauucacgccgaucagcugacaccuacauggcggguguacuccaccggcagcaauguguuucagaccagagccggcugucugaucggagccgagcacgugaacaauagcuacgagugcgacauccccaucggcgcuggcaucugugccagcuaccagacacagacaaacagccccagacgggcuagaagcguggccagccagagcaucauugccuacacaaugucucugggcgccgagaacagcguggccuacuccaacaacucuaucgcuauccccaccaacuucaccaucagcgugaccaccgagauccugccuguguccaugaccaagaccagcguggacugcaccauguacaucugcggcgauuccaccgagugcuccaaccugcugcugcaguacggcagcuucugcacccagcugaauagagcccugacagggaucgccguggaacaggacaagaacacccaagagguguucgcccaagugaagcaaaucuacaagaccccuccuaucaaggacuucggcggcuucaauuucagccagauucugcccgauccuagcaagcccagcaagcggagcuucaucgaggaccugcuguucaacaaagugacacuggccgacgccggcuucaucaagcaguauggcgauugucugggcgacauugccgccagggaucugauuugcgcccagaaguuuaacggacugacagugcugccuccucugcugaccgaugagaugaucgcccaguacacaucugcccugcuggccggcacaaucacaagcggcuggacauuuggagcuggcgccgcucugcagauccccuuugcuaugcagauggccuaccgguucaacggcaucggagugacccagaaugugcuguacgagaaccagaagcugaucgccaaccaguucaacagcgccaucggcaagauccaggacagccugagcagcacagcaagcgcccugggaaagcugcaggacguggucaaccagaaugcccaggcacugaacacccuggucaagcagcuguccuccaacuucggcugcaucagcucugugcugaacgauauccugagcagacuggacaaggucgaggccgaggugcagaucgacugucugaucacaggcagacugcagagccuccagacauacgugacccagcagcugaucagagccgccgagauuagagccucugccaaucuggccgccaccaagaugucugagugugugcugggccagagcaagagaguggacuuuugcggcaagggcuaccaccugaugagcuucccucagucugccccucacggcgugguguuucugcacgugacauaugugcccgcucaagagaagaauuucaccaccgcuccagccaucugccacgacggcaaagcccacuuuccuagagaaggcguguucguguccaacggcacccauugguucgugacacagcggaacuucuacgagccccagaucaucaccaccgacaacaccuucgugucuggcaacugcgacguugugaucggcauugugaacaauaccguguacgacccucugcagcccgagcuggacagcggcggaggaucuggcggaggacagaucuacgagggcaagcugacagccgagggccugagauuuggaaucguggccagccgguucaaucacgcccugguggauagacugguggaaggcgccaucgaugccauugucagacacggcggcagagaagaggacaucacccucguuagagugcccggcucuugggagauuccuguggcugcuggcgagcuggcccggaaagaagauaucgacgccguuaucgccaucggcgugcugaucagaggcgccacaccucacuucgacuauaucgccagcgagguguccaaaggccuggccgaucugagccuggaacugagaaagcccaucaccuucggcgugaucaccgcugacacacuggaacaggccauugagagagccggcaccaagcacggcaacaaaggaugggaagccgcucuguccgccaucgagauggccaaccuguucaagagccugcggugaggacuagucccuguucccagagcccacuuuuuuuucuuuuuuugaaauaaaauagccugucuuucagaucucaaaggcucuuuucagagccaccaaaaaaaaaaaaaaaaaaaaaaaaaaaaaaaaaaaaaaaaaaaaaaaaaaaaaaaaaaaaaaaaaaaaaaaaaaaaaaaaaaaaaaaaaaaaaaaaaaaaa

SEQ ID NO: 12629 - RNA, 4196 nt, Artificial Sequence
  SARS-CoV-2/Wuhan/WIV05/2019__EPI_ISL_402128 spike protein mRNA gc mod (1-1147)(A890C_V1040C) LumSynth construct
aggagagucccgcagucggcguccagcggcucugcuuguucgugugugugucguugcaggccuuauucaagcuuaccauguucguguuucuggugcugcugccccugguguccagccagugugugaaccugaccaccagaacacagcugccuccagccuacaccaacagcuucaccagaggcguguacuaccccgacaagguguucagauccagcgugcugcacucuacccaggaccuguuccugccuuucuucagcaacgugaccugguuccacgccauccacguguccggcaccaauggcaccaagagauucgacaaccccgugcugcccuucaacgacgggguguacuuugccagcaccgagaaguccaacaucaucagaggcuggaucuucggcaccacacuggacagcaagacccagagccugcugaucgugaacaacgccaccaacguggucaucaaagugugcgaguuccaguucugcaacgaccccuuccugggcgucuacuaccacaagaacaacaagagcuggauggaaagcgaguuccggguguacagcagcgccaacaacugcaccuucgaguacgugucccagccuuuccugauggaccuggaaggcaagcagggcaacuucaagaaccugcgcgaguucguguucaagaacaucgacggcuacuucaaaaucuacagcaagcacaccccuaucaaccucgugcgggaucugccucagggcuucucugcucuggaaccccugguggaucugcccaucggcaucaacaucacccgguuucagacacugcuggcccugcacagaagcuaccugacaccuggcgauagcagcagcggauggacagcuggugccgccgcuuacuaugugggcuaccugcagccuagaaccuuccugcugaaguacaacgagaacggcaccaucaccgacgccguggauugugcucuggauccucugagcgagacaaagugcacccugaaguccuucaccguggaaaagggcaucuaccagaccagcaacuuccgggugcagcccaccgaauccaucgugcgguuccccaauaucaccaaucugugccccuucggcgagguguucaaugccaccagauucgccucuguguacgccuggaaccggaagcggaucagcaauugcguggccgacuacuccgugcuguacaacuccgccagcuucagcaccuucaagugcuacggcguguccccuaccaagcugaacgaccugugcuucacaaacguguacgccgacagcuucgugauccggggagaugaagugcggcagauugccccuggacagacaggcaagaucgccgacuacaacuacaagcugcccgacgacuucaccggcugugugauugccuggaacagcaacaaccuggacuccaaagucggcggcaacuacaauuaccuguaccggcuguuccggaaguccaaucugaagcccuucgagcgggacaucagcaccgaaaucuaucaggccggcagcaccccuugcaacggcguggaaggcuucaacugcuacuucccacugcaguccuacggcuuucagcccacaaauggcgugggcuaucagcccuacagagugguggugcugagcuucgaacugcugcaugcuccugccacagugugcggcccuaagaaaagcaccaaucucgugaagaacaaaugcgugaacuucaacuucaacggccugaccggcaccggcgugcugacagagagcaacaagaaguuccugccauuccagcaguuuggccgggauaucgccgauaccacagacgccguuagagauccccagacacuggaaauccuggacaucaccccaugcagcuucggcggagugucugugaucaccccuggcaccaacaccagcaaucagguggcagugcuguaccaggacgugaacuguaccgaagugcccguggccauucacgccgaucagcugacaccuacauggcggguguacuccaccggcagcaauguguuucagaccagagccggcugucugaucggagccgagcacgugaacaauagcuacgagugcgacauccccaucggcgcuggcaucugugccagcuaccagacacagacaaacagccccagacgggcuagaagcguggccagccagagcaucauugccuacacaaugucucugggcgccgagaacagcguggccuacuccaacaacucuaucgcuauccccaccaacuucaccaucagcgugaccaccgagauccugccuguguccaugaccaagaccagcguggacugcaccauguacaucugcggcgauuccaccgagugcuccaaccugcugcugcaguacggcagcuucugcacccagcugaauagagcccugacagggaucgccguggaacaggacaagaacacccaagagguguucgcccaagugaagcaaaucuacaagaccccuccuaucaaggacuucggcggcuucaauuucagccagauucugcccgauccuagcaagcccagcaagcggagcuucaucgaggaccugcuguucaacaaagugacacuggccgacgccggcuucaucaagcaguauggcgauugucugggcgacauugccgccagggaucugauuugcgcccagaaguuuaacggacugacagugcugccuccucugcugaccgaugagaugaucgcccaguacacaucugcccugcuggccggcacaaucacaagcggcuggacauuuggaugcggcgccgcucugcagauccccuuugcuaugcagauggccuaccgguucaacggcaucggagugacccagaaugugcuguacgagaaccagaagcugaucgccaaccaguucaacagcgccaucggcaagauccaggacagccugagcagcacagcaagcgcccugggaaagcugcaggacguggucaaccagaaugcccaggcacugaacacccuggucaagcagcuguccuccaacuucggcgccaucagcucugugcugaacgauauccugagcagacuggacaaggucgaggccgaggugcagaucgacagacugaucacaggcagacugcagagccuccagacauacgugacccagcagcugaucagagccgccgagauuagagccucugccaaucuggccgccaccaagaugucugagugugugcugggccagagcaagagaugugacuuuugcggcaagggcuaccaccugaugagcuucccucagucugccccucacggcgugguguuucugcacgugacauaugugcccgcucaagagaagaauuucaccaccgcuccagccaucugccacgacggcaaagcccacuuuccuagagaaggcguguucguguccaacggcacccauugguucgugacacagcggaacuucuacgagccccagaucaucaccaccgacaacaccuucgugucuggcaacugcgacguugugaucggcauugugaacaauaccguguacgacccucugcagcccgagcuggacagcggcggaggaucuggcggaggacagaucuacgagggcaagcugacagccgagggccugagauuuggaaucguggccagccgguucaaucacgcccugguggauagacugguggaaggcgccaucgaugccauugucagacacggcggcagagaagaggacaucacccucguuagagugcccggcucuugggagauuccuguggcugcuggcgagcuggcccggaaagaagauaucgacgccguuaucgccaucggcgugcugaucagaggcgccacaccucacuucgacuauaucgccagcgagguguccaaaggccuggccgaucugagccuggaacugagaaagcccaucaccuucggcgugaucaccgcugacacacuggaacaggccauugagagagccggcaccaagcacggcaacaaaggaugggaagccgcucuguccgccaucgagauggccaaccuguucaagagccugcggugaggacuagucccuguucccagagcccacuuuuuuuucuuuuuuugaaauaaaauagccugucuuucagaucucaaaggcucuuuucagagccaccaaaaaaaaaaaaaaaaaaaaaaaaaaaaaaaaaaaaaaaaaaaaaaaaaaaaaaaaaaaaaaaaaaaaaaaaaaaaaaaaaaaaaaaaaaaaaaaaaaaaa

SEQ ID NO: 12630 - RNA, 4196 nt, Artificial Sequence
  SARS-CoV-2/Wuhan/WIV05/2019__EPI_ISL_402128 spike protein mRNA gc mod (1-1147)(T874C_S1055C) LumSynth construct
aggagagucccgcagucggcguccagcggcucugcuuguucgugugugugucguugcaggccuuauucaagcuuaccauguucguguuucuggugcugcugccccugguguccagccagugugugaaccugaccaccagaacacagcugccuccagccuacaccaacagcuucaccagaggcguguacuaccccgacaagguguucagauccagcgugcugcacucuacccaggaccuguuccugccuuucuucagcaacgugaccugguuccacgccauccacguguccggcaccaauggcaccaagagauucgacaaccccgugcugcccuucaacgacgggguguacuuugccagcaccgagaaguccaacaucaucagaggcuggaucuucggcaccacacuggacagcaagacccagagccugcugaucgugaacaacgccaccaacguggucaucaaagugugcgaguuccaguucugcaacgaccccuuccugggcgucuacuaccacaagaacaacaagagcuggauggaaagcgaguuccggguguacagcagcgccaacaacugcaccuucgaguacgugucccagccuuuccugauggaccuggaaggcaagcagggcaacuucaagaaccugcgcgaguucguguucaagaacaucgacggcuacuucaaaaucuacagcaagcacaccccuaucaaccucgugcgggaucugccucagggcuucucugcucuggaaccccugguggaucugcccaucggcaucaacaucacccgguuucagacacugcuggcccugcacagaagcuaccugacaccuggcgauagcagcagcggauggacagcuggugccgccgcuuacuaugugggcuaccugcagccuagaaccuuccugcugaaguacaacgagaacggcaccaucaccgacgccguggauugugcucuggauccucugagcgagacaaagugcacccugaaguccuucaccguggaaaagggcaucuaccagaccagcaacuuccgggugcagcccaccgaauccaucgugcgguuccccaauaucaccaaucugugccccuucggcgagguguucaaugccaccagauucgccucuguguacgccuggaaccggaagcggaucagcaauugcguggccgacuacuccgugcuguacaacuccgccagcuucagcaccuucaagugcuacggcguguccccuaccaagcugaacgaccugugcuucacaaacguguacgccgacagcuucgugauccggggagaugaagugcggcagauugccccuggacagacaggcaagaucgccgacuacaacuacaagcugcccgacgacuucaccggcugugugauugccuggaacagcaacaaccuggacuccaaagucggcggcaacuacaauuaccuguaccggcuguuccggaaguccaaucugaagcccuucgagcgggacaucagcaccgaaaucuaucaggccggcagcaccccuugcaacggcguggaaggcuucaacugcuacuucccacugcaguccuacggcuuucagcccacaaauggcgugggcuaucagcccuacagagugguggugcugagcuucgaacugcugcaugcuccugccacagugugcggcccuaagaaaagcaccaaucucgugaagaacaaaugcgugaacuucaacuucaacggccugaccggcaccggcgugcugacagagagcaacaagaaguuccugccauuccagcaguuuggccgggauaucgccgauaccacagacgccguuagagauccccagacacuggaaauccuggacaucaccccaugcagcuucggcggagugucugugaucaccccuggcaccaacaccagcaaucagguggcagugcuguaccaggacgugaacuguaccgaagugcccguggccauucacgccgaucagcugacaccuacauggcggguguacuccaccggcagcaauguguuucagaccagagccggcugucugaucggagccgagcacgugaacaauagcuacgagugcgacauccccaucggcgcuggcaucugugccagcuaccagacacagacaaacagccccagacgggcuagaagcguggccagccagagcaucauugccuacacaaugucucugggcgccgagaacagcguggccuacuccaacaacucuaucgcuauccccaccaacuucaccaucagcgugaccaccgagauccugccuguguccaugaccaagaccagcguggacugcaccauguacaucugcggcgauuccaccgagugcuccaaccugcugcugcaguacggcagcuucugcacccagcugaauagagcccugacagggaucgccguggaacaggacaagaacacccaagagguguucgcccaagugaagcaaaucuacaagaccccuccuaucaaggacuucggcggcuucaauuucagccagauucugcccgauccuagcaagcccagcaagcggagcuucaucgaggaccugcuguucaacaaagugacacuggccgacgccggcuucaucaagcaguauggcgauugucugggcgacauugccgccagggaucugauuugcgcccagaaguuuaacggacugacagugcugccuccucugcugaccgaugagaugaucgcccaguacugcucugcccugcuggccggcacaaucacaagcggcuggacauuuggagcuggcgccgcucugcagauccccuuugcuaugcagauggccuaccgguucaacggcaucggagugacccagaaugugcuguacgagaaccagaagcugaucgccaaccaguucaacagcgccaucggcaagauccaggacagccugagcagcacagcaagcgcccugggaaagcugcaggacguggucaaccagaaugcccaggcacugaacacccuggucaagcagcuguccuccaacuucggcgccaucagcucugugcugaacgauauccugagcagacuggacaaggucgaggccgaggugcagaucgacagacugaucacaggcagacugcagagccuccagacauacgugacccagcagcugaucagagccgccgagauuagagccucugccaaucuggccgccaccaagaugucugagugugugcugggccagagcaagagaguggacuuuugcggcaagggcuaccaccugaugagcuucccucagugcgccccucacggcgugguguuucugcacgugacauaugugcccgcucaagagaagaauuucaccaccgcuccagccaucugccacgacggcaaagcccacuuuccuagagaaggcguguucguguccaacggcacccauugguucgugacacagcggaacuucuacgagccccagaucaucaccaccgacaacaccuucgugucuggcaacugcgacguugugaucggcauugugaacaauaccguguacgacccucugcagcccgagcuggacagcggcggaggaucuggcggaggacagaucuacgagggcaagcugacagccgagggccugagauuuggaaucguggccagccgguucaaucacgcccugguggauagacugguggaaggcgccaucgaugccauugucagacacggcggcagagaagaggacaucacccucguuagagugcccggcucuugggagauuccuguggcugcuggcgagcuggcccggaaagaagauaucgacgccguuaucgccaucggcgugcugaucagaggcgccacaccucacuucgacuauaucgccagcgagguguccaaaggccuggccgaucugagccuggaacugagaaagcccaucaccuucggcgugaucaccgcugacacacuggaacaggccauugagagagccggcaccaagcacggcaacaaaggaugggaagccgcucuguccgccaucgagauggccaaccuguucaagagccugcggugaggacuagucccuguucccagagcccacuuuuuuuucuuuuuuugaaauaaaauagccugucuuucagaucucaaaggcucuuuucagagccaccaaaaaaaaaaaaaaaaaaaaaaaaaaaaaaaaaaaaaaaaaaaaaaaaaaaaaaaaaaaaaaaaaaaaaaaaaaaaaaaaaaaaaaaaaaaaaaaaaaaaa

SEQ ID NO: 12631 - RNA, 4220 nt, Artificial Sequence
  SARS-CoV-2/Wuhan/WIV05/2019__EPI_ISL_402128 spike protein mRNA gc mod (1-1147) Ferritin construct
aggagagucccgcagucggcguccagcggcucugcuuguucgugugugugucguugcaggccuuauucaagcuuaccauguucguguuucuggugcugcugccccugguguccagccagugugugaaccugaccaccagaacacagcugccuccagccuacaccaacagcuucaccagaggcguguacuaccccgacaagguguucagauccagcgugcugcacucuacccaggaccuguuccugccuuucuucagcaacgugaccugguuccacgccauccacguguccggcaccaauggcaccaagagauucgacaaccccgugcugcccuucaacgacgggguguacuuugccagcaccgagaaguccaacaucaucagaggcuggaucuucggcaccacacuggacagcaagacccagagccugcugaucgugaacaacgccaccaacguggucaucaaagugugcgaguuccaguucugcaacgaccccuuccugggcgucuacuaccacaagaacaacaagagcuggauggaaagcgaguuccggguguacagcagcgccaacaacugcaccuucgaguacgugucccagccuuuccugauggaccuggaaggcaagcagggcaacuucaagaaccugcgcgaguucguguucaagaacaucgacggcuacuucaaaaucuacagcaagcacaccccuaucaaccucgugcgggaucugccucagggcuucucugcucuggaaccccugguggaucugcccaucggcaucaacaucacccgguuucagacacugcuggcccugcacagaagcuaccugacaccuggcgauagcagcagcggauggacagcuggugccgccgcuuacuaugugggcuaccugcagccuagaaccuuccugcugaaguacaacgagaacggcaccaucaccgacgccguggauugugcucuggauccucugagcgagacaaagugcacccugaaguccuucaccguggaaaagggcaucuaccagaccagcaacuuccgggugcagcccaccgaauccaucgugcgguuccccaauaucaccaaucugugccccuucggcgagguguucaaugccaccagauucgccucuguguacgccuggaaccggaagcggaucagcaauugcguggccgacuacuccgugcuguacaacuccgccagcuucagcaccuucaagugcuacggcguguccccuaccaagcugaacgaccugugcuucacaaacguguacgccgacagcuucgugauccggggagaugaagugcggcagauugccccuggacagacaggcaagaucgccgacuacaacuacaagcugcccgacgacuucaccggcugugugauugccuggaacagcaacaaccuggacuccaaagucggcggcaacuacaauuaccuguaccggcuguuccggaaguccaaucugaagcccuucgagcgggacaucagcaccgaaaucuaucaggccggcagcaccccuugcaacggcguggaaggcuucaacugcuacuucccacugcaguccuacggcuuucagcccacaaauggcgugggcuaucagcccuacagagugguggugcugagcuucgaacugcugcaugcuccugccacagugugcggcccuaagaaaagcaccaaucucgugaagaacaaaugcgugaacuucaacuucaacggccugaccggcaccggcgugcugacagagagcaacaagaaguuccugccauuccagcaguuuggccgggauaucgccgauaccacagacgccguuagagauccccagacacuggaaauccuggacaucaccccaugcagcuucggcggagugucugugaucaccccuggcaccaacaccagcaaucagguggcagugcuguaccaggacgugaacuguaccgaagugcccguggccauucacgccgaucagcugacaccuacauggcggguguacuccaccggcagcaauguguuucagaccagagccggcugucugaucggagccgagcacgugaacaauagcuacgagugcgacauccccaucggcgcuggcaucugugccagcuaccagacacagacaaacagccccagacgggcuagaagcguggccagccagagcaucauugccuacacaaugucucugggcgccgagaacagcguggccuacuccaacaacucuaucgcuauccccaccaacuucaccaucagcgugaccaccgagauccugccuguguccaugaccaagaccagcguggacugcaccauguacaucugcggcgauuccaccgagugcuccaaccugcugcugcaguacggcagcuucugcacccagcugaauagagcccugacagggaucgccguggaacaggacaagaacacccaagagguguucgcccaagugaagcaaaucuacaagaccccuccuaucaaggacuucggcggcuucaauuucagccagauucugcccgauccuagcaagcccagcaagcggagcuucaucgaggaccugcuguucaacaaagugacacuggccgacgccggcuucaucaagcaguauggcgauugucugggcgacauugccgccagggaucugauuugcgcccagaaguuuaacggacugacagugcugccuccucugcugaccgaugagaugaucgcccaguacacaucugcccugcuggccggcacaaucacaagcggcuggacauuuggagcuggcgccgcucugcagauccccuuugcuaugcagauggccuaccgguucaacggcaucggagugacccagaaugugcuguacgagaaccagaagcugaucgccaaccaguucaacagcgccaucggcaagauccaggacagccugagcagcacagcaagcgcccugggaaagcugcaggacguggucaaccagaaugcccaggcacugaacacccuggucaagcagcuguccuccaacuucggcgccaucagcucugugcugaacgauauccugagcagacuggacaaggucgaggccgaggugcagaucgacagacugaucacaggcagacugcagagccuccagacauacgugacccagcagcugaucagagccgccgagauuagagccucugccaaucuggccgccaccaagaugucugagugugugcugggccagagcaagagaguggacuuuugcggcaagggcuaccaccugaugagcuucccucagucugccccucacggcgugguguuucugcacgugacauaugugcccgcucaagagaagaauuucaccaccgcuccagccaucugccacgacggcaaagcccacuuuccuagagaaggcguguucguguccaacggcacccauugguucgugacacagcggaacuucuacgagccccagaucaucaccaccgacaacaccuucgugucuggcaacugcgacguugugaucggcauugugaacaauaccguguacgacccucugcagcccgagcuggacagcggaggcggaggaucugacaucaucaagcugcugaacgagcaagugaacaaagagaugcagagcagcaaccuguacaugagcaugagcagcuggugcuacacccacagccuugauggcgccggacuguuccuguuugaucacgccgccgaggaauacgagcacgccaagaagcugaucaucuuccugaacgagaacaacgugcccgugcagcugaccagcauuucugccccugagcacaaguucgagggccugacacagaucuuccagaaggccuacgaacacgagcagcacaucagcgagagcaucaacaacaucguggaccacgccauuaagagcaaggaucacgccaccuucaacuuucugcagugguacguggccgaacagcacgaggaagaggugcuguucaaggacauccuggacaagaucgagcugaucggcaacgagaaccacggccuguaucuggccgaccaguacgugaagggaaucgccaagagcagaaagagcugaggacuagucccuguucccagagcccacuuuuuuuucuuuuuuugaaauaaaauagccugucuuucagaucucaaaggcucuuuucagagccaccaaaaaaaaaaaaaaaaaaaaaaaaaaaaaaaaaaaaaaaaaaaaaaaaaaaaaaaaaaaaaaaaaaaaaaaaaaaaaaaaaaaaaaaaaaaaaaaaaaaaa

SEQ ID NO: 12632 - RNA, 4220 nt, Artificial Sequence
  SARS-CoV-2/Wuhan/WIV05/2019__EPI_ISL_402128 spike protein mRNA gc mod (1-1147)(K986P_V987P) Ferritin construct
aggagagucccgcagucggcguccagcggcucugcuuguucgugugugugucguugcaggccuuauucaagcuuaccauguucguguuucuggugcugcugccccugguguccagccagugugugaaccugaccaccagaacacagcugccuccagccuacaccaacagcuucaccagaggcguguacuaccccgacaagguguucagauccagcgugcugcacucuacccaggaccuguuccugccuuucuucagcaacgugaccugguuccacgccauccacguguccggcaccaauggcaccaagagauucgacaaccccgugcugcccuucaacgacgggguguacuuugccagcaccgagaaguccaacaucaucagaggcuggaucuucggcaccacacuggacagcaagacccagagccugcugaucgugaacaacgccaccaacguggucaucaaagugugcgaguuccaguucugcaacgaccccuuccugggcgucuacuaccacaagaacaacaagagcuggauggaaagcgaguuccggguguacagcagcgccaacaacugcaccuucgaguacgugucccagccuuuccugauggaccuggaaggcaagcagggcaacuucaagaaccugcgcgaguucguguucaagaacaucgacggcuacuucaaaaucuacagcaagcacaccccuaucaaccucgugcgggaucugccucagggcuucucugcucuggaaccccugguggaucugcccaucggcaucaacaucacccgguuucagacacugcuggcccugcacagaagcuaccugacaccuggcgauagcagcagcggauggacagcuggugccgccgcuuacuaugugggcuaccugcagccuagaaccuuccugcugaaguacaacgagaacggcaccaucaccgacgccguggauugugcucuggauccucugagcgagacaaagugcacccugaaguccuucaccguggaaaagggcaucuaccagaccagcaacuuccgggugcagcccaccgaauccaucgugcgguuccccaauaucaccaaucugugccccuucggcgagguguucaaugccaccagauucgccucuguguacgccuggaaccggaagcggaucagcaauugcguggccgacuacuccgugcuguacaacuccgccagcuucagcaccuucaagugcuacggcguguccccuaccaagcugaacgaccugugcuucacaaacguguacgccgacagcuucgugauccggggagaugaagugcggcagauugccccuggacagacaggcaagaucgccgacuacaacuacaagcugcccgacgacuucaccggcugugugauugccuggaacagcaacaaccuggacuccaaagucggcggcaacuacaauuaccuguaccggcuguuccggaaguccaaucugaagcccuucgagcgggacaucagcaccgaaaucuaucaggccggcagcaccccuugcaacggcguggaaggcuucaacugcuacuucccacugcaguccuacggcuuucagcccacaaauggcgugggcuaucagcccuacagagugguggugcugagcuucgaacugcugcaugcuccugccacagugugcggcccuaagaaaagcaccaaucucgugaagaacaaaugcgugaacuucaacuucaacggccugaccggcaccggcgugcugacagagagcaacaagaaguuccugccauuccagcaguuuggccgggauaucgccgauaccacagacgccguuagagauccccagacacuggaaauccuggacaucaccccaugcagcuucggcggagugucugugaucaccccuggcaccaacaccagcaaucagguggcagugcuguaccaggacgugaacuguaccgaagugcccguggccauucacgccgaucagcugacaccuacauggcggguguacuccaccggcagcaauguguuucagaccagagccggcugucugaucggagccgagcacgugaacaauagcuacgagugcgacauccccaucggcgcuggcaucugugccagcuaccagacacagacaaacagccccagacgggcuagaagcguggccagccagagcaucauugccuacacaaugucucugggcgccgagaacagcguggccuacuccaacaacucuaucgcuauccccaccaacuucaccaucagcgugaccaccgagauccugccuguguccaugaccaagaccagcguggacugcaccauguacaucugcggcgauuccaccgagugcuccaaccugcugcugcaguacggcagcuucugcacccagcugaauagagcccugacagggaucgccguggaacaggacaagaacacccaagagguguucgcccaagugaagcaaaucuacaagaccccuccuaucaaggacuucggcggcuucaauuucagccagauucugcccgauccuagcaagcccagcaagcggagcuucaucgaggaccugcuguucaacaaagugacacuggccgacgccggcuucaucaagcaguauggcgauugucugggcgacauugccgccagggaucugauuugcgcccagaaguuuaacggacugacagugcugccuccucugcugaccgaugagaugaucgcccaguacacaucugcccugcuggccggcacaaucacaagcggcuggacauuuggagcuggcgccgcucugcagauccccuuugcuaugcagauggccuaccgguucaacggcaucggagugacccagaaugugcuguacgagaaccagaagcugaucgccaaccaguucaacagcgccaucggcaagauccaggacagccugagcagcacagcaagcgcccugggaaagcugcaggacguggucaaccagaaugcccaggcacugaacacccuggucaagcagcuguccuccaacuucggcgccaucagcucugugcugaacgauauccugagcagacuggacccuccugaggccgaggugcagaucgacagacugaucacaggcagacugcagagccuccagacauacgugacccagcagcugaucagagccgccgagauuagagccucugccaaucuggccgccaccaagaugucugagugugugcugggccagagcaagagaguggacuuuugcggcaagggcuaccaccugaugagcuucccucagucugccccucacggcgugguguuucugcacgugacauaugugcccgcucaagagaagaauuucaccaccgcuccagccaucugccacgacggcaaagcccacuuuccuagagaaggcguguucguguccaacggcacccauugguucgugacacagcggaacuucuacgagccccagaucaucaccaccgacaacaccuucgugucuggcaacugcgacguugugaucggcauugugaacaauaccguguacgacccucugcagcccgagcuggacagcggaggcggaggaucugacaucaucaagcugcugaacgagcaagugaacaaagagaugcagagcagcaaccuguacaugagcaugagcagcuggugcuacacccacagccuugauggcgccggacuguuccuguuugaucacgccgccgaggaauacgagcacgccaagaagcugaucaucuuccugaacgagaacaacgugcccgugcagcugaccagcauuucugccccugagcacaaguucgagggccugacacagaucuuccagaaggccuacgaacacgagcagcacaucagcgagagcaucaacaacaucguggaccacgccauuaagagcaaggaucacgccaccuucaacuuucugcagugguacguggccgaacagcacgaggaagaggugcuguucaaggacauccuggacaagaucgagcugaucggcaacgagaaccacggccuguaucuggccgaccaguacgugaagggaaucgccaagagcagaaagagcugaggacuagucccuguucccagagcccacuuuuuuuucuuuuuuugaaauaaaauagccugucuuucagaucucaaaggcucuuuucagagccaccaaaaaaaaaaaaaaaaaaaaaaaaaaaaaaaaaaaaaaaaaaaaaaaaaaaaaaaaaaaaaaaaaaaaaaaaaaaaaaaaaaaaaaaaaaaaaaaaaaaaa

SEQ ID NO: 12633 - RNA, 4220 nt, Artificial Sequence
  SARS-CoV-2/Wuhan/WIV05/2019__EPI_ISL_402128 spike protein mRNA gc mod (1-1147)(K986P_V987P_T887WN_A1020W) Ferritin construct
aggagagucccgcagucggcguccagcggcucugcuuguucgugugugugucguugcaggccuuauucaagcuuaccauguucguguuucuggugcugcugccccugguguccagccagugugugaaccugaccaccagaacacagcugccuccagccuacaccaacagcuucaccagaggcguguacuaccccgacaagguguucagauccagcgugcugcacucuacccaggaccuguuccugccuuucuucagcaacgugaccugguuccacgccauccacguguccggcaccaauggcaccaagagauucgacaaccccgugcugcccuucaacgacgggguguacuuugccagcaccgagaaguccaacaucaucagaggcuggaucuucggcaccacacuggacagcaagacccagagccugcugaucgugaacaacgccaccaacguggucaucaaagugugcgaguuccaguucugcaacgaccccuuccugggcgucuacuaccacaagaacaacaagagcuggauggaaagcgaguuccggguguacagcagcgccaacaacugcaccuucgaguacgugucccagccuuuccugauggaccuggaaggcaagcagggcaacuucaagaaccugcgcgaguucguguucaagaacaucgacggcuacuucaaaaucuacagcaagcacaccccuaucaaccucgugcgggaucugccucagggcuucucugcucuggaaccccugguggaucugcccaucggcaucaacaucacccgguuucagacacugcuggcccugcacagaagcuaccugacaccuggcgauagcagcagcggauggacagcuggugccgccgcuuacuaugugggcuaccugcagccuagaaccuuccugcugaaguacaacgagaacggcaccaucaccgacgccguggauugugcucuggauccucugagcgagacaaagugcacccugaaguccuucaccguggaaaagggcaucuaccagaccagcaacuuccgggugcagcccaccgaauccaucgugcgguuccccaauaucaccaaucugugccccuucggcgagguguucaaugccaccagauucgccucuguguacgccuggaaccggaagcggaucagcaauugcguggccgacuacuccgugcuguacaacuccgccagcuucagcaccuucaagugcuacggcguguccccuaccaagcugaacgaccugugcuucacaaacguguacgccgacagcuucgugauccggggagaugaagugcggcagauugccccuggacagacaggcaagaucgccgacuacaacuacaagcugcccgacgacuucaccggcugugugauugccuggaacagcaacaaccuggacuccaaagucggcggcaacuacaauuaccuguaccggcuguuccggaaguccaaucugaagcccuucgagcgggacaucagcaccgaaaucuaucaggccggcagcaccccuugcaacggcguggaaggcuucaacugcuacuucccacugcaguccuacggcuuucagcccacaaauggcgugggcuaucagcccuacagagugguggugcugagcuucgaacugcugcaugcuccugccacagugugcggcccuaagaaaagcaccaaucucgugaagaacaaaugcgugaacuucaacuucaacggccugaccggcaccggcgugcugacagagagcaacaagaaguuccugccauuccagcaguuuggccgggauaucgccgauaccacagacgccguuagagauccccagacacuggaaauccuggacaucaccccaugcagcuucggcggagugucugugaucaccccuggcaccaacaccagcaaucagguggcagugcuguaccaggacgugaacuguaccgaagugcccguggccauucacgccgaucagcugacaccuacauggcggguguacuccaccggcagcaauguguuucagaccagagccggcugucugaucggagccgagcacgugaacaauagcuacgagugcgacauccccaucggcgcuggcaucugugccagcuaccagacacagacaaacagccccagacgggcuagaagcguggccagccagagcaucauugccuacacaaugucucugggcgccgagaacagcguggccuacuccaacaacucuaucgcuauccccaccaacuucaccaucagcgugaccaccgagauccugccuguguccaugaccaagaccagcguggacugcaccauguacaucugcggcgauuccaccgagugcuccaaccugcugcugcaguacggcagcuucugcacccagcugaauagagcccugacagggaucgccguggaacaggacaagaacacccaagagguguucgcccaagugaagcaaaucuacaagaccccuccuaucaaggacuucggcggcuucaauuucagccagauucugcccgauccuagcaagcccagcaagcggagcuucaucgaggaccugcuguucaacaaagugacacuggccgacgccggcuucaucaagcaguauggcgauugucugggcgacauugccgccagggaucugauuugcgcccagaaguuuaacggacugacagugcugccuccucugcugaccgaugagaugaucgcccaguacacaucugcccugcuggccggcacaaucacaagcggcuggugguuuggagcuggcgccgcucugcagauccccuuugcuaugcagauggccuaccgguucaacggcaucggagugacccagaaugugcuguacgagaaccagaagcugaucgccaaccaguucaacagcgccaucggcaagauccaggacagccugagcagcacagcaagcgcccugggaaagcugcaggacguggucaaccagaaugcccaggcacugaacacccuggucaagcagcuguccuccaacuucggcgccaucagcucugugcugaacgauauccugagcagacuggacccuccugaggccgaggugcagaucgacagacugaucacaggcagacugcagagccuccagacauacgugacccagcagcugaucagagccgccgagauuagauggucugccaaucuggccgccaccaagaugucugagugugugcugggccagagcaagagaguggacuuuugcggcaagggcuaccaccugaugagcuucccucagucugccccucacggcgugguguuucugcacgugacauaugugcccgcucaagagaagaauuucaccaccgcuccagccaucugccacgacggcaaagcccacuuuccuagagaaggcguguucguguccaacggcacccauugguucgugacacagcggaacuucuacgagccccagaucaucaccaccgacaacaccuucgugucuggcaacugcgacguugugaucggcauugugaacaauaccguguacgacccucugcagcccgagcuggacagcggaggcggaggaucugacaucaucaagcugcugaacgagcaagugaacaaagagaugcagagcagcaaccuguacaugagcaugagcagcuggugcuacacccacagccuugauggcgccggacuguuccuguuugaucacgccgccgaggaauacgagcacgccaagaagcugaucaucuuccugaacgagaacaacgugcccgugcagcugaccagcauuucugccccugagcacaaguucgagggccugacacagaucuuccagaaggccuacgaacacgagcagcacaucagcgagagcaucaacaacaucguggaccacgccauuaagagcaaggaucacgccaccuucaacuuucugcagugguacguggccgaacagcacgaggaagaggugcuguucaaggacauccuggacaagaucgagcugaucggcaacgagaaccacggccuguaucuggccgaccaguacgugaagggaaucgccaagagcagaaagagcugaggacuagucccuguucccagagcccacuuuuuuuucuuuuuuugaaauaaaauagccugucuuucagaucucaaaggcucuuuucagagccaccaaaaaaaaaaaaaaaaaaaaaaaaaaaaaaaaaaaaaaaaaaaaaaaaaaaaaaaaaaaaaaaaaaaaaaaaaaaaaaaaaaaaaaaaaaaaaaaaaaaaa

SEQ ID NO: 12634 - RNA, 4220 nt, Artificial Sequence
  SARS-CoV-2/Wuhan/WIV05/2019__EPI_ISL_402128 spike protein mRNA gc mod (1-1147)(K986P_V987P_P1069F) Ferritin construct
aggagagucccgcagucggcguccagcggcucugcuuguucgugugugugucguugcaggccuuauucaagcuuaccauguucguguuucuggugcugcugccccugguguccagccagugugugaaccugaccaccagaacacagcugccuccagccuacaccaacagcuucaccagaggcguguacuaccccgacaagguguucagauccagcgugcugcacucuacccaggaccuguuccugccuuucuucagcaacgugaccugguuccacgccauccacguguccggcaccaauggcaccaagagauucgacaaccccgugcugcccuucaacgacgggguguacuuugccagcaccgagaaguccaacaucaucagaggcuggaucuucggcaccacacuggacagcaagacccagagccugcugaucgugaacaacgccaccaacguggucaucaaagugugcgaguuccaguucugcaacgaccccuuccugggcgucuacuaccacaagaacaacaagagcuggauggaaagcgaguuccggguguacagcagcgccaacaacugcaccuucgaguacgugucccagccuuuccugauggaccuggaaggcaagcagggcaacuucaagaaccugcgcgaguucguguucaagaacaucgacggcuacuucaaaaucuacagcaagcacaccccuaucaaccucgugcgggaucugccucagggcuucucugcucuggaaccccugguggaucugcccaucggcaucaacaucacccgguuucagacacugcuggcccugcacagaagcuaccugacaccuggcgauagcagcagcggauggacagcuggugccgccgcuuacuaugugggcuaccugcagccuagaaccuuccugcugaaguacaacgagaacggcaccaucaccgacgccguggauugugcucuggauccucugagcgagacaaagugcacccugaaguccuucaccguggaaaagggcaucuaccagaccagcaacuuccgggugcagcccaccgaauccaucgugcgguuccccaauaucaccaaucugugccccuucggcgagguguucaaugccaccagauucgccucuguguacgccuggaaccggaagcggaucagcaauugcguggccgacuacuccgugcuguacaacuccgccagcuucagcaccuucaagugcuacggcguguccccuaccaagcugaacgaccugugcuucacaaacguguacgccgacagcuucgugauccggggagaugaagugcggcagauugccccuggacagacaggcaagaucgccgacuacaacuacaagcugcccgacgacuucaccggcugugugauugccuggaacagcaacaaccuggacuccaaagucggcggcaacuacaauuaccuguaccggcuguuccggaaguccaaucugaagcccuucgagcgggacaucagcaccgaaaucuaucaggccggcagcaccccuugcaacggcguggaaggcuucaacugcuacuucccacugcaguccuacggcuuucagcccacaaauggcgugggcuaucagcccuacagagugguggugcugagcuucgaacugcugcaugcuccugccacagugugcggcccuaagaaaagcaccaaucucgugaagaacaaaugcgugaacuucaacuucaacggccugaccggcaccggcgugcugacagagagcaacaagaaguuccugccauuccagcaguuuggccgggauaucgccgauaccacagacgccguuagagauccccagacacuggaaauccuggacaucaccccaugcagcuucggcggagugucugugaucaccccuggcaccaacaccagcaaucagguggcagugcuguaccaggacgugaacuguaccgaagugcccguggccauucacgccgaucagcugacaccuacauggcggguguacuccaccggcagcaauguguuucagaccagagccggcugucugaucggagccgagcacgugaacaauagcuacgagugcgacauccccaucggcgcuggcaucugugccagcuaccagacacagacaaacagccccagacgggcuagaagcguggccagccagagcaucauugccuacacaaugucucugggcgccgagaacagcguggccuacuccaacaacucuaucgcuauccccaccaacuucaccaucagcgugaccaccgagauccugccuguguccaugaccaagaccagcguggacugcaccauguacaucugcggcgauuccaccgagugcuccaaccugcugcugcaguacggcagcuucugcacccagcugaauagagcccugacagggaucgccguggaacaggacaagaacacccaagagguguucgcccaagugaagcaaaucuacaagaccccuccuaucaaggacuucggcggcuucaauuucagccagauucugcccgauccuagcaagcccagcaagcggagcuucaucgaggaccugcuguucaacaaagugacacuggccgacgccggcuucaucaagcaguauggcgauugucugggcgacauugccgccagggaucugauuugcgcccagaaguuuaacggacugacagugcugccuccucugcugaccgaugagaugaucgcccaguacacaucugcccugcuggccggcacaaucacaagcggcuggacauuuggagcuggcgccgcucugcagauccccuuugcuaugcagauggccuaccgguucaacggcaucggagugacccagaaugugcuguacgagaaccagaagcugaucgccaaccaguucaacagcgccaucggcaagauccaggacagccugagcagcacagcaagcgcccugggaaagcugcaggacguggucaaccagaaugcccaggcacugaacacccuggucaagcagcuguccuccaacuucggcgccaucagcucugugcugaacgauauccugagcagacuggacccuccugaggccgaggugcagaucgacagacugaucacaggcagacugcagagccuccagacauacgugacccagcagcugaucagagccgccgagauuagagccucugccaaucuggccgccaccaagaugucugagugugugcugggccagagcaagagaguggacuuuugcggcaagggcuaccaccugaugagcuucccucagucugccccucacggcgugguguuucugcacgugacauauguguucgcucaagagaagaauuucaccaccgcuccagccaucugccacgacggcaaagcccacuuuccuagagaaggcguguucguguccaacggcacccauugguucgugacacagcggaacuucuacgagccccagaucaucaccaccgacaacaccuucgugucuggcaacugcgacguugugaucggcauugugaacaauaccguguacgacccucugcagcccgagcuggacagcggaggcggaggaucugacaucaucaagcugcugaacgagcaagugaacaaagagaugcagagcagcaaccuguacaugagcaugagcagcuggugcuacacccacagccuugauggcgccggacuguuccuguuugaucacgccgccgaggaauacgagcacgccaagaagcugaucaucuuccugaacgagaacaacgugcccgugcagcugaccagcauuucugccccugagcacaaguucgagggccugacacagaucuuccagaaggccuacgaacacgagcagcacaucagcgagagcaucaacaacaucguggaccacgccauuaagagcaaggaucacgccaccuucaacuuucugcagugguacguggccgaacagcacgaggaagaggugcuguucaaggacauccuggacaagaucgagcugaucggcaacgagaaccacggccuguaucuggccgaccaguacgugaagggaaucgccaagagcagaaagagcugaggacuagucccuguucccagagcccacuuuuuuuucuuuuuuugaaauaaaauagccugucuuucagaucucaaaggcucuuuucagagccaccaaaaaaaaaaaaaaaaaaaaaaaaaaaaaaaaaaaaaaaaaaaaaaaaaaaaaaaaaaaaaaaaaaaaaaaaaaaaaaaaaaaaaaaaaaaaaaaaaaaaa

SEQ ID NO: 12635 - RNA, 4220 nt, Artificial Sequence
  SARS-CoV-2/Wuhan/WIV05/2019__EPI_ISL_402128 spike protein mRNA gc mod (1-1147)(K986P_V987P_ H1048Q_H1064N_ H1083N_H1101N) Ferritin construct
aggagagucccgcagucggcguccagcggcucugcuuguucgugugugugucguugcaggccuuauucaagcuuaccauguucguguuucuggugcugcugccccugguguccagccagugugugaaccugaccaccagaacacagcugccuccagccuacaccaacagcuucaccagaggcguguacuaccccgacaagguguucagauccagcgugcugcacucuacccaggaccuguuccugccuuucuucagcaacgugaccugguuccacgccauccacguguccggcaccaauggcaccaagagauucgacaaccccgugcugcccuucaacgacgggguguacuuugccagcaccgagaaguccaacaucaucagaggcuggaucuucggcaccacacuggacagcaagacccagagccugcugaucgugaacaacgccaccaacguggucaucaaagugugcgaguuccaguucugcaacgaccccuuccugggcgucuacuaccacaagaacaacaagagcuggauggaaagcgaguuccggguguacagcagcgccaacaacugcaccuucgaguacgugucccagccuuuccugauggaccuggaaggcaagcagggcaacuucaagaaccugcgcgaguucguguucaagaacaucgacggcuacuucaaaaucuacagcaagcacaccccuaucaaccucgugcgggaucugccucagggcuucucugcucuggaaccccugguggaucugcccaucggcaucaacaucacccgguuucagacacugcuggcccugcacagaagcuaccugacaccuggcgauagcagcagcggauggacagcuggugccgccgcuuacuaugugggcuaccugcagccuagaaccuuccugcugaaguacaacgagaacggcaccaucaccgacgccguggauugugcucuggauccucugagcgagacaaagugcacccugaaguccuucaccguggaaaagggcaucuaccagaccagcaacuuccgggugcagcccaccgaauccaucgugcgguuccccaauaucaccaaucugugccccuucggcgagguguucaaugccaccagauucgccucuguguacgccuggaaccggaagcggaucagcaauugcguggccgacuacuccgugcuguacaacuccgccagcuucagcaccuucaagugcuacggcguguccccuaccaagcugaacgaccugugcuucacaaacguguacgccgacagcuucgugauccggggagaugaagugcggcagauugccccuggacagacaggcaagaucgccgacuacaacuacaagcugcccgacgacuucaccggcugugugauugccuggaacagcaacaaccuggacuccaaagucggcggcaacuacaauuaccuguaccggcuguuccggaaguccaaucugaagcccuucgagcgggacaucagcaccgaaaucuaucaggccggcagcaccccuugcaacggcguggaaggcuucaacugcuacuucccacugcaguccuacggcuuucagcccacaaauggcgugggcuaucagcccuacagagugguggugcugagcuucgaacugcugcaugcuccugccacagugugcggcccuaagaaaagcaccaaucucgugaagaacaaaugcgugaacuucaacuucaacggccugaccggcaccggcgugcugacagagagcaacaagaaguuccugccauuccagcaguuuggccgggauaucgccgauaccacagacgccguuagagauccccagacacuggaaauccuggacaucaccccaugcagcuucggcggagugucugugaucaccccuggcaccaacaccagcaaucagguggcagugcuguaccaggacgugaacuguaccgaagugcccguggccauucacgccgaucagcugacaccuacauggcggguguacuccaccggcagcaauguguuucagaccagagccggcugucugaucggagccgagcacgugaacaauagcuacgagugcgacauccccaucggcgcuggcaucugugccagcuaccagacacagacaaacagccccagacgggcuagaagcguggccagccagagcaucauugccuacacaaugucucugggcgccgagaacagcguggccuacuccaacaacucuaucgcuauccccaccaacuucaccaucagcgugaccaccgagauccugccuguguccaugaccaagaccagcguggacugcaccauguacaucugcggcgauuccaccgagugcuccaaccugcugcugcaguacggcagcuucugcacccagcugaauagagcccugacagggaucgccguggaacaggacaagaacacccaagagguguucgcccaagugaagcaaaucuacaagaccccuccuaucaaggacuucggcggcuucaauuucagccagauucugcccgauccuagcaagcccagcaagcggagcuucaucgaggaccugcuguucaacaaagugacacuggccgacgccggcuucaucaagcaguauggcgauugucugggcgacauugccgccagggaucugauuugcgcccagaaguuuaacggacugacagugcugccuccucugcugaccgaugagaugaucgcccaguacacaucugcccugcuggccggcacaaucacaagcggcuggacauuuggagcuggcgccgcucugcagauccccuuugcuaugcagauggccuaccgguucaacggcaucggagugacccagaaugugcuguacgagaaccagaagcugaucgccaaccaguucaacagcgccaucggcaagauccaggacagccugagcagcacagcaagcgcccugggaaagcugcaggacguggucaaccagaaugcccaggcacugaacacccuggucaagcagcuguccuccaacuucggcgccaucagcucugugcugaacgauauccugagcagacuggacccuccugaggccgaggugcagaucgacagacugaucacaggcagacugcagagccuccagacauacgugacccagcagcugaucagagccgccgagauuagagccucugccaaucuggccgccaccaagaugucugagugugugcugggccagagcaagagaguggacuuuugcggcaagggcuaccagcugaugagcuucccucagucugccccucacggcgugguguuucugaacgugacauaugugcccgcucaagagaagaauuucaccaccgcuccagccaucugcaacgacggcaaagcccacuuuccuagagaaggcguguucguguccaacggcaccaacugguucgugacacagcggaacuucuacgagccccagaucaucaccaccgacaacaccuucgugucuggcaacugcgacguugugaucggcauugugaacaauaccguguacgacccucugcagcccgagcuggacagcggaggcggaggaucugacaucaucaagcugcugaacgagcaagugaacaaagagaugcagagcagcaaccuguacaugagcaugagcagcuggugcuacacccacagccuugauggcgccggacuguuccuguuugaucacgccgccgaggaauacgagcacgccaagaagcugaucaucuuccugaacgagaacaacgugcccgugcagcugaccagcauuucugccccugagcacaaguucgagggccugacacagaucuuccagaaggccuacgaacacgagcagcacaucagcgagagcaucaacaacaucguggaccacgccauuaagagcaaggaucacgccaccuucaacuuucugcagugguacguggccgaacagcacgaggaagaggugcuguucaaggacauccuggacaagaucgagcugaucggcaacgagaaccacggccuguaucuggccgaccaguacgugaagggaaucgccaagagcagaaagagcugaggacuagucccuguucccagagcccacuuuuuuuucuuuuuuugaaauaaaauagccugucuuucagaucucaaaggcucuuuucagagccaccaaaaaaaaaaaaaaaaaaaaaaaaaaaaaaaaaaaaaaaaaaaaaaaaaaaaaaaaaaaaaaaaaaaaaaaaaaaaaaaaaaaaaaaaaaaaaaaaaaaaa

SEQ ID NO: 12636 - RNA, 4220 nt, Artificial Sequence
  SARS-CoV-2/Wuhan/WIV05/2019__EPI_ISL_402128 spike protein mRNA gc mod (1-1147)(I712C_T1077C) Ferritin construct
aggagagucccgcagucggcguccagcggcucugcuuguucgugugugugucguugcaggccuuauucaagcuuaccauguucguguuucuggugcugcugccccugguguccagccagugugugaaccugaccaccagaacacagcugccuccagccuacaccaacagcuucaccagaggcguguacuaccccgacaagguguucagauccagcgugcugcacucuacccaggaccuguuccugccuuucuucagcaacgugaccugguuccacgccauccacguguccggcaccaauggcaccaagagauucgacaaccccgugcugcccuucaacgacgggguguacuuugccagcaccgagaaguccaacaucaucagaggcuggaucuucggcaccacacuggacagcaagacccagagccugcugaucgugaacaacgccaccaacguggucaucaaagugugcgaguuccaguucugcaacgaccccuuccugggcgucuacuaccacaagaacaacaagagcuggauggaaagcgaguuccggguguacagcagcgccaacaacugcaccuucgaguacgugucccagccuuuccugauggaccuggaaggcaagcagggcaacuucaagaaccugcgcgaguucguguucaagaacaucgacggcuacuucaaaaucuacagcaagcacaccccuaucaaccucgugcgggaucugccucagggcuucucugcucuggaaccccugguggaucugcccaucggcaucaacaucacccgguuucagacacugcuggcccugcacagaagcuaccugacaccuggcgauagcagcagcggauggacagcuggugccgccgcuuacuaugugggcuaccugcagccuagaaccuuccugcugaaguacaacgagaacggcaccaucaccgacgccguggauugugcucuggauccucugagcgagacaaagugcacccugaaguccuucaccguggaaaagggcaucuaccagaccagcaacuuccgggugcagcccaccgaauccaucgugcgguuccccaauaucaccaaucugugccccuucggcgagguguucaaugccaccagauucgccucuguguacgccuggaaccggaagcggaucagcaauugcguggccgacuacuccgugcuguacaacuccgccagcuucagcaccuucaagugcuacggcguguccccuaccaagcugaacgaccugugcuucacaaacguguacgccgacagcuucgugauccggggagaugaagugcggcagauugccccuggacagacaggcaagaucgccgacuacaacuacaagcugcccgacgacuucaccggcugugugauugccuggaacagcaacaaccuggacuccaaagucggcggcaacuacaauuaccuguaccggcuguuccggaaguccaaucugaagcccuucgagcgggacaucagcaccgaaaucuaucaggccggcagcaccccuugcaacggcguggaaggcuucaacugcuacuucccacugcaguccuacggcuuucagcccacaaauggcgugggcuaucagcccuacagagugguggugcugagcuucgaacugcugcaugcuccugccacagugugcggcccuaagaaaagcaccaaucucgugaagaacaaaugcgugaacuucaacuucaacggccugaccggcaccggcgugcugacagagagcaacaagaaguuccugccauuccagcaguuuggccgggauaucgccgauaccacagacgccguuagagauccccagacacuggaaauccuggacaucaccccaugcagcuucggcggagugucugugaucaccccuggcaccaacaccagcaaucagguggcagugcuguaccaggacgugaacuguaccgaagugcccguggccauucacgccgaucagcugacaccuacauggcggguguacuccaccggcagcaauguguuucagaccagagccggcugucugaucggagccgagcacgugaacaauagcuacgagugcgacauccccaucggcgcuggcaucugugccagcuaccagacacagacaaacagccccagacgggcuagaagcguggccagccagagcaucauugccuacacaaugucucugggcgccgagaacagcguggccuacuccaacaacucuugcgcuauccccaccaacuucaccaucagcgugaccaccgagauccugccuguguccaugaccaagaccagcguggacugcaccauguacaucugcggcgauuccaccgagugcuccaaccugcugcugcaguacggcagcuucugcacccagcugaauagagcccugacagggaucgccguggaacaggacaagaacacccaagagguguucgcccaagugaagcaaaucuacaagaccccuccuaucaaggacuucggcggcuucaauuucagccagauucugcccgauccuagcaagcccagcaagcggagcuucaucgaggaccugcuguucaacaaagugacacuggccgacgccggcuucaucaagcaguauggcgauugucugggcgacauugccgccagggaucugauuugcgcccagaaguuuaacggacugacagugcugccuccucugcugaccgaugagaugaucgcccaguacacaucugcccugcuggccggcacaaucacaagcggcuggacauuuggagcuggcgccgcucugcagauccccuuugcuaugcagauggccuaccgguucaacggcaucggagugacccagaaugugcuguacgagaaccagaagcugaucgccaaccaguucaacagcgccaucggcaagauccaggacagccugagcagcacagcaagcgcccugggaaagcugcaggacguggucaaccagaaugcccaggcacugaacacccuggucaagcagcuguccuccaacuucggcgccaucagcucugugcugaacgauauccugagcagacuggacaaggucgaggccgaggugcagaucgacagacugaucacaggcagacugcagagccuccagacauacgugacccagcagcugaucagagccgccgagauuagagccucugccaaucuggccgccaccaagaugucugagugugugcugggccagagcaagagaguggacuuuugcggcaagggcuaccaccugaugagcuucccucagucugccccucacggcgugguguuucugcacgugacauaugugcccgcucaagagaagaauuucaccugugcuccagccaucugccacgacggcaaagcccacuuuccuagagaaggcguguucguguccaacggcacccauugguucgugacacagcggaacuucuacgagccccagaucaucaccaccgacaacaccuucgugucuggcaacugcgacguugugaucggcauugugaacaauaccguguacgacccucugcagcccgagcuggacagcggaggcggaggaucugacaucaucaagcugcugaacgagcaagugaacaaagagaugcagagcagcaaccuguacaugagcaugagcagcuggugcuacacccacagccuugauggcgccggacuguuccuguuugaucacgccgccgaggaauacgagcacgccaagaagcugaucaucuuccugaacgagaacaacgugcccgugcagcugaccagcauuucugccccugagcacaaguucgagggccugacacagaucuuccagaaggccuacgaacacgagcagcacaucagcgagagcaucaacaacaucguggaccacgccauuaagagcaaggaucacgccaccuucaacuuucugcagugguacguggccgaacagcacgaggaagaggugcuguucaaggacauccuggacaagaucgagcugaucggcaacgagaaccacggccuguaucuggccgaccaguacgugaagggaaucgccaagagcagaaagagcugaggacuagucccuguucccagagcccacuuuuuuuucuuuuuuugaaauaaaauagccugucuuucagaucucaaaggcucuuuucagagccaccaaaaaaaaaaaaaaaaaaaaaaaaaaaaaaaaaaaaaaaaaaaaaaaaaaaaaaaaaaaaaaaaaaaaaaaaaaaaaaaaaaaaaaaaaaaaaaaaaaaaa

SEQ ID NO: 12637 - RNA, 4220 nt, Artificial Sequence
  SARS-CoV-2/Wuhan/WIV05/2019__EPI_ISL_402128 spike protein mRNA gc mod (1-1147)(I714C_Y1110C) Ferritin construct
aggagagucccgcagucggcguccagcggcucugcuuguucgugugugugucguugcaggccuuauucaagcuuaccauguucguguuucuggugcugcugccccugguguccagccagugugugaaccugaccaccagaacacagcugccuccagccuacaccaacagcuucaccagaggcguguacuaccccgacaagguguucagauccagcgugcugcacucuacccaggaccuguuccugccuuucuucagcaacgugaccugguuccacgccauccacguguccggcaccaauggcaccaagagauucgacaaccccgugcugcccuucaacgacgggguguacuuugccagcaccgagaaguccaacaucaucagaggcuggaucuucggcaccacacuggacagcaagacccagagccugcugaucgugaacaacgccaccaacguggucaucaaagugugcgaguuccaguucugcaacgaccccuuccugggcgucuacuaccacaagaacaacaagagcuggauggaaagcgaguuccggguguacagcagcgccaacaacugcaccuucgaguacgugucccagccuuuccugauggaccuggaaggcaagcagggcaacuucaagaaccugcgcgaguucguguucaagaacaucgacggcuacuucaaaaucuacagcaagcacaccccuaucaaccucgugcgggaucugccucagggcuucucugcucuggaaccccugguggaucugcccaucggcaucaacaucacccgguuucagacacugcuggcccugcacagaagcuaccugacaccuggcgauagcagcagcggauggacagcuggugccgccgcuuacuaugugggcuaccugcagccuagaaccuuccugcugaaguacaacgagaacggcaccaucaccgacgccguggauugugcucuggauccucugagcgagacaaagugcacccugaaguccuucaccguggaaaagggcaucuaccagaccagcaacuuccgggugcagcccaccgaauccaucgugcgguuccccaauaucaccaaucugugccccuucggcgagguguucaaugccaccagauucgccucuguguacgccuggaaccggaagcggaucagcaauugcguggccgacuacuccgugcuguacaacuccgccagcuucagcaccuucaagugcuacggcguguccccuaccaagcugaacgaccugugcuucacaaacguguacgccgacagcuucgugauccggggagaugaagugcggcagauugccccuggacagacaggcaagaucgccgacuacaacuacaagcugcccgacgacuucaccggcugugugauugccuggaacagcaacaaccuggacuccaaagucggcggcaacuacaauuaccuguaccggcuguuccggaaguccaaucugaagcccuucgagcgggacaucagcaccgaaaucuaucaggccggcagcaccccuugcaacggcguggaaggcuucaacugcuacuucccacugcaguccuacggcuuucagcccacaaauggcgugggcuaucagcccuacagagugguggugcugagcuucgaacugcugcaugcuccugccacagugugcggcccuaagaaaagcaccaaucucgugaagaacaaaugcgugaacuucaacuucaacggccugaccggcaccggcgugcugacagagagcaacaagaaguuccugccauuccagcaguuuggccgggauaucgccgauaccacagacgccguuagagauccccagacacuggaaauccuggacaucaccccaugcagcuucggcggagugucugugaucaccccuggcaccaacaccagcaaucagguggcagugcuguaccaggacgugaacuguaccgaagugcccguggccauucacgccgaucagcugacaccuacauggcggguguacuccaccggcagcaauguguuucagaccagagccggcugucugaucggagccgagcacgugaacaauagcuacgagugcgacauccccaucggcgcuggcaucugugccagcuaccagacacagacaaacagccccagacgggcuagaagcguggccagccagagcaucauugccuacacaaugucucugggcgccgagaacagcguggccuacuccaacaacucuaucgcuugccccaccaacuucaccaucagcgugaccaccgagauccugccuguguccaugaccaagaccagcguggacugcaccauguacaucugcggcgauuccaccgagugcuccaaccugcugcugcaguacggcagcuucugcacccagcugaauagagcccugacagggaucgccguggaacaggacaagaacacccaagagguguucgcccaagugaagcaaaucuacaagaccccuccuaucaaggacuucggcggcuucaauuucagccagauucugcccgauccuagcaagcccagcaagcggagcuucaucgaggaccugcuguucaacaaagugacacuggccgacgccggcuucaucaagcaguauggcgauugucugggcgacauugccgccagggaucugauuugcgcccagaaguuuaacggacugacagugcugccuccucugcugaccgaugagaugaucgcccaguacacaucugcccugcuggccggcacaaucacaagcggcuggacauuuggagcuggcgccgcucugcagauccccuuugcuaugcagauggccuaccgguucaacggcaucggagugacccagaaugugcuguacgagaaccagaagcugaucgccaaccaguucaacagcgccaucggcaagauccaggacagccugagcagcacagcaagcgcccugggaaagcugcaggacguggucaaccagaaugcccaggcacugaacacccuggucaagcagcuguccuccaacuucggcgccaucagcucugugcugaacgauauccugagcagacuggacaaggucgaggccgaggugcagaucgacagacugaucacaggcagacugcagagccuccagacauacgugacccagcagcugaucagagccgccgagauuagagccucugccaaucuggccgccaccaagaugucugagugugugcugggccagagcaagagaguggacuuuugcggcaagggcuaccaccugaugagcuucccucagucugccccucacggcgugguguuucugcacgugacauaugugcccgcucaagagaagaauuucaccaccgcuccagccaucugccacgacggcaaagcccacuuuccuagagaaggcguguucguguccaacggcacccauugguucgugacacagcggaacuucugugagccccagaucaucaccaccgacaacaccuucgugucuggcaacugcgacguugugaucggcauugugaacaauaccguguacgacccucugcagcccgagcuggacagcggaggcggaggaucugacaucaucaagcugcugaacgagcaagugaacaaagagaugcagagcagcaaccuguacaugagcaugagcagcuggugcuacacccacagccuugauggcgccggacuguuccuguuugaucacgccgccgaggaauacgagcacgccaagaagcugaucaucuuccugaacgagaacaacgugcccgugcagcugaccagcauuucugccccugagcacaaguucgagggccugacacagaucuuccagaaggccuacgaacacgagcagcacaucagcgagagcaucaacaacaucguggaccacgccauuaagagcaaggaucacgccaccuucaacuuucugcagugguacguggccgaacagcacgaggaagaggugcuguucaaggacauccuggacaagaucgagcugaucggcaacgagaaccacggccuguaucuggccgaccaguacgugaagggaaucgccaagagcagaaagagcugaggacuagucccuguucccagagcccacuuuuuuuucuuuuuuugaaauaaaauagccugucuuucagaucucaaaggcucuuuucagagccaccaaaaaaaaaaaaaaaaaaaaaaaaaaaaaaaaaaaaaaaaaaaaaaaaaaaaaaaaaaaaaaaaaaaaaaaaaaaaaaaaaaaaaaaaaaaaaaaaaaaaa

SEQ ID NO: 12638 - RNA, 4220 nt, Artificial Sequence
  SARS-CoV-2/Wuhan/WIV05/2019__EPI_ISL_402128 spike protein mRNA gc mod (1-1147)(P715C_P1069C) Ferritin construct
aggagagucccgcagucggcguccagcggcucugcuuguucgugugugugucguugcaggccuuauucaagcuuaccauguucguguuucuggugcugcugccccugguguccagccagugugugaaccugaccaccagaacacagcugccuccagccuacaccaacagcuucaccagaggcguguacuaccccgacaagguguucagauccagcgugcugcacucuacccaggaccuguuccugccuuucuucagcaacgugaccugguuccacgccauccacguguccggcaccaauggcaccaagagauucgacaaccccgugcugcccuucaacgacgggguguacuuugccagcaccgagaaguccaacaucaucagaggcuggaucuucggcaccacacuggacagcaagacccagagccugcugaucgugaacaacgccaccaacguggucaucaaagugugcgaguuccaguucugcaacgaccccuuccugggcgucuacuaccacaagaacaacaagagcuggauggaaagcgaguuccggguguacagcagcgccaacaacugcaccuucgaguacgugucccagccuuuccugauggaccuggaaggcaagcagggcaacuucaagaaccugcgcgaguucguguucaagaacaucgacggcuacuucaaaaucuacagcaagcacaccccuaucaaccucgugcgggaucugccucagggcuucucugcucuggaaccccugguggaucugcccaucggcaucaacaucacccgguuucagacacugcuggcccugcacagaagcuaccugacaccuggcgauagcagcagcggauggacagcuggugccgccgcuuacuaugugggcuaccugcagccuagaaccuuccugcugaaguacaacgagaacggcaccaucaccgacgccguggauugugcucuggauccucugagcgagacaaagugcacccugaaguccuucaccguggaaaagggcaucuaccagaccagcaacuuccgggugcagcccaccgaauccaucgugcgguuccccaauaucaccaaucugugccccuucggcgagguguucaaugccaccagauucgccucuguguacgccuggaaccggaagcggaucagcaauugcguggccgacuacuccgugcuguacaacuccgccagcuucagcaccuucaagugcuacggcguguccccuaccaagcugaacgaccugugcuucacaaacguguacgccgacagcuucgugauccggggagaugaagugcggcagauugccccuggacagacaggcaagaucgccgacuacaacuacaagcugcccgacgacuucaccggcugugugauugccuggaacagcaacaaccuggacuccaaagucggcggcaacuacaauuaccuguaccggcuguuccggaaguccaaucugaagcccuucgagcgggacaucagcaccgaaaucuaucaggccggcagcaccccuugcaacggcguggaaggcuucaacugcuacuucccacugcaguccuacggcuuucagcccacaaauggcgugggcuaucagcccuacagagugguggugcugagcuucgaacugcugcaugcuccugccacagugugcggcccuaagaaaagcaccaaucucgugaagaacaaaugcgugaacuucaacuucaacggccugaccggcaccggcgugcugacagagagcaacaagaaguuccugccauuccagcaguuuggccgggauaucgccgauaccacagacgccguuagagauccccagacacuggaaauccuggacaucaccccaugcagcuucggcggagugucugugaucaccccuggcaccaacaccagcaaucagguggcagugcuguaccaggacgugaacuguaccgaagugcccguggccauucacgccgaucagcugacaccuacauggcggguguacuccaccggcagcaauguguuucagaccagagccggcugucugaucggagccgagcacgugaacaauagcuacgagugcgacauccccaucggcgcuggcaucugugccagcuaccagacacagacaaacagccccagacgggcuagaagcguggccagccagagcaucauugccuacacaaugucucugggcgccgagaacagcguggccuacuccaacaacucuaucgcuaucugcaccaacuucaccaucagcgugaccaccgagauccugccuguguccaugaccaagaccagcguggacugcaccauguacaucugcggcgauuccaccgagugcuccaaccugcugcugcaguacggcagcuucugcacccagcugaauagagcccugacagggaucgccguggaacaggacaagaacacccaagagguguucgcccaagugaagcaaaucuacaagaccccuccuaucaaggacuucggcggcuucaauuucagccagauucugcccgauccuagcaagcccagcaagcggagcuucaucgaggaccugcuguucaacaaagugacacuggccgacgccggcuucaucaagcaguauggcgauugucugggcgacauugccgccagggaucugauuugcgcccagaaguuuaacggacugacagugcugccuccucugcugaccgaugagaugaucgcccaguacacaucugcccugcuggccggcacaaucacaagcggcuggacauuuggagcuggcgccgcucugcagauccccuuugcuaugcagauggccuaccgguucaacggcaucggagugacccagaaugugcuguacgagaaccagaagcugaucgccaaccaguucaacagcgccaucggcaagauccaggacagccugagcagcacagcaagcgcccugggaaagcugcaggacguggucaaccagaaugcccaggcacugaacacccuggucaagcagcuguccuccaacuucggcgccaucagcucugugcugaacgauauccugagcagacuggacaaggucgaggccgaggugcagaucgacagacugaucacaggcagacugcagagccuccagacauacgugacccagcagcugaucagagccgccgagauuagagccucugccaaucuggccgccaccaagaugucugagugugugcugggccagagcaagagaguggacuuuugcggcaagggcuaccaccugaugagcuucccucagucugccccucacggcgugguguuucugcacgugacauaugugugugcucaagagaagaauuucaccaccgcuccagccaucugccacgacggcaaagcccacuuuccuagagaaggcguguucguguccaacggcacccauugguucgugacacagcggaacuucuacgagccccagaucaucaccaccgacaacaccuucgugucuggcaacugcgacguugugaucggcauugugaacaauaccguguacgacccucugcagcccgagcuggacagcggaggcggaggaucugacaucaucaagcugcugaacgagcaagugaacaaagagaugcagagcagcaaccuguacaugagcaugagcagcuggugcuacacccacagccuugauggcgccggacuguuccuguuugaucacgccgccgaggaauacgagcacgccaagaagcugaucaucuuccugaacgagaacaacgugcccgugcagcugaccagcauuucugccccugagcacaaguucgagggccugacacagaucuuccagaaggccuacgaacacgagcagcacaucagcgagagcaucaacaacaucguggaccacgccauuaagagcaaggaucacgccaccuucaacuuucugcagugguacguggccgaacagcacgaggaagaggugcuguucaaggacauccuggacaagaucgagcugaucggcaacgagaaccacggccuguaucuggccgaccaguacgugaagggaaucgccaagagcagaaagagcugaggacuagucccuguucccagagcccacuuuuuuuucuuuuuuugaaauaaaauagccugucuuucagaucucaaaggcucuuuucagagccaccaaaaaaaaaaaaaaaaaaaaaaaaaaaaaaaaaaaaaaaaaaaaaaaaaaaaaaaaaaaaaaaaaaaaaaaaaaaaaaaaaaaaaaaaaaaaaaaaaaaaa

SEQ ID NO: 12639 - RNA, 4220 nt, Artificial Sequence
  SARS-CoV-2/Wuhan/WIV05/2019__EPI_ISL_402128 spike protein mRNA gc mod (1-1147)(G889C_L1034C) Ferritin construct
aggagagucccgcagucggcguccagcggcucugcuuguucgugugugugucguugcaggccuuauucaagcuuaccauguucguguuucuggugcugcugccccugguguccagccagugugugaaccugaccaccagaacacagcugccuccagccuacaccaacagcuucaccagaggcguguacuaccccgacaagguguucagauccagcgugcugcacucuacccaggaccuguuccugccuuucuucagcaacgugaccugguuccacgccauccacguguccggcaccaauggcaccaagagauucgacaaccccgugcugcccuucaacgacgggguguacuuugccagcaccgagaaguccaacaucaucagaggcuggaucuucggcaccacacuggacagcaagacccagagccugcugaucgugaacaacgccaccaacguggucaucaaagugugcgaguuccaguucugcaacgaccccuuccugggcgucuacuaccacaagaacaacaagagcuggauggaaagcgaguuccggguguacagcagcgccaacaacugcaccuucgaguacgugucccagccuuuccugauggaccuggaaggcaagcagggcaacuucaagaaccugcgcgaguucguguucaagaacaucgacggcuacuucaaaaucuacagcaagcacaccccuaucaaccucgugcgggaucugccucagggcuucucugcucuggaaccccugguggaucugcccaucggcaucaacaucacccgguuucagacacugcuggcccugcacagaagcuaccugacaccuggcgauagcagcagcggauggacagcuggugccgccgcuuacuaugugggcuaccugcagccuagaaccuuccugcugaaguacaacgagaacggcaccaucaccgacgccguggauugugcucuggauccucugagcgagacaaagugcacccugaaguccuucaccguggaaaagggcaucuaccagaccagcaacuuccgggugcagcccaccgaauccaucgugcgguuccccaauaucaccaaucugugccccuucggcgagguguucaaugccaccagauucgccucuguguacgccuggaaccggaagcggaucagcaauugcguggccgacuacuccgugcuguacaacuccgccagcuucagcaccuucaagugcuacggcguguccccuaccaagcugaacgaccugugcuucacaaacguguacgccgacagcuucgugauccggggagaugaagugcggcagauugccccuggacagacaggcaagaucgccgacuacaacuacaagcugcccgacgacuucaccggcugugugauugccuggaacagcaacaaccuggacuccaaagucggcggcaacuacaauuaccuguaccggcuguuccggaaguccaaucugaagcccuucgagcgggacaucagcaccgaaaucuaucaggccggcagcaccccuugcaacggcguggaaggcuucaacugcuacuucccacugcaguccuacggcuuucagcccacaaauggcgugggcuaucagcccuacagagugguggugcugagcuucgaacugcugcaugcuccugccacagugugcggcccuaagaaaagcaccaaucucgugaagaacaaaugcgugaacuucaacuucaacggccugaccggcaccggcgugcugacagagagcaacaagaaguuccugccauuccagcaguuuggccgggauaucgccgauaccacagacgccguuagagauccccagacacuggaaauccuggacaucaccccaugcagcuucggcggagugucugugaucaccccuggcaccaacaccagcaaucagguggcagugcuguaccaggacgugaacuguaccgaagugcccguggccauucacgccgaucagcugacaccuacauggcggguguacuccaccggcagcaauguguuucagaccagagccggcugucugaucggagccgagcacgugaacaauagcuacgagugcgacauccccaucggcgcuggcaucugugccagcuaccagacacagacaaacagccccagacgggcuagaagcguggccagccagagcaucauugccuacacaaugucucugggcgccgagaacagcguggccuacuccaacaacucuaucgcuauccccaccaacuucaccaucagcgugaccaccgagauccugccuguguccaugaccaagaccagcguggacugcaccauguacaucugcggcgauuccaccgagugcuccaaccugcugcugcaguacggcagcuucugcacccagcugaauagagcccugacagggaucgccguggaacaggacaagaacacccaagagguguucgcccaagugaagcaaaucuacaagaccccuccuaucaaggacuucggcggcuucaauuucagccagauucugcccgauccuagcaagcccagcaagcggagcuucaucgaggaccugcuguucaacaaagugacacuggccgacgccggcuucaucaagcaguauggcgauugucugggcgacauugccgccagggaucugauuugcgcccagaaguuuaacggacugacagugcugccuccucugcugaccgaugagaugaucgcccaguacacaucugcccugcuggccggcacaaucacaagcggcuggacauuuugcgcuggcgccgcucugcagauccccuuugcuaugcagauggccuaccgguucaacggcaucggagugacccagaaugugcuguacgagaaccagaagcugaucgccaaccaguucaacagcgccaucggcaagauccaggacagccugagcagcacagcaagcgcccugggaaagcugcaggacguggucaaccagaaugcccaggcacugaacacccuggucaagcagcuguccuccaacuucggcgccaucagcucugugcugaacgauauccugagcagacuggacaaggucgaggccgaggugcagaucgacagacugaucacaggcagacugcagagccuccagacauacgugacccagcagcugaucagagccgccgagauuagagccucugccaaucuggccgccaccaagaugucugaguguguguguggccagagcaagagaguggacuuuugcggcaagggcuaccaccugaugagcuucccucagucugccccucacggcgugguguuucugcacgugacauaugugcccgcucaagagaagaauuucaccaccgcuccagccaucugccacgacggcaaagcccacuuuccuagagaaggcguguucguguccaacggcacccauugguucgugacacagcggaacuucuacgagccccagaucaucaccaccgacaacaccuucgugucuggcaacugcgacguugugaucggcauugugaacaauaccguguacgacccucugcagcccgagcuggacagcggaggcggaggaucugacaucaucaagcugcugaacgagcaagugaacaaagagaugcagagcagcaaccuguacaugagcaugagcagcuggugcuacacccacagccuugauggcgccggacuguuccuguuugaucacgccgccgaggaauacgagcacgccaagaagcugaucaucuuccugaacgagaacaacgugcccgugcagcugaccagcauuucugccccugagcacaaguucgagggccugacacagaucuuccagaaggccuacgaacacgagcagcacaucagcgagagcaucaacaacaucguggaccacgccauuaagagcaaggaucacgccaccuucaacuuucugcagugguacguggccgaacagcacgaggaagaggugcuguucaaggacauccuggacaagaucgagcugaucggcaacgagaaccacggccuguaucuggccgaccaguacgugaagggaaucgccaagagcagaaagagcugaggacuagucccuguucccagagcccacuuuuuuuucuuuuuuugaaauaaaauagccugucuuucagaucucaaaggcucuuuucagagccaccaaaaaaaaaaaaaaaaaaaaaaaaaaaaaaaaaaaaaaaaaaaaaaaaaaaaaaaaaaaaaaaaaaaaaaaaaaaaaaaaaaaaaaaaaaaaaaaaaaaaa

SEQ ID NO: 12640 - RNA, 4220 nt, Artificial Sequence
  SARS-CoV-2/Wuhan/WIV05/2019__EPI_ISL_402128 spike protein mRNA gc mod (1-1147)(I909C_Y1047C) Ferritin construct
aggagagucccgcagucggcguccagcggcucugcuuguucgugugugugucguugcaggccuuauucaagcuuaccauguucguguuucuggugcugcugccccugguguccagccagugugugaaccugaccaccagaacacagcugccuccagccuacaccaacagcuucaccagaggcguguacuaccccgacaagguguucagauccagcgugcugcacucuacccaggaccuguuccugccuuucuucagcaacgugaccugguuccacgccauccacguguccggcaccaauggcaccaagagauucgacaaccccgugcugcccuucaacgacgggguguacuuugccagcaccgagaaguccaacaucaucagaggcuggaucuucggcaccacacuggacagcaagacccagagccugcugaucgugaacaacgccaccaacguggucaucaaagugugcgaguuccaguucugcaacgaccccuuccugggcgucuacuaccacaagaacaacaagagcuggauggaaagcgaguuccggguguacagcagcgccaacaacugcaccuucgaguacgugucccagccuuuccugauggaccuggaaggcaagcagggcaacuucaagaaccugcgcgaguucguguucaagaacaucgacggcuacuucaaaaucuacagcaagcacaccccuaucaaccucgugcgggaucugccucagggcuucucugcucuggaaccccugguggaucugcccaucggcaucaacaucacccgguuucagacacugcuggcccugcacagaagcuaccugacaccuggcgauagcagcagcggauggacagcuggugccgccgcuuacuaugugggcuaccugcagccuagaaccuuccugcugaaguacaacgagaacggcaccaucaccgacgccguggauugugcucuggauccucugagcgagacaaagugcacccugaaguccuucaccguggaaaagggcaucuaccagaccagcaacuuccgggugcagcccaccgaauccaucgugcgguuccccaauaucaccaaucugugccccuucggcgagguguucaaugccaccagauucgccucuguguacgccuggaaccggaagcggaucagcaauugcguggccgacuacuccgugcuguacaacuccgccagcuucagcaccuucaagugcuacggcguguccccuaccaagcugaacgaccugugcuucacaaacguguacgccgacagcuucgugauccggggagaugaagugcggcagauugccccuggacagacaggcaagaucgccgacuacaacuacaagcugcccgacgacuucaccggcugugugauugccuggaacagcaacaaccuggacuccaaagucggcggcaacuacaauuaccuguaccggcuguuccggaaguccaaucugaagcccuucgagcgggacaucagcaccgaaaucuaucaggccggcagcaccccuugcaacggcguggaaggcuucaacugcuacuucccacugcaguccuacggcuuucagcccacaaauggcgugggcuaucagcccuacagagugguggugcugagcuucgaacugcugcaugcuccugccacagugugcggcccuaagaaaagcaccaaucucgugaagaacaaaugcgugaacuucaacuucaacggccugaccggcaccggcgugcugacagagagcaacaagaaguuccugccauuccagcaguuuggccgggauaucgccgauaccacagacgccguuagagauccccagacacuggaaauccuggacaucaccccaugcagcuucggcggagugucugugaucaccccuggcaccaacaccagcaaucagguggcagugcuguaccaggacgugaacuguaccgaagugcccguggccauucacgccgaucagcugacaccuacauggcggguguacuccaccggcagcaauguguuucagaccagagccggcugucugaucggagccgagcacgugaacaauagcuacgagugcgacauccccaucggcgcuggcaucugugccagcuaccagacacagacaaacagccccagacgggcuagaagcguggccagccagagcaucauugccuacacaaugucucugggcgccgagaacagcguggccuacuccaacaacucuaucgcuauccccaccaacuucaccaucagcgugaccaccgagauccugccuguguccaugaccaagaccagcguggacugcaccauguacaucugcggcgauuccaccgagugcuccaaccugcugcugcaguacggcagcuucugcacccagcugaauagagcccugacagggaucgccguggaacaggacaagaacacccaagagguguucgcccaagugaagcaaaucuacaagaccccuccuaucaaggacuucggcggcuucaauuucagccagauucugcccgauccuagcaagcccagcaagcggagcuucaucgaggaccugcuguucaacaaagugacacuggccgacgccggcuucaucaagcaguauggcgauugucugggcgacauugccgccagggaucugauuugcgcccagaaguuuaacggacugacagugcugccuccucugcugaccgaugagaugaucgcccaguacacaucugcccugcuggccggcacaaucacaagcggcuggacauuuggagcuggcgccgcucugcagauccccuuugcuaugcagauggccuaccgguucaacggcugcggagugacccagaaugugcuguacgagaaccagaagcugaucgccaaccaguucaacagcgccaucggcaagauccaggacagccugagcagcacagcaagcgcccugggaaagcugcaggacguggucaaccagaaugcccaggcacugaacacccuggucaagcagcuguccuccaacuucggcgccaucagcucugugcugaacgauauccugagcagacuggacaaggucgaggccgaggugcagaucgacagacugaucacaggcagacugcagagccuccagacauacgugacccagcagcugaucagagccgccgagauuagagccucugccaaucuggccgccaccaagaugucugagugugugcugggccagagcaagagaguggacuuuugcggcaagggcugucaccugaugagcuucccucagucugccccucacggcgugguguuucugcacgugacauaugugcccgcucaagagaagaauuucaccaccgcuccagccaucugccacgacggcaaagcccacuuuccuagagaaggcguguucguguccaacggcacccauugguucgugacacagcggaacuucuacgagccccagaucaucaccaccgacaacaccuucgugucuggcaacugcgacguugugaucggcauugugaacaauaccguguacgacccucugcagcccgagcuggacagcggaggcggaggaucugacaucaucaagcugcugaacgagcaagugaacaaagagaugcagagcagcaaccuguacaugagcaugagcagcuggugcuacacccacagccuugauggcgccggacuguuccuguuugaucacgccgccgaggaauacgagcacgccaagaagcugaucaucuuccugaacgagaacaacgugcccgugcagcugaccagcauuucugccccugagcacaaguucgagggccugacacagaucuuccagaaggccuacgaacacgagcagcacaucagcgagagcaucaacaacaucguggaccacgccauuaagagcaaggaucacgccaccuucaacuuucugcagugguacguggccgaacagcacgaggaagaggugcuguucaaggacauccuggacaagaucgagcugaucggcaacgagaaccacggccuguaucuggccgaccaguacgugaagggaaucgccaagagcagaaagagcugaggacuagucccuguucccagagcccacuuuuuuuucuuuuuuugaaauaaaauagccugucuuucagaucucaaaggcucuuuucagagccaccaaaaaaaaaaaaaaaaaaaaaaaaaaaaaaaaaaaaaaaaaaaaaaaaaaaaaaaaaaaaaaaaaaaaaaaaaaaaaaaaaaaaaaaaaaaaaaaaaaaaa

SEQ ID NO: 12641 - RNA, 4220 nt, Artificial Sequence
  SARS-CoV-2/Wuhan/WIV05/2019__EPI_ISL_402128 spike protein mRNA gc mod (1-1147)(Q965C_S1003C) Ferritin construct
aggagagucccgcagucggcguccagcggcucugcuuguucgugugugugucguugcaggccuuauucaagcuuaccauguucguguuucuggugcugcugccccugguguccagccagugugugaaccugaccaccagaacacagcugccuccagccuacaccaacagcuucaccagaggcguguacuaccccgacaagguguucagauccagcgugcugcacucuacccaggaccuguuccugccuuucuucagcaacgugaccugguuccacgccauccacguguccggcaccaauggcaccaagagauucgacaaccccgugcugcccuucaacgacgggguguacuuugccagcaccgagaaguccaacaucaucagaggcuggaucuucggcaccacacuggacagcaagacccagagccugcugaucgugaacaacgccaccaacguggucaucaaagugugcgaguuccaguucugcaacgaccccuuccugggcgucuacuaccacaagaacaacaagagcuggauggaaagcgaguuccggguguacagcagcgccaacaacugcaccuucgaguacgugucccagccuuuccugauggaccuggaaggcaagcagggcaacuucaagaaccugcgcgaguucguguucaagaacaucgacggcuacuucaaaaucuacagcaagcacaccccuaucaaccucgugcgggaucugccucagggcuucucugcucuggaaccccugguggaucugcccaucggcaucaacaucacccgguuucagacacugcuggcccugcacagaagcuaccugacaccuggcgauagcagcagcggauggacagcuggugccgccgcuuacuaugugggcuaccugcagccuagaaccuuccugcugaaguacaacgagaacggcaccaucaccgacgccguggauugugcucuggauccucugagcgagacaaagugcacccugaaguccuucaccguggaaaagggcaucuaccagaccagcaacuuccgggugcagcccaccgaauccaucgugcgguuccccaauaucaccaaucugugccccuucggcgagguguucaaugccaccagauucgccucuguguacgccuggaaccggaagcggaucagcaauugcguggccgacuacuccgugcuguacaacuccgccagcuucagcaccuucaagugcuacggcguguccccuaccaagcugaacgaccugugcuucacaaacguguacgccgacagcuucgugauccggggagaugaagugcggcagauugccccuggacagacaggcaagaucgccgacuacaacuacaagcugcccgacgacuucaccggcugugugauugccuggaacagcaacaaccuggacuccaaagucggcggcaacuacaauuaccuguaccggcuguuccggaaguccaaucugaagcccuucgagcgggacaucagcaccgaaaucuaucaggccggcagcaccccuugcaacggcguggaaggcuucaacugcuacuucccacugcaguccuacggcuuucagcccacaaauggcgugggcuaucagcccuacagagugguggugcugagcuucgaacugcugcaugcuccugccacagugugcggcccuaagaaaagcaccaaucucgugaagaacaaaugcgugaacuucaacuucaacggccugaccggcaccggcgugcugacagagagcaacaagaaguuccugccauuccagcaguuuggccgggauaucgccgauaccacagacgccguuagagauccccagacacuggaaauccuggacaucaccccaugcagcuucggcggagugucugugaucaccccuggcaccaacaccagcaaucagguggcagugcuguaccaggacgugaacuguaccgaagugcccguggccauucacgccgaucagcugacaccuacauggcggguguacuccaccggcagcaauguguuucagaccagagccggcugucugaucggagccgagcacgugaacaauagcuacgagugcgacauccccaucggcgcuggcaucugugccagcuaccagacacagacaaacagccccagacgggcuagaagcguggccagccagagcaucauugccuacacaaugucucugggcgccgagaacagcguggccuacuccaacaacucuaucgcuauccccaccaacuucaccaucagcgugaccaccgagauccugccuguguccaugaccaagaccagcguggacugcaccauguacaucugcggcgauuccaccgagugcuccaaccugcugcugcaguacggcagcuucugcacccagcugaauagagcccugacagggaucgccguggaacaggacaagaacacccaagagguguucgcccaagugaagcaaaucuacaagaccccuccuaucaaggacuucggcggcuucaauuucagccagauucugcccgauccuagcaagcccagcaagcggagcuucaucgaggaccugcuguucaacaaagugacacuggccgacgccggcuucaucaagcaguauggcgauugucugggcgacauugccgccagggaucugauuugcgcccagaaguuuaacggacugacagugcugccuccucugcugaccgaugagaugaucgcccaguacacaucugcccugcuggccggcacaaucacaagcggcuggacauuuggagcuggcgccgcucugcagauccccuuugcuaugcagauggccuaccgguucaacggcaucggagugacccagaaugugcuguacgagaaccagaagcugaucgccaaccaguucaacagcgccaucggcaagauccaggacagccugagcagcacagcaagcgcccugggaaagcugcaggacguggucaaccagaaugcccaggcacugaacacccuggucaagugccuguccuccaacuucggcgccaucagcucugugcugaacgauauccugagcagacuggacaaggucgaggccgaggugcagaucgacagacugaucacaggcagacugcagugucuccagacauacgugacccagcagcugaucagagccgccgagauuagagccucugccaaucuggccgccaccaagaugucugagugugugcugggccagagcaagagaguggacuuuugcggcaagggcuaccaccugaugagcuucccucagucugccccucacggcgugguguuucugcacgugacauaugugcccgcucaagagaagaauuucaccaccgcuccagccaucugccacgacggcaaagcccacuuuccuagagaaggcguguucguguccaacggcacccauugguucgugacacagcggaacuucuacgagccccagaucaucaccaccgacaacaccuucgugucuggcaacugcgacguugugaucggcauugugaacaauaccguguacgacccucugcagcccgagcuggacagcggaggcggaggaucugacaucaucaagcugcugaacgagcaagugaacaaagagaugcagagcagcaaccuguacaugagcaugagcagcuggugcuacacccacagccuugauggcgccggacuguuccuguuugaucacgccgccgaggaauacgagcacgccaagaagcugaucaucuuccugaacgagaacaacgugcccgugcagcugaccagcauuucugccccugagcacaaguucgagggccugacacagaucuuccagaaggccuacgaacacgagcagcacaucagcgagagcaucaacaacaucguggaccacgccauuaagagcaaggaucacgccaccuucaacuuucugcagugguacguggccgaacagcacgaggaagaggugcuguucaaggacauccuggacaagaucgagcugaucggcaacgagaaccacggccuguaucuggccgaccaguacgugaagggaaucgccaagagcagaaagagcugaggacuagucccuguucccagagcccacuuuuuuuucuuuuuuugaaauaaaauagccugucuuucagaucucaaaggcucuuuucagagccaccaaaaaaaaaaaaaaaaaaaaaaaaaaaaaaaaaaaaaaaaaaaaaaaaaaaaaaaaaaaaaaaaaaaaaaaaaaaaaaaaaaaaaaaaaaaaaaaaaaaaa

SEQ ID NO: 12642 - RNA, 4220 nt, Artificial Sequence
  SARS-CoV-2/Wuhan/WIV05/2019__EPI_ISL_402128 spike protein mRNA gc mod (1-1147)(F970C_G999C) Ferritin construct
aggagagucccgcagucggcguccagcggcucugcuuguucgugugugugucguugcaggccuuauucaagcuuaccauguucguguuucuggugcugcugccccugguguccagccagugugugaaccugaccaccagaacacagcugccuccagccuacaccaacagcuucaccagaggcguguacuaccccgacaagguguucagauccagcgugcugcacucuacccaggaccuguuccugccuuucuucagcaacgugaccugguuccacgccauccacguguccggcaccaauggcaccaagagauucgacaaccccgugcugcccuucaacgacgggguguacuuugccagcaccgagaaguccaacaucaucagaggcuggaucuucggcaccacacuggacagcaagacccagagccugcugaucgugaacaacgccaccaacguggucaucaaagugugcgaguuccaguucugcaacgaccccuuccugggcgucuacuaccacaagaacaacaagagcuggauggaaagcgaguuccggguguacagcagcgccaacaacugcaccuucgaguacgugucccagccuuuccugauggaccuggaaggcaagcagggcaacuucaagaaccugcgcgaguucguguucaagaacaucgacggcuacuucaaaaucuacagcaagcacaccccuaucaaccucgugcgggaucugccucagggcuucucugcucuggaaccccugguggaucugcccaucggcaucaacaucacccgguuucagacacugcuggcccugcacagaagcuaccugacaccuggcgauagcagcagcggauggacagcuggugccgccgcuuacuaugugggcuaccugcagccuagaaccuuccugcugaaguacaacgagaacggcaccaucaccgacgccguggauugugcucuggauccucugagcgagacaaagugcacccugaaguccuucaccguggaaaagggcaucuaccagaccagcaacuuccgggugcagcccaccgaauccaucgugcgguuccccaauaucaccaaucugugccccuucggcgagguguucaaugccaccagauucgccucuguguacgccuggaaccggaagcggaucagcaauugcguggccgacuacuccgugcuguacaacuccgccagcuucagcaccuucaagugcuacggcguguccccuaccaagcugaacgaccugugcuucacaaacguguacgccgacagcuucgugauccggggagaugaagugcggcagauugccccuggacagacaggcaagaucgccgacuacaacuacaagcugcccgacgacuucaccggcugugugauugccuggaacagcaacaaccuggacuccaaagucggcggcaacuacaauuaccuguaccggcuguuccggaaguccaaucugaagcccuucgagcgggacaucagcaccgaaaucuaucaggccggcagcaccccuugcaacggcguggaaggcuucaacugcuacuucccacugcaguccuacggcuuucagcccacaaauggcgugggcuaucagcccuacagagugguggugcugagcuucgaacugcugcaugcuccugccacagugugcggcccuaagaaaagcaccaaucucgugaagaacaaaugcgugaacuucaacuucaacggccugaccggcaccggcgugcugacagagagcaacaagaaguuccugccauuccagcaguuuggccgggauaucgccgauaccacagacgccguuagagauccccagacacuggaaauccuggacaucaccccaugcagcuucggcggagugucugugaucaccccuggcaccaacaccagcaaucagguggcagugcuguaccaggacgugaacuguaccgaagugcccguggccauucacgccgaucagcugacaccuacauggcggguguacuccaccggcagcaauguguuucagaccagagccggcugucugaucggagccgagcacgugaacaauagcuacgagugcgacauccccaucggcgcuggcaucugugccagcuaccagacacagacaaacagccccagacgggcuagaagcguggccagccagagcaucauugccuacacaaugucucugggcgccgagaacagcguggccuacuccaacaacucuaucgcuauccccaccaacuucaccaucagcgugaccaccgagauccugccuguguccaugaccaagaccagcguggacugcaccauguacaucugcggcgauuccaccgagugcuccaaccugcugcugcaguacggcagcuucugcacccagcugaauagagcccugacagggaucgccguggaacaggacaagaacacccaagagguguucgcccaagugaagcaaaucuacaagaccccuccuaucaaggacuucggcggcuucaauuucagccagauucugcccgauccuagcaagcccagcaagcggagcuucaucgaggaccugcuguucaacaaagugacacuggccgacgccggcuucaucaagcaguauggcgauugucugggcgacauugccgccagggaucugauuugcgcccagaaguuuaacggacugacagugcugccuccucugcugaccgaugagaugaucgcccaguacacaucugcccugcuggccggcacaaucacaagcggcuggacauuuggagcuggcgccgcucugcagauccccuuugcuaugcagauggccuaccgguucaacggcaucggagugacccagaaugugcuguacgagaaccagaagcugaucgccaaccaguucaacagcgccaucggcaagauccaggacagccugagcagcacagcaagcgcccugggaaagcugcaggacguggucaaccagaaugcccaggcacugaacacccuggucaagcagcuguccuccaacugcggcgccaucagcucugugcugaacgauauccugagcagacuggacaaggucgaggccgaggugcagaucgacagacugaucacauguagacugcagagccuccagacauacgugacccagcagcugaucagagccgccgagauuagagccucugccaaucuggccgccaccaagaugucugagugugugcugggccagagcaagagaguggacuuuugcggcaagggcuaccaccugaugagcuucccucagucugccccucacggcgugguguuucugcacgugacauaugugcccgcucaagagaagaauuucaccaccgcuccagccaucugccacgacggcaaagcccacuuuccuagagaaggcguguucguguccaacggcacccauugguucgugacacagcggaacuucuacgagccccagaucaucaccaccgacaacaccuucgugucuggcaacugcgacguugugaucggcauugugaacaauaccguguacgacccucugcagcccgagcuggacagcggaggcggaggaucugacaucaucaagcugcugaacgagcaagugaacaaagagaugcagagcagcaaccuguacaugagcaugagcagcuggugcuacacccacagccuugauggcgccggacuguuccuguuugaucacgccgccgaggaauacgagcacgccaagaagcugaucaucuuccugaacgagaacaacgugcccgugcagcugaccagcauuucugccccugagcacaaguucgagggccugacacagaucuuccagaaggccuacgaacacgagcagcacaucagcgagagcaucaacaacaucguggaccacgccauuaagagcaaggaucacgccaccuucaacuuucugcagugguacguggccgaacagcacgaggaagaggugcuguucaaggacauccuggacaagaucgagcugaucggcaacgagaaccacggccuguaucuggccgaccaguacgugaagggaaucgccaagagcagaaagagcugaggacuagucccuguucccagagcccacuuuuuuuucuuuuuuugaaauaaaauagccugucuuucagaucucaaaggcucuuuucagagccaccaaaaaaaaaaaaaaaaaaaaaaaaaaaaaaaaaaaaaaaaaaaaaaaaaaaaaaaaaaaaaaaaaaaaaaaaaaaaaaaaaaaaaaaaaaaaaaaaaaaaa

SEQ ID NO: 12643 - RNA, 4220 nt, Artificial Sequence
  SARS-CoV-2/Wuhan/WIV05/2019__EPI_ISL_402128 spike protein mRNA gc mod (1-1147)(A972C_R995C) Ferritin construct
aggagagucccgcagucggcguccagcggcucugcuuguucgugugugugucguugcaggccuuauucaagcuuaccauguucguguuucuggugcugcugccccugguguccagccagugugugaaccugaccaccagaacacagcugccuccagccuacaccaacagcuucaccagaggcguguacuaccccgacaagguguucagauccagcgugcugcacucuacccaggaccuguuccugccuuucuucagcaacgugaccugguuccacgccauccacguguccggcaccaauggcaccaagagauucgacaaccccgugcugcccuucaacgacgggguguacuuugccagcaccgagaaguccaacaucaucagaggcuggaucuucggcaccacacuggacagcaagacccagagccugcugaucgugaacaacgccaccaacguggucaucaaagugugcgaguuccaguucugcaacgaccccuuccugggcgucuacuaccacaagaacaacaagagcuggauggaaagcgaguuccggguguacagcagcgccaacaacugcaccuucgaguacgugucccagccuuuccugauggaccuggaaggcaagcagggcaacuucaagaaccugcgcgaguucguguucaagaacaucgacggcuacuucaaaaucuacagcaagcacaccccuaucaaccucgugcgggaucugccucagggcuucucugcucuggaaccccugguggaucugcccaucggcaucaacaucacccgguuucagacacugcuggcccugcacagaagcuaccugacaccuggcgauagcagcagcggauggacagcuggugccgccgcuuacuaugugggcuaccugcagccuagaaccuuccugcugaaguacaacgagaacggcaccaucaccgacgccguggauugugcucuggauccucugagcgagacaaagugcacccugaaguccuucaccguggaaaagggcaucuaccagaccagcaacuuccgggugcagcccaccgaauccaucgugcgguuccccaauaucaccaaucugugccccuucggcgagguguucaaugccaccagauucgccucuguguacgccuggaaccggaagcggaucagcaauugcguggccgacuacuccgugcuguacaacuccgccagcuucagcaccuucaagugcuacggcguguccccuaccaagcugaacgaccugugcuucacaaacguguacgccgacagcuucgugauccggggagaugaagugcggcagauugccccuggacagacaggcaagaucgccgacuacaacuacaagcugcccgacgacuucaccggcugugugauugccuggaacagcaacaaccuggacuccaaagucggcggcaacuacaauuaccuguaccggcuguuccggaaguccaaucugaagcccuucgagcgggacaucagcaccgaaaucuaucaggccggcagcaccccuugcaacggcguggaaggcuucaacugcuacuucccacugcaguccuacggcuuucagcccacaaauggcgugggcuaucagcccuacagagugguggugcugagcuucgaacugcugcaugcuccugccacagugugcggcccuaagaaaagcaccaaucucgugaagaacaaaugcgugaacuucaacuucaacggccugaccggcaccggcgugcugacagagagcaacaagaaguuccugccauuccagcaguuuggccgggauaucgccgauaccacagacgccguuagagauccccagacacuggaaauccuggacaucaccccaugcagcuucggcggagugucugugaucaccccuggcaccaacaccagcaaucagguggcagugcuguaccaggacgugaacuguaccgaagugcccguggccauucacgccgaucagcugacaccuacauggcggguguacuccaccggcagcaauguguuucagaccagagccggcugucugaucggagccgagcacgugaacaauagcuacgagugcgacauccccaucggcgcuggcaucugugccagcuaccagacacagacaaacagccccagacgggcuagaagcguggccagccagagcaucauugccuacacaaugucucugggcgccgagaacagcguggccuacuccaacaacucuaucgcuauccccaccaacuucaccaucagcgugaccaccgagauccugccuguguccaugaccaagaccagcguggacugcaccauguacaucugcggcgauuccaccgagugcuccaaccugcugcugcaguacggcagcuucugcacccagcugaauagagcccugacagggaucgccguggaacaggacaagaacacccaagagguguucgcccaagugaagcaaaucuacaagaccccuccuaucaaggacuucggcggcuucaauuucagccagauucugcccgauccuagcaagcccagcaagcggagcuucaucgaggaccugcuguucaacaaagugacacuggccgacgccggcuucaucaagcaguauggcgauugucugggcgacauugccgccagggaucugauuugcgcccagaaguuuaacggacugacagugcugccuccucugcugaccgaugagaugaucgcccaguacacaucugcccugcuggccggcacaaucacaagcggcuggacauuuggagcuggcgccgcucugcagauccccuuugcuaugcagauggccuaccgguucaacggcaucggagugacccagaaugugcuguacgagaaccagaagcugaucgccaaccaguucaacagcgccaucggcaagauccaggacagccugagcagcacagcaagcgcccugggaaagcugcaggacguggucaaccagaaugcccaggcacugaacacccuggucaagcagcuguccuccaacuucggcugcaucagcucugugcugaacgauauccugagcagacuggacaaggucgaggccgaggugcagaucgacugucugaucacaggcagacugcagagccuccagacauacgugacccagcagcugaucagagccgccgagauuagagccucugccaaucuggccgccaccaagaugucugagugugugcugggccagagcaagagaguggacuuuugcggcaagggcuaccaccugaugagcuucccucagucugccccucacggcgugguguuucugcacgugacauaugugcccgcucaagagaagaauuucaccaccgcuccagccaucugccacgacggcaaagcccacuuuccuagagaaggcguguucguguccaacggcacccauugguucgugacacagcggaacuucuacgagccccagaucaucaccaccgacaacaccuucgugucuggcaacugcgacguugugaucggcauugugaacaauaccguguacgacccucugcagcccgagcuggacagcggaggcggaggaucugacaucaucaagcugcugaacgagcaagugaacaaagagaugcagagcagcaaccuguacaugagcaugagcagcuggugcuacacccacagccuugauggcgccggacuguuccuguuugaucacgccgccgaggaauacgagcacgccaagaagcugaucaucuuccugaacgagaacaacgugcccgugcagcugaccagcauuucugccccugagcacaaguucgagggccugacacagaucuuccagaaggccuacgaacacgagcagcacaucagcgagagcaucaacaacaucguggaccacgccauuaagagcaaggaucacgccaccuucaacuuucugcagugguacguggccgaacagcacgaggaagaggugcuguucaaggacauccuggacaagaucgagcugaucggcaacgagaaccacggccuguaucuggccgaccaguacgugaagggaaucgccaagagcagaaagagcugaggacuagucccuguucccagagcccacuuuuuuuucuuuuuuugaaauaaaauagccugucuuucagaucucaaaggcucuuuucagagccaccaaaaaaaaaaaaaaaaaaaaaaaaaaaaaaaaaaaaaaaaaaaaaaaaaaaaaaaaaaaaaaaaaaaaaaaaaaaaaaaaaaaaaaaaaaaaaaaaaaaaa

SEQ ID NO: 12644 - RNA, 4220 nt, Artificial Sequence
  SARS-CoV-2/Wuhan/WIV05/2019__EPI_ISL_402128 spike protein mRNA gc mod (1-1147)(A890C_V1040C) Ferritin construct
aggagagucccgcagucggcguccagcggcucugcuuguucgugugugugucguugcaggccuuauucaagcuuaccauguucguguuucuggugcugcugccccugguguccagccagugugugaaccugaccaccagaacacagcugccuccagccuacaccaacagcuucaccagaggcguguacuaccccgacaagguguucagauccagcgugcugcacucuacccaggaccuguuccugccuuucuucagcaacgugaccugguuccacgccauccacguguccggcaccaauggcaccaagagauucgacaaccccgugcugcccuucaacgacgggguguacuuugccagcaccgagaaguccaacaucaucagaggcuggaucuucggcaccacacuggacagcaagacccagagccugcugaucgugaacaacgccaccaacguggucaucaaagugugcgaguuccaguucugcaacgaccccuuccugggcgucuacuaccacaagaacaacaagagcuggauggaaagcgaguuccggguguacagcagcgccaacaacugcaccuucgaguacgugucccagccuuuccugauggaccuggaaggcaagcagggcaacuucaagaaccugcgcgaguucguguucaagaacaucgacggcuacuucaaaaucuacagcaagcacaccccuaucaaccucgugcgggaucugccucagggcuucucugcucuggaaccccugguggaucugcccaucggcaucaacaucacccgguuucagacacugcuggcccugcacagaagcuaccugacaccuggcgauagcagcagcggauggacagcuggugccgccgcuuacuaugugggcuaccugcagccuagaaccuuccugcugaaguacaacgagaacggcaccaucaccgacgccguggauugugcucuggauccucugagcgagacaaagugcacccugaaguccuucaccguggaaaagggcaucuaccagaccagcaacuuccgggugcagcccaccgaauccaucgugcgguuccccaauaucaccaaucugugccccuucggcgagguguucaaugccaccagauucgccucuguguacgccuggaaccggaagcggaucagcaauugcguggccgacuacuccgugcuguacaacuccgccagcuucagcaccuucaagugcuacggcguguccccuaccaagcugaacgaccugugcuucacaaacguguacgccgacagcuucgugauccggggagaugaagugcggcagauugccccuggacagacaggcaagaucgccgacuacaacuacaagcugcccgacgacuucaccggcugugugauugccuggaacagcaacaaccuggacuccaaagucggcggcaacuacaauuaccuguaccggcuguuccggaaguccaaucugaagcccuucgagcgggacaucagcaccgaaaucuaucaggccggcagcaccccuugcaacggcguggaaggcuucaacugcuacuucccacugcaguccuacggcuuucagcccacaaauggcgugggcuaucagcccuacagagugguggugcugagcuucgaacugcugcaugcuccugccacagugugcggcccuaagaaaagcaccaaucucgugaagaacaaaugcgugaacuucaacuucaacggccugaccggcaccggcgugcugacagagagcaacaagaaguuccugccauuccagcaguuuggccgggauaucgccgauaccacagacgccguuagagauccccagacacuggaaauccuggacaucaccccaugcagcuucggcggagugucugugaucaccccuggcaccaacaccagcaaucagguggcagugcuguaccaggacgugaacuguaccgaagugcccguggccauucacgccgaucagcugacaccuacauggcggguguacuccaccggcagcaauguguuucagaccagagccggcugucugaucggagccgagcacgugaacaauagcuacgagugcgacauccccaucggcgcuggcaucugugccagcuaccagacacagacaaacagccccagacgggcuagaagcguggccagccagagcaucauugccuacacaaugucucugggcgccgagaacagcguggccuacuccaacaacucuaucgcuauccccaccaacuucaccaucagcgugaccaccgagauccugccuguguccaugaccaagaccagcguggacugcaccauguacaucugcggcgauuccaccgagugcuccaaccugcugcugcaguacggcagcuucugcacccagcugaauagagcccugacagggaucgccguggaacaggacaagaacacccaagagguguucgcccaagugaagcaaaucuacaagaccccuccuaucaaggacuucggcggcuucaauuucagccagauucugcccgauccuagcaagcccagcaagcggagcuucaucgaggaccugcuguucaacaaagugacacuggccgacgccggcuucaucaagcaguauggcgauugucugggcgacauugccgccagggaucugauuugcgcccagaaguuuaacggacugacagugcugccuccucugcugaccgaugagaugaucgcccaguacacaucugcccugcuggccggcacaaucacaagcggcuggacauuuggaugcggcgccgcucugcagauccccuuugcuaugcagauggccuaccgguucaacggcaucggagugacccagaaugugcuguacgagaaccagaagcugaucgccaaccaguucaacagcgccaucggcaagauccaggacagccugagcagcacagcaagcgcccugggaaagcugcaggacguggucaaccagaaugcccaggcacugaacacccuggucaagcagcuguccuccaacuucggcgccaucagcucugugcugaacgauauccugagcagacuggacaaggucgaggccgaggugcagaucgacagacugaucacaggcagacugcagagccuccagacauacgugacccagcagcugaucagagccgccgagauuagagccucugccaaucuggccgccaccaagaugucugagugugugcugggccagagcaagagaugugacuuuugcggcaagggcuaccaccugaugagcuucccucagucugccccucacggcgugguguuucugcacgugacauaugugcccgcucaagagaagaauuucaccaccgcuccagccaucugccacgacggcaaagcccacuuuccuagagaaggcguguucguguccaacggcacccauugguucgugacacagcggaacuucuacgagccccagaucaucaccaccgacaacaccuucgugucuggcaacugcgacguugugaucggcauugugaacaauaccguguacgacccucugcagcccgagcuggacagcggaggcggaggaucugacaucaucaagcugcugaacgagcaagugaacaaagagaugcagagcagcaaccuguacaugagcaugagcagcuggugcuacacccacagccuugauggcgccggacuguuccuguuugaucacgccgccgaggaauacgagcacgccaagaagcugaucaucuuccugaacgagaacaacgugcccgugcagcugaccagcauuucugccccugagcacaaguucgagggccugacacagaucuuccagaaggccuacgaacacgagcagcacaucagcgagagcaucaacaacaucguggaccacgccauuaagagcaaggaucacgccaccuucaacuuucugcagugguacguggccgaacagcacgaggaagaggugcuguucaaggacauccuggacaagaucgagcugaucggcaacgagaaccacggccuguaucuggccgaccaguacgugaagggaaucgccaagagcagaaagagcugaggacuagucccuguucccagagcccacuuuuuuuucuuuuuuugaaauaaaauagccugucuuucagaucucaaaggcucuuuucagagccaccaaaaaaaaaaaaaaaaaaaaaaaaaaaaaaaaaaaaaaaaaaaaaaaaaaaaaaaaaaaaaaaaaaaaaaaaaaaaaaaaaaaaaaaaaaaaaaaaaaaaa

SEQ ID NO: 12645 - RNA, 4220 nt, Artificial Sequence
  SARS-CoV-2/Wuhan/WIV05/2019__EPI_ISL_402128 spike protein mRNA gc mod (1-1147)(T874C_S1055C) Ferritin construct
aggagagucccgcagucggcguccagcggcucugcuuguucgugugugugucguugcaggccuuauucaagcuuaccauguucguguuucuggugcugcugccccugguguccagccagugugugaaccugaccaccagaacacagcugccuccagccuacaccaacagcuucaccagaggcguguacuaccccgacaagguguucagauccagcgugcugcacucuacccaggaccuguuccugccuuucuucagcaacgugaccugguuccacgccauccacguguccggcaccaauggcaccaagagauucgacaaccccgugcugcccuucaacgacgggguguacuuugccagcaccgagaaguccaacaucaucagaggcuggaucuucggcaccacacuggacagcaagacccagagccugcugaucgugaacaacgccaccaacguggucaucaaagugugcgaguuccaguucugcaacgaccccuuccugggcgucuacuaccacaagaacaacaagagcuggauggaaagcgaguuccggguguacagcagcgccaacaacugcaccuucgaguacgugucccagccuuuccugauggaccuggaaggcaagcagggcaacuucaagaaccugcgcgaguucguguucaagaacaucgacggcuacuucaaaaucuacagcaagcacaccccuaucaaccucgugcgggaucugccucagggcuucucugcucuggaaccccugguggaucugcccaucggcaucaacaucacccgguuucagacacugcuggcccugcacagaagcuaccugacaccuggcgauagcagcagcggauggacagcuggugccgccgcuuacuaugugggcuaccugcagccuagaaccuuccugcugaaguacaacgagaacggcaccaucaccgacgccguggauugugcucuggauccucugagcgagacaaagugcacccugaaguccuucaccguggaaaagggcaucuaccagaccagcaacuuccgggugcagcccaccgaauccaucgugcgguuccccaauaucaccaaucugugccccuucggcgagguguucaaugccaccagauucgccucuguguacgccuggaaccggaagcggaucagcaauugcguggccgacuacuccgugcuguacaacuccgccagcuucagcaccuucaagugcuacggcguguccccuaccaagcugaacgaccugugcuucacaaacguguacgccgacagcuucgugauccggggagaugaagugcggcagauugccccuggacagacaggcaagaucgccgacuacaacuacaagcugcccgacgacuucaccggcugugugauugccuggaacagcaacaaccuggacuccaaagucggcggcaacuacaauuaccuguaccggcuguuccggaaguccaaucugaagcccuucgagcgggacaucagcaccgaaaucuaucaggccggcagcaccccuugcaacggcguggaaggcuucaacugcuacuucccacugcaguccuacggcuuucagcccacaaauggcgugggcuaucagcccuacagagugguggugcugagcuucgaacugcugcaugcuccugccacagugugcggcccuaagaaaagcaccaaucucgugaagaacaaaugcgugaacuucaacuucaacggccugaccggcaccggcgugcugacagagagcaacaagaaguuccugccauuccagcaguuuggccgggauaucgccgauaccacagacgccguuagagauccccagacacuggaaauccuggacaucaccccaugcagcuucggcggagugucugugaucaccccuggcaccaacaccagcaaucagguggcagugcuguaccaggacgugaacuguaccgaagugcccguggccauucacgccgaucagcugacaccuacauggcggguguacuccaccggcagcaauguguuucagaccagagccggcugucugaucggagccgagcacgugaacaauagcuacgagugcgacauccccaucggcgcuggcaucugugccagcuaccagacacagacaaacagccccagacgggcuagaagcguggccagccagagcaucauugccuacacaaugucucugggcgccgagaacagcguggccuacuccaacaacucuaucgcuauccccaccaacuucaccaucagcgugaccaccgagauccugccuguguccaugaccaagaccagcguggacugcaccauguacaucugcggcgauuccaccgagugcuccaaccugcugcugcaguacggcagcuucugcacccagcugaauagagcccugacagggaucgccguggaacaggacaagaacacccaagagguguucgcccaagugaagcaaaucuacaagaccccuccuaucaaggacuucggcggcuucaauuucagccagauucugcccgauccuagcaagcccagcaagcggagcuucaucgaggaccugcuguucaacaaagugacacuggccgacgccggcuucaucaagcaguauggcgauugucugggcgacauugccgccagggaucugauuugcgcccagaaguuuaacggacugacagugcugccuccucugcugaccgaugagaugaucgcccaguacugcucugcccugcuggccggcacaaucacaagcggcuggacauuuggagcuggcgccgcucugcagauccccuuugcuaugcagauggccuaccgguucaacggcaucggagugacccagaaugugcuguacgagaaccagaagcugaucgccaaccaguucaacagcgccaucggcaagauccaggacagccugagcagcacagcaagcgcccugggaaagcugcaggacguggucaaccagaaugcccaggcacugaacacccuggucaagcagcuguccuccaacuucggcgccaucagcucugugcugaacgauauccugagcagacuggacaaggucgaggccgaggugcagaucgacagacugaucacaggcagacugcagagccuccagacauacgugacccagcagcugaucagagccgccgagauuagagccucugccaaucuggccgccaccaagaugucugagugugugcugggccagagcaagagaguggacuuuugcggcaagggcuaccaccugaugagcuucccucagugcgccccucacggcgugguguuucugcacgugacauaugugcccgcucaagagaagaauuucaccaccgcuccagccaucugccacgacggcaaagcccacuuuccuagagaaggcguguucguguccaacggcacccauugguucgugacacagcggaacuucuacgagccccagaucaucaccaccgacaacaccuucgugucuggcaacugcgacguugugaucggcauugugaacaauaccguguacgacccucugcagcccgagcuggacagcggaggcggaggaucugacaucaucaagcugcugaacgagcaagugaacaaagagaugcagagcagcaaccuguacaugagcaugagcagcuggugcuacacccacagccuugauggcgccggacuguuccuguuugaucacgccgccgaggaauacgagcacgccaagaagcugaucaucuuccugaacgagaacaacgugcccgugcagcugaccagcauuucugccccugagcacaaguucgagggccugacacagaucuuccagaaggccuacgaacacgagcagcacaucagcgagagcaucaacaacaucguggaccacgccauuaagagcaaggaucacgccaccuucaacuuucugcagugguacguggccgaacagcacgaggaagaggugcuguucaaggacauccuggacaagaucgagcugaucggcaacgagaaccacggccuguaucuggccgaccaguacgugaagggaaucgccaagagcagaaagagcugaggacuagucccuguucccagagcccacuuuuuuuucuuuuuuugaaauaaaauagccugucuuucagaucucaaaggcucuuuucagagccaccaaaaaaaaaaaaaaaaaaaaaaaaaaaaaaaaaaaaaaaaaaaaaaaaaaaaaaaaaaaaaaaaaaaaaaaaaaaaaaaaaaaaaaaaaaaaaaaaaaaaa

SEQ ID NO: 12646 - RNA, 3806 nt, Artificial Sequence
  SARS-CoV-2/Wuhan/WIV05/2019__EPI_ISL_402128 spike protein mRNA gc mod (1-1147) Foldon construct
aggagagucccgcagucggcguccagcggcucugcuuguucgugugugugucguugcaggccuuauucaagcuuaccauguucguguuucuggugcugcugccccugguguccagccagugugugaaccugaccaccagaacacagcugccuccagccuacaccaacagcuucaccagaggcguguacuaccccgacaagguguucagauccagcgugcugcacucuacccaggaccuguuccugccuuucuucagcaacgugaccugguuccacgccauccacguguccggcaccaauggcaccaagagauucgacaaccccgugcugcccuucaacgacgggguguacuuugccagcaccgagaaguccaacaucaucagaggcuggaucuucggcaccacacuggacagcaagacccagagccugcugaucgugaacaacgccaccaacguggucaucaaagugugcgaguuccaguucugcaacgaccccuuccugggcgucuacuaccacaagaacaacaagagcuggauggaaagcgaguuccggguguacagcagcgccaacaacugcaccuucgaguacgugucccagccuuuccugauggaccuggaaggcaagcagggcaacuucaagaaccugcgcgaguucguguucaagaacaucgacggcuacuucaaaaucuacagcaagcacaccccuaucaaccucgugcgggaucugccucagggcuucucugcucuggaaccccugguggaucugcccaucggcaucaacaucacccgguuucagacacugcuggcccugcacagaagcuaccugacaccuggcgauagcagcagcggauggacagcuggugccgccgcuuacuaugugggcuaccugcagccuagaaccuuccugcugaaguacaacgagaacggcaccaucaccgacgccguggauugugcucuggauccucugagcgagacaaagugcacccugaaguccuucaccguggaaaagggcaucuaccagaccagcaacuuccgggugcagcccaccgaauccaucgugcgguuccccaauaucaccaaucugugccccuucggcgagguguucaaugccaccagauucgccucuguguacgccuggaaccggaagcggaucagcaauugcguggccgacuacuccgugcuguacaacuccgccagcuucagcaccuucaagugcuacggcguguccccuaccaagcugaacgaccugugcuucacaaacguguacgccgacagcuucgugauccggggagaugaagugcggcagauugccccuggacagacaggcaagaucgccgacuacaacuacaagcugcccgacgacuucaccggcugugugauugccuggaacagcaacaaccuggacuccaaagucggcggcaacuacaauuaccuguaccggcuguuccggaaguccaaucugaagcccuucgagcgggacaucagcaccgaaaucuaucaggccggcagcaccccuugcaacggcguggaaggcuucaacugcuacuucccacugcaguccuacggcuuucagcccacaaauggcgugggcuaucagcccuacagagugguggugcugagcuucgaacugcugcaugcuccugccacagugugcggcccuaagaaaagcaccaaucucgugaagaacaaaugcgugaacuucaacuucaacggccugaccggcaccggcgugcugacagagagcaacaagaaguuccugccauuccagcaguuuggccgggauaucgccgauaccacagacgccguuagagauccccagacacuggaaauccuggacaucaccccaugcagcuucggcggagugucugugaucaccccuggcaccaacaccagcaaucagguggcagugcuguaccaggacgugaacuguaccgaagugcccguggccauucacgccgaucagcugacaccuacauggcggguguacuccaccggcagcaauguguuucagaccagagccggcugucugaucggagccgagcacgugaacaauagcuacgagugcgacauccccaucggcgcuggcaucugugccagcuaccagacacagacaaacagccccagacgggcuagaagcguggccagccagagcaucauugccuacacaaugucucugggcgccgagaacagcguggccuacuccaacaacucuaucgcuauccccaccaacuucaccaucagcgugaccaccgagauccugccuguguccaugaccaagaccagcguggacugcaccauguacaucugcggcgauuccaccgagugcuccaaccugcugcugcaguacggcagcuucugcacccagcugaauagagcccugacagggaucgccguggaacaggacaagaacacccaagagguguucgcccaagugaagcaaaucuacaagaccccuccuaucaaggacuucggcggcuucaauuucagccagauucugcccgauccuagcaagcccagcaagcggagcuucaucgaggaccugcuguucaacaaagugacacuggccgacgccggcuucaucaagcaguauggcgauugucugggcgacauugccgccagggaucugauuugcgcccagaaguuuaacggacugacagugcugccuccucugcugaccgaugagaugaucgcccaguacacaucugcccugcuggccggcacaaucacaagcggcuggacauuuggagcuggcgccgcucugcagauccccuuugcuaugcagauggccuaccgguucaacggcaucggagugacccagaaugugcuguacgagaaccagaagcugaucgccaaccaguucaacagcgccaucggcaagauccaggacagccugagcagcacagcaagcgcccugggaaagcugcaggacguggucaaccagaaugcccaggcacugaacacccuggucaagcagcuguccuccaacuucggcgccaucagcucugugcugaacgauauccugagcagacuggacaaggucgaggccgaggugcagaucgacagacugaucacaggcagacugcagagccuccagacauacgugacccagcagcugaucagagccgccgagauuagagccucugccaaucuggccgccaccaagaugucugagugugugcugggccagagcaagagaguggacuuuugcggcaagggcuaccaccugaugagcuucccucagucugccccucacggcgugguguuucugcacgugacauaugugcccgcucaagagaagaauuucaccaccgcuccagccaucugccacgacggcaaagcccacuuuccuagagaaggcguguucguguccaacggcacccauugguucgugacacagcggaacuucuacgagccccagaucaucaccaccgacaacaccuucgugucuggcaacugcgacguugugaucggcauugugaacaauaccguguacgacccucugcagcccgagcuggacagcggaggaucuggcuauauccccgaggcuccuagagauggccaggccuauguucggaaggauggcgaaugggugcugcugagcaccuuccuuugaggacuagucccuguucccagagcccacuuuuuuuucuuuuuuugaaauaaaauagccugucuuucagaucucaaaggcucuuuucagagccaccaaaaaaaaaaaaaaaaaaaaaaaaaaaaaaaaaaaaaaaaaaaaaaaaaaaaaaaaaaaaaaaaaaaaaaaaaaaaaaaaaaaaaaaaaaaaaaaaaaaaa

SEQ ID NO: 12647 - RNA, 3806 nt, Artificial Sequence
  SARS-CoV-2/Wuhan/WIV05/2019__EPI_ISL_402128 spike protein mRNA gc mod (1-1147)(K986P_V987P) Foldon construct
aggagagucccgcagucggcguccagcggcucugcuuguucgugugugugucguugcaggccuuauucaagcuuaccauguucguguuucuggugcugcugccccugguguccagccagugugugaaccugaccaccagaacacagcugccuccagccuacaccaacagcuucaccagaggcguguacuaccccgacaagguguucagauccagcgugcugcacucuacccaggaccuguuccugccuuucuucagcaacgugaccugguuccacgccauccacguguccggcaccaauggcaccaagagauucgacaaccccgugcugcccuucaacgacgggguguacuuugccagcaccgagaaguccaacaucaucagaggcuggaucuucggcaccacacuggacagcaagacccagagccugcugaucgugaacaacgccaccaacguggucaucaaagugugcgaguuccaguucugcaacgaccccuuccugggcgucuacuaccacaagaacaacaagagcuggauggaaagcgaguuccggguguacagcagcgccaacaacugcaccuucgaguacgugucccagccuuuccugauggaccuggaaggcaagcagggcaacuucaagaaccugcgcgaguucguguucaagaacaucgacggcuacuucaaaaucuacagcaagcacaccccuaucaaccucgugcgggaucugccucagggcuucucugcucuggaaccccugguggaucugcccaucggcaucaacaucacccgguuucagacacugcuggcccugcacagaagcuaccugacaccuggcgauagcagcagcggauggacagcuggugccgccgcuuacuaugugggcuaccugcagccuagaaccuuccugcugaaguacaacgagaacggcaccaucaccgacgccguggauugugcucuggauccucugagcgagacaaagugcacccugaaguccuucaccguggaaaagggcaucuaccagaccagcaacuuccgggugcagcccaccgaauccaucgugcgguuccccaauaucaccaaucugugccccuucggcgagguguucaaugccaccagauucgccucuguguacgccuggaaccggaagcggaucagcaauugcguggccgacuacuccgugcuguacaacuccgccagcuucagcaccuucaagugcuacggcguguccccuaccaagcugaacgaccugugcuucacaaacguguacgccgacagcuucgugauccggggagaugaagugcggcagauugccccuggacagacaggcaagaucgccgacuacaacuacaagcugcccgacgacuucaccggcugugugauugccuggaacagcaacaaccuggacuccaaagucggcggcaacuacaauuaccuguaccggcuguuccggaaguccaaucugaagcccuucgagcgggacaucagcaccgaaaucuaucaggccggcagcaccccuugcaacggcguggaaggcuucaacugcuacuucccacugcaguccuacggcuuucagcccacaaauggcgugggcuaucagcccuacagagugguggugcugagcuucgaacugcugcaugcuccugccacagugugcggcccuaagaaaagcaccaaucucgugaagaacaaaugcgugaacuucaacuucaacggccugaccggcaccggcgugcugacagagagcaacaagaaguuccugccauuccagcaguuuggccgggauaucgccgauaccacagacgccguuagagauccccagacacuggaaauccuggacaucaccccaugcagcuucggcggagugucugugaucaccccuggcaccaacaccagcaaucagguggcagugcuguaccaggacgugaacuguaccgaagugcccguggccauucacgccgaucagcugacaccuacauggcggguguacuccaccggcagcaauguguuucagaccagagccggcugucugaucggagccgagcacgugaacaauagcuacgagugcgacauccccaucggcgcuggcaucugugccagcuaccagacacagacaaacagccccagacgggcuagaagcguggccagccagagcaucauugccuacacaaugucucugggcgccgagaacagcguggccuacuccaacaacucuaucgcuauccccaccaacuucaccaucagcgugaccaccgagauccugccuguguccaugaccaagaccagcguggacugcaccauguacaucugcggcgauuccaccgagugcuccaaccugcugcugcaguacggcagcuucugcacccagcugaauagagcccugacagggaucgccguggaacaggacaagaacacccaagagguguucgcccaagugaagcaaaucuacaagaccccuccuaucaaggacuucggcggcuucaauuucagccagauucugcccgauccuagcaagcccagcaagcggagcuucaucgaggaccugcuguucaacaaagugacacuggccgacgccggcuucaucaagcaguauggcgauugucugggcgacauugccgccagggaucugauuugcgcccagaaguuuaacggacugacagugcugccuccucugcugaccgaugagaugaucgcccaguacacaucugcccugcuggccggcacaaucacaagcggcuggacauuuggagcuggcgccgcucugcagauccccuuugcuaugcagauggccuaccgguucaacggcaucggagugacccagaaugugcuguacgagaaccagaagcugaucgccaaccaguucaacagcgccaucggcaagauccaggacagccugagcagcacagcaagcgcccugggaaagcugcaggacguggucaaccagaaugcccaggcacugaacacccuggucaagcagcuguccuccaacuucggcgccaucagcucugugcugaacgauauccugagcagacuggacccuccugaggccgaggugcagaucgacagacugaucacaggcagacugcagagccuccagacauacgugacccagcagcugaucagagccgccgagauuagagccucugccaaucuggccgccaccaagaugucugagugugugcugggccagagcaagagaguggacuuuugcggcaagggcuaccaccugaugagcuucccucagucugccccucacggcgugguguuucugcacgugacauaugugcccgcucaagagaagaauuucaccaccgcuccagccaucugccacgacggcaaagcccacuuuccuagagaaggcguguucguguccaacggcacccauugguucgugacacagcggaacuucuacgagccccagaucaucaccaccgacaacaccuucgugucuggcaacugcgacguugugaucggcauugugaacaauaccguguacgacccucugcagcccgagcuggacagcggaggaucuggcuauauccccgaggcuccuagagauggccaggccuauguucggaaggauggcgaaugggugcugcugagcaccuuccuuugaggacuagucccuguucccagagcccacuuuuuuuucuuuuuuugaaauaaaauagccugucuuucagaucucaaaggcucuuuucagagccaccaaaaaaaaaaaaaaaaaaaaaaaaaaaaaaaaaaaaaaaaaaaaaaaaaaaaaaaaaaaaaaaaaaaaaaaaaaaaaaaaaaaaaaaaaaaaaaaaaaaaa

SEQ ID NO: 12648 - RNA, 3806 nt, Artificial Sequence
  SARS-CoV-2/Wuhan/WIV05/2019__EPI_ISL_402128 spike protein mRNA gc mod (1-1147)(K986P_V987P_T887WN_A1020W) Foldon construct
aggagagucccgcagucggcguccagcggcucugcuuguucgugugugugucguugcaggccuuauucaagcuuaccauguucguguuucuggugcugcugccccugguguccagccagugugugaaccugaccaccagaacacagcugccuccagccuacaccaacagcuucaccagaggcguguacuaccccgacaagguguucagauccagcgugcugcacucuacccaggaccuguuccugccuuucuucagcaacgugaccugguuccacgccauccacguguccggcaccaauggcaccaagagauucgacaaccccgugcugcccuucaacgacgggguguacuuugccagcaccgagaaguccaacaucaucagaggcuggaucuucggcaccacacuggacagcaagacccagagccugcugaucgugaacaacgccaccaacguggucaucaaagugugcgaguuccaguucugcaacgaccccuuccugggcgucuacuaccacaagaacaacaagagcuggauggaaagcgaguuccggguguacagcagcgccaacaacugcaccuucgaguacgugucccagccuuuccugauggaccuggaaggcaagcagggcaacuucaagaaccugcgcgaguucguguucaagaacaucgacggcuacuucaaaaucuacagcaagcacaccccuaucaaccucgugcgggaucugccucagggcuucucugcucuggaaccccugguggaucugcccaucggcaucaacaucacccgguuucagacacugcuggcccugcacagaagcuaccugacaccuggcgauagcagcagcggauggacagcuggugccgccgcuuacuaugugggcuaccugcagccuagaaccuuccugcugaaguacaacgagaacggcaccaucaccgacgccguggauugugcucuggauccucugagcgagacaaagugcacccugaaguccuucaccguggaaaagggcaucuaccagaccagcaacuuccgggugcagcccaccgaauccaucgugcgguuccccaauaucaccaaucugugccccuucggcgagguguucaaugccaccagauucgccucuguguacgccuggaaccggaagcggaucagcaauugcguggccgacuacuccgugcuguacaacuccgccagcuucagcaccuucaagugcuacggcguguccccuaccaagcugaacgaccugugcuucacaaacguguacgccgacagcuucgugauccggggagaugaagugcggcagauugccccuggacagacaggcaagaucgccgacuacaacuacaagcugcccgacgacuucaccggcugugugauugccuggaacagcaacaaccuggacuccaaagucggcggcaacuacaauuaccuguaccggcuguuccggaaguccaaucugaagcccuucgagcgggacaucagcaccgaaaucuaucaggccggcagcaccccuugcaacggcguggaaggcuucaacugcuacuucccacugcaguccuacggcuuucagcccacaaauggcgugggcuaucagcccuacagagugguggugcugagcuucgaacugcugcaugcuccugccacagugugcggcccuaagaaaagcaccaaucucgugaagaacaaaugcgugaacuucaacuucaacggccugaccggcaccggcgugcugacagagagcaacaagaaguuccugccauuccagcaguuuggccgggauaucgccgauaccacagacgccguuagagauccccagacacuggaaauccuggacaucaccccaugcagcuucggcggagugucugugaucaccccuggcaccaacaccagcaaucagguggcagugcuguaccaggacgugaacuguaccgaagugcccguggccauucacgccgaucagcugacaccuacauggcggguguacuccaccggcagcaauguguuucagaccagagccggcugucugaucggagccgagcacgugaacaauagcuacgagugcgacauccccaucggcgcuggcaucugugccagcuaccagacacagacaaacagccccagacgggcuagaagcguggccagccagagcaucauugccuacacaaugucucugggcgccgagaacagcguggccuacuccaacaacucuaucgcuauccccaccaacuucaccaucagcgugaccaccgagauccugccuguguccaugaccaagaccagcguggacugcaccauguacaucugcggcgauuccaccgagugcuccaaccugcugcugcaguacggcagcuucugcacccagcugaauagagcccugacagggaucgccguggaacaggacaagaacacccaagagguguucgcccaagugaagcaaaucuacaagaccccuccuaucaaggacuucggcggcuucaauuucagccagauucugcccgauccuagcaagcccagcaagcggagcuucaucgaggaccugcuguucaacaaagugacacuggccgacgccggcuucaucaagcaguauggcgauugucugggcgacauugccgccagggaucugauuugcgcccagaaguuuaacggacugacagugcugccuccucugcugaccgaugagaugaucgcccaguacacaucugcccugcuggccggcacaaucacaagcggcuggugguuuggagcuggcgccgcucugcagauccccuuugcuaugcagauggccuaccgguucaacggcaucggagugacccagaaugugcuguacgagaaccagaagcugaucgccaaccaguucaacagcgccaucggcaagauccaggacagccugagcagcacagcaagcgcccugggaaagcugcaggacguggucaaccagaaugcccaggcacugaacacccuggucaagcagcuguccuccaacuucggcgccaucagcucugugcugaacgauauccugagcagacuggacccuccugaggccgaggugcagaucgacagacugaucacaggcagacugcagagccuccagacauacgugacccagcagcugaucagagccgccgagauuagauggucugccaaucuggccgccaccaagaugucugagugugugcugggccagagcaagagaguggacuuuugcggcaagggcuaccaccugaugagcuucccucagucugccccucacggcgugguguuucugcacgugacauaugugcccgcucaagagaagaauuucaccaccgcuccagccaucugccacgacggcaaagcccacuuuccuagagaaggcguguucguguccaacggcacccauugguucgugacacagcggaacuucuacgagccccagaucaucaccaccgacaacaccuucgugucuggcaacugcgacguugugaucggcauugugaacaauaccguguacgacccucugcagcccgagcuggacagcggaggaucuggcuauauccccgaggcuccuagagauggccaggccuauguucggaaggauggcgaaugggugcugcugagcaccuuccuuugaggacuagucccuguucccagagcccacuuuuuuuucuuuuuuugaaauaaaauagccugucuuucagaucucaaaggcucuuuucagagccaccaaaaaaaaaaaaaaaaaaaaaaaaaaaaaaaaaaaaaaaaaaaaaaaaaaaaaaaaaaaaaaaaaaaaaaaaaaaaaaaaaaaaaaaaaaaaaaaaaaaaa

SEQ ID NO: 12649 - RNA, 3806 nt, Artificial Sequence
  SARS-CoV-2/Wuhan/WIV05/2019__EPI_ISL_402128 spike protein mRNA gc mod (1-1147)(K986P_V987P_P1069F) Foldon construct
aggagagucccgcagucggcguccagcggcucugcuuguucgugugugugucguugcaggccuuauucaagcuuaccauguucguguuucuggugcugcugccccugguguccagccagugugugaaccugaccaccagaacacagcugccuccagccuacaccaacagcuucaccagaggcguguacuaccccgacaagguguucagauccagcgugcugcacucuacccaggaccuguuccugccuuucuucagcaacgugaccugguuccacgccauccacguguccggcaccaauggcaccaagagauucgacaaccccgugcugcccuucaacgacgggguguacuuugccagcaccgagaaguccaacaucaucagaggcuggaucuucggcaccacacuggacagcaagacccagagccugcugaucgugaacaacgccaccaacguggucaucaaagugugcgaguuccaguucugcaacgaccccuuccugggcgucuacuaccacaagaacaacaagagcuggauggaaagcgaguuccggguguacagcagcgccaacaacugcaccuucgaguacgugucccagccuuuccugauggaccuggaaggcaagcagggcaacuucaagaaccugcgcgaguucguguucaagaacaucgacggcuacuucaaaaucuacagcaagcacaccccuaucaaccucgugcgggaucugccucagggcuucucugcucuggaaccccugguggaucugcccaucggcaucaacaucacccgguuucagacacugcuggcccugcacagaagcuaccugacaccuggcgauagcagcagcggauggacagcuggugccgccgcuuacuaugugggcuaccugcagccuagaaccuuccugcugaaguacaacgagaacggcaccaucaccgacgccguggauugugcucuggauccucugagcgagacaaagugcacccugaaguccuucaccguggaaaagggcaucuaccagaccagcaacuuccgggugcagcccaccgaauccaucgugcgguuccccaauaucaccaaucugugccccuucggcgagguguucaaugccaccagauucgccucuguguacgccuggaaccggaagcggaucagcaauugcguggccgacuacuccgugcuguacaacuccgccagcuucagcaccuucaagugcuacggcguguccccuaccaagcugaacgaccugugcuucacaaacguguacgccgacagcuucgugauccggggagaugaagugcggcagauugccccuggacagacaggcaagaucgccgacuacaacuacaagcugcccgacgacuucaccggcugugugauugccuggaacagcaacaaccuggacuccaaagucggcggcaacuacaauuaccuguaccggcuguuccggaaguccaaucugaagcccuucgagcgggacaucagcaccgaaaucuaucaggccggcagcaccccuugcaacggcguggaaggcuucaacugcuacuucccacugcaguccuacggcuuucagcccacaaauggcgugggcuaucagcccuacagagugguggugcugagcuucgaacugcugcaugcuccugccacagugugcggcccuaagaaaagcaccaaucucgugaagaacaaaugcgugaacuucaacuucaacggccugaccggcaccggcgugcugacagagagcaacaagaaguuccugccauuccagcaguuuggccgggauaucgccgauaccacagacgccguuagagauccccagacacuggaaauccuggacaucaccccaugcagcuucggcggagugucugugaucaccccuggcaccaacaccagcaaucagguggcagugcuguaccaggacgugaacuguaccgaagugcccguggccauucacgccgaucagcugacaccuacauggcggguguacuccaccggcagcaauguguuucagaccagagccggcugucugaucggagccgagcacgugaacaauagcuacgagugcgacauccccaucggcgcuggcaucugugccagcuaccagacacagacaaacagccccagacgggcuagaagcguggccagccagagcaucauugccuacacaaugucucugggcgccgagaacagcguggccuacuccaacaacucuaucgcuauccccaccaacuucaccaucagcgugaccaccgagauccugccuguguccaugaccaagaccagcguggacugcaccauguacaucugcggcgauuccaccgagugcuccaaccugcugcugcaguacggcagcuucugcacccagcugaauagagcccugacagggaucgccguggaacaggacaagaacacccaagagguguucgcccaagugaagcaaaucuacaagaccccuccuaucaaggacuucggcggcuucaauuucagccagauucugcccgauccuagcaagcccagcaagcggagcuucaucgaggaccugcuguucaacaaagugacacuggccgacgccggcuucaucaagcaguauggcgauugucugggcgacauugccgccagggaucugauuugcgcccagaaguuuaacggacugacagugcugccuccucugcugaccgaugagaugaucgcccaguacacaucugcccugcuggccggcacaaucacaagcggcuggacauuuggagcuggcgccgcucugcagauccccuuugcuaugcagauggccuaccgguucaacggcaucggagugacccagaaugugcuguacgagaaccagaagcugaucgccaaccaguucaacagcgccaucggcaagauccaggacagccugagcagcacagcaagcgcccugggaaagcugcaggacguggucaaccagaaugcccaggcacugaacacccuggucaagcagcuguccuccaacuucggcgccaucagcucugugcugaacgauauccugagcagacuggacccuccugaggccgaggugcagaucgacagacugaucacaggcagacugcagagccuccagacauacgugacccagcagcugaucagagccgccgagauuagagccucugccaaucuggccgccaccaagaugucugagugugugcugggccagagcaagagaguggacuuuugcggcaagggcuaccaccugaugagcuucccucagucugccccucacggcgugguguuucugcacgugacauauguguucgcucaagagaagaauuucaccaccgcuccagccaucugccacgacggcaaagcccacuuuccuagagaaggcguguucguguccaacggcacccauugguucgugacacagcggaacuucuacgagccccagaucaucaccaccgacaacaccuucgugucuggcaacugcgacguugugaucggcauugugaacaauaccguguacgacccucugcagcccgagcuggacagcggaggaucuggcuauauccccgaggcuccuagagauggccaggccuauguucggaaggauggcgaaugggugcugcugagcaccuuccuuugaggacuagucccuguucccagagcccacuuuuuuuucuuuuuuugaaauaaaauagccugucuuucagaucucaaaggcucuuuucagagccaccaaaaaaaaaaaaaaaaaaaaaaaaaaaaaaaaaaaaaaaaaaaaaaaaaaaaaaaaaaaaaaaaaaaaaaaaaaaaaaaaaaaaaaaaaaaaaaaaaaaaa

SEQ ID NO: 12650 - RNA, 3806 nt, Artificial Sequence
  SARS-CoV-2/Wuhan/WIV05/2019__EPI_ISL_402128 spike protein mRNA gc mod (1-1147)(K986P_V987P_ H1048Q_H1064N_ H1083N_H1101N) Foldon construct
aggagagucccgcagucggcguccagcggcucugcuuguucgugugugugucguugcaggccuuauucaagcuuaccauguucguguuucuggugcugcugccccugguguccagccagugugugaaccugaccaccagaacacagcugccuccagccuacaccaacagcuucaccagaggcguguacuaccccgacaagguguucagauccagcgugcugcacucuacccaggaccuguuccugccuuucuucagcaacgugaccugguuccacgccauccacguguccggcaccaauggcaccaagagauucgacaaccccgugcugcccuucaacgacgggguguacuuugccagcaccgagaaguccaacaucaucagaggcuggaucuucggcaccacacuggacagcaagacccagagccugcugaucgugaacaacgccaccaacguggucaucaaagugugcgaguuccaguucugcaacgaccccuuccugggcgucuacuaccacaagaacaacaagagcuggauggaaagcgaguuccggguguacagcagcgccaacaacugcaccuucgaguacgugucccagccuuuccugauggaccuggaaggcaagcagggcaacuucaagaaccugcgcgaguucguguucaagaacaucgacggcuacuucaaaaucuacagcaagcacaccccuaucaaccucgugcgggaucugccucagggcuucucugcucuggaaccccugguggaucugcccaucggcaucaacaucacccgguuucagacacugcuggcccugcacagaagcuaccugacaccuggcgauagcagcagcggauggacagcuggugccgccgcuuacuaugugggcuaccugcagccuagaaccuuccugcugaaguacaacgagaacggcaccaucaccgacgccguggauugugcucuggauccucugagcgagacaaagugcacccugaaguccuucaccguggaaaagggcaucuaccagaccagcaacuuccgggugcagcccaccgaauccaucgugcgguuccccaauaucaccaaucugugccccuucggcgagguguucaaugccaccagauucgccucuguguacgccuggaaccggaagcggaucagcaauugcguggccgacuacuccgugcuguacaacuccgccagcuucagcaccuucaagugcuacggcguguccccuaccaagcugaacgaccugugcuucacaaacguguacgccgacagcuucgugauccggggagaugaagugcggcagauugccccuggacagacaggcaagaucgccgacuacaacuacaagcugcccgacgacuucaccggcugugugauugccuggaacagcaacaaccuggacuccaaagucggcggcaacuacaauuaccuguaccggcuguuccggaaguccaaucugaagcccuucgagcgggacaucagcaccgaaaucuaucaggccggcagcaccccuugcaacggcguggaaggcuucaacugcuacuucccacugcaguccuacggcuuucagcccacaaauggcgugggcuaucagcccuacagagugguggugcugagcuucgaacugcugcaugcuccugccacagugugcggcccuaagaaaagcaccaaucucgugaagaacaaaugcgugaacuucaacuucaacggccugaccggcaccggcgugcugacagagagcaacaagaaguuccugccauuccagcaguuuggccgggauaucgccgauaccacagacgccguuagagauccccagacacuggaaauccuggacaucaccccaugcagcuucggcggagugucugugaucaccccuggcaccaacaccagcaaucagguggcagugcuguaccaggacgugaacuguaccgaagugcccguggccauucacgccgaucagcugacaccuacauggcggguguacuccaccggcagcaauguguuucagaccagagccggcugucugaucggagccgagcacgugaacaauagcuacgagugcgacauccccaucggcgcuggcaucugugccagcuaccagacacagacaaacagccccagacgggcuagaagcguggccagccagagcaucauugccuacacaaugucucugggcgccgagaacagcguggccuacuccaacaacucuaucgcuauccccaccaacuucaccaucagcgugaccaccgagauccugccuguguccaugaccaagaccagcguggacugcaccauguacaucugcggcgauuccaccgagugcuccaaccugcugcugcaguacggcagcuucugcacccagcugaauagagcccugacagggaucgccguggaacaggacaagaacacccaagagguguucgcccaagugaagcaaaucuacaagaccccuccuaucaaggacuucggcggcuucaauuucagccagauucugcccgauccuagcaagcccagcaagcggagcuucaucgaggaccugcuguucaacaaagugacacuggccgacgccggcuucaucaagcaguauggcgauugucugggcgacauugccgccagggaucugauuugcgcccagaaguuuaacggacugacagugcugccuccucugcugaccgaugagaugaucgcccaguacacaucugcccugcuggccggcacaaucacaagcggcuggacauuuggagcuggcgccgcucugcagauccccuuugcuaugcagauggccuaccgguucaacggcaucggagugacccagaaugugcuguacgagaaccagaagcugaucgccaaccaguucaacagcgccaucggcaagauccaggacagccugagcagcacagcaagcgcccugggaaagcugcaggacguggucaaccagaaugcccaggcacugaacacccuggucaagcagcuguccuccaacuucggcgccaucagcucugugcugaacgauauccugagcagacuggacccuccugaggccgaggugcagaucgacagacugaucacaggcagacugcagagccuccagacauacgugacccagcagcugaucagagccgccgagauuagagccucugccaaucuggccgccaccaagaugucugagugugugcugggccagagcaagagaguggacuuuugcggcaagggcuaccagcugaugagcuucccucagucugccccucacggcgugguguuucugaacgugacauaugugcccgcucaagagaagaauuucaccaccgcuccagccaucugcaacgacggcaaagcccacuuuccuagagaaggcguguucguguccaacggcaccaacugguucgugacacagcggaacuucuacgagccccagaucaucaccaccgacaacaccuucgugucuggcaacugcgacguugugaucggcauugugaacaauaccguguacgacccucugcagcccgagcuggacagcggaggaucuggcuauauccccgaggcuccuagagauggccaggccuauguucggaaggauggcgaaugggugcugcugagcaccuuccuuugaggacuagucccuguucccagagcccacuuuuuuuucuuuuuuugaaauaaaauagccugucuuucagaucucaaaggcucuuuucagagccaccaaaaaaaaaaaaaaaaaaaaaaaaaaaaaaaaaaaaaaaaaaaaaaaaaaaaaaaaaaaaaaaaaaaaaaaaaaaaaaaaaaaaaaaaaaaaaaaaaaaaa

SEQ ID NO: 12651 - RNA, 3806 nt, Artificial Sequence
  SARS-CoV-2/Wuhan/WIV05/2019__EPI_ISL_402128 spike protein mRNA gc mod (1-1147)(I712C_T1077C) Foldon construct
aggagagucccgcagucggcguccagcggcucugcuuguucgugugugugucguugcaggccuuauucaagcuuaccauguucguguuucuggugcugcugccccugguguccagccagugugugaaccugaccaccagaacacagcugccuccagccuacaccaacagcuucaccagaggcguguacuaccccgacaagguguucagauccagcgugcugcacucuacccaggaccuguuccugccuuucuucagcaacgugaccugguuccacgccauccacguguccggcaccaauggcaccaagagauucgacaaccccgugcugcccuucaacgacgggguguacuuugccagcaccgagaaguccaacaucaucagaggcuggaucuucggcaccacacuggacagcaagacccagagccugcugaucgugaacaacgccaccaacguggucaucaaagugugcgaguuccaguucugcaacgaccccuuccugggcgucuacuaccacaagaacaacaagagcuggauggaaagcgaguuccggguguacagcagcgccaacaacugcaccuucgaguacgugucccagccuuuccugauggaccuggaaggcaagcagggcaacuucaagaaccugcgcgaguucguguucaagaacaucgacggcuacuucaaaaucuacagcaagcacaccccuaucaaccucgugcgggaucugccucagggcuucucugcucuggaaccccugguggaucugcccaucggcaucaacaucacccgguuucagacacugcuggcccugcacagaagcuaccugacaccuggcgauagcagcagcggauggacagcuggugccgccgcuuacuaugugggcuaccugcagccuagaaccuuccugcugaaguacaacgagaacggcaccaucaccgacgccguggauugugcucuggauccucugagcgagacaaagugcacccugaaguccuucaccguggaaaagggcaucuaccagaccagcaacuuccgggugcagcccaccgaauccaucgugcgguuccccaauaucaccaaucugugccccuucggcgagguguucaaugccaccagauucgccucuguguacgccuggaaccggaagcggaucagcaauugcguggccgacuacuccgugcuguacaacuccgccagcuucagcaccuucaagugcuacggcguguccccuaccaagcugaacgaccugugcuucacaaacguguacgccgacagcuucgugauccggggagaugaagugcggcagauugccccuggacagacaggcaagaucgccgacuacaacuacaagcugcccgacgacuucaccggcugugugauugccuggaacagcaacaaccuggacuccaaagucggcggcaacuacaauuaccuguaccggcuguuccggaaguccaaucugaagcccuucgagcgggacaucagcaccgaaaucuaucaggccggcagcaccccuugcaacggcguggaaggcuucaacugcuacuucccacugcaguccuacggcuuucagcccacaaauggcgugggcuaucagcccuacagagugguggugcugagcuucgaacugcugcaugcuccugccacagugugcggcccuaagaaaagcaccaaucucgugaagaacaaaugcgugaacuucaacuucaacggccugaccggcaccggcgugcugacagagagcaacaagaaguuccugccauuccagcaguuuggccgggauaucgccgauaccacagacgccguuagagauccccagacacuggaaauccuggacaucaccccaugcagcuucggcggagugucugugaucaccccuggcaccaacaccagcaaucagguggcagugcuguaccaggacgugaacuguaccgaagugcccguggccauucacgccgaucagcugacaccuacauggcggguguacuccaccggcagcaauguguuucagaccagagccggcugucugaucggagccgagcacgugaacaauagcuacgagugcgacauccccaucggcgcuggcaucugugccagcuaccagacacagacaaacagccccagacgggcuagaagcguggccagccagagcaucauugccuacacaaugucucugggcgccgagaacagcguggccuacuccaacaacucuugcgcuauccccaccaacuucaccaucagcgugaccaccgagauccugccuguguccaugaccaagaccagcguggacugcaccauguacaucugcggcgauuccaccgagugcuccaaccugcugcugcaguacggcagcuucugcacccagcugaauagagcccugacagggaucgccguggaacaggacaagaacacccaagagguguucgcccaagugaagcaaaucuacaagaccccuccuaucaaggacuucggcggcuucaauuucagccagauucugcccgauccuagcaagcccagcaagcggagcuucaucgaggaccugcuguucaacaaagugacacuggccgacgccggcuucaucaagcaguauggcgauugucugggcgacauugccgccagggaucugauuugcgcccagaaguuuaacggacugacagugcugccuccucugcugaccgaugagaugaucgcccaguacacaucugcccugcuggccggcacaaucacaagcggcuggacauuuggagcuggcgccgcucugcagauccccuuugcuaugcagauggccuaccgguucaacggcaucggagugacccagaaugugcuguacgagaaccagaagcugaucgccaaccaguucaacagcgccaucggcaagauccaggacagccugagcagcacagcaagcgcccugggaaagcugcaggacguggucaaccagaaugcccaggcacugaacacccuggucaagcagcuguccuccaacuucggcgccaucagcucugugcugaacgauauccugagcagacuggacaaggucgaggccgaggugcagaucgacagacugaucacaggcagacugcagagccuccagacauacgugacccagcagcugaucagagccgccgagauuagagccucugccaaucuggccgccaccaagaugucugagugugugcugggccagagcaagagaguggacuuuugcggcaagggcuaccaccugaugagcuucccucagucugccccucacggcgugguguuucugcacgugacauaugugcccgcucaagagaagaauuucaccugugcuccagccaucugccacgacggcaaagcccacuuuccuagagaaggcguguucguguccaacggcacccauugguucgugacacagcggaacuucuacgagccccagaucaucaccaccgacaacaccuucgugucuggcaacugcgacguugugaucggcauugugaacaauaccguguacgacccucugcagcccgagcuggacagcggaggaucuggcuauauccccgaggcuccuagagauggccaggccuauguucggaaggauggcgaaugggugcugcugagcaccuuccuuugaggacuagucccuguucccagagcccacuuuuuuuucuuuuuuugaaauaaaauagccugucuuucagaucucaaaggcucuuuucagagccaccaaaaaaaaaaaaaaaaaaaaaaaaaaaaaaaaaaaaaaaaaaaaaaaaaaaaaaaaaaaaaaaaaaaaaaaaaaaaaaaaaaaaaaaaaaaaaaaaaaaaa

SEQ ID NO: 12652 - RNA, 3806 nt, Artificial Sequence
  SARS-CoV-2/Wuhan/WIV05/2019__EPI_ISL_402128 spike protein mRNA gc mod (1-1147)(I714C_Y1110C) Foldon construct
aggagagucccgcagucggcguccagcggcucugcuuguucgugugugugucguugcaggccuuauucaagcuuaccauguucguguuucuggugcugcugccccugguguccagccagugugugaaccugaccaccagaacacagcugccuccagccuacaccaacagcuucaccagaggcguguacuaccccgacaagguguucagauccagcgugcugcacucuacccaggaccuguuccugccuuucuucagcaacgugaccugguuccacgccauccacguguccggcaccaauggcaccaagagauucgacaaccccgugcugcccuucaacgacgggguguacuuugccagcaccgagaaguccaacaucaucagaggcuggaucuucggcaccacacuggacagcaagacccagagccugcugaucgugaacaacgccaccaacguggucaucaaagugugcgaguuccaguucugcaacgaccccuuccugggcgucuacuaccacaagaacaacaagagcuggauggaaagcgaguuccggguguacagcagcgccaacaacugcaccuucgaguacgugucccagccuuuccugauggaccuggaaggcaagcagggcaacuucaagaaccugcgcgaguucguguucaagaacaucgacggcuacuucaaaaucuacagcaagcacaccccuaucaaccucgugcgggaucugccucagggcuucucugcucuggaaccccugguggaucugcccaucggcaucaacaucacccgguuucagacacugcuggcccugcacagaagcuaccugacaccuggcgauagcagcagcggauggacagcuggugccgccgcuuacuaugugggcuaccugcagccuagaaccuuccugcugaaguacaacgagaacggcaccaucaccgacgccguggauugugcucuggauccucugagcgagacaaagugcacccugaaguccuucaccguggaaaagggcaucuaccagaccagcaacuuccgggugcagcccaccgaauccaucgugcgguuccccaauaucaccaaucugugccccuucggcgagguguucaaugccaccagauucgccucuguguacgccuggaaccggaagcggaucagcaauugcguggccgacuacuccgugcuguacaacuccgccagcuucagcaccuucaagugcuacggcguguccccuaccaagcugaacgaccugugcuucacaaacguguacgccgacagcuucgugauccggggagaugaagugcggcagauugccccuggacagacaggcaagaucgccgacuacaacuacaagcugcccgacgacuucaccggcugugugauugccuggaacagcaacaaccuggacuccaaagucggcggcaacuacaauuaccuguaccggcuguuccggaaguccaaucugaagcccuucgagcgggacaucagcaccgaaaucuaucaggccggcagcaccccuugcaacggcguggaaggcuucaacugcuacuucccacugcaguccuacggcuuucagcccacaaauggcgugggcuaucagcccuacagagugguggugcugagcuucgaacugcugcaugcuccugccacagugugcggcccuaagaaaagcaccaaucucgugaagaacaaaugcgugaacuucaacuucaacggccugaccggcaccggcgugcugacagagagcaacaagaaguuccugccauuccagcaguuuggccgggauaucgccgauaccacagacgccguuagagauccccagacacuggaaauccuggacaucaccccaugcagcuucggcggagugucugugaucaccccuggcaccaacaccagcaaucagguggcagugcuguaccaggacgugaacuguaccgaagugcccguggccauucacgccgaucagcugacaccuacauggcggguguacuccaccggcagcaauguguuucagaccagagccggcugucugaucggagccgagcacgugaacaauagcuacgagugcgacauccccaucggcgcuggcaucugugccagcuaccagacacagacaaacagccccagacgggcuagaagcguggccagccagagcaucauugccuacacaaugucucugggcgccgagaacagcguggccuacuccaacaacucuaucgcuugccccaccaacuucaccaucagcgugaccaccgagauccugccuguguccaugaccaagaccagcguggacugcaccauguacaucugcggcgauuccaccgagugcuccaaccugcugcugcaguacggcagcuucugcacccagcugaauagagcccugacagggaucgccguggaacaggacaagaacacccaagagguguucgcccaagugaagcaaaucuacaagaccccuccuaucaaggacuucggcggcuucaauuucagccagauucugcccgauccuagcaagcccagcaagcggagcuucaucgaggaccugcuguucaacaaagugacacuggccgacgccggcuucaucaagcaguauggcgauugucugggcgacauugccgccagggaucugauuugcgcccagaaguuuaacggacugacagugcugccuccucugcugaccgaugagaugaucgcccaguacacaucugcccugcuggccggcacaaucacaagcggcuggacauuuggagcuggcgccgcucugcagauccccuuugcuaugcagauggccuaccgguucaacggcaucggagugacccagaaugugcuguacgagaaccagaagcugaucgccaaccaguucaacagcgccaucggcaagauccaggacagccugagcagcacagcaagcgcccugggaaagcugcaggacguggucaaccagaaugcccaggcacugaacacccuggucaagcagcuguccuccaacuucggcgccaucagcucugugcugaacgauauccugagcagacuggacaaggucgaggccgaggugcagaucgacagacugaucacaggcagacugcagagccuccagacauacgugacccagcagcugaucagagccgccgagauuagagccucugccaaucuggccgccaccaagaugucugagugugugcugggccagagcaagagaguggacuuuugcggcaagggcuaccaccugaugagcuucccucagucugccccucacggcgugguguuucugcacgugacauaugugcccgcucaagagaagaauuucaccaccgcuccagccaucugccacgacggcaaagcccacuuuccuagagaaggcguguucguguccaacggcacccauugguucgugacacagcggaacuucugugagccccagaucaucaccaccgacaacaccuucgugucuggcaacugcgacguugugaucggcauugugaacaauaccguguacgacccucugcagcccgagcuggacagcggaggaucuggcuauauccccgaggcuccuagagauggccaggccuauguucggaaggauggcgaaugggugcugcugagcaccuuccuuugaggacuagucccuguucccagagcccacuuuuuuuucuuuuuuugaaauaaaauagccugucuuucagaucucaaaggcucuuuucagagccaccaaaaaaaaaaaaaaaaaaaaaaaaaaaaaaaaaaaaaaaaaaaaaaaaaaaaaaaaaaaaaaaaaaaaaaaaaaaaaaaaaaaaaaaaaaaaaaaaaaaaa

SEQ ID NO: 12653 - RNA, 3806 nt, Artificial Sequence
  SARS-CoV-2/Wuhan/WIV05/2019__EPI_ISL_402128 spike protein mRNA gc mod (1-1147)(P715C_P1069C) Foldon construct
aggagagucccgcagucggcguccagcggcucugcuuguucgugugugugucguugcaggccuuauucaagcuuaccauguucguguuucuggugcugcugccccugguguccagccagugugugaaccugaccaccagaacacagcugccuccagccuacaccaacagcuucaccagaggcguguacuaccccgacaagguguucagauccagcgugcugcacucuacccaggaccuguuccugccuuucuucagcaacgugaccugguuccacgccauccacguguccggcaccaauggcaccaagagauucgacaaccccgugcugcccuucaacgacgggguguacuuugccagcaccgagaaguccaacaucaucagaggcuggaucuucggcaccacacuggacagcaagacccagagccugcugaucgugaacaacgccaccaacguggucaucaaagugugcgaguuccaguucugcaacgaccccuuccugggcgucuacuaccacaagaacaacaagagcuggauggaaagcgaguuccggguguacagcagcgccaacaacugcaccuucgaguacgugucccagccuuuccugauggaccuggaaggcaagcagggcaacuucaagaaccugcgcgaguucguguucaagaacaucgacggcuacuucaaaaucuacagcaagcacaccccuaucaaccucgugcgggaucugccucagggcuucucugcucuggaaccccugguggaucugcccaucggcaucaacaucacccgguuucagacacugcuggcccugcacagaagcuaccugacaccuggcgauagcagcagcggauggacagcuggugccgccgcuuacuaugugggcuaccugcagccuagaaccuuccugcugaaguacaacgagaacggcaccaucaccgacgccguggauugugcucuggauccucugagcgagacaaagugcacccugaaguccuucaccguggaaaagggcaucuaccagaccagcaacuuccgggugcagcccaccgaauccaucgugcgguuccccaauaucaccaaucugugccccuucggcgagguguucaaugccaccagauucgccucuguguacgccuggaaccggaagcggaucagcaauugcguggccgacuacuccgugcuguacaacuccgccagcuucagcaccuucaagugcuacggcguguccccuaccaagcugaacgaccugugcuucacaaacguguacgccgacagcuucgugauccggggagaugaagugcggcagauugccccuggacagacaggcaagaucgccgacuacaacuacaagcugcccgacgacuucaccggcugugugauugccuggaacagcaacaaccuggacuccaaagucggcggcaacuacaauuaccuguaccggcuguuccggaaguccaaucugaagcccuucgagcgggacaucagcaccgaaaucuaucaggccggcagcaccccuugcaacggcguggaaggcuucaacugcuacuucccacugcaguccuacggcuuucagcccacaaauggcgugggcuaucagcccuacagagugguggugcugagcuucgaacugcugcaugcuccugccacagugugcggcccuaagaaaagcaccaaucucgugaagaacaaaugcgugaacuucaacuucaacggccugaccggcaccggcgugcugacagagagcaacaagaaguuccugccauuccagcaguuuggccgggauaucgccgauaccacagacgccguuagagauccccagacacuggaaauccuggacaucaccccaugcagcuucggcggagugucugugaucaccccuggcaccaacaccagcaaucagguggcagugcuguaccaggacgugaacuguaccgaagugcccguggccauucacgccgaucagcugacaccuacauggcggguguacuccaccggcagcaauguguuucagaccagagccggcugucugaucggagccgagcacgugaacaauagcuacgagugcgacauccccaucggcgcuggcaucugugccagcuaccagacacagacaaacagccccagacgggcuagaagcguggccagccagagcaucauugccuacacaaugucucugggcgccgagaacagcguggccuacuccaacaacucuaucgcuaucugcaccaacuucaccaucagcgugaccaccgagauccugccuguguccaugaccaagaccagcguggacugcaccauguacaucugcggcgauuccaccgagugcuccaaccugcugcugcaguacggcagcuucugcacccagcugaauagagcccugacagggaucgccguggaacaggacaagaacacccaagagguguucgcccaagugaagcaaaucuacaagaccccuccuaucaaggacuucggcggcuucaauuucagccagauucugcccgauccuagcaagcccagcaagcggagcuucaucgaggaccugcuguucaacaaagugacacuggccgacgccggcuucaucaagcaguauggcgauugucugggcgacauugccgccagggaucugauuugcgcccagaaguuuaacggacugacagugcugccuccucugcugaccgaugagaugaucgcccaguacacaucugcccugcuggccggcacaaucacaagcggcuggacauuuggagcuggcgccgcucugcagauccccuuugcuaugcagauggccuaccgguucaacggcaucggagugacccagaaugugcuguacgagaaccagaagcugaucgccaaccaguucaacagcgccaucggcaagauccaggacagccugagcagcacagcaagcgcccugggaaagcugcaggacguggucaaccagaaugcccaggcacugaacacccuggucaagcagcuguccuccaacuucggcgccaucagcucugugcugaacgauauccugagcagacuggacaaggucgaggccgaggugcagaucgacagacugaucacaggcagacugcagagccuccagacauacgugacccagcagcugaucagagccgccgagauuagagccucugccaaucuggccgccaccaagaugucugagugugugcugggccagagcaagagaguggacuuuugcggcaagggcuaccaccugaugagcuucccucagucugccccucacggcgugguguuucugcacgugacauaugugugugcucaagagaagaauuucaccaccgcuccagccaucugccacgacggcaaagcccacuuuccuagagaaggcguguucguguccaacggcacccauugguucgugacacagcggaacuucuacgagccccagaucaucaccaccgacaacaccuucgugucuggcaacugcgacguugugaucggcauugugaacaauaccguguacgacccucugcagcccgagcuggacagcggaggaucuggcuauauccccgaggcuccuagagauggccaggccuauguucggaaggauggcgaaugggugcugcugagcaccuuccuuugaggacuagucccuguucccagagcccacuuuuuuuucuuuuuuugaaauaaaauagccugucuuucagaucucaaaggcucuuuucagagccaccaaaaaaaaaaaaaaaaaaaaaaaaaaaaaaaaaaaaaaaaaaaaaaaaaaaaaaaaaaaaaaaaaaaaaaaaaaaaaaaaaaaaaaaaaaaaaaaaaaaaa

SEQ ID NO: 12654 - RNA, 3806 nt, Artificial Sequence
  SARS-CoV-2/Wuhan/WIV05/2019__EPI_ISL_402128 spike protein mRNA gc mod (1-1147)(G889C_L1034C) Foldon construct
aggagagucccgcagucggcguccagcggcucugcuuguucgugugugugucguugcaggccuuauucaagcuuaccauguucguguuucuggugcugcugccccugguguccagccagugugugaaccugaccaccagaacacagcugccuccagccuacaccaacagcuucaccagaggcguguacuaccccgacaagguguucagauccagcgugcugcacucuacccaggaccuguuccugccuuucuucagcaacgugaccugguuccacgccauccacguguccggcaccaauggcaccaagagauucgacaaccccgugcugcccuucaacgacgggguguacuuugccagcaccgagaaguccaacaucaucagaggcuggaucuucggcaccacacuggacagcaagacccagagccugcugaucgugaacaacgccaccaacguggucaucaaagugugcgaguuccaguucugcaacgaccccuuccugggcgucuacuaccacaagaacaacaagagcuggauggaaagcgaguuccggguguacagcagcgccaacaacugcaccuucgaguacgugucccagccuuuccugauggaccuggaaggcaagcagggcaacuucaagaaccugcgcgaguucguguucaagaacaucgacggcuacuucaaaaucuacagcaagcacaccccuaucaaccucgugcgggaucugccucagggcuucucugcucuggaaccccugguggaucugcccaucggcaucaacaucacccgguuucagacacugcuggcccugcacagaagcuaccugacaccuggcgauagcagcagcggauggacagcuggugccgccgcuuacuaugugggcuaccugcagccuagaaccuuccugcugaaguacaacgagaacggcaccaucaccgacgccguggauugugcucuggauccucugagcgagacaaagugcacccugaaguccuucaccguggaaaagggcaucuaccagaccagcaacuuccgggugcagcccaccgaauccaucgugcgguuccccaauaucaccaaucugugccccuucggcgagguguucaaugccaccagauucgccucuguguacgccuggaaccggaagcggaucagcaauugcguggccgacuacuccgugcuguacaacuccgccagcuucagcaccuucaagugcuacggcguguccccuaccaagcugaacgaccugugcuucacaaacguguacgccgacagcuucgugauccggggagaugaagugcggcagauugccccuggacagacaggcaagaucgccgacuacaacuacaagcugcccgacgacuucaccggcugugugauugccuggaacagcaacaaccuggacuccaaagucggcggcaacuacaauuaccuguaccggcuguuccggaaguccaaucugaagcccuucgagcgggacaucagcaccgaaaucuaucaggccggcagcaccccuugcaacggcguggaaggcuucaacugcuacuucccacugcaguccuacggcuuucagcccacaaauggcgugggcuaucagcccuacagagugguggugcugagcuucgaacugcugcaugcuccugccacagugugcggcccuaagaaaagcaccaaucucgugaagaacaaaugcgugaacuucaacuucaacggccugaccggcaccggcgugcugacagagagcaacaagaaguuccugccauuccagcaguuuggccgggauaucgccgauaccacagacgccguuagagauccccagacacuggaaauccuggacaucaccccaugcagcuucggcggagugucugugaucaccccuggcaccaacaccagcaaucagguggcagugcuguaccaggacgugaacuguaccgaagugcccguggccauucacgccgaucagcugacaccuacauggcggguguacuccaccggcagcaauguguuucagaccagagccggcugucugaucggagccgagcacgugaacaauagcuacgagugcgacauccccaucggcgcuggcaucugugccagcuaccagacacagacaaacagccccagacgggcuagaagcguggccagccagagcaucauugccuacacaaugucucugggcgccgagaacagcguggccuacuccaacaacucuaucgcuauccccaccaacuucaccaucagcgugaccaccgagauccugccuguguccaugaccaagaccagcguggacugcaccauguacaucugcggcgauuccaccgagugcuccaaccugcugcugcaguacggcagcuucugcacccagcugaauagagcccugacagggaucgccguggaacaggacaagaacacccaagagguguucgcccaagugaagcaaaucuacaagaccccuccuaucaaggacuucggcggcuucaauuucagccagauucugcccgauccuagcaagcccagcaagcggagcuucaucgaggaccugcuguucaacaaagugacacuggccgacgccggcuucaucaagcaguauggcgauugucugggcgacauugccgccagggaucugauuugcgcccagaaguuuaacggacugacagugcugccuccucugcugaccgaugagaugaucgcccaguacacaucugcccugcuggccggcacaaucacaagcggcuggacauuuugcgcuggcgccgcucugcagauccccuuugcuaugcagauggccuaccgguucaacggcaucggagugacccagaaugugcuguacgagaaccagaagcugaucgccaaccaguucaacagcgccaucggcaagauccaggacagccugagcagcacagcaagcgcccugggaaagcugcaggacguggucaaccagaaugcccaggcacugaacacccuggucaagcagcuguccuccaacuucggcgccaucagcucugugcugaacgauauccugagcagacuggacaaggucgaggccgaggugcagaucgacagacugaucacaggcagacugcagagccuccagacauacgugacccagcagcugaucagagccgccgagauuagagccucugccaaucuggccgccaccaagaugucugaguguguguguggccagagcaagagaguggacuuuugcggcaagggcuaccaccugaugagcuucccucagucugccccucacggcgugguguuucugcacgugacauaugugcccgcucaagagaagaauuucaccaccgcuccagccaucugccacgacggcaaagcccacuuuccuagagaaggcguguucguguccaacggcacccauugguucgugacacagcggaacuucuacgagccccagaucaucaccaccgacaacaccuucgugucuggcaacugcgacguugugaucggcauugugaacaauaccguguacgacccucugcagcccgagcuggacagcggaggaucuggcuauauccccgaggcuccuagagauggccaggccuauguucggaaggauggcgaaugggugcugcugagcaccuuccuuugaggacuagucccuguucccagagcccacuuuuuuuucuuuuuuugaaauaaaauagccugucuuucagaucucaaaggcucuuuucagagccaccaaaaaaaaaaaaaaaaaaaaaaaaaaaaaaaaaaaaaaaaaaaaaaaaaaaaaaaaaaaaaaaaaaaaaaaaaaaaaaaaaaaaaaaaaaaaaaaaaaaaa

SEQ ID NO: 12655 - RNA, 3806 nt, Artificial Sequence
  SARS-CoV-2/Wuhan/WIV05/2019__EPI_ISL_402128 spike protein mRNA gc mod (1-1147)(I909C_Y1047C) Foldon construct
aggagagucccgcagucggcguccagcggcucugcuuguucgugugugugucguugcaggccuuauucaagcuuaccauguucguguuucuggugcugcugccccugguguccagccagugugugaaccugaccaccagaacacagcugccuccagccuacaccaacagcuucaccagaggcguguacuaccccgacaagguguucagauccagcgugcugcacucuacccaggaccuguuccugccuuucuucagcaacgugaccugguuccacgccauccacguguccggcaccaauggcaccaagagauucgacaaccccgugcugcccuucaacgacgggguguacuuugccagcaccgagaaguccaacaucaucagaggcuggaucuucggcaccacacuggacagcaagacccagagccugcugaucgugaacaacgccaccaacguggucaucaaagugugcgaguuccaguucugcaacgaccccuuccugggcgucuacuaccacaagaacaacaagagcuggauggaaagcgaguuccggguguacagcagcgccaacaacugcaccuucgaguacgugucccagccuuuccugauggaccuggaaggcaagcagggcaacuucaagaaccugcgcgaguucguguucaagaacaucgacggcuacuucaaaaucuacagcaagcacaccccuaucaaccucgugcgggaucugccucagggcuucucugcucuggaaccccugguggaucugcccaucggcaucaacaucacccgguuucagacacugcuggcccugcacagaagcuaccugacaccuggcgauagcagcagcggauggacagcuggugccgccgcuuacuaugugggcuaccugcagccuagaaccuuccugcugaaguacaacgagaacggcaccaucaccgacgccguggauugugcucuggauccucugagcgagacaaagugcacccugaaguccuucaccguggaaaagggcaucuaccagaccagcaacuuccgggugcagcccaccgaauccaucgugcgguuccccaauaucaccaaucugugccccuucggcgagguguucaaugccaccagauucgccucuguguacgccuggaaccggaagcggaucagcaauugcguggccgacuacuccgugcuguacaacuccgccagcuucagcaccuucaagugcuacggcguguccccuaccaagcugaacgaccugugcuucacaaacguguacgccgacagcuucgugauccggggagaugaagugcggcagauugccccuggacagacaggcaagaucgccgacuacaacuacaagcugcccgacgacuucaccggcugugugauugccuggaacagcaacaaccuggacuccaaagucggcggcaacuacaauuaccuguaccggcuguuccggaaguccaaucugaagcccuucgagcgggacaucagcaccgaaaucuaucaggccggcagcaccccuugcaacggcguggaaggcuucaacugcuacuucccacugcaguccuacggcuuucagcccacaaauggcgugggcuaucagcccuacagagugguggugcugagcuucgaacugcugcaugcuccugccacagugugcggcccuaagaaaagcaccaaucucgugaagaacaaaugcgugaacuucaacuucaacggccugaccggcaccggcgugcugacagagagcaacaagaaguuccugccauuccagcaguuuggccgggauaucgccgauaccacagacgccguuagagauccccagacacuggaaauccuggacaucaccccaugcagcuucggcggagugucugugaucaccccuggcaccaacaccagcaaucagguggcagugcuguaccaggacgugaacuguaccgaagugcccguggccauucacgccgaucagcugacaccuacauggcggguguacuccaccggcagcaauguguuucagaccagagccggcugucugaucggagccgagcacgugaacaauagcuacgagugcgacauccccaucggcgcuggcaucugugccagcuaccagacacagacaaacagccccagacgggcuagaagcguggccagccagagcaucauugccuacacaaugucucugggcgccgagaacagcguggccuacuccaacaacucuaucgcuauccccaccaacuucaccaucagcgugaccaccgagauccugccuguguccaugaccaagaccagcguggacugcaccauguacaucugcggcgauuccaccgagugcuccaaccugcugcugcaguacggcagcuucugcacccagcugaauagagcccugacagggaucgccguggaacaggacaagaacacccaagagguguucgcccaagugaagcaaaucuacaagaccccuccuaucaaggacuucggcggcuucaauuucagccagauucugcccgauccuagcaagcccagcaagcggagcuucaucgaggaccugcuguucaacaaagugacacuggccgacgccggcuucaucaagcaguauggcgauugucugggcgacauugccgccagggaucugauuugcgcccagaaguuuaacggacugacagugcugccuccucugcugaccgaugagaugaucgcccaguacacaucugcccugcuggccggcacaaucacaagcggcuggacauuuggagcuggcgccgcucugcagauccccuuugcuaugcagauggccuaccgguucaacggcugcggagugacccagaaugugcuguacgagaaccagaagcugaucgccaaccaguucaacagcgccaucggcaagauccaggacagccugagcagcacagcaagcgcccugggaaagcugcaggacguggucaaccagaaugcccaggcacugaacacccuggucaagcagcuguccuccaacuucggcgccaucagcucugugcugaacgauauccugagcagacuggacaaggucgaggccgaggugcagaucgacagacugaucacaggcagacugcagagccuccagacauacgugacccagcagcugaucagagccgccgagauuagagccucugccaaucuggccgccaccaagaugucugagugugugcugggccagagcaagagaguggacuuuugcggcaagggcugucaccugaugagcuucccucagucugccccucacggcgugguguuucugcacgugacauaugugcccgcucaagagaagaauuucaccaccgcuccagccaucugccacgacggcaaagcccacuuuccuagagaaggcguguucguguccaacggcacccauugguucgugacacagcggaacuucuacgagccccagaucaucaccaccgacaacaccuucgugucuggcaacugcgacguugugaucggcauugugaacaauaccguguacgacccucugcagcccgagcuggacagcggaggaucuggcuauauccccgaggcuccuagagauggccaggccuauguucggaaggauggcgaaugggugcugcugagcaccuuccuuugaggacuagucccuguucccagagcccacuuuuuuuucuuuuuuugaaauaaaauagccugucuuucagaucucaaaggcucuuuucagagccaccaaaaaaaaaaaaaaaaaaaaaaaaaaaaaaaaaaaaaaaaaaaaaaaaaaaaaaaaaaaaaaaaaaaaaaaaaaaaaaaaaaaaaaaaaaaaaaaaaaaaa

SEQ ID NO: 12656 - RNA, 3806 nt, Artificial Sequence
  SARS-CoV-2/Wuhan/WIV05/2019__EPI_ISL_402128 spike protein mRNA gc mod (1-1147)(Q965C_S1003C) Foldon construct
aggagagucccgcagucggcguccagcggcucugcuuguucgugugugugucguugcaggccuuauucaagcuuaccauguucguguuucuggugcugcugccccugguguccagccagugugugaaccugaccaccagaacacagcugccuccagccuacaccaacagcuucaccagaggcguguacuaccccgacaagguguucagauccagcgugcugcacucuacccaggaccuguuccugccuuucuucagcaacgugaccugguuccacgccauccacguguccggcaccaauggcaccaagagauucgacaaccccgugcugcccuucaacgacgggguguacuuugccagcaccgagaaguccaacaucaucagaggcuggaucuucggcaccacacuggacagcaagacccagagccugcugaucgugaacaacgccaccaacguggucaucaaagugugcgaguuccaguucugcaacgaccccuuccugggcgucuacuaccacaagaacaacaagagcuggauggaaagcgaguuccggguguacagcagcgccaacaacugcaccuucgaguacgugucccagccuuuccugauggaccuggaaggcaagcagggcaacuucaagaaccugcgcgaguucguguucaagaacaucgacggcuacuucaaaaucuacagcaagcacaccccuaucaaccucgugcgggaucugccucagggcuucucugcucuggaaccccugguggaucugcccaucggcaucaacaucacccgguuucagacacugcuggcccugcacagaagcuaccugacaccuggcgauagcagcagcggauggacagcuggugccgccgcuuacuaugugggcuaccugcagccuagaaccuuccugcugaaguacaacgagaacggcaccaucaccgacgccguggauugugcucuggauccucugagcgagacaaagugcacccugaaguccuucaccguggaaaagggcaucuaccagaccagcaacuuccgggugcagcccaccgaauccaucgugcgguuccccaauaucaccaaucugugccccuucggcgagguguucaaugccaccagauucgccucuguguacgccuggaaccggaagcggaucagcaauugcguggccgacuacuccgugcuguacaacuccgccagcuucagcaccuucaagugcuacggcguguccccuaccaagcugaacgaccugugcuucacaaacguguacgccgacagcuucgugauccggggagaugaagugcggcagauugccccuggacagacaggcaagaucgccgacuacaacuacaagcugcccgacgacuucaccggcugugugauugccuggaacagcaacaaccuggacuccaaagucggcggcaacuacaauuaccuguaccggcuguuccggaaguccaaucugaagcccuucgagcgggacaucagcaccgaaaucuaucaggccggcagcaccccuugcaacggcguggaaggcuucaacugcuacuucccacugcaguccuacggcuuucagcccacaaauggcgugggcuaucagcccuacagagugguggugcugagcuucgaacugcugcaugcuccugccacagugugcggcccuaagaaaagcaccaaucucgugaagaacaaaugcgugaacuucaacuucaacggccugaccggcaccggcgugcugacagagagcaacaagaaguuccugccauuccagcaguuuggccgggauaucgccgauaccacagacgccguuagagauccccagacacuggaaauccuggacaucaccccaugcagcuucggcggagugucugugaucaccccuggcaccaacaccagcaaucagguggcagugcuguaccaggacgugaacuguaccgaagugcccguggccauucacgccgaucagcugacaccuacauggcggguguacuccaccggcagcaauguguuucagaccagagccggcugucugaucggagccgagcacgugaacaauagcuacgagugcgacauccccaucggcgcuggcaucugugccagcuaccagacacagacaaacagccccagacgggcuagaagcguggccagccagagcaucauugccuacacaaugucucugggcgccgagaacagcguggccuacuccaacaacucuaucgcuauccccaccaacuucaccaucagcgugaccaccgagauccugccuguguccaugaccaagaccagcguggacugcaccauguacaucugcggcgauuccaccgagugcuccaaccugcugcugcaguacggcagcuucugcacccagcugaauagagcccugacagggaucgccguggaacaggacaagaacacccaagagguguucgcccaagugaagcaaaucuacaagaccccuccuaucaaggacuucggcggcuucaauuucagccagauucugcccgauccuagcaagcccagcaagcggagcuucaucgaggaccugcuguucaacaaagugacacuggccgacgccggcuucaucaagcaguauggcgauugucugggcgacauugccgccagggaucugauuugcgcccagaaguuuaacggacugacagugcugccuccucugcugaccgaugagaugaucgcccaguacacaucugcccugcuggccggcacaaucacaagcggcuggacauuuggagcuggcgccgcucugcagauccccuuugcuaugcagauggccuaccgguucaacggcaucggagugacccagaaugugcuguacgagaaccagaagcugaucgccaaccaguucaacagcgccaucggcaagauccaggacagccugagcagcacagcaagcgcccugggaaagcugcaggacguggucaaccagaaugcccaggcacugaacacccuggucaagugccuguccuccaacuucggcgccaucagcucugugcugaacgauauccugagcagacuggacaaggucgaggccgaggugcagaucgacagacugaucacaggcagacugcagugucuccagacauacgugacccagcagcugaucagagccgccgagauuagagccucugccaaucuggccgccaccaagaugucugagugugugcugggccagagcaagagaguggacuuuugcggcaagggcuaccaccugaugagcuucccucagucugccccucacggcgugguguuucugcacgugacauaugugcccgcucaagagaagaauuucaccaccgcuccagccaucugccacgacggcaaagcccacuuuccuagagaaggcguguucguguccaacggcacccauugguucgugacacagcggaacuucuacgagccccagaucaucaccaccgacaacaccuucgugucuggcaacugcgacguugugaucggcauugugaacaauaccguguacgacccucugcagcccgagcuggacagcggaggaucuggcuauauccccgaggcuccuagagauggccaggccuauguucggaaggauggcgaaugggugcugcugagcaccuuccuuugaggacuagucccuguucccagagcccacuuuuuuuucuuuuuuugaaauaaaauagccugucuuucagaucucaaaggcucuuuucagagccaccaaaaaaaaaaaaaaaaaaaaaaaaaaaaaaaaaaaaaaaaaaaaaaaaaaaaaaaaaaaaaaaaaaaaaaaaaaaaaaaaaaaaaaaaaaaaaaaaaaaaa

SEQ ID NO: 12657 - RNA, 3806 nt, Artificial Sequence
  SARS-CoV-2/Wuhan/WIV05/2019__EPI_ISL_402128 spike protein mRNA gc mod (1-1147)(F970C_G999C) Foldon construct
aggagagucccgcagucggcguccagcggcucugcuuguucgugugugugucguugcaggccuuauucaagcuuaccauguucguguuucuggugcugcugccccugguguccagccagugugugaaccugaccaccagaacacagcugccuccagccuacaccaacagcuucaccagaggcguguacuaccccgacaagguguucagauccagcgugcugcacucuacccaggaccuguuccugccuuucuucagcaacgugaccugguuccacgccauccacguguccggcaccaauggcaccaagagauucgacaaccccgugcugcccuucaacgacgggguguacuuugccagcaccgagaaguccaacaucaucagaggcuggaucuucggcaccacacuggacagcaagacccagagccugcugaucgugaacaacgccaccaacguggucaucaaagugugcgaguuccaguucugcaacgaccccuuccugggcgucuacuaccacaagaacaacaagagcuggauggaaagcgaguuccggguguacagcagcgccaacaacugcaccuucgaguacgugucccagccuuuccugauggaccuggaaggcaagcagggcaacuucaagaaccugcgcgaguucguguucaagaacaucgacggcuacuucaaaaucuacagcaagcacaccccuaucaaccucgugcgggaucugccucagggcuucucugcucuggaaccccugguggaucugcccaucggcaucaacaucacccgguuucagacacugcuggcccugcacagaagcuaccugacaccuggcgauagcagcagcggauggacagcuggugccgccgcuuacuaugugggcuaccugcagccuagaaccuuccugcugaaguacaacgagaacggcaccaucaccgacgccguggauugugcucuggauccucugagcgagacaaagugcacccugaaguccuucaccguggaaaagggcaucuaccagaccagcaacuuccgggugcagcccaccgaauccaucgugcgguuccccaauaucaccaaucugugccccuucggcgagguguucaaugccaccagauucgccucuguguacgccuggaaccggaagcggaucagcaauugcguggccgacuacuccgugcuguacaacuccgccagcuucagcaccuucaagugcuacggcguguccccuaccaagcugaacgaccugugcuucacaaacguguacgccgacagcuucgugauccggggagaugaagugcggcagauugccccuggacagacaggcaagaucgccgacuacaacuacaagcugcccgacgacuucaccggcugugugauugccuggaacagcaacaaccuggacuccaaagucggcggcaacuacaauuaccuguaccggcuguuccggaaguccaaucugaagcccuucgagcgggacaucagcaccgaaaucuaucaggccggcagcaccccuugcaacggcguggaaggcuucaacugcuacuucccacugcaguccuacggcuuucagcccacaaauggcgugggcuaucagcccuacagagugguggugcugagcuucgaacugcugcaugcuccugccacagugugcggcccuaagaaaagcaccaaucucgugaagaacaaaugcgugaacuucaacuucaacggccugaccggcaccggcgugcugacagagagcaacaagaaguuccugccauuccagcaguuuggccgggauaucgccgauaccacagacgccguuagagauccccagacacuggaaauccuggacaucaccccaugcagcuucggcggagugucugugaucaccccuggcaccaacaccagcaaucagguggcagugcuguaccaggacgugaacuguaccgaagugcccguggccauucacgccgaucagcugacaccuacauggcggguguacuccaccggcagcaauguguuucagaccagagccggcugucugaucggagccgagcacgugaacaauagcuacgagugcgacauccccaucggcgcuggcaucugugccagcuaccagacacagacaaacagccccagacgggcuagaagcguggccagccagagcaucauugccuacacaaugucucugggcgccgagaacagcguggccuacuccaacaacucuaucgcuauccccaccaacuucaccaucagcgugaccaccgagauccugccuguguccaugaccaagaccagcguggacugcaccauguacaucugcggcgauuccaccgagugcuccaaccugcugcugcaguacggcagcuucugcacccagcugaauagagcccugacagggaucgccguggaacaggacaagaacacccaagagguguucgcccaagugaagcaaaucuacaagaccccuccuaucaaggacuucggcggcuucaauuucagccagauucugcccgauccuagcaagcccagcaagcggagcuucaucgaggaccugcuguucaacaaagugacacuggccgacgccggcuucaucaagcaguauggcgauugucugggcgacauugccgccagggaucugauuugcgcccagaaguuuaacggacugacagugcugccuccucugcugaccgaugagaugaucgcccaguacacaucugcccugcuggccggcacaaucacaagcggcuggacauuuggagcuggcgccgcucugcagauccccuuugcuaugcagauggccuaccgguucaacggcaucggagugacccagaaugugcuguacgagaaccagaagcugaucgccaaccaguucaacagcgccaucggcaagauccaggacagccugagcagcacagcaagcgcccugggaaagcugcaggacguggucaaccagaaugcccaggcacugaacacccuggucaagcagcuguccuccaacugcggcgccaucagcucugugcugaacgauauccugagcagacuggacaaggucgaggccgaggugcagaucgacagacugaucacauguagacugcagagccuccagacauacgugacccagcagcugaucagagccgccgagauuagagccucugccaaucuggccgccaccaagaugucugagugugugcugggccagagcaagagaguggacuuuugcggcaagggcuaccaccugaugagcuucccucagucugccccucacggcgugguguuucugcacgugacauaugugcccgcucaagagaagaauuucaccaccgcuccagccaucugccacgacggcaaagcccacuuuccuagagaaggcguguucguguccaacggcacccauugguucgugacacagcggaacuucuacgagccccagaucaucaccaccgacaacaccuucgugucuggcaacugcgacguugugaucggcauugugaacaauaccguguacgacccucugcagcccgagcuggacagcggaggaucuggcuauauccccgaggcuccuagagauggccaggccuauguucggaaggauggcgaaugggugcugcugagcaccuuccuuugaggacuagucccuguucccagagcccacuuuuuuuucuuuuuuugaaauaaaauagccugucuuucagaucucaaaggcucuuuucagagccaccaaaaaaaaaaaaaaaaaaaaaaaaaaaaaaaaaaaaaaaaaaaaaaaaaaaaaaaaaaaaaaaaaaaaaaaaaaaaaaaaaaaaaaaaaaaaaaaaaaaaa

SEQ ID NO: 12658 - RNA, 3806 nt, Artificial Sequence
  SARS-CoV-2/Wuhan/WIV05/2019__EPI_ISL_402128 spike protein mRNA gc mod (1-1147)(A972C_R995C) Foldon construct
aggagagucccgcagucggcguccagcggcucugcuuguucgugugugugucguugcaggccuuauucaagcuuaccauguucguguuucuggugcugcugccccugguguccagccagugugugaaccugaccaccagaacacagcugccuccagccuacaccaacagcuucaccagaggcguguacuaccccgacaagguguucagauccagcgugcugcacucuacccaggaccuguuccugccuuucuucagcaacgugaccugguuccacgccauccacguguccggcaccaauggcaccaagagauucgacaaccccgugcugcccuucaacgacgggguguacuuugccagcaccgagaaguccaacaucaucagaggcuggaucuucggcaccacacuggacagcaagacccagagccugcugaucgugaacaacgccaccaacguggucaucaaagugugcgaguuccaguucugcaacgaccccuuccugggcgucuacuaccacaagaacaacaagagcuggauggaaagcgaguuccggguguacagcagcgccaacaacugcaccuucgaguacgugucccagccuuuccugauggaccuggaaggcaagcagggcaacuucaagaaccugcgcgaguucguguucaagaacaucgacggcuacuucaaaaucuacagcaagcacaccccuaucaaccucgugcgggaucugccucagggcuucucugcucuggaaccccugguggaucugcccaucggcaucaacaucacccgguuucagacacugcuggcccugcacagaagcuaccugacaccuggcgauagcagcagcggauggacagcuggugccgccgcuuacuaugugggcuaccugcagccuagaaccuuccugcugaaguacaacgagaacggcaccaucaccgacgccguggauugugcucuggauccucugagcgagacaaagugcacccugaaguccuucaccguggaaaagggcaucuaccagaccagcaacuuccgggugcagcccaccgaauccaucgugcgguuccccaauaucaccaaucugugccccuucggcgagguguucaaugccaccagauucgccucuguguacgccuggaaccggaagcggaucagcaauugcguggccgacuacuccgugcuguacaacuccgccagcuucagcaccuucaagugcuacggcguguccccuaccaagcugaacgaccugugcuucacaaacguguacgccgacagcuucgugauccggggagaugaagugcggcagauugccccuggacagacaggcaagaucgccgacuacaacuacaagcugcccgacgacuucaccggcugugugauugccuggaacagcaacaaccuggacuccaaagucggcggcaacuacaauuaccuguaccggcuguuccggaaguccaaucugaagcccuucgagcgggacaucagcaccgaaaucuaucaggccggcagcaccccuugcaacggcguggaaggcuucaacugcuacuucccacugcaguccuacggcuuucagcccacaaauggcgugggcuaucagcccuacagagugguggugcugagcuucgaacugcugcaugcuccugccacagugugcggcccuaagaaaagcaccaaucucgugaagaacaaaugcgugaacuucaacuucaacggccugaccggcaccggcgugcugacagagagcaacaagaaguuccugccauuccagcaguuuggccgggauaucgccgauaccacagacgccguuagagauccccagacacuggaaauccuggacaucaccccaugcagcuucggcggagugucugugaucaccccuggcaccaacaccagcaaucagguggcagugcuguaccaggacgugaacuguaccgaagugcccguggccauucacgccgaucagcugacaccuacauggcggguguacuccaccggcagcaauguguuucagaccagagccggcugucugaucggagccgagcacgugaacaauagcuacgagugcgacauccccaucggcgcuggcaucugugccagcuaccagacacagacaaacagccccagacgggcuagaagcguggccagccagagcaucauugccuacacaaugucucugggcgccgagaacagcguggccuacuccaacaacucuaucgcuauccccaccaacuucaccaucagcgugaccaccgagauccugccuguguccaugaccaagaccagcguggacugcaccauguacaucugcggcgauuccaccgagugcuccaaccugcugcugcaguacggcagcuucugcacccagcugaauagagcccugacagggaucgccguggaacaggacaagaacacccaagagguguucgcccaagugaagcaaaucuacaagaccccuccuaucaaggacuucggcggcuucaauuucagccagauucugcccgauccuagcaagcccagcaagcggagcuucaucgaggaccugcuguucaacaaagugacacuggccgacgccggcuucaucaagcaguauggcgauugucugggcgacauugccgccagggaucugauuugcgcccagaaguuuaacggacugacagugcugccuccucugcugaccgaugagaugaucgcccaguacacaucugcccugcuggccggcacaaucacaagcggcuggacauuuggagcuggcgccgcucugcagauccccuuugcuaugcagauggccuaccgguucaacggcaucggagugacccagaaugugcuguacgagaaccagaagcugaucgccaaccaguucaacagcgccaucggcaagauccaggacagccugagcagcacagcaagcgcccugggaaagcugcaggacguggucaaccagaaugcccaggcacugaacacccuggucaagcagcuguccuccaacuucggcugcaucagcucugugcugaacgauauccugagcagacuggacaaggucgaggccgaggugcagaucgacugucugaucacaggcagacugcagagccuccagacauacgugacccagcagcugaucagagccgccgagauuagagccucugccaaucuggccgccaccaagaugucugagugugugcugggccagagcaagagaguggacuuuugcggcaagggcuaccaccugaugagcuucccucagucugccccucacggcgugguguuucugcacgugacauaugugcccgcucaagagaagaauuucaccaccgcuccagccaucugccacgacggcaaagcccacuuuccuagagaaggcguguucguguccaacggcacccauugguucgugacacagcggaacuucuacgagccccagaucaucaccaccgacaacaccuucgugucuggcaacugcgacguugugaucggcauugugaacaauaccguguacgacccucugcagcccgagcuggacagcggaggaucuggcuauauccccgaggcuccuagagauggccaggccuauguucggaaggauggcgaaugggugcugcugagcaccuuccuuugaggacuagucccuguucccagagcccacuuuuuuuucuuuuuuugaaauaaaauagccugucuuucagaucucaaaggcucuuuucagagccaccaaaaaaaaaaaaaaaaaaaaaaaaaaaaaaaaaaaaaaaaaaaaaaaaaaaaaaaaaaaaaaaaaaaaaaaaaaaaaaaaaaaaaaaaaaaaaaaaaaaaa

SEQ ID NO: 12659 - RNA, 3806 nt, Artificial Sequence
  SARS-CoV-2/Wuhan/WIV05/2019__EPI_ISL_402128 spike protein mRNA gc mod (1-1147)(A890C_V1040C) Foldon construct
aggagagucccgcagucggcguccagcggcucugcuuguucgugugugugucguugcaggccuuauucaagcuuaccauguucguguuucuggugcugcugccccugguguccagccagugugugaaccugaccaccagaacacagcugccuccagccuacaccaacagcuucaccagaggcguguacuaccccgacaagguguucagauccagcgugcugcacucuacccaggaccuguuccugccuuucuucagcaacgugaccugguuccacgccauccacguguccggcaccaauggcaccaagagauucgacaaccccgugcugcccuucaacgacgggguguacuuugccagcaccgagaaguccaacaucaucagaggcuggaucuucggcaccacacuggacagcaagacccagagccugcugaucgugaacaacgccaccaacguggucaucaaagugugcgaguuccaguucugcaacgaccccuuccugggcgucuacuaccacaagaacaacaagagcuggauggaaagcgaguuccggguguacagcagcgccaacaacugcaccuucgaguacgugucccagccuuuccugauggaccuggaaggcaagcagggcaacuucaagaaccugcgcgaguucguguucaagaacaucgacggcuacuucaaaaucuacagcaagcacaccccuaucaaccucgugcgggaucugccucagggcuucucugcucuggaaccccugguggaucugcccaucggcaucaacaucacccgguuucagacacugcuggcccugcacagaagcuaccugacaccuggcgauagcagcagcggauggacagcuggugccgccgcuuacuaugugggcuaccugcagccuagaaccuuccugcugaaguacaacgagaacggcaccaucaccgacgccguggauugugcucuggauccucugagcgagacaaagugcacccugaaguccuucaccguggaaaagggcaucuaccagaccagcaacuuccgggugcagcccaccgaauccaucgugcgguuccccaauaucaccaaucugugccccuucggcgagguguucaaugccaccagauucgccucuguguacgccuggaaccggaagcggaucagcaauugcguggccgacuacuccgugcuguacaacuccgccagcuucagcaccuucaagugcuacggcguguccccuaccaagcugaacgaccugugcuucacaaacguguacgccgacagcuucgugauccggggagaugaagugcggcagauugccccuggacagacaggcaagaucgccgacuacaacuacaagcugcccgacgacuucaccggcugugugauugccuggaacagcaacaaccuggacuccaaagucggcggcaacuacaauuaccuguaccggcuguuccggaaguccaaucugaagcccuucgagcgggacaucagcaccgaaaucuaucaggccggcagcaccccuugcaacggcguggaaggcuucaacugcuacuucccacugcaguccuacggcuuucagcccacaaauggcgugggcuaucagcccuacagagugguggugcugagcuucgaacugcugcaugcuccugccacagugugcggcccuaagaaaagcaccaaucucgugaagaacaaaugcgugaacuucaacuucaacggccugaccggcaccggcgugcugacagagagcaacaagaaguuccugccauuccagcaguuuggccgggauaucgccgauaccacagacgccguuagagauccccagacacuggaaauccuggacaucaccccaugcagcuucggcggagugucugugaucaccccuggcaccaacaccagcaaucagguggcagugcuguaccaggacgugaacuguaccgaagugcccguggccauucacgccgaucagcugacaccuacauggcggguguacuccaccggcagcaauguguuucagaccagagccggcugucugaucggagccgagcacgugaacaauagcuacgagugcgacauccccaucggcgcuggcaucugugccagcuaccagacacagacaaacagccccagacgggcuagaagcguggccagccagagcaucauugccuacacaaugucucugggcgccgagaacagcguggccuacuccaacaacucuaucgcuauccccaccaacuucaccaucagcgugaccaccgagauccugccuguguccaugaccaagaccagcguggacugcaccauguacaucugcggcgauuccaccgagugcuccaaccugcugcugcaguacggcagcuucugcacccagcugaauagagcccugacagggaucgccguggaacaggacaagaacacccaagagguguucgcccaagugaagcaaaucuacaagaccccuccuaucaaggacuucggcggcuucaauuucagccagauucugcccgauccuagcaagcccagcaagcggagcuucaucgaggaccugcuguucaacaaagugacacuggccgacgccggcuucaucaagcaguauggcgauugucugggcgacauugccgccagggaucugauuugcgcccagaaguuuaacggacugacagugcugccuccucugcugaccgaugagaugaucgcccaguacacaucugcccugcuggccggcacaaucacaagcggcuggacauuuggaugcggcgccgcucugcagauccccuuugcuaugcagauggccuaccgguucaacggcaucggagugacccagaaugugcuguacgagaaccagaagcugaucgccaaccaguucaacagcgccaucggcaagauccaggacagccugagcagcacagcaagcgcccugggaaagcugcaggacguggucaaccagaaugcccaggcacugaacacccuggucaagcagcuguccuccaacuucggcgccaucagcucugugcugaacgauauccugagcagacuggacaaggucgaggccgaggugcagaucgacagacugaucacaggcagacugcagagccuccagacauacgugacccagcagcugaucagagccgccgagauuagagccucugccaaucuggccgccaccaagaugucugagugugugcugggccagagcaagagaugugacuuuugcggcaagggcuaccaccugaugagcuucccucagucugccccucacggcgugguguuucugcacgugacauaugugcccgcucaagagaagaauuucaccaccgcuccagccaucugccacgacggcaaagcccacuuuccuagagaaggcguguucguguccaacggcacccauugguucgugacacagcggaacuucuacgagccccagaucaucaccaccgacaacaccuucgugucuggcaacugcgacguugugaucggcauugugaacaauaccguguacgacccucugcagcccgagcuggacagcggaggaucuggcuauauccccgaggcuccuagagauggccaggccuauguucggaaggauggcgaaugggugcugcugagcaccuuccuuugaggacuagucccuguucccagagcccacuuuuuuuucuuuuuuugaaauaaaauagccugucuuucagaucucaaaggcucuuuucagagccaccaaaaaaaaaaaaaaaaaaaaaaaaaaaaaaaaaaaaaaaaaaaaaaaaaaaaaaaaaaaaaaaaaaaaaaaaaaaaaaaaaaaaaaaaaaaaaaaaaaaaa

SEQ ID NO: 12660 - RNA, 3806 nt, Artificial Sequence
  SARS-CoV-2/Wuhan/WIV05/2019__EPI_ISL_402128 spike protein mRNA gc mod (1-1147)(T874C_S1055C) Foldon construct
aggagagucccgcagucggcguccagcggcucugcuuguucgugugugugucguugcaggccuuauucaagcuuaccauguucguguuucuggugcugcugccccugguguccagccagugugugaaccugaccaccagaacacagcugccuccagccuacaccaacagcuucaccagaggcguguacuaccccgacaagguguucagauccagcgugcugcacucuacccaggaccuguuccugccuuucuucagcaacgugaccugguuccacgccauccacguguccggcaccaauggcaccaagagauucgacaaccccgugcugcccuucaacgacgggguguacuuugccagcaccgagaaguccaacaucaucagaggcuggaucuucggcaccacacuggacagcaagacccagagccugcugaucgugaacaacgccaccaacguggucaucaaagugugcgaguuccaguucugcaacgaccccuuccugggcgucuacuaccacaagaacaacaagagcuggauggaaagcgaguuccggguguacagcagcgccaacaacugcaccuucgaguacgugucccagccuuuccugauggaccuggaaggcaagcagggcaacuucaagaaccugcgcgaguucguguucaagaacaucgacggcuacuucaaaaucuacagcaagcacaccccuaucaaccucgugcgggaucugccucagggcuucucugcucuggaaccccugguggaucugcccaucggcaucaacaucacccgguuucagacacugcuggcccugcacagaagcuaccugacaccuggcgauagcagcagcggauggacagcuggugccgccgcuuacuaugugggcuaccugcagccuagaaccuuccugcugaaguacaacgagaacggcaccaucaccgacgccguggauugugcucuggauccucugagcgagacaaagugcacccugaaguccuucaccguggaaaagggcaucuaccagaccagcaacuuccgggugcagcccaccgaauccaucgugcgguuccccaauaucaccaaucugugccccuucggcgagguguucaaugccaccagauucgccucuguguacgccuggaaccggaagcggaucagcaauugcguggccgacuacuccgugcuguacaacuccgccagcuucagcaccuucaagugcuacggcguguccccuaccaagcugaacgaccugugcuucacaaacguguacgccgacagcuucgugauccggggagaugaagugcggcagauugccccuggacagacaggcaagaucgccgacuacaacuacaagcugcccgacgacuucaccggcugugugauugccuggaacagcaacaaccuggacuccaaagucggcggcaacuacaauuaccuguaccggcuguuccggaaguccaaucugaagcccuucgagcgggacaucagcaccgaaaucuaucaggccggcagcaccccuugcaacggcguggaaggcuucaacugcuacuucccacugcaguccuacggcuuucagcccacaaauggcgugggcuaucagcccuacagagugguggugcugagcuucgaacugcugcaugcuccugccacagugugcggcccuaagaaaagcaccaaucucgugaagaacaaaugcgugaacuucaacuucaacggccugaccggcaccggcgugcugacagagagcaacaagaaguuccugccauuccagcaguuuggccgggauaucgccgauaccacagacgccguuagagauccccagacacuggaaauccuggacaucaccccaugcagcuucggcggagugucugugaucaccccuggcaccaacaccagcaaucagguggcagugcuguaccaggacgugaacuguaccgaagugcccguggccauucacgccgaucagcugacaccuacauggcggguguacuccaccggcagcaauguguuucagaccagagccggcugucugaucggagccgagcacgugaacaauagcuacgagugcgacauccccaucggcgcuggcaucugugccagcuaccagacacagacaaacagccccagacgggcuagaagcguggccagccagagcaucauugccuacacaaugucucugggcgccgagaacagcguggccuacuccaacaacucuaucgcuauccccaccaacuucaccaucagcgugaccaccgagauccugccuguguccaugaccaagaccagcguggacugcaccauguacaucugcggcgauuccaccgagugcuccaaccugcugcugcaguacggcagcuucugcacccagcugaauagagcccugacagggaucgccguggaacaggacaagaacacccaagagguguucgcccaagugaagcaaaucuacaagaccccuccuaucaaggacuucggcggcuucaauuucagccagauucugcccgauccuagcaagcccagcaagcggagcuucaucgaggaccugcuguucaacaaagugacacuggccgacgccggcuucaucaagcaguauggcgauugucugggcgacauugccgccagggaucugauuugcgcccagaaguuuaacggacugacagugcugccuccucugcugaccgaugagaugaucgcccaguacugcucugcccugcuggccggcacaaucacaagcggcuggacauuuggagcuggcgccgcucugcagauccccuuugcuaugcagauggccuaccgguucaacggcaucggagugacccagaaugugcuguacgagaaccagaagcugaucgccaaccaguucaacagcgccaucggcaagauccaggacagccugagcagcacagcaagcgcccugggaaagcugcaggacguggucaaccagaaugcccaggcacugaacacccuggucaagcagcuguccuccaacuucggcgccaucagcucugugcugaacgauauccugagcagacuggacaaggucgaggccgaggugcagaucgacagacugaucacaggcagacugcagagccuccagacauacgugacccagcagcugaucagagccgccgagauuagagccucugccaaucuggccgccaccaagaugucugagugugugcugggccagagcaagagaguggacuuuugcggcaagggcuaccaccugaugagcuucccucagugcgccccucacggcgugguguuucugcacgugacauaugugcccgcucaagagaagaauuucaccaccgcuccagccaucugccacgacggcaaagcccacuuuccuagagaaggcguguucguguccaacggcacccauugguucgugacacagcggaacuucuacgagccccagaucaucaccaccgacaacaccuucgugucuggcaacugcgacguugugaucggcauugugaacaauaccguguacgacccucugcagcccgagcuggacagcggaggaucuggcuauauccccgaggcuccuagagauggccaggccuauguucggaaggauggcgaaugggugcugcugagcaccuuccuuugaggacuagucccuguucccagagcccacuuuuuuuucuuuuuuugaaauaaaauagccugucuuucagaucucaaaggcucuuuucagagccaccaaaaaaaaaaaaaaaaaaaaaaaaaaaaaaaaaaaaaaaaaaaaaaaaaaaaaaaaaaaaaaaaaaaaaaaaaaaaaaaaaaaaaaaaaaaaaaaaaaaaa

SEQ ID NO: 12661 - RNA, 4178 nt, Artificial Sequence
  SARS-CoV-2/Wuhan/WIV05/2019__EPI_ISL_402128 spike protein mRNA gc mod (1-1147) WhcAg construct
aggagagucccgcagucggcguccagcggcucugcuuguucgugugugugucguugcaggccuuauucaagcuuaccauguucguguuucuggugcugcugccccugguguccagccagugugugaaccugaccaccagaacacagcugccuccagccuacaccaacagcuucaccagaggcguguacuaccccgacaagguguucagauccagcgugcugcacucuacccaggaccuguuccugccuuucuucagcaacgugaccugguuccacgccauccacguguccggcaccaauggcaccaagagauucgacaaccccgugcugcccuucaacgacgggguguacuuugccagcaccgagaaguccaacaucaucagaggcuggaucuucggcaccacacuggacagcaagacccagagccugcugaucgugaacaacgccaccaacguggucaucaaagugugcgaguuccaguucugcaacgaccccuuccugggcgucuacuaccacaagaacaacaagagcuggauggaaagcgaguuccggguguacagcagcgccaacaacugcaccuucgaguacgugucccagccuuuccugauggaccuggaaggcaagcagggcaacuucaagaaccugcgcgaguucguguucaagaacaucgacggcuacuucaaaaucuacagcaagcacaccccuaucaaccucgugcgggaucugccucagggcuucucugcucuggaaccccugguggaucugcccaucggcaucaacaucacccgguuucagacacugcuggcccugcacagaagcuaccugacaccuggcgauagcagcagcggauggacagcuggugccgccgcuuacuaugugggcuaccugcagccuagaaccuuccugcugaaguacaacgagaacggcaccaucaccgacgccguggauugugcucuggauccucugagcgagacaaagugcacccugaaguccuucaccguggaaaagggcaucuaccagaccagcaacuuccgggugcagcccaccgaauccaucgugcgguuccccaauaucaccaaucugugccccuucggcgagguguucaaugccaccagauucgccucuguguacgccuggaaccggaagcggaucagcaauugcguggccgacuacuccgugcuguacaacuccgccagcuucagcaccuucaagugcuacggcguguccccuaccaagcugaacgaccugugcuucacaaacguguacgccgacagcuucgugauccggggagaugaagugcggcagauugccccuggacagacaggcaagaucgccgacuacaacuacaagcugcccgacgacuucaccggcugugugauugccuggaacagcaacaaccuggacuccaaagucggcggcaacuacaauuaccuguaccggcuguuccggaaguccaaucugaagcccuucgagcgggacaucagcaccgaaaucuaucaggccggcagcaccccuugcaacggcguggaaggcuucaacugcuacuucccacugcaguccuacggcuuucagcccacaaauggcgugggcuaucagcccuacagagugguggugcugagcuucgaacugcugcaugcuccugccacagugugcggcccuaagaaaagcaccaaucucgugaagaacaaaugcgugaacuucaacuucaacggccugaccggcaccggcgugcugacagagagcaacaagaaguuccugccauuccagcaguuuggccgggauaucgccgauaccacagacgccguuagagauccccagacacuggaaauccuggacaucaccccaugcagcuucggcggagugucugugaucaccccuggcaccaacaccagcaaucagguggcagugcuguaccaggacgugaacuguaccgaagugcccguggccauucacgccgaucagcugacaccuacauggcggguguacuccaccggcagcaauguguuucagaccagagccggcugucugaucggagccgagcacgugaacaauagcuacgagugcgacauccccaucggcgcuggcaucugugccagcuaccagacacagacaaacagccccagacgggcuagaagcguggccagccagagcaucauugccuacacaaugucucugggcgccgagaacagcguggccuacuccaacaacucuaucgcuauccccaccaacuucaccaucagcgugaccaccgagauccugccuguguccaugaccaagaccagcguggacugcaccauguacaucugcggcgauuccaccgagugcuccaaccugcugcugcaguacggcagcuucugcacccagcugaauagagcccugacagggaucgccguggaacaggacaagaacacccaagagguguucgcccaagugaagcaaaucuacaagaccccuccuaucaaggacuucggcggcuucaauuucagccagauucugcccgauccuagcaagcccagcaagcggagcuucaucgaggaccugcuguucaacaaagugacacuggccgacgccggcuucaucaagcaguauggcgauugucugggcgacauugccgccagggaucugauuugcgcccagaaguuuaacggacugacagugcugccuccucugcugaccgaugagaugaucgcccaguacacaucugcccugcuggccggcacaaucacaagcggcuggacauuuggagcuggcgccgcucugcagauccccuuugcuaugcagauggccuaccgguucaacggcaucggagugacccagaaugugcuguacgagaaccagaagcugaucgccaaccaguucaacagcgccaucggcaagauccaggacagccugagcagcacagcaagcgcccugggaaagcugcaggacguggucaaccagaaugcccaggcacugaacacccuggucaagcagcuguccuccaacuucggcgccaucagcucugugcugaacgauauccugagcagacuggacaaggucgaggccgaggugcagaucgacagacugaucacaggcagacugcagagccuccagacauacgugacccagcagcugaucagagccgccgagauuagagccucugccaaucuggccgccaccaagaugucugagugugugcugggccagagcaagagaguggacuuuugcggcaagggcuaccaccugaugagcuucccucagucugccccucacggcgugguguuucugcacgugacauaugugcccgcucaagagaagaauuucaccaccgcuccagccaucugccacgacggcaaagcccacuuuccuagagaaggcguguucguguccaacggcacccauugguucgugacacagcggaacuucuacgagccccagaucaucaccaccgacaacaccuucgugucuggcaacugcgacguugugaucggcauugugaacaauaccguguacgacccucugcagcccgagcuggacagcggaggcggaggaucugacaucgaccccuacaaagaguucggcagcagcuaccagcugcugaacuuccugccucuggacuucuuccccgaccugaacgcccugguggauacagccacagcucuguacgaggaagaacugaccggcagagagcacugcagcccucaccacacagccauuagacaggcccucgugugcugggacgagcugacaaaacugaucgccuggaugagcagcaacaucaccagcgagcaagugcggaccaucaucgugaaccacgugaacgauaccuggggccugaaagugcggcagagccugugguuucaccugagcugucugaccuucggccagcacaccgugcaagaguuucugguguccuucggcguguggaucagaaccccugcuccauacagaccuccaaacgcucccauccugagcacccugccugagcacacagugaucuguugaggacuagucccuguucccagagcccacuuuuuuuucuuuuuuugaaauaaaauagccugucuuucagaucucaaaggcucuuuucagagccaccaaaaaaaaaaaaaaaaaaaaaaaaaaaaaaaaaaaaaaaaaaaaaaaaaaaaaaaaaaaaaaaaaaaaaaaaaaaaaaaaaaaaaaaaaaaaaaaaaaaaa

SEQ ID NO: 12662 - RNA, 4178 nt, Artificial Sequence
  SARS-CoV-2/Wuhan/WIV05/2019__EPI_ISL_402128 spike protein mRNA gc mod (1-1147)(K986P_V987P) WhcAg construct
aggagagucccgcagucggcguccagcggcucugcuuguucgugugugugucguugcaggccuuauucaagcuuaccauguucguguuucuggugcugcugccccugguguccagccagugugugaaccugaccaccagaacacagcugccuccagccuacaccaacagcuucaccagaggcguguacuaccccgacaagguguucagauccagcgugcugcacucuacccaggaccuguuccugccuuucuucagcaacgugaccugguuccacgccauccacguguccggcaccaauggcaccaagagauucgacaaccccgugcugcccuucaacgacgggguguacuuugccagcaccgagaaguccaacaucaucagaggcuggaucuucggcaccacacuggacagcaagacccagagccugcugaucgugaacaacgccaccaacguggucaucaaagugugcgaguuccaguucugcaacgaccccuuccugggcgucuacuaccacaagaacaacaagagcuggauggaaagcgaguuccggguguacagcagcgccaacaacugcaccuucgaguacgugucccagccuuuccugauggaccuggaaggcaagcagggcaacuucaagaaccugcgcgaguucguguucaagaacaucgacggcuacuucaaaaucuacagcaagcacaccccuaucaaccucgugcgggaucugccucagggcuucucugcucuggaaccccugguggaucugcccaucggcaucaacaucacccgguuucagacacugcuggcccugcacagaagcuaccugacaccuggcgauagcagcagcggauggacagcuggugccgccgcuuacuaugugggcuaccugcagccuagaaccuuccugcugaaguacaacgagaacggcaccaucaccgacgccguggauugugcucuggauccucugagcgagacaaagugcacccugaaguccuucaccguggaaaagggcaucuaccagaccagcaacuuccgggugcagcccaccgaauccaucgugcgguuccccaauaucaccaaucugugccccuucggcgagguguucaaugccaccagauucgccucuguguacgccuggaaccggaagcggaucagcaauugcguggccgacuacuccgugcuguacaacuccgccagcuucagcaccuucaagugcuacggcguguccccuaccaagcugaacgaccugugcuucacaaacguguacgccgacagcuucgugauccggggagaugaagugcggcagauugccccuggacagacaggcaagaucgccgacuacaacuacaagcugcccgacgacuucaccggcugugugauugccuggaacagcaacaaccuggacuccaaagucggcggcaacuacaauuaccuguaccggcuguuccggaaguccaaucugaagcccuucgagcgggacaucagcaccgaaaucuaucaggccggcagcaccccuugcaacggcguggaaggcuucaacugcuacuucccacugcaguccuacggcuuucagcccacaaauggcgugggcuaucagcccuacagagugguggugcugagcuucgaacugcugcaugcuccugccacagugugcggcccuaagaaaagcaccaaucucgugaagaacaaaugcgugaacuucaacuucaacggccugaccggcaccggcgugcugacagagagcaacaagaaguuccugccauuccagcaguuuggccgggauaucgccgauaccacagacgccguuagagauccccagacacuggaaauccuggacaucaccccaugcagcuucggcggagugucugugaucaccccuggcaccaacaccagcaaucagguggcagugcuguaccaggacgugaacuguaccgaagugcccguggccauucacgccgaucagcugacaccuacauggcggguguacuccaccggcagcaauguguuucagaccagagccggcugucugaucggagccgagcacgugaacaauagcuacgagugcgacauccccaucggcgcuggcaucugugccagcuaccagacacagacaaacagccccagacgggcuagaagcguggccagccagagcaucauugccuacacaaugucucugggcgccgagaacagcguggccuacuccaacaacucuaucgcuauccccaccaacuucaccaucagcgugaccaccgagauccugccuguguccaugaccaagaccagcguggacugcaccauguacaucugcggcgauuccaccgagugcuccaaccugcugcugcaguacggcagcuucugcacccagcugaauagagcccugacagggaucgccguggaacaggacaagaacacccaagagguguucgcccaagugaagcaaaucuacaagaccccuccuaucaaggacuucggcggcuucaauuucagccagauucugcccgauccuagcaagcccagcaagcggagcuucaucgaggaccugcuguucaacaaagugacacuggccgacgccggcuucaucaagcaguauggcgauugucugggcgacauugccgccagggaucugauuugcgcccagaaguuuaacggacugacagugcugccuccucugcugaccgaugagaugaucgcccaguacacaucugcccugcuggccggcacaaucacaagcggcuggacauuuggagcuggcgccgcucugcagauccccuuugcuaugcagauggccuaccgguucaacggcaucggagugacccagaaugugcuguacgagaaccagaagcugaucgccaaccaguucaacagcgccaucggcaagauccaggacagccugagcagcacagcaagcgcccugggaaagcugcaggacguggucaaccagaaugcccaggcacugaacacccuggucaagcagcuguccuccaacuucggcgccaucagcucugugcugaacgauauccugagcagacuggacccuccugaggccgaggugcagaucgacagacugaucacaggcagacugcagagccuccagacauacgugacccagcagcugaucagagccgccgagauuagagccucugccaaucuggccgccaccaagaugucugagugugugcugggccagagcaagagaguggacuuuugcggcaagggcuaccaccugaugagcuucccucagucugccccucacggcgugguguuucugcacgugacauaugugcccgcucaagagaagaauuucaccaccgcuccagccaucugccacgacggcaaagcccacuuuccuagagaaggcguguucguguccaacggcacccauugguucgugacacagcggaacuucuacgagccccagaucaucaccaccgacaacaccuucgugucuggcaacugcgacguugugaucggcauugugaacaauaccguguacgacccucugcagcccgagcuggacagcggaggcggaggaucugacaucgaccccuacaaagaguucggcagcagcuaccagcugcugaacuuccugccucuggacuucuuccccgaccugaacgcccugguggauacagccacagcucuguacgaggaagaacugaccggcagagagcacugcagcccucaccacacagccauuagacaggcccucgugugcugggacgagcugacaaaacugaucgccuggaugagcagcaacaucaccagcgagcaagugcggaccaucaucgugaaccacgugaacgauaccuggggccugaaagugcggcagagccugugguuucaccugagcugucugaccuucggccagcacaccgugcaagaguuucugguguccuucggcguguggaucagaaccccugcuccauacagaccuccaaacgcucccauccugagcacccugccugagcacacagugaucuguugaggacuagucccuguucccagagcccacuuuuuuuucuuuuuuugaaauaaaauagccugucuuucagaucucaaaggcucuuuucagagccaccaaaaaaaaaaaaaaaaaaaaaaaaaaaaaaaaaaaaaaaaaaaaaaaaaaaaaaaaaaaaaaaaaaaaaaaaaaaaaaaaaaaaaaaaaaaaaaaaaaaaa

SEQ ID NO: 12663 - RNA, 4178 nt, Artificial Sequence
  SARS-CoV-2/Wuhan/WIV05/2019__EPI_ISL_402128 spike protein mRNA gc mod (1-1147)(K986P_V987P_T887WN_A1020W) WhcAg construct
aggagagucccgcagucggcguccagcggcucugcuuguucgugugugugucguugcaggccuuauucaagcuuaccauguucguguuucuggugcugcugccccugguguccagccagugugugaaccugaccaccagaacacagcugccuccagccuacaccaacagcuucaccagaggcguguacuaccccgacaagguguucagauccagcgugcugcacucuacccaggaccuguuccugccuuucuucagcaacgugaccugguuccacgccauccacguguccggcaccaauggcaccaagagauucgacaaccccgugcugcccuucaacgacgggguguacuuugccagcaccgagaaguccaacaucaucagaggcuggaucuucggcaccacacuggacagcaagacccagagccugcugaucgugaacaacgccaccaacguggucaucaaagugugcgaguuccaguucugcaacgaccccuuccugggcgucuacuaccacaagaacaacaagagcuggauggaaagcgaguuccggguguacagcagcgccaacaacugcaccuucgaguacgugucccagccuuuccugauggaccuggaaggcaagcagggcaacuucaagaaccugcgcgaguucguguucaagaacaucgacggcuacuucaaaaucuacagcaagcacaccccuaucaaccucgugcgggaucugccucagggcuucucugcucuggaaccccugguggaucugcccaucggcaucaacaucacccgguuucagacacugcuggcccugcacagaagcuaccugacaccuggcgauagcagcagcggauggacagcuggugccgccgcuuacuaugugggcuaccugcagccuagaaccuuccugcugaaguacaacgagaacggcaccaucaccgacgccguggauugugcucuggauccucugagcgagacaaagugcacccugaaguccuucaccguggaaaagggcaucuaccagaccagcaacuuccgggugcagcccaccgaauccaucgugcgguuccccaauaucaccaaucugugccccuucggcgagguguucaaugccaccagauucgccucuguguacgccuggaaccggaagcggaucagcaauugcguggccgacuacuccgugcuguacaacuccgccagcuucagcaccuucaagugcuacggcguguccccuaccaagcugaacgaccugugcuucacaaacguguacgccgacagcuucgugauccggggagaugaagugcggcagauugccccuggacagacaggcaagaucgccgacuacaacuacaagcugcccgacgacuucaccggcugugugauugccuggaacagcaacaaccuggacuccaaagucggcggcaacuacaauuaccuguaccggcuguuccggaaguccaaucugaagcccuucgagcgggacaucagcaccgaaaucuaucaggccggcagcaccccuugcaacggcguggaaggcuucaacugcuacuucccacugcaguccuacggcuuucagcccacaaauggcgugggcuaucagcccuacagagugguggugcugagcuucgaacugcugcaugcuccugccacagugugcggcccuaagaaaagcaccaaucucgugaagaacaaaugcgugaacuucaacuucaacggccugaccggcaccggcgugcugacagagagcaacaagaaguuccugccauuccagcaguuuggccgggauaucgccgauaccacagacgccguuagagauccccagacacuggaaauccuggacaucaccccaugcagcuucggcggagugucugugaucaccccuggcaccaacaccagcaaucagguggcagugcuguaccaggacgugaacuguaccgaagugcccguggccauucacgccgaucagcugacaccuacauggcggguguacuccaccggcagcaauguguuucagaccagagccggcugucugaucggagccgagcacgugaacaauagcuacgagugcgacauccccaucggcgcuggcaucugugccagcuaccagacacagacaaacagccccagacgggcuagaagcguggccagccagagcaucauugccuacacaaugucucugggcgccgagaacagcguggccuacuccaacaacucuaucgcuauccccaccaacuucaccaucagcgugaccaccgagauccugccuguguccaugaccaagaccagcguggacugcaccauguacaucugcggcgauuccaccgagugcuccaaccugcugcugcaguacggcagcuucugcacccagcugaauagagcccugacagggaucgccguggaacaggacaagaacacccaagagguguucgcccaagugaagcaaaucuacaagaccccuccuaucaaggacuucggcggcuucaauuucagccagauucugcccgauccuagcaagcccagcaagcggagcuucaucgaggaccugcuguucaacaaagugacacuggccgacgccggcuucaucaagcaguauggcgauugucugggcgacauugccgccagggaucugauuugcgcccagaaguuuaacggacugacagugcugccuccucugcugaccgaugagaugaucgcccaguacacaucugcccugcuggccggcacaaucacaagcggcuggugguuuggagcuggcgccgcucugcagauccccuuugcuaugcagauggccuaccgguucaacggcaucggagugacccagaaugugcuguacgagaaccagaagcugaucgccaaccaguucaacagcgccaucggcaagauccaggacagccugagcagcacagcaagcgcccugggaaagcugcaggacguggucaaccagaaugcccaggcacugaacacccuggucaagcagcuguccuccaacuucggcgccaucagcucugugcugaacgauauccugagcagacuggacccuccugaggccgaggugcagaucgacagacugaucacaggcagacugcagagccuccagacauacgugacccagcagcugaucagagccgccgagauuagauggucugccaaucuggccgccaccaagaugucugagugugugcugggccagagcaagagaguggacuuuugcggcaagggcuaccaccugaugagcuucccucagucugccccucacggcgugguguuucugcacgugacauaugugcccgcucaagagaagaauuucaccaccgcuccagccaucugccacgacggcaaagcccacuuuccuagagaaggcguguucguguccaacggcacccauugguucgugacacagcggaacuucuacgagccccagaucaucaccaccgacaacaccuucgugucuggcaacugcgacguugugaucggcauugugaacaauaccguguacgacccucugcagcccgagcuggacagcggaggcggaggaucugacaucgaccccuacaaagaguucggcagcagcuaccagcugcugaacuuccugccucuggacuucuuccccgaccugaacgcccugguggauacagccacagcucuguacgaggaagaacugaccggcagagagcacugcagcccucaccacacagccauuagacaggcccucgugugcugggacgagcugacaaaacugaucgccuggaugagcagcaacaucaccagcgagcaagugcggaccaucaucgugaaccacgugaacgauaccuggggccugaaagugcggcagagccugugguuucaccugagcugucugaccuucggccagcacaccgugcaagaguuucugguguccuucggcguguggaucagaaccccugcuccauacagaccuccaaacgcucccauccugagcacccugccugagcacacagugaucuguugaggacuagucccuguucccagagcccacuuuuuuuucuuuuuuugaaauaaaauagccugucuuucagaucucaaaggcucuuuucagagccaccaaaaaaaaaaaaaaaaaaaaaaaaaaaaaaaaaaaaaaaaaaaaaaaaaaaaaaaaaaaaaaaaaaaaaaaaaaaaaaaaaaaaaaaaaaaaaaaaaaaaa

SEQ ID NO: 12664 - RNA, 4178 nt, Artificial Sequence
  SARS-CoV-2/Wuhan/WIV05/2019__EPI_ISL_402128 spike protein mRNA gc mod (1-1147)(K986P_V987P_P1069F) WhcAg construct
aggagagucccgcagucggcguccagcggcucugcuuguucgugugugugucguugcaggccuuauucaagcuuaccauguucguguuucuggugcugcugccccugguguccagccagugugugaaccugaccaccagaacacagcugccuccagccuacaccaacagcuucaccagaggcguguacuaccccgacaagguguucagauccagcgugcugcacucuacccaggaccuguuccugccuuucuucagcaacgugaccugguuccacgccauccacguguccggcaccaauggcaccaagagauucgacaaccccgugcugcccuucaacgacgggguguacuuugccagcaccgagaaguccaacaucaucagaggcuggaucuucggcaccacacuggacagcaagacccagagccugcugaucgugaacaacgccaccaacguggucaucaaagugugcgaguuccaguucugcaacgaccccuuccugggcgucuacuaccacaagaacaacaagagcuggauggaaagcgaguuccggguguacagcagcgccaacaacugcaccuucgaguacgugucccagccuuuccugauggaccuggaaggcaagcagggcaacuucaagaaccugcgcgaguucguguucaagaacaucgacggcuacuucaaaaucuacagcaagcacaccccuaucaaccucgugcgggaucugccucagggcuucucugcucuggaaccccugguggaucugcccaucggcaucaacaucacccgguuucagacacugcuggcccugcacagaagcuaccugacaccuggcgauagcagcagcggauggacagcuggugccgccgcuuacuaugugggcuaccugcagccuagaaccuuccugcugaaguacaacgagaacggcaccaucaccgacgccguggauugugcucuggauccucugagcgagacaaagugcacccugaaguccuucaccguggaaaagggcaucuaccagaccagcaacuuccgggugcagcccaccgaauccaucgugcgguuccccaauaucaccaaucugugccccuucggcgagguguucaaugccaccagauucgccucuguguacgccuggaaccggaagcggaucagcaauugcguggccgacuacuccgugcuguacaacuccgccagcuucagcaccuucaagugcuacggcguguccccuaccaagcugaacgaccugugcuucacaaacguguacgccgacagcuucgugauccggggagaugaagugcggcagauugccccuggacagacaggcaagaucgccgacuacaacuacaagcugcccgacgacuucaccggcugugugauugccuggaacagcaacaaccuggacuccaaagucggcggcaacuacaauuaccuguaccggcuguuccggaaguccaaucugaagcccuucgagcgggacaucagcaccgaaaucuaucaggccggcagcaccccuugcaacggcguggaaggcuucaacugcuacuucccacugcaguccuacggcuuucagcccacaaauggcgugggcuaucagcccuacagagugguggugcugagcuucgaacugcugcaugcuccugccacagugugcggcccuaagaaaagcaccaaucucgugaagaacaaaugcgugaacuucaacuucaacggccugaccggcaccggcgugcugacagagagcaacaagaaguuccugccauuccagcaguuuggccgggauaucgccgauaccacagacgccguuagagauccccagacacuggaaauccuggacaucaccccaugcagcuucggcggagugucugugaucaccccuggcaccaacaccagcaaucagguggcagugcuguaccaggacgugaacuguaccgaagugcccguggccauucacgccgaucagcugacaccuacauggcggguguacuccaccggcagcaauguguuucagaccagagccggcugucugaucggagccgagcacgugaacaauagcuacgagugcgacauccccaucggcgcuggcaucugugccagcuaccagacacagacaaacagccccagacgggcuagaagcguggccagccagagcaucauugccuacacaaugucucugggcgccgagaacagcguggccuacuccaacaacucuaucgcuauccccaccaacuucaccaucagcgugaccaccgagauccugccuguguccaugaccaagaccagcguggacugcaccauguacaucugcggcgauuccaccgagugcuccaaccugcugcugcaguacggcagcuucugcacccagcugaauagagcccugacagggaucgccguggaacaggacaagaacacccaagagguguucgcccaagugaagcaaaucuacaagaccccuccuaucaaggacuucggcggcuucaauuucagccagauucugcccgauccuagcaagcccagcaagcggagcuucaucgaggaccugcuguucaacaaagugacacuggccgacgccggcuucaucaagcaguauggcgauugucugggcgacauugccgccagggaucugauuugcgcccagaaguuuaacggacugacagugcugccuccucugcugaccgaugagaugaucgcccaguacacaucugcccugcuggccggcacaaucacaagcggcuggacauuuggagcuggcgccgcucugcagauccccuuugcuaugcagauggccuaccgguucaacggcaucggagugacccagaaugugcuguacgagaaccagaagcugaucgccaaccaguucaacagcgccaucggcaagauccaggacagccugagcagcacagcaagcgcccugggaaagcugcaggacguggucaaccagaaugcccaggcacugaacacccuggucaagcagcuguccuccaacuucggcgccaucagcucugugcugaacgauauccugagcagacuggacccuccugaggccgaggugcagaucgacagacugaucacaggcagacugcagagccuccagacauacgugacccagcagcugaucagagccgccgagauuagagccucugccaaucuggccgccaccaagaugucugagugugugcugggccagagcaagagaguggacuuuugcggcaagggcuaccaccugaugagcuucccucagucugccccucacggcgugguguuucugcacgugacauauguguucgcucaagagaagaauuucaccaccgcuccagccaucugccacgacggcaaagcccacuuuccuagagaaggcguguucguguccaacggcacccauugguucgugacacagcggaacuucuacgagccccagaucaucaccaccgacaacaccuucgugucuggcaacugcgacguugugaucggcauugugaacaauaccguguacgacccucugcagcccgagcuggacagcggaggcggaggaucugacaucgaccccuacaaagaguucggcagcagcuaccagcugcugaacuuccugccucuggacuucuuccccgaccugaacgcccugguggauacagccacagcucuguacgaggaagaacugaccggcagagagcacugcagcccucaccacacagccauuagacaggcccucgugugcugggacgagcugacaaaacugaucgccuggaugagcagcaacaucaccagcgagcaagugcggaccaucaucgugaaccacgugaacgauaccuggggccugaaagugcggcagagccugugguuucaccugagcugucugaccuucggccagcacaccgugcaagaguuucugguguccuucggcguguggaucagaaccccugcuccauacagaccuccaaacgcucccauccugagcacccugccugagcacacagugaucuguugaggacuagucccuguucccagagcccacuuuuuuuucuuuuuuugaaauaaaauagccugucuuucagaucucaaaggcucuuuucagagccaccaaaaaaaaaaaaaaaaaaaaaaaaaaaaaaaaaaaaaaaaaaaaaaaaaaaaaaaaaaaaaaaaaaaaaaaaaaaaaaaaaaaaaaaaaaaaaaaaaaaaa

SEQ ID NO: 12665 - RNA, 4178 nt, Artificial Sequence
  SARS-CoV-2/Wuhan/WIV05/2019__EPI_ISL_402128 spike protein mRNA gc mod (1-1147)(K986P_V987P_ H1048Q_H1064N_ H1083N_H1101N) WhcAg construct
aggagagucccgcagucggcguccagcggcucugcuuguucgugugugugucguugcaggccuuauucaagcuuaccauguucguguuucuggugcugcugccccugguguccagccagugugugaaccugaccaccagaacacagcugccuccagccuacaccaacagcuucaccagaggcguguacuaccccgacaagguguucagauccagcgugcugcacucuacccaggaccuguuccugccuuucuucagcaacgugaccugguuccacgccauccacguguccggcaccaauggcaccaagagauucgacaaccccgugcugcccuucaacgacgggguguacuuugccagcaccgagaaguccaacaucaucagaggcuggaucuucggcaccacacuggacagcaagacccagagccugcugaucgugaacaacgccaccaacguggucaucaaagugugcgaguuccaguucugcaacgaccccuuccugggcgucuacuaccacaagaacaacaagagcuggauggaaagcgaguuccggguguacagcagcgccaacaacugcaccuucgaguacgugucccagccuuuccugauggaccuggaaggcaagcagggcaacuucaagaaccugcgcgaguucguguucaagaacaucgacggcuacuucaaaaucuacagcaagcacaccccuaucaaccucgugcgggaucugccucagggcuucucugcucuggaaccccugguggaucugcccaucggcaucaacaucacccgguuucagacacugcuggcccugcacagaagcuaccugacaccuggcgauagcagcagcggauggacagcuggugccgccgcuuacuaugugggcuaccugcagccuagaaccuuccugcugaaguacaacgagaacggcaccaucaccgacgccguggauugugcucuggauccucugagcgagacaaagugcacccugaaguccuucaccguggaaaagggcaucuaccagaccagcaacuuccgggugcagcccaccgaauccaucgugcgguuccccaauaucaccaaucugugccccuucggcgagguguucaaugccaccagauucgccucuguguacgccuggaaccggaagcggaucagcaauugcguggccgacuacuccgugcuguacaacuccgccagcuucagcaccuucaagugcuacggcguguccccuaccaagcugaacgaccugugcuucacaaacguguacgccgacagcuucgugauccggggagaugaagugcggcagauugccccuggacagacaggcaagaucgccgacuacaacuacaagcugcccgacgacuucaccggcugugugauugccuggaacagcaacaaccuggacuccaaagucggcggcaacuacaauuaccuguaccggcuguuccggaaguccaaucugaagcccuucgagcgggacaucagcaccgaaaucuaucaggccggcagcaccccuugcaacggcguggaaggcuucaacugcuacuucccacugcaguccuacggcuuucagcccacaaauggcgugggcuaucagcccuacagagugguggugcugagcuucgaacugcugcaugcuccugccacagugugcggcccuaagaaaagcaccaaucucgugaagaacaaaugcgugaacuucaacuucaacggccugaccggcaccggcgugcugacagagagcaacaagaaguuccugccauuccagcaguuuggccgggauaucgccgauaccacagacgccguuagagauccccagacacuggaaauccuggacaucaccccaugcagcuucggcggagugucugugaucaccccuggcaccaacaccagcaaucagguggcagugcuguaccaggacgugaacuguaccgaagugcccguggccauucacgccgaucagcugacaccuacauggcggguguacuccaccggcagcaauguguuucagaccagagccggcugucugaucggagccgagcacgugaacaauagcuacgagugcgacauccccaucggcgcuggcaucugugccagcuaccagacacagacaaacagccccagacgggcuagaagcguggccagccagagcaucauugccuacacaaugucucugggcgccgagaacagcguggccuacuccaacaacucuaucgcuauccccaccaacuucaccaucagcgugaccaccgagauccugccuguguccaugaccaagaccagcguggacugcaccauguacaucugcggcgauuccaccgagugcuccaaccugcugcugcaguacggcagcuucugcacccagcugaauagagcccugacagggaucgccguggaacaggacaagaacacccaagagguguucgcccaagugaagcaaaucuacaagaccccuccuaucaaggacuucggcggcuucaauuucagccagauucugcccgauccuagcaagcccagcaagcggagcuucaucgaggaccugcuguucaacaaagugacacuggccgacgccggcuucaucaagcaguauggcgauugucugggcgacauugccgccagggaucugauuugcgcccagaaguuuaacggacugacagugcugccuccucugcugaccgaugagaugaucgcccaguacacaucugcccugcuggccggcacaaucacaagcggcuggacauuuggagcuggcgccgcucugcagauccccuuugcuaugcagauggccuaccgguucaacggcaucggagugacccagaaugugcuguacgagaaccagaagcugaucgccaaccaguucaacagcgccaucggcaagauccaggacagccugagcagcacagcaagcgcccugggaaagcugcaggacguggucaaccagaaugcccaggcacugaacacccuggucaagcagcuguccuccaacuucggcgccaucagcucugugcugaacgauauccugagcagacuggacccuccugaggccgaggugcagaucgacagacugaucacaggcagacugcagagccuccagacauacgugacccagcagcugaucagagccgccgagauuagagccucugccaaucuggccgccaccaagaugucugagugugugcugggccagagcaagagaguggacuuuugcggcaagggcuaccagcugaugagcuucccucagucugccccucacggcgugguguuucugaacgugacauaugugcccgcucaagagaagaauuucaccaccgcuccagccaucugcaacgacggcaaagcccacuuuccuagagaaggcguguucguguccaacggcaccaacugguucgugacacagcggaacuucuacgagccccagaucaucaccaccgacaacaccuucgugucuggcaacugcgacguugugaucggcauugugaacaauaccguguacgacccucugcagcccgagcuggacagcggaggcggaggaucugacaucgaccccuacaaagaguucggcagcagcuaccagcugcugaacuuccugccucuggacuucuuccccgaccugaacgcccugguggauacagccacagcucuguacgaggaagaacugaccggcagagagcacugcagcccucaccacacagccauuagacaggcccucgugugcugggacgagcugacaaaacugaucgccuggaugagcagcaacaucaccagcgagcaagugcggaccaucaucgugaaccacgugaacgauaccuggggccugaaagugcggcagagccugugguuucaccugagcugucugaccuucggccagcacaccgugcaagaguuucugguguccuucggcguguggaucagaaccccugcuccauacagaccuccaaacgcucccauccugagcacccugccugagcacacagugaucuguugaggacuagucccuguucccagagcccacuuuuuuuucuuuuuuugaaauaaaauagccugucuuucagaucucaaaggcucuuuucagagccaccaaaaaaaaaaaaaaaaaaaaaaaaaaaaaaaaaaaaaaaaaaaaaaaaaaaaaaaaaaaaaaaaaaaaaaaaaaaaaaaaaaaaaaaaaaaaaaaaaaaaa

SEQ ID NO: 12666 - RNA, 4178 nt, Artificial Sequence
  SARS-CoV-2/Wuhan/WIV05/2019__EPI_ISL_402128 spike protein mRNA gc mod (1-1147)(I712C_T1077C) WhcAg construct
aggagagucccgcagucggcguccagcggcucugcuuguucgugugugugucguugcaggccuuauucaagcuuaccauguucguguuucuggugcugcugccccugguguccagccagugugugaaccugaccaccagaacacagcugccuccagccuacaccaacagcuucaccagaggcguguacuaccccgacaagguguucagauccagcgugcugcacucuacccaggaccuguuccugccuuucuucagcaacgugaccugguuccacgccauccacguguccggcaccaauggcaccaagagauucgacaaccccgugcugcccuucaacgacgggguguacuuugccagcaccgagaaguccaacaucaucagaggcuggaucuucggcaccacacuggacagcaagacccagagccugcugaucgugaacaacgccaccaacguggucaucaaagugugcgaguuccaguucugcaacgaccccuuccugggcgucuacuaccacaagaacaacaagagcuggauggaaagcgaguuccggguguacagcagcgccaacaacugcaccuucgaguacgugucccagccuuuccugauggaccuggaaggcaagcagggcaacuucaagaaccugcgcgaguucguguucaagaacaucgacggcuacuucaaaaucuacagcaagcacaccccuaucaaccucgugcgggaucugccucagggcuucucugcucuggaaccccugguggaucugcccaucggcaucaacaucacccgguuucagacacugcuggcccugcacagaagcuaccugacaccuggcgauagcagcagcggauggacagcuggugccgccgcuuacuaugugggcuaccugcagccuagaaccuuccugcugaaguacaacgagaacggcaccaucaccgacgccguggauugugcucuggauccucugagcgagacaaagugcacccugaaguccuucaccguggaaaagggcaucuaccagaccagcaacuuccgggugcagcccaccgaauccaucgugcgguuccccaauaucaccaaucugugccccuucggcgagguguucaaugccaccagauucgccucuguguacgccuggaaccggaagcggaucagcaauugcguggccgacuacuccgugcuguacaacuccgccagcuucagcaccuucaagugcuacggcguguccccuaccaagcugaacgaccugugcuucacaaacguguacgccgacagcuucgugauccggggagaugaagugcggcagauugccccuggacagacaggcaagaucgccgacuacaacuacaagcugcccgacgacuucaccggcugugugauugccuggaacagcaacaaccuggacuccaaagucggcggcaacuacaauuaccuguaccggcuguuccggaaguccaaucugaagcccuucgagcgggacaucagcaccgaaaucuaucaggccggcagcaccccuugcaacggcguggaaggcuucaacugcuacuucccacugcaguccuacggcuuucagcccacaaauggcgugggcuaucagcccuacagagugguggugcugagcuucgaacugcugcaugcuccugccacagugugcggcccuaagaaaagcaccaaucucgugaagaacaaaugcgugaacuucaacuucaacggccugaccggcaccggcgugcugacagagagcaacaagaaguuccugccauuccagcaguuuggccgggauaucgccgauaccacagacgccguuagagauccccagacacuggaaauccuggacaucaccccaugcagcuucggcggagugucugugaucaccccuggcaccaacaccagcaaucagguggcagugcuguaccaggacgugaacuguaccgaagugcccguggccauucacgccgaucagcugacaccuacauggcggguguacuccaccggcagcaauguguuucagaccagagccggcugucugaucggagccgagcacgugaacaauagcuacgagugcgacauccccaucggcgcuggcaucugugccagcuaccagacacagacaaacagccccagacgggcuagaagcguggccagccagagcaucauugccuacacaaugucucugggcgccgagaacagcguggccuacuccaacaacucuugcgcuauccccaccaacuucaccaucagcgugaccaccgagauccugccuguguccaugaccaagaccagcguggacugcaccauguacaucugcggcgauuccaccgagugcuccaaccugcugcugcaguacggcagcuucugcacccagcugaauagagcccugacagggaucgccguggaacaggacaagaacacccaagagguguucgcccaagugaagcaaaucuacaagaccccuccuaucaaggacuucggcggcuucaauuucagccagauucugcccgauccuagcaagcccagcaagcggagcuucaucgaggaccugcuguucaacaaagugacacuggccgacgccggcuucaucaagcaguauggcgauugucugggcgacauugccgccagggaucugauuugcgcccagaaguuuaacggacugacagugcugccuccucugcugaccgaugagaugaucgcccaguacacaucugcccugcuggccggcacaaucacaagcggcuggacauuuggagcuggcgccgcucugcagauccccuuugcuaugcagauggccuaccgguucaacggcaucggagugacccagaaugugcuguacgagaaccagaagcugaucgccaaccaguucaacagcgccaucggcaagauccaggacagccugagcagcacagcaagcgcccugggaaagcugcaggacguggucaaccagaaugcccaggcacugaacacccuggucaagcagcuguccuccaacuucggcgccaucagcucugugcugaacgauauccugagcagacuggacaaggucgaggccgaggugcagaucgacagacugaucacaggcagacugcagagccuccagacauacgugacccagcagcugaucagagccgccgagauuagagccucugccaaucuggccgccaccaagaugucugagugugugcugggccagagcaagagaguggacuuuugcggcaagggcuaccaccugaugagcuucccucagucugccccucacggcgugguguuucugcacgugacauaugugcccgcucaagagaagaauuucaccugugcuccagccaucugccacgacggcaaagcccacuuuccuagagaaggcguguucguguccaacggcacccauugguucgugacacagcggaacuucuacgagccccagaucaucaccaccgacaacaccuucgugucuggcaacugcgacguugugaucggcauugugaacaauaccguguacgacccucugcagcccgagcuggacagcggaggcggaggaucugacaucgaccccuacaaagaguucggcagcagcuaccagcugcugaacuuccugccucuggacuucuuccccgaccugaacgcccugguggauacagccacagcucuguacgaggaagaacugaccggcagagagcacugcagcccucaccacacagccauuagacaggcccucgugugcugggacgagcugacaaaacugaucgccuggaugagcagcaacaucaccagcgagcaagugcggaccaucaucgugaaccacgugaacgauaccuggggccugaaagugcggcagagccugugguuucaccugagcugucugaccuucggccagcacaccgugcaagaguuucugguguccuucggcguguggaucagaaccccugcuccauacagaccuccaaacgcucccauccugagcacccugccugagcacacagugaucuguugaggacuagucccuguucccagagcccacuuuuuuuucuuuuuuugaaauaaaauagccugucuuucagaucucaaaggcucuuuucagagccaccaaaaaaaaaaaaaaaaaaaaaaaaaaaaaaaaaaaaaaaaaaaaaaaaaaaaaaaaaaaaaaaaaaaaaaaaaaaaaaaaaaaaaaaaaaaaaaaaaaaaa

SEQ ID NO: 12667 - RNA, 4178 nt, Artificial Sequence
  SARS-CoV-2/Wuhan/WIV05/2019__EPI_ISL_402128 spike protein mRNA gc mod (1-1147)(I714C_Y1110C) WhcAg construct
aggagagucccgcagucggcguccagcggcucugcuuguucgugugugugucguugcaggccuuauucaagcuuaccauguucguguuucuggugcugcugccccugguguccagccagugugugaaccugaccaccagaacacagcugccuccagccuacaccaacagcuucaccagaggcguguacuaccccgacaagguguucagauccagcgugcugcacucuacccaggaccuguuccugccuuucuucagcaacgugaccugguuccacgccauccacguguccggcaccaauggcaccaagagauucgacaaccccgugcugcccuucaacgacgggguguacuuugccagcaccgagaaguccaacaucaucagaggcuggaucuucggcaccacacuggacagcaagacccagagccugcugaucgugaacaacgccaccaacguggucaucaaagugugcgaguuccaguucugcaacgaccccuuccugggcgucuacuaccacaagaacaacaagagcuggauggaaagcgaguuccggguguacagcagcgccaacaacugcaccuucgaguacgugucccagccuuuccugauggaccuggaaggcaagcagggcaacuucaagaaccugcgcgaguucguguucaagaacaucgacggcuacuucaaaaucuacagcaagcacaccccuaucaaccucgugcgggaucugccucagggcuucucugcucuggaaccccugguggaucugcccaucggcaucaacaucacccgguuucagacacugcuggcccugcacagaagcuaccugacaccuggcgauagcagcagcggauggacagcuggugccgccgcuuacuaugugggcuaccugcagccuagaaccuuccugcugaaguacaacgagaacggcaccaucaccgacgccguggauugugcucuggauccucugagcgagacaaagugcacccugaaguccuucaccguggaaaagggcaucuaccagaccagcaacuuccgggugcagcccaccgaauccaucgugcgguuccccaauaucaccaaucugugccccuucggcgagguguucaaugccaccagauucgccucuguguacgccuggaaccggaagcggaucagcaauugcguggccgacuacuccgugcuguacaacuccgccagcuucagcaccuucaagugcuacggcguguccccuaccaagcugaacgaccugugcuucacaaacguguacgccgacagcuucgugauccggggagaugaagugcggcagauugccccuggacagacaggcaagaucgccgacuacaacuacaagcugcccgacgacuucaccggcugugugauugccuggaacagcaacaaccuggacuccaaagucggcggcaacuacaauuaccuguaccggcuguuccggaaguccaaucugaagcccuucgagcgggacaucagcaccgaaaucuaucaggccggcagcaccccuugcaacggcguggaaggcuucaacugcuacuucccacugcaguccuacggcuuucagcccacaaauggcgugggcuaucagcccuacagagugguggugcugagcuucgaacugcugcaugcuccugccacagugugcggcccuaagaaaagcaccaaucucgugaagaacaaaugcgugaacuucaacuucaacggccugaccggcaccggcgugcugacagagagcaacaagaaguuccugccauuccagcaguuuggccgggauaucgccgauaccacagacgccguuagagauccccagacacuggaaauccuggacaucaccccaugcagcuucggcggagugucugugaucaccccuggcaccaacaccagcaaucagguggcagugcuguaccaggacgugaacuguaccgaagugcccguggccauucacgccgaucagcugacaccuacauggcggguguacuccaccggcagcaauguguuucagaccagagccggcugucugaucggagccgagcacgugaacaauagcuacgagugcgacauccccaucggcgcuggcaucugugccagcuaccagacacagacaaacagccccagacgggcuagaagcguggccagccagagcaucauugccuacacaaugucucugggcgccgagaacagcguggccuacuccaacaacucuaucgcuugccccaccaacuucaccaucagcgugaccaccgagauccugccuguguccaugaccaagaccagcguggacugcaccauguacaucugcggcgauuccaccgagugcuccaaccugcugcugcaguacggcagcuucugcacccagcugaauagagcccugacagggaucgccguggaacaggacaagaacacccaagagguguucgcccaagugaagcaaaucuacaagaccccuccuaucaaggacuucggcggcuucaauuucagccagauucugcccgauccuagcaagcccagcaagcggagcuucaucgaggaccugcuguucaacaaagugacacuggccgacgccggcuucaucaagcaguauggcgauugucugggcgacauugccgccagggaucugauuugcgcccagaaguuuaacggacugacagugcugccuccucugcugaccgaugagaugaucgcccaguacacaucugcccugcuggccggcacaaucacaagcggcuggacauuuggagcuggcgccgcucugcagauccccuuugcuaugcagauggccuaccgguucaacggcaucggagugacccagaaugugcuguacgagaaccagaagcugaucgccaaccaguucaacagcgccaucggcaagauccaggacagccugagcagcacagcaagcgcccugggaaagcugcaggacguggucaaccagaaugcccaggcacugaacacccuggucaagcagcuguccuccaacuucggcgccaucagcucugugcugaacgauauccugagcagacuggacaaggucgaggccgaggugcagaucgacagacugaucacaggcagacugcagagccuccagacauacgugacccagcagcugaucagagccgccgagauuagagccucugccaaucuggccgccaccaagaugucugagugugugcugggccagagcaagagaguggacuuuugcggcaagggcuaccaccugaugagcuucccucagucugccccucacggcgugguguuucugcacgugacauaugugcccgcucaagagaagaauuucaccaccgcuccagccaucugccacgacggcaaagcccacuuuccuagagaaggcguguucguguccaacggcacccauugguucgugacacagcggaacuucugugagccccagaucaucaccaccgacaacaccuucgugucuggcaacugcgacguugugaucggcauugugaacaauaccguguacgacccucugcagcccgagcuggacagcggaggcggaggaucugacaucgaccccuacaaagaguucggcagcagcuaccagcugcugaacuuccugccucuggacuucuuccccgaccugaacgcccugguggauacagccacagcucuguacgaggaagaacugaccggcagagagcacugcagcccucaccacacagccauuagacaggcccucgugugcugggacgagcugacaaaacugaucgccuggaugagcagcaacaucaccagcgagcaagugcggaccaucaucgugaaccacgugaacgauaccuggggccugaaagugcggcagagccugugguuucaccugagcugucugaccuucggccagcacaccgugcaagaguuucugguguccuucggcguguggaucagaaccccugcuccauacagaccuccaaacgcucccauccugagcacccugccugagcacacagugaucuguugaggacuagucccuguucccagagcccacuuuuuuuucuuuuuuugaaauaaaauagccugucuuucagaucucaaaggcucuuuucagagccaccaaaaaaaaaaaaaaaaaaaaaaaaaaaaaaaaaaaaaaaaaaaaaaaaaaaaaaaaaaaaaaaaaaaaaaaaaaaaaaaaaaaaaaaaaaaaaaaaaaaaa

SEQ ID NO: 12668 - RNA, 4178 nt, Artificial Sequence
  SARS-CoV-2/Wuhan/WIV05/2019__EPI_ISL_402128 spike protein mRNA gc mod (1-1147)(P715C_P1069C) WhcAg construct
aggagagucccgcagucggcguccagcggcucugcuuguucgugugugugucguugcaggccuuauucaagcuuaccauguucguguuucuggugcugcugccccugguguccagccagugugugaaccugaccaccagaacacagcugccuccagccuacaccaacagcuucaccagaggcguguacuaccccgacaagguguucagauccagcgugcugcacucuacccaggaccuguuccugccuuucuucagcaacgugaccugguuccacgccauccacguguccggcaccaauggcaccaagagauucgacaaccccgugcugcccuucaacgacgggguguacuuugccagcaccgagaaguccaacaucaucagaggcuggaucuucggcaccacacuggacagcaagacccagagccugcugaucgugaacaacgccaccaacguggucaucaaagugugcgaguuccaguucugcaacgaccccuuccugggcgucuacuaccacaagaacaacaagagcuggauggaaagcgaguuccggguguacagcagcgccaacaacugcaccuucgaguacgugucccagccuuuccugauggaccuggaaggcaagcagggcaacuucaagaaccugcgcgaguucguguucaagaacaucgacggcuacuucaaaaucuacagcaagcacaccccuaucaaccucgugcgggaucugccucagggcuucucugcucuggaaccccugguggaucugcccaucggcaucaacaucacccgguuucagacacugcuggcccugcacagaagcuaccugacaccuggcgauagcagcagcggauggacagcuggugccgccgcuuacuaugugggcuaccugcagccuagaaccuuccugcugaaguacaacgagaacggcaccaucaccgacgccguggauugugcucuggauccucugagcgagacaaagugcacccugaaguccuucaccguggaaaagggcaucuaccagaccagcaacuuccgggugcagcccaccgaauccaucgugcgguuccccaauaucaccaaucugugccccuucggcgagguguucaaugccaccagauucgccucuguguacgccuggaaccggaagcggaucagcaauugcguggccgacuacuccgugcuguacaacuccgccagcuucagcaccuucaagugcuacggcguguccccuaccaagcugaacgaccugugcuucacaaacguguacgccgacagcuucgugauccggggagaugaagugcggcagauugccccuggacagacaggcaagaucgccgacuacaacuacaagcugcccgacgacuucaccggcugugugauugccuggaacagcaacaaccuggacuccaaagucggcggcaacuacaauuaccuguaccggcuguuccggaaguccaaucugaagcccuucgagcgggacaucagcaccgaaaucuaucaggccggcagcaccccuugcaacggcguggaaggcuucaacugcuacuucccacugcaguccuacggcuuucagcccacaaauggcgugggcuaucagcccuacagagugguggugcugagcuucgaacugcugcaugcuccugccacagugugcggcccuaagaaaagcaccaaucucgugaagaacaaaugcgugaacuucaacuucaacggccugaccggcaccggcgugcugacagagagcaacaagaaguuccugccauuccagcaguuuggccgggauaucgccgauaccacagacgccguuagagauccccagacacuggaaauccuggacaucaccccaugcagcuucggcggagugucugugaucaccccuggcaccaacaccagcaaucagguggcagugcuguaccaggacgugaacuguaccgaagugcccguggccauucacgccgaucagcugacaccuacauggcggguguacuccaccggcagcaauguguuucagaccagagccggcugucugaucggagccgagcacgugaacaauagcuacgagugcgacauccccaucggcgcuggcaucugugccagcuaccagacacagacaaacagccccagacgggcuagaagcguggccagccagagcaucauugccuacacaaugucucugggcgccgagaacagcguggccuacuccaacaacucuaucgcuaucugcaccaacuucaccaucagcgugaccaccgagauccugccuguguccaugaccaagaccagcguggacugcaccauguacaucugcggcgauuccaccgagugcuccaaccugcugcugcaguacggcagcuucugcacccagcugaauagagcccugacagggaucgccguggaacaggacaagaacacccaagagguguucgcccaagugaagcaaaucuacaagaccccuccuaucaaggacuucggcggcuucaauuucagccagauucugcccgauccuagcaagcccagcaagcggagcuucaucgaggaccugcuguucaacaaagugacacuggccgacgccggcuucaucaagcaguauggcgauugucugggcgacauugccgccagggaucugauuugcgcccagaaguuuaacggacugacagugcugccuccucugcugaccgaugagaugaucgcccaguacacaucugcccugcuggccggcacaaucacaagcggcuggacauuuggagcuggcgccgcucugcagauccccuuugcuaugcagauggccuaccgguucaacggcaucggagugacccagaaugugcuguacgagaaccagaagcugaucgccaaccaguucaacagcgccaucggcaagauccaggacagccugagcagcacagcaagcgcccugggaaagcugcaggacguggucaaccagaaugcccaggcacugaacacccuggucaagcagcuguccuccaacuucggcgccaucagcucugugcugaacgauauccugagcagacuggacaaggucgaggccgaggugcagaucgacagacugaucacaggcagacugcagagccuccagacauacgugacccagcagcugaucagagccgccgagauuagagccucugccaaucuggccgccaccaagaugucugagugugugcugggccagagcaagagaguggacuuuugcggcaagggcuaccaccugaugagcuucccucagucugccccucacggcgugguguuucugcacgugacauaugugugugcucaagagaagaauuucaccaccgcuccagccaucugccacgacggcaaagcccacuuuccuagagaaggcguguucguguccaacggcacccauugguucgugacacagcggaacuucuacgagccccagaucaucaccaccgacaacaccuucgugucuggcaacugcgacguugugaucggcauugugaacaauaccguguacgacccucugcagcccgagcuggacagcggaggcggaggaucugacaucgaccccuacaaagaguucggcagcagcuaccagcugcugaacuuccugccucuggacuucuuccccgaccugaacgcccugguggauacagccacagcucuguacgaggaagaacugaccggcagagagcacugcagcccucaccacacagccauuagacaggcccucgugugcugggacgagcugacaaaacugaucgccuggaugagcagcaacaucaccagcgagcaagugcggaccaucaucgugaaccacgugaacgauaccuggggccugaaagugcggcagagccugugguuucaccugagcugucugaccuucggccagcacaccgugcaagaguuucugguguccuucggcguguggaucagaaccccugcuccauacagaccuccaaacgcucccauccugagcacccugccugagcacacagugaucuguugaggacuagucccuguucccagagcccacuuuuuuuucuuuuuuugaaauaaaauagccugucuuucagaucucaaaggcucuuuucagagccaccaaaaaaaaaaaaaaaaaaaaaaaaaaaaaaaaaaaaaaaaaaaaaaaaaaaaaaaaaaaaaaaaaaaaaaaaaaaaaaaaaaaaaaaaaaaaaaaaaaaaa

SEQ ID NO: 12669 - RNA, 4178 nt, Artificial Sequence
  SARS-CoV-2/Wuhan/WIV05/2019__EPI_ISL_402128 spike protein mRNA gc mod (1-1147)(G889C_L1034C) WhcAg construct
aggagagucccgcagucggcguccagcggcucugcuuguucgugugugugucguugcaggccuuauucaagcuuaccauguucguguuucuggugcugcugccccugguguccagccagugugugaaccugaccaccagaacacagcugccuccagccuacaccaacagcuucaccagaggcguguacuaccccgacaagguguucagauccagcgugcugcacucuacccaggaccuguuccugccuuucuucagcaacgugaccugguuccacgccauccacguguccggcaccaauggcaccaagagauucgacaaccccgugcugcccuucaacgacgggguguacuuugccagcaccgagaaguccaacaucaucagaggcuggaucuucggcaccacacuggacagcaagacccagagccugcugaucgugaacaacgccaccaacguggucaucaaagugugcgaguuccaguucugcaacgaccccuuccugggcgucuacuaccacaagaacaacaagagcuggauggaaagcgaguuccggguguacagcagcgccaacaacugcaccuucgaguacgugucccagccuuuccugauggaccuggaaggcaagcagggcaacuucaagaaccugcgcgaguucguguucaagaacaucgacggcuacuucaaaaucuacagcaagcacaccccuaucaaccucgugcgggaucugccucagggcuucucugcucuggaaccccugguggaucugcccaucggcaucaacaucacccgguuucagacacugcuggcccugcacagaagcuaccugacaccuggcgauagcagcagcggauggacagcuggugccgccgcuuacuaugugggcuaccugcagccuagaaccuuccugcugaaguacaacgagaacggcaccaucaccgacgccguggauugugcucuggauccucugagcgagacaaagugcacccugaaguccuucaccguggaaaagggcaucuaccagaccagcaacuuccgggugcagcccaccgaauccaucgugcgguuccccaauaucaccaaucugugccccuucggcgagguguucaaugccaccagauucgccucuguguacgccuggaaccggaagcggaucagcaauugcguggccgacuacuccgugcuguacaacuccgccagcuucagcaccuucaagugcuacggcguguccccuaccaagcugaacgaccugugcuucacaaacguguacgccgacagcuucgugauccggggagaugaagugcggcagauugccccuggacagacaggcaagaucgccgacuacaacuacaagcugcccgacgacuucaccggcugugugauugccuggaacagcaacaaccuggacuccaaagucggcggcaacuacaauuaccuguaccggcuguuccggaaguccaaucugaagcccuucgagcgggacaucagcaccgaaaucuaucaggccggcagcaccccuugcaacggcguggaaggcuucaacugcuacuucccacugcaguccuacggcuuucagcccacaaauggcgugggcuaucagcccuacagagugguggugcugagcuucgaacugcugcaugcuccugccacagugugcggcccuaagaaaagcaccaaucucgugaagaacaaaugcgugaacuucaacuucaacggccugaccggcaccggcgugcugacagagagcaacaagaaguuccugccauuccagcaguuuggccgggauaucgccgauaccacagacgccguuagagauccccagacacuggaaauccuggacaucaccccaugcagcuucggcggagugucugugaucaccccuggcaccaacaccagcaaucagguggcagugcuguaccaggacgugaacuguaccgaagugcccguggccauucacgccgaucagcugacaccuacauggcggguguacuccaccggcagcaauguguuucagaccagagccggcugucugaucggagccgagcacgugaacaauagcuacgagugcgacauccccaucggcgcuggcaucugugccagcuaccagacacagacaaacagccccagacgggcuagaagcguggccagccagagcaucauugccuacacaaugucucugggcgccgagaacagcguggccuacuccaacaacucuaucgcuauccccaccaacuucaccaucagcgugaccaccgagauccugccuguguccaugaccaagaccagcguggacugcaccauguacaucugcggcgauuccaccgagugcuccaaccugcugcugcaguacggcagcuucugcacccagcugaauagagcccugacagggaucgccguggaacaggacaagaacacccaagagguguucgcccaagugaagcaaaucuacaagaccccuccuaucaaggacuucggcggcuucaauuucagccagauucugcccgauccuagcaagcccagcaagcggagcuucaucgaggaccugcuguucaacaaagugacacuggccgacgccggcuucaucaagcaguauggcgauugucugggcgacauugccgccagggaucugauuugcgcccagaaguuuaacggacugacagugcugccuccucugcugaccgaugagaugaucgcccaguacacaucugcccugcuggccggcacaaucacaagcggcuggacauuuugcgcuggcgccgcucugcagauccccuuugcuaugcagauggccuaccgguucaacggcaucggagugacccagaaugugcuguacgagaaccagaagcugaucgccaaccaguucaacagcgccaucggcaagauccaggacagccugagcagcacagcaagcgcccugggaaagcugcaggacguggucaaccagaaugcccaggcacugaacacccuggucaagcagcuguccuccaacuucggcgccaucagcucugugcugaacgauauccugagcagacuggacaaggucgaggccgaggugcagaucgacagacugaucacaggcagacugcagagccuccagacauacgugacccagcagcugaucagagccgccgagauuagagccucugccaaucuggccgccaccaagaugucugaguguguguguggccagagcaagagaguggacuuuugcggcaagggcuaccaccugaugagcuucccucagucugccccucacggcgugguguuucugcacgugacauaugugcccgcucaagagaagaauuucaccaccgcuccagccaucugccacgacggcaaagcccacuuuccuagagaaggcguguucguguccaacggcacccauugguucgugacacagcggaacuucuacgagccccagaucaucaccaccgacaacaccuucgugucuggcaacugcgacguugugaucggcauugugaacaauaccguguacgacccucugcagcccgagcuggacagcggaggcggaggaucugacaucgaccccuacaaagaguucggcagcagcuaccagcugcugaacuuccugccucuggacuucuuccccgaccugaacgcccugguggauacagccacagcucuguacgaggaagaacugaccggcagagagcacugcagcccucaccacacagccauuagacaggcccucgugugcugggacgagcugacaaaacugaucgccuggaugagcagcaacaucaccagcgagcaagugcggaccaucaucgugaaccacgugaacgauaccuggggccugaaagugcggcagagccugugguuucaccugagcugucugaccuucggccagcacaccgugcaagaguuucugguguccuucggcguguggaucagaaccccugcuccauacagaccuccaaacgcucccauccugagcacccugccugagcacacagugaucuguugaggacuagucccuguucccagagcccacuuuuuuuucuuuuuuugaaauaaaauagccugucuuucagaucucaaaggcucuuuucagagccaccaaaaaaaaaaaaaaaaaaaaaaaaaaaaaaaaaaaaaaaaaaaaaaaaaaaaaaaaaaaaaaaaaaaaaaaaaaaaaaaaaaaaaaaaaaaaaaaaaaaaa

SEQ ID NO: 12670 - RNA, 4178 nt, Artificial Sequence
  SARS-CoV-2/Wuhan/WIV05/2019__EPI_ISL_402128 spike protein mRNA gc mod (1-1147)(I909C_Y1047C) WhcAg construct
aggagagucccgcagucggcguccagcggcucugcuuguucgugugugugucguugcaggccuuauucaagcuuaccauguucguguuucuggugcugcugccccugguguccagccagugugugaaccugaccaccagaacacagcugccuccagccuacaccaacagcuucaccagaggcguguacuaccccgacaagguguucagauccagcgugcugcacucuacccaggaccuguuccugccuuucuucagcaacgugaccugguuccacgccauccacguguccggcaccaauggcaccaagagauucgacaaccccgugcugcccuucaacgacgggguguacuuugccagcaccgagaaguccaacaucaucagaggcuggaucuucggcaccacacuggacagcaagacccagagccugcugaucgugaacaacgccaccaacguggucaucaaagugugcgaguuccaguucugcaacgaccccuuccugggcgucuacuaccacaagaacaacaagagcuggauggaaagcgaguuccggguguacagcagcgccaacaacugcaccuucgaguacgugucccagccuuuccugauggaccuggaaggcaagcagggcaacuucaagaaccugcgcgaguucguguucaagaacaucgacggcuacuucaaaaucuacagcaagcacaccccuaucaaccucgugcgggaucugccucagggcuucucugcucuggaaccccugguggaucugcccaucggcaucaacaucacccgguuucagacacugcuggcccugcacagaagcuaccugacaccuggcgauagcagcagcggauggacagcuggugccgccgcuuacuaugugggcuaccugcagccuagaaccuuccugcugaaguacaacgagaacggcaccaucaccgacgccguggauugugcucuggauccucugagcgagacaaagugcacccugaaguccuucaccguggaaaagggcaucuaccagaccagcaacuuccgggugcagcccaccgaauccaucgugcgguuccccaauaucaccaaucugugccccuucggcgagguguucaaugccaccagauucgccucuguguacgccuggaaccggaagcggaucagcaauugcguggccgacuacuccgugcuguacaacuccgccagcuucagcaccuucaagugcuacggcguguccccuaccaagcugaacgaccugugcuucacaaacguguacgccgacagcuucgugauccggggagaugaagugcggcagauugccccuggacagacaggcaagaucgccgacuacaacuacaagcugcccgacgacuucaccggcugugugauugccuggaacagcaacaaccuggacuccaaagucggcggcaacuacaauuaccuguaccggcuguuccggaaguccaaucugaagcccuucgagcgggacaucagcaccgaaaucuaucaggccggcagcaccccuugcaacggcguggaaggcuucaacugcuacuucccacugcaguccuacggcuuucagcccacaaauggcgugggcuaucagcccuacagagugguggugcugagcuucgaacugcugcaugcuccugccacagugugcggcccuaagaaaagcaccaaucucgugaagaacaaaugcgugaacuucaacuucaacggccugaccggcaccggcgugcugacagagagcaacaagaaguuccugccauuccagcaguuuggccgggauaucgccgauaccacagacgccguuagagauccccagacacuggaaauccuggacaucaccccaugcagcuucggcggagugucugugaucaccccuggcaccaacaccagcaaucagguggcagugcuguaccaggacgugaacuguaccgaagugcccguggccauucacgccgaucagcugacaccuacauggcggguguacuccaccggcagcaauguguuucagaccagagccggcugucugaucggagccgagcacgugaacaauagcuacgagugcgacauccccaucggcgcuggcaucugugccagcuaccagacacagacaaacagccccagacgggcuagaagcguggccagccagagcaucauugccuacacaaugucucugggcgccgagaacagcguggccuacuccaacaacucuaucgcuauccccaccaacuucaccaucagcgugaccaccgagauccugccuguguccaugaccaagaccagcguggacugcaccauguacaucugcggcgauuccaccgagugcuccaaccugcugcugcaguacggcagcuucugcacccagcugaauagagcccugacagggaucgccguggaacaggacaagaacacccaagagguguucgcccaagugaagcaaaucuacaagaccccuccuaucaaggacuucggcggcuucaauuucagccagauucugcccgauccuagcaagcccagcaagcggagcuucaucgaggaccugcuguucaacaaagugacacuggccgacgccggcuucaucaagcaguauggcgauugucugggcgacauugccgccagggaucugauuugcgcccagaaguuuaacggacugacagugcugccuccucugcugaccgaugagaugaucgcccaguacacaucugcccugcuggccggcacaaucacaagcggcuggacauuuggagcuggcgccgcucugcagauccccuuugcuaugcagauggccuaccgguucaacggcugcggagugacccagaaugugcuguacgagaaccagaagcugaucgccaaccaguucaacagcgccaucggcaagauccaggacagccugagcagcacagcaagcgcccugggaaagcugcaggacguggucaaccagaaugcccaggcacugaacacccuggucaagcagcuguccuccaacuucggcgccaucagcucugugcugaacgauauccugagcagacuggacaaggucgaggccgaggugcagaucgacagacugaucacaggcagacugcagagccuccagacauacgugacccagcagcugaucagagccgccgagauuagagccucugccaaucuggccgccaccaagaugucugagugugugcugggccagagcaagagaguggacuuuugcggcaagggcugucaccugaugagcuucccucagucugccccucacggcgugguguuucugcacgugacauaugugcccgcucaagagaagaauuucaccaccgcuccagccaucugccacgacggcaaagcccacuuuccuagagaaggcguguucguguccaacggcacccauugguucgugacacagcggaacuucuacgagccccagaucaucaccaccgacaacaccuucgugucuggcaacugcgacguugugaucggcauugugaacaauaccguguacgacccucugcagcccgagcuggacagcggaggcggaggaucugacaucgaccccuacaaagaguucggcagcagcuaccagcugcugaacuuccugccucuggacuucuuccccgaccugaacgcccugguggauacagccacagcucuguacgaggaagaacugaccggcagagagcacugcagcccucaccacacagccauuagacaggcccucgugugcugggacgagcugacaaaacugaucgccuggaugagcagcaacaucaccagcgagcaagugcggaccaucaucgugaaccacgugaacgauaccuggggccugaaagugcggcagagccugugguuucaccugagcugucugaccuucggccagcacaccgugcaagaguuucugguguccuucggcguguggaucagaaccccugcuccauacagaccuccaaacgcucccauccugagcacccugccugagcacacagugaucuguugaggacuagucccuguucccagagcccacuuuuuuuucuuuuuuugaaauaaaauagccugucuuucagaucucaaaggcucuuuucagagccaccaaaaaaaaaaaaaaaaaaaaaaaaaaaaaaaaaaaaaaaaaaaaaaaaaaaaaaaaaaaaaaaaaaaaaaaaaaaaaaaaaaaaaaaaaaaaaaaaaaaaa

SEQ ID NO: 12671 - RNA, 4178 nt, Artificial Sequence
  SARS-CoV-2/Wuhan/WIV05/2019__EPI_ISL_402128 spike protein mRNA gc mod (1-1147)(Q965C_S1003C) WhcAg construct
aggagagucccgcagucggcguccagcggcucugcuuguucgugugugugucguugcaggccuuauucaagcuuaccauguucguguuucuggugcugcugccccugguguccagccagugugugaaccugaccaccagaacacagcugccuccagccuacaccaacagcuucaccagaggcguguacuaccccgacaagguguucagauccagcgugcugcacucuacccaggaccuguuccugccuuucuucagcaacgugaccugguuccacgccauccacguguccggcaccaauggcaccaagagauucgacaaccccgugcugcccuucaacgacgggguguacuuugccagcaccgagaaguccaacaucaucagaggcuggaucuucggcaccacacuggacagcaagacccagagccugcugaucgugaacaacgccaccaacguggucaucaaagugugcgaguuccaguucugcaacgaccccuuccugggcgucuacuaccacaagaacaacaagagcuggauggaaagcgaguuccggguguacagcagcgccaacaacugcaccuucgaguacgugucccagccuuuccugauggaccuggaaggcaagcagggcaacuucaagaaccugcgcgaguucguguucaagaacaucgacggcuacuucaaaaucuacagcaagcacaccccuaucaaccucgugcgggaucugccucagggcuucucugcucuggaaccccugguggaucugcccaucggcaucaacaucacccgguuucagacacugcuggcccugcacagaagcuaccugacaccuggcgauagcagcagcggauggacagcuggugccgccgcuuacuaugugggcuaccugcagccuagaaccuuccugcugaaguacaacgagaacggcaccaucaccgacgccguggauugugcucuggauccucugagcgagacaaagugcacccugaaguccuucaccguggaaaagggcaucuaccagaccagcaacuuccgggugcagcccaccgaauccaucgugcgguuccccaauaucaccaaucugugccccuucggcgagguguucaaugccaccagauucgccucuguguacgccuggaaccggaagcggaucagcaauugcguggccgacuacuccgugcuguacaacuccgccagcuucagcaccuucaagugcuacggcguguccccuaccaagcugaacgaccugugcuucacaaacguguacgccgacagcuucgugauccggggagaugaagugcggcagauugccccuggacagacaggcaagaucgccgacuacaacuacaagcugcccgacgacuucaccggcugugugauugccuggaacagcaacaaccuggacuccaaagucggcggcaacuacaauuaccuguaccggcuguuccggaaguccaaucugaagcccuucgagcgggacaucagcaccgaaaucuaucaggccggcagcaccccuugcaacggcguggaaggcuucaacugcuacuucccacugcaguccuacggcuuucagcccacaaauggcgugggcuaucagcccuacagagugguggugcugagcuucgaacugcugcaugcuccugccacagugugcggcccuaagaaaagcaccaaucucgugaagaacaaaugcgugaacuucaacuucaacggccugaccggcaccggcgugcugacagagagcaacaagaaguuccugccauuccagcaguuuggccgggauaucgccgauaccacagacgccguuagagauccccagacacuggaaauccuggacaucaccccaugcagcuucggcggagugucugugaucaccccuggcaccaacaccagcaaucagguggcagugcuguaccaggacgugaacuguaccgaagugcccguggccauucacgccgaucagcugacaccuacauggcggguguacuccaccggcagcaauguguuucagaccagagccggcugucugaucggagccgagcacgugaacaauagcuacgagugcgacauccccaucggcgcuggcaucugugccagcuaccagacacagacaaacagccccagacgggcuagaagcguggccagccagagcaucauugccuacacaaugucucugggcgccgagaacagcguggccuacuccaacaacucuaucgcuauccccaccaacuucaccaucagcgugaccaccgagauccugccuguguccaugaccaagaccagcguggacugcaccauguacaucugcggcgauuccaccgagugcuccaaccugcugcugcaguacggcagcuucugcacccagcugaauagagcccugacagggaucgccguggaacaggacaagaacacccaagagguguucgcccaagugaagcaaaucuacaagaccccuccuaucaaggacuucggcggcuucaauuucagccagauucugcccgauccuagcaagcccagcaagcggagcuucaucgaggaccugcuguucaacaaagugacacuggccgacgccggcuucaucaagcaguauggcgauugucugggcgacauugccgccagggaucugauuugcgcccagaaguuuaacggacugacagugcugccuccucugcugaccgaugagaugaucgcccaguacacaucugcccugcuggccggcacaaucacaagcggcuggacauuuggagcuggcgccgcucugcagauccccuuugcuaugcagauggccuaccgguucaacggcaucggagugacccagaaugugcuguacgagaaccagaagcugaucgccaaccaguucaacagcgccaucggcaagauccaggacagccugagcagcacagcaagcgcccugggaaagcugcaggacguggucaaccagaaugcccaggcacugaacacccuggucaagugccuguccuccaacuucggcgccaucagcucugugcugaacgauauccugagcagacuggacaaggucgaggccgaggugcagaucgacagacugaucacaggcagacugcagugucuccagacauacgugacccagcagcugaucagagccgccgagauuagagccucugccaaucuggccgccaccaagaugucugagugugugcugggccagagcaagagaguggacuuuugcggcaagggcuaccaccugaugagcuucccucagucugccccucacggcgugguguuucugcacgugacauaugugcccgcucaagagaagaauuucaccaccgcuccagccaucugccacgacggcaaagcccacuuuccuagagaaggcguguucguguccaacggcacccauugguucgugacacagcggaacuucuacgagccccagaucaucaccaccgacaacaccuucgugucuggcaacugcgacguugugaucggcauugugaacaauaccguguacgacccucugcagcccgagcuggacagcggaggcggaggaucugacaucgaccccuacaaagaguucggcagcagcuaccagcugcugaacuuccugccucuggacuucuuccccgaccugaacgcccugguggauacagccacagcucuguacgaggaagaacugaccggcagagagcacugcagcccucaccacacagccauuagacaggcccucgugugcugggacgagcugacaaaacugaucgccuggaugagcagcaacaucaccagcgagcaagugcggaccaucaucgugaaccacgugaacgauaccuggggccugaaagugcggcagagccugugguuucaccugagcugucugaccuucggccagcacaccgugcaagaguuucugguguccuucggcguguggaucagaaccccugcuccauacagaccuccaaacgcucccauccugagcacccugccugagcacacagugaucuguugaggacuagucccuguucccagagcccacuuuuuuuucuuuuuuugaaauaaaauagccugucuuucagaucucaaaggcucuuuucagagccaccaaaaaaaaaaaaaaaaaaaaaaaaaaaaaaaaaaaaaaaaaaaaaaaaaaaaaaaaaaaaaaaaaaaaaaaaaaaaaaaaaaaaaaaaaaaaaaaaaaaaa

SEQ ID NO: 12672 - RNA, 4178 nt, Artificial Sequence
  SARS-CoV-2/Wuhan/WIV05/2019__EPI_ISL_402128 spike protein mRNA gc mod (1-1147)(F970C_G999C) WhcAg construct
aggagagucccgcagucggcguccagcggcucugcuuguucgugugugugucguugcaggccuuauucaagcuuaccauguucguguuucuggugcugcugccccugguguccagccagugugugaaccugaccaccagaacacagcugccuccagccuacaccaacagcuucaccagaggcguguacuaccccgacaagguguucagauccagcgugcugcacucuacccaggaccuguuccugccuuucuucagcaacgugaccugguuccacgccauccacguguccggcaccaauggcaccaagagauucgacaaccccgugcugcccuucaacgacgggguguacuuugccagcaccgagaaguccaacaucaucagaggcuggaucuucggcaccacacuggacagcaagacccagagccugcugaucgugaacaacgccaccaacguggucaucaaagugugcgaguuccaguucugcaacgaccccuuccugggcgucuacuaccacaagaacaacaagagcuggauggaaagcgaguuccggguguacagcagcgccaacaacugcaccuucgaguacgugucccagccuuuccugauggaccuggaaggcaagcagggcaacuucaagaaccugcgcgaguucguguucaagaacaucgacggcuacuucaaaaucuacagcaagcacaccccuaucaaccucgugcgggaucugccucagggcuucucugcucuggaaccccugguggaucugcccaucggcaucaacaucacccgguuucagacacugcuggcccugcacagaagcuaccugacaccuggcgauagcagcagcggauggacagcuggugccgccgcuuacuaugugggcuaccugcagccuagaaccuuccugcugaaguacaacgagaacggcaccaucaccgacgccguggauugugcucuggauccucugagcgagacaaagugcacccugaaguccuucaccguggaaaagggcaucuaccagaccagcaacuuccgggugcagcccaccgaauccaucgugcgguuccccaauaucaccaaucugugccccuucggcgagguguucaaugccaccagauucgccucuguguacgccuggaaccggaagcggaucagcaauugcguggccgacuacuccgugcuguacaacuccgccagcuucagcaccuucaagugcuacggcguguccccuaccaagcugaacgaccugugcuucacaaacguguacgccgacagcuucgugauccggggagaugaagugcggcagauugccccuggacagacaggcaagaucgccgacuacaacuacaagcugcccgacgacuucaccggcugugugauugccuggaacagcaacaaccuggacuccaaagucggcggcaacuacaauuaccuguaccggcuguuccggaaguccaaucugaagcccuucgagcgggacaucagcaccgaaaucuaucaggccggcagcaccccuugcaacggcguggaaggcuucaacugcuacuucccacugcaguccuacggcuuucagcccacaaauggcgugggcuaucagcccuacagagugguggugcugagcuucgaacugcugcaugcuccugccacagugugcggcccuaagaaaagcaccaaucucgugaagaacaaaugcgugaacuucaacuucaacggccugaccggcaccggcgugcugacagagagcaacaagaaguuccugccauuccagcaguuuggccgggauaucgccgauaccacagacgccguuagagauccccagacacuggaaauccuggacaucaccccaugcagcuucggcggagugucugugaucaccccuggcaccaacaccagcaaucagguggcagugcuguaccaggacgugaacuguaccgaagugcccguggccauucacgccgaucagcugacaccuacauggcggguguacuccaccggcagcaauguguuucagaccagagccggcugucugaucggagccgagcacgugaacaauagcuacgagugcgacauccccaucggcgcuggcaucugugccagcuaccagacacagacaaacagccccagacgggcuagaagcguggccagccagagcaucauugccuacacaaugucucugggcgccgagaacagcguggccuacuccaacaacucuaucgcuauccccaccaacuucaccaucagcgugaccaccgagauccugccuguguccaugaccaagaccagcguggacugcaccauguacaucugcggcgauuccaccgagugcuccaaccugcugcugcaguacggcagcuucugcacccagcugaauagagcccugacagggaucgccguggaacaggacaagaacacccaagagguguucgcccaagugaagcaaaucuacaagaccccuccuaucaaggacuucggcggcuucaauuucagccagauucugcccgauccuagcaagcccagcaagcggagcuucaucgaggaccugcuguucaacaaagugacacuggccgacgccggcuucaucaagcaguauggcgauugucugggcgacauugccgccagggaucugauuugcgcccagaaguuuaacggacugacagugcugccuccucugcugaccgaugagaugaucgcccaguacacaucugcccugcuggccggcacaaucacaagcggcuggacauuuggagcuggcgccgcucugcagauccccuuugcuaugcagauggccuaccgguucaacggcaucggagugacccagaaugugcuguacgagaaccagaagcugaucgccaaccaguucaacagcgccaucggcaagauccaggacagccugagcagcacagcaagcgcccugggaaagcugcaggacguggucaaccagaaugcccaggcacugaacacccuggucaagcagcuguccuccaacugcggcgccaucagcucugugcugaacgauauccugagcagacuggacaaggucgaggccgaggugcagaucgacagacugaucacauguagacugcagagccuccagacauacgugacccagcagcugaucagagccgccgagauuagagccucugccaaucuggccgccaccaagaugucugagugugugcugggccagagcaagagaguggacuuuugcggcaagggcuaccaccugaugagcuucccucagucugccccucacggcgugguguuucugcacgugacauaugugcccgcucaagagaagaauuucaccaccgcuccagccaucugccacgacggcaaagcccacuuuccuagagaaggcguguucguguccaacggcacccauugguucgugacacagcggaacuucuacgagccccagaucaucaccaccgacaacaccuucgugucuggcaacugcgacguugugaucggcauugugaacaauaccguguacgacccucugcagcccgagcuggacagcggaggcggaggaucugacaucgaccccuacaaagaguucggcagcagcuaccagcugcugaacuuccugccucuggacuucuuccccgaccugaacgcccugguggauacagccacagcucuguacgaggaagaacugaccggcagagagcacugcagcccucaccacacagccauuagacaggcccucgugugcugggacgagcugacaaaacugaucgccuggaugagcagcaacaucaccagcgagcaagugcggaccaucaucgugaaccacgugaacgauaccuggggccugaaagugcggcagagccugugguuucaccugagcugucugaccuucggccagcacaccgugcaagaguuucugguguccuucggcguguggaucagaaccccugcuccauacagaccuccaaacgcucccauccugagcacccugccugagcacacagugaucuguugaggacuagucccuguucccagagcccacuuuuuuuucuuuuuuugaaauaaaauagccugucuuucagaucucaaaggcucuuuucagagccaccaaaaaaaaaaaaaaaaaaaaaaaaaaaaaaaaaaaaaaaaaaaaaaaaaaaaaaaaaaaaaaaaaaaaaaaaaaaaaaaaaaaaaaaaaaaaaaaaaaaaa

SEQ ID NO: 12673 - RNA, 4178 nt, Artificial Sequence
  SARS-CoV-2/Wuhan/WIV05/2019__EPI_ISL_402128 spike protein mRNA gc mod (1-1147)(A972C_R995C) WhcAg construct
aggagagucccgcagucggcguccagcggcucugcuuguucgugugugugucguugcaggccuuauucaagcuuaccauguucguguuucuggugcugcugccccugguguccagccagugugugaaccugaccaccagaacacagcugccuccagccuacaccaacagcuucaccagaggcguguacuaccccgacaagguguucagauccagcgugcugcacucuacccaggaccuguuccugccuuucuucagcaacgugaccugguuccacgccauccacguguccggcaccaauggcaccaagagauucgacaaccccgugcugcccuucaacgacgggguguacuuugccagcaccgagaaguccaacaucaucagaggcuggaucuucggcaccacacuggacagcaagacccagagccugcugaucgugaacaacgccaccaacguggucaucaaagugugcgaguuccaguucugcaacgaccccuuccugggcgucuacuaccacaagaacaacaagagcuggauggaaagcgaguuccggguguacagcagcgccaacaacugcaccuucgaguacgugucccagccuuuccugauggaccuggaaggcaagcagggcaacuucaagaaccugcgcgaguucguguucaagaacaucgacggcuacuucaaaaucuacagcaagcacaccccuaucaaccucgugcgggaucugccucagggcuucucugcucuggaaccccugguggaucugcccaucggcaucaacaucacccgguuucagacacugcuggcccugcacagaagcuaccugacaccuggcgauagcagcagcggauggacagcuggugccgccgcuuacuaugugggcuaccugcagccuagaaccuuccugcugaaguacaacgagaacggcaccaucaccgacgccguggauugugcucuggauccucugagcgagacaaagugcacccugaaguccuucaccguggaaaagggcaucuaccagaccagcaacuuccgggugcagcccaccgaauccaucgugcgguuccccaauaucaccaaucugugccccuucggcgagguguucaaugccaccagauucgccucuguguacgccuggaaccggaagcggaucagcaauugcguggccgacuacuccgugcuguacaacuccgccagcuucagcaccuucaagugcuacggcguguccccuaccaagcugaacgaccugugcuucacaaacguguacgccgacagcuucgugauccggggagaugaagugcggcagauugccccuggacagacaggcaagaucgccgacuacaacuacaagcugcccgacgacuucaccggcugugugauugccuggaacagcaacaaccuggacuccaaagucggcggcaacuacaauuaccuguaccggcuguuccggaaguccaaucugaagcccuucgagcgggacaucagcaccgaaaucuaucaggccggcagcaccccuugcaacggcguggaaggcuucaacugcuacuucccacugcaguccuacggcuuucagcccacaaauggcgugggcuaucagcccuacagagugguggugcugagcuucgaacugcugcaugcuccugccacagugugcggcccuaagaaaagcaccaaucucgugaagaacaaaugcgugaacuucaacuucaacggccugaccggcaccggcgugcugacagagagcaacaagaaguuccugccauuccagcaguuuggccgggauaucgccgauaccacagacgccguuagagauccccagacacuggaaauccuggacaucaccccaugcagcuucggcggagugucugugaucaccccuggcaccaacaccagcaaucagguggcagugcuguaccaggacgugaacuguaccgaagugcccguggccauucacgccgaucagcugacaccuacauggcggguguacuccaccggcagcaauguguuucagaccagagccggcugucugaucggagccgagcacgugaacaauagcuacgagugcgacauccccaucggcgcuggcaucugugccagcuaccagacacagacaaacagccccagacgggcuagaagcguggccagccagagcaucauugccuacacaaugucucugggcgccgagaacagcguggccuacuccaacaacucuaucgcuauccccaccaacuucaccaucagcgugaccaccgagauccugccuguguccaugaccaagaccagcguggacugcaccauguacaucugcggcgauuccaccgagugcuccaaccugcugcugcaguacggcagcuucugcacccagcugaauagagcccugacagggaucgccguggaacaggacaagaacacccaagagguguucgcccaagugaagcaaaucuacaagaccccuccuaucaaggacuucggcggcuucaauuucagccagauucugcccgauccuagcaagcccagcaagcggagcuucaucgaggaccugcuguucaacaaagugacacuggccgacgccggcuucaucaagcaguauggcgauugucugggcgacauugccgccagggaucugauuugcgcccagaaguuuaacggacugacagugcugccuccucugcugaccgaugagaugaucgcccaguacacaucugcccugcuggccggcacaaucacaagcggcuggacauuuggagcuggcgccgcucugcagauccccuuugcuaugcagauggccuaccgguucaacggcaucggagugacccagaaugugcuguacgagaaccagaagcugaucgccaaccaguucaacagcgccaucggcaagauccaggacagccugagcagcacagcaagcgcccugggaaagcugcaggacguggucaaccagaaugcccaggcacugaacacccuggucaagcagcuguccuccaacuucggcugcaucagcucugugcugaacgauauccugagcagacuggacaaggucgaggccgaggugcagaucgacugucugaucacaggcagacugcagagccuccagacauacgugacccagcagcugaucagagccgccgagauuagagccucugccaaucuggccgccaccaagaugucugagugugugcugggccagagcaagagaguggacuuuugcggcaagggcuaccaccugaugagcuucccucagucugccccucacggcgugguguuucugcacgugacauaugugcccgcucaagagaagaauuucaccaccgcuccagccaucugccacgacggcaaagcccacuuuccuagagaaggcguguucguguccaacggcacccauugguucgugacacagcggaacuucuacgagccccagaucaucaccaccgacaacaccuucgugucuggcaacugcgacguugugaucggcauugugaacaauaccguguacgacccucugcagcccgagcuggacagcggaggcggaggaucugacaucgaccccuacaaagaguucggcagcagcuaccagcugcugaacuuccugccucuggacuucuuccccgaccugaacgcccugguggauacagccacagcucuguacgaggaagaacugaccggcagagagcacugcagcccucaccacacagccauuagacaggcccucgugugcugggacgagcugacaaaacugaucgccuggaugagcagcaacaucaccagcgagcaagugcggaccaucaucgugaaccacgugaacgauaccuggggccugaaagugcggcagagccugugguuucaccugagcugucugaccuucggccagcacaccgugcaagaguuucugguguccuucggcguguggaucagaaccccugcuccauacagaccuccaaacgcucccauccugagcacccugccugagcacacagugaucuguugaggacuagucccuguucccagagcccacuuuuuuuucuuuuuuugaaauaaaauagccugucuuucagaucucaaaggcucuuuucagagccaccaaaaaaaaaaaaaaaaaaaaaaaaaaaaaaaaaaaaaaaaaaaaaaaaaaaaaaaaaaaaaaaaaaaaaaaaaaaaaaaaaaaaaaaaaaaaaaaaaaaaa

SEQ ID NO: 12674 - RNA, 4178 nt, Artificial Sequence
  SARS-CoV-2/Wuhan/WIV05/2019__EPI_ISL_402128 spike protein mRNA gc mod (1-1147)(A890C_V1040C) WhcAg construct
aggagagucccgcagucggcguccagcggcucugcuuguucgugugugugucguugcaggccuuauucaagcuuaccauguucguguuucuggugcugcugccccugguguccagccagugugugaaccugaccaccagaacacagcugccuccagccuacaccaacagcuucaccagaggcguguacuaccccgacaagguguucagauccagcgugcugcacucuacccaggaccuguuccugccuuucuucagcaacgugaccugguuccacgccauccacguguccggcaccaauggcaccaagagauucgacaaccccgugcugcccuucaacgacgggguguacuuugccagcaccgagaaguccaacaucaucagaggcuggaucuucggcaccacacuggacagcaagacccagagccugcugaucgugaacaacgccaccaacguggucaucaaagugugcgaguuccaguucugcaacgaccccuuccugggcgucuacuaccacaagaacaacaagagcuggauggaaagcgaguuccggguguacagcagcgccaacaacugcaccuucgaguacgugucccagccuuuccugauggaccuggaaggcaagcagggcaacuucaagaaccugcgcgaguucguguucaagaacaucgacggcuacuucaaaaucuacagcaagcacaccccuaucaaccucgugcgggaucugccucagggcuucucugcucuggaaccccugguggaucugcccaucggcaucaacaucacccgguuucagacacugcuggcccugcacagaagcuaccugacaccuggcgauagcagcagcggauggacagcuggugccgccgcuuacuaugugggcuaccugcagccuagaaccuuccugcugaaguacaacgagaacggcaccaucaccgacgccguggauugugcucuggauccucugagcgagacaaagugcacccugaaguccuucaccguggaaaagggcaucuaccagaccagcaacuuccgggugcagcccaccgaauccaucgugcgguuccccaauaucaccaaucugugccccuucggcgagguguucaaugccaccagauucgccucuguguacgccuggaaccggaagcggaucagcaauugcguggccgacuacuccgugcuguacaacuccgccagcuucagcaccuucaagugcuacggcguguccccuaccaagcugaacgaccugugcuucacaaacguguacgccgacagcuucgugauccggggagaugaagugcggcagauugccccuggacagacaggcaagaucgccgacuacaacuacaagcugcccgacgacuucaccggcugugugauugccuggaacagcaacaaccuggacuccaaagucggcggcaacuacaauuaccuguaccggcuguuccggaaguccaaucugaagcccuucgagcgggacaucagcaccgaaaucuaucaggccggcagcaccccuugcaacggcguggaaggcuucaacugcuacuucccacugcaguccuacggcuuucagcccacaaauggcgugggcuaucagcccuacagagugguggugcugagcuucgaacugcugcaugcuccugccacagugugcggcccuaagaaaagcaccaaucucgugaagaacaaaugcgugaacuucaacuucaacggccugaccggcaccggcgugcugacagagagcaacaagaaguuccugccauuccagcaguuuggccgggauaucgccgauaccacagacgccguuagagauccccagacacuggaaauccuggacaucaccccaugcagcuucggcggagugucugugaucaccccuggcaccaacaccagcaaucagguggcagugcuguaccaggacgugaacuguaccgaagugcccguggccauucacgccgaucagcugacaccuacauggcggguguacuccaccggcagcaauguguuucagaccagagccggcugucugaucggagccgagcacgugaacaauagcuacgagugcgacauccccaucggcgcuggcaucugugccagcuaccagacacagacaaacagccccagacgggcuagaagcguggccagccagagcaucauugccuacacaaugucucugggcgccgagaacagcguggccuacuccaacaacucuaucgcuauccccaccaacuucaccaucagcgugaccaccgagauccugccuguguccaugaccaagaccagcguggacugcaccauguacaucugcggcgauuccaccgagugcuccaaccugcugcugcaguacggcagcuucugcacccagcugaauagagcccugacagggaucgccguggaacaggacaagaacacccaagagguguucgcccaagugaagcaaaucuacaagaccccuccuaucaaggacuucggcggcuucaauuucagccagauucugcccgauccuagcaagcccagcaagcggagcuucaucgaggaccugcuguucaacaaagugacacuggccgacgccggcuucaucaagcaguauggcgauugucugggcgacauugccgccagggaucugauuugcgcccagaaguuuaacggacugacagugcugccuccucugcugaccgaugagaugaucgcccaguacacaucugcccugcuggccggcacaaucacaagcggcuggacauuuggaugcggcgccgcucugcagauccccuuugcuaugcagauggccuaccgguucaacggcaucggagugacccagaaugugcuguacgagaaccagaagcugaucgccaaccaguucaacagcgccaucggcaagauccaggacagccugagcagcacagcaagcgcccugggaaagcugcaggacguggucaaccagaaugcccaggcacugaacacccuggucaagcagcuguccuccaacuucggcgccaucagcucugugcugaacgauauccugagcagacuggacaaggucgaggccgaggugcagaucgacagacugaucacaggcagacugcagagccuccagacauacgugacccagcagcugaucagagccgccgagauuagagccucugccaaucuggccgccaccaagaugucugagugugugcugggccagagcaagagaugugacuuuugcggcaagggcuaccaccugaugagcuucccucagucugccccucacggcgugguguuucugcacgugacauaugugcccgcucaagagaagaauuucaccaccgcuccagccaucugccacgacggcaaagcccacuuuccuagagaaggcguguucguguccaacggcacccauugguucgugacacagcggaacuucuacgagccccagaucaucaccaccgacaacaccuucgugucuggcaacugcgacguugugaucggcauugugaacaauaccguguacgacccucugcagcccgagcuggacagcggaggcggaggaucugacaucgaccccuacaaagaguucggcagcagcuaccagcugcugaacuuccugccucuggacuucuuccccgaccugaacgcccugguggauacagccacagcucuguacgaggaagaacugaccggcagagagcacugcagcccucaccacacagccauuagacaggcccucgugugcugggacgagcugacaaaacugaucgccuggaugagcagcaacaucaccagcgagcaagugcggaccaucaucgugaaccacgugaacgauaccuggggccugaaagugcggcagagccugugguuucaccugagcugucugaccuucggccagcacaccgugcaagaguuucugguguccuucggcguguggaucagaaccccugcuccauacagaccuccaaacgcucccauccugagcacccugccugagcacacagugaucuguugaggacuagucccuguucccagagcccacuuuuuuuucuuuuuuugaaauaaaauagccugucuuucagaucucaaaggcucuuuucagagccaccaaaaaaaaaaaaaaaaaaaaaaaaaaaaaaaaaaaaaaaaaaaaaaaaaaaaaaaaaaaaaaaaaaaaaaaaaaaaaaaaaaaaaaaaaaaaaaaaaaaaa

SEQ ID NO: 12675 - RNA, 4178 nt, Artificial Sequence
  SARS-CoV-2/Wuhan/WIV05/2019__EPI_ISL_402128 spike protein mRNA gc mod (1-1147)(T874C_S1055C) WhcAg construct
aggagagucccgcagucggcguccagcggcucugcuuguucgugugugugucguugcaggccuuauucaagcuuaccauguucguguuucuggugcugcugccccugguguccagccagugugugaaccugaccaccagaacacagcugccuccagccuacaccaacagcuucaccagaggcguguacuaccccgacaagguguucagauccagcgugcugcacucuacccaggaccuguuccugccuuucuucagcaacgugaccugguuccacgccauccacguguccggcaccaauggcaccaagagauucgacaaccccgugcugcccuucaacgacgggguguacuuugccagcaccgagaaguccaacaucaucagaggcuggaucuucggcaccacacuggacagcaagacccagagccugcugaucgugaacaacgccaccaacguggucaucaaagugugcgaguuccaguucugcaacgaccccuuccugggcgucuacuaccacaagaacaacaagagcuggauggaaagcgaguuccggguguacagcagcgccaacaacugcaccuucgaguacgugucccagccuuuccugauggaccuggaaggcaagcagggcaacuucaagaaccugcgcgaguucguguucaagaacaucgacggcuacuucaaaaucuacagcaagcacaccccuaucaaccucgugcgggaucugccucagggcuucucugcucuggaaccccugguggaucugcccaucggcaucaacaucacccgguuucagacacugcuggcccugcacagaagcuaccugacaccuggcgauagcagcagcggauggacagcuggugccgccgcuuacuaugugggcuaccugcagccuagaaccuuccugcugaaguacaacgagaacggcaccaucaccgacgccguggauugugcucuggauccucugagcgagacaaagugcacccugaaguccuucaccguggaaaagggcaucuaccagaccagcaacuuccgggugcagcccaccgaauccaucgugcgguuccccaauaucaccaaucugugccccuucggcgagguguucaaugccaccagauucgccucuguguacgccuggaaccggaagcggaucagcaauugcguggccgacuacuccgugcuguacaacuccgccagcuucagcaccuucaagugcuacggcguguccccuaccaagcugaacgaccugugcuucacaaacguguacgccgacagcuucgugauccggggagaugaagugcggcagauugccccuggacagacaggcaagaucgccgacuacaacuacaagcugcccgacgacuucaccggcugugugauugccuggaacagcaacaaccuggacuccaaagucggcggcaacuacaauuaccuguaccggcuguuccggaaguccaaucugaagcccuucgagcgggacaucagcaccgaaaucuaucaggccggcagcaccccuugcaacggcguggaaggcuucaacugcuacuucccacugcaguccuacggcuuucagcccacaaauggcgugggcuaucagcccuacagagugguggugcugagcuucgaacugcugcaugcuccugccacagugugcggcccuaagaaaagcaccaaucucgugaagaacaaaugcgugaacuucaacuucaacggccugaccggcaccggcgugcugacagagagcaacaagaaguuccugccauuccagcaguuuggccgggauaucgccgauaccacagacgccguuagagauccccagacacuggaaauccuggacaucaccccaugcagcuucggcggagugucugugaucaccccuggcaccaacaccagcaaucagguggcagugcuguaccaggacgugaacuguaccgaagugcccguggccauucacgccgaucagcugacaccuacauggcggguguacuccaccggcagcaauguguuucagaccagagccggcugucugaucggagccgagcacgugaacaauagcuacgagugcgacauccccaucggcgcuggcaucugugccagcuaccagacacagacaaacagccccagacgggcuagaagcguggccagccagagcaucauugccuacacaaugucucugggcgccgagaacagcguggccuacuccaacaacucuaucgcuauccccaccaacuucaccaucagcgugaccaccgagauccugccuguguccaugaccaagaccagcguggacugcaccauguacaucugcggcgauuccaccgagugcuccaaccugcugcugcaguacggcagcuucugcacccagcugaauagagcccugacagggaucgccguggaacaggacaagaacacccaagagguguucgcccaagugaagcaaaucuacaagaccccuccuaucaaggacuucggcggcuucaauuucagccagauucugcccgauccuagcaagcccagcaagcggagcuucaucgaggaccugcuguucaacaaagugacacuggccgacgccggcuucaucaagcaguauggcgauugucugggcgacauugccgccagggaucugauuugcgcccagaaguuuaacggacugacagugcugccuccucugcugaccgaugagaugaucgcccaguacugcucugcccugcuggccggcacaaucacaagcggcuggacauuuggagcuggcgccgcucugcagauccccuuugcuaugcagauggccuaccgguucaacggcaucggagugacccagaaugugcuguacgagaaccagaagcugaucgccaaccaguucaacagcgccaucggcaagauccaggacagccugagcagcacagcaagcgcccugggaaagcugcaggacguggucaaccagaaugcccaggcacugaacacccuggucaagcagcuguccuccaacuucggcgccaucagcucugugcugaacgauauccugagcagacuggacaaggucgaggccgaggugcagaucgacagacugaucacaggcagacugcagagccuccagacauacgugacccagcagcugaucagagccgccgagauuagagccucugccaaucuggccgccaccaagaugucugagugugugcugggccagagcaagagaguggacuuuugcggcaagggcuaccaccugaugagcuucccucagugcgccccucacggcgugguguuucugcacgugacauaugugcccgcucaagagaagaauuucaccaccgcuccagccaucugccacgacggcaaagcccacuuuccuagagaaggcguguucguguccaacggcacccauugguucgugacacagcggaacuucuacgagccccagaucaucaccaccgacaacaccuucgugucuggcaacugcgacguugugaucggcauugugaacaauaccguguacgacccucugcagcccgagcuggacagcggaggcggaggaucugacaucgaccccuacaaagaguucggcagcagcuaccagcugcugaacuuccugccucuggacuucuuccccgaccugaacgcccugguggauacagccacagcucuguacgaggaagaacugaccggcagagagcacugcagcccucaccacacagccauuagacaggcccucgugugcugggacgagcugacaaaacugaucgccuggaugagcagcaacaucaccagcgagcaagugcggaccaucaucgugaaccacgugaacgauaccuggggccugaaagugcggcagagccugugguuucaccugagcugucugaccuucggccagcacaccgugcaagaguuucugguguccuucggcguguggaucagaaccccugcuccauacagaccuccaaacgcucccauccugagcacccugccugagcacacagugaucuguugaggacuagucccuguucccagagcccacuuuuuuuucuuuuuuugaaauaaaauagccugucuuucagaucucaaaggcucuuuucagagccaccaaaaaaaaaaaaaaaaaaaaaaaaaaaaaaaaaaaaaaaaaaaaaaaaaaaaaaaaaaaaaaaaaaaaaaaaaaaaaaaaaaaaaaaaaaaaaaaaaaaaa

SEQ ID NO: 12676 - RNA, 4039 nt, Artificial Sequence
  SARS-CoV-2/Wuhan/WIV05/2019__EPI_ISL_402128 spike protein mRNA wt (1-1273)
aggagaaagcuuaccauguuuguuuuucuuguuuuauugccacuagucucuagucaguguguuaaucuuacaaccagaacucaauuacccccugcauacacuaauucuuucacacgugguguuuauuacccugacaaaguuuucagauccucaguuuuacauucaacucaggacuuguucuuaccuuucuuuuccaauguuacuugguuccaugcuauacaugucucugggaccaaugguacuaagagguuugauaacccuguccuaccauuuaaugaugguguuuauuuugcuuccacugagaagucuaacauaauaagaggcuggauuuuugguacuacuuuagauucgaagacccagucccuacuuauuguuaauaacgcuacuaauguuguuauuaaagucugugaauuucaauuuuguaaugauccauuuuuggguguuuauuaccacaaaaacaacaaaaguuggauggaaagugaguucagaguuuauucuagugcgaauaauugcacuuuugaauaugucucucagccuuuucuuauggaccuugaaggaaaacaggguaauuucaaaaaucuuagggaauuuguguuuaagaauauugaugguuauuuuaaaauauauucuaagcacacgccuauuaauuuagugcgugaucucccucaggguuuuucggcuuuagaaccauugguagauuugccaauagguauuaacaucacuagguuucaaacuuuacuugcuuuacauagaaguuauuugacuccuggugauucuucuucagguuggacagcuggugcugcagcuuauuauguggguuaucuucaaccuaggacuuuucuauuaaaauauaaugaaaauggaaccauuacagaugcuguagacugugcacuugacccucucucagaaacaaaguguacguugaaauccuucacuguagaaaaaggaaucuaucaaacuucuaacuuuagaguccaaccaacagaaucuauuguuagauuuccuaauauuacaaacuugugcccuuuuggugaaguuuuuaacgccaccagauuugcaucuguuuaugcuuggaacaggaagagaaucagcaacuguguugcugauuauucuguccuauauaauuccgcaucauuuuccacuuuuaaguguuauggagugucuccuacuaaauuaaaugaucucugcuuuacuaaugucuaugcagauucauuuguaauuagaggugaugaagucagacaaaucgcuccagggcaaacuggaaagauugcugauuauaauuauaaauuaccagaugauuuuacaggcugcguuauagcuuggaauucuaacaaucuugauucuaagguuggugguaauuauaauuaccuguauagauuguuuaggaagucuaaucucaaaccuuuugagagagauauuucaacugaaaucuaucaggccgguagcacaccuuguaaugguguugaagguuuuaauuguuacuuuccuuuacaaucauaugguuuccaacccacuaaugguguugguuaccaaccauacagaguaguaguacuuucuuuugaacuucuacaugcaccagcaacuguuuguggaccuaaaaagucuacuaauuugguuaaaaacaaaugugucaauuucaacuucaaugguuuaacaggcacagguguucuuacugagucuaacaaaaaguuucugccuuuccaacaauuuggcagagacauugcugacacuacugaugcuguccgugauccacagacacuugagauucuugacauuacaccauguucuuuugguggugucaguguuauaacaccaggaacaaauacuucuaaccagguugcuguucuuuaucaggauguuaacugcacagaagucccuguugcuauucaugcagaucaacuuacuccuacuuggcguguuuauucuacagguucuaauguuuuucaaacacgugcaggcuguuuaauaggggcugaacaugucaacaacucauaugagugugacauacccauuggugcagguauaugcgcuaguuaucagacucagacuaauucuccucggcgggcacguaguguagcuagucaauccaucauugccuacacuaugucacuuggugcagaaaauucaguugcuuacucuaauaacucuauugccauacccacaaauuuuacuauuaguguuaccacagaaauucuaccagugucuaugaccaagacaucaguagauuguacaauguacauuuguggugauucaacugaaugcagcaaucuuuuguugcaauauggcaguuuuuguacacaauuaaaccgugcuuuaacuggaauagcuguugaacaagacaaaaacacccaagaaguuuuugcacaagucaaacaaauuuacaaaacaccaccaauuaaagauuuuggugguuuuaauuuuucacaaauauuaccagauccaucaaaaccaagcaagaggucauuuauugaagaucuacuuuucaacaaagugacacuugcagaugcuggcuucaucaaacaauauggugauugccuuggugauauugcugcuagagaccucauuugugcacaaaaguuuaacggccuuacuguuuugccaccuuugcucacagaugaaaugauugcucaauacacuucugcacuguuagcggguacaaucacuucugguuggaccuuuggugcaggugcugcauuacaaauaccauuugcuaugcaaauggcuuauagguuuaaugguauuggaguuacacagaauguucucuaugagaaccaaaaauugauugccaaccaauuuaauagugcuauuggcaaaauucaagacucacuuucuuccacagcaagugcacuuggaaaacuucaagauguggucaaccaaaaugcacaagcuuuaaacacgcuuguuaaacaacuuagcuccaauuuuggugcaauuucaaguguuuuaaaugauauccuuucacgucuugacaaaguugaggcugaagugcaaauugauagguugaucacaggcagacuucaaaguuugcagacauaugugacucaacaauuaauuagagcugcagaaaucagagcuucugcuaaucuugcugcuacuaaaaugucagaguguguacuuggacaaucaaaaagaguugauuuuuguggaaagggcuaucaucuuauguccuucccucagucagcaccucaugguguagucuucuugcaugugacuuaugucccugcacaagaaaagaacuucacaacugcuccugccauuugucaugauggaaaagcacacuuuccucgugaaggugucuuuguuucaaauggcacacacugguuuguaacacaaaggaauuuuuaugaaccacaaaucauuacuacagacaacacauuugugucugguaacugugauguuguaauaggaauugucaacaacacaguuuaugauccuuugcaaccugaauuagacucauucaaggaggaguuagauaaauauuuuaagaaucauacaucaccagauguugauuuaggugacaucucuggcauuaaugcuucaguuguaaacauucaaaaagaaauugaccgccucaaugagguugccaagaauuuaaaugaaucucucaucgaucuccaagaacuuggaaaguaugagcaguauauaaaauggccaugguacauuuggcuagguuuuauagcuggcuugauugccauaguaauggugacaauuaugcuuugcuguaugaccaguugcuguaguugucucaagggcuguuguucuuguggauccugcugcaaauuugaugaagacgacucugagccagugcucaaaggagucaaauuacauuacacauaaggacuaguuauaagacugacuagcccgaugggccucccaacgggcccuccuccccuccuugcaccgagauuaauaaaaaaaaaaaaaaaaaaaaaaaaaaaaaaaaaaaaaaaaaaaaaaaaaaaaaaaaaaaaaaaaugcaucccccccccccccccccccccccccccccccaaaggcucuuuucagagccaccagaauu

SEQ ID NO: 12677 - RNA, 4027 nt, Artificial Sequence
  SARS-CoV-2/bat/Yunnan/RaTG13/2013__EPI_ISL_402131 spike protein mRNA wt (1-1269)
aggagaaagcuuaccauguuuguuuuucuuguuuuauugccacuaguuucuagucaguguguuaaucuaacaacuagaacucaguuaccuccugcauacaccaacucauccacccguggugucuauuacccugacaaaguuuucagaucuucaguuuuacauuuaacucaggauuuguuuuuaccuuucuucuccaaugugaccugguuccaugcuauacauguuucagggaccaaugguauuaaaagguuugauaacccaguucugccauucaacgauggcgucuauuuugcuuccacugagaagucuaauauaauaagaggauggauuuuugguacuaccuuagauucgaagacccagucucuacuuauuguuaauaacgcuacuaauguuguuauuaaagucugugaauuucaauuuuguaaugauccauuuuuggguguuuauuaccacaaaaacaacaaaaguuggauggaaagugaguucagaguuuacucuagugcgaauaauugcacuuuugaguaugucucucagccuuuucuuauggaccuugaaggaaaacaggguaauuucaaaaaucuuagggaauucguguuuaagaauauugaugguuauuucaaaauauauucuaaacauacgccuauuaauuuagugcgugaucuucccccugguuuuucagcuuuagaaccauugguagaucugccaauagguauuaacaucacuagguuucaaacuuuacuugcuuuacauagaagcuauuugacuccuggugauucuucuucagguuggacagcuggugcugcagcuuauuauguggguuaucuucaaccaaggacuuuucuacuaaaauauaaugagaauggaaccauuacagaugcuguagacugugcacuugacccucuuucagaaacaaaguguacguuaaaauccuucacuguugaaaaaggaauuuaucaaaccucuaacuuuagaguccaaccaacagauucuauuguuagauucccaaauauuacaaacuuauguccuuuuggugaaguuuuuaacgccaccacauucgcaucaguuuaugcuuggaacagaaagagaauuagcaacuguguugcugauuacucuguccuauauaauuccacuucauuuucuaccuuuaaauguuauggagugucuccuacuaaauuaaaugaucucugcuuuacuaauguuuaugcagacucauuugugauuacaggugaugaagucagacaaauugcgccaggacaaacuggaaagauugcugacuacaauuauaaacuaccagaugauuuuacugguuguguuauagcuuggaauucuaagcauauugaugcaaaagagggcgguaauuuuaacuaucuuuaccgucucuuuagaaaagcuaaucuuaaacccuuugagagggauaucucaacugaaauuuaccaagcaggcagcaaaccuuguaauggucaaacuggucuaaauugcuacuacccacuuuauagauauggauuuuacccuacugaugguguuggucaccaaccuuauaggguaguaguacuuucuuuugaacuucuaaaugcaccagcaacuguuuguggaccuaagaagucuacuaacuugguuaaaaauaaaugugucaauuucaacuuuaaugguuuaacuggcacagguguccucacagagucuaauaaaaaguuucuaccuuuccaacaauuugguagagacauugcagacacuacugaugccguccgugauccacagacacuugagauucuugacauuacaccauguucuuuugguggugucaguguuauaacaccuggaacaaaugccucuaaccagguugcuguucuuuaucaggauguuaacugcacagaagucccuguugcuauccaugcagaccaacuuacucccacuuggcguguuuacuccacagguucuaauguuuuucaaacacgugcagguuguuuaauaggggcugaacaugucaauaacucguaugagugugacauaccuauuggugcaggaauaugcgccaguuaucagacucaaacuaauucacguaguguggccagucaaucuauuauugccuacacuaugucacuuggugcagaaaauucaguugcuuauucuaauaacucuauugccauaccuacaaauuuuacuauuagugugaccacugaaauucuaccugugucuaugacaaagacaucgguagacuguacaauguauauuuguggugauucaacugagugcagcaaccuuuuguugcaauaugguaguuuuugcacacaauuaaaucgugcuuuaacuggaauagcuguugaacaggacaaaaauacucaagaaguuuuugcucaaguuaaacaaauuuauaagacaccaccaauuaaagauuuuggugguuucaauuuuucacaaauauuaccagauccaucaaaaccaagcaagaggucauuuauugaggauuuacuuuucaauaaagugacacuugcugaugcuggcuucaucaaacaauauggugauugccuuggugauauugcugcuagggaucuuauuugugcucaaaaguucaauggccuuacuguucugccaccuuugcucacagaugaaaugaucgcucaauacacuucugcacuauuagcagguacaaucacuucugguuggacuuuuggugcaggugcugcuuuacaaauaccauuugccaugcaaauggcuuauagguuuaaugguauuggaguuacacagaauguucucuaugagaaccaaaaauugauugccaaccaguuuaauagugcuauuggcaaaauucaagacucacuuucuucuacagcaagugcacuuggaaaacuucaagauguugucaaccaaaaugcacaagcuuuaaacacgcuuguuaaacaacuuagcuccaauuuuggagcuauuucuagcguguuaaaugauauccuuucacgucucgacaaaguugaggcugaagugcagauugacagguugaucacaggcagacuucaaagcuugcagacauaugugacucaacaauuaauuagagcugcagaaaucagagcuucugccaaucuugcugcuacuaaaaugucagaguguguacucggacaaucaaaaagaguugauuuuuguggaaaaggcuaucaucuuaugucuuucccucagucagcaccucaugguguagucuucuugcaugugacauaugucccugcacaagaaaagaacuucacaacugcuccugccauuugucaugauggaaaagcacacuuuccacgugaagguguuuucguuucaaauggcacacacugguuuguuacacaaaggaauuuuuaugaaccacaaauuauuacaacagacaacacauuugucucugguagcugugauguuguaauaggaauugucaacaacacaguuuaugauccuuugcaaccagaacuugauucauucaaggaggaguuggauaaauacuuuaaaaaucauacaucaccugauguagauuuaggugacauuucuggcauuaaugcuucaguugucaauauucaaaaggaaauugaccgccucaaugagguugccaaaaaucuaaaugaaucucucaucgaucuccaagaacuuggaaaguaugaacaguauauaaaauggccaugguacauuuggcuagguuuuauagcuggcuugauugccauaauaauggucacgauuaugcuuugcuguaugaccaguugcugcaguugucucaagggcuguuguucuugcggaucuugcugcaaauuugaugaagacgacucugagccagugcucaaaggagucaaauuacauuacacauaaggacuaguuauaagacugacuagcccgaugggccucccaacgggcccuccuccccuccuugcaccgagauuaauaaaaaaaaaaaaaaaaaaaaaaaaaaaaaaaaaaaaaaaaaaaaaaaaaaaaaaaaaaaaaaaaugcaucccccccccccccccccccccccccccccccaaaggcucuuuucagagccaccagaauu

SEQ ID NO: 12678 - RNA, 4039 nt, Artificial Sequence
  SARS-CoV-2/Wuhan/HBCDC-HB-01/2019__EPI_ISL_402132 spike protein mRNA wt (1-1273)
aggagaaagcuuaccauguuuguuuuucuuguuuuauugccacuagucucuagucaguguguuaaucuuacaaccagaacucaauuacccccugcauacacuaauucuaucacacgugguguuuauuacccugacaaaguuuucagauccucaguuuuacauucaacucaggacuuguucuuaccuuucuuuuccaauguuacuugguuccaugcuauacaugucucugggaccaaugguacuaagagguuugauaacccuguccuaccauuuaaugaugguguuuauuuugcuuccacugagaagucuaacauaauaagaggcuggauuuuugguacuacuuuagauucgaagacccagucccuacuuauuguuaauaacgcuacuaauguuguuauuaaagucugugaauuucaauuuuguaaugauccauuuuuggguguuuauuaccacaaaaacaacaaaaguuggauggaaagugaguucagaguuuauucuagugcgaauaauugcacuuuugaauaugucucucagccuuuucuuauggaccuugaaggaaaacaggguaauuucaaaaaucuuagggaauuuguguuuaagaauauugaugguuauuuuaaaauauauucuaagcacacgccuauuaauuuagugcgugaucucccucaggguuuuucggcuuuagaaccauugguagauuugccaauagguauuaacaucacuagguuucaaacuuuacuugcuuuacauagaaguuauuugacuccuggugauucuucuucagguuggacagcuggugcugcagcuuauuauguggguuaucuucaaccuaggacuuuucuauuaaaauauaaugaaaauggaaccauuacagaugcuguagacugugcacuugacccucucucagaaacaaaguguacguugaaauccuucacuguagaaaaaggaaucuaucaaacuucuaacuuuagaguccaaccaacagaaucuauuguuagauuuccuaauauuacaaacuugugcccuuuuggugaaguuuuuaacgccaccagauuugcaucuguuuaugcuuggaacaggaagagaaucagcaacuguguugcugauuauucuguccuauauaauuccgcaucauuuuccacuuuuaaguguuauggagugucuccuacuaaauuaaaugaucucugcuuuacuaaugucuaugcagauucauuuguaauuagaggugaugaagucagacaaaucgcuccagggcaaacuggaaagauugcugauuauaauuauaaauuaccagaugauuuuacaggcugcguuauagcuuggaauucuaacaaucuugauucuaagguuggugguaauuauaauuaccuguauagauuguuuaggaagucuaaucucaaaccuuuugagagagauauuucaacugaaaucuaucaggccgguagcacaccuuguaaugguguugaagguuuuaauuguuacuuuccuuuacaaucauaugguuuccaacccacuaaugguguugguuaccaaccauacagaguaguaguacuuucuuuugaacuucuacaugcaccagcaacuguuuguggaccuaaaaagucuacuaauuugguuaaaaacaaaugugucaauuucaacuucaaugguuuaacaggcacagguguucuuacugagucuaacaaaaaguuucugccuuuccaacaauuuggcagagacauugcugacacuacugaugcuguccgugauccacagacacuugagauucuugacauuacaccauguucuuuugguggugucaguguuauaacaccaggaacaaauacuucuaaccagguugcuguucuuuaucaggauguuaacugcacagaagucccuguugcuauucaugcagaucaacuuacuccuacuuggcguguuuauucuacagguucuaauguuuuucaaacacgugcaggcuguuuaauaggggcugaacaugucaacaacucauaugagugugacauacccauuggugcagguauaugcgcuaguuaucagacucagacuaauucuccucggcgggcacguaguguagcuagucaauccaucauugccuacacuaugucacuuggugcagaaaauucaguugcuuacucuaauaacucuauugccauacccacaaauuuuacuauuaguguuaccacagaaauucuaccagugucuaugaccaagacaucaguagauuguacaauguacauuuguggugauucaacugaaugcagcaaucuuuuguugcaauauggcaguuuuuguacacaauuaaaccgugcuuuaacuggaauagcuguugaacaagacaaaaacacccaagaaguuuuugcacaagucaaacaaauuuacaaaacaccaccaauuaaagauuuuggugguuuuaauuuuucacaaauauuaccagauccaucaaaaccaagcaagaggucauuuauugaagaucuacuuuucaacaaagugacacuugcagaugcuggcuucaucaaacaauauggugauugccuuggugauauugcugcuagagaccucauuugugcacaaaaguuuaacggccuuacuguuuugccaccuuugcucacagaugaaaugauugcucaauacacuucugcacuguuagcggguacaaucacuucugguuggaccuuuggugcaggugcugcauuacaaauaccauuugcuaugcaaauggcuuauagguuuaaugguauuggaguuacacagaauguucucuaugagaaccaaaaauugauugccaaccaauuuaauagugcuauuggcaaaauucaagacucacuuucuuccacagcaagugcacuuggaaaacuucaagauguggucaaccaaaaugcacaagcuuuaaacacgcuuguuaaacaacuuagcuccaauuuuggugcaauuucaaguguuuuaaaugauauccuuucacgucuugacaaaguugaggcugaagugcaaauugauagguugaucacaggcagacuucaaaguuugcagacauaugugacucaacaauuaauuagagcugcagaaaucagagcuucugcuaaucuugcugcuacuaaaaugucagaguguguacuuggacaaucaaaaagaguugauuuuuguggaaagggcuaucaucuuauguccuucccucagucagcaccucaugguguagucuucuugcaugugacuuaugucccugcacaagaaaagaacuucacaacugcuccugccauuugucaugauggaaaagcacacuuuccucgugaaggugucuuuguuucaaauggcacacacugguuuguaacacaaaggaauuuuuaugaaccacaaaucauuacuacagacaacacauuugugucugguaacugugauguuguaauaggaauugucaacaacacaguuuaugauccuuugcaaccugaauuagacucauucaaggaggaguuagauaaauauuuuaagaaucauacaucaccagauguugauuuaggugacaucucuggcauuaaugcuucaguuguaaacauucaaaaagaaauugaccgccucaaugagguugccaagaauuuaaaugaaucucucaucgaucuccaagaacuuggaaaguaugagcaguauauaaaauggccaugguacauuuggcuagguuuuauagcuggcuugauugccauaguaauggugacaauuaugcuuugcuguaugaccaguugcuguaguugucucaagggcuguuguucuuguggauccugcugcaaauuugaugaagacgacucugagccagugcucaaaggagucaaauuacauuacacauaaggacuaguuauaagacugacuagcccgaugggccucccaacgggcccuccuccccuccuugcaccgagauuaauaaaaaaaaaaaaaaaaaaaaaaaaaaaaaaaaaaaaaaaaaaaaaaaaaaaaaaaaaaaaaaaaugcaucccccccccccccccccccccccccccccccaaaggcucuuuucagagccaccagaauu

SEQ ID NO: 12679 - RNA, 4039 nt, Artificial Sequence
  SARS-CoV-2/Guangdong/20SF028/2020__EPI_ISL_403936 spike protein mRNA wt (1-1273)
aggagaaagcuuaccauguuuguuuuucuuguuuuauugccacuagucucuagucaguguguuaaucuuacaaccagaacucaauuacccccugcauacacuaauucuuucacacgugguguuuauuacccugacaaaguuuucagauccucaguuuuauauucaacucaggacuuguucuuaccuuucuuuuccaauguuacuugguuccaugcuauacaugucucugggaccaaugguacuaagagguuugauaacccuguccuaccauuuaaugaugguguuuauuuugcuuccacugagaagucuaacauaauaagaggcuggauuuuugguacuacuuuagauucgaagacccagucccuacuuauuguuaauaacgcuacuaauguuguuauuaaagucugugaauuucaauuuuguaaugauccauuuuuggguguuuauuaccacaaaaacaacaaaaguuggauggaaagugaguucagaguuuauucuagugcgaauaauugcacuuuugaauaugucucucagccuuuucuuauggaccuugaaggaaaacaggguaauuucaaaaaucuuagggaauuuguguuuaagaauauugaugguuauuuuaaaauauauucuaagcacacgccuauuaauuuagugcgugaucucccucaggguuuuucggcuuuagaaccauugguagauuugccaauagguauuaacaucacuagguuucaaacuuuacuugcuuuacauagaaguuauuugacuccuggugauucuucuucagguuggacagcuggugcugcagcuuauuauguggguuaucuucaaccuaggacuuuucuauuaaaauauaaugaaaauggaaccauuacagaugcuguagacugugcacuugacccucucucagaaacaaaguguacguugaaauccuucacuguagaaaaaggaaucuaucaaacuucuaacuuuagaguccaaccaacagaaucuauuguuagauuuccuaauauuacaaacuugugcccuuuuggugaaguuuuuaacgccaccagauuugcaucuguuuaugcuuggaacaggaagagaaucagcaacuguguugcugauuauucuguccuauauaauuccgcaucauuuuccacuuuuaaguguuauggagugucuccuacuaaauuaaaugaucucugcuuuacuaaugucuaugcagauucauuuguaauuagaggugaugaagucagacaaaucgcuccagggcaaacuggaaagauugcugauuauaauuauaaauuaccagaugauuuuacaggcugcguuauagcuuggaauucuaacaaucuugauucuaagguuggugguaauuauaauuaccuguauagauuguuuaggaagucuaaucucaaaccuuuugagagagauauuucaacugaaaucuaucaggccgguagcacaccuuguaaugguguugaagguuuuaauuguuacuuuccuuuacaaucauaugguuuccaacccacuaaugguguugguuaccaaccauacagaguaguaguacuuucuuuugaacuucuacaugcaccagcaacuguuuguggaccuaaaaagucuacuaauuugguuaaaaacaaaugugucaauuucaacuucaaugguuuaacaggcacagguguucuuacugagucuaacaaaaaguuucugccuuuccaacaauuuggcagagacauugcugacacuacugaugcuguccgugauccacagacacuugagauucuugacauuacaccauguucuuuugguggugucaguguuauaacaccaggaacaaauacuucuaaccagguugcuguucuuuaucaggauguuaacugcacagaagucccuguugcuauucaugcagaucaacuuacuccuacuuggcguguuuauucuacagguucuaauguuuuucaaacacgugcaggcuguuuaauaggggcugaacaugucaacaacucauaugagugugacauacccauuggugcagguauaugcgcuaguuaucagacucagacuaauucuccucggcgggcacguaguguagcuagucaauccaucauugccuacacuaugucacuuggugcagaaaauucaguugcuuacucuaauaacucuauugccauacccacaaauuuuacuauuaguguuaccacagaaauucuaccagugucuaugaccaagacaucaguagauuguacaauguacauuuguggugauucaacugaaugcagcaaucuuuuguugcaauauggcaguuuuuguacacaauuaaaccgugcuuuaacuggaauagcuguugaacaagacaaaaacacccaagaaguuuuugcacaagucaaacaaauuuacaaaacaccaccaauuaaagauuuuggugguuuuaauuuuucacaaauauuaccagauccaucaaaaccaagcaagaggucauuuauugaagaucuacuuuucaacaaagugacacuugcagaugcuggcuucaucaaacaauauggugauugccuuggugauauugcugcuagagaccucauuugugcacaaaaguuuaacggccuuacuguuuugccaccuuugcucacagaugaaaugauugcucaauacacuucugcacuguuagcggguacaaucacuucugguuggaccuuuggugcaggugcugcauuacaaauaccauuugcuaugcaaauggcuuauagguuuaaugguauuggaguuacacagaauguucucuaugagaaccaaaaauugauugccaaccaauuuaauagugcuauuggcaaaauucaagacucacuuucuuccacagcaagugcacuuggaaaacuucaagauguggucaaccaaaaugcacaagcuuuaaacacgcuuguuaaacaacuuagcuccaauuuuggugcaauuucaaguguuuuaaaugauauccuuucacgucuugacaaaguugaggcugaagugcaaauugauagguugaucacaggcagacuucaaaguuugcagacauaugugacucaacaauuaauuagagcugcagaaaucagagcuucugcuaaucuugcugcuacuaaaaugucagaguguguacuuggacaaucaaaaagaguugauuuuuguggaaagggcuaucaucuuauguccuucccucagucagcaccucaugguguagucuucuugcaugugacuuaugucccugcacaagaaaagaacuucacaacugcuccugccauuugucaugauggaaaagcacacuuuccucgugaaggugucuuuguuucaaauggcacacacugguuuguaacacaaaggaauuuuuaugaaccacaaaucauuacuacagacaacacauuugugucugguaacugugauguuguaauaggaauugucaacaacacaguuuaugauccuuugcaaccugaauuagacucauucaaggaggaguuagauaaauauuuuaagaaucauacaucaccagauguugauuuaggugacaucucuggcauuaaugcuucaguuguaaacauucaaaaagaaauugaccgccucaaugagguugccaagaauuuaaaugaaucucucaucgaucuccaagaacuuggaaaguaugagcaguauauaaaauggccaugguacauuuggcuagguuuuauagcuggcuugauugccauaguaauggugacaauuaugcuuugcuguaugaccaguugcuguaguugucucaagggcuguuguucuuguggauccugcugcaaauuugaugaagacgacucugagccagugcucaaaggagucaaauuacauuacacauaaggacuaguuauaagacugacuagcccgaugggccucccaacgggcccuccuccccuccuugcaccgagauuaauaaaaaaaaaaaaaaaaaaaaaaaaaaaaaaaaaaaaaaaaaaaaaaaaaaaaaaaaaaaaaaaaugcaucccccccccccccccccccccccccccccccaaaggcucuuuucagagccaccagaauu

SEQ ID NO: 12680 - RNA, 4039 nt, Artificial Sequence
  SARS-CoV-2/Shenzhen/SZTH-001/2020__EPI_ISL_406592 spike protein mRNA wt (1-1273)
aggagaaagcuuaccauguuuguuuuucuuguuuuauugccacuagucucuagucaguguguuaaucuuacaaccagaacucaauuacccccugcauacacuaauucuuucacacgugguguuuauuacccugacaaaguuuucagauccucaguuuuacauucaacucaggacuuguucuuaccuuucuuuuccaauguuacuugguuccaugcuauacaugucucugggaccaaugguacuaagagguuugauaacccuguccuaccauuuaaugaugguguuuauuuugcuuccacugagaagucuaacauaauaagaggcuggauuuuugguacuacuuuagauucgaagacccagucccuacuuauuguuaauaacgcuacuaauguuguuauuaaagucugugaauuucaauuuuguaaugauccauuuuuggguguuuauuaccacaaaaacaacaaaaguuggauggaaagugaguucagaguuuauucuagugcgaauaauugcacuuuugaauaugucucucagccuuuucuuauggaccuugaaggaaaacaggguaauuucaaaaaucuuagggaauuuguguuuaagaauauugaugguuauuuuaaaauauauucuaagcacacgccuauuaauuuagugcgugaucucccucaggguuuuucggcuuuagaaccauugguagauuugccaauagguauuaacaucacuagguuucaaacuuuacuugcuuuacauagaaguuauuugacuccuggugauucuucuucagguuggacagcuggugcugcagcuuauuauguggguuaucuucaaccuaggacuuuucuauuaaaauauaaugaaaauggaaccauuacagaugcuguagacugugcacuugacccucucucagaaacaaaguguacguugaaauccuucacuguagaaaaaggaaucuaucaaacuucuaacuuuagaguccaaccaacagaaucuauuguuagauuuccuaauauuacaaacuugugcccuuuuggugaaguuuuuaacgccaccagauuugcaucuguuuaugcuuggaacaggaagagaaucagcaacuguguugcugauuauucuguccuauauaauuccgcaucauuuuccacuuuuaaguguuauggagugucuccuacuaaauuaaaugaucucugcuuuacuaaugucuaugcagauucauuuguaauuagaggugaugaagucagacaaaucgcuccagggcaaacuggaaagauugcugauuauaauuauaaauuaccagaugauuuuacaggcugcguuauagcuuggaauucuaacaaucuugauucuaagguuggugguaauuauaauuaccuguauagauuguuuaggaagucuaaucucaaaccuuuugagagagauauuucaacugaaaucuaucaggccgguagcacaccuuguaaugguguugaagguuuuaauuguuacuuuccuuuacaaucauaugguuuccaacccacuaaugguguugguuaccaaccauacagaguaguaguacuuucuuuugaacuucuacaugcaccagcaacuguuuguggaccuaaaaagucuacuaauuugguuaaaaacaaaugugucaauuucaacuucaaugguuuaacaggcacagguguucuuacugagucuaacaaaaaguuucugccuuuccaacaauuuggcagagacauugcugacacuacugaugcuguccgugauccacagacacuugagauucuugacauuacaccauguucuuuugguggugucaguguuauaacaccaggaacaaauacuucuaaccagguugcuguucuuuaucaggauguuaacugcacagaagucccuguugcuauucaugcagaucaacuuacuccuacuuggcguguuuauucuacagguucuaauguuuuucaaacacgugcaggcuguuuaauaggggcugaacaugucaacaacucauaugagugugacauacccauuggugcagguauaugcgcuaguuaucagacucagacuaauucuccucggcgggcacguaguguagcuagucaauccaucauugccuacacuaugucacuuggugcagaaaauucaguugcuuacucuaauaacucuauugccauacccacaaauuuuacuauuaguguuaccacagaaauucuaccagugucuaugaccaagacaucaguagauuguacaauguacauuuguggugauucaacugaaugcagcaaucuuuuguugcaauauggcaguuuuuguacacaauuaaaccgugcuuuaacuggaauagcuguugaacaagacaaaaacacccaagaaguuuuugcacaagucaaacaaauuuacaaaacaccaccaauuaaagauuuuggugguuuuaauuuuucacaaauauuaccagauccaucaaaaccaagcaagaggucauuuauugaagaucuacuuuucaacaaagugacacuugcagaugcuggcuucaucaaacaauauggugauugccuuggugauauugcugcuagagaccucauuugugcacaaaaguuuaacggccuuacuguuuugccaccuuugcucacagaugaaaugauugcucaauacacuucugcacuguuagcggguacaaucacuucugguuggaccuuuggugcaggugcugcauuacaaauaccauuugcuaugcaaauggcuuauagguuuaaugguauuggaguuacacagaauguucucuaugagaaccaaaaauugauugccaaccaauuuaauagugcuauuggcaaaauucaagacucacuuucuuccacagcaagugcacuuggaaaacuucaagauguggucaaccaaaaugcacaagcuuuaaacacgcuuguuaaacaacuuagcuccaauuuuggugcaauuucaaguguuuuaaaugauauccuuucacgucuugacaaaguugaggcugaagugcaaauugauagguugaucacaggcagacuucaaaguuugcagacauaugugacucaacaauuaauuagagcugcagaaaucagagcuucugcuaaucuugcugcuacuaaaaugucagaguguguacuuggacaaucaaaaagaguugauuuuuguggaaagggcuaucaucuuauguccuucccucagucagcaccucaugguguagucuucuugcaugugacuuaugucccugcacaagaaaagaacuucacaacugcuccugccauuugucaugauggaaaagcacacuuuccucgugaaggugucuuuguuucaaauggcacacacugguuuguaacacaaaggaauuuuuaugaaccacaaaucauuacuacagacaacacauuugugucugguaacugugauguucuaauaggaauugucaacaacacaguuuaugauccuuugcaaccugaauuagacucauucaaggaggaguuagauaaauauuuuaagaaucauacaucaccagauguugauuuaggugacaucucuggcauuaaugcuucaguuguaaacauucaaaaagaaauugaccgccucaaugagguugccaagaauuuaaaugaaucucucaucgaucuccaagaacuuggaaaguaugagcaguauauaaaauggccaugguacauuuggcuagguuuuauagcuggcuugauugccauaguaauggugacaauuaugcuuugcuguaugaccaguugcuguaguugucucaagggcuguuguucuuguggauccugcugcaaauuugaugaagacgacucugggccagugcucaaaggagucaaauuacauuacacauaaggacuaguuauaagacugacuagcccgaugggccucccaacgggcccuccuccccuccuugcaccgagauuaauaaaaaaaaaaaaaaaaaaaaaaaaaaaaaaaaaaaaaaaaaaaaaaaaaaaaaaaaaaaaaaaaugcaucccccccccccccccccccccccccccccccaaaggcucuuuucagagccaccagaauu

SEQ ID NO: 12681 - RNA, 4039 nt, Artificial Sequence
  SARS-CoV-2/Shenzhen/SZTH-004/2020__EPI_ISL_406595 spike protein mRNA wt (1-1273)
aggagaaagcuuaccauguuuguuuuucuuguuuuauugccacuagucucuagucaguguguuaaucuuacaaccagaacucaauuacccccugcauacacuaauucuuucacacgugguguuuauuacccugacaaaguuuucagauccucaguuuuacauucaacucaggacuuguucuuaccuuucuuuuccaauguuacuugguuccaugcuauacaugucucugggaccaaugguacuaagagguuugauaacccuguccuaccauuuaaugaugguguuuauuuugcuuccacugagaagucuaacauaauaagaggcuggauuuuugguacuacuuuagauucgaagacccagucccuacuuauuguuaauaacgcuacuaauguuguuauuaaagucugugaauuucaauuuuguaaugauccauuuuuggguguuuauuaccacaaaaacaacaaaaguuggauggaaagugaguucagaguuuauucuagugcgaauaauugcacuuuugaauaugucucucagccuuuucuuauggaccuugaaggaaaacaggguaauuucaaaaaucuuagggaauuuguguuuaagaauauugaugguuauuuuaaaauauauucuaagcacacgccuauuaauuuagugcgugaucucccucaggguuuuucggcuuuagaaccauugguagauuugccaauagguauuaacaucacuagguuucaaacuuuacuugcuuuacauagaaguuauuugacuccuggugauucuucuucagguuggacagcuggugcugcagcuuauuauguggguuaucuucaaccuaggacuuuucuauuaaaauauaaugaaaauggaaccauuacagaugcuguagacugugcacuugacccucucucagaaacaaaguguacguugaaauccuucacuguagaaaaaggaaucuaucaaacuucuaacuuuagaguccaaccaacagaaucuauuguuagauuuccuaauauuacaaacuugugcccuuuuggugaaguuuuuaacgccaccagauuugcaucuguuuaugcuugggacaggaagagaaucagcaacuguguugcuuauuauucuguccuauauaauuccgcaucauuuuccacuuuuaaguguuauggagugucuccuacuaaauuaaaugaucucugcuuuacuaaugucuaugcagauucauuuguaauuagaggugaugaagucagacaaaucgcuccagggcaaacuggaaagauugcugauuauaauuauaaauuaccagaugauuuuacaggcugcguuauagcuuggaauucuaacaaucuugauucuaagguuggugguaauuauaauuaccuguauagauuguuuaggaagucuaaucucaaaccuuuugagagagauauuucaacugaaaucuaucaggccgguagcacaccuuguaaugguguugaagguuuuaauuguuacuuuccuuuacaaucauaugguuuccaacccacuaaugguguugguuaccaaccauacagaguaguaguacuuucuuuugaacuucuacaugcaccagcaacuguuuguggaccuaaaaagucuacuaauuugguuaaaaacaaaugugucaauuucaacuucaaugguuuaacaggcacagguguucuuacugagucuaacaaaaaguuucugccuuuccaacaauuuggcagagacauugcugacacuacugaugcuguccgugauccacagacacuugagauucuugacauuacaccauguucuuuugguggugucaguguuauaacaccaggaacaaauacuucuaaccagguugcuguucuuuaucaggauguuaacugcacagaagucccuguugcuauucaugcagaucaacuuacuccuacuuggcguguuuauucuacagguucuaauguuuuucaaacacgugcaggcuguuuaauaggggcugaacaugucaacaacucauaugagugugacauacccauuggugcaggcauaugcgcuaguuaucagacucagacuaauucuccucggcgggcacguaguguagcuagucaauccaucauugccuacacuaugucacuuggugcagaaaauucaguugcuuacucuaauaacucuauugccauacccacaaauuuuacuauuaguguuaccacagaaauucuaccagugucuaugaccaagacaucaguagauuguacaauguacauuuguggugauucaacugaaugcagcaaucuuuuguugcaauauggcaguuuuuguacacaauuaaaccgugcuuuaacuggaauagcuguugaacaagacaaaaacacccaagaaguuuuugcacaagucaaacaaauuuacaaaacaccaccaauuaaagauuuuggugguuuuaauuuuucacaaauauuaccagauccaucaaaaccaagcaagaggucauuuauugaagaucuacuuuucaacaaagugacacuugcagaugcuggcuucaucaaacaauauggugauugccuuggugauauugcugcuagagaccucauuugugcacaaaaguuuaacggccuuacuguuuugccaccuuugcucacagaugaaaugauugcucaauacacuucugcacuguuagcggguacaaucacuucugguuggaccuuuggugcaggugcugcauuacaaauaccauuugcuaugcaaauggcuuauagguuuaaugguauuggaguuacacagaauguucucuaugagaaccaaaaauugauugccaaccaauuuaauagugcuauuggcaaaauucaagacucacuuucuuccacagcaagugcacuuggaaaacuucaagauguggucaaccaaaaugcacaagcuuuaaacacgcuuguuaaacaacuuagcuccaauuuuggugcaauuucaaguguuuuaaaugauauccuuucacgucuugacaaaguugaggcugaagugcaaauugauagguugaucacaggcagacuucaaaguuugcagacauaugugacucaacaauuaauuagagcugcagaaaucagagcuucugcuaaucuugcugcuacuaaaaugucagaguguguacuuggacaaucaaaaagaguugauuuuuguggaaagggcuaucaucuuauguccuucccucagucagcaccucaugguguagucuucuugcaugugacuuaugucccugcacaagaaaagaacuucacaacugcuccugccauuugucaugauggaaaagcacacuuuccucgugaaggugucuuuguuucaaauggcacacacugguuuguaacacaaaggaauuuuuaugaaccacaaaucauuacuacagacaacacauuugugucugguaacugugauguuguaauaggaauugucaacaacacaguuuaugauccuuugcaaccugaauuagacucauucaaggaggaguuagauaaauauuuuaagaaucauacaucaccagauguugauuuaggugacaucucuggcauuaaugcuucaguuguaaacauucaaaaagaaauugaccgccucaaugagguugccaagaauuuaaaugaaucucucaucgaucuccaagaacuuggaaaguaugagcaguauauaaaauggccaugguacauuuggcuagguuuuauagcuggcuugauugccauaguaauggugacaauuaugcuuugcuguaugaccaguugcuguaguugucucaagggcuguuguucuuguggauccugcugcaaauuugaugaagacgacucugagccagugcucaaaggagucaaauuacauuacacauaaggacuaguuauaagacugacuagcccgaugggccucccaacgggcccuccuccccuccuugcaccgagauuaauaaaaaaaaaaaaaaaaaaaaaaaaaaaaaaaaaaaaaaaaaaaaaaaaaaaaaaaaaaaaaaaaugcaucccccccccccccccccccccccccccccccaaaggcucuuuucagagccaccagaauu

SEQ ID NO: 12682 - RNA, 4039 nt, Artificial Sequence
  SARS-CoV-2/France/IDF0372/2020__EPI_ISL_406596 spike protein mRNA wt (1-1273)
aggagaaagcuuaccauguuuguuuuucuuguuuuauugccacuagucucuagucaguguguuaaucuuacaaccagaacucaauuacccccugcauacacuaauucuuucacacgugguguuuauuacccugacaaaguuuucagauccucaguuuuacauucaacucaggacuuguucuuaccuuucuuuuccaauguuacuugguuccaugcuauacaugucucugggaccaaugguacuaagagguuugauaacccuguccuaccauuuaaugaugguguuuauuuugcuuccacugagaagucuaacauaauaagaggcuggauuuuugguacuacuuuagauucgaagacccagucccuacuuauuguuaauaacgcuacuaauguuguuauuaaagucugugaauuucaauuuuguaaugauccauuuuuggguguuuauuaccacaaaaacaacaaaaguuggauggaaagugaguucagaguuuauucuagugcgaauaauugcacuuuugaauaugucucucagccuuuucuuauggaccuugaaggaaaacaggguaauuucaaaaaucuuagggaauuuguguuuaagaauauugaugguuauuuuaaaauauauucuaagcacacgccuauuaauuuagugcgugaucucccucaggguuuuucggcuuuagaaccauugguagauuugccaauagguauuaacaucacuagguuucaaacuuuacuugcuuuacauagaaguuauuugacuccuggugauucuucuucagguuggacagcuggugcugcagcuuauuauguggguuaucuucaaccuaggacuuuucuauuaaaauauaaugaaaauggaaccauuacagaugcuguagacugugcacuugacccucucucagaaacaaaguguacguugaaauccuucacuguagaaaaaggaaucuaucaaacuucuaacuuuagaguccaaccaacagaaucuauuguuagauuuccuaauauuacaaacuugugcccuuuuggugaaguuuuuaacgccaccagauuugcaucuguuuaugcuuggaacaggaagagaaucagcaacuguguugcugauuauucuuuccuauauaauuccgcaucauuuuccacuuuuaaguguuauggagugucuccuacuaaauuaaaugaucucugcuuuacuaaugucuaugcagauucauuuguaauuagaggugaugaagucagacaaaucgcuccagggcaaacuggaaagauugcugauuauaauuauaaauuaccagaugauuuuacaggcugcguuauagcuuggaauucuaacaaucuugauucuaagguuggugguaauuauaauuaccuguauagauuguuuaggaagucuaaucucaaaccuuuugagagagauauuucaacugaaaucuaucaggccgguagcacaccuuguaaugguguugaagguuuuaauuguuacuuuccuuuacaaucauaugguuuccaacccacuaaugguguugguuaccaaccauacagaguaguaguacuuucuuuugaacuucuacaugcaccagcaacuguuuguggaccuaaaaagucuacuaauuugguuaaaaacaaaugugucaauuucaacuucaaugguuuaacaggcacagguguucuuacugagucuaacaaaaaguuucugccuuuccaacaauuuggcagagacauugcugacacuacugaugcuguccgugauccacagacacuugagauucuugacauuacaccauguucuuuugguggugucaguguuauaacaccaggaacaaauacuucuaaccagguugcuguucuuuaucaggauguuaacugcacagaagucccuguugcuauucaugcagaucaacuuacuccuacuuggcguguuuauucuacagguucuaauguuuuucaaacacgugcaggcuguuuaauaggggcugaacaugucaacaacucauaugagugugacauacccauuggugcagguauaugcgcuaguuaucagacucagacuaauucuccucggcgggcacguaguguagcuagucaauccaucauugccuacacuaugucacuuggugcagaaaauucaguugcuuacucuaauaacucuauugccauacccacaaauuuuacuauuaguguuaccacagaaauucuaccagugucuaugaccaagacaucaguagauuguacaauguacauuuguggugauucaacugaaugcagcaaucuuuuguugcaauauggcaguuuuuguacacaauuaaaccgugcuuuaacuggaauagcuguugaacaagacaaaaacacccaagaaguuuuugcacaagucaaacaaauuuacaaaacaccaccaauuaaagauuuuggugguuuuaauuuuucacaaauauuaccagauccaucaaaaccaagcaagaggucauuuauugaagaucuacuuuucaacaaagugacacuugcagaugcuggcuucaucaaacaauauggugauugccuuggugauauugcugcuagagaccucauuugugcacaaaaguuuaacggccuuacuguuuugccaccuuugcucacagaugaaaugauugcucaauacacuucugcacuguuagcggguacaaucacuucugguuggaccuuuggugcaggugcugcauuacaaauaccauuugcuaugcaaauggcuuauagguuuaaugguauuggaguuacacagaauguucucuaugagaaccaaaaauugauugccaaccaauuuaauagugcuauuggcaaaauucaagacucacuuucuuccacagcaagugcacuuggaaaacuucaagauguggucaaccaaaaugcacaagcuuuaaacacgcuuguuaaacaacuuagcuccaauuuuggugcaauuucaaguguuuuaaaugauauccuuucacgucuugacaaaguugaggcugaagugcaaauugauagguugaucacaggcagacuucaaaguuugcagacauaugugacucaacaauuaauuagagcugcagaaaucagagcuucugcuaaucuugcugcuacuaaaaugucagaguguguacuuggacaaucaaaaagaguugauuuuuguggaaagggcuaucaucuuauguccuucccucagucagcaccucaugguguagucuucuugcaugugacuuaugucccugcacaagaaaagaacuucacaacugcuccugccauuugucaugauggaaaagcacacuuuccucgugaaggugucuuuguuucaaauggcacacacugguuuguaacacaaaggaauuuuuaugaaccacaaaucauuacuacagacaacacauuugugucugguaacugugauguuguaauaggaauugucaacaacacaguuuaugauccuuugcaaccugaauuagacucauucaaggaggaguuagauaaauauuuuaagaaucauacaucaccagauguugauuuaggugacaucucuggcauuaaugcuucaguuguaaacauucaaaaagaaauugaccgccucaaugagguugccaagaauuuaaaugaaucucucaucgaucuccaagaacuuggaaaguaugagcaguauauaaaauggccaugguacauuuggcuagguuuuauagcuggcuugauugccauaguaauggugacaauuaugcuuugcuguaugaccaguugcuguaguugucucaagggcuguuguucuuguggauccugcugcaaauuugaugaagacgacucugagccagugcucaaaggagucaaauuacauuacacauaaggacuaguuauaagacugacuagcccgaugggccucccaacgggcccuccuccccuccuugcaccgagauuaauaaaaaaaaaaaaaaaaaaaaaaaaaaaaaaaaaaaaaaaaaaaaaaaaaaaaaaaaaaaaaaaaugcaucccccccccccccccccccccccccccccccaaaggcucuuuucagagccaccagaauu

SEQ ID NO: 12683 - RNA, 4039 nt, Artificial Sequence
  SARS-CoV-2/Australia/VIC01/2020__EPI_ISL_406844 spike protein mRNA wt (1-1273)
aggagaaagcuuaccauguuuguuuuucuuguuuuauugccacuagucucuagucaguguguuaaucuuacaaccagaacucaauuacccccugcauacacuaauucuuucacacgugguguuuauuacccugacaaaguuuucagauccucaguuuuacauucaacucaggacuuguucuuaccuuucuuuuccaauguuacuugguuccaugcuauacaugucucugggaccaaugguacuaagagguuugauaacccuguccuaccauuuaaugaugguguuuauuuugcuuccacugagaagucuaacauaauaagaggcuggauuuuugguacuacuuuagauucgaagacccagucccuacuuauuguuaauaacgcuacuaauguuguuauuaaagucugugaauuucaauuuuguaaugauccauuuuuggguguuuauuaccacaaaaacaacaaaaguuggauggaaagugaguucagaguuuauucuagugcgaauaauugcacuuuugaauaugucucucagccuuuucuuauggaccuugaaggaaaacaggguaauuucaaaaaucuuagggaauuuguguuuaagaauauugaugguuauuuuaaaauauauucuaagcacacgccuauuaauuuagugcgugaucucccucaggguuuuucggcuuuagaaccauugguagauuugccaauagguauuaacaucacuagguuucaaacuuuacuugcuuuacauagaagguauuugacuccuggugauucuucuucagguuggacagcuggugcugcagcuuauuauguggguuaucuucaaccuaggacuuuucuauuaaaauauaaugaaaauggaaccauuacagaugcuguagacugugcacuugacccucucucagaaacaaaguguacguugaaauccuucacuguagaaaaaggaaucuaucaaacuucuaacuuuagaguccaaccaacagaaucuauuguuagauuuccuaauauuacaaacuugugcccuuuuggugaaguuuuuaacgccaccagauuugcaucuguuuaugcuuggaacaggaagagaaucagcaacuguguugcugauuauucuguccuauauaauuccgcaucauuuuccacuuuuaaguguuauggagugucuccuacuaaauuaaaugaucucugcuuuacuaaugucuaugcagauucauuuguaauuagaggugaugaagucagacaaaucgcuccagggcaaacuggaaagauugcugauuauaauuauaaauuaccagaugauuuuacaggcugcguuauagcuuggaauucuaacaaucuugauucuaagguuggugguaauuauaauuaccuguauagauuguuuaggaagucuaaucucaaaccuuuugagagagauauuucaacugaaaucuaucaggccgguagcacaccuuguaaugguguugaagguuuuaauuguuacuuuccuuuacaaucauaugguuuccaacccacuaaugguguugguuaccaaccauacagaguaguaguacuuucuuuugaacuucuacaugcaccagcaacuguuuguggaccuaaaaagucuacuaauuugguuaaaaacaaaugugucaauuucaacuucaaugguuuaacaggcacagguguucuuacugagucuaacaaaaaguuucugccuuuccaacaauuuggcagagacauugcugacacuacugaugcuguccgugauccacagacacuugagauucuugacauuacaccauguucuuuugguggugucaguguuauaacaccaggaacaaauacuucuaaccagguugcuguucuuuaucaggauguuaacugcacagaagucccuguugcuauucaugcagaucaacuuacuccuacuuggcguguuuauucuacagguucuaauguuuuucaaacacgugcaggcuguuuaauaggggcugaacaugucaacaacucauaugagugugacauacccauuggugcagguauaugcgcuaguuaucagacucagacuaauucuccucggcgggcacguaguguagcuagucaauccaucauugccuacacuaugucacuuggugcagaaaauucaguugcuuacucuaauaacucuauugccauacccacaaauuuuacuauuaguguuaccacagaaauucuaccagugucuaugaccaagacaucaguagauuguacaauguacauuuguggugauucaacugaaugcagcaaucuuuuguugcaauauggcaguuuuuguacacaauuaaaccgugcuuuaacuggaauagcuguugaacaagacaaaaacacccaagaaguuuuugcacaagucaaacaaauuuacaaaacaccaccaauuaaagauuuuggugguuuuaauuuuucacaaauauuaccagauccaucaaaaccaagcaagaggucauuuauugaagaucuacuuuucaacaaagugacacuugcagaugcuggcuucaucaaacaauauggugauugccuuggugauauugcugcuagagaccucauuugugcacaaaaguuuaacggccuuacuguuuugccaccuuugcucacagaugaaaugauugcucaauacacuucugcacuguuagcggguacaaucacuucugguuggaccuuuggugcaggugcugcauuacaaauaccauuugcuaugcaaauggcuuauagguuuaaugguauuggaguuacacagaauguucucuaugagaaccaaaaauugauugccaaccaauuuaauagugcuauuggcaaaauucaagacucacuuucuuccacagcaagugcacuuggaaaacuucaagauguggucaaccaaaaugcacaagcuuuaaacacgcuuguuaaacaacuuagcuccaauuuuggugcaauuucaaguguuuuaaaugauauccuuucacgucuugacaaaguugaggcugaagugcaaauugauagguugaucacaggcagacuucaaaguuugcagacauaugugacucaacaauuaauuagagcugcagaaaucagagcuucugcuaaucuugcugcuacuaaaaugucagaguguguacuuggacaaucaaaaagaguugauuuuuguggaaagggcuaucaucuuauguccuucccucagucagcaccucaugguguagucuucuugcaugugacuuaugucccugcacaagaaaagaacuucacaacugcuccugccauuugucaugauggaaaagcacacuuuccucgugaaggugucuuuguuucaaauggcacacacugguuuguaacacaaaggaauuuuuaugaaccacaaaucauuacuacagacaacacauuugugucugguaacugugauguuguaauaggaauugucaacaacacaguuuaugauccuuugcaaccugaauuagacucauucaaggaggaguuagauaaauauuuuaagaaucauacaucaccagauguugauuuaggugacaucucuggcauuaaugcuucaguuguaaacauucaaaaagaaauugaccgccucaaugagguugccaagaauuuaaaugaaucucucaucgaucuccaagaacuuggaaaguaugagcaguauauaaaauggccaugguacauuuggcuagguuuuauagcuggcuugauugccauaguaauggugacaauuaugcuuugcuguaugaccaguugcuguaguugucucaagggcuguuguucuuguggauccugcugcaaauuugaugaagacgacucugagccagugcucaaaggagucaaauuacauuacacauaaggacuaguuauaagacugacuagcccgaugggccucccaacgggcccuccuccccuccuugcaccgagauuaauaaaaaaaaaaaaaaaaaaaaaaaaaaaaaaaaaaaaaaaaaaaaaaaaaaaaaaaaaaaaaaaaugcaucccccccccccccccccccccccccccccccaaaggcucuuuucagagccaccagaauu

SEQ ID NO: 12684 - RNA, 4039 nt, Artificial Sequence
  SARS-CoV-2/Germany/BavPat1/2020__EPI_ISL_406862 spike protein mRNA wt (1-1273)
aggagaaagcuuaccauguuuguuuuucuuguuuuauugccacuagucucuagucaguguguuaaucuuacaaccagaacucaauuacccccugcauacacuaauucuuucacacgugguguuuauuacccugacaaaguuuucagauccucaguuuuacauucaacucaggacuuguucuuaccuuucuuuuccaauguuacuugguuccaugcuauacaugucucugggaccaaugguacuaagagguuugauaacccuguccuaccauuuaaugaugguguuuauuuugcuuccacugagaagucuaacauaauaagaggcuggauuuuugguacuacuuuagauucgaagacccagucccuacuuauuguuaauaacgcuacuaauguuguuauuaaagucugugaauuucaauuuuguaaugauccauuuuuggguguuuauuaccacaaaaacaacaaaaguuggauggaaagugaguucagaguuuauucuagugcgaauaauugcacuuuugaauaugucucucagccuuuucuuauggaccuugaaggaaaacaggguaauuucaaaaaucuuagggaauuuguguuuaagaauauugaugguuauuuuaaaauauauucuaagcacacgccuauuaauuuagugcgugaucucccucaggguuuuucggcuuuagaaccauugguagauuugccaauagguauuaacaucacuagguuucaaacuuuacuugcuuuacauagaaguuauuugacuccuggugauucuucuucagguuggacagcuggugcugcagcuuauuauguggguuaucuucaaccuaggacuuuucuauuaaaauauaaugaaaauggaaccauuacagaugcuguagacugugcacuugacccucucucagaaacaaaguguacguugaaauccuucacuguagaaaaaggaaucuaucaaacuucuaacuuuagaguccaaccaacagaaucuauuguuagauuuccuaauauuacaaacuugugcccuuuuggugaaguuuuuaacgccaccagauuugcaucuguuuaugcuuggaacaggaagagaaucagcaacuguguugcugauuauucuguccuauauaauuccgcaucauuuuccacuuuuaaguguuauggagugucuccuacuaaauuaaaugaucucugcuuuacuaaugucuaugcagauucauuuguaauuagaggugaugaagucagacaaaucgcuccagggcaaacuggaaagauugcugauuauaauuauaaauuaccagaugauuuuacaggcugcguuauagcuuggaauucuaacaaucuugauucuaagguuggugguaauuauaauuaccuguauagauuguuuaggaagucuaaucucaaaccuuuugagagagauauuucaacugaaaucuaucaggccgguagcacaccuuguaaugguguugaagguuuuaauuguuacuuuccuuuacaaucauaugguuuccaacccacuaaugguguugguuaccaaccauacagaguaguaguacuuucuuuugaacuucuacaugcaccagcaacuguuuguggaccuaaaaagucuacuaauuugguuaaaaacaaaugugucaauuucaacuucaaugguuuaacaggcacagguguucuuacugagucuaacaaaaaguuucugccuuuccaacaauuuggcagagacauugcugacacuacugaugcuguccgugauccacagacacuugagauucuugacauuacaccauguucuuuugguggugucaguguuauaacaccaggaacaaauacuucuaaccagguugcuguucuuuaucaggguguuaacugcacagaagucccuguugcuauucaugcagaucaacuuacuccuacuuggcguguuuauucuacagguucuaauguuuuucaaacacgugcaggcuguuuaauaggggcugaacaugucaacaacucauaugagugugacauacccauuggugcagguauaugcgcuaguuaucagacucagacuaauucuccucggcgggcacguaguguagcuagucaauccaucauugccuacacuaugucacuuggugcagaaaauucaguugcuuacucuaauaacucuauugccauacccacaaauuuuacuauuaguguuaccacagaaauucuaccagugucuaugaccaagacaucaguagauuguacaauguacauuuguggugauucaacugaaugcagcaaucuuuuguugcaauauggcaguuuuuguacacaauuaaaccgugcuuuaacuggaauagcuguugaacaagacaaaaacacccaagaaguuuuugcacaagucaaacaaauuuacaaaacaccaccaauuaaagauuuuggugguuuuaauuuuucacaaauauuaccagauccaucaaaaccaagcaagaggucauuuauugaagaucuacuuuucaacaaagugacacuugcagaugcuggcuucaucaaacaauauggugauugccuuggugauauugcugcuagagaccucauuugugcacaaaaguuuaacggccuuacuguuuugccaccuuugcucacagaugaaaugauugcucaauacacuucugcacuguuagcggguacaaucacuucugguuggaccuuuggugcaggugcugcauuacaaauaccauuugcuaugcaaauggcuuauagguuuaaugguauuggaguuacacagaauguucucuaugagaaccaaaaauugauugccaaccaauuuaauagugcuauuggcaaaauucaagacucacuuucuuccacagcaagugcacuuggaaaacuucaagauguggucaaccaaaaugcacaagcuuuaaacacgcuuguuaaacaacuuagcuccaauuuuggugcaauuucaaguguuuuaaaugauauccuuucacgucuugacaaaguugaggcugaagugcaaauugauagguugaucacaggcagacuucaaaguuugcagacauaugugacucaacaauuaauuagagcugcagaaaucagagcuucugcuaaucuugcugcuacuaaaaugucagaguguguacuuggacaaucaaaaagaguugauuuuuguggaaagggcuaucaucuuauguccuucccucagucagcaccucaugguguagucuucuugcaugugacuuaugucccugcacaagaaaagaacuucacaacugcuccugccauuugucaugauggaaaagcacacuuuccucgugaaggugucuuuguuucaaauggcacacacugguuuguaacacaaaggaauuuuuaugaaccacaaaucauuacuacagacaacacauuugugucugguaacugugauguuguaauaggaauugucaacaacacaguuuaugauccuuugcaaccugaauuagacucauucaaggaggaguuagauaaauauuuuaagaaucauacaucaccagauguugauuuaggugacaucucuggcauuaaugcuucaguuguaaacauucaaaaagaaauugaccgccucaaugagguugccaagaauuuaaaugaaucucucaucgaucuccaagaacuuggaaaguaugagcaguauauaaaauggccaugguacauuuggcuagguuuuauagcuggcuugauugccauaguaauggugacaauuaugcuuugcuguaugaccaguugcuguaguugucucaagggcuguuguucuuguggauccugcugcaaauuugaugaagacgacucugagccagugcucaaaggagucaaauuacauuacacauaaggacuaguuauaagacugacuagcccgaugggccucccaacgggcccuccuccccuccuugcaccgagauuaauaaaaaaaaaaaaaaaaaaaaaaaaaaaaaaaaaaaaaaaaaaaaaaaaaaaaaaaaaaaaaaaaugcaucccccccccccccccccccccccccccccccaaaggcucuuuucagagccaccagaauu

SEQ ID NO: 12685 - RNA, 4039 nt, Artificial Sequence
  SARS-CoV-2/Wuhan/HBCDC-HB-02/2020__EPI_ISL_412978 spike protein mRNA wt (1-1273)
aggagaaagcuuaccauguuuguuuuucuuguuuuauugccacuagucucuagucaguguguuaaucuuacaaccagaacucaauuacccccugcauacacuaauucuuucacacgugguguuuauuacccugacaaaguuuucagauccucaguuuuacauucaacucaggacuuguucuuaccuuucuuuuccaauguuacuugguuccaugcuauacaugucucugggaccaaugguacuaagagguuugauaacccuguccuaccauuuaaugaugguguuuauuuugcuuccacugagaagucuaacauaauaagaggcuggauuuuugguacuacuuuagauucgaagacccagucccuacuuauuguuaauaacgcuacuaauguuguuauuaaagucugugaauuucaauuuuguaaugauccauuuuuggguguuuauuaccacaaaaacaacaaaaguuggauggaaagugaguucagaguuuauucuagugcgaauaauugcacuuuugaauaugucucucagccuuuucuuauggaccuugaaggaaaacaggguaauuucaaaaaucuuagggaauuuguguuuaagaauauugaugguuauuuuaaaauauauucuaagcacacgccuauuaauuuagugcgugaucucccucaggguuuuucggcuuuagaaccauugguagauuugccaauagguauuaacaucacuagguuucaaacuuuacuugcuuuacauagaaguuauuugacuccuggugauucuucuucagguuggacagcuggugcugcagcuuauuauguggguuaucuucaaccuaggacuuuucuauuaaaauauaaugaaaauggaaccauuacagaugcuguagacugugcacuugacccucucucagaaacaaaguguacguugaaauccuucacuguagaaaaaggaaucuaucaaacuucuaacuuuagaguccaaccaacagaaucuauuguuagauuuccuaauauuacaaacuugugcccuuuuggugaaguuuuuaacgccaccagauuugcaucuguuuaugcuuggaacaggaagagaaucagcaacuguguugcugauuauucuguccuauauaauuccgcaucauuuuccacuuuuaaguguuauggagugucuccuacuaaauuaaaugaucucugcuuuacuaaugucuaugcagauucauuuguaauuagaggugaugaagucagacaaaucgcuccagggcaaacuggaaagauugcugauuauaauuauaaauuaccagaugauuuuacaggcugcguuauagcuuggaauucuaacaaucuugauucuaagguuggugguaauuauaauuaccuguauagauuguuuaggaagucuaaucucaaaccuuuugagagagauauuucaacugaaaucuaucaggccgguagcacaccuuguaaugguguugaagguuuuaauuguuacuuuccuuuacaaucauaugguuuccaacccacuaaugguguugguuaccaaccauacagaguaguaguacuuucuuuugaacuucuacaugcaccagcaacuguuuguggaccuaaaaagucuacuaauuugguuaaaaacaaaugugucaauuucaacuucaaugguuuaacaggcacagguguucuuacugagucuaacaaaaaguuucugccuuuccaacaauuuggcagagacauugcugacacuacugaugcuguccgugauccacagacacuugagauucuugacauuacaccauguucuuuugguggugucaguguuauaacaccaggaacaaauacuucuaaccagguugcuguucuuuaucaggauguuaacugcacagaagucccuguugcuauucaugcagaucaacuuacuccuacuuggcguguuuauucuacagguucuaauguuuuucaaacacgugcaggcuguuuaauaggggcugaacaugucaacaacucauaugagugugacauacccauuggugcagguauaugcgcuaguuaucagacucagacuaauucuccucggcgggcacguaguguagcuagucaauccaucauugccuacacuaugucacuuggugcagaaaauucaguugcuuacucuaauaacucuauugccauacccacaaauuuuacuauuaguguuaccacagaaauucuaccagugucuaugaccaagacaucaguagauuguacaauguacauuuguggugauucaacugaaugcagcaauuuuuuguugcaauauggcaguuuuuguacacaauuaaaccgugcuuuaacuggaauagcuguugaacaagacaaaaacacccaagaaguuuuugcacaagucaaacaaauuuacaaaacaccaccaauuaaagauuuuggugguuuuaauuuuucacaaauauuaccagauccaucaaaaccaagcaagaggucauuuauugaagaucuacuuuucaacaaagugacacuugcagaugcuggcuucaucaaacaauauggugauugccuuggugauauugcugcuagagaccucauuugugcacaaaaguuuaacggccuuacuguuuugccaccuuugcucacagaugaaaugauugcucaauacacuucugcacuguuagcggguacaaucacuucugguuggaccuuuggugcaggugcugcauuacaaauaccauuugcuaugcaaauggcuuauagguuuaaugguauuggaguuacacagaauguucucuaugagaaccaaaaauugauugccaaccaauuuaauagugcuauuggcaaaauucaagacucacuuucuuccacagcaagugcacuuggaaaacuucaagauguggucaaccaaaaugcacaagcuuuaaacacgcuuguuaaacaacuuagcuccaauuuuggugcaauuucaaguguuuuaaaugauauccuuucacgucuugacaaaguugaggcugaagugcaaauugauagguugaucacaggcagacuucaaaguuugcagacauaugugacucaacaauuaauuagagcugcagaaaucagagcuucugcuaaucuugcugcuacuaaaaugucagaguguguacuuggacaaucaaaaagaguugauuuuuguggaaagggcuaucaucuuauguccuucccucagucagcaccucaugguguagucuucuugcaugugacuuaugucccugcacaagaaaagaacuucacaacugcuccugccauuugucaugauggaaaagcacacuuuccucgugaaggugucuuuguuucaaauggcacacacugguuuguaacacaaaggaauuuuuaugaaccacaaaucauuacuacagacaacacauuugugucugguaacugugauguuguaauaggaauugucaacaacacaguuuaugauccuuugcaaccugaauuagacucauucaaggaggaguuagauaaauauuuuaagaaucauacaucaccagauguugauuuaggugacaucucuggcauuaaugcuucaguuguaaacauucaaaaagaaauugaccgccucaaugagguugccaagaauuuaaaugaaucucucaucgaucuccaagaacuuggaaaguaugagcaguauauaaaauggccaugguacauuuggcuagguuuuauagcuggcuugauugccauaguaauggugacaauuaugcuuugcuguaugaccaguugcuguaguugucucaagggcuguuguucuuguggauccugcugcaaauuugaugaagacgacucugagccagugcucaaaggagucaaauuacauuacacauaaggacuaguuauaagacugacuagcccgaugggccucccaacgggcccuccuccccuccuugcaccgagauuaauaaaaaaaaaaaaaaaaaaaaaaaaaaaaaaaaaaaaaaaaaaaaaaaaaaaaaaaaaaaaaaaaugcaucccccccccccccccccccccccccccccccaaaggcucuuuucagagccaccagaauu

SEQ ID NO: 12686 - RNA, 4039 nt, Artificial Sequence
  SARS-CoV-2/Australia/QLD02/2020__EPI_ISL_407896 spike protein mRNA wt (1-1273)
aggagaaagcuuaccauguuuguuuuucuuguuuuauugccacuagucucuagucaguguguuaaucuuacaaccagaacucaauuacccccugcauacacuaauucuuucacacgugguguuuauuacccugacaaaguuuucagauccucaguuuuacauucaacucaggacuuguucuuaccuuucuuuuccaauguuacuugguuccaugcuauacaugucucugggaccaaugguacuaagagguuugauaacccuguccuaccauuuaaugaugguguuuauuuugcuuccacugagaagucuaacauaauaagaggcuggauuuuugguacuacuuuagauucgaagacccagucccuacuuauuguuaauaacgcuacuaauguuguuauuaaagucugugaauuucaauuuuguaaugauccauuuuuggguguuuauuaccacaaaaacaacaaaaguuggauggaaagugaguucagaguuuauucuagugcgaauaauugcacuuuugaauaugucucucagccuuuucuuauggaccuugaaggaaaacaggguaauuucaaaaaucuuagggaauuuguguuuaagaauauugaugguuauuuuaaaauauauucuaagcacacgccuauuaauuuagugcgugaucucccucaggguuuuucggcuuuagaaccauugguagauuugccaauagguauuaacaucacuagguuucaaacuuuacuugcuuuacauagaaguuauuugacuccuggugauucuucuucagguuggacagcuggugcugcagcuuauuauguggguuaucuucaaccuaggacuuuucuauuaaaauauaaugaaaauggaaccauuacagaugcuguagacugugcacuugacccucucucagaaacaaaguguacguugaaauccuucacuguagaaaaaggaaucuaucaaacuucuaacuuuagaguccaaccaacagaaucuauuguuagauuuccuaauauuacaaacuugugcccuuuuggugaaguuuuuaacgccaccagauuugcaucuguuuaugcuuggaacaggaagagaaucagcaacuguguugcugauuauucuguccuauauaauuccgcaucauuuuccacuuuuaaguguuauggagugucuccuacuaaauuaaaugaucucugcuuuacuaaugucuaugcagauucauuuguaauuagaggugaugaagucagacaaaucgcuccagggcaaacuggaaagauugcugauuauaauuauaaauuaccagaugauuuuacaggcugcguuauagcuuggaauucuaacaaucuugauucuaagguuggugguaauuauaauuaccuguauagauuguuuaggaagucuaaucucaaaccuuuugagagagauauuucaacugaaaucuaucaggccgguagcacaccuuguaaugguguugaagguuuuaauuguuacuuuccuuuacaaucauaugguuuccaacccacuaaugguguugguuaccaaccauacagaguaguaguacuuucuuuugaacuucuacaugcaccagcaacuguuuguggaccuaaaaagucuacuaauuugguuaaaaacaaaugugucaauuucaacuucaaugguuuaacaggcacagguguucuuacugagucuaacaaaaaguuucugccuuuccaacaauuuggcagagacauugcugacacuacugaugcuguccgugauccacagacacuugagauucuugacauuacaccauguucuuuugguggugucaguguuauaacaccaggaacaaauacuucuaaccagguugcuguucuuuaucaggauguuaacugcacagaagucccuguugcuauucaugcagaucaacuuacuccuacuuggcguguuuauucuacagguucuaauguuuuucaaacacgugcaggcuguuuaauaggggcugaacaugucaacaacucauaugagugugacauacccauuggugcagguauaugcgcuaguuaucagacucagacuaauucuccucggcgggcacguaguguagcuagucaauccaucauugccuacacuaugucacuuggugcagaaaauucaguugcuuacucuaauaacucuauugccauacccacaaauuuuacuauuaguguuaccacagaaauucuaccagugucuaugaccaagacaucaguagauuguacaauguacauuuguggugauucaacugaaugcagcaaucuuuuguugcaauauggcaguuuuuguacacaauuaaaccgugcuuuaacuggaauagcuguugaacaagacaaaaacacccaagaaguuuuugcacaagucaaacaaauuuacaaaacaccaccaauuaaagauuuuggugguuuuaauuuuucacaaauauuaccagauccaucaaaaccaagcaagaggucauuuauugaagaucuacuuuucaacaaagugacacuugcagaugcuggcuucaucaaacaauauggugauugccuuggugauauugcugcuagagaccucauuugugcacaaaaguuuaacggccuuacuguuuugccaccuuugcucacagaugaaaugauugcucaauacacuucugcacuguuagcggguacaaucacuucugguuggaccuuuggugcaggugcugcauuacaaauaccauuugcuaugcaaauggcuuauagguuuaaugguauuggaguuacacagaauguucucuaugagaaccaaaaauugauugccaaccaauuuaauagugcuauuggcaaaauucaagacucacuuucuuccacagcaagugcacuuggaaaacuucaagauguggucaaccaaaaugcacaagcuuuaaacacgcuuguuaaacaacuuagcuccaauuuuggugcaauuucaaguguuuuaaaugauauccuuucacgucuugacaaaguugaggcugaagugcaaauugauagguugaucacaggcagacuucaaaguuugcagacauaugugacucaacaauuaauuagagcugcagaaaucagagcuucugcuaaucuugcugcuacuaaaaugucagaguguguacuuggacaaucaaaaagaguugauuuuuguggaaagggcuaucaucuuauguccuucccucagucagcaccucaugguguagucuucuugcaugugacuuaugucccugcacaagaaaagaacuucacaacugcuccugccauuugucaugauggaaaagcacacuuuccucgugaaggugucuuuguuucaaauggcacacacugguuuguaacacaaaggaauuuuuaugaaccacaaaucauuacuacagacaacacauuugugucugguaacugugauguuguaauaggaauugucaacaacacaguuuaugauccuuugcaacuugaauuagacucauucaaggaggaguuagauaaauauuuuaagaaucauacaucaccagauguugauuuaggugacaucucuggcauuaaugcuucaguuguaaacauucaaaaagaaauugaccgccucaaugagguugccaagaauuuaaaugaaucucucaucgaucuccaagaacuuggaaaguaugagcaguauauaaaauggccaugguacauuuggcuagguuuuauagcuggcuugauugccauaguaauggugacaauuaugcuuugcuguaugaccaguugcuguaguugucucaagggcuguuguucuuguggauccugcugcaaauuugaugaagacgacucugagccagugcucaaaggagucaaauuacauuacacauaaggacuaguuauaagacugacuagcccgaugggccucccaacgggcccuccuccccuccuugcaccgagauuaauaaaaaaaaaaaaaaaaaaaaaaaaaaaaaaaaaaaaaaaaaaaaaaaaaaaaaaaaaaaaaaaaugcaucccccccccccccccccccccccccccccccaaaggcucuuuucagagccaccagaauu

SEQ ID NO: 12687 - RNA, 4039 nt, Artificial Sequence
  SARS-CoV-2/India/1-31/2020__EPI_ISL_413523 spike protein mRNA wt (1-1273)
aggagaaagcuuaccauguuuguuuuucuuguuuuauugccacuagucucuagucaguguguuaaucuuacaaccagaacucaauuacccccugcauacacuaauucuuucacacgugguguuuauuacccugacaaaguuuucagauccucaguuuuacauucaacucaggacuuguucuuaccuuucuuuuccaauguuacuugguuccaugcuauacaugucucugggaccaaugguacuaagagguuugauaacccuguccuaccauuuaaugaugguguuuauuuugcuuccacugagaagucuaacauaauaagaggcuggauuuuugguacuacuuuagauucgaagacccagucccuacuuauuguuaauaacgcuacuaauguuguuauuaaagucugugaauuucaauuuuguaaugauccauuuuuggguguuuauuaccacaaaaacaacaaaaguuggauggaaagugaguucagaguuuauucuagugcgaauaauugcacuuuugaauaugucucucagccuuuucuuauggaccuugaaggaaaacaggguaauuucaaaaaucuuagggaauuuguguuuaagaauauugaugguuauuuuaaaauauauucuaagcacacgccuauuaauuuagugcgugaucucccucaggguuuuucggcuuuagaaccauugguagauuugccaauagguauuaacaucacuagguuucaaacuuuacuugcuuuacauagaaguuauuugacuccuggugauucuucuucagguuggacagcuggugcugcagcuuauuauguggguuaucuucaaccuaggacuuuucuauuaaaauauaaugaaaauggaaccauuacagaugcuguagacugugcacuugacccucucucagaaacaaaguguacguugaaauccuucacuguagaaaaaggaaucuaucaaacuucuaacuuuagaguccaaccaacagaaucuauuguuagauuuccuaauauuacaaacuugugcccuuuuggugaaguuuuuaacgccaccagauuugcaucuguuuaugcuuggaacaggaagagaaucagcaacuguguugcugauuauucuguccuauauaauuccgcaucauuuuccacuuuuaaguguuauggagugucuccuacuaaauuaaaugaucucugcuuuacuaaugucuaugcagauucauuuguaauuagaggugaugaagucagacaaaucgcuccagggcaaacuggaaagauugcugauuauaauuauaaauuaccagaugauuuuacaggcugcguuauagcuuggaauucuaacaaucuugauucuaagguuggugguaauuauaauuaccuguauagauuguuuaggaagucuaaucucaaaccuuuugagagagauauuucaacugaaaucuaucaggccgguagcacaccuuguaaugguguugaagguuuuaauuguuacuuuccuuuacaaucauaugguuuccaacccacuaaugguguugguuaccaaccauacagaguaguaguacuuucuuuugaacuucuacaugcaccagcaacuguuuguggaccuaaaaagucuacuaauuugguuaaaaacaaaugugucaauuucaacuucaaugguuuaacaggcacagguguucuuacugagucuaacaaaaaguuucugccuuuccaacaauuuggcagagacauugcugacacuacugaugcuguccgugauccacagacacuugagauucuugacauuacaccauguucuuuugguggugucaguguuauaacaccaggaacaaauacuucuaaccagguugcuguucuuuaucaggauguuaacugcacagaagucccuguugcuauucaugcagaucaacuuacuccuacuuggcguguuuauucuacagguucuaauguuuuucaaacacgugcaggcuguuuaauaggggcugaacaugucaacaacucauaugagugugacauacccauuggugcagguauaugcgcuaguuaucagacucagacuaauucuccucggcgggcacguaguguagcuagucaauccaucauugccuacacuaugucacuuggugcagaaaauucaguugcuuacucuaauaacucuauugccauacccacaaauuuuacuauuaguguuaccacagaaauucuaccagugucuaugaccaagacaucaguagauuguacaauguacauuuguggugauucaacugaaugcagcaaucuuuuguugcaauauggcaguuuuuguacacaauuaaaccgugcuuuaacuggaauagcuguugaacaagacaaaaacacccaagaaguuuuugcacaagucaaacaaauuuacaaaacaccaccaauuaaagauuuuggugguuuuaauuuuucacaaauauuaccagauccaucaaaaccaagcaagaggucauuuauugaagaucuacuuuucaacaaagugacacuugcagaugcuggcuucaucaaacaauauggugauugccuuggugauauugcugcuagagaccucauuugugcacaaaaguuuaacggccuuacuguuuugccaccuuugcucacagaugaaaugauugcucaauacacuucugcacuguuagcggguacaaucacuucugguuggaccuuuggugcaggugcugcauuacaaauaccauuugcuaugcaaauggcuuauagguuuaaugguauuggaguuacacagaauguucucuaugagaaccaaaaauugauugccaaccaauuuaauaguguuauuggcaaaauucaagacucacuuucuuccacagcaagugcacuuggaaaacuucaagauguggucaaccaaaaugcacaagcuuuaaacacgcuuguuaaacaacuuagcuccaauuuuggugcaauuucaaguguuuuaaaugauauccuuucacgucuugacaaaguugaggcugaagugcaaauugauagguugaucacaggcagacuucaaaguuugcagacauaugugacucaacaauuaauuagagcugcagaaaucagagcuucugcuaaucuugcugcuacuaaaaugucagaguguguacuuggacaaucaaaaagaguugauuuuuguggaaagggcuaucaucuuauguccuucccucagucagcaccucaugguguagucuucuugcaugugacuuaugucccugcacaagaaaagaacuucacaacugcuccugccauuugucaugauggaaaagcacacuuuccucgugaaggugucuuuguuucaaauggcacacacugguuuguaacacaaaggaauuuuuaugaaccacaaaucauuacuacagacaacacauuugugucugguaacugugauguuguaauaggaauugucaacaacacaguuuaugauccuuugcaaccugaauuagacucauucaaggaggaguuagauaaauauuuuaagaaucauacaucaccagauguugauuuaggugacaucucuggcauuaaugcuucaguuguaaacauucaaaaagaaauugaccgccucaaugagguugccaagaauuuaaaugaaucucucaucgaucuccaagaacuuggaaaguaugagcaguauauaaaauggccaugguacauuuggcuagguuuuauagcuggcuugauugccauaguaauggugacaauuaugcuuugcuguaugaccaguugcuguaguugucucaagggcuguuguucuuguggauccugcugcaaauuugaugaagacgacucugagccagugcucaaaggagucaaauuacauuacacauaaggacuaguuauaagacugacuagcccgaugggccucccaacgggcccuccuccccuccuugcaccgagauuaauaaaaaaaaaaaaaaaaaaaaaaaaaaaaaaaaaaaaaaaaaaaaaaaaaaaaaaaaaaaaaaaaugcaucccccccccccccccccccccccccccccccaaaggcucuuuucagagccaccagaauu

SEQ ID NO: 12688 - RNA, 4039 nt, Artificial Sequence
  SARS-CoV-2/Guangdong/GD2020087-P0008/2020__EPI_ISL_413863 spike protein mRNA wt (1-1273)
aggagaaagcuuaccauguuuguuuuucuuguuuuauugccacuagucucuagucaguguguuaaucuuacaaccagaacucaauuacccccugcauacacuaauucuuucacacgugguguuuauuacccugacaaaguuuucagauccucaguuuuacauucaacucaggacuuguucuuaccuuucuuuuccaauguuacuugguuccaugcuauacaugucucugggaccaaugguacuaagagguuugauaacccuguccuaccauuuaaugaugguguuuauuuugcuuccacugagaagucuaacauaauaagaggcuggauuuuugguacuacuuuagauucgaagacccagucccuacuuauuguuaauaacgcuacuaauguuguuauuaaagucugugaauuucaauuuuguaaugauccauuuuuggguguuuauuaccacaaaaacaacaaaaguuggauggaaagugaguucagaguuuauucuagugcgaauaauugcacuuuugaauaugucucucagccuuuucuuauggaccuugaaggaaaacaggguaauuucaaaaaucuuagggaauuuguguuuaagaauauugaugguuauuuuaaaauauauucuaagcacacgccuauuaauuuagugcgugaucucccucaggguuuuucggcuuuagaaccauugguagauuugccaauagguauuaacaucacuagguuucaaacuuuacuugcuuuacauagaaguuauuugacuccuggugauucuucuucagguuggacagcuggugcugcagcuuauuauguggguuaucuucaaccuaggacuuuucuauuaaaauauaaugaaaauggaaccauuacagaugcuguagacugugcacuugacccucucucagaaacaaaguguacguugaaauccuucacuguagaaaaaggaaucuaucaaacuucuaacuuuagaguccaaccaacagaaucuauuguuagauuuccuaauauuacaaacuugugcccuuuuggugaaguuuuuaacgccaccagauuugcaucuguuuaugcuuggaacaggaagagaaucagcaacuguguugcugauuauucuguccuauauaauuccgcaucauuuuccacuuuuaaguguuauggagugucuccuacuaaauuaaaugaucucugcuuuacuaaugucuaugcagauucauuuguaauuagaggugaugaagucagagaaaucgcuccagggcaaacuggaaagauugcugauuauaauuauaaauuaccagaugauuuuacaggcugcguuauagcuuggaauucuaacaaucuugauucuaagguuggugguaauuauaauuaccuguauagauuguuuaggaagucuaaucucaaaccuuuugagagagauauuucaacugaaaucuaucaggccgguagcacaccuuguaaugguguugaagguuuuaauuguuacuuuccuuuacaaucauaugguuuccaacccacuaaugguguugguuaccaaccauacagaguaguaguacuuucuuuugaacuucuacaugcaccagcaacuguuuguggaccuaaaaagucuacuaauuugguuaaaaacaaaugugucaauuucaacuucaaugguuuaacaggcacagguguucuuacugagucuaacaaaaaguuucugccuuuccaacaauuuggcagagacauugcugacacuacugaugcuguccgugauccacagacacuugagauucuugacauuacaccauguucuuuugguggugucaguguuauaacaccaggaacaaauacuucuaaccagguugcuguucuuuaucaggauguuaacugcacagaagucccuguugcuauucaugcagaucaacuuacuccuacuuggcguguuuauucuacagguucuaauguuuuucaaacacgugcaggcuguuuaauaggggcugaacaugucaacaacucauaugagugugacauacccauuggugcagguauaugcgcuaguuaucagacucagacuaauucuccucggcgggcacguaguguagcuagucaauccaucauugccuacacuaugucacuuggugcagaaaauucaguugcuuacucuaauaacucuauugccauacccacaaauuuuacuauuaguguuaccacagaaauucuaccagugucuaugaccaagacaucaguagauuguacaauguacauuuguggugauucaacugaaugcagcaaucuuuuguugcaauauggcaguuuuuguacacaauuaaaccgugcuuuaacuggaauagcuguugaacaagacaaaaacacccaagaaguuuuugcacaagucaaacaaauuuacaaaacaccaccaauuaaagauuuuggugguuuuaauuuuucacaaauauuaccagauccaucaaaaccaagcaagaggucauuuauugaagaucuacuuuucaacaaagugacacuugcagaugcuggcuucaucaaacaauauggugauugccuuggugauauugcugcuagagaccucauuugugcacaaaaguuuaacggccuuacuguuuugccaccuuugcucacagaugaaaugauugcucaauacacuucugcacuguuagcggguacaaucacuucugguuggaccuuuggugcaggugcugcauuacaaauaccauuugcuaugcaaauggcuuauagguuuaaugguauuggaguuacacagaauguucucuaugagaaccaaaaauugauugccaaccaauuuaauagugcuauuggcaaaauucaagacucacuuucuuccacagcaagugcacuuggaaaacuucaagauguggucaaccaaaaugcacaagcuuuaaacacgcuuguuaaacaacuuagcuccaauuuuggugcaauuucaaguguuuuaaaugauauccuuucacgucuugacaaaguugaggcugaagugcaaauugauagguugaucacaggcagacuucaaaguuugcagacauaugugacucaacaauuaauuagagcugcagaaaucagagcuucugcuaaucuugcugcuacuaaaaugucagaguguguacuuggacaaucaaaaagaguugauuuuuguggaaagggcuaucaucuuauguccuucccucagucagcaccucaugguguagucuucuugcaugugacuuaugucccugcacaagaaaagaacuucacaacugcuccugccauuugucaugauggaaaagcacacuuuccucgugaaggugucuuuguuucaaauggcacacacugguuuguaacacaaaggaauuuuuaugaaccacaaaucauuacuacagacaacacauuugugucugguaacugugauguuguaauaggaauugucaacaacacaguuuaugauccuuugcaaccugaauuagacucauucaaggaggaguuagauaaauauuuuaagaaucauacaucaccagauguugauuuaggugacaucucuggcauuaaugcuucaguuguaaacauucaaaaagaaauugaccgccucaaugagguugccaagaauuuaaaugaaucucucaucgaucuccaagaacuuggaaaguaugagcaguauauaaaauggccaugguacauuuggcuagguuuuauagcuggcuugauugccauaguaauggugacaauuaugcuuugcuguaugaccaguugcuguaguugucucaagggcuguuguucuuguggauccugcugcaaauuugaugaagacgacucugagccagugcucaaaggagucaaauuacauuacacauaaggacuaguuauaagacugacuagcccgaugggccucccaacgggcccuccuccccuccuugcaccgagauuaauaaaaaaaaaaaaaaaaaaaaaaaaaaaaaaaaaaaaaaaaaaaaaaaaaaaaaaaaaaaaaaaaugcaucccccccccccccccccccccccccccccccaaaggcucuuuucagagccaccagaauu

SEQ ID NO: 12689 - RNA, 4039 nt, Artificial Sequence
  SARS-CoV-2/Sweden/01/2020__EPI_ISL_411951 spike protein mRNA wt (1-1273)
aggagaaagcuuaccauguuuguuuuucuuguuuuauugccacuagucucuagucaguguguuaaucuuacaaccagaacucaauuacccccugcauacacuaauucuuucacacgugguguuuauuacccugacaaaguuuucagauccucaguuuuacauucaacucaggacuuguucuuaccuuucuuuuccaauguuacuugguuccaugcuauacaugucucugggaccaaugguacuaagagguuugauaacccuguccuaccauuuaaugaugguguuuauuuugcuuccacugagaagucuaacauaauaagaggcuggauuuuugguacuacuuuagauucgaagacccagucccuacuuauuguuaauaacgcuacuaauguuguuauuaaagucugugaauuucaauuuuguaaugauccauuuuuggguguuuauuaccacaaaaacaacaaaaguuggauggaaagugaguucagaguuuauucuagugcgaauaauugcacuuuugaauaugucucucagccuuuucuuauggaccuugaaggaaaacaggguaauuucaaaaaucuuagggaauuuguguuuaagaauauugaugguuauuuuaaaauauauucuaagcacacgccuauuaauuuagugcgugaucucccucaggguuuuucggcuuuagaaccauugguagauuugccaauagguauuaacaucacuagguuucaaacuuuacuugcuuuacauagaaguuauuugacuccuggugauucuucuucagguuggacagcuggugcugcagcuuauuauguggguuaucuucaaccuaggacuuuucuauuaaaauauaaugaaaauggaaccauuacagaugcuguagacugugcacuugacccucucucagaaacaaaguguacguugaaauccuucacuguagaaaaaggaaucuaucaaacuucuaacuuuagaguccaaccaacagaaucuauuguuagauuuccuaauauuacaaacuugugcccuuuuggugaaguuuuuaacgccaccagauuugcaucuguuuaugcuuggaacaggaagagaaucagcaacuguguugcugauuauucuguccuauauaauuccgcaucauuuuccacuuuuaaguguuauggagugucuccuacuaaauuaaaugaucucugcuuuacuaaugucuaugcagauucauuuguaauuagaggugaugaagucagacaaaucgcuccagggcaaacuggaaagauugcugauuauaauuauaaauuaccagaugauuuuacaggcugcguuauagcuuggaauucuaacaaucuugauucuaagguuggugguaauuauaauuaccuguauagauuguuuaggaagucuaaucucaaaccuuuugagagagauauuucaacugaaaucuaucaggccgguagcacaccuuguaaugguguugaagguuuuaauuguuacuuuccuuuacaaucauaugguuuccaacccacuaaugguguugguuaccaaccauacagaguaguaguacuuucuuuugaacuucuacaugcaccagcaacuguuuguggaccuaaaaagucuacuaauuugguuaaaaacaaaugugucaauuucaacuucaaugguuuaacaggcacagguguucuuacugagucuaacaaaaaguuucugccuuuccaacaauuuggcagagacauugcugacacuacugaugcuguccgugauccacagacacuugagauucuugacauuacaccauguucuuuugguggugucaguguuauaacaccaggaacaaauacuucuaaccagguugcuguucuuuaucaggauguuaacugcacagaagucccuguugcuauucaugcagaucaacuuacuccuacuuggcguguuuauucuacagguucuaauguuuuucaaacacgugcaggcuguuuaauaggggcugaacaugucaacaacucauaugagugugacauacccauuggugcagguauaugcgcuaguuaucagacucagacuaauucuccucggcgggcacguaguguagcuagucaauccaucauugccuacacuaugucacuuggugcagaaaauucaguugcuuacucuaauaacucuauugccauacccacaaauuuuacuauuaguguuaccacagaaauucuaccagugucuaugaccaagacaucaguagauuguacaauguacauuuguggugauucaacugaaugcagcaaucuuuuguugcaauauggcaguuuuuguacacaauuaaaccgugcuuuaacuggaauagcuguugaacaagacaaaaacacccaagaaguuuuugcacaagucaaacaaauuuacaaaacaccaccaauuaaagauuguggugguuuuaauuuuucacaaauauuaccagauccaucaaaaccaagcaagaggucauuuauugaagaucuacuuuucaacaaagugacacuugcagaugcuggcuucaucaaacaauauggugauugccuuggugauauugcugcuagagaccucauuugugcacaaaaguuuaacggccuuacuguuuugccaccuuugcucacagaugaaaugauugcucaauacacuucugcacuguuagcggguacaaucacuucugguuggaccuuuggugcaggugcugcauuacaaauaccauuugcuaugcaaauggcuuauagguuuaaugguauuggaguuacacagaauguucucuaugagaaccaaaaauugauugccaaccaauuuaauagugcuauuggcaaaauucaagacucacuuucuuccacagcaagugcacuuggaaaacuucaagauguggucaaccaaaaugcacaagcuuuaaacacgcuuguuaaacaacuuagcuccaauuuuggugcaauuucaaguguuuuaaaugauauccuuucacgucuugacaaaguugaggcugaagugcaaauugauagguugaucacaggcagacuucaaaguuugcagacauaugugacucaacaauuaauuagagcugcagaaaucagagcuucugcuaaucuugcugcuacuaaaaugucagaguguguacuuggacaaucaaaaagaguugauuuuuguggaaagggcuaucaucuuauguccuucccucagucagcaccucaugguguagucuucuugcaugugacuuaugucccugcacaagaaaagaacuucacaacugcuccugccauuugucaugauggaaaagcacacuuuccucgugaaggugucuuuguuucaaauggcacacacugguuuguaacacaaaggaauuuuuaugaaccacaaaucauuacuacagacaacacauuugugucugguaacugugauguuguaauaggaauugucaacaacacaguuuaugauccuuugcaaccugaauuagacucauucaaggaggaguuagauaaauauuuuaagaaucauacaucaccagauguugauuuaggugacaucucuggcauuaaugcuucaguuguaaacauucaaaaagaaauugaccgccucaaugagguugccaagaauuuaaaugaaucucucaucgaucuccaagaacuuggaaaguaugagcaguauauaaaauggccaugguacauuuggcuagguuuuauagcuggcuugauugccauaguaauggugacaauuaugcuuugcuguaugaccaguugcuguaguugucucaagggcuguuguucuuguggauccugcugcaaauuugaugaagacgacucugagccagugcucaaaggagucaaauuacauuacacauaaggacuaguuauaagacugacuagcccgaugggccucccaacgggcccuccuccccuccuugcaccgagauuaauaaaaaaaaaaaaaaaaaaaaaaaaaaaaaaaaaaaaaaaaaaaaaaaaaaaaaaaaaaaaaaaaugcaucccccccccccccccccccccccccccccccaaaggcucuuuucagagccaccagaauu

SEQ ID NO: 12690 - RNA, 4039 nt, Artificial Sequence
  SARS-CoV-2/Tianmen/HBCDC-HB-07/2020__EPI_ISL_412983 spike protein mRNA wt (1-1273)
aggagaaagcuuaccauguuuguuuuucuuguuuuauugccacuagucucuagucaguguguuaaucuuacaaccagaacucaauuacccccugcauacacuaauucuuucacacgugguguuuauuacccugacaaaguuuucagauccucaguuuuacauucaacucaggacuuguucuuaccuuucuuuuccaauguuacuugguuccaugcuauacaugucucugggaccaaugguacuaagagguuugauaacccuguccuaccauuuaaugaugguguuuauuuugcuuccacugagaagucuaacauaauaagaggcuggauuuuugguacuacuuuagauucgaagacccagucccuacuuauuguuaauaacgcuacuaauguuguuauuaaagucugugaauuucaauuuuguaaugauccauuuuuggguguuuauuaccacaaaaacaacaaaaguuggauggaaagugaguucagaguuuauucuagugcgaauaauugcacuuuugaauaugucucucagccuuuucuuauggaccuugaaggaaaacaggguaauuucaaaaaucuuagggaauuuguguuuaagaauauugaugguuauuuuaaaauauauucuaagcacacgccuauuaauuuagugcgugaucucccucaggguuuuucggcuuuagaaccauugguagauuugccaauagguauuaacaucacuagguuucaaacuuuacuugcuuuacauagaaguuauuugacuccuggugauucuucuucagguuggacagcuggugcugcagcuuauuauguggguuaucuucaaccuaggacuuuucuauuaaaauauaaugaaaauggaaccauuacagaugcuguagacugugcacuugacccucucucagaaacaaaguguacguugaaauccuucacuguagaaaaaggaaucuaucaaacuucuaacuuuagaguccaaccaacagaaucuauuguuagauuuccuaauauuacaaacuugugcccuuuuggugaaguuuuuaacgccaccagauuugcaucuguuuaugcuuggaacaggaagagaaucagcaacuguguugcugauuauucuguccuauauaauuccgcaucauuuuccacuuuuaaguguuauggagugucuccuacuaaauuaaaugaucucugcuuuacuaaugucuaugcagauucauuuguaauuagaggugaugaagucagacaaaucgcuccagggcaaacuggaaagauugcugauuauaauuauaaauuaccagaugauuuuacaggcugcguuauagcuuggaauucuaacaaucuugauucuaagguuggugguaauuauaauuaccuguauagauuguuuaggaagucuaaucucaaaccuuuugagagagauauuucaacugaaaucuaucaggccgguagcacaccuuguaaugguguugaagguuuuaauuguuacuuuccuuuacaaucauaugguuuccaacccacuaaugguguugguuaccaaccauacagaguaguaguacuuucuuuugaacuucuacaugcaccagcaacuguuuguggaccuaaaaagucuacuaauuugguuaaaaacaaaugugucaauuucaacuucaaugguuuaacaggcacagguguucuuacugagucuaacaaaaaguuucugccuuuccaacaauuuggcagagacauugcugacacuacugaugcuguccgugauccacagacacuugagauucuugacauuacaccauguucuuuugguggugucaguguuauaacaccaggaacaaauacuucuaaccagguugcuguucuuuaucaggaucuuaacugcacagaagucccuguugcuauucaugcagaucaacuuacuccuacuuggcguguuuauucuacagguucuaauguuuuucaaacacgugcaggcuguuuaauaggggcugaacaugucaacaacucauaugagugugacauacccauuggugcagguauaugcgcuaguuaucagacucagacuaauucuccucggcgggcacguaguguagcuagucaauccaucauugccuacacuaugucacuuggugcagaaaauucaguugcuuacucuaauaacucuauugccauacccacaaauuuuacuauuaguguuaccacagaaauucuaccagugucuaugaccaagacaucaguagauuguacaauguacauuuguggugauucaacugaaugcagcaaucuuuuguugcaauauggcaguuuuuguacacaauuaaaccgugcuuuaacuggaauagcuguugaacaagacaaaaacacccaagaaguuuuugcacaagucaaacaaauuuacaaaacaccaccaauuaaagauuuuggugguuuuaauuuuucacaaauauuaccagauccaucaaaaccaagcaagaggucauuuauugaagaucuacuuuucaacaaagugacacuugcagaugcuggcuucaucaaacaauauggugauugccuuggugauauugcugcuagagaccucauuugugcacaaaaguuuaacggccuuacuguuuugccaccuuugcucacagaugaaaugauugcucaauacacuucugcacuguuagcggguacaaucacuucugguuggaccuuuggugcaggugcugcauuacaaauaccauuugcuaugcaaauggcuuauagguuuaaugguauuggaguuacacagaauguucucuaugagaaccaaaaauugauugccaaccaauuuaauagugcuauuggcaaaauucaagacucacuuucuuccacagcaagugcacuuggaaaacuucaagauguggucaaccaaaaugcacaagcuuuaaacacgcuuguuaaacaacuuagcuccaauuuuggugcaauuucaaguguuuuaaaugauauccuuucacgucuugacaaaguugaggcugaagugcaaauugauagguugaucacaggcagacuucaaaguuugcagacauaugugacucaacaauuaauuagagcugcagaaaucagagcuucugcuaaucuugcugcuacuaaaaugucagaguguguacuuggacaaucaaaaagaguugauuuuuguggaaagggcuaucaucuuauguccuucccucagucagcaccucaugguguagucuucuugcaugugacuuaugucccugcacaagaaaagaacuucacaacugcuccugccauuugucaugauggaaaagcacacuuuccucgugaaggugucuuuguuucaaauggcacacacugguuuguaacacaaaggaauuuuuaugaaccacaaaucauuacuacagacaacacauuugugucugguaacugugauguuguaauaggaauugucaacaacacaguuuaugauccuuugcaaccugaauuagacucauucaaggaggaguuagauaaauauuuuaagaaucauacaucaccagauguugauuuaggugacaucucuggcauuaaugcuucaguuguaaacauucaaaaagaaauugaccgccucaaugagguugccaagaauuuaaaugaaucucucaucgaucuccaagaacuuggaaaguaugagcaguauauaaaauggccaugguacauuuggcuagguuuuauagcuggcuugauugccauaguaauggugacaauuaugcuuugcuguaugaccaguugcuguaguugucucaagggcuguuguucuuguggauccugcugcaaauuugaugaagacgacucugagccagugcucaaaggagucaaauuacauuacacauaaggacuaguuauaagacugacuagcccgaugggccucccaacgggcccuccuccccuccuugcaccgagauuaauaaaaaaaaaaaaaaaaaaaaaaaaaaaaaaaaaaaaaaaaaaaaaaaaaaaaaaaaaaaaaaaaugcaucccccccccccccccccccccccccccccccaaaggcucuuuucagagccaccagaauu

SEQ ID NO: 12691 - RNA, 4039 nt, Artificial Sequence
  SARS-CoV-2/Hong Kong/case42_VM20002493/2020__EPI_ISL_414527 spike protein mRNA wt (1-1273)
aggagaaagcuuaccauguuuguuuuucuuguuuuauugccacuagucucuagucaguguguuaaucuuacaaccagaacucaauuacccccugcauacacuaauucuuucacacgugguguuuauuacccugacaaaguuuucagauccucaguuuuacauucaacucaggacuuguucuuaccuuucuuuuccaauguuacuugguuccaugcuauacaugucucugggaccaaugguacuaagagguuugauaacccuguccuaccauuuaaugaugguguuuauuuugcuuccacugagaagucuaacauaauaagaggcuggauuuuugguacuacuuuagauucgaagacccagucccuacuuauuguuaauaacgcuacuaauguuguuauuaaagucugugaauuucaauuuuguaaugauccauuuuuggguguuuauuaccacaaaaacaacaaaaguuggauggaaagugaguucagaguuuauucuagugcgaauaauugcacuuuugaauaugucucucagccuuuucuuauggaccuugaaggaaaacaggguaauuucaaaaaucuuagggaauuuguguuuaagaauauugaugguuauuuuaaaauauauucuaagcacacgccuauuaauuuagugcgugaucucccucaggguuuuucggcuuuagaaccauugguagauuugccaauagguauuaacaucacuagguuucaaacuuuacuugcuuuacauagaaguuauuugacuccuggugauucuucuucagguuggacagcuggugcugcagcuuauuauguggguuaucuucaaccuaggacuuuucuauuaaaauauaaugaaaauggaaccauuacagaugcuguagacugugcacuugacccucucucagaaacaaaguguacguugaaauccuucacuguagaaaaaggaaucuaucaaacuucuaacuuuagaguccaaccaacagaaucuauuguuagauuuccuaauauuacaaacuugugcccuuuuggugaaguuuuuaacgccaccagauuugcaucuguuuaugcuuggaacaggaagagaaucagcaacuguguugcugauuauucuguccuauauaauuccgcaucauuuuccacuuuuaaguguuauggagugucuccuacuaaauuaaaugaucucugcuuuacuaaugucuaugcagauucauuuguaauuagaggugaugaagucagacaaaucgcuccagggcaaacuggaaagauugcugauuauaauuauaaauuaccagaugauuuuacaggcugcguuauagcuuggaauucuaacaaucuugauucuaagguuggugguaauuauaauuaccuguauagauuguuuaggaagucuaaucucaaaccuuuugagagagauauuucaacugaaaucuaucaggccgguagcacaccuuguaaugguguugaagguuuuaauuguuacuuuccuuuacaaucauaugguuuccaacccacuaaugguguugguuaccaaccauacagaguaguaguacuuucuuuugaacuucuacaugcaccagcaacuguuuguggaccuaaaaagucuacuaauuugguuaaaaacaaaugugucaauuucaacuucaaugguuuaacaggcacagguguucuuacugagucuaacaaaaaguuucugccuuuccaacaauuuggcagagacauugcugacacuacugaugcuguccgugauccacagacacuugagauucuugacauuacaccauguucuuuugguggugucaguguuauaacaccaggaacaaauacuucuaaccagguugcuguucuuuaucaggauguuaacugcacagaagucccuguugcuauucaugcagaucaacuuacuccuacuuggcguguuuauucuacagguucuaauguuuuucaaacacgugcaggcuguuuaauaggggcugaacaugucaacaacucauaugagugugacauacccauuggugcagguauaugcgcuaguuaucagacucagacuaauucuccucggcgggcacguaguguagcuagucaauccaucauugccuacacuaugucacuuggugcagaaaauucaguugcuuacucuaauaacucuauugccauacccacaaauuuugcuauuaguguuaccacagaaauucuaccagugucuaugaccaagacaucaguagauuguacaauguacauuuguggugauucaacugaaugcagcaaucuuuuguugcaauauggcaguuuuuguacacaauuaaaccgugcuuuaacuggaauagcuguugaacaagacaaaaacacccaagaaguuuuugcacaagucaaacaaauuuacaaaacaccaccaauuaaagauuuuggugguuuuaauuuuucacaaauauuaccagauccaucaaaaccaagcaagaggucauuuauugaagaucuacuuuucaacaaagugacacuugcagaugcuggcuucaucaaacaauauggugauugccuuggugauauugcugcuagagaccucauuugugcacaaaaguuuaacggccuuacuguuuugccaccuuugcucacagaugaaaugauugcucaauacacuucugcacuguuagcggguacaaucacuucugguuggaccuuuggugcaggugcugcauuacaaauaccauuugcuaugcaaauggcuuauagguuuaaugguauuggaguuacacagaauguucucuaugagaaccaaaaauugauugccaaccaauuuaauagugcuauuggcaaaauucaagacucacuuucuuccacagcaagugcacuuggaaaacuucaagauguggucaaccaaaaugcacaagcuuuaaacacgcuuguuaaacaacuuagcuccaauuuuggugcaauuucaaguguuuuaaaugauauccuuucacgucuugacaaaguugaggcugaagugcaaauugauagguugaucacaggcagacuucaaaguuugcagacauaugugacucaacaauuaauuagagcugcagaaaucagagcuucugcuaaucuugcugcuacuaaaaugucagaguguguacuuggacaaucaaaaagaguugauuuuuguggaaagggcuaucaucuuauguccuucccucagucagcaccucaugguguagucuucuugcaugugacuuaugucccugcacaagaaaagaacuucacaacugcuccugccauuugucaugauggaaaagcacacuuuccucgugaaggugucuuuguuucaaauggcacacacugguuuguaacacaaaggaauuuuuaugaaccacaaaucauuacuacagacaacacauuugugucugguaacugugauguuguaauaggaauugucaacaacacaguuuaugauccuuugcaaccugaauuagacucauucaaggaggaguuagauaaauauuuuaagaaucauacaucaccagauguugauuuaggugacaucucuggcauuaaugcuucaguuguaaacauucaaaaagaaauugaccgccucaaugagguugccaagaauuuaaaugaaucucucaucgaucuccaagaacuuggaaaguaugagcaguauauaaaauggccaugguacauuuggcuagguuuuauagcuggcuugauugccauaguaauggugacaauuaugcuuugcuguaugaccaguugcuguaguugucucaagggcuguuguucuuguggauccugcugcaaauuugaugaagacgacucugagccagugcucaaaggagucaaauuacauuacacauaaggacuaguuauaagacugacuagcccgaugggccucccaacgggcccuccuccccuccuugcaccgagauuaauaaaaaaaaaaaaaaaaaaaaaaaaaaaaaaaaaaaaaaaaaaaaaaaaaaaaaaaaaaaaaaaaugcaucccccccccccccccccccccccccccccccaaaggcucuuuucagagccaccagaauu

SEQ ID NO: 12692 - RNA, 4039 nt, Artificial Sequence
  SARS-CoV-2/USA/CruiseA-23/2020__EPI_ISL_414482 spike protein mRNA wt (1-1273)
aggagaaagcuuaccauguuuguuuuucuuguuuuauugccacuagucucuagucaguguguuaaucuuacaaccagaacucaauuacccccugcauacacuaauucuuucacacgugguguuuauuacccugacaaaguuuucagauccucaguuuuacauucaacucaggacuuguucuuaccuuucuuuuccaauguuacuugguuccaugcuauacaugucucugggaccaaugguacuaagagguuugauaacccuguccuaccauuuaaugaugguguuuauuuugcuuccacugagaagucuaacauaauaagaggcuggauuuuugguacuacuuuagauucgaagacccagucccuacuuauuguuaauaacgcuacuaauguuguuauuaaagucugugaauuucaauuuuguaaugauccauuuuuggguguuuauuaccacaaaaacaacaaaaguuggauggaaagugaguucagaguuuauucuagugcgaauaauugcacuuuugaauaugucucucagccuuuucuuauggaccuugaaguaaaacaggguaauuucaaaaaucuuagggaauuuguguuuaagaauauugaugguuauuuuaaaauauauucuaagcacacgccuauuaauuuagugcgugaucucccucaggguuuuucggcuuuagaaccauugguagauuugccaauagguauuaacaucacuagguuucaaacuuuacuugcuuuacauagaaguuauuugacuccuggugauucuucuucagguuggacagcuggugcugcagcuuauuauguggguuaucuucaaccuaggacuuuucuauuaaaauauaaugaaaauggaaccauuacagaugcuguagacugugcacuugacccucucucagaaacaaaguguacguugaaauccuucacuguagaaaaaggaaucuaucaaacuucuaacuuuagaguccaaccaacagaaucuauuguuagauuuccuaauauuacaaacuugugcccuuuuggugaaguuuuuaacgccaccagauuugcaucuguuuaugcuuggaacaggaagagaaucagcaacuguguugcugauuauucuguccuauauaauuccgcaucauuuuccacuuuuaaguguuauggagugucuccuacuaaauuaaaugaucucugcuuuacuaaugucuaugcagauucauuuguaauuagaggugaugaagucagacaaaucgcuccagggcaaacuggaaagauugcugauuauaauuauaaauuaccagaugauuuuacaggcugcguuauagcuuggaauucuaacaaucuugauucuaagguuggugguaauuauaauuaccuguauagauuguuuaggaagucuaaucucaaaccuuuugagagagauauuucaacugaaaucuaucaggccgguagcacaccuuguaaugguguugaagguuuuaauuguuacuuuccuuuacaaucauaugguuuccaacccacuaaugguguugguuaccaaccauacagaguaguaguacuuucuuuugaacuucuacaugcaccagcaacuguuuguggaccuaaaaagucuacuaauuugguuaaaaacaaaugugucaauuucaacuucaaugguuuaacaggcacagguguucuuacugagucuaacaaaaaguuucugccuuuccaacaauuuggcagagacauugcugacacuacugaugcuguccgugauccacagacacuugagauucuugacauuacaccauguucuuuugguggugucaguguuauaacaccaggaacaaauacuucuaaccagguugcuguucuuuaucaggauguuaacugcacagaagucccuguugcuauucaugcagaucaacuuacuccuacuuggcguguuuauucuacagguucuaauguuuuucaaacacgugcaggcuguuuaauaggggcugaacaugucaacaacucauaugagugugacauacccauuggugcagguauaugcgcuaguuaucagacucagacuaauucuccucggcgggcacguaguguagcuagucaauccaucauugccuacacuaugucacuuggugcagaaaauucaguugcuuacucuaauaacucuauugccauacccacaaauuuuacuauuaguguuaccacagaaauucuaccagugucuaugaccaagacaucaguagauuguacaauguacauuuguggugauucaacugaaugcagcaaucuuuuguugcaauauggcaguuuuuguacacaauuaaaccgugcuuuaacuggaauagcuguugaacaagacaaaaacacccaagaaguuuuugcacaagucaaacaaauuuacaaaacaccaccaauuaaagauuuuggugguuuuaauuuuucacaaauauuaccagauccaucaaaaccaagcaagaggucauuuauugaagaucuacuuuucaacaaagugacacuugcagaugcuggcuucaucaaacaauauggugauugccuuggugauauugcugcuagagaccucauuugugcacaaaaguuuaacggccuuacuguuuugccaccuuugcucacagaugaaaugauugcucaauacacuucugcacuguuagcggguacaaucacuucugguuggaccuuuggugcaggugcugcauuacaaauaccauuugcuaugcaaauggcuuauagguuuaaugguauuggaguuacacagaauguucucuaugagaaccaaaaauugauugccaaccaauuuaauagugcuauuggcaaaauucaagacucacuuucuuccacagcaagugcacuuggaaaacuucaagauguggucaaccaaaaugcacaagcuuuaaacacgcuuguuaaacaacuuagcuccaauuuuggugcaauuucaaguguuuuaaaugauauccuuucacgucuugacaaaguugaggcugaagugcaaauugauagguugaucacaggcagacuucaaaguuugcagacauaugugacucaacaauuaauuagagcugcagaaaucagagcuucugcuaaucuugcugcuacuaaaaugucagaguguguacuuggacaaucaaaaagaguugauuuuuguggaaagggcuaucaucuuauguccuucccucagucagcaccucaugguguagucuucuugcaugugacuuaugucccugcacaagaaaagaacuucacaacugcuccugccauuugucaugauggaaaagcacacuuuccucgugaaggugucuuuguuucaaauggcacacacugguuuguaacacaaaggaauuuuuaugaaccacaaaucauuacuacagacaacacauuugugucugguaacugugauguuguaauaggaauugucaacaacacaguuuaugauccuuugcaaccugaauuagacucauucaaggaggaguuagauaaauauuuuaagaaucauacaucaccagauguugauuuaggugacaucucuggcauuaaugcuucaguuguaaacauucaaaaagaaauugaccgccucaaugagguugccaagaauuuaaaugaaucucucaucgaucuccaagaacuuggaaaguaugagcaguauauaaaauggccaugguacauuuggcuagguuuuauagcuggcuugauugccauaguaauggugacaauuaugcuuugcuguaugaccaguugcuguaguugucucaagggcuguuguucuuguggauccugcugcaaauuugaugaagacgacucugagccagugcucaaaggagucaaauuacauuacacauaaggacuaguuauaagacugacuagcccgaugggccucccaacgggcccuccuccccuccuugcaccgagauuaauaaaaaaaaaaaaaaaaaaaaaaaaaaaaaaaaaaaaaaaaaaaaaaaaaaaaaaaaaaaaaaaaugcaucccccccccccccccccccccccccccccccaaaggcucuuuucagagccaccagaauu

SEQ ID NO: 12693 - RNA, 4039 nt, Artificial Sequence
  SARS-CoV-2/Hong Kong/case85_VM20002868/2020__EPI_ISL_414519 spike protein mRNA wt (1-1273)
aggagaaagcuuaccauguuuguuuuucuuguuuuagugccacuagucucuagucaguguguuaaucuuacaaccagaacucaauuacccccugcauacacuaauucuuucacacgugguguuuauuacccugacaaaguuuucagauccucaguuuuacauucaacucaggacuuguucuuaccuuucuuuuccaauguuacuugguuccaugcuauacaugucucugggaccaaugguacuaagagguuugauaacccuguccuaccauuuaaugaugguguuuauuuugcuuccacugagaagucuaacauaauaagaggcuggauuuuugguacuacuuuagauucgaagacccagucccuacuuauuguuaauaacgcuacuaauguuguuauuaaagucugugaauuucaauuuuguaaugauccauuuuuggguguuuauuaccacaaaaacaacaaaaguuggauggaaagugaguucagaguuuauucuagugcgaauaauugcacuuuugaauaugucucucagccuuuucuuauggaccuugaaggaaaacaggguaauuucaaaaaucuuagggaauuuguguuuaagaauauugaugguuauuuuaaaauauauucuaagcacacgccuauuaauuuagugcgugaucucccucaggguuuuucggcuuuagaaccauugguagauuugccaauagguauuaacaucacuagguuucaaacuuuacuugcuuuacauagaaguuauuugacuccuggugauucuucuucagguuggacagcuggugcugcagcuuauuauguggguuaucuucaaccuaggacuuuucuauuaaaauauaaugaaaauggaaccauuacagaugcuguagacugugcacuugacccucucucagaaacaaaguguacguugaaauccuucacuguagaaaaaggaaucuaucaaacuucuaacuuuagaguccaaccaacagaaucuauuguuagauuuccuaauauuacaaacuugugcccuuuuggugaaguuuuuaacgccaccagauuugcaucuguuuaugcuuggaacaggaagagaaucagcaacuguguugcugauuauucuguccuauauaauuccgcaucauuuuccacuuuuaaguguuauggagugucuccuacuaaauuaaaugaucucugcuuuacuaaugucuaugcagauucauuuguaauuagaggugaugaagucagacaaaucgcuccagggcaaacuggaaagauugcugauuauaauuauaaauuaccagaugauuuuacaggcugcguuauagcuuggaauucuaacaaucuugauucuaagguuggugguaauuauaauuaccuguauagauuguuuaggaagucuaaucucaaaccuuuugagagagauauuucaacugaaaucuaucaggccgguagcacaccuuguaaugguguugaagguuuuaauuguuacuuuccuuuacaaucauaugguuuccaacccacuaaugguguugguuaccaaccauacagaguaguaguacuuucuuuugaacuucuacaugcaccagcaacuguuuguggaccuaaaaagucuacuaauuugguuaaaaacaaaugugucaauuucaacuucaaugguuuaacaggcacagguguucuuacugagucuaacaaaaaguuucugccuuuccaacaauuuggcagagacauugcugacacuacugaugcuguccgugauccacagacacuugagauucuugacauuacaccauguucuuuugguggugucaguguuauaacaccaggaacaaauacuucuaaccagguugcuguucuuuaucaggauguuaacugcacagaagucccuguugcuauucaugcagaucaacuuacuccuacuuggcguguuuauucuacagguucuaauguuuuucaaacacgugcaggcuguuuaauaggggcugaacaugucaacaacucauaugagugugacauacccauuggugcagguauaugcgcuaguuaucagacucagacuaauucuccucggcgggcacguaguguagcuagucaauccaucauugccuacacuaugucacuuggugcagaaaauucaguugcuuacucuaauaacucuauugccauacccacaaauuuuacuauuaguguuaccacagaaauucuaccagugucuaugaccaagacaucaguagauuguacaauguacauuuguggugauucaacugaaugcagcaaucuuuuguugcaauauggcaguuuuuguacacaauuaaaccgugcuuuaacuggaauagcuguugaacaagacaaaaacacccaagaaguuuuugcacaagucaaacaaauuuacaaaacaccaccaauuaaagauuuuggugguuuuaauuuuucacaaauauuaccagauccaucaaaaccaagcaagaggucauuuauugaagaucuacuuuucaacaaagugacacuugcagaugcuggcuucaucaaacaauauggugauugccuuggugauauugcugcuagagaccucauuugugcacaaaaguuuaacggccuuacuguuuugccaccuuugcucacagaugaaaugauugcucaauacacuucugcacuguuagcggguacaaucacuucugguuggaccuuuggugcaggugcugcauuacaaauaccauuugcuaugcaaauggcuuauagguuuaaugguauuggaguuacacagaauguucucuaugagaaccaaaaauugauugccaaccaauuuaauagugcuauuggcaaaauucaagacucacuuucuuccacagcaagugcacuuggaaaacuucaagauguggucaaccaaaaugcacaagcuuuaaacacgcuuguuaaacaacuuagcuccaauuuuggugcaauuucaaguguuuuaaaugauauccuuucacgucuugacaaaguugaggcugaagugcaaauugauagguugaucacaggcagacuucaaaguuugcagacauaugugacucaacaauuaauuagagcugcagaaaucagagcuucugcuaaucuugcugcuacuaaaaugucagaguguguacuuggacaaucaaaaagaguugauuuuuguggaaagggcuaucaucuuauguccuucccucagucagcaccucaugguguagucuucuugcaugugacuuaugucccugcacaagaaaagaacuucacaacugcuccugccauuugucaugauggaaaagcacacuuuccucgugaaggugucuuuguuucaaauggcacacacugguuuguaacacaaaggaauuuuuaugaaccacaaaucauuacuacagacaacacauuugugucugguaacugugauguuguaauaggaauugucaacaacacaguuuaugauccuuugcaaccugaauuagacucauucaaggaggaguuagauaaauauuuuaagaaucauacaucaccagauguugauuuaggugacaucucuggcauuaaugcuucaguuguaaacauucaaaaagaaauugaccgccucaaugagguugccaagaauuuaaaugaaucucucaucgaucuccaagaacuuggaaaguaugagcaguauauaaaauggccaugguacauuuggcuagguuuuauagcuggcuugauugccauaguaauggugacaauuaugcuuugcuguaugaccaguugcuguaguugucucaagggcuguuguucuuguggauccugcugcaaauuugaugaagacgacucugagccagugcucaaaggagucaaauuacauuacacauaaggacuaguuauaagacugacuagcccgaugggccucccaacgggcccuccuccccuccuugcaccgagauuaauaaaaaaaaaaaaaaaaaaaaaaaaaaaaaaaaaaaaaaaaaaaaaaaaaaaaaaaaaaaaaaaaugcaucccccccccccccccccccccccccccccccaaaggcucuuuucagagccaccagaauu

SEQ ID NO: 12694 - RNA, 4039 nt, Artificial Sequence
  SARS-CoV-2/England/200990660/2020__EPI_ISL_414523 spike protein mRNA wt (1-1273)
aggagaaagcuuaccauguuuguuuuucuuguuuuauugccacuagucucuagucaguguguuaaucuuacaaccagaacucaauuacccccugcauacacuaauucuuucacacgugguguuuauuacccugacaaaguuuucagauccucaguuuuacauucaacucaggacuuguucuuaccuuucuuuuccaauguuacuugguuccaugcuauacaugucucugggaccaaugguacuaagagguuugauaacccuguccuaccauuuaaugaugguguuuauuuugcuuccacugagaagucuaacauaauaagaggcuggauuuuugguacuacuuuagauucgaagacccagucccuacuuauuguuaauaacgcuacuaauguuguuauuaaagucugugaauuucaauuuuguaaugauccauuuuuggguguuuauuaccacaaaaacaacaaaaguuggauggaaagugaguucagaguuuauucuagugcgaauaauugcacuuuugaauaugucucucagccuuuucuuauggaccuugaaggaaaacaggguaauuucaaaaaucuuagggaauuuguguuuaagaauauugaugguuauuuuaaaauauauucuaagcacacgccuauuaauuuagugcgugaucucccucaggguuuuucggcuuuagaaccauugguagauuugccaauagguauuaacaucacuagguuucaaacuuuacuugcuuuacauagaaguuauuugacuccuggugauucuucuucagguuggacagcuggugcugcagcuuauuauguggguuaucuucaaccuaggacuuuucuauuaaaauauaaugaaaauggaaccauuacagaugcuguagacugugcacuugacccucucucagaaacaaaguguacguugaaauccuucacuguagaaaaaggaaucuaucaaacuucuaacuuuagaguccaaccaacagaaucuauuguuagauuuccuaauauuacaaacuugugcccuuuuggugaaguuuuuaacgccaccagauuugcaucuguuuaugcuuggaacaggaagagaaucagcaacuguguugcugauuauucuguccuauauaauuccgcaucauuuuccacuuuuaaguguuauggagugucuccuacuaaauuaaaugaucucugcuuuacuaaugucuaugcagauucauuuguaauuagaggugaugaagucagacaaaucgcuccagggcaaacuggaaagauugcugauuauaauuauaaauuaccagaugauuuuacaggcugcguuauagcuuggaauucuaacaaucuugauucuaagguuggugguaauuauaauuaccuguauagauuguuuaggaagucuaaucucaaaccuuuugagagagauauuucaacugaaaucuaucaggccgguagcacaccuuguaaugguguugaagguuuuaauuguuacuuuccuuuacaaucauaugguuuccaacccacuaaugguguugguuaccaaccauacagaguaguaguacuuucuuuugaacuucuacaugcaccagcaacuguuuguggaccuaaaaagucuacuaauuugguuaaaaacaaaugugucaauuucaacuucaaugguuuaacaggcacagguguucuuacugagucuaacaaaaaguuucugccuuuccaacaauuuggcagagacauugcugacacuacugaugcuguccgugauccacagacacuugagauucuugacauuacaccauguucuuuugguggugucaguguuauaacaccaggaacaaauacuucuaaccagguugcuguucuuuaucaggguguuaacugcacagaagucccuguugcuauucaugcagaucaacuuacuccuacuuggcguguuuauucuacagguucuaauguuuuucaaacacgugcaggcuguuuaauaggggcugaacaugucaacaacucauaugagugugacauacccauuggugcagguauaugcgcuaguuaucagacucagacuaauucuccucggcgggcacguaguguagcuagucaauccaucauugccuacacuaugucacuuggugcagaaaauucaguugcuuacucuaauaacucuauugccauacccacaaauuuuacuauuaguguuaccacagaaauucuaccagugucuaugaccaagacaucaguagauuguacaauguacauuuguggugauucaacugaaugcagcaaucuuuuguugcaauauggcaguuuuuguacacaauuaaaccgugcuuuaacuggaauagcuguugaacaagacaaaaacacccaagaaguuuuugcacaagucaaacaaauuuacaaaacaccaccaauuaaagauuuuggugguuuuaauuuuucacaaauauuaccagauccaucaaaaccaagcaagaggucauuuauugaagaucuacuuuucaacaaagugacacuugcagaugcuggcuucaucaaacaauauggugauugccuuggugauauugcugcuagagaccucauuugugcacaaaaguuuaacggccuuacuguuuugccaccuuugcucacagaugaaaugauugcucaauacacuucugcacuguuagcggguacaaucacuucugguuggaccuuuggugcaggugcugcauuacaaauaccauuugcuaugcaaauggcuuauagguuuaaugguauuggaguuacacagaauguucucuaugagaaccaaaaauugauugccaaccaauuuaauagugcuauuggcaaaauucaagacucacuuucuuccacagcaagugcacuuggaaaacuucaagauguggucaaccaaaaugcacaagcuuuaaacacgcuuguuaaacaacuuagcuccaauuuuggugcaauuucaaguguuuuaaaugauauccuuucacgucuugacaaaguugaggcugaagugcaaauugauagguugaucacaggcagacuucaaaguuugcagacauaugugacucaacaauuaauuagagcugcagaaaucagagcuucugcuaaucuugcugcuacuaaaaugucagaguguguacuuggacaaucaaaaagaguugauuuuuguggaaagggcuaucaucuuauguccuucccucagucagcaccucaugguguagucuucuugcaugugacuuaugucccugcacaagaaaagaacuucacaacugcuccugccauuugucaugauggaaaagcacacuuuccucgugaaggugucuuuguuucaaauggcacacacugguuuguaacacaaaggaauuuuuaugaaccacaaaucauuacuacagacaacacauuugugucugguaacugugauguuguaauaggaauugucaacaacacaguuuaugauccuuugcaaccugaauuagacucauucaaggaggaguuagauaaauauuuuaagaaucauacaucaccagauguugauuuaggugacaucucuggcauuaaugcuucaguuguaaacauucaaaaagaaauugaccgccucaaugagguugccaagaauuuaaaugaaucucucaucgaucuccaagaacuuggaaaguaugagcaguauauaaaauggccaugguacauuuggcuagguuuuauagcuggcuugauugccauaguaauggugacaauuaugcuuugcuguaugaccaguugcuguaguugucucaagggcuguuguucuuguggauccugcugcaaauuugaugaagacgacucugagcuagugcucaaaggagucaaauuacauuacacauaaggacuaguuauaagacugacuagcccgaugggccucccaacgggcccuccuccccuccuugcaccgagauuaauaaaaaaaaaaaaaaaaaaaaaaaaaaaaaaaaaaaaaaaaaaaaaaaaaaaaaaaaaaaaaaaaugcaucccccccccccccccccccccccccccccccaaaggcucuuuucagagccaccagaauu

SEQ ID NO: 12695 - RNA, 4039 nt, Artificial Sequence
  SARS-CoV-2/Australia/NSW09/2020__EPI_ISL_413595 spike protein mRNA wt (1-1273)
aggagaaagcuuaccauguuuguuuuucuuguuuuauugccacuagucucuagucaguguguuaaucuuacaaccagaacucaauuacccccugcauacacuaauucuuucacacgugguguuuauuacccugacaaaguuuucagauccucaguuuuacauucaacucaggacuuguucuuaccuuucuuuuccaauguuacuugguuccaugcuauacaugucucugggaccaaugguacuaagagguuugauaacccuguccuaccauuuaaugaugguguuuauuuugcuuccacugagaagucuaacauaauaagaggcuggauuuuugguacuacuuuagauucgaagacccagucccuacuuauuguuaauaacgcuacuaauguuguuauuaaagucugugaauuucaauuuuguaaugauccauuuuuggguguuuauuaccacaaaaacaacaaaaguuggauggaaagugaguucagaguuuauucuagugcgaauaauugcacuuuugaauaugucucucagccuuuucuuauggaccuugaaggaaaacaggguaauuucaaaaaucuuagggaauuuguguuuaagaauauugaugguuauuuuaaaauauauucuaagcacacgccuauuaauuuagugcgugaucucccucaggguuuuucggcuuuagaaccauugguagauuugccaauagguauuaacaucacuagguuucaaacuuuacuugcuuuacauagaaguuauuugacuccuggugauucuucuucagguuggacagcuggugcugcagcuuauuauguggguuaucuucaaccuaggacuuuucuauuaaaauauaaugaaaauggaaccauuacagaugcuguagacugugcacuugacccucucucagaaacaaaguguacguugaaauccuucacuguagaaaaaggaaucuaucaaacuucuaacuuuagaguccaaccaacagaaucuauuguuagauuuccuaauauuacaaacuugugcccuuuuggugaaguuuuuaacgccaccagauuugcaucuguuuaugcuuggaacaggaagagaaucagcaacuguguugcugauuauucuguccuauauaauuccgcaucauuuuccacuuuuaaguguuauggagugucuccuacuaaauuaaaugaucucugcuuuacuaaugucuaugcagauucauuuguaauuagaggugaugaagucagacaaaucgcuccagggcaaacuggaaagauugcugauuauaauuauaaauuaccagaugauuuuacaggcugcguuauagcuuggaauucuaacaaucuugauucuaagguuggugguaauuauaauuaccuguauagauuguuuaggaagucuaaucucaaaccuuuugagagagauauuucaacugaaaucuaucaggccgguagcacaccuuguaaugguguugaagguuuuaauuguuacuuuccuuuacaaucauaugguuuccaacccacuaaugguguugguuaccaaccauacagaguaguaguacuuucuuuugaacuucuacaugcaccagcaacuguuuguggaccuaaaaagucuacuaauuugguuaaaaacaaaugugucaauuucaacuucaaugguuuaacaggcacagguguucuuacugagucuaacaaaaaguuucugccuuuccaacaauuuggcagagacauugcugacacuacugaugcuguccgugauccacagacacuugagauucuugacauuacaccauguucuuuugguggugucaguguuauaacaccaggaacaaauacuucuaaccagguugcuguucuuuaucaggauguuaacugcacagaagucccuguugcuauucaugcagaucaacuuacuccuacuuggcguguuuauucuacagguucuaauguuuuucaaacacgugcaggcuguuuaauaggggcugaacaugucaacaacucauaugagugugacauacccauuggugcagguauaugcgcuaguuaucagacucagacuaauucuccucggcgggcacguaguguagcuagucaauccaucauugccuacacuaugucacuuggugcagaaaauucaguugcuuacucuaauaacucuauugccauacccacaaauuuuacuauuaguguuaccacagaaauucuaccagugucuaugaccaagacaucaguagauuguacaauguacauuuguggugauucaacugaaugcagcaaucuuuuguugcaauauggcaguuuuuguacacaauuaaaccgugcuuuaacuggaauagcuguugaacaagacaaaaacacccaagaaguuuuugcacaagucaaacaaauuuacaaaacaccaccaauuaaagauuuuggugguuuuaauuuuucacaaauauuaccagauccaucaaaaccaagcaagaggucauuuauugaagaucuacuuuucaacaaagugacacuugcagaugcuggcuucaucaaacaauauggugauugccuuggugauauugcugcuagagaccucauuugugcacaaaaguuuaacggccuuacuguuuugccaccuuugcucacagaugaaaugauugcucaauacacuucugcacuguuagcggguacaaucacuucugguuggaccuuuggugcaggugcugcauuacaaauaccauuugcuaugcaaauggcuuauagguuuaaugguauuggaguuacacagaauguucucuaugagaaccaaaaauugauugccaaccaauuuaauagugcuauuggcaaaauucaagacucacuuucuuucacagcaagugcacuuggaaaacuucaagauguggucaaccaaaaugcacaagcuuuaaacacgcuuguuaaacaacuuagcuccaauuuuggugcaauuucaaguguuuuaaaugauauccuuucacgucuugacaaaguugaggcugaagugcaaauugauagguugaucacaggcagacuucaaaguuugcagacauaugugacucaacaauuaauuagagcugcagaaaucagagcuucugcuaaucuugcugcuacuaaaaugucagaguguguacuuggacaaucaaaaagaguugauuuuuguggaaagggcuaucaucuuauguccuucccucagucagcaccucaugguguagucuucuugcaugugacuuaugucccugcacaagaaaagaacuucacaacugcuccugccauuugucaugauggaaaagcacacuuuccucgugaaggugucuuuguuucaaauggcacacacugguuuguaacacaaaggaauuuuuaugaaccacaaaucauuacuacagacaacacauuugugucugguaacugugauguuguaauaggaauugucaacaacacaguuuaugauccuuugcaaccugaauuagacucauucaaggaggaguuagauaaauauuuuaagaaucauacaucaccagauguugauuuaggugacaucucuggcauuaaugcuucaguuguaaacauucaaaaagaaauugaccgccucaaugagguugccaagaauuuaaaugaaucucucaucgaucuccaagaacuuggaaaguaugagcaguauauaaaauggccaugguacauuuggcuagguuuuauagcuggcuugauugccauaguaauggugacaauuaugcuuugcuguaugaccaguugcuguaguugucucaagggcuguuguucuuguggauccugcugcaaauuugaugaagacgacucugagccagugcucaaaggagucaaauuacauuacacauaaggacuaguuauaagacugacuagcccgaugggccucccaacgggcccuccuccccuccuugcaccgagauuaauaaaaaaaaaaaaaaaaaaaaaaaaaaaaaaaaaaaaaaaaaaaaaaaaaaaaaaaaaaaaaaaaugcaucccccccccccccccccccccccccccccccaaaggcucuuuucagagccaccagaauu

SEQ ID NO: 12696 - RNA, 4039 nt, Artificial Sequence
  SARS-CoV-2/Australia/NSW10/2020__EPI_ISL_413596 spike protein mRNA wt (1-1273)
aggagaaagcuuaccauguuuguuuuucuuguuuuauugccacuagucucuagucaguguguuaaucuuacaaccagaacucaauuacccccugcauacacuaauucuuucacacgugguguuuauuacccugacaaaguuuucagauccucaguuuuacauucaacucaggacuuguucuuaccuuucuuuuccaauguuacuugguuccaugcuauacaugucucugggaccaaugguacuaagagguuugauaacccuguccuaccauuuaaugaugguguuuauuuugcuuccacugagaagucuaacauaauaagaggcuggauuuuugguacuacuuuagauucgaagacccagucccuacuuauuguuaauaacgcuacuaauguuguuauuaaagucugugaauuucaauuuuguaaugauccauuuuuggguguuuauuaccacaaaaacaacaaaaguuggauggaaagugaguucagaguuuauucuagugcgaauaauugcacuuuugaauaugucucucagccuuuucuuauggaccuugaaggaaaacaggguaauuucaaaaaucuuagggaauuuguguuuaagaauauugaugguuauuuuaaaauauauucuaagcacacgccuauuaauuuagugcgugaucucccucaggguuuuucggcuuuagaaccauugguagauuugccaauagguauuaacaucacuagguuucaaacuuuacuugcuuuacauagaaguuauuugacuccuggugauucuucuucagguuggacagcuggugcugcagcuuauuauguggguuaucuucaaccuaggacuuuucuauuaaaauauaaugaaaauggaaccauuacagaugcuguagacugugcacuugacccucucucagaaacaaaguguacguugaaauccuucacuguagaaaaaggaaucuaucaaacuucuaacuuuagaguccaaccaacagaaucuauuguuagauuuccuaauauuacaaacuugugcccuuuuggugaaguuuuuaacgccaccagauuugcaucuguuuaugcuuggaacaggaagagaaucagcaacuguguugcugauuauucuguccuauauaauuccgcaucauuuuccacuuuuaaguguuauggagugucuccuacuaaauuaaaugaucucugcuuuacuaaugucuaugcagauucauuuguaauuagaggugaugaagucagacaaaucgcuccagggcaaacuggaaagauugcugauuauaauuauaaauuaccagaugauuuuacaggcugcguuauagcuuggaauucuaacaaucuugauucuaagguuggugguaauuauaauuaccuguauagauuguuuaggaagucuaaucucaaaccuuuugagagagauauuucaacugaaaucuaucaggccgguagcacaccuuguaaugguguugaagguuuuaauuguuacuuuccuuuacaaucauaugguuuccaacccacuaaugguguugguuaccaaccauacagaguaguaguacuuucuuuugaacuucuacaugcaccagcaacuguuuguggaccuaaaaagucuacuaauuugguuaaaaacaaaugugucaauuucaacuucaaugguuuaacaggcacagguguucuuacugagucuaacaaaaaguuucugccuuuccaacaauuuggcagagacauugcugacacuacugaugcuguccgugauccacagacacuugagauucuugacauuacaccauguucuuuugguggugucaguguuauaacaccaggaacaaauacuucuaaccagguugcuguucuuuaucaggauguuaacugcacagaagucccuguugcuauucaugcagaucaacuuacuccuacuuggcguguuuauucuacagguucuaauguuuuucaaacacgugcaggcuguuuaauaggggcugaacaugucaacaacucauaugagugugacauacccauuggugcagguauaugcgcuaguuaucagacucagacuaauucuccucggcgggcacguaguguagcuagucaauccaucauugccuacacuaugucacuuggugcagaaaauucaguugcuuacucuaauaacucuauugccauacccacaaauuuuacuauuaguguuaccacagaaauucuaccagugucuaugaccaagacaucaguagauuguacaauguacauuuguggugauucaacugaaugcagcaaucuuuuguugcaauauggcaguuuuuguacacaauuaaaccgugcuuuaacuggaauagcuguugaacaagacaaaaacacccaagaaguuuuugcacaagucaaacaaauuuacaaaacaccaccaauuaaagauuuuggugguuuuaauuuuucacaaauauuaccagauccaucaaaaccaagcaagaggucauuuauugaagaucuacuuuucaacaaagugacacuugcagaugcuggcuucaucaaacaauauggugauugccuuggugauauugcugcuagagaccucauuugugcacaaaaguuuaacggccuuacuguuuugccaccuuugcucacagaugaaaugauugcucaauacacuucugcacuguuagcggguacaaucacuucugguuggaccuuuggugcaggugcugcauuacaaauaccauuugcuaugcaaauggcuuauagguuuaaugguauuggaguuacacagaauguucucuaugagaaccaaaaauugauugccaaccaauuuaauagugcuauuggcaaaauucaagacucacuuucuuccacagcaagugcacuuggaaaacuucaagauguggucaaccaaaaugcacaagcuuuaaacacgcuuguuaaacaacuuagcuccaauuuuggugcaauuucaaguguuuuaaaugauauccuuucacgucuugacaaaguugaggcugaagugcaaauugauagguugaucacaggcagacuucaaaguuugcagacauaugugacucaacaauuaauuagagcugcagaaaucagagcuucugcuaaucuugcugcuacuaaaaugucagaguguguacuuggacaaucaaaaagaguugauuuuuguggaaagggcuaucaucuuauguccuucccucagucagcaccucaugguguagucuucuugcaugugacuuaugucccugcacaagaaaagaacuucacaacugcuccugccauuugucaugauggaaaagcacacuuuccucgugaaggugucuuuguuucaaauggcacacacugguuuguaacacaaaggaauuuuuaugaaccacaaaucauuacuacagacaacacauuugugucugguaacugugauguuguaauaggaauugucaacaacacaguuuaugauccuuugcaaccugaauuagacucauucaaggaggaguuagauaaauauuuuaagaaucauacaucaccagauguugauuuaggugacaucucuggcauuaaugcuucaguuguaaacauucaaaaagaaauugaccgccucaaugagguugccaagaauuuaaaugaaucucucaucgaucuccaagaacuuggaaaguaugagcaguauauaaaauggccaugguacauuuggcuagguuuuauagcuggcuugauugccauaguaauggugacaauuaugcuuugcuguaugaccaguugcuguaguugucucaagggcuguuguucuuguggauccugcuucaaauuugaugaagacgacucugagccagugcucaaaggagucaaauuacauuacacauaaggacuaguuauaagacugacuagcccgaugggccucccaacgggcccuccuccccuccuugcaccgagauuaauaaaaaaaaaaaaaaaaaaaaaaaaaaaaaaaaaaaaaaaaaaaaaaaaaaaaaaaaaaaaaaaaugcaucccccccccccccccccccccccccccccccaaaggcucuuuucagagccaccagaauu

SEQ ID NO: 12697 - RNA, 4039 nt, Artificial Sequence
  SARS-CoV-2/Switzerland/1000477797/2020__EPI_ISL_413023 spike protein mRNA wt (1-1273)
aggagaaagcuuaccauguuuguuuuucuuguuuuauugccacuagucucuagucaguguguuaaucuuacaaccagaacucaauuacccccugcauacacuaauucuuucacacgugguguuuauuacccugacaaaguuuucagauccucaguuuuacauucaacucaggacuuguucuuaccuuucuuuuccaauguuacuugguuccaugcuauacaugucucugggaccaaugguacuaagagguuugauaacccuguccuaccauuuaaugaugguguuuauuuugcuuccacugagaagucuaacauaauaagaggcuggauuuuugguacuacuuuagauucgaagacccagucccuacuuauuguuaauaacgcuacuaauguuguuauuaaagucugugaauuucaauuuuguaaugauccauuuuuggguguuuauuaccacaaaaacaacaaaaguuggauggaaagugaguucagaguuuauucuagugcgaauaauugcacuuuugaauaugucucucagccuuuucuuauggaccuugaaggaaaacaggguaauuucaaaaaucuuagggaauuuguguuuaagaauauugaugguuauuuuaacauauauucuaagcacacgccuauuaauuuagugcgugaucucccucaggguuuuucggcuuuagaaccauugguagauuugccaauagguauuaacaucacuagguuucaaacuuuacuugcuuuacauagaaguuauuugacuccuggugauucuucuucagguuggacagcuggugcugcagcuuauuauguggguuaucuucaaccuaggacuuuucuauuaaaauauaaugaaaauggaaccauuacagaugcuguagacugugcacuugacccucucucagaaacaaaguguacguugaaauccuucacuguagaaaaaggaaucuaucaaacuucuaacuuuagaguccaaccaacagaaucuauuguuagauuuccuaauauuacaaacuugugcccuuuuggugaaguuuuuaacgccaccagauuugcaucuguuuaugcuuggaacaggaagagaaucagcaacuguguugcugauuauucuguccuauauaauuccgcaucauuuuccacuuuuaaguguuauggagugucuccuacuaaauuaaaugaucucugcuuuacuaaugucuaugcagauucauuuguaauuagaggugaugaagucagacaaaucgcuccagggcaaacuggaaagauugcugauuauaauuauaaauuaccagaugauuuuacaggcugcguuauagcuuggaauucuaacaaucuugauucuaagguuggugguaauuauaauuaccuguauagauuguuuaggaagucuaaucucaaaccuuuugagagagauauuucaacugaaaucuaucaggccgguagcacaccuuguaaugguguugaagguuuuaauuguuacuuuccuuuacaaucauaugguuuccaacccacuaaugguguugguuaccaaccauacagaguaguaguacuuucuuuugaacuucuacaugcaccagcaacuguuuguggaccuaaaaagucuacuaauuugguuaaaaacaaaugugucaauuucaacuucaaugguuuaacaggcacagguguucuuacugagucuaacaaaaaguuucugccuuuccaacaauuuggcagagacauugcugacacuacugaugcuguccgugauccacagacacuugagauucuugacauuacaccauguucuuuugguggugucaguguuauaacaccaggaacaaauacuucuaaccagguugcuguucuuuaucaggguguuaacugcacagaagucccuguugcuauucaugcagaucaacuuacuccuacuuggcguguuuauucuacagguucuaauguuuuucaaacacgugcaggcuguuuaauaggggcugaacaugucaacaacucauaugagugugacauacccauuggugcagguauaugcgcuaguuaucagacucagacuaauucuccucggcgggcacguaguguagcuagucaauccaucauugccuacacuaugucacuuggugcagaaaauucaguugcuuacucuaauaacucuauugccauacccacaaauuuuacuauuaguguuaccacagaaauucuaccagugucuaugaccaagacaucaguagauuguacaauguacauuuguggugauucaacugaaugcagcaaucuuuuguugcaauauggcaguuuuuguacacaauuaaaccgugcuuuaacuggaauagcuguugaacaagacaaaaacacccaagaaguuuuugcacaagucaaacaaauuuacaaaacaccaccaauuaaagauuuuggugguuuuaauuuuucacaaauauuaccagauccaucaaaaccaagcaagaggucauuuauugaagaucuacuuuucaacaaagugacacuugcagaugcuggcuucaucaaacaauauggugauugccuuggugauauugcugcuagagaccucauuugugcacaaaaguuuaacggccuuacuguuuugccaccuuugcucacagaugaaaugauugcucaauacacuucugcacuguuagcggguacaaucacuucugguuggaccuuuggugcaggugcugcauuacaaauaccauuugcuaugcaaauggcuuauagguuuaaugguauuggaguuacacagaauguucucuaugagaaccaaaaauugauugccaaccaauuuaauagugcuauuggcaaaauucaagacucacuuucuuccacagcaagugcacuuggaaaacuucaagauguggucaaccaaaaugcacaagcuuuaaacacgcuuguuaaacaacuuagcuccaauuuuggugcaauuucaaguguuuuaaaugauauccuuucacgucuugacaaaguugaggcugaagugcaaauugauagguugaucacaggcagacuucaaaguuugcagacauaugugacucaacaauuaauuagagcugcagaaaucagagcuucugcuaaucuugcugcuacuaaaaugucagaguguguacuuggacaaucaaaaagaguugauuuuuguggaaagggcuaucaucuuauguccuucccucagucagcaccucaugguguagucuucuugcaugugacuuaugucccugcacaagaaaagaacuucacaacugcuccugccauuugucaugauggaaaagcacacuuuccucgugaaggugucuuuguuucaaauggcacacacugguuuguaacacaaaggaauuuuuaugaaccacaaaucauuacuacagacaacacauuugugucugguaacugugauguuguaauaggaauugucaacaacacaguuuaugauccuuugcaaccugaauuagacucauucaaggaggaguuagauaaauauuuuaagaaucauacaucaccagauguugauuuaggugacaucucuggcauuaaugcuucaguuguaaacauucaaaaagaaauugaccgccucaaugagguugccaagaauuuaaaugaaucucucaucgaucuccaagaacuuggaaaguaugagcaguauauaaaauggccaugguacauuuggcuagguuuuauagcuggcuugauugccauaguaauggugacaauuaugcuuugcuguaugaccaguugcuguaguugucucaagggcuguuguucuuguggauccugcugcaaauuugaugaagacgacucugagccagugcucaaaggagucaaauuacauuacacauaaggacuaguuauaagacugacuagcccgaugggccucccaacgggcccuccuccccuccuugcaccgagauuaauaaaaaaaaaaaaaaaaaaaaaaaaaaaaaaaaaaaaaaaaaaaaaaaaaaaaaaaaaaaaaaaaugcaucccccccccccccccccccccccccccccccaaaggcucuuuucagagccaccagaauu

SEQ ID NO: 12698 - RNA, 4039 nt, Artificial Sequence
  SARS-CoV-2/Belgium/BA-02291/2020__EPI_ISL_415159 spike protein mRNA wt (1-1273)
aggagaaagcuuaccauguuuguuuuucuuguuuuauugccacuagucucuagucaguguguuaaucuuacaaccagaacucaauuacccccugcauacacuaauucuuucacacgugguguuuauuacccugacaaaguuuucagauccucaguuuuacauucaacucaggacuuguucuuaccuuucuuuuccaauguuacuugguuccaugcuauacaugucucugggaccaaugguacuaagagguuugauaacccuguccuaccauuuaaugaugguguuuauuuugcuuccacugagaagucuaacauaauaagaggcuggauuuuugguacuacuuuagauucgaagacccagucccuacuuauuguuaauaacgcuacuaauguuguuauuaaagucugugaauuucaauuuuguaaugauccauuuuuggguguuuauuaccacaaaaacaacaaaaguuggauggaaagugaguucagaguuuauucuagugcgaauaauugcacuuuugaauaugucucucagccuuuucuuauggaccuugaaggaaaacaggguaauuucaaaaaucuuagggaauuuguguuuaagaauauugaugguuauuuuaaaauauauucuaagcacacgccuauuaauuuagugcgugaucucccucaggguuuuucggcuuuagaaccauugguagauuugccaauagguauuaacaucacuagguuucaaacuuuacuugcuuuacauagaaguuauuugacuccuggugauucuucuucagguuggacagcuggugcugcagcuuauuauguggguuaucuucaaccuaggacuuuucuauuaaaauauaaugaaaauggaaccauuacagaugcuguagacugugcacuugacccucucucagaaacaaaguguacguugaaauccuucacuguagaaaaaggaaucuaucaaacuucuaacuuuagaguccaaccaacagaaucuauuguuagauuuccuaauauuacaaacuugugcccuuuuggugaaguuuuuaacgccaccagauuugcaucuguuuaugcuuggaacaggaagagaaucagcaacuguguugcugauuauucuguccuauauaauuccgcaucauuuuccacuuuuaaguguuauggagugucuccuacuaaauuaaaugaucucugcuuuacuaaugucuaugcagauucauuuguaauuagaggugaugaagucagacaaaucgcuccagggcaaacuggaaagauugcugauuauaauuauaaauuaccagaugauuuuacaggcugcguuauagcuuggaauucuaacaaucuugauucuaagguuggugguaauuauaauuaccuguauagauuguuuaggaggucuaaucucaaaccuuuugagagagauauuucaacugaaaucuaucaggccgguagcacaccuuguaaugguguugaagguuuuaauuguuacuuuccuuuacaaucauaugguuuccaacccacuaaugguguugguuaccaaccauacagaguaguaguacuuucuuuugaacuucuaccugcaccagcaacuguuuguggaccuaaaaagucuacuaauuugguuaaaaacaaaugugucaauuucaacuucaaugguuuaacaggcacagguguucuuacugagucuaacaaaaaguuucugccuuuccaacaauuuggcagagacauugcugacacuacugaugcuguccgugauccacagacacuugagauucuugacauuacaccauguucuuuugguggugucaguguuauaacaccaggaacaaauacuucuaaccagguugcuguucuuuaucaggguguuaacugcacagaagucccuguugcuauucaugcagaucaacuuacuccuacuuggcguguuuauucuacagguucuaauguuuuucaaacacgugcaggcuguuuaauaggggcugaacaugucaacaacucauaugagugugacauacccauuggugcagguauaugcgcuaguuaucagacucagacuaauucuccucggcgggcacguaguguagcuagucaauccaucauugccuacacuaugucacuuggugcagaaaauucaguugcuuacucuaauaacucuauugccauacccacaaauuuuacuauuaguguuaccacagaaauucuaccagugucuaugaccaagacaucaguagauuguacaauguacauuuguggugauucaacugaaugcagcaaucuuuuguugcaauauggcaguuuuuguacacaauuaaaccgugcuuuaacuggaauagcuguugaacaagacaaaaacacccaagaaguuuuugcacaagucaaacaaauuuacaaaacaccaccaauuaaagauuuuggugguuuuaauuuuucacaaauauuaccagauccaucaaaaccaagcaagaggucauuuauugaagaucuacuuuucaacaaagugacacuugcagaugcuggcuucaucaaacaauauggugauugccuuggugauauugcugcuagagaccucauuugugcacaaaaguuuaacggccuuacuguuuugccaccuuugcucacagaugaaaugauugcucaauacacuucugcacuguuagcggguacaaucacuucugguuggaccuuuggugcaggugcugcauuacaaauaccauuugcuaugcaaauggcuuauagguuuaaugguauuggaguuacacagaauguucucuaugagaaccaaaaauugauugccaaccaauuuaauagugcuauuggcaaaauucaagacucacuuucuucugcagcaccugcacuuggaaaacuucaagauguggucaaccaaaaugcacaagcuuuaaacacgcuuguuaaacaacuuagcuccaauuuuggugcaauuucaaguguuuuaaaugauauccuuucacgucuugacaaaguugaggcugaagugcaaauugauagguugaucacaggcagacuucaaaguuugcagacauaugugacucaacaauuaauuagagcugcagaaaucagagcuucugcuaaucuugcugcuacuaaaaugucagaguguguacuuggacaaucaaaaagaguugauuuuuguggaaagggcuaucaucuuauguccuucccucagucagcaccucaugguguagucuucuugcaugugacuuaugucccugcacaagaaaagaacuucacaacugcuccugccauuugucaugauggaaaagcacacuuuccucgugaaggugucuuuguuucaaauggcacacacugguuuguaacacaaaggaauuuuuaugaaccacaaaucauuacuacagacaacacauuugugucugguaacugugauguuguaauaggaauugucaacaacacaguuuaugauccuuugcaaccugaauuagacucauucaaggaggaguuagauaaauauuuuaagaaucauacaucaccagauguugauuuaggugacaucucuggcauuaaugcuucaguuguaaacauucaaaaagaaauugaccgccucaaugagguugccaagaauuuaaaugaaucucucaucgaucuccaagaacuuggaaaguaugagcaguauauaaaauggccaugguacauuuggcuagguuuuauagcuggcuugauugccauaguaauggugacaauuaugcuuugcuguaugaccaguugcuguaguugucucaagggcuguuguucuuguggauccugcugcaaauuugaugaagacgacucugagccagugcucaaaggagucaaauuacauuacacauaaggacuaguuauaagacugacuagcccgaugggccucccaacgggcccuccuccccuccuugcaccgagauuaauaaaaaaaaaaaaaaaaaaaaaaaaaaaaaaaaaaaaaaaaaaaaaaaaaaaaaaaaaaaaaaaaugcaucccccccccccccccccccccccccccccccaaaggcucuuuucagagccaccagaauu

SEQ ID NO: 12699 - RNA, 4039 nt, Artificial Sequence
  SARS-CoV-2/USA/WA8-UW5/2020__EPI_ISL_413486 spike protein mRNA wt (1-1273)
aggagaaagcuuaccauguuuguuuuucuuguuuuauugccacuagucucuagucaguguguuaaucuuacaaccagaacucaauuacccccugcauacacuaauucuuucacacgugguguuuauuacccugacaaaguuuucagauccucaguuuuacauucaacucaggacuuguucuuaccuuucuuuuccaauguuacuugguuccaugcuauacaugucucugggaccaaugguacuaagagguuugauaacccuguccuaccauuuaaugaugguguuuauuuugcuuccacugagaagucuaacauaauaagaggcuggauuuuugguacuacuuuagauucgaagacccagucccuacuuauuguuaauaacgcuacuaauguuguuauuaaagucugugaauuucaauuuuguaaugauccauuuuuggguguuuauuaccacaaaaacaacaaaaguuggauggaaagugaguucagaguuuauucuagugcgaauaauugcacuuuugaauaugucucucagccuuuucuuauggaccuugaaggaaaacaggguaauuucaaaaaucuuagggaauuuguguuuaagaauauugaugguuauuuuaaaauauauucuaagcacacgccuauuaauuuagugcgugaucucccucaggguuuuucggcuuuagaaccauugguagauuugccaauagguauuaacaucacuagguuucaaacuuuacuugcuuuacauagaaguuauuugacuccuggugauucuucuucagguuggacagcuggugcugcagcuuauuauguggguuaucuucaaccuaggacuuuucuauuaaaauauaaugaaaauggaaccauuacagaugcuguagacugugcacuugacccucucucagaaacaaaguguacguugaaauccuucacuguagaaaaaggaaucuaucaaacuucuaacuuuagaguccaaccaacagaaucuauuguuagauuuccuaauauuacaaacuugugcccuuuuggugaaguuuuuaacgccaccagauuugcaucuguuuaugcuuggaacaggaagagaaucagcaacuguguugcugauuauucuguccuauauaauuccgcaucauuuuccacuuuuaaguguuauggagugucuccuacuaaauuaaaugaucucugcuuuacuaaugucuaugcagauucauuuguaauuagaggugaugaagucagacaaaucgcuccagggcaaacuggaaagauugcugauuauaauuauaaauuaccagaugauuuuacaggcugcguuauagcuuggaauucuaacaaucuugauucuaagguuggugguaauuauaauuaccuguauagauuguuuaggaagucuaaucucaaaccuuuugagagagauauuucaacugaaaucuaucaggccgguagcacaccuuguaaugguguugaagguuuuaauuguuacuuuccuuuacaaucauaugguuuccaacccacuaaugguguugguuaccaaccauacagaguaguaguacuuucuuuugaacuucuacaugcaccagcaacuguuuguggaccuaaaaagucuacuaauuugguuaaaaacaaaugugucaauuucaacuucaaugguuuaacaggcacagguguucuuacugagucuaacaaaaaguuucugccuuuccaacaauuuggcagagacauugcugacacuacugaugcuguccgugauccacagacacuugagauucuugacauuacaccauguucuuuugguggugucaguguuauaacaccaggaacaaauacuucuaaccagguugcuguucuuuaucaggauguuaacugcacagaagucccuguugcuauucaugcagaucaacuuacuccuacuuggcguguuuauucuacagguucuaauguuuuucaaacacgugcaggcuguuuaauaggggcugaauaugucaacaacucauaugagugugacauacccauuggugcagguauaugcgcuaguuaucagacucagacuaauucuccucggcgggcacguaguguagcuagucaauccaucauugccuacacuaugucacuuggugcagaaaauucaguugcuuacucuaauaacucuauugccauacccacaaauuuuacuauuaguguuaccacagaaauucuaccagugucuaugaccaagacaucaguagauuguacaauguacauuuguggugauucaacugaaugcagcaaucuuuuguugcaauauggcaguuuuuguacacaauuaaaccgugcuuuaacuggaauagcuguugaacaagacaaaaacacccaagaaguuuuugcacaagucaaacaaauuuacaaaacaccaccaauuaaagauuuuggugguuuuaauuuuucacaaauauuaccagauccaucaaaaccaagcaagaggucauuuauugaagaucuacuuuucaacaaagugacacuugcagaugcuggcuucaucaaacaauauggugauugccuuggugauauugcugcuagagaccucauuugugcacaaaaguuuaacggccuuacuguuuugccaccuuugcucacagaugaaaugauugcucaauacacuucugcacuguuagcggguacaaucacuucugguuggaccuuuggugcaggugcugcauuacaaauaccauuugcuaugcaaauggcuuauagguuuaaugguauuggaguuacacagaauguucucuaugagaaccaaaaauugauugccaaccaauuuaauagugcuauuggcaaaauucaagacucacuuucuuccacagcaagugcacuuggaaaacuucaagauguggucaaccaaaaugcacaagcuuuaaacacgcuuguuaaacaacuuagcuccaauuuuggugcaauuucaaguguuuuaaaugauauccuuucacgucuugacaaaguugaggcugaagugcaaauugauagguugaucacaggcagacuucaaaguuugcagacauaugugacucaacaauuaauuagagcugcagaaaucagagcuucugcuaaucuugcugcuacuaaaaugucagaguguguacuuggacaaucaaaaagaguugauuuuuguggaaagggcuaucaucuuauguccuucccucagucagcaccucaugguguagucuucuugcaugugacuuaugucccugcacaagaaaagaacuucacaacugcuccugccauuugucaugauggaaaagcacacuuuccucgugaaggugucuuuguuucaaauggcacacacugguuuguaacacaaaggaauuuuuaugaaccacaaaucauuacuacagacaacacauuugugucugguaacugugauguuguaauaggaauugucaacaacacaguuuaugauccuuugcaaccugaauuagacucauucaaggaggaguuagauaaauauuuuaagaaucauacaucaccagauguugauuuaggugacaucucuggcauuaaugcuucaguuguaaacauucaaaaagaaauugaccgccucaaugagguugccaagaauuuaaaugaaucucucaucgaucuccaagaacuuggaaaguaugagcaguauauaaaauggccaugguacauuuggcuagguuuuauagcuggcuugauugccauaguaauggugacaauuaugcuuugcuguaugaccaguugcuguaguugucucaagggcuguuguucuuguggauccugcugcaaauuugaugaagacgacucugagccagugcucaaaggagucaaauuacauuacacauaaggacuaguuauaagacugacuagcccgaugggccucccaacgggcccuccuccccuccuugcaccgagauuaauaaaaaaaaaaaaaaaaaaaaaaaaaaaaaaaaaaaaaaaaaaaaaaaaaaaaaaaaaaaaaaaaugcaucccccccccccccccccccccccccccccccaaaggcucuuuucagagccaccagaauu

SEQ ID NO: 12700 - RNA, 4039 nt, Artificial Sequence
  SARS-CoV-2/England/20102000506/2020__EPI_ISL_415147 spike protein mRNA wt (1-1273)
aggagaaagcuuaccauguuuguuuuucuuguuuuauugccacuagucucuagucaguguguuaaucuuacaaccagaacucaauuacccccugcauacacuaauucuuucacacgugguguuuauuacccugacaaaguuuucagauccucaguuuuacauucaacucaggacuuguucuuaccuuucuuuuccaauguuacuugguuccaugcuauacaugucucugggaccaaugguacuaagagguuugauaacccuguccuaccauuuaaugaugguguuuauuuugcuuccacugagaagucuaacauaauaagaggcuggauuuuugguacuacuuuagauucgaagacccagucccuacuuauuguuaauaacgcuacuaauguuguuauuaaagucugugaauuucaauuuuguaaugauccauuuuuggguguuuauuaccacaaaaacaacaaaaguuggauggaaagugaguucagaguuuauucuagugcgaauaauugcacuuuugaauaugucucucagccuuuucuuauggaccuugaaggaaaacaggguaauuucaaaaaucuuagggaauuuguguuuaagaauauugaugguuauuuuaaaauauauucuaagcacacgccuauuaauuuagugcgugaucucccucaggguuuuucggcuuuagaaccauugguagauuugccaauagguauuaacaucacuagguuucaaacuuuacuugcuuuacauagaaguuauuugacuccuggugauucuucuucagguuggacagcuggugcugcagcuuauuauguggguuaucuucaaccuaggacuuuucuauuaaaauauaaugaaaauggaaccauuacagaugcuguagacugugcacuugacccucucucagaaacaaaguguacguugaaauccuucacuguagaaaaaggaaucuaucaaacuucuaacuuuagaguccaaccaacagaaucuauuguuagauuuccuaauauuacaaacuugugcccuuuuggugaaguuuuuaacgccaccagauuugcaucuguuuaugcuuggaacaggaagagaaucagcaacuguguugcugauuauucuguccuauauaauuccgcaucauuuuccacuuuuaaguguuauggagugucuccuacuaaauuaaaugaucucugcuuuacuaaugucuaugcagauucauuuguaauuagaggugaugaagucagacaaaucgcuccagggcaaacuggaaagauugcugauuauaauuauaaauuaccagaugauuuuacaggcugcguuauagcuuggaauucuaacaaucuugauucuaagguuggugguaauuauaauuaccuguauagauuguuuaggaagucuaaucucaaaccuuuugagagagauauuucaacugaaaucuaucaggccgguagcacaccuuguaaugguguugaagguuuuaauuguuacuuuccuuuacaaucauaugguuuccaacccacuaaugguguugguuaccaaccauacagaguaguaguacuuucuuuugaacuucuacaugcaccagcaacuguuuguggaccuaaaaagucuacuaauuugguuaaaaacaaaugugucaauuucaacuucaaugguuuaacaggcacagguguucuuacugagucuaacaaaaaguuucugccuuuccaacaauuuggcagagacauugcugacacuacugaugcuguccgugauccacagacacuugagauucuugacauuacaccauguucuuuugguggugucaguguuauaacaccaggaacaaauacuucuaaccagguugcuguucuuuaucaggguguuaacugcacagaagucccuguugcuauucaugcagaucaacuuacuccuacuuggcguguuuauucuacagguucuaauguuuuucaaacacgugcaggcuguuuaauaggggcugaacaugucaacaacucauaugagugugacauacccauuggugcagguauaugcgcuaguuaucagacucagacuaauucuccucggcgggcacguaguguagcuagucaauccaucauugccuacacuaugucacuuggugcagaaaauucaguugcuuacucuaauaacucuauugccauacccacaaauuuuacuauuaguguuaccacagaaauucuaccagugucuaugaccaagacaucaguagauuguacaauguacauuuguggugauucaacugaaugcagcaaucuuuuguugcaauauggcaguuuuuguacacaauuaaaccgugcuuuaacuggaauagcuguugaacaagacaaaaacacccaagaaguuuuugcacaagucaaacaaauuuacaaaacaccaccaauuaaagauuuuggugguuuuaauuuuucacaaauauuaccagauccaucaaaaccaagcaagaggucauuuauugaagaucuacuuuucaacaaagugacacuugcagaugcuggcuucaucaaacaauaugguuauugccuuggugauauugcugcuagagaccucauuugugcacaaaaguuuaacggccuuacuguuuugccaccuuugcucacagaugaaaugauugcucaauacacuucugcacuguuagcggguacaaucacuucugguuggaccuuuggugcaggugcugcauuacaaauaccauuugcuaugcaaauggcuuauagguuuaaugguauuggaguuacacagaauguucucuaugagaaccaaaaauugauugccaaccaauuuaauagugcuauuggcaaaauucaagacucacuuucuuccacagcaagugcacuuggaaaacuucaagauguggucaaccaaaaugcacaagcuuuaaacacgcuuguuaaacaacuuagcuccaauuuuggugcaauuucaaguguuuuaaaugauauccuuucacgucuugacaaaguugaggcugaagugcaaauugauagguugaucacaggcagacuucaaaguuugcagacauaugugacucaacaauuaauuagagcugcagaaaucagagcuucugcuaaucuugcugcuacuaaaaugucagaguguguacuuggacaaucaaaaagaguugauuuuuguggaaagggcuaucaucuuauguccuucccucagucagcaccucaugguguagucuucuugcaugugacuuaugucccugcacaagaaaagaacuucacaacugcuccugccauuugucaugauggaaaagcacacuuuccucgugaaggugucuuuguuucaaauggcacacacugguuuguaacacaaaggaauuuuuaugaaccacaaaucauuacuacagacaacacauuugugucugguaacugugauguuguaauaggaauugucaacaacacaguuuaugauccuuugcaaccugaauuagacucauucaaggaggaguuagauaaauauuuuaagaaucauacaucaccagauguugauuuaggugacaucucuggcauuaaugcuucaguuguaaacauucaaaaagaaauugaccgccucaaugagguugccaagaauuuaaaugaaucucucaucgaucuccaagaacuuggaaaguaugagcaguauauaaaauggccaugguacauuuggcuagguuuuauagcuggcuugauugccauaguaauggugacaauuaugcuuugcuguaugaccaguugcuguaguugucucaagggcuguuguucuuguggauccugcugcaaauuugaugaagacgacucugagccagugcucaaaggagucaaauuacauuacacauaaggacuaguuauaagacugacuagcccgaugggccucccaacgggcccuccuccccuccuugcaccgagauuaauaaaaaaaaaaaaaaaaaaaaaaaaaaaaaaaaaaaaaaaaaaaaaaaaaaaaaaaaaaaaaaaaugcaucccccccccccccccccccccccccccccccaaaggcucuuuucagagccaccagaauu

SEQ ID NO: 12701 - RNA, 4039 nt, Artificial Sequence
  SARS-CoV-2/Belgium/VAG-03013/2020__EPI_ISL_415155 spike protein mRNA wt (1-1273)
aggagaaagcuuaccauguuuguuuuucuuguuuuauugccacuagucucuagucaguguguuaaucuuacaaccagaacucaauuacccccugcauacacuaauucuuucacacgugguguuuauuacccugacaaaguuuucagauccucaguuuuacauucaacucaggacuuguucuuaccuuucuuuuccaauguuacuugguuccaugcuauacaugucucugggaccaaugguacuaagagguuugauaacccuguccuaccauuuaaugaugguguuuauuuugcuuccacugagaagucuaacauaauaagaggcuggauuuuugguacuacuuuagauucgaagacccagucccuacuuauuguuaauaacgcuacuaauguuguuauuaaagucugugaauuucaauuuuguaaugauccauuuuuggguguuuauuaccacaaaaacaacaaaaguuggauggaaagugaguucagaguuuauucuagugcgaauaauugcacuuuugaauaugucucucagccuuuucuuauggaccuugaaggaaaacaggguaauuucaaaaaucuuagggaauuuguguuuaagaauauugaugguuauuuuaaaauauauucuaagcacacgccuauuaauuuagugcgugaucucccucaggguuuuucggcuuuagaaccauugguagauuugccaauagguauuaacaucacuagguuucaaacuuuacuugcuuuacauagaaguuauuugacuccuggugauucuucuucagguuggacagcuggugcugcagcuuauuauguggguuaucuucaaccuaggacuuuucuauuaaaauauaaugaaaauggaaccauuacagaugcuguagacugugcacuugacccucucucagaaacaaaguguacguugaaauccuucacuguagaaaaaggaaucuaucaaacuucuaacuuuagaguccaaccaacagaaucuauuguuagauuuccuaauauuacaaacuugugcccuuuuggugaaguuuuuaacgccaccagauuugcaucuguuuaugcuuggaacaggaagagaaucagcaacuguguugcugauuauucuguccuauauaauuccgcaucauuuuccacuuuuaaguguuauggagugucuccuacuaaauuaaaugaucucugcuuuacuaaugucuaugcagauucauuuguaauuagaggugaugaagucagacaaaucgcuccagggcaaacuggaaagauugcugauuauaauuauaaauuaccagaugauuuuacaggcugcguuauagcuuggaauucuaacaaucuugauucuaagguuggugguaauuauaauuaccuguauagauuguuuaggaagucuaaucucaaaccuuuugagagagauauuucaacugaaaucuaucaggccgguagcacaccuuguaaugguguugaagguuuuaauuguuacuuuccuuuacaaucauaugguuuccaacccacuaaugguguugguuaccaaccauacagaguaguaguacuuucuuuugaacuucuacaugcaccagcaacuguuuguggaccuaaaaagucuacuaauuugguuaaaaacaaaugugucaauuucaacuucaaugguuuaacaggcacagguguucuuacugagucuaacaaaaaguuucugccuuuccaacaauuuggcagagacauugcugacacuacugaugcuguccgugauccacagacacuugagauucuugacauuacaccauguucuuuugguggugucaguguuauaacaccaggaacaaauacuucuaaccagguugcuguucuuuaucaggguguuaacugcacagaagucccuguugcuauucaugcagaucaacuuacuccuacuuggcguguuuauucuacagguucuaauguuuuucaaacacgugcaggcuguuuaauaggggcugaacaugucaacaacucauaugagugugacauacccauuggugcagguauaugcgcuaguuaucagacucagacuaauucuccucggcgggcacguaguguagcuagucaauccaucauugccuacacuaugucacuuggugcagaaaauucaguugcuuacucuaauaacucuauugccauacccacaaauuuuacuauuaguguuaccacagaaauucuaccagugucuaugaccaagacaucaguagauuguacaauguacauuuguggugauucaacugaaugcagcaaucuuuuguugcaauauggcaguuuuuguacacaauuaaaccgugcuuuaacuggaauagcuguugaacaagacaaaaacacccaagaaguuuuugcacaagucaaacaaauuuacaaaacaccaccaauuaaagauuuuggugguuuuaauuuuucacaaauauuaccagauccaucaaaaccaagcaagaggucauuuauugaagaucuacuuuucaacaaagugacacuugcagaugcuggcuucaucaaacaauauggugauugccuuggugauauugcugcuagagaccucauuugugcacaaaaguuuaacggccuuacuguuuugccaccuuugcucacagaugaaaugauugcucaauacacuucugcacuguuagcggguacaaucacuucugguuggaccuuuggugcaggugcugcauuacaaauaccauuugcuaugcaaauggcuuauagguuuaaugguauuggaguuacacagaauguucucuaugagaaccaaaaauugauugccaaccaauuuaauagugcuauuggcaaaauucaagacucacuuucuuccacagcaacugcacuuggaaaacuucaagauguggucaaccaaaaugcacaagcuuuaaacacgcuuguuaaacaacuuagcuccaauuuuggugcaauuucaaguguuuuaaaugauauccuuucacgucuugacaaaguugaggcugaagugcaaauugauagguugaucacaggcagacuucaaaguuugcagacauaugugacucaacaauuaauuagagcugcagaaaucagagcuucugcuaaucuugcugcuacuaaaaugucagaguguguacuuggacaaucaaaaagaguugauuuuuguggaaagggcuaucaucuuauguccuucccucagucagcaccucaugguguagucuucuugcaugugacuuaugucccugcacaagaaaagaacuucacaacugcuccugccauuugucaugauggaaaagcacacuuuccucgugaaggugucuuuguuucaaauggcacacacugguuuguaacacaaaggaauuuuuaugaaccacaaaucauuacuacagacaacacauuugugucugguaacugugauguuguaauaggaauugucaacaacacaguuuaugauccuuugcaaccugaauuagacucauucaaggaggaguuagauaaauauuuuaagaaucauacaucaccagauguugauuuaggugacaucucuggcauuaaugcuucaguuguaaacauucaaaaagaaauugaccgccucaaugagguugccaagaauuuaaaugaaucucucaucgaucuccaagaacuuggaaaguaugagcaguauauaaaauggccaugguacauuuggcuagguuuuauagcuggcuugauugccauaguaauggugacaauuaugcuuugcuguaugaccaguugcuguaguugucucaagggcuguuguucuuguggauccugcugcaaauuugaugaagacgacucugagccagugcucaaaggagucaaauuacauuacacauaaggacuaguuauaagacugacuagcccgaugggccucccaacgggcccuccuccccuccuugcaccgagauuaauaaaaaaaaaaaaaaaaaaaaaaaaaaaaaaaaaaaaaaaaaaaaaaaaaaaaaaaaaaaaaaaaugcaucccccccccccccccccccccccccccccccaaaggcucuuuucagagccaccagaauu

SEQ ID NO: 12702 - RNA, 4039 nt, Artificial Sequence
  SARS-CoV-2/Belgium/BC-03016/2020__EPI_ISL_415157 spike protein mRNA wt (1-1273)
aggagaaagcuuaccauguuuguuuuucuuguuuuauugccacuagucucuagucaguguguuaaucuuacaaccagaacucaauuacccccugcauacacuaauucuuucacacgugguguuuauuacccugacaaaguuuucagauccucaguuuuacauucaacucaggacuuguucuuaccuuucuuuuccaauguuacuugguuccaugcuauacaugucucugggaccaaugguacuaagagguuugauaacccuguccuaccauuuaaugaugguguuuauuuugcuuccacugagaagucuaacauaauaagaggcuggauuuuugguacuacuuuagauucgaagacccagucccuacuuauuguuaauaacgcuacuaauguuguuauuaaagucugugaauuucaauuuuguaaugauccauuuuuggguguuuauuaccacaaaaacaacaaaaguuggauggaaagugaguucagaguuuauucuagugcgaauaauugcacuuuugaauaugucucucagccuuuucuuauggaccuugaaggaaaacaggguaauuucaaaaaucuuagggaauuuguguuuaagaauauugaugguuauuuuaaaauauauucuaagcacacgccuauuaauuuagugcgugaucucccucaggguuuuucggcuuuagaaccauugguagauuugccaauagguauuaacaucacuagguuucaaacuuuacuugcuuuacauagaaguuauuugacuccuggugauucuucuucagguuggacagcuggugcugcagcuuauuauguggguuaucuucaaccuaggacuuuucuauuaaaauauaaugaaaauggaaccauuacagaugcuguagacugugcacuugacccucucucagaaacaaaguguacguugaaauccuucacuguagaaaaaggaaucuaucaaacuucuaacuuuagaguccaaccaacagaaucuauuguuagauuuccuaauauuacaaacuugugcccuuuuggugaaguuuuuaacgccaccagauuugcaucuguuuaugcuuggaacaggaagagaaucagcaacuguguugcugauuauucuguccuauauaauuccgcaucauuuuccacuuuuaaguguuauggagugucuccuacuaaauuaaaugaucucugcuuuacuaaugucuaugcagauucauuuguaauuagaggugaugaagucagacaaaucgcuccagggcaaacuggaaagauugcugauuauaauuauaaauuaccagaugauuuuacaggcugcguuauagcuuggaauucuaacaaucuugauucuaagguuggugguaauuauaauuaccuguauagauuguuuaggaagucuaaucucaaaccuuuugagagagauauuucaacugaaaucuaucaggccgguagcacaccuuguaaugguguugaagguuuuaauuguuacuuuccuuuacaaucauaugguuuccaacccacuaaugguguugguuaccaaccauacagaguaguaguacuuucuuuugaacuucuacaugcaccagcaacuguuuguggaccuaaaaagucuacuaauuugguuaaaaacaaaugugucaauuucaacuucaaugguuuaacaggcacagguguucuuacugagucuaacaaaaaguuucugccuuuccaacaauuuggcagagacauugcugacacuacugaugcuguccgugauccacagacacuugagauucuugacauuacaccauguucuuuugguggugucaguguuauaacaccaggaacaaauacuucuaaccagguugcuguucuuuaucaggguguuaacugcacagaagucccuguugcuauucaugcagaucaacuuacuccuacuuggcguguuuauucuacagguucuaauguuuuucaaacacgugcaggcuguuuaauaggggcugaacaugucaacaacucauaugagugugacauacccauuggugcagguauaugcgcuaguuaucagacucagacuaauucuccucggcgggcacguaguguagcuagucaauccaucauugccuacacuaugucacuuggugcagaaaauucaguugcuuacucuaauaacucuauugccauacccacaaauuuuacuauuaguguuaccacagaaauucuaccagugucuaugaccaagacaucaguagauuguacaauguacauuuguggugauucaacugaaugcagcaaucuuuuguugcaauauggcaguuuuuguacacaauuaaaccgugcuuuaacuggaauagcuguugaacaagacaaaaacacccaagaaguuuuugcacaagucaaacaaauuuacaaaacaccaccaauuaaagauuuuggugguuuuaauuuuucacaaauauuaccagauccaucaaaaccaagcaagaggucauuuauugaagaucuacuuuucaacaaagugacacuugcagaugcuggcuucaucaaacaauauggugauugccuuggugauauugcugcuagagaccucauuugugcacaaaaguuuaacggccuuacuguuuugccaccuuugcucacagaugaaaugauugcucaauacacuucugcacuguuagcggguacaaucacuucugguuggaccuuuggugcaggugcugcauuacaaauaccauuugcuaugcaaauggcuuauagguuuaaugguauuggaguuacacagaauguucucuaugagaaccaaaaauugauugccaaccaauuuaauagugcuauuggcaaaauucaagacucacuuucuuccacagcaccugcacuuggaaaacuucaagauguggucaaccaaaaugcacaagcuuuaaacacgcuuguuaaacaacuuagcuccaauuuuggugcaauuucaaguguuuuaaaugauauccuuucacgucuugacaaaguugaggcugaagugcaaauugauagguugaucacaggcagacuucaaaguuugcagacauaugugacucaacaauuaauuagagcugcagaaaucagagcuucugcuaaucuugcugcuacuaaaaugucagaguguguacuuggacaaucaaaaagaguugauuuuuguggaaagggcuaucaucuuauguccuucccucagucagcaccucaugguguagucuucuugcaugugacuuaugucccugcacaagaaaagaacuucacaacugcuccugccauuugucaugauggaaaagcacacuuuccucgugaaggugucuuuguuucaaauggcacacacugguuuguaacacaaaggaauuuuuaugaaccacaaaucauuacuacagacaacacauuugugucugguaacugugauguuguaauaggaauugucaacaacacaguuuaugauccuuugcaaccugaauuagacucauucaaggaggaguuagauaaauauuuuaagaaucauacaucaccagauguugauuuaggugacaucucuggcauuaaugcuucaguuguaaacauucaaaaagaaauugaccgccucaaugagguugccaagaauuuaaaugaaucucucaucgaucuccaagaacuuggaaaguaugagcaguauauaaaauggccaugguacauuuggcuagguuuuauagcuggcuugauugccauaguaauggugacaauuaugcuuugcuguaugaccaguugcuguaguugucucaagggcuguuguucuuguggauccugcugcaaauuugaugaagacgacucugagccagugcucaaaggagucaaauuacauuacacauaaggacuaguuauaagacugacuagcccgaugggccucccaacgggcccuccuccccuccuugcaccgagauuaauaaaaaaaaaaaaaaaaaaaaaaaaaaaaaaaaaaaaaaaaaaaaaaaaaaaaaaaaaaaaaaaaugcaucccccccccccccccccccccccccccccccaaaggcucuuuucagagccaccagaauu

SEQ ID NO: 12703 - RNA, 4039 nt, Artificial Sequence
  SARS-CoV-2/Germany/BavPat3/2020__EPI_ISL_414521 spike protein mRNA wt (1-1273)
aggagaaagcuuaccauguuuguuuuucuuguuuuauugccacuagucucuagucaguguguuaaucuuacaaccagaacucaauuacccccugcauacacuaauucuuucacacgugguguuuauuacccugacaaaguuuucagauccucaguuuuacauucaacucaggacuuguucuuaccuuucuuuuccaauguuacuugguuccaugcuauacaugucucugggaccaaugguacuaagagguuugauaacccuguccuaccauuuaaugaugguguuuauuuugcuuccacugagaagucuaacauaauaagaggcuggauuuuugguacuacuuuagauucgaagacccagucccuacuuauuguuaauaacgcuacuaauguuguuauuaaagucugugaauuucaauuuuguaaugauccauuuuuggguguuuauuaccacaaaaacaacaaaaguuggauggaaagugaguucagaguuuauucuagugcgaauaauugcacuuuugaauaugucucucagccuuuucuuauggaccuugaaggaaaacaggguaauuucaaaaaucuuagggaauuuguguuuaagaauauugaugguuauuuuaaaauauauucuaagcacacgccuauuaauuuagugcgugaucucccucaggguuuuucggcuuuagaaccauugguagauuugccaauagguauuaacaucacuagguuucaaacuuuacuugcuuuacauagaaguuauuugacuccuggugauucuucuucagguuggacagcuggugcugcagcuuauuauguggguuaucuucaaccuaggacuuuucuauuaaaauauaaugaaaauggaaccauuacagaugcuguagacugugcacuugacccucucucagaaacaaaguguacguugaaauccuucacuguagaaaaaggaaucuaucaaacuucuaacuuuagaguccaaccaacagaaucuauuguuagauuuccuaauauuacaaacuugugcccuuuuggugaaguuuuuaacgccaccagauuugcaucuguuuaugcuuggaacaggaagagaaucagcaacuguguugcugauuauucuguccuauauaauuccgcaucauuuuccacuuuuaaguguuauggagugucuccuacuaaauuaaaugaucucugcuuuacuaaugucuaugcagauucauuuguaauuagaggugaugaagucagacaaaucgcuccagggcaaacuggaaagauugcugauuauaauuauaaauuaccagaugauuuuacaggcugcguuauagcuuggaauucuaacaaucuugauucuaagguuggugguaauuauaauuaccuguauagauuguuuaggaagucuaaucucaaaccuuuugagagagauauuucaacugaaaucuaucaggccgguagcacaccuuguaaugguguugaagguuuuaauuguuacuuuccuuuacaaucauaugguuuccaacccacuaaugguguugguuaccaaccauacagaguaguaguacuuucuuuugaacuucuacaugcaccagcaacuguuuguggaccuaaaaagucuacuaauuugguuaaaaacaaaugugucaauuucaacuucaaugguuuaacaggcacagguguucuuacugagucuaacaaaaaguuucugccuuuccaacaauuuggcagagacauugcugacacuacugaugcuguccgugauccacagacacuugagauucuugacauuacaccauguucuuuugguggugucaguguuauaacaccaggaacaaauacuucuaaccagguugcuguucuuuaucaggauguuaacugcacagaagucccuguugcuauucaugcagaucaacuuacuccuacuuggcguguuuauucuacagguucuaauguuuuucaaacacgugcaggcuguuuaauaggggcugaacaugucaacaacucauaugagugugacauacccauuggugcagguauaugcgcuaguuaucagacucagacuaauucuccucggcgggcacguaguguagcuagucaauccaucauugccuacacuaugucacuuggugcagaaaauucaguugcuuacucuaauaacucuauugccauacccacaaauuuuacuauuaguguuaccacagaaauucuaccagugucuaugaccaagacaucaguagauuguacaauguacauuuguggugauucaacugaaugcagcaaucuuuuguugcaauauggcaguuuuuguacacaauuaaaccgugcuuuaacuggaauagcuguugaacaagacaaaaacacccaacaaguuuuugcacaagucaaacaaauuuacaaaacaccaccaauuaaagauuuuggugguuuuaauuuuucacaaauauuaccagauccaucaaaaccaagcaagaggucauuuauugaagaucuacuuuucaacaaagugacacuugcagaugcuggcuucaucaaacaauauggugauugccuuggugauauugcugcuagagaccucauuugugcacaaaaguuuaacggccuuacuguuuugccaccuuugcucacagaugaaaugauugcucaauacacuucugcacuguuagcggguacaaucacuucugguuggaccuuuggugcaggugcugcauuacaaauaccauuugcuaugcaaauggcuuauagguuuaaugguauuggaguuacacagaauguucucuaugagaaccaaaaauugauugccaaccaauuuaauagugcuauuggcaaaauucaagacucacuuucuuccacagcaagugcacuuggaaaacuucaagauguggucaaccaaaaugcacaagcuuuaaacacgcuuguuaaacaacuuagcuccaauuuuggugcaauuucaaguguuuuaaaugauauccuuucacgucuugacaaaguugaggcugaagugcaaauugauagguugaucacaggcagacuucaaaguuugcagacauaugugacucaacaauuaauuagagcugcagaaaucagagcuucugcuaaucuugcugcuacuaaaaugucagaguguguacuuggacaaucaaaaagaguugauuuuuguggaaagggcuaucaucuuauguccuucccucagucagcaccucaugguguagucuucuugcaugugacuuaugucccugcacaagaaaagaacuucacaacugcuccugccauuugucaugauggaaaagcacacuuuccucgugaaggugucuuuguuucaaauggcacacacugguuuguaacacaaaggaauuuuuaugaaccacaaaucauuacuacagacaacacauuugugucugguaacugugauguuguaauaggaauugucaacaacacaguuuaugauccuuugcaaccugaauuagacucauucaaggaggaguuagauaaauauuuuaagaaucauacaucaccagauguugauuuaggugacaucucuggcauuaaugcuucaguuguaaacauucaaaaagaaauugaccgccucaaugagguugccaagaauuuaaaugaaucucucaucgaucuccaagaacuuggaaaguaugagcaguauauaaaauggccaugguacauuuggcuagguuuuauagcuggcuugauugccauaguaauggugacaauuaugcuuugcuguaugaccaguugcuguaguugucucaagggcuguuguucuuguggauccugcugcaaauuugaugaagacgacucugagccagugcucaaaggagucaaauuacauuacacauaaggacuaguuauaagacugacuagcccgaugggccucccaacgggcccuccuccccuccuugcaccgagauuaauaaaaaaaaaaaaaaaaaaaaaaaaaaaaaaaaaaaaaaaaaaaaaaaaaaaaaaaaaaaaaaaaugcaucccccccccccccccccccccccccccccccaaaggcucuuuucagagccaccagaauu

SEQ ID NO: 12704 - RNA, 4039 nt, Artificial Sequence
  SARS-CoV-2/France/HF1805/2020__EPI_ISL_414628 spike protein mRNA wt (1-1273)
aggagaaagcuuaccauguuuguuuuucuuguuuuauugccacuagucucuagucaguguguuaaucuuacaaccagaacucaauuacccccugcauacacuaauucuuucacacgugguguuuauuacccugacaaaguuuucagauccucaguuuuacauucaacucaggacuuguucuuaccuuucuuuuccaauguuacuugguuccaugcuauacaugucucugggaccaaugguacuaagagguuugauaacccuguccuaccauuuaaugaugguguuuauuuugcuuccacugagaagucuaacauaauaagaggcuggauuuuugguacuacuuuagauucgaagacccagucccuacuuauuguuaauaacgcuacuaauguuguuauuaaagucugugaauuucaauuuuguaaugauccauuuuuggguguuuauuaccacaaaaacaacaaaaguuggauggaaagugaguucagaguuuauucuagugcgaauaauugcacuuuugaauaugucucucagccuuuucuuauggaccuugaaggaaaacaggguaauuucaaaaaucuuagggaauuuguguuuaagaauauugaugguuauuuuaaaauauauucuaagcacacgccuauuaauuuagugcgugaucucccucaggguuuuucggcuuuagaaccauugguagauuugccaauagguauuaacaucacuagguuucaaacuuuacuugcuuuacauagaaguuauuugacuccuggugauucuucuucagguuggacagcuggugcugcagcuuauuauguggguuaucuucaaccuaggacuuuucuauuaaaauauaaugaaaauggaaccauuacagaugcuguagacugugcacuugacccucucucagaaacaaaguguacguugaaauccuucacuguagaaaaaggaaucuaucaaacuucuaacuuuagaguccaaccaacagaaucuauuguuagauuuccuaauauuacaaacuugugcccuuuuggugaaguuuuuaacgccaccagauuugcaucuguuuaugcuuggaacaggaagagaaucagcaacuguguugcugauuauucuguccuauauaauuccgcaucauuuuccacuuuuaaguguuauggagugucuccuacuaaauuaaaugaucucugcuuuacuaaugucuaugcagauucauuuguaauuagaggugaugaagucagacaaaucgcuccagggcaaacuggaaagauugcugauuauaauuauaaauuaccagaugauuuuacaggcugcguuauagcuuggaauucuaacaaucuugauucuaagguuggugguaauuauaauuaccuguauagauuguuuaggaagucuaaucucaaaccuuuugagagagauauuucaacugaaaucuaucaggccgguagcacaccuuguaaugguguugaagguuuuaauuguuacuuuccuuuacaaucauaugguuuccaacccacuaaugguguugguuaccaaccauacagaguaguaguacuuucuuuugaacuucuacaugcaccagcaacuguuuguggaccuaaaaagucuacuaauuugguuaaaaacaaaugugucaauuucaacuucaaugguuuaacaggcacagguguucuuacugagucuaacaaaaaguuucugccuuuccaacaauuuggcagagacauugcugacacuacugaugcuguccgugauccacagacacuugagauucuugacauuacaccauguucuuuugguggugucaguguuauaacaccaggaacaaauacuucuaaccagguugcuguucuuuaucaggguguuaacugcacagaagucccuguugcuauucaugcagaucaacuuacuccuacuuggcguguuuauucuacagguucuaauguuuuucaaacacgugcaggcuguuuaauaggggcugaacaugucaacaacucauaugagugugacauacccauuggugcagguauaugcgcuaguuaucagacucagacuaauucuccucggcgggcacguaguguagcuagucaauccaucauugccuacacuaugucacuuggugcagaaaauucaguugcuuacucuaauaacucuauugccauacccacaaauuuuacuauuaguguuaccacagaaauucuaccagugucuaugaccaagacaucaguagauuguacaauguacauuuguggugauucaacugaaugcagcaaucuuuuguugcaauauggcaguuuuuguacacaauuaaaccgugcuuuaacuggaauagcuguugaacaagacaaaaacacccaagaaguuuuugcacaagucaaacaaauuuacaaaacaccaccaauuaaagauuuuggugguuuuaauuuuucacaaauauuaccagauccaucaaaaccaagcaagaggucauuuauugaagaucuacuuuucaacaaagugacacuugcagaugcuggcuucaucaaacaauauggugauugccuuggugauauugcugcuagagaccucauuugugcacaaaaguuuaacggccuuacuguuuugccaccuuugcucacagaugaaaugauugcucaauacacuucugcacuguuagcggguacaaucacuucugguuggaccuuuggugcaggugcugcauuacaaauaccauuugcuaugcaaauggcuuauagguuuaaugguauuggaguuacacagaauguucucuaugagaaccaaaaauugauugccaaccaauuuaauagugcuauuggcaaaauucaagacucacuuucuuccacagcaagugcacuuggaaaacuucaagauguggucaaccaaaaugcacaagcuuuaaacacgcuuguuaaacaacuuagcuccaauuuuggugcaauuucaaguguuuuaaaugauauccuuucacgucuugacaaaguugaggcugaagugcaaauugauagguugaucacaggcagacuucaaaguuugcagacauaugugacucaacaauuaauuagagcugcagaaaucagagcuucugcuaaucuugcugcuacuaaaaugucagaguguguacuuggacaaucaaaaagaguugauuuuuguggaaagggcuaucaucuuauguccuucccucagucagcaccucaugguguagucuucuugcaugugacuuaugucccugcacaagaaaagaacuucacaacugcuccugccauuugucaugauggaaaagcacacuuuccucgugaaggugucuuuguuucaaauggcacacacugguuuguaacacaaaggaauuuuuaugaaccacaaaucauuacuacagacaacacauuugugucugguaacugugauguuguaauaggaguugucaacaacacaguuuaugauccuuugcaaccugaauuagacucauucaaggaggaguuagauaaauauuuuaagaaucauacaucaccagauguugauuuaggugacaucucuggcauuaaugcuucaguuguaaacauucaaaaagaaauugaccgccucaaugagguugccaagaauuuaaaugaaucucucaucgaucuccaagaacuuggaaaguaugagcaguauauaaaauggccaugguacauuuggcuagguuuuauagcuggcuugauugccauaguaauggugacaauuaugcuuugcuguaugaccaguugcuguaguugucucaagggcuguuguucuuguggauccugcugcaaauuugaugaagacgacucugagccagugcucaaaggagucaaauuacauuacacauaaggacuaguuauaagacugacuagcccgaugggccucccaacgggcccuccuccccuccuugcaccgagauuaauaaaaaaaaaaaaaaaaaaaaaaaaaaaaaaaaaaaaaaaaaaaaaaaaaaaaaaaaaaaaaaaaugcaucccccccccccccccccccccccccccccccaaaggcucuuuucagagccaccagaauu

SEQ ID NO: 12705 - RNA, 4039 nt, Artificial Sequence
  SARS-CoV-2/Netherlands/ZuidHolland_9/2020__EPI_ISL_414445 spike protein mRNA wt (1-1273)
aggagaaagcuuaccauguuuguuuuucuuguuuuauugccacuagucucuagucaguguguuaaucuuacaaccagaacucaauuacccccugcauacacuaauucuuucacacgugguguuuauuacccugacaaaguuuucagauccucaguuuuacauucaacucaggacuuguucuuaccuuucuuuuccaauguuacuugguuccaugcuauacaugucucugggaccaaugguacuaagagguuugauaacccuguccuaccauuuaaugaugguguuuauuuugcuuccacugagaagucuaacauaauaagaggcuggauuuuugguacuacuuuagauucgaagacccagucccuacuuauuguuaauaacgcuacuaauguuguuauuaaagucugugaauuucaauuuuguaaugauccauuuuuggguguuuauuaccacaaaaacaacaaaaguuggauggaaagugaguucagaguuuauucuagugcgaauaauugcacuuuugaauaugucucucagccuuuucuuauggaccuugaaggaaaacaggguaauuucaaaaaucuuagggaauuuguguuuaagaauauugaugguuauuuuaaaauauauucuaagcacacgccuauuaauuuagugcgugaucucccucaggguuuuucggcuuuagaaccauugguagauuugccaauagguauuaacaucacuagguuucaaacuuuacuugcuuuacauagaaguuauuugacuccuggugauucuucuucagguuggacagcuggugcugcagcuuauuauguggguuaucuucaaccuaggacuuuucuauuaaaauauaaugaaaauggaaccauuacagaugcuguagacugugcacuugacccucucucagaaacaaaguguacguugaaauccuucacuguagaaaaaggaaucuaucaaacuucuaacuuuagaguccaaccaacagaaucuauuguuagauuuccuaauauuacaaacuugugcccuuuuggugaaguuuuuaacgccaccagauuugcaucuguuuaugcuuggaacaggaagagaaucagcaacuguguugcugauuauucuguccuauauaauuccgcaucauuuuccacuuuuaaguguuauggagugucuccuacuaaauuaaaugaucucugcuuuacuaaugucuaugcagauucauuuguaauuagaggugaugaagucagacaaaucgcuccagggcaaacuggaaagauugcugauuauaauuauaaauuaccagaugauuuuacaggcugcguuauagcuuggaauucuaacaaucuugauucuaagguuggugguaauuauaauuaccuguauagauuguuuaggaagucuaaucucaaaccuuuugagagagauauuucaacugaaaucuaucaggccgguagcacaccuuguaaugguguugaagguuuuaauuguuacuuuccuuuacaaucauaugguuuccaacccacuaaugguguugguuaccaaccauacagaguaguaguacuuucuuuugaacuucuacaugcaccagcaacuguuuguggaccuaaaaagucuacuaauuugguuaaaaacaaaugugucaauuucaacuucaaugguuuaacaggcacagguguucuuacugagucuaacaaaaaguuucugccuuuccaacaauuuggcagagacauugcugacacuacugaugcuguccgugauccacagacacuugagauucuugacauuacaccauguucuuuugguggugucaguguuauaacaccaggaacaaauacuucuaaccagguugcuguucuuuaucaggguguuaacugcacagaagucccuguugcuauucaugcagaucaacuuacuccuacuuggcguguuuauucuacagguucuaauguuuuucaaacacgugcaggcuguuuaauaggggcugaacaugucaacaacucauaugagugugacauacccauuggugcagguauaugcgcuaguuaucagacucagacuaauucuccucggcgggcacguaguguagcuagucaauccaucauugccuacacuaugucacuuggugcagaaaauucaguugcuuacucuaauaacucuauugccauacccacaaauuuuacuauuaguguuaccacagaaauucuaccagugucuaugaccaagacaucaguagauuguacaauguacauuuguggugauucaacugaaugcagcaaucuuuuguugcaauauggcaguuuuuguacacaauuaaaccgugcuuuaacuggaauagcuguugaacaagacaaaaacacccaagaaguuuuugcacaagucaaacaaauuuacaaaacaccaccaauuaaagauuuuggugguuuuaauuuuucacaaauauuaccagauccaucaaaaccaagcaagaggucauuuauugaagaucuacuuuucaacaaagugacacuugcagaugcuggcuucaucaaacaauauggugauugccuuggugauauugcugcuagagaccucauuuguguacaaaaguuuaacggccuuacuguuuugccaccuuugcucacagaugaaaugauugcucaauacacuucugcacuguuagcggguacaaucacuucugguuggaccuuuggugcaggugcugcauuacaaauaccauuugcuaugcaaauggcuuauagguuuaaugguauuggaguuacacagaauguucucuaugagaaccaaaaauugauugccaaccaauuuaauagugcuauuggcaaaauucaagacucacuuucuuccacagcaagugcacuuggaaaacuucaagauguggucaaccaaaaugcacaagcuuuaaacacgcuuguuaaacaacuuagcuccaauuuuggugcaauuucaaguguuuuaaaugauauccuuucacgucuugacaaaguugaggcugaagugcaaauugauagguugaucacaggcagacuucaaaguuugcagacauaugugacucaacaauuaauuagagcugcagaaaucagagcuucugcuaaucuugcugcuacuaaaaugucagaguguguacuuggacaaucaaaaagaguugauuuuuguggaaagggcuaucaucuuauguccuucccucagucagcaccucaugguguagucuucuugcaugugacuuaugucccugcacaagaaaagaacuucacaacugcuccugccauuugucaugauggaaaagcacacuuuccucgugaaggugucuuuguuucaaauggcacacacugguuuguaacacaaaggaauuuuuaugaaccacaaaucauuacuacagacaacacauuugugucugguaacugugauguuguaauaggaauugucaacaacacaguuuaugauccuuugcaaccugaauuagacucauucaaggaggaguuagauaaauauuuuaagaaucauacaucaccagauguugauuuaggugacaucucuggcauuaaugcuucaguuguaaacauucaaaaagaaauugaccgccucaaugagguugccaagaauuuaaaugaaucucucaucgaucuccaagaacuuggaaaguaugagcaguauauaaaauggccaugguacauuuggcuagguuuuauagcuggcuugauugccauaguaauggugacaauuaugcuuugcuguaugaccaguugcuguaguugucucaagggcuguuguucuuguggauccugcugcaaauuugaugaagacgacucugagccagugcucaaaggagucaaauuacauuacacauaaggacuaguuauaagacugacuagcccgaugggccucccaacgggcccuccuccccuccuugcaccgagauuaauaaaaaaaaaaaaaaaaaaaaaaaaaaaaaaaaaaaaaaaaaaaaaaaaaaaaaaaaaaaaaaaaugcaucccccccccccccccccccccccccccccccaaaggcucuuuucagagccaccagaauu

SEQ ID NO: 12706 - RNA, 4039 nt, Artificial Sequence
  SARS-CoV-2/Finland/FIN03032020A/2020__EPI_ISL_413602 spike protein mRNA wt (1-1273)
aggagaaagcuuaccauguuuguuuuucuuguuuuauugccacuagucucuagucaguguguuaaucuuacaaccagaacucaauuacccccugcauacacuaauucuuucacacgugguguuuauuacccugacaaaguuuucagauccucaguuuuacauucaacucaggacuuguucuuaccuuucuuuuccaauguuacuugguuccaugcuauacaugucucugggaccaaugguacuaagagguuugauaacccuguccuaccauuuaaugaugguguuuauuuugcuuccacugagaagucuaacauaauaagaggcuggauuuuugguacuacuuuagauucgaagacccagucccuacuuauuguuaauaacgcuacuaauguuguuauuaaagucugugaauuucaauuuuguaaugauccauuuuuggguguuuauuaccacaaaaacaacaaaaguuggauggaaagugaguucagaguuuauucuagugcgaauaauugcacuuuugaauaugucucucagccuuuucuuauggaccuugaaggaaaacaggguaauuucaaaaaucuuagggaauuuguguuuaagaauauugaugguuauuuuaaaauauauucuaagcacacgccuauuaauuuagugcgugaucucccucaggguuuuucggcuuuagaaccauugguagauuugccaauagguauuaacaucacuagguuucaaacuuuacuugcuuuacauagaaguuauuugacuccuggugauucuucuucagguuggacagcuggugcugcagcuuauuauguggguuaucuucaaccuaggacuuuucuauuaaaauauaaugaaaauggaaccauuacagaugcuguagacugugcacuugacccucucucagaaacaaaguguacguugaaauccuucacuguagaaaaaggaaucuaucaaacuucuaacuuuagaguccaaccaacagaaucuauuguuagauuuccuaauauuacaaacuugugcccuuuuggugaaguuuuuaacgccaccagauuugcaucuguuuaugcuuggaacaggaagagaaucagcaacuguguugcugauuauucuguccuauauaauuccgcaucauuuuccacuuuuaaguguuauggagugucuccuacuaaauuaaaugaucucugcuuuacuaaugucuaugcagauucauuuguaauuagaggugaugaagucagacaaaucgcuccagggcaaacuggaaagauugcugauuauaauuauaaauuaccagaugauuuuacaggcugcguuauaucuuggaauucuaacaaucuugauucuaagguuggugguaauuauaauuaccuguauagauuguuuaggaagucuaaucucaaaccuuuugagagagauauuucaacugaaaucuaucaggccgguagcacaccuuguaaugguguugaagguuuuaauuguuacuuuccuuuacaaucauaugguuuccaacccacuaaugguguugguuaccaaccauacagaguaguaguacuuucuuuugaacuucuacaugcaccagcaacuguuuguggaccuaaaaagucuacuaauuugguuaaaaacaaaugugucaauuucaacuucaaugguuuaacaggcacagguguucuuacugagucuaacaaaaaguuucugccuuuccaacaauuuggcagagacauugcugacacuacugaugcuguccgugauccacagacacuugagauucuugacauuacaccauguucuuuugguggugucaguguuauaacaccaggaacaaauacuucuaaccagguugcuguucuuuaucaggguguuaacugcacagaagucccuguugcuauucaugcagaucaacuuacuccuacuuggcguguuuauucuacagguucuaauguuuuucaaacacgugcaggcuguuuaauaggggcugaacaugucaacaacucauaugagugugacauacccauuggugcagguauaugcgcuaguuaucagacucagacuaauucuccucggcgggcacguaguguagcuagucaauccaucauugccuacacuaugucacuuggugcagaaaauucaguugcuuacucuaauaacucuauugccauacccacaaauuuuacuauuaguguuaccacagaaauucuaccagugucuaugaccaagacaucaguagauuguacaauguacauuuguggugauucaacugaaugcagcaaucuuuuguugcaauauggcaguuuuuguacacaauuaaaccgugcuuuaacuggaauagcuguugaacaagacaaaaacacccaagaaguuuuugcacaagucaaacaaauuuacaaaacaccaccaauuaaagauuuuggugguuuuaauuuuucacaaauauuaccagauccaucaaaaccaagcaagaggucauuuauugaagaucuacuuuucaacaaagugacacuugcagaugcuggcuucaucaaacaauauggugauugccuuggugauauugcugcuagagaccucauuugugcacaaaaguuuaacggccuuacuguuuugccaccuuugcucacagaugaaaugauugcucaauacacuucugcacuguuagcggguacaaucacuucugguuggaccuuuggugcaggugcugcauuacaaauaccauuugcuaugcaaauggcuuauagguuuaaugguauuggaguuacacagaauguucucuaugagaaccaaaaauugauugccaaccaauuuaauagugcuauuggcaaaauucaagacucacuuucuuccacagcaagugcacuuggaaaacuucaagauguggucaaccaaaaugcacaagcuuuaaacacgcuuguuaaacaacuuagcuccaauuuuggugcaauuucaaguguuuuaaaugauauccuuucacgucuugacaaaguugaggcugaagugcaaauugauagguugaucacaggcagacuucaaaguuugcagacauaugugacucaacaauuaauuagagcugcagaaaucagagcuucugcuaaucuugcugcuacuaaaaugucagaguguguacuuggacaaucaaaaagaguugauuuuuguggaaagggcuaucaucuuauguccuucccucagucagcaccucaugguguagucuucuugcaugugacuuaugucccugcacaagaaaagaacuucacaacugcuccugccauuugucaugauggaaaagcacacuuuccucgugaaggugucuuuguuucaaauggcacacacugguuuguaacacaaaggaauuuuuaugaaccacaaaucauuacuacagacaacacauuugugucugguaacugugauguuguaauaggaauugucaacaacacaguuuaugauccuuugcaaccugaauuagacucauucaaggaggaguuagauaaauauuuuaagaaucauacaucaccagauguugauuuaggugacaucucuggcauuaaugcuucaguuguaaacauucaaaaagaaauugaccgccucaaugagguugccaagaauuuaaaugaaucucucaucgaucuccaagaacuuggaaaguaugagcaguauauaaaauggccaugguacauuuggcuagguuuuauagcuggcuugauugccauaguaauggugacaauuaugcuuugcuguaugaccaguugcuguaguugucucaagggcuguuguucuuguggauccugcugcaaauuugaugaagacgacucugagccagugcucaaaggagucaaauuacauuacacauaaggacuaguuauaagacugacuagcccgaugggccucccaacgggcccuccuccccuccuugcaccgagauuaauaaaaaaaaaaaaaaaaaaaaaaaaaaaaaaaaaaaaaaaaaaaaaaaaaaaaaaaaaaaaaaaaugcaucccccccccccccccccccccccccccccccaaaggcucuuuucagagccaccagaauu

SEQ ID NO: 12707 - RNA, 4039 nt, Artificial Sequence
  SARS-CoV-2/France/GE1977/2020__EPI_ISL_414632 spike protein mRNA wt (1-1273)
aggagaaagcuuaccauguuuguuuuucuuguuuuauugccacuagucucuagucaguguguuaaucuuacaaccagaacucaauuacccccugcauacacuaauucuuucacacgugguguuuauuacccugacaaaguuuucagauccucaguuuuacauucaacucaggacuuguucuuaccuuucuuuuccaauguuacuugguuccaugcuauacaugucucugggaccaaugguacuaagagguuugauaacccuguccuaccauuuaaugaugguguuuauuuugcuuccacugagaagucuaacauaauaagaggcuggauuuuugguacuacuuuagauucgaagacccagucccuacuuauuguuaauaacgcuacuaauguuguuauuaaagucugugaauuucaauuuuguaaugauccauuuuuggguguuuauuaccacaaaaacaacaaaaguuggauggaaagugaguucagaguuuauucuagugcgaauaauugcacuuuugaauaugucucucagccuuuucuuauggaccuugaaggaaaacaggguaauuucaaaaaucuuagggaauuuguguuuaagaauauugaugguuauuuuaaaauauauucuaagcacacgccuauuaauuuagugcgugaucucccucaggguuuuucggcuuuagaaccauugguagauuugccaauagguauuaacaucacuagguuucaaacuuuacuugcuuuacauagaaguuauuugacuccuggugauucuucuucagguuggacagcuggugcugcagcuuauuauguggguuaucuucaaccuaggacuuuucuauuaaaauauaaugaaaauggaaccauuacagaugcuguagacugugcacuugacccucucucagaaacaaaguguacguugaaauccuucacuguagaaaaaggaaucuaucaaacuucuaacuuuagaguccaaccaacagaaucuauuguuagauuuccuaauauuacaaacuugugcccuuuuggugaaguuuuuaacgccaccagauuugcaucuguuuaugcuuggaacaggaagagaaucagcaacuguguugcugauuauucuguccuauauaauuccgcaucauuuuccacuuuuaaguguuauggagugucuccuacuaaauuaaaugaucucugcuuuacuaaugucuaugcagauucauuuguaauuagaggugaugaagucagacaaaucgcuccagggcaaacuggaaagauugcugauuauaauuauaaauuaccagaugauuuuacaggcugcguuauagcuuggaauucuaacaaucuugauucuaagguuggugguaauuauaauuaccuguauagauuguuuaggaagucuaaucucaaaccuuuugagagagauauuucaacugaaaucuaucaggccgguagcacaccuuguaaugguguugaagguuuuaauuguuacuuuccuuuacaaucauaugguuuccaacccacuaaugguguugguuaccaaccauacagaguaguaguacuuucuuuugaacuucuacaugcaccagcaacuguuuguggaccuaaaaagucuacuaauuugguuaaaaacaaaugugucaauuucaacuucaaugguuuaacaggcacagguguucuuacugagucuaacaaaaaguuucugccuuuccaacaauuuggcagagacauugcugacacuacugaugcuguccgugauccacagacacuugagauucuugacauuacaccauguucuuuugguggugucaguguuauaacaccaggaacaaauacuucuaaccagguugcuguucuuuaucaggguguuaacugcacagaagucccuguugcuauucaugcagaucaacuuacuccuacuuggcguguuuauucuacagguucuaauguuuuucaaacacgugcaggcuguuuaauaggggcugaacaugucaacaacucauaugagugugacauacccauuggugcagguauaugcgcuaguuaucagacucagacuaauucuccucggcgggcacguaguguagcuagucaauccaucauugccuacacuaugucacuuggugcagaaaauucaguugcuuacucuaauaacucuauugccauacccacaaauuuuacuauuaguguuaccacagaaauucuaccagugucuaugaccaagacaucaguagauuguacaauguacauuuguggugauucaacugaaugcagcaaucuuuuguugcaauauggcaguuuuuguacacaauuaaaccgugcuuuaacuggaauagcuguugaacaagacaaaaacacccaagaaguuuuugcacaagucaaacaaauuuacaaaacaccaccaauuaaagauuuuggugguuuuaauuuuucacaaauauuaccagauccaucaaaaccaagcaagaggucauuuauugaagaucuacuuuucaacaaagugacacuugcagaugcuggcuucaucaaacaauauggugauugccuuggugauauugcugcuagagaccucauuugugcacaaaaguuuaacggccuuacuguuuugccaccuuugcucacagaugaaaugauugcucaauacacuucugcacuguuagcggguacaaucacuucugguuggaccuuuggugcaggugcugcauuacaaauaccauuugcuaugcaaauggcuuauagguuuaaugguauuggaguuacacagaauguucucuaugagaaccaaaaauugauugccaaccaauuuaauagugcuauuggcaaaauucaagacucacuuuuuuccacagcaagugcacuuggaaaacuucaagauguggucaaccaaaaugcacaagcuuuaaacacgcuuguuaaacaacuuagcuccaauuuuggugcaauuucaaguguuuuaaaugauauccuuucacgucuugacaaaguugaggcugaagugcaaauugauagguugaucacaggcagacuucaaaguuugcagacauaugugacucaacaauuaauuagagcugcagaaaucagagcuucugcuaaucuugcugcuacuaaaaugucagaguguguacuuggacaaucaaaaagaguugauuuuuguggaaagggcuaucaucuuauguccuucccucagucagcaccucaugguguagucuucuugcaugugacuuaugucccugcacaagaaaagaacuucacaacugcuccugccauuugucaugauggaaaagcacacuuuccucgugaaggugucuuuguuucaaauggcacacacugguuuguaacacaaaggaauuuuuaugaaccacaaaucauuacuacagacaacacauuugugucugguaacugugauguuguaauaggaauugucaacaacacaguuuaugauccuuugcaaccugaauuagacucauucaaggaggaguuagauaaauauuuuaagaaucauacaucaccagauguugauuuaggugacaucucuggcauuaaugcuucaguuguaaacauucaaaaagaaauugaccgccucaaugagguugccaagaauuuaaaugaaucucucaucgaucuccaagaacuuggaaaguaugagcaguauauaaaauggccaugguacauuuggcuagguuuuauagcuggcuugauugccauaguaauggugacaauuaugcuuugcuguaugaccaguugcuguaguugucucaagggcuguuguucuuguggauccugcugcaaauuugaugaagacgacucugagccagugcucaaaggagucaaauuacauuacacauaaggacuaguuauaagacugacuagcccgaugggccucccaacgggcccuccuccccuccuugcaccgagauuaauaaaaaaaaaaaaaaaaaaaaaaaaaaaaaaaaaaaaaaaaaaaaaaaaaaaaaaaaaaaaaaaaugcaucccccccccccccccccccccccccccccccaaaggcucuuuucagagccaccagaauu

SEQ ID NO: 12708 - RNA, 4039 nt, Artificial Sequence
  SARS-CoV-2/Finland/FIN-313/2020__EPI_ISL_414641 spike protein mRNA wt (1-1273)
aggagaaagcuuaccauguuuguuuuucuuguuuuauugccacuagucucuagucaguguguuaaucuuacaaccagaacucaauuacccccugcauacacuaauucuuucacacgugguguuuauuacccugacaaaguuuucagauccucaguuuuacauucaacucaggacuuguucuuaccuuucuuuuccaauguuacuugguuccaugcuauacaugucucugggaccaaugguacuaagagguuugauaacccuguccuaccauuuaaugaugguguuuauuuugcuuccacugagaagucuaacauaauaagaggcuggauuuuugguacuacuuuagauucgaagacccagucccuacuuauuguuaauaacgcuacuaauguuguuauuaaagucugugaauuucaauuuuguaaugauccauuuuuggguguuuauuaccacaaaaacaacaaaaguuggauggaaagugaguucagaguuuauucuagugcgaauaauugcacuuuugaauaugucucucagccuuuucuuauggaccuugaaggaaaacaggguaauuucaaaaaucuuagggaauuuguguuuaagaauauugaugguuauuuuaaaauauauucuaagcacacgccuauuaauuuagugcgugaucucccucaggguuuuucggcuuuagaaccauugguagauuugccaauagguauuaacaucacuagguuuaaaacuuuacuugcuuuacauagaaguuauuugacuccuggugauucuucuucagguuggacagcuggugcugcagcuuauuauguggguuaucuucaaccuaggacuuuucuauuaaaauauaaugaaaauggaaccauuacagaugcuguagacugugcacuugacccucucucagaaacaaaguguacguugaaauccuucacuguagaaaaaggaaucuaucaaacuucuaacuuuagaguccaaccaacagaaucuauuguuagauuuccuaauauuacaaacuugugcccuuuuggugaaguuuuuaacgccaccagauuugcaucuguuuaugcuuggaacaggaagagaaucagcaacuguguugcugauuauucuguccuauauaauuccgcaucauuuuccacuuuuaaguguuauggagugucuccuacuaaauuaaaugaucucugcuuuacuaaugucuaugcagauucauuuguaauuagaggugaugaagucagacaaaucgcuccagggcaaacuggaaagauugcugauuauaauuauaaauuaccagaugauuuuacaggcugcguuauagcuuggaauucuaacaaucuugauucuaagguuggugguaauuauaauuaccuguauagauuguuuaggaagucuaaucucaaaccuuuugagagagauauuucaacugaaaucuaucaggccgguagcacaccuuguaaugguguugaagguuuuaauuguuacuuuccuuuacaaucauaugguuuccaacccacuaaugguguugguuaccaaccauacagaguaguaguacuuucuuuugaacuucuacaugcaccagcaacuguuuguggaccuaaaaagucuacuaauuugguuaaaaacaaaugugucaauuucaacuucaaugguuuaacaggcacagguguucuuacugagucuaacaaaaaguuucugccuuuccaacaauuuggcagagacauugcugacacuacugaugcuguccgugauccacagacacuugagauucuugacauuacaccauguucuuuugguggugucaguguuauaacaccaggaacaaauacuucuaaccagguugcuguucuuuaucaggguguuaacugcacagaagucccuguugcuauucaugcagaucaacuuacuccuacuuggcguguuuauucuacagguucuaauguuuuucaaacacgugcaggcuguuuaauaggggcugaacaugucaacaacucauaugagugugacauacccauuggugcagguauaugcgcuaguuaucagacucagacuaauucuccucggcgggcacguaguguagcuagucaaucuaucauugccuacacuaugucacuuggugcagaaaauucaguugcuuacucuaauaacucuauugccauacccacaaauuuuacuauuaguguuaccacagaaauucuaccagugucuaugaccaagacaucaguagauuguacaauguacauuuguggugauucaacugaaugcagcaaucuuuuguugcaauauggcaguuuuuguacacaauuaaaccgugcuuuaacuggaauagcuguugaacaagacaaaaacacccaagaaguuuuugcacaagucaaacaaauuuacaaaacaccaccaauuaaagauuuuggugguuuuaauuuuucacaaauauuaccagauccaucaaaaccaagcaagaggucauuuauugaagaucuacuuuucaacaaagugacacuugcagaugcuggcuucaucaaacaauauggugauugccuuggugauauugcugcuagagaccucauuugugcacaaaaguuuaacggccuuacuguuuugccaccuuugcucacagaugaaaugauugcucaauacacuucugcacuguuagcggguacaaucacuucugguuggaccuuuggugcaggugcugcauuacaaauaccauuugcuaugcaaauggcuuauagguuuaaugguauuggaguuacacagaauguucucuaugagaaccaaaaauugauugccaaccaauuuaauagugcuauuggcaaaauucaagacucacuuucuuccacagcaagugcacuuggaaaacuucaagauguggucaaccaaaaugcacaagcuuuaaacacgcuuguuaaacaacuuagcuccaauuuuggugcaauuucaaguguuuuaaaugauauccuuucacgucuugacaaaguugaggcugaagugcaaauugauagguugaucacaggcagacuucaaaguuugcagacauaugugacucaacaauuaauuagagcugcagaaaucagagcuucugcuaaucuugcugcuacuaaaaugucagaguguguacuuggacaaucaaaaagaguugauuuuuguggaaagggcuaucaucuuauguccuucccucagucagcaccucaugguguagucuucuugcaugugacuuaugucccugcacaagaaaagaacuucacaacugcuccugccauuugucaugauggaaaagcacacuuuccucgugaaggugucuuuguuucaaauggcacacacugguuuguaacacaaaggaauuuuuaugaaccacaaaucauuacuacagacaacacauuugugucugguaacugugauguuguaauaggaauugucaacaacacaguuuaugauccuuugcaaccugaauuagacucauucaaggaggaguuagauaaauauuuuaagaaucauacaucaccagauguugauuuaggugacaucucuggcauuaaugcuucaguuguaaacauucaaaaagaaauugaccgccucaaugagguugccaagaauuuaaaugaaucucucaucgaucuccaagaacuuggaaaguaugagcaguauauaaaauggccaugguacauuuggcuagguuuuauagcuggcuugauugccauaguaauggugacaauuaugcuuugcuguaugaccaguugcuguaguugucucaagggcuguuguucuuguggauccugcugcaaauuugaugaagacgacucugagccagugcucaaaggagucaaauuacauuacacauaaggacuaguuauaagacugacuagcccgaugggccucccaacgggcccuccuccccuccuugcaccgagauuaauaaaaaaaaaaaaaaaaaaaaaaaaaaaaaaaaaaaaaaaaaaaaaaaaaaaaaaaaaaaaaaaaugcaucccccccccccccccccccccccccccccccaaaggcucuuuucagagccaccagaauu

SEQ ID NO: 12709 - RNA, 4039 nt, Artificial Sequence
  SARS-CoV-2/Netherlands/ZuidHolland_2/2020__EPI_ISL_414556 spike protein mRNA wt (1-1273)
aggagaaagcuuaccauguuuguuuuucuuguuuuauugccacuagucucuagucaguguguuaaucuuacaaccagaacucaauuacccccugcauacacuaauucuuucacacgugguguuuauuacccugacaaaguuuucagauccucaguuuuacauucaacucaggacuuguucuuaccuuucuuuuccaauguuacuugguuccaugcuauacaugucucugggaccaaugguacuaagagguuugauaacccuguccuaccauuuaaugaugguguuuauuuugcuuccacugagaagucuaacauaauaagaggcuggauuuuugguacuacuuuagauucgaagacccagucccuacuuauuguuaauaacgcuacuaauguuguuauuaaagucugugaauuucaauuuuguaaugauccauuuuuggguguuuauuaccacaaaaacaacaaaaguuggauggaaagugaguucagaguuuauucuagugcgaauaauugcacuuuugaauaugucucucagccuuuucuuauggaccuugaaggaaaacaggguaauuucaaaaaucuuagggaauuuguguuuaagaauauugaugguuauuuuaaaauauauucuaagcacacgccuauuaauuuagugcgugaucucccucaggguuuuucggcuuuagaaccauugguagauuugccaauagguauuaacaucacuagguuucaaacuuuacuugcuuuacauagaaguuauuugacuccuggugauucuucuucagguuggacagcuggugcugcagcuuauuauguggguuaucuucaaccuaggacuuuucuauuaaaauauaaugaaaauggaaccauuacagaugcuguagacugugcacuugacccucucucagaaacaaaguguacguugaaauccuucacuguagaaaaaggaaucuaucaaacuucuaacuuuagaguccaaccaacagaaucuauuguuagauuuccuaauauuacaaacuugugcccuuuuggugaaguuuuuaacgccaccagauuugcaucuguuuaugcuuggaacaggaagagaaucagcaacuguguugcugauuauucuguccuauauaauuccgcaucauuuuccacuuuuaaguguuauggagugucuccuacuaaauuaaaugaucucugcuuuacuaaugucuaugcagauucauuuguaauuagaggugaugaagucagacaaaucgcuccagggcaaacuggaaagauugcugauuauaauuauaaauuaccagaugauuuuacaggcugcguuauagcuuggaauucuaacaaucuugauucuaagguuggugguaauuauaauuaccuguauagauuguuuaggaagucuaaucucaaaccuuuugagagagauauuucaacugaaaucuaucaggccgguagcacaccuuguaaugguguugaagguuuuaauuguuacuuuccuuuacaaucauaugguuuccaacccacuaaugguguugguuaccaaccauacagaguaguaguacuuucuuuugaacuucuacaugcaccagcaacuguuuguggaccuaaaaagucuacuaauuugguuaaaaacaaaugugucaauuucaacuucaaugguuuaacaggcacagguguucuuacugagucuaacaaaaaguuucugccuuuccaacaauuuggcagagacauugcugacacuacugaugcuguccgugauccacagacacuugagauucuugacauuacaccauguucuuuugguggugucaguguuauaacaccaggaacaaauacuucuaaccagguugcuguucuuuaucaggguguuaacugcacagaagucccuguugcuauucaugcagaucaacuuacuccuacuuggcguguuuauucuacagguucuaauguuuuucaaacacgugcaggcuguuuaauaggggcugaacaugucaacaacucauaugagugugacauacccauuggugcagguauaugcgcuaguuaucagacucagacuaauucuccucggcgggcacguaguguagcuagucaauccaucauugccuacacuaugucacuuggugcagaaaauucaguugcuuacucuaauaacucuauugccauacccacaaauuuuacuauuaguguuaccacagaaauucuaccagugucuaugaccaagacaucaguagauuguacaauguacauuuguggugauucaacugaaugcagcaaucuuuuguugcaauauggcaguuuuuguacacaauuaaaccgugcuuuaacuggaauagcucuugaacaagacaaaaacacccaagaaguuuuugcacaagucaaacaaauuuacaaaacaccaccaauuaaagauuuuggugguuuuaauuuuucacaaauauuaccagauccaucaaaaccaagcaagaggucauuuauugaagaucuacuuuucaacaaagugacacuugcagaugcuggcuucaucaaacaauauggugauugccuuggugauauugcugcuagagaccucauuugugcacaaaaguuuaacggccuuacuguuuugccaccuuugcucacagaugaaaugauugcucaauacacuucugcacuguuagcggguacaaucacuucugguuggaccuuuggugcaggugcugcauuacaaauaccauuugcuaugcaaauggcuuauagguuuaaugguauuggaguuacacagaauguucucuaugagaaccaaaaauugauugccaaccaauuuaauagugcuauuggcaaaauucaagacucacuuucuuccacagcaagugcacuuggaaaacuucaagauguggucaaccaaaaugcacaagcuuuaaacacgcuuguuaaacaacuuagcuccaauuuuggugcaauuucaaguguuuuaaaugauauccuuucacgucuugacaaaguugaggcugaagugcaaauugauagguugaucacaggcagacuucaaaguuugcagacauaugugacucaacaauuaauuagagcugcagaaaucagagcuucugcuaaucuugcugcuacuaaaaugucagaguguguacuuggacaaucaaaaagaguugauuuuuguggaaagggcuaucaucuuauguccuucccucagucagcaccucaugguguagucuucuugcaugugacuuaugucccugcacaagaaaagaacuucacaacugcuccugccauuugucaugauggaaaagcacacuuuccucgugaaggugucuuuguuucaaauggcacacacugguuuguaacacaaaggaauuuuuaugaaccacaaaucauuacuacagacaacacauuugugucugguaacugugauguuguaauaggaauugucaacaacacaguuuaugauccuuugcaaccugaauuagacucauucaaggaggaguuagauaaauauuuuaagaaucauacaucaccagauguugauuuaggugacaucucuggcauuaaugcuucaguuguaaacauucaaaaagaaauugaccgccucaaugagguugccaagaauuuaaaugaaucucucaucgaucuccaagaacuuggaaaguaugagcaguauauaaaauggccaugguacauuuggcuagguuuuauagcuggcuugauugccauaguaauggugacaauuaugcuuugcuguaugaccaguugcuguaguugucucaagggcuguuguucuuguggauccugcugcaaauuugaugaagacgacucugagccagugcucaaaggagucaaauuacauuacacauaaggacuaguuauaagacugacuagcccgaugggccucccaacgggcccuccuccccuccuugcaccgagauuaauaaaaaaaaaaaaaaaaaaaaaaaaaaaaaaaaaaaaaaaaaaaaaaaaaaaaaaaaaaaaaaaaugcaucccccccccccccccccccccccccccccccaaaggcucuuuucagagccaccagaauu

SEQ ID NO: 12710 - RNA, 4039 nt, Artificial Sequence
  SARS-CoV-2/USA/WA-UW31/2020__EPI_ISL_414618 spike protein mRNA wt (1-1273)
aggagaaagcuuaccauguuuguuuuucuuguuuuauugccacuagucucuagucaguguguuaaucuuacaaccagaacucaauuacccccugcauacacuaauucuuucacacgugguguuuauuacccugacaaaguuuucagauccucaguuuuacauucaacucaggacuuguucuuaccuuucuuuuccaauguuacuugguuccaugcuauacaugucucugggaccaaugguacuaagagguuugauaacccuguccuaccauuuaaugaugguguuuauuuugcuuccacugagaagucuaacauaauaagaggcuggauuuuugguacuacuuuagauucgaagacccagucccuacuuauuguuaauaacgcuacuaauguuguuauuaaagucugugaauuucaauuuuguaaugauccauuuuuggguguuuauuaccacaaaaacaacaaaaguuggauggaaagugaguucagaguuuauucuagugcgaauaauugcacuuuugaauaugucucucagccuuuucuuauggaccuugaaggaaaacaggguaauuucaaaaaucuuagggaauuuguguuuaagaauauugaugguuauuuuaaaauauauucuaagcacacgccuauuaauuuagugcgugaucucccucaggguuuuucggcuuuagaaccauugguagauuugccaauagguauuaacaucacuagguuucaaacuuuacuugcuuuacauagaaguuauuugacuccuggugauucuucuucagguuggacagcuggugcugcagcuuauuauguggguuaucuucaaccuaggacuuuucuauuaaaauauaaugaaaauggaaccauuacagaugcuguagacugugcacuugacccucucucagaaacaaaguguacguugaaauccuucacuguagaaaaaggaaucuaucaaacuucuaacuuuagaguccaaccaacagaaucuauuguuagauuuccuaauauuacaaacuugugcccuuuuggugaaguuuuuaacgccaccagauuugcaucuguuuaugcuuggaacaggaagagaaucagcaacuguguugcugauuauucuguccuauauaauuccgcaucauuuuccacuuuuaaguguuauggagugucuccuacuaaauuaaaugaucucugcuuuacuaaugucuaugcagauucauuuguaauuagaggugaugaagucagacaaaucgcuccagggcaaacuggaaagauugcugauuauaauuauaaauuaccagaugauuuuacaggcugcguuauagcuuggaauucuaacaaucuugauucuaagguuggugguaauuauaauuaccuguauagauuguuuaggaagucuaaucucaaaccuuuugagagagauauuucaacugaaaucuaucaggccgguagcacaccuuguaauggugcugaagguuuuaauuguuacuuuccuuuacaaucauaugguuuccaacccacuaaugguguugguuaccaaccauacagaguaguaguacuuucuuuugaacuucuacaugcaccagcaacuguuuguggaccuaaaaagucuacuaauuugguuaaaaacaaaugugucaauuucaacuucaaugguuuaacaggcacagguguucuuacugagucuaacaaaaaguuucugccuuuccaacaauuuggcagagacauugcugacacuacugaugcuguccgugauccacagacacuugagauucuugacauuacaccauguucuuuugguggugucaguguuauaacaccaggaacaaauacuucuaaccagguugcuguucuuuaucaggauguuaacugcacagaagucccuguugcuauucaugcagaucaacuuacuccuacuuggcguguuuauucuacagguucuaauguuuuucaaacacgugcaggcuguuuaauaggggcugaacaugucaacaacucauaugagugugacauacccauuggugcagguauaugcgcuaguuaucagacucagacuaauucuccucggcgggcacguaguguagcuagucaauccaucauugccuacacuaugucacuuggugcagaaaauucaguugcuuacucuaauaacucuauugccauacccacaaauuuuacuauuaguguuaccacagaaauucuaccagugucuaugaccaagacaucaguagauuguacaauguacauuuguggugauucaacugaaugcagcaaucuuuuguugcaauauggcaguuuuuguacacaauuaaaccgugcuuuaacuggaauagcuguugaacaagacaaaaacacccaagaaguuuuugcacaagucaaacaaauuuacaaaacaccaccaauuaaagauuuuggugguuuuaauuuuucacaaauauuaccagauccaucaaaaccaagcaagaggucauuuauugaagaucuacuuuucaacaaagugacacuugcagaugcuggcuucaucaaacaauauggugauugccuuggugauauugcugcuagagaccucauuugugcacaaaaguuuaacggccuuacuguuuugccaccuuugcucacagaugaaaugauugcucaauacacuucugcacuguuagcggguacaaucacuucugguuggaccuuuggugcaggugcugcauuacaaauaccauuugcuaugcaaauggcuuauagguuuaaugguauuggaguuacacagaauguucucuaugagaaccaaaaauugauugccaaccaauuuaauagugcuauuggcaaaauucaagacucacuuucuuccacagcaagugcacuuggaaaacuucaagauguggucaaccaaaaugcacaagcuuuaaacacgcuuguuaaacaacuuagcuccaauuuuggugcaauuucaaguguuuuaaaugauauccuuucacgucuugacaaaguugaggcugaagugcaaauugauagguugaucacaggcagacuucaaaguuugcagacauaugugacucaacaauuaauuagagcugcagaaaucagagcuucugcuaaucuugcugcuacuaaaaugucagaguguguacuuggacaaucaaaaagaguugauuuuuguggaaagggcuaucaucuuauguccuucccucagucagcaccucaugguguagucuucuugcaugugacuuaugucccugcacaagaaaagaacuucacaacugcuccugccauuugucaugauggaaaagcacacuuuccucgugaaggugucuuuguuucaaauggcacacacugguuuguaacacaaaggaauuuuuaugaaccacaaaucauuacuacagacaacacauuugugucugguaacugugauguuguaauaggaauugucaacaacacaguuuaugauccuuugcaaccugaauuagacucauucaaggaggaguuagauaaauauuuuaagaaucauacaucaccagauguugauuuaggugacaucucuggcauuaaugcuucaguuguaaacauucaaaaagaaauugaccgccucaaugagguugccaagaauuuaaaugaaucucucaucgaucuccaagaacuuggaaaguaugagcaguauauaaaauggccaugguacauuuggcuagguuuuauagcuggcuugauugccauaguaauggugacaauuaugcuuugcuguaugaccaguugcuguaguugucucaagggcuguuguucuuguggauccugcugcaaauuugaugaagacgacucugagccagugcucaaaggagucaaauuacauuacacauaaggacuaguuauaagacugacuagcccgaugggccucccaacgggcccuccuccccuccuugcaccgagauuaauaaaaaaaaaaaaaaaaaaaaaaaaaaaaaaaaaaaaaaaaaaaaaaaaaaaaaaaaaaaaaaaaugcaucccccccccccccccccccccccccccccccaaaggcucuuuucagagccaccagaauu

SEQ ID NO: 12711 - RNA, 4039 nt, Artificial Sequence
  SARS-CoV-2/South Korea/SNU01/2020__EPI_ISL_411929 spike protein mRNA wt (1-1273)
aggagaaagcuuaccauguuuguuuuucuuguuuuauugccacuagucucuagucaguguguuaaucuuacaaccagaacucaauuacccccugcauacacuaauucuuucacacgugguguuuauuacccugacaaaguuuucagauccucaguuuuacauucaacucaggacuuguucuuaccuuucuuuuccaauguuacuugguuccaugcuauacaugucucugggaccaaugguacuaagagguuugauaacccuguccuaccauuuaaugaugguguuuauuuugcuuccacugagaagucuaacauaauaagaggcuggauuuuugguacuacuuuagauucgaagacccagucccuacuuauuguuaauaacgcuacuaauguuguuauuaaagucugugaauuucaauuuuguaaugauccauuuuuggguguuuauuaccacaaaaacaacaaaaguuggauggaaagugaguucagaguuuauucuagugcgaauaauugcacuuuugaauaugucucucagccuuuucuuauggaccuugaaggaaaacaggguaauuucaaaaaucuuagggaauuuguguuuaagaauauugaugguuauuuuaaaauauauucuaagcacacgccuauuaauuuagugcgugaucucccucaggguuuuugggcuuuagaaccauugguagauuugccaauagguauuaacaucacuagguuucaaacuuuacuugcuuuacauagaaguuauuugacuccuggugauucuucuucagguuggacagcuggugcugcagcuuauuauguggguuaucuucaaccuaggacuuuucuauuaaaauauaaugaaaauggaaccauuacagaugcuguagacugugcacuugacccucucucagaaacaaaguguacguugaaauccuucacuguagaaaaaggaaucuaucaaacuucuaacuuuagaguccaaccaacagaaucuauuguuagauuuccuaauauuacaaacuugugcccuuuuggugaaguuuuuaacgccaccagauuugcaucuguuuaugcuuggaacaggaagagaaucagcaacuguguugcugauuauucuguccuauauaauuccgcaucauuuuccacuuuuaaguguuauggagugucuccuacuaaauuaaaugaucucugcuuuacuaaugucuaugcagauucauuuguaauuagaggugaugaagucagacaaaucgcuccagggcaaacuggaaagauugcugauuauaauuauaaauuaccagaugauuuuacaggcugcguuauagcuuggaauucuaacaaucuugauucuaagguuggugguaauuauaauuaccuguauagauuguuuaggaagucuaaucucaaaccuuuugagagagauauuucaacugaaaucuaucaggccgguagcacaccuuguaaugguguugaagguuuuaauuguuacuuuccuuuacaaucauaugguuuccaacccacuaaugguguugguuaccaaccauacagaguaguaguacuuucuuuugaacuucuacaugcaccagcaacuguuuguggaccuaaaaagucuacuaauuugguuaaaaacaaaugugucaauuucaacuucaaugguuuaacaggcacagguguucuuacugagucuaacaaaaaguuucugccuuuccaacaauuuggcagagacauugcugacacuacugaugcuguccgugauccacagacacuugagauucuugacauuacaccauguucuuuugguggugucaguguuauaacaccaggaacaaauacuucuaaccagguugcuguucuuuaucaggauguuaacugcacagaagucccuguugcuauucaugcagaucaacuuacuccuacuuggcguguuuauucuacagguucuaauguuuuucaaacacgugcaggcuguuuaauaggggcugaacaugucaacaacucauaugagugugacauacccauuggugcagguauaugcgcuaguuaucagacucagacuaauucuccucggcgggcacguaguguagcuagucaauccaucauugccuacacuaugucacuuggugcagaaaauucaguugcuuacucuaauaacucuauugccauacccacaaauuuuacuauuaguguuaccacagaaauucuaccagugucuaugaccaagacaucaguagauuguacaauguacauuuguggugauucaacugaaugcagcaaucuuuuguugcaauauggcaguuuuuguacacaauuaaaccgugcuuuaacuggaauagcuguugaacaagacaaaaacacccaagaaguuuuugcacaagucaaacaaauuuacaaaacaccaccaauuaaagauuuuggugguuuuaauuuuucacaaauauuaccagauccaucaaaaccaagcaagaggucauuuauugaagaucuacuuuucaacaaagugacacuugcagaugcuggcuucaucaaacaauauggugauugccuuggugauauugcugcuagagaccucauuugugcacaaaaguuuaacggccuuacuguuuugccaccuuugcucacagaugaaaugauugcucaauacacuucugcacuguuagcggguacaaucacuucugguuggaccuuuggugcaggugcugcauuacaaauaccauuugcuaugcaaauggcuuauagguuuaaugguauuggaguuacacagaauguucucuaugagaaccaaaaauugauugccaaccaauuuaauagugcuauuggcaaaauucaagacucacuuucuuccacagcaagugcacuuggaaaacuucaagauguggucaaccaaaaugcacaagcuuuaaacacgcuuguuaaacaacuuagcuccaauuuuggugcaauuucaaguguuuuaaaugauauccuuucacgucuugacaaaguugaggcugaagugcaaauugauagguugaucacaggcagacuucaaaguuugcagacauaugugacucaacaauuaauuagagcugcagaaaucagagcuucugcuaaucuugcugcuacuaaaaugucagaguguguacuuggacaaucaaaaagaguugauuuuuguggaaagggcuaucaucuuauguccuucccucagucagcaccucaugguguagucuucuugcaugugacuuaugucccugcacaagaaaagaacuucacaacugcuccugccauuugucaugauggaaaagcacacuuuccucgugaaggugucuuuguuucaaauggcacacacugguuuguaacacaaaggaauuuuuaugaaccacaaaucauuacuacagacaacacauuugugucugguaacugugauguuguaauaggaauugucaacaacacaguuuaugauccuuugcaaccugaauuagacucauucaaggaggaguuagauaaauauuuuaagaaucauacaucaccagauguugauuuaggugacaucucuggcauuaaugcuucaguuguaaacauucaaaaagaaauugaccgccucaaugagguugccaagaauuuaaaugaaucucucaucgaucuccaagaacuuggaaaguaugagcaguauauaaaauggccaugguacauuuggcuagguuuuauagcuggcuugauugccauaguaauggugacaauuaugcuuugcuguaugaccaguugcuguaguugucucaagggcuguuguucuuguggauccugcugcaaauuugaugaagacgacucugagccagugcucaaaggagucaaauuacauuacacauaaggacuaguuauaagacugacuagcccgaugggccucccaacgggcccuccuccccuccuugcaccgagauuaauaaaaaaaaaaaaaaaaaaaaaaaaaaaaaaaaaaaaaaaaaaaaaaaaaaaaaaaaaaaaaaaaugcaucccccccccccccccccccccccccccccccaaaggcucuuuucagagccaccagaauu

SEQ ID NO: 12712 - RNA, 4039 nt, Artificial Sequence
  SARS-CoV-2/China/WF0004/2020__EPI_ISL_413694 spike protein mRNA wt (1-1273)
aggagaaagcuuaccauguuuguuuuucuuguuuuauugccacuagucucuagucaguguguuaaucuuacaaccagaacucaauuacccccugcauacacuaauucuuucacacgugguguuuauuacccugacaaaguuuucagauccucaguuuuacauucaacucaggacuuguucuuaccuuucuuuuccaauguuacuugguuccaugcuauacaugucucugggaccaaugguacuaagagguuugauaacccuguccuaccauuuaaugaugguguuuauuuugcuuccacugagaagucuaacauaauaagaggcuggauuuuugguacuacuuuagauucgaagacccagucccuacuuauuguuaauaacgcuacuaauguuguuauuaaagucugugaauuucaauuuuguaaugauccauuuuuggguguuuauuaccacaaaaacaacaaaaguuggacggaaagugaguucagaguuuauucuagugcgaauaauugcacuuuugaauaugucucucagccuuuucuuauggaccuugaaggaaaacaggguaauuucaaaaaucuuagggaauuuguguuuaagaauauugaugguuauuuuaaaauauauucuaagcacacgccuauuaauuuagugcgugaucucccucaggguuuuucggcuuuagaaccauugguagauuugccaauagguauuaacaucacuagguuucaaacuuuacuugcuuuacauagaaguuauuugacuccuggugauucuucuucagguuggacagcuggugcugcagcuuauuauguggguuaucuucaaccuaggacuuuucuauuaaaauauaaugaaaauggaaccauuacagaugcuguagacugugcacuugacccucucucagaaacaaaguguacguugaaauccuucacuguagaaaaaggaaucuaucaaacuucuaacuuuagaguccaaccaacagaaucuauuguuagauuuccuaauauuacaaacuugugcccuuuuggugaaguuuuuaacgccaccagauuugcaucuguuuaugcuuggaacaggaagagaaucagcaacuguguugcugauuauucuguccuauauaauuccgcaucauuuuccacuuuuaaguguuauggagugucuccuacuaaauuaaaugaucucugcuuuacuaaugucuaugcagauucauuuguaauuagaggugaugaagucagacaaaucgcuccagggcaaacuggaaagauugcugauuauaauuauaaauuaccagaugauuuuacaggcugcguuauagcuuggaauucuaacaaucuugauucuaagguuggugguaauuauaauuaccuguauagauuguuuaggaagucuaaucucaaaccuuuugagagagauauuucaacugaaaucuaucaggccgguagcacaccuuguaaugguguugaagguuuuaauuguuacuuuccuuuacaaucauaugguuuccaacccacuaaugguguugguuaccaaccauacagaguaguaguacuuucuuuugaacuucuacaugcaccagcaacuguuuguggaccuaaaaagucuacuaauuugguuaaaaacaaaugugucaauuucaacuucaaugguuuaacaggcacagguguucuuacugagucuaacaaaaaguuucugccuuuccaacaauuuggcagagacauugcugacacuacugaugcuguccgugauccacagacacuugagauucuugacauuacaccauguucuuuugguggugucaguguuauaacaccaggaacaaauacuucuaaccagguugcuguucuuuaucaggauguuaacugcacagaagucccuguugcuauucaugcagaucaacuuacuccuacuuggcguguuuauucuacagguucuaauguuuuucaaacacgugcaggcuguuuaauaggggcugaacaugucaacaacucauaugagugugacauacccauuggugcagguauaugcgcuaguuaucagacucagacuaauucuccucggcgggcacguaguguagcuagucaauccaucauugccuacacuaugucacuuggugcagaaaauucaguugcuuacucuaauaacucuauugccauacccacaaauuuuacuauuaguguuaccacagaaauucuaccagugucuaugaccaagacaucaguagauuguacaauguacauuuguggugauucaacugaaugcagcaaucuuuuguugcaauauggcaguuuuuguacacaauuaaaccgugcuuuaacuggaauagcuguugaacaagacaaaaacacccaagaaguuuuugcacaagucaaacaaauuuacaaaacaccaccaauuaaagauuuuggugguuuuaauuuuucacaaauauuaccagauccaucaaaaccaagcaagaggucauuuauugaagaucuacuuuucaacaaagugacacuugcagaugcuggcuucaucaaacaauauggugauugccuuggugauauugcugcuagagaccucauuugugcacaaaaguuuaacggccuuacuguuuugccaccuuugcucacagaugaaaugauugcucaauacacuucugcacuguuagcggguacaaucacuucugguuggaccuuuggugcaggugcugcauuacaaauaccauuugcuaugcaaauggcuuauagguuuaaugguauuggaguuacacagaauguucucuaugagaaccaaaaauugauugccaaccaauuuaauagugcuauuggcaaaauucaagacucacuuucuuccacagcaagugcacuuggaaaacuucaagauguggucaaccaaaaugcacaagcuuuaaacacgcuuguuaaacaacuuagcuccaauuuuggugcaauuucaaguguuuuaaaugauauccuuucacgucuugacaaaguugaggcugaagugcaaauugauagguugaucacaggcagacuucaaaguuugcagacauaugugacucaacaauuaauuagagcugcagaaaucagagcuucugcuaaucuugcugcuacuaaaaugucagaguguguacuuggacaaucaaaaagauuugauuuuuguggaaagggcuaucaucuuauguccuucccucagucagcaccucaugguguagucuucuugcaugugacuuaugucccugcacaagaaaagaacuucacaacugcuccugccauuugucaugauggaaaagcacacuuuccucgugaaggugucuuuguuucaaauggcacacacugguuuguaacacaaaggaauuuuuaugaaccacaaaucauuacuacagacaacacauuugugucugguaacugugauguuguaauaggaauugucaacaacacaguuuaugauccuuugcaaccugaauuagacucauucaaggaggaguuagauaaauauuuuaagaaucauacaucaccagauguugauuuaggugacaucucuggcauuaaugcuucaguuguaaacauucaaaaagaaauugaccgccucaaugagguugccaagaauuuaaaugaaucucucaucgaucuccaagaacuuggaaaguaugagcaguauauaaaauggccaugguacauuuggcuagguuuuauagcuggcuugauugccauaguaauggugacaauuaugcuuugcuguaugaccaguugcuguaguugucucaagggcuguuguucuuguggauccugcugcaaauuugaugaagacgacucugagccagugcucaaaggagucaaauuacauuacacauaaggacuaguuauaagacugacuagcccgaugggccucccaacgggcccuccuccccuccuugcaccgagauuaauaaaaaaaaaaaaaaaaaaaaaaaaaaaaaaaaaaaaaaaaaaaaaaaaaaaaaaaaaaaaaaaaugcaucccccccccccccccccccccccccccccccaaaggcucuuuucagagccaccagaauu

SEQ ID NO: 12713 - RNA, 4039 nt, Artificial Sequence
  SARS-CoV-2/China/WF0028/2020__EPI_ISL_413791 spike protein mRNA wt (1-1273)
aggagaaagcuuaccauguuuguuuuucuuguuuuauugccacuagucucuagucaguguguuaaucuuacaaccagaacucaauuacccccugcauacacuaauucuuucacacgugguguuuauuacccugacaaaguuuucagauccucaguuuuacauucaacucaggacuuguucuuaccuuucuuuuccaauguuacuugguuccaugcuauacaugucucugggaccaaugguacuaagagguuugauaacccuguccuaccauuuaaugaugguguuuauuuugcuuccacugagaagucuaacauaauaagaggcuggauuuuugguacuacuuuagauucgaagacccagucccuacuuauuguuaauaacgcuacuaauguuguuauuaaagucugugaauuucaauuuuguaaugauccauuuuuggguguuuauuaccacaaaaacaacaaaaguuggauggaaagugaguucagaguuuauucuagugcgaauaauugcacuuuugaauaugucucucagccuuuucuuauggaccuugaaggaaaacaggguaauuucaaaaaucuuagggaauuuguguuuaagaauauugaugguuauuuuaaaauauauucuaagcacacgccuauuaauuuagugcgugaucucccucaggguuuuucggcuuuagaaccauugguagauuugccaauagguauuaacaucacuagguuucaaacuuuacuugcuuuacauagaaguuauuugacuccuggugauucuucuucagguuggacagcuggugcugcagcuuauuauguggguuaucuucaaccuaggacuuuucuauuaaaauauaaugaaaauggaaccauuacagaugcuguagacugugcacuugacccucucucagaaacaaaguguacguugaaauccuucacuguagaaaaaggaaucuaucaaacuucuaacuuuagaguccaaccaacagaaucuauuguuagauuuccuaauauuacaaacuugugcccuuuuggugaaguuuuuaacgccaccagauuugcaucuguuuaugcuuggaacaggaagagaaucagcaacuguguugcugauuauucuguccuauauaauuccgcaucauuuuccacuuuuaaguguuauggagugucuccuacuaaauuaaaugaucucugcuuuacuaaugucuaugcagauucauuuguaauuagaggugaugaagucagacaaaucgcuccagggcaaacuggaaagauugcugauuauaauuauaaauuaccagaugauuuuacaggcugcguuauagcuuggaauucuaacaaucuugauucuaagguuggugguaauuauaauuaccuguauagauuguuuaggaagucuaaucucaaaccuuuugagagagauauuucaacugaaaucuaucaggccgguagcacaccuuguaaugguguugaagguuuuaauuguuacuuuccuuuacaaucauaugguuuccaacccacuaaugguguugguuaccaaccauacagaguaguaguacuuucuuuugaacuucuacaugcaccagcaacuguuuguggaccuaaaaagucuacuaauuugguuaaaaacaaaugugucaauuucaacuucaaugguuuaacaggcacagguguucuuacugagucuaacaaaaaguuucugccuuuccaacaauuuggcagagacauugcugacacuacugaugcuguccgugauccacagacacuugagauucuugacauuacaccauguucuuuugguggugucaguguuauaacaccaggaacaaauacuucuaaccagguugcuguucuuuaucaggauguuaacugcacagaagucccuguugcuauucaugcagaucaacuuacuccuacuuggcguguuuauucuacagguucuaauguuuuucaaacacgugcaggcuguuuaauaggggcugaacaugucaacaacucauaugagugugacauacccauuggugcagguauaugcgcuaguuaucagacucagacuaauucuccucggcgggcacguaguguagcuagucaauccaucauugccuacacuaugucacuuggugcagaaaauucaguugcuuacucuaauaacucuauugccauacccacaaauuuuacuauuaguguuaccacagaaauucuaccagugucuaugaccaagacaucaguagauuguacaauguacauuuguggugauucaacugaaugcagcaaucuuuuguugcaauauggcaguuuuuguacacaauuaaaccgugcuuuaacuggaauagcuguugaacaagacaaaaacacccaagaaguuuuugcacaagucaaacaaauuuacaaaacaccaccaauuaaagauuuuggugguuuuaauuuuucacaaauauuaccagauccaucaaaaccaagcaagaggucauuuauugaagaucuacuuuucaacaaagugacacuugcagaugcuggcuucaucaaacaauauggugauugccuuggugauauugcugcuagagaccucauuugugcacaaaaguuuaacggccuuacuguuuugccaccuuugcucacagaugaaaugauugcucaauacacuucugcacuguuagcggguacaaucacuucugguuggaccuuuggugcaggugcugcauuacaaauaccauuugcuaugcaaauggcuuauagguuuaaugguauuggaguuacacagaauguucucuaugagaaccaaaaauugauugccaaccaauuuaauagugcuauuggcaaaauucaagacucacuuucuuccacagcaagugcacuuggaaaacuucaagauguggucaaccaaaaugcacaagcuuuaaacacgcuuguuaaacaacuuagcuccaauuuuggugcaauuucaaguguuuuaaaugauauccuuucacgucuugacaaaguugaggcugaagugcaaauugauagguugaucacaggcagacuucaaaguuugcagacauaugugacucaacaauuaauuagagcugcagaaaucagagcuucugcuaaucuugcugcuacuaaaaugucagaguguguacuuggacaaucaaaaagaguugauuuuuguggaaagggcuaucaucuuauguccuucccucagucagcaccucaugguguagucuucuugcaugugacuuaugucccugcacaagaaaagaacuucacaacugcuccugccauuugucaugauggaaaagcacacuuuccucgugaaggugucuuuguuucaaauggcacacacugguuuguaacacaaaggaauuuuuaugaaccacaaaucauuacuacagacaacacauuugugucugguaacugugauguuguaauaggaauugucaacaacacaguuuaugauccuuugcaaccugaauuagaaucauucaaggaggaguuagauaaauauuuuaagaaucauacaucaccagauguugauuuaggugacaucucuggcauuaaugcuucaguuguaaacauucaaaaagaaauugaccgccucaaugagguugccaagaauuuaaaugaaucucucaucgaucuccaagaacuuggaaaguaugagcaguauauaaaauggccaugguacauuuggcuagguuuuauagcuggcuugauugccauaguaauggugacaauuaugcuuugcuguaugaccaguugcuguaguugucucaagggcuguuguucuuguggauccugcugcaaauuugaugaagacgacucugagccagugcucaaaggagucaaauuacauuacacauaaggacuaguuauaagacugacuagcccgaugggccucccaacgggcccuccuccccuccuugcaccgagauuaauaaaaaaaaaaaaaaaaaaaaaaaaaaaaaaaaaaaaaaaaaaaaaaaaaaaaaaaaaaaaaaaaugcaucccccccccccccccccccccccccccccccaaaggcucuuuucagagccaccagaauu

SEQ ID NO: 12714 - RNA, 4039 nt, Artificial Sequence
  SARS-CoV-2/2019-nCoV/USA-CruiseA-18/2020__MT159716.1 spike protein mRNA wt (1-1273)
aggagaaagcuuaccauguuuguuuuucuuguuuuauugccacuagucucuagucaguguguuaaucuuacaaccagaacucaauuacccccugcauacacuaauucuuucacacgugguguuuauuacccugacaaaguuuucagauccucaguuuuacauucaacucaggacuuguucuuaccuuucuuuuccaauguuacuugguuccaugcuauacaugucucugggaccaaugguacuaagagguuugauaacccuguccuaccauuuaaugaugguguuuauuuugcuuccacugagaagucuaacauaauaagaggcuggauuuuugguacuacuuuagauucgaagacccagucccuacuuauuguuaauaacgcuacuaauguuguuauuaaagucugugaauuucaauuuuguaaugauccauuuuuggguguuuauuaccacaaaaacaacaaaaguuggauggaaagugaguuaagaguuuauucuagugcgaauaauugcacuuuugaauaugucucucagccuuuucuuauggaccuugaaggaaaacaggguaauuucaaaaaucuuagggaauuuguguuuaagaauauugaugguuauuuuaaaauauauucuaagcacacgccuauuaauuuagugcgugaucucccucaggguuuuucggcuuuagaaccauugguagauuugccaauagguauuaacaucacuagguuucaaacuuuacuugcuuuacauagaaguuauuugacuccuggugauucuucuucagguuggacagcuggugcugcagcuuauuauguggguuaucuucaaccuaggacuuuucuauuaaaauauaaugaaaauggaaccauuacagaugcuguagacugugcacuugacccucucucagaaacaaaguguacguugaaauccuucacuguagaaaaaggaaucuaucaaacuucuaacuuuagaguccaaccaacagaaucuauuguuagauuuccuaauauuacaaacuugugcccuuuuggugaaguuuuuaacgccaccagauuugcaucuguuuaugcuuggaacaggaagagaaucagcaacuguguugcugauuauucuguccuauauaauuccgcaucauuuuccacuuuuaaguguuauggagugucuccuacuaaauuaaaugaucucugcuuuacuaaugucuaugcagauucauuuguaauuagaggugaugaagucagacaaaucgcuccagggcaaacuggaaagauugcugauuauaauuauaaauuaccagaugauuuuacaggcugcguuauagcuuggaauucuaacaaucuugauucuaagguuggugguaauuauaauuaccuguauagauuguuuaggaagucuaaucucaaaccuuuugagagagauauuucaacugaaaucuaucaggccgguagcacaccuuguaaugguguugaagguuuuaauuguuacuuuccuuuacaaucauaugguuuccaacccacuaaugguguugguuaccaaccauacagaguaguaguacuuucuuuugaacuucuacaugcaccagcaacuguuuguggaccuaaaaagucuacuaauuugguuaaaaacaaaugugucaauuucaacuucaaugguuuaacaggcacagguguucuuacugagucuaacaaaaaguuucugccuuuccaacaauuuggcagagacauugcugacacuacugaugcuguccgugauccacagacacuugagauucuugacauuacaccauguucuuuugguggugucaguguuauaacaccaggaacaaauacuucuaaccagguugcuguucuuuaucaggauguuaacugcacagaagucccuguugcuauucaugcagaucaacuuacuccuacuuggcguguuuauucuacagguucuaauguuuuucaaacacgugcaggcuguuuaauaggggcugaacaugucaacaacucauaugagugugacauacccauuggugcagguauaugcgcuaguuaucagacucagacuaauucuccucggcgggcacguaguguagcuagucaauccaucauugccuacacuaugucacuuggugcagaaaauucaguugcuuacucuaauaacucuauugccauacccacaaauuuuacuauuaguguuaccacagaaauucuaccagugucuaugaccaagacaucaguagauuguacaauguacauuuguggugauucaacugaaugcagcaaucuuuuguugcaauauggcaguuuuuguacacaauuaaaccgugcuuuaacuggaauagcuguugaacaagacaaaaacacccaagaaguuuuugcacaagucaaacaaauuuacaaaacaccaccaauuaaagauuuuggugguuuuaauuuuucacaaauauuaccagauccaucaaaaccaagcaagaggucauuuauugaagaucuacuuuucaacaaagugacacuugcagaugcuggcuucaucaaacaauauggugauugccuuggugauauugcugcuagagaccucauuugugcacaaaaguuuaacggccuuacuguuuugccaccuuugcucacagaugaaaugauugcucaauacacuucugcacuguuagcggguacaaucacuucugguuggaccuuuggugcaggugcugcauuacaaauaccauuugcuaugcaaauggcuuauagguuuaaugguauuggaguuacacagaauguucucuaugagaaccaaaaauugauugccaaccaauuuaauagugcuauuggcaaaauucaagacucacuuucuuccacagcaagugcacuuggaaaacuucaagauguggucaaccaaaaugcacaagcuuuaaacacgcuuguuaaacaacuuagcuccaauuuuggugcaauuucaaguguuuuaaaugauauccuuucacgucuugacaaaguugaggcugaagugcaaauugauagguugaucacaggcagacuucaaaguuugcagacauaugugacucaacaauuaauuagagcugcagaaaucagagcuucugcuaaucuugcugcuacuaaaaugucagaguguguacuuggacaaucaaaaagaguugauuuuuguggaaagggcuaucaucuuauguccuucccucagucagcaccucaugguguagucuucuugcaugugacuuaugucccugcacaagaaaagaacuucacaacugcuccugccauuugucaugauggaaaagcacacuuuccucgugaaggugucuuuguuucaaauggcacacacugguuuguaacacaaaggaauuuuuaugaaccacaaaucauuacuacagacaacacauuugugucugguaacugugauguuguaauaggaauugucaacaacacaguuuaugauccuuugcaaccugaauuagacucauucaaggaggaguuagauaaauauuuuaagaaucauacaucaccagauguugauuuaggugacaucucuggcauuaaugcuucaguuguaaacauucaaaaagaaauugaccgccucaaugagguugccaagaauuuaaaugaaucucucaucgaucuccaagaacuuggaaaguaugagcaguauauaaaauggccaugguacauuuggcuagguuuuauagcuggcuugauugccauaguaauggugacaauuaugcuuugcuguaugaccaguugcuguaguugucucaagggcuguuguucuuguggauccugcugcaaauuugaugaagacgacucugagccagugcucaaaggagucaaauuacauuacacauaaggacuaguuauaagacugacuagcccgaugggccucccaacgggcccuccuccccuccuugcaccgagauuaauaaaaaaaaaaaaaaaaaaaaaaaaaaaaaaaaaaaaaaaaaaaaaaaaaaaaaaaaaaaaaaaaugcaucccccccccccccccccccccccccccccccaaaggcucuuuucagagccaccagaauu

SEQ ID NO: 12715 - RNA, 4039 nt, Artificial Sequence
  SARS-CoV-2/SARS-CoV-2/Yunnan-01/human/2020/CHN__MT049951.1 spike protein mRNA wt (1-1273)
aggagaaagcuuaccauguuuguuuuucuuguuuuauugccacuagucucuagucaguguguuaaucuuacaaccagaacucaauuacccccugcaaacacuaauucuuucacacgugguguuuauuacccugacaaaguuuucagauccucaguuuuacauucaacucaggacuuguucuuaccuuucuuuuccaauguuacuugguuccaugcuauacaugucucugggaccaaugguacuaagagguuugauaacccuguccuaccauuuaaugaugguguuuauuuugcuuccacugagaagucuaacauaauaagaggcuggauuuuugguacuacuuuagauucgaagacccagucccuacuuauuguuaauaacgcuacuaauguuguuauuaaagucugugaauuucaauuuuguaaugauccauuuuuggguguuuauuaccacaaaaacaacaaaaguuggauggaaagugaguucagaguuuauucuagugcgaauaauugcacuuuugaauaugucucucagccuuuucuuauggaccuugaaggaaaacaggguaauuucaaaaaucuuagggaauuuguguuuaagaauauugaugguuauuuuaaaauauauucuaagcacacgccuauuaauuuagugcgugaucucccucaggguuuuucggcuuuagaaccauugguagauuugccaauagguauuaacaucacuagguuucaaacuuuacuugcuuuacauagaaguuauuugacuccuggugauucuucuucagguuggacagcuggugcugcagcuuauuauguggguuaucuucaaccuaggacuuuucuauuaaaauauaaugaaaauggaaccauuacagaugcuguagacugugcacuugacccucucucagaaacaaaguguacguugaaauccuucacuguagaaaaaggaaucuaucaaacuucuaacuuuagaguccaaccaacagaaucuauuguuagauuuccuaauauuacaaacuugugcccuuuuggugaaguuuuuaacgccaccagauuugcaucuguuuaugcuuggaacaggaagagaaucagcaacuguguugcugauuauucuguccuauauaauuccgcaucauuuuccacuuuuaaguguuauggagugucuccuacuaaauuaaaugaucucugcuuuacuaaugucuaugcagauucauuuguaauuagaggugaugaagucagacaaaucgcuccagggcaaacuggaaagauugcugauuauaauuauaaauuaccagaugauuuuacaggcugcguuauagcuuggaauucuaacaaucuugauucuaagguuggugguaauuauaauuaccuguauagauuguuuaggaagucuaaucucaaaccuuuugagagagauauuucaacugaaaucuaucaggccgguagcacaccuuguaaugguguugaagguuuuaauuguuacuuuccuuuacaaucauaugguuuccaacccacuaaugguguugguuaccaaccauacagaguaguaguacuuucuuuugaacuucuacaugcaccagcaacuguuuguggaccuaaaaagucuacuaauuugguuaaaaacaaaugugucaauuucaacuucaaugguuuaacaggcacagguguucuuacugagucuaacaaaaaguuucugccuuuccaacaauuuggcagagacauugcugacacuacugaugcuguccgugauccacagacacuugagauucuugacauuacaccauguucuuuugguggugucaguguuauaacaccaggaacaaauacuucuaaccagguugcuguucuuuaucaggauguuaacugcacagaagucccuguugcuauucaugcagaucaacuuacuccuacuuggcguguuuauucuacagguucuaauguuuuucaaacacgugcaggcuguuuaauaggggcugaacaugucaacaacucauaugagugugacauacccauuggugcagguauaugcgcuaguuaucagacucagacuaauucuccucggcgggcacguaguguagcuagucaauccaucauugccuacacuaugucacuuggugcagaaaauucaguugcuuacucuaauaacucuauugccauacccacaaauuuuacuauuaguguuaccacagaaauucuaccagugucuaugaccaagacaucaguagauuguacaauguacauuuguggugauucaacugaaugcagcaaucuuuuguugcaauauggcaguuuuuguacacaauuaaaccgugcuuuaacuggaauagcuguugaacaagacaaaaacacccaagaaguuuuugcacaagucaaacaaauuuacaaaacaccaccaauuaaagauuuuggugguuuuaauuuuucacaaauauuaccagauccaucaaaaccaagcaagaggucauuuauugaagaucuacuuuucaacaaagugacacuugcagaugcuggcuucaucaaacaauauggugauugccuuggugauauugcugcuagagaccucauuugugcacaaaaguuuaacggccuuacuguuuugccaccuuugcucacagaugaaaugauugcucaauacacuucugcacuguuagcggguacaaucacuucugguuggaccuuuggugcaggugcugcauuacaaauaccauuugcuaugcaaauggcuuauagguuuaaugguauuggaguuacacagaauguucucuaugagaaccaaaaauugauugccaaccaauuuaauagugcuauuggcaaaauucaagacucacuuucuuccacagcaagugcacuuggaaaacuucaagauguggucaaccaaaaugcacaagcuuuaaacacgcuuguuaaacaacuuagcuccaauuuuggugcaauuucaaguguuuuaaaugauauccuuucacgucuugacaaaguugaggcugaagugcaaauugauagguugaucacaggcagacuucaaaguuugcagacauaugugacucaacaauuaauuagagcugcagaaaucagagcuucugcuaaucuugcugcuacuaaaaugucagaguguguacuuggacaaucaaaaagaguugauuuuuguggaaagggcuaucaucuuauguccuucccucagucagcaccucaugguguagucuucuugcaugugacuuaugucccugcacaagaaaagaacuucacaacugcuccugccauuugucaugauggaaaagcacacuuuccucgugaaggugucuuuguuucaaauggcacacacugguuuguaacacaaaggaauuuuuaugaaccacaaaucauuacuacagacaacacauuugugucugguaacugugauguuguaauaggaauugucaacaacacaguuuaugauccuuugcaaccugaauuagacucauucaaggaggaguuagauaaauauuuuaagaaucauacaucaccagauguugauuuaggugacaucucuggcauuaaugcuucaguuguaaacauucaaaaagaaauugaccgccucaaugagguugccaagaauuuaaaugaaucucucaucgaucuccaagaacuuggaaaguaugagcaguauauaaaauggccaugguacauuuggcuagguuuuauagcuggcuugauugccauaguaauggugacaauuaugcuuugcuguaugaccaguugcuguaguugucucaagggcuguuguucuuguggauccugcugcaaauuugaugaagacgacucugagccagugcucaaaggagucaaauuacauuacacauaaggacuaguuauaagacugacuagcccgaugggccucccaacgggcccuccuccccuccuugcaccgagauuaauaaaaaaaaaaaaaaaaaaaaaaaaaaaaaaaaaaaaaaaaaaaaaaaaaaaaaaaaaaaaaaaaugcaucccccccccccccccccccccccccccccccaaaggcucuuuucagagccaccagaauu

SEQ ID NO: 12716 - RNA, 4039 nt, Artificial Sequence
  SARS-CoV-2/USA/WA-UW292/2020__EPI_ISL_418077 spike protein mRNA wt (1-1273)
aggagaaagcuuaccauguuuguuuuucuuguuuuauugccacuagucucuagucaguguguuaaucuuacaaccagaacucaauuacccccugcauacacuaauucuuucacacgugguguuuauuacccugacaaaguuuucagauccucaguuuuacauucaacucaggacuuguucuuaccuuucuuuuccaauguuacuugguuccaugcuauacaugucucugggaccaaugguacuaagagguuugauaacccuguccuaccauuuaaugaugguguuuauuuugcuuccacugagaagucuaacauaauaagaggcuggauuuuugguacuacuuuagauucgaagacccagucccuacuuauuguuaauaacgcuacuaauguuguuauuaaagucugugaauuucaauuuuguaaugauccauuuuuggguguuuauuaccacaaaaacaacaaaaguuggauggaaagugaguucagaguuuauucuagugcgaauaauugcacuuuugaauaugucucucagccuuuucuuauggaccuugaaggaaaacaggguaauuucaaaaaucuuagggaauuuguguuuaagaauauugaugguuauuuuaaaauauauucuaagcacacgccuauuaauuuagugcgugaucucccucaggguuuuucggcuuuagaaccauugguagauuugccaauagguauuaacaucacuagguuucaaacuuuacuugcuuuacauagaaguuauuugacuccuggugauucuucuucagguuggacagcuggugcugcagcuuauuauguggguuaucuucaaccuaggacuuuucuauuaaaauauaaugaaaauggaaccauuacagaugcuguagacugugcacuugacccucucucagaaacaaaguguacguugaaauccuucacuguagaaaaaggaaucuaucaaacuucuaacuuuagaguccaaccaacagaaucuauuguuagauuuccuaauauuacaaacuugugcccuuuuggugaaguuuuuaacgccaccagauuugcaucuguuuaugcuuggaacaggaagagaaucagcaacuguguugcugauuauucuguccuauauaauuccgcaucauuuuccacuuuuaaguguuauggagugucuccuacuaaauuaaaugaucucugcuuuacuaaugucuaugcagauucauuuguaauuagaggugaugaagucagacaaaucgcuccagggcaaacuggaaagauugcugauuauaauuauaaauuaccagaugauuuuacaggcugcguuauagcuuggaauucuaacaaucuugauucuaagguuggugguaauuauaauuaccuguauagauuguuuaggaagucuaaucucaaaccuuuugagagagauauuucaacugaaaucuaucaggccaguagcacaccuuguaaugguguugaagguuuuaauuguuacuuuccuuuacaaucauaugguuuccaacccacuaaugguguugguuaccaaccauacagaguaguaguacuuucuuuugaacuucuacaugcaccagcaacuguuuguggaccuaaaaagucuacuaauuugguuaaaaacaaaugugucaauuucaacuucaaugguuuaacaggcacagguguucuuacugagucuaacaaaaaguuucugccuuuccaacaauuuggcagagacauugcugacacuacugaugcuguccgugauccacagacacuugagauucuugacauuacaccauguucuuuugguggugucaguguuauaacaccaggaacaaauacuucuaaccagguugcuguucuuuaucaggauguuaacugcacagaagucccuguugcuauucaugcagaucaacuuacuccuacuuggcguguuuauucuacagguucuaauguuuuucaaacacgugcaggcuguuuaauaggggcugaacaugucaacaacucauaugagugugacauacccauuggugcagguauaugcgcuaguuaucagacucagacuaauucuccucggcgggcacguaguguagcuagucaauccaucauugccuacacuaugucacuuggugcagaaaauucaguugcuuacucuaauaacucuauugccauacccacaaauuuuacuauuaguguuaccacagaaauucuaccagugucuaugaccaagacaucaguagauuguacaauguacauuuguggugauucaacugaaugcagcaaucuuuuguugcaauauggcaguuuuuguacacaauuaaaccgugcuuuaacuggaauagcuguugaacaagacaaaaacacccaagaaguuuuugcacaagucaaacaaauuuacaaaacaccaccaauuaaagauuuuggugguuuuaauuuuucacaaauauuaccagauccaucaaaaccaagcaagaggucauuuauugaagaucuacuuuucaacaaagugacacuugcagaugcuggcuucaucaaacaauauggugauugccuuggugauauugcugcuagagaccucauuugugcacaaaaguuuaacggccuuacuguuuugccaccuuugcucacagaugaaaugauugcucaauacacuucugcacuguuagcggguacaaucacuucugguuggaccuuuggugcaggugcugcauuacaaauaccauuugcuaugcaaauggcuuauagguuuaaugguauuggaguuacacagaauguucucuaugagaaccaaaaauugauugccaaccaauuuaauagugcuauuggcaaaauucaagacucacuuucuuccacagcaagugcacuuggaaaacuucaagauguggucaaccaaaaugcacaagcuuuaaacacgcuuguuaaacaacuuagcuccaauuuuggugcaauuucaaguguuuuaaaugauauccuuucacgucuugacaaaguugaggcugaagugcaaauugauagguugaucacaggcagacuucaaaguuugcagacauaugugacucaacaauuaauuagagcugcagaaaucagagcuucugcuaaucuugcugcuacuaaaaugucagaguguguacuuggacaaucaaaaagaguugauuuuuguggaaagggcuaucaucuuauguccuucccucagucagcaccucaugguguagucuucuugcaugugacuuaugucccugcacaagaaaagaacuucacaacugcuccugccauuugucaugauggaaaagcacacuuuccucgugaaggugucuuuguuucaaauggcacacacugguuuguaacacaaaggaauuuuuaugaaccacaaaucauuacuacagacaacacauuugugucugguaacugugauguuguaauaggaauugucaacaacacaguuuaugauccuuugcaaccugaauuagacucauucaaggaggaguuagauaaauauuuuaagaaucauacaucaccagauguugauuuaggugacaucucuggcauuaaugcuucaguuguaaacauucaaaaagaaauugaccgccucaaugagguugccaagaauuuaaaugaaucucucaucgaucuccaagaacuuggaaaguaugagcaguauauaaaauggccaugguacauuuggcuagguuuuauagcuggcuugauugccauaguaauggugacaauuaugcuuugcuguaugaccaguugcuguaguugucucaagggcuguuguucuuguggauccugcugcaaauuugaugaagacgacucugagccagugcucaaaggagucaaauuacauuacacauaaggacuaguuauaagacugacuagcccgaugggccucccaacgggcccuccuccccuccuugcaccgagauuaauaaaaaaaaaaaaaaaaaaaaaaaaaaaaaaaaaaaaaaaaaaaaaaaaaaaaaaaaaaaaaaaaugcaucccccccccccccccccccccccccccccccaaaggcucuuuucagagccaccagaauu

SEQ ID NO: 12717 - RNA, 4039 nt, Artificial Sequence
  SARS-CoV-2/Iceland/192/2020__EPI_ISL_417819 spike protein mRNA wt (1-1273)
aggagaaagcuuaccauguuuguuuuuuuuguuuuauugccacuagucucuagucaguguguuaaucuuacaaccagaacucaauuacccccugcauacacuaauucuuucacacgugguguuuauuacccugacaaaguuuucagauccucaguuuuacauucaacucaggacuuguucuuaccuuucuuuuccaauguuacuugguuccaugcuauacaugucucugggaccaaugguacuaagagguuugauaacccuguccuaccauuuaaugaugguguuuauuuugcuuccacugagaagucuaacauaauaagaggcuggauuuuugguacuacuuuagauucgaagacccagucccuacuuauuguuaauaacgcuacuaauguuguuauuaaagucugugaauuucaauuuuguaaugauccauuuuuggguguuuauuaccacaaaaacaacaaaaguuggauggaaagugaguucagaguuuauucuagugcgaauaauugcacuuuugaauaugucucucagccuuuucuuauggaccuugaaggaaaacaggguaauuucaaaaaucuuagggaauuuguguuuaagaauauugaugguuauuuuaaaauauauucuaagcacacgccuauuaauuuagugcgugaucucccucaggguuuuucggcuuuagaaccauugguagauuugccaauagguauuaacaucacuagguuucaaacuuuacuugcuuuacauagaaguuauuugacuccuggugauucuucuucagguuggacagcuggugcugcagcuuauuauguggguuaucuucaaccuaggacuuuucuauuaaaauauaaugaaaauggaaccauuacagaugcuguagacugugcacuugacccucucucagaaacaaaguguacguugaaauccuucacuguagaaaaaggaaucuaucaaacuucuaacuuuagaguccaaccaacagaaucuauuguuagauuuccuaauauuacaaacuugugcccuuuuggugaaguuuuuaacgccaccagauuugcaucuguuuaugcuuggaacaggaagagaaucagcaacuguguugcugauuauucuguccuauauaauuccgcaucauuuuccacuuuuaaguguuauggagugucuccuacuaaauuaaaugaucucugcuuuacuaaugucuaugcagauucauuuguaauuagaggugaugaagucagacaaaucgcuccagggcaaacuggaaagauugcugauuauaauuauaaauuaccagaugauuuuacaggcugcguuauagcuuggaauucuaacaaucuugauucuaagguuggugguaauuauaauuaccuguauagauuguuuaggaagucuaaucucaaaccuuuugagagagauauuucaacugaaaucuaucaggccgguagcacaccuuguaaugguguugaagguuuuaauuguuacuuuccuuuacaaucauaugguuuccaacccacuaaugguguugguuaccaaccauacagaguaguaguacuuucuuuugaacuucuacaugcaccagcaacuguuuguggaccuaaaaagucuacuaauuugguuaaaaacaaaugugucaauuucaacuucaaugguuuaacaggcacagguguucuuacugagucuaacaaaaaguuucugccuuuccaacaauuuggcagagacauugcugacacuacugaugcuguccgugauccacagacacuugagauucuugacauuacaccauguucuuuugguggugucaguguuauaacaccaggaacaaauacuucuaaccagguugcuguucuuuaucaggguguuaacugcacagaagucccuguugcuauucaugcagaucaacuuacuccuacuuggcguguuuauucuacagguucuaauguuuuucaaacacgugcaggcuguuuaauaggggcugaacaugucaacaacucauaugagugugacauacccauuggugcagguauaugcgcuaguuaucagacucagacuaauucuccucggcgggcacguaguguagcuagucaauccaucauugccuacacuaugucacuuggugcagaaaauucaguugcuuacucuaauaacucuauugccauacccacaaauuuuacuauuaguguuaccacagaaauucuaccagugucuaugaccaagacaucaguagauuguacaauguacauuuguggugauucaacugaaugcagcaaucuuuuguugcaauauggcaguuuuuguacacaauuaaaccgugcuuuaacuggaauagcuguugaacaagacaaaaacacccaagaaguuuuugcacaagucaaacaaauuuacaaaacaccaccaauuaaagauuuuggugguuuuaauuuuucacaaauauuaccagauccaucaaaaccaagcaagaggucauuuauugaagaucuacuuuucaacaaagugacacuugcagaugcuggcuucaucaaacaauauggugauugccuuggugauauugcugcuagagaccucauuugugcacaaaaguuuaacggccuuacuguuuugccaccuuugcucacagaugaaaugauugcucaauacacuucugcacuguuagcggguacaaucacuucugguuggaccuuuggugcaggugcugcauuacaaauaccauuugcuaugcaaauggcuuauagguuuaaugguauuggaguuacacagaauguucucuaugagaaccaaaaauugauugccaaccaauuuaauagugcuauuggcaaaauucaagacucacuuucuuccacagcaagugcacuuggaaaacuucaagauguggucaaccaaaaugcacaagcuuuaaacacgcuuguuaaacaacuuagcuccaauuuuggugcaauuucaaguguuuuaaaugauauccuuucacgucuugacaaaguugaggcugaagugcaaauugauagguugaucacaggcagacuucaaaguuugcagacauaugugacucaacaauuaauuagagcugcagaaaucagagcuucugcuaaucuugcugcuacuaaaaugucagaguguguacuuggacaaucaaaaagaguugauuuuuguggaaagggcuaucaucuuauguccuucccucagucagcaccucaugguguagucuucuugcaugugacuuaugucccugcacaagaaaagaacuucacaacugcuccugccauuugucaugauggaaaagcacacuuuccucgugaaggugucuuuguuucaaauggcacacacugguuuguaacacaaaggaauuuuuaugaaccacaaaucauuacuacagacaacacauuugugucugguaacugugauguuguaauaggaauugucaacaacacaguuuaugauccuuugcaaccugaauuagacucauucaaggaggaguuagauaaauauuuuaagaaucauacaucaccagauguugauuuaggugacaucucuggcauuaaugcuucaguuguaaacauucaaaaagaaauugaccgccucaaugagguugccaagaauuuaaaugaaucucucaucgaucuccaagaacuuggaaaguaugagcaguauauaaaauggccaugguacauuuggcuagguuuuauagcuggcuugauugccauaguaauggugacaauuaugcuuugcuguaugaccaguugcuguaguugucucaagggcuguuguucuuguggauccugcugcaaauuugaugaagacgacucugagccagugcucaaaggagucaaauuacauuacacauaaggacuaguuauaagacugacuagcccgaugggccucccaacgggcccuccuccccuccuugcaccgagauuaauaaaaaaaaaaaaaaaaaaaaaaaaaaaaaaaaaaaaaaaaaaaaaaaaaaaaaaaaaaaaaaaaugcaucccccccccccccccccccccccccccccccaaaggcucuuuucagagccaccagaauu

SEQ ID NO: 12718 - RNA, 4039 nt, Artificial Sequence
  SARS-CoV-2/Belgium/ULG-6939/2020__EPI_ISL_417020 spike protein mRNA wt (1-1273)
aggagaaagcuuaccauguuuguuuuucuuguuuuauugccacuagucucuagucaguguguuaaucuuacaaccagaacucaauuacccccugcauacacuaauucuuucacacgugguguuuauuacccugacaaaguuuucagauccucaguuuuacauucaacucaggacuuguucuuaccuuucuuuuccaauguuacuugguuccaugcuauacaugucucugggaccaaugguacuaagagguuugauaacccuguccuaccauuuaaugaugguguuuauuuugcuuccacugagaagucuaacauaauaagaggcuggauuuuugguacuacuuuagauucgaagacccagucccuacuuauuguuaauaacgcuacuaauguuguuauuaaagucugugaauuucaauuuuguaaugauccauuuuuggguguuuauuaccacaaaaacaacaaaaguuggauggaaagugaguucagaguuuauucuagugcgaauaauugcacuuuugaauaugucucucagccuuuucuuauggaccuugaaggaaaacaggguaauuucaaaaaucuuagggaauuuguguuuaagaauauugaugguuauuuuaaaauauauucuaagcacacgccuauuaauuuagugcgugaucucccucaggguuuuucggcuuuagaaccauugguagauuugccaauagguauuaacaucacuagguuucaaacuuuacuugcuuuacauagaaguuauuugacuccuggugauucuucuucagguuggacagcuggugcugcagcuuauuauguggguuaucuucaaccuaggacuuuucuauuaaaauauaaugaaaauggaaccauuacagaugcuguagacugugcacuugacccucucucagaaacaaaguguacguugaaauccuucacuguagaaaaaggaaucuaucaaacuucuaacuuuagaguccaaccaacagaaucuauuguuagauuuccuaauauuacaaacuugugcccuuuuggugaaguuuuuaacgccaccagauuugcaucuguuuaugcuuggaacaggaagagaaucagcaacuguguugcugauuauucuguccuauauaauuccgcaucauuuuccacuuuuaaguguuauggagugucuccuacuaaauuaaaugaucucugcuuuacuaaugucuaugcagauucauuuguaauuagaggugaugaagucagacaaaucgcuccagggcaaacuggaaagauugcugauuauaauuauaaauuaccagaugauuuuacaggcugcguuauagcuuggaauucuaacaaucuugauucuaagguuggugguaauuauaauuaccuguauagauuguuuaggaagucuaaucucaaaccuuuugagagagauauuucaacugaaaucuaucaggccgguagcacaccuuguaaugguguugaagguuuuaauuguuacuuuccuuuacaaucauaugguuuccaacccacuaaugguguugguuaccaaccauacagaguaguaguacuuucuuuugaacuucuacaugcaccagcaacuguuuguggaccuaaaaagucuacuaauuugguuaaaaacaaaugugucaauuucaacuucaaugguuuaacaggcacagguguucuuacugagucuaacaaaaaguuucugccuuuccaacaauuuggcagagacauugcugacacuacugaugcuguccgugauccacagacacuugagauucuugacauuacaccauguucuuuugguggugucaguguuauaacaccaggaacaaauacuucuaaccagguugcuguucuuuaucaggguguuaacugcacagaagucccuguugcuauucaugcagaucaacuuacuccuacuuggcguguuuauucuacagguucuaauguuuuucaaacacgugcaggcuguuuaauaggggcugaacaugucaacaacucauaugagugugacauacccauuggugcagguauaugcgcuaguuaucagacucagacuaauucuccucggcgggcacguaguguagcuagucaauccaucauugccuacacuaugucacuuggugcagaaaauucaguuguuuacucuaauaacucuauugccauacccacaaauuuuacuauuaguguuaccacagaaauucuaccagugucuaugaccaagacaucaguagauuguacaauguacauuuguggugauucaacugaaugcagcaaucuuuuguugcaauauggcaguuuuuguacacaauuaaaccgugcuuuaacuggaauagcuguugaacaagacaaaaacacccaagaaguuuuugcacaagucaaacaaauuuacaaaacaccaccaauuaaagauuuuggugguuuuaauuuuucacaaauauuaccagauccaucaaaaccaagcaagaggucauuuauugaagaucuacuuuucaacaaagugacacuugcagaugcuggcuucaucaaacaauauggugauugccuuggugauauugcugcuagagaccucauuugugcacaaaaguuuaacggccuuacuguuuugccaccuuugcucacagaugaaaugauugcucaauacacuucugcacuguuagcggguacaaucacuucugguuggaccuuuggugcaggugcugcauuacaaauaccauuugcuaugcaaauggcuuauagguuuaaugguauuggaguuacacagaauguucucuaugagaaccaaaaauugauugccaaccaauuuaauagugcuauuggcaaaauucaagacucacuuucuuccacagcaagugcacuuggaaaacuucaagauguggucaaccaaaaugcacaagcuuuaaacacgcuuguuaaacaacuuagcuccaauuuuggugcaauuucaaguguuuuaaaugauauccuuucacgucuugacaaaguugaggcugaagugcaaauugauagguugaucacaggcagacuucaaaguuugcagacauaugugacucaacaauuaauuagagcugcagaaaucagagcuucugcuaaucuugcugcuacuaaaaugucagaguguguacuuggacaaucaaaaagaguugauuuuuguggaaagggcuaucaucuuauguccuucccucagucagcaccucaugguguagucuucuugcaugugacuuaugucccugcacaagaaaagaacuucacaacugcuccugccauuugucaugauggaaaagcacacuuuccucgugaaggugucuuuguuucaaauggcacacacugguuuguaacacaaaggaauuuuuaugaaccacaaaucauuacuacagacaacacauuugugucugguaacugugauguuguaauaggaauugucaacaacacaguuuaugauccuuugcaaccugaauuagacucauucaaggaggaguuagauaaauauuuuaagaaucauacaucaccagauguugauuuaggugacaucucuggcauuaaugcuucaguuguaaacauucaaaaagaaauugaccgccucaaugagguugccaagaauuuaaaugaaucucucaucgaucuccaagaacuuggaaaguaugagcaguauauaaaauggccaugguacauuuggcuagguuuuauagcuggcuugauugccauaguaauggugacaauuaugcuuugcuguaugaccaguugcuguaguugucucaagggcuguuguucuuguggauccugcugcaaauuugaugaagacgacucugagccagugcucaaaggagucaaauuacauuacacauaaggacuaguuauaagacugacuagcccgaugggccucccaacgggcccuccuccccuccuugcaccgagauuaauaaaaaaaaaaaaaaaaaaaaaaaaaaaaaaaaaaaaaaaaaaaaaaaaaaaaaaaaaaaaaaaaugcaucccccccccccccccccccccccccccccccaaaggcucuuuucagagccaccagaauu

SEQ ID NO: 12719 - RNA, 4039 nt, Artificial Sequence
  SARS-CoV-2/France/HF2496/2020__EPI_ISL_418231 spike protein mRNA wt (1-1273)
aggagaaagcuuaccauguuuguuuuucuuguuuuauugccacuagucucuagucaguguguuaaucuuacaaccagaacucaauuacccccugcauacacuaauucuuucacacgugguguuuauuacccugacaaaguuuucagauccucaguuuuacauucaacucaggacuuguucuuaccuuucuuuuccaauguuacuugguuccaugcuauacaugucucugggaccaaugguacuaagagguuugauaacccuguccuaccauuuaaugaugguguuuauuuugcuuccacugagaagucuaacauaauaagaggcuggauuuuugguacuacuuuagauucgaagacccagucccuacuuauuguuaauaacgcuacuaauguuguuauuaaagucugugaauuucaauuuuguaaugauccauuuuuggguguuuauuaccacaaaaacaacaaaaguuggauggaaagugaguucagaguuuauucuagugcgaauaauugcacuuuugaauaugucucucagccuuuucuuauggaccuugaaggaaaacaggguaauuucaaaaaucuuagggaauuuguguuuaagaauauugaugguuauuuuaaaauauauucuaagcacacgccuauuaauuuagugcgugaucucccucaggguuuuucggcuuuagaaccauugguagauuugccaauagguauuaacaucacuagguuucaaacuuuacuugcuuuacauagaaguuauuugacuccuggugauucuucuucagguuggacagcuggugcugcagcuuauuauguggguuaucuucaaccuaggacuuuucuauuaaaauauaaugaaaauggaaccauuacagaugcuguagacugugcacuugacccucucucagaaacaaaguguacguugaaauccuucacuguagaaaaaggaaucuaucaaacuucuaacuuuagaguccaaccaacagaaucuauuguuagauuuccuaauauuacaaacuugugcccuuuuggugaaguuuuuaacgccaccagauuugcaucuguuuaugcuuggaacaggaagagaaucagcaacuguguugcugauuauucuguccuauauaauuccgcaucauuuuccacuuuuaaguguuauggagugucuccuacuaaauuaaaugaucucugcuuuacuaaugucuaugcagauucauuuguaauuagaggugaugaagucagacaaaucgcuccagggcaaacuggaaagauugcugauuauaauuauaaauuaccagaugauuuuacaggcugcguuauagcuuggaauucuaacaaucuugauucuaagguuggugguaauuauaauuaccuguauagauuguuuaggaagucuaaucucaaaccuuuugagagagauauuucaacugaaaucuaucaggccgguagcacaccuuguaaugguguugaagguuuuaauuguuacuuuccuuuacaaucauaugguuuccaacccacuaaugguguugguuaccaaccauacagaguaguaguacuuucuuuugaacuucuacaugcaccagcaacuguuuguggaccuaaaaagucuacuaauuugguuaaaaacaaaugugucaauuucaacuucaaugguuuaacaggcacagguguucuuacugagucuaacaaaaaguuucugccuuuccaacaauuuggcagagacauugcugacacuacugaugcuguccgugauccacagacacuugagauucuugacauuacaccauguucuuuugguggugucaguguuauaacaccaggaacaaauacuucuaaccagguugcuguucuuuaucaggguguuaacugcacagaagucccuguugcuauucaugcagaucaacuuacuccuacuuggcguguuuauucuacagguucuaauguuuuucaaacacgugcaggcuguuuaauaggggcugaacaugucaacaacucauaugagugugacauacccauuggugcagguauaugcgcuaguuaucagacucagacuaauucuccucggcgggcacguaguguagcuagucaauccaucauugccuacacuaugucacuuggugcagaaaauucaguugcuuacucuaauaacucuauugccauacccacaaauuuuacuauuaguguuaccacagaaauucuaccagugucuaugaccaagacaucaguagauuguacaauguacauuuguggugauucaacugaaugcagcaaucuuuuguugcaauauggcaguuuuuguacacaauuaaaccgugcuuuaacuggaauagcuguugaacaagacaaaaacacccaagaaguuuuugcacaagucaaacaaauuuacaaaacaccaccaauuaaagauuuuggugguuuuaauuuuucacaaauauuaccagauccaucaaaaccaagcaagaggucauuuauugaagaucuacuuuucaacaaagugacacuugcagaugcuggcuucaucaaacaauauggugauugccuuggugauauuguugcuagagaccucauuugugcacaaaaguuuaacggccuuacuguuuugccaccuuugcucacagaugaaaugauugcucaauacacuucugcacuguuagcggguacaaucacuucugguuggaccuuuggugcaggugcugcauuacaaauaccauuugcuaugcaaauggcuuauagguuuaaugguauuggaguuacacagaauguucucuaugagaaccaaaaauugauugccaaccaauuuaauagugcuauuggcaaaauucaagacucacuuucuuccacagcaagugcacuuggaaaacuucaagauguggucaaccaaaaugcacaagcuuuaaacacgcuuguuaaacaacuuagcuccaauuuuggugcaauuucaaguguuuuaaaugauauccuuucacgucuugacaaaguugaggcugaagugcaaauugauagguugaucacaggcagacuucaaaguuugcagacauaugugacucaacaauuaauuagagcugcagaaaucagagcuucugcuaaucuugcugcuacuaaaaugucagaguguguacuuggacaaucaaaaagaguugauuuuuguggaaagggcuaucaucuuauguccuucccucagucagcaccucaugguguagucuucuugcaugugacuuaugucccugcacaagaaaagaacuucacaacugcuccugccauuugucaugauggaaaagcacacuuuccucgugaaggugucuuuguuucaaauggcacacacugguuuguaacacaaaggaauuuuuaugaaccacaaaucauuacuacagacaacacauuugugucugguaacugugauguuguaauaggaauugucaacaacacaguuuaugauccuuugcaaccugaauuagacucauucaaggaggaguuagauaaauauuuuaagaaucauacaucaccagauguugauuuaggugacaucucuggcauuaaugcuucaguuguaaacauucaaaaagaaauugaccgccucaaugagguugccaagaauuuaaaugaaucucucaucgaucuccaagaacuuggaaaguaugagcaguauauaaaauggccaugguacauuuggcuagguuuuauagcuggcuugauugccauaguaauggugacaauuaugcuuugcuguaugaccaguugcuguaguugucucaagggcuguuguucuuguggauccugcugcaaauuugaugaagacgacucugagccagugcucaaaggagucaaauuacauuacacauaaggacuaguuauaagacugacuagcccgaugggccucccaacgggcccuccuccccuccuugcaccgagauuaauaaaaaaaaaaaaaaaaaaaaaaaaaaaaaaaaaaaaaaaaaaaaaaaaaaaaaaaaaaaaaaaaugcaucccccccccccccccccccccccccccccccaaaggcucuuuucagagccaccagaauu

SEQ ID NO: 12720 - RNA, 4039 nt, Artificial Sequence
  SARS-CoV-2/USA/WA-UW291/2020__EPI_ISL_418076 spike protein mRNA wt (1-1273)
aggagaaagcuuaccauguuuguuuuucuuguuuuauugccacuagucucuagucaguguguuaaucuuacaaccagaacucaauuacccccugcauacacuaauucuuucacacgugguguuuauuacccugacaaaguuuucagauccucaguuuuacauucaacucaggacuuguucuuaccuuucuuuuccaauguuacuugguuccaugcuauacaugucucugggaccaaugguacuaagagguuugauaacccuguccuaccauuuaaugaugguguuuauuuugcuuccacugagaagucuaacauaauaagaggcuggauuuuugguacuacuuuagauucgaagacccagucccuacuuauuguuaauaacgcuacuaauguuguuauuaaagucugugaauuucaauuuuguaaugauccauuuuuggguguuuauuaccacaaaaacaacaaaaguuggauggaaagugaguucagaguuuauucuagugcgaauaauugcacuuuugaauaugucucucagccuuuucuuauggaccuugaaggaaaacaggguaauuucaaaaaucuuagggaauuuguguuuaagaauauugaugguuauuuuaaaauauauucuaagcacacgccuauuaauuuagugcgugaucucccucaggguuuuucggcuuuagaaccauugguagauuugccaauagguauuaacaucacuagguuucaaacuuuacuugcuuuacauagaaguuauuugacuccuggugauucuucuucagguuggacagcuggugcugcagcuuauuauguggguuaucuucaaccuaggacuuuucuauuaaaauauaaugaaaauggaaccauuacagaugcuguagacugugcacuugacccucucucagaaacaaaguguacguugaaauccuucacuguagaaaaaggaaucuaucaaacuucuaacuuuagaguccaaccaacagaaucuauuguuagauuuccuaauauuacaaacuugugcccuuuuggugaaguuuuuaacgccaccagauuugcaucuguuuaugcuuggaacaggaagagaaucagcaacuguguugcugauuauucuguccuauauaauuccgcaucauuuuccacuuuuaaguguuauggagugucuccuacuaaauuaaaugaucucugcuuuacuaaugucuaugcagauucauuuguaauuagaggugaugaagucagacaaaucgcuccagggcaaacuggaaagauugcugauuauaauuauaaauuaccagaugauuuuacaggcugcguuauagcuuggaauucuaacaaucuugauucuaagguuggugguaauuauaauuaccuguauagauuguuuaggaagucuaaucucaaaccuuuugagagagauauuucaacugaaaucuaucaggccgguagcacaccuuguaaugguguugaagguuuuaauuguuacuuuccuuuacaaucauaugguuuccaacccacuaaugguguugguuaccaaccauacagaguaguaguacuuucuuuugaacuucuacaugcaccagcaacuguuuguggaccuaaaaagucuacuaauuugguuaaaaacaaaugugucaauuucaacuucaaugguuuaacaggcacagguguucuuacugagucuaacaaaaaguuucugccuuuccaacaauuuggcagagacauugcugacacuacugaugcuguccgugauccacagacacuugagauucuugacauuacaccauguucuuuugguggugucaguguuauaacaccaggaacaaauacuucuaaccagguugcuguucuuuaucaggguguuaacugcacagaagucccuguugcuauucaugcagaucaacuuacuccuacuuggcguguuuauucuacagguucuaauguuuuucaaacacgugcaggcuguuuaauaggggcugaacaugucaacaacucauaugagugugacauacccauuggugcagguauaugcgcuaguuaucagacucagacuaauucuccucggcgggcacguaguguagcuagucaauccaucauugccuacacuaugucacuuggugcagaaaauucaguugcuuacucuaauaacucuauugccauacccacaaauuuuacuauuaguguuaccacagaaauucuaccagugucuaugaccaagacaucaguagauuguacaauguacauuuguggugauucaacugaaugcagcaaucuuuuguugcaauauggcaguuuuuguacacaauuaaaccgugcuuuaacuggaauagcuguugaacaagacaaaaacacccaagaaguuuuugcacaagucaaacaaauuuacaaaacaccaccaauuaaagauuuuggugguuuuaauuuuucacaaauauuaccagauccaucaaaaccaagcaagaggucauuuauugaagaucuacuuuucaacaaagugacacuugcagaugcuggcuucaucaaacaauauggugauugccuuggugauauugcugcuagagaccucauuugugcacaaaaguuuaacggccuuacuguuuugccaccuuugcucacagaugaaaugauugcucaauacacuucugcacuguuagcggguacaaucacuucugguuggaccuuuggugcaggugcugcauuacaaauaccauuugcuaugcaaauggcuuauagguuuaaugguauuggaguuacacagaauguucucuaugagaaccaaaaauugauugccaaccaauuuaauagugcuauuggcaaaauucaauacucacuuucuuccacagcaagugcacuuggaaaacuucaagauguggucaaccaaaaugcacaagcuuuaaacacgcuuguuaaacaacuuagcuccaauuuuggugcaauuucaaguguuuuaaaugauauccuuucacgucuugacaaaguugaggcugaagugcaaauugauagguugaucacaggcagacuucaaaguuugcagacauaugugacucaacaauuaauuagagcugcagaaaucagagcuucugcuaaucuugcugcuacuaaaaugucagaguguguacuuggacaaucaaaaagaguugauuuuuguggaaagggcuaucaucuuauguccuucccucagucagcaccucaugguguagucuucuugcaugugacuuaugucccugcacaagaaaagaacuucacaacugcuccugccauuugucaugauggaaaagcacacuuuccucgugaaggugucuuuguuucaaauggcacacacugguuuguaacacaaaggaauuuuuaugaaccacaaaucauuacuacagacaacacauuugugucugguaacugugauguuguaauaggaauugucaacaacacaguuuaugauccuuugcaaccugaauuagacucauucaaggaggaguuagauaaauauuuuaagaaucauacaucaccagauguugauuuaggugacaucucuggcauuaaugcuucaguuguaaacauucaaaaagaaauugaccgccucaaugagguugccaagaauuuaaaugaaucucucaucgaucuccaagaacuuggaaaguaugagcaguauauaaaauggccaugguacauuuggcuagguuuuauagcuggcuugauugccauaguaauggugacaauuaugcuuugcuguaugaccaguugcuguaguugucucaagggcuguuguucuuguggauccugcugcaaauuugaugaagacgacucugagccagugcucaaaggagucaaauuacauuacacauaaggacuaguuauaagacugacuagcccgaugggccucccaacgggcccuccuccccuccuugcaccgagauuaauaaaaaaaaaaaaaaaaaaaaaaaaaaaaaaaaaaaaaaaaaaaaaaaaaaaaaaaaaaaaaaaaugcaucccccccccccccccccccccccccccccccaaaggcucuuuucagagccaccagaauu

SEQ ID NO: 12721 - RNA, 4039 nt, Artificial Sequence
  SARS-CoV-2/Portugal/PT0034/2020__EPI_ISL_418019 spike protein mRNA wt (1-1273)
aggagaaagcuuaccauguuuguuuuucuuguuuuauugccacuagucucuagucaguguguuaaucuuacaaccagaacucaauuacccccugcauacacuaauucuuucacacgugguguuuauuacccugacaaaguuuucagauccucaguuuuacauucaacucaggacuuguucuuaccuuucuuuuccaauguuacuugguuccaugcuauacaugucucugggaccaaugguacuaagagguuugauaacccuguccuaccauuuaaugaugguguuuauuuugcuuccacugagaagucuaacauaauaagaggcuggauuuuugguacuacuuuagauucgaagacccagucccuacuuauuguuaauaacgcuacuaauguuguuauuaaagucugugaauuucaauuuuguaaugauccauuuuuggguguuuauuaccacaaaaacaacaaaaguuggauggaaagugaguucagaguuuauucuagugcgaauaauugcacuuuugaauaugucucucagccuuuucuuauggaccuugaaggaaaacaggguaauuucaaaaaucuuagggaauuuguguuuaagaauauugaugguuauuuuaaaauauauucuaagcacacgccuauuaauuuagugcgugaucucccucaggguuuuucggcuuuagaaccauugguagauuugccaauagguauuaacaucacuagguuucaaacuuuacuugcuuuacauagaaguuauuugacuccuggugauucuucuucagguuggacagcuggugcugcagcuuauuauguggguuaucuucaaccuaggacuuuucuauuaaaauauaaugaaaauggaaccauuacagaugcuguagacugugcacuugacccucucucagaaacaaaguguacguugaaauccuucacuguagaaaaaggaaucuaucaaacuucuaacuuuagaguccaaccaacagaaucuauuguuagauuuccuaauauuacaaacuugugcccuuuuggugaaguuuuuaacgccaccagauuugcaucuguuuaugcuuggaacaggaagagaaucagcaacuguguugcugauuauucuguccuauauaauuccgcaucauuuuccacuuuuaaguguuauggagugucuccuacuaaauuaaaugaucucugcuuuacuaaugucuaugcagauucauuuguaauuagaggugaugaagucagacaaaucgcuccagggcaaacuggaaagauugcugauuauaauuauaaauuaccagaugauuuuacaggcugcguuauagcuuggaauucuaacaaucuugauucuaagguuggugguaauuauaauuaccuguauagauuguuuaggaagucuaaucucaaaccuuuugagagagauauuucaacugaaaucuaucaggccgguagcacaccuuguaaugguguugaagguuuuaauuguuacuuuccuuuacaaucauaugguuuccaacccacuaaugguguugguuaccaaccauacagaguaguaguacuuucuuuugaacuucuacaugcaccagcaacuguuuguggaccuaaaaagucuacuaauuugguuaaaaacaaaugugucaauuucaacuucaaugguuuaacaggcacagguguucuuacugagucuaacaaaaaguuucugccuuuccaacaauuuggcagagacauugcugacacuacugaugcuguccgugauccacagacacuugagauucuugacauuacaccauguucuuuugguggugucaguguuauaacaccaggaacaaauacuucuaaccagguugcuguucuuuaucaggguguuaacugcacagaagucccuguugcuauucaugcagaucaacuuacuccuacuuggcguguuuauucuacagguucuaauguuuuucaaacacgugcaggcuguuuaauaggggcugaacaugucaacaacucauaugagugugacauacccauuggugcagguauaugcgcuaguuaucagacucagacuaauucuccucggcgggcacguaguguagcuagucaauccaucauugccuacacuaugucacuuggugcagaaaauucaguugcuuacucuaauaacucuauugccauacccacaaauuuuacuauuaguguuaccacagaaauucuaccagugucuaugaccaagacaucaguagauuguacaauguacauuuguggugauucaacugaaugcagcaaucuuuuguugcaauauggcaguuuuuguacacaauuaaaccgugcuuuaacuggaauagcuguugaacaagacaaaaacacccaagaaguuuuugcacaagucaaacaaauuuacaaaacaccaccaauuaaagauuuuggugguuuuaauuuuucacaaauauuaccagauccaucaaaaccaagcaagaggucauuuauugaagaucuacuuuucaacaaagugacacuugcagaugcuggcuucaucaaacaauauggugauugccuuggugauauugcugcuagagaccucauuugugcacaaaaguuuaacggccuuacuguuuugccaccuuugcucacagaugaaaugauugcucaauacacuucugcacuguuagcggguacaaucacuucugguuggaccuuuggugcaggugcugcauuacaaauaccauuugcuaugcaaauggcuuauagguuuaaugguauuggaguuacacagaauguucucuaugagaaccaaaaauugauugccaaccaauuuaauagugcuauuggcaaaauucaagacucacuuucuuccacagcaagugcacuuggaaaacuucaagauguggucaaccaaaaugcacaagcuuuaaacacgcuuguuaaacaacuuagcuccaauuuuggugcaauuucaaguguuuuaaaugauauccuuucacgucuugacaaaguugaggcugaagugcaaauugauagguugaucacaggcagacuucaaaguuugcagacauaugugacucaacaauuaauuagagcugcagaaaucagagcuucugcuaaucuugcugcuacuaaaaugucagaguguguacuuggacaaucaaaaagaguugauuuuuguggaaagggcuaucaucuuauguccuucccucagucagcaccucaugguguagucuucuugcaugugacuuaugucccugcacaagaaaagaacuucacaacugcuccugccauuugucaugauggaaaagcacacuuuccucgugaaggugucuuuguuucaaauggcacacacugguuuguaacacaaaggaauuuuuaugaaccacaaaucauuacuacagacaacacauuugugucugguaacugugauguuguaauaggaauugucaacaacacaguuuaugauccuuugcaaccugaauuagacucauucaaggaggaguuagauaaauauuuuaagaaucauacaucaccagauguugauuuaggugacaucucuggcauuaaugcuucaguuguaaacauucaaaaagaaauugaccgccucaaugagguugccaagaauuuaaaugaaucucucaucgaucuccaagaacuuggaaaguaugagcaguauauaaaauggccaugguacauuuggcuagguuuuauagcuggcuugauugccauaguaauggugacaauuaugcuuugcuguauuaccaguugcuguaguugucucaagggcuguuguucuuguggauccugcugcaaauuugaugaagacgacucugagccagugcucaaaggagucaaauuacauuacacauaaggacuaguuauaagacugacuagcccgaugggccucccaacgggcccuccuccccuccuugcaccgagauuaauaaaaaaaaaaaaaaaaaaaaaaaaaaaaaaaaaaaaaaaaaaaaaaaaaaaaaaaaaaaaaaaaugcaucccccccccccccccccccccccccccccccaaaggcucuuuucagagccaccagaauu

SEQ ID NO: 12722 - RNA, 4039 nt, Artificial Sequence
  SARS-CoV-2/Iceland/202/2020__EPI_ISL_417750 spike protein mRNA wt (1-1273)
aggagaaagcuuaccauguuuguuuuucuuguuuuauugccacuagucucuagucaguguguuaaucuuacaaccagaacucaauuacccccugcauacacuaauucuuucacacgugguguuuauuacccugacaaaguuuucagauccucaguuuuacauucaacucaggacuuguucuuaccuuucuuuuccaauguuacuugguuccaugcuauacaugucucugggaccaaugguacuaagagguuugauaacccuguccuaccauuuaaugaugguguuuauuuugcuuccacugagaagucuaacauaauaagaggcuggauuuuugguacuacuuuagauucgaagacccagucccuacuuauuguuaauaacgcuacuaauguuguuauuaaagucugugaauuucaauuuuguaaugauccauuuuuggguguuuauuaccacaaaaacaacaaaaguuggauggaaagugaguucagaguuuauucuagugcgaauaauugcacuuuugaauaugucucucagccuuuucuuauggaccuugaaggaaaacaggguaauuucaaaaaucuuagggaauuuguguuuaagaauauugaugguuauuuuaaaauauauucuaagcacacgccuauuaauuuagugcgugaucucccucaggguuuuucggcuuuagaaccauugguagauuugccaauagguauuaacaucacuagguuucaaacuuuacuugcuuuacauagaaguuauuugacuccuggugauucuucuucagguuggacagcuggugcugcagcuuauuauguggguuaucuucaaccuaggacuuuucuauuaaaauauaaugaaaauggaaccauuacagaugcuguagacugugcacuugacccucucucagaaacaaaguguacguugaaauccuucacuguagaaaaaggaaucuaucaaacuucuaacuuuagaguccaaccaacagaaucuauuguuagauuuccuaauauuacaaacuugugcccuuuuggugaaguuuuuaacgccaccagauuugcaucuguuuaugcuuggaacaggaagagaaucagcaacuguguugcugauuauucuguccuauauaauuccgcaucauuuuccacuuuuaaguguuauggagugucuccuacuaaauuaaaugaucucugcuuuacuaaugucuaugcagauucauuuguaauuagaggugaugaagucagacaaaucgcuccagggcaaacuggaaagauugcugauuauaauuauaaauuaccagaugauuuuacaggcugcguuauagcuuggaauucuaacaaucuugauucuaagguuggugguaauuauaauuaccuguauagauuguuuaggaagucuaaucucaaaccuuuugagagagauauuucaacugaaaucuaucaggccgguagcacaccuuguaaugguguugaagguuuuaauuguuacuuuccuuuacaaucauaugguuuccaacccacuaaugguguugguuaccaaccauacagaguaguaguacuuucuuuugaacuucuacaugcaccagcaacuguuuguggaccuaaaaagucuacuaauuugguuaaaaacaaaugugucaauuucaacuucaaugguuuaacaggcacagguguucuuacugagucuaacaaaaaguuucugccuuuccaacaauuuggcagagacauugcugacacuacugaugcuguccgugauccacagacacuugagauucuugacauuacaccauguucuuuugguggugucaguguuauaacaccaggaacaaauacuucuaaccagguugcuguucuuuaucaggauguuaacugcacagaagucccuguugcuauucaugcagaucaacuuacuccuacuuggcguguuuauucuacagguucuaauguuuuucaaacacgugcaggcuguuuaauaggggcugaacaugucaacaacucauaugagugugacauacccauuggugcagguauaugcgcuaguuaucagacucagacuaauucuccucggcgggcacguaguguagcuagucaauccaucauugccuacacuaugucacuuggugcagaaaauucaguugcuuacucuaauaacucuauugccauacccacaaauuuuacuauuaguguuaccacagaaauucuaccagugucuaugaccaagacaucaguagauuguacaauguacauuuguggugauucaacugaaugcagcaaucuuuuguugcaauauggcaguuuuuguacacaauuaaaccgugcuuuaacuggaauagcuguugaacaagacaaaaacacccaagaaguuuuugcacaagucaaacaaauuuacaaaacaccaccaauuaaagauuuuggugguuuuaauuuuucacaaauauuaccagauccaucaaaaccaagcaagaggucauuuauugaagaucuacuuuucaacaaagugacacuugcagaugcuggcuucaucaaacaauauggugauugccuuggugauauugcugcuagagaccucauuugugcacaaaaguuuaacggccuuacuguuuugccaccuuugcucacagaugaaaugauugcucaauacacuucugcacuguuagcggguacaaucacuucugguuggaccuuuggugcaggugcugcauuacaaauaccauuugcuaugcaaauggcuuauagguuuaaugguauuggaguuacacagaauguucucuaugagaaccaaaaauugauugccaaccaauuuaauagugcuauuggcaaaauucaagacucacuuucuuccacagcaagugcacuuggaaaacuucaagauguggucaaccaaaaugcacaagcuuuaaacacgcuuguuaaacaacuuagcuccaauuuuggugcaauuucaaguguuuuaaaugauauccuuucacgucuugacaaaguugaggcugaagugcaaauugauagguugaucacaggcagacuucaaaguuugcagacauaugugacucaacaauuaauuagagcugcagaaaucagagcuucugcuaaucuugcugcuacuaaaaugucagaguguguacuuggacaaucaaaaagaguugauuuuuguggaaagggcuaucaucuuauguccuucccucagucagcaccucaugguguagucuucuugcaugugacuuaugucccugcacaagaaaagaacuucacaacugcuccugccauuugucaugauggaaaagcacacuuuccucgugaaggugucuuuguuucaaauggcacacacugguuuguaacacaaaggaauuuuuaugaaccacaaaucauuacuacagacaacacauuugugucugguaacugugauguuguaauaggaauugucaacaacacaguuuaugauccuuugcaaccugaauuagacucauucaaggaggaguuagauaaauauuuuaagaaucauacaucaccagauguugauuuaggugacaucccuggcauuaaugcuucaguuguaaacauucaaaaagaaauugaccgccucaaugagguugccaagaauuuaaaugaaucucucaucgaucuccaagaacuuggaaaguaugagcaguauauaaaauggccaugguacauuuggcuagguuuuauagcuggcuugauugccauaguaauggugacaauuaugcuuugcuguaugaccaguugcuguaguugucucaagggcuguuguucuuguggauccugcugcaaauuugaugaagacgacucugagccagugcucaaaggagucaaauuacauuacacauaaggacuaguuauaagacugacuagcccgaugggccucccaacgggcccuccuccccuccuugcaccgagauuaauaaaaaaaaaaaaaaaaaaaaaaaaaaaaaaaaaaaaaaaaaaaaaaaaaaaaaaaaaaaaaaaaugcaucccccccccccccccccccccccccccccccaaaggcucuuuucagagccaccagaauu

SEQ ID NO: 12723 - RNA, 4039 nt, Artificial Sequence
  SARS-CoV-2/USA/WA-UW261/2020__EPI_ISL_418046 spike protein mRNA wt (1-1273)
aggagaaagcuuaccauguuuguuuuucuuguuuuauugccacuagucucuagucaguguguuaaucuuacaaccagaacucaauuacccccugcauacacuaauucuuucacacgugguguuuauuacccugacaaaguuuucagauccucaguuuuacauucaacucaggacuuguucuuaccuuucuuuuccaauguuacuugguuccaugcuauacaugucucugggaccaaugguacuaagagguuugauaacccuguccuaccauuuaaugaugguguuuauuuugcuuccacugagaagucuaacauaauaagaggcuggauuuuugguacuacuuuagauucgaagacccagucccuacuuauuguuaauaacgcuacuaauguuguuauuaaagucugugaauuucaauuuuguaaugauccauuuuuggguguuuauuaccacaaaaacaacaaaaguuggauggaaagugaguucagaguuuauucuagugcgaauaauugcacuuuugaauaugucucucagccuuuucuuauggaccuugaaggaaaacaggguaauuucaaaaaucuuagggaauuuguguuuaagaauauugaugguuauuuuaaaauauauucuaagcacacgccuauuaauuuagugcgugaucucccucaggguuuuucggcuuuagaaccauugguagauuugccaauagguauuaacaucacuagguuucaaacuuuacuugcuuuacauagaaguuauuugacuccuggugauucuucuucagguuggacagcuggugcugcagcuuauuauguggguuaucuucaaccuaggacuuuucuauuaaaauauaaugaaaauggaaccauuacagaugcuguagacugugcacuugacccucucucagaaacaaaguguacguugaaauccuucacuguagaaaaaggaaucuaucaaacuucuaacuuuagaguccaaccaacagaaucuauuguuagauuuccuaauauuacaaacuugugcccuuuuggugaaguuuuuaacgccaccagauuuacaucuguuuaugcuuggaacaggaagagaaucagcaacuguguugcugauuauucuguccuauauaauuccgcaucauuuuccacuuuuaaguguuauggagugucuccuacuaaauuaaaugaucucugcuuuacuaaugucuaugcagauucauuuguaauuagaggugaugaagucagacaaaucgcuccagggcaaacuggaaagauugcugauuauaauuauaaauuaccagaugauuuuacaggcugcguuauagcuuggaauucuaacaaucuugauucuaagguuggugguaauuauaauuaccuguauagauuguuuaggaagucuaaucucaaaccuuuugagagagauauuucaacugaaaucuaucaggccgguagcacaccuuguaaugguguugaagguuuuaauuguuacuuuccuuuacaaucauaugguuuccaacccacuaaugguguugguuaccaaccauacagaguaguaguacuuucuuuugaacuucuacaugcaccagcaacuguuuguggaccuaaaaagucuacuaauuugguuaaaaacaaaugugucaauuucaacuucaaugguuuaacaggcacagguguucuuacugagucuaacaaaaaguuucugccuuuccaacaauuuggcagagacauugcugacacuacugaugcuguccgugauccacagacacuugagauucuugacauuacaccauguucuuuugguggugucaguguuauaacaccaggaacaaauacuucuaaccagguugcuguucuuuaucaggauguuaacugcacagaagucccuguugcuauucaugcagaucaacuuacuccuacuuggcguguuuauucuacagguucuaauguuuuucaaacacgugcaggcuguuuaauaggggcugaacaugucaacaacucauaugagugugacauacccauuggugcagguauaugcgcuaguuaucagacucagacuaauucuccucggcgggcacguaguguagcuagucaauccaucauugccuacacuaugucacuuggugcagaaaauucaguugcuuacucuaauaacucuauugccauacccacaaauuuuacuauuaguguuaccacagaaauucuaccagugucuaugaccaagacaucaguagauuguacaauguacauuuguggugauucaacugaaugcagcaaucuuuuguugcaauauggcaguuuuuguacacaauuaaaccgugcuuuaacuggaauagcuguugaacaagacaaaaacacccaagaaguuuuugcacaagucaaacaaauuuacaaaacaccaccaauuaaagauuuuggugguuuuaauuuuucacaaauauuaccagauccaucaaaaccaagcaagaggucauuuauugaagaucuacuuuucaacaaagugacacuugcagaugcuggcuucaucaaacaauauggugauugccuuggugauauugcugcuagagaccucauuugugcacaaaaguuuaacggccuuacuguuuugccaccuuugcucacagaugaaaugauugcucaauacacuucugcacuguuagcggguacaaucacuucugguuggaccuuuggugcaggugcugcauuacaaauaccauuugcuaugcaaauggcuuauagguuuaaugguauuggaguuacacagaauguucucuaugagaaccaaaaauugauugccaaccaauuuaauagugcuauuggcaaaauucaagacucacuuucuuccacagcaagugcacuuggaaaacuucaagauguggucaaccaaaaugcacaagcuuuaaacacgcuuguuaaacaacuuagcuccaauuuuggugcaauuucaaguguuuuaaaugauauccuuucacgucuugacaaaguugaggcugaagugcaaauugauagguugaucacaggcagacuucaaaguuugcagacauaugugacucaacaauuaauuagagcugcagaaaucagagcuucugcuaaucuugcugcuacuaaaaugucagaguguguacuuggacaaucaaaaagaguugauuuuuguggaaagggcuaucaucuuauguccuucccucagucagcaccucaugguguagucuucuugcaugugacuuaugucccugcacaagaaaagaacuucacaacugcuccugccauuugucaugauggaaaagcacacuuuccucgugaaggugucuuuguuucaaauggcacacacugguuuguaacacaaaggaauuuuuaugaaccacaaaucauuacuacagacaacacauuugugucugguaacugugauguuguaauaggaauugucaacaacacaguuuaugauccuuugcaaccugaauuagacucauucaaggaggaguuagauaaauauuuuaagaaucauacaucaccagauguugauuuaggugacaucucuggcauuaaugcuucaguuguaaacauucaaaaagaaauugaccgccucaaugagguugccaagaauuuaaaugaaucucucaucgaucuccaagaacuuggaaaguaugagcaguauauaaaauggccaugguacauuuggcuagguuuuauagcuggcuugauugccauaguaauggugacaauuaugcuuugcuguaugaccaguugcuguaguugucucaagggcuguuguucuuguggauccugcugcaaauuugaugaagacgacucugagccagugcucaaaggagucaaauuacauuacacauaaggacuaguuauaagacugacuagcccgaugggccucccaacgggcccuccuccccuccuugcaccgagauuaauaaaaaaaaaaaaaaaaaaaaaaaaaaaaaaaaaaaaaaaaaaaaaaaaaaaaaaaaaaaaaaaaugcaucccccccccccccccccccccccccccccccaaaggcucuuuucagagccaccagaauu

SEQ ID NO: 12724 - RNA, 4039 nt, Artificial Sequence
  SARS-CoV-2/Portugal/PT0035/2020__EPI_ISL_418020 spike protein mRNA wt (1-1273)
aggagaaagcuuaccauguuuguuuuucuuguuuuauugccacuagucucuagucaguguguuaaucuuacaaccagaacucaauuacccccugcauacacuaauucuuucacacgugguguuuauuacccugacaaaguuuucagauccucaguuuuacauucaacucaggacuuguucuuaccuuucuuuuccaauguuacuugguuccaugcuauacaugucucugggaccaaugguacuaagagguuugauaacccuguccuaccauuuaaugaugguguuuauuuugcuuccacugagaagucuaacauaauaagaggcuggauuuuugguacuacuuuagauucgaagacccagucccuacuuauuguuaauaacgcuacuaauguuguuauuaaagucugugaauuucaauuuuguaaugauccauuuuuggguguuuauuaccacaaaaacaacaaaaguuggauggaaagugaguucagaguuuauucuagugcgaauaauugcacuuuugaauaugucucucagccuuuucuuauggaccuugaaggaaaacaggguaauuucaaaaaucuuagggaauuuguguuuaagaauauugaugguuauuuuaaaauauauucuaagcacacgccuauuaauuuagugcgugaucucccucaggguuuuucggcuuuagaaccauugguagauuugccaauagguauuaacaucacuagguuucaaacuuuacuugcuuuacauagaaguuauuugacuccuggugauucuucuucagguuggacagcuggugcugcagcuuauuauguggguuaucuucaaccuaggacuuuucuauuaaaauauaaugaaaauggaaccauuacagaugcuguagacugugcacuugacccucucucagaaacaaaguguacguugaaauccuucacuguagaaaaaggaaucuaucaaacuucuaacuuuagaguccaaccaacagaaucuauuguuagauuuccuaauauuacaaacuugugcccuuuuggugaaguuuuuaacgccaccagauuugcaucuguuuaugcuuggaacaggaagagaaucagcaacuguguugcugauuauucuguccuauauaauuccgcaucauuuuccacuuuuaaguguuauggagugucuccuacuaaauuaaaugaucucugcuuuacuaaugucuaugcagauucauuuguaauuagaggugaugaagucagacaaaucgcuccagggcaaacuggaaagauugcugauuauaauuauaaauuaccagaugauuuuacaggcugcguuauagcuuggaauucuaacaaucuugauucuaagguuggugguaauuauaauuaccuguauagauuguuuaggaagucuaaucucaaaccuuuugagagagauauuucaacugaaaucuaucaggccgguagcacaccuuguaaugguguugaagguuuuaauuguuacuuuccuuuacaaucauaugguuuccaacccacuaaugguguugguuaccaaccauacagaguaguaguacuuucuuuugaacuucuacaugcaccagcaacuguuuguggaccuaaaaagucuacuaauuugguuaaaaacaaaugugucaauuucaacuucaaugguuuaacaggcacagguguucuuacugagucuaacaaaaaguuucugccuuuccaacaauuuggcagagacauugcugacacuacugaugcuguccgugauccacagacacuugagauucuugacauuacaccauguucuuuugguggugucaguguuauaacaccaggaacaaauacuucuaaccagguugcuguucuuuaucaggauguuaacugcacagaagucccuguugcuauucaugcagaucaacuuacuccuacuuggcguguuuauucuacagguucuaauguuuuucaaacacgugcaggcuguuuaauaggggcugaacaugucaacaacucauaugagugugacauacccauuggugcagguauaugcgcuaguuaucagacucagacuaauucuccucggcgggcacguaguguagcuagucaauccaucauugccuacacuaugucacuuggugcagaaaauucaguugcuuacucuaauaacucuauugccauacccacaaauuuuacuauuaguguuaccacagaaauucuaccagugucuaugaccaagacaucaguagauuguacaauguacauuuguggugauucaacugaaugcagcaaucuuuuguugcaauauggcaguuuuuguacacaauuaaaccgugcuuuaacuggaauagcuguugaacaagacaaaaacacccaagaaguuuuugcacaagucaaacaaauuuacaaaacaccaccaauuaaagauuuuggugguuuuaauuuuucacaaauauuaccagauccaucaaaaccaagcaagaggucauuuauugaagaucuacuuuucaacaaagugacacuugcagaugcuggcuucaucaaacaauauggugauugccuuggugauauuucugcuagagaccucauuugugcacaaaaguuuaacggccuuacuguuuugccaccuuugcucacagaugaaaugauugcucaauacacuucugcacuguuagcggguacaaucacuucugguuggaccuuuggugcaggugcugcauuacaaauaccauuugcuaugcaaauggcuuauagguuuaaugguauuggaguuacacagaauguucucuaugagaaccaaaaauugauugccaaccaauuuaauagugcuauuggcaaaauucaagacucacuuucuuccacagcaagugcacuuggaaaacuucaagauguggucaaccaaaaugcacaagcuuuaaacacgcuuguuaaacaacuuagcuccaauuuuggugcaauuucaaguguuuuaaaugauauccuuucacgucuugacaaaguugaggcugaagugcaaauugauagguugaucacaggcagacuucaaaguuugcagacauaugugacucaacaauuaauuagagcugcagaaaucagagcuucugcuaaucuugcugcuacuaaaaugucagaguguguacuuggacaaucaaaaagaguugauuuuuguggaaagggcuaucaucuuauguccuucccucagucagcaccucaugguguagucuucuugcaugugacuuaugucccugcacaagaaaagaacuucacaacugcuccugccauuugucaugauggaaaagcacacuuuccucgugaaggugucuuuguuucaaauggcacacacugguuuguaacacaaaggaauuuuuaugaaccacaaaucauuacuacagacaacacauuugugucugguaacugugauguuguaauaggaauugucaacaacacaguuuaugauccuuugcaaccugaauuagacucauucaaggaggaguuagauaaauauuuuaagaaucauacaucaccagauguugauuuaggugacaucucuggcauuaaugcuucaguuguaaacauucaaaaagaaauugaccgccucaaugagguugccaagaauuuaaaugaaucucucaucgaucuccaagaacuuggaaaguaugagcaguauauaaaauggccaugguacauuuggcuagguuuuauagcuggcuugauugccauaguaauggugacaauuaugcuuugcuguaugaccaguugcuguaguugucucaagggcuguuguucuuguggauccugcugcaaauuugaugaagacgacucugagccagugcucaaaggagucaaauuacauuacacauaaggacuaguuauaagacugacuagcccgaugggccucccaacgggcccuccuccccuccuugcaccgagauuaauaaaaaaaaaaaaaaaaaaaaaaaaaaaaaaaaaaaaaaaaaaaaaaaaaaaaaaaaaaaaaaaaugcaucccccccccccccccccccccccccccccccaaaggcucuuuucagagccaccagaauu

SEQ ID NO: 12725 - RNA, 4039 nt, Artificial Sequence
  SARS-CoV-2/USA/NY-NYUMC7/2020__EPI_ISL_418192 spike protein mRNA wt (1-1273)
aggagaaagcuuaccauguuuguuuuucuuguuuuauugccacuagucucuagucaguguguuaaucuuacaaccagaacucaauuacccccugcauacacuaauucuuucacacgugguguuuauuacccugacaaaguuuucagauccucaguuuuacauucaacucaggacuuguucuuaccuuucuuuuccaauguuacuugguuccaugcuauacaugucucugggaccaaugguacuaagagguuugauaacccuguccuaccauuuaaugaugguguuuauuuugcuuccacugagaagucuaacauaauaagaggcuggauuuuugguacuacuuuagauucgaagacccagucccuacuuauuguuaauaacgcuacuaauguuguuauuaaagucugugaauuucaauuuuguaaugauccauuuuuggguguuuaucaccacaaaaacaacaaaaguuggauggaaagugaguucagaguuuauucuagugcgaauaauugcacuuuugaauaugucucucagccuuuucuuauggaccuugaaggaaaacaggguaauuucaaaaaucuuagggaauuuguguuuaagaauauugaugguuauuuuaaaauauauucuaagcacacgccuauuaauuuagugcgugaucucccucaggguuuuucggcuuuagaaccauugguagauuugccaauagguauuaacaucacuagguuucaaacuuuacuugcuuuacauagaaguuauuugacuccuggugauucuucuucagguuggacagcuggugcugcagcuuauuauguggguuaucuucaaccuaggacuuuucuauuaaaauauaaugaaaauggaaccauuacagaugcuguagacugugcacuugacccucucucagaaacaaaguguacguugaaauccuucacuguagaaaaaggaaucuaucaaacuucuaacuuuagaguccaaccaacagaaucuauuguuagauuuccuaauauuacaaacuugugcccuuuuggugaaguuuuuaacgccaccagauuugcaucuguuuaugcuuggaacaggaagagaaucagcaacuguguugcugauuauucuguccuauauaauuccgcaucauuuuccacuuuuaaguguuauggagugucuccuacuaaauuaaaugaucucugcuuuacuaaugucuaugcagauucauuuguaauuagaggugaugaagucagacaaaucgcuccagggcaaacuggaaagauugcugauuauaauuauaaauuaccagaugauuuuacaggcugcguuauagcuuggaauucuaacaaucuugauucuaagguuggugguaauuauaauuaccuguauagauuguuuaggaagucuaaucucaaaccuuuugagagagauauuucaacugaaaucuaucaggccgguagcacaccuuguaaugguguugaagguuuuaauuguuacuuuccuuuacaaucauaugguuuccaacccacuaaugguguugguuaccaaccauacagaguaguaguacuuucuuuugaacuucuacaugcaccagcaacuguuuguggaccuaaaaagucuacuaauuugguuaaaaacaaaugugucaauuucaacuucaaugguuuaacaggcacagguguucuuacugagucuaacaaaaaguuucugccuuuccaacaauuuggcagagacauugcugacacuacugaugcuguccgugauccacagacacuugagauucuugacauuacaccauguucuuuugguggugucaguguuauaacaccaggaacaaauacuucuaaccagguugcuguucuuuaucaggguguuaacugcacagaagucccuguugcuauucaugcagaucaacuuacuccuacuuggcguguuuauucuacagguucuaauguuuuucaaacacgugcaggcuguuuaauaggggcugaacaugucaacaacucauaugagugugacauacccauuggugcagguauaugcgcuaguuaucagacucagacuaauucuccucggcgggcacguaguguagcuagucaauccaucauugccuacacuaugucacuuggugcagaaaauucaguugcuuacucuaauaacucuauugccauacccacaaauuuuacuauuaguguuaccacagaaauucuaccagugucuaugaccaagacaucaguagauuguacaauguacauuuguggugauucaacugaaugcagcaaucuuuuguugcaauauggcaguuuuuguacacaauuaaaccgugcuuuaacuggaauagcuguugaacaagacaaaaacacccaagaaguuuuugcacaagucaaacaaauuuacaaaacaccaccaauuaaagauuuuggugguuuuaauuuuucacaaauauuaccagauccaucaaaaccaagcaagaggucauuuauugaagaucuacuuuucaacaaagugacacuugcagaugcuggcuucaucaaacaauauggugauugccuuggugauauugcugcuagagaccucauuugugcacaaaaguuuaacggccuuacuguuuugccaccuuugcucacagaugaaaugauugcucaauacacuucugcacuguuagcggguacaaucacuucugguuggaccuuuggugcaggugcugcauuacaaauaccauuugcuaugcaaauggcuuauagguuuaaugguauuggaguuacacagaauguucucuaugagaaccaaaaauugauugccaaccaauuuaauagugcuauuggcaaaauucaagacucacuuucuuccacagcaagugcacuuggaaaacuucaagauguggucaaccaaaaugcacaagcuuuaaacacgcuuguuaaacaacuuagcuccaauuuuggugcaauuucaaguguuuuaaaugauauccuuucacgucuugacaaaguugaggcugaagugcaaauugauagguugaucacaggcagacuucaaaguuugcagacauaugugacucaacaauuaauuagagcugcagaaaucagagcuucugcuaaucuugcugcuacuaaaaugucagaguguguacuuggacaaucaaaaagaguugauuuuuguggaaagggcuaucaucuuauguccuucccucagucagcaccucaugguguagucuucuugcaugugacuuaugucccugcacaagaaaagaacuucacaacugcuccugccauuugucaugauggaaaagcacacuuuccucgugaaggugucuuuguuucaaauggcacacacugguuuguaacacaaaggaauuuuuaugaaccacaaaucauuacuacagacaacacauuugugucugguaacugugauguuguaauaggaauugucaacaacacaguuuaugauccuuugcaaccugaauuagacucauucaaggaggaguuagauaaauauuuuaagaaucauacaucaccagauguugauuuaggugacaucucuggcauuaaugcuucaguuguaaacauucaaaaagaaauugaccgccucaaugagguugccaagaauuuaaaugaaucucucaucgaucuccaagaacuuggaaaguaugagcaguauauaaaauggccaugguacauuuggcuagguuuuauagcuggcuugauugccauaguaauggugacaauuaugcuuugcuguaugaccaguugcuguaguugucucaagggcuguuguucuuguggauccugcugcaaauuugaugaagacgacucugagccagugcucaaaggagucaaauuacauuacacauaaggacuaguuauaagacugacuagcccgaugggccucccaacgggcccuccuccccuccuugcaccgagauuaauaaaaaaaaaaaaaaaaaaaaaaaaaaaaaaaaaaaaaaaaaaaaaaaaaaaaaaaaaaaaaaaaugcaucccccccccccccccccccccccccccccccaaaggcucuuuucagagccaccagaauu

SEQ ID NO: 12726 - RNA, 4039 nt, Artificial Sequence
  SARS-CoV-2/Iceland/189/2020__EPI_ISL_417709 spike protein mRNA wt (1-1273)
aggagaaagcuuaccauguuuguuuuucuuguuuuauugccacuagucucuagucaguguguuaaucuuacaaccagaacucaauuacccccugcauacacuaauucuuucacacgugguguuuauuacccugacaaaguuuucagauccucaguuuuacauucaacucaggacuuguucuuaccuuucuuuuccaauguuacuugguuccaugcuauacaugucucugggaccaaugguacuaagagguuugauaacccuguccuaccauuuaaugaugguguuuauuuugcuuccacugagaagucuaacauaauaagaggcuggauuuuugguacuacuuuagauucgaagacccagucccuacuuauuguuaauaacgcuacuaauguuguuauuaaagucugugaauuucaauuuuguaaugauccauuuuuggguguuuauuaccacaaaaacaacaaaaguuggauggaaagugaguucagaguuuauucuagugcgaauaauugcacuuuugaauaugucucucagccuuuucuuauggaccuugaaggaaaacaggguaauuucaaaaaucuuagggaauuuguguuuaagaauauugaugguuauuuuaaaauauauucuaagcacacgccuauuaauuuagugcgugaucucccucaggguuuuucggcuuuagaaccauugguagauuugccaauagguauuaacaucacuagguuucaaacuuuacuugcuuuacauagaaguuauuugacuccuggugauucuucuucagguuggacagcuggugcugcagcuuauuauguggguuaucuucaaccuaggacuuuucuauuaaaauauaaugaaaauggaaccauuacagaugcuguagacugugcacuugacccucucucagaaacaaaguguacguugaaauccuucacuguagaaaaaggaaucuaucaaacuucuaacuuuagaguccaaccaacagaaucuauuguuagauuuccuaauauuacaaacuugugcccuuuuggugaaguuuuuaacgccaccagauuugcaucuguuuaugcuuggaacaggaagagaaucagcaacuguguugcugauuauucuguccuauauaauuccgcaucauuuuccacuuuuaaguguuauggagugucuccuacuaaauuaaaugaucucugcuuuacuaaugucuaugcagauucauuuguaauuagaggugaugaagucagacaaaucgcuccagggcaaacuggaaagauugcugauuauaauuauaaauuaccagaugauuuuacaggcugcguuauagcuuggaauucuaacaaucuugauucuaagguuggugguaauuauaauuaccuguauagauuguuuaggaagucuaaucucaaaccuuuugagagagauauuucaacugaaaucuaucaggccgguagcacaccuuguaaugguguugaagguuuuaauuguuacuuuccuuuacaaucauaugguuuccaacccacuaaugguguugguuaccaaccauacagaguaguaguacuuucuuuugaacuucuacaugcaccagcaacuguuuguggaccuaaaaagucuacuaauuugguuaaaaacaaaugugucaauuucaacuucaaugguuuaacaggcacagguguucuuacugagucuaacaaaaaguuucugccuuuccaacaauuuggcagagacauugcugacacuacugaugcuguccgugauccacagacacuugagauucuugacauuacaccauguucuuuugguggugucaguguuauaacaccaggaacaaauacuucuaaccagguugcuguucuuuaucaggguguuaacugcacagaagucccuguugcuauucaugcagaucaacuuacuccuacuuggcguguuuauucuacagguucuaauguuuuucaaacacgugcaggcuguuuaauaggggcugaacaugucaacaacucauaugagugugacauacccauuggugcagguauaugcgcuaguuaucagacucagacuaauucuccucggcgggcacguaguguagcuagucaauccaucauugccuacacuaugucacuuggugcagaaaauucaguugcuuacucuaauaacucuauugccauacccacaaauuuuacuauuaguguuaccacagaaauucuaccagugucuaugaccaagacaucaguagauuguacaauguacauuuguggugauucaacugaaugcagcaaucuuuuguugcaauauggcaguuuuuguacacaauuaaaccgugcuuuaacuggaauagcuguugaacaagacaaaaacacccaagaaguuuuugcacaagucaaacaaauuuacaaaacaccaccaauuaaagauuuuggugguuuuaauuuuucacaaauauuaccagauccaucaaaaccaagcaagaggucauuuauugaagaucuacuuuucaacaaagugacacuugcagaugcuggcuucaccaaacaauauggugauugccuuggugauauugcugcuagagaccucauuugugcacaaaaguuuaacggccuuacuguuuugccaccuuugcucacagaugaaaugauugcucaauacacuucugcacuguuagcggguacaaucacuucugguuggaccuuuggugcaggugcugcauuacaaauaccauuugcuaugcaaauggcuuauagguuuaaugguauuggaguuacacagaauguucucuaugagaaccaaaaauugauugccaaccaauuuaauagugcuauuggcaaaauucaagacucacuuucuuccacagcaagugcacuuggaaaacuucaagauguggucaaccaaaaugcacaagcuuuaaacacgcuuguuaaacaacuuagcuccaauuuuggugcaauuucaaguguuuuaaaugauauccuuucacgucuugacaaaguugaggcugaagugcaaauugauagguugaucacaggcagacuucaaaguuugcagacauaugugacucaacaauuaauuagagcugcagaaaucagagcuucugcuaaucuugcugcuacuaaaaugucagaguguguacuuggacaaucaaaaagaguugauuuuuguggaaagggcuaucaucuuauguccuucccucagucagcaccucaugguguagucuucuugcaugugacuuaugucccugcacaagaaaagaacuucacaacugcuccugccauuugucaugauggaaaagcacacuuuccucgugaaggugucuuuguuucaaauggcacacacugguuuguaacacaaaggaauuuuuaugaaccacaaaucauuacuacagacaacacauuugugucugguaacugugauguuguaauaggaauugucaacaacacaguuuaugauccuuugcaaccugaauuagacucauucaaggaggaguuagauaaauauuuuaagaaucauacaucaccagauguugauuuaggugacaucucuggcauuaaugcuucaguuguaaacauucaaaaagaaauugaccgccucaaugagguugccaagaauuuaaaugaaucucucaucgaucuccaagaacuuggaaaguaugagcaguauauaaaauggccaugguacauuuggcuagguuuuauagcuggcuugauugccauaguaauggugacaauuaugcuuugcuguaugaccaguugcuguaguugucucaagggcuguuguucuuguggauccugcugcaaauuugaugaagacgacucugagccagugcucaaaggagucaaauuacauuacacauaaggacuaguuauaagacugacuagcccgaugggccucccaacgggcccuccuccccuccuugcaccgagauuaauaaaaaaaaaaaaaaaaaaaaaaaaaaaaaaaaaaaaaaaaaaaaaaaaaaaaaaaaaaaaaaaaugcaucccccccccccccccccccccccccccccccaaaggcucuuuucagagccaccagaauu

SEQ ID NO: 12727 - RNA, 4039 nt, Artificial Sequence
  SARS-CoV-2/Australia/NSW56/2020__EPI_ISL_417408 spike protein mRNA wt (1-1273)
aggagaaagcuuaccauguuuguuuuucuuguuuuauugccacuagucucuagucaguguguuaaucuuacaaccagaacucaauuacccccugcauacacuaauucuuucacacgugguguuuauuacccugacaaaguuuucagauccucaguuuuacauucaacucaggacuuguucuuaccuuucuuuuccaauguuacuugguuccaugcuauacaugucucugggaccaaugguacuaagagguuugauaacccuguccuaccauuuaaugaugguguuuauuuugcuuccacugagaagucuaacauaauaagaggcuggauuuuugguacuacuuuagauucgaagacccagucccuacuuauuguuaauaacgcuacuaauguuguuauuaaagucugugaauuucaauuuuguaaugauccauuuuuggguguuuauuaccacaaaaacaacaaaaguuggauggaaagugaguucagaguuuauucuagugcgaauaauugcacuuuugaauaugucucucagccuuuucuuauggaccuugaaggaaaacaggguaauuucaaaaaucuuagggaauuuguguuuaagaauauugaugguuauuuuaaaauauauucuaagcacacgccuauuaauuuagugcgugaucucccucaggguuuuucggcuuuagaaccauugguagauuugccaauagguauuaacaucacuagguuucaaacuuuacuugcuuuacauagaaguuauuugacuccuggugauucuucuucagguuggacagcuggugcugcagcuuauuauguggguuaucuucaaccuaggacuuuucuauuaaaauauaaugaaaauggaaccauuacagaugcuguagacugugcacuugacccucucucagaaacaaaguguacguugaaauccuucacuguagaaaaaggaaucuaucaaacuucuaacuuuagaguccaaccaacagaaucuauuguuagauuuccuaauauuacaaacuugugcccuuuuggugaaguuuuuaacgccaccagauuugcaucuguuuaugcuuggaacaggaagagaaucagcaacuguguugcugauuauucuguccuauauaauuccgcaucauuuuccacuuuuaaguguuauggagugucuccuacuaaauuaaaugaucucugcuuuacuaaugucuaugcagauucauuuguaauuagaggugaugaagucagacaaaucgcuccagggcaaacuggaaagauugcugauuauaauuauaaauuaccagaugauuuuacaggcugcguuauagcuuggaauucuaacaaucuugauucuaagguuggugguaauuauaauuaccuguauagauuguuuaggaagucuaaucucaaaccuuuugagagagauauuucaacugaaaucuaucaggccgguagcacaccuuguaaugguguugaagguuuuaauuguuacuuuccuuuacaaucauaugguuuccaacccacuaaugguguugguuaccaaccauacagaguaguaguacuuucuuuugaacuucuacaugcaccagcaacuguuuguggaccuaaaaagucuacuaauuugguuaaaaacaaaugugucaauuucaacuucaaugguuuaacaggcacagguguucuuacugagucuaacaaaaaguuucugccuuuccaacaauuuggcagagacauugcugacacuacugaugcuguccgugauccacagacacuugagauucuugacauuacaccauguucuuuugguggugucaguguuauaacaccaggaacaaauacuucuaaccagguugcuguucuuuaucaggauguuaacugcacagaagucccuguugcuauucaugcagaucaacuuacuccuacuuggcguguuuauucuacagguucuaauguuuuucaaacacgugcaggcuguuuaauaggggcugaacaugucaacaacucauaugagugugacauacccauuggugcagguauaugcgcuaguuaucagacucagacuaauucuccucggcgggcacguaguguagcuagucaauccaucauugccuacacuaugucacuuggugcagaaaauucaguugcuuacucuaauaacucuauugccauacccacaaauuuuacuauuaguguuaccacagaaauucuaccagugucuaugaccaagacaucaguagauuguacaauguacauuuguggugauucaacugaaugcagcaaucuuuuguugcaauauggcaguuuuuguacacaauuaaaccgugcuuuaacuggaauagcuguugaacaagacaaaaacacccaagaaguuuuugcacaagucaaacaaauuuacaaaacaccaccaauuaaagauuuuggugguuuuaauuuuucacaaauauuaccagauucaucaaaaccaagcaagaggucauuuauugaagaucuacuuuucaacaaagugacacuugcagaugcuggcuucaucaaacaauauggugauugccuuggugauauugcugcuagagaccucauuugugcacaaaaguuuaacggccuuacuguuuugccaccuuugcucacagaugaaaugauugcucaauacacuucugcacuguuagcggguacaaucacuucugguuggaccuuuggugcaggugcugcauuacaaauaccauuugcuaugcaaauggcuuauagguuuaaugguauuggaguuacacagaauguucucuaugagaaccaaaaauugauugccaaccaauuuaauagugcuauuggcaaaauucaagacucacuuucuuccacagcaagugcacuuggaaaacuucaagauguggucaaccaaaaugcacaagcuuuaaacacgcuuguuaaacaacuuagcuccaauuuuggugcaauuucaaguguuuuaaaugauauccuuucacgucuugacaaaguugaggcugaagugcaaauugauagguugaucacaggcagacuucaaaguuugcagacauaugugacucaacaauuaauuagagcugcagaaaucagagcuucugcuaaucuugcugcuacuaaaaugucagaguguguacuuggacaaucaaaaagaguugauuuuuguggaaagggcuaucaucuuauguccuucccucagucagcaccucaugguguagucuucuugcaugugacuuaugucccugcacaagaaaagaacuucacaacugcuccugccauuugucaugauggaaaagcacacuuuccucgugaaggugucuuuguuucaaauggcacacacugguuuguaacacaaaggaauuuuuaugaaccacaaaucauuacuacagacaacacauuugugucugguaacugugauguuguaauaggaauugucaacaacacaguuuaugauccuuugcaaccugaauuagacucauucaaggaggaguuagauaaauauuuuaagaaucauacaucaccagauguugauuuaggugacaucucuggcauuaaugcuucaguuguaaacauucaaaaagaaauugaccgccucaaugagguugccaagaauuuaaaugaaucucucaucgaucuccaagaacuuggaaaguaugagcaguauauaaaauggccaugguacauuuggcuagguuuuauagcuggcuugauugccauaguaauggugacaauuaugcuuugcuguaugaccaguugcuguaguugucucaagggcuguuguucuuguggauccugcugcaaauuugaugaagacgacucugagccagugcucaaaggagucaaauuacauuacacauaaggacuaguuauaagacugacuagcccgaugggccucccaacgggcccuccuccccuccuugcaccgagauuaauaaaaaaaaaaaaaaaaaaaaaaaaaaaaaaaaaaaaaaaaaaaaaaaaaaaaaaaaaaaaaaaaugcaucccccccccccccccccccccccccccccccaaaggcucuuuucagagccaccagaauu

SEQ ID NO: 12728 - RNA, 4039 nt, Artificial Sequence
  SARS-CoV-2/Iceland/280/2020__EPI_ISL_417608 spike protein mRNA wt (1-1273)
aggagaaagcuuaccauguuuguuuuucuuguuuuauugccacuagucucuagucaguguguuaaucuuacaaccagaacucaauuacccccugcauacacuaauucuuucacacgugguguuuauuacccugacaaaguuuucagauccucaguuuuacauucaacucaggacuuguucuuaccuuucuuuuccaauguuacuugguuccaugcuauacaugucucugggaccaaugguacuaagagguuugauaacccuguccuaccauuuaaugaugguguuuauuuugcuuccacugagaagucuaacauaauaagaggcuggauuuuugguacuacuuuagauucgaagacccagucccuacuuauuguuaauaacgcuacuaauguuguuauuaaagucugugaauuucaauuuuguaaugauccauuuuuggguguuuauuaccacaaaaacaacaaaaguuggauggaaagugaguucagaguuuauucuagugcgaauaauugcacuuuugaauaugucucucagccuuuucuuauggaccuugaaggaaaacaggguaauuucaaaaaucuuagggaauuuguguuuaagaauauugaugguuauuuuaaaauauauucuaagcacacgccuauuaauuuagugcgugaucucccucaggguuuuucggcuuuagaaccauugguagauuugccaauagguauuaacaucacuagguuucaaacuuuacuugcuuuacauagaaguuauuugacuccuggugauucuucuucagguuggacagcuggugcugcagcuuauuauguggguuaucuucaaccuaggacuuuucuauuaaaauauaaugaaaauggaaccauuacagaugcuguagacugugcacuugacccucucucagaaacaaaguguacguugaaauccuucacuguagaaaaaggaaucuaucaaacuucuaacuuuagaguccaaccaacagaaucuauuguuagauuuccuaauauuacaaacuugugcccuuuuggugaaguuuuuaacgccaccagauuugcaucuguuuaugcuuggaacaggaagagaaucagcaacuguguugcugauuauucuguccuauauaauuccgcaucauuuuccacuuuuaaguguuauggagugucuccuacuaaauuaaaugaucucugcuuuacuaaugucuaugcagauucauuuguaauuagaggugaugaagucagacaaaucgcuccagggcaaacuggaaagauugcugauuauaauuauaaauuaccagaugauuuuacaggcugcguuauagcuuggaauucuaacaaucuugauucuaagguuggugguaauuauaauuaccuguauagauuguuuaggaagucuaaucucaaaccuuuugagagagauauuucaacugaaaucuaucaggccgguagcacaccuuguaaugguguugaagguuuuaauuguuacuuuccuuuacaaucauaugguuuccaacccacuaaugguguugguuaccaaccauacagaguaguaguacuuucuuuugaacuucuacaugcaccagcaacuguuuguggaccuaaaaagucuacuaauuugguuaaaaacaaaugugucaauuucaacuucaaugguuuaacaggcacagguguucuuacugagucuaacaaaaaguuucugccuuuccaacaauuuggcagagacauugcugacacuacugaugcuguccgugauccacagacacuugagauucuugacauuacaccauguucuuuugguggugucaguguuauaacaccaggaacaaauacuucuaaccagguugcuguucuuuaucaggguguuaacugcacagaagucccuguugcuauucaugcagaucaacuuacuccuacuuggcguguuuauucuacagguucuaauguuuuucaaacacgugcaggcuguuuaauaggggcugaacaugucaacaacucauaugagugugacauacccauuggugcagguauaugcgcuaguuaucauacucagacuaauucuccucggcgggcacguaguguagcuagucaauccaucauugccuacacuaugucacuuggugcagaaaauucaguugcuuacucuaauaacucuauugccauacccacaaauuuuacuauuaguguuaccacagaaauucuaccagugucuaugaccaagacaucaguagauuguacaauguacauuuguggugauucaacugaaugcagcaaucuuuuguugcaauauggcaguuuuuguacacaauuaaaccgugcuuuaacuggaauagcuguugaacaagacaaaaacacccaagaaguuuuugcacaagucaaacaaauuuacaaaacaccaccaauuaaagauuuuggugguuuuaauuuuucacaaauauuaccagauccaucaaaaccaagcaagaggucauuuauugaagaucuacuuuucaacaaagugacacuugcagaugcuggcuucaucaaacaauauggugauugccuuggugauauugcugcuagagaccucauuugugcacaaaaguuuaacggccuuacuguuuugccaccuuugcucacagaugaaaugauugcucaauacacuucugcacuguuagcggguacaaucacuucugguuggaccuuuggugcaggugcugcauuacaaauaccauuugcuaugcaaauggcuuauagguuuaaugguauuggaguuacacagaauguucucuaugagaaccaaaaauugauugccaaccaauuuaauagugcuauuggcaaaauucaagacucacuuucuuccacagcaagugcacuuggaaaacuucaagauguggucaaccaaaaugcacaagcuuuaaacacgcuuguuaaacaacuuagcuccaauuuuggugcaauuucaaguguuuuaaaugauauccuuucacgucuugacaaaguugaggcugaagugcaaauugauagguugaucacaggcagacuucaaaguuugcagacauaugugacucaacaauuaauuagagcugcagaaaucagagcuucugcuaaucuugcugcuacuaaaaugucagaguguguacuuggacaaucaaaaagaguugauuuuuguggaaagggcuaucaucuuauguccuucccucagucagcaccucaugguguagucuucuugcaugugacuuaugucccugcacaagaaaagaacuucacaacugcuccugccauuugucaugauggaaaagcacacuuuccucgugaaggugucuuuguuucaaauggcacacacugguuuguaacacaaaggaauuuuuaugaaccacaaaucauuacuacagacaacacauuugugucugguaacugugauguuguaauaggaauugucaacaacacaguuuaugauccuuugcaaccugaauuagacucauucaaggaggaguuagauaaauauuuuaagaaucauacaucaccagauguugauuuaggugacaucucuggcauuaaugcuucaguuguaaacauucaaaaagaaauugaccgccucaaugagguugccaagaauuuaaaugaaucucucaucgaucuccaagaacuuggaaaguaugagcaguauauaaaauggccaugguacauuuggcuagguuuuauagcuggcuugauugccauaguaauggugacaauuaugcuuugcuguaugaccaguugcuguaguugucucaagggcuguuguucuuguggauccugcugcaaauuugaugaagacgacucugagccagugcucaaaggagucaaauuacauuacacauaaggacuaguuauaagacugacuagcccgaugggccucccaacgggcccuccuccccuccuugcaccgagauuaauaaaaaaaaaaaaaaaaaaaaaaaaaaaaaaaaaaaaaaaaaaaaaaaaaaaaaaaaaaaaaaaaugcaucccccccccccccccccccccccccccccccaaaggcucuuuucagagccaccagaauu

SEQ ID NO: 12729 - RNA, 4039 nt, Artificial Sequence
  SARS-CoV-2/Iceland/247/2020__EPI_ISL_417575 spike protein mRNA wt (1-1273)
aggagaaagcuuaccauguuuguuuuucuuguuuuauugccacuagucucuagucaguguguuaaucuuacaaccagaacucaauuacccccugcauacacuaauucuuucacacgugguguuuauuacccugacaaaguuuucagauccucaguuuuacauucaacucaggacuuguucuuaccuuucuuuuccaauguuacuugguuccaugcuauacaugucucugggaccaaugguacuaagagguuugauaacccuguccuaccauuuaaugaugguguuuauuuugcuuccacugagaagucuaacauaauaagaggcuggauuuuugguacuacuuuagauucgaagacccagucccuacuuauuguuaauaacgcuacuaauguuguuauuaaagucugugaauuucaauuuuguaaugauccauuuuuggguguuuauuaccacaaaaacaacaaaaguuggauggaaagugaguucagaguuuauucuagugcgaauaauugcacuuuugaauaugucucucagccuuuucuuauggaccuugaaggaaaacaggguaauuucaaaaaucuuagggaauuuguguuuaagaauauugaugguuauuuuaaaauauauucuaagcacacgccuauuaauuuagugcgugaucucccucaggguuuuucggcuuuagaaccauugguagauuugccaauagguauuaacaucacuagguuucaaacuuuacuugcuuuacauagaaguuauuugacuccuggugauucuucuucagguuggacagcuggugcugcagcuuauuauguggguuaucuucaaccuaggacuuuucuauuaaaauauaaugaaaauggaaccauuacagaugcuguagacugugcacuugacccucucucagaaacaaaguguacguugaaauccuucacuguagaaaaaggaaucuaucaaacuucuaacuuuagaguccaaccaacagaaucuauuguuagauuuccuaauauuacaaacuugugcccuuuuggugaaguuuuuaacgccaccagauuugcaucuguuuaugcuuggaacaggaagagaaucagcaacuguguugcugauuauucuguccuauauaauuccgcaucauuuuccacuuuuaaguguuauggagugucuccuacuaaauuaaaugaucucugcuuuacuaaugucuaugcagauucauuuguaauuagaggugaugaagucagacaaaucgcuccagggcaaacuggaaagauugcugauuauaauuauaaauuaccagaugauuuuacaggcugcguuauagcuuggaauucuaacaaucuugauucuaagguuggugguaauuauaauuaccuguauagauuguuuaggaagucuaaucucaaaccuuuugagagagauauuucaacugaaaucuaucaggccgguagcacaccuuguaaugguguugaagguuuuaauuguuacuuuccuuuacaaucauaugguuuccaacccacuaaugguguugguuaccaaccauacagaguaguaguacuuucuuuugaacuucuacaugcaccagcaacuguuuguggaccuaaaaagucuacuaauuugguuaaaaacaaaugugucaauuucaacuucaaugguuuaacaggcacagguguucuuacugagucuaacaaaaaguuucugccuuuccaacaauuuggcagagacauugcugacacuacugaugcuguccgugauccacagacacuugagauucuugacauuacaccauguucuuuugguggugucaguguuauaacaccaggaacaaauacuucuaaccagguugcuguucuuuaucaggguguuaacugcacagaagucccuguugcuauucaugcagaucaacuuacuccuacuuggcguguuuauucuacagguucuaauguuuuucaaacacgugcaggcuguuuaauaggggcugaacaugucaacaacucauaugagugugacauacccauuggugcagguauaugcgcuaguuaucagacucagacuaauucuccucggcgggcacguaguguagcuagucaauccaucauugccuacacuaugucacuuggugcagaaaauucaguugcuuacucuaauaacucuauugccauacccacaaauuuuacuauuaguguuaccacagaaauucuaccagugucuaugaccaagacaucaguagauuguacaauguacauuuguggugauucaacugaaugcagcaaucuuuuguugcaauauggcaguuuuuguacacaauuaaaccgugcuuuaacuggaauagcuguugaacaagacaaaaacacccaagaaguuuuugcacaagucaaacaaauuuacaaaacaccaccaauuaaagauuuuggugguuuuaauuuuucacaaauauuaccagauccaucaaaaccaagcaagaggucauuuauugaagaucuacuuuucaacaaagugacacuugcagaugcuggcuucaucaaacaauauggugauugccuuggugauauugcugcuagagaccucauuugugcacaaaaguuuaacggccuuacuguuuugccaccuuugcucacagaugaaaugauugcucaauacacuucugcacuguuagcggguacaaucacuucugguuggaccuuuggugcaggugcugcauuacaaauaccauuugcuaugcaaauggcuuauagguuuaaugguauuggaguuacacagaauguucucuaugagaaccaaaaauugauugccaaccaauuuaauagugcuauuggcaaaauucaagacucacuuucuuccacagcaagugcacuuggaaaacuucaagauguggucaaccaaaaugcacaagcuuuaaacacgcuuguuaaacaacuuagcuccaauuuuggugcaauuucaaguguuuuaaaugauauccuuucacgucuugacaaaguugaggcugaagugcaaauugauagguugaucacaggcagacuucaaaguuugcagacauaugugacucaacaauuaauuagagcugcagaaaucagagcuucugcuaaucuugcugcuacuaaaaugucagaguguguacuuggacaaucaaaaagaguugauuuuuguggaaagggcuaucaucuuauguccuucccucagucagcaccucaugguguagucuucuugcaugugacuuaugucccugcacaagaaaagaacuucacaacugcuccugccauuugucaugauggaaaagcacacuuuccucgugaaggugucuuuguuucaaauggcacacacugguuuguaacacaaaggaauuuuuaugaaccacaaaucauuacuacagacaacacauuugugucugguaacugugauguuguaauaggaauugucaacaacacaguuuaugauccuuugcaaccugaauuagacucauucaaggaggaguuagauaaauauuuuaagaaucauacaucaccagauguugauuuaggugacaucucuggcauuaaugcuucaguuguaaacauucaaaaagaaauugaccgccucaaugagguugccaagaauuuaaaugaaucucucaucgaucuccaagaacuuggaaaguaugagcaguauauaaaauggccaugguacauuuggcuagguuuuauagcuggcuugauugccauaguaauugugacaauuaugcuuugcuguaugaccaguugcuguaguugucucaagggcuguuguucuuguggauccugcugcaaauuugaugaagacgacucugagccagugcucaaaggagucaaauuacauuacacauaaggacuaguuauaagacugacuagcccgaugggccucccaacgggcccuccuccccuccuugcaccgagauuaauaaaaaaaaaaaaaaaaaaaaaaaaaaaaaaaaaaaaaaaaaaaaaaaaaaaaaaaaaaaaaaaaugcaucccccccccccccccccccccccccccccccaaaggcucuuuucagagccaccagaauu

SEQ ID NO: 12730 - RNA, 4039 nt, Artificial Sequence
  SARS-CoV-2/Iceland/238/2020__EPI_ISL_417566 spike protein mRNA wt (1-1273)
aggagaaagcuuaccauguuuguuuuucuuguuuuauugccacuagucucuagucaguguguuaaucuuacaaccagaacucaauuacccccugcauacacuaauucuuucacacgugguguuuauuacccugacaaaguuuucagauccucaguuuuacauucaacucaggacuuguucuuaccuuucuuuuccaauguuacuugguuccaugcuauacaugucucugggaccaaugguacuaagagguuugauaacccuguccuaccauuuaaugaugguguuuauuuugcuuccacugagaagucuaacauaauaagaggcuggauuuuugguacuacuuuagauucgaagacccagucccuacuuauuguuaauaacgcuacuaauguuguuauuaaagucugugaauuucaauuuuguaaugauccauuuuuggguguuuauuaccacaaaaacaacaaaaguuggauggaaagugaguucagaguuuauucuagugcgaauaauugcacuuuugaauaugucucucagccuuuucuuauggaccuugaaggaaaacaggguaauuucaaaaaucuuagggaauuuguguuuaagaauauugaugguuauuuuaaaauauauucuaagcacacgccuauuaauuuagugcgugaucucccucaggguuuuucggcuuuagaaccauugguagauuugccaauagguauuaacaucacuagguuucaaacuuuacuugcuuuacauagaaguuauuugacuccuggugauucuucuucagguuggacagcuggugcugcagcuuauuauguggguuaucuucaaccuaggacuuuucuauuaaaauauaaugaaaauggaaccauuacagaugcuguagacugugcacuugacccucucucagaaacaaaguguacguugaaauccuucacuguagaaaaaggaaucuaucaaacuucuaacuuuagaguccaaccaacagaaucuauuguuagauuuccuaauauuacaaacuugugcccuuuuggugaaguuuuuaacgccaccagauuugcaucuguuuaugcuuggaacaggaagagaaucagcaacuguguugcugauuauucuguccuauauaauuccgcaucauuuuccacuuuuaaguguuauggagugucuccuacuaaauuaaaugaucucugcuuuacuaaugucuaugcagauucauuuguaauuagaggugaugaagucagacaaaucgcuccagggcaaacuggaaagauugcugauuauaauuauaaauuaccagaugauuuuacaggcugcguuauagcuuggaauucuaacaaucuugauucuaagguuggugguaauuauaauuaccuguauagauuguuuaggaagucuaaucucaaaccuuuugagagagauauuucaacugaaaucuaucaggccgguagcacaccuuguaaugguguugaagguuuuaauuguuacuuuccuuuacaaucauaugguuuccaacccacuaaugguguugguuaccaaccauacagaguaguaguacuuucuuuugaacuucuacaugcaccagcaacuguuuguggaccuaaaaagucuacuaauuugguuaaaaacaaaugugucaauuucaacuucaaugguuuaacaggcacagguguucuuacugagucuaacaaaaaguuucugccuuuccaacaauuuggcagagacauugcugacacuacugaugcuguccgugauccacagacacuugagauucuugacauuacaccauguucuuuugguggugucaguguuauaacaccaggaacaaauacuucuaaccagguugcuguucuuuaucaggguguuaacugcacagaagucccuguugcuauucaugcagaucaacuuacuccuacuuggcguguuuauucuacagguucuaauguuuuucaaacacgugcaggcuguuuaauaggggcugaacaugucaacaacucauaugagugugacauacccauuggugcagguauaugcgcuaguuaucagacucagacuaauucuccucggcgggcacguaguguagcuagucaauccaucauugccuacacuaugucacuuggugcagaaaauucaguugcuuacucuaauaacucuauugccauacccacaaauuuuacuauuaguguuaccacagaaauucuaccagugucuaugaccaagacaucaguagauuguacaauguacauuuguggugauucaacugaaugcagcaaucuuuuguugcaauauggcaguuuuuguacacaauuaaaccgugcuuuaacuggaauagcuguugaacaagacaaaaacacccaagaaguuuuugcacaagucaaacaaauuuacaaaacaccaccaauuaaagauuuuggugguuuuaauuuuucacaaauauuaccagauccaucaaaaccaagcaagaggucauuuauugaagaucuacuuuucaacaaagugacacuugcagauguuggcuucaucaaacaauauggugauugccuuggugauauugcugcuagagaccucauuugugcacaaaaguuuaacggccuuacuguuuugccaccuuugcucacagaugaaaugauugcucaauacacuucugcacuguuagcggguacaaucacuucugguuggaccuuuggugcaggugcugcauuacaaauaccauuugcuaugcaaauggcuuauagguuuaaugguauuggaguuacacagaauguucucuaugagaaccaaaaauugauugccaaccaauuuaauagugcuauuggcaaaauucaagacucacuuucuuccacagcaagugcacuuggaaaacuucaagauguggucaaccaaaaugcacaagcuuuaaacacgcuuguuaaacaacuuagcuccaauuuuggugcaauuucaaguguuuuaaaugauauccuuucacgucuugacaaaguugaggcugaagugcaaauugauagguugaucacaggcagacuucaaaguuugcagacauaugugacucaacaauuaauuagagcugcagaaaucagagcuucugcuaaucuugcugcuacuaaaaugucagaguguguacuuggacaaucaaaaagaguugauuuuuguggaaagggcuaucaucuuauguccuucccucagucagcaccucaugguguagucuucuugcaugugacuuaugucccugcacaagaaaagaacuucacaacugcuccugccauuugucaugauggaaaagcacacuuuccucgugaaggugucuuuguuucaaauggcacacacugguuuguaacacaaaggaauuuuuaugaaccacaaaucauuacuacagacaacacauuugugucugguaacugugauguuguaauaggaauugucaacaacacaguuuaugauccuuugcaaccugaauuagacucauucaaggaggaguuagauaaauauuuuaagaaucauacaucaccagauguugauuuaggugacaucucuggcauuaaugcuucaguuguaaacauucaaaaagaaauugaccgccucaaugagguugccaagaauuuaaaugaaucucucaucgaucuccaagaacuuggaaaguaugagcaguauauaaaauggccaugguacauuuggcuagguuuuauagcuggcuugauugccauaguaauggugacaauuaugcuuugcuguaugaccaguugcuguaguugucucaagggcuguuguucuuguggauccugcugcaaauuugaugaagacgacucugagccagugcucaaaggagucaaauuacauuacacauaaggacuaguuauaagacugacuagcccgaugggccucccaacgggcccuccuccccuccuugcaccgagauuaauaaaaaaaaaaaaaaaaaaaaaaaaaaaaaaaaaaaaaaaaaaaaaaaaaaaaaaaaaaaaaaaaugcaucccccccccccccccccccccccccccccccaaaggcucuuuucagagccaccagaauu

SEQ ID NO: 12731 - RNA, 4039 nt, Artificial Sequence
  SARS-CoV-2/Greece/16/2020__EPI_ISL_418265 spike protein mRNA wt (1-1273)
aggagaaagcuuaccauguuuguuuuucuuguuuuauugccacuagucucuagucaguguguuaaucuuacaaccagaacucaauuacccccugcauacacuaauucuuucacacgugguguuuauuacccugacaaaguuuucagauccucaguuuuacauucaacucaggacuuguucuuaccuuucuuuuccaauguuacuugguuccaugcuauacaugucucugggaccaaugguacuaagagguuugauaacccuguccuaccauuuaaugaugguguuuauuuugcuuccacugagaagucuaacauaauaagaggcuggauuuuugguacuacuuuagauucgaagacccagucccuacuuauuguuaauaacgcuacuaauguuguuauuaaagucugugaauuucaauuuuguaaugauccauuuuuggguguuuauuaccacaaaaacaacaaaaguuggauggaaagugaguucagaguuuauucuagugcgaauaauugcacuuuugaauaugucucucagccuuuucuuauggaccuugaaggaaaacaggguaauuucaaaaaucuuagggaauuuguguuuaagaauguugaugguuauuuuaaaauauauucuaagcacacgccuauuaauuuagugcgugaucucccucaggguuuuucggcuuuagaaccauugguagauuugccaauagguauuaacaucacuagguuucaaacuuuacuugcuuuacauagaaguuauuugacuccuggugauucuucuucagguuggacagcuggugcugcagcuuauuauguggguuaucuucaaccuaggacuuuucuauuaaaauauaaugaaaauggaaccauuacagaugcuguagacugugcacuugacccucucucagaaacaaaguguacguugaaauccuucacuguagaaaaaggaaucuaucaaacuucuaacuuuagaguccaaccaacagaaucuauuguuagauuuccuaauauuacaaacuugugcccuuuuggugaaguuuuuaacgccaccagauuugcaucuguuuaugcuuggaacaggaagagaaucagcaacuguguugcugauuauucuguccuauauaauuccgcaucauuuuccacuuuuaaguguuauggagugucuccuacuaaauuaaaugaucucugcuuuacuaaugucuaugcagauucauuuguaauuagaggugaugaagucagacaaaucgcuccagggcaaacuggaaagauugcugauuauaauuauaaauuaccagaugauuuuacaggcugcguuauagcuuggaauucuaacaaucuugauucuaagguuggugguaauuauaauuaccuguauagauuguuuaggaagucuaaucucaaaccuuuugagagagauauuucaacugaaaucuaucaggccgguagcacaccuuguaaugguguugaagguuuuaauuguuacuuuccuuuacaaucauaugguuuccaacccacuaaugguguugguuaccaaccauacagaguaguaguacuuucuuuugaacuucuacaugcaccagcaacuguuuguggaccuaaaaagucuacuaauuugguuaaaaacaaaugugucaauuucaacuucaaugguuuaacaggcacagguguucuuacugagucuaacaaaaaguuucugccuuuccaacaauuuggcagagacauugcugacacuacugaugcuguccgugauccacagacacuugagauucuugacauuacaccauguucuuuugguggugucaguguuauaacaccaggaacaaauacuucuaaccagguugcuguucuuuaucaggauguuaacugcacagaagucccuguugcuauucaugcagaucaacuuacuccuacuuggcguguuuauucuacagguucuaauguuuuucaaacacgugcaggcuguuuaauaggggcugaacaugucaacaacucauaugagugugacauacccauuggugcagguauaugcgcuaguuaucagacucagacuaauucuccucggcgggcacguaguguagcuagucaauccaucauugccuacacuaugucacuuggugcagaaaauucaguugcuuacucuaauaacucuauugccauacccacaaauuuuacuauuaguguuaccacagaaauucuaccagugucuaugaccaagacaucaguagauuguacaauguacauuuguggugauucaacugaaugcagcaaucuuuuguugcaauauggcaguuuuuguacacaauuaaaccgugcuuuaacuggaauagcuguugaacaagacaaaaacacccaagaaguuuuugcacaagucaaacaaauuuacaaaacaccaccaauuaaagauuuuggugguuuuaauuuuucacaaauauuaccagauccaucaaaaccaagcaagaggucauuuauugaagaucuacuuuucaacaaagugacacuugcagaugcuggcuucaucaaacaauauggugauugccuuggugauauugcugcuagagaccucauuugugcacaaaaguuuaacggccuuacuguuuugccaccuuugcucacagaugaaaugauugcucaauacacuucugcacuguuagcggguacaaucacuucugguuggaccuuuggugcaggugcugcauuacaaauaccauuugcuaugcaaauggcuuauagguuuaaugguauuggaguuacacagaauguucucuaugagaaccaaaaauugauugccaaccaauuuaauagugcuauuggcaaaauucaagacucacuuucuuccacagcaagugcacuuggaaaacuucaagauguggucaaccaaaaugcacaagcuuuaaacacgcuuguuaaacaacuuagcuccaauuuuggugcaauuucaaguguuuuaaaugauauccuuucacgucuugacaaaguugaggcugaagugcaaauugauagguugaucacaggcagacuucaaaguuugcagacauaugugacucaacaauuaauuagagcugcagaaaucagagcuucugcuaaucuugcugcuacuaaaaugucagaguguguacuuggacaaucaaaaagaguugauuuuuguggaaagggcuaucaucuuauguccuucccucagucagcaccucaugguguagucuucuugcaugugacuuaugucccugcacaagaaaagaacuucacaacugcuccugccauuugucaugauggaaaagcacacuuuccucgugaaggugucuuuguuucaaauggcacacacugguuuguaacacaaaggaauuuuuaugaaccacaaaucauuacuacagacaacacauuugugucugguaacugugauguuguaauaggaauugucaacaacacaguuuaugauccuuugcaaccugaauuagacucauucaaggaggaguuagauaaauauuuuaagaaucauacaucaccagauguugauuuaggugacaucucuggcauuaaugcuucaguuguaaacauucaaaaagaaauugaccgccucaaugagguugccaagaauuuaaaugaaucucucaucgaucuccaagaacuuggaaaguaugagcaguauauaaaauggccaugguacauuuggcuagguuuuauagcuggcuugauugccauaguaauggugacaauuaugcuuugcuguaugaccaguugcuguaguugucucaagggcuguuguucuuguggauccugcugcaaauuugaugaagacgacucugagccagugcucaaaggagucaaauuacauuacacauaaggacuaguuauaagacugacuagcccgaugggccucccaacgggcccuccuccccuccuugcaccgagauuaauaaaaaaaaaaaaaaaaaaaaaaaaaaaaaaaaaaaaaaaaaaaaaaaaaaaaaaaaaaaaaaaaugcaucccccccccccccccccccccccccccccccaaaggcucuuuucagagccaccagaauu

SEQ ID NO: 12732 - RNA, 4039 nt, Artificial Sequence
  SARS-CoV-2/Iceland/319/2020__EPI_ISL_417648 spike protein mRNA wt (1-1273)
aggagaaagcuuaccauguuuguuuuucuuguuuuauugccacuagucucuagucaguguguuaaucuuacaaccagaacucaauuacccccugcauacacuaauucuuucacacgugguguuuauuacccugacaaaguuuucagauccucaguuuuacauucaacucaggacuuguucuuaccuuucuuuuccaauguuacuugguuccaugcuauacaugucucugggaccaaugguacuaagagguuugauaacccuguccuaccauuuaaugaugguguuuauuuugcuuccacugagaagucuaacauaauaagaggcuggauuuuugguacuacuuuagauucgaagacccagucccuacuuauuguuaauaacgcuacuaauguuguuauuaaagucugugaauuucaauuuuguaaugauccauuuuuggguguuuauuaccacaaaaacaacaaaaguuggauggaaagugaguucagaguuuauucuagugcgaauaauugcacuuuugaauaugucucucagccuuuucuuauagaccuugaaggaaaacaggguaauuucaaaaaucuuagggaauuuguguuuaagaauauugaugguuauuuuaaaauauauucuaagcacacgccuauuaauuuagugcgugaucucccucaggguuuuucggcuuuagaaccauugguagauuugccaauagguauuaacaucacuagguuucaaacuuuacuugcuuuacauagaaguuauuugacuccuggugauucuucuucagguuggacagcuggugcugcagcuuauuauguggguuaucuucaaccuaggacuuuucuauuaaaauauaaugaaaauggaaccauuacagaugcuguagacugugcacuugacccucucucagaaacaaaguguacguugaaauccuucacuguagaaaaaggaaucuaucaaacuucuaacuuuagaguccaaccaacagaaucuauuguuagauuuccuaauauuacaaacuugugcccuuuuggugaaguuuuuaacgccaccagauuugcaucuguuuaugcuuggaacaggaagagaaucagcaacuguguugcugauuauucuguccuauauaauuccgcaucauuuuccacuuuuaaguguuauggagugucuccuacuaaauuaaaugaucucugcuuuacuaaugucuaugcagauucauuuguaauuagaggugaugaagucagacaaaucgcuccagggcaaacuggaaagauugcugauuauaauuauaaauuaccagaugauuuuacaggcugcguuauagcuuggaauucuaacaaucuugauucuaagguuggugguaauuauaauuaccuguauagauuguuuaggaagucuaaucucaaaccuuuugagagagauauuucaacugaaaucuaucaggccgguagcacaccuuguaaugguguugaagguuuuaauuguuacuuuccuuuacaaucauaugguuuccaacccacuaaugguguugguuaccaaccauacagaguaguaguacuuucuuuugaacuucuacaugcaccagcaacuguuuguggaccuaaaaagucuacuaauuugguuaaaaacaaaugugucaauuucaacuucaaugguuuaacaggcacagguguucuuacugagucuaacaaaaaguuucugccuuuccaacaauuuggcagagacauugcugacacuacugaugcuguccgugauccacagacacuugagauucuugacauuacaccauguucuuuugguggugucaguguuauaacaccaggaacaaauacuucuaaccagguugcuguucuuuaucaggguguuaacugcacagaagucccuguugcuauucaugcagaucaacuuacuccuacuuggcguguuuauucuacagguucuaauguuuuucaaacacgugcaggcuguuuaauaggggcugaacaugucaacaacucauaugagugugacauacccauuggugcagguauaugcgcuaguuaucagacucagacuaauucuccucggcgggcacguaguguagcuagucaauccaucauugccuacacuaugucacuuggugcagaaaauucaguugcuuacucuaauaacucuauugccauacccacaaauuuuacuauuaguguuaccacagaaauucuaccagugucuaugaccaagacaucaguagauuguacaauguacauuuguggugauucaacugaaugcagcaaucuuuuguugcaauauggcaguuuuuguacacaauuaaaccgugcuuuaacuggaauagcuguugaacaagacaaaaacacccaagaaguuuuugcacaagucaaacaaauuuacaaaacaccaccaauuaaagauuuuggugguuuuaauuuuucacaaauauuaccagauccaucaaaaccaagcaagaggucauuuauugaagaucuacuuuucaacaaagugacacuugcagaugcuggcuucaucaaacaauauggugauugccuuggugauauugcugcuagagaccucauuugugcacaaaaguuuaacggccuuacuguuuugccaccuuugcucacagaugaaaugauugcucaauacacuucugcacuguuagcggguacaaucacuucugguuggaccuuuggugcaggugcugcauuacaaauaccauuugcuaugcaaauggcuuauagguuuaaugguauuggaguuacacagaauguucucuaugagaaccaaaaauugauugccaaccaauuuaauagugcuauuggcaaaauucaagacucacuuucuuccacagcaagugcacuuggaaaacuucaagauguggucaaccaaaaugcacaagcuuuaaacacgcuuguuaaacaacuuagcuccaauuuuggugcaauuucaaguguuuuaaaugauauccuuucacgucuugacaaaguugaggcugaagugcaaauugauagguugaucacaggcagacuucaaaguuugcagacauaugugacucaacaauuaauuagagcugcagaaaucagagcuucugcuaaucuugcugcuacuaaaaugucagaguguguacuuggacaaucaaaaagaguugauuuuuguggaaagggcuaucaucuuauguccuucccucagucagcaccucaugguguagucuucuugcaugugacuuaugucccugcacaagaaaagaacuucacaacugcuccugccauuugucaugauggaaaagcacacuuuccucgugaaggugucuuuguuucaaauggcacacacugguuuguaacacaaaggaauuuuuaugaaccacaaaucauuacuacagacaacacauuugugucugguaacugugauguuguaauaggaauugucaacaacacaguuuaugauccuuugcaaccugaauuagacucauucaaggaggaguuagauaaauauuuuaagaaucauacaucaccagauguugauuuaggugacaucucuggcauuaaugcuucaguuguaaacauucaaaaagaaauugaccgccucaaugagguugccaagaauuuaaaugaaucucucaucgaucuccaagaacuuggaaaguaugagcaguauauaaaauggccaugguacauuuggcuagguuuuauagcuggcuugauugccauaguaauggugacaauuaugcuuugcuguaugaccaguugcuguaguugucucaagggcuguuguucuuguggauccugcugcaaauuugaugaagacgacucugagccagugcucaaaggagucaaauuacauuacacauaaggacuaguuauaagacugacuagcccgaugggccucccaacgggcccuccuccccuccuugcaccgagauuaauaaaaaaaaaaaaaaaaaaaaaaaaaaaaaaaaaaaaaaaaaaaaaaaaaaaaaaaaaaaaaaaaugcaucccccccccccccccccccccccccccccccaaaggcucuuuucagagccaccagaauu

SEQ ID NO: 12733 - RNA, 4039 nt, Artificial Sequence
  SARS-CoV-2/Congo/94/2020__EPI_ISL_417947 spike protein mRNA wt (1-1273)
aggagaaagcuuaccauguuuguuuuucuuguuuuauugccacuagucucuagucaguguguuaaucuuacaaccagaacucaauuacccccugcauacacuaauucuuucacacgugguguuuauuacccugacaaaguuuucagauccucaguuuuacauucaacucaggacuuguucuuaccuuucuuuuccaauguuacuugguuccaugcuauacaugucucugggaccaaugguacuaagagguuugauaacccuguccuaccauuuaaugaugguguuuauuuugcuuccacugagaagucuaacauaauaagaggcuggauuuuugguacuacuuuagauucgaagacccagucccuacuuauuguuaauaacgcuacuaauguuguuauuaaagucugugaauuucaauuuuguaaugauccauuuuuggguguuuauuaccacaaaaacaacaaaaguuggauggaaagugaguucagaguuuauucuagugcgaauaauugcacuuuugaauaugucucucagccuuuucuuauggaccuugaaggaaaacaggguaauuucaaaaaucuuagggaauuuguguuuaagaauauugaugguuauuuuaaaauauauucuaagcacacgccuauuaauuuagugcgugaucucccucaggguuuuucggcuuuagaaccauugguagauuugccaauagguauuaacaucacuagguuucaaacuuuacuugcuuuacauagaaguuauuugacuccuggugauucuucuucagguuggacagcuggugcugcagcuuauuauguggguuaucuucaaccuaggacuuuucuauuaaaauauaaugaaaauggaaccauuacagaugcuguagacugugcacuugacccucucucagaaacaaaguguacguugaaauccuucacuguagaaaaaggaaucuaucaaacuucuaacuuuagaguccaaccaacagaaucuauuguuagauuuccuaauauuacaaacuugugcccuuuuggugaaguuuuuaacgccaccagauuugcaucuguuuaugcuuggaacaggaagagaaucagcaacuguguugcugauuauucuguccuauauaauuccgcaucauuuuccacuuuuaaguguuauggagugucuccuacuaaauuaaaugaucucugcuuuacuaaugucuaugcagauucauuuguaauuagaggugaugaagucagacaaaucgcuccagggcaaacuggaaagauugcugauuauaauuauaaauuaccagaugauuuuacaggcugcguuauagcuuggaauucuaacaaucuugauucuaagguuggugguaauuauaauuaccuguauagauuguuuaggaagucuaaucucaaaccuuuugagagagauauuucaacugaaaucuaucaggccgguagcacaccuuguaaugguguugaagguuuuaauuguuacuuuccuuuacaaucauaugguuuccaacccacuaaugguguugguuaccaaccauacagaguaguaguacuuucuuuugaacuucuacaugcaccagcaacuguuuguggaccuaaaaagucuacuaauuugguuaaaaacaaaugugucaauuucaacuucaaugguuuaacaggcacagguguucuuacugagucuaacaaaaaguuucugccuuuccaacaauuuggcagagacauugcugacacuacugaugcuguccgugauccacagacacuugagauucuugacauuacaccauguucuuuugguggugucaguguuauaacaccaggaacaaauacuucuaaccagguugcuguucuuuaucaggguguuaacugcacagaagucccuguugcuauucaugcagaucaacuuacuccuacuuggcguguuuauucuacagguucuaauguuuuucaaacacgugcaggcuguuuaauaggggcugaacaugucaacaacucauaugagugugacauacccauuggugcagguauaugcgcuaguuaucagacucagacuaauucuccucggcgggcacguaguguagcuagucaauccaucauugccuacacuaugucacuuggugcagaaaauucaguugcuuacucuaauaacucuauugccauacccacaaauuuuacuauuaguguuaccacagaaauucuaccagugucuaugaccaagacaucaguagauuguacaauguacauuuguggugauucaacugaaugcagcaaucuuuuguugcaauauggcaguuuuuguacacaauuaaaccgugcuuuaacuggaauagcuguugaacaagacaaaaacacccaagaaguuuuugcacaagucaaacaaauuuacaaaacaccaccaauuaaagauuuuggugguuuuaauuuuucacaaauauuaccagauccaucaaaaccaagcaagaggucauuuauugaagauauacuuuucaacaaagugacacuugcagaugcuggcuucaucaaacaauauggugauugccuuggugauauugcugcuagagaccucauuugugcacaaaaguuuaacggccuuacuguuuugccaccuuugcucacagaugaaaugauugcucaauacacuucugcacuguuagcggguacaaucacuucugguuggaccuuuggugcaggugcugcauuacaaauaccauuugcuaugcaaauggcuuauagguuuaaugguauuggaguuacacagaauguucucuaugagaaccaaaaauugauugccaaccaauuuaauagugcuauuggcaaaauucaagacucacuuucuuccacagcaagugcacuuggaaaacuucaagauguggucaaccaaaaugcacaagcuuuaaacacgcuuguuaaacaacuuagcuccaauuuuggugcaauuucaaguguuuuaaaugauauccuuucacgucuugacaaaguugaggcugaagugcaaauugauagguugaucacaggcagacuucaaaguuugcagacauaugugacucaacaauuaauuagagcugcagaaaucagagcuucugcuaaucuugcugcuacuaaaaugucagaguguguacuuggacaaucaaaaagaguugauuuuuguggaaagggcuaucaucuuauguccuucccucagucagcaccucaugguguagucuucuugcaugugacuuaugucccugcacaagaaaagaacuucacaacugcuccugccauuugucaugauggaaaagcacacuuuccucgugaaggugucuuuguuucaaauggcacacacugguuuguaacacaaaggaauuuuuaugaaccacaaaucauuacuacagacaacacauuugugucugguaacugugauguuguaauaggaauugucaacaacacaguuuaugauccuuugcaaccugaauuagacucauucaaggaggaguuagauaaauauuuuaagaaucauacaucaccagauguugauuuaggugacaucucuggcauuaaugcuucaguuguaaacauucaaaaagaaauugaccgccucaaugagguugccaagaauuuaaaugaaucucucaucgaucuccaagaacuuggaaaguaugagcaguauauaaaauggccaugguacauuuggcuagguuuuauagcuggcuugauugccauaguaauggugacaauuaugcuuugcuguaugaccaguugcuguaguugucucaagggcuguuguucuuguggauccugcugcaaauuugaugaagacgacucugagccagugcucaaaggagucaaauuacauuacacauaaggacuaguuauaagacugacuagcccgaugggccucccaacgggcccuccuccccuccuugcaccgagauuaauaaaaaaaaaaaaaaaaaaaaaaaaaaaaaaaaaaaaaaaaaaaaaaaaaaaaaaaaaaaaaaaaugcaucccccccccccccccccccccccccccccccaaaggcucuuuucagagccaccagaauu

SEQ ID NO: 12734 - RNA, 4039 nt, Artificial Sequence
  SARS-CoV-2/Congo/158/2020__EPI_ISL_417950 spike protein mRNA wt (1-1273)
aggagaaagcuuaccauguuuguuuuucuuguuuuauugccacuagucucuagucaguguguuaaucuuacaaccagaacucaauuacccccugcauacacuaauucuuucacacgugguguuuauuacccugacaaaguuuucagauccucaguuuuacauucaacucaggacuuguucuuaccuuucuuuuccaauguuacuugguuccaugcuauacaugucucugggaccaaugguacuaagagguuugauaacccuguccuaccauuuaaugaugguguuuauuuugcuuccacugagaagucuaacauaauaagaggcuggauuuuugguacuacuuuagauucgaagacccagucccuacuuauuguuaauaacgcuacuaauguuguuauuaaagucugugaauuucaauuuuguaaugauccauuuuuggguguuuauuaccacaaaaacaacaaaaguuggauggaaagugaguucagaguuuauucuagugcgaauaauugcacuuuugaauaugucucucagccuuuucuuauggaccuugaaggaaaacaggguaauuucaaaaaucuuagggaauuuguguuuaagaauauugaugguuauuuuaaaauauauucuaagcacacgccuauuaauuuagugcgugaucucccucaggguuuuucggcuuuagaaccauugguagauuugccaauagguauuaacaucacuagguuucaaacuuuacuugcuuuacauagaaguuauuugacuccuggugauucuucuucagguuggacagcuggugcugcagcuuauuauguggguuaucuucaaccuaggacuuuucuauuaaaauauaaugaaaauggaaccauuacagaugcuguagacugugcacuugacccucucucagaaacaaaguguacguugaaauccuucacuguagaaaaaggaaucuaucaaacuucuaacuuuagaguccaaccaacagaaucuauuguuagauuuccuaauauuacaaacuugugcccuuuuggugaaguuuuuaacgccaccagauuugcaucuguuuaugcuuggaacaggaagagaaucagcaacuguguugcugauuauucuguccuauauaauuccgcaucauuuuccacuuuuaaguguuauggagugucuccuacuaaauuaaaugaucucugcuuuacuaaugucuaugcagauucauuuguaauuagaggugaugaagucagacaaaucgcuccagggcaaacuggaaagauugcugauuauaauuauaaauuaccagaugauuuuacaggcugcguuauagcuuggaauucuaacaaucuugauucuaagguuggugguaauuauaauuaccuguauagauuguuuaggaagucuaaucucaaaccuuuugagagagauauuucaacugaaaucuaucaggccgguagcacaccuuguaaugguguugaagguuuuaauuguuacuuuccuuuacaaucauaugguuuccaacccacuaaugguguugguuaccaaccauacagaguaguaguacuuucuuuugaacuucuacaugcaccagcaacuguuuguggaccuaaaaagucuacuaauuugguuaaaaacaaaugugucaauuucaacuucaaugguuuaacaggcacagguguucuuacugagucuaacaaaaaguuucugccuuuccaacaauuuggcagagacauugcugacacuacugaugcuguccgugauccacagacacuugagauucuugacauuacaccauguucuuuugguggugucaguguuauaacaccaggaacaaauacuucuaaccagguugcuguucuuuaucaggauguuaacugcacagaagucccuguugcuauucaugcagaucaacuuacuccuacuuggcguguuuauucuacagguucuaauguuuuucaaacacgugcaggcuguuuaauaggggcugaacaugucaacaacucauaugagugugacauacccauuggugcagguauaugcgcuaguuaucagacucagacuaauucuccucggcgggcacguaguguagcuagucaauccaucauugccuacacuaugucacuuggugcagaaaauucaguugcuuacucuaauaacucuauugccauacccacaaauuuuacuauuaguguuaccacagaaauucuaccagugucuaugaccaagacaucaguagauuguacaauguacauuuguggugauucaacugaaugcagcaaucuuuuguugcaauauggcaguuuuuguacacaauuaaaccgugcuuuaacuggaauagcuguugaacaagacaaaaacacccaagaaguuuuugcacaagucaaacaaauuuacaaaacaccaccaauuaaagauuuuggugguuuuaauuuuucacaaauauuaccagauccaucaaaaccaagcaagaggucauuuauugaagaucuacuuuucaacaaagugacacuugcagaugcuggcuucaucaaacaauauggugauugccuuggugauauugcugcuagagaccucauuugugcacaaaaguuuaacggccuuacuguuuugccaccuuugcucacagaugaaaugauugcucaauacacuucugcacuguuagcggguacaaucacuucugguuggaccuuuggugcaggugcugcauuacaaauaccauuugcuaugcaaauggcuuauagguuuaaugguauuggaguuacacagaauguucucuaugagaaccaaaaauugauugccaaccaauuuaauagugcuauuggcaaaauucaagacucacuuucuuccacagcaagugcacuuggaaaacuucaagauguggucaaccaaaaugcacaagcuuuaaacacgcuuguuaaacaacuuagcuccaauuuuggugcaauuucaaguguuuuaaaugauauccuuucacgucuugacaaaguugaggcugaagugcaaauugauagguugaucacaggcagacuucaaaguuugcagacauaugugacucaacaauuaauuagagcugcagaaaucagagcuucugcuaaucuugcugcuacuaaaaugucagaguguguacuuggacaaucaaaaagaguugauuuuuguggaaagggcuaucaucuuauguccuucccucagucagcaccucaugguguagucuucuugcaugugacuuaugucccugcacaagaaaagaacuucacaacugcuccugccauuugucaugauggaaaagcacacuuuccucgugaaggugucuuuguuucaaauggcacacacugguuuguaacacaaaggaauuuuuaugaaccacaaaucauuacuacagacaacacauuuuugucugguaacugugauguuguaauaggaauugucaacaacacaguuuaugauccuuugcaaccugaauuagacucauucaaggaggaguuagauaaauauuuuaagaaucauacaucaccagauguugauuuaggugacaucucuggcauuaaugcuucaguuguaaacauucaaaaagaaauugaccgccucaaugagguugccaagaauuuaaaugaaucucucaucgaucuccaagaacuuggaaaguaugagcaguauauaaaauggccaugguacauuuggcuagguuuuauagcuggcuugauugccauaguaauggugacaauuaugcuuugcuguaugaccaguugcuguaguugucucaagggcuguuguucuuguggauccugcugcaaauuugaugaagacgacucugagccagugcucaaaggagucaaauuacauuacacauaaggacuaguuauaagacugacuagcccgaugggccucccaacgggcccuccuccccuccuugcaccgagauuaauaaaaaaaaaaaaaaaaaaaaaaaaaaaaaaaaaaaaaaaaaaaaaaaaaaaaaaaaaaaaaaaaugcaucccccccccccccccccccccccccccccccaaaggcucuuuucagagccaccagaauu

SEQ ID NO: 12735 - RNA, 4039 nt, Artificial Sequence
  SARS-CoV-2/USA/UT-00034/2020__EPI_ISL_417977 spike protein mRNA wt (1-1273)
aggagaaagcuuaccauguuuguuuuucuuguuuuauugccacuagucucuagucaguguguuaaucuuacaaccagaacucaauuacccccugcauacacuaauucuuucacacgugguguuuauuacccugacaaaguuuucagauccucaguuuuacauucaacucaggacuuguucuuaccuuucuuuuccaauguuacuugguuccaugcuauacaugucucugggaccaaugguacuaagagguuugauaacccuguccuaccauuuaaugaugguguuuauuuugcuuccacugagaagucuaacauaauaagaggcuggauuuuugguacuacuuuagauucgaagacccagucccuacuuauuguuaauaacgcuacuaauguuguuauuaaagucugugaauuucaauuuuguaaugauccauuuuuggguguuuauuacuacaaaaacaacaaaaguuggauggaaagugaguucagaguuuauucuagugcgaauaauugcacuuuugaauaugucucucagccuuuucuuauggaccuugaaggaaaacaggguaauuucaaaaaucuuagggaauuuguguuuaagaauauugaugguuauuuuaaaauauauucuaagcacacgccuauuaauuuagugcgugaucucccucaggguuuuucggcuuuagaaccauugguagauuugccaauagguauuaacaucacuagguuucaaacuuuacuugcuuuacauagaaguuauuugacuccuggugauucuucuucagguuggacagcuggugcugcagcuuauuauguggguuaucuucaaccuaggacuuuucuauuaaaauauaaugaaaauggaaccauuacagaugcuguagacugugcacuugacccucucucagaaacaaaguguacguugaaauccuucacuguagaaaaaggaaucuaucaaacuucuaacuuuagaguccaaccaacagaaucuauuguuagauuuccuaauauuacaaacuugugcccuuuuggugaaguuuuuaacgccaccagauuugcaucuguuuaugcuuggaacaggaagagaaucagcaacuguguugcugauuauucuguccuauauaauuccgcaucauuuuccacuuuuaaguguuauggagugucuccuacuaaauuaaaugaucucugcuuuacuaaugucuaugcagauucauuuguaauuagaggugaugaagucagacaaaucgcuccagggcaaacuggaaagauugcugauuauaauuauaaauuaccagaugauuuuacaggcugcguuauagcuuggaauucuaacaaucuugauucuaagguuggugguaauuauaauuaccuguauagauuguuuaggaagucuaaucucaaaccuuuugagagagauauuucaacugaaaucuaucaggccgguagcacaccuuguaaugguguugaagguuuuaauuguuacuuuccuuuacaaucauaugguuuccaacccacuaaugguguugguuaccaaccauacagaguaguaguacuuucuuuugaacuucuacaugcaccagcaacuguuuguggaccuaaaaagucuacuaauuugguuaaaaacaaaugugucaauuucaacuucaaugguuuaacaggcacagguguucuuacugagucuaacaaaaaguuucugccuuuccaacaauuuggcagagacauugcugacacuacugaugcuguccgugauccacagacacuugagauucuugacauuacaccauguucuuuugguggugucaguguuauaacaccaggaacaaauacuucuaaccagguugcuguucuuuaucaggguguuaacugcacagaagucccuguugcuauucaugcagaucaacuuacuccuacuuggcguguuuauucuacagguucuaauguuuuucaaacacgugcaggcuguuuaauaggggcugaacaugucaacaacucauaugagugugacauacccauuggugcagguauaugcgcuaguuaucagacucagacuaauucuccucggcgggcacguaguguagcuagucaauccaucauugccuacacuaugucacuuggugcagaaaauucaguugcuuacucuaauaacucuauugccauacccacaaauuuuacuauuaguguuaccacagaaauucuaccagugucuaugaccaagacaucaguagauuguacaauguacauuuguggugauucaacugaaugcagcaaucuuuuguugcaauauggcaguuuuuguacacaauuaaaccgugcuuuaacuggaauagcuguugaacaagacaaaaacacccaagaaguuuuugcacaagucaaacaaauuuacaaaacaccaccaauuaaagauuuuggugguuuuaauuuuucacaaauauuaccagauccaucaaaaccaagcaagaggucauuuauugaagaucuacuuuucaacaaagugacacuugcagaugcuggcuucaucaaacaauauggugauugccuuggugauauugcugcuagagaccucauuugugcacaaaaguuuaacggccuuacuguuuugccaccuuugcucacagaugaaaugauugcucaauacacuucugcacuguuagcggguacaaucacuucugguuggaccuuuggugcaggugcugcauuacaaauaccauuugcuaugcaaauggcuuauagguuuaaugguauuggaguuacacagaauguucucuaugagaaccaaaaauugauugccaaccaauuuaauagugcuauuggcaaaauucaagacucacuuucuuccacagcaagugcacuuggaaaacuucaagauguggucaaccaaaaugcacaagcuuuaaacacgcuuguuaaacaacuuagcuccaauuuuggugcaauuucaaguguuuuaaaugauauccuuucacgucuugacaaaguugaggcugaagugcaaauugauagguugaucacaggcagacuucaaaguuugcagacauaugugacucaacaauuaauuagagcugcagaaaucagagcuucugcuaaucuugcugcuacuaaaaugucagaguguguacuuggacaaucaaaaagaguugauuuuuguggaaagggcuaucaucuuauguccuucccucagucagcaccucaugguguagucuucuugcaugugacuuaugucccugcacaagaaaagaacuucacaacugcuccugccauuugucaugauggaaaagcacacuuuccucgugaaggugucuuuguuucaaauggcacacacugguuuguaacacaaaggaauuuuuaugaaccacaaaucauuacuacagacaacacauuugugucugguaacugugauguuguaauaggaauugucaacaacacaguuuaugauccuuugcaaccugaauuagacucauucaaggaggaguuagauaaauauuuuaagaaucauacaucaccagauguugauuuaggugacaucucuggcauuaaugcuucaguuguaaacauucaaaaagaaauugaccgccucaaugagguugccaagaauuuaaaugaaucucucaucgaucuccaagaacuuggaaaguaugagcaguauauaaaauggccaugguacauuuggcuagguuuuauagcuggcuugauugccauaguaauggugacaauuaugcuuugcuguaugaccaguugcuguaguugucucaagggcuguuguucuuguggauccugcugcaaauuugaugaagacgacucugagccagugcucaaaggagucaaauuacauuacacauaaggacuaguuauaagacugacuagcccgaugggccucccaacgggcccuccuccccuccuugcaccgagauuaauaaaaaaaaaaaaaaaaaaaaaaaaaaaaaaaaaaaaaaaaaaaaaaaaaaaaaaaaaaaaaaaaugcaucccccccccccccccccccccccccccccccaaaggcucuuuucagagccaccagaauu

SEQ ID NO: 12736 - RNA, 4039 nt, Artificial Sequence
  SARS-CoV-2/USA/UT-00033/2020__EPI_ISL_417976 spike protein mRNA wt (1-1273)
aggagaaagcuuaccauguuuguuuuucuuguuuuauugccacuagucucuagucaguguguuaaucuuacaaccagaacucaauuacccccugcauacacuaauucuuucacacgugguguuuauuacccugacaaaguuuucagauccucaguuuuacauucaacucaggacuuguucuuaccuuucuuuuccaauguuacuugguuccaugcuauacaugucucugggaccaaugguacuaagagguuugauaacccuguccuaccauuuaaugaugguguuuauuuugcuuccacugagaagucuaacauaauaagaggcuggauuuuugguacuacuuuagauucgaagacccagucccuacuuauuguuaauaacgcuacuaauguuguuauuaaagucugugaauuucaauuuuguaaugauccauuuuuggguguuuauuaccacaaaaacaacaaaaguuggauggaaagugaguucagaguuuauucuagugcgaauaauugcacuuuugaauaugucucucagccuuuucuuauggaccuugaaggaaaacaggguaauuucaaaaaucuuagggaauuuguguuuaagaauauugaugguuauuuuaaaauauauucuaagcacacgccuauuaauuuagugcgugaucucccucaggguuuuucggcuuuagaaccauugguagauuugccaauagguauuaacaucacuagguuucaaacuuuacuugcuuuacauagaaguuauuugacuccuggugauucuucuucagguuugacagcuggugcugcagcuuauuauguggguuaucuucaaccuaggacuuuucuauuaaaauauaaugaaaauggaaccauuacagaugcuguagacugugcacuugacccucucucagaaacaaaguguacguugaaauccuucacuguagaaaaaggaaucuaucaaacuucuaacuuuagaguccaaccaacagaaucuauuguuagauuuccuaauauuacaaacuugugcccuuuuggugaaguuuuuaacgccaccagauuugcaucuguuuaugcuuggaacaggaagagaaucagcaacuguguugcugauuauucuguccuauauaauuccgcaucauuuuccacuuuuaaguguuauggagugucuccuacuaaauuaaaugaucucugcuuuacuaaugucuaugcagauucauuuguaauuagaggugaugaagucagacaaaucgcuccagggcaaacuggaaagauugcugauuauaauuauaaauuaccagaugauuuuacaggcugcguuauagcuuggaauucuaacaaucuugauucuaagguuggugguaauuauaauuaccuguauagauuguuuaggaagucuaaucucaaaccuuuugagagagauauuucaacugaaaucuaucaggccgguagcacaccuuguaaugguguugaagguuuuaauuguuacuuuccuuuacaaucauaugguuuccaacccacuaaugguguugguuaccaaccauacagaguaguaguacuuucuuuugaacuucuacaugcaccagcaacuguuuguggaccuaaaaagucuacuaauuugguuaaaaacaaaugugucaauuucaacuucaaugguuuaacaggcacagguguucuuacugagucuaacaaaaaguuucugccuuuccaacaauuuggcagagacauugcugacacuacugaugcuguccgugauccacagacacuugagauucuugacauuacaccauguucuuuugguggugucaguguuauaacaccaggaacaaauacuucuaaccagguugcuguucuuuaucaggguguuaacugcacagaagucccuguugcuauucaugcagaucaacuuacuccuacuuggcguguuuauucuacagguucuaauguuuuucaaacacgugcaggcuguuuaauaggggcugaacaugucaacaacucauaugagugugacauacccauuggugcagguauaugcgcuaguuaucagacucagacuaauucuccucggcgggcacguaguguagcuagucaauccaucauugccuacacuaugucacuuggugcagaaaauucaguugcuuacucuaauaacucuauugccauacccacaaauuuuacuauuaguguuaccacagaaauucuaccagugucuaugaccaagacaucaguagauuguacaauguacauuuguggugauucaacugaaugcagcaaucuuuuguugcaauauggcaguuuuuguacacaauuaaaccgugcuuuaacuggaauagcuguugaacaagacaaaaacacccaagaaguuuuugcacaagucaaacaaauuuacaaaacaccaccaauuaaagauuuuggugguuuuaauuuuucacaaauauuaccagauccaucaaaaccaagcaagaggucauuuauugaagaucuacuuuucaacaaagugacacuugcagaugcuggcuucaucaaacaauauggugauugccuuggugauauugcugcuagagaccucauuugugcacaaaaguuuaacggccuuacuguuuugccaccuuugcucacagaugaaaugauugcucaauacacuucugcacuguuagcggguacaaucacuucugguuggaccuuuggugcaggugcugcauuacaaauaccauuugcuaugcaaauggcuuauagguuuaaugguauuggaguuacacagaauguucucuaugagaaccaaaaauugauugccaaccaauuuaauagugcuauuggcaaaauucaagacucacuuucuuccacagcaagugcacuuggaaaacuucaagauguggucaaccaaaaugcacaagcuuuaaacacgcuuguuaaacaacuuagcuccaauuuuggugcaauuucaaguguuuuaaaugauauccuuucacgucuugacaaaguugaggcugaagugcaaauugauagguugaucacaggcagacuucaaaguuugcagacauaugugacucaacaauuaauuagagcugcagaaaucagagcuucugcuaaucuugcugcuacuaaaaugucagaguguguacuuggacaaucaaaaagaguugauuuuuguggaaagggcuaucaucuuauguccuucccucagucagcaccucaugguguagucuucuugcaugugacuuaugucccugcacaagaaaagaacuucacaacugcuccugccauuugucaugauggaaaagcacacuuuccucgugaaggugucuuuguuucaaauggcacacacugguuuguaacacaaaggaauuuuuaugaaccacaaaucauuacuacagacaacacauuugugucugguaacugugauguuguaauaggaauugucaacaacacaguuuaugauccuuugcaaccugaauuagacucauucaaggaggaguuagauaaauauuuuaagaaucauacaucaccagauguugauuuaggugacaucucuggcauuaaugcuucaguuguaaacauucaaaaagaaauugaccgccucaaugagguugccaagaauuuaaaugaaucucucaucgaucuccaagaacuuggaaaguaugagcaguauauaaaauggccaugguacauuuggcuagguuuuauagcuggcuugauugccauaguaauggugacaauuaugcuuugcuguaugaccaguugcuguaguugucucaagggcuguuguucuuguggauccugcugcaaauuugaugaagacgacucugagccagugcucaaaggagucaaauuacauuacacauaaggacuaguuauaagacugacuagcccgaugggccucccaacgggcccuccuccccuccuugcaccgagauuaauaaaaaaaaaaaaaaaaaaaaaaaaaaaaaaaaaaaaaaaaaaaaaaaaaaaaaaaaaaaaaaaaugcaucccccccccccccccccccccccccccccccaaaggcucuuuucagagccaccagaauu

SEQ ID NO: 12737 - RNA, 4039 nt, Artificial Sequence
  SARS-CoV-2/USA/WI-13/2020__EPI_ISL_417516 spike protein mRNA wt (1-1273)
aggagaaagcuuaccauguuuguuuuucuuguuuuauugccacuagucucuagucaguguguuaaucuuacaaccagaacucaauuacccccugcauacacuaauucuuucacacgugguguuuauuacccugacaaaguuuucagauccucaguuuuacauucaacucaggacuuguucuuaccuuucuuuuccaauguuacuugguuccaugcuauacaugucucugggaccaaugguacuaagagguuugauaacccuguccuaccauuuaaugaugguguuuauuuugcuuccacugagaagucuaacauaauaagaggcuggauuuuugguacuacuuuagauucgaagacccagucccuacuuauuguuaauaacgcuacuaauguuguuauuaaagucugugaauuucaauuuuguaaugauccauuuuuggguguuuauuaccacaaaaacaacaaaaguuggauggaaagugaguucagaguuuauucuagugcgaauaauugcacuuuugaauaugucucucagccuuuucuuauggaccuugaaggaaaacaggguaauuucaaaaaucuuagggaauuuguguuuaagaauauugaugguuauuuuaaaauauauucuaagcacacgccuauuaauuuagugcgugaucucccucaggguuuuucggcuuuagaaccauugguagauuugccaauagguauuaacaucacuagguuucaaacuuuacuugcuuuacauagaaguuauuugacuccuggugauucuucuucagguuggacagcuggugcugcagcuuauuauguggguuaucuucaaccuaggacuuuucuauuaaaauauaaugaaaauggaaccauuacagaugcuguagacugugcacuugacccucucucagaaacaaaguguacguugaaauccuucacuguagaaaaaggaaucuaucaaacuucuaacuuuagaguccuaccaacagaaucuauuguuagauuuccuaauauuacaaacuugugcccuuuuggugaaguuuuuaacgccaccagauuugcaucuguuuaugcuuggaacaggaagagaaucagcaacuguguugcugauuauucuguccuauauaauuccgcaucauuuuccacuuuuaaguguuauggagugucuccuacuaaauuaaaugaucucugcuuuacuaaugucuaugcagauucauuuguaauuagaggugaugaagucagacaaaucgcuccagggcaaacuggaaagauugcugauuauaauuauaaauuaccagaugauuuuacaggcugcguuauagcuuggaauucuaacaaucuugauucuaagguuggugguaauuauaauuaccuguauagauuguuuaggaagucuaaucucaaaccuuuugagagagauauuucaacugaaaucuaucaggccgguagcacaccuuguaaugguguugaagguuuuaauuguuacuuuccuuuacaaucauaugguuuccaacccacuaaugguguugguuaccaaccauacagaguaguaguacuuucuuuugaacuucuacaugcaccagcaacuguuuguggaccuaaaaagucuacuaauuugguuaaaaacaaaugugucaauuucaacuucaaugguuuaacaggcacagguguucuuacugagucuaacaaaaaguuucugccuuuccaacaauuuggcagagacauugcugacacuacugaugcuguccgugauccacagacacuugagauucuugacauuacaccauguucuuuugguggugucaguguuauaacaccaggaacaaauacuucuaaccagguugcuguucuuuaucaggguguuaacugcacagaagucccuguugcuauucaugcagaucaacuuacuccuacuuggcguguuuauucuacagguucuaauguuuuucaaacacgugcaggcuguuuaauaggggcugaacaugucaacaacucauaugagugugacauacccauuggugcagguauaugcgcuaguuaucagacucagacuaauucuccucggcgggcacguaguguagcuagucaauccaucauugccuacacuaugucacuuggugcagaaaauucaguugcuuacucuaauaacucuauugccauacccacaaauuuuacuauuaguguuaccacagaaauucuaccagugucuaugaccaagacaucaguagauuguacaauguacauuuguggugauucaacugaaugcagcaaucuuuuguugcaauauggcaguuuuuguacacaauuaaaccgugcuuuaacuggaauagcuguugaacaagacaaaaacacccaagaaguuuuugcacaagucaaacaaauuuacaaaacaccaccaauuaaagauuuuggugguuuuaauuuuucacaaauauuaccagauccaucaaaaccaagcaagaggucauuuauugaagaucuacuuuucaacaaagugacacuugcagaugcuggcuucaucaaacaauauggugauugccuuggugauauugcugcuagagaccucauuugugcacaaaaguuuaacggccuuacuguuuugccaccuuugcucacagaugaaaugauugcucaauacacuucugcacuguuagcggguacaaucacuucugguuggaccuuuggugcaggugcugcauuacaaauaccauuugcuaugcaaauggcuuauagguuuaaugguauuggaguuacacagaauguucucuaugagaaccaaaaauugauugccaaccaauuuaauagugcuauuggcaaaauucaagacucacuuucuuccacagcaagugcacuuggaaaacuucaagauguggucaaccaaaaugcacaagcuuuaaacacgcuuguuaaacaacuuagcuccaauuuuggugcaauuucaaguguuuuaaaugauauccuuucacgucuugacaaaguugaggcugaagugcaaauugauagguugaucacaggcagacuucaaaguuugcagacauaugugacucaacaauuaauuagagcugcagaaaucagagcuucugcuaaucuugcugcuacuaaaaugucagaguguguacuuggacaaucaaaaagaguugauuuuuguggaaagggcuaucaucuuauguccuucccucagucagcaccucaugguguagucuucuugcaugugacuuaugucccugcacaagaaaagaacuucacaacugcuccugccauuugucaugauggaaaagcacacuuuccucgugaaggugucuuuguuucaaauggcacacacugguuuguaacacaaaggaauuuuuaugaaccacaaaucauuacuacagacaacacauuugugucugguaacugugauguuguaauaggaauugucaacaacacaguuuaugauccuuugcaaccugaauuagacucauucaaggaggaguuagauaaauauuuuaagaaucauacaucaccagauguugauuuaggugacaucucuggcauuaaugcuucaguuguaaacauucaaaaagaaauugaccgccucaaugagguugccaagaauuuaaaugaaucucucaucgaucuccaagaacuuggaaaguaugagcaguauauaaaauggccaugguacauuuggcuagguuuuauagcuggcuugauugccauaguaauggugacaauuaugcuuugcuguaugaccaguugcuguaguugucucaagggcuguuguucuuguggauccugcugcaaauuugaugaagacgacucugagccagugcucaaaggagucaaauuacauuacacauaaggacuaguuauaagacugacuagcccgaugggccucccaacgggcccuccuccccuccuugcaccgagauuaauaaaaaaaaaaaaaaaaaaaaaaaaaaaaaaaaaaaaaaaaaaaaaaaaaaaaaaaaaaaaaaaaugcaucccccccccccccccccccccccccccccccaaaggcucuuuucagagccaccagaauu

SEQ ID NO: 12738 - RNA, 4036 nt, Artificial Sequence
  SARS-CoV-2/India/1-27/2020__EPI_ISL_413522 spike protein mRNA wt (1-1272)
aggagaaagcuuaccauguuuguuuuucuuguuuuauugccacuagucucuagucaguguguuaaucuuacaaccagaacucaauuacccccugcauacacuaauucuuucacacgugguguuuauuacccugacaaaguuuucagauccucaguuuuacauucaacucaggacuuguucuuaccuuucuuuuccaauguuacuugguuccaugcuauacaugucucugggaccaaugguacuaagagguuugauaacccuguccuaccauuuaaugaugguguuuauuuugcuuccacugagaagucuaacauaauaagaggcuggauuuuugguacuacuuuagauucgaagacccagucccuacuuauuguuaauaacgcuacuaauguuguuauuaaagucugugaauuucaauuuuguaaugauccauuuuuggguguuuaccacaaaaacaacaaaaguuggauggaaagugaguucagaguuuauucuagugcgaauaauugcacuuuugaauaugucucucagccuuuucuuauggaccuugaaggaaaacaggguaauuucaaaaaucuuagggaauuuguguuuaagaauauugaugguuauuuuaaaauauauucuaagcacacgccuauuaauuuagugcgugaucucccucaggguuuuucggcuuuagaaccauugguagauuugccaauagguauuaacaucacuagguuucaaacuuuacuugcuuuacauagaaguuauuugacuccuggugauucuucuucagguuggacagcuggugcugcagcuuauuauguggguuaucuucaaccuaggacuuuucuauuaaaauauaaugaaaauggaaccauuacagaugcuguagacugugcacuugacccucucucagaaacaaaguguacguugaaauccuucacuguagaaaaaggaaucuaucaaacuucuaacuuuagaguccaaccaacagaaucuauuguuagauuuccuaauauuacaaacuugugcccuuuuggugaaguuuuuaacgccaccagauuugcaucuguuuaugcuuggaacaggaagagaaucagcaacuguguugcugauuauucuguccuauauaauuccgcaucauuuuccacuuuuaaguguuauggagugucuccuacuaaauuaaaugaucucugcuuuacuaaugucuaugcagauucauuuguaauuagaggugaugaagucauacaaaucgcuccagggcaaacuggaaagauugcugauuauaauuauaaauuaccagaugauuuuacaggcugcguuauagcuuggaauucuaacaaucuugauucuaagguuggugguaauuauaauuaccuguauagauuguuuaggaagucuaaucucaaaccuuuugagagagauauuucaacugaaaucuaucaggccgguagcacaccuuguaaugguguugaagguuuuaauuguuacuuuccuuuacaaucauaugguuuccaacccacuaaugguguugguuaccaaccauacagaguaguaguacuuucuuuugaacuucuacaugcaccagcaacuguuuguggaccuaaaaagucuacuaauuugguuaaaaacaaaugugucaauuucaacuucaaugguuuaacaggcacagguguucuuacugagucuaacaaaaaguuucugccuuuccaacaauuuggcagagacauugcugacacuacugaugcuguccgugauccacagacacuugagauucuugacauuacaccauguucuuuugguggugucaguguuauaacaccaggaacaaauacuucuaaccagguugcuguucuuuaucaggauguuaacugcacagaagucccuguugcuauucaugcagaucaacuuacuccuacuuggcguguuuauucuacagguucuaauguuuuucaaacacgugcaggcuguuuaauaggggcugaacaugucaacaacucauaugagugugacauacccauuggugcagguauaugcgcuaguuaucagacucagacuaauucuccucggcgggcacguaguguagcuagucaauccaucauugccuacacuaugucacuuggugcagaaaauucaguugcuuacucuaauaacucuauugccauacccacaaauuuuacuauuaguguuaccacagaaauucuaccagugucuaugaccaagacaucaguagauuguacaauguacauuuguggugauucaacugaaugcagcaaucuuuuguugcaauauggcaguuuuuguacacaauuaaaccgugcuuuaacuggaauagcuguugaacaagacaaaaacacccaagaaguuuuugcacaagucaaacaaauuuacaaaacaccaccaauuaaagauuuuggugguuuuaauuuuucacaaauauuaccagauccaucaaaaccaagcaagaggucauuuauugaagaucuacuuuucaacaaagugacacuugcagaugcuggcuucaucaaacaauauggugauugccuuggugauauugcugcuagagaccucauuugugcacaaaaguuuaacggccuuacuguuuugccaccuuugcucacagaugaaaugauugcucaauacacuucugcacuguuagcggguacaaucacuucugguuggaccuuuggugcaggugcugcauuacaaauaccauuugcuaugcaaauggcuuauagguuuaaugguauuggaguuacacagaauguucucuaugagaaccaaaaauugauugccaaccaauuuaauagugcuauuggcaaaauucaagacucacuuucuuccacagcaagugcacuuggaaaacuucaagauguggucaaccaaaaugcacaagcuuuaaacacgcuuguuaaacaacuuagcuccaauuuuggugcaauuucaaguguuuuaaaugauauccuuucacgucuugacaaaguugaggcugaagugcaaauugauagguugaucacaggcagacuucaaaguuugcagacauaugugacucaacaauuaauuagagcugcagaaaucagagcuucugcuaaucuugcugcuacuaaaaugucagaguguguacuuggacaaucaaaaagaguugauuuuuguggaaagggcuaucaucuuauguccuucccucagucagcaccucaugguguagucuucuugcaugugacuuaugucccugcacaagaaaagaacuucacaacugcuccugccauuugucaugauggaaaagcacacuuuccucgugaaggugucuuuguuucaaauggcacacacugguuuguaacacaaaggaauuuuuaugaaccacaaaucauuacuacagacaacacauuugugucugguaacugugauguuguaauaggaauugucaacaacacaguuuaugauccuuugcaaccugaauuagacucauucaaggaggaguuagauaaauauuuuaagaaucauacaucaccagauguugauuuaggugacaucucuggcauuaaugcuucaguuguaaacauucaaaaagaaauugaccgccucaaugagguugccaagaauuuaaaugaaucucucaucgaucuccaagaacuuggaaaguaugagcaguauauaaaauggccaugguacauuuggcuagguuuuauagcuggcuugauugccauaguaauggugacaauuaugcuuugcuguaugaccaguugcuguaguugucucaagggcuguuguucuuguggauccugcugcaaauuugaugaagacgacucugagccagugcucaaaggagucaaauuacauuacacauaaggacuaguuauaagacugacuagcccgaugggccucccaacgggcccuccuccccuccuugcaccgagauuaauaaaaaaaaaaaaaaaaaaaaaaaaaaaaaaaaaaaaaaaaaaaaaaaaaaaaaaaaaaaaaaaaugcaucccccccccccccccccccccccccccccccaaaggcucuuuucagagccaccagaauu

SEQ ID NO: 12739 - RNA, 4021 nt, Artificial Sequence
  SARS-CoV-2/pangolin/Guangxi/P4L/2017__EPI_ISL_410538 spike protein mRNA wt (1-1267)
aggagaaagcuuaccauguuuguuuuucuuuuugucuugccuuugguuuccagucaaugugucaauuugaccacaagaacuggaauaccgccagguuauaccaauucaucuacuagaggugucuauuauccagacaaaguuuuuaggucuucaauuuuacaucuuacacaagaccuuuucuuaccuuucuuuucuaauguuacuugguuuaacaccauaaauuaucaaggaggcuuuaagaaguuugacaauccuguuuuaccauuuaaugaugguguuuacuuugccuccacggaaaaguccaauauuauacgcgguuggauuuuuggaacaacacuugaugccagaacucaaucucuucuaauaguuaacaacgcaaccaauguuguuaucaaaguaugugaguuucaguuuugcacugauccauuuuuagguguuuacuaucauaacaacaauaaaacauggguugaaaaugaguuuagaguuuauucaagugccaacaauugcacuuucgaauacauuucucaaccuuuucuuauggaccuugaaggaaagcaagguaauuuuaagaaccuuagagaguuuguguuuaaaaauguugaugguuauuucaagauuuacucuaaacacacaccuauugauuuagugcgcgaccuccccagagguuuugcugcauuggaaccacugguggaccucccuauagguauuaauauuaccagauuccaaacauugcuugcuuuacauagaaguuaucuuacaccugguaaucuagaaaguggcuggacaacuggagcugcugcuuacuauguagguuaccuacaacagaggacuuuucucuuaaguuacaaucaaaauggaaccauuacagaugcuguugauuguucacuagacccucuuucagagacaaagugcacauuaaaaucccuaacaguugaaaaaggaauuuaccagacuucuaacuucagaguucaaccaacaaucaguauaguuagauuuccuaauauuacaaacuuauguccauuuggagaaguguuuaacgcauccaaauuugcaucaguuuaugcuuggaacaggaagagaauuagcaauuguguugcugauuacucuguacuuuauaacucuacaucauuuuccacuuuuaaauguuauggaguuucaccuacaaaacucaaugaccuuugcuucaccaauguguaugcagacucauuuguuguuaaaggugacgagguuagacaaauagcacccggacaaacugguguuauugcugauuauaacuauaagcugccagaugauuuuacugguuguguuauugcuuggaacucaguuaagcaagaugcuuugacuggugguaauuaugguuauuuguauagauuauuuagaaagucuaagcuuaaaccauuugagagagauauuuccacugaaauauaccaagccggcagcacacccuguaacggucaaguuggucuaaauuguuauuauccucuugaaagguaugguuuucacccaacuacagguguuaacuaccaaccuuuuagagugguuguuuuaucauuugaguuacuuaauggaccagcuacuguuuguggacccaaauugucuacaacacuaguuaaagacaaaugugucaauuucaacuuuaacgguuuaacuggcacagguguucuuacaacaucuaagaaacaguuucugccuuuucaacaauuugguagagacaucucugacacuacugaugcuguccgugacccacagacacuugaaauacuugacauuaccccuugcucuuuuggaggaguuagugugauaacaccagguacaaacacuucuaaucaaguggcuguacuuuaccaagauguuaacuguacugaagugccuauggccauucaugcagaacaacuuacaccugccuggcguguuuacucugcaggagcaaauguguuucaaacaagagcaggcuguuuaguaggugcugagcaugucaacaauucuuaugaaugugacauuccagucggugcuggcauaugugcaaguuaccauuccaugucaucauugcguagugucaaccagcguucaaucauugcuuacacuaugucuuuaggugcagaaaauucaguugcuuauucuaauaauucaauugccauaccuacuaauuuuacaauaaguguuaccacagaaauucuaccagugucaaugacuaagacuucuguagauuguacuauguacaucuguggagauucaauugaguguaguaauuuauugcuacaauauggcaguuuuugcacacaauuaaaccgugcuuugacugggauugcuguugaacaagacaaaaacacacaagaaguuuuugcccagguuaaacaaaucuacaaaacaccaccuauuaaagauuuugguggcuuuaacuuuucacaaauauugccagauccaucaaaaccaagcaagaggucauuuauugaggauuuacucuucaacaaagugacacuugcugaugcuggcuucaucaaacaauauggugauugccuuggugauauugcugcuagagaucucaucugugcacaaaaguucaauggacucacgguucuaccgccuuugcucacagaugaaaugauugcucaauacacuucugcacuacuugcuggaacaaucaccucagguuggaccuuuggugcaggagcugcuuuacaaauacccuuugcaaugcaaauggcuuacagguuuaauggcauuggagucacucagaauguucuauaugagaaucagaaauuaauugccaaucaguucaacagugcuauuggcaaaauacaggauucacuuucaucuacggcuagugcacuugguaaacuucaagacgucguaaaucaaaaugcacaggcuuuaaacacacuugucaaacaacuuaguuccaauuuuggagcuauuucgagugugcuuaaugauauucuuucacgucuugacaaaguugaggcugaagugcaaauugauagguuaaucacaggaagacuacagagucuucaaacuuaugugacacaacaauuaaucagagcagcagaaaucagagcuucugcuaaucuugcugcaacaaaaaugucugagugcguacucggacaaucuaaaagaguugauuuuuguggaaaaggcuaccauuuaaugucuuucccucaaucagcaccgcaugguguuguuuucuugcauguuacuuauguaccugcacaagaaaagaacuuuacuacugcuccugcuauuugucaugaaggaaaagcacacuucccucgugaaggugucuucguuucaaauggcacucauugguuuauuacacaaaggaauuuuuaugaaccucaaauuauuaccacugacaacacauucgucucugguagcugugauguuguaauuggaauagucaacaacacaguuuaugauccuuugcaacccgagcuugacucauuuaaggaggaguuagacaaauacuucaaaaaucacacaucaccagauguugaucuuggcgacauaucuggcauaaaugcuucggucgucaacauacaaaaagaaauugaccgccucaaugagguugccaaaaauuugaaugaaucacccauugaccuacaagagcuuggaaaauaugagcaauacaucaaauggccuugguacauuuggcuugguuuuauagcugggcuaauugcuaucauuauggucacaaucaugcuauguuguaugacuaguugcuguaguugccucaaggguuguugcucuugcgguuccugcugcaaauuugaugaagacgauucagaaccuguucugaaaggagucaaauuacauuacacauaaggacuaguuauaagacugacuagcccgaugggccucccaacgggcccuccuccccuccuugcaccgagauuaauaaaaaaaaaaaaaaaaaaaaaaaaaaaaaaaaaaaaaaaaaaaaaaaaaaaaaaaaaaaaaaaaugcaucccccccccccccccccccccccccccccccaaaggcucuuuucagagccaccagaauu

SEQ ID NO: 12740 - RNA, 4021 nt, Artificial Sequence
  SARS-CoV-2/pangolin/Guangxi/P5L/2017__EPI_ISL_410540 spike protein mRNA wt (1-1267)
aggagaaagcuuaccauguuuguuuuucuuuuugucuugccuuugguuuccagucaaugugucaauuugaccacaagaacuggaauaccgccagguuauaccaauucaucuacuagaggugucuauuauccagacaaaguuuuuaggucuucaauuuuacaucuuacacaagaccuuuucuuaccuuucuuuucuaauguuacuugguuuaacaccauaaauuaucaaggaggcuuuaagaaguuugacaauccuguuuuaccauuuaaugaugguguuuacuuugccuccacggaaaaguccaauauuauacgcgguuggauuuuuggaacaacacuugaugccagaacucaaucucuucuaauaguuaacaacgcaaccaauguuguuaucaaaguaugugaguuucaguuuugcacugauccauuuuuagguguuuacuaucauaacaacaauaaaacauggguugaaaaugaguuuagaguuuauucaagugccaacaauugcacuuucgaauacauuucucaaccuuuucuuauggaccuugaaggaaagcaagguaauuuuaagaaccuuagagaguuuguguuuaaaaauguugaugguuauuucaagauuuacucuaaacacacaccuauugauuuagugcgcgaccuccccagagguuuugcugcauuggaaccacugguggaccucccuauagguauuaauauuaccagauuccaaacauugcuugcuuuacauagaaguuaucuuacaccugguaagcuagaaaguggcuggacaacuggagcugcugcuuacuauguagguuaccuacaacagaggacuuuucucuuaaguuacaaucaaaauggaaccauuacagaugcuguugauuguucacuagacccucuuucagagacaaagugcacauuaaaaucccuaacaguugaaaaaggaauuuaccagacuucuaacuucagaguucaaccaacaaucaguauaguuagauuuccuaauauuacaaacuuauguccauuuggagaaguguuuaacgcauccaaauuugcaucaguuuaugcuuggaacaggaagagaauuagcaauuguguugcugauuacucuguacuuuauaacucuacaucauuuuccacuuuuaaauguuauggaguuucaccuacaaaacucaaugaccuuugcuucaccaauguguaugcagacucauuuguuguuaaaggugacgagguuagacaaauagcacccggacaaacugguguuauugcugauuauaacuauaagcugccagaugauuuuacugguuguguuauugcuuggaacucaguuaagcaagaugcuuugacuggugguaauuaugguuauuuguauagauuauuuagaaagucuaagcuuaaaccauuugagagagauauuuccacugaaauauaccaagccggcagcacacccuguaacggucaaguuggucuaaauuguuauuauccucuugaaagguaugguuuucacccaacuacagguguuaacuaccaaccuuuuagagugguuguuuuaucauuugaguuacuuaauggaccagcuacuguuuguggacccaaauugucuacaacacuaguuaaagacaaaugugucaauuucaacuuuaacgguuuaacuggcacagguguucuuacaacaucuaagaaacaguuucugccuuuucaacaauuugguagagacaucucugacacuacugaugcuguccgugacccacagacacuugaaauacuugacauuaccccuugcucuuuuggaggaguuagugugauaacaccagguacaaacacuucuaaucaaguggcuguacuuuaccaagauguuaacuguacugaagugccuauggccauucaugcagaacaacuuacaccugccuggcguguuuacucugcaggagcaaauguguuucaaacaagagcaggcuguuuaguaggugcugagcaugucaacaauucuuaugaaugugacauuccagucggugcuggcauaugugcaaguuaccauuccaugucaucauuucguagugucaaccagcguucaaucauugcuuacacuaugucuuuaggugcagaaaauucaguugcuuauucuaauaauucaauugccauaccuacuaauuuuacaauaaguguuaccacagaaauucuaccagugucaaugacuaagacuucuguagauuguacuauguacaucuguggagauucaauugaguguaguaauuuauugcuacaauauggcaguuuuugcacacaauuaaaccgugcuuugacugggauugcuguugaacaagacaaaaacacacaagaaguuuuugcccagguuaaacaaaucuacaaaacaccaccuauuaaagauuuugguggcuuuaacuuuucacaaauauugccagauccaucaaaaccaagcaagaggucauuuauugaggauuuacucuucaacaaagugacacuugcugaugcuggcuucaucaaacaauauggugauugccuuggugauauugcugcuagagaucucaucugugcacaaaaguucaauggacucacgguucuaccgccuuugcucacagaugaaaugauugcucaauacacuucugcacuacuugcuggaacaaucaccucagguuggaccuuuggugcaggagcugcuuuacaaauacccuuugcaaugcaaauggcuuacagguuuaauggcauuggagucacucagaauguucuauaugagaaucagaaauuaauugccaaucaguucaacagugcuauuggcaaaauacaggauucacuuucaucuacggcuagugcacuugguaaacuucaagacgucguaaaucaaaaugcacaggcuuuaaacacacuugucaaacaacuuaguuccaauuuuggagcuauuucgagugugcuuaaugauauucuuucacgucuugacaaaguugaggcugaagugcaaauugauagguuaaucacaggaagacuacagagucuucaaacuuaugugacacaacaauuaaucagagcagcagaaaucagagcuucugcuaaucuugcugcaacaaaaaugucugagugcguacucggacaaucuaaaagaguugauuuuuguggaaaaggcuaccauuuaaugucuuucccucaaucagcaccgcaugguguuguuuucuugcauguuacuuauguaccugcacaagaaaagaacuuuacuacugcuccugcuauuugucaugaaggaaaagcacacuucccucgugaaggugucuucguuucaaauggcacucauugguuuauuacacaaaggaauuuuuaugaaccucaaauuauuaccacugacaacacauucgucucugguagcugugauguuguaauuggaauagucaacaacacaguuuaugauccuuugcaacccgagcuugacucauuuaaggaggaguuagacaaauacuucaaaaaucacacaucaccagauguugaucuuggcgacauaucuggcauaaaugcuucggucgucaacauacaaaaagaaauugaccgccucaaugagguugccaaaaauuugaaugaaucacucauugaccuacaagagcuuggaaaauaugagcaauacaucaaauggccuugguacauuuggcuugguuuuauagcugggcuaauugcuaucauuauggucacaaucaugcuauguuguaugacuaguugcuguaguugccucaaggguuguugcucuugcgguuccugcugcaaauuugaugaagacgauucagaaccuguucugaaaggagucaaauuacauuacacauaaggacuaguuauaagacugacuagcccgaugggccucccaacgggcccuccuccccuccuugcaccgagauuaauaaaaaaaaaaaaaaaaaaaaaaaaaaaaaaaaaaaaaaaaaaaaaaaaaaaaaaaaaaaaaaaaugcaucccccccccccccccccccccccccccccccaaaggcucuuuucagagccaccagaauu

SEQ ID NO: 12741 - RNA, 4021 nt, Artificial Sequence
  SARS-CoV-2/pangolin/Guangxi/P5E/2017__EPI_ISL_410541 spike protein mRNA wt (1-1267)
aggagaaagcuuaccauguuuguuuuucuuuuugucuugccuuugguuuccagucaaugugucaauuugaccacaagaacuggaauaccgccagguuauaccaauucaucuacuagaggugucuauuauccagacaaaguuuuuaggucuucaauuuuacaucuuacacaagaccuuuucuuaccuuucuuuucuaauguuacuugguuuaacaccauaacuuaucaaggaggcucuaagaaguuugacaauccuguuuuaccauuuaaugaugguguuuacuuugccuccacggaaaaguccaauauuauacgcgguuggauuuuuggaacaacacuugaugccagaacucaaucucuucuaauaguuaacaacgcaaccaauguuguuaucaaaguaugugaguuucaguuuugcacugauccauuuuuagguguuuacuaucauaacaacaauaaaacauggguugaaaaugaguuuagaguuuauucaagugccaacaauugcacuuucgaauacauuucucaaccuuuucuuauggaccuugaaggaaagcaagguaauuuuaagaaccuuagagaguuuguguuuaaaaauguugaugguuauuucaagauuuacucuaaacacacaccuauugauuuagugcgcgaccuccccagagguuuugcugcauuggaaccacugguggaccucccuauagguauuaauauuaccagauuccaaacauugcuugcuuuacauagaaguuaucuuacaccugguaagcuagaaaguggcuggacaacuggagcugcugcuuacuauguagguuaccuacaacagaggacuuuucucuuaaguuacaaucaaaauggaaccauuacagaugcuguugauuguucacuagacccucuuucagagacaaagugcacauuaaaaucccuaacaguugaaaaaggaauuuaccagacuucuaacuucagaguucaaccaacaaucaguauaguuagauuuccuaauauuacaaacuuauguccauuuggagaaguguuuaacgcauccaaauuugcaucaguuuaugcuuggaacaggaagagaauuagcaauuguguugcugauuacucuguacuuuauaacucuacaucauuuuccacuuuuaaauguuauggaguuucaccuacaaaacucaaugaccuuugcuucaccaauguguaugcagacucauuuguuguuaaaggugacgagguuagacaaauagcacccggacaaacugguguuauugcugauuauaacuauaagcugccagaugauuuuacugguuguguuauugcuuggaacucaguuaagcaagaugcuuugacuggugauaauuaugguuauuuguauagauuauuuagaaagucuaagcuuaaaccauuugagagagauauuuccacugaaauauaccaagccggcagcacacccuguaacggucaaguuggucuaaauuguuauuauccucuugaaagguaugguuuucacccaacuacagguguuaacuaccaaccuuuuagagugguuguuuuaucauuugaguuacuuaauggaccagcuacuguuuguggacccaaauugucuacaacacuaguuaaagacaaaugugucaauuucaacuuuaacgguuuaacuggcacagguguucuuacaacaucuaagaaacaguuucugccuuuucaacaauuugguagagacaucucugacacuacugaugcuguccgugacccacagacacuugaaauacuugacauuaccccuugcucuuuuggaggaguuagugugauaacaccagguacaaacacuucuaaucaaguggcuguacuuuaccaagauguuaacuguacugaagugccuauggccauucaugcagaacaacuuacaccugccuggcguguuuacucugcaggagcaaauguguuucaaacaagagcaggcuguuuaguaggugcugagcaugucaacaauucuuaugaaugugacauuccagucggugcuggcauaugugcaaguuaccauuccaugucaucauuucguagugucaaccagcguucaaucauugcuuacacuaugucuuuaggugcagaaaauucaguugcuuauucuaauaauucaauugccauaccuacuaauuuuacaauaaguguuaccacagaaauucuaccagugucaaugacuaagacuucuguagauuguacuauguacaucuguggagauucaauugaguguaguaauuuauugcuacaauauggcaguuuuugcacacaauuaaaccgugcuuugacugggauugcuguugaacaagacaaaaacacacaagaaguuuuugcccagguuaaacaaaucuacaaaacaccaccuauuaaagauuuugguggcuuuaacuuuucacaaauauugccagauccaucaaaaccaagcaagaggucauuuauugaggauuuacucuucaacaaagugacacuugcugaugcuggcuucaucaaacaauauggugauugccuuggugauauugcugcuagagaucucaucugugcacaaaaguucaauggacucacgguucuaccgccuuugcucacagaugaaaugauugcucaauacacuucugcacuacuugcuggaacaaucaccucagguuggaccuuuggugcaggagcugcuuuacaaauacccuuugcaaugcaaauggcuuacagguuuaauggcauuggagucacucagaauguucuauaugagaaucagaaauuaauugccaaucaguucaacagugcuauuggcaaaauacaggauucacuuucaucuacggcuagugcacuugguaaacuucaagacgucguaaaucaaaaugcacaggcuuuaaacacacuugucaaacaacuuaguuccaauuuuggagcuauuucgagugugcuuaaugauauucuuucacgucuugacaaaguugaggcugaagugcaaauugauagguuaaucacaggaagacuacagagucuucaaacuuaugugacacaacaauuaaucagagcagcagaaaucagagcuucugcuaaucuugcugcaacaaaaaugucugagugcguacucggacaaucuaaaagaguugauuuuuguggaaaaggcuaccauuuaaugucuuucccucaaucagcaccgcaugguguuguuuucuugcauguuacuuauguaccugcacaagaaaagaacuuuacuacugcuccugcuauuugucaugaaggaaaagcacacuucccucgugaaggugucuucguuucaaauggcacucauugguuuauuacacaaaggaauuuuuaugaaccucaaauuauuaccacugacaacacauucgucucugguagcugugauguuguaauuggaauagucaacaacacaguuuaugauccuuugcaacccgagcuugacucauuuaaggaggaguuagacaaauacuucaaaaaucacacaucaccagauguugaucuuggcgacauaucuggcauaaaugcuucggucgucaacauacaaaaagaaauugaccgccucaaugagguugccaaaaauuugaaugaaucacucauugaccuacaagagcuuggaaaauaugagcaauacaucaaauggccuugguacauuuggcuugguuuuauagcugggcuaauugcuaucauuauggucacaaucaugcuauguuguaugacuaguugcuguaguugccucaaggguuguugcucuugcgguuccugcugcaaauuugaugaagacgauucagaaccuguucugaaaggagucaaauuacauuacacauaaggacuaguuauaagacugacuagcccgaugggccucccaacgggcccuccuccccuccuugcaccgagauuaauaaaaaaaaaaaaaaaaaaaaaaaaaaaaaaaaaaaaaaaaaaaaaaaaaaaaaaaaaaaaaaaaugcaucccccccccccccccccccccccccccccccaaaggcucuuuucagagccaccagaauu

SEQ ID NO: 12742 - RNA, 4015 nt, Artificial Sequence
  SARS-CoV-2/pangolin/Guangxi/P1E/2017__EPI_ISL_410539 spike protein mRNA wt (1-1265)
aggagaaagcuuaccauguuuguuuuucuuuuugucuugccuuugguuuccagucaaugugucaauuugaccacaagaacuggaauacagccagguuauaccaauucaucuacuagaggugucuauuauccagacaaaguuuuuaggucuucaauuuuacaucuuacacaagaccuuuucuuaccuuucuuuucuaauguuacuugguuuaacaccauaaauuaucaaggaggcuuuaagaaguuugacaauccuguuuuaccauuuaaugaugguguuuacuuugccuccacggaaaaguccaauauuauacgcgguuggauuuuuggaacaacacuugaugccagaacucaaucucuucuaauaguuaacaacgcaaccaauguuguuaucaaaguaugugaguuucaguuuugcacugauccauuuuuagguguuuacuaucauaacaacaauaaaacauggguugaaaaugaguuuagaguuuauucaagugccaacaauugcacuuucgaauacauuucucaaccuuuucuuauggaccuugaaggaaagcaagguaauuuuaagaaccuuagagaguuuguguuuaaaaauguugaugguuauuucaagauuuacucuaaacacacaccuauugauuuagugcgcgaccuccccagagguuuugcugcauuggaaccacugguggaccucccuauagguauuaauauuaccagauuccaaacauugcuugcuuuacauagaaguuaucuuacaccugguaagcuagaaaguggcuggacaacuggagcugcugcuuacuauguagguuaccuacaacagaggacuuuucucuuaaguuacaaucaaaauggaaccauuacagaugcuguugauuguucacuagacccucuuucagagacaaagugcacauuaaaaucccuaacaguugaaaaaggaauuuaccagacuucuaacuucagaguucaaccaacaaucaguauaguuagauuuccuaauauuacaaacuuauguccauuuggagaaguguuuaacgcauccaaauuugcaucaguuuaugcuuggaacaggaagagaauuagcaauuguguugcugauuacucuguacuuuauaacucuacaucauuuuccacuuuuaaauguuauggaguuucaccuacaaaacucaaugaccuuugcuucaccaauguguaugcagacucauuuguuguuaaaggugacgagguuagacaaauagcacccggacaaacugguguuauugcugauuauaacuauaagcugccagaugauuuuacugguuguguuauugcuuggaacucaguuaagcaagaugcuuugacuggugguaauuauuuguauagauuauuuagaaagucuaagcuuaaaccauuugagagagauauuuccacugaaauauaccaagccggcagcacacccuguaacggucaaguuggucuaaauuguuauuauccucuugaaagguaugguuuucacccaacuacagguguuaacuaccaaccuuuuagagugguuguuuuaucauuugaguuacuuaauggaccagcuacuguuuguggacccaaauugucuacaacacuaguuaaagacaaaugugucaauuucaacuuuaacgguuuaacuggcacagguguucuuacaacaucuaagaaacaguuucugccuuuucaacaauuugguagagacaucucugacacuacugaugcuguccgugacccacagacacuugaaauacuugacauuaccccuugcucuuuuggaggaguuagugugauaacaccagguacaaacacuucuaaucaaguggcuguacuuuaccaagauguuaacuguacugaagugccuauggccauucaugcagaacaacuuacaccugccuggcguguuuacucugcaggagcaaauguguuucaaacaagagcaggcuguuuaguaggugcugagcaugucaacaauucuuaugaaugugacauuccagucggugcuggcauaugugcaaguuaccauuccaugucaucauugcguagugucaaccagcguucaaucauugcuuacacuaugucuuuaggugcagaaaauucaguugcuuauucuaauaauucaauugccauaccuacuaauuuuacaauaaguguuaccacagaaauucuaccagugucaaugacuaagacuucuguagauuguacuauguacaucuguggagauucaauugaguguaguaauuuauugcuacaauauggcaguuuuugcacacaauuaaaccgugcuuugacugggauugcuguugaacaagacaaaaacacacaagaaguuuuugcccagguuaaacaaaucuacaaaacaccaccuauuaaagauuuugguggcuuuaacuuuucacaaauauugccagauccaucaaaaccaagcaagaggucauuuauugaggauuuacucuucaacaaagugacacuugcugaugcuggcuucaucaaacaauauggugauugccuuggugauauugcugcuagagaucucaucugugcacaaaaguucaauggacucacgguucuaccgccuuugcucacagaugaaaugauugcucaauacacuucugcacuacuugcuggaacaaucaccucagguuggaccuuuggugcaggagcugcuuuacaaauacccuuugcaaugcaaauggcuuacagguuuaauggcauuggagucacucagaauguucuauaugagaaucagaaauuaauugccaaucaguucaacagugcuauuggcaaaauacaggauucacuuucaucuacggcuagugcacuugguaaacuucaagacgucguaaaucaaaaugcacaggcuuuaaacacacuugucaaacaacuuaguuccaauuuuggagcuauuucgagugugcuuaaugauauucuuucacgucuugacaaaguugaggcugaagugcaaauugauagguuaaucacaggaagacuacagagucuucaaacuuaugugacacaacaauuaaucagagcagcagaaaucagagcuucugcuaaucuugcugcaacaaaaaugucugagugcguacucggacaaucuaaaagaguugauuuuuguggaaaaggcuaccauuuaaugucuuucccucaaucagcaccgcaugguguuguuuucuugcauguuacuuauguaccugcacaagaaaagaacuuuacuacugcuccugcuauuugucaugaaggaaaagcacacuucccucgugaaggugucuucguuucaaauggcacucauugguuuauuacacaaaggaauuuuuaugaaccucaaauuauuaccacugacaacacauucgucucugguagcugugauguuguaauuggaauagucaacaacacaguuuaugauccuuugcaacccgagcuugacucauuuaaggaggaguuagacaaauacuucaaaaaucacacaucaccagauguugaucuuggcgacauaucuggcauaaaugcuucggucgucaacauacaaaaagaaauugaccgccucaaugagguugccaaaaauuugaaugaaucacucauugaccuacaagagcuuggaaaauaugagcaauacaucaaauggccuugguacauuuggcuugguuuuauagcugggcuaauugcuaucauuauggucacaaucaugcuauguuguaugacuaguugcuguaguugccucaaggguuguugcucuugcgguuccugcugcaaauuugaugaagacgauucagaaccuguucugaaaggagucaaauuacauuacacauaaggacuaguuauaagacugacuagcccgaugggccucccaacgggcccuccuccccuccuugcaccgagauuaauaaaaaaaaaaaaaaaaaaaaaaaaaaaaaaaaaaaaaaaaaaaaaaaaaaaaaaaaaaaaaaaaugcaucccccccccccccccccccccccccccccccaaaggcucuuuucagagccaccagaauu

SEQ ID NO: 12743 - RNA, 4039 nt, Artificial Sequence; identical to SEQ ID NO: 162
  SARS-CoV-2/Wuhan/WIV05/2019__EPI_ISL_402128 spike protein mRNA gc (1-1273) R9514

SEQ ID NO: 12744 - RNA, 4027 nt, Artificial Sequence
  SARS-CoV-2/bat/Yunnan/RaTG13/2013__EPI_ISL_402131 spike protein mRNA gc (1-1269)
aggagaaagcuuaccauguucguguuccugguccuccugccccuggugagcucccagugcgugaaccucaccacccgcacgcagcugccgcccgccuacaccaacagcuccacccggggcgucuacuaccccgacaagguguuccgcagcuccgugcugcaccucacccaggaccuguuccugcccuucuucagcaacgucacgugguuccacgccauccacguguccgggaccaacggcaucaagcgguucgacaacccggugcuccccuucaacgacggggucuacuucgcgagcaccgagaaguccaacaucauccgcggcuggaucuucgggaccacgcuggacagcaagacccagucccugcucaucgugaacaacgccaccaacguggucaucaaggugugcgaguuccaguucugcaacgaccccuuccugggcguguacuaccacaagaacaacaagagcuggauggaguccgaguuccgggucuacagcuccgccaacaacugcaccuucgaguacgugagccagcccuuccugauggaccucgagggcaagcaggggaacuucaagaaccugcgcgaguucguguucaagaacaucgacggcuacuucaagaucuacuccaagcacacgccgaucaaccugguccgggaccucccgcccggguucagcgcccuggagccccugguggaccuccccaucggcaucaacaucacccgcuuccagacccugcuggcccuccaccgguccuaccugacccccggggacagcagcuccggcuggacggcgggcgccgccgccuacuacgugggguaccugcagccccgcaccuuccuccugaaguacaacgagaacggcaccaucaccgacgcggucgacugcgcccuggacccccucagcgagacgaagugcacccugaaguccuucaccguggagaaggggaucuaccagaccagcaacuuccgggugcagccgacggacuccaucguccgcuuccccaacaucaccaaccugugccccuucggcgagguguucaacgccaccaccuucgccagcgucuacgccuggaaccggaagcgcaucuccaacugcguggcggacuacagcgugcucuacaacuccacgagcuucuccaccuucaagugcuacggcgucagccccaccaagcugaacgaccugugcuucaccaacguguacgccgacuccuucgugaucacgggggacgagguccggcagaucgccccgggccagaccgggaagaucgccgacuacaacuacaagcuccccgacgacuucaccggcugcgugaucgccuggaacagcaagcacaucgacgcgaaggagggcgggaacuucaacuaccuguaccgccuguuccggaaggccaaccucaagcccuucgagcgcgacaucuccaccgagaucuaccaggccggcagcaagcccugcaacgggcagacgggccugaacugcuacuacccgcuguaccgguacggguucuaccccaccgacggcguggggcaccagcccuaccgcgucguggugcucuccuucgagcugcugaacgcccccgccaccgucugcggcccgaagaaguccaccaaccucgugaagaacaagugcgugaacuucaacuucaacggccugaccgggacgggcguccugaccgagagcaacaagaaguuccugcccuuccagcaguucgggcgggacaucgcggacaccaccgacgccgugcgcgacccccagacgcucgagauccuggacaucaccccgugcagcuucggcggggugagcgucaucacccccggcaccaacgccuccaaccagguggccgugcuguaccaggacgucaacugcacggaggugcccguggccauccacgcggaccagcucacccccaccuggcgcgucuacagcaccggcuccaacguguuccagacgcgggccgggugccugaucggcgccgagcacgugaacaacagcuacgagugcgacaucccgaucggggccggcaucugcgcguccuaccagacccagaccaacagccgcuccgucgccagccaguccaucaucgccuacaccaugagccugggcgccgagaacuccguggccuacagcaacaacuccaucgcgauccccacgaacuucaccaucagcgugaccaccgagauccuccccgucuccaugacgaagaccagcguggacugcaccauguacaucugcggggacuccaccgagugcagcaaccugcugcuccaguacggcagcuucugcacgcagcugaaccgggcccugaccgggaucgccguggagcaggacaagaacacccaggaggucuucgcccaggugaagcagaucuacaagacgcccccgaucaaggacuucggcggguucaacuucucccagauccuccccgaccccagcaagcccuccaagcgcagcuucaucgaggaccugcuguucaacaaggugacccucgccgacgcgggcuucaucaagcaguacggcgacugccugggggacaucgccgcccgggaccugaucugcgcccagaaguucaacggccucaccguccugccgccccugcucaccgacgagaugaucgcccaguacaccuccgcgcugcuggccgggacgaucaccagcggcuggaccuucggggccggcgccgcgcuccagauccccuucgccaugcagauggccuaccgcuucaacggcaucggggugacccagaacgugcuguacgagaaccagaagcugaucgccaaccaguucaacuccgccaucggcaagauccaggacagccucuccagcacggcguccgcccuggggaagcugcaggacgucgugaaccagaacgcccaggcccucaacacccuggugaagcagcugagcuccaacuucggcgccaucagcuccguccucaacgacauccugagccggcuggacaagguggaggcggaggugcagaucgaccgccucaucaccgggcggcugcagucccugcagaccuacgucacccagcagcucauccgcgccgccgagauccgggccagcgccaaccuggcggccacgaagauguccgagugcgugcugggccagagcaagcgcguggacuucugcggcaagggguaccaccucaugagcuucccccaguccgccccgcacggcgucguguuccugcacgugaccuacguccccgcccaggagaagaacuucaccaccgcgcccgccaucugccacgacgggaaggcccacuucccccgggagggcguguucgucagcaacgggacgcacugguucgugacccagcgcaacuucuacgagccgcagaucaucaccaccgacaacacguucguguccggcagcugcgacgucgugaucggcaucgugaacaacaccgucuacgacccccugcagcccgagcucgacuccuucaaggaggagcuggacaaguacuucaagaaccacaccagccccgacguggaccugggggacaucuccggcaucaacgccagcguggucaacauccagaaggagaucgaccggcucaacgagguggccaagaaccugaacgagucccugaucgaccuccaggagcuggggaaguacgagcaguacaucaaguggccgugguacaucuggcugggcuucaucgcgggccucaucgccaucaucauggugaccaucaugcugugcugcaugacgagcugcugcuccugccugaaggggugcugcagcugcggcuccugcugcaaguucgacgaggacgacagcgagcccguccucaagggggugaagcugcacuacaccugaggacuaguuauaagacugacuagcccgaugggccucccaacgggcccuccuccccuccuugcaccgagauuaauaaaaaaaaaaaaaaaaaaaaaaaaaaaaaaaaaaaaaaaaaaaaaaaaaaaaaaaaaaaaaaaaugcaucccccccccccccccccccccccccccccccaaaggcucuuuucagagccaccagaauu

SEQ ID NO: 12745 - RNA, 4039 nt, Artificial Sequence
  SARS-CoV-2/Wuhan/HBCDC-HB-01/2019__EPI_ISL_402132 spike protein mRNA gc (1-1273)
aggagaaagcuuaccauguucguguuccugguccuccugccccuggugagcucccagugcgugaaccucaccacccgcacgcagcugccgcccgccuacaccaacagcaucacccggggcgucuacuaccccgacaagguguuccgcuccagcgugcugcacuccacccaggaccucuuccugcccuucuucagcaacgucacgugguuccacgccauccacguguccgggaccaacggcaccaagcgguucgacaacccggugcugcccuucaacgacggggucuacuucgcgagcaccgagaaguccaacaucauccgcggcuggaucuucgggacgacccucgacagcaagacccagucccugcugaucgugaacaacgccaccaacguggucaucaaggugugcgaguuccaguucugcaacgaccccuuccucggcguguacuaccacaagaacaacaagagcuggauggaguccgaguuccgggucuacagcuccgccaacaacugcacguucgaguacgugagccagcccuuccugauggaccuggagggcaagcaggggaacuucaagaaccuccgcgaguucguguucaagaacaucgacggcuacuucaagaucuacuccaagcacaccccgaucaaccugguccgggaccugccccagggguucagcgcccucgagccccugguggaccugcccaucggcaucaacaucacccgcuuccagacccuccuggcccugcaccgguccuaccucacgccgggggacagcagcuccggcuggaccgcgggcgccgccgccuacuacgugggguaccugcagccccgcaccuuccugcucaaguacaacgagaacggcaccaucacggacgcggucgacugcgcccuggacccccugagcgagaccaagugcacccucaaguccuucaccguggagaaggggaucuaccagacgagcaacuuccgggugcagcccaccgaguccaucguccgcuucccgaacaucaccaaccugugccccuucggcgagguguucaacgccacccgguucgccagcgucuacgccuggaaccgcaagcggaucuccaacugcguggcggacuacagcgugcuguacaacuccgccagcuucuccacguucaagugcuacggcgucagccccaccaagcucaacgaccugugcuucaccaacguguacgccgacuccuucgugauccgcggggacgagguccggcagaucgcccccggccagaccgggaagaucgccgacuacaacuacaagcugccggacgacuucacgggcugcgugaucgcguggaacagcaacaaccucgacuccaaggucgggggcaacuacaacuaccuguaccgccuguuccgcaagagcaaccucaagcccuucgagcgggacaucuccaccgagaucuaccaggccggcagcacccccugcaacgggguggagggcuucaacugcuacuucccccugcaguccuacggguuccagccgaccaacggcgugggguaccagcccuaccggguggucgugcugagcuucgagcuccugcacgcccccgccacggugugcggccccaagaaguccaccaaccuggucaagaacaagugcgugaacuucaacuucaacggccucaccgggaccggcgugcugaccgagagcaacaagaaguuccugccguuccagcaguucgggcgcgacaucgccgacacgaccgacgcgguccgcgacccccagacccuggagauccucgacaucacccccugcagcuucggcgggguguccgugaucacgccgggcaccaacaccagcaaccaggucgccgugcuguaccaggacgugaacugcaccgagguccccguggccauccacgccgaccagcugacgcccaccuggcggguguacuccaccggcagcaacgucuuccagacccgcgccgggugccucaucggcgcggagcacgugaacaacuccuacgagugcgacauccccaucggggccggcaucugcgccagcuaccagacgcagaccaacuccccgcggcgcgcccggagcguggcgucccagagcaucaucgccuacaccaugucccugggcgccgagaacagcgucgccuacuccaacaacagcaucgccauccccaccaacuucacgaucuccgugaccaccgagauccugcccgugagcaugaccaagacgagcgucgacugcaccauguacaucugcggggacuccaccgagugcagcaaccuccugcugcaguacggcuccuucugcacccagcucaaccgcgcgcugacggggaucgccguggagcaggacaagaacacccaggagguguucgcccaggucaagcagaucuacaagacgcccccgaucaaggacuucggcggguucaacuucagccagauccugcccgaccccuccaagcccagcaagcgguccuucaucgaggaccuccuguucaacaaggugacccuggccgacgccggcuucaucaagcaguacggcgacugccucggggacaucgcggcccgcgaccugaucugcgcccagaaguucaacggccugaccgugcucccgccccugcugaccgacgagaugaucgcccaguacaccagcgcccuccuggcggggaccaucacguccggcuggaccuucggggccggcgccgcccugcagauccccuucgcgaugcagauggccuaccgguucaacggcaucggggucacccagaacgugcucuacgagaaccagaagcugaucgccaaccaguucaacagcgccaucggcaagauccaggacucccugagcuccaccgccagcgcgcucgggaagcugcaggacguggucaaccagaacgcccaggcccugaacacgcucgugaagcagcuguccagcaacuucggcgccaucuccagcgugcugaacgacauccucucccgccuggacaaggucgaggccgaggugcagaucgaccggcugaucaccgggcgccuccagagccugcagaccuacgugacccagcagcugauccgggcggccgagauccgcgccagcgccaaccucgccgcgaccaagauguccgagugcguccugggccagagcaagcggguggacuucugcggcaagggguaccaccugauguccuucccccagagcgccccgcacggcguggucuuccuccacgugacguacguccccgcccaggagaagaacuucaccaccgcccccgcgaucugccacgacgggaaggcccacuucccccgcgagggcguguucguguccaacgggacccacugguucgucacgcagcggaacuucuacgagccgcagaucaucaccaccgacaacaccuucgugagcggcaacugcgacguggucaucggcaucgugaacaacacgguguacgacccccugcagcccgagcuggacuccuucaaggaggagcucgacaaguacuucaagaaccacaccagccccgacgucgaccugggggacaucuccggcaucaacgccagcguggugaacauccagaaggagaucgaccgccugaacgaggucgccaagaaccucaacgagucccugaucgaccugcaggagcucgggaaguacgagcaguacaucaaguggccgugguacaucuggcugggcuucaucgccggccugaucgcgaucgugauggugaccaucaugcucugcugcaugaccagcugcugcuccugccugaaggggugcugcagcugcggcuccugcugcaaguucgacgaggacgacagcgagcccguccugaagggggugaagcuccacuacacgugaggacuaguuauaagacugacuagcccgaugggccucccaacgggcccuccuccccuccuugcaccgagauuaauaaaaaaaaaaaaaaaaaaaaaaaaaaaaaaaaaaaaaaaaaaaaaaaaaaaaaaaaaaaaaaaaugcaucccccccccccccccccccccccccccccccaaaggcucuuuucagagccaccagaauu

SEQ ID NO: 12746 - RNA, 4039 nt, Artificial Sequence
  SARS-CoV-2/Guangdong/20SF028/2020__EPI_ISL_403936 spike protein mRNA gc (1-1273)
aggagaaagcuuaccauguucguguuccugguccuccugccccuggugagcucccagugcgugaaccucaccacccgcacgcagcugccgcccgccuacaccaacagcuucacccggggcgucuacuaccccgacaagguguuccgcuccagcgugcuguacuccacccaggaccucuuccugcccuucuucagcaacgucacgugguuccacgccauccacguguccgggaccaacggcaccaagcgguucgacaacccggugcugcccuucaacgacggggucuacuucgcgagcaccgagaaguccaacaucauccgcggcuggaucuucgggacgacccucgacagcaagacccagucccugcugaucgugaacaacgccaccaacguggucaucaaggugugcgaguuccaguucugcaacgaccccuuccucggcguguacuaccacaagaacaacaagagcuggauggaguccgaguuccgggucuacagcuccgccaacaacugcacguucgaguacgugagccagcccuuccugauggaccuggagggcaagcaggggaacuucaagaaccuccgcgaguucguguucaagaacaucgacggcuacuucaagaucuacuccaagcacaccccgaucaaccugguccgggaccugccccagggguucagcgcccucgagccccugguggaccugcccaucggcaucaacaucacccgcuuccagacccuccuggcccugcaccgguccuaccucacgccgggggacagcagcuccggcuggaccgcgggcgccgccgccuacuacgugggguaccugcagccccgcaccuuccugcucaaguacaacgagaacggcaccaucacggacgcggucgacugcgcccuggacccccugagcgagaccaagugcacccucaaguccuucaccguggagaaggggaucuaccagacgagcaacuuccgggugcagcccaccgaguccaucguccgcuucccgaacaucaccaaccugugccccuucggcgagguguucaacgccacccgguucgccagcgucuacgccuggaaccgcaagcggaucuccaacugcguggcggacuacagcgugcuguacaacuccgccagcuucuccacguucaagugcuacggcgucagccccaccaagcucaacgaccugugcuucaccaacguguacgccgacuccuucgugauccgcggggacgagguccggcagaucgcccccggccagaccgggaagaucgccgacuacaacuacaagcugccggacgacuucacgggcugcgugaucgcguggaacagcaacaaccucgacuccaaggucgggggcaacuacaacuaccuguaccgccuguuccgcaagagcaaccucaagcccuucgagcgggacaucuccaccgagaucuaccaggccggcagcacccccugcaacgggguggagggcuucaacugcuacuucccccugcaguccuacggguuccagccgaccaacggcgugggguaccagcccuaccggguggucgugcugagcuucgagcuccugcacgcccccgccacggugugcggccccaagaaguccaccaaccuggucaagaacaagugcgugaacuucaacuucaacggccucaccgggaccggcgugcugaccgagagcaacaagaaguuccugccguuccagcaguucgggcgcgacaucgccgacacgaccgacgcgguccgcgacccccagacccuggagauccucgacaucacccccugcagcuucggcgggguguccgugaucacgccgggcaccaacaccagcaaccaggucgccgugcuguaccaggacgugaacugcaccgagguccccguggccauccacgccgaccagcugacgcccaccuggcggguguacuccaccggcagcaacgucuuccagacccgcgccgggugccucaucggcgcggagcacgugaacaacuccuacgagugcgacauccccaucggggccggcaucugcgccagcuaccagacgcagaccaacuccccgcggcgcgcccggagcguggcgucccagagcaucaucgccuacaccaugucccugggcgccgagaacagcgucgccuacuccaacaacagcaucgccauccccaccaacuucacgaucuccgugaccaccgagauccugcccgugagcaugaccaagacgagcgucgacugcaccauguacaucugcggggacuccaccgagugcagcaaccuccugcugcaguacggcuccuucugcacccagcucaaccgcgcgcugacggggaucgccguggagcaggacaagaacacccaggagguguucgcccaggucaagcagaucuacaagacgcccccgaucaaggacuucggcggguucaacuucagccagauccugcccgaccccuccaagcccagcaagcgguccuucaucgaggaccuccuguucaacaaggugacccuggccgacgccggcuucaucaagcaguacggcgacugccucggggacaucgcggcccgcgaccugaucugcgcccagaaguucaacggccugaccgugcucccgccccugcugaccgacgagaugaucgcccaguacaccagcgcccuccuggcggggaccaucacguccggcuggaccuucggggccggcgccgcccugcagauccccuucgcgaugcagauggccuaccgguucaacggcaucggggucacccagaacgugcucuacgagaaccagaagcugaucgccaaccaguucaacagcgccaucggcaagauccaggacucccugagcuccaccgccagcgcgcucgggaagcugcaggacguggucaaccagaacgcccaggcccugaacacgcucgugaagcagcuguccagcaacuucggcgccaucuccagcgugcugaacgacauccucucccgccuggacaaggucgaggccgaggugcagaucgaccggcugaucaccgggcgccuccagagccugcagaccuacgugacccagcagcugauccgggcggccgagauccgcgccagcgccaaccucgccgcgaccaagauguccgagugcguccugggccagagcaagcggguggacuucugcggcaagggguaccaccugauguccuucccccagagcgccccgcacggcguggucuuccuccacgugacguacguccccgcccaggagaagaacuucaccaccgcccccgcgaucugccacgacgggaaggcccacuucccccgcgagggcguguucguguccaacgggacccacugguucgucacgcagcggaacuucuacgagccgcagaucaucaccaccgacaacaccuucgugagcggcaacugcgacguggucaucggcaucgugaacaacacgguguacgacccccugcagcccgagcuggacuccuucaaggaggagcucgacaaguacuucaagaaccacaccagccccgacgucgaccugggggacaucuccggcaucaacgccagcguggugaacauccagaaggagaucgaccgccugaacgaggucgccaagaaccucaacgagucccugaucgaccugcaggagcucgggaaguacgagcaguacaucaaguggccgugguacaucuggcugggcuucaucgccggccugaucgcgaucgugauggugaccaucaugcucugcugcaugaccagcugcugcuccugccugaaggggugcugcagcugcggcuccugcugcaaguucgacgaggacgacagcgagcccguccugaagggggugaagcuccacuacacgugaggacuaguuauaagacugacuagcccgaugggccucccaacgggcccuccuccccuccuugcaccgagauuaauaaaaaaaaaaaaaaaaaaaaaaaaaaaaaaaaaaaaaaaaaaaaaaaaaaaaaaaaaaaaaaaaugcaucccccccccccccccccccccccccccccccaaaggcucuuuucagagccaccagaauu

SEQ ID NO: 12747 - RNA, 4039 nt, Artificial Sequence
  SARS-CoV-2/Shenzhen/SZTH-001/2020__EPI_ISL_406592 spike protein mRNA gc (1-1273)
aggagaaagcuuaccauguucguguuccugguccuccugccccuggugagcucccagugcgugaaccucaccacccgcacgcagcugccgcccgccuacaccaacagcuucacccggggcgucuacuaccccgacaagguguuccgcuccagcgugcugcacuccacccaggaccucuuccugcccuucuucagcaacgucacgugguuccacgccauccacguguccgggaccaacggcaccaagcgguucgacaacccggugcugcccuucaacgacggggucuacuucgcgagcaccgagaaguccaacaucauccgcggcuggaucuucgggacgacccucgacagcaagacccagucccugcugaucgugaacaacgccaccaacguggucaucaaggugugcgaguuccaguucugcaacgaccccuuccucggcguguacuaccacaagaacaacaagagcuggauggaguccgaguuccgggucuacagcuccgccaacaacugcacguucgaguacgugagccagcccuuccugauggaccuggagggcaagcaggggaacuucaagaaccuccgcgaguucguguucaagaacaucgacggcuacuucaagaucuacuccaagcacaccccgaucaaccugguccgggaccugccccagggguucagcgcccucgagccccugguggaccugcccaucggcaucaacaucacccgcuuccagacccuccuggcccugcaccgguccuaccucacgccgggggacagcagcuccggcuggaccgcgggcgccgccgccuacuacgugggguaccugcagccccgcaccuuccugcucaaguacaacgagaacggcaccaucacggacgcggucgacugcgcccuggacccccugagcgagaccaagugcacccucaaguccuucaccguggagaaggggaucuaccagacgagcaacuuccgggugcagcccaccgaguccaucguccgcuucccgaacaucaccaaccugugccccuucggcgagguguucaacgccacccgguucgccagcgucuacgccuggaaccgcaagcggaucuccaacugcguggcggacuacagcgugcuguacaacuccgccagcuucuccacguucaagugcuacggcgucagccccaccaagcucaacgaccugugcuucaccaacguguacgccgacuccuucgugauccgcggggacgagguccggcagaucgcccccggccagaccgggaagaucgccgacuacaacuacaagcugccggacgacuucacgggcugcgugaucgcguggaacagcaacaaccucgacuccaaggucgggggcaacuacaacuaccuguaccgccuguuccgcaagagcaaccucaagcccuucgagcgggacaucuccaccgagaucuaccaggccggcagcacccccugcaacgggguggagggcuucaacugcuacuucccccugcaguccuacggguuccagccgaccaacggcgugggguaccagcccuaccggguggucgugcugagcuucgagcuccugcacgcccccgccacggugugcggccccaagaaguccaccaaccuggucaagaacaagugcgugaacuucaacuucaacggccucaccgggaccggcgugcugaccgagagcaacaagaaguuccugccguuccagcaguucgggcgcgacaucgccgacacgaccgacgcgguccgcgacccccagacccuggagauccucgacaucacccccugcagcuucggcgggguguccgugaucacgccgggcaccaacaccagcaaccaggucgccgugcuguaccaggacgugaacugcaccgagguccccguggccauccacgccgaccagcugacgcccaccuggcggguguacuccaccggcagcaacgucuuccagacccgcgccgggugccucaucggcgcggagcacgugaacaacuccuacgagugcgacauccccaucggggccggcaucugcgccagcuaccagacgcagaccaacuccccgcggcgcgcccggagcguggcgucccagagcaucaucgccuacaccaugucccugggcgccgagaacagcgucgccuacuccaacaacagcaucgccauccccaccaacuucacgaucuccgugaccaccgagauccugcccgugagcaugaccaagacgagcgucgacugcaccauguacaucugcggggacuccaccgagugcagcaaccuccugcugcaguacggcuccuucugcacccagcucaaccgcgcgcugacggggaucgccguggagcaggacaagaacacccaggagguguucgcccaggucaagcagaucuacaagacgcccccgaucaaggacuucggcggguucaacuucagccagauccugcccgaccccuccaagcccagcaagcgguccuucaucgaggaccuccuguucaacaaggugacccuggccgacgccggcuucaucaagcaguacggcgacugccucggggacaucgcggcccgcgaccugaucugcgcccagaaguucaacggccugaccgugcucccgccccugcugaccgacgagaugaucgcccaguacaccagcgcccuccuggcggggaccaucacguccggcuggaccuucggggccggcgccgcccugcagauccccuucgcgaugcagauggccuaccgguucaacggcaucggggucacccagaacgugcucuacgagaaccagaagcugaucgccaaccaguucaacagcgccaucggcaagauccaggacucccugagcuccaccgccagcgcgcucgggaagcugcaggacguggucaaccagaacgcccaggcccugaacacgcucgugaagcagcuguccagcaacuucggcgccaucuccagcgugcugaacgacauccucucccgccuggacaaggucgaggccgaggugcagaucgaccggcugaucaccgggcgccuccagagccugcagaccuacgugacccagcagcugauccgggcggccgagauccgcgccagcgccaaccucgccgcgaccaagauguccgagugcguccugggccagagcaagcggguggacuucugcggcaagggguaccaccugauguccuucccccagagcgccccgcacggcguggucuuccuccacgugacguacguccccgcccaggagaagaacuucaccaccgcccccgcgaucugccacgacgggaaggcccacuucccccgcgagggcguguucguguccaacgggacccacugguucgucacgcagcggaacuucuacgagccgcagaucaucaccaccgacaacaccuucgugagcggcaacugcgacgugcugaucggcaucgucaacaacacgguguacgacccccugcagcccgagcucgacuccuucaaggaggagcuggacaaguacuucaagaaccacaccagccccgacguggaccugggggacaucuccggcaucaacgccagcgucgugaacauccagaaggagaucgaccgccucaacgagguggccaagaaccugaacgagucccugaucgaccuccaggagcuggggaaguacgagcaguacaucaaguggccgugguacaucuggcugggcuucaucgccggccucaucgcgaucgucauggugaccaucaugcugugcugcaugaccagcugcugcuccugccugaaggggugcugcagcugcggcuccugcugcaaguucgacgaggacgacagcgggcccgugcucaagggcgucaagcugcacuacacgugaggacuaguuauaagacugacuagcccgaugggccucccaacgggcccuccuccccuccuugcaccgagauuaauaaaaaaaaaaaaaaaaaaaaaaaaaaaaaaaaaaaaaaaaaaaaaaaaaaaaaaaaaaaaaaaaugcaucccccccccccccccccccccccccccccccaaaggcucuuuucagagccaccagaauu

SEQ ID NO: 12748 - RNA, 4039 nt, Artificial Sequence
  SARS-CoV-2/Shenzhen/SZTH-004/2020__EPI_ISL_406595 spike protein mRNA gc (1-1273)
aggagaaagcuuaccauguucguguuccugguccuccugccccuggugagcucccagugcgugaaccucaccacccgcacgcagcugccgcccgccuacaccaacagcuucacccggggcgucuacuaccccgacaagguguuccgcuccagcgugcugcacuccacccaggaccucuuccugcccuucuucagcaacgucacgugguuccacgccauccacguguccgggaccaacggcaccaagcgguucgacaacccggugcugcccuucaacgacggggucuacuucgcgagcaccgagaaguccaacaucauccgcggcuggaucuucgggacgacccucgacagcaagacccagucccugcugaucgugaacaacgccaccaacguggucaucaaggugugcgaguuccaguucugcaacgaccccuuccucggcguguacuaccacaagaacaacaagagcuggauggaguccgaguuccgggucuacagcuccgccaacaacugcacguucgaguacgugagccagcccuuccugauggaccuggagggcaagcaggggaacuucaagaaccuccgcgaguucguguucaagaacaucgacggcuacuucaagaucuacuccaagcacaccccgaucaaccugguccgggaccugccccagggguucagcgcccucgagccccugguggaccugcccaucggcaucaacaucacccgcuuccagacccuccuggcccugcaccgguccuaccucacgccgggggacagcagcuccggcuggaccgcgggcgccgccgccuacuacgugggguaccugcagccccgcaccuuccugcucaaguacaacgagaacggcaccaucacggacgcggucgacugcgcccuggacccccugagcgagaccaagugcacccucaaguccuucaccguggagaaggggaucuaccagacgagcaacuuccgggugcagcccaccgaguccaucguccgcuucccgaacaucaccaaccugugccccuucggcgagguguucaacgccacccgguucgccagcgucuacgccugggaccgcaagcggaucuccaacugcguggcguacuacagcgugcuguacaacuccgccagcuucuccacguucaagugcuacggcgucagccccaccaagcucaacgaccugugcuucaccaacguguacgccgacuccuucgugauccgcggggacgagguccggcagaucgcccccggccagaccgggaagaucgccgacuacaacuacaagcugccggacgacuucacgggcugcgugaucgcguggaacagcaacaaccucgacuccaaggucgggggcaacuacaacuaccuguaccgccuguuccgcaagagcaaccucaagcccuucgagcgggacaucuccaccgagaucuaccaggccggcagcacccccugcaacgggguggagggcuucaacugcuacuucccccugcaguccuacggguuccagccgaccaacggcgugggguaccagcccuaccggguggucgugcugagcuucgagcuccugcacgcccccgccacggugugcggccccaagaaguccaccaaccuggucaagaacaagugcgugaacuucaacuucaacggccucaccgggaccggcgugcugaccgagagcaacaagaaguuccugccguuccagcaguucgggcgcgacaucgccgacacgaccgacgcgguccgcgacccccagacccuggagauccucgacaucacccccugcagcuucggcgggguguccgugaucacgccgggcaccaacaccagcaaccaggucgccgugcuguaccaggacgugaacugcaccgagguccccguggccauccacgccgaccagcugacgcccaccuggcggguguacuccaccggcagcaacgucuuccagacccgcgccgggugccucaucggcgcggagcacgugaacaacuccuacgagugcgacauccccaucggggccggcaucugcgccagcuaccagacgcagaccaacuccccgcggcgcgcccggagcguggcgucccagagcaucaucgccuacaccaugucccugggcgccgagaacagcgucgccuacuccaacaacagcaucgccauccccaccaacuucacgaucuccgugaccaccgagauccugcccgugagcaugaccaagacgagcgucgacugcaccauguacaucugcggggacuccaccgagugcagcaaccuccugcugcaguacggcuccuucugcacccagcucaaccgcgcgcugacggggaucgccguggagcaggacaagaacacccaggagguguucgcccaggucaagcagaucuacaagacgcccccgaucaaggacuucggcggguucaacuucagccagauccugcccgaccccuccaagcccagcaagcgguccuucaucgaggaccuccuguucaacaaggugacccuggccgacgccggcuucaucaagcaguacggcgacugccucggggacaucgcggcccgcgaccugaucugcgcccagaaguucaacggccugaccgugcucccgccccugcugaccgacgagaugaucgcccaguacaccagcgcccuccuggcggggaccaucacguccggcuggaccuucggggccggcgccgcccugcagauccccuucgcgaugcagauggccuaccgguucaacggcaucggggucacccagaacgugcucuacgagaaccagaagcugaucgccaaccaguucaacagcgccaucggcaagauccaggacucccugagcuccaccgccagcgcgcucgggaagcugcaggacguggucaaccagaacgcccaggcccugaacacgcucgugaagcagcuguccagcaacuucggcgccaucuccagcgugcugaacgacauccucucccgccuggacaaggucgaggccgaggugcagaucgaccggcugaucaccgggcgccuccagagccugcagaccuacgugacccagcagcugauccgggcggccgagauccgcgccagcgccaaccucgccgcgaccaagauguccgagugcguccugggccagagcaagcggguggacuucugcggcaagggguaccaccugauguccuucccccagagcgccccgcacggcguggucuuccuccacgugacguacguccccgcccaggagaagaacuucaccaccgcccccgcgaucugccacgacgggaaggcccacuucccccgcgagggcguguucguguccaacgggacccacugguucgucacgcagcggaacuucuacgagccgcagaucaucaccaccgacaacaccuucgugagcggcaacugcgacguggucaucggcaucgugaacaacacgguguacgacccccugcagcccgagcuggacuccuucaaggaggagcucgacaaguacuucaagaaccacaccagccccgacgucgaccugggggacaucuccggcaucaacgccagcguggugaacauccagaaggagaucgaccgccugaacgaggucgccaagaaccucaacgagucccugaucgaccugcaggagcucgggaaguacgagcaguacaucaaguggccgugguacaucuggcugggcuucaucgccggccugaucgcgaucgugauggugaccaucaugcucugcugcaugaccagcugcugcuccugccugaaggggugcugcagcugcggcuccugcugcaaguucgacgaggacgacagcgagcccguccugaagggggugaagcuccacuacacgugaggacuaguuauaagacugacuagcccgaugggccucccaacgggcccuccuccccuccuugcaccgagauuaauaaaaaaaaaaaaaaaaaaaaaaaaaaaaaaaaaaaaaaaaaaaaaaaaaaaaaaaaaaaaaaaaugcaucccccccccccccccccccccccccccccccaaaggcucuuuucagagccaccagaauu

SEQ ID NO: 12749 - RNA, 4039 nt, Artificial Sequence
  SARS-CoV-2/France/IDF0372/2020__EPI_ISL_406596 spike protein mRNA gc (1-1273)
aggagaaagcuuaccauguucguguuccugguccuccugccccuggugagcucccagugcgugaaccucaccacccgcacgcagcugccgcccgccuacaccaacagcuucacccggggcgucuacuaccccgacaagguguuccgcuccagcgugcugcacuccacccaggaccucuuccugcccuucuucagcaacgucacgugguuccacgccauccacguguccgggaccaacggcaccaagcgguucgacaacccggugcugcccuucaacgacggggucuacuucgcgagcaccgagaaguccaacaucauccgcggcuggaucuucgggacgacccucgacagcaagacccagucccugcugaucgugaacaacgccaccaacguggucaucaaggugugcgaguuccaguucugcaacgaccccuuccucggcguguacuaccacaagaacaacaagagcuggauggaguccgaguuccgggucuacagcuccgccaacaacugcacguucgaguacgugagccagcccuuccugauggaccuggagggcaagcaggggaacuucaagaaccuccgcgaguucguguucaagaacaucgacggcuacuucaagaucuacuccaagcacaccccgaucaaccugguccgggaccugccccagggguucagcgcccucgagccccugguggaccugcccaucggcaucaacaucacccgcuuccagacccuccuggcccugcaccgguccuaccucacgccgggggacagcagcuccggcuggaccgcgggcgccgccgccuacuacgugggguaccugcagccccgcaccuuccugcucaaguacaacgagaacggcaccaucacggacgcggucgacugcgcccuggacccccugagcgagaccaagugcacccucaaguccuucaccguggagaaggggaucuaccagacgagcaacuuccgggugcagcccaccgaguccaucguccgcuucccgaacaucaccaaccugugccccuucggcgagguguucaacgccacccgguucgccagcgucuacgccuggaaccgcaagcggaucuccaacugcguggcggacuacagcuuccuguacaacuccgccagcuucuccacguucaagugcuacggcgugagccccaccaagcucaacgaccugugcuucaccaacgucuacgccgacuccuucgugauccgcggggacgaggugcggcagaucgcccccggccagaccgggaagaucgccgacuacaacuacaagcugccggacgacuucacgggcugcgucaucgcguggaacagcaacaaccucgacuccaaggucgggggcaacuacaacuaccuguaccgccuguuccgcaagagcaaccucaagcccuucgagcgggacaucuccaccgagaucuaccaggccggcagcacccccugcaacgggguggagggcuucaacugcuacuucccccugcaguccuacggguuccagccgaccaacggcgugggguaccagcccuaccggguggugguccugagcuucgagcuccugcacgcccccgccacggugugcggccccaagaaguccaccaaccuggugaagaacaagugcgucaacuucaacuucaacggccucaccgggaccggcgugcugaccgagagcaacaagaaguuccugccguuccagcaguucgggcgcgacaucgccgacacgaccgacgcggugcgcgacccccagacccuggagauccucgacaucacccccugcagcuucggcggggucuccgugaucacgccgggcaccaacaccagcaaccagguggccguccuguaccaggacgugaacugcaccgaggugcccgucgccauccacgccgaccagcugacgcccaccuggcggguguacuccaccggcagcaacguguuccagacccgcgccgggugccucaucggcgcggagcacgucaacaacuccuacgagugcgacauccccaucggggccggcaucugcgccagcuaccagacgcagaccaacuccccgcggcgcgcccggagcguggcgucccagagcaucaucgccuacaccaugucccugggcgccgagaacagcguggccuacuccaacaacagcaucgccauccccaccaacuucacgaucuccgucaccaccgagauccugcccgugagcaugaccaagacgagcguggacugcaccauguacaucugcggggacuccaccgagugcagcaaccuccugcugcaguacggcuccuucugcacccagcucaaccgcgcgcugacggggaucgccgucgagcaggacaagaacacccaggagguguucgcccaggugaagcagaucuacaagacgcccccgaucaaggacuucggcggguucaacuucagccagauccugcccgaccccuccaagcccagcaagcgguccuucaucgaggaccuccuguucaacaaggucacccuggccgacgccggcuucaucaagcaguacggcgacugccucggggacaucgcggcccgcgaccugaucugcgcccagaaguucaacggccugaccgugcucccgccccugcugaccgacgagaugaucgcccaguacaccagcgcccuccuggcggggaccaucacguccggcuggaccuucggggccggcgccgcccugcagauccccuucgcgaugcagauggccuaccgguucaacggcaucggggugacccagaacguccucuacgagaaccagaagcugaucgccaaccaguucaacagcgccaucggcaagauccaggacucccugagcuccaccgccagcgcgcucgggaagcugcaggacguggugaaccagaacgcccaggcccugaacacgcucgucaagcagcuguccagcaacuucggcgccaucuccagcgugcugaacgacauccucucccgccuggacaagguggaggccgagguccagaucgaccggcugaucaccgggcgccuccagagccugcagaccuacgugacccagcagcugauccgggcggccgagauccgcgccagcgccaaccucgccgcgaccaagauguccgagugcgugcugggccagagcaagcgggucgacuucugcggcaagggguaccaccugauguccuucccccagagcgccccgcacggcgugguguuccuccacgucacguacgugcccgcccaggagaagaacuucaccaccgcccccgcgaucugccacgacgggaaggcccacuucccccgcgagggcgucuucguguccaacgggacccacugguucgugacgcagcggaacuucuacgagccgcagaucaucaccaccgacaacaccuucgucagcggcaacugcgacguggugaucggcaucgucaacaacacgguguacgacccccugcagcccgagcuggacuccuucaaggaggagcucgacaaguacuucaagaaccacaccagccccgacguggaccugggggacaucuccggcaucaacgccagcgucgugaacauccagaaggagaucgaccgccugaacgagguggccaagaaccucaacgagucccugaucgaccugcaggagcucgggaaguacgagcaguacaucaaguggccgugguacaucuggcugggcuucaucgccggccugaucgcgaucgucauggugaccaucaugcucugcugcaugaccagcugcugcuccugccugaaggggugcugcagcugcggcuccugcugcaaguucgacgaggacgacagcgagcccgugcugaagggggucaagcuccacuacacgugaggacuaguuauaagacugacuagcccgaugggccucccaacgggcccuccuccccuccuugcaccgagauuaauaaaaaaaaaaaaaaaaaaaaaaaaaaaaaaaaaaaaaaaaaaaaaaaaaaaaaaaaaaaaaaaaugcaucccccccccccccccccccccccccccccccaaaggcucuuuucagagccaccagaauu

SEQ ID NO: 12750 - RNA, 4039 nt, Artificial Sequence
  SARS-CoV-2/Australia/VIC01/2020__EPI_ISL_406844 spike protein mRNA gc (1-1273)
aggagaaagcuuaccauguucguguuccugguccuccugccccuggugagcucccagugcgugaaccucaccacccgcacgcagcugccgcccgccuacaccaacagcuucacccggggcgucuacuaccccgacaagguguuccgcuccagcgugcugcacuccacccaggaccucuuccugcccuucuucagcaacgucacgugguuccacgccauccacguguccgggaccaacggcaccaagcgguucgacaacccggugcugcccuucaacgacggggucuacuucgcgagcaccgagaaguccaacaucauccgcggcuggaucuucgggacgacccucgacagcaagacccagucccugcugaucgugaacaacgccaccaacguggucaucaaggugugcgaguuccaguucugcaacgaccccuuccucggcguguacuaccacaagaacaacaagagcuggauggaguccgaguuccgggucuacagcuccgccaacaacugcacguucgaguacgugagccagcccuuccugauggaccuggagggcaagcaggggaacuucaagaaccuccgcgaguucguguucaagaacaucgacggcuacuucaagaucuacuccaagcacaccccgaucaaccugguccgggaccugccccagggguucagcgcccucgagccccugguggaccugcccaucggcaucaacaucacccgcuuccagacccuccuggcccugcaccggcgcuaccucacgccgggggacuccagcagcggcuggaccgcgggcgccgccgccuacuacgugggguaccugcagccccggaccuuccugcucaaguacaacgagaacggcaccaucacggacgcggucgacugcgcccuggacccccuguccgagaccaagugcacccucaagagcuucaccguggagaaggggaucuaccagacguccaacuuccgcgugcagcccaccgagagcaucguccgguucccgaacaucaccaaccugugccccuucggcgagguguucaacgccacccgcuucgccuccgucuacgccuggaaccggaagcgcaucagcaacugcguggcggacuacuccgugcuguacaacagcgccuccuucagcacguucaagugcuacggcgucucccccaccaagcucaacgaccugugcuucaccaacguguacgccgacagcuucgugauccgcggggacgagguccggcagaucgcccccggccagaccgggaagaucgccgacuacaacuacaagcugccggacgacuucacgggcugcgugaucgcguggaacuccaacaaccucgacagcaaggucgggggcaacuacaacuaccuguaccggcuguuccgcaaguccaaccucaagcccuucgagcgggacaucagcaccgagaucuaccaggccggcuccacccccugcaacgggguggagggcuucaacugcuacuucccccugcagagcuacggguuccagccgaccaacggcgugggguaccagcccuaccgcguggucgugcuguccuucgagcuccugcacgcccccgccacggugugcggccccaagaaguccaccaaccuggucaagaacaagugcgugaacuucaacuucaacggccucaccgggaccggcgugcugaccgagagcaacaagaaguuccugccguuccagcaguucgggcgcgacaucgccgacacgaccgacgcgguccgggacccccagacccuggagauccucgacaucacccccugcagcuucggcggggugagcgugaucacgccgggcaccaacaccuccaaccaggucgccgugcuguaccaggacgugaacugcaccgagguccccguggccauccacgccgaccagcugacgcccaccuggcgcguguacagcaccggcuccaacgucuuccagacccgggccgggugccucaucggcgcggagcacgugaacaacagcuacgagugcgacauccccaucggggccggcaucugcgccuccuaccagacgcagaccaacagcccgcgccgggcccgcuccguggcgagccaguccaucaucgccuacaccaugagccugggcgccgagaacuccgucgccuacagcaacaacuccaucgccauccccaccaacuucacgaucagcgugaccaccgagauccugcccguguccaugaccaagacgagcgucgacugcaccauguacaucugcggggacagcaccgagugcuccaaccuccugcugcaguacggcagcuucugcacccagcucaaccgggcgcugacggggaucgccguggagcaggacaagaacacccaggagguguucgcccaggucaagcagaucuacaagacgcccccgaucaaggacuucggcggguucaacuucucccagauccugcccgaccccagcaagcccuccaagcgcagcuucaucgaggaccuccuguucaacaaggugacccuggccgacgccggcuucaucaagcaguacggcgacugccucggggacaucgcggcccgggaccugaucugcgcccagaaguucaacggccugaccgugcucccgccccugcugaccgacgagaugaucgcccaguacaccuccgcccuccuggcggggaccaucacgagcggcuggaccuucggggccggcgccgcccugcagauccccuucgcgaugcagauggccuaccgcuucaacggcaucggggucacccagaacgugcucuacgagaaccagaagcugaucgccaaccaguucaacuccgccaucggcaagauccaggacagccuguccagcaccgccuccgcgcucgggaagcugcaggacguggucaaccagaacgcccaggcccugaacacgcucgugaagcagcugagcuccaacuucggcgccaucagcuccgugcugaacgacauccucagccggcuggacaaggucgaggccgaggugcagaucgaccgccugaucaccgggcggcuccagucccugcagaccuacgugacccagcagcugauccgcgcggccgagauccgggccagcgccaaccucgccgcgaccaagaugagcgagugcguccugggccaguccaagcgcguggacuucugcggcaagggguaccaccugaugagcuucccccaguccgccccgcacggcguggucuuccuccacgugacguacguccccgcccaggagaagaacuucaccaccgcccccgcgaucugccacgacgggaaggcccacuucccccgggagggcguguucgugagcaacgggacccacugguucgucacgcagcgcaacuucuacgagccgcagaucaucaccaccgacaacaccuucguguccggcaacugcgacguggucaucggcaucgugaacaacacgguguacgacccccugcagcccgagcuggacagcuucaaggaggagcucgacaaguacuucaagaaccacaccucccccgacgucgaccugggggacaucagcggcaucaacgccuccguggugaacauccagaaggagaucgaccggcugaacgaggucgccaagaaccucaacgagagccugaucgaccugcaggagcucgggaaguacgagcaguacaucaaguggccgugguacaucuggcugggcuucaucgccggccugaucgcgaucgugauggugaccaucaugcucugcugcaugaccuccugcugcagcugccugaaggggugcugcuccugcggcagcugcugcaaguucgacgaggacgacuccgagcccguccugaagggggugaagcuccacuacacgugaggacuaguuauaagacugacuagcccgaugggccucccaacgggcccuccuccccuccuugcaccgagauuaauaaaaaaaaaaaaaaaaaaaaaaaaaaaaaaaaaaaaaaaaaaaaaaaaaaaaaaaaaaaaaaaaugcaucccccccccccccccccccccccccccccccaaaggcucuuuucagagccaccagaauu

SEQ ID NO: 12751 - RNA, 4039 nt, Artificial Sequence
  SARS-CoV-2/Germany/BavPat1/2020__EPI_ISL_406862 spike protein mRNA gc (1-1273)
aggagaaagcuuaccauguucguguuccugguccuccugccccuggugagcucccagugcgugaaccucaccacccgcacgcagcugccgcccgccuacaccaacagcuucacccggggcgucuacuaccccgacaagguguuccgcuccagcgugcugcacuccacccaggaccucuuccugcccuucuucagcaacgucacgugguuccacgccauccacguguccgggaccaacggcaccaagcgguucgacaacccggugcugcccuucaacgacggggucuacuucgcgagcaccgagaaguccaacaucauccgcggcuggaucuucgggacgacccucgacagcaagacccagucccugcugaucgugaacaacgccaccaacguggucaucaaggugugcgaguuccaguucugcaacgaccccuuccucggcguguacuaccacaagaacaacaagagcuggauggaguccgaguuccgggucuacagcuccgccaacaacugcacguucgaguacgugagccagcccuuccugauggaccuggagggcaagcaggggaacuucaagaaccuccgcgaguucguguucaagaacaucgacggcuacuucaagaucuacuccaagcacaccccgaucaaccugguccgggaccugccccagggguucagcgcccucgagccccugguggaccugcccaucggcaucaacaucacccgcuuccagacccuccuggcccugcaccgguccuaccucacgccgggggacagcagcuccggcuggaccgcgggcgccgccgccuacuacgugggguaccugcagccccgcaccuuccugcucaaguacaacgagaacggcaccaucacggacgcggucgacugcgcccuggacccccugagcgagaccaagugcacccucaaguccuucaccguggagaaggggaucuaccagacgagcaacuuccgggugcagcccaccgaguccaucguccgcuucccgaacaucaccaaccugugccccuucggcgagguguucaacgccacccgguucgccagcgucuacgccuggaaccgcaagcggaucuccaacugcguggcggacuacagcgugcuguacaacuccgccagcuucuccacguucaagugcuacggcgucagccccaccaagcucaacgaccugugcuucaccaacguguacgccgacuccuucgugauccgcggggacgagguccggcagaucgcccccggccagaccgggaagaucgccgacuacaacuacaagcugccggacgacuucacgggcugcgugaucgcguggaacagcaacaaccucgacuccaaggucgggggcaacuacaacuaccuguaccgccuguuccgcaagagcaaccucaagcccuucgagcgggacaucuccaccgagaucuaccaggccggcagcacccccugcaacgggguggagggcuucaacugcuacuucccccugcaguccuacggguuccagccgaccaacggcgugggguaccagcccuaccggguggucgugcugagcuucgagcuccugcacgcccccgccacggugugcggccccaagaaguccaccaaccuggucaagaacaagugcgugaacuucaacuucaacggccucaccgggaccggcgugcugaccgagagcaacaagaaguuccugccguuccagcaguucgggcgcgacaucgccgacacgaccgacgcgguccgcgacccccagacccuggagauccucgacaucacccccugcagcuucggcgggguguccgugaucacgccgggcaccaacaccagcaaccaggucgccgugcuguaccagggcgugaacugcaccgagguccccguggccauccacgccgaccagcugacgcccaccuggcggguguacuccaccgggagcaacgucuuccagacccgcgccggcugccucaucggggcggagcacgugaacaacuccuacgagugcgacauccccaucggcgccggcaucugcgccagcuaccagacgcagaccaacuccccgcggcgcgcccggagcguggcgucccagagcaucaucgccuacaccaugucccugggggccgagaacagcgucgccuacuccaacaacagcaucgccauccccaccaacuucacgaucuccgugaccaccgagauccugcccgugagcaugaccaagacgagcgucgacugcaccauguacaucugcggcgacuccaccgagugcagcaaccuccugcugcaguacggguccuucugcacccagcucaaccgcgcgcugacgggcaucgccguggagcaggacaagaacacccaggagguguucgcccaggucaagcagaucuacaagacgcccccgaucaaggacuucgggggcuucaacuucagccagauccugcccgaccccuccaagcccagcaagcgguccuucaucgaggaccuccuguucaacaaggugacccuggccgacgccggcuucaucaagcaguacggggacugccucggcgacaucgcggcccgcgaccugaucugcgcccagaaguucaacgggcugaccgugcucccgccccugcugaccgacgagaugaucgcccaguacaccagcgcccuccuggcgggcaccaucacguccggguggaccuucggcgccggcgccgcccugcagauccccuucgcgaugcagauggccuaccgguucaacgggaucggcgucacccagaacgugcucuacgagaaccagaagcugaucgccaaccaguucaacagcgccaucgggaagauccaggacucccugagcuccaccgccagcgcgcucggcaagcugcaggacguggucaaccagaacgcccaggcccugaacacgcucgugaagcagcuguccagcaacuucggggccaucuccagcgugcugaacgacauccucucccgccuggacaaggucgaggccgaggugcagaucgaccggcugaucaccggccgccuccagagccugcagaccuacgugacccagcagcugauccgggcggccgagauccgcgccagcgccaaccucgccgcgaccaagauguccgagugcguccugggccagagcaagcggguggacuucugcgggaagggcuaccaccugauguccuucccccagagcgccccgcacgggguggucuuccuccacgugacguacguccccgcccaggagaagaacuucaccaccgcccccgcgaucugccacgacggcaaggcccacuucccccgcgaggggguguucguguccaacggcacccacugguucgucacgcagcggaacuucuacgagccgcagaucaucaccaccgacaacaccuucgugagcggcaacugcgacguggucaucgggaucgugaacaacacgguguacgacccccugcagcccgagcuggacuccuucaaggaggagcucgacaaguacuucaagaaccacaccagccccgacgucgaccugggcgacaucuccgggaucaacgccagcguggugaacauccagaaggagaucgaccgccugaacgaggucgccaagaaccucaacgagucccugaucgaccugcaggagcucggcaaguacgagcaguacaucaaguggccgugguacaucuggcugggcuucaucgccgggcugaucgcgaucgugauggugaccaucaugcucugcugcaugaccagcugcugcuccugccugaagggcugcugcagcugcggguccugcugcaaguucgacgaggacgacagcgagcccguccugaagggcgugaagcuccacuacacgugaggacuaguuauaagacugacuagcccgaugggccucccaacgggcccuccuccccuccuugcaccgagauuaauaaaaaaaaaaaaaaaaaaaaaaaaaaaaaaaaaaaaaaaaaaaaaaaaaaaaaaaaaaaaaaaaugcaucccccccccccccccccccccccccccccccaaaggcucuuuucagagccaccagaauu

SEQ ID NO: 12752 - RNA, 4039 nt, Artificial Sequence
  SARS-CoV-2/Wuhan/HBCDC-HB-02/2020__EPI_ISL_412978 spike protein mRNA gc (1-1273)
aggagaaagcuuaccauguucguguuccugguccuccugccccuggugagcucccagugcgugaaccucaccacccgcacgcagcugccgcccgccuacaccaacagcuucacccggggcgucuacuaccccgacaagguguuccgcuccagcgugcugcacuccacccaggaccucuuccugcccuucuucagcaacgucacgugguuccacgccauccacguguccgggaccaacggcaccaagcgguucgacaacccggugcugcccuucaacgacggggucuacuucgcgagcaccgagaaguccaacaucauccgcggcuggaucuucgggacgacccucgacagcaagacccagucccugcugaucgugaacaacgccaccaacguggucaucaaggugugcgaguuccaguucugcaacgaccccuuccucggcguguacuaccacaagaacaacaagagcuggauggaguccgaguuccgggucuacagcuccgccaacaacugcacguucgaguacgugagccagcccuuccugauggaccuggagggcaagcaggggaacuucaagaaccuccgcgaguucguguucaagaacaucgacggcuacuucaagaucuacuccaagcacaccccgaucaaccugguccgggaccugccccagggguucagcgcccucgagccccugguggaccugcccaucggcaucaacaucacccgcuuccagacccuccuggcccugcaccgguccuaccucacgccgggggacagcagcuccggcuggaccgcgggcgccgccgccuacuacgugggguaccugcagccccgcaccuuccugcucaaguacaacgagaacggcaccaucacggacgcggucgacugcgcccuggacccccugagcgagaccaagugcacccucaaguccuucaccguggagaaggggaucuaccagacgagcaacuuccgggugcagcccaccgaguccaucguccgcuucccgaacaucaccaaccugugccccuucggcgagguguucaacgccacccgguucgccagcgucuacgccuggaaccgcaagcggaucuccaacugcguggcggacuacagcgugcuguacaacuccgccagcuucuccacguucaagugcuacggcgucagccccaccaagcucaacgaccugugcuucaccaacguguacgccgacuccuucgugauccgcggggacgagguccggcagaucgcccccggccagaccgggaagaucgccgacuacaacuacaagcugccggacgacuucacgggcugcgugaucgcguggaacagcaacaaccucgacuccaaggucgggggcaacuacaacuaccuguaccgccuguuccgcaagagcaaccucaagcccuucgagcgggacaucuccaccgagaucuaccaggccggcagcacccccugcaacgggguggagggcuucaacugcuacuucccccugcaguccuacggguuccagccgaccaacggcgugggguaccagcccuaccggguggucgugcugagcuucgagcuccugcacgcccccgccacggugugcggccccaagaaguccaccaaccuggucaagaacaagugcgugaacuucaacuucaacggccucaccgggaccggcgugcugaccgagagcaacaagaaguuccugccguuccagcaguucgggcgcgacaucgccgacacgaccgacgcgguccgcgacccccagacccuggagauccucgacaucacccccugcagcuucggcgggguguccgugaucacgccgggcaccaacaccagcaaccaggucgccgugcuguaccaggacgugaacugcaccgagguccccguggccauccacgccgaccagcugacgcccaccuggcggguguacuccaccggcagcaacgucuuccagacccgcgccgggugccucaucggcgcggagcacgugaacaacuccuacgagugcgacauccccaucggggccggcaucugcgccagcuaccagacgcagaccaacuccccgcggcgcgcccggagcguggcgucccagagcaucaucgccuacaccaugucccugggcgccgagaacagcgucgccuacuccaacaacagcaucgccauccccaccaacuucacgaucuccgugaccaccgagauccugcccgugagcaugaccaagacgagcgucgacugcaccauguacaucugcggggacuccaccgagugcagcaacuuccuccugcaguacggcuccuucugcacccagcugaaccgcgcgcucacggggaucgccguggagcaggacaagaacacccaggagguguucgcccaggucaagcagaucuacaagacgcccccgaucaaggacuucggcggguucaacuucagccagauccugcccgaccccuccaagcccagcaagcgguccuucaucgaggaccuccuguucaacaaggugacccuggccgacgccggcuucaucaagcaguacggcgacugccugggggacaucgcggcccgcgaccucaucugcgcccagaaguucaacggccugaccgugcugccgccccuccugaccgacgagaugaucgcccaguacaccagcgcccugcucgcggggaccaucacguccggcuggaccuucggggccggcgccgcccugcagauccccuucgcgaugcagauggccuaccgguucaacggcaucggggucacccagaacgugcuguacgagaaccagaagcucaucgccaaccaguucaacagcgccaucggcaagauccaggacucccugagcuccaccgccagcgcgcuggggaagcuccaggacguggucaaccagaacgcccaggcccugaacacgcuggugaagcagcucuccagcaacuucggcgccaucuccagcgugcugaacgacauccugucccgccucgacaaggucgaggccgaggugcagaucgaccggcugaucaccgggcgccugcagagccuccagaccuacgugacccagcagcugauccgggcggccgagauccgcgccagcgccaaccuggccgcgaccaagauguccgagugcguccucggccagagcaagcggguggacuucugcggcaagggguaccaccugauguccuucccccagagcgccccgcacggcguggucuuccugcacgugacguacguccccgcccaggagaagaacuucaccaccgcccccgcgaucugccacgacgggaaggcccacuucccccgcgagggcguguucguguccaacgggacccacugguucgucacgcagcggaacuucuacgagccgcagaucaucaccaccgacaacaccuucgugagcggcaacugcgacguggucaucggcaucgugaacaacacgguguacgacccccuccagcccgagcuggacuccuucaaggaggagcuggacaaguacuucaagaaccacaccagccccgacgucgaccucggggacaucuccggcaucaacgccagcguggugaacauccagaaggagaucgaccgccugaacgaggucgccaagaaccugaacgagucccucaucgaccugcaggagcuggggaaguacgagcaguacaucaaguggccgugguacaucuggcucggcuucaucgccggccugaucgcgaucgugauggugaccaucaugcugugcugcaugaccagcugcugcuccugccucaaggggugcugcagcugcggcuccugcugcaaguucgacgaggacgacagcgagcccguccugaagggggugaagcugcacuacacgugaggacuaguuauaagacugacuagcccgaugggccucccaacgggcccuccuccccuccuugcaccgagauuaauaaaaaaaaaaaaaaaaaaaaaaaaaaaaaaaaaaaaaaaaaaaaaaaaaaaaaaaaaaaaaaaaugcaucccccccccccccccccccccccccccccccaaaggcucuuuucagagccaccagaauu

SEQ ID NO: 12753 - RNA, 4039 nt, Artificial Sequence
  SARS-CoV-2/Australia/QLD02/2020__EPI_ISL_407896 spike protein mRNA gc (1-1273)
aggagaaagcuuaccauguucguguuccugguccuccugccccuggugagcucccagugcgugaaccucaccacccgcacgcagcugccgcccgccuacaccaacagcuucacccggggcgucuacuaccccgacaagguguuccgcuccagcgugcugcacuccacccaggaccucuuccugcccuucuucagcaacgucacgugguuccacgccauccacguguccgggaccaacggcaccaagcgguucgacaacccggugcugcccuucaacgacggggucuacuucgcgagcaccgagaaguccaacaucauccgcggcuggaucuucgggacgacccucgacagcaagacccagucccugcugaucgugaacaacgccaccaacguggucaucaaggugugcgaguuccaguucugcaacgaccccuuccucggcguguacuaccacaagaacaacaagagcuggauggaguccgaguuccgggucuacagcuccgccaacaacugcacguucgaguacgugagccagcccuuccugauggaccuggagggcaagcaggggaacuucaagaaccuccgcgaguucguguucaagaacaucgacggcuacuucaagaucuacuccaagcacaccccgaucaaccugguccgggaccugccccagggguucagcgcccucgagccccugguggaccugcccaucggcaucaacaucacccgcuuccagacccuccuggcccugcaccgguccuaccucacgccgggggacagcagcuccggcuggaccgcgggcgccgccgccuacuacgugggguaccugcagccccgcaccuuccugcucaaguacaacgagaacggcaccaucacggacgcggucgacugcgcccuggacccccugagcgagaccaagugcacccucaaguccuucaccguggagaaggggaucuaccagacgagcaacuuccgggugcagcccaccgaguccaucguccgcuucccgaacaucaccaaccugugccccuucggcgagguguucaacgccacccgguucgccagcgucuacgccuggaaccgcaagcggaucuccaacugcguggcggacuacagcgugcuguacaacuccgccagcuucuccacguucaagugcuacggcgucagccccaccaagcucaacgaccugugcuucaccaacguguacgccgacuccuucgugauccgcggggacgagguccggcagaucgcccccggccagaccgggaagaucgccgacuacaacuacaagcugccggacgacuucacgggcugcgugaucgcguggaacagcaacaaccucgacuccaaggucgggggcaacuacaacuaccuguaccgccuguuccgcaagagcaaccucaagcccuucgagcgggacaucuccaccgagaucuaccaggccggcagcacccccugcaacgggguggagggcuucaacugcuacuucccccugcaguccuacggguuccagccgaccaacggcgugggguaccagcccuaccggguggucgugcugagcuucgagcuccugcacgcccccgccacggugugcggccccaagaaguccaccaaccuggucaagaacaagugcgugaacuucaacuucaacggccucaccgggaccggcgugcugaccgagagcaacaagaaguuccugccguuccagcaguucgggcgcgacaucgccgacacgaccgacgcgguccgcgacccccagacccuggagauccucgacaucacccccugcagcuucggcgggguguccgugaucacgccgggcaccaacaccagcaaccaggucgccgugcuguaccaggacgugaacugcaccgagguccccguggccauccacgccgaccagcugacgcccaccuggcggguguacuccaccggcagcaacgucuuccagacccgcgccgggugccucaucggcgcggagcacgugaacaacuccuacgagugcgacauccccaucggggccggcaucugcgccagcuaccagacgcagaccaacuccccgcggcgcgcccggagcguggcgucccagagcaucaucgccuacaccaugucccugggcgccgagaacagcgucgccuacuccaacaacagcaucgccauccccaccaacuucacgaucuccgugaccaccgagauccugcccgugagcaugaccaagacgagcgucgacugcaccauguacaucugcggggacuccaccgagugcagcaaccuccugcugcaguacggcuccuucugcacccagcucaaccgcgcgcugacggggaucgccguggagcaggacaagaacacccaggagguguucgcccaggucaagcagaucuacaagacgcccccgaucaaggacuucggcggguucaacuucagccagauccugcccgaccccuccaagcccagcaagcgguccuucaucgaggaccuccuguucaacaaggugacccuggccgacgccggcuucaucaagcaguacggcgacugccucggggacaucgcggcccgcgaccugaucugcgcccagaaguucaacggccugaccgugcucccgccccugcugaccgacgagaugaucgcccaguacaccagcgcccuccuggcggggaccaucacguccggcuggaccuucggggccggcgccgcccugcagauccccuucgcgaugcagauggccuaccgguucaacggcaucggggucacccagaacgugcucuacgagaaccagaagcugaucgccaaccaguucaacagcgccaucggcaagauccaggacucccugagcuccaccgccagcgcgcucgggaagcugcaggacguggucaaccagaacgcccaggcccugaacacgcucgugaagcagcuguccagcaacuucggcgccaucuccagcgugcugaacgacauccucucccgccuggacaaggucgaggccgaggugcagaucgaccggcugaucaccgggcgccuccagagccugcagaccuacgugacccagcagcugauccgggcggccgagauccgcgccagcgccaaccucgccgcgaccaagauguccgagugcguccugggccagagcaagcggguggacuucugcggcaagggguaccaccugauguccuucccccagagcgccccgcacggcguggucuuccuccacgugacguacguccccgcccaggagaagaacuucaccaccgcccccgcgaucugccacgacgggaaggcccacuucccccgcgagggcguguucguguccaacgggacccacugguucgucacgcagcggaacuucuacgagccgcagaucaucaccaccgacaacaccuucgugagcggcaacugcgacguggucaucggcaucgugaacaacacgguguacgacccccugcagcuggagcucgacuccuucaaggaggagcuggacaaguacuucaagaaccacaccagccccgacgucgaccugggggacaucuccggcaucaacgccagcguggugaacauccagaaggagaucgaccgccucaacgaggucgccaagaaccugaacgagucccugaucgaccuccaggagcuggggaaguacgagcaguacaucaaguggcccugguacaucuggcugggcuucaucgccggccucaucgcgaucgugauggugaccaucaugcugugcugcaugaccagcugcugcuccugccugaaggggugcugcagcugcggcuccugcugcaaguucgacgaggacgacagcgagccgguccucaagggggugaagcugcacuacacgugaggacuaguuauaagacugacuagcccgaugggccucccaacgggcccuccuccccuccuugcaccgagauuaauaaaaaaaaaaaaaaaaaaaaaaaaaaaaaaaaaaaaaaaaaaaaaaaaaaaaaaaaaaaaaaaaugcaucccccccccccccccccccccccccccccccaaaggcucuuuucagagccaccagaauu

SEQ ID NO: 12754 - RNA, 4039 nt, Artificial Sequence
  SARS-CoV-2/India/1-31/2020__EPI_ISL_413523 spike protein mRNA gc (1-1273)
aggagaaagcuuaccauguucguguuccugguccuccugccccuggugagcucccagugcgugaaccucaccacccgcacgcagcugccgcccgccuacaccaacagcuucacccggggcgucuacuaccccgacaagguguuccgcuccagcgugcugcacuccacccaggaccucuuccugcccuucuucagcaacgucacgugguuccacgccauccacguguccgggaccaacggcaccaagcgguucgacaacccggugcugcccuucaacgacggggucuacuucgcgagcaccgagaaguccaacaucauccgcggcuggaucuucgggacgacccucgacagcaagacccagucccugcugaucgugaacaacgccaccaacguggucaucaaggugugcgaguuccaguucugcaacgaccccuuccucggcguguacuaccacaagaacaacaagagcuggauggaguccgaguuccgggucuacagcuccgccaacaacugcacguucgaguacgugagccagcccuuccugauggaccuggagggcaagcaggggaacuucaagaaccuccgcgaguucguguucaagaacaucgacggcuacuucaagaucuacuccaagcacaccccgaucaaccugguccgggaccugccccagggguucagcgcccucgagccccugguggaccugcccaucggcaucaacaucacccgcuuccagacccuccuggcccugcaccgguccuaccucacgccgggggacagcagcuccggcuggaccgcgggcgccgccgccuacuacgugggguaccugcagccccgcaccuuccugcucaaguacaacgagaacggcaccaucacggacgcggucgacugcgcccuggacccccugagcgagaccaagugcacccucaaguccuucaccguggagaaggggaucuaccagacgagcaacuuccgggugcagcccaccgaguccaucguccgcuucccgaacaucaccaaccugugccccuucggcgagguguucaacgccacccgguucgccagcgucuacgccuggaaccgcaagcggaucuccaacugcguggcggacuacagcgugcuguacaacuccgccagcuucuccacguucaagugcuacggcgucagccccaccaagcucaacgaccugugcuucaccaacguguacgccgacuccuucgugauccgcggggacgagguccggcagaucgcccccggccagaccgggaagaucgccgacuacaacuacaagcugccggacgacuucacgggcugcgugaucgcguggaacagcaacaaccucgacuccaaggucgggggcaacuacaacuaccuguaccgccuguuccgcaagagcaaccucaagcccuucgagcgggacaucuccaccgagaucuaccaggccggcagcacccccugcaacgggguggagggcuucaacugcuacuucccccugcaguccuacggguuccagccgaccaacggcgugggguaccagcccuaccggguggucgugcugagcuucgagcuccugcacgcccccgccacggugugcggccccaagaaguccaccaaccuggucaagaacaagugcgugaacuucaacuucaacggccucaccgggaccggcgugcugaccgagagcaacaagaaguuccugccguuccagcaguucgggcgcgacaucgccgacacgaccgacgcgguccgcgacccccagacccuggagauccucgacaucacccccugcagcuucggcgggguguccgugaucacgccgggcaccaacaccagcaaccaggucgccgugcuguaccaggacgugaacugcaccgagguccccguggccauccacgccgaccagcugacgcccaccuggcggguguacuccaccggcagcaacgucuuccagacccgcgccgggugccucaucggcgcggagcacgugaacaacuccuacgagugcgacauccccaucggggccggcaucugcgccagcuaccagacgcagaccaacuccccgcggcgcgcccggagcguggcgucccagagcaucaucgccuacaccaugucccugggcgccgagaacagcgucgccuacuccaacaacagcaucgccauccccaccaacuucacgaucuccgugaccaccgagauccugcccgugagcaugaccaagacgagcgucgacugcaccauguacaucugcggggacuccaccgagugcagcaaccuccugcugcaguacggcuccuucugcacccagcucaaccgcgcgcugacggggaucgccguggagcaggacaagaacacccaggagguguucgcccaggucaagcagaucuacaagacgcccccgaucaaggacuucggcggguucaacuucagccagauccugcccgaccccuccaagcccagcaagcgguccuucaucgaggaccuccuguucaacaaggugacccuggccgacgccggcuucaucaagcaguacggcgacugccucggggacaucgcggcccgcgaccugaucugcgcccagaaguucaacggccugaccgugcucccgccccugcugaccgacgagaugaucgcccaguacaccagcgcccuccuggcggggaccaucacguccggcuggaccuucggggccggcgccgcccugcagauccccuucgcgaugcagauggccuaccgguucaacggcaucggggucacccagaacgugcucuacgagaaccagaagcugaucgccaaccaguucaacagcgugaucggcaagauccaggacucccugagcuccaccgccagcgcccucgggaagcugcaggacgucgugaaccagaacgcgcaggcccugaacacgcucgugaagcagcuguccagcaacuucggcgccaucuccagcguccugaacgacauccucucccgccuggacaagguggaggccgaggugcagaucgaccggcugaucaccgggcgccuccagagccugcagaccuacgucacccagcagcugauccgggccgcggagauccgcgccagcgccaaccucgccgccaccaagauguccgagugcgugcugggccagagcaagcggguggacuucugcggcaagggguaccaccugauguccuucccccagagcgcgccgcacggcgucguguuccuccacgucacguacgugcccgcccaggagaagaacuucaccaccgcccccgccaucugccacgacgggaaggcgcacuucccccgcgagggcguguucgucuccaacgggacccacugguucgugacgcagcggaacuucuacgagccgcagaucaucaccaccgacaacaccuucgugagcggcaacugcgacgucgugaucggcaucgugaacaacacggucuacgacccccugcagcccgagcuggacuccuucaaggaggagcucgacaaguacuucaagaaccacaccagccccgacguggaccugggggacaucuccggcaucaacgccagcguggucaacauccagaaggagaucgaccgccugaacgagguggccaagaaccucaacgagucccugaucgaccugcaggagcucgggaaguacgagcaguacaucaaguggccgugguacaucuggcugggcuucaucgccggccugaucgccaucgugauggucaccaucaugcucugcugcaugaccagcugcugcuccugccugaaggggugcugcagcugcggcuccugcugcaaguucgacgaggacgacagcgagcccgugcugaagggggugaagcuccacuacacgugaggacuaguuauaagacugacuagcccgaugggccucccaacgggcccuccuccccuccuugcaccgagauuaauaaaaaaaaaaaaaaaaaaaaaaaaaaaaaaaaaaaaaaaaaaaaaaaaaaaaaaaaaaaaaaaaugcaucccccccccccccccccccccccccccccccaaaggcucuuuucagagccaccagaauu

SEQ ID NO: 12755 - RNA, 4039 nt, Artificial Sequence
  SARS-CoV-2/Guangdong/GD2020087-P0008/2020__EPI_ISL_413863 spike protein mRNA gc (1-1273)
aggagaaagcuuaccauguucguguuccugguccuccugccccuggugagcucccagugcgugaaccucaccacccgcacgcagcugccgcccgccuacaccaacagcuucacccggggcgucuacuaccccgacaagguguuccgcuccagcgugcugcacuccacccaggaccucuuccugcccuucuucagcaacgucacgugguuccacgccauccacguguccgggaccaacggcaccaagcgguucgacaacccggugcugcccuucaacgacggggucuacuucgcgagcaccgagaaguccaacaucauccgcggcuggaucuucgggacgacccucgacagcaagacccagucccugcugaucgugaacaacgccaccaacguggucaucaaggugugcgaguuccaguucugcaacgaccccuuccucggcguguacuaccacaagaacaacaagagcuggauggaguccgaguuccgggucuacagcuccgccaacaacugcacguucgaguacgugagccagcccuuccugauggaccuggagggcaagcaggggaacuucaagaaccuccgcgaguucguguucaagaacaucgacggcuacuucaagaucuacuccaagcacaccccgaucaaccugguccgggaccugccccagggguucagcgcccucgagccccugguggaccugcccaucggcaucaacaucacccgcuuccagacccuccuggcccugcaccgguccuaccucacgccgggggacagcagcuccggcuggaccgcgggcgccgccgccuacuacgugggguaccugcagccccgcaccuuccugcucaaguacaacgagaacggcaccaucacggacgcggucgacugcgcccuggacccccugagcgagaccaagugcacccucaaguccuucaccguggagaaggggaucuaccagacgagcaacuuccgggugcagcccaccgaguccaucguccgcuucccgaacaucaccaaccugugccccuucggcgagguguucaacgccacccgguucgccagcgucuacgccuggaaccgcaagcggaucuccaacugcguggcggacuacagcgugcuguacaacuccgccagcuucuccacguucaagugcuacggcgucagccccaccaagcucaacgaccugugcuucaccaacguguacgccgacuccuucgugauccgcggggacgagguccgggagaucgcccccggccagaccgggaagaucgccgacuacaacuacaagcugccggacgacuucacgggcugcgugaucgcguggaacagcaacaaccucgacuccaaggucgggggcaacuacaacuaccuguaccgccuguuccgcaagagcaaccucaagcccuucgagcgggacaucuccaccgagaucuaccaggccggcagcacccccugcaacgggguggagggcuucaacugcuacuucccccugcaguccuacggguuccagccgaccaacggcgugggguaccagcccuaccggguggucgugcugagcuucgagcuccugcacgcccccgccacggugugcggccccaagaaguccaccaaccuggucaagaacaagugcgugaacuucaacuucaacggccucaccgggaccggcgugcugaccgagagcaacaagaaguuccugccguuccagcaguucgggcgcgacaucgccgacacgaccgacgcgguccgcgacccccagacccuggagauccucgacaucacccccugcagcuucggcgggguguccgugaucacgccgggcaccaacaccagcaaccaggucgccgugcuguaccaggacgugaacugcaccgagguccccguggccauccacgccgaccagcugacgcccaccuggcggguguacuccaccggcagcaacgucuuccagacccgcgccgggugccucaucggcgcggagcacgugaacaacuccuacgagugcgacauccccaucggggccggcaucugcgccagcuaccagacgcagaccaacuccccgcggcgcgcccggagcguggcgucccagagcaucaucgccuacaccaugucccugggcgccgagaacagcgucgccuacuccaacaacagcaucgccauccccaccaacuucacgaucuccgugaccaccgagauccugcccgugagcaugaccaagacgagcgucgacugcaccauguacaucugcggggacuccaccgagugcagcaaccuccugcugcaguacggcuccuucugcacccagcucaaccgcgcgcugacggggaucgccguggagcaggacaagaacacccaggagguguucgcccaggucaagcagaucuacaagacgcccccgaucaaggacuucggcggguucaacuucagccagauccugcccgaccccuccaagcccagcaagcgguccuucaucgaggaccuccuguucaacaaggugacccuggccgacgccggcuucaucaagcaguacggcgacugccucggggacaucgcggcccgcgaccugaucugcgcccagaaguucaacggccugaccgugcucccgccccugcugaccgacgagaugaucgcccaguacaccagcgcccuccuggcggggaccaucacguccggcuggaccuucggggccggcgccgcccugcagauccccuucgcgaugcagauggccuaccgguucaacggcaucggggucacccagaacgugcucuacgagaaccagaagcugaucgccaaccaguucaacagcgccaucggcaagauccaggacucccugagcuccaccgccagcgcgcucgggaagcugcaggacguggucaaccagaacgcccaggcccugaacacgcucgugaagcagcuguccagcaacuucggcgccaucuccagcgugcugaacgacauccucucccgccuggacaaggucgaggccgaggugcagaucgaccggcugaucaccgggcgccuccagagccugcagaccuacgugacccagcagcugauccgggcggccgagauccgcgccagcgccaaccucgccgcgaccaagauguccgagugcguccugggccagagcaagcggguggacuucugcggcaagggguaccaccugauguccuucccccagagcgccccgcacggcguggucuuccuccacgugacguacguccccgcccaggagaagaacuucaccaccgcccccgcgaucugccacgacgggaaggcccacuucccccgcgagggcguguucguguccaacgggacccacugguucgucacgcagcggaacuucuacgagccgcagaucaucaccaccgacaacaccuucgugagcggcaacugcgacguggucaucggcaucgugaacaacacgguguacgacccccugcagcccgagcuggacuccuucaaggaggagcucgacaaguacuucaagaaccacaccagccccgacgucgaccugggggacaucuccggcaucaacgccagcguggugaacauccagaaggagaucgaccgccugaacgaggucgccaagaaccucaacgagucccugaucgaccugcaggagcucgggaaguacgagcaguacaucaaguggccgugguacaucuggcugggcuucaucgccggccugaucgcgaucgugauggugaccaucaugcucugcugcaugaccagcugcugcuccugccugaaggggugcugcagcugcggcuccugcugcaaguucgacgaggacgacagcgagcccguccugaagggggugaagcuccacuacacgugaggacuaguuauaagacugacuagcccgaugggccucccaacgggcccuccuccccuccuugcaccgagauuaauaaaaaaaaaaaaaaaaaaaaaaaaaaaaaaaaaaaaaaaaaaaaaaaaaaaaaaaaaaaaaaaaugcaucccccccccccccccccccccccccccccccaaaggcucuuuucagagccaccagaauu

SEQ ID NO: 12756 - RNA, 4039 nt, Artificial Sequence
  SARS-CoV-2/Sweden/01/2020__EPI_ISL_411951 spike protein mRNA gc (1-1273)
aggagaaagcuuaccauguucguguuccugguccuccugccccuggugagcucccagugcgugaaccucaccacccgcacgcagcugccgcccgccuacaccaacagcuucacccggggcgucuacuaccccgacaagguguuccgcuccagcgugcugcacuccacccaggaccucuuccugcccuucuucagcaacgucacgugguuccacgccauccacguguccgggaccaacggcaccaagcgguucgacaacccggugcugcccuucaacgacggggucuacuucgcgagcaccgagaaguccaacaucauccgcggcuggaucuucgggacgacccucgacagcaagacccagucccugcugaucgugaacaacgccaccaacguggucaucaaggugugcgaguuccaguucugcaacgaccccuuccucggcguguacuaccacaagaacaacaagagcuggauggaguccgaguuccgggucuacagcuccgccaacaacugcacguucgaguacgugagccagcccuuccugauggaccuggagggcaagcaggggaacuucaagaaccuccgcgaguucguguucaagaacaucgacggcuacuucaagaucuacuccaagcacaccccgaucaaccugguccgggaccugccccagggguucagcgcccucgagccccugguggaccugcccaucggcaucaacaucacccgcuuccagacccuccuggcccugcaccgguccuaccucacgccgggggacagcagcuccggcuggaccgcgggcgccgccgccuacuacgugggguaccugcagccccgcaccuuccugcucaaguacaacgagaacggcaccaucacggacgcggucgacugcgcccuggacccccugagcgagaccaagugcacccucaaguccuucaccguggagaaggggaucuaccagacgagcaacuuccgggugcagcccaccgaguccaucguccgcuucccgaacaucaccaaccugugccccuucggcgagguguucaacgccacccgguucgccagcgucuacgccuggaaccgcaagcggaucuccaacugcguggcggacuacagcgugcuguacaacuccgccagcuucuccacguucaagugcuacggcgucagccccaccaagcucaacgaccugugcuucaccaacguguacgccgacuccuucgugauccgcggggacgagguccggcagaucgcccccggccagaccgggaagaucgccgacuacaacuacaagcugccggacgacuucacgggcugcgugaucgcguggaacagcaacaaccucgacuccaaggucgggggcaacuacaacuaccuguaccgccuguuccgcaagagcaaccucaagcccuucgagcgggacaucuccaccgagaucuaccaggccggcagcacccccugcaacgggguggagggcuucaacugcuacuucccccugcaguccuacggguuccagccgaccaacggcgugggguaccagcccuaccggguggucgugcugagcuucgagcuccugcacgcccccgccacggugugcggccccaagaaguccaccaaccuggucaagaacaagugcgugaacuucaacuucaacggccucaccgggaccggcgugcugaccgagagcaacaagaaguuccugccguuccagcaguucgggcgcgacaucgccgacacgaccgacgcgguccgcgacccccagacccuggagauccucgacaucacccccugcagcuucggcgggguguccgugaucacgccgggcaccaacaccagcaaccaggucgccgugcuguaccaggacgugaacugcaccgagguccccguggccauccacgccgaccagcugacgcccaccuggcggguguacuccaccggcagcaacgucuuccagacccgcgccgggugccucaucggcgcggagcacgugaacaacuccuacgagugcgacauccccaucggggccggcaucugcgccagcuaccagacgcagaccaacuccccgcggcgcgcccggagcguggcgucccagagcaucaucgccuacaccaugucccugggcgccgagaacagcgucgccuacuccaacaacagcaucgccauccccaccaacuucacgaucuccgugaccaccgagauccugcccgugagcaugaccaagacgagcgucgacugcaccauguacaucugcggggacuccaccgagugcagcaaccuccugcugcaguacggcuccuucugcacccagcucaaccgcgcgcugacggggaucgccguggagcaggacaagaacacccaggagguguucgcccaggucaagcagaucuacaagacgcccccgaucaaggacugcggcggguucaacuucagccagauccugcccgaccccuccaagcccagcaagcgguccuucaucgaggaccuccuguucaacaaggugacccuggccgacgccggcuucaucaagcaguacggcgacugccucggggacaucgcggcccgcgaccugaucugcgcccagaaguucaacggccugaccgugcucccgccccugcugaccgacgagaugaucgcccaguacaccagcgcccuccuggcggggaccaucacguccggcuggaccuucggggccggcgccgcccugcagauccccuucgcgaugcagauggccuaccgguucaacggcaucggggucacccagaacgugcucuacgagaaccagaagcugaucgccaaccaguucaacagcgccaucggcaagauccaggacucccugagcuccaccgccagcgcgcucgggaagcugcaggacguggucaaccagaacgcccaggcccugaacacgcucgugaagcagcuguccagcaacuucggcgccaucuccagcgugcugaacgacauccucucccgccuggacaaggucgaggccgaggugcagaucgaccggcugaucaccgggcgccuccagagccugcagaccuacgugacccagcagcugauccgggcggccgagauccgcgccagcgccaaccucgccgcgaccaagauguccgagugcguccugggccagagcaagcggguggacuucugcggcaagggguaccaccugauguccuucccccagagcgccccgcacggcguggucuuccuccacgugacguacguccccgcccaggagaagaacuucaccaccgcccccgcgaucugccacgacgggaaggcccacuucccccgcgagggcguguucguguccaacgggacccacugguucgucacgcagcggaacuucuacgagccgcagaucaucaccaccgacaacaccuucgugagcggcaacugcgacguggucaucggcaucgugaacaacacgguguacgacccccugcagcccgagcuggacuccuucaaggaggagcucgacaaguacuucaagaaccacaccagccccgacgucgaccugggggacaucuccggcaucaacgccagcguggugaacauccagaaggagaucgaccgccugaacgaggucgccaagaaccucaacgagucccugaucgaccugcaggagcucgggaaguacgagcaguacaucaaguggccgugguacaucuggcugggcuucaucgccggccugaucgcgaucgugauggugaccaucaugcucugcugcaugaccagcugcugcuccugccugaaggggugcugcagcugcggcuccugcugcaaguucgacgaggacgacagcgagcccguccugaagggggugaagcuccacuacacgugaggacuaguuauaagacugacuagcccgaugggccucccaacgggcccuccuccccuccuugcaccgagauuaauaaaaaaaaaaaaaaaaaaaaaaaaaaaaaaaaaaaaaaaaaaaaaaaaaaaaaaaaaaaaaaaaugcaucccccccccccccccccccccccccccccccaaaggcucuuuucagagccaccagaauu

SEQ ID NO: 12757 - RNA, 4039 nt, Artificial Sequence
  SARS-CoV-2/Tianmen/HBCDC-HB-07/2020__EPI_ISL_412983 spike protein mRNA gc (1-1273)
aggagaaagcuuaccauguucguguuccugguccuccugccccuggugagcucccagugcgugaaccucaccacccgcacgcagcugccgcccgccuacaccaacagcuucacccggggcgucuacuaccccgacaagguguuccgcuccagcgugcugcacuccacccaggaccucuuccugcccuucuucagcaacgucacgugguuccacgccauccacguguccgggaccaacggcaccaagcgguucgacaacccggugcugcccuucaacgacggggucuacuucgcgagcaccgagaaguccaacaucauccgcggcuggaucuucgggacgacccucgacagcaagacccagucccugcugaucgugaacaacgccaccaacguggucaucaaggugugcgaguuccaguucugcaacgaccccuuccucggcguguacuaccacaagaacaacaagagcuggauggaguccgaguuccgggucuacagcuccgccaacaacugcacguucgaguacgugagccagcccuuccugauggaccuggagggcaagcaggggaacuucaagaaccuccgcgaguucguguucaagaacaucgacggcuacuucaagaucuacuccaagcacaccccgaucaaccugguccgggaccugccccagggguucagcgcccucgagccccugguggaccugcccaucggcaucaacaucacccgcuuccagacccuccuggcccugcaccgguccuaccucacgccgggggacagcagcuccggcuggaccgcgggcgccgccgccuacuacgugggguaccugcagccccgcaccuuccugcucaaguacaacgagaacggcaccaucacggacgcggucgacugcgcccuggacccccugagcgagaccaagugcacccucaaguccuucaccguggagaaggggaucuaccagacgagcaacuuccgggugcagcccaccgaguccaucguccgcuucccgaacaucaccaaccugugccccuucggcgagguguucaacgccacccgguucgccagcgucuacgccuggaaccgcaagcggaucuccaacugcguggcggacuacagcgugcuguacaacuccgccagcuucuccacguucaagugcuacggcgucagccccaccaagcucaacgaccugugcuucaccaacguguacgccgacuccuucgugauccgcggggacgagguccggcagaucgcccccggccagaccgggaagaucgccgacuacaacuacaagcugccggacgacuucacgggcugcgugaucgcguggaacagcaacaaccucgacuccaaggucgggggcaacuacaacuaccuguaccgccuguuccgcaagagcaaccucaagcccuucgagcgggacaucuccaccgagaucuaccaggccggcagcacccccugcaacgggguggagggcuucaacugcuacuucccccugcaguccuacggguuccagccgaccaacggcgugggguaccagcccuaccggguggucgugcugagcuucgagcuccugcacgcccccgccacggugugcggccccaagaaguccaccaaccuggucaagaacaagugcgugaacuucaacuucaacggccucaccgggaccggcgugcugaccgagagcaacaagaaguuccugccguuccagcaguucgggcgcgacaucgccgacacgaccgacgcgguccgcgacccccagacccuggagauccucgacaucacccccugcagcuucggcgggguguccgugaucacgccgggcaccaacaccagcaaccaggucgccgugcuguaccaggaccugaacugcaccgaggugcccgucgccauccacgccgaccagcucacgcccaccuggcggguguacuccaccggcagcaacguguuccagacccgcgccgggugccugaucggcgcggagcacgucaacaacuccuacgagugcgacauccccaucggggccggcaucugcgccagcuaccagacgcagaccaacuccccgcggcgcgcccggagcguggcgucccagagcaucaucgccuacaccaugucccugggcgccgagaacagcguggccuacuccaacaacagcaucgccauccccaccaacuucacgaucuccgucaccaccgagauccuccccgugagcaugaccaagacgagcguggacugcaccauguacaucugcggggacuccaccgagugcagcaaccugcugcuccaguacggcuccuucugcacccagcugaaccgcgcgcugacggggaucgccgucgagcaggacaagaacacccaggagguguucgcccaggugaagcagaucuacaagacgcccccgaucaaggacuucggcggguucaacuucagccagauccuccccgaccccuccaagcccagcaagcgguccuucaucgaggaccugcuguucaacaaggucacccucgccgacgccggcuucaucaagcaguacggcgacugccugggggacaucgcggcccgcgaccugaucugcgcccagaaguucaacggccucaccgugcugccgccccugcucaccgacgagaugaucgcccaguacaccagcgcccugcuggcggggaccaucacguccggcuggaccuucggggccggcgccgcccuccagauccccuucgcgaugcagauggccuaccgguucaacggcaucggggugacccagaacguccuguacgagaaccagaagcugaucgccaaccaguucaacagcgccaucggcaagauccaggacucccucagcuccaccgccagcgcgcuggggaagcugcaggacguggugaaccagaacgcccaggcccucaacacgcuggucaagcagcuguccagcaacuucggcgccaucuccagcgugcucaacgacauccugucccgccuggacaagguggaggccgagguccagaucgaccggcucaucaccgggcgccugcagagccugcagaccuacgugacccagcagcucauccgggcggccgagauccgcgccagcgccaaccuggccgcgaccaagauguccgagugcgugcugggccagagcaagcgggucgacuucugcggcaagggguaccaccucauguccuucccccagagcgccccgcacggcgugguguuccugcacgucacguacgugcccgcccaggagaagaacuucaccaccgcccccgcgaucugccacgacgggaaggcccacuucccccgcgagggcgucuucguguccaacgggacccacugguucgugacgcagcggaacuucuacgagccgcagaucaucaccaccgacaacaccuucgucagcggcaacugcgacguggugaucggcaucgucaacaacacgguguacgacccccugcagcccgagcucgacuccuucaaggaggagcuggacaaguacuucaagaaccacaccagccccgacguggaccugggggacaucuccggcaucaacgccagcgucgugaacauccagaaggagaucgaccgccucaacgagguggccaagaaccugaacgagucccugaucgaccuccaggagcuggggaaguacgagcaguacaucaaguggccgugguacaucuggcugggcuucaucgccggccucaucgcgaucgucauggugaccaucaugcugugcugcaugaccagcugcugcuccugccugaaggggugcugcagcugcggcuccugcugcaaguucgacgaggacgacagcgagcccgugcucaagggggucaagcugcacuacacgugaggacuaguuauaagacugacuagcccgaugggccucccaacgggcccuccuccccuccuugcaccgagauuaauaaaaaaaaaaaaaaaaaaaaaaaaaaaaaaaaaaaaaaaaaaaaaaaaaaaaaaaaaaaaaaaaugcaucccccccccccccccccccccccccccccccaaaggcucuuuucagagccaccagaauu

SEQ ID NO: 12758 - RNA, 4039 nt, Artificial Sequence
  SARS-CoV-2/Hong Kong/case42_VM20002493/2020__EPI_ISL_414527 spike protein mRNA gc (1-1273)
aggagaaagcuuaccauguucguguuccugguccuccugccccuggugagcucccagugcgugaaccucaccacccgcacgcagcugccgcccgccuacaccaacagcuucacccggggcgucuacuaccccgacaagguguuccgcuccagcgugcugcacuccacccaggaccucuuccugcccuucuucagcaacgucacgugguuccacgccauccacguguccgggaccaacggcaccaagcgguucgacaacccggugcugcccuucaacgacggggucuacuucgcgagcaccgagaaguccaacaucauccgcggcuggaucuucgggacgacccucgacagcaagacccagucccugcugaucgugaacaacgccaccaacguggucaucaaggugugcgaguuccaguucugcaacgaccccuuccucggcguguacuaccacaagaacaacaagagcuggauggaguccgaguuccgggucuacagcuccgccaacaacugcacguucgaguacgugagccagcccuuccugauggaccuggagggcaagcaggggaacuucaagaaccuccgcgaguucguguucaagaacaucgacggcuacuucaagaucuacuccaagcacaccccgaucaaccugguccgggaccugccccagggguucagcgcccucgagccccugguggaccugcccaucggcaucaacaucacccgcuuccagacccuccuggcccugcaccgguccuaccucacgccgggggacagcagcuccggcuggaccgcgggcgccgccgccuacuacgugggguaccugcagccccgcaccuuccugcucaaguacaacgagaacggcaccaucacggacgcggucgacugcgcccuggacccccugagcgagaccaagugcacccucaaguccuucaccguggagaaggggaucuaccagacgagcaacuuccgggugcagcccaccgaguccaucguccgcuucccgaacaucaccaaccugugccccuucggcgagguguucaacgccacccgguucgccagcgucuacgccuggaaccgcaagcggaucuccaacugcguggcggacuacagcgugcuguacaacuccgccagcuucuccacguucaagugcuacggcgucagccccaccaagcucaacgaccugugcuucaccaacguguacgccgacuccuucgugauccgcggggacgagguccggcagaucgcccccggccagaccgggaagaucgccgacuacaacuacaagcugccggacgacuucacgggcugcgugaucgcguggaacagcaacaaccucgacuccaaggucgggggcaacuacaacuaccuguaccgccuguuccgcaagagcaaccucaagcccuucgagcgggacaucuccaccgagaucuaccaggccggcagcacccccugcaacgggguggagggcuucaacugcuacuucccccugcaguccuacggguuccagccgaccaacggcgugggguaccagcccuaccggguggucgugcugagcuucgagcuccugcacgcccccgccacggugugcggccccaagaaguccaccaaccuggucaagaacaagugcgugaacuucaacuucaacggccucaccgggaccggcgugcugaccgagagcaacaagaaguuccugccguuccagcaguucgggcgcgacaucgccgacacgaccgacgcgguccgcgacccccagacccuggagauccucgacaucacccccugcagcuucggcgggguguccgugaucacgccgggcaccaacaccagcaaccaggucgccgugcuguaccaggacgugaacugcaccgagguccccguggccauccacgccgaccagcugacgcccaccuggcggguguacuccaccggcagcaacgucuuccagacccgcgccgggugccucaucggcgcggagcacgugaacaacuccuacgagugcgacauccccaucggggccggcaucugcgccagcuaccagacgcagaccaacuccccgcggcgcgcccggagcguggcgucccagagcaucaucgccuacaccaugucccugggcgccgagaacagcgucgccuacuccaacaacagcaucgccauccccaccaacuucgcgaucuccgugacgaccgagauccugcccgugagcaugaccaagaccagcgucgacugcacgauguacaucugcggggacuccaccgagugcagcaaccuccugcugcaguacggcuccuucugcacccagcucaaccgcgcccugaccgggaucgccguggagcaggacaagaacacgcaggagguguucgcccaggucaagcagaucuacaagacgcccccgaucaaggacuucggcggguucaacuucagccagauccugcccgaccccuccaagcccagcaagcgguccuucaucgaggaccuccuguucaacaaggugacccuggccgacgcgggcuucaucaagcaguacggcgacugccucggggacaucgccgcccgcgaccugaucugcgcccagaaguucaacggccugaccgugcucccgccccugcugaccgacgagaugaucgcccaguacaccagcgcgcuccuggccgggaccaucaccuccggcuggacguucggggccggcgccgcgcugcagauccccuucgccaugcagauggccuaccgguucaacggcaucggggucacccagaacgugcucuacgagaaccagaagcugaucgccaaccaguucaacagcgccaucggcaagauccaggacucccugagcuccaccgcgagcgcccucgggaagcugcaggacguggucaaccagaacgcccaggcccugaacacccucgugaagcagcuguccagcaacuucggcgccaucuccagcgugcugaacgacauccucucccgccuggacaaggucgaggcggaggugcagaucgaccggcugaucacggggcgccuccagagccugcagaccuacgugacccagcagcugauccgggccgccgagauccgcgccagcgccaaccucgcggccaccaagauguccgagugcguccugggccagagcaagcggguggacuucugcggcaagggguaccaccugauguccuucccccagagcgccccgcacggcguggucuuccuccacgugaccuacguccccgcccaggagaagaacuucacgaccgcgcccgccaucugccacgacgggaaggcccacuucccccgcgagggcguguucguguccaacgggacccacugguucgucacccagcggaacuucuacgagccgcagaucaucacgaccgacaacaccuucgugagcggcaacugcgacguggucaucggcaucgugaacaacaccguguacgacccccugcagcccgagcuggacuccuucaaggaggagcucgacaaguacuucaagaaccacacgagccccgacgucgaccugggggacaucuccggcaucaacgccagcguggugaacauccagaaggagaucgaccgccugaacgaggucgccaagaaccucaacgagucccugaucgaccugcaggagcucgggaaguacgagcaguacaucaaguggccgugguacaucuggcugggcuucaucgcgggccugaucgccaucgugauggugaccaucaugcucugcugcaugaccagcugcugcuccugccugaaggggugcugcagcugcggcuccugcugcaaguucgacgaggacgacagcgagcccguccugaagggggugaagcuccacuacaccugaggacuaguuauaagacugacuagcccgaugggccucccaacgggcccuccuccccuccuugcaccgagauuaauaaaaaaaaaaaaaaaaaaaaaaaaaaaaaaaaaaaaaaaaaaaaaaaaaaaaaaaaaaaaaaaaugcaucccccccccccccccccccccccccccccccaaaggcucuuuucagagccaccagaauu

SEQ ID NO: 12759 - RNA, 4039 nt, Artificial Sequence
  SARS-CoV-2/USA/CruiseA-23/2020__EPI_ISL_414482 spike protein mRNA gc (1-1273)
aggagaaagcuuaccauguucguguuccugguccuccugccccuggugagcucccagugcgugaaccucaccacccgcacgcagcugccgcccgccuacaccaacagcuucacccggggcgucuacuaccccgacaagguguuccgcuccagcgugcugcacuccacccaggaccucuuccugcccuucuucagcaacgucacgugguuccacgccauccacguguccgggaccaacggcaccaagcgguucgacaacccggugcugcccuucaacgacggggucuacuucgcgagcaccgagaaguccaacaucauccgcggcuggaucuucgggacgacccucgacagcaagacccagucccugcugaucgugaacaacgccaccaacguggucaucaaggugugcgaguuccaguucugcaacgaccccuuccucggcguguacuaccacaagaacaacaagagcuggauggaguccgaguuccgggucuacagcuccgccaacaacugcacguucgaguacgugagccagcccuuccugauggaccuggaggugaagcagggcaacuucaagaaccuccgcgaguucgucuucaagaacaucgacggguacuucaagaucuacuccaagcacaccccgaucaaccuggugcgggaccugccccagggcuucagcgcccucgagccccugguggaccugcccaucgggaucaacaucacccgcuuccagacccuccuggcccugcaccgguccuaccucacgccgggcgacagcagcuccggguggaccgcgggcgccgccgccuacuacgucggcuaccugcagccccgcaccuuccugcucaaguacaacgagaacgggaccaucacggacgcgguggacugcgcccuggacccccugagcgagaccaagugcacccucaaguccuucaccguggagaagggcaucuaccagacgagcaacuuccggguccagcccaccgaguccaucgugcgcuucccgaacaucaccaaccugugccccuucggggaggucuucaacgccacccgguucgccagcguguacgccuggaaccgcaagcggaucuccaacugcguggcggacuacagcguccuguacaacuccgccagcuucuccacguucaagugcuacggcgugagccccaccaagcucaacgaccugugcuucaccaacguguacgccgacuccuucgucauccgcggcgacgaggugcggcagaucgcccccgggcagaccggcaagaucgccgacuacaacuacaagcugccggacgacuucacggggugcgugaucgcguggaacagcaacaaccucgacuccaaggucggcgggaacuacaacuaccuguaccgccuguuccgcaagagcaaccucaagcccuucgagcgggacaucuccaccgagaucuaccaggccggcagcacccccugcaacggcguggagggguucaacugcuacuucccccugcaguccuacggcuuccagccgaccaacggggugggcuaccagcccuaccgggucguggugcugagcuucgagcuccugcacgcccccgccacggucugcgggcccaagaaguccaccaaccuggugaagaacaagugcgugaacuucaacuucaacggccucaccggcaccgggguccugaccgagagcaacaagaaguuccugccguuccagcaguucggccgcgacaucgccgacacgaccgacgcggugcgcgacccccagacccuggagauccucgacaucacccccugcagcuucgggggcguguccgucaucacgccggggaccaacaccagcaaccagguggccgugcuguaccaggacgucaacugcaccgaggugcccguggccauccacgccgaccagcugacgcccaccuggcgggucuacuccaccggcagcaacguguuccagacccgcgccggcugccucaucggggcggagcacgugaacaacuccuacgagugcgacauccccaucggcgccgggaucugcgccagcuaccagacgcagaccaacuccccgcggcgcgcccggagcgucgcgucccagagcaucaucgccuacaccaugucccugggcgccgagaacagcguggccuacuccaacaacagcaucgccauccccaccaacuucacgaucuccgugaccaccgagauccugcccgucagcaugaccaagacgagcguggacugcaccauguacaucugcggcgacuccaccgagugcagcaaccuccugcugcaguacggguccuucugcacccagcucaaccgcgcgcugacgggcaucgccguggagcaggacaagaacacccaggaggucuucgcccaggugaagcagaucuacaagacgcccccgaucaaggacuucgggggcuucaacuucagccagauccugcccgaccccuccaagcccagcaagcgguccuucaucgaggaccuccuguucaacaaggugacccuggccgacgccggguucaucaagcaguacggcgacugccucggcgacaucgcggcccgcgaccugaucugcgcccagaaguucaacgggcugaccguccucccgccccugcugaccgacgagaugaucgcccaguacaccagcgcccuccuggcgggcaccaucacguccggguggaccuucggcgccggggccgcccugcagauccccuucgcgaugcagauggccuaccgguucaacggcaucggcgugacccagaacgugcucuacgagaaccagaagcugaucgccaaccaguucaacagcgccaucgggaagauccaggacucccugagcuccaccgccagcgcgcucggcaagcugcaggacgucgugaaccagaacgcccaggcccugaacacgcucgugaagcagcuguccagcaacuucggggccaucuccagcguccugaacgacauccucucccgccuggacaagguggaggccgaggugcagaucgaccggcugaucaccggccgccuccagagccugcagaccuacgucacccagcagcugauccgggcggccgagauccgcgccagcgccaaccucgccgcgaccaagauguccgagugcgugcuggggcagagcaagcggguggacuucugcggcaagggcuaccaccugauguccuucccccagagcgccccgcacggggucguguuccuccacgucacguacgugcccgcccaggagaagaacuucaccaccgcccccgcgaucugccacgacggcaaggcccacuucccccgcgaggggguguucgucuccaacggcacccacugguucgugacgcagcggaacuucuacgagccgcagaucaucaccaccgacaacaccuucgugagcgggaacugcgacgucgugaucggcaucgugaacaacacggucuacgacccccugcagcccgagcuggacuccuucaaggaggagcucgacaaguacuucaagaaccacaccagccccgacguggaccugggcgacaucuccgggaucaacgccagcguggucaacauccagaaggagaucgaccgccugaacgagguggccaagaaccucaacgagucccugaucgaccugcaggagcucggcaaguacgagcaguacaucaaguggccgugguacaucuggcugggguucaucgccggccugaucgcgaucgugauggucaccaucaugcucugcugcaugaccagcugcugcuccugccugaagggcugcugcagcugcggguccugcugcaaguucgacgaggacgacagcgagcccgugcugaagggcgugaagcuccacuacacgugaggacuaguuauaagacugacuagcccgaugggccucccaacgggcccuccuccccuccuugcaccgagauuaauaaaaaaaaaaaaaaaaaaaaaaaaaaaaaaaaaaaaaaaaaaaaaaaaaaaaaaaaaaaaaaaaugcaucccccccccccccccccccccccccccccccaaaggcucuuuucagagccaccagaauu

SEQ ID NO: 12760 - RNA, 4039 nt, Artificial Sequence
  SARS-CoV-2/Hong Kong/case85_VM20002868/2020__EPI_ISL_414519 spike protein mRNA gc (1-1273)
aggagaaagcuuaccauguucguguuccugguccucgugccccuggugagcucccagugcgucaaccugaccacccgcacgcagcucccgcccgccuacaccaacagcuucacccggggcguguacuaccccgacaagguguuccgcuccagcguccugcacuccacccaggaccuguuccuccccuucuucagcaacgugacgugguuccacgccauccacguguccgggaccaacggcaccaagcgguucgacaacccgguccugcccuucaacgacgggguguacuucgcgagcaccgagaaguccaacaucauccgcggcuggaucuucgggacgacccuggacagcaagacccagucccuccugaucgugaacaacgccaccaacgucgugaucaaggugugcgaguuccaguucugcaacgaccccuuccugggcgucuacuaccacaagaacaacaagagcuggauggaguccgaguuccggguguacagcuccgccaacaacugcacguucgaguacgugagccagcccuuccucauggaccuggagggcaagcaggggaacuucaagaaccugcgcgaguucgucuucaagaacaucgacggcuacuucaagaucuacuccaagcacaccccgaucaaccucgugcgggaccugccccagggguucagcgcccuggagccccucguggaccugcccaucggcaucaacaucacccgcuuccagacccugcucgcccugcaccgguccuaccugacgccgggggacagcagcuccggcuggaccgcgggcgccgccgccuacuacgucggguaccuccagccccgcaccuuccugcugaaguacaacgagaacggcaccaucacggacgcgguggacugcgcccucgacccccugagcgagaccaagugcacccugaaguccuucaccguggagaaggggaucuaccagacgagcaacuuccggguccagcccaccgaguccaucgugcgcuucccgaacaucaccaaccucugccccuucggcgaggucuucaacgccacccgguucgccagcguguacgccuggaaccgcaagcggaucuccaacugcguggcggacuacagcguccuguacaacuccgccagcuucuccacguucaagugcuacggcgugagccccaccaagcugaacgaccucugcuucaccaacguguacgccgacuccuucgucauccgcggggacgaggugcggcagaucgcccccggccagaccgggaagaucgccgacuacaacuacaagcugccggacgacuucacgggcugcgugaucgcguggaacagcaacaaccuggacuccaaggucgggggcaacuacaacuaccucuaccgccuguuccgcaagagcaaccugaagcccuucgagcgggacaucuccaccgagaucuaccaggccggcagcacccccugcaacgggguggagggcuucaacugcuacuucccccuccaguccuacggguuccagccgaccaacggcgugggguaccagcccuaccgggucguggugcugagcuucgagcugcuccacgcccccgccacggucugcggccccaagaaguccaccaaccuggugaagaacaagugcgugaacuucaacuucaacggccugaccgggaccggcguccucaccgagagcaacaagaaguuccugccguuccagcaguucgggcgcgacaucgccgacacgaccgacgcggugcgcgacccccagacccuggagauccuggacaucacccccugcagcuucggcgggguguccgucaucacgccgggcaccaacaccagcaaccagguggccgugcucuaccaggacgucaacugcaccgaggugcccguggccauccacgccgaccagcugacgcccaccuggcgggucuacuccaccggcagcaacguguuccagacccgcgccgggugccugaucggcgcggagcacgugaacaacuccuacgagugcgacauccccaucggggccggcaucugcgccagcuaccagacgcagaccaacuccccgcggcgcgcccggagcgucgcgucccagagcaucaucgccuacaccaugucccucggcgccgagaacagcguggccuacuccaacaacagcaucgccauccccaccaacuucacgaucuccgugaccaccgagauccugcccgucagcaugaccaagacgagcguggacugcaccauguacaucugcggggacuccaccgagugcagcaaccugcuccugcaguacggcuccuucugcacccagcugaaccgcgcgcucacggggaucgccguggagcaggacaagaacacccaggaggucuucgcccaggugaagcagaucuacaagacgcccccgaucaaggacuucggcggguucaacuucagccagauccugcccgaccccuccaagcccagcaagcgguccuucaucgaggaccuccuguucaacaaggugacccuggccgacgccggcuucaucaagcaguacggcgacugccugggggacaucgcggcccgcgaccucaucugcgcccagaaguucaacggccugaccguccugccgccccuccugaccgacgagaugaucgcccaguacaccagcgcccugcucgcggggaccaucacguccggcuggaccuucggggccggcgccgcccugcagauccccuucgcgaugcagauggccuaccgguucaacggcaucggggugacccagaacgugcuguacgagaaccagaagcucaucgccaaccaguucaacagcgccaucggcaagauccaggacucccugagcuccaccgccagcgcgcuggggaagcuccaggacgucgugaaccagaacgcccaggcccugaacacgcuggugaagcagcucuccagcaacuucggcgccaucuccagcguccugaacgacauccugucccgccucgacaagguggaggccgaggugcagaucgaccggcugaucaccgggcgccugcagagccuccagaccuacgucacccagcagcugauccgggcggccgagauccgcgccagcgccaaccuggccgcgaccaagauguccgagugcgugcucggccagagcaagcggguggacuucugcggcaagggguaccaccugauguccuucccccagagcgccccgcacggcgucguguuccugcacgucacguacgugcccgcccaggagaagaacuucaccaccgcccccgcgaucugccacgacgggaaggcccacuucccccgcgagggcguguucgucuccaacgggacccacugguucgugacgcagcggaacuucuacgagccgcagaucaucaccaccgacaacaccuucgugagcggcaacugcgacgucgugaucggcaucgugaacaacacggucuacgacccccuccagcccgagcuggacuccuucaaggaggagcuggacaaguacuucaagaaccacaccagccccgacguggaccucggggacaucuccggcaucaacgccagcguggucaacauccagaaggagaucgaccgccugaacgagguggccaagaaccugaacgagucccucaucgaccugcaggagcuggggaaguacgagcaguacaucaaguggccgugguacaucuggcucggcuucaucgccggccugaucgcgaucgugauggucaccaucaugcugugcugcaugaccagcugcugcuccugccucaaggggugcugcagcugcggcuccugcugcaaguucgacgaggacgacagcgagcccgugcugaagggggugaagcugcacuacacgugaggacuaguuauaagacugacuagcccgaugggccucccaacgggcccuccuccccuccuugcaccgagauuaauaaaaaaaaaaaaaaaaaaaaaaaaaaaaaaaaaaaaaaaaaaaaaaaaaaaaaaaaaaaaaaaaugcaucccccccccccccccccccccccccccccccaaaggcucuuuucagagccaccagaauu

SEQ ID NO: 12761 - RNA, 4039 nt, Artificial Sequence
  SARS-CoV-2/England/200990660/2020__EPI_ISL_414523 spike protein mRNA gc (1-1273)
aggagaaagcuuaccauguucguguuccugguccuccugccccuggugagcucccagugcgugaaccucaccacccgcacgcagcugccgcccgccuacaccaacagcuucacccggggcgucuacuaccccgacaagguguuccgcuccagcgugcugcacuccacccaggaccucuuccugcccuucuucagcaacgucacgugguuccacgccauccacguguccgggaccaacggcaccaagcgguucgacaacccggugcugcccuucaacgacggggucuacuucgcgagcaccgagaaguccaacaucauccgcggcuggaucuucgggacgacccucgacagcaagacccagucccugcugaucgugaacaacgccaccaacguggucaucaaggugugcgaguuccaguucugcaacgaccccuuccucggcguguacuaccacaagaacaacaagagcuggauggaguccgaguuccgggucuacagcuccgccaacaacugcacguucgaguacgugagccagcccuuccugauggaccuggagggcaagcaggggaacuucaagaaccuccgcgaguucguguucaagaacaucgacggcuacuucaagaucuacuccaagcacaccccgaucaaccugguccgggaccugccccagggguucagcgcccucgagccccugguggaccugcccaucggcaucaacaucacccgcuuccagacccuccuggcccugcaccgguccuaccucacgccgggggacagcagcuccggcuggaccgcgggcgccgccgccuacuacgugggguaccugcagccccgcaccuuccugcucaaguacaacgagaacggcaccaucacggacgcggucgacugcgcccuggacccccugagcgagaccaagugcacccucaaguccuucaccguggagaaggggaucuaccagacgagcaacuuccgggugcagcccaccgaguccaucguccgcuucccgaacaucaccaaccugugccccuucggcgagguguucaacgccacccgguucgccagcgucuacgccuggaaccgcaagcggaucuccaacugcguggcggacuacagcgugcuguacaacuccgccagcuucuccacguucaagugcuacggcgucagccccaccaagcucaacgaccugugcuucaccaacguguacgccgacuccuucgugauccgcggggacgagguccggcagaucgcccccggccagaccgggaagaucgccgacuacaacuacaagcugccggacgacuucacgggcugcgugaucgcguggaacagcaacaaccucgacuccaaggucgggggcaacuacaacuaccuguaccgccuguuccgcaagagcaaccucaagcccuucgagcgggacaucuccaccgagaucuaccaggccggcagcacccccugcaacgggguggagggcuucaacugcuacuucccccugcaguccuacggguuccagccgaccaacggcgugggguaccagcccuaccggguggucgugcugagcuucgagcuccugcacgcccccgccacggugugcggccccaagaaguccaccaaccuggucaagaacaagugcgugaacuucaacuucaacggccucaccgggaccggcgugcugaccgagagcaacaagaaguuccugccguuccagcaguucgggcgcgacaucgccgacacgaccgacgcgguccgcgacccccagacccuggagauccucgacaucacccccugcagcuucggcgggguguccgugaucacgccgggcaccaacaccagcaaccaggucgccgugcuguaccagggcgugaacugcaccgagguccccguggccauccacgccgaccagcugacgcccaccuggcggguguacuccaccgggagcaacgucuuccagacccgcgccggcugccucaucggggcggagcacgugaacaacuccuacgagugcgacauccccaucggcgccggcaucugcgccagcuaccagacgcagaccaacuccccgcggcgcgcccggagcguggcgucccagagcaucaucgccuacaccaugucccugggggccgagaacagcgucgccuacuccaacaacagcaucgccauccccaccaacuucacgaucuccgugaccaccgagauccugcccgugagcaugaccaagacgagcgucgacugcaccauguacaucugcggcgacuccaccgagugcagcaaccuccugcugcaguacggguccuucugcacccagcucaaccgcgcgcugacgggcaucgccguggagcaggacaagaacacccaggagguguucgcccaggucaagcagaucuacaagacgcccccgaucaaggacuucgggggcuucaacuucagccagauccugcccgaccccuccaagcccagcaagcgguccuucaucgaggaccuccuguucaacaaggugacccuggccgacgccggcuucaucaagcaguacggggacugccucggcgacaucgcggcccgcgaccugaucugcgcccagaaguucaacgggcugaccgugcucccgccccugcugaccgacgagaugaucgcccaguacaccagcgcccuccuggcgggcaccaucacguccggguggaccuucggcgccggcgccgcccugcagauccccuucgcgaugcagauggccuaccgguucaacgggaucggcgucacccagaacgugcucuacgagaaccagaagcugaucgccaaccaguucaacagcgccaucgggaagauccaggacucccugagcuccaccgccagcgcgcucggcaagcugcaggacguggucaaccagaacgcccaggcccugaacacgcucgugaagcagcuguccagcaacuucggggccaucuccagcgugcugaacgacauccucucccgccuggacaaggucgaggccgaggugcagaucgaccggcugaucaccggccgccuccagagccugcagaccuacgugacccagcagcugauccgggcggccgagauccgcgccagcgccaaccucgccgcgaccaagauguccgagugcguccugggccagagcaagcggguggacuucugcgggaagggcuaccaccugauguccuucccccagagcgccccgcacgggguggucuuccuccacgugacguacguccccgcccaggagaagaacuucaccaccgcccccgcgaucugccacgacggcaaggcccacuucccccgcgaggggguguucguguccaacggcacccacugguucgucacgcagcggaacuucuacgagccgcagaucaucaccaccgacaacaccuucgugagcggcaacugcgacguggucaucgggaucgugaacaacacgguguacgacccccugcagcccgagcuggacuccuucaaggaggagcucgacaaguacuucaagaaccacaccagccccgacgucgaccugggcgacaucuccgggaucaacgccagcguggugaacauccagaaggagaucgaccgccugaacgaggucgccaagaaccucaacgagucccugaucgaccugcaggagcucggcaaguacgagcaguacaucaaguggccgugguacaucuggcugggcuucaucgccgggcugaucgcgaucgugauggugaccaucaugcucugcugcaugaccagcugcugcuccugccugaagggcugcugcagcugcggguccugcugcaaguucgacgaggacgacagcgagcugguccucaagggcgugaagcugcacuacacgugaggacuaguuauaagacugacuagcccgaugggccucccaacgggcccuccuccccuccuugcaccgagauuaauaaaaaaaaaaaaaaaaaaaaaaaaaaaaaaaaaaaaaaaaaaaaaaaaaaaaaaaaaaaaaaaaugcaucccccccccccccccccccccccccccccccaaaggcucuuuucagagccaccagaauu

SEQ ID NO: 12762 - RNA, 4039 nt, Artificial Sequence
  SARS-CoV-2/Australia/NSW09/2020__EPI_ISL_413595 spike protein mRNA gc (1-1273)
aggagaaagcuuaccauguucguguuccugguccuccugccccuggugagcucccagugcgugaaccucaccacccgcacgcagcugccgcccgccuacaccaacagcuucacccggggcgucuacuaccccgacaagguguuccgcuccagcgugcugcacuccacccaggaccucuuccugcccuucuucagcaacgucacgugguuccacgccauccacguguccgggaccaacggcaccaagcgguucgacaacccggugcugcccuucaacgacggggucuacuucgcgagcaccgagaaguccaacaucauccgcggcuggaucuucgggacgacccucgacagcaagacccagucccugcugaucgugaacaacgccaccaacguggucaucaaggugugcgaguuccaguucugcaacgaccccuuccucggcguguacuaccacaagaacaacaagagcuggauggaguccgaguuccgggucuacagcuccgccaacaacugcacguucgaguacgugagccagcccuuccugauggaccuggagggcaagcaggggaacuucaagaaccuccgcgaguucguguucaagaacaucgacggcuacuucaagaucuacuccaagcacaccccgaucaaccugguccgggaccugccccagggguucagcgcccucgagccccugguggaccugcccaucggcaucaacaucacccgcuuccagacccuccuggcccugcaccgguccuaccucacgccgggggacagcagcuccggcuggaccgcgggcgccgccgccuacuacgugggguaccugcagccccgcaccuuccugcucaaguacaacgagaacggcaccaucacggacgcggucgacugcgcccuggacccccugagcgagaccaagugcacccucaaguccuucaccguggagaaggggaucuaccagacgagcaacuuccgggugcagcccaccgaguccaucguccgcuucccgaacaucaccaaccugugccccuucggcgagguguucaacgccacccgguucgccagcgucuacgccuggaaccgcaagcggaucuccaacugcguggcggacuacagcgugcuguacaacuccgccagcuucuccacguucaagugcuacggcgucagccccaccaagcucaacgaccugugcuucaccaacguguacgccgacuccuucgugauccgcggggacgagguccggcagaucgcccccggccagaccgggaagaucgccgacuacaacuacaagcugccggacgacuucacgggcugcgugaucgcguggaacagcaacaaccucgacuccaaggucgggggcaacuacaacuaccuguaccgccuguuccgcaagagcaaccucaagcccuucgagcgggacaucuccaccgagaucuaccaggccggcagcacccccugcaacgggguggagggcuucaacugcuacuucccccugcaguccuacggguuccagccgaccaacggcgugggguaccagcccuaccggguggucgugcugagcuucgagcuccugcacgcccccgccacggugugcggccccaagaaguccaccaaccuggucaagaacaagugcgugaacuucaacuucaacggccucaccgggaccggcgugcugaccgagagcaacaagaaguuccugccguuccagcaguucgggcgcgacaucgccgacacgaccgacgcgguccgcgacccccagacccuggagauccucgacaucacccccugcagcuucggcgggguguccgugaucacgccgggcaccaacaccagcaaccaggucgccgugcuguaccaggacgugaacugcaccgagguccccguggccauccacgccgaccagcugacgcccaccuggcggguguacuccaccggcagcaacgucuuccagacccgcgccgggugccucaucggcgcggagcacgugaacaacuccuacgagugcgacauccccaucggggccggcaucugcgccagcuaccagacgcagaccaacuccccgcggcgcgcccggagcguggcgucccagagcaucaucgccuacaccaugucccugggcgccgagaacagcgucgccuacuccaacaacagcaucgccauccccaccaacuucacgaucuccgugaccaccgagauccugcccgugagcaugaccaagacgagcgucgacugcaccauguacaucugcggggacuccaccgagugcagcaaccuccugcugcaguacggcuccuucugcacccagcucaaccgcgcgcugacggggaucgccguggagcaggacaagaacacccaggagguguucgcccaggucaagcagaucuacaagacgcccccgaucaaggacuucggcggguucaacuucagccagauccugcccgaccccuccaagcccagcaagcgguccuucaucgaggaccuccuguucaacaaggugacccuggccgacgccggcuucaucaagcaguacggcgacugccucggggacaucgcggcccgcgaccugaucugcgcccagaaguucaacggccugaccgugcucccgccccugcugaccgacgagaugaucgcccaguacaccagcgcccuccuggcggggaccaucacguccggcuggaccuucggggccggcgccgcccugcagauccccuucgcgaugcagauggccuaccgguucaacggcaucggggucacccagaacgugcucuacgagaaccagaagcugaucgccaaccaguucaacagcgccaucggcaagauccaggacucccugagcuucaccgccuccgcgcucgggaagcugcaggacguggucaaccagaacgcccaggcccugaacacgcucgugaagcagcugagcuccaacuucggcgccaucagcuccgugcugaacgacauccucagccgccuggacaaggucgaggccgaggugcagaucgaccggcugaucaccgggcgccuccagucccugcagaccuacgugacccagcagcugauccgggcggccgagauccgcgccagcgccaaccucgccgcgaccaagaugagcgagugcguccugggccaguccaagcggguggacuucugcggcaagggguaccaccugaugagcuucccccaguccgccccgcacggcguggucuuccuccacgugacguacguccccgcccaggagaagaacuucaccaccgcccccgcgaucugccacgacgggaaggcccacuucccccgcgagggcguguucgugagcaacgggacccacugguucgucacgcagcggaacuucuacgagccgcagaucaucaccaccgacaacaccuucguguccggcaacugcgacguggucaucggcaucgugaacaacacgguguacgacccccugcagcccgagcuggacagcuucaaggaggagcucgacaaguacuucaagaaccacaccucccccgacgucgaccugggggacaucagcggcaucaacgccuccguggugaacauccagaaggagaucgaccgccugaacgaggucgccaagaaccucaacgagagccugaucgaccugcaggagcucgggaaguacgagcaguacaucaaguggccgugguacaucuggcugggcuucaucgccggccugaucgcgaucgugauggugaccaucaugcucugcugcaugaccuccugcugcagcugccugaaggggugcugcuccugcggcagcugcugcaaguucgacgaggacgacuccgagcccguccugaagggggugaagcuccacuacacgugaggacuaguuauaagacugacuagcccgaugggccucccaacgggcccuccuccccuccuugcaccgagauuaauaaaaaaaaaaaaaaaaaaaaaaaaaaaaaaaaaaaaaaaaaaaaaaaaaaaaaaaaaaaaaaaaugcaucccccccccccccccccccccccccccccccaaaggcucuuuucagagccaccagaauu

SEQ ID NO: 12763 - RNA, 4039 nt, Artificial Sequence
  SARS-CoV-2/Australia/NSW10/2020__EPI_ISL_413596 spike protein mRNA gc (1-1273)
aggagaaagcuuaccauguucguguuccugguccuccugccccuggugagcucccagugcgugaaccucaccacccgcacgcagcugccgcccgccuacaccaacagcuucacccggggcgucuacuaccccgacaagguguuccgcuccagcgugcugcacuccacccaggaccucuuccugcccuucuucagcaacgucacgugguuccacgccauccacguguccgggaccaacggcaccaagcgguucgacaacccggugcugcccuucaacgacggggucuacuucgcgagcaccgagaaguccaacaucauccgcggcuggaucuucgggacgacccucgacagcaagacccagucccugcugaucgugaacaacgccaccaacguggucaucaaggugugcgaguuccaguucugcaacgaccccuuccucggcguguacuaccacaagaacaacaagagcuggauggaguccgaguuccgggucuacagcuccgccaacaacugcacguucgaguacgugagccagcccuuccugauggaccuggagggcaagcaggggaacuucaagaaccuccgcgaguucguguucaagaacaucgacggcuacuucaagaucuacuccaagcacaccccgaucaaccugguccgggaccugccccagggguucagcgcccucgagccccugguggaccugcccaucggcaucaacaucacccgcuuccagacccuccuggcccugcaccgguccuaccucacgccgggggacagcagcuccggcuggaccgcgggcgccgccgccuacuacgugggguaccugcagccccgcaccuuccugcucaaguacaacgagaacggcaccaucacggacgcggucgacugcgcccuggacccccugagcgagaccaagugcacccucaaguccuucaccguggagaaggggaucuaccagacgagcaacuuccgggugcagcccaccgaguccaucguccgcuucccgaacaucaccaaccugugccccuucggcgagguguucaacgccacccgguucgccagcgucuacgccuggaaccgcaagcggaucuccaacugcguggcggacuacagcgugcuguacaacuccgccagcuucuccacguucaagugcuacggcgucagccccaccaagcucaacgaccugugcuucaccaacguguacgccgacuccuucgugauccgcggggacgagguccggcagaucgcccccggccagaccgggaagaucgccgacuacaacuacaagcugccggacgacuucacgggcugcgugaucgcguggaacagcaacaaccucgacuccaaggucgggggcaacuacaacuaccuguaccgccuguuccgcaagagcaaccucaagcccuucgagcgggacaucuccaccgagaucuaccaggccggcagcacccccugcaacgggguggagggcuucaacugcuacuucccccugcaguccuacggguuccagccgaccaacggcgugggguaccagcccuaccggguggucgugcugagcuucgagcuccugcacgcccccgccacggugugcggccccaagaaguccaccaaccuggucaagaacaagugcgugaacuucaacuucaacggccucaccgggaccggcgugcugaccgagagcaacaagaaguuccugccguuccagcaguucgggcgcgacaucgccgacacgaccgacgcgguccgcgacccccagacccuggagauccucgacaucacccccugcagcuucggcgggguguccgugaucacgccgggcaccaacaccagcaaccaggucgccgugcuguaccaggacgugaacugcaccgagguccccguggccauccacgccgaccagcugacgcccaccuggcggguguacuccaccggcagcaacgucuuccagacccgcgccgggugccucaucggcgcggagcacgugaacaacuccuacgagugcgacauccccaucggggccggcaucugcgccagcuaccagacgcagaccaacuccccgcggcgcgcccggagcguggcgucccagagcaucaucgccuacaccaugucccugggcgccgagaacagcgucgccuacuccaacaacagcaucgccauccccaccaacuucacgaucuccgugaccaccgagauccugcccgugagcaugaccaagacgagcgucgacugcaccauguacaucugcggggacuccaccgagugcagcaaccuccugcugcaguacggcuccuucugcacccagcucaaccgcgcgcugacggggaucgccguggagcaggacaagaacacccaggagguguucgcccaggucaagcagaucuacaagacgcccccgaucaaggacuucggcggguucaacuucagccagauccugcccgaccccuccaagcccagcaagcgguccuucaucgaggaccuccuguucaacaaggugacccuggccgacgccggcuucaucaagcaguacggcgacugccucggggacaucgcggcccgcgaccugaucugcgcccagaaguucaacggccugaccgugcucccgccccugcugaccgacgagaugaucgcccaguacaccagcgcccuccuggcggggaccaucacguccggcuggaccuucggggccggcgccgcccugcagauccccuucgcgaugcagauggccuaccgguucaacggcaucggggucacccagaacgugcucuacgagaaccagaagcugaucgccaaccaguucaacagcgccaucggcaagauccaggacucccugagcuccaccgccagcgcgcucgggaagcugcaggacguggucaaccagaacgcccaggcccugaacacgcucgugaagcagcuguccagcaacuucggcgccaucuccagcgugcugaacgacauccucucccgccuggacaaggucgaggccgaggugcagaucgaccggcugaucaccgggcgccuccagagccugcagaccuacgugacccagcagcugauccgggcggccgagauccgcgccagcgccaaccucgccgcgaccaagauguccgagugcguccugggccagagcaagcggguggacuucugcggcaagggguaccaccugauguccuucccccagagcgccccgcacggcguggucuuccuccacgugacguacguccccgcccaggagaagaacuucaccaccgcccccgcgaucugccacgacgggaaggcccacuucccccgcgagggcguguucguguccaacgggacccacugguucgucacgcagcggaacuucuacgagccgcagaucaucaccaccgacaacaccuucgugagcggcaacugcgacguggucaucggcaucgugaacaacacgguguacgacccccugcagcccgagcuggacuccuucaaggaggagcucgacaaguacuucaagaaccacaccagccccgacgucgaccugggggacaucuccggcaucaacgccagcguggugaacauccagaaggagaucgaccgccugaacgaggucgccaagaaccucaacgagucccugaucgaccugcaggagcucgggaaguacgagcaguacaucaaguggccgugguacaucuggcugggcuucaucgccggccugaucgcgaucgugauggugaccaucaugcucugcugcaugaccagcugcugcuccugccugaaggggugcugcagcugcggcuccugcuucaaguucgacgaggacgacagcgagcccguccugaagggggugaagcuccacuacacgugaggacuaguuauaagacugacuagcccgaugggccucccaacgggcccuccuccccuccuugcaccgagauuaauaaaaaaaaaaaaaaaaaaaaaaaaaaaaaaaaaaaaaaaaaaaaaaaaaaaaaaaaaaaaaaaaugcaucccccccccccccccccccccccccccccccaaaggcucuuuucagagccaccagaauu

SEQ ID NO: 12764 - RNA, 4039 nt, Artificial Sequence
  SARS-CoV-2/Switzerland/1000477797/2020__EPI_ISL_413023 spike protein mRNA gc (1-1273)
aggagaaagcuuaccauguucguguuccugguccuccugccccuggugagcucccagugcgugaaccucaccacccgcacgcagcugccgcccgccuacaccaacagcuucacccggggcgucuacuaccccgacaagguguuccgcuccagcgugcugcacuccacccaggaccucuuccugcccuucuucagcaacgucacgugguuccacgccauccacguguccgggaccaacggcaccaagcgguucgacaacccggugcugcccuucaacgacggggucuacuucgcgagcaccgagaaguccaacaucauccgcggcuggaucuucgggacgacccucgacagcaagacccagucccugcugaucgugaacaacgccaccaacguggucaucaaggugugcgaguuccaguucugcaacgaccccuuccucggcguguacuaccacaagaacaacaagagcuggauggaguccgaguuccgggucuacagcuccgccaacaacugcacguucgaguacgugagccagcccuuccugauggaccuggagggcaagcaggggaacuucaagaaccuccgcgaguucguguucaagaacaucgacggcuacuucaacaucuacuccaagcacaccccgaucaaccugguccgggaccugccccagggguucagcgcccucgagccccugguggaccugcccaucggcaucaacaucacccgcuuccagacccuccuggcccugcaccgguccuaccucacgccgggggacagcagcuccggcuggaccgcgggcgccgccgccuacuacgugggguaccugcagccccgcaccuuccugcucaaguacaacgagaacggcaccaucacggacgcggucgacugcgcccuggacccccugagcgagaccaagugcacccucaaguccuucaccguggagaaggggaucuaccagacgagcaacuuccgggugcagcccaccgaguccaucguccgcuucccgaacaucaccaaccugugccccuucggcgagguguucaacgccacccgguucgccagcgucuacgccuggaaccgcaagcggaucuccaacugcguggcggacuacagcgugcuguacaacuccgccagcuucuccacguucaagugcuacggcgucagccccaccaagcucaacgaccugugcuucaccaacguguacgccgacuccuucgugauccgcggggacgagguccggcagaucgcccccggccagaccgggaagaucgccgacuacaacuacaagcugccggacgacuucacgggcugcgugaucgcguggaacagcaacaaccucgacuccaaggucgggggcaacuacaacuaccuguaccgccuguuccgcaagagcaaccucaagcccuucgagcgggacaucuccaccgagaucuaccaggccggcagcacccccugcaacgggguggagggcuucaacugcuacuucccccugcaguccuacggguuccagccgaccaacggcgugggguaccagcccuaccggguggucgugcugagcuucgagcuccugcacgcccccgccacggugugcggccccaagaaguccaccaaccuggucaagaacaagugcgugaacuucaacuucaacggccucaccgggaccggcgugcugaccgagagcaacaagaaguuccugccguuccagcaguucgggcgcgacaucgccgacacgaccgacgcgguccgcgacccccagacccuggagauccucgacaucacccccugcagcuucggcgggguguccgugaucacgccgggcaccaacaccagcaaccaggucgccgugcuguaccagggcgugaacugcaccgagguccccguggccauccacgccgaccagcugacgcccaccuggcggguguacuccaccgggagcaacgucuuccagacccgcgccggcugccucaucggggcggagcacgugaacaacuccuacgagugcgacauccccaucggcgccggcaucugcgccagcuaccagacgcagaccaacuccccgcggcgcgcccggagcguggcgucccagagcaucaucgccuacaccaugucccugggggccgagaacagcgucgccuacuccaacaacagcaucgccauccccaccaacuucacgaucuccgugaccaccgagauccugcccgugagcaugaccaagacgagcgucgacugcaccauguacaucugcggcgacuccaccgagugcagcaaccuccugcugcaguacggguccuucugcacccagcucaaccgcgcgcugacgggcaucgccguggagcaggacaagaacacccaggagguguucgcccaggucaagcagaucuacaagacgcccccgaucaaggacuucgggggcuucaacuucagccagauccugcccgaccccuccaagcccagcaagcgguccuucaucgaggaccuccuguucaacaaggugacccuggccgacgccggcuucaucaagcaguacggggacugccucggcgacaucgcggcccgcgaccugaucugcgcccagaaguucaacgggcugaccgugcucccgccccugcugaccgacgagaugaucgcccaguacaccagcgcccuccuggcgggcaccaucacguccggguggaccuucggcgccggcgccgcccugcagauccccuucgcgaugcagauggccuaccgguucaacgggaucggcgucacccagaacgugcucuacgagaaccagaagcugaucgccaaccaguucaacagcgccaucgggaagauccaggacucccugagcuccaccgccagcgcgcucggcaagcugcaggacguggucaaccagaacgcccaggcccugaacacgcucgugaagcagcuguccagcaacuucggggccaucuccagcgugcugaacgacauccucucccgccuggacaaggucgaggccgaggugcagaucgaccggcugaucaccggccgccuccagagccugcagaccuacgugacccagcagcugauccgggcggccgagauccgcgccagcgccaaccucgccgcgaccaagauguccgagugcguccugggccagagcaagcggguggacuucugcgggaagggcuaccaccugauguccuucccccagagcgccccgcacgggguggucuuccuccacgugacguacguccccgcccaggagaagaacuucaccaccgcccccgcgaucugccacgacggcaaggcccacuucccccgcgaggggguguucguguccaacggcacccacugguucgucacgcagcggaacuucuacgagccgcagaucaucaccaccgacaacaccuucgugagcggcaacugcgacguggucaucgggaucgugaacaacacgguguacgacccccugcagcccgagcuggacuccuucaaggaggagcucgacaaguacuucaagaaccacaccagccccgacgucgaccugggcgacaucuccgggaucaacgccagcguggugaacauccagaaggagaucgaccgccugaacgaggucgccaagaaccucaacgagucccugaucgaccugcaggagcucggcaaguacgagcaguacaucaaguggccgugguacaucuggcugggcuucaucgccgggcugaucgcgaucgugauggugaccaucaugcucugcugcaugaccagcugcugcuccugccugaagggcugcugcagcugcggguccugcugcaaguucgacgaggacgacagcgagcccguccugaagggcgugaagcuccacuacacgugaggacuaguuauaagacugacuagcccgaugggccucccaacgggcccuccuccccuccuugcaccgagauuaauaaaaaaaaaaaaaaaaaaaaaaaaaaaaaaaaaaaaaaaaaaaaaaaaaaaaaaaaaaaaaaaaugcaucccccccccccccccccccccccccccccccaaaggcucuuuucagagccaccagaauu

SEQ ID NO: 12765 - RNA, 4039 nt, Artificial Sequence
  SARS-CoV-2/Belgium/BA-02291/2020__EPI_ISL_415159 spike protein mRNA gc (1-1273)
aggagaaagcuuaccauguucguguuccugguccuccugccccuggugagcucccagugcgugaaccucaccacccgcacgcagcugccgcccgccuacaccaacagcuucacccggggcgucuacuaccccgacaagguguuccgcuccagcgugcugcacuccacccaggaccucuuccugcccuucuucagcaacgucacgugguuccacgccauccacguguccgggaccaacggcaccaagcgguucgacaacccggugcugcccuucaacgacggggucuacuucgcgagcaccgagaaguccaacaucauccgcggcuggaucuucgggacgacccucgacagcaagacccagucccugcugaucgugaacaacgccaccaacguggucaucaaggugugcgaguuccaguucugcaacgaccccuuccucggcguguacuaccacaagaacaacaagagcuggauggaguccgaguuccgggucuacagcuccgccaacaacugcacguucgaguacgugagccagcccuuccugauggaccuggagggcaagcaggggaacuucaagaaccuccgcgaguucguguucaagaacaucgacggcuacuucaagaucuacuccaagcacaccccgaucaaccugguccgggaccugccccagggguucagcgcccucgagccccugguggaccugcccaucggcaucaacaucacccgcuuccagacccuccuggcccugcaccgguccuaccucacgccgggggacagcagcuccggcuggaccgcgggcgccgccgccuacuacgugggguaccugcagccccgcaccuuccugcucaaguacaacgagaacggcaccaucacggacgcggucgacugcgcccuggacccccugagcgagaccaagugcacccucaaguccuucaccguggagaaggggaucuaccagacgagcaacuuccgggugcagcccaccgaguccaucguccgcuucccgaacaucaccaaccugugccccuucggcgagguguucaacgccacccgguucgccagcgucuacgccuggaaccgcaagcggaucuccaacugcguggcggacuacagcgugcuguacaacuccgccagcuucuccacguucaagugcuacggcgucagccccaccaagcucaacgaccugugcuucaccaacguguacgccgacuccuucgugauccgcggggacgagguccggcagaucgcccccggccagaccgggaagaucgccgacuacaacuacaagcugccggacgacuucacgggcugcgugaucgcguggaacagcaacaaccucgacuccaaggucgggggcaacuacaacuaccuguaccgccuguuccggcgcagcaaccucaagcccuucgagcgggacaucuccaccgagaucuaccaggccggcagcacccccugcaacgggguggagggcuucaacugcuacuucccccugcaguccuacggguuccagccgaccaacggcgugggguaccagcccuaccgcguggucgugcugagcuucgagcuccugcccgcccccgccacggugugcggcccgaagaaguccaccaaccuggucaagaacaagugcgugaacuucaacuucaacggccucaccgggaccggcgugcugaccgaguccaacaagaaguuccugcccuuccagcaguucgggcgcgacaucgccgacacgaccgacgcgguccgggacccccagacccuggagauccucgacaucaccccgugcagcuucggcgggguguccgugaucacgcccggcaccaacaccagcaaccaggucgccgugcuguaccagggcgugaacugcaccgagguccccguggccauccacgccgaccagcugacgcccaccuggcgcguguacuccaccgggagcaacgucuuccagacccgggccggcugccucaucggggcggagcacgugaacaacuccuacgagugcgacaucccgaucggcgccggcaucugcgccagcuaccagacgcagaccaacagcccccgccgggcccgcagcguggcgucccagagcaucaucgccuacaccaugucccugggggccgagaacagcgucgccuacuccaacaacagcaucgccauccccaccaacuucacgaucuccgugaccaccgagauccugcccgugagcaugaccaagacgagcgucgacugcaccauguacaucugcggcgacuccaccgagugcagcaaccuccugcugcaguacggguccuucugcacccagcucaaccgggcgcugacgggcaucgccguggagcaggacaagaacacccaggagguguucgcccaggucaagcagaucuacaagaccccgcccaucaaggacuucgggggcuucaacuucagccagauccugcccgaccccuccaagccgagcaagcgcuccuucaucgaggaccuccuguucaacaaggugacccuggccgacgccggcuucaucaagcaguacggggacugccucggcgacaucgcggcccgggaccugaucugcgcccagaaguucaacgggcugacggugcucccgccccugcugaccgacgagaugaucgcccaguacaccagcgcccuccuggcgggcaccaucacguccggguggaccuucggcgccggcgccgcccugcagauccccuucgcgaugcagauggccuaccgcuucaacgggaucggcgucacccagaacgugcucuacgagaaccagaagcugaucgccaaccaguucaacagcgccaucgggaagauccaggacucccugagcuccgccgcgcccgcccucggcaagcugcaggacguggucaaccagaacgcccaggcccugaacacccucgugaagcagcugagcuccaacuucggggccaucagcuccgugcugaacgacauccucagccggcuggacaaggucgaggcggaggugcagaucgaccgccugaucacgggccggcuccagucccugcagaccuacgugacccagcagcugauccgcgccgccgagauccgggccagcgccaaccucgcggccaccaagaugagcgagugcguccugggccaguccaagcgcguggacuucugcgggaagggcuaccaccugaugagcuucccccaguccgcgccccacgggguggucuuccuccacgugaccuacguccccgcccaggagaagaacuucacgaccgccccggccaucugccacgacggcaaggcccacuucccccgggaggggguguucgugagcaacggcacccacugguucgucacccagcgcaacuucuacgagccccagaucaucacgaccgacaacaccuucguguccggcaacugcgacguggucaucgggaucgugaacaacaccguguacgacccccugcagccggagcuggacagcuucaaggaggagcucgacaaguacuucaagaaccacacgucccccgacgucgaccugggcgacaucagcgggaucaacgccuccguggugaacauccagaaggagaucgaccggcugaacgaggucgccaagaaccucaacgagagccugaucgaccugcaggagcucggcaaguacgagcaguacaucaaguggcccugguacaucuggcugggcuucaucgcggggcugaucgccaucgugauggugaccaucaugcucugcugcaugaccuccugcugcagcugccugaagggcugcugcuccugcgggagcugcugcaaguucgacgaggacgacuccgagccgguccugaagggcgugaagcuccacuacaccugaggacuaguuauaagacugacuagcccgaugggccucccaacgggcccuccuccccuccuugcaccgagauuaauaaaaaaaaaaaaaaaaaaaaaaaaaaaaaaaaaaaaaaaaaaaaaaaaaaaaaaaaaaaaaaaaugcaucccccccccccccccccccccccccccccccaaaggcucuuuucagagccaccagaauu

SEQ ID NO: 12766 - RNA, 4039 nt, Artificial Sequence
  SARS-CoV-2/USA/WA8-UW5/2020__EPI_ISL_413486 spike protein mRNA gc (1-1273)
aggagaaagcuuaccauguucguguuccugguccuccugccccuggugagcucccagugcgugaaccucaccacccgcacgcagcugccgcccgccuacaccaacagcuucacccggggcgucuacuaccccgacaagguguuccgcuccagcgugcugcacuccacccaggaccucuuccugcccuucuucagcaacgucacgugguuccacgccauccacguguccgggaccaacggcaccaagcgguucgacaacccggugcugcccuucaacgacggggucuacuucgcgagcaccgagaaguccaacaucauccgcggcuggaucuucgggacgacccucgacagcaagacccagucccugcugaucgugaacaacgccaccaacguggucaucaaggugugcgaguuccaguucugcaacgaccccuuccucggcguguacuaccacaagaacaacaagagcuggauggaguccgaguuccgggucuacagcuccgccaacaacugcacguucgaguacgugagccagcccuuccugauggaccuggagggcaagcaggggaacuucaagaaccuccgcgaguucguguucaagaacaucgacggcuacuucaagaucuacuccaagcacaccccgaucaaccugguccgggaccugccccagggguucagcgcccucgagccccugguggaccugcccaucggcaucaacaucacccgcuuccagacccuccuggcccugcaccgguccuaccucacgccgggggacagcagcuccggcuggaccgcgggcgccgccgccuacuacgugggguaccugcagccccgcaccuuccugcucaaguacaacgagaacggcaccaucacggacgcggucgacugcgcccuggacccccugagcgagaccaagugcacccucaaguccuucaccguggagaaggggaucuaccagacgagcaacuuccgggugcagcccaccgaguccaucguccgcuucccgaacaucaccaaccugugccccuucggcgagguguucaacgccacccgguucgccagcgucuacgccuggaaccgcaagcggaucuccaacugcguggcggacuacagcgugcuguacaacuccgccagcuucuccacguucaagugcuacggcgucagccccaccaagcucaacgaccugugcuucaccaacguguacgccgacuccuucgugauccgcggggacgagguccggcagaucgcccccggccagaccgggaagaucgccgacuacaacuacaagcugccggacgacuucacgggcugcgugaucgcguggaacagcaacaaccucgacuccaaggucgggggcaacuacaacuaccuguaccgccuguuccgcaagagcaaccucaagcccuucgagcgggacaucuccaccgagaucuaccaggccggcagcacccccugcaacgggguggagggcuucaacugcuacuucccccugcaguccuacggguuccagccgaccaacggcgugggguaccagcccuaccggguggucgugcugagcuucgagcuccugcacgcccccgccacggugugcggccccaagaaguccaccaaccuggucaagaacaagugcgugaacuucaacuucaacggccucaccgggaccggcgugcugaccgagagcaacaagaaguuccugccguuccagcaguucgggcgcgacaucgccgacacgaccgacgcgguccgcgacccccagacccuggagauccucgacaucacccccugcagcuucggcgggguguccgugaucacgccgggcaccaacaccagcaaccaggucgccgugcuguaccaggacgugaacugcaccgagguccccguggccauccacgccgaccagcugacgcccaccuggcggguguacuccaccggcagcaacgucuuccagacccgcgccgggugccucaucggcgcggaguacgugaacaacuccuacgagugcgacauccccaucggggccggcaucugcgccagcuaccagacgcagaccaacuccccgcggcgcgcccggagcguggcgucccagagcaucaucgccuacaccaugucccugggcgccgagaacagcgucgccuacuccaacaacagcaucgccauccccaccaacuucacgaucuccgugaccaccgagauccugcccgugagcaugaccaagacgagcgucgacugcaccauguacaucugcggggacuccaccgagugcagcaaccuccugcugcaguacggcuccuucugcacccagcucaaccgcgcgcugacggggaucgccguggagcaggacaagaacacccaggagguguucgcccaggucaagcagaucuacaagacgcccccgaucaaggacuucggcggguucaacuucagccagauccugcccgaccccuccaagcccagcaagcgguccuucaucgaggaccuccuguucaacaaggugacccuggccgacgccggcuucaucaagcaguacggcgacugccucggggacaucgcggcccgcgaccugaucugcgcccagaaguucaacggccugaccgugcucccgccccugcugaccgacgagaugaucgcccaguacaccagcgcccuccuggcggggaccaucacguccggcuggaccuucggggccggcgccgcccugcagauccccuucgcgaugcagauggccuaccgguucaacggcaucggggucacccagaacgugcucuacgagaaccagaagcugaucgccaaccaguucaacagcgccaucggcaagauccaggacucccugagcuccaccgccagcgcgcucgggaagcugcaggacguggucaaccagaacgcccaggcccugaacacgcucgugaagcagcuguccagcaacuucggcgccaucuccagcgugcugaacgacauccucucccgccuggacaaggucgaggccgaggugcagaucgaccggcugaucaccgggcgccuccagagccugcagaccuacgugacccagcagcugauccgggcggccgagauccgcgccagcgccaaccucgccgcgaccaagauguccgagugcguccugggccagagcaagcggguggacuucugcggcaagggguaccaccugauguccuucccccagagcgccccgcacggcguggucuuccuccacgugacguacguccccgcccaggagaagaacuucaccaccgcccccgcgaucugccacgacgggaaggcccacuucccccgcgagggcguguucguguccaacgggacccacugguucgucacgcagcggaacuucuacgagccgcagaucaucaccaccgacaacaccuucgugagcggcaacugcgacguggucaucggcaucgugaacaacacgguguacgacccccugcagcccgagcuggacuccuucaaggaggagcucgacaaguacuucaagaaccacaccagccccgacgucgaccugggggacaucuccggcaucaacgccagcguggugaacauccagaaggagaucgaccgccugaacgaggucgccaagaaccucaacgagucccugaucgaccugcaggagcucgggaaguacgagcaguacaucaaguggccgugguacaucuggcugggcuucaucgccggccugaucgcgaucgugauggugaccaucaugcucugcugcaugaccagcugcugcuccugccugaaggggugcugcagcugcggcuccugcugcaaguucgacgaggacgacagcgagcccguccugaagggggugaagcuccacuacacgugaggacuaguuauaagacugacuagcccgaugggccucccaacgggcccuccuccccuccuugcaccgagauuaauaaaaaaaaaaaaaaaaaaaaaaaaaaaaaaaaaaaaaaaaaaaaaaaaaaaaaaaaaaaaaaaaugcaucccccccccccccccccccccccccccccccaaaggcucuuuucagagccaccagaauu

SEQ ID NO: 12767 - RNA, 4039 nt, Artificial Sequence
  SARS-CoV-2/England/20102000506/2020__EPI_ISL_415147 spike protein mRNA gc (1-1273)
aggagaaagcuuaccauguucguguuccugguccuccugccccuggugagcucccagugcgugaaccucaccacccgcacgcagcugccgcccgccuacaccaacagcuucacccggggcgucuacuaccccgacaagguguuccgcuccagcgugcugcacuccacccaggaccucuuccugcccuucuucagcaacgucacgugguuccacgccauccacguguccgggaccaacggcaccaagcgguucgacaacccggugcugcccuucaacgacggggucuacuucgcgagcaccgagaaguccaacaucauccgcggcuggaucuucgggacgacccucgacagcaagacccagucccugcugaucgugaacaacgccaccaacguggucaucaaggugugcgaguuccaguucugcaacgaccccuuccucggcguguacuaccacaagaacaacaagagcuggauggaguccgaguuccgggucuacagcuccgccaacaacugcacguucgaguacgugagccagcccuuccugauggaccuggagggcaagcaggggaacuucaagaaccuccgcgaguucguguucaagaacaucgacggcuacuucaagaucuacuccaagcacaccccgaucaaccugguccgggaccugccccagggguucagcgcccucgagccccugguggaccugcccaucggcaucaacaucacccgcuuccagacccuccuggcccugcaccgguccuaccucacgccgggggacagcagcuccggcuggaccgcgggcgccgccgccuacuacgugggguaccugcagccccgcaccuuccugcucaaguacaacgagaacggcaccaucacggacgcggucgacugcgcccuggacccccugagcgagaccaagugcacccucaaguccuucaccguggagaaggggaucuaccagacgagcaacuuccgggugcagcccaccgaguccaucguccgcuucccgaacaucaccaaccugugccccuucggcgagguguucaacgccacccgguucgccagcgucuacgccuggaaccgcaagcggaucuccaacugcguggcggacuacagcgugcuguacaacuccgccagcuucuccacguucaagugcuacggcgucagccccaccaagcucaacgaccugugcuucaccaacguguacgccgacuccuucgugauccgcggggacgagguccggcagaucgcccccggccagaccgggaagaucgccgacuacaacuacaagcugccggacgacuucacgggcugcgugaucgcguggaacagcaacaaccucgacuccaaggucgggggcaacuacaacuaccuguaccgccuguuccgcaagagcaaccucaagcccuucgagcgggacaucuccaccgagaucuaccaggccggcagcacccccugcaacgggguggagggcuucaacugcuacuucccccugcaguccuacggguuccagccgaccaacggcgugggguaccagcccuaccggguggucgugcugagcuucgagcuccugcacgcccccgccacggugugcggccccaagaaguccaccaaccuggucaagaacaagugcgugaacuucaacuucaacggccucaccgggaccggcgugcugaccgagagcaacaagaaguuccugccguuccagcaguucgggcgcgacaucgccgacacgaccgacgcgguccgcgacccccagacccuggagauccucgacaucacccccugcagcuucggcgggguguccgugaucacgccgggcaccaacaccagcaaccaggucgccgugcuguaccagggcgugaacugcaccgagguccccguggccauccacgccgaccagcugacgcccaccuggcggguguacuccaccgggagcaacgucuuccagacccgcgccggcugccucaucggggcggagcacgugaacaacuccuacgagugcgacauccccaucggcgccggcaucugcgccagcuaccagacgcagaccaacuccccgcggcgcgcccggagcguggcgucccagagcaucaucgccuacaccaugucccugggggccgagaacagcgucgccuacuccaacaacagcaucgccauccccaccaacuucacgaucuccgugaccaccgagauccugcccgugagcaugaccaagacgagcgucgacugcaccauguacaucugcggcgacuccaccgagugcagcaaccuccugcugcaguacggguccuucugcacccagcucaaccgcgcgcugacgggcaucgccguggagcaggacaagaacacccaggagguguucgcccaggucaagcagaucuacaagacgcccccgaucaaggacuucgggggcuucaacuucagccagauccugcccgaccccuccaagcccagcaagcgguccuucaucgaggaccuccuguucaacaaggugacccuggccgacgccggcuucaucaagcaguacggguacugccucggcgacaucgcggcccgcgaccugaucugcgcccagaaguucaacgggcugaccgugcucccgccccugcugaccgacgagaugaucgcccaguacaccagcgcccuccuggcgggcaccaucacguccggguggaccuucggcgccggcgccgcccugcagauccccuucgcgaugcagauggccuaccgguucaacgggaucggcgucacccagaacgugcucuacgagaaccagaagcugaucgccaaccaguucaacagcgccaucgggaagauccaggacucccugagcuccaccgccagcgcgcucggcaagcugcaggacguggucaaccagaacgcccaggcccugaacacgcucgugaagcagcuguccagcaacuucggggccaucuccagcgugcugaacgacauccucucccgccuggacaaggucgaggccgaggugcagaucgaccggcugaucaccggccgccuccagagccugcagaccuacgugacccagcagcugauccgggcggccgagauccgcgccagcgccaaccucgccgcgaccaagauguccgagugcguccugggccagagcaagcggguggacuucugcgggaagggcuaccaccugauguccuucccccagagcgccccgcacgggguggucuuccuccacgugacguacguccccgcccaggagaagaacuucaccaccgcccccgcgaucugccacgacggcaaggcccacuucccccgcgaggggguguucguguccaacggcacccacugguucgucacgcagcggaacuucuacgagccgcagaucaucaccaccgacaacaccuucgugagcggcaacugcgacguggucaucgggaucgugaacaacacgguguacgacccccugcagcccgagcuggacuccuucaaggaggagcucgacaaguacuucaagaaccacaccagccccgacgucgaccugggcgacaucuccgggaucaacgccagcguggugaacauccagaaggagaucgaccgccugaacgaggucgccaagaaccucaacgagucccugaucgaccugcaggagcucggcaaguacgagcaguacaucaaguggccgugguacaucuggcugggcuucaucgccgggcugaucgcgaucgugauggugaccaucaugcucugcugcaugaccagcugcugcuccugccugaagggcugcugcagcugcggguccugcugcaaguucgacgaggacgacagcgagcccguccugaagggcgugaagcuccacuacacgugaggacuaguuauaagacugacuagcccgaugggccucccaacgggcccuccuccccuccuugcaccgagauuaauaaaaaaaaaaaaaaaaaaaaaaaaaaaaaaaaaaaaaaaaaaaaaaaaaaaaaaaaaaaaaaaaugcaucccccccccccccccccccccccccccccccaaaggcucuuuucagagccaccagaauu

SEQ ID NO: 12768 - RNA, 4039 nt, Artificial Sequence
  SARS-CoV-2/Belgium/VAG-03013/2020__EPI_ISL_415155 spike protein mRNA gc (1-1273)
aggagaaagcuuaccauguucguguuccugguccuccugccccuggugagcucccagugcgugaaccucaccacccgcacgcagcugccgcccgccuacaccaacagcuucacccggggcgucuacuaccccgacaagguguuccgcuccagcgugcugcacuccacccaggaccucuuccugcccuucuucagcaacgucacgugguuccacgccauccacguguccgggaccaacggcaccaagcgguucgacaacccggugcugcccuucaacgacggggucuacuucgcgagcaccgagaaguccaacaucauccgcggcuggaucuucgggacgacccucgacagcaagacccagucccugcugaucgugaacaacgccaccaacguggucaucaaggugugcgaguuccaguucugcaacgaccccuuccucggcguguacuaccacaagaacaacaagagcuggauggaguccgaguuccgggucuacagcuccgccaacaacugcacguucgaguacgugagccagcccuuccugauggaccuggagggcaagcaggggaacuucaagaaccuccgcgaguucguguucaagaacaucgacggcuacuucaagaucuacuccaagcacaccccgaucaaccugguccgggaccugccccagggguucagcgcccucgagccccugguggaccugcccaucggcaucaacaucacccgcuuccagacccuccuggcccugcaccgguccuaccucacgccgggggacagcagcuccggcuggaccgcgggcgccgccgccuacuacgugggguaccugcagccccgcaccuuccugcucaaguacaacgagaacggcaccaucacggacgcggucgacugcgcccuggacccccugagcgagaccaagugcacccucaaguccuucaccguggagaaggggaucuaccagacgagcaacuuccgggugcagcccaccgaguccaucguccgcuucccgaacaucaccaaccugugccccuucggcgagguguucaacgccacccgguucgccagcgucuacgccuggaaccgcaagcggaucuccaacugcguggcggacuacagcgugcuguacaacuccgccagcuucuccacguucaagugcuacggcgucagccccaccaagcucaacgaccugugcuucaccaacguguacgccgacuccuucgugauccgcggggacgagguccggcagaucgcccccggccagaccgggaagaucgccgacuacaacuacaagcugccggacgacuucacgggcugcgugaucgcguggaacagcaacaaccucgacuccaaggucgggggcaacuacaacuaccuguaccgccuguuccgcaagagcaaccucaagcccuucgagcgggacaucuccaccgagaucuaccaggccggcagcacccccugcaacgggguggagggcuucaacugcuacuucccccugcaguccuacggguuccagccgaccaacggcgugggguaccagcccuaccggguggucgugcugagcuucgagcuccugcacgcccccgccacggugugcggccccaagaaguccaccaaccuggucaagaacaagugcgugaacuucaacuucaacggccucaccgggaccggcgugcugaccgagagcaacaagaaguuccugccguuccagcaguucgggcgcgacaucgccgacacgaccgacgcgguccgcgacccccagacccuggagauccucgacaucacccccugcagcuucggcgggguguccgugaucacgccgggcaccaacaccagcaaccaggucgccgugcuguaccagggcgugaacugcaccgagguccccguggccauccacgccgaccagcugacgcccaccuggcggguguacuccaccgggagcaacgucuuccagacccgcgccggcugccucaucggggcggagcacgugaacaacuccuacgagugcgacauccccaucggcgccggcaucugcgccagcuaccagacgcagaccaacuccccgcggcgcgcccggagcguggcgucccagagcaucaucgccuacaccaugucccugggggccgagaacagcgucgccuacuccaacaacagcaucgccauccccaccaacuucacgaucuccgugaccaccgagauccugcccgugagcaugaccaagacgagcgucgacugcaccauguacaucugcggcgacuccaccgagugcagcaaccuccugcugcaguacggguccuucugcacccagcucaaccgcgcgcugacgggcaucgccguggagcaggacaagaacacccaggagguguucgcccaggucaagcagaucuacaagacgcccccgaucaaggacuucgggggcuucaacuucagccagauccugcccgaccccuccaagcccagcaagcgguccuucaucgaggaccuccuguucaacaaggugacccuggccgacgccggcuucaucaagcaguacggggacugccucggcgacaucgcggcccgcgaccugaucugcgcccagaaguucaacgggcugaccgugcucccgccccugcugaccgacgagaugaucgcccaguacaccagcgcccuccuggcgggcaccaucacguccggguggaccuucggcgccggcgccgcccugcagauccccuucgcgaugcagauggccuaccgguucaacgggaucggcgucacccagaacgugcucuacgagaaccagaagcugaucgccaaccaguucaacagcgccaucgggaagauccaggacucccugagcuccaccgccacggcgcucggcaagcugcaggacguggucaaccagaacgcccaggcccugaacacccucgugaagcagcugagcuccaacuucggggccaucagcuccgugcugaacgacauccucagccgccuggacaaggucgaggccgaggugcagaucgaccggcugaucaccggccgccuccagucccugcagaccuacgugacccagcagcugauccgggcggccgagauccgcgccagcgccaaccucgccgcgacgaagaugagcgagugcguccugggccaguccaagcggguggacuucugcgggaagggcuaccaccugaugagcuucccccaguccgccccgcacgggguggucuuccuccacgugaccuacguccccgcccaggagaagaacuucaccaccgcccccgcgaucugccacgacggcaaggcccacuucccccgcgaggggguguucgugagcaacggcacgcacugguucgucacccagcggaacuucuacgagccgcagaucaucaccaccgacaacacguucguguccggcaacugcgacguggucaucgggaucgugaacaacaccguguacgacccccugcagcccgagcuggacagcuucaaggaggagcucgacaaguacuucaagaaccacaccucccccgacgucgaccugggcgacaucagcgggaucaacgccuccguggugaacauccagaaggagaucgaccgccugaacgaggucgccaagaaccucaacgagagccugaucgaccugcaggagcucggcaaguacgagcaguacaucaaguggccgugguacaucuggcugggcuucaucgccgggcugaucgcgaucgugauggugaccaucaugcucugcugcaugacguccugcugcagcugccugaagggcugcugcuccugcgggagcugcugcaaguucgacgaggacgacuccgagcccguccugaagggcgugaagcuccacuacaccugaggacuaguuauaagacugacuagcccgaugggccucccaacgggcccuccuccccuccuugcaccgagauuaauaaaaaaaaaaaaaaaaaaaaaaaaaaaaaaaaaaaaaaaaaaaaaaaaaaaaaaaaaaaaaaaaugcaucccccccccccccccccccccccccccccccaaaggcucuuuucagagccaccagaauu

SEQ ID NO: 12769 - RNA, 4039 nt, Artificial Sequence
  SARS-CoV-2/Belgium/BC-03016/2020__EPI_ISL_415157 spike protein mRNA gc (1-1273)
aggagaaagcuuaccauguucguguuccugguccuccugccccuggugagcucccagugcgugaaccucaccacccgcacgcagcugccgcccgccuacaccaacagcuucacccggggcgucuacuaccccgacaagguguuccgcuccagcgugcugcacuccacccaggaccucuuccugcccuucuucagcaacgucacgugguuccacgccauccacguguccgggaccaacggcaccaagcgguucgacaacccggugcugcccuucaacgacggggucuacuucgcgagcaccgagaaguccaacaucauccgcggcuggaucuucgggacgacccucgacagcaagacccagucccugcugaucgugaacaacgccaccaacguggucaucaaggugugcgaguuccaguucugcaacgaccccuuccucggcguguacuaccacaagaacaacaagagcuggauggaguccgaguuccgggucuacagcuccgccaacaacugcacguucgaguacgugagccagcccuuccugauggaccuggagggcaagcaggggaacuucaagaaccuccgcgaguucguguucaagaacaucgacggcuacuucaagaucuacuccaagcacaccccgaucaaccugguccgggaccugccccagggguucagcgcccucgagccccugguggaccugcccaucggcaucaacaucacccgcuuccagacccuccuggcccugcaccgguccuaccucacgccgggggacagcagcuccggcuggaccgcgggcgccgccgccuacuacgugggguaccugcagccccgcaccuuccugcucaaguacaacgagaacggcaccaucacggacgcggucgacugcgcccuggacccccugagcgagaccaagugcacccucaaguccuucaccguggagaaggggaucuaccagacgagcaacuuccgggugcagcccaccgaguccaucguccgcuucccgaacaucaccaaccugugccccuucggcgagguguucaacgccacccgguucgccagcgucuacgccuggaaccgcaagcggaucuccaacugcguggcggacuacagcgugcuguacaacuccgccagcuucuccacguucaagugcuacggcgucagccccaccaagcucaacgaccugugcuucaccaacguguacgccgacuccuucgugauccgcggggacgagguccggcagaucgcccccggccagaccgggaagaucgccgacuacaacuacaagcugccggacgacuucacgggcugcgugaucgcguggaacagcaacaaccucgacuccaaggucgggggcaacuacaacuaccuguaccgccuguuccgcaagagcaaccucaagcccuucgagcgggacaucuccaccgagaucuaccaggccggcagcacccccugcaacgggguggagggcuucaacugcuacuucccccugcaguccuacggguuccagccgaccaacggcgugggguaccagcccuaccggguggucgugcugagcuucgagcuccugcacgcccccgccacggugugcggccccaagaaguccaccaaccuggucaagaacaagugcgugaacuucaacuucaacggccucaccgggaccggcgugcugaccgagagcaacaagaaguuccugccguuccagcaguucgggcgcgacaucgccgacacgaccgacgcgguccgcgacccccagacccuggagauccucgacaucacccccugcagcuucggcgggguguccgugaucacgccgggcaccaacaccagcaaccaggucgccgugcuguaccagggcgugaacugcaccgagguccccguggccauccacgccgaccagcugacgcccaccuggcggguguacuccaccgggagcaacgucuuccagacccgcgccggcugccucaucggggcggagcacgugaacaacuccuacgagugcgacauccccaucggcgccggcaucugcgccagcuaccagacgcagaccaacuccccgcggcgcgcccggagcguggcgucccagagcaucaucgccuacaccaugucccugggggccgagaacagcgucgccuacuccaacaacagcaucgccauccccaccaacuucacgaucuccgugaccaccgagauccugcccgugagcaugaccaagacgagcgucgacugcaccauguacaucugcggcgacuccaccgagugcagcaaccuccugcugcaguacggguccuucugcacccagcucaaccgcgcgcugacgggcaucgccguggagcaggacaagaacacccaggagguguucgcccaggucaagcagaucuacaagacgcccccgaucaaggacuucgggggcuucaacuucagccagauccugcccgaccccuccaagcccagcaagcgguccuucaucgaggaccuccuguucaacaaggugacccuggccgacgccggcuucaucaagcaguacggggacugccucggcgacaucgcggcccgcgaccugaucugcgcccagaaguucaacgggcugaccgugcucccgccccugcugaccgacgagaugaucgcccaguacaccagcgcccuccuggcgggcaccaucacguccggguggaccuucggcgccggcgccgcccugcagauccccuucgcgaugcagauggccuaccgguucaacgggaucggcgucacccagaacgugcucuacgagaaccagaagcugaucgccaaccaguucaacagcgccaucgggaagauccaggacucccugagcuccaccgcccccgcgcucggcaagcugcaggacguggucaaccagaacgcccaggcccugaacacgcucgugaagcagcugagcuccaacuucggggccaucagcuccgugcugaacgacauccucagccgccuggacaaggucgaggccgaggugcagaucgaccggcugaucaccggccgccuccagucccugcagaccuacgugacccagcagcugauccgggcggccgagauccgcgccagcgccaaccucgccgcgaccaagaugagcgagugcguccugggccaguccaagcggguggacuucugcgggaagggcuaccaccugaugagcuucccgcaguccgcgccccacgggguggucuuccuccacgugacguacguccccgcccaggagaagaacuucaccaccgcccccgccaucugccacgacggcaaggcccacuucccgcgcgaggggguguucgugagcaacggcacccacugguucgucacgcagcggaacuucuacgagccccagaucaucaccaccgacaacaccuucguguccggcaacugcgacguggucaucgggaucgugaacaacacgguguacgacccccugcagcccgagcuggacagcuucaaggaggagcucgacaaguacuucaagaaccacaccuccccggacgucgaccugggcgacaucagcgggaucaacgccuccguggugaacauccagaaggagaucgaccgccugaacgaggucgccaagaaccucaacgagagccugaucgaccugcaggagcucggcaaguacgagcaguacaucaaguggcccugguacaucuggcugggcuucaucgccgggcugaucgcgaucgugauggugaccaucaugcucugcugcaugaccuccugcugcagcugccugaagggcugcugcuccugcgggagcugcugcaaguucgacgaggacgacuccgagcccguccugaagggcgugaagcuccacuacacgugaggacuaguuauaagacugacuagcccgaugggccucccaacgggcccuccuccccuccuugcaccgagauuaauaaaaaaaaaaaaaaaaaaaaaaaaaaaaaaaaaaaaaaaaaaaaaaaaaaaaaaaaaaaaaaaaugcaucccccccccccccccccccccccccccccccaaaggcucuuuucagagccaccagaauu

SEQ ID NO: 12770 - RNA, 4039 nt, Artificial Sequence
  SARS-CoV-2/Germany/BavPat3/2020__EPI_ISL_414521 spike protein mRNA gc (1-1273)
aggagaaagcuuaccauguucguguuccugguccuccugccccuggugagcucccagugcgugaaccucaccacccgcacgcagcugccgcccgccuacaccaacagcuucacccggggcgucuacuaccccgacaagguguuccgcuccagcgugcugcacuccacccaggaccucuuccugcccuucuucagcaacgucacgugguuccacgccauccacguguccgggaccaacggcaccaagcgguucgacaacccggugcugcccuucaacgacggggucuacuucgcgagcaccgagaaguccaacaucauccgcggcuggaucuucgggacgacccucgacagcaagacccagucccugcugaucgugaacaacgccaccaacguggucaucaaggugugcgaguuccaguucugcaacgaccccuuccucggcguguacuaccacaagaacaacaagagcuggauggaguccgaguuccgggucuacagcuccgccaacaacugcacguucgaguacgugagccagcccuuccugauggaccuggagggcaagcaggggaacuucaagaaccuccgcgaguucguguucaagaacaucgacggcuacuucaagaucuacuccaagcacaccccgaucaaccugguccgggaccugccccagggguucagcgcccucgagccccugguggaccugcccaucggcaucaacaucacccgcuuccagacccuccuggcccugcaccgguccuaccucacgccgggggacagcagcuccggcuggaccgcgggcgccgccgccuacuacgugggguaccugcagccccgcaccuuccugcucaaguacaacgagaacggcaccaucacggacgcggucgacugcgcccuggacccccugagcgagaccaagugcacccucaaguccuucaccguggagaaggggaucuaccagacgagcaacuuccgggugcagcccaccgaguccaucguccgcuucccgaacaucaccaaccugugccccuucggcgagguguucaacgccacccgguucgccagcgucuacgccuggaaccgcaagcggaucuccaacugcguggcggacuacagcgugcuguacaacuccgccagcuucuccacguucaagugcuacggcgucagccccaccaagcucaacgaccugugcuucaccaacguguacgccgacuccuucgugauccgcggggacgagguccggcagaucgcccccggccagaccgggaagaucgccgacuacaacuacaagcugccggacgacuucacgggcugcgugaucgcguggaacagcaacaaccucgacuccaaggucgggggcaacuacaacuaccuguaccgccuguuccgcaagagcaaccucaagcccuucgagcgggacaucuccaccgagaucuaccaggccggcagcacccccugcaacgggguggagggcuucaacugcuacuucccccugcaguccuacggguuccagccgaccaacggcgugggguaccagcccuaccggguggucgugcugagcuucgagcuccugcacgcccccgccacggugugcggccccaagaaguccaccaaccuggucaagaacaagugcgugaacuucaacuucaacggccucaccgggaccggcgugcugaccgagagcaacaagaaguuccugccguuccagcaguucgggcgcgacaucgccgacacgaccgacgcgguccgcgacccccagacccuggagauccucgacaucacccccugcagcuucggcgggguguccgugaucacgccgggcaccaacaccagcaaccaggucgccgugcuguaccaggacgugaacugcaccgagguccccguggccauccacgccgaccagcugacgcccaccuggcggguguacuccaccggcagcaacgucuuccagacccgcgccgggugccucaucggcgcggagcacgugaacaacuccuacgagugcgacauccccaucggggccggcaucugcgccagcuaccagacgcagaccaacuccccgcggcgcgcccggagcguggcgucccagagcaucaucgccuacaccaugucccugggcgccgagaacagcgucgccuacuccaacaacagcaucgccauccccaccaacuucacgaucuccgugaccaccgagauccugcccgugagcaugaccaagacgagcgucgacugcaccauguacaucugcggggacuccaccgagugcagcaaccuccugcugcaguacggcuccuucugcacccagcucaaccgcgcgcugacggggaucgccguggagcaggacaagaacacccagcaggucuucgcccaggugaagcagaucuacaagacgcccccgaucaaggacuucggcggguucaacuucagccagauccugcccgaccccuccaagcccagcaagcgguccuucaucgaggaccuccuguucaacaaggugacccuggccgacgccggcuucaucaagcaguacggcgacugccucggggacaucgcggcccgcgaccugaucugcgcccagaaguucaacggccugaccgugcucccgccccugcugaccgacgagaugaucgcccaguacaccagcgcccuccuggcggggaccaucacguccggcuggaccuucggggccggcgccgcccugcagauccccuucgcgaugcagauggccuaccgguucaacggcaucggggucacccagaacgugcucuacgagaaccagaagcugaucgccaaccaguucaacagcgccaucggcaagauccaggacucccugagcuccaccgccagcgcgcucgggaagcugcaggacguggucaaccagaacgcccaggcccugaacacgcucgugaagcagcuguccagcaacuucggcgccaucuccagcgugcugaacgacauccucucccgccuggacaaggucgaggccgaggugcagaucgaccggcugaucaccgggcgccuccagagccugcagaccuacgugacccagcagcugauccgggcggccgagauccgcgccagcgccaaccucgccgcgaccaagauguccgagugcguccugggccagagcaagcggguggacuucugcggcaagggguaccaccugauguccuucccccagagcgccccgcacggcguggucuuccuccacgugacguacguccccgcccaggagaagaacuucaccaccgcccccgcgaucugccacgacgggaaggcccacuucccccgcgagggcguguucguguccaacgggacccacugguucgucacgcagcggaacuucuacgagccgcagaucaucaccaccgacaacaccuucgugagcggcaacugcgacguggucaucggcaucgugaacaacacgguguacgacccccugcagcccgagcuggacuccuucaaggaggagcucgacaaguacuucaagaaccacaccagccccgacgucgaccugggggacaucuccggcaucaacgccagcguggugaacauccagaaggagaucgaccgccugaacgaggucgccaagaaccucaacgagucccugaucgaccugcaggagcucgggaaguacgagcaguacaucaaguggccgugguacaucuggcugggcuucaucgccggccugaucgcgaucgugauggugaccaucaugcucugcugcaugaccagcugcugcuccugccugaaggggugcugcagcugcggcuccugcugcaaguucgacgaggacgacagcgagcccguccugaagggggugaagcuccacuacacgugaggacuaguuauaagacugacuagcccgaugggccucccaacgggcccuccuccccuccuugcaccgagauuaauaaaaaaaaaaaaaaaaaaaaaaaaaaaaaaaaaaaaaaaaaaaaaaaaaaaaaaaaaaaaaaaaugcaucccccccccccccccccccccccccccccccaaaggcucuuuucagagccaccagaauu

SEQ ID NO: 12771 - RNA, 4039 nt, Artificial Sequence
  SARS-CoV-2/France/HF1805/2020__EPI_ISL_414628 spike protein mRNA gc (1-1273)
aggagaaagcuuaccauguucguguuccugguccuccugccccuggugagcucccagugcgugaaccucaccacccgcacgcagcugccgcccgccuacaccaacagcuucacccggggcgucuacuaccccgacaagguguuccgcuccagcgugcugcacuccacccaggaccucuuccugcccuucuucagcaacgucacgugguuccacgccauccacguguccgggaccaacggcaccaagcgguucgacaacccggugcugcccuucaacgacggggucuacuucgcgagcaccgagaaguccaacaucauccgcggcuggaucuucgggacgacccucgacagcaagacccagucccugcugaucgugaacaacgccaccaacguggucaucaaggugugcgaguuccaguucugcaacgaccccuuccucggcguguacuaccacaagaacaacaagagcuggauggaguccgaguuccgggucuacagcuccgccaacaacugcacguucgaguacgugagccagcccuuccugauggaccuggagggcaagcaggggaacuucaagaaccuccgcgaguucguguucaagaacaucgacggcuacuucaagaucuacuccaagcacaccccgaucaaccugguccgggaccugccccagggguucagcgcccucgagccccugguggaccugcccaucggcaucaacaucacccgcuuccagacccuccuggcccugcaccgguccuaccucacgccgggggacagcagcuccggcuggaccgcgggcgccgccgccuacuacgugggguaccugcagccccgcaccuuccugcucaaguacaacgagaacggcaccaucacggacgcggucgacugcgcccuggacccccugagcgagaccaagugcacccucaaguccuucaccguggagaaggggaucuaccagacgagcaacuuccgggugcagcccaccgaguccaucguccgcuucccgaacaucaccaaccugugccccuucggcgagguguucaacgccacccgguucgccagcgucuacgccuggaaccgcaagcggaucuccaacugcguggcggacuacagcgugcuguacaacuccgccagcuucuccacguucaagugcuacggcgucagccccaccaagcucaacgaccugugcuucaccaacguguacgccgacuccuucgugauccgcggggacgagguccggcagaucgcccccggccagaccgggaagaucgccgacuacaacuacaagcugccggacgacuucacgggcugcgugaucgcguggaacagcaacaaccucgacuccaaggucgggggcaacuacaacuaccuguaccgccuguuccgcaagagcaaccucaagcccuucgagcgggacaucuccaccgagaucuaccaggccggcagcacccccugcaacgggguggagggcuucaacugcuacuucccccugcaguccuacggguuccagccgaccaacggcgugggguaccagcccuaccggguggucgugcugagcuucgagcuccugcacgcccccgccacggugugcggccccaagaaguccaccaaccuggucaagaacaagugcgugaacuucaacuucaacggccucaccgggaccggcgugcugaccgagagcaacaagaaguuccugccguuccagcaguucgggcgcgacaucgccgacacgaccgacgcgguccgcgacccccagacccuggagauccucgacaucacccccugcagcuucggcgggguguccgugaucacgccgggcaccaacaccagcaaccaggucgccgugcuguaccagggcgugaacugcaccgagguccccguggccauccacgccgaccagcugacgcccaccuggcggguguacuccaccgggagcaacgucuuccagacccgcgccggcugccucaucggggcggagcacgugaacaacuccuacgagugcgacauccccaucggcgccggcaucugcgccagcuaccagacgcagaccaacuccccgcggcgcgcccggagcguggcgucccagagcaucaucgccuacaccaugucccugggggccgagaacagcgucgccuacuccaacaacagcaucgccauccccaccaacuucacgaucuccgugaccaccgagauccugcccgugagcaugaccaagacgagcgucgacugcaccauguacaucugcggcgacuccaccgagugcagcaaccuccugcugcaguacggguccuucugcacccagcucaaccgcgcgcugacgggcaucgccguggagcaggacaagaacacccaggagguguucgcccaggucaagcagaucuacaagacgcccccgaucaaggacuucgggggcuucaacuucagccagauccugcccgaccccuccaagcccagcaagcgguccuucaucgaggaccuccuguucaacaaggugacccuggccgacgccggcuucaucaagcaguacggggacugccucggcgacaucgcggcccgcgaccugaucugcgcccagaaguucaacgggcugaccgugcucccgccccugcugaccgacgagaugaucgcccaguacaccagcgcccuccuggcgggcaccaucacguccggguggaccuucggcgccggcgccgcccugcagauccccuucgcgaugcagauggccuaccgguucaacgggaucggcgucacccagaacgugcucuacgagaaccagaagcugaucgccaaccaguucaacagcgccaucgggaagauccaggacucccugagcuccaccgccagcgcgcucggcaagcugcaggacguggucaaccagaacgcccaggcccugaacacgcucgugaagcagcuguccagcaacuucggggccaucuccagcgugcugaacgacauccucucccgccuggacaaggucgaggccgaggugcagaucgaccggcugaucaccggccgccuccagagccugcagaccuacgugacccagcagcugauccgggcggccgagauccgcgccagcgccaaccucgccgcgaccaagauguccgagugcguccugggccagagcaagcggguggacuucugcgggaagggcuaccaccugauguccuucccccagagcgccccgcacgggguggucuuccuccacgugacguacguccccgcccaggagaagaacuucaccaccgcccccgcgaucugccacgacggcaaggcccacuucccccgcgaggggguguucguguccaacggcacccacugguucgucacgcagcggaacuucuacgagccgcagaucaucaccaccgacaacaccuucgugagcggcaacugcgacguggucaucgggguggugaacaacacggucuacgacccccugcagcccgagcuggacuccuucaaggaggagcucgacaaguacuucaagaaccacaccagccccgacguggaccugggcgacaucuccgggaucaacgccagcguggucaacauccagaaggagaucgaccgccugaacgagguggccaagaaccucaacgagucccugaucgaccugcaggagcucggcaaguacgagcaguacaucaaguggccgugguacaucuggcugggcuucaucgccgggcugaucgcgaucgugauggucaccaucaugcucugcugcaugaccagcugcugcuccugccugaagggcugcugcagcugcggguccugcugcaaguucgacgaggacgacagcgagcccgugcugaagggcgugaagcuccacuacacgugaggacuaguuauaagacugacuagcccgaugggccucccaacgggcccuccuccccuccuugcaccgagauuaauaaaaaaaaaaaaaaaaaaaaaaaaaaaaaaaaaaaaaaaaaaaaaaaaaaaaaaaaaaaaaaaaugcaucccccccccccccccccccccccccccccccaaaggcucuuuucagagccaccagaauu

SEQ ID NO: 12772 - RNA, 4039 nt, Artificial Sequence
  SARS-CoV-2/Netherlands/ZuidHolland_9/2020__EPI_ISL_414445 spike protein mRNA gc (1-1273)
aggagaaagcuuaccauguucguguuccugguccuccugccccuggugagcucccagugcgugaaccucaccacccgcacgcagcugccgcccgccuacaccaacagcuucacccggggcgucuacuaccccgacaagguguuccgcuccagcgugcugcacuccacccaggaccucuuccugcccuucuucagcaacgucacgugguuccacgccauccacguguccgggaccaacggcaccaagcgguucgacaacccggugcugcccuucaacgacggggucuacuucgcgagcaccgagaaguccaacaucauccgcggcuggaucuucgggacgacccucgacagcaagacccagucccugcugaucgugaacaacgccaccaacguggucaucaaggugugcgaguuccaguucugcaacgaccccuuccucggcguguacuaccacaagaacaacaagagcuggauggaguccgaguuccgggucuacagcuccgccaacaacugcacguucgaguacgugagccagcccuuccugauggaccuggagggcaagcaggggaacuucaagaaccuccgcgaguucguguucaagaacaucgacggcuacuucaagaucuacuccaagcacaccccgaucaaccugguccgggaccugccccagggguucagcgcccucgagccccugguggaccugcccaucggcaucaacaucacccgcuuccagacccuccuggcccugcaccgguccuaccucacgccgggggacagcagcuccggcuggaccgcgggcgccgccgccuacuacgugggguaccugcagccccgcaccuuccugcucaaguacaacgagaacggcaccaucacggacgcggucgacugcgcccuggacccccugagcgagaccaagugcacccucaaguccuucaccguggagaaggggaucuaccagacgagcaacuuccgggugcagcccaccgaguccaucguccgcuucccgaacaucaccaaccugugccccuucggcgagguguucaacgccacccgguucgccagcgucuacgccuggaaccgcaagcggaucuccaacugcguggcggacuacagcgugcuguacaacuccgccagcuucuccacguucaagugcuacggcgucagccccaccaagcucaacgaccugugcuucaccaacguguacgccgacuccuucgugauccgcggggacgagguccggcagaucgcccccggccagaccgggaagaucgccgacuacaacuacaagcugccggacgacuucacgggcugcgugaucgcguggaacagcaacaaccucgacuccaaggucgggggcaacuacaacuaccuguaccgccuguuccgcaagagcaaccucaagcccuucgagcgggacaucuccaccgagaucuaccaggccggcagcacccccugcaacgggguggagggcuucaacugcuacuucccccugcaguccuacggguuccagccgaccaacggcgugggguaccagcccuaccggguggucgugcugagcuucgagcuccugcacgcccccgccacggugugcggccccaagaaguccaccaaccuggucaagaacaagugcgugaacuucaacuucaacggccucaccgggaccggcgugcugaccgagagcaacaagaaguuccugccguuccagcaguucgggcgcgacaucgccgacacgaccgacgcgguccgcgacccccagacccuggagauccucgacaucacccccugcagcuucggcgggguguccgugaucacgccgggcaccaacaccagcaaccaggucgccgugcuguaccagggcgugaacugcaccgagguccccguggccauccacgccgaccagcugacgcccaccuggcggguguacuccaccgggagcaacgucuuccagacccgcgccggcugccucaucggggcggagcacgugaacaacuccuacgagugcgacauccccaucggcgccggcaucugcgccagcuaccagacgcagaccaacuccccgcggcgcgcccggagcguggcgucccagagcaucaucgccuacaccaugucccugggggccgagaacagcgucgccuacuccaacaacagcaucgccauccccaccaacuucacgaucuccgugaccaccgagauccugcccgugagcaugaccaagacgagcgucgacugcaccauguacaucugcggcgacuccaccgagugcagcaaccuccugcugcaguacggguccuucugcacccagcucaaccgcgcgcugacgggcaucgccguggagcaggacaagaacacccaggagguguucgcccaggucaagcagaucuacaagacgcccccgaucaaggacuucgggggcuucaacuucagccagauccugcccgaccccuccaagcccagcaagcgguccuucaucgaggaccuccuguucaacaaggugacccuggccgacgccggcuucaucaagcaguacggggacugccucggcgacaucgcggcccgcgaccugaucugcgugcagaaguucaacgggcugaccguccucccgccccugcugaccgacgagaugaucgcccaguacaccagcgcccuccuggccggcaccaucacguccggguggaccuucggcgcgggcgccgcccugcagauccccuucgccaugcagauggcguaccgguucaacgggaucggcgugacccagaacgugcucuacgagaaccagaagcugaucgccaaccaguucaacagcgccaucgggaagauccaggacucccugagcuccaccgccagcgcccucggcaagcugcaggacgucgugaaccagaacgcgcaggcccugaacacgcucgugaagcagcuguccagcaacuucggggccaucuccagcguccugaacgacauccucucccgccuggacaagguggaggccgaggugcagaucgaccggcugaucaccggccgccuccagagccugcagaccuacgucacccagcagcugauccgggccgcggagauccgcgccagcgccaaccucgccgccaccaagauguccgagugcgugcugggccagagcaagcggguggacuucugcgggaagggcuaccaccugauguccuucccccagagcgcgccgcacggggucguguuccuccacgucacguacgugcccgcccaggagaagaacuucaccaccgcccccgccaucugccacgacggcaaggcgcacuucccccgcgaggggguguucgucuccaacggcacccacugguucgugacgcagcggaacuucuacgagccgcagaucaucaccaccgacaacaccuucgugagcggcaacugcgacgucgugaucgggaucgugaacaacacggucuacgacccccugcagcccgagcuggacuccuucaaggaggagcucgacaaguacuucaagaaccacaccagccccgacguggaccugggcgacaucuccgggaucaacgccagcguggucaacauccagaaggagaucgaccgccugaacgagguggccaagaaccucaacgagucccugaucgaccugcaggagcucggcaaguacgagcaguacaucaaguggccgugguacaucuggcugggcuucaucgccgggcugaucgccaucgugauggucaccaucaugcucugcugcaugaccagcugcugcuccugccugaagggcugcugcagcugcggguccugcugcaaguucgacgaggacgacagcgagcccgugcugaagggcgugaagcuccacuacacgugaggacuaguuauaagacugacuagcccgaugggccucccaacgggcccuccuccccuccuugcaccgagauuaauaaaaaaaaaaaaaaaaaaaaaaaaaaaaaaaaaaaaaaaaaaaaaaaaaaaaaaaaaaaaaaaaugcaucccccccccccccccccccccccccccccccaaaggcucuuuucagagccaccagaauu

SEQ ID NO: 12773 - RNA, 4039 nt, Artificial Sequence
  SARS-CoV-2/Finland/FIN03032020A/2020__EPI_ISL_413602 spike protein mRNA gc (1-1273)
aggagaaagcuuaccauguucguguuccugguccuccugccccuggugagcucccagugcgugaaccucaccacccgcacgcagcugccgcccgccuacaccaacagcuucacccggggcgucuacuaccccgacaagguguuccgcuccagcgugcugcacuccacccaggaccucuuccugcccuucuucagcaacgucacgugguuccacgccauccacguguccgggaccaacggcaccaagcgguucgacaacccggugcugcccuucaacgacggggucuacuucgcgagcaccgagaaguccaacaucauccgcggcuggaucuucgggacgacccucgacagcaagacccagucccugcugaucgugaacaacgccaccaacguggucaucaaggugugcgaguuccaguucugcaacgaccccuuccucggcguguacuaccacaagaacaacaagagcuggauggaguccgaguuccgggucuacagcuccgccaacaacugcacguucgaguacgugagccagcccuuccugauggaccuggagggcaagcaggggaacuucaagaaccuccgcgaguucguguucaagaacaucgacggcuacuucaagaucuacuccaagcacaccccgaucaaccugguccgggaccugccccagggguucagcgcccucgagccccugguggaccugcccaucggcaucaacaucacccgcuuccagacccuccuggcccugcaccgguccuaccucacgccgggggacagcagcuccggcuggaccgcgggcgccgccgccuacuacgugggguaccugcagccccgcaccuuccugcucaaguacaacgagaacggcaccaucacggacgcggucgacugcgcccuggacccccugagcgagaccaagugcacccucaaguccuucaccguggagaaggggaucuaccagacgagcaacuuccgggugcagcccaccgaguccaucguccgcuucccgaacaucaccaaccugugccccuucggcgagguguucaacgccacccgguucgccagcgucuacgccuggaaccgcaagcggaucuccaacugcguggcggacuacagcgugcuguacaacuccgccagcuucuccacguucaagugcuacggcgucagccccaccaagcucaacgaccugugcuucaccaacguguacgccgacuccuucgugauccgcggggacgagguccggcagaucgcccccggccagaccgggaagaucgccgacuacaacuacaagcugccggacgacuucacgggcugcgugaucagcuggaacuccaacaaccucgacagcaaggucgggggcaacuacaacuaccuguaccgccuguuccggaaguccaaccucaagcccuucgagcgcgacaucagcaccgagaucuaccaggcgggcuccacccccugcaacgggguggagggcuucaacugcuacuucccccugcagagcuacggguuccagccgaccaacggcgugggguaccagcccuaccggguggucgugcugagcuucgagcuccugcacgcccccgccacggugugcggccccaagaaguccaccaaccuggucaagaacaagugcgugaacuucaacuucaacggccucaccgggaccggcgugcugaccgagagcaacaagaaguuccugccguuccagcaguucgggcgcgacaucgccgacacgaccgacgccguccgcgacccccagacccuggagauccucgacaucacccccugcuccuucggcggggugagcgugaucacgccgggcaccaacaccuccaaccaggucgcggugcuguaccagggcgugaacugcaccgagguccccguggccauccacgccgaccagcugacgcccaccuggcggguguacagcaccggguccaacgucuuccagacccgcgccggcugccucaucggggccgagcacgugaacaacagcuacgagugcgacauccccaucggcgcgggcaucugcgccuccuaccagacgcagaccaacagcccgcggcgcgcccgguccguggccagccaguccaucaucgcguacaccaugagccugggggccgagaacuccgucgccuacagcaacaacuccaucgccauccccaccaacuucacgaucagcgugaccaccgagauccugcccgugagcaugaccaagacguccgucgacugcaccauguacaucugcggcgacagcaccgagugcuccaaccuccugcugcaguacgggagcuucugcacccagcucaaccgcgcccugacgggcaucgcgguggagcaggacaagaacacccaggagguguucgcccaggucaagcagaucuacaagacgcccccgaucaaggacuucgggggcuucaacuucucccagauccugcccgaccccagcaagcccuccaagcggagcuucaucgaggaccuccuguucaacaaggugacccuggccgacgccggcuucaucaagcaguacggggacugccucggcgacaucgccgcgcgcgaccugaucugcgcccagaaguucaacgggcugaccgugcucccgccccugcugaccgacgagaugaucgcccaguacaccuccgcccuccuggccggcaccaucacgagcggguggaccuucggcgcgggcgccgcccugcagauccccuucgccaugcagauggcguaccgguucaacgggaucggcgucacccagaacgugcucuacgagaaccagaagcugaucgccaaccaguucaacuccgccaucgggaagauccaggacagccuguccagcaccgccuccgcccucggcaagcugcaggacguggucaaccagaacgcgcaggcccugaacacgcucgugaagcagcugagcuccaacuucggggccaucagcuccgugcugaacgacauccucagccgccuggacaaggucgaggccgaggugcagaucgaccggcugaucaccggccgccuccagagccugcagaccuacgugacccagcagcugauccgggccgcggagauccgcgccuccgccaaccucgccgccaccaagaugagcgagugcguccugggccaguccaagcggguggacuucugcgggaagggcuaccaccugaugagcuucccccaguccgcgccgcacgggguggucuuccuccacgugacguacguccccgcccaggagaagaacuucaccaccgcccccgccaucugccacgacggcaaggcgcacuucccccgcgaggggguguucgugagcaacggcacccacugguucgucacgcagcggaacuucuacgagccgcagaucaucaccaccgacaacaccuucguguccggcaacugcgacguggucaucgggaucgugaacaacacgguguacgacccccugcagcccgagcuggacagcuucaaggaggagcucgacaaguacuucaagaaccacaccucccccgacgucgaccugggcgacaucagcgggaucaacgccuccguggugaacauccagaaggagaucgaccgccugaacgaggucgccaagaaccucaacgagagccugaucgaccugcaggagcucggcaaguacgagcaguacaucaaguggccgugguacaucuggcugggcuucaucgccgggcugaucgccaucgugauggugaccaucaugcucugcugcaugaccuccugcugcagcugccugaagggcugcugcuccugcgggagcugcugcaaguucgacgaggacgacuccgagcccguccugaagggcgugaagcuccacuacacgugaggacuaguuauaagacugacuagcccgaugggccucccaacgggcccuccuccccuccuugcaccgagauuaauaaaaaaaaaaaaaaaaaaaaaaaaaaaaaaaaaaaaaaaaaaaaaaaaaaaaaaaaaaaaaaaaugcaucccccccccccccccccccccccccccccccaaaggcucuuuucagagccaccagaauu

SEQ ID NO: 12774 - RNA, 4039 nt, Artificial Sequence
  SARS-CoV-2/France/GE1977/2020__EPI_ISL_414632 spike protein mRNA gc (1-1273)
aggagaaagcuuaccauguucguguuccugguccuccugccccuggugagcucccagugcgugaaccucaccacccgcacgcagcugccgcccgccuacaccaacagcuucacccggggcgucuacuaccccgacaagguguuccgcuccagcgugcugcacuccacccaggaccucuuccugcccuucuucagcaacgucacgugguuccacgccauccacguguccgggaccaacggcaccaagcgguucgacaacccggugcugcccuucaacgacggggucuacuucgcgagcaccgagaaguccaacaucauccgcggcuggaucuucgggacgacccucgacagcaagacccagucccugcugaucgugaacaacgccaccaacguggucaucaaggugugcgaguuccaguucugcaacgaccccuuccucggcguguacuaccacaagaacaacaagagcuggauggaguccgaguuccgggucuacagcuccgccaacaacugcacguucgaguacgugagccagcccuuccugauggaccuggagggcaagcaggggaacuucaagaaccuccgcgaguucguguucaagaacaucgacggcuacuucaagaucuacuccaagcacaccccgaucaaccugguccgggaccugccccagggguucagcgcccucgagccccugguggaccugcccaucggcaucaacaucacccgcuuccagacccuccuggcccugcaccgguccuaccucacgccgggggacagcagcuccggcuggaccgcgggcgccgccgccuacuacgugggguaccugcagccccgcaccuuccugcucaaguacaacgagaacggcaccaucacggacgcggucgacugcgcccuggacccccugagcgagaccaagugcacccucaaguccuucaccguggagaaggggaucuaccagacgagcaacuuccgggugcagcccaccgaguccaucguccgcuucccgaacaucaccaaccugugccccuucggcgagguguucaacgccacccgguucgccagcgucuacgccuggaaccgcaagcggaucuccaacugcguggcggacuacagcgugcuguacaacuccgccagcuucuccacguucaagugcuacggcgucagccccaccaagcucaacgaccugugcuucaccaacguguacgccgacuccuucgugauccgcggggacgagguccggcagaucgcccccggccagaccgggaagaucgccgacuacaacuacaagcugccggacgacuucacgggcugcgugaucgcguggaacagcaacaaccucgacuccaaggucgggggcaacuacaacuaccuguaccgccuguuccgcaagagcaaccucaagcccuucgagcgggacaucuccaccgagaucuaccaggccggcagcacccccugcaacgggguggagggcuucaacugcuacuucccccugcaguccuacggguuccagccgaccaacggcgugggguaccagcccuaccggguggucgugcugagcuucgagcuccugcacgcccccgccacggugugcggccccaagaaguccaccaaccuggucaagaacaagugcgugaacuucaacuucaacggccucaccgggaccggcgugcugaccgagagcaacaagaaguuccugccguuccagcaguucgggcgcgacaucgccgacacgaccgacgcgguccgcgacccccagacccuggagauccucgacaucacccccugcagcuucggcgggguguccgugaucacgccgggcaccaacaccagcaaccaggucgccgugcuguaccagggcgugaacugcaccgagguccccguggccauccacgccgaccagcugacgcccaccuggcggguguacuccaccgggagcaacgucuuccagacccgcgccggcugccucaucggggcggagcacgugaacaacuccuacgagugcgacauccccaucggcgccggcaucugcgccagcuaccagacgcagaccaacuccccgcggcgcgcccggagcguggcgucccagagcaucaucgccuacaccaugucccugggggccgagaacagcgucgccuacuccaacaacagcaucgccauccccaccaacuucacgaucuccgugaccaccgagauccugcccgugagcaugaccaagacgagcgucgacugcaccauguacaucugcggcgacuccaccgagugcagcaaccuccugcugcaguacggguccuucugcacccagcucaaccgcgcgcugacgggcaucgccguggagcaggacaagaacacccaggagguguucgcccaggucaagcagaucuacaagacgcccccgaucaaggacuucgggggcuucaacuucagccagauccugcccgaccccuccaagcccagcaagcgguccuucaucgaggaccuccuguucaacaaggugacccuggccgacgccggcuucaucaagcaguacggggacugccucggcgacaucgcggcccgcgaccugaucugcgcccagaaguucaacgggcugaccgugcucccgccccugcugaccgacgagaugaucgcccaguacaccagcgcccuccuggcgggcaccaucacguccggguggaccuucggcgccggcgccgcccugcagauccccuucgcgaugcagauggccuaccgguucaacgggaucggcgucacccagaacgugcucuacgagaaccagaagcugaucgccaaccaguucaacagcgccaucgggaagauccaggacucccuguucagcaccgccuccgcgcucggcaagcugcaggacguggucaaccagaacgcccaggcccugaacacgcucgugaagcagcugagcuccaacuucggggccaucagcuccgugcugaacgacauccucagccgccuggacaaggucgaggccgaggugcagaucgaccggcugaucaccggccgccuccagucccugcagaccuacgugacccagcagcugauccgggcggccgagauccgcgccagcgccaaccucgccgcgaccaagaugagcgagugcguccugggccaguccaagcggguggacuucugcgggaagggcuaccaccugaugagcuucccccaguccgccccgcacgggguggucuuccuccacgugacguacguccccgcccaggagaagaacuucaccaccgcccccgcgaucugccacgacggcaaggcccacuucccccgcgaggggguguucgugagcaacggcacccacugguucgucacgcagcggaacuucuacgagccgcagaucaucaccaccgacaacaccuucguguccggcaacugcgacguggucaucgggaucgugaacaacacgguguacgacccccugcagcccgagcuggacagcuucaaggaggagcucgacaaguacuucaagaaccacaccucccccgacgucgaccugggcgacaucagcgggaucaacgccuccguggugaacauccagaaggagaucgaccgccugaacgaggucgccaagaaccucaacgagagccugaucgaccugcaggagcucggcaaguacgagcaguacaucaaguggccgugguacaucuggcugggcuucaucgccgggcugaucgcgaucgugauggugaccaucaugcucugcugcaugaccuccugcugcagcugccugaagggcugcugcuccugcgggagcugcugcaaguucgacgaggacgacuccgagcccguccugaagggcgugaagcuccacuacacgugaggacuaguuauaagacugacuagcccgaugggccucccaacgggcccuccuccccuccuugcaccgagauuaauaaaaaaaaaaaaaaaaaaaaaaaaaaaaaaaaaaaaaaaaaaaaaaaaaaaaaaaaaaaaaaaaugcaucccccccccccccccccccccccccccccccaaaggcucuuuucagagccaccagaauu

SEQ ID NO: 12775 - RNA, 4039 nt, Artificial Sequence
  SARS-CoV-2/Finland/FIN-313/2020__EPI_ISL_414641 spike protein mRNA gc (1-1273)
aggagaaagcuuaccauguucguguuccugguccuccugccccuggugagcucccagugcgugaaccucaccacccgcacgcagcugccgcccgccuacaccaacagcuucacccggggcgucuacuaccccgacaagguguuccgcuccagcgugcugcacuccacccaggaccucuuccugcccuucuucagcaacgucacgugguuccacgccauccacguguccgggaccaacggcaccaagcgguucgacaacccggugcugcccuucaacgacggggucuacuucgcgagcaccgagaaguccaacaucauccgcggcuggaucuucgggacgacccucgacagcaagacccagucccugcugaucgugaacaacgccaccaacguggucaucaaggugugcgaguuccaguucugcaacgaccccuuccucggcguguacuaccacaagaacaacaagagcuggauggaguccgaguuccgggucuacagcuccgccaacaacugcacguucgaguacgugagccagcccuuccugauggaccuggagggcaagcaggggaacuucaagaaccuccgcgaguucguguucaagaacaucgacggcuacuucaagaucuacuccaagcacaccccgaucaaccugguccgggaccugccccagggguucagcgcccucgagccccugguggaccugcccaucggcaucaacaucacccgcuucaagacccuccuggcccugcaccgguccuaccucacgccgggggacagcagcuccggcuggaccgcgggcgccgccgccuacuacgugggguaccugcagccccgcaccuuccugcucaaguacaacgagaacggcaccaucacggacgcggucgacugcgcccuggacccccugagcgagaccaagugcacccucaaguccuucaccguggagaaggggaucuaccagacgagcaacuuccgggugcagcccaccgaguccaucguccgcuucccgaacaucaccaaccugugccccuucggcgagguguucaacgccacccgguucgccagcgucuacgccuggaaccgcaagcggaucuccaacugcguggcggacuacagcgugcuguacaacuccgccagcuucuccacguucaagugcuacggcgucagccccaccaagcucaacgaccugugcuucaccaacguguacgccgacuccuucgugauccgcggggacgagguccggcagaucgcccccggccagaccgggaagaucgccgacuacaacuacaagcugccggacgacuucacgggcugcgugaucgcguggaacagcaacaaccucgacuccaaggucgggggcaacuacaacuaccuguaccgccuguuccgcaagagcaaccucaagcccuucgagcgggacaucuccaccgagaucuaccaggccggcagcacccccugcaacgggguggagggcuucaacugcuacuucccccugcaguccuacggguuccagccgaccaacggcgugggguaccagcccuaccggguggucgugcugagcuucgagcuccugcacgcccccgccacggugugcggccccaagaaguccaccaaccuggucaagaacaagugcgugaacuucaacuucaacggccucaccgggaccggcgugcugaccgagagcaacaagaaguuccugccguuccagcaguucgggcgcgacaucgccgacacgaccgacgcgguccgcgacccccagacccuggagauccucgacaucacccccugcagcuucggcgggguguccgugaucacgccgggcaccaacaccagcaaccaggucgccgugcuguaccagggcgugaacugcaccgagguccccguggccauccacgccgaccagcugacgcccaccuggcggguguacuccaccgggagcaacgucuuccagacccgcgccggcugccucaucggggcggagcacgugaacaacuccuacgagugcgacauccccaucggcgccggcaucugcgccagcuaccagacgcagaccaacuccccgcggcgcgcccggagcguggcgucccagagcaucaucgccuacaccaugucccugggggccgagaacagcgucgccuacuccaacaacagcaucgccauccccaccaacuucacgaucuccgugaccaccgagauccugcccgugagcaugaccaagacgagcgucgacugcaccauguacaucugcggcgacuccaccgagugcagcaaccuccugcugcaguacggguccuucugcacccagcucaaccgcgcgcugacgggcaucgccguggagcaggacaagaacacccaggagguguucgcccaggucaagcagaucuacaagacgcccccgaucaaggacuucgggggcuucaacuucagccagauccugcccgaccccuccaagcccagcaagcgguccuucaucgaggaccuccuguucaacaaggugacccuggccgacgccggcuucaucaagcaguacggggacugccucggcgacaucgcggcccgcgaccugaucugcgcccagaaguucaacgggcugaccgugcucccgccccugcugaccgacgagaugaucgcccaguacaccagcgcccuccuggcgggcaccaucacguccggguggaccuucggcgccggcgccgcccugcagauccccuucgcgaugcagauggccuaccgguucaacgggaucggcgucacccagaacgugcucuacgagaaccagaagcugaucgccaaccaguucaacagcgccaucgggaagauccaggacucccugagcuccaccgccagcgcgcucggcaagcugcaggacguggucaaccagaacgcccaggcccugaacacgcucgugaagcagcuguccagcaacuucggggccaucuccagcgugcugaacgacauccucucccgccuggacaaggucgaggccgaggugcagaucgaccggcugaucaccggccgccuccagagccugcagaccuacgugacccagcagcugauccgggcggccgagauccgcgccagcgccaaccucgccgcgaccaagauguccgagugcguccugggccagagcaagcggguggacuucugcgggaagggcuaccaccugauguccuucccccagagcgccccgcacgggguggucuuccuccacgugacguacguccccgcccaggagaagaacuucaccaccgcccccgcgaucugccacgacggcaaggcccacuucccccgcgaggggguguucguguccaacggcacccacugguucgucacgcagcggaacuucuacgagccgcagaucaucaccaccgacaacaccuucgugagcggcaacugcgacguggucaucgggaucgugaacaacacgguguacgacccccugcagcccgagcuggacuccuucaaggaggagcucgacaaguacuucaagaaccacaccagccccgacgucgaccugggcgacaucuccgggaucaacgccagcguggugaacauccagaaggagaucgaccgccugaacgaggucgccaagaaccucaacgagucccugaucgaccugcaggagcucggcaaguacgagcaguacaucaaguggccgugguacaucuggcugggcuucaucgccgggcugaucgcgaucgugauggugaccaucaugcucugcugcaugaccagcugcugcuccugccugaagggcugcugcagcugcggguccugcugcaaguucgacgaggacgacagcgagcccguccugaagggcgugaagcuccacuacacgugaggacuaguuauaagacugacuagcccgaugggccucccaacgggcccuccuccccuccuugcaccgagauuaauaaaaaaaaaaaaaaaaaaaaaaaaaaaaaaaaaaaaaaaaaaaaaaaaaaaaaaaaaaaaaaaaugcaucccccccccccccccccccccccccccccccaaaggcucuuuucagagccaccagaauu

SEQ ID NO: 12776 - RNA, 4039 nt, Artificial Sequence
  SARS-CoV-2/Netherlands/ZuidHolland_2/2020__EPI_ISL_414556 spike protein mRNA gc (1-1273)
aggagaaagcuuaccauguucguguuccugguccuccugccccuggugagcucccagugcgugaaccucaccacccgcacgcagcugccgcccgccuacaccaacagcuucacccggggcgucuacuaccccgacaagguguuccgcuccagcgugcugcacuccacccaggaccucuuccugcccuucuucagcaacgucacgugguuccacgccauccacguguccgggaccaacggcaccaagcgguucgacaacccggugcugcccuucaacgacggggucuacuucgcgagcaccgagaaguccaacaucauccgcggcuggaucuucgggacgacccucgacagcaagacccagucccugcugaucgugaacaacgccaccaacguggucaucaaggugugcgaguuccaguucugcaacgaccccuuccucggcguguacuaccacaagaacaacaagagcuggauggaguccgaguuccgggucuacagcuccgccaacaacugcacguucgaguacgugagccagcccuuccugauggaccuggagggcaagcaggggaacuucaagaaccuccgcgaguucguguucaagaacaucgacggcuacuucaagaucuacuccaagcacaccccgaucaaccugguccgggaccugccccagggguucagcgcccucgagccccugguggaccugcccaucggcaucaacaucacccgcuuccagacccuccuggcccugcaccgguccuaccucacgccgggggacagcagcuccggcuggaccgcgggcgccgccgccuacuacgugggguaccugcagccccgcaccuuccugcucaaguacaacgagaacggcaccaucacggacgcggucgacugcgcccuggacccccugagcgagaccaagugcacccucaaguccuucaccguggagaaggggaucuaccagacgagcaacuuccgggugcagcccaccgaguccaucguccgcuucccgaacaucaccaaccugugccccuucggcgagguguucaacgccacccgguucgccagcgucuacgccuggaaccgcaagcggaucuccaacugcguggcggacuacagcgugcuguacaacuccgccagcuucuccacguucaagugcuacggcgucagccccaccaagcucaacgaccugugcuucaccaacguguacgccgacuccuucgugauccgcggggacgagguccggcagaucgcccccggccagaccgggaagaucgccgacuacaacuacaagcugccggacgacuucacgggcugcgugaucgcguggaacagcaacaaccucgacuccaaggucgggggcaacuacaacuaccuguaccgccuguuccgcaagagcaaccucaagcccuucgagcgggacaucuccaccgagaucuaccaggccggcagcacccccugcaacgggguggagggcuucaacugcuacuucccccugcaguccuacggguuccagccgaccaacggcgugggguaccagcccuaccggguggucgugcugagcuucgagcuccugcacgcccccgccacggugugcggccccaagaaguccaccaaccuggucaagaacaagugcgugaacuucaacuucaacggccucaccgggaccggcgugcugaccgagagcaacaagaaguuccugccguuccagcaguucgggcgcgacaucgccgacacgaccgacgcgguccgcgacccccagacccuggagauccucgacaucacccccugcagcuucggcgggguguccgugaucacgccgggcaccaacaccagcaaccaggucgccgugcuguaccagggcgugaacugcaccgagguccccguggccauccacgccgaccagcugacgcccaccuggcggguguacuccaccgggagcaacgucuuccagacccgcgccggcugccucaucggggcggagcacgugaacaacuccuacgagugcgacauccccaucggcgccggcaucugcgccagcuaccagacgcagaccaacuccccgcggcgcgcccggagcguggcgucccagagcaucaucgccuacaccaugucccugggggccgagaacagcgucgccuacuccaacaacagcaucgccauccccaccaacuucacgaucuccgugaccaccgagauccugcccgugagcaugaccaagacgagcgucgacugcaccauguacaucugcggcgacuccaccgagugcagcaaccuccugcugcaguacggguccuucugcacccagcucaaccgcgcgcugacgggcaucgcccuggagcaggacaagaacacccaggagguguucgcccaggugaagcagaucuacaagacgcccccgaucaaggacuucgggggcuucaacuucagccagauccuccccgaccccuccaagcccagcaagcgguccuucaucgaggaccugcuguucaacaaggucacccucgccgacgccggcuucaucaagcaguacggggacugccugggcgacaucgcggcccgcgaccugaucugcgcccagaaguucaacgggcucaccgugcugccgccccugcucaccgacgagaugaucgcccaguacaccagcgcccugcuggcgggcaccaucacguccggguggaccuucggcgccggcgccgcccuccagauccccuucgcgaugcagauggccuaccgguucaacgggaucggcgugacccagaacguccuguacgagaaccagaagcugaucgccaaccaguucaacagcgccaucgggaagauccaggacucccucagcuccaccgccagcgcgcugggcaagcugcaggacguggugaaccagaacgcccaggcccucaacacgcuggucaagcagcuguccagcaacuucggggccaucuccagcgugcucaacgacauccugucccgccuggacaagguggaggccgagguccagaucgaccggcucaucaccggccgccugcagagccugcagaccuacgugacccagcagcucauccgggcggccgagauccgcgccagcgccaaccuggccgcgaccaagauguccgagugcgugcugggccagagcaagcgggucgacuucugcgggaagggcuaccaccucauguccuucccccagagcgccccgcacggggugguguuccugcacgucacguacgugcccgcccaggagaagaacuucaccaccgcccccgcgaucugccacgacggcaaggcccacuucccccgcgagggggucuucguguccaacggcacccacugguucgugacgcagcggaacuucuacgagccgcagaucaucaccaccgacaacaccuucgucagcggcaacugcgacguggugaucgggaucgucaacaacacgguguacgacccccugcagcccgagcucgacuccuucaaggaggagcuggacaaguacuucaagaaccacaccagccccgacguggaccugggcgacaucuccgggaucaacgccagcgucgugaacauccagaaggagaucgaccgccucaacgagguggccaagaaccugaacgagucccugaucgaccuccaggagcugggcaaguacgagcaguacaucaaguggccgugguacaucuggcugggcuucaucgccgggcucaucgcgaucgucauggugaccaucaugcugugcugcaugaccagcugcugcuccugccugaagggcugcugcagcugcggguccugcugcaaguucgacgaggacgacagcgagcccgugcucaagggcgucaagcugcacuacacgugaggacuaguuauaagacugacuagcccgaugggccucccaacgggcccuccuccccuccuugcaccgagauuaauaaaaaaaaaaaaaaaaaaaaaaaaaaaaaaaaaaaaaaaaaaaaaaaaaaaaaaaaaaaaaaaaugcaucccccccccccccccccccccccccccccccaaaggcucuuuucagagccaccagaauu

SEQ ID NO: 12777 - RNA, 4039 nt, Artificial Sequence
  SARS-CoV-2/USA/WA-UW31/2020__EPI_ISL_414618 spike protein mRNA gc (1-1273)
aggagaaagcuuaccauguucguguuccugguccuccugccccuggugagcucccagugcgugaaccucaccacccgcacgcagcugccgcccgccuacaccaacagcuucacccggggcgucuacuaccccgacaagguguuccgcuccagcgugcugcacuccacccaggaccucuuccugcccuucuucagcaacgucacgugguuccacgccauccacguguccgggaccaacggcaccaagcgguucgacaacccggugcugcccuucaacgacggggucuacuucgcgagcaccgagaaguccaacaucauccgcggcuggaucuucgggacgacccucgacagcaagacccagucccugcugaucgugaacaacgccaccaacguggucaucaaggugugcgaguuccaguucugcaacgaccccuuccucggcguguacuaccacaagaacaacaagagcuggauggaguccgaguuccgggucuacagcuccgccaacaacugcacguucgaguacgugagccagcccuuccugauggaccuggagggcaagcaggggaacuucaagaaccuccgcgaguucguguucaagaacaucgacggcuacuucaagaucuacuccaagcacaccccgaucaaccugguccgggaccugccccagggguucagcgcccucgagccccugguggaccugcccaucggcaucaacaucacccgcuuccagacccuccuggcccugcaccgguccuaccucacgccgggggacagcagcuccggcuggaccgcgggcgccgccgccuacuacgugggguaccugcagccccgcaccuuccugcucaaguacaacgagaacggcaccaucacggacgcggucgacugcgcccuggacccccugagcgagaccaagugcacccucaaguccuucaccguggagaaggggaucuaccagacgagcaacuuccgggugcagcccaccgaguccaucguccgcuucccgaacaucaccaaccugugccccuucggcgagguguucaacgccacccgguucgccagcgucuacgccuggaaccgcaagcggaucuccaacugcguggcggacuacagcgugcuguacaacuccgccagcuucuccacguucaagugcuacggcgucagccccaccaagcucaacgaccugugcuucaccaacguguacgccgacuccuucgugauccgcggggacgagguccggcagaucgcccccggccagaccgggaagaucgccgacuacaacuacaagcugccggacgacuucacgggcugcgugaucgcguggaacagcaacaaccucgacuccaaggucgggggcaacuacaacuaccuguaccgccuguuccgcaagagcaaccucaagcccuucgagcgggacaucuccaccgagaucuaccaggccggcagcacccccugcaacggggccgagggcuucaacugcuacuucccccugcaguccuacggguuccagccgaccaacggcgugggguaccagcccuaccggguggugguccugagcuucgagcuccugcacgcccccgccacggugugcggccccaagaaguccaccaaccuggugaagaacaagugcgucaacuucaacuucaacggccucaccgggaccggcgugcugaccgagagcaacaagaaguuccugccguuccagcaguucgggcgcgacaucgcggacacgaccgacgccgugcgcgacccccagacccuggagauccucgacaucacccccugcagcuucggcggggucuccgugaucacgccgggcaccaacaccagcaaccagguggccguccuguaccaggacgugaacugcaccgaggugcccgucgccauccacgccgaccagcugacgcccaccuggcggguguacuccaccggcagcaacguguuccagacccgcgcggggugccucaucggcgccgagcacgucaacaacuccuacgagugcgacauccccaucggggccggcaucugcgccagcuaccagacgcagaccaacuccccgcggcgcgcgcggagcguggccucccagagcaucaucgccuacaccaugucccugggcgccgagaacagcguggccuacuccaacaacagcaucgcgauccccaccaacuucacgaucuccgucaccaccgagauccugcccgugagcaugaccaagacgagcguggacugcaccauguacaucugcggggacuccaccgagugcagcaaccuccugcugcaguacggcuccuucugcacccagcucaaccgcgcccugacggggaucgccgucgagcaggacaagaacacccaggagguguucgcccaggugaagcagaucuacaagacgcccccgaucaaggacuucggcggguucaacuucagccagauccugcccgaccccuccaagcccagcaagcgguccuucaucgaggaccuccuguucaacaaggucacccuggccgacgcgggcuucaucaagcaguacggcgacugccucggggacaucgccgcccgcgaccugaucugcgcccagaaguucaacggccugaccgugcucccgccccugcugaccgacgagaugaucgcccaguacaccagcgcgcuccuggccgggaccaucacguccggcuggaccuucggggccggcgccgcgcugcagauccccuucgccaugcagauggccuaccgguucaacggcaucggggugacccagaacguccucuacgagaaccagaagcugaucgccaaccaguucaacagcgccaucggcaagauccaggacucccugagcuccaccgcgagcgcccucgggaagcugcaggacguggugaaccagaacgcccaggcccugaacacgcucgucaagcagcuguccagcaacuucggcgccaucuccagcgugcugaacgacauccucucccgccuggacaagguggaggcggagguccagaucgaccggcugaucaccgggcgccuccagagccugcagaccuacgugacccagcagcugauccgggccgccgagauccgcgccagcgccaaccucgcggccaccaagauguccgagugcgugcugggccagagcaagcgggucgacuucugcggcaagggguaccaccugauguccuucccccagagcgccccgcacggcgugguguuccuccacgucacguacgugcccgcccaggagaagaacuucaccaccgcgcccgccaucugccacgacgggaaggcccacuucccccgcgagggcgucuucguguccaacgggacccacugguucgugacgcagcggaacuucuacgagccgcagaucaucaccaccgacaacaccuucgucagcggcaacugcgacguggugaucggcaucgucaacaacacgguguacgacccccugcagcccgagcuggacuccuucaaggaggagcucgacaaguacuucaagaaccacaccagccccgacguggaccugggggacaucuccggcaucaacgccagcgucgugaacauccagaaggagaucgaccgccugaacgagguggccaagaaccucaacgagucccugaucgaccugcaggagcucgggaaguacgagcaguacaucaaguggccgugguacaucuggcugggcuucaucgcgggccugaucgccaucgucauggugaccaucaugcucugcugcaugaccagcugcugcuccugccugaaggggugcugcagcugcggcuccugcugcaaguucgacgaggacgacagcgagcccgugcugaagggggucaagcuccacuacacgugaggacuaguuauaagacugacuagcccgaugggccucccaacgggcccuccuccccuccuugcaccgagauuaauaaaaaaaaaaaaaaaaaaaaaaaaaaaaaaaaaaaaaaaaaaaaaaaaaaaaaaaaaaaaaaaaugcaucccccccccccccccccccccccccccccccaaaggcucuuuucagagccaccagaauu

SEQ ID NO: 12778 - RNA, 4039 nt, Artificial Sequence
  SARS-CoV-2/South Korea/SNU01/2020__EPI_ISL_411929 spike protein mRNA gc (1-1273)
aggagaaagcuuaccauguucguguuccugguccuccugccccuggugagcucccagugcgugaaccucaccacccgcacgcagcugccgcccgccuacaccaacagcuucacccggggcgucuacuaccccgacaagguguuccgcuccagcgugcugcacuccacccaggaccucuuccugcccuucuucagcaacgucacgugguuccacgccauccacguguccgggaccaacggcaccaagcgguucgacaacccggugcugcccuucaacgacggggucuacuucgcgagcaccgagaaguccaacaucauccgcggcuggaucuucgggacgacccucgacagcaagacccagucccugcugaucgugaacaacgccaccaacguggucaucaaggugugcgaguuccaguucugcaacgaccccuuccucggcguguacuaccacaagaacaacaagagcuggauggaguccgaguuccgggucuacagcuccgccaacaacugcacguucgaguacgugagccagcccuuccugauggaccuggagggcaagcaggggaacuucaagaaccuccgcgaguucguguucaagaacaucgacggcuacuucaagaucuacuccaagcacaccccgaucaaccugguccgggaccugccccagggguucugggcccucgagccccugguggaccugcccaucggcaucaacaucacccgcuuccagacccuccuggcccugcaccggagcuaccucacgccgggggacuccagcagcggcuggaccgcgggcgccgccgccuacuacgugggguaccugcagccccgcaccuuccugcucaaguacaacgagaacggcaccaucacggacgcggucgacugcgcccuggacccccuguccgagaccaagugcacccucaagagcuucaccguggagaaggggaucuaccagacguccaacuuccgggugcagcccaccgagagcaucguccgcuucccgaacaucaccaaccugugccccuucggcgagguguucaacgccacccgguucgccuccgucuacgccuggaaccgcaagcggaucagcaacugcguggcggacuacuccgugcuguacaacagcgccuccuucagcacguucaagugcuacggcgucucccccaccaagcucaacgaccugugcuucaccaacguguacgccgacagcuucgugauccgcggggacgagguccggcagaucgcccccggccagaccgggaagaucgccgacuacaacuacaagcugccggacgacuucacgggcugcgugaucgcguggaacuccaacaaccucgacagcaaggucgggggcaacuacaacuaccuguaccgccuguuccggaaguccaaccucaagcccuucgagcgcgacaucagcaccgagaucuaccaggccggcuccacccccugcaacgggguggagggcuucaacugcuacuucccccugcagagcuacggguuccagccgaccaacggcgugggguaccagcccuaccggguggucgugcuguccuucgagcuccugcacgcccccgccacggugugcggccccaagaaguccaccaaccuggucaagaacaagugcgugaacuucaacuucaacggccucaccgggaccggcgugcugaccgagagcaacaagaaguuccugccguuccagcaguucgggcgcgacaucgccgacacgaccgacgcgguccgcgacccccagacccuggagauccucgacaucacccccugcagcuucggcggggugagcgugaucacgccgggcaccaacaccuccaaccaggucgccgugcuguaccaggacgugaacugcaccgagguccccguggccauccacgccgaccagcugacgcccaccuggcggguguacagcaccggcuccaacgucuuccagacccgcgccgggugccucaucggcgcggagcacgugaacaacagcuacgagugcgacauccccaucggggccggcaucugcgccuccuaccagacgcagaccaacagcccgcggcgcgcccgguccguggcgagccaguccaucaucgccuacaccaugagccugggcgccgagaacuccgucgccuacagcaacaacuccaucgccauccccaccaacuucacgaucagcgugaccaccgagauccugcccguguccaugaccaagacgagcgucgacugcaccauguacaucugcggggacagcaccgagugcuccaaccuccugcugcaguacggcagcuucugcacccagcucaaccgcgcgcugacggggaucgccguggagcaggacaagaacacccaggagguguucgcccaggucaagcagaucuacaagacgcccccgaucaaggacuucggcggguucaacuucucccagauccugcccgaccccagcaagcccuccaagcggagcuucaucgaggaccuccuguucaacaaggugacccuggccgacgccggcuucaucaagcaguacggcgacugccucggggacaucgcggcccgcgaccugaucugcgcccagaaguucaacggccugaccgugcucccgccccugcugaccgacgagaugaucgcccaguacaccuccgcccuccuggcggggaccaucacgagcggcuggaccuucggggccggcgccgcccugcagauccccuucgcgaugcagauggccuaccgguucaacggcaucggggucacccagaacgugcucuacgagaaccagaagcugaucgccaaccaguucaacuccgccaucggcaagauccaggacagccuguccagcaccgccuccgcgcucgggaagcugcaggacguggucaaccagaacgcccaggcccugaacacgcucgugaagcagcugagcuccaacuucggcgccaucagcuccgugcugaacgacauccucagccgccuggacaaggucgaggccgaggugcagaucgaccggcugaucaccgggcgccuccagucccugcagaccuacgugacccagcagcugauccgggcggccgagauccgcgccagcgccaaccucgccgcgaccaagaugagcgagugcguccugggccaguccaagcggguggacuucugcggcaagggguaccaccugaugagcuucccccaguccgccccgcacggcguggucuuccuccacgugacguacguccccgcccaggagaagaacuucaccaccgcccccgcgaucugccacgacgggaaggcccacuucccccgcgagggcguguucgugagcaacgggacccacugguucgucacgcagcggaacuucuacgagccgcagaucaucaccaccgacaacaccuucguguccggcaacugcgacguggucaucggcaucgugaacaacacgguguacgacccccugcagcccgagcuggacagcuucaaggaggagcucgacaaguacuucaagaaccacaccucccccgacgucgaccugggggacaucagcggcaucaacgccuccguggugaacauccagaaggagaucgaccgccugaacgaggucgccaagaaccucaacgagagccugaucgaccugcaggagcucgggaaguacgagcaguacaucaaguggccgugguacaucuggcugggcuucaucgccggccugaucgcgaucgugauggugaccaucaugcucugcugcaugaccuccugcugcagcugccugaaggggugcugcuccugcggcagcugcugcaaguucgacgaggacgacuccgagcccguccugaagggggugaagcuccacuacacgugaggacuaguuauaagacugacuagcccgaugggccucccaacgggcccuccuccccuccuugcaccgagauuaauaaaaaaaaaaaaaaaaaaaaaaaaaaaaaaaaaaaaaaaaaaaaaaaaaaaaaaaaaaaaaaaaugcaucccccccccccccccccccccccccccccccaaaggcucuuuucagagccaccagaauu

SEQ ID NO: 12779 - RNA, 4039 nt, Artificial Sequence
  SARS-CoV-2/China/WF0004/2020__EPI_ISL_413694 spike protein mRNA gc (1-1273)
aggagaaagcuuaccauguucguguuccugguccuccugccccuggugagcucccagugcgugaaccucaccacccgcacgcagcugccgcccgccuacaccaacagcuucacccggggcgucuacuaccccgacaagguguuccgcuccagcgugcugcacuccacccaggaccucuuccugcccuucuucagcaacgucacgugguuccacgccauccacguguccgggaccaacggcaccaagcgguucgacaacccggugcugcccuucaacgacggggucuacuucgcgagcaccgagaaguccaacaucauccgcggcuggaucuucgggacgacccucgacagcaagacccagucccugcugaucgugaacaacgccaccaacguggucaucaaggugugcgaguuccaguucugcaacgaccccuuccucggcguguacuaccacaagaacaacaagagcuggacggaguccgaguuccgggucuacagcuccgccaacaacugcaccuucgaguacgugagccagcccuuccugauggaccuggagggcaagcaggggaacuucaagaaccuccgcgaguucguguucaagaacaucgacggcuacuucaagaucuacuccaagcacaccccgaucaaccugguccgggaccugccccagggguucagcgcccucgagccccugguggaccugcccaucggcaucaacaucacccgcuuccagacgcuccuggcccugcaccgguccuaccucaccccgggggacagcagcuccggcuggaccgcgggcgccgccgccuacuacgugggguaccugcagccccgcaccuuccugcucaaguacaacgagaacggcacgaucaccgacgcggucgacugcgcccuggacccccugagcgagaccaagugcacccucaaguccuucacgguggagaaggggaucuaccagaccagcaacuuccgggugcagcccaccgaguccaucguccgcuucccgaacaucaccaaccugugccccuucggcgagguguucaacgccacgcgguucgccagcgucuacgccuggaaccgcaagcggaucuccaacugcguggcggacuacagcgugcuguacaacuccgccagcuucuccaccuucaagugcuacggcgucagccccaccaagcucaacgaccugugcuucaccaacguguacgccgacuccuucgugauccgcggggacgagguccggcagaucgcccccggccagacggggaagaucgccgacuacaacuacaagcugccggacgacuucaccggcugcgugaucgcguggaacagcaacaaccucgacuccaaggucgggggcaacuacaacuaccuguaccgccuguuccgcaagagcaaccucaagcccuucgagcgggacaucuccaccgagaucuaccaggccggcagcacccccugcaacgggguggagggcuucaacugcuacuucccccugcaguccuacggguuccagccgacgaacggcgugggguaccagcccuaccggguggucgugcugagcuucgagcuccugcacgcccccgccaccgugugcggccccaagaaguccaccaaccuggucaagaacaagugcgugaacuucaacuucaacggccucaccgggaccggcgugcugacggagagcaacaagaaguuccugccguuccagcaguucgggcgcgacaucgccgacaccaccgacgcgguccgcgacccccagacccuggagauccucgacaucacgcccugcagcuucggcgggguguccgugaucaccccgggcaccaacaccagcaaccaggucgccgugcuguaccaggacgugaacugcacggagguccccguggccauccacgccgaccagcugacccccaccuggcggguguacuccaccggcagcaacgucuuccagacgcgcgccgggugccucaucggcgcggagcacgugaacaacuccuacgagugcgacauccccaucggggccggcaucugcgccagcuaccagacccagaccaacuccccgcggcgcgcccggagcguggcgucccagagcaucaucgccuacaccaugucccugggcgccgagaacagcgucgccuacuccaacaacagcaucgccauccccacgaacuucaccaucuccgugaccaccgagauccugcccgugagcaugacgaagaccagcgucgacugcaccauguacaucugcggggacuccaccgagugcagcaaccuccugcugcaguacggcuccuucugcacgcagcucaaccgcgcgcugaccgggaucgccguggagcaggacaagaacacccaggagguguucgcccaggucaagcagaucuacaagacgcccccgaucaaggacuucggcggguucaacuucagccagauccugcccgaccccuccaagcccagcaagcgguccuucaucgaggaccuccuguucaacaaggugacccuggccgacgccggcuucaucaagcaguacggcgacugccucggggacaucgcggcccgcgaccugaucugcgcccagaaguucaacggccugaccgugcucccgccccugcugaccgacgagaugaucgcccaguacaccagcgcccuccuggcggggacgaucaccuccggcuggaccuucggggccggcgccgcccugcagauccccuucgcgaugcagauggccuaccgguucaacggcaucggggucacccagaacgugcucuacgagaaccagaagcugaucgccaaccaguucaacagcgccaucggcaagauccaggacucccugagcuccacggccagcgcgcucgggaagcugcaggacguggucaaccagaacgcccaggcccugaacacccucgugaagcagcuguccagcaacuucggcgccaucuccagcgugcugaacgacauccucucccgccuggacaaggucgaggccgaggugcagaucgaccggcugaucaccgggcgccuccagagccugcagaccuacgugacccagcagcugauccgggcggccgagauccgcgccagcgccaaccucgccgcgacgaagauguccgagugcguccugggccagagcaagcgguucgacuucugcggcaagggguaccaccugauguccuucccccagagcgccccgcacggcgugguguuccuccacgucaccuacgugcccgcccaggagaagaacuucaccaccgcccccgcgaucugccacgacgggaaggcccacuucccccgcgagggcgucuucguguccaacgggacgcacugguucgugacccagcggaacuucuacgagccgcagaucaucaccaccgacaacacguucgucagcggcaacugcgacguggugaucggcaucgucaacaacaccguguacgacccccugcagcccgagcuggacuccuucaaggaggagcucgacaaguacuucaagaaccacaccagccccgacguggaccugggggacaucuccggcaucaacgccagcgucgugaacauccagaaggagaucgaccgccugaacgagguggccaagaaccucaacgagucccugaucgaccugcaggagcucgggaaguacgagcaguacaucaaguggccgugguacaucuggcugggcuucaucgccggccugaucgcgaucgucauggugaccaucaugcucugcugcaugacgagcugcugcuccugccugaaggggugcugcagcugcggcuccugcugcaaguucgacgaggacgacagcgagcccgugcugaagggggucaagcuccacuacaccugaggacuaguuauaagacugacuagcccgaugggccucccaacgggcccuccuccccuccuugcaccgagauuaauaaaaaaaaaaaaaaaaaaaaaaaaaaaaaaaaaaaaaaaaaaaaaaaaaaaaaaaaaaaaaaaaugcaucccccccccccccccccccccccccccccccaaaggcucuuuucagagccaccagaauu

SEQ ID NO: 12780 - RNA, 4039 nt, Artificial Sequence
  SARS-CoV-2/China/WF0028/2020__EPI_ISL_413791 spike protein mRNA gc (1-1273)
aggagaaagcuuaccauguucguguuccugguccuccugccccuggugagcucccagugcgugaaccucaccacccgcacgcagcugccgcccgccuacaccaacagcuucacccggggcgucuacuaccccgacaagguguuccgcuccagcgugcugcacuccacccaggaccucuuccugcccuucuucagcaacgucacgugguuccacgccauccacguguccgggaccaacggcaccaagcgguucgacaacccggugcugcccuucaacgacggggucuacuucgcgagcaccgagaaguccaacaucauccgcggcuggaucuucgggacgacccucgacagcaagacccagucccugcugaucgugaacaacgccaccaacguggucaucaaggugugcgaguuccaguucugcaacgaccccuuccucggcguguacuaccacaagaacaacaagagcuggauggaguccgaguuccgggucuacagcuccgccaacaacugcacguucgaguacgugagccagcccuuccugauggaccuggagggcaagcaggggaacuucaagaaccuccgcgaguucguguucaagaacaucgacggcuacuucaagaucuacuccaagcacaccccgaucaaccugguccgggaccugccccagggguucagcgcccucgagccccugguggaccugcccaucggcaucaacaucacccgcuuccagacccuccuggcccugcaccgguccuaccucacgccgggggacagcagcuccggcuggaccgcgggcgccgccgccuacuacgugggguaccugcagccccgcaccuuccugcucaaguacaacgagaacggcaccaucacggacgcggucgacugcgcccuggacccccugagcgagaccaagugcacccucaaguccuucaccguggagaaggggaucuaccagacgagcaacuuccgggugcagcccaccgaguccaucguccgcuucccgaacaucaccaaccugugccccuucggcgagguguucaacgccacccgguucgccagcgucuacgccuggaaccgcaagcggaucuccaacugcguggcggacuacagcgugcuguacaacuccgccagcuucuccacguucaagugcuacggcgucagccccaccaagcucaacgaccugugcuucaccaacguguacgccgacuccuucgugauccgcggggacgagguccggcagaucgcccccggccagaccgggaagaucgccgacuacaacuacaagcugccggacgacuucacgggcugcgugaucgcguggaacagcaacaaccucgacuccaaggucgggggcaacuacaacuaccuguaccgccuguuccgcaagagcaaccucaagcccuucgagcgggacaucuccaccgagaucuaccaggccggcagcacccccugcaacgggguggagggcuucaacugcuacuucccccugcaguccuacggguuccagccgaccaacggcgugggguaccagcccuaccggguggucgugcugagcuucgagcuccugcacgcccccgccacggugugcggccccaagaaguccaccaaccuggucaagaacaagugcgugaacuucaacuucaacggccucaccgggaccggcgugcugaccgagagcaacaagaaguuccugccguuccagcaguucgggcgcgacaucgccgacacgaccgacgcgguccgcgacccccagacccuggagauccucgacaucacccccugcagcuucggcgggguguccgugaucacgccgggcaccaacaccagcaaccaggucgccgugcuguaccaggacgugaacugcaccgagguccccguggccauccacgccgaccagcugacgcccaccuggcggguguacuccaccggcagcaacgucuuccagacccgcgccgggugccucaucggcgcggagcacgugaacaacuccuacgagugcgacauccccaucggggccggcaucugcgccagcuaccagacgcagaccaacuccccgcggcgcgcccggagcguggcgucccagagcaucaucgccuacaccaugucccugggcgccgagaacagcgucgccuacuccaacaacagcaucgccauccccaccaacuucacgaucuccgugaccaccgagauccugcccgugagcaugaccaagacgagcgucgacugcaccauguacaucugcggggacuccaccgagugcagcaaccuccugcugcaguacggcuccuucugcacccagcucaaccgcgcgcugacggggaucgccguggagcaggacaagaacacccaggagguguucgcccaggucaagcagaucuacaagacgcccccgaucaaggacuucggcggguucaacuucagccagauccugcccgaccccuccaagcccagcaagcgguccuucaucgaggaccuccuguucaacaaggugacccuggccgacgccggcuucaucaagcaguacggcgacugccucggggacaucgcggcccgcgaccugaucugcgcccagaaguucaacggccugaccgugcucccgccccugcugaccgacgagaugaucgcccaguacaccagcgcccuccuggcggggaccaucacguccggcuggaccuucggggccggcgccgcccugcagauccccuucgcgaugcagauggccuaccgguucaacggcaucggggucacccagaacgugcucuacgagaaccagaagcugaucgccaaccaguucaacagcgccaucggcaagauccaggacucccugagcuccaccgccagcgcgcucgggaagcugcaggacguggucaaccagaacgcccaggcccugaacacgcucgugaagcagcuguccagcaacuucggcgccaucuccagcgugcugaacgacauccucucccgccuggacaaggucgaggccgaggugcagaucgaccggcugaucaccgggcgccuccagagccugcagaccuacgugacccagcagcugauccgggcggccgagauccgcgccagcgccaaccucgccgcgaccaagauguccgagugcguccugggccagagcaagcggguggacuucugcggcaagggguaccaccugauguccuucccccagagcgccccgcacggcguggucuuccuccacgugacguacguccccgcccaggagaagaacuucaccaccgcccccgcgaucugccacgacgggaaggcccacuucccccgcgagggcguguucguguccaacgggacccacugguucgucacgcagcggaacuucuacgagccgcagaucaucaccaccgacaacaccuucgugagcggcaacugcgacguggucaucggcaucgugaacaacacgguguacgacccccugcagcccgagcuggaguccuucaaggaggagcucgacaaguacuucaagaaccacaccagccccgacgucgaccugggggacaucuccggcaucaacgccagcguggugaacauccagaaggagaucgaccgccugaacgaggucgccaagaaccucaacgagucccugaucgaccugcaggagcucgggaaguacgagcaguacaucaaguggccgugguacaucuggcugggcuucaucgccggccugaucgcgaucgugauggugaccaucaugcucugcugcaugaccagcugcugcuccugccugaaggggugcugcagcugcggcuccugcugcaaguucgacgaggacgacagcgagcccguccugaagggggugaagcuccacuacacgugaggacuaguuauaagacugacuagcccgaugggccucccaacgggcccuccuccccuccuugcaccgagauuaauaaaaaaaaaaaaaaaaaaaaaaaaaaaaaaaaaaaaaaaaaaaaaaaaaaaaaaaaaaaaaaaaugcaucccccccccccccccccccccccccccccccaaaggcucuuuucagagccaccagaauu

SEQ ID NO: 12781 - RNA, 4039 nt, Artificial Sequence
  SARS-CoV-2/2019-nCoV/USA-CruiseA-18/2020__MT159716.1 spike protein mRNA gc (1-1273)
aggagaaagcuuaccauguucguguuccugguccuccugccccuggugagcucccagugcgugaaccucaccacccgcacgcagcugccgcccgccuacaccaacagcuucacccggggcgucuacuaccccgacaagguguuccgcuccagcgugcugcacuccacccaggaccucuuccugcccuucuucagcaacgucacgugguuccacgccauccacguguccgggaccaacggcaccaagcgguucgacaacccggugcugcccuucaacgacggggucuacuucgcgagcaccgagaaguccaacaucauccgcggcuggaucuucgggacgacccucgacagcaagacccagucccugcugaucgugaacaacgccaccaacguggucaucaaggugugcgaguuccaguucugcaacgaccccuuccucggcguguacuaccacaagaacaacaagagcuggauggaguccgagcugcgggucuacagcuccgccaacaacugcacguucgaguacgugagccagcccuuccugauggaccucgagggcaagcaggggaacuucaagaaccugcgcgaguucguguucaagaacaucgacggcuacuucaagaucuacuccaagcacaccccgaucaaccugguccgggaccucccccagggguucagcgcccuggagccccugguggaccuccccaucggcaucaacaucacccgcuuccagacccugcuggcccuccaccgguccuaccugacgccgggggacagcagcuccggcuggaccgcgggcgccgccgccuacuacgugggguaccugcagccccgcaccuuccuccugaaguacaacgagaacggcaccaucacggacgcggucgacugcgcccuggacccccucagcgagaccaagugcacccugaaguccuucaccguggagaaggggaucuaccagacgagcaacuuccgggugcagcccaccgaguccaucguccgcuucccgaacaucaccaaccugugccccuucggcgagguguucaacgccacccgguucgccagcgucuacgccuggaaccgcaagcggaucuccaacugcguggcggacuacagcgugcucuacaacuccgccagcuucuccacguucaagugcuacggcgucagccccaccaagcugaacgaccugugcuucaccaacguguacgccgacuccuucgugauccgcggggacgagguccggcagaucgcccccggccagaccgggaagaucgccgacuacaacuacaagcucccggacgacuucacgggcugcgugaucgcguggaacagcaacaaccuggacuccaaggucgggggcaacuacaacuaccuguaccgccucuuccgcaagagcaaccugaagcccuucgagcgggacaucuccaccgagaucuaccaggccggcagcacccccugcaacgggguggagggcuucaacugcuacuucccccugcaguccuacggguuccagccgaccaacggcgugggguaccagcccuaccggguggucgugcucagcuucgagcugcugcacgcccccgccacggugugcggccccaagaaguccaccaaccucgucaagaacaagugcgugaacuucaacuucaacggccugaccgggaccggcgugcugaccgagagcaacaagaaguuccugccguuccagcaguucgggcgcgacaucgccgacacgaccgacgcgguccgcgacccccagacccucgagauccuggacaucacccccugcagcuucggcgggguguccgugaucacgccgggcaccaacaccagcaaccaggucgccgugcuguaccaggacgugaacugcaccgagguccccguggccauccacgccgaccagcucacgcccaccuggcggguguacuccaccggcagcaacgucuuccagacccgcgccgggugccugaucggcgcggagcacgugaacaacuccuacgagugcgacauccccaucggggccggcaucugcgccagcuaccagacgcagaccaacuccccgcggcgcgcccggagcguggcgucccagagcaucaucgccuacaccaugucccugggcgccgagaacagcgucgccuacuccaacaacagcaucgccauccccaccaacuucacgaucuccgugaccaccgagauccuccccgugagcaugaccaagacgagcgucgacugcaccauguacaucugcggggacuccaccgagugcagcaaccugcugcuccaguacggcuccuucugcacccagcugaaccgcgcgcugacggggaucgccguggagcaggacaagaacacccaggagguguucgcccaggucaagcagaucuacaagacgcccccgaucaaggacuucggcggguucaacuucagccagauccuccccgaccccuccaagcccagcaagcgguccuucaucgaggaccugcuguucaacaaggugacccucgccgacgccggcuucaucaagcaguacggcgacugccugggggacaucgcggcccgcgaccugaucugcgcccagaaguucaacggccucaccgugcugccgccccugcucaccgacgagaugaucgcccaguacaccagcgcccugcuggcggggaccaucacguccggcuggaccuucggggccggcgccgcccuccagauccccuucgcgaugcagauggccuaccgguucaacggcaucggggucacccagaacgugcuguacgagaaccagaagcugaucgccaaccaguucaacagcgccaucggcaagauccaggacucccucagcuccaccgccagcgcgcuggggaagcugcaggacguggucaaccagaacgcccaggcccucaacacgcuggugaagcagcuguccagcaacuucggcgccaucuccagcgugcucaacgacauccugucccgccuggacaaggucgaggccgaggugcagaucgaccggcucaucaccgggcgccugcagagccugcagaccuacgugacccagcagcucauccgggcggccgagauccgcgccagcgccaaccuggccgcgaccaagauguccgagugcguccugggccagagcaagcggguggacuucugcggcaagggguaccaccucauguccuucccccagagcgccccgcacggcguggucuuccugcacgugacguacguccccgcccaggagaagaacuucaccaccgcccccgcgaucugccacgacgggaaggcccacuucccccgcgagggcguguucguguccaacgggacccacugguucgucacgcagcggaacuucuacgagccgcagaucaucaccaccgacaacaccuucgugagcggcaacugcgacguggucaucggcaucgugaacaacacgguguacgacccccugcagcccgagcucgacuccuucaaggaggagcuggacaaguacuucaagaaccacaccagccccgacgucgaccugggggacaucuccggcaucaacgccagcguggugaacauccagaaggagaucgaccgccucaacgaggucgccaagaaccugaacgagucccugaucgaccuccaggagcuggggaaguacgagcaguacaucaaguggccgugguacaucuggcugggcuucaucgccggccucaucgcgaucgugauggugaccaucaugcugugcugcaugaccagcugcugcuccugccugaaggggugcugcagcugcggcuccugcugcaaguucgacgaggacgacagcgagcccguccucaagggggugaagcugcacuacacgugaggacuaguuauaagacugacuagcccgaugggccucccaacgggcccuccuccccuccuugcaccgagauuaauaaaaaaaaaaaaaaaaaaaaaaaaaaaaaaaaaaaaaaaaaaaaaaaaaaaaaaaaaaaaaaaaugcaucccccccccccccccccccccccccccccccaaaggcucuuuucagagccaccagaauu

SEQ ID NO: 12782 - RNA, 4039 nt, Artificial Sequence
  SARS-CoV-2/SARS-CoV-2/Yunnan-01/human/2020/CHN__MT049951.1 spike protein mRNA gc (1-1273)
aggagaaagcuuaccauguucguguuccugguccuccugccccuggugagcucccagugcgugaaccucaccacccgcacgcagcugccgcccgccaacaccaacagcuucacccggggcgucuacuaccccgacaagguguuccgcuccagcgugcugcacuccacccaggaccucuuccugcccuucuucagcaacgucacgugguuccacgccauccacguguccgggaccaacggcaccaagcgguucgacaacccggugcugcccuucaacgacggggucuacuucgcgagcaccgagaaguccaacaucauccgcggcuggaucuucgggacgacccucgacagcaagacccagucccugcugaucgugaacaacgccaccaacguggucaucaaggugugcgaguuccaguucugcaacgaccccuuccucggcguguacuaccacaagaacaacaagagcuggauggaguccgaguuccgggucuacagcuccgccaacaacugcacguucgaguacgugagccagcccuuccugauggaccuggagggcaagcaggggaacuucaagaaccuccgcgaguucguguucaagaacaucgacggcuacuucaagaucuacuccaagcacaccccgaucaaccugguccgggaccugccccagggguucagcgcccucgagccccugguggaccugcccaucggcaucaacaucacccgcuuccagacccuccuggcccugcaccgguccuaccucacgccgggggacagcagcuccggcuggaccgcgggcgccgccgccuacuacgugggguaccugcagccccgcaccuuccugcucaaguacaacgagaacggcaccaucacggacgcggucgacugcgcccuggacccccugagcgagaccaagugcacccucaaguccuucaccguggagaaggggaucuaccagacgagcaacuuccgggugcagcccaccgaguccaucguccgcuucccgaacaucaccaaccugugccccuucggcgagguguucaacgccacccgguucgccagcgucuacgccuggaaccgcaagcggaucuccaacugcguggcggacuacagcgugcuguacaacuccgccagcuucuccacguucaagugcuacggcgucagccccaccaagcucaacgaccugugcuucaccaacguguacgccgacuccuucgugauccgcggggacgagguccggcagaucgcccccggccagaccgggaagaucgccgacuacaacuacaagcugccggacgacuucacgggcugcgugaucgcguggaacagcaacaaccucgacuccaaggucgggggcaacuacaacuaccuguaccgccuguuccgcaagagcaaccucaagcccuucgagcgggacaucuccaccgagaucuaccaggccggcagcacccccugcaacgggguggagggcuucaacugcuacuucccccugcaguccuacggguuccagccgaccaacggcgugggguaccagcccuaccggguggucgugcugagcuucgagcuccugcacgcccccgccacggugugcggccccaagaaguccaccaaccuggucaagaacaagugcgugaacuucaacuucaacggccucaccgggaccggcgugcugaccgagagcaacaagaaguuccugccguuccagcaguucgggcgcgacaucgccgacacgaccgacgcgguccgcgacccccagacccuggagauccucgacaucacccccugcagcuucggcgggguguccgugaucacgccgggcaccaacaccagcaaccaggucgccgugcuguaccaggacgugaacugcaccgagguccccguggccauccacgccgaccagcugacgcccaccuggcggguguacuccaccggcagcaacgucuuccagacccgcgccgggugccucaucggcgcggagcacgugaacaacuccuacgagugcgacauccccaucggggccggcaucugcgccagcuaccagacgcagaccaacuccccgcggcgcgcccggagcguggcgucccagagcaucaucgccuacaccaugucccugggcgccgagaacagcgucgccuacuccaacaacagcaucgccauccccaccaacuucacgaucuccgugaccaccgagauccugcccgugagcaugaccaagacgagcgucgacugcaccauguacaucugcggggacuccaccgagugcagcaaccuccugcugcaguacggcuccuucugcacccagcucaaccgcgcgcugacggggaucgccguggagcaggacaagaacacccaggagguguucgcccaggucaagcagaucuacaagacgcccccgaucaaggacuucggcggguucaacuucagccagauccugcccgaccccuccaagcccagcaagcgguccuucaucgaggaccuccuguucaacaaggugacccuggccgacgccggcuucaucaagcaguacggcgacugccucggggacaucgcggcccgcgaccugaucugcgcccagaaguucaacggccugaccgugcucccgccccugcugaccgacgagaugaucgcccaguacaccagcgcccuccuggcggggaccaucacguccggcuggaccuucggggccggcgccgcccugcagauccccuucgcgaugcagauggccuaccgguucaacggcaucggggucacccagaacgugcucuacgagaaccagaagcugaucgccaaccaguucaacagcgccaucggcaagauccaggacucccugagcuccaccgccagcgcgcucgggaagcugcaggacguggucaaccagaacgcccaggcccugaacacgcucgugaagcagcuguccagcaacuucggcgccaucuccagcgugcugaacgacauccucucccgccuggacaaggucgaggccgaggugcagaucgaccggcugaucaccgggcgccuccagagccugcagaccuacgugacccagcagcugauccgggcggccgagauccgcgccagcgccaaccucgccgcgaccaagauguccgagugcguccugggccagagcaagcggguggacuucugcggcaagggguaccaccugauguccuucccccagagcgccccgcacggcguggucuuccuccacgugacguacguccccgcccaggagaagaacuucaccaccgcccccgcgaucugccacgacgggaaggcccacuucccccgcgagggcguguucguguccaacgggacccacugguucgucacgcagcggaacuucuacgagccgcagaucaucaccaccgacaacaccuucgugagcggcaacugcgacguggucaucggcaucgugaacaacacgguguacgacccccugcagcccgagcuggacuccuucaaggaggagcucgacaaguacuucaagaaccacaccagccccgacgucgaccugggggacaucuccggcaucaacgccagcguggugaacauccagaaggagaucgaccgccugaacgaggucgccaagaaccucaacgagucccugaucgaccugcaggagcucgggaaguacgagcaguacaucaaguggccgugguacaucuggcugggcuucaucgccggccugaucgcgaucgugauggugaccaucaugcucugcugcaugaccagcugcugcuccugccugaaggggugcugcagcugcggcuccugcugcaaguucgacgaggacgacagcgagcccguccugaagggggugaagcuccacuacacgugaggacuaguuauaagacugacuagcccgaugggccucccaacgggcccuccuccccuccuugcaccgagauuaauaaaaaaaaaaaaaaaaaaaaaaaaaaaaaaaaaaaaaaaaaaaaaaaaaaaaaaaaaaaaaaaaugcaucccccccccccccccccccccccccccccccaaaggcucuuuucagagccaccagaauu

SEQ ID NO: 12783 - RNA, 4039 nt, Artificial Sequence
  SARS-CoV-2/USA/WA-UW292/2020__EPI_ISL_418077 spike protein mRNA gc (1-1273)
aggagaaagcuuaccauguucguguuccugguccuccugccccuggugagcucccagugcgugaaccucaccacccgcacgcagcugccgcccgccuacaccaacagcuucacccggggcgucuacuaccccgacaagguguuccgcuccagcgugcugcacuccacccaggaccucuuccugcccuucuucagcaacgucacgugguuccacgccauccacguguccgggaccaacggcaccaagcgguucgacaacccggugcugcccuucaacgacggggucuacuucgcgagcaccgagaaguccaacaucauccgcggcuggaucuucgggacgacccucgacagcaagacccagucccugcugaucgugaacaacgccaccaacguggucaucaaggugugcgaguuccaguucugcaacgaccccuuccucggcguguacuaccacaagaacaacaagagcuggauggaguccgaguuccgggucuacagcuccgccaacaacugcacguucgaguacgugagccagcccuuccugauggaccuggagggcaagcaggggaacuucaagaaccuccgcgaguucguguucaagaacaucgacggcuacuucaagaucuacuccaagcacaccccgaucaaccugguccgggaccugccccagggguucagcgcccucgagccccugguggaccugcccaucggcaucaacaucacccgcuuccagacccuccuggcccugcaccgguccuaccucacgccgggggacagcagcuccggcuggaccgcgggcgccgccgccuacuacgugggguaccugcagccccgcaccuuccugcucaaguacaacgagaacggcaccaucacggacgcggucgacugcgcccuggacccccugagcgagaccaagugcacccucaaguccuucaccguggagaaggggaucuaccagacgagcaacuuccgggugcagcccaccgaguccaucguccgcuucccgaacaucaccaaccugugccccuucggcgagguguucaacgccacccgguucgccagcgucuacgccuggaaccgcaagcggaucuccaacugcguggcggacuacagcgugcuguacaacuccgccagcuucuccacguucaagugcuacggcgucagccccaccaagcucaacgaccugugcuucaccaacguguacgccgacuccuucgugauccgcggggacgagguccggcagaucgcccccggccagaccgggaagaucgccgacuacaacuacaagcugccggacgacuucacgggcugcgugaucgcguggaacagcaacaaccucgacuccaaggucgggggcaacuacaacuaccuguaccgccuguuccgcaagagcaaccucaagcccuucgagcgggacaucuccaccgagaucuaccaggccagcuccacccccugcaacggcguggagggguucaacugcuacuucccccugcagagcuacggcuuccagccgaccaacggggugggcuaccagcccuaccggguggucgugcugagcuucgagcuccugcacgcccccgccacggugugcgggcccaagaaguccaccaaccuggucaagaacaagugcgugaacuucaacuucaacggccucaccggcaccggggugcugaccgagagcaacaagaaguuccugccguuccagcaguucggccgcgacaucgccgacacgaccgacgcgguccgcgacccccagacccuggagauccucgacaucacccccugcuccuucgggggcgugagcgugaucacgccggggaccaacaccuccaaccaggucgccgugcuguaccaggacgugaacugcaccgagguccccguggccauccacgccgaccagcugacgcccaccuggcggguguacagcaccggcuccaacgucuuccagacccgcgccggcugccucaucggggcggagcacgugaacaacagcuacgagugcgacauccccaucggcgccgggaucugcgccuccuaccagacgcagaccaacagcccgcggcgcgcccgguccguggcgagccaguccaucaucgccuacaccaugagccugggcgccgagaacuccgucgccuacagcaacaacuccaucgccauccccaccaacuucacgaucagcgugaccaccgagauccugcccgugagcaugaccaagacguccgucgacugcaccauguacaucugcggcgacagcaccgagugcuccaaccuccugcugcaguacgggagcuucugcacccagcucaaccgcgcgcugacgggcaucgccguggagcaggacaagaacacccaggagguguucgcccaggucaagcagaucuacaagacgcccccgaucaaggacuucgggggcuucaacuucucccagauccugcccgaccccagcaagcccuccaagcggagcuucaucgaggaccuccuguucaacaaggugacccuggccgacgccggguucaucaagcaguacggcgacugccucggcgacaucgcggcccgcgaccugaucugcgcccagaaguucaacgggcugaccgugcucccgccccugcugaccgacgagaugaucgcccaguacaccuccgcccuccuggcgggcaccaucacgagcggguggaccuucggcgccggggccgcccugcagauccccuucgcgaugcagauggccuaccgguucaacggcaucggcgucacccagaacgugcucuacgagaaccagaagcugaucgccaaccaguucaacuccgccaucgggaagauccaggacagccuguccagcaccgccuccgcgcucggcaagcugcaggacguggucaaccagaacgcccaggcccugaacacgcucgugaagcagcugagcuccaacuucggggccaucagcuccgugcugaacgacauccucagccgccuggacaaggucgaggccgaggugcagaucgaccggcugaucaccggccgccuccagagccugcagaccuacgugacccagcagcugauccgggcggccgagauccgcgccuccgccaaccucgccgcgaccaagaugagcgagugcguccuggggcaguccaagcggguggacuucugcggcaagggcuaccaccugaugagcuucccccaguccgccccgcacgggguggucuuccuccacgugacguacguccccgcccaggagaagaacuucaccaccgcccccgcgaucugccacgacggcaaggcccacuucccccgcgaggggguguucgugagcaacggcacccacugguucgucacgcagcggaacuucuacgagccgcagaucaucaccaccgacaacaccuucguguccgggaacugcgacguggucaucggcaucgugaacaacacgguguacgacccccugcagcccgagcuggacagcuucaaggaggagcucgacaaguacuucaagaaccacaccucccccgacgucgaccugggcgacaucagcgggaucaacgccuccguggugaacauccagaaggagaucgaccgccugaacgaggucgccaagaaccucaacgagagccugaucgaccugcaggagcucggcaaguacgagcaguacaucaaguggccgugguacaucuggcugggguucaucgccggccugaucgcgaucgugauggugaccaucaugcucugcugcaugaccuccugcugcagcugccugaagggcugcugcuccugcgggagcugcugcaaguucgacgaggacgacuccgagcccguccugaagggcgugaagcuccacuacacgugaggacuaguuauaagacugacuagcccgaugggccucccaacgggcccuccuccccuccuugcaccgagauuaauaaaaaaaaaaaaaaaaaaaaaaaaaaaaaaaaaaaaaaaaaaaaaaaaaaaaaaaaaaaaaaaaugcaucccccccccccccccccccccccccccccccaaaggcucuuuucagagccaccagaauu

SEQ ID NO: 12784 - RNA, 4039 nt, Artificial Sequence
  SARS-CoV-2/Iceland/192/2020__EPI_ISL_417819 spike protein mRNA gc (1-1273)
aggagaaagcuuaccauguucguguucuucguccugcucccccuggugagcucccagugcgugaaccugaccacccgcacgcagcucccgcccgccuacaccaacagcuucacccggggcgucuacuaccccgacaagguguuccgcuccagcgugcugcacuccacccaggaccuguuccuccccuucuucagcaacgucacgugguuccacgccauccacguguccgggaccaacggcaccaagcgguucgacaacccggugcugcccuucaacgacggggucuacuucgcgagcaccgagaaguccaacaucauccgcggcuggaucuucgggacgacccuggacagcaagacccagucccuccugaucgugaacaacgccaccaacguggucaucaaggugugcgaguuccaguucugcaacgaccccuuccugggcguguacuaccacaagaacaacaagagcuggauggaguccgaguuccgggucuacagcuccgccaacaacugcacguucgaguacgugagccagcccuuccucauggaccuggagggcaagcaggggaacuucaagaaccugcgcgaguucguguucaagaacaucgacggcuacuucaagaucuacuccaagcacaccccgaucaaccucguccgggaccugccccagggguucagcgcccuggagccccucguggaccugcccaucggcaucaacaucacccgcuuccagacccugcucgcccugcaccgguccuaccugacgccgggggacagcagcuccggcuggaccgcgggcgccgccgccuacuacgugggguaccuccagccccgcaccuuccugcugaaguacaacgagaacggcaccaucacggacgcggucgacugcgcccucgacccccugagcgagaccaagugcacccugaaguccuucaccguggagaaggggaucuaccagacgagcaacuuccgggugcagcccaccgaguccaucguccgcuucccgaacaucaccaaccucugccccuucggcgagguguucaacgccacccgguucgccagcgucuacgccuggaaccgcaagcggaucuccaacugcguggcggacuacagcgugcuguacaacuccgccagcuucuccacguucaagugcuacggcgucagccccaccaagcugaacgaccucugcuucaccaacguguacgccgacuccuucgugauccgcggggacgagguccggcagaucgcccccggccagaccgggaagaucgccgacuacaacuacaagcugccggacgacuucacgggcugcgugaucgcguggaacagcaacaaccuggacuccaaggucgggggcaacuacaacuaccucuaccgccuguuccgcaagagcaaccugaagcccuucgagcgggacaucuccaccgagaucuaccaggccggcagcacccccugcaacgggguggagggcuucaacugcuacuucccccuccaguccuacggguuccagccgaccaacggcgugggguaccagcccuaccggguggucgugcugagcuucgagcugcuccacgcccccgccacggugugcggccccaagaaguccaccaaccuggucaagaacaagugcgugaacuucaacuucaacggccugaccgggaccggcgugcucaccgagagcaacaagaaguuccugccguuccagcaguucgggcgcgacaucgccgacacgaccgacgcgguccgcgacccccagacccuggagauccuggacaucacccccugcagcuucggcgggguguccgugaucacgccgggcaccaacaccagcaaccaggucgccgugcucuaccagggcgugaacugcaccgagguccccguggccauccacgccgaccagcugacgcccaccuggcggguguacuccaccgggagcaacgucuuccagacccgcgccggcugccugaucggggcggagcacgugaacaacuccuacgagugcgacauccccaucggcgccggcaucugcgccagcuaccagacgcagaccaacuccccgcggcgcgcccggagcguggcgucccagagcaucaucgccuacaccaugucccucggggccgagaacagcgucgccuacuccaacaacagcaucgccauccccaccaacuucacgaucuccgugaccaccgagauccugcccgugagcaugaccaagacgagcgucgacugcaccauguacaucugcggcgacuccaccgagugcagcaaccugcuccugcaguacggguccuucugcacccagcugaaccgcgcgcucacgggcaucgccguggagcaggacaagaacacccaggagguguucgcccaggucaagcagaucuacaagacgcccccgaucaaggacuucgggggcuucaacuucagccagauccugcccgaccccuccaagcccagcaagcgguccuucaucgaggaccuccuguucaacaaggugacccuggccgacgccggcuucaucaagcaguacggggacugccugggcgacaucgcggcccgcgaccucaucugcgcccagaaguucaacgggcugaccgugcugccgccccuccugaccgacgagaugaucgcccaguacaccagcgcccugcucgcgggcaccaucacguccggguggaccuucggcgccggcgccgcccugcagauccccuucgcgaugcagauggccuaccgguucaacgggaucggcgucacccagaacgugcuguacgagaaccagaagcucaucgccaaccaguucaacagcgccaucgggaagauccaggacucccugagcuccaccgccagcgcgcugggcaagcuccaggacguggucaaccagaacgcccaggcccugaacacgcuggugaagcagcucuccagcaacuucggggccaucuccagcgugcugaacgacauccugucccgccucgacaaggucgaggccgaggugcagaucgaccggcugaucaccggccgccugcagagccuccagaccuacgugacccagcagcugauccgggcggccgagauccgcgccagcgccaaccuggccgcgaccaagauguccgagugcguccucggccagagcaagcggguggacuucugcgggaagggcuaccaccugauguccuucccccagagcgccccgcacgggguggucuuccugcacgugacguacguccccgcccaggagaagaacuucaccaccgcccccgcgaucugccacgacggcaaggcccacuucccccgcgaggggguguucguguccaacggcacccacugguucgucacgcagcggaacuucuacgagccgcagaucaucaccaccgacaacaccuucgugagcggcaacugcgacguggucaucgggaucgugaacaacacgguguacgacccccuccagcccgagcuggacuccuucaaggaggagcuggacaaguacuucaagaaccacaccagccccgacgucgaccucggcgacaucuccgggaucaacgccagcguggugaacauccagaaggagaucgaccgccugaacgaggucgccaagaaccugaacgagucccucaucgaccugcaggagcugggcaaguacgagcaguacaucaaguggccgugguacaucuggcucggcuucaucgccgggcugaucgcgaucgugauggugaccaucaugcugugcugcaugaccagcugcugcuccugccucaagggcugcugcagcugcggguccugcugcaaguucgacgaggacgacagcgagcccguccugaagggcgugaagcugcacuacacgugaggacuaguuauaagacugacuagcccgaugggccucccaacgggcccuccuccccuccuugcaccgagauuaauaaaaaaaaaaaaaaaaaaaaaaaaaaaaaaaaaaaaaaaaaaaaaaaaaaaaaaaaaaaaaaaaugcaucccccccccccccccccccccccccccccccaaaggcucuuuucagagccaccagaauu

SEQ ID NO: 12785 - RNA, 4039 nt, Artificial Sequence
  SARS-CoV-2/Belgium/ULG-6939/2020__EPI_ISL_417020 spike protein mRNA gc (1-1273)
aggagaaagcuuaccauguucguguuccugguccuccugccccuggugagcucccagugcgugaaccucaccacccgcacgcagcugccgcccgccuacaccaacagcuucacccggggcgucuacuaccccgacaagguguuccgcuccagcgugcugcacuccacccaggaccucuuccugcccuucuucagcaacgucacgugguuccacgccauccacguguccgggaccaacggcaccaagcgguucgacaacccggugcugcccuucaacgacggggucuacuucgcgagcaccgagaaguccaacaucauccgcggcuggaucuucgggacgacccucgacagcaagacccagucccugcugaucgugaacaacgccaccaacguggucaucaaggugugcgaguuccaguucugcaacgaccccuuccucggcguguacuaccacaagaacaacaagagcuggauggaguccgaguuccgggucuacagcuccgccaacaacugcacguucgaguacgugagccagcccuuccugauggaccuggagggcaagcaggggaacuucaagaaccuccgcgaguucguguucaagaacaucgacggcuacuucaagaucuacuccaagcacaccccgaucaaccugguccgggaccugccccagggguucagcgcccucgagccccugguggaccugcccaucggcaucaacaucacccgcuuccagacccuccuggcccugcaccgguccuaccucacgccgggggacagcagcuccggcuggaccgcgggcgccgccgccuacuacgugggguaccugcagccccgcaccuuccugcucaaguacaacgagaacggcaccaucacggacgcggucgacugcgcccuggacccccugagcgagaccaagugcacccucaaguccuucaccguggagaaggggaucuaccagacgagcaacuuccgggugcagcccaccgaguccaucguccgcuucccgaacaucaccaaccugugccccuucggcgagguguucaacgccacccgguucgccagcgucuacgccuggaaccgcaagcggaucuccaacugcguggcggacuacagcgugcuguacaacuccgccagcuucuccacguucaagugcuacggcgucagccccaccaagcucaacgaccugugcuucaccaacguguacgccgacuccuucgugauccgcggggacgagguccggcagaucgcccccggccagaccgggaagaucgccgacuacaacuacaagcugccggacgacuucacgggcugcgugaucgcguggaacagcaacaaccucgacuccaaggucgggggcaacuacaacuaccuguaccgccuguuccgcaagagcaaccucaagcccuucgagcgggacaucuccaccgagaucuaccaggccggcagcacccccugcaacgggguggagggcuucaacugcuacuucccccugcaguccuacggguuccagccgaccaacggcgugggguaccagcccuaccggguggucgugcugagcuucgagcuccugcacgcccccgccacggugugcggccccaagaaguccaccaaccuggucaagaacaagugcgugaacuucaacuucaacggccucaccgggaccggcgugcugaccgagagcaacaagaaguuccugccguuccagcaguucgggcgcgacaucgccgacacgaccgacgcgguccgcgacccccagacccuggagauccucgacaucacccccugcagcuucggcgggguguccgugaucacgccgggcaccaacaccagcaaccaggucgccgugcuguaccagggcgugaacugcaccgagguccccguggccauccacgccgaccagcugacgcccaccuggcggguguacuccaccgggagcaacgucuuccagacccgcgccggcugccucaucggggcggagcacgugaacaacuccuacgagugcgacauccccaucggcgccggcaucugcgccagcuaccagacgcagaccaacuccccgcggcgcgcccggagcguggcgucccagagcaucaucgccuacaccaugucccugggggccgagaacagcgucguguacuccaacaacagcaucgccauccccaccaacuucacgaucuccgugaccaccgagauccugcccgucagcaugaccaagacgagcguggacugcaccauguacaucugcggcgacuccaccgagugcagcaaccuccugcugcaguacggguccuucugcacccagcucaaccgcgcccugacgggcaucgcgguggagcaggacaagaacacccaggaggucuucgcccaggugaagcagaucuacaagacgcccccgaucaaggacuucgggggcuucaacuucagccagauccugcccgaccccuccaagcccagcaagcgguccuucaucgaggaccuccuguucaacaaggugacccuggccgacgccggcuucaucaagcaguacggggacugccucggcgacaucgccgcgcgcgaccugaucugcgcccagaaguucaacgggcugaccguccucccgccccugcugaccgacgagaugaucgcccaguacaccagcgcccuccuggccggcaccaucacguccggguggaccuucggcgcgggcgccgcccugcagauccccuucgccaugcagauggcguaccgguucaacgggaucggcgugacccagaacgugcucuacgagaaccagaagcugaucgccaaccaguucaacagcgccaucgggaagauccaggacucccugagcuccaccgccagcgcccucggcaagcugcaggacgucgugaaccagaacgcgcaggcccugaacacgcucgugaagcagcuguccagcaacuucggggccaucuccagcguccugaacgacauccucucccgccuggacaagguggaggccgaggugcagaucgaccggcugaucaccggccgccuccagagccugcagaccuacgucacccagcagcugauccgggccgcggagauccgcgccagcgccaaccucgccgccaccaagauguccgagugcgugcugggccagagcaagcggguggacuucugcgggaagggcuaccaccugauguccuucccccagagcgcgccgcacggggucguguuccuccacgucacguacgugcccgcccaggagaagaacuucaccaccgcccccgccaucugccacgacggcaaggcgcacuucccccgcgaggggguguucgucuccaacggcacccacugguucgugacgcagcggaacuucuacgagccgcagaucaucaccaccgacaacaccuucgugagcggcaacugcgacgucgugaucgggaucgugaacaacacggucuacgacccccugcagcccgagcuggacuccuucaaggaggagcucgacaaguacuucaagaaccacaccagccccgacguggaccugggcgacaucuccgggaucaacgccagcguggucaacauccagaaggagaucgaccgccugaacgagguggccaagaaccucaacgagucccugaucgaccugcaggagcucggcaaguacgagcaguacaucaaguggccgugguacaucuggcugggcuucaucgccgggcugaucgccaucgugauggucaccaucaugcucugcugcaugaccagcugcugcuccugccugaagggcugcugcagcugcggguccugcugcaaguucgacgaggacgacagcgagcccgugcugaagggcgugaagcuccacuacacgugaggacuaguuauaagacugacuagcccgaugggccucccaacgggcccuccuccccuccuugcaccgagauuaauaaaaaaaaaaaaaaaaaaaaaaaaaaaaaaaaaaaaaaaaaaaaaaaaaaaaaaaaaaaaaaaaugcaucccccccccccccccccccccccccccccccaaaggcucuuuucagagccaccagaauu

SEQ ID NO: 12786 - RNA, 4039 nt, Artificial Sequence
  SARS-CoV-2/France/HF2496/2020__EPI_ISL_418231 spike protein mRNA gc (1-1273)
aggagaaagcuuaccauguucguguuccugguccuccugccccuggugagcucccagugcgugaaccucaccacccgcacgcagcugccgcccgccuacaccaacagcuucacccggggcgucuacuaccccgacaagguguuccgcuccagcgugcugcacuccacccaggaccucuuccugcccuucuucagcaacgucacgugguuccacgccauccacguguccgggaccaacggcaccaagcgguucgacaacccggugcugcccuucaacgacggggucuacuucgcgagcaccgagaaguccaacaucauccgcggcuggaucuucgggacgacccucgacagcaagacccagucccugcugaucgugaacaacgccaccaacguggucaucaaggugugcgaguuccaguucugcaacgaccccuuccucggcguguacuaccacaagaacaacaagagcuggauggaguccgaguuccgggucuacagcuccgccaacaacugcacguucgaguacgugagccagcccuuccugauggaccuggagggcaagcaggggaacuucaagaaccuccgcgaguucguguucaagaacaucgacggcuacuucaagaucuacuccaagcacaccccgaucaaccugguccgggaccugccccagggguucagcgcccucgagccccugguggaccugcccaucggcaucaacaucacccgcuuccagacccuccuggcccugcaccgguccuaccucacgccgggggacagcagcuccggcuggaccgcgggcgccgccgccuacuacgugggguaccugcagccccgcaccuuccugcucaaguacaacgagaacggcaccaucacggacgcggucgacugcgcccuggacccccugagcgagaccaagugcacccucaaguccuucaccguggagaaggggaucuaccagacgagcaacuuccgggugcagcccaccgaguccaucguccgcuucccgaacaucaccaaccugugccccuucggcgagguguucaacgccacccgguucgccagcgucuacgccuggaaccgcaagcggaucuccaacugcguggcggacuacagcgugcuguacaacuccgccagcuucuccacguucaagugcuacggcgucagccccaccaagcucaacgaccugugcuucaccaacguguacgccgacuccuucgugauccgcggggacgagguccggcagaucgcccccggccagaccgggaagaucgccgacuacaacuacaagcugccggacgacuucacgggcugcgugaucgcguggaacagcaacaaccucgacuccaaggucgggggcaacuacaacuaccuguaccgccuguuccgcaagagcaaccucaagcccuucgagcgggacaucuccaccgagaucuaccaggccggcagcacccccugcaacgggguggagggcuucaacugcuacuucccccugcaguccuacggguuccagccgaccaacggcgugggguaccagcccuaccggguggucgugcugagcuucgagcuccugcacgcccccgccacggugugcggccccaagaaguccaccaaccuggucaagaacaagugcgugaacuucaacuucaacggccucaccgggaccggcgugcugaccgagagcaacaagaaguuccugccguuccagcaguucgggcgcgacaucgccgacacgaccgacgcgguccgcgacccccagacccuggagauccucgacaucacccccugcagcuucggcgggguguccgugaucacgccgggcaccaacaccagcaaccaggucgccgugcuguaccagggcgugaacugcaccgagguccccguggccauccacgccgaccagcugacgcccaccuggcggguguacuccaccgggagcaacgucuuccagacccgcgccggcugccucaucggggcggagcacgugaacaacuccuacgagugcgacauccccaucggcgccggcaucugcgccagcuaccagacgcagaccaacuccccgcggcgcgcccggagcguggcgucccagagcaucaucgccuacaccaugucccugggggccgagaacagcgucgccuacuccaacaacagcaucgccauccccaccaacuucacgaucuccgugaccaccgagauccugcccgugagcaugaccaagacgagcgucgacugcaccauguacaucugcggcgacuccaccgagugcagcaaccuccugcugcaguacggguccuucugcacccagcucaaccgcgcgcugacgggcaucgccguggagcaggacaagaacacccaggagguguucgcccaggucaagcagaucuacaagacgcccccgaucaaggacuucgggggcuucaacuucagccagauccugcccgaccccuccaagcccagcaagcgguccuucaucgaggaccuccuguucaacaaggugacccuggccgacgccggcuucaucaagcaguacggggacugccucggcgacaucguggcgcgcgaccugaucugcgcccagaaguucaacgggcugaccguccucccgccccugcugaccgacgagaugaucgcccaguacaccagcgcccuccuggccggcaccaucacguccggguggaccuucggcgcgggcgccgcccugcagauccccuucgccaugcagauggcguaccgguucaacgggaucggcgugacccagaacgugcucuacgagaaccagaagcugaucgccaaccaguucaacagcgccaucgggaagauccaggacucccugagcuccaccgccagcgcccucggcaagcugcaggacgucgugaaccagaacgcgcaggcccugaacacgcucgugaagcagcuguccagcaacuucggggccaucuccagcguccugaacgacauccucucccgccuggacaagguggaggccgaggugcagaucgaccggcugaucaccggccgccuccagagccugcagaccuacgucacccagcagcugauccgggccgcggagauccgcgccagcgccaaccucgccgccaccaagauguccgagugcgugcugggccagagcaagcggguggacuucugcgggaagggcuaccaccugauguccuucccccagagcgcgccgcacggggucguguuccuccacgucacguacgugcccgcccaggagaagaacuucaccaccgcccccgccaucugccacgacggcaaggcgcacuucccccgcgaggggguguucgucuccaacggcacccacugguucgugacgcagcggaacuucuacgagccgcagaucaucaccaccgacaacaccuucgugagcggcaacugcgacgucgugaucgggaucgugaacaacacggucuacgacccccugcagcccgagcuggacuccuucaaggaggagcucgacaaguacuucaagaaccacaccagccccgacguggaccugggcgacaucuccgggaucaacgccagcguggucaacauccagaaggagaucgaccgccugaacgagguggccaagaaccucaacgagucccugaucgaccugcaggagcucggcaaguacgagcaguacaucaaguggccgugguacaucuggcugggcuucaucgccgggcugaucgccaucgugauggucaccaucaugcucugcugcaugaccagcugcugcuccugccugaagggcugcugcagcugcggguccugcugcaaguucgacgaggacgacagcgagcccgugcugaagggcgugaagcuccacuacacgugaggacuaguuauaagacugacuagcccgaugggccucccaacgggcccuccuccccuccuugcaccgagauuaauaaaaaaaaaaaaaaaaaaaaaaaaaaaaaaaaaaaaaaaaaaaaaaaaaaaaaaaaaaaaaaaaugcaucccccccccccccccccccccccccccccccaaaggcucuuuucagagccaccagaauu

SEQ ID NO: 12787 - RNA, 4039 nt, Artificial Sequence
  SARS-CoV-2/USA/WA-UW291/2020__EPI_ISL_418076 spike protein mRNA gc (1-1273)
aggagaaagcuuaccauguucguguuccugguccuccugccccuggugagcucccagugcgugaaccucaccacccgcacgcagcugccgcccgccuacaccaacagcuucacccggggcgucuacuaccccgacaagguguuccgcuccagcgugcugcacuccacccaggaccucuuccugcccuucuucagcaacgucacgugguuccacgccauccacguguccgggaccaacggcaccaagcgguucgacaacccggugcugcccuucaacgacggggucuacuucgcgagcaccgagaaguccaacaucauccgcggcuggaucuucgggacgacccucgacagcaagacccagucccugcugaucgugaacaacgccaccaacguggucaucaaggugugcgaguuccaguucugcaacgaccccuuccucggcguguacuaccacaagaacaacaagagcuggauggaguccgaguuccgggucuacagcuccgccaacaacugcacguucgaguacgugagccagcccuuccugauggaccuggagggcaagcaggggaacuucaagaaccuccgcgaguucguguucaagaacaucgacggcuacuucaagaucuacuccaagcacaccccgaucaaccugguccgggaccugccccagggguucagcgcccucgagccccugguggaccugcccaucggcaucaacaucacccgcuuccagacccuccuggcccugcaccgguccuaccucacgccgggggacagcagcuccggcuggaccgcgggcgccgccgccuacuacgugggguaccugcagccccgcaccuuccugcucaaguacaacgagaacggcaccaucacggacgcggucgacugcgcccuggacccccugagcgagaccaagugcacccucaaguccuucaccguggagaaggggaucuaccagacgagcaacuuccgggugcagcccaccgaguccaucguccgcuucccgaacaucaccaaccugugccccuucggcgagguguucaacgccacccgguucgccagcgucuacgccuggaaccgcaagcggaucuccaacugcguggcggacuacagcgugcuguacaacuccgccagcuucuccacguucaagugcuacggcgucagccccaccaagcucaacgaccugugcuucaccaacguguacgccgacuccuucgugauccgcggggacgagguccggcagaucgcccccggccagaccgggaagaucgccgacuacaacuacaagcugccggacgacuucacgggcugcgugaucgcguggaacagcaacaaccucgacuccaaggucgggggcaacuacaacuaccuguaccgccuguuccgcaagagcaaccucaagcccuucgagcgggacaucuccaccgagaucuaccaggccggcagcacccccugcaacgggguggagggcuucaacugcuacuucccccugcaguccuacggguuccagccgaccaacggcgugggguaccagcccuaccggguggucgugcugagcuucgagcuccugcacgcccccgccacggugugcggccccaagaaguccaccaaccuggucaagaacaagugcgugaacuucaacuucaacggccucaccgggaccggcgugcugaccgagagcaacaagaaguuccugccguuccagcaguucgggcgcgacaucgccgacacgaccgacgcgguccgcgacccccagacccuggagauccucgacaucacccccugcagcuucggcgggguguccgugaucacgccgggcaccaacaccagcaaccaggucgccgugcuguaccagggcgugaacugcaccgagguccccguggccauccacgccgaccagcugacgcccaccuggcggguguacuccaccgggagcaacgucuuccagacccgcgccggcugccucaucggggcggagcacgugaacaacuccuacgagugcgacauccccaucggcgccggcaucugcgccagcuaccagacgcagaccaacuccccgcggcgcgcccggagcguggcgucccagagcaucaucgccuacaccaugucccugggggccgagaacagcgucgccuacuccaacaacagcaucgccauccccaccaacuucacgaucuccgugaccaccgagauccugcccgugagcaugaccaagacgagcgucgacugcaccauguacaucugcggcgacuccaccgagugcagcaaccuccugcugcaguacggguccuucugcacccagcucaaccgcgcgcugacgggcaucgccguggagcaggacaagaacacccaggagguguucgcccaggucaagcagaucuacaagacgcccccgaucaaggacuucgggggcuucaacuucagccagauccugcccgaccccuccaagcccagcaagcgguccuucaucgaggaccuccuguucaacaaggugacccuggccgacgccggcuucaucaagcaguacggggacugccucggcgacaucgcggcccgcgaccugaucugcgcccagaaguucaacgggcugaccgugcucccgccccugcugaccgacgagaugaucgcccaguacaccagcgcccuccuggcgggcaccaucacguccggguggaccuucggcgccggcgccgcccugcagauccccuucgcgaugcagauggccuaccgguucaacgggaucggcgucacccagaacgugcucuacgagaaccagaagcugaucgccaaccaguucaacagcgccaucgggaagauccaguacucccugagcuccaccgccagcgcgcucggcaagcugcaggacguggucaaccagaacgcccaggcccugaacacgcucgugaagcagcuguccagcaacuucggggccaucuccagcgugcugaacgacauccucucccgccuggacaaggucgaggccgaggugcagaucgaccggcugaucaccggccgccuccagagccugcagaccuacgugacccagcagcugauccgggcggccgagauccgcgccagcgccaaccucgccgcgaccaagauguccgagugcguccugggccagagcaagcggguggacuucugcgggaagggcuaccaccugauguccuucccccagagcgccccgcacgggguggucuuccuccacgugacguacguccccgcccaggagaagaacuucaccaccgcccccgcgaucugccacgacggcaaggcccacuucccccgcgaggggguguucguguccaacggcacccacugguucgucacgcagcggaacuucuacgagccgcagaucaucaccaccgacaacaccuucgugagcggcaacugcgacguggucaucgggaucgugaacaacacgguguacgacccccugcagcccgagcuggacuccuucaaggaggagcucgacaaguacuucaagaaccacaccagccccgacgucgaccugggcgacaucuccgggaucaacgccagcguggugaacauccagaaggagaucgaccgccugaacgaggucgccaagaaccucaacgagucccugaucgaccugcaggagcucggcaaguacgagcaguacaucaaguggccgugguacaucuggcugggcuucaucgccgggcugaucgcgaucgugauggugaccaucaugcucugcugcaugaccagcugcugcuccugccugaagggcugcugcagcugcggguccugcugcaaguucgacgaggacgacagcgagcccguccugaagggcgugaagcuccacuacacgugaggacuaguuauaagacugacuagcccgaugggccucccaacgggcccuccuccccuccuugcaccgagauuaauaaaaaaaaaaaaaaaaaaaaaaaaaaaaaaaaaaaaaaaaaaaaaaaaaaaaaaaaaaaaaaaaugcaucccccccccccccccccccccccccccccccaaaggcucuuuucagagccaccagaauu

SEQ ID NO: 12788 - RNA, 4039 nt, Artificial Sequence
  SARS-CoV-2/Portugal/PT0034/2020__EPI_ISL_418019 spike protein mRNA gc (1-1273)
aggagaaagcuuaccauguucguguuccugguccuccugccccuggugagcucccagugcgugaaccucaccacccgcacgcagcugccgcccgccuacaccaacagcuucacccggggcgucuacuaccccgacaagguguuccgcuccagcgugcugcacuccacccaggaccucuuccugcccuucuucagcaacgucacgugguuccacgccauccacguguccgggaccaacggcaccaagcgguucgacaacccggugcugcccuucaacgacggggucuacuucgcgagcaccgagaaguccaacaucauccgcggcuggaucuucgggacgacccucgacagcaagacccagucccugcugaucgugaacaacgccaccaacguggucaucaaggugugcgaguuccaguucugcaacgaccccuuccucggcguguacuaccacaagaacaacaagagcuggauggaguccgaguuccgggucuacagcuccgccaacaacugcacguucgaguacgugagccagcccuuccugauggaccuggagggcaagcaggggaacuucaagaaccuccgcgaguucguguucaagaacaucgacggcuacuucaagaucuacuccaagcacaccccgaucaaccugguccgggaccugccccagggguucagcgcccucgagccccugguggaccugcccaucggcaucaacaucacccgcuuccagacccuccuggcccugcaccgguccuaccucacgccgggggacagcagcuccggcuggaccgcgggcgccgccgccuacuacgugggguaccugcagccccgcaccuuccugcucaaguacaacgagaacggcaccaucacggacgcggucgacugcgcccuggacccccugagcgagaccaagugcacccucaaguccuucaccguggagaaggggaucuaccagacgagcaacuuccgggugcagcccaccgaguccaucguccgcuucccgaacaucaccaaccugugccccuucggcgagguguucaacgccacccgguucgccagcgucuacgccuggaaccgcaagcggaucuccaacugcguggcggacuacagcgugcuguacaacuccgccagcuucuccacguucaagugcuacggcgucagccccaccaagcucaacgaccugugcuucaccaacguguacgccgacuccuucgugauccgcggggacgagguccggcagaucgcccccggccagaccgggaagaucgccgacuacaacuacaagcugccggacgacuucacgggcugcgugaucgcguggaacagcaacaaccucgacuccaaggucgggggcaacuacaacuaccuguaccgccuguuccgcaagagcaaccucaagcccuucgagcgggacaucuccaccgagaucuaccaggccggcagcacccccugcaacgggguggagggcuucaacugcuacuucccccugcaguccuacggguuccagccgaccaacggcgugggguaccagcccuaccggguggucgugcugagcuucgagcuccugcacgcccccgccacggugugcggccccaagaaguccaccaaccuggucaagaacaagugcgugaacuucaacuucaacggccucaccgggaccggcgugcugaccgagagcaacaagaaguuccugccguuccagcaguucgggcgcgacaucgccgacacgaccgacgcgguccgcgacccccagacccuggagauccucgacaucacccccugcagcuucggcgggguguccgugaucacgccgggcaccaacaccagcaaccaggucgccgugcuguaccagggcgugaacugcaccgagguccccguggccauccacgccgaccagcugacgcccaccuggcggguguacuccaccgggagcaacgucuuccagacccgcgccggcugccucaucggggcggagcacgugaacaacuccuacgagugcgacauccccaucggcgccggcaucugcgccagcuaccagacgcagaccaacuccccgcggcgcgcccggagcguggcgucccagagcaucaucgccuacaccaugucccugggggccgagaacagcgucgccuacuccaacaacagcaucgccauccccaccaacuucacgaucuccgugaccaccgagauccugcccgugagcaugaccaagacgagcgucgacugcaccauguacaucugcggcgacuccaccgagugcagcaaccuccugcugcaguacggguccuucugcacccagcucaaccgcgcgcugacgggcaucgccguggagcaggacaagaacacccaggagguguucgcccaggucaagcagaucuacaagacgcccccgaucaaggacuucgggggcuucaacuucagccagauccugcccgaccccuccaagcccagcaagcgguccuucaucgaggaccuccuguucaacaaggugacccuggccgacgccggcuucaucaagcaguacggggacugccucggcgacaucgcggcccgcgaccugaucugcgcccagaaguucaacgggcugaccgugcucccgccccugcugaccgacgagaugaucgcccaguacaccagcgcccuccuggcgggcaccaucacguccggguggaccuucggcgccggcgccgcccugcagauccccuucgcgaugcagauggccuaccgguucaacgggaucggcgucacccagaacgugcucuacgagaaccagaagcugaucgccaaccaguucaacagcgccaucgggaagauccaggacucccugagcuccaccgccagcgcgcucggcaagcugcaggacguggucaaccagaacgcccaggcccugaacacgcucgugaagcagcuguccagcaacuucggggccaucuccagcgugcugaacgacauccucucccgccuggacaaggucgaggccgaggugcagaucgaccggcugaucaccggccgccuccagagccugcagaccuacgugacccagcagcugauccgggcggccgagauccgcgccagcgccaaccucgccgcgaccaagauguccgagugcguccugggccagagcaagcggguggacuucugcgggaagggcuaccaccugauguccuucccccagagcgccccgcacgggguggucuuccuccacgugacguacguccccgcccaggagaagaacuucaccaccgcccccgcgaucugccacgacggcaaggcccacuucccccgcgaggggguguucguguccaacggcacccacugguucgucacgcagcggaacuucuacgagccgcagaucaucaccaccgacaacaccuucgugagcggcaacugcgacguggucaucgggaucgugaacaacacgguguacgacccccugcagcccgagcuggacuccuucaaggaggagcucgacaaguacuucaagaaccacaccagccccgacgucgaccugggcgacaucuccgggaucaacgccagcguggugaacauccagaaggagaucgaccgccugaacgaggucgccaagaaccucaacgagucccugaucgaccugcaggagcucggcaaguacgagcaguacaucaaguggccgugguacaucuggcugggcuucaucgccgggcugaucgcgaucgugauggugaccaucaugcucugcugcaucaccagcugcugcuccugccugaagggcugcugcagcugcggguccugcugcaaguucgacgaggacgacagcgagcccguccugaagggcgugaagcuccacuacacgugaggacuaguuauaagacugacuagcccgaugggccucccaacgggcccuccuccccuccuugcaccgagauuaauaaaaaaaaaaaaaaaaaaaaaaaaaaaaaaaaaaaaaaaaaaaaaaaaaaaaaaaaaaaaaaaaugcaucccccccccccccccccccccccccccccccaaaggcucuuuucagagccaccagaauu

SEQ ID NO: 12789 - RNA, 4039 nt, Artificial Sequence
  SARS-CoV-2/Iceland/202/2020__EPI_ISL_417750 spike protein mRNA gc (1-1273)
aggagaaagcuuaccauguucguguuccugguccuccugccccuggugagcucccagugcgugaaccucaccacccgcacgcagcugccgcccgccuacaccaacagcuucacccggggcgucuacuaccccgacaagguguuccgcuccagcgugcugcacuccacccaggaccucuuccugcccuucuucagcaacgucacgugguuccacgccauccacguguccgggaccaacggcaccaagcgguucgacaacccggugcugcccuucaacgacggggucuacuucgcgagcaccgagaaguccaacaucauccgcggcuggaucuucgggacgacccucgacagcaagacccagucccugcugaucgugaacaacgccaccaacguggucaucaaggugugcgaguuccaguucugcaacgaccccuuccucggcguguacuaccacaagaacaacaagagcuggauggaguccgaguuccgggucuacagcuccgccaacaacugcacguucgaguacgugagccagcccuuccugauggaccuggagggcaagcaggggaacuucaagaaccuccgcgaguucguguucaagaacaucgacggcuacuucaagaucuacuccaagcacaccccgaucaaccugguccgggaccugccccagggguucagcgcccucgagccccugguggaccugcccaucggcaucaacaucacccgcuuccagacccuccuggcccugcaccgguccuaccucacgccgggggacagcagcuccggcuggaccgcgggcgccgccgccuacuacgugggguaccugcagccccgcaccuuccugcucaaguacaacgagaacggcaccaucacggacgcggucgacugcgcccuggacccccugagcgagaccaagugcacccucaaguccuucaccguggagaaggggaucuaccagacgagcaacuuccgggugcagcccaccgaguccaucguccgcuucccgaacaucaccaaccugugccccuucggcgagguguucaacgccacccgguucgccagcgucuacgccuggaaccgcaagcggaucuccaacugcguggcggacuacagcgugcuguacaacuccgccagcuucuccacguucaagugcuacggcgucagccccaccaagcucaacgaccugugcuucaccaacguguacgccgacuccuucgugauccgcggggacgagguccggcagaucgcccccggccagaccgggaagaucgccgacuacaacuacaagcugccggacgacuucacgggcugcgugaucgcguggaacagcaacaaccucgacuccaaggucgggggcaacuacaacuaccuguaccgccuguuccgcaagagcaaccucaagcccuucgagcgggacaucuccaccgagaucuaccaggccggcagcacccccugcaacgggguggagggcuucaacugcuacuucccccugcaguccuacggguuccagccgaccaacggcgugggguaccagcccuaccggguggucgugcugagcuucgagcuccugcacgcccccgccacggugugcggccccaagaaguccaccaaccuggucaagaacaagugcgugaacuucaacuucaacggccucaccgggaccggcgugcugaccgagagcaacaagaaguuccugccguuccagcaguucgggcgcgacaucgccgacacgaccgacgcgguccgcgacccccagacccuggagauccucgacaucacccccugcagcuucggcgggguguccgugaucacgccgggcaccaacaccagcaaccaggucgccgugcuguaccaggacgugaacugcaccgagguccccguggccauccacgccgaccagcugacgcccaccuggcggguguacuccaccggcagcaacgucuuccagacccgcgccgggugccucaucggcgcggagcacgugaacaacuccuacgagugcgacauccccaucggggccggcaucugcgccagcuaccagacgcagaccaacuccccgcggcgcgcccggagcguggcgucccagagcaucaucgccuacaccaugucccugggcgccgagaacagcgucgccuacuccaacaacagcaucgccauccccaccaacuucacgaucuccgugaccaccgagauccugcccgugagcaugaccaagacgagcgucgacugcaccauguacaucugcggggacuccaccgagugcagcaaccuccugcugcaguacggcuccuucugcacccagcucaaccgcgcgcugacggggaucgccguggagcaggacaagaacacccaggagguguucgcccaggucaagcagaucuacaagacgcccccgaucaaggacuucggcggguucaacuucagccagauccugcccgaccccuccaagcccagcaagcgguccuucaucgaggaccuccuguucaacaaggugacccuggccgacgccggcuucaucaagcaguacggcgacugccucggggacaucgcggcccgcgaccugaucugcgcccagaaguucaacggccugaccgugcucccgccccugcugaccgacgagaugaucgcccaguacaccagcgcccuccuggcggggaccaucacguccggcuggaccuucggggccggcgccgcccugcagauccccuucgcgaugcagauggccuaccgguucaacggcaucggggucacccagaacgugcucuacgagaaccagaagcugaucgccaaccaguucaacagcgccaucggcaagauccaggacucccugagcuccaccgccagcgcgcucgggaagcugcaggacguggucaaccagaacgcccaggcccugaacacgcucgugaagcagcuguccagcaacuucggcgccaucuccagcgugcugaacgacauccucucccgccuggacaaggucgaggccgaggugcagaucgaccggcugaucaccgggcgccuccagagccugcagaccuacgugacccagcagcugauccgggcggccgagauccgcgccagcgccaaccucgccgcgaccaagauguccgagugcguccugggccagagcaagcggguggacuucugcggcaagggguaccaccugauguccuucccccagagcgccccgcacggcguggucuuccuccacgugacguacguccccgcccaggagaagaacuucaccaccgcccccgcgaucugccacgacgggaaggcccacuucccccgcgagggcguguucguguccaacgggacccacugguucgucacgcagcggaacuucuacgagccgcagaucaucaccaccgacaacaccuucgugagcggcaacugcgacguggucaucggcaucgugaacaacacgguguacgacccccugcagcccgagcuggacuccuucaaggaggagcucgacaaguacuucaagaaccacaccagccccgacgucgaccugggggacaucccgggcaucaacgccuccguggugaacauccagaaggagaucgaccgccugaacgaggucgccaagaaccucaacgagagccugaucgaccugcaggagcucgggaaguacgagcaguacaucaaguggcccugguacaucuggcugggcuucaucgccggccugaucgcgaucgugauggugaccaucaugcucugcugcaugaccuccugcugcagcugccugaaggggugcugcuccugcggcagcugcugcaaguucgacgaggacgacuccgagcccguccugaagggggugaagcuccacuacacgugaggacuaguuauaagacugacuagcccgaugggccucccaacgggcccuccuccccuccuugcaccgagauuaauaaaaaaaaaaaaaaaaaaaaaaaaaaaaaaaaaaaaaaaaaaaaaaaaaaaaaaaaaaaaaaaaugcaucccccccccccccccccccccccccccccccaaaggcucuuuucagagccaccagaauu

SEQ ID NO: 12790 - RNA, 4039 nt, Artificial Sequence
  SARS-CoV-2/USA/WA-UW261/2020__EPI_ISL_418046 spike protein mRNA gc (1-1273)
aggagaaagcuuaccauguucguguuccugguccuccugccccuggugagcucccagugcgugaaccucaccacccgcacgcagcugccgcccgccuacaccaacagcuucacccggggcgucuacuaccccgacaagguguuccgcuccagcgugcugcacuccacccaggaccucuuccugcccuucuucagcaacgucacgugguuccacgccauccacguguccgggaccaacggcaccaagcgguucgacaacccggugcugcccuucaacgacggggucuacuucgcgagcaccgagaaguccaacaucauccgcggcuggaucuucgggacgacccucgacagcaagacccagucccugcugaucgugaacaacgccaccaacguggucaucaaggugugcgaguuccaguucugcaacgaccccuuccucggcguguacuaccacaagaacaacaagagcuggauggaguccgaguuccgggucuacagcuccgccaacaacugcacguucgaguacgugagccagcccuuccugauggaccuggagggcaagcaggggaacuucaagaaccuccgcgaguucguguucaagaacaucgacggcuacuucaagaucuacuccaagcacaccccgaucaaccugguccgggaccugccccagggguucagcgcccucgagccccugguggaccugcccaucggcaucaacaucacccgcuuccagacccuccuggcccugcaccgguccuaccucacgccgggggacagcagcuccggcuggaccgcgggcgccgccgccuacuacgugggguaccugcagccccgcaccuuccugcucaaguacaacgagaacggcaccaucacggacgcggucgacugcgcccuggacccccugagcgagaccaagugcacccucaaguccuucaccguggagaaggggaucuaccagacgagcaacuuccgggugcagcccaccgaguccaucguccgcuucccgaacaucaccaaccugugccccuucggcgagguguucaacgccacccgguucacgagcgucuacgccuggaaccgcaagcggaucuccaacugcguggccgacuacagcgugcuguacaacuccgcgagcuucuccaccuucaagugcuacggcgucagccccaccaagcucaacgaccugugcuucaccaacguguacgccgacuccuucgugauccgcggggacgagguccggcagaucgcccccggccagacggggaagaucgccgacuacaacuacaagcugccggacgacuucaccggcugcgugaucgccuggaacagcaacaaccucgacuccaaggucgggggcaacuacaacuaccuguaccgccuguuccgcaagagcaaccucaagcccuucgagcgggacaucuccaccgagaucuaccaggcgggcagcacccccugcaacgggguggagggcuucaacugcuacuucccccugcaguccuacggguuccagccgacgaacggcgugggguaccagcccuaccggguggucgugcugagcuucgagcuccugcacgcccccgccaccgugugcggccccaagaaguccaccaaccuggucaagaacaagugcgugaacuucaacuucaacggccucaccgggaccggcgugcugacggagagcaacaagaaguuccugccguuccagcaguucgggcgcgacaucgccgacaccaccgacgccguccgcgacccccagacccuggagauccucgacaucacgcccugcagcuucggcgggguguccgugaucaccccgggcaccaacaccagcaaccaggucgcggugcuguaccaggacgugaacugcacggagguccccguggccauccacgccgaccagcugacccccaccuggcggguguacuccaccggcagcaacgucuuccagacgcgcgccgggugccucaucggcgccgagcacgugaacaacuccuacgagugcgacauccccaucggggcgggcaucugcgccagcuaccagacccagaccaacuccccgcggcgcgcccggagcguggccucccagagcaucaucgcguacaccaugucccugggcgccgagaacagcgucgccuacuccaacaacagcaucgccauccccacgaacuucaccaucuccgugaccaccgagauccugcccgugagcaugacgaagaccagcgucgacugcaccauguacaucugcggggacuccaccgagugcagcaaccuccugcugcaguacggcuccuucugcacgcagcucaaccgcgcccugaccgggaucgcgguggagcaggacaagaacacccaggagguguucgcccaggucaagcagaucuacaagacgcccccgaucaaggacuucggcggguucaacuucagccagauccugcccgaccccuccaagcccagcaagcgguccuucaucgaggaccuccuguucaacaaggugacccuggccgacgccggcuucaucaagcaguacggcgacugccucggggacaucgccgcgcgcgaccugaucugcgcccagaaguucaacggccugaccgugcucccgccccugcugaccgacgagaugaucgcccaguacaccagcgcccuccuggccgggacgaucaccuccggcuggaccuucggggcgggcgccgcccugcagauccccuucgccaugcagauggcguaccgguucaacggcaucggggucacccagaacgugcucuacgagaaccagaagcugaucgccaaccaguucaacagcgccaucggcaagauccaggacucccugagcuccacggccagcgcccucgggaagcugcaggacguggucaaccagaacgcgcaggcccugaacacccucgugaagcagcuguccagcaacuucggcgccaucuccagcgugcugaacgacauccucucccgccuggacaaggucgaggccgaggugcagaucgaccggcugaucaccgggcgccuccagagccugcagaccuacgugacccagcagcugauccgggccgcggagauccgcgccagcgccaaccucgccgccacgaagauguccgagugcguccugggccagagcaagcggguggacuucugcggcaagggguaccaccugauguccuucccccagagcgcgccgcacggcguggucuuccuccacgugaccuacguccccgcccaggagaagaacuucaccaccgcccccgccaucugccacgacgggaaggcgcacuucccccgcgagggcguguucguguccaacgggacgcacugguucgucacccagcggaacuucuacgagccgcagaucaucaccaccgacaacacguucgugagcggcaacugcgacguggucaucggcaucgugaacaacaccguguacgacccccugcagcccgagcuggacuccuucaaggaggagcucgacaaguacuucaagaaccacaccagccccgacgucgaccugggggacaucuccggcaucaacgccagcguggugaacauccagaaggagaucgaccgccugaacgaggucgccaagaaccucaacgagucccugaucgaccugcaggagcucgggaaguacgagcaguacaucaaguggccgugguacaucuggcugggcuucaucgccggccugaucgccaucgugauggugaccaucaugcucugcugcaugacgagcugcugcuccugccugaaggggugcugcagcugcggcuccugcugcaaguucgacgaggacgacagcgagcccguccugaagggggugaagcuccacuacaccugaggacuaguuauaagacugacuagcccgaugggccucccaacgggcccuccuccccuccuugcaccgagauuaauaaaaaaaaaaaaaaaaaaaaaaaaaaaaaaaaaaaaaaaaaaaaaaaaaaaaaaaaaaaaaaaaugcaucccccccccccccccccccccccccccccccaaaggcucuuuucagagccaccagaauu

SEQ ID NO: 12791 - RNA, 4039 nt, Artificial Sequence
  SARS-CoV-2/Portugal/PT0035/2020__EPI_ISL_418020 spike protein mRNA gc (1-1273)
aggagaaagcuuaccauguucguguuccugguccuccugccccuggugagcucccagugcgugaaccucaccacccgcacgcagcugccgcccgccuacaccaacagcuucacccggggcgucuacuaccccgacaagguguuccgcuccagcgugcugcacuccacccaggaccucuuccugcccuucuucagcaacgucacgugguuccacgccauccacguguccgggaccaacggcaccaagcgguucgacaacccggugcugcccuucaacgacggggucuacuucgcgagcaccgagaaguccaacaucauccgcggcuggaucuucgggacgacccucgacagcaagacccagucccugcugaucgugaacaacgccaccaacguggucaucaaggugugcgaguuccaguucugcaacgaccccuuccucggcguguacuaccacaagaacaacaagagcuggauggaguccgaguuccgggucuacagcuccgccaacaacugcacguucgaguacgugagccagcccuuccugauggaccuggagggcaagcaggggaacuucaagaaccuccgcgaguucguguucaagaacaucgacggcuacuucaagaucuacuccaagcacaccccgaucaaccugguccgggaccugccccagggguucagcgcccucgagccccugguggaccugcccaucggcaucaacaucacccgcuuccagacccuccuggcccugcaccgguccuaccucacgccgggggacagcagcuccggcuggaccgcgggcgccgccgccuacuacgugggguaccugcagccccgcaccuuccugcucaaguacaacgagaacggcaccaucacggacgcggucgacugcgcccuggacccccugagcgagaccaagugcacccucaaguccuucaccguggagaaggggaucuaccagacgagcaacuuccgggugcagcccaccgaguccaucguccgcuucccgaacaucaccaaccugugccccuucggcgagguguucaacgccacccgguucgccagcgucuacgccuggaaccgcaagcggaucuccaacugcguggcggacuacagcgugcuguacaacuccgccagcuucuccacguucaagugcuacggcgucagccccaccaagcucaacgaccugugcuucaccaacguguacgccgacuccuucgugauccgcggggacgagguccggcagaucgcccccggccagaccgggaagaucgccgacuacaacuacaagcugccggacgacuucacgggcugcgugaucgcguggaacagcaacaaccucgacuccaaggucgggggcaacuacaacuaccuguaccgccuguuccgcaagagcaaccucaagcccuucgagcgggacaucuccaccgagaucuaccaggccggcagcacccccugcaacgggguggagggcuucaacugcuacuucccccugcaguccuacggguuccagccgaccaacggcgugggguaccagcccuaccggguggucgugcugagcuucgagcuccugcacgcccccgccacggugugcggccccaagaaguccaccaaccuggucaagaacaagugcgugaacuucaacuucaacggccucaccgggaccggcgugcugaccgagagcaacaagaaguuccugccguuccagcaguucgggcgcgacaucgccgacacgaccgacgcgguccgcgacccccagacccuggagauccucgacaucacccccugcagcuucggcgggguguccgugaucacgccgggcaccaacaccagcaaccaggucgccgugcuguaccaggacgugaacugcaccgagguccccguggccauccacgccgaccagcugacgcccaccuggcggguguacuccaccggcagcaacgucuuccagacccgcgccgggugccucaucggcgcggagcacgugaacaacuccuacgagugcgacauccccaucggggccggcaucugcgccagcuaccagacgcagaccaacuccccgcggcgcgcccggagcguggcgucccagagcaucaucgccuacaccaugucccugggcgccgagaacagcgucgccuacuccaacaacagcaucgccauccccaccaacuucacgaucuccgugaccaccgagauccugcccgugagcaugaccaagacgagcgucgacugcaccauguacaucugcggggacuccaccgagugcagcaaccuccugcugcaguacggcuccuucugcacccagcucaaccgcgcgcugacggggaucgccguggagcaggacaagaacacccaggagguguucgcccaggucaagcagaucuacaagacgcccccgaucaaggacuucggcggguucaacuucagccagauccugcccgaccccuccaagcccagcaagcgguccuucaucgaggaccuccuguucaacaaggugacccuggccgacgccggcuucaucaagcaguacggcgacugccucggggacaucagcgcgcgcgaccugaucugcgcccagaaguucaacggccugaccgugcucccgccccugcugaccgacgagaugaucgcccaguacaccuccgcccuccuggccgggaccaucacgagcggcuggaccuucggggcgggcgccgcccugcagauccccuucgccaugcagauggcguaccgguucaacggcaucggggucacccagaacgugcucuacgagaaccagaagcugaucgccaaccaguucaacuccgccaucggcaagauccaggacagccuguccagcaccgccuccgcccucgggaagcugcaggacguggucaaccagaacgcgcaggcccugaacacgcucgugaagcagcugagcuccaacuucggcgccaucagcuccgugcugaacgacauccucagccgccuggacaaggucgaggccgaggugcagaucgaccggcugaucaccgggcgccuccagagccugcagaccuacgugacccagcagcugauccgggccgcggagauccgcgccuccgccaaccucgccgccaccaagaugagcgagugcguccugggccaguccaagcggguggacuucugcggcaagggguaccaccugaugagcuucccccaguccgcgccgcacggcguggucuuccuccacgugacguacguccccgcccaggagaagaacuucaccaccgcccccgccaucugccacgacgggaaggcgcacuucccccgcgagggcguguucgugagcaacgggacccacugguucgucacgcagcggaacuucuacgagccgcagaucaucaccaccgacaacaccuucguguccggcaacugcgacguggucaucggcaucgugaacaacacgguguacgacccccugcagcccgagcuggacagcuucaaggaggagcucgacaaguacuucaagaaccacaccucccccgacgucgaccugggggacaucagcggcaucaacgccuccguggugaacauccagaaggagaucgaccgccugaacgaggucgccaagaaccucaacgagagccugaucgaccugcaggagcucgggaaguacgagcaguacaucaaguggccgugguacaucuggcugggcuucaucgccggccugaucgccaucgugauggugaccaucaugcucugcugcaugaccuccugcugcagcugccugaaggggugcugcuccugcggcagcugcugcaaguucgacgaggacgacuccgagcccguccugaagggggugaagcuccacuacacgugaggacuaguuauaagacugacuagcccgaugggccucccaacgggcccuccuccccuccuugcaccgagauuaauaaaaaaaaaaaaaaaaaaaaaaaaaaaaaaaaaaaaaaaaaaaaaaaaaaaaaaaaaaaaaaaaugcaucccccccccccccccccccccccccccccccaaaggcucuuuucagagccaccagaauu

SEQ ID NO: 12792 - RNA, 4039 nt, Artificial Sequence
  SARS-CoV-2/USA/NY-NYUMC7/2020__EPI_ISL_418192 spike protein mRNA gc (1-1273)
aggagaaagcuuaccauguucguguuccugguccuccugccccuggugagcucccagugcgugaaccucaccacccgcacgcagcugccgcccgccuacaccaacagcuucacccggggcgucuacuaccccgacaagguguuccgcuccagcgugcugcacuccacccaggaccucuuccugcccuucuucagcaacgucacgugguuccacgccauccacguguccgggaccaacggcaccaagcgguucgacaacccggugcugcccuucaacgacggggucuacuucgcgagcaccgagaaguccaacaucauccgcggcuggaucuucgggacgacccucgacagcaagacccagucccugcugaucgugaacaacgccaccaacguggucaucaaggugugcgaguuccaguucugcaacgaccccuuccucggcguguaccaccacaagaacaacaagagcuggauggaguccgaguuccgggucuacagcuccgccaacaacugcacguucgaguacgugagccagcccuuccugauggaccuggagggcaagcaggggaacuucaagaaccuccgcgaguucguguucaagaacaucgacggcuacuucaagaucuacuccaagcacaccccgaucaaccugguccgggaccugccccagggguucagcgcccucgagccccugguggaccugcccaucggcaucaacaucacccgcuuccagacccuccuggcccugcaccgguccuaccucacgccgggggacagcagcuccggcuggaccgcgggcgccgccgccuacuacgugggguaccugcagccccgcaccuuccugcucaaguacaacgagaacggcaccaucacggacgcggucgacugcgcccuggacccccugagcgagaccaagugcacccucaaguccuucaccguggagaaggggaucuaccagacgagcaacuuccgggugcagcccaccgaguccaucguccgcuucccgaacaucaccaaccugugccccuucggcgagguguucaacgccacccgguucgccagcgucuacgccuggaaccgcaagcggaucuccaacugcguggcggacuacagcgugcuguacaacuccgccagcuucuccacguucaagugcuacggcgucagccccaccaagcucaacgaccugugcuucaccaacguguacgccgacuccuucgugauccgcggggacgagguccggcagaucgcccccggccagaccgggaagaucgccgacuacaacuacaagcugccggacgacuucacgggcugcgugaucgcguggaacagcaacaaccucgacuccaaggucgggggcaacuacaacuaccuguaccgccuguuccgcaagagcaaccucaagcccuucgagcgggacaucuccaccgagaucuaccaggccggcagcacccccugcaacgggguggagggcuucaacugcuacuucccccugcaguccuacggguuccagccgaccaacggcgugggguaccagcccuaccggguggucgugcugagcuucgagcuccugcacgcccccgccacggugugcggccccaagaaguccaccaaccuggucaagaacaagugcgugaacuucaacuucaacggccucaccgggaccggcgugcugaccgagagcaacaagaaguuccugccguuccagcaguucgggcgcgacaucgccgacacgaccgacgcgguccgcgacccccagacccuggagauccucgacaucacccccugcagcuucggcgggguguccgugaucacgccgggcaccaacaccagcaaccaggucgccgugcuguaccagggcgugaacugcaccgagguccccguggccauccacgccgaccagcugacgcccaccuggcggguguacuccaccgggagcaacgucuuccagacccgcgccggcugccucaucggggcggagcacgugaacaacuccuacgagugcgacauccccaucggcgccggcaucugcgccagcuaccagacgcagaccaacuccccgcggcgcgcccggagcguggcgucccagagcaucaucgccuacaccaugucccugggggccgagaacagcgucgccuacuccaacaacagcaucgccauccccaccaacuucacgaucuccgugaccaccgagauccugcccgugagcaugaccaagacgagcgucgacugcaccauguacaucugcggcgacuccaccgagugcagcaaccuccugcugcaguacggguccuucugcacccagcucaaccgcgcgcugacgggcaucgccguggagcaggacaagaacacccaggagguguucgcccaggucaagcagaucuacaagacgcccccgaucaaggacuucgggggcuucaacuucagccagauccugcccgaccccuccaagcccagcaagcgguccuucaucgaggaccuccuguucaacaaggugacccuggccgacgccggcuucaucaagcaguacggggacugccucggcgacaucgcggcccgcgaccugaucugcgcccagaaguucaacgggcugaccgugcucccgccccugcugaccgacgagaugaucgcccaguacaccagcgcccuccuggcgggcaccaucacguccggguggaccuucggcgccggcgccgcccugcagauccccuucgcgaugcagauggccuaccgguucaacgggaucggcgucacccagaacgugcucuacgagaaccagaagcugaucgccaaccaguucaacagcgccaucgggaagauccaggacucccugagcuccaccgccagcgcgcucggcaagcugcaggacguggucaaccagaacgcccaggcccugaacacgcucgugaagcagcuguccagcaacuucggggccaucuccagcgugcugaacgacauccucucccgccuggacaaggucgaggccgaggugcagaucgaccggcugaucaccggccgccuccagagccugcagaccuacgugacccagcagcugauccgggcggccgagauccgcgccagcgccaaccucgccgcgaccaagauguccgagugcguccugggccagagcaagcggguggacuucugcgggaagggcuaccaccugauguccuucccccagagcgccccgcacgggguggucuuccuccacgugacguacguccccgcccaggagaagaacuucaccaccgcccccgcgaucugccacgacggcaaggcccacuucccccgcgaggggguguucguguccaacggcacccacugguucgucacgcagcggaacuucuacgagccgcagaucaucaccaccgacaacaccuucgugagcggcaacugcgacguggucaucgggaucgugaacaacacgguguacgacccccugcagcccgagcuggacuccuucaaggaggagcucgacaaguacuucaagaaccacaccagccccgacgucgaccugggcgacaucuccgggaucaacgccagcguggugaacauccagaaggagaucgaccgccugaacgaggucgccaagaaccucaacgagucccugaucgaccugcaggagcucggcaaguacgagcaguacaucaaguggccgugguacaucuggcugggcuucaucgccgggcugaucgcgaucgugauggugaccaucaugcucugcugcaugaccagcugcugcuccugccugaagggcugcugcagcugcggguccugcugcaaguucgacgaggacgacagcgagcccguccugaagggcgugaagcuccacuacacgugaggacuaguuauaagacugacuagcccgaugggccucccaacgggcccuccuccccuccuugcaccgagauuaauaaaaaaaaaaaaaaaaaaaaaaaaaaaaaaaaaaaaaaaaaaaaaaaaaaaaaaaaaaaaaaaaugcaucccccccccccccccccccccccccccccccaaaggcucuuuucagagccaccagaauu

SEQ ID NO: 12793 - RNA, 4039 nt, Artificial Sequence
  SARS-CoV-2/Iceland/189/2020__EPI_ISL_417709 spike protein mRNA gc (1-1273)
aggagaaagcuuaccauguucguguuccugguccuccugccccuggugagcucccagugcgugaaccucaccacccgcacgcagcugccgcccgccuacaccaacagcuucacccggggcgucuacuaccccgacaagguguuccgcuccagcgugcugcacuccacccaggaccucuuccugcccuucuucagcaacgucacgugguuccacgccauccacguguccgggaccaacggcaccaagcgguucgacaacccggugcugcccuucaacgacggggucuacuucgcgagcaccgagaaguccaacaucauccgcggcuggaucuucgggacgacccucgacagcaagacccagucccugcugaucgugaacaacgccaccaacguggucaucaaggugugcgaguuccaguucugcaacgaccccuuccucggcguguacuaccacaagaacaacaagagcuggauggaguccgaguuccgggucuacagcuccgccaacaacugcacguucgaguacgugagccagcccuuccugauggaccuggagggcaagcaggggaacuucaagaaccuccgcgaguucguguucaagaacaucgacggcuacuucaagaucuacuccaagcacaccccgaucaaccugguccgggaccugccccagggguucagcgcccucgagccccugguggaccugcccaucggcaucaacaucacccgcuuccagacccuccuggcccugcaccgguccuaccucacgccgggggacagcagcuccggcuggaccgcgggcgccgccgccuacuacgugggguaccugcagccccgcaccuuccugcucaaguacaacgagaacggcaccaucacggacgcggucgacugcgcccuggacccccugagcgagaccaagugcacccucaaguccuucaccguggagaaggggaucuaccagacgagcaacuuccgggugcagcccaccgaguccaucguccgcuucccgaacaucaccaaccugugccccuucggcgagguguucaacgccacccgguucgccagcgucuacgccuggaaccgcaagcggaucuccaacugcguggcggacuacagcgugcuguacaacuccgccagcuucuccacguucaagugcuacggcgucagccccaccaagcucaacgaccugugcuucaccaacguguacgccgacuccuucgugauccgcggggacgagguccggcagaucgcccccggccagaccgggaagaucgccgacuacaacuacaagcugccggacgacuucacgggcugcgugaucgcguggaacagcaacaaccucgacuccaaggucgggggcaacuacaacuaccuguaccgccuguuccgcaagagcaaccucaagcccuucgagcgggacaucuccaccgagaucuaccaggccggcagcacccccugcaacgggguggagggcuucaacugcuacuucccccugcaguccuacggguuccagccgaccaacggcgugggguaccagcccuaccggguggucgugcugagcuucgagcuccugcacgcccccgccacggugugcggccccaagaaguccaccaaccuggucaagaacaagugcgugaacuucaacuucaacggccucaccgggaccggcgugcugaccgagagcaacaagaaguuccugccguuccagcaguucgggcgcgacaucgccgacacgaccgacgcgguccgcgacccccagacccuggagauccucgacaucacccccugcagcuucggcgggguguccgugaucacgccgggcaccaacaccagcaaccaggucgccgugcuguaccagggcgugaacugcaccgagguccccguggccauccacgccgaccagcugacgcccaccuggcggguguacuccaccgggagcaacgucuuccagacccgcgccggcugccucaucggggcggagcacgugaacaacuccuacgagugcgacauccccaucggcgccggcaucugcgccagcuaccagacgcagaccaacuccccgcggcgcgcccggagcguggcgucccagagcaucaucgccuacaccaugucccugggggccgagaacagcgucgccuacuccaacaacagcaucgccauccccaccaacuucacgaucuccgugaccaccgagauccugcccgugagcaugaccaagacgagcgucgacugcaccauguacaucugcggcgacuccaccgagugcagcaaccuccugcugcaguacggguccuucugcacccagcucaaccgcgcgcugacgggcaucgccguggagcaggacaagaacacccaggagguguucgcccaggucaagcagaucuacaagacgcccccgaucaaggacuucgggggcuucaacuucagccagauccugcccgaccccuccaagcccagcaagcgguccuucaucgaggaccuccuguucaacaaggugacccuggccgacgccggcuucaccaagcaguacggggacugccucggcgacaucgcggcccgcgaccugaucugcgcccagaaguucaacgggcugaccgugcucccgccccugcugaccgacgagaugaucgcccaguacaccagcgcccuccuggcgggcacgaucaccuccggguggaccuucggcgccggcgccgcccugcagauccccuucgcgaugcagauggccuaccgguucaacgggaucggcgucacccagaacgugcucuacgagaaccagaagcugaucgccaaccaguucaacagcgccaucgggaagauccaggacucccugagcuccacggccagcgcgcucggcaagcugcaggacguggucaaccagaacgcccaggcccugaacacccucgugaagcagcuguccagcaacuucggggccaucuccagcgugcugaacgacauccucucccgccuggacaaggucgaggccgaggugcagaucgaccggcugaucaccggccgccuccagagccugcagaccuacgugacccagcagcugauccgggcggccgagauccgcgccagcgccaaccucgccgcgacgaagauguccgagugcguccugggccagagcaagcggguggacuucugcgggaagggcuaccaccugauguccuucccccagagcgccccgcacgggguggucuuccuccacgugaccuacguccccgcccaggagaagaacuucaccaccgcccccgcgaucugccacgacggcaaggcccacuucccccgcgaggggguguucguguccaacggcacgcacugguucgucacccagcggaacuucuacgagccgcagaucaucaccaccgacaacacguucgugagcggcaacugcgacguggucaucgggaucgugaacaacaccguguacgacccccugcagcccgagcuggacuccuucaaggaggagcucgacaaguacuucaagaaccacaccagccccgacgucgaccugggcgacaucuccgggaucaacgccagcguggugaacauccagaaggagaucgaccgccugaacgaggucgccaagaaccucaacgagucccugaucgaccugcaggagcucggcaaguacgagcaguacaucaaguggccgugguacaucuggcugggcuucaucgccgggcugaucgcgaucgugauggugaccaucaugcucugcugcaugacgagcugcugcuccugccugaagggcugcugcagcugcggguccugcugcaaguucgacgaggacgacagcgagcccguccugaagggcgugaagcuccacuacaccugaggacuaguuauaagacugacuagcccgaugggccucccaacgggcccuccuccccuccuugcaccgagauuaauaaaaaaaaaaaaaaaaaaaaaaaaaaaaaaaaaaaaaaaaaaaaaaaaaaaaaaaaaaaaaaaaugcaucccccccccccccccccccccccccccccccaaaggcucuuuucagagccaccagaauu

SEQ ID NO: 12794 - RNA, 4039 nt, Artificial Sequence
  SARS-CoV-2/Australia/NSW56/2020__EPI_ISL_417408 spike protein mRNA gc (1-1273)
aggagaaagcuuaccauguucguguuccugguccuccugccccuggugagcucccagugcgugaaccucaccacccgcacgcagcugccgcccgccuacaccaacagcuucacccggggcgucuacuaccccgacaagguguuccgcuccagcgugcugcacuccacccaggaccucuuccugcccuucuucagcaacgucacgugguuccacgccauccacguguccgggaccaacggcaccaagcgguucgacaacccggugcugcccuucaacgacggggucuacuucgcgagcaccgagaaguccaacaucauccgcggcuggaucuucgggacgacccucgacagcaagacccagucccugcugaucgugaacaacgccaccaacguggucaucaaggugugcgaguuccaguucugcaacgaccccuuccucggcguguacuaccacaagaacaacaagagcuggauggaguccgaguuccgggucuacagcuccgccaacaacugcacguucgaguacgugagccagcccuuccugauggaccuggagggcaagcaggggaacuucaagaaccuccgcgaguucguguucaagaacaucgacggcuacuucaagaucuacuccaagcacaccccgaucaaccugguccgggaccugccccagggguucagcgcccucgagccccugguggaccugcccaucggcaucaacaucacccgcuuccagacccuccuggcccugcaccgguccuaccucacgccgggggacagcagcuccggcuggaccgcgggcgccgccgccuacuacgugggguaccugcagccccgcaccuuccugcucaaguacaacgagaacggcaccaucacggacgcggucgacugcgcccuggacccccugagcgagaccaagugcacccucaaguccuucaccguggagaaggggaucuaccagacgagcaacuuccgggugcagcccaccgaguccaucguccgcuucccgaacaucaccaaccugugccccuucggcgagguguucaacgccacccgguucgccagcgucuacgccuggaaccgcaagcggaucuccaacugcguggcggacuacagcgugcuguacaacuccgccagcuucuccacguucaagugcuacggcgucagccccaccaagcucaacgaccugugcuucaccaacguguacgccgacuccuucgugauccgcggggacgagguccggcagaucgcccccggccagaccgggaagaucgccgacuacaacuacaagcugccggacgacuucacgggcugcgugaucgcguggaacagcaacaaccucgacuccaaggucgggggcaacuacaacuaccuguaccgccuguuccgcaagagcaaccucaagcccuucgagcgggacaucuccaccgagaucuaccaggccggcagcacccccugcaacgggguggagggcuucaacugcuacuucccccugcaguccuacggguuccagccgaccaacggcgugggguaccagcccuaccggguggucgugcugagcuucgagcuccugcacgcccccgccacggugugcggccccaagaaguccaccaaccuggucaagaacaagugcgugaacuucaacuucaacggccucaccgggaccggcgugcugaccgagagcaacaagaaguuccugccguuccagcaguucgggcgcgacaucgccgacacgaccgacgcgguccgcgacccccagacccuggagauccucgacaucacccccugcagcuucggcgggguguccgugaucacgccgggcaccaacaccagcaaccaggucgccgugcuguaccaggacgugaacugcaccgagguccccguggccauccacgccgaccagcugacgcccaccuggcggguguacuccaccggcagcaacgucuuccagacccgcgccgggugccucaucggcgcggagcacgugaacaacuccuacgagugcgacauccccaucggggccggcaucugcgccagcuaccagacgcagaccaacuccccgcggcgcgcccggagcguggcgucccagagcaucaucgccuacaccaugucccugggcgccgagaacagcgucgccuacuccaacaacagcaucgccauccccaccaacuucacgaucuccgugaccaccgagauccugcccgugagcaugaccaagacgagcgucgacugcaccauguacaucugcggggacuccaccgagugcagcaaccuccugcugcaguacggcuccuucugcacccagcucaaccgcgcgcugacggggaucgccguggagcaggacaagaacacccaggagguguucgcccaggucaagcagaucuacaagacgcccccgaucaaggacuucggcggguucaacuucagccagauccugcccgacuccagcaagcccuccaagcggagcuucaucgaggaccuccuguucaacaaggugacccuggccgacgccggcuucaucaagcaguacggcgacugccucggggacaucgcggcccgcgaccugaucugcgcccagaaguucaacggccugaccgugcugcccccgcuccugaccgacgagaugaucgcccaguacaccuccgcccuccuggcggggaccaucacgagcggcuggaccuucggggccggcgccgcccugcagauccccuucgcgaugcagauggccuaccgguucaacggcaucggggucacccagaacgugcucuacgagaaccagaagcugaucgccaaccaguucaacuccgccaucggcaagauccaggacagccuguccagcaccgccuccgcgcucgggaagcugcaggacguggucaaccagaacgcccaggcccugaacacgcucgugaagcagcugagcuccaacuucggcgccaucagcuccgugcugaacgacauccucagccgccuggacaaggucgaggccgaggugcagaucgaccggcugaucaccgggcgccuccagagccugcagaccuacgugacccagcagcugauccgggcggccgagauccgcgccuccgccaaccucgccgcgaccaagaugagcgagugcguccugggccaguccaagcggguggacuucugcggcaagggguaccaccugaugagcuucccccaguccgcgccccacggcguggucuuccuccacgugacguacgucccggcccaggagaagaacuucaccaccgcccccgccaucugccacgacgggaaggcccacuucccccgcgagggcguguucgugagcaacgggacccacugguucgucacgcagcggaacuucuacgagccccagaucaucaccaccgacaacaccuucguguccggcaacugcgacguggucaucggcaucgugaacaacacgguguacgacccgcugcagcccgagcuggacagcuucaaggaggagcucgacaaguacuucaagaaccacaccucccccgacgucgaccugggggacaucagcggcaucaacgccuccguggugaacauccagaaggagaucgaccgccugaacgaggucgccaagaaccucaacgagagccugaucgaccugcaggagcucgggaaguacgagcaguacaucaaguggcccugguacaucuggcugggcuucaucgccggccugaucgcgaucgugauggugaccaucaugcucugcugcaugaccuccugcugcagcugccugaaggggugcugcuccugcggcagcugcugcaaguucgacgaggacgacuccgagccgguccugaagggggugaagcuccacuacacgugaggacuaguuauaagacugacuagcccgaugggccucccaacgggcccuccuccccuccuugcaccgagauuaauaaaaaaaaaaaaaaaaaaaaaaaaaaaaaaaaaaaaaaaaaaaaaaaaaaaaaaaaaaaaaaaaugcaucccccccccccccccccccccccccccccccaaaggcucuuuucagagccaccagaauu

SEQ ID NO: 12795 - RNA, 4039 nt, Artificial Sequence
  SARS-CoV-2/Iceland/280/2020__EPI_ISL_417608 spike protein mRNA gc (1-1273)
aggagaaagcuuaccauguucguguuccugguccuccugccccuggugagcucccagugcgugaaccucaccacccgcacgcagcugccgcccgccuacaccaacagcuucacccggggcgucuacuaccccgacaagguguuccgcuccagcgugcugcacuccacccaggaccucuuccugcccuucuucagcaacgucacgugguuccacgccauccacguguccgggaccaacggcaccaagcgguucgacaacccggugcugcccuucaacgacggggucuacuucgcgagcaccgagaaguccaacaucauccgcggcuggaucuucgggacgacccucgacagcaagacccagucccugcugaucgugaacaacgccaccaacguggucaucaaggugugcgaguuccaguucugcaacgaccccuuccucggcguguacuaccacaagaacaacaagagcuggauggaguccgaguuccgggucuacagcuccgccaacaacugcacguucgaguacgugagccagcccuuccugauggaccuggagggcaagcaggggaacuucaagaaccuccgcgaguucguguucaagaacaucgacggcuacuucaagaucuacuccaagcacaccccgaucaaccugguccgggaccugccccagggguucagcgcccucgagccccugguggaccugcccaucggcaucaacaucacccgcuuccagacccuccuggcccugcaccgguccuaccucacgccgggggacagcagcuccggcuggaccgcgggcgccgccgccuacuacgugggguaccugcagccccgcaccuuccugcucaaguacaacgagaacggcaccaucacggacgcggucgacugcgcccuggacccccugagcgagaccaagugcacccucaaguccuucaccguggagaaggggaucuaccagacgagcaacuuccgggugcagcccaccgaguccaucguccgcuucccgaacaucaccaaccugugccccuucggcgagguguucaacgccacccgguucgccagcgucuacgccuggaaccgcaagcggaucuccaacugcguggcggacuacagcgugcuguacaacuccgccagcuucuccacguucaagugcuacggcgucagccccaccaagcucaacgaccugugcuucaccaacguguacgccgacuccuucgugauccgcggggacgagguccggcagaucgcccccggccagaccgggaagaucgccgacuacaacuacaagcugccggacgacuucacgggcugcgugaucgcguggaacagcaacaaccucgacuccaaggucgggggcaacuacaacuaccuguaccgccuguuccgcaagagcaaccucaagcccuucgagcgggacaucuccaccgagaucuaccaggccggcagcacccccugcaacgggguggagggcuucaacugcuacuucccccugcaguccuacggguuccagccgaccaacggcgugggguaccagcccuaccggguggucgugcugagcuucgagcuccugcacgcccccgccacggugugcggccccaagaaguccaccaaccuggucaagaacaagugcgugaacuucaacuucaacggccucaccgggaccggcgugcugaccgagagcaacaagaaguuccugccguuccagcaguucgggcgcgacaucgccgacacgaccgacgcgguccgcgacccccagacccuggagauccucgacaucacccccugcagcuucggcgggguguccgugaucacgccgggcaccaacaccagcaaccaggucgccgugcuguaccagggcgugaacugcaccgagguccccguggccauccacgccgaccagcugacgcccaccuggcggguguacuccaccgggagcaacgucuuccagacccgcgccggcugccucaucggggcggagcacgugaacaacuccuacgagugcgacauccccaucggcgccggcaucugcgccagcuaccacacgcagaccaacuccccgcggcgcgcccggagcguggcgucccagagcaucaucgccuacaccaugucccugggggccgagaacagcgucgccuacuccaacaacagcaucgccauccccaccaacuucacgaucuccgugaccaccgagauccugcccgugagcaugaccaagacgagcgucgacugcaccauguacaucugcggcgacuccaccgagugcagcaaccuccugcugcaguacggguccuucugcacccagcucaaccgcgcgcugacgggcaucgccguggagcaggacaagaacacccaggagguguucgcccaggucaagcagaucuacaagacgcccccgaucaaggacuucgggggcuucaacuucagccagauccugcccgaccccuccaagcccagcaagcgguccuucaucgaggaccuccuguucaacaaggugacccuggccgacgccggcuucaucaagcaguacggggacugccucggcgacaucgcggcccgcgaccugaucugcgcccagaaguucaacgggcugaccgugcucccgccccugcugaccgacgagaugaucgcccaguacaccagcgcccuccuggcgggcaccaucacguccggguggaccuucggcgccggcgccgcccugcagauccccuucgcgaugcagauggccuaccgguucaacgggaucggcgucacccagaacgugcucuacgagaaccagaagcugaucgccaaccaguucaacagcgccaucgggaagauccaggacucccugagcuccaccgccagcgcgcucggcaagcugcaggacguggucaaccagaacgcccaggcccugaacacgcucgugaagcagcuguccagcaacuucggggccaucuccagcgugcugaacgacauccucucccgccuggacaaggucgaggccgaggugcagaucgaccggcugaucaccggccgccuccagagccugcagaccuacgugacccagcagcugauccgggcggccgagauccgcgccagcgccaaccucgccgcgaccaagauguccgagugcguccugggccagagcaagcggguggacuucugcgggaagggcuaccaccugauguccuucccccagagcgccccgcacgggguggucuuccuccacgugacguacguccccgcccaggagaagaacuucaccaccgcccccgcgaucugccacgacggcaaggcccacuucccccgcgaggggguguucguguccaacggcacccacugguucgucacgcagcggaacuucuacgagccgcagaucaucaccaccgacaacaccuucgugagcggcaacugcgacguggucaucgggaucgugaacaacacgguguacgacccccugcagcccgagcuggacuccuucaaggaggagcucgacaaguacuucaagaaccacaccagccccgacgucgaccugggcgacaucuccgggaucaacgccagcguggugaacauccagaaggagaucgaccgccugaacgaggucgccaagaaccucaacgagucccugaucgaccugcaggagcucggcaaguacgagcaguacaucaaguggccgugguacaucuggcugggcuucaucgccgggcugaucgcgaucgugauggugaccaucaugcucugcugcaugaccagcugcugcuccugccugaagggcugcugcagcugcggguccugcugcaaguucgacgaggacgacagcgagcccguccugaagggcgugaagcuccacuacacgugaggacuaguuauaagacugacuagcccgaugggccucccaacgggcccuccuccccuccuugcaccgagauuaauaaaaaaaaaaaaaaaaaaaaaaaaaaaaaaaaaaaaaaaaaaaaaaaaaaaaaaaaaaaaaaaaugcaucccccccccccccccccccccccccccccccaaaggcucuuuucagagccaccagaauu

SEQ ID NO: 12796 - RNA, 4039 nt, Artificial Sequence
  SARS-CoV-2/Iceland/247/2020__EPI_ISL_417575 spike protein mRNA gc (1-1273)
aggagaaagcuuaccauguucguguuccugguccuccugccccuggugagcucccagugcgugaaccucaccacccgcacgcagcugccgcccgccuacaccaacagcuucacccggggcgucuacuaccccgacaagguguuccgcuccagcgugcugcacuccacccaggaccucuuccugcccuucuucagcaacgucacgugguuccacgccauccacguguccgggaccaacggcaccaagcgguucgacaacccggugcugcccuucaacgacggggucuacuucgcgagcaccgagaaguccaacaucauccgcggcuggaucuucgggacgacccucgacagcaagacccagucccugcugaucgugaacaacgccaccaacguggucaucaaggugugcgaguuccaguucugcaacgaccccuuccucggcguguacuaccacaagaacaacaagagcuggauggaguccgaguuccgggucuacagcuccgccaacaacugcacguucgaguacgugagccagcccuuccugauggaccuggagggcaagcaggggaacuucaagaaccuccgcgaguucguguucaagaacaucgacggcuacuucaagaucuacuccaagcacaccccgaucaaccugguccgggaccugccccagggguucagcgcccucgagccccugguggaccugcccaucggcaucaacaucacccgcuuccagacccuccuggcccugcaccgguccuaccucacgccgggggacagcagcuccggcuggaccgcgggcgccgccgccuacuacgugggguaccugcagccccgcaccuuccugcucaaguacaacgagaacggcaccaucacggacgcggucgacugcgcccuggacccccugagcgagaccaagugcacccucaaguccuucaccguggagaaggggaucuaccagacgagcaacuuccgggugcagcccaccgaguccaucguccgcuucccgaacaucaccaaccugugccccuucggcgagguguucaacgccacccgguucgccagcgucuacgccuggaaccgcaagcggaucuccaacugcguggcggacuacagcgugcuguacaacuccgccagcuucuccacguucaagugcuacggcgucagccccaccaagcucaacgaccugugcuucaccaacguguacgccgacuccuucgugauccgcggggacgagguccggcagaucgcccccggccagaccgggaagaucgccgacuacaacuacaagcugccggacgacuucacgggcugcgugaucgcguggaacagcaacaaccucgacuccaaggucgggggcaacuacaacuaccuguaccgccuguuccgcaagagcaaccucaagcccuucgagcgggacaucuccaccgagaucuaccaggccggcagcacccccugcaacgggguggagggcuucaacugcuacuucccccugcaguccuacggguuccagccgaccaacggcgugggguaccagcccuaccggguggucgugcugagcuucgagcuccugcacgcccccgccacggugugcggccccaagaaguccaccaaccuggucaagaacaagugcgugaacuucaacuucaacggccucaccgggaccggcgugcugaccgagagcaacaagaaguuccugccguuccagcaguucgggcgcgacaucgccgacacgaccgacgcgguccgcgacccccagacccuggagauccucgacaucacccccugcagcuucggcgggguguccgugaucacgccgggcaccaacaccagcaaccaggucgccgugcuguaccagggcgugaacugcaccgagguccccguggccauccacgccgaccagcugacgcccaccuggcggguguacuccaccgggagcaacgucuuccagacccgcgccggcugccucaucggggcggagcacgugaacaacuccuacgagugcgacauccccaucggcgccggcaucugcgccagcuaccagacgcagaccaacuccccgcggcgcgcccggagcguggcgucccagagcaucaucgccuacaccaugucccugggggccgagaacagcgucgccuacuccaacaacagcaucgccauccccaccaacuucacgaucuccgugaccaccgagauccugcccgugagcaugaccaagacgagcgucgacugcaccauguacaucugcggcgacuccaccgagugcagcaaccuccugcugcaguacggguccuucugcacccagcucaaccgcgcgcugacgggcaucgccguggagcaggacaagaacacccaggagguguucgcccaggucaagcagaucuacaagacgcccccgaucaaggacuucgggggcuucaacuucagccagauccugcccgaccccuccaagcccagcaagcgguccuucaucgaggaccuccuguucaacaaggugacccuggccgacgccggcuucaucaagcaguacggggacugccucggcgacaucgcggcccgcgaccugaucugcgcccagaaguucaacgggcugaccgugcucccgccccugcugaccgacgagaugaucgcccaguacaccagcgcccuccuggcgggcaccaucacguccggguggaccuucggcgccggcgccgcccugcagauccccuucgcgaugcagauggccuaccgguucaacgggaucggcgucacccagaacgugcucuacgagaaccagaagcugaucgccaaccaguucaacagcgccaucgggaagauccaggacucccugagcuccaccgccagcgcgcucggcaagcugcaggacguggucaaccagaacgcccaggcccugaacacgcucgugaagcagcuguccagcaacuucggggccaucuccagcgugcugaacgacauccucucccgccuggacaaggucgaggccgaggugcagaucgaccggcugaucaccggccgccuccagagccugcagaccuacgugacccagcagcugauccgggcggccgagauccgcgccagcgccaaccucgccgcgaccaagauguccgagugcguccugggccagagcaagcggguggacuucugcgggaagggcuaccaccugauguccuucccccagagcgccccgcacgggguggucuuccuccacgugacguacguccccgcccaggagaagaacuucaccaccgcccccgcgaucugccacgacggcaaggcccacuucccccgcgaggggguguucguguccaacggcacccacugguucgucacgcagcggaacuucuacgagccgcagaucaucaccaccgacaacaccuucgugagcggcaacugcgacguggucaucgggaucgugaacaacacgguguacgacccccugcagcccgagcuggacuccuucaaggaggagcucgacaaguacuucaagaaccacaccagccccgacgucgaccugggcgacaucuccgggaucaacgccagcguggugaacauccagaaggagaucgaccgccugaacgaggucgccaagaaccucaacgagucccugaucgaccugcaggagcucggcaaguacgagcaguacaucaaguggccgugguacaucuggcugggcuucaucgccgggcugaucgcgaucgugaucgugaccaucaugcucugcugcaugaccagcugcugcuccugccugaagggcugcugcagcugcggguccugcugcaaguucgacgaggacgacagcgagcccguccugaagggcgugaagcuccacuacacgugaggacuaguuauaagacugacuagcccgaugggccucccaacgggcccuccuccccuccuugcaccgagauuaauaaaaaaaaaaaaaaaaaaaaaaaaaaaaaaaaaaaaaaaaaaaaaaaaaaaaaaaaaaaaaaaaugcaucccccccccccccccccccccccccccccccaaaggcucuuuucagagccaccagaauu

SEQ ID NO: 12797 - RNA, 4039 nt, Artificial Sequence
  SARS-CoV-2/Iceland/238/2020__EPI_ISL_417566 spike protein mRNA gc (1-1273)
aggagaaagcuuaccauguucguguuccugguccuccugccccuggugagcucccagugcgugaaccucaccacccgcacgcagcugccgcccgccuacaccaacagcuucacccggggcgucuacuaccccgacaagguguuccgcuccagcgugcugcacuccacccaggaccucuuccugcccuucuucagcaacgucacgugguuccacgccauccacguguccgggaccaacggcaccaagcgguucgacaacccggugcugcccuucaacgacggggucuacuucgcgagcaccgagaaguccaacaucauccgcggcuggaucuucgggacgacccucgacagcaagacccagucccugcugaucgugaacaacgccaccaacguggucaucaaggugugcgaguuccaguucugcaacgaccccuuccucggcguguacuaccacaagaacaacaagagcuggauggaguccgaguuccgggucuacagcuccgccaacaacugcacguucgaguacgugagccagcccuuccugauggaccuggagggcaagcaggggaacuucaagaaccuccgcgaguucguguucaagaacaucgacggcuacuucaagaucuacuccaagcacaccccgaucaaccugguccgggaccugccccagggguucagcgcccucgagccccugguggaccugcccaucggcaucaacaucacccgcuuccagacccuccuggcccugcaccgguccuaccucacgccgggggacagcagcuccggcuggaccgcgggcgccgccgccuacuacgugggguaccugcagccccgcaccuuccugcucaaguacaacgagaacggcaccaucacggacgcggucgacugcgcccuggacccccugagcgagaccaagugcacccucaaguccuucaccguggagaaggggaucuaccagacgagcaacuuccgggugcagcccaccgaguccaucguccgcuucccgaacaucaccaaccugugccccuucggcgagguguucaacgccacccgguucgccagcgucuacgccuggaaccgcaagcggaucuccaacugcguggcggacuacagcgugcuguacaacuccgccagcuucuccacguucaagugcuacggcgucagccccaccaagcucaacgaccugugcuucaccaacguguacgccgacuccuucgugauccgcggggacgagguccggcagaucgcccccggccagaccgggaagaucgccgacuacaacuacaagcugccggacgacuucacgggcugcgugaucgcguggaacagcaacaaccucgacuccaaggucgggggcaacuacaacuaccuguaccgccuguuccgcaagagcaaccucaagcccuucgagcgggacaucuccaccgagaucuaccaggccggcagcacccccugcaacgggguggagggcuucaacugcuacuucccccugcaguccuacggguuccagccgaccaacggcgugggguaccagcccuaccggguggucgugcugagcuucgagcuccugcacgcccccgccacggugugcggccccaagaaguccaccaaccuggucaagaacaagugcgugaacuucaacuucaacggccucaccgggaccggcgugcugaccgagagcaacaagaaguuccugccguuccagcaguucgggcgcgacaucgccgacacgaccgacgcgguccgcgacccccagacccuggagauccucgacaucacccccugcagcuucggcgggguguccgugaucacgccgggcaccaacaccagcaaccaggucgccgugcuguaccagggcgugaacugcaccgagguccccguggccauccacgccgaccagcugacgcccaccuggcggguguacuccaccgggagcaacgucuuccagacccgcgccggcugccucaucggggcggagcacgugaacaacuccuacgagugcgacauccccaucggcgccggcaucugcgccagcuaccagacgcagaccaacuccccgcggcgcgcccggagcguggcgucccagagcaucaucgccuacaccaugucccugggggccgagaacagcgucgccuacuccaacaacagcaucgccauccccaccaacuucacgaucuccgugaccaccgagauccugcccgugagcaugaccaagacgagcgucgacugcaccauguacaucugcggcgacuccaccgagugcagcaaccuccugcugcaguacggguccuucugcacccagcucaaccgcgcgcugacgggcaucgccguggagcaggacaagaacacccaggagguguucgcccaggucaagcagaucuacaagacgcccccgaucaaggacuucgggggcuucaacuucagccagauccugcccgaccccuccaagcccagcaagcgguccuucaucgaggaccuccuguucaacaaggugacccuggccgacgugggcuucaucaagcaguacggggacugccucggcgacaucgccgcgcgcgaccugaucugcgcccagaaguucaacgggcugaccguccucccgccccugcugaccgacgagaugaucgcccaguacaccagcgcccuccuggccggcaccaucacguccggguggaccuucggcgcgggcgccgcccugcagauccccuucgccaugcagauggcguaccgguucaacgggaucggcgugacccagaacgugcucuacgagaaccagaagcugaucgccaaccaguucaacagcgccaucgggaagauccaggacucccugagcuccaccgccagcgcccucggcaagcugcaggacgucgugaaccagaacgcgcaggcccugaacacgcucgugaagcagcuguccagcaacuucggggccaucuccagcguccugaacgacauccucucccgccuggacaagguggaggccgaggugcagaucgaccggcugaucaccggccgccuccagagccugcagaccuacgucacccagcagcugauccgggccgcggagauccgcgccagcgccaaccucgccgccaccaagauguccgagugcgugcugggccagagcaagcggguggacuucugcgggaagggcuaccaccugauguccuucccccagagcgcgccgcacggggucguguuccuccacgucacguacgugcccgcccaggagaagaacuucaccaccgcccccgccaucugccacgacggcaaggcgcacuucccccgcgaggggguguucgucuccaacggcacccacugguucgugacgcagcggaacuucuacgagccgcagaucaucaccaccgacaacaccuucgugagcggcaacugcgacgucgugaucgggaucgugaacaacacggucuacgacccccugcagcccgagcuggacuccuucaaggaggagcucgacaaguacuucaagaaccacaccagccccgacguggaccugggcgacaucuccgggaucaacgccagcguggucaacauccagaaggagaucgaccgccugaacgagguggccaagaaccucaacgagucccugaucgaccugcaggagcucggcaaguacgagcaguacaucaaguggccgugguacaucuggcugggcuucaucgccgggcugaucgccaucgugauggucaccaucaugcucugcugcaugaccagcugcugcuccugccugaagggcugcugcagcugcggguccugcugcaaguucgacgaggacgacagcgagcccgugcugaagggcgugaagcuccacuacacgugaggacuaguuauaagacugacuagcccgaugggccucccaacgggcccuccuccccuccuugcaccgagauuaauaaaaaaaaaaaaaaaaaaaaaaaaaaaaaaaaaaaaaaaaaaaaaaaaaaaaaaaaaaaaaaaaugcaucccccccccccccccccccccccccccccccaaaggcucuuuucagagccaccagaauu

SEQ ID NO: 12798 - RNA, 4039 nt, Artificial Sequence
  SARS-CoV-2/Greece/16/2020__EPI_ISL_418265 spike protein mRNA gc (1-1273)
aggagaaagcuuaccauguucguguuccugguccuccugccccuggugagcucccagugcgugaaccucaccacccgcacgcagcugccgcccgccuacaccaacagcuucacccggggcgucuacuaccccgacaagguguuccgcuccagcgugcugcacuccacccaggaccucuuccugcccuucuucagcaacgucacgugguuccacgccauccacguguccgggaccaacggcaccaagcgguucgacaacccggugcugcccuucaacgacggggucuacuucgcgagcaccgagaaguccaacaucauccgcggcuggaucuucgggacgacccucgacagcaagacccagucccugcugaucgugaacaacgccaccaacguggucaucaaggugugcgaguuccaguucugcaacgaccccuuccucggcguguacuaccacaagaacaacaagagcuggauggaguccgaguuccgggucuacagcuccgccaacaacugcacguucgaguacgugagccagcccuuccugauggaccuggagggcaagcaggggaacuucaagaaccuccgcgaguucguguucaagaacgucgacggcuacuucaagaucuacuccaagcacaccccgaucaaccuggugcgggaccugccccagggguucagcgcccucgagccccugguggaccugcccaucggcaucaacaucacccgcuuccagacccuccuggcccugcaccgguccuaccucacgccgggggacagcagcuccggcuggaccgcgggcgccgccgccuacuacgucggguaccugcagccccgcaccuuccugcucaaguacaacgagaacggcaccaucacggacgcgguggacugcgcccuggacccccugagcgagaccaagugcacccucaaguccuucaccguggagaaggggaucuaccagacgagcaacuuccggguccagcccaccgaguccaucgugcgcuucccgaacaucaccaaccugugccccuucggcgaggucuucaacgccacccgguucgccagcguguacgccuggaaccgcaagcggaucuccaacugcguggcggacuacagcguccuguacaacuccgccagcuucuccacguucaagugcuacggcgugagccccaccaagcucaacgaccugugcuucaccaacguguacgccgacuccuucgucauccgcggggacgaggugcggcagaucgcccccggccagaccgggaagaucgccgacuacaacuacaagcugccggacgacuucacgggcugcgugaucgcguggaacagcaacaaccucgacuccaaggucgggggcaacuacaacuaccuguaccgccuguuccgcaagagcaaccucaagcccuucgagcgggacaucuccaccgagaucuaccaggccggcagcacccccugcaacgggguggagggcuucaacugcuacuucccccugcaguccuacggguuccagccgaccaacggcgugggguaccagcccuaccgggucguggugcugagcuucgagcuccugcacgcccccgccacggucugcggccccaagaaguccaccaaccuggugaagaacaagugcgugaacuucaacuucaacggccucaccgggaccggcguccugaccgagagcaacaagaaguuccugccguuccagcaguucgggcgcgacaucgccgacacgaccgacgcggugcgcgacccccagacccuggagauccucgacaucacccccugcagcuucggcgggguguccgucaucacgccgggcaccaacaccagcaaccagguggccgugcuguaccaggacgucaacugcaccgaggugcccguggccauccacgccgaccagcugacgcccaccuggcgggucuacuccaccggcagcaacguguuccagacccgcgccgggugccucaucggcgcggagcacgugaacaacuccuacgagugcgacauccccaucggggccggcaucugcgccagcuaccagacgcagaccaacuccccgcggcgcgcccggagcgucgcgucccagagcaucaucgccuacaccaugucccugggcgccgagaacagcguggccuacuccaacaacagcaucgccauccccaccaacuucacgaucuccgugaccaccgagauccugcccgucagcaugaccaagacgagcguggacugcaccauguacaucugcggggacuccaccgagugcagcaaccuccugcugcaguacggcuccuucugcacccagcucaaccgcgcgcugacggggaucgccguggagcaggacaagaacacccaggaggucuucgcccaggugaagcagaucuacaagacgcccccgaucaaggacuucggcggguucaacuucagccagauccugcccgaccccuccaagcccagcaagcgguccuucaucgaggaccuccuguucaacaaggugacccuggccgacgccggcuucaucaagcaguacggcgacugccucggggacaucgcggcccgcgaccugaucugcgcccagaaguucaacggccugaccguccucccgccccugcugaccgacgagaugaucgcccaguacaccagcgcccuccuggcggggaccaucacguccggcuggaccuucggggccggcgccgcccugcagauccccuucgcgaugcagauggccuaccgguucaacggcaucggggugacccagaacgugcucuacgagaaccagaagcugaucgccaaccaguucaacagcgccaucggcaagauccaggacucccugagcuccaccgccagcgcgcucgggaagcugcaggacgucgugaaccagaacgcccaggcccugaacacgcucgugaagcagcuguccagcaacuucggcgccaucuccagcguccugaacgacauccucucccgccuggacaagguggaggccgaggugcagaucgaccggcugaucaccgggcgccuccagagccugcagaccuacgucacccagcagcugauccgggcggccgagauccgcgccagcgccaaccucgccgcgaccaagauguccgagugcgugcugggccagagcaagcggguggacuucugcggcaagggguaccaccugauguccuucccccagagcgccccgcacggcgucguguuccuccacgucacguacgugcccgcccaggagaagaacuucaccaccgcccccgcgaucugccacgacgggaaggcccacuucccccgcgagggcguguucgucuccaacgggacccacugguucgugacgcagcggaacuucuacgagccgcagaucaucaccaccgacaacaccuucgugagcggcaacugcgacgucgugaucggcaucgugaacaacacggucuacgacccccugcagcccgagcuggacuccuucaaggaggagcucgacaaguacuucaagaaccacaccagccccgacguggaccugggggacaucuccggcaucaacgccagcguggucaacauccagaaggagaucgaccgccugaacgagguggccaagaaccucaacgagucccugaucgaccugcaggagcucgggaaguacgagcaguacaucaaguggccgugguacaucuggcugggcuucaucgccggccugaucgcgaucgugauggucaccaucaugcucugcugcaugaccagcugcugcuccugccugaaggggugcugcagcugcggcuccugcugcaaguucgacgaggacgacagcgagcccgugcugaagggggugaagcuccacuacacgugaggacuaguuauaagacugacuagcccgaugggccucccaacgggcccuccuccccuccuugcaccgagauuaauaaaaaaaaaaaaaaaaaaaaaaaaaaaaaaaaaaaaaaaaaaaaaaaaaaaaaaaaaaaaaaaaugcaucccccccccccccccccccccccccccccccaaaggcucuuuucagagccaccagaauu

SEQ ID NO: 12799 - RNA, 4039 nt, Artificial Sequence
  SARS-CoV-2/Iceland/319/2020__EPI_ISL_417648 spike protein mRNA gc (1-1273)
aggagaaagcuuaccauguucguguuccugguccuccugccccuggugagcucccagugcgugaaccucaccacccgcacgcagcugccgcccgccuacaccaacagcuucacccggggcgucuacuaccccgacaagguguuccgcuccagcgugcugcacuccacccaggaccucuuccugcccuucuucagcaacgucacgugguuccacgccauccacguguccgggaccaacggcaccaagcgguucgacaacccggugcugcccuucaacgacggggucuacuucgcgagcaccgagaaguccaacaucauccgcggcuggaucuucgggacgacccucgacagcaagacccagucccugcugaucgugaacaacgccaccaacguggucaucaaggugugcgaguuccaguucugcaacgaccccuuccucggcguguacuaccacaagaacaacaagagcuggauggaguccgaguuccgggucuacagcuccgccaacaacugcacguucgaguacgugagccagcccuuccugaucgaccuggagggcaagcaggggaacuucaagaaccuccgcgaguucguguucaagaacaucgacggcuacuucaagaucuacuccaagcacaccccgaucaaccugguccgggaccugccccagggguucagcgcccucgagccccugguggaccugcccaucggcaucaacaucacccgcuuccagacccuccuggcccugcaccgguccuaccucacgccgggggacagcagcuccggcuggaccgcgggcgccgccgccuacuacgugggguaccugcagccccgcaccuuccugcucaaguacaacgagaacggcaccaucacggacgcggucgacugcgcccuggacccccugagcgagaccaagugcacccucaaguccuucaccguggagaaggggaucuaccagacgagcaacuuccgggugcagcccaccgaguccaucguccgcuucccgaacaucaccaaccugugccccuucggcgagguguucaacgccacccgguucgccagcgucuacgccuggaaccgcaagcggaucuccaacugcguggcggacuacagcgugcuguacaacuccgccagcuucuccacguucaagugcuacggcgucagccccaccaagcucaacgaccugugcuucaccaacguguacgccgacuccuucgugauccgcggggacgagguccggcagaucgcccccggccagaccgggaagaucgccgacuacaacuacaagcugccggacgacuucacgggcugcgugaucgcguggaacagcaacaaccucgacuccaaggucgggggcaacuacaacuaccuguaccgccuguuccgcaagagcaaccucaagcccuucgagcgggacaucuccaccgagaucuaccaggccggcagcacccccugcaacgggguggagggcuucaacugcuacuucccccugcaguccuacggguuccagccgaccaacggcgugggguaccagcccuaccggguggucgugcugagcuucgagcuccugcacgcccccgccacggugugcggccccaagaaguccaccaaccuggucaagaacaagugcgugaacuucaacuucaacggccucaccgggaccggcgugcugaccgagagcaacaagaaguuccugccguuccagcaguucgggcgcgacaucgccgacacgaccgacgcgguccgcgacccccagacccuggagauccucgacaucacccccugcagcuucggcgggguguccgugaucacgccgggcaccaacaccagcaaccaggucgccgugcuguaccagggcgugaacugcaccgagguccccguggccauccacgccgaccagcugacgcccaccuggcggguguacuccaccgggagcaacgucuuccagacccgcgccggcugccucaucggggcggagcacgugaacaacuccuacgagugcgacauccccaucggcgccggcaucugcgccagcuaccagacgcagaccaacuccccgcggcgcgcccggagcguggcgucccagagcaucaucgccuacaccaugucccugggggccgagaacagcgucgccuacuccaacaacagcaucgccauccccaccaacuucacgaucuccgugaccaccgagauccugcccgugagcaugaccaagacgagcgucgacugcaccauguacaucugcggcgacuccaccgagugcagcaaccuccugcugcaguacggguccuucugcacccagcucaaccgcgcgcugacgggcaucgccguggagcaggacaagaacacccaggagguguucgcccaggucaagcagaucuacaagacgcccccgaucaaggacuucgggggcuucaacuucagccagauccugcccgaccccuccaagcccagcaagcgguccuucaucgaggaccuccuguucaacaaggugacccuggccgacgccggcuucaucaagcaguacggggacugccucggcgacaucgcggcccgcgaccugaucugcgcccagaaguucaacgggcugaccgugcucccgccccugcugaccgacgagaugaucgcccaguacaccagcgcccuccuggcgggcaccaucacguccggguggaccuucggcgccggcgccgcccugcagauccccuucgcgaugcagauggccuaccgguucaacgggaucggcgucacccagaacgugcucuacgagaaccagaagcugaucgccaaccaguucaacagcgccaucgggaagauccaggacucccugagcuccaccgccagcgcgcucggcaagcugcaggacguggucaaccagaacgcccaggcccugaacacgcucgugaagcagcuguccagcaacuucggggccaucuccagcgugcugaacgacauccucucccgccuggacaaggucgaggccgaggugcagaucgaccggcugaucaccggccgccuccagagccugcagaccuacgugacccagcagcugauccgggcggccgagauccgcgccagcgccaaccucgccgcgaccaagauguccgagugcguccugggccagagcaagcggguggacuucugcgggaagggcuaccaccugauguccuucccccagagcgccccgcacgggguggucuuccuccacgugacguacguccccgcccaggagaagaacuucaccaccgcccccgcgaucugccacgacggcaaggcccacuucccccgcgaggggguguucguguccaacggcacccacugguucgucacgcagcggaacuucuacgagccgcagaucaucaccaccgacaacaccuucgugagcggcaacugcgacguggucaucgggaucgugaacaacacgguguacgacccccugcagcccgagcuggacuccuucaaggaggagcucgacaaguacuucaagaaccacaccagccccgacgucgaccugggcgacaucuccgggaucaacgccagcguggugaacauccagaaggagaucgaccgccugaacgaggucgccaagaaccucaacgagucccugaucgaccugcaggagcucggcaaguacgagcaguacaucaaguggccgugguacaucuggcugggcuucaucgccgggcugaucgcgaucgugauggugaccaucaugcucugcugcaugaccagcugcugcuccugccugaagggcugcugcagcugcggguccugcugcaaguucgacgaggacgacagcgagcccguccugaagggcgugaagcuccacuacacgugaggacuaguuauaagacugacuagcccgaugggccucccaacgggcccuccuccccuccuugcaccgagauuaauaaaaaaaaaaaaaaaaaaaaaaaaaaaaaaaaaaaaaaaaaaaaaaaaaaaaaaaaaaaaaaaaugcaucccccccccccccccccccccccccccccccaaaggcucuuuucagagccaccagaauu

SEQ ID NO: 12800 - RNA, 4039 nt, Artificial Sequence
  SARS-CoV-2/Congo/94/2020__EPI_ISL_417947 spike protein mRNA gc (1-1273)
aggagaaagcuuaccauguucguguuccugguccuccugccccuggugagcucccagugcgugaaccucaccacccgcacgcagcugccgcccgccuacaccaacagcuucacccggggcgucuacuaccccgacaagguguuccgcuccagcgugcugcacuccacccaggaccucuuccugcccuucuucagcaacgucacgugguuccacgccauccacguguccgggaccaacggcaccaagcgguucgacaacccggugcugcccuucaacgacggggucuacuucgcgagcaccgagaaguccaacaucauccgcggcuggaucuucgggacgacccucgacagcaagacccagucccugcugaucgugaacaacgccaccaacguggucaucaaggugugcgaguuccaguucugcaacgaccccuuccucggcguguacuaccacaagaacaacaagagcuggauggaguccgaguuccgggucuacagcuccgccaacaacugcacguucgaguacgugagccagcccuuccugauggaccuggagggcaagcaggggaacuucaagaaccuccgcgaguucguguucaagaacaucgacggcuacuucaagaucuacuccaagcacaccccgaucaaccugguccgggaccugccccagggguucagcgcccucgagccccugguggaccugcccaucggcaucaacaucacccgcuuccagacccuccuggcccugcaccgguccuaccucacgccgggggacagcagcuccggcuggaccgcgggcgccgccgccuacuacgugggguaccugcagccccgcaccuuccugcucaaguacaacgagaacggcaccaucacggacgcggucgacugcgcccuggacccccugagcgagaccaagugcacccucaaguccuucaccguggagaaggggaucuaccagacgagcaacuuccgggugcagcccaccgaguccaucguccgcuucccgaacaucaccaaccugugccccuucggcgagguguucaacgccacccgguucgccagcgucuacgccuggaaccgcaagcggaucuccaacugcguggcggacuacagcgugcuguacaacuccgccagcuucuccacguucaagugcuacggcgucagccccaccaagcucaacgaccugugcuucaccaacguguacgccgacuccuucgugauccgcggggacgagguccggcagaucgcccccggccagaccgggaagaucgccgacuacaacuacaagcugccggacgacuucacgggcugcgugaucgcguggaacagcaacaaccucgacuccaaggucgggggcaacuacaacuaccuguaccgccuguuccgcaagagcaaccucaagcccuucgagcgggacaucuccaccgagaucuaccaggccggcagcacccccugcaacgggguggagggcuucaacugcuacuucccccugcaguccuacggguuccagccgaccaacggcgugggguaccagcccuaccggguggucgugcugagcuucgagcuccugcacgcccccgccacggugugcggccccaagaaguccaccaaccuggucaagaacaagugcgugaacuucaacuucaacggccucaccgggaccggcgugcugaccgagagcaacaagaaguuccugccguuccagcaguucgggcgcgacaucgccgacacgaccgacgcgguccgcgacccccagacccuggagauccucgacaucacccccugcagcuucggcgggguguccgugaucacgccgggcaccaacaccagcaaccaggucgccgugcuguaccagggcgugaacugcaccgagguccccguggccauccacgccgaccagcugacgcccaccuggcggguguacuccaccgggagcaacgucuuccagacccgcgccggcugccucaucggggcggagcacgugaacaacuccuacgagugcgacauccccaucggcgccggcaucugcgccagcuaccagacgcagaccaacuccccgcggcgcgcccggagcguggcgucccagagcaucaucgccuacaccaugucccugggggccgagaacagcgucgccuacuccaacaacagcaucgccauccccaccaacuucacgaucuccgugaccaccgagauccugcccgugagcaugaccaagacgagcgucgacugcaccauguacaucugcggcgacuccaccgagugcagcaaccuccugcugcaguacggguccuucugcacccagcucaaccgcgcgcugacgggcaucgccguggagcaggacaagaacacccaggagguguucgcccaggucaagcagaucuacaagacgcccccgaucaaggacuucgggggcuucaacuucagccagauccugcccgaccccuccaagcccagcaagcgguccuucaucgaggacauccucuucaacaaggugacccuggccgacgccggcuucaucaagcaguacggggacugccugggcgacaucgcggcccgcgaccucaucugcgcccagaaguucaacgggcugaccgugcugccgccccuccugaccgacgagaugaucgcccaguacaccagcgcccugcucgcgggcaccaucacguccggguggaccuucggcgccggcgccgcccugcagauccccuucgcgaugcagauggccuaccgguucaacgggaucggcgucacccagaacgugcuguacgagaaccagaagcucaucgccaaccaguucaacagcgccaucgggaagauccaggacucccugagcuccaccgccagcgcgcugggcaagcuccaggacguggucaaccagaacgcccaggcccugaacacgcuggugaagcagcucuccagcaacuucggggccaucuccagcgugcugaacgacauccugucccgccucgacaaggucgaggccgaggugcagaucgaccggcugaucaccggccgccugcagagccuccagaccuacgugacccagcagcugauccgggcggccgagauccgcgccagcgccaaccuggccgcgaccaagauguccgagugcguccucggccagagcaagcggguggacuucugcgggaagggcuaccaccugauguccuucccccagagcgccccgcacgggguggucuuccugcacgugacguacguccccgcccaggagaagaacuucaccaccgcccccgcgaucugccacgacggcaaggcccacuucccccgcgaggggguguucguguccaacggcacccacugguucgucacgcagcggaacuucuacgagccgcagaucaucaccaccgacaacaccuucgugagcggcaacugcgacguggucaucgggaucgugaacaacacgguguacgacccccuccagcccgagcuggacuccuucaaggaggagcuggacaaguacuucaagaaccacaccagccccgacgucgaccucggcgacaucuccgggaucaacgccagcguggugaacauccagaaggagaucgaccgccugaacgaggucgccaagaaccugaacgagucccucaucgaccugcaggagcugggcaaguacgagcaguacaucaaguggccgugguacaucuggcucggcuucaucgccgggcugaucgcgaucgugauggugaccaucaugcugugcugcaugaccagcugcugcuccugccucaagggcugcugcagcugcggguccugcugcaaguucgacgaggacgacagcgagcccguccugaagggcgugaagcugcacuacacgugaggacuaguuauaagacugacuagcccgaugggccucccaacgggcccuccuccccuccuugcaccgagauuaauaaaaaaaaaaaaaaaaaaaaaaaaaaaaaaaaaaaaaaaaaaaaaaaaaaaaaaaaaaaaaaaaugcaucccccccccccccccccccccccccccccccaaaggcucuuuucagagccaccagaauu

SEQ ID NO: 12801 - RNA, 4039 nt, Artificial Sequence
  SARS-CoV-2/Congo/158/2020__EPI_ISL_417950 spike protein mRNA gc (1-1273)
aggagaaagcuuaccauguucguguuccugguccuccugccccuggugagcucccagugcgugaaccucaccacccgcacgcagcugccgcccgccuacaccaacagcuucacccggggcgucuacuaccccgacaagguguuccgcuccagcgugcugcacuccacccaggaccucuuccugcccuucuucagcaacgucacgugguuccacgccauccacguguccgggaccaacggcaccaagcgguucgacaacccggugcugcccuucaacgacggggucuacuucgcgagcaccgagaaguccaacaucauccgcggcuggaucuucgggacgacccucgacagcaagacccagucccugcugaucgugaacaacgccaccaacguggucaucaaggugugcgaguuccaguucugcaacgaccccuuccucggcguguacuaccacaagaacaacaagagcuggauggaguccgaguuccgggucuacagcuccgccaacaacugcacguucgaguacgugagccagcccuuccugauggaccuggagggcaagcaggggaacuucaagaaccuccgcgaguucguguucaagaacaucgacggcuacuucaagaucuacuccaagcacaccccgaucaaccugguccgggaccugccccagggguucagcgcccucgagccccugguggaccugcccaucggcaucaacaucacccgcuuccagacccuccuggcccugcaccgguccuaccucacgccgggggacagcagcuccggcuggaccgcgggcgccgccgccuacuacgugggguaccugcagccccgcaccuuccugcucaaguacaacgagaacggcaccaucacggacgcggucgacugcgcccuggacccccugagcgagaccaagugcacccucaaguccuucaccguggagaaggggaucuaccagacgagcaacuuccgggugcagcccaccgaguccaucguccgcuucccgaacaucaccaaccugugccccuucggcgagguguucaacgccacccgguucgccagcgucuacgccuggaaccgcaagcggaucuccaacugcguggcggacuacagcgugcuguacaacuccgccagcuucuccacguucaagugcuacggcgucagccccaccaagcucaacgaccugugcuucaccaacguguacgccgacuccuucgugauccgcggggacgagguccggcagaucgcccccggccagaccgggaagaucgccgacuacaacuacaagcugccggacgacuucacgggcugcgugaucgcguggaacagcaacaaccucgacuccaaggucgggggcaacuacaacuaccuguaccgccuguuccgcaagagcaaccucaagcccuucgagcgggacaucuccaccgagaucuaccaggccggcagcacccccugcaacgggguggagggcuucaacugcuacuucccccugcaguccuacggguuccagccgaccaacggcgugggguaccagcccuaccggguggucgugcugagcuucgagcuccugcacgcccccgccacggugugcggccccaagaaguccaccaaccuggucaagaacaagugcgugaacuucaacuucaacggccucaccgggaccggcgugcugaccgagagcaacaagaaguuccugccguuccagcaguucgggcgcgacaucgccgacacgaccgacgcgguccgcgacccccagacccuggagauccucgacaucacccccugcagcuucggcgggguguccgugaucacgccgggcaccaacaccagcaaccaggucgccgugcuguaccaggacgugaacugcaccgagguccccguggccauccacgccgaccagcugacgcccaccuggcggguguacuccaccggcagcaacgucuuccagacccgcgccgggugccucaucggcgcggagcacgugaacaacuccuacgagugcgacauccccaucggggccggcaucugcgccagcuaccagacgcagaccaacuccccgcggcgcgcccggagcguggcgucccagagcaucaucgccuacaccaugucccugggcgccgagaacagcgucgccuacuccaacaacagcaucgccauccccaccaacuucacgaucuccgugaccaccgagauccugcccgugagcaugaccaagacgagcgucgacugcaccauguacaucugcggggacuccaccgagugcagcaaccuccugcugcaguacggcuccuucugcacccagcucaaccgcgcgcugacggggaucgccguggagcaggacaagaacacccaggagguguucgcccaggucaagcagaucuacaagacgcccccgaucaaggacuucggcggguucaacuucagccagauccugcccgaccccuccaagcccagcaagcgguccuucaucgaggaccuccuguucaacaaggugacccuggccgacgccggcuucaucaagcaguacggcgacugccucggggacaucgcggcccgcgaccugaucugcgcccagaaguucaacggccugaccgugcucccgccccugcugaccgacgagaugaucgcccaguacaccagcgcccuccuggcggggaccaucacguccggcuggaccuucggggccggcgccgcccugcagauccccuucgcgaugcagauggccuaccgguucaacggcaucggggucacccagaacgugcucuacgagaaccagaagcugaucgccaaccaguucaacagcgccaucggcaagauccaggacucccugagcuccaccgccagcgcgcucgggaagcugcaggacguggucaaccagaacgcccaggcccugaacacgcucgugaagcagcuguccagcaacuucggcgccaucuccagcgugcugaacgacauccucucccgccuggacaaggucgaggccgaggugcagaucgaccggcugaucaccgggcgccuccagagccugcagaccuacgugacccagcagcugauccgggcggccgagauccgcgccagcgccaaccucgccgcgaccaagauguccgagugcguccugggccagagcaagcggguggacuucugcggcaagggguaccaccugauguccuucccccagagcgccccgcacggcguggucuuccuccacgugacguacguccccgcccaggagaagaacuucaccaccgcccccgcgaucugccacgacgggaaggcccacuucccccgcgagggcguguucguguccaacgggacccacugguucgucacgcagcggaacuucuacgagccgcagaucaucaccaccgacaacaccuuccugagcggcaacugcgacguggugaucggcaucgucaacaacacgguguacgacccccugcagcccgagcucgacuccuucaaggaggagcuggacaaguacuucaagaaccacaccagccccgacguggaccugggggacaucuccggcaucaacgccagcgucgugaacauccagaaggagaucgaccgccucaacgagguggccaagaaccugaacgagucccugaucgaccuccaggagcuggggaaguacgagcaguacaucaaguggccgugguacaucuggcugggcuucaucgccggccucaucgcgaucgucauggugaccaucaugcugugcugcaugaccagcugcugcuccugccugaaggggugcugcagcugcggcuccugcugcaaguucgacgaggacgacagcgagcccgugcucaagggggucaagcugcacuacacgugaggacuaguuauaagacugacuagcccgaugggccucccaacgggcccuccuccccuccuugcaccgagauuaauaaaaaaaaaaaaaaaaaaaaaaaaaaaaaaaaaaaaaaaaaaaaaaaaaaaaaaaaaaaaaaaaugcaucccccccccccccccccccccccccccccccaaaggcucuuuucagagccaccagaauu

SEQ ID NO: 12802 - RNA, 4039 nt, Artificial Sequence
  SARS-CoV-2/USA/UT-00034/2020__EPI_ISL_417977 spike protein mRNA gc (1-1273)
aggagaaagcuuaccauguucguguuccugguccuccugccccuggugagcucccagugcgugaaccucaccacccgcacgcagcugccgcccgccuacaccaacagcuucacccggggcgucuacuaccccgacaagguguuccgcuccagcgugcugcacuccacccaggaccucuuccugcccuucuucagcaacgucacgugguuccacgccauccacguguccgggaccaacggcaccaagcgguucgacaacccggugcugcccuucaacgacggggucuacuucgcgagcaccgagaaguccaacaucauccgcggcuggaucuucgggacgacccucgacagcaagacccagucccugcugaucgugaacaacgccaccaacguggucaucaaggugugcgaguuccaguucugcaacgaccccuuccucggcguguacuacuacaagaacaacaagagcuggauggaguccgaguuccgggucuacagcuccgccaacaacugcacguucgaguacgugagccagcccuuccugauggaccuggagggcaagcaggggaacuucaagaaccuccgcgaguucguguucaagaacaucgacggcuacuucaagaucuacuccaagcacaccccgaucaaccugguccgggaccugccccagggguucagcgcccucgagccccugguggaccugcccaucggcaucaacaucacccgcuuccagacccuccuggcccugcaccgguccuaccucacgccgggggacagcagcuccggcuggaccgcgggcgccgccgccuacuacgugggguaccugcagccccgcaccuuccugcucaaguacaacgagaacggcaccaucacggacgcggucgacugcgcccuggacccccugagcgagaccaagugcacccucaaguccuucaccguggagaaggggaucuaccagacgagcaacuuccgggugcagcccaccgaguccaucguccgcuucccgaacaucaccaaccugugccccuucggcgagguguucaacgccacccgguucgccagcgucuacgccuggaaccgcaagcggaucuccaacugcguggcggacuacagcgugcuguacaacuccgccagcuucuccacguucaagugcuacggcgucagccccaccaagcucaacgaccugugcuucaccaacguguacgccgacuccuucgugauccgcggggacgagguccggcagaucgcccccggccagaccgggaagaucgccgacuacaacuacaagcugccggacgacuucacgggcugcgugaucgcguggaacagcaacaaccucgacuccaaggucgggggcaacuacaacuaccuguaccgccuguuccgcaagagcaaccucaagcccuucgagcgggacaucuccaccgagaucuaccaggccggcagcacccccugcaacgggguggagggcuucaacugcuacuucccccugcaguccuacggguuccagccgaccaacggcgugggguaccagcccuaccggguggucgugcugagcuucgagcuccugcacgcccccgccacggugugcggccccaagaaguccaccaaccuggucaagaacaagugcgugaacuucaacuucaacggccucaccgggaccggcgugcugaccgagagcaacaagaaguuccugccguuccagcaguucgggcgcgacaucgccgacacgaccgacgcgguccgcgacccccagacccuggagauccucgacaucacccccugcagcuucggcgggguguccgugaucacgccgggcaccaacaccagcaaccaggucgccgugcuguaccagggcgugaacugcaccgagguccccguggccauccacgccgaccagcugacgcccaccuggcggguguacuccaccgggagcaacgucuuccagacccgcgccggcugccucaucggggcggagcacgugaacaacuccuacgagugcgacauccccaucggcgccggcaucugcgccagcuaccagacgcagaccaacuccccgcggcgcgcccggagcguggcgucccagagcaucaucgccuacaccaugucccugggggccgagaacagcgucgccuacuccaacaacagcaucgccauccccaccaacuucacgaucuccgugaccaccgagauccugcccgugagcaugaccaagacgagcgucgacugcaccauguacaucugcggcgacuccaccgagugcagcaaccuccugcugcaguacggguccuucugcacccagcucaaccgcgcgcugacgggcaucgccguggagcaggacaagaacacccaggagguguucgcccaggucaagcagaucuacaagacgcccccgaucaaggacuucgggggcuucaacuucagccagauccugcccgaccccuccaagcccagcaagcgguccuucaucgaggaccuccuguucaacaaggugacccuggccgacgccggcuucaucaagcaguacggggacugccucggcgacaucgcggcccgcgaccugaucugcgcccagaaguucaacgggcugaccgugcucccgccccugcugaccgacgagaugaucgcccaguacaccagcgcccuccuggcgggcaccaucacguccggguggaccuucggcgccggcgccgcccugcagauccccuucgcgaugcagauggccuaccgguucaacgggaucggcgucacccagaacgugcucuacgagaaccagaagcugaucgccaaccaguucaacagcgccaucgggaagauccaggacucccugagcuccaccgccagcgcgcucggcaagcugcaggacguggucaaccagaacgcccaggcccugaacacgcucgugaagcagcuguccagcaacuucggggccaucuccagcgugcugaacgacauccucucccgccuggacaaggucgaggccgaggugcagaucgaccggcugaucaccggccgccuccagagccugcagaccuacgugacccagcagcugauccgggcggccgagauccgcgccagcgccaaccucgccgcgaccaagauguccgagugcguccugggccagagcaagcggguggacuucugcgggaagggcuaccaccugauguccuucccccagagcgccccgcacgggguggucuuccuccacgugacguacguccccgcccaggagaagaacuucaccaccgcccccgcgaucugccacgacggcaaggcccacuucccccgcgaggggguguucguguccaacggcacccacugguucgucacgcagcggaacuucuacgagccgcagaucaucaccaccgacaacaccuucgugagcggcaacugcgacguggucaucgggaucgugaacaacacgguguacgacccccugcagcccgagcuggacuccuucaaggaggagcucgacaaguacuucaagaaccacaccagccccgacgucgaccugggcgacaucuccgggaucaacgccagcguggugaacauccagaaggagaucgaccgccugaacgaggucgccaagaaccucaacgagucccugaucgaccugcaggagcucggcaaguacgagcaguacaucaaguggccgugguacaucuggcugggcuucaucgccgggcugaucgcgaucgugauggugaccaucaugcucugcugcaugaccagcugcugcuccugccugaagggcugcugcagcugcggguccugcugcaaguucgacgaggacgacagcgagcccguccugaagggcgugaagcuccacuacacgugaggacuaguuauaagacugacuagcccgaugggccucccaacgggcccuccuccccuccuugcaccgagauuaauaaaaaaaaaaaaaaaaaaaaaaaaaaaaaaaaaaaaaaaaaaaaaaaaaaaaaaaaaaaaaaaaugcaucccccccccccccccccccccccccccccccaaaggcucuuuucagagccaccagaauu

SEQ ID NO: 12803 - RNA, 4039 nt, Artificial Sequence
  SARS-CoV-2/USA/UT-00033/2020__EPI_ISL_417976 spike protein mRNA gc (1-1273)
aggagaaagcuuaccauguucguguuccugguccuccugccccuggugagcucccagugcgugaaccucaccacccgcacgcagcugccgcccgccuacaccaacagcuucacccggggcgucuacuaccccgacaagguguuccgcuccagcgugcugcacuccacccaggaccucuuccugcccuucuucagcaacgucacgugguuccacgccauccacguguccgggaccaacggcaccaagcgguucgacaacccggugcugcccuucaacgacggggucuacuucgcgagcaccgagaaguccaacaucauccgcggcuggaucuucgggacgacccucgacagcaagacccagucccugcugaucgugaacaacgccaccaacguggucaucaaggugugcgaguuccaguucugcaacgaccccuuccucggcguguacuaccacaagaacaacaagagcuggauggaguccgaguuccgggucuacagcuccgccaacaacugcacguucgaguacgugagccagcccuuccugauggaccuggagggcaagcaggggaacuucaagaaccuccgcgaguucguguucaagaacaucgacggcuacuucaagaucuacuccaagcacaccccgaucaaccugguccgggaccugccccagggguucagcgcccucgagccccugguggaccugcccaucggcaucaacaucacccgcuuccagacccuccuggcccugcaccgguccuaccucacgccgggggacagcagcuccggccugaccgcgggcgccgccgccuacuacgugggguaccugcagccccgcaccuuccuccugaaguacaacgagaacggcaccaucacggacgcggucgacugcgcccuggacccccucagcgagaccaagugcacccugaaguccuucaccguggagaaggggaucuaccagacgagcaacuuccgggugcagcccaccgaguccaucguccgcuucccgaacaucaccaaccugugccccuucggcgagguguucaacgccacccgguucgccagcgucuacgccuggaaccgcaagcggaucuccaacugcguggcggacuacagcgugcucuacaacuccgccagcuucuccacguucaagugcuacggcgucagccccaccaagcugaacgaccugugcuucaccaacguguacgccgacuccuucgugauccgcggggacgagguccggcagaucgcccccggccagaccgggaagaucgccgacuacaacuacaagcucccggacgacuucacgggcugcgugaucgcguggaacagcaacaaccuggacuccaaggucgggggcaacuacaacuaccuguaccgccucuuccgcaagagcaaccugaagcccuucgagcgggacaucuccaccgagaucuaccaggccggcagcacccccugcaacgggguggagggcuucaacugcuacuucccccugcaguccuacggguuccagccgaccaacggcgugggguaccagcccuaccggguggucgugcucagcuucgagcugcugcacgcccccgccacggugugcggccccaagaaguccaccaaccucgucaagaacaagugcgugaacuucaacuucaacggccugaccgggaccggcgugcugaccgagagcaacaagaaguuccugccguuccagcaguucgggcgcgacaucgccgacacgaccgacgcgguccgcgacccccagacccucgagauccuggacaucacccccugcagcuucggcgggguguccgugaucacgccgggcaccaacaccagcaaccaggucgccgugcuguaccagggcgugaacugcaccgagguccccguggccauccacgccgaccagcucacgcccaccuggcggguguacuccaccgggagcaacgucuuccagacccgcgccggcugccugaucggggcggagcacgugaacaacuccuacgagugcgacauccccaucggcgccggcaucugcgccagcuaccagacgcagaccaacuccccgcggcgcgcccggagcguggcgucccagagcaucaucgccuacaccaugucccugggggccgagaacagcgucgccuacuccaacaacagcaucgccauccccaccaacuucacgaucuccgugaccaccgagauccuccccgugagcaugaccaagacgagcgucgacugcaccauguacaucugcggcgacuccaccgagugcagcaaccugcugcuccaguacggguccuucugcacccagcugaaccgcgcgcugacgggcaucgccguggagcaggacaagaacacccaggagguguucgcccaggucaagcagaucuacaagacgcccccgaucaaggacuucgggggcuucaacuucagccagauccuccccgaccccuccaagcccagcaagcgguccuucaucgaggaccugcuguucaacaaggugacccucgccgacgccggcuucaucaagcaguacggggacugccugggcgacaucgcggcccgcgaccugaucugcgcccagaaguucaacgggcucaccgugcugccgccccugcucaccgacgagaugaucgcccaguacaccagcgcccugcuggcgggcaccaucacguccggguggaccuucggcgccggcgccgcccuccagauccccuucgcgaugcagauggccuaccgguucaacgggaucggcgucacccagaacgugcuguacgagaaccagaagcugaucgccaaccaguucaacagcgccaucgggaagauccaggacucccucagcuccaccgccagcgcgcugggcaagcugcaggacguggucaaccagaacgcccaggcccucaacacgcuggugaagcagcuguccagcaacuucggggccaucuccagcgugcucaacgacauccugucccgccuggacaaggucgaggccgaggugcagaucgaccggcucaucaccggccgccugcagagccugcagaccuacgugacccagcagcucauccgggcggccgagauccgcgccagcgccaaccuggccgcgaccaagauguccgagugcguccugggccagagcaagcggguggacuucugcgggaagggcuaccaccucauguccuucccccagagcgccccgcacgggguggucuuccugcacgugacguacguccccgcccaggagaagaacuucaccaccgcccccgcgaucugccacgacggcaaggcccacuucccccgcgaggggguguucguguccaacggcacccacugguucgucacgcagcggaacuucuacgagccgcagaucaucaccaccgacaacaccuucgugagcggcaacugcgacguggucaucgggaucgugaacaacacgguguacgacccccugcagcccgagcucgacuccuucaaggaggagcuggacaaguacuucaagaaccacaccagccccgacgucgaccugggcgacaucuccgggaucaacgccagcguggugaacauccagaaggagaucgaccgccucaacgaggucgccaagaaccugaacgagucccugaucgaccuccaggagcugggcaaguacgagcaguacaucaaguggccgugguacaucuggcugggcuucaucgccgggcucaucgcgaucgugauggugaccaucaugcugugcugcaugaccagcugcugcuccugccugaagggcugcugcagcugcggguccugcugcaaguucgacgaggacgacagcgagcccguccucaagggcgugaagcugcacuacacgugaggacuaguuauaagacugacuagcccgaugggccucccaacgggcccuccuccccuccuugcaccgagauuaauaaaaaaaaaaaaaaaaaaaaaaaaaaaaaaaaaaaaaaaaaaaaaaaaaaaaaaaaaaaaaaaaugcaucccccccccccccccccccccccccccccccaaaggcucuuuucagagccaccagaauu

SEQ ID NO: 12804 - RNA, 4039 nt, Artificial Sequence
  SARS-CoV-2/USA/WI-13/2020__EPI_ISL_417516 spike protein mRNA gc (1-1273)
aggagaaagcuuaccauguucguguuccugguccuccugccccuggugagcucccagugcgugaaccucaccacccgcacgcagcugccgcccgccuacaccaacagcuucacccggggcgucuacuaccccgacaagguguuccgcuccagcgugcugcacuccacccaggaccucuuccugcccuucuucagcaacgucacgugguuccacgccauccacguguccgggaccaacggcaccaagcgguucgacaacccggugcugcccuucaacgacggggucuacuucgcgagcaccgagaaguccaacaucauccgcggcuggaucuucgggacgacccucgacagcaagacccagucccugcugaucgugaacaacgccaccaacguggucaucaaggugugcgaguuccaguucugcaacgaccccuuccucggcguguacuaccacaagaacaacaagagcuggauggaguccgaguuccgggucuacagcuccgccaacaacugcacguucgaguacgugagccagcccuuccugauggaccuggagggcaagcaggggaacuucaagaaccuccgcgaguucguguucaagaacaucgacggcuacuucaagaucuacuccaagcacaccccgaucaaccugguccgggaccugccccagggguucagcgcccucgagccccugguggaccugcccaucggcaucaacaucacccgcuuccagacccuccuggcccugcaccgguccuaccucacgccgggggacagcagcuccggcuggaccgcgggcgccgccgccuacuacgugggguaccugcagccccgcaccuuccugcucaaguacaacgagaacggcaccaucacggacgcggucgacugcgcccuggacccccugagcgagaccaagugcacccucaaguccuucaccguggagaaggggaucuaccagacgagcaacuuccgggugcugcccaccgaguccaucguccgcuucccgaacaucaccaaccugugccccuucggcgagguguucaacgccacccgguucgccagcgucuacgccuggaaccgcaagcggaucuccaacugcguggcggacuacagcgugcucuacaacuccgccagcuucuccacguucaagugcuacggcgucagccccaccaagcugaacgaccugugcuucaccaacguguacgccgacuccuucgugauccgcggggacgagguccggcagaucgcccccggccagaccgggaagaucgccgacuacaacuacaagcucccggacgacuucacgggcugcgugaucgcguggaacagcaacaaccuggacuccaaggucgggggcaacuacaacuaccuguaccgccucuuccgcaagagcaaccugaagcccuucgagcgggacaucuccaccgagaucuaccaggccggcagcacccccugcaacgggguggagggcuucaacugcuacuucccccugcaguccuacggguuccagccgaccaacggcgugggguaccagcccuaccggguggucgugcucagcuucgagcugcugcacgcccccgccacggugugcggccccaagaaguccaccaaccucgucaagaacaagugcgugaacuucaacuucaacggccugaccgggaccggcgugcugaccgagagcaacaagaaguuccugccguuccagcaguucgggcgcgacaucgccgacacgaccgacgcgguccgcgacccccagacccucgagauccuggacaucacccccugcagcuucggcgggguguccgugaucacgccgggcaccaacaccagcaaccaggucgccgugcuguaccagggcgugaacugcaccgagguccccguggccauccacgccgaccagcucacgcccaccuggcggguguacuccaccgggagcaacgucuuccagacccgcgccggcugccugaucggggcggagcacgugaacaacuccuacgagugcgacauccccaucggcgccggcaucugcgccagcuaccagacgcagaccaacuccccgcggcgcgcccggagcguggcgucccagagcaucaucgccuacaccaugucccugggggccgagaacagcgucgccuacuccaacaacagcaucgccauccccaccaacuucacgaucuccgugaccaccgagauccuccccgugagcaugaccaagacgagcgucgacugcaccauguacaucugcggcgacuccaccgagugcagcaaccugcugcuccaguacggguccuucugcacccagcugaaccgcgcgcugacgggcaucgccguggagcaggacaagaacacccaggagguguucgcccaggucaagcagaucuacaagacgcccccgaucaaggacuucgggggcuucaacuucagccagauccuccccgaccccuccaagcccagcaagcgguccuucaucgaggaccugcuguucaacaaggugacccucgccgacgccggcuucaucaagcaguacggggacugccugggcgacaucgcggcccgcgaccugaucugcgcccagaaguucaacgggcucaccgugcugccgccccugcucaccgacgagaugaucgcccaguacaccagcgcccugcuggcgggcaccaucacguccggguggaccuucggcgccggcgccgcccuccagauccccuucgcgaugcagauggccuaccgguucaacgggaucggcgucacccagaacgugcuguacgagaaccagaagcugaucgccaaccaguucaacagcgccaucgggaagauccaggacucccucagcuccaccgccagcgcgcugggcaagcugcaggacguggucaaccagaacgcccaggcccucaacacgcuggugaagcagcuguccagcaacuucggggccaucuccagcgugcucaacgacauccugucccgccuggacaaggucgaggccgaggugcagaucgaccggcucaucaccggccgccugcagagccugcagaccuacgugacccagcagcucauccgggcggccgagauccgcgccagcgccaaccuggccgcgaccaagauguccgagugcguccugggccagagcaagcggguggacuucugcgggaagggcuaccaccucauguccuucccccagagcgccccgcacgggguggucuuccugcacgugacguacguccccgcccaggagaagaacuucaccaccgcccccgcgaucugccacgacggcaaggcccacuucccccgcgaggggguguucguguccaacggcacccacugguucgucacgcagcggaacuucuacgagccgcagaucaucaccaccgacaacaccuucgugagcggcaacugcgacguggucaucgggaucgugaacaacacgguguacgacccccugcagcccgagcucgacuccuucaaggaggagcuggacaaguacuucaagaaccacaccagccccgacgucgaccugggcgacaucuccgggaucaacgccagcguggugaacauccagaaggagaucgaccgccucaacgaggucgccaagaaccugaacgagucccugaucgaccuccaggagcugggcaaguacgagcaguacaucaaguggccgugguacaucuggcugggcuucaucgccgggcucaucgcgaucgugauggugaccaucaugcugugcugcaugaccagcugcugcuccugccugaagggcugcugcagcugcggguccugcugcaaguucgacgaggacgacagcgagcccguccucaagggcgugaagcugcacuacacgugaggacuaguuauaagacugacuagcccgaugggccucccaacgggcccuccuccccuccuugcaccgagauuaauaaaaaaaaaaaaaaaaaaaaaaaaaaaaaaaaaaaaaaaaaaaaaaaaaaaaaaaaaaaaaaaaugcaucccccccccccccccccccccccccccccccaaaggcucuuuucagagccaccagaauu

SEQ ID NO: 12805 - RNA, 4036 nt, Artificial Sequence
  SARS-CoV-2/India/1-27/2020__EPI_ISL_413522 spike protein mRNA gc (1-1272)
aggagaaagcuuaccauguucguguuccugguccuccugccccuggugagcucccagugcgugaaccucaccacccgcacgcagcugccgcccgccuacaccaacagcuucacccggggcgucuacuaccccgacaagguguuccgcuccagcgugcugcacuccacccaggaccucuuccugcccuucuucagcaacgucacgugguuccacgccauccacguguccgggaccaacggcaccaagcgguucgacaacccggugcugcccuucaacgacggggucuacuucgcgagcaccgagaaguccaacaucauccgcggcuggaucuucgggacgacccucgacagcaagacccagucccugcugaucgugaacaacgccaccaacguggucaucaaggugugcgaguuccaguucugcaacgaccccuuccucggcguguaccacaagaacaacaagagcuggauggaguccgaguuccgggucuacagcuccgccaacaacugcacguucgaguacgugagccagcccuuccugauggaccuggagggcaagcaggggaacuucaagaaccuccgcgaguucguguucaagaacaucgacggcuacuucaagaucuacuccaagcacaccccgaucaaccugguccgggaccugccccagggguucagcgcccucgagccccugguggaccugcccaucggcaucaacaucacccgcuuccagacccuccuggcccugcaccgguccuaccucacgccgggggacagcagcuccggcuggaccgcgggcgccgccgccuacuacgugggguaccugcagccccgcaccuuccugcucaaguacaacgagaacggcaccaucacggacgcggucgacugcgcccuggacccccugagcgagaccaagugcacccucaaguccuucaccguggagaaggggaucuaccagacgagcaacuuccgggugcagcccaccgaguccaucguccgcuucccgaacaucaccaaccugugccccuucggcgagguguucaacgccacccgguucgccagcgucuacgccuggaaccgcaagcggaucuccaacugcguggcggacuacagcgugcuguacaacuccgccagcuucuccacguucaagugcuacggcgucagccccaccaagcucaacgaccugugcuucaccaacguguacgccgacuccuucgugauccgcggggacgaggucauccagaucgcccccggccagaccgggaagaucgccgacuacaacuacaagcugccggacgacuucacgggcugcgugaucgcguggaacagcaacaaccucgacuccaaggucgggggcaacuacaacuaccuguaccggcuguuccgcaagagcaaccucaagcccuucgagcgggacaucuccaccgagaucuaccaggccggcagcacccccugcaacgggguggagggcuucaacugcuacuucccccugcaguccuacggguuccagccgaccaacggcgugggguaccagcccuaccgcguggucgugcugagcuucgagcuccugcacgcccccgccacggugugcggccccaagaaguccaccaaccuggucaagaacaagugcgugaacuucaacuucaacggccucaccgggaccggcgugcugaccgagagcaacaagaaguuccugccguuccagcaguucgggcgggacaucgccgacacgaccgacgcgguccgcgacccccagacccuggagauccucgacaucacccccugcagcuucggcgggguguccgugaucacgccgggcaccaacaccagcaaccaggucgccgugcuguaccaggacgugaacugcaccgagguccccguggccauccacgccgaccagcugacgcccaccuggcgcguguacuccaccggcagcaacgucuuccagacccgggccgggugccucaucggcgcggagcacgugaacaacuccuacgagugcgacauccccaucggggccggcaucugcgccagcuaccagacgcagaccaacuccccgcgccgggcccgcagcguggcgucccagagcaucaucgccuacaccaugucccugggcgccgagaacagcgucgccuacuccaacaacagcaucgccauccccaccaacuucacgaucuccgugaccaccgagauccugcccgugagcaugaccaagacgagcgucgacugcaccauguacaucugcggggacuccaccgagugcagcaaccuccugcugcaguacggcuccuucugcacccagcucaaccgggcgcugacggggaucgccguggagcaggacaagaacacccaggagguguucgcccaggucaagcagaucuacaagacgcccccgaucaaggacuucggcggguucaacuucagccagauccugcccgaccccuccaagcccagcaagcgcuccuucaucgaggaccuccuguucaacaaggugacccuggccgacgccggcuucaucaagcaguacggcgacugccucggggacaucgcggcccgggaccugaucugcgcccagaaguucaacggccugaccgugcucccgccccugcugaccgacgagaugaucgcccaguacaccagcgcccuccuggcggggaccaucacguccggcuggaccuucggggccggcgccgcccugcagauccccuucgcgaugcagauggccuaccgcuucaacggcaucggggucacccagaacgugcucuacgagaaccagaagcugaucgccaaccaguucaacagcgccaucggcaagauccaggacucccugagcuccaccgccagcgcgcucgggaagcugcaggacguggucaaccagaacgcccaggcccugaacacgcucgugaagcagcuguccagcaacuucggcgccaucuccagcgugcugaacgacauccucucccggcuggacaaggucgaggccgaggugcagaucgaccgccugaucaccgggcggcuccagagccugcagaccuacgugacccagcagcugauccgcgcggccgagauccgggccagcgccaaccucgccgcgaccaagauguccgagugcguccugggccagagcaagcgcguggacuucugcggcaagggguaccaccugauguccuucccccagagcgccccgcacggcguggucuuccuccacgugacguacguccccgcccaggagaagaacuucaccaccgcccccgcgaucugccacgacgggaaggcccacuucccccgggagggcguguucguguccaacgggacccacugguucgucacgcagcgcaacuucuacgagccgcagaucaucaccaccgacaacaccuucgugagcggcaacugcgacguggucaucggcaucgugaacaacacgguguacgacccccugcagcccgagcuggacuccuucaaggaggagcucgacaaguacuucaagaaccacaccagccccgacgucgaccugggggacaucuccggcaucaacgccagcguggugaacauccagaaggagaucgaccggcugaacgaggucgccaagaaccucaacgagucccugaucgaccugcaggagcucgggaaguacgagcaguacaucaaguggccgugguacaucuggcugggcuucaucgccggccugaucgcgaucgugauggugaccaucaugcucugcugcaugaccagcugcugcuccugccugaaggggugcugcagcugcggcuccugcugcaaguucgacgaggacgacagcgagcccguccugaagggggugaagcuccacuacacgugaggacuaguuauaagacugacuagcccgaugggccucccaacgggcccuccuccccuccuugcaccgagauuaauaaaaaaaaaaaaaaaaaaaaaaaaaaaaaaaaaaaaaaaaaaaaaaaaaaaaaaaaaaaaaaaaugcaucccccccccccccccccccccccccccccccaaaggcucuuuucagagccaccagaauu

SEQ ID NO: 12806 - RNA, 4021 nt, Artificial Sequence
  SARS-CoV-2/pangolin/Guangxi/P4L/2017__EPI_ISL_410538 spike protein mRNA gc (1-1267)
aggagaaagcuuaccauguucguguuccuguucguccucccccuggugagcucccagugcgugaaccugaccacccgcacgggcaucccgcccggguacaccaacagcuccacccggggcgucuacuaccccgacaagguguuccgcagcuccauccuccaccugacccaggaccuguuccuccccuucuucagcaacgugacgugguucaacaccaucaacuaccagggcggguucaagaaguucgacaacccgguccugcccuucaacgacgggguguacuucgccuccaccgagaaguccaacaucauccggggcuggaucuucggcaccacgcuggacgcccgcacccagagccuccugaucgugaacaacgcgaccaacgucgugaucaaggugugcgaguuccaguucugcaccgaccccuuccugggggucuacuaccacaacaacaacaagacguggguggagaacgaguuccggguguacagcuccgccaacaacugcaccuucgaguacaucagccagcccuuccucauggaccuggagggcaagcaggggaacuucaagaaccugcgcgaguucgucuucaagaacguggacggcuacuucaagaucuacuccaagcacaccccgaucgaccucgugcgggaccugccccgcggguucgccgcccuggagccccucgucgaccugcccaucggcaucaacaucacccgguuccagacgcugcucgcccugcaccgcagcuaccugaccccgggcaaccucgaguccggguggaccaccggcgcggccgccuacuacgugggguaccugcagcagcggacguuccugcucagcuacaaccagaacggcaccaucaccgacgccguggacugcucccuggacccccugagcgagaccaagugcacgcucaagucccugaccgucgagaagggcaucuaccagaccagcaacuuccgcgugcagcccaccaucagcaucgugcgguuccccaacaucacgaaccugugcccguucggggaggucuucaacgcguccaaguucgccagcguguacgccuggaaccgcaagcggaucuccaacugcgucgccgacuacagcgugcucuacaacuccaccagcuucuccaccuucaagugcuacggcgugagccccaccaagcugaacgaccugugcuucacgaacgucuacgccgacuccuucguggugaagggggacgagguccgccagaucgcgcccggccagaccggggugaucgccgacuacaacuacaagcuccccgacgacuucaccggcugcgugaucgccuggaacagcgucaagcaggacgcccugaccggcgggaacuacggcuaccuguaccgccucuuccggaaguccaagcugaagccguucgagcgggacaucagcacggagaucuaccaggccggguccacccccugcaacggccagguggggcugaacugcuacuacccccucgagcgcuacggcuuccaccccaccaccggcgugaacuaccagccguuccgggucguggugcugagcuucgagcugcucaacgggcccgcgaccgucugcggccccaagcuguccacgacccuggugaaggacaagugcgugaacuucaacuucaacgggcugaccggcaccgggguccucacgaccagcaagaagcaguuccugcccuuccagcaguucggccgcgacaucuccgacaccaccgacgccgugcgcgacccgcagacgcuggagauccucgacaucacccccugcagcuucggcgggguguccgucaucacccccggcaccaacacgagcaaccagguggccgugcuguaccaggacgucaacugcaccgaggugccgauggccauccacgccgagcagcugacccccgcguggcggguguacagcgccggggccaacgucuuccagacccgcgccggcugccucgugggcgccgagcacgugaacaacuccuacgagugcgacauccccgucggggcgggcaucugcgccagcuaccacuccaugagcucccugcggagcgugaaccagcgcuccaucaucgccuacacgaugagccugggggccgagaacuccguggcguacagcaacaacuccaucgccauccccaccaacuucaccaucagcgucaccacggagauccucccgguguccaugaccaagaccagcguggacugcaccauguacaucugcggcgacuccaucgagugcagcaaccugcugcuccaguacggguccuucugcacgcagcugaaccgggcccugaccggcaucgccgucgagcaggacaagaacacccaggagguguucgcccaggugaagcagaucuacaagaccccgcccaucaaggacuucggcggguucaacuucagccagauccuccccgaccccagcaagcccuccaagcgcagcuucaucgaggaccugcuguucaacaaggucacgcucgcggacgccggcuucaucaagcaguacggggacugccugggcgacaucgccgcccgggaccugaucugcgcccagaaguucaacgggcucaccgugcugccgccccugcucaccgacgagaugaucgcgcaguacaccuccgcccugcuggccggcacgaucaccagcggcuggaccuucggggccggcgccgcgcuccagauccccuucgccaugcagauggccuaccgcuucaacgggaucggcgugacccagaacguccuguacgagaaccagaagcugaucgccaaccaguucaacuccgcgaucgggaagauccaggacagccucuccagcacggccuccgcccugggcaagcugcaggacguggugaaccagaacgcccaggcccucaacacccuggucaagcagcugagcuccaacuucggcgcgaucagcuccgugcucaacgacauccugagccggcuggacaagguggaggccgagguccagaucgaccgccucaucaccgggcggcugcagucccugcagaccuacgugacccagcagcucauccgcgccgccgagauccgggccagcgcgaaccuggccgccacgaagauguccgagugcgugcugggccagagcaagcgcgucgacuucugcgggaagggcuaccaccucauguccuucccccagagcgcgccccacgggguggucuuccugcacgugaccuacgugcccgcccaggagaagaacuucaccaccgccccggccaucugccacgagggcaaggcccacuucccccgggagggcgucuucgugagcaacgggacgcacugguucaucacccagcgcaacuucuacgagccccagaucaucaccaccgacaacacguucguguccggcagcugcgacgucgugaucgggaucgugaacaacaccgucuacgacccccugcagccggagcucgacuccuucaaggaggagcuggacaaguacuucaagaaccacaccagccccgacguggaccugggcgacaucuccggcaucaacgccagcguggucaacauccagaaggagaucgaccggcucaacgagguggcgaagaaccugaacgagucccccaucgaccugcaggagcucgggaaguacgagcaguacaucaaguggcccugguacaucuggcugggcuucaucgccgggcugaucgccaucaucauggugaccaucaugcucugcugcaugacgagcugcugcuccugccugaagggcugcugcagcugcggguccugcugcaaguucgacgaggacgacagcgagccgguccugaagggcgugaagcuccacuacaccugaggacuaguuauaagacugacuagcccgaugggccucccaacgggcccuccuccccuccuugcaccgagauuaauaaaaaaaaaaaaaaaaaaaaaaaaaaaaaaaaaaaaaaaaaaaaaaaaaaaaaaaaaaaaaaaaugcaucccccccccccccccccccccccccccccccaaaggcucuuuucagagccaccagaauu

SEQ ID NO: 12807 - RNA, 4021 nt, Artificial Sequence
  SARS-CoV-2/pangolin/Guangxi/P5L/2017__EPI_ISL_410540 spike protein mRNA gc (1-1267)
aggagaaagcuuaccauguucguguuccuguucguccucccccuggugagcucccagugcgugaaccugaccacccgcacgggcaucccgcccggguacaccaacagcuccacccggggcgucuacuaccccgacaagguguuccgcagcuccauccuccaccugacccaggaccuguuccuccccuucuucagcaacgugacgugguucaacaccaucaacuaccagggcggguucaagaaguucgacaacccgguccugcccuucaacgacgggguguacuucgccuccaccgagaaguccaacaucauccggggcuggaucuucggcaccacgcuggacgcccgcacccagagccuccugaucgugaacaacgcgaccaacgucgugaucaaggugugcgaguuccaguucugcaccgaccccuuccugggggucuacuaccacaacaacaacaagacguggguggagaacgaguuccggguguacagcuccgccaacaacugcaccuucgaguacaucagccagcccuuccucauggaccuggagggcaagcaggggaacuucaagaaccugcgcgaguucgucuucaagaacguggacggcuacuucaagaucuacuccaagcacaccccgaucgaccucgugcgggaccugccccgcggguucgccgcccuggagccccucgucgaccugcccaucggcaucaacaucacccgguuccagacgcugcucgcccugcaccgcagcuaccugaccccgggcaagcucgaguccggguggaccaccggcgcggccgccuacuacgugggguaccugcagcagcggacguuccugcucagcuacaaccagaacggcaccaucaccgacgccguggacugcucccuggacccccugagcgagaccaagugcacgcucaagucccugaccgucgagaagggcaucuaccagaccagcaacuuccgcgugcagcccaccaucagcaucgugcgguuccccaacaucacgaaccugugcccguucggggaggucuucaacgcguccaaguucgccagcguguacgccuggaaccgcaagcggaucuccaacugcgucgccgacuacagcgugcucuacaacuccaccagcuucuccaccuucaagugcuacggcgugagccccaccaagcugaacgaccugugcuucacgaacgucuacgccgacuccuucguggugaagggggacgagguccgccagaucgcgcccggccagaccggggugaucgccgacuacaacuacaagcuccccgacgacuucaccggcugcgugaucgccuggaacagcgucaagcaggacgcccugaccggcgggaacuacggcuaccuguaccgccucuuccggaaguccaagcugaagccguucgagcgggacaucagcacggagaucuaccaggccggguccacccccugcaacggccagguggggcugaacugcuacuacccccucgagcgcuacggcuuccaccccaccaccggcgugaacuaccagccguuccgggucguggugcugagcuucgagcugcucaacgggcccgcgaccgucugcggccccaagcuguccacgacccuggugaaggacaagugcgugaacuucaacuucaacgggcugaccggcaccgggguccucacgaccagcaagaagcaguuccugcccuuccagcaguucggccgcgacaucuccgacaccaccgacgccgugcgcgacccgcagacgcuggagauccucgacaucacccccugcagcuucggcgggguguccgucaucacccccggcaccaacacgagcaaccagguggccgugcuguaccaggacgucaacugcaccgaggugccgauggccauccacgccgagcagcugacccccgcguggcggguguacagcgccggggccaacgucuuccagacccgcgccggcugccucgugggcgccgagcacgugaacaacuccuacgagugcgacauccccgucggggcgggcaucugcgccagcuaccacuccaugagcuccuuccggagcgugaaccagcgcuccaucaucgccuacacgaugagccugggggccgagaacuccguggcguacagcaacaacuccaucgccauccccaccaacuucaccaucagcgucaccacggagauccugccgguguccaugaccaagaccagcguggacugcaccauguacaucugcggcgacuccaucgagugcagcaaccuccugcugcaguacggguccuucugcacgcagcucaaccgggcccugaccggcaucgccgucgagcaggacaagaacacccaggagguguucgcccaggugaagcagaucuacaagaccccgcccaucaaggacuucggcggguucaacuucagccagauccugcccgaccccagcaagcccuccaagcgcagcuucaucgaggaccuccuguucaacaaggucacgcuggcggacgccggcuucaucaagcaguacggggacugccucggcgacaucgccgcccgggaccugaucugcgcccagaaguucaacgggcugaccgugcucccgccccugcugaccgacgagaugaucgcgcaguacaccuccgcccuccuggccggcacgaucaccagcggcuggaccuucggggccggcgccgcgcugcagauccccuucgccaugcagauggccuaccgcuucaacgggaucggcgugacccagaacguccucuacgagaaccagaagcugaucgccaaccaguucaacuccgcgaucgggaagauccaggacagccuguccagcacggccuccgcccucggcaagcugcaggacguggugaaccagaacgcccaggcccugaacacccucgucaagcagcugagcuccaacuucggcgcgaucagcuccgugcugaacgacauccucagccggcuggacaagguggaggccgagguccagaucgaccgccugaucaccgggcggcuccagucccugcagaccuacgugacccagcagcugauccgcgccgccgagauccgggccagcgcgaaccucgccgccacgaagauguccgagugcgugcugggccagagcaagcgcgucgacuucugcgggaagggcuaccaccugauguccuucccccagagcgcgccccacgggguggucuuccuccacgugaccuacgugcccgcccaggagaagaacuucaccaccgccccggccaucugccacgagggcaaggcccacuucccccgggagggcgucuucgugagcaacgggacgcacugguucaucacccagcgcaacuucuacgagccccagaucaucaccaccgacaacacguucguguccggcagcugcgacgucgugaucgggaucgugaacaacaccgucuacgacccccugcagccggagcuggacuccuucaaggaggagcucgacaaguacuucaagaaccacaccagccccgacguggaccugggcgacaucuccggcaucaacgccagcguggucaacauccagaaggagaucgaccggcugaacgagguggcgaagaaccucaacgagucccugaucgaccugcaggagcucgggaaguacgagcaguacaucaaguggcccugguacaucuggcugggcuucaucgccgggcugaucgccaucaucauggugaccaucaugcucugcugcaugacgagcugcugcuccugccugaagggcugcugcagcugcggguccugcugcaaguucgacgaggacgacagcgagcccguccugaagggcgugaagcuccacuacaccugaggacuaguuauaagacugacuagcccgaugggccucccaacgggcccuccuccccuccuugcaccgagauuaauaaaaaaaaaaaaaaaaaaaaaaaaaaaaaaaaaaaaaaaaaaaaaaaaaaaaaaaaaaaaaaaaugcaucccccccccccccccccccccccccccccccaaaggcucuuuucagagccaccagaauu

SEQ ID NO: 12808 - RNA, 4021 nt, Artificial Sequence
  SARS-CoV-2/pangolin/Guangxi/P5E/2017__EPI_ISL_410541 spike protein mRNA gc (1-1267)
aggagaaagcuuaccauguucguguuccuguucguccucccccuggugagcucccagugcgugaaccugaccacccgcacgggcaucccgcccggguacaccaacagcuccacccggggcgucuacuaccccgacaagguguuccgcagcuccauccuccaccugacccaggaccuguuccuccccuucuucagcaacgugacgugguucaacaccaucaccuaccagggcggguccaagaaguucgacaacccgguccugcccuucaacgacgggguguacuucgccagcaccgagaaguccaacaucauccggggcuggaucuucggcacgacccuggacgcccgcacccagagccuccugaucgugaacaacgcgaccaacgucgugaucaaggugugcgaguuccaguucugcacggaccccuuccugggggucuacuaccacaacaacaacaagaccuggguggagaacgaguuccggguguacuccagcgccaacaacugcaccuucgaguacaucucccagcccuuccucauggaccuggagggcaagcaggggaacuucaagaaccugcgcgaguucgucuucaagaacguggacggcuacuucaagaucuacagcaagcacaccccgaucgaccucgugcgggaccugccccgcggguucgccgcccuggagccccucgucgaccugcccaucggcaucaacaucacgcgguuccagacccugcucgcccugcaccgcuccuaccugaccccgggcaagcucgagagcggguggaccacgggcgcggccgccuacuacgugggguaccugcagcagcggaccuuccugcucuccuacaaccagaacggcaccaucaccgacgccguggacugcagccuggacccccuguccgagacgaagugcacccucaagagccugaccgucgagaagggcaucuaccagaccagcaacuuccgcgugcagcccacgaucuccaucgugcgguuccccaacaucaccaaccugugcccguucggggaggucuucaacgcgagcaaguucgccuccguguacgccuggaaccgcaagcggaucagcaacugcgucgccgacuacuccgugcucuacaacagcaccuccuucagcaccuucaagugcuacggcgugucccccacgaagcugaacgaccugugcuucaccaacgucuacgccgacagcuucguggugaagggggacgagguccgccagaucgcgcccggccagaccggggugaucgccgacuacaacuacaagcuccccgacgacuucaccggcugcgugaucgccuggaacuccgucaagcaggacgcccugacgggcgacaacuacggguaccuguaccggcuguuccgcaagagcaagcucaagccguucgagcgggacaucuccaccgagaucuaccaggccggcagcacccccugcaacggccagguggggcugaacugcuacuacccccucgagcgcuacggguuccaccccaccaccggcgugaacuaccagccguuccgggucguggugcuguccuucgagcugcucaacggccccgcgacggucugcgggcccaagcugagcaccacccuggugaaggacaagugcgugaacuucaacuucaacggccugaccgggacgggcguccucaccaccuccaagaagcaguuccugcccuuccagcaguucgggcgcgacaucagcgacaccacggacgccgugcgcgacccgcagacccuggagauccucgacaucacccccugcuccuucggcggcgugagcgucaucacccccgggacgaacaccagcaaccagguggccgugcuguaccaggacgucaacugcaccgaggugccgauggccauccacgccgagcagcugacccccgcguggcggguguacuccgccggcgccaacgucuuccagacgcgcgccgggugccucgugggcgccgagcacgugaacaacagcuacgagugcgacauccccgucggcgcggggaucugcgccuccuaccacagcauguccagcuuccgguccgugaaccagcgcagcaucaucgccuacaccaugucccugggcgccgagaacagcguggcguacuccaacaacagcaucgccauccccaccaacuucaccaucuccgucacgaccgagauccugccggugagcaugaccaagaccuccguggacugcacgauguacaucugcggggacagcaucgagugcuccaaccuccugcugcaguacggcagcuucugcacccagcucaaccgggcccugaccgggaucgccgucgagcaggacaagaacacccaggagguguucgcccaggugaagcagaucuacaagacgccgcccaucaaggacuucggcggcuucaacuucagccagauccugcccgaccccuccaagcccagcaagcgcuccuucaucgaggaccuccuguucaacaaggucacccuggcggacgccggguucaucaagcaguacggcgacugccucggggacaucgccgcccgggaccugaucugcgcccagaaguucaacggccugaccgugcucccgccccugcugaccgacgagaugaucgcgcaguacacgagcgcccuccuggccgggaccaucaccuccggcuggaccuucggcgccggggccgcgcugcagauccccuucgccaugcagauggccuaccgcuucaacggcaucggggugacgcagaacguccucuacgagaaccagaagcugaucgccaaccaguucaacagcgcgaucggcaagauccaggacucccugagcuccaccgccagcgcccucgggaagcugcaggacguggugaaccagaacgcccaggcccugaacacccucgucaagcagcuguccagcaacuucggcgcgaucuccagcgugcugaacgacauccucucccggcuggacaagguggaggccgagguccagaucgaccgccugaucaccggccggcuccagagccugcagaccuacgugacgcagcagcugauccgcgccgccgagauccgggccuccgcgaaccucgccgccaccaagaugagcgagugcgugcuggggcaguccaagcgcgucgacuucugcggcaagggguaccaccugaugagcuucccccagagcgcgccccacggcguggucuuccuccacgugaccuacgugcccgcccaggagaagaacuucaccacggccccggccaucugccacgaggggaaggcccacuucccccgggagggcgucuucguguccaacggcacccacugguucaucacccagcgcaacuucuacgagccccagaucaucaccacggacaacaccuucgugagcggguccugcgacgucgugaucggcaucgugaacaacaccgucuacgacccccugcagccggagcuggacagcuucaaggaggagcucgacaaguacuucaagaaccacaccucccccgacguggaccugggggacaucagcggcaucaacgccuccguggucaacauccagaaggagaucgaccggcugaacgagguggcgaagaaccucaacgagagccugaucgaccugcaggagcucggcaaguacgagcaguacaucaaguggcccugguacaucuggcugggguucaucgccggccugaucgccaucaucauggugacgaucaugcucugcugcaugaccuccugcugcagcugccugaaggggugcugcuccugcggcagcugcugcaaguucgacgaggacgacuccgagcccguccugaagggggugaagcuccacuacaccugaggacuaguuauaagacugacuagcccgaugggccucccaacgggcccuccuccccuccuugcaccgagauuaauaaaaaaaaaaaaaaaaaaaaaaaaaaaaaaaaaaaaaaaaaaaaaaaaaaaaaaaaaaaaaaaaugcaucccccccccccccccccccccccccccccccaaaggcucuuuucagagccaccagaauu

SEQ ID NO: 12809 - RNA, 4015 nt, Artificial Sequence
  SARS-CoV-2/pangolin/Guangxi/P1E/2017__EPI_ISL_410539 spike protein mRNA gc (1-1265)
aggagaaagcuuaccauguucguguuccuguucguccucccccuggugagcucccagugcgugaaccugaccacccgcacgggcauccagccgggguacaccaacagcuccacccggggcgucuacuaccccgacaagguguuccgcagcuccauccuccaccugacccaggaccuguuccuccccuucuucagcaacgugacgugguucaacaccaucaacuaccagggcggguucaagaaguucgacaaccccguccugccguucaacgacgggguguacuucgccuccaccgagaaguccaacaucauccggggcuggaucuucggcaccacgcuggacgcccgcacccagagccuccugaucgugaacaacgcgaccaacgucgugaucaaggugugcgaguuccaguucugcaccgaccccuuccugggggucuacuaccacaacaacaacaagacguggguggagaacgaguuccggguguacagcuccgccaacaacugcaccuucgaguacaucagccagcccuuccucauggaccuggagggcaagcaggggaacuucaagaaccugcgcgaguucgucuucaagaacguggacggcuacuucaagaucuacuccaagcacacccccaucgaccucgugcgggaccugccgcgcggguucgccgcccuggagccccucgucgaccugcccaucggcaucaacaucacccgguuccagacgcugcucgcccugcaccgcagcuaccugacccccggcaagcucgaguccggguggaccaccggcgcggccgccuacuacgugggguaccugcagcagcggacguuccugcucagcuacaaccagaacggcaccaucaccgacgccguggacugcucccuggacccgcugagcgagaccaagugcacgcucaagucccugaccgucgagaagggcaucuaccagaccagcaacuuccgcgugcagcccaccaucagcaucgugcgguuccccaacaucacgaaccugugccccuucggggaggucuucaacgcguccaaguucgccagcguguacgccuggaaccgcaagcggaucuccaacugcgucgccgacuacagcgugcucuacaacuccaccagcuucuccaccuucaagugcuacggcgugagcccgaccaagcugaacgaccugugcuucacgaacgucuacgccgacuccuucguggugaagggggacgagguccgccagaucgcgcccggccagaccggggugaucgccgacuacaacuacaagcuccccgacgacuucaccggcugcgugaucgccuggaacagcgucaagcaggacgcccugaccggcgggaacuaccuguaccgccucuuccggaaguccaagcugaagcccuucgagcgggacaucagcacggagaucuaccaggccggcuccaccccgugcaacggccagguggggcugaacugcuacuacccccucgagcgcuacggguuccaccccaccaccggcgugaacuaccagcccuuccgggucguggugcugagcuucgagcugcucaacggcccggcgaccgucugcgggcccaagcuguccacgacccuggugaaggacaagugcgugaacuucaacuucaacggccugaccgggaccggcguccucacgaccagcaagaagcaguuccugcccuuccagcaguucgggcgcgacaucuccgacaccaccgacgccgugcgcgacccccagacgcuggagauccucgacaucaccccgugcagcuucggcggcguguccgucaucacccccgggaccaacacgagcaaccagguggccgugcuguaccaggacgucaacugcaccgaggugcccauggccauccacgccgagcagcugaccccggcguggcggguguacagcgccggcgccaacgucuuccagacccgcgccgggugccucgugggcgccgagcacgugaacaacuccuacgagugcgacauccccgucggcgcggggaucugcgccagcuaccacuccaugagcucccugcggagcgugaaccagcgcuccaucaucgccuacacgaugagccugggcgccgagaacuccguggcguacagcaacaacuccaucgccauccccaccaacuucaccaucagcgucaccacggagauccuccccguguccaugaccaagaccagcguggacugcaccauguacaucugcggggacuccaucgagugcagcaaccugcugcuccaguacggcuccuucugcacgcagcugaaccgggcccugaccgggaucgccgucgagcaggacaagaacacccaggagguguucgcccaggugaagcagaucuacaagaccccgcccaucaaggacuucggcggcuucaacuucagccagauccuccccgaccccagcaagccguccaagcgcagcuucaucgaggaccugcuguucaacaaggucacgcucgcggacgccggguucaucaagcaguacggcgacugccugggggacaucgccgcccgggaccugaucugcgcccagaaguucaacggccucaccgugcugccgccccugcucaccgacgagaugaucgcgcaguacaccuccgcccugcuggccgggacgaucaccagcggcuggaccuucggcgccggggccgcgcuccagauccccuucgccaugcagauggccuaccgcuucaacggcaucggggugacccagaacguccuguacgagaaccagaagcugaucgccaaccaguucaacuccgcgaucggcaagauccaggacagccucuccagcacggccuccgcccuggggaagcugcaggacguggugaaccagaacgcccaggcccucaacacccuggucaagcagcugagcuccaacuucggcgcgaucagcuccgugcucaacgacauccugagccggcuggacaagguggaggccgagguccagaucgaccgccucaucaccggccggcugcagucccugcagaccuacgugacccagcagcucauccgcgccgccgagauccgggccagcgcgaaccuggccgccacgaagauguccgagugcgugcuggggcagagcaagcgcgucgacuucugcggcaagggguaccaccucauguccuucccccagagcgcgccccacggcguggucuuccugcacgugaccuacgugcccgcccaggagaagaacuucaccaccgcccccgccaucugccacgaggggaaggcccacuucccgcgggagggcgucuucgugagcaacggcacgcacugguucaucacccagcgcaacuucuacgagccccagaucaucaccaccgacaacacguucguguccgggagcugcgacgucgugaucggcaucgugaacaacaccgucuacgacccccugcagcccgagcucgacuccuucaaggaggagcuggacaaguacuucaagaaccacaccagcccggacguggaccugggggacaucuccggcaucaacgccagcguggucaacauccagaaggagaucgaccggcucaacgagguggcgaagaaccugaacgagucccugaucgaccuccaggagcugggcaaguacgagcaguacaucaaguggcccugguacaucuggcugggguucaucgccggccucaucgccaucaucauggugaccaucaugcugugcugcaugacgagcugcugcuccugccugaaggggugcugcagcugcggcuccugcugcaaguucgacgaggacgacagcgagcccguccucaagggggugaagcugcacuacaccugaggacuaguuauaagacugacuagcccgaugggccucccaacgggcccuccuccccuccuugcaccgagauuaauaaaaaaaaaaaaaaaaaaaaaaaaaaaaaaaaaaaaaaaaaaaaaaaaaaaaaaaaaaaaaaaaugcaucccccccccccccccccccccccccccccccaaaggcucuuuucagagccaccagaauu

SEQ ID NO: 12810 - RNA, 4039 nt, Artificial Sequence; identical to SEQ ID NO: 163
  SARS-CoV-2/Wuhan/WIV05/2019__EPI_ISL_402128 spike protein mRNA gc (1-1273)(K986P_V987P) R9515, R10157

SEQ ID NO: 12811 - RNA, 4039 nt, Artificial Sequence
  SARS-CoV-2/Wuhan/WIV05/2019__EPI_ISL_402128 spike protein mRNA gc (1-1273)(K986P_V987P_T887WN_A1020W) R9641
aggagaaagcuuaccauguucguguuccugguccuccugccccuggugagcucccagugcgugaaccucaccacccgcacgcagcugccgcccgccuacaccaacagcuucacccggggcgucuacuaccccgacaagguguuccgcuccagcgugcugcacuccacccaggaccucuuccugcccuucuucagcaacgucacgugguuccacgccauccacguguccgggaccaacggcaccaagcgguucgacaacccggugcugcccuucaacgacggggucuacuucgcgagcaccgagaaguccaacaucauccgcggcuggaucuucgggacgacccucgacagcaagacccagucccugcugaucgugaacaacgccaccaacguggucaucaaggugugcgaguuccaguucugcaacgaccccuuccucggcguguacuaccacaagaacaacaagagcuggauggaguccgaguuccgggucuacagcuccgccaacaacugcacguucgaguacgugagccagcccuuccugauggaccuggagggcaagcaggggaacuucaagaaccuccgcgaguucguguucaagaacaucgacggcuacuucaagaucuacuccaagcacaccccgaucaaccugguccgggaccugccccagggguucagcgcccucgagccccugguggaccugcccaucggcaucaacaucacccgcuuccagacccuccuggcccugcaccgguccuaccucacgccgggggacagcagcuccggcuggaccgcgggcgccgccgccuacuacgugggguaccugcagccccgcaccuuccugcucaaguacaacgagaacggcaccaucacggacgcggucgacugcgcccuggacccccugagcgagaccaagugcacccucaaguccuucaccguggagaaggggaucuaccagacgagcaacuuccgggugcagcccaccgaguccaucguccgcuucccgaacaucaccaaccugugccccuucggcgagguguucaacgccacccgguucgccagcgucuacgccuggaaccgcaagcggaucuccaacugcguggcggacuacagcgugcuguacaacuccgccagcuucuccacguucaagugcuacggcgucagccccaccaagcucaacgaccugugcuucaccaacguguacgccgacuccuucgugauccgcggggacgagguccggcagaucgcccccggccagaccgggaagaucgccgacuacaacuacaagcugccggacgacuucacgggcugcgugaucgcguggaacagcaacaaccucgacuccaaggucgggggcaacuacaacuaccuguaccgccuguuccgcaagagcaaccucaagcccuucgagcgggacaucuccaccgagaucuaccaggccggcagcacccccugcaacgggguggagggcuucaacugcuacuucccccugcaguccuacggguuccagccgaccaacggcgugggguaccagcccuaccggguggucgugcugagcuucgagcuccugcacgcccccgccacggugugcggccccaagaaguccaccaaccuggucaagaacaagugcgugaacuucaacuucaacggccucaccgggaccggcgugcugaccgagagcaacaagaaguuccugccguuccagcaguucgggcgcgacaucgccgacacgaccgacgcgguccgcgacccccagacccuggagauccucgacaucacccccugcagcuucggcgggguguccgugaucacgccgggcaccaacaccagcaaccaggucgccgugcuguaccaggacgugaacugcaccgagguccccguggccauccacgccgaccagcugacgcccaccuggcggguguacuccaccggcagcaacgucuuccagacccgcgccgggugccucaucggcgcggagcacgugaacaacuccuacgagugcgacauccccaucggggccggcaucugcgccagcuaccagacgcagaccaacuccccgcggcgcgcccggagcguggcgucccagagcaucaucgccuacaccaugucccugggcgccgagaacagcgucgccuacuccaacaacagcaucgccauccccaccaacuucacgaucuccgugaccaccgagauccugcccgugagcaugaccaagacgagcgucgacugcaccauguacaucugcggggacuccaccgagugcagcaaccuccugcugcaguacggcuccuucugcacccagcucaaccgcgcgcugacggggaucgccguggagcaggacaagaacacccaggagguguucgcccaggucaagcagaucuacaagacgcccccgaucaaggacuucggcggguucaacuucagccagauccugcccgaccccuccaagcccagcaagcgguccuucaucgaggaccuccuguucaacaaggugacccuggccgacgccggcuucaucaagcaguacggcgacugccucggggacaucgcggcccgcgaccugaucugcgcccagaaguucaacggccugaccgugcucccgccccugcugaccgacgagaugaucgcccaguacaccagcgcccuccuggcggggaccaucacguccggcuggugguucggggccggcgccgcccugcagauccccuucgcgaugcagauggccuaccgguucaacggcaucggggucacccagaacgugcucuacgagaaccagaagcugaucgccaaccaguucaacagcgccaucggcaagauccaggacucccugagcuccaccgccagcgcgcucgggaagcugcaggacguggucaaccagaacgcccaggcccugaacacgcucgugaagcagcuguccagcaacuucggcgccaucuccagcgugcugaacgacauccucucccgccuggacccgcccgaggccgaggugcagaucgaccggcugaucaccgggcgccuccagagccugcagaccuacgugacccagcagcugauccgggcggccgagauccgcuggagcgccaaccucgccgcgaccaagauguccgagugcguccugggccagagcaagcggguggacuucugcggcaagggguaccaccugauguccuucccccagagcgccccgcacggcguggucuuccuccacgugacguacguccccgcccaggagaagaacuucaccaccgcccccgcgaucugccacgacgggaaggcccacuucccccgcgagggcguguucguguccaacgggacccacugguucgucacgcagcggaacuucuacgagccgcagaucaucaccaccgacaacaccuucgugagcggcaacugcgacguggucaucggcaucgugaacaacacgguguacgacccccugcagcccgagcuggacuccuucaaggaggagcucgacaaguacuucaagaaccacaccagccccgacgucgaccugggggacaucuccggcaucaacgccagcguggugaacauccagaaggagaucgaccgccugaacgaggucgccaagaaccucaacgagucccugaucgaccugcaggagcucgggaaguacgagcaguacaucaaguggccgugguacaucuggcugggcuucaucgccggccugaucgcgaucgugauggugaccaucaugcucugcugcaugaccagcugcugcuccugccugaaggggugcugcagcugcggcuccugcugcaaguucgacgaggacgacagcgagcccguccugaagggggugaagcuccacuacacgugaggacuaguuauaagacugacuagcccgaugggccucccaacgggcccuccuccccuccuugcaccgagauuaauaaaaaaaaaaaaaaaaaaaaaaaaaaaaaaaaaaaaaaaaaaaaaaaaaaaaaaaaaaaaaaaaugcaucccccccccccccccccccccccccccccccaaaggcucuuuucagagccaccagaauu

SEQ ID NO: 12812 - RNA, 4039 nt, Artificial Sequence
  SARS-CoV-2/Wuhan/WIV05/2019__EPI_ISL_402128 spike protein mRNA gc (1-1273)(K986P_V987P_P1069F) R9660
aggagaaagcuuaccauguucguguuccugguccuccugccccuggugagcucccagugcgugaaccucaccacccgcacgcagcugccgcccgccuacaccaacagcuucacccggggcgucuacuaccccgacaagguguuccgcuccagcgugcugcacuccacccaggaccucuuccugcccuucuucagcaacgucacgugguuccacgccauccacguguccgggaccaacggcaccaagcgguucgacaacccggugcugcccuucaacgacggggucuacuucgcgagcaccgagaaguccaacaucauccgcggcuggaucuucgggacgacccucgacagcaagacccagucccugcugaucgugaacaacgccaccaacguggucaucaaggugugcgaguuccaguucugcaacgaccccuuccucggcguguacuaccacaagaacaacaagagcuggauggaguccgaguuccgggucuacagcuccgccaacaacugcacguucgaguacgugagccagcccuuccugauggaccuggagggcaagcaggggaacuucaagaaccuccgcgaguucguguucaagaacaucgacggcuacuucaagaucuacuccaagcacaccccgaucaaccugguccgggaccugccccagggguucagcgcccucgagccccugguggaccugcccaucggcaucaacaucacccgcuuccagacccuccuggcccugcaccgguccuaccucacgccgggggacagcagcuccggcuggaccgcgggcgccgccgccuacuacgugggguaccugcagccccgcaccuuccugcucaaguacaacgagaacggcaccaucacggacgcggucgacugcgcccuggacccccugagcgagaccaagugcacccucaaguccuucaccguggagaaggggaucuaccagacgagcaacuuccgggugcagcccaccgaguccaucguccgcuucccgaacaucaccaaccugugccccuucggcgagguguucaacgccacccgguucgccagcgucuacgccuggaaccgcaagcggaucuccaacugcguggcggacuacagcgugcuguacaacuccgccagcuucuccacguucaagugcuacggcgucagccccaccaagcucaacgaccugugcuucaccaacguguacgccgacuccuucgugauccgcggggacgagguccggcagaucgcccccggccagaccgggaagaucgccgacuacaacuacaagcugccggacgacuucacgggcugcgugaucgcguggaacagcaacaaccucgacuccaaggucgggggcaacuacaacuaccuguaccgccuguuccgcaagagcaaccucaagcccuucgagcgggacaucuccaccgagaucuaccaggccggcagcacccccugcaacgggguggagggcuucaacugcuacuucccccugcaguccuacggguuccagccgaccaacggcgugggguaccagcccuaccggguggucgugcugagcuucgagcuccugcacgcccccgccacggugugcggccccaagaaguccaccaaccuggucaagaacaagugcgugaacuucaacuucaacggccucaccgggaccggcgugcugaccgagagcaacaagaaguuccugccguuccagcaguucgggcgcgacaucgccgacacgaccgacgcgguccgcgacccccagacccuggagauccucgacaucacccccugcagcuucggcgggguguccgugaucacgccgggcaccaacaccagcaaccaggucgccgugcuguaccaggacgugaacugcaccgagguccccguggccauccacgccgaccagcugacgcccaccuggcggguguacuccaccggcagcaacgucuuccagacccgcgccgggugccucaucggcgcggagcacgugaacaacuccuacgagugcgacauccccaucggggccggcaucugcgccagcuaccagacgcagaccaacuccccgcggcgcgcccggagcguggcgucccagagcaucaucgccuacaccaugucccugggcgccgagaacagcgucgccuacuccaacaacagcaucgccauccccaccaacuucacgaucuccgugaccaccgagauccugcccgugagcaugaccaagacgagcgucgacugcaccauguacaucugcggggacuccaccgagugcagcaaccuccugcugcaguacggcuccuucugcacccagcucaaccgcgcgcugacggggaucgccguggagcaggacaagaacacccaggagguguucgcccaggucaagcagaucuacaagacgcccccgaucaaggacuucggcggguucaacuucagccagauccugcccgaccccuccaagcccagcaagcgguccuucaucgaggaccuccuguucaacaaggugacccuggccgacgccggcuucaucaagcaguacggcgacugccucggggacaucgcggcccgcgaccugaucugcgcccagaaguucaacggccugaccgugcucccgccccugcugaccgacgagaugaucgcccaguacaccagcgcccuccuggcggggaccaucacguccggcuggaccuucggggccggcgccgcccugcagauccccuucgcgaugcagauggccuaccgguucaacggcaucggggucacccagaacgugcucuacgagaaccagaagcugaucgccaaccaguucaacagcgccaucggcaagauccaggacucccugagcuccaccgccagcgcgcucgggaagcugcaggacguggucaaccagaacgcccaggcccugaacacgcucgugaagcagcuguccagcaacuucggcgccaucuccagcgugcugaacgacauccucucccgccuggacccgcccgaggccgaggugcagaucgaccggcugaucaccgggcgccuccagagccugcagaccuacgugacccagcagcugauccgggcggccgagauccgcgccagcgccaaccucgccgcgaccaagauguccgagugcguccugggccagagcaagcggguggacuucugcggcaagggguaccaccugauguccuucccccagagcgccccgcacggcguggucuuccuccacgugacguacgucuucgcccaggagaagaacuucaccaccgcccccgcgaucugccacgacgggaaggcccacuucccccgcgagggcguguucguguccaacgggacccacugguucgucacgcagcggaacuucuacgagccgcagaucaucaccaccgacaacaccuucgugagcggcaacugcgacguggucaucggcaucgugaacaacacgguguacgacccccugcagcccgagcuggacuccuucaaggaggagcucgacaaguacuucaagaaccacaccagccccgacgucgaccugggggacaucuccggcaucaacgccagcguggugaacauccagaaggagaucgaccgccugaacgaggucgccaagaaccucaacgagucccugaucgaccugcaggagcucgggaaguacgagcaguacaucaaguggccgugguacaucuggcugggcuucaucgccggccugaucgcgaucgugauggugaccaucaugcucugcugcaugaccagcugcugcuccugccugaaggggugcugcagcugcggcuccugcugcaaguucgacgaggacgacagcgagcccguccugaagggggugaagcuccacuacacgugaggacuaguuauaagacugacuagcccgaugggccucccaacgggcccuccuccccuccuugcaccgagauuaauaaaaaaaaaaaaaaaaaaaaaaaaaaaaaaaaaaaaaaaaaaaaaaaaaaaaaaaaaaaaaaaaugcaucccccccccccccccccccccccccccccccaaaggcucuuuucagagccaccagaauu

SEQ ID NO: 12813 - RNA, 4039 nt, Artificial Sequence
  SARS-CoV-2/Wuhan/WIV05/2019__EPI_ISL_402128 spike protein mRNA gc (1-1273)(K986P_V987P_ H1048Q_H1064N_ H1083N_H1101N) R9661
aggagaaagcuuaccauguucguguuccugguccuccugccccuggugagcucccagugcgugaaccucaccacccgcacgcagcugccgcccgccuacaccaacagcuucacccggggcgucuacuaccccgacaagguguuccgcuccagcgugcugcacuccacccaggaccucuuccugcccuucuucagcaacgucacgugguuccacgccauccacguguccgggaccaacggcaccaagcgguucgacaacccggugcugcccuucaacgacggggucuacuucgcgagcaccgagaaguccaacaucauccgcggcuggaucuucgggacgacccucgacagcaagacccagucccugcugaucgugaacaacgccaccaacguggucaucaaggugugcgaguuccaguucugcaacgaccccuuccucggcguguacuaccacaagaacaacaagagcuggauggaguccgaguuccgggucuacagcuccgccaacaacugcacguucgaguacgugagccagcccuuccugauggaccuggagggcaagcaggggaacuucaagaaccuccgcgaguucguguucaagaacaucgacggcuacuucaagaucuacuccaagcacaccccgaucaaccugguccgggaccugccccagggguucagcgcccucgagccccugguggaccugcccaucggcaucaacaucacccgcuuccagacccuccuggcccugcaccgguccuaccucacgccgggggacagcagcuccggcuggaccgcgggcgccgccgccuacuacgugggguaccugcagccccgcaccuuccugcucaaguacaacgagaacggcaccaucacggacgcggucgacugcgcccuggacccccugagcgagaccaagugcacccucaaguccuucaccguggagaaggggaucuaccagacgagcaacuuccgggugcagcccaccgaguccaucguccgcuucccgaacaucaccaaccugugccccuucggcgagguguucaacgccacccgguucgccagcgucuacgccuggaaccgcaagcggaucuccaacugcguggcggacuacagcgugcuguacaacuccgccagcuucuccacguucaagugcuacggcgucagccccaccaagcucaacgaccugugcuucaccaacguguacgccgacuccuucgugauccgcggggacgagguccggcagaucgcccccggccagaccgggaagaucgccgacuacaacuacaagcugccggacgacuucacgggcugcgugaucgcguggaacagcaacaaccucgacuccaaggucgggggcaacuacaacuaccuguaccgccuguuccgcaagagcaaccucaagcccuucgagcgggacaucuccaccgagaucuaccaggccggcagcacccccugcaacgggguggagggcuucaacugcuacuucccccugcaguccuacggguuccagccgaccaacggcgugggguaccagcccuaccggguggucgugcugagcuucgagcuccugcacgcccccgccacggugugcggccccaagaaguccaccaaccuggucaagaacaagugcgugaacuucaacuucaacggccucaccgggaccggcgugcugaccgagagcaacaagaaguuccugccguuccagcaguucgggcgcgacaucgccgacacgaccgacgcgguccgcgacccccagacccuggagauccucgacaucacccccugcagcuucggcgggguguccgugaucacgccgggcaccaacaccagcaaccaggucgccgugcuguaccaggacgugaacugcaccgagguccccguggccauccacgccgaccagcugacgcccaccuggcggguguacuccaccggcagcaacgucuuccagacccgcgccgggugccucaucggcgcggagcacgugaacaacuccuacgagugcgacauccccaucggggccggcaucugcgccagcuaccagacgcagaccaacuccccgcggcgcgcccggagcguggcgucccagagcaucaucgccuacaccaugucccugggcgccgagaacagcgucgccuacuccaacaacagcaucgccauccccaccaacuucacgaucuccgugaccaccgagauccugcccgugagcaugaccaagacgagcgucgacugcaccauguacaucugcggggacuccaccgagugcagcaaccuccugcugcaguacggcuccuucugcacccagcucaaccgcgcgcugacggggaucgccguggagcaggacaagaacacccaggagguguucgcccaggucaagcagaucuacaagacgcccccgaucaaggacuucggcggguucaacuucagccagauccugcccgaccccuccaagcccagcaagcgguccuucaucgaggaccuccuguucaacaaggugacccuggccgacgccggcuucaucaagcaguacggcgacugccucggggacaucgcggcccgcgaccugaucugcgcccagaaguucaacggccugaccgugcucccgccccugcugaccgacgagaugaucgcccaguacaccagcgcccuccuggcggggaccaucacguccggcuggaccuucggggccggcgccgcccugcagauccccuucgcgaugcagauggccuaccgguucaacggcaucggggucacccagaacgugcucuacgagaaccagaagcugaucgccaaccaguucaacagcgccaucggcaagauccaggacucccugagcuccaccgccagcgcgcucgggaagcugcaggacguggucaaccagaacgcccaggcccugaacacgcucgugaagcagcuguccagcaacuucggcgccaucuccagcgugcugaacgacauccucucccgccuggacccgcccgaggccgaggugcagaucgaccggcugaucaccgggcgccuccagagccugcagaccuacgugacccagcagcugauccgggcggccgagauccgcgccagcgccaaccucgccgcgaccaagauguccgagugcguccugggccagagcaagcggguggacuucugcggcaagggguaccagcugauguccuucccccagagcgccccgcacggcguggucuuccucaacgugacguacguccccgcccaggagaagaacuucaccaccgcccccgcgaucugcaacgacgggaaggcccacuucccccgcgagggcguguucguguccaacgggaccaacugguucgucacgcagcggaacuucuacgagccgcagaucaucaccaccgacaacaccuucgugagcggcaacugcgacguggucaucggcaucgugaacaacacgguguacgacccccugcagcccgagcuggacuccuucaaggaggagcucgacaaguacuucaagaaccacaccagccccgacgucgaccugggggacaucuccggcaucaacgccagcguggugaacauccagaaggagaucgaccgccugaacgaggucgccaagaaccucaacgagucccugaucgaccugcaggagcucgggaaguacgagcaguacaucaaguggccgugguacaucuggcugggcuucaucgccggccugaucgcgaucgugauggugaccaucaugcucugcugcaugaccagcugcugcuccugccugaaggggugcugcagcugcggcuccugcugcaaguucgacgaggacgacagcgagcccguccugaagggggugaagcuccacuacacgugaggacuaguuauaagacugacuagcccgaugggccucccaacgggcccuccuccccuccuugcaccgagauuaauaaaaaaaaaaaaaaaaaaaaaaaaaaaaaaaaaaaaaaaaaaaaaaaaaaaaaaaaaaaaaaaaugcaucccccccccccccccccccccccccccccccaaaggcucuuuucagagccaccagaauu

SEQ ID NO: 12814 - RNA, 4039 nt, Artificial Sequence
  SARS-CoV-2/Wuhan/WIV05/2019__EPI_ISL_402128 spike protein mRNA gc (1-1273)(I712C_T1077C)
aggagaaagcuuaccauguucguguuccugguccuccugccccuggugagcucccagugcgugaaccucaccacccgcacgcagcugccgcccgccuacaccaacagcuucacccggggcgucuacuaccccgacaagguguuccgcuccagcgugcugcacuccacccaggaccucuuccugcccuucuucagcaacgucacgugguuccacgccauccacguguccgggaccaacggcaccaagcgguucgacaacccggugcugcccuucaacgacggggucuacuucgcgagcaccgagaaguccaacaucauccgcggcuggaucuucgggacgacccucgacagcaagacccagucccugcugaucgugaacaacgccaccaacguggucaucaaggugugcgaguuccaguucugcaacgaccccuuccucggcguguacuaccacaagaacaacaagagcuggauggaguccgaguuccgggucuacagcuccgccaacaacugcacguucgaguacgugagccagcccuuccugauggaccuggagggcaagcaggggaacuucaagaaccuccgcgaguucguguucaagaacaucgacggcuacuucaagaucuacuccaagcacaccccgaucaaccugguccgggaccugccccagggguucagcgcccucgagccccugguggaccugcccaucggcaucaacaucacccgcuuccagacccuccuggcccugcaccgguccuaccucacgccgggggacagcagcuccggcuggaccgcgggcgccgccgccuacuacgugggguaccugcagccccgcaccuuccugcucaaguacaacgagaacggcaccaucacggacgcggucgacugcgcccuggacccccugagcgagaccaagugcacccucaaguccuucaccguggagaaggggaucuaccagacgagcaacuuccgggugcagcccaccgaguccaucguccgcuucccgaacaucaccaaccugugccccuucggcgagguguucaacgccacccgguucgccagcgucuacgccuggaaccgcaagcggaucuccaacugcguggcggacuacagcgugcuguacaacuccgccagcuucuccacguucaagugcuacggcgucagccccaccaagcucaacgaccugugcuucaccaacguguacgccgacuccuucgugauccgcggggacgagguccggcagaucgcccccggccagaccgggaagaucgccgacuacaacuacaagcugccggacgacuucacgggcugcgugaucgcguggaacagcaacaaccucgacuccaaggucgggggcaacuacaacuaccuguaccgccuguuccgcaagagcaaccucaagcccuucgagcgggacaucuccaccgagaucuaccaggccggcagcacccccugcaacgggguggagggcuucaacugcuacuucccccugcaguccuacggguuccagccgaccaacggcgugggguaccagcccuaccggguggucgugcugagcuucgagcuccugcacgcccccgccacggugugcggccccaagaaguccaccaaccuggucaagaacaagugcgugaacuucaacuucaacggccucaccgggaccggcgugcugaccgagagcaacaagaaguuccugccguuccagcaguucgggcgcgacaucgccgacacgaccgacgcgguccgcgacccccagacccuggagauccucgacaucacccccugcagcuucggcgggguguccgugaucacgccgggcaccaacaccagcaaccaggucgccgugcuguaccaggacgugaacugcaccgagguccccguggccauccacgccgaccagcugacgcccaccuggcggguguacuccaccggcagcaacgucuuccagacccgcgccgggugccucaucggcgcggagcacgugaacaacuccuacgagugcgacauccccaucggggccggcaucugcgccagcuaccagacgcagaccaacuccccgcggcgcgcccggagcguggcgucccagagcaucaucgccuacaccaugucccugggcgccgagaacagcgucgccuacuccaacaacagcugcgccauccccaccaacuucacgaucuccgugaccaccgagauccugcccgugagcaugaccaagacgagcgucgacugcaccauguacaucugcggggacuccaccgagugcagcaaccuccugcugcaguacggcuccuucugcacccagcucaaccgcgcgcugacggggaucgccguggagcaggacaagaacacccaggagguguucgcccaggucaagcagaucuacaagacgcccccgaucaaggacuucggcggguucaacuucagccagauccugcccgaccccuccaagcccagcaagcgguccuucaucgaggaccuccuguucaacaaggugacccuggccgacgccggcuucaucaagcaguacggcgacugccucggggacaucgcggcccgcgaccugaucugcgcccagaaguucaacggccugaccgugcucccgccccugcugaccgacgagaugaucgcccaguacaccagcgcccuccuggcggggaccaucacguccggcuggaccuucggggccggcgccgcccugcagauccccuucgcgaugcagauggccuaccgguucaacggcaucggggucacccagaacgugcucuacgagaaccagaagcugaucgccaaccaguucaacagcgccaucggcaagauccaggacucccugagcuccaccgccagcgcgcucgggaagcugcaggacguggucaaccagaacgcccaggcccugaacacgcucgugaagcagcuguccagcaacuucggcgccaucuccagcgugcugaacgacauccucucccgccuggacaaggucgaggccgaggugcagaucgaccggcugaucaccgggcgccuccagagccugcagaccuacgugacccagcagcugauccgggcggccgagauccgcgccagcgccaaccucgccgcgaccaagauguccgagugcguccugggccagagcaagcggguggacuucugcggcaagggguaccaccugauguccuucccccagagcgccccgcacggcguggucuuccuccacgugacguacguccccgcccaggagaagaacuucaccugcgcccccgcgaucugccacgacgggaaggcccacuucccccgcgagggcguguucguguccaacgggacccacugguucgucacgcagcggaacuucuacgagccgcagaucaucaccaccgacaacaccuucgugagcggcaacugcgacguggucaucggcaucgugaacaacacgguguacgacccccugcagcccgagcuggacuccuucaaggaggagcucgacaaguacuucaagaaccacaccagccccgacgucgaccugggggacaucuccggcaucaacgccagcguggugaacauccagaaggagaucgaccgccugaacgaggucgccaagaaccucaacgagucccugaucgaccugcaggagcucgggaaguacgagcaguacaucaaguggccgugguacaucuggcugggcuucaucgccggccugaucgcgaucgugauggugaccaucaugcucugcugcaugaccagcugcugcuccugccugaaggggugcugcagcugcggcuccugcugcaaguucgacgaggacgacagcgagcccguccugaagggggugaagcuccacuacacgugaggacuaguuauaagacugacuagcccgaugggccucccaacgggcccuccuccccuccuugcaccgagauuaauaaaaaaaaaaaaaaaaaaaaaaaaaaaaaaaaaaaaaaaaaaaaaaaaaaaaaaaaaaaaaaaaugcaucccccccccccccccccccccccccccccccaaaggcucuuuucagagccaccagaauu

SEQ ID NO: 12815 - RNA, 4039 nt, Artificial Sequence
  SARS-CoV-2/Wuhan/WIV05/2019__EPI_ISL_402128 spike protein mRNA gc (1-1273)(I714C_Y1110C)
aggagaaagcuuaccauguucguguuccugguccuccugccccuggugagcucccagugcgugaaccucaccacccgcacgcagcugccgcccgccuacaccaacagcuucacccggggcgucuacuaccccgacaagguguuccgcuccagcgugcugcacuccacccaggaccucuuccugcccuucuucagcaacgucacgugguuccacgccauccacguguccgggaccaacggcaccaagcgguucgacaacccggugcugcccuucaacgacggggucuacuucgcgagcaccgagaaguccaacaucauccgcggcuggaucuucgggacgacccucgacagcaagacccagucccugcugaucgugaacaacgccaccaacguggucaucaaggugugcgaguuccaguucugcaacgaccccuuccucggcguguacuaccacaagaacaacaagagcuggauggaguccgaguuccgggucuacagcuccgccaacaacugcacguucgaguacgugagccagcccuuccugauggaccuggagggcaagcaggggaacuucaagaaccuccgcgaguucguguucaagaacaucgacggcuacuucaagaucuacuccaagcacaccccgaucaaccugguccgggaccugccccagggguucagcgcccucgagccccugguggaccugcccaucggcaucaacaucacccgcuuccagacccuccuggcccugcaccgguccuaccucacgccgggggacagcagcuccggcuggaccgcgggcgccgccgccuacuacgugggguaccugcagccccgcaccuuccugcucaaguacaacgagaacggcaccaucacggacgcggucgacugcgcccuggacccccugagcgagaccaagugcacccucaaguccuucaccguggagaaggggaucuaccagacgagcaacuuccgggugcagcccaccgaguccaucguccgcuucccgaacaucaccaaccugugccccuucggcgagguguucaacgccacccgguucgccagcgucuacgccuggaaccgcaagcggaucuccaacugcguggcggacuacagcgugcuguacaacuccgccagcuucuccacguucaagugcuacggcgucagccccaccaagcucaacgaccugugcuucaccaacguguacgccgacuccuucgugauccgcggggacgagguccggcagaucgcccccggccagaccgggaagaucgccgacuacaacuacaagcugccggacgacuucacgggcugcgugaucgcguggaacagcaacaaccucgacuccaaggucgggggcaacuacaacuaccuguaccgccuguuccgcaagagcaaccucaagcccuucgagcgggacaucuccaccgagaucuaccaggccggcagcacccccugcaacgggguggagggcuucaacugcuacuucccccugcaguccuacggguuccagccgaccaacggcgugggguaccagcccuaccggguggucgugcugagcuucgagcuccugcacgcccccgccacggugugcggccccaagaaguccaccaaccuggucaagaacaagugcgugaacuucaacuucaacggccucaccgggaccggcgugcugaccgagagcaacaagaaguuccugccguuccagcaguucgggcgcgacaucgccgacacgaccgacgcgguccgcgacccccagacccuggagauccucgacaucacccccugcagcuucggcgggguguccgugaucacgccgggcaccaacaccagcaaccaggucgccgugcuguaccaggacgugaacugcaccgagguccccguggccauccacgccgaccagcugacgcccaccuggcggguguacuccaccggcagcaacgucuuccagacccgcgccgggugccucaucggcgcggagcacgugaacaacuccuacgagugcgacauccccaucggggccggcaucugcgccagcuaccagacgcagaccaacuccccgcggcgcgcccggagcguggcgucccagagcaucaucgccuacaccaugucccugggcgccgagaacagcgucgccuacuccaacaacagcaucgccugccccaccaacuucacgaucuccgugaccaccgagauccugcccgugagcaugaccaagacgagcgucgacugcaccauguacaucugcggggacuccaccgagugcagcaaccuccugcugcaguacggcuccuucugcacccagcucaaccgcgcgcugacggggaucgccguggagcaggacaagaacacccaggagguguucgcccaggucaagcagaucuacaagacgcccccgaucaaggacuucggcggguucaacuucagccagauccugcccgaccccuccaagcccagcaagcgguccuucaucgaggaccuccuguucaacaaggugacccuggccgacgccggcuucaucaagcaguacggcgacugccucggggacaucgcggcccgcgaccugaucugcgcccagaaguucaacggccugaccgugcucccgccccugcugaccgacgagaugaucgcccaguacaccagcgcccuccuggcggggaccaucacguccggcuggaccuucggggccggcgccgcccugcagauccccuucgcgaugcagauggccuaccgguucaacggcaucggggucacccagaacgugcucuacgagaaccagaagcugaucgccaaccaguucaacagcgccaucggcaagauccaggacucccugagcuccaccgccagcgcgcucgggaagcugcaggacguggucaaccagaacgcccaggcccugaacacgcucgugaagcagcuguccagcaacuucggcgccaucuccagcgugcugaacgacauccucucccgccuggacaaggucgaggccgaggugcagaucgaccggcugaucaccgggcgccuccagagccugcagaccuacgugacccagcagcugauccgggcggccgagauccgcgccagcgccaaccucgccgcgaccaagauguccgagugcguccugggccagagcaagcggguggacuucugcggcaagggguaccaccugauguccuucccccagagcgccccgcacggcguggucuuccuccacgugacguacguccccgcccaggagaagaacuucaccaccgcccccgcgaucugccacgacgggaaggcccacuucccccgcgagggcguguucguguccaacgggacccacugguucgucacgcagcggaacuucugcgagccgcagaucaucaccaccgacaacaccuucgugagcggcaacugcgacguggucaucggcaucgugaacaacacgguguacgacccccugcagcccgagcuggacuccuucaaggaggagcucgacaaguacuucaagaaccacaccagccccgacgucgaccugggggacaucuccggcaucaacgccagcguggugaacauccagaaggagaucgaccgccugaacgaggucgccaagaaccucaacgagucccugaucgaccugcaggagcucgggaaguacgagcaguacaucaaguggccgugguacaucuggcugggcuucaucgccggccugaucgcgaucgugauggugaccaucaugcucugcugcaugaccagcugcugcuccugccugaaggggugcugcagcugcggcuccugcugcaaguucgacgaggacgacagcgagcccguccugaagggggugaagcuccacuacacgugaggacuaguuauaagacugacuagcccgaugggccucccaacgggcccuccuccccuccuugcaccgagauuaauaaaaaaaaaaaaaaaaaaaaaaaaaaaaaaaaaaaaaaaaaaaaaaaaaaaaaaaaaaaaaaaaugcaucccccccccccccccccccccccccccccccaaaggcucuuuucagagccaccagaauu

SEQ ID NO: 12816 - RNA, 4039 nt, Artificial Sequence
  SARS-CoV-2/Wuhan/WIV05/2019__EPI_ISL_402128 spike protein mRNA gc (1-1273)(P715C_P1069C) R9561
aggagaaagcuuaccauguucguguuccugguccuccugccccuggugagcucccagugcgugaaccucaccacccgcacgcagcugccgcccgccuacaccaacagcuucacccggggcgucuacuaccccgacaagguguuccgcuccagcgugcugcacuccacccaggaccucuuccugcccuucuucagcaacgucacgugguuccacgccauccacguguccgggaccaacggcaccaagcgguucgacaacccggugcugcccuucaacgacggggucuacuucgcgagcaccgagaaguccaacaucauccgcggcuggaucuucgggacgacccucgacagcaagacccagucccugcugaucgugaacaacgccaccaacguggucaucaaggugugcgaguuccaguucugcaacgaccccuuccucggcguguacuaccacaagaacaacaagagcuggauggaguccgaguuccgggucuacagcuccgccaacaacugcacguucgaguacgugagccagcccuuccugauggaccuggagggcaagcaggggaacuucaagaaccuccgcgaguucguguucaagaacaucgacggcuacuucaagaucuacuccaagcacaccccgaucaaccugguccgggaccugccccagggguucagcgcccucgagccccugguggaccugcccaucggcaucaacaucacccgcuuccagacccuccuggcccugcaccgguccuaccucacgccgggggacagcagcuccggcuggaccgcgggcgccgccgccuacuacgugggguaccugcagccccgcaccuuccugcucaaguacaacgagaacggcaccaucacggacgcggucgacugcgcccuggacccccugagcgagaccaagugcacccucaaguccuucaccguggagaaggggaucuaccagacgagcaacuuccgggugcagcccaccgaguccaucguccgcuucccgaacaucaccaaccugugccccuucggcgagguguucaacgccacccgguucgccagcgucuacgccuggaaccgcaagcggaucuccaacugcguggcggacuacagcgugcuguacaacuccgccagcuucuccacguucaagugcuacggcgucagccccaccaagcucaacgaccugugcuucaccaacguguacgccgacuccuucgugauccgcggggacgagguccggcagaucgcccccggccagaccgggaagaucgccgacuacaacuacaagcugccggacgacuucacgggcugcgugaucgcguggaacagcaacaaccucgacuccaaggucgggggcaacuacaacuaccuguaccgccuguuccgcaagagcaaccucaagcccuucgagcgggacaucuccaccgagaucuaccaggccggcagcacccccugcaacgggguggagggcuucaacugcuacuucccccugcaguccuacggguuccagccgaccaacggcgugggguaccagcccuaccggguggucgugcugagcuucgagcuccugcacgcccccgccacggugugcggccccaagaaguccaccaaccuggucaagaacaagugcgugaacuucaacuucaacggccucaccgggaccggcgugcugaccgagagcaacaagaaguuccugccguuccagcaguucgggcgcgacaucgccgacacgaccgacgcgguccgcgacccccagacccuggagauccucgacaucacccccugcagcuucggcgggguguccgugaucacgccgggcaccaacaccagcaaccaggucgccgugcuguaccaggacgugaacugcaccgagguccccguggccauccacgccgaccagcugacgcccaccuggcggguguacuccaccggcagcaacgucuuccagacccgcgccgggugccucaucggcgcggagcacgugaacaacuccuacgagugcgacauccccaucggggccggcaucugcgccagcuaccagacgcagaccaacuccccgcggcgcgcccggagcguggcgucccagagcaucaucgccuacaccaugucccugggcgccgagaacagcgucgccuacuccaacaacagcaucgccaucugcaccaacuucacgaucuccgugaccaccgagauccugcccgugagcaugaccaagacgagcgucgacugcaccauguacaucugcggggacuccaccgagugcagcaaccuccugcugcaguacggcuccuucugcacccagcucaaccgcgcgcugacggggaucgccguggagcaggacaagaacacccaggagguguucgcccaggucaagcagaucuacaagacgcccccgaucaaggacuucggcggguucaacuucagccagauccugcccgaccccuccaagcccagcaagcgguccuucaucgaggaccuccuguucaacaaggugacccuggccgacgccggcuucaucaagcaguacggcgacugccucggggacaucgcggcccgcgaccugaucugcgcccagaaguucaacggccugaccgugcucccgccccugcugaccgacgagaugaucgcccaguacaccagcgcccuccuggcggggaccaucacguccggcuggaccuucggggccggcgccgcccugcagauccccuucgcgaugcagauggccuaccgguucaacggcaucggggucacccagaacgugcucuacgagaaccagaagcugaucgccaaccaguucaacagcgccaucggcaagauccaggacucccugagcuccaccgccagcgcgcucgggaagcugcaggacguggucaaccagaacgcccaggcccugaacacgcucgugaagcagcuguccagcaacuucggcgccaucuccagcgugcugaacgacauccucucccgccuggacaaggucgaggccgaggugcagaucgaccggcugaucaccgggcgccuccagagccugcagaccuacgugacccagcagcugauccgggcggccgagauccgcgccagcgccaaccucgccgcgaccaagauguccgagugcguccugggccagagcaagcggguggacuucugcggcaagggguaccaccugauguccuucccccagagcgccccgcacggcguggucuuccuccacgugacguacgucugcgcccaggagaagaacuucaccaccgcccccgcgaucugccacgacgggaaggcccacuucccccgcgagggcguguucguguccaacgggacccacugguucgucacgcagcggaacuucuacgagccgcagaucaucaccaccgacaacaccuucgugagcggcaacugcgacguggucaucggcaucgugaacaacacgguguacgacccccugcagcccgagcuggacuccuucaaggaggagcucgacaaguacuucaagaaccacaccagccccgacgucgaccugggggacaucuccggcaucaacgccagcguggugaacauccagaaggagaucgaccgccugaacgaggucgccaagaaccucaacgagucccugaucgaccugcaggagcucgggaaguacgagcaguacaucaaguggccgugguacaucuggcugggcuucaucgccggccugaucgcgaucgugauggugaccaucaugcucugcugcaugaccagcugcugcuccugccugaaggggugcugcagcugcggcuccugcugcaaguucgacgaggacgacagcgagcccguccugaagggggugaagcuccacuacacgugaggacuaguuauaagacugacuagcccgaugggccucccaacgggcccuccuccccuccuugcaccgagauuaauaaaaaaaaaaaaaaaaaaaaaaaaaaaaaaaaaaaaaaaaaaaaaaaaaaaaaaaaaaaaaaaaugcaucccccccccccccccccccccccccccccccaaaggcucuuuucagagccaccagaauu

SEQ ID NO: 12817 - RNA, 4039 nt, Artificial Sequence
  SARS-CoV-2/Wuhan/WIV05/2019__EPI_ISL_402128 spike protein mRNA gc (1-1273)(G889C_L1034C) R9564
aggagaaagcuuaccauguucguguuccugguccuccugccccuggugagcucccagugcgugaaccucaccacccgcacgcagcugccgcccgccuacaccaacagcuucacccggggcgucuacuaccccgacaagguguuccgcuccagcgugcugcacuccacccaggaccucuuccugcccuucuucagcaacgucacgugguuccacgccauccacguguccgggaccaacggcaccaagcgguucgacaacccggugcugcccuucaacgacggggucuacuucgcgagcaccgagaaguccaacaucauccgcggcuggaucuucgggacgacccucgacagcaagacccagucccugcugaucgugaacaacgccaccaacguggucaucaaggugugcgaguuccaguucugcaacgaccccuuccucggcguguacuaccacaagaacaacaagagcuggauggaguccgaguuccgggucuacagcuccgccaacaacugcacguucgaguacgugagccagcccuuccugauggaccuggagggcaagcaggggaacuucaagaaccuccgcgaguucguguucaagaacaucgacggcuacuucaagaucuacuccaagcacaccccgaucaaccugguccgggaccugccccagggguucagcgcccucgagccccugguggaccugcccaucggcaucaacaucacccgcuuccagacccuccuggcccugcaccgguccuaccucacgccgggggacagcagcuccggcuggaccgcgggcgccgccgccuacuacgugggguaccugcagccccgcaccuuccugcucaaguacaacgagaacggcaccaucacggacgcggucgacugcgcccuggacccccugagcgagaccaagugcacccucaaguccuucaccguggagaaggggaucuaccagacgagcaacuuccgggugcagcccaccgaguccaucguccgcuucccgaacaucaccaaccugugccccuucggcgagguguucaacgccacccgguucgccagcgucuacgccuggaaccgcaagcggaucuccaacugcguggcggacuacagcgugcuguacaacuccgccagcuucuccacguucaagugcuacggcgucagccccaccaagcucaacgaccugugcuucaccaacguguacgccgacuccuucgugauccgcggggacgagguccggcagaucgcccccggccagaccgggaagaucgccgacuacaacuacaagcugccggacgacuucacgggcugcgugaucgcguggaacagcaacaaccucgacuccaaggucgggggcaacuacaacuaccuguaccgccuguuccgcaagagcaaccucaagcccuucgagcgggacaucuccaccgagaucuaccaggccggcagcacccccugcaacgggguggagggcuucaacugcuacuucccccugcaguccuacggguuccagccgaccaacggcgugggguaccagcccuaccggguggucgugcugagcuucgagcuccugcacgcccccgccacggugugcggccccaagaaguccaccaaccuggucaagaacaagugcgugaacuucaacuucaacggccucaccgggaccggcgugcugaccgagagcaacaagaaguuccugccguuccagcaguucgggcgcgacaucgccgacacgaccgacgcgguccgcgacccccagacccuggagauccucgacaucacccccugcagcuucggcgggguguccgugaucacgccgggcaccaacaccagcaaccaggucgccgugcuguaccaggacgugaacugcaccgagguccccguggccauccacgccgaccagcugacgcccaccuggcggguguacuccaccggcagcaacgucuuccagacccgcgccgggugccucaucggcgcggagcacgugaacaacuccuacgagugcgacauccccaucggggccggcaucugcgccagcuaccagacgcagaccaacuccccgcggcgcgcccggagcguggcgucccagagcaucaucgccuacaccaugucccugggcgccgagaacagcgucgccuacuccaacaacagcaucgccauccccaccaacuucacgaucuccgugaccaccgagauccugcccgugagcaugaccaagacgagcgucgacugcaccauguacaucugcggggacuccaccgagugcagcaaccuccugcugcaguacggcuccuucugcacccagcucaaccgcgcgcugacggggaucgccguggagcaggacaagaacacccaggagguguucgcccaggucaagcagaucuacaagacgcccccgaucaaggacuucggcggguucaacuucagccagauccugcccgaccccuccaagcccagcaagcgguccuucaucgaggaccuccuguucaacaaggugacccuggccgacgccggcuucaucaagcaguacggcgacugccucggggacaucgcggcccgcgaccugaucugcgcccagaaguucaacggccugaccgugcucccgccccugcugaccgacgagaugaucgcccaguacaccagcgcccuccuggcggggaccaucacguccggcuggaccuucugcgccggcgccgcccugcagauccccuucgcgaugcagauggccuaccgguucaacggcaucggggucacccagaacgugcucuacgagaaccagaagcugaucgccaaccaguucaacagcgccaucggcaagauccaggacucccugagcuccaccgccagcgcgcucgggaagcugcaggacguggucaaccagaacgcccaggcccugaacacgcucgugaagcagcuguccagcaacuucggcgccaucuccagcgugcugaacgacauccucucccgccuggacaaggucgaggccgaggugcagaucgaccggcugaucaccgggcgccuccagagccugcagaccuacgugacccagcagcugauccgggcggccgagauccgcgccagcgccaaccucgccgcgaccaagauguccgagugcgucugcggccagagcaagcggguggacuucugcggcaagggguaccaccugauguccuucccccagagcgccccgcacggcguggucuuccuccacgugacguacguccccgcccaggagaagaacuucaccaccgcccccgcgaucugccacgacgggaaggcccacuucccccgcgagggcguguucguguccaacgggacccacugguucgucacgcagcggaacuucuacgagccgcagaucaucaccaccgacaacaccuucgugagcggcaacugcgacguggucaucggcaucgugaacaacacgguguacgacccccugcagcccgagcuggacuccuucaaggaggagcucgacaaguacuucaagaaccacaccagccccgacgucgaccugggggacaucuccggcaucaacgccagcguggugaacauccagaaggagaucgaccgccugaacgaggucgccaagaaccucaacgagucccugaucgaccugcaggagcucgggaaguacgagcaguacaucaaguggccgugguacaucuggcugggcuucaucgccggccugaucgcgaucgugauggugaccaucaugcucugcugcaugaccagcugcugcuccugccugaaggggugcugcagcugcggcuccugcugcaaguucgacgaggacgacagcgagcccguccugaagggggugaagcuccacuacacgugaggacuaguuauaagacugacuagcccgaugggccucccaacgggcccuccuccccuccuugcaccgagauuaauaaaaaaaaaaaaaaaaaaaaaaaaaaaaaaaaaaaaaaaaaaaaaaaaaaaaaaaaaaaaaaaaugcaucccccccccccccccccccccccccccccccaaaggcucuuuucagagccaccagaauu

SEQ ID NO: 12818 - RNA, 4039 nt, Artificial Sequence
  SARS-CoV-2/Wuhan/WIV05/2019__EPI_ISL_402128 spike protein mRNA gc (1-1273)(I909C_Y1047C)
aggagaaagcuuaccauguucguguuccugguccuccugccccuggugagcucccagugcgugaaccucaccacccgcacgcagcugccgcccgccuacaccaacagcuucacccggggcgucuacuaccccgacaagguguuccgcuccagcgugcugcacuccacccaggaccucuuccugcccuucuucagcaacgucacgugguuccacgccauccacguguccgggaccaacggcaccaagcgguucgacaacccggugcugcccuucaacgacggggucuacuucgcgagcaccgagaaguccaacaucauccgcggcuggaucuucgggacgacccucgacagcaagacccagucccugcugaucgugaacaacgccaccaacguggucaucaaggugugcgaguuccaguucugcaacgaccccuuccucggcguguacuaccacaagaacaacaagagcuggauggaguccgaguuccgggucuacagcuccgccaacaacugcacguucgaguacgugagccagcccuuccugauggaccuggagggcaagcaggggaacuucaagaaccuccgcgaguucguguucaagaacaucgacggcuacuucaagaucuacuccaagcacaccccgaucaaccugguccgggaccugccccagggguucagcgcccucgagccccugguggaccugcccaucggcaucaacaucacccgcuuccagacccuccuggcccugcaccgguccuaccucacgccgggggacagcagcuccggcuggaccgcgggcgccgccgccuacuacgugggguaccugcagccccgcaccuuccugcucaaguacaacgagaacggcaccaucacggacgcggucgacugcgcccuggacccccugagcgagaccaagugcacccucaaguccuucaccguggagaaggggaucuaccagacgagcaacuuccgggugcagcccaccgaguccaucguccgcuucccgaacaucaccaaccugugccccuucggcgagguguucaacgccacccgguucgccagcgucuacgccuggaaccgcaagcggaucuccaacugcguggcggacuacagcgugcuguacaacuccgccagcuucuccacguucaagugcuacggcgucagccccaccaagcucaacgaccugugcuucaccaacguguacgccgacuccuucgugauccgcggggacgagguccggcagaucgcccccggccagaccgggaagaucgccgacuacaacuacaagcugccggacgacuucacgggcugcgugaucgcguggaacagcaacaaccucgacuccaaggucgggggcaacuacaacuaccuguaccgccuguuccgcaagagcaaccucaagcccuucgagcgggacaucuccaccgagaucuaccaggccggcagcacccccugcaacgggguggagggcuucaacugcuacuucccccugcaguccuacggguuccagccgaccaacggcgugggguaccagcccuaccggguggucgugcugagcuucgagcuccugcacgcccccgccacggugugcggccccaagaaguccaccaaccuggucaagaacaagugcgugaacuucaacuucaacggccucaccgggaccggcgugcugaccgagagcaacaagaaguuccugccguuccagcaguucgggcgcgacaucgccgacacgaccgacgcgguccgcgacccccagacccuggagauccucgacaucacccccugcagcuucggcgggguguccgugaucacgccgggcaccaacaccagcaaccaggucgccgugcuguaccaggacgugaacugcaccgagguccccguggccauccacgccgaccagcugacgcccaccuggcggguguacuccaccggcagcaacgucuuccagacccgcgccgggugccucaucggcgcggagcacgugaacaacuccuacgagugcgacauccccaucggggccggcaucugcgccagcuaccagacgcagaccaacuccccgcggcgcgcccggagcguggcgucccagagcaucaucgccuacaccaugucccugggcgccgagaacagcgucgccuacuccaacaacagcaucgccauccccaccaacuucacgaucuccgugaccaccgagauccugcccgugagcaugaccaagacgagcgucgacugcaccauguacaucugcggggacuccaccgagugcagcaaccuccugcugcaguacggcuccuucugcacccagcucaaccgcgcgcugacggggaucgccguggagcaggacaagaacacccaggagguguucgcccaggucaagcagaucuacaagacgcccccgaucaaggacuucggcggguucaacuucagccagauccugcccgaccccuccaagcccagcaagcgguccuucaucgaggaccuccuguucaacaaggugacccuggccgacgccggcuucaucaagcaguacggcgacugccucggggacaucgcggcccgcgaccugaucugcgcccagaaguucaacggccugaccgugcucccgccccugcugaccgacgagaugaucgcccaguacaccagcgcccuccuggcggggaccaucacguccggcuggaccuucggggccggcgccgcccugcagauccccuucgcgaugcagauggccuaccgguucaacggcugcggggucacccagaacgugcucuacgagaaccagaagcugaucgccaaccaguucaacagcgccaucggcaagauccaggacucccugagcuccaccgccagcgcgcucgggaagcugcaggacguggucaaccagaacgcccaggcccugaacacgcucgugaagcagcuguccagcaacuucggcgccaucuccagcgugcugaacgacauccucucccgccuggacaaggucgaggccgaggugcagaucgaccggcugaucaccgggcgccuccagagccugcagaccuacgugacccagcagcugauccgggcggccgagauccgcgccagcgccaaccucgccgcgaccaagauguccgagugcguccugggccagagcaagcggguggacuucugcggcaaggggugccaccugauguccuucccccagagcgccccgcacggcguggucuuccuccacgugacguacguccccgcccaggagaagaacuucaccaccgcccccgcgaucugccacgacgggaaggcccacuucccccgcgagggcguguucguguccaacgggacccacugguucgucacgcagcggaacuucuacgagccgcagaucaucaccaccgacaacaccuucgugagcggcaacugcgacguggucaucggcaucgugaacaacacgguguacgacccccugcagcccgagcuggacuccuucaaggaggagcucgacaaguacuucaagaaccacaccagccccgacgucgaccugggggacaucuccggcaucaacgccagcguggugaacauccagaaggagaucgaccgccugaacgaggucgccaagaaccucaacgagucccugaucgaccugcaggagcucgggaaguacgagcaguacaucaaguggccgugguacaucuggcugggcuucaucgccggccugaucgcgaucgugauggugaccaucaugcucugcugcaugaccagcugcugcuccugccugaaggggugcugcagcugcggcuccugcugcaaguucgacgaggacgacagcgagcccguccugaagggggugaagcuccacuacacgugaggacuaguuauaagacugacuagcccgaugggccucccaacgggcccuccuccccuccuugcaccgagauuaauaaaaaaaaaaaaaaaaaaaaaaaaaaaaaaaaaaaaaaaaaaaaaaaaaaaaaaaaaaaaaaaaugcaucccccccccccccccccccccccccccccccaaaggcucuuuucagagccaccagaauu

SEQ ID NO: 12819 - RNA, 4039 nt, Artificial Sequence
  SARS-CoV-2/Wuhan/WIV05/2019__EPI_ISL_402128 spike protein mRNA gc (1-1273)(Q965C_S1003C)
aggagaaagcuuaccauguucguguuccugguccuccugccccuggugagcucccagugcgugaaccucaccacccgcacgcagcugccgcccgccuacaccaacagcuucacccggggcgucuacuaccccgacaagguguuccgcuccagcgugcugcacuccacccaggaccucuuccugcccuucuucagcaacgucacgugguuccacgccauccacguguccgggaccaacggcaccaagcgguucgacaacccggugcugcccuucaacgacggggucuacuucgcgagcaccgagaaguccaacaucauccgcggcuggaucuucgggacgacccucgacagcaagacccagucccugcugaucgugaacaacgccaccaacguggucaucaaggugugcgaguuccaguucugcaacgaccccuuccucggcguguacuaccacaagaacaacaagagcuggauggaguccgaguuccgggucuacagcuccgccaacaacugcacguucgaguacgugagccagcccuuccugauggaccuggagggcaagcaggggaacuucaagaaccuccgcgaguucguguucaagaacaucgacggcuacuucaagaucuacuccaagcacaccccgaucaaccugguccgggaccugccccagggguucagcgcccucgagccccugguggaccugcccaucggcaucaacaucacccgcuuccagacccuccuggcccugcaccgguccuaccucacgccgggggacagcagcuccggcuggaccgcgggcgccgccgccuacuacgugggguaccugcagccccgcaccuuccugcucaaguacaacgagaacggcaccaucacggacgcggucgacugcgcccuggacccccugagcgagaccaagugcacccucaaguccuucaccguggagaaggggaucuaccagacgagcaacuuccgggugcagcccaccgaguccaucguccgcuucccgaacaucaccaaccugugccccuucggcgagguguucaacgccacccgguucgccagcgucuacgccuggaaccgcaagcggaucuccaacugcguggcggacuacagcgugcuguacaacuccgccagcuucuccacguucaagugcuacggcgucagccccaccaagcucaacgaccugugcuucaccaacguguacgccgacuccuucgugauccgcggggacgagguccggcagaucgcccccggccagaccgggaagaucgccgacuacaacuacaagcugccggacgacuucacgggcugcgugaucgcguggaacagcaacaaccucgacuccaaggucgggggcaacuacaacuaccuguaccgccuguuccgcaagagcaaccucaagcccuucgagcgggacaucuccaccgagaucuaccaggccggcagcacccccugcaacgggguggagggcuucaacugcuacuucccccugcaguccuacggguuccagccgaccaacggcgugggguaccagcccuaccggguggucgugcugagcuucgagcuccugcacgcccccgccacggugugcggccccaagaaguccaccaaccuggucaagaacaagugcgugaacuucaacuucaacggccucaccgggaccggcgugcugaccgagagcaacaagaaguuccugccguuccagcaguucgggcgcgacaucgccgacacgaccgacgcgguccgcgacccccagacccuggagauccucgacaucacccccugcagcuucggcgggguguccgugaucacgccgggcaccaacaccagcaaccaggucgccgugcuguaccaggacgugaacugcaccgagguccccguggccauccacgccgaccagcugacgcccaccuggcggguguacuccaccggcagcaacgucuuccagacccgcgccgggugccucaucggcgcggagcacgugaacaacuccuacgagugcgacauccccaucggggccggcaucugcgccagcuaccagacgcagaccaacuccccgcggcgcgcccggagcguggcgucccagagcaucaucgccuacaccaugucccugggcgccgagaacagcgucgccuacuccaacaacagcaucgccauccccaccaacuucacgaucuccgugaccaccgagauccugcccgugagcaugaccaagacgagcgucgacugcaccauguacaucugcggggacuccaccgagugcagcaaccuccugcugcaguacggcuccuucugcacccagcucaaccgcgcgcugacggggaucgccguggagcaggacaagaacacccaggagguguucgcccaggucaagcagaucuacaagacgcccccgaucaaggacuucggcggguucaacuucagccagauccugcccgaccccuccaagcccagcaagcgguccuucaucgaggaccuccuguucaacaaggugacccuggccgacgccggcuucaucaagcaguacggcgacugccucggggacaucgcggcccgcgaccugaucugcgcccagaaguucaacggccugaccgugcucccgccccugcugaccgacgagaugaucgcccaguacaccagcgcccuccuggcggggaccaucacguccggcuggaccuucggggccggcgccgcccugcagauccccuucgcgaugcagauggccuaccgguucaacggcaucggggucacccagaacgugcucuacgagaaccagaagcugaucgccaaccaguucaacagcgccaucggcaagauccaggacucccugagcuccaccgccagcgcgcucgggaagcugcaggacguggucaaccagaacgcccaggcccugaacacgcucgugaagugccuguccagcaacuucggcgccaucuccagcgugcugaacgacauccucucccgccuggacaaggucgaggccgaggugcagaucgaccggcugaucaccgggcgccuccagugccugcagaccuacgugacccagcagcugauccgggcggccgagauccgcgccagcgccaaccucgccgcgaccaagauguccgagugcguccugggccagagcaagcggguggacuucugcggcaagggguaccaccugauguccuucccccagagcgccccgcacggcguggucuuccuccacgugacguacguccccgcccaggagaagaacuucaccaccgcccccgcgaucugccacgacgggaaggcccacuucccccgcgagggcguguucguguccaacgggacccacugguucgucacgcagcggaacuucuacgagccgcagaucaucaccaccgacaacaccuucgugagcggcaacugcgacguggucaucggcaucgugaacaacacgguguacgacccccugcagcccgagcuggacuccuucaaggaggagcucgacaaguacuucaagaaccacaccagccccgacgucgaccugggggacaucuccggcaucaacgccagcguggugaacauccagaaggagaucgaccgccugaacgaggucgccaagaaccucaacgagucccugaucgaccugcaggagcucgggaaguacgagcaguacaucaaguggccgugguacaucuggcugggcuucaucgccggccugaucgcgaucgugauggugaccaucaugcucugcugcaugaccagcugcugcuccugccugaaggggugcugcagcugcggcuccugcugcaaguucgacgaggacgacagcgagcccguccugaagggggugaagcuccacuacacgugaggacuaguuauaagacugacuagcccgaugggccucccaacgggcccuccuccccuccuugcaccgagauuaauaaaaaaaaaaaaaaaaaaaaaaaaaaaaaaaaaaaaaaaaaaaaaaaaaaaaaaaaaaaaaaaaugcaucccccccccccccccccccccccccccccccaaaggcucuuuucagagccaccagaauu

SEQ ID NO: 12820 - RNA, 4039 nt, Artificial Sequence
  SARS-CoV-2/Wuhan/WIV05/2019__EPI_ISL_402128 spike protein mRNA gc (1-1273)(F970C_G999C) R9562
aggagaaagcuuaccauguucguguuccugguccuccugccccuggugagcucccagugcgugaaccucaccacccgcacgcagcugccgcccgccuacaccaacagcuucacccggggcgucuacuaccccgacaagguguuccgcuccagcgugcugcacuccacccaggaccucuuccugcccuucuucagcaacgucacgugguuccacgccauccacguguccgggaccaacggcaccaagcgguucgacaacccggugcugcccuucaacgacggggucuacuucgcgagcaccgagaaguccaacaucauccgcggcuggaucuucgggacgacccucgacagcaagacccagucccugcugaucgugaacaacgccaccaacguggucaucaaggugugcgaguuccaguucugcaacgaccccuuccucggcguguacuaccacaagaacaacaagagcuggauggaguccgaguuccgggucuacagcuccgccaacaacugcacguucgaguacgugagccagcccuuccugauggaccuggagggcaagcaggggaacuucaagaaccuccgcgaguucguguucaagaacaucgacggcuacuucaagaucuacuccaagcacaccccgaucaaccugguccgggaccugccccagggguucagcgcccucgagccccugguggaccugcccaucggcaucaacaucacccgcuuccagacccuccuggcccugcaccgguccuaccucacgccgggggacagcagcuccggcuggaccgcgggcgccgccgccuacuacgugggguaccugcagccccgcaccuuccugcucaaguacaacgagaacggcaccaucacggacgcggucgacugcgcccuggacccccugagcgagaccaagugcacccucaaguccuucaccguggagaaggggaucuaccagacgagcaacuuccgggugcagcccaccgaguccaucguccgcuucccgaacaucaccaaccugugccccuucggcgagguguucaacgccacccgguucgccagcgucuacgccuggaaccgcaagcggaucuccaacugcguggcggacuacagcgugcuguacaacuccgccagcuucuccacguucaagugcuacggcgucagccccaccaagcucaacgaccugugcuucaccaacguguacgccgacuccuucgugauccgcggggacgagguccggcagaucgcccccggccagaccgggaagaucgccgacuacaacuacaagcugccggacgacuucacgggcugcgugaucgcguggaacagcaacaaccucgacuccaaggucgggggcaacuacaacuaccuguaccgccuguuccgcaagagcaaccucaagcccuucgagcgggacaucuccaccgagaucuaccaggccggcagcacccccugcaacgggguggagggcuucaacugcuacuucccccugcaguccuacggguuccagccgaccaacggcgugggguaccagcccuaccggguggucgugcugagcuucgagcuccugcacgcccccgccacggugugcggccccaagaaguccaccaaccuggucaagaacaagugcgugaacuucaacuucaacggccucaccgggaccggcgugcugaccgagagcaacaagaaguuccugccguuccagcaguucgggcgcgacaucgccgacacgaccgacgcgguccgcgacccccagacccuggagauccucgacaucacccccugcagcuucggcgggguguccgugaucacgccgggcaccaacaccagcaaccaggucgccgugcuguaccaggacgugaacugcaccgagguccccguggccauccacgccgaccagcugacgcccaccuggcggguguacuccaccggcagcaacgucuuccagacccgcgccgggugccucaucggcgcggagcacgugaacaacuccuacgagugcgacauccccaucggggccggcaucugcgccagcuaccagacgcagaccaacuccccgcggcgcgcccggagcguggcgucccagagcaucaucgccuacaccaugucccugggcgccgagaacagcgucgccuacuccaacaacagcaucgccauccccaccaacuucacgaucuccgugaccaccgagauccugcccgugagcaugaccaagacgagcgucgacugcaccauguacaucugcggggacuccaccgagugcagcaaccuccugcugcaguacggcuccuucugcacccagcucaaccgcgcgcugacggggaucgccguggagcaggacaagaacacccaggagguguucgcccaggucaagcagaucuacaagacgcccccgaucaaggacuucggcggguucaacuucagccagauccugcccgaccccuccaagcccagcaagcgguccuucaucgaggaccuccuguucaacaaggugacccuggccgacgccggcuucaucaagcaguacggcgacugccucggggacaucgcggcccgcgaccugaucugcgcccagaaguucaacggccugaccgugcucccgccccugcugaccgacgagaugaucgcccaguacaccagcgcccuccuggcggggaccaucacguccggcuggaccuucggggccggcgccgcccugcagauccccuucgcgaugcagauggccuaccgguucaacggcaucggggucacccagaacgugcucuacgagaaccagaagcugaucgccaaccaguucaacagcgccaucggcaagauccaggacucccugagcuccaccgccagcgcgcucgggaagcugcaggacguggucaaccagaacgcccaggcccugaacacgcucgugaagcagcuguccagcaacugcggcgccaucuccagcgugcugaacgacauccucucccgccuggacaaggucgaggccgaggugcagaucgaccggcugaucaccugucgccuccagagccugcagaccuacgugacccagcagcugauccgggcggccgagauccgcgccagcgccaaccucgccgcgaccaagauguccgagugcguccugggccagagcaagcggguggacuucugcggcaagggguaccaccugauguccuucccccagagcgccccgcacggcguggucuuccuccacgugacguacguccccgcccaggagaagaacuucaccaccgcccccgcgaucugccacgacgggaaggcccacuucccccgcgagggcguguucguguccaacgggacccacugguucgucacgcagcggaacuucuacgagccgcagaucaucaccaccgacaacaccuucgugagcggcaacugcgacguggucaucggcaucgugaacaacacgguguacgacccccugcagcccgagcuggacuccuucaaggaggagcucgacaaguacuucaagaaccacaccagccccgacgucgaccugggggacaucuccggcaucaacgccagcguggugaacauccagaaggagaucgaccgccugaacgaggucgccaagaaccucaacgagucccugaucgaccugcaggagcucgggaaguacgagcaguacaucaaguggccgugguacaucuggcugggcuucaucgccggccugaucgcgaucgugauggugaccaucaugcucugcugcaugaccagcugcugcuccugccugaaggggugcugcagcugcggcuccugcugcaaguucgacgaggacgacagcgagcccguccugaagggggugaagcuccacuacacgugaggacuaguuauaagacugacuagcccgaugggccucccaacgggcccuccuccccuccuugcaccgagauuaauaaaaaaaaaaaaaaaaaaaaaaaaaaaaaaaaaaaaaaaaaaaaaaaaaaaaaaaaaaaaaaaaugcaucccccccccccccccccccccccccccccccaaaggcucuuuucagagccaccagaauu

SEQ ID NO: 12821 - RNA, 4039 nt, Artificial Sequence
  SARS-CoV-2/Wuhan/WIV05/2019__EPI_ISL_402128 spike protein mRNA gc (1-1273)(A972C_R995C)
aggagaaagcuuaccauguucguguuccugguccuccugccccuggugagcucccagugcgugaaccucaccacccgcacgcagcugccgcccgccuacaccaacagcuucacccggggcgucuacuaccccgacaagguguuccgcuccagcgugcugcacuccacccaggaccucuuccugcccuucuucagcaacgucacgugguuccacgccauccacguguccgggaccaacggcaccaagcgguucgacaacccggugcugcccuucaacgacggggucuacuucgcgagcaccgagaaguccaacaucauccgcggcuggaucuucgggacgacccucgacagcaagacccagucccugcugaucgugaacaacgccaccaacguggucaucaaggugugcgaguuccaguucugcaacgaccccuuccucggcguguacuaccacaagaacaacaagagcuggauggaguccgaguuccgggucuacagcuccgccaacaacugcacguucgaguacgugagccagcccuuccugauggaccuggagggcaagcaggggaacuucaagaaccuccgcgaguucguguucaagaacaucgacggcuacuucaagaucuacuccaagcacaccccgaucaaccugguccgggaccugccccagggguucagcgcccucgagccccugguggaccugcccaucggcaucaacaucacccgcuuccagacccuccuggcccugcaccgguccuaccucacgccgggggacagcagcuccggcuggaccgcgggcgccgccgccuacuacgugggguaccugcagccccgcaccuuccugcucaaguacaacgagaacggcaccaucacggacgcggucgacugcgcccuggacccccugagcgagaccaagugcacccucaaguccuucaccguggagaaggggaucuaccagacgagcaacuuccgggugcagcccaccgaguccaucguccgcuucccgaacaucaccaaccugugccccuucggcgagguguucaacgccacccgguucgccagcgucuacgccuggaaccgcaagcggaucuccaacugcguggcggacuacagcgugcuguacaacuccgccagcuucuccacguucaagugcuacggcgucagccccaccaagcucaacgaccugugcuucaccaacguguacgccgacuccuucgugauccgcggggacgagguccggcagaucgcccccggccagaccgggaagaucgccgacuacaacuacaagcugccggacgacuucacgggcugcgugaucgcguggaacagcaacaaccucgacuccaaggucgggggcaacuacaacuaccuguaccgccuguuccgcaagagcaaccucaagcccuucgagcgggacaucuccaccgagaucuaccaggccggcagcacccccugcaacgggguggagggcuucaacugcuacuucccccugcaguccuacggguuccagccgaccaacggcgugggguaccagcccuaccggguggucgugcugagcuucgagcuccugcacgcccccgccacggugugcggccccaagaaguccaccaaccuggucaagaacaagugcgugaacuucaacuucaacggccucaccgggaccggcgugcugaccgagagcaacaagaaguuccugccguuccagcaguucgggcgcgacaucgccgacacgaccgacgcgguccgcgacccccagacccuggagauccucgacaucacccccugcagcuucggcgggguguccgugaucacgccgggcaccaacaccagcaaccaggucgccgugcuguaccaggacgugaacugcaccgagguccccguggccauccacgccgaccagcugacgcccaccuggcggguguacuccaccggcagcaacgucuuccagacccgcgccgggugccucaucggcgcggagcacgugaacaacuccuacgagugcgacauccccaucggggccggcaucugcgccagcuaccagacgcagaccaacuccccgcggcgcgcccggagcguggcgucccagagcaucaucgccuacaccaugucccugggcgccgagaacagcgucgccuacuccaacaacagcaucgccauccccaccaacuucacgaucuccgugaccaccgagauccugcccgugagcaugaccaagacgagcgucgacugcaccauguacaucugcggggacuccaccgagugcagcaaccuccugcugcaguacggcuccuucugcacccagcucaaccgcgcgcugacggggaucgccguggagcaggacaagaacacccaggagguguucgcccaggucaagcagaucuacaagacgcccccgaucaaggacuucggcggguucaacuucagccagauccugcccgaccccuccaagcccagcaagcgguccuucaucgaggaccuccuguucaacaaggugacccuggccgacgccggcuucaucaagcaguacggcgacugccucggggacaucgcggcccgcgaccugaucugcgcccagaaguucaacggccugaccgugcucccgccccugcugaccgacgagaugaucgcccaguacaccagcgcccuccuggcggggaccaucacguccggcuggaccuucggggccggcgccgcccugcagauccccuucgcgaugcagauggccuaccgguucaacggcaucggggucacccagaacgugcucuacgagaaccagaagcugaucgccaaccaguucaacagcgccaucggcaagauccaggacucccugagcuccaccgccagcgcgcucgggaagcugcaggacguggucaaccagaacgcccaggcccugaacacgcucgugaagcagcuguccagcaacuucggcugcaucuccagcgugcugaacgacauccucucccgccuggacaaggucgaggccgaggugcagaucgacugccugaucaccgggcgccuccagagccugcagaccuacgugacccagcagcugauccgggcggccgagauccgcgccagcgccaaccucgccgcgaccaagauguccgagugcguccugggccagagcaagcggguggacuucugcggcaagggguaccaccugauguccuucccccagagcgccccgcacggcguggucuuccuccacgugacguacguccccgcccaggagaagaacuucaccaccgcccccgcgaucugccacgacgggaaggcccacuucccccgcgagggcguguucguguccaacgggacccacugguucgucacgcagcggaacuucuacgagccgcagaucaucaccaccgacaacaccuucgugagcggcaacugcgacguggucaucggcaucgugaacaacacgguguacgacccccugcagcccgagcuggacuccuucaaggaggagcucgacaaguacuucaagaaccacaccagccccgacgucgaccugggggacaucuccggcaucaacgccagcguggugaacauccagaaggagaucgaccgccugaacgaggucgccaagaaccucaacgagucccugaucgaccugcaggagcucgggaaguacgagcaguacaucaaguggccgugguacaucuggcugggcuucaucgccggccugaucgcgaucgugauggugaccaucaugcucugcugcaugaccagcugcugcuccugccugaaggggugcugcagcugcggcuccugcugcaaguucgacgaggacgacagcgagcccguccugaagggggugaagcuccacuacacgugaggacuaguuauaagacugacuagcccgaugggccucccaacgggcccuccuccccuccuugcaccgagauuaauaaaaaaaaaaaaaaaaaaaaaaaaaaaaaaaaaaaaaaaaaaaaaaaaaaaaaaaaaaaaaaaaugcaucccccccccccccccccccccccccccccccaaaggcucuuuucagagccaccagaauu

SEQ ID NO: 12822 - RNA, 4039 nt, Artificial Sequence
  SARS-CoV-2/Wuhan/WIV05/2019__EPI_ISL_402128 spike protein mRNA gc (1-1273)(A890C_V1040C) R9560
aggagaaagcuuaccauguucguguuccugguccuccugccccuggugagcucccagugcgugaaccucaccacccgcacgcagcugccgcccgccuacaccaacagcuucacccggggcgucuacuaccccgacaagguguuccgcuccagcgugcugcacuccacccaggaccucuuccugcccuucuucagcaacgucacgugguuccacgccauccacguguccgggaccaacggcaccaagcgguucgacaacccggugcugcccuucaacgacggggucuacuucgcgagcaccgagaaguccaacaucauccgcggcuggaucuucgggacgacccucgacagcaagacccagucccugcugaucgugaacaacgccaccaacguggucaucaaggugugcgaguuccaguucugcaacgaccccuuccucggcguguacuaccacaagaacaacaagagcuggauggaguccgaguuccgggucuacagcuccgccaacaacugcacguucgaguacgugagccagcccuuccugauggaccuggagggcaagcaggggaacuucaagaaccuccgcgaguucguguucaagaacaucgacggcuacuucaagaucuacuccaagcacaccccgaucaaccugguccgggaccugccccagggguucagcgcccucgagccccugguggaccugcccaucggcaucaacaucacccgcuuccagacccuccuggcccugcaccgguccuaccucacgccgggggacagcagcuccggcuggaccgcgggcgccgccgccuacuacgugggguaccugcagccccgcaccuuccugcucaaguacaacgagaacggcaccaucacggacgcggucgacugcgcccuggacccccugagcgagaccaagugcacccucaaguccuucaccguggagaaggggaucuaccagacgagcaacuuccgggugcagcccaccgaguccaucguccgcuucccgaacaucaccaaccugugccccuucggcgagguguucaacgccacccgguucgccagcgucuacgccuggaaccgcaagcggaucuccaacugcguggcggacuacagcgugcuguacaacuccgccagcuucuccacguucaagugcuacggcgucagccccaccaagcucaacgaccugugcuucaccaacguguacgccgacuccuucgugauccgcggggacgagguccggcagaucgcccccggccagaccgggaagaucgccgacuacaacuacaagcugccggacgacuucacgggcugcgugaucgcguggaacagcaacaaccucgacuccaaggucgggggcaacuacaacuaccuguaccgccuguuccgcaagagcaaccucaagcccuucgagcgggacaucuccaccgagaucuaccaggccggcagcacccccugcaacgggguggagggcuucaacugcuacuucccccugcaguccuacggguuccagccgaccaacggcgugggguaccagcccuaccggguggucgugcugagcuucgagcuccugcacgcccccgccacggugugcggccccaagaaguccaccaaccuggucaagaacaagugcgugaacuucaacuucaacggccucaccgggaccggcgugcugaccgagagcaacaagaaguuccugccguuccagcaguucgggcgcgacaucgccgacacgaccgacgcgguccgcgacccccagacccuggagauccucgacaucacccccugcagcuucggcgggguguccgugaucacgccgggcaccaacaccagcaaccaggucgccgugcuguaccaggacgugaacugcaccgagguccccguggccauccacgccgaccagcugacgcccaccuggcggguguacuccaccggcagcaacgucuuccagacccgcgccgggugccucaucggcgcggagcacgugaacaacuccuacgagugcgacauccccaucggggccggcaucugcgccagcuaccagacgcagaccaacuccccgcggcgcgcccggagcguggcgucccagagcaucaucgccuacaccaugucccugggcgccgagaacagcgucgccuacuccaacaacagcaucgccauccccaccaacuucacgaucuccgugaccaccgagauccugcccgugagcaugaccaagacgagcgucgacugcaccauguacaucugcggggacuccaccgagugcagcaaccuccugcugcaguacggcuccuucugcacccagcucaaccgcgcgcugacggggaucgccguggagcaggacaagaacacccaggagguguucgcccaggucaagcagaucuacaagacgcccccgaucaaggacuucggcggguucaacuucagccagauccugcccgaccccuccaagcccagcaagcgguccuucaucgaggaccuccuguucaacaaggugacccuggccgacgccggcuucaucaagcaguacggcgacugccucggggacaucgcggcccgcgaccugaucugcgcccagaaguucaacggccugaccgugcucccgccccugcugaccgacgagaugaucgcccaguacaccagcgcccuccuggcggggaccaucacguccggcuggaccuucgggugcggcgccgcccugcagauccccuucgcgaugcagauggccuaccgguucaacggcaucggggucacccagaacgugcucuacgagaaccagaagcugaucgccaaccaguucaacagcgccaucggcaagauccaggacucccugagcuccaccgccagcgcgcucgggaagcugcaggacguggucaaccagaacgcccaggcccugaacacgcucgugaagcagcuguccagcaacuucggcgccaucuccagcgugcugaacgacauccucucccgccuggacaaggucgaggccgaggugcagaucgaccggcugaucaccgggcgccuccagagccugcagaccuacgugacccagcagcugauccgggcggccgagauccgcgccagcgccaaccucgccgcgaccaagauguccgagugcguccugggccagagcaagcggugcgacuucugcggcaagggguaccaccugauguccuucccccagagcgccccgcacggcguggucuuccuccacgugacguacguccccgcccaggagaagaacuucaccaccgcccccgcgaucugccacgacgggaaggcccacuucccccgcgagggcguguucguguccaacgggacccacugguucgucacgcagcggaacuucuacgagccgcagaucaucaccaccgacaacaccuucgugagcggcaacugcgacguggucaucggcaucgugaacaacacgguguacgacccccugcagcccgagcuggacuccuucaaggaggagcucgacaaguacuucaagaaccacaccagccccgacgucgaccugggggacaucuccggcaucaacgccagcguggugaacauccagaaggagaucgaccgccugaacgaggucgccaagaaccucaacgagucccugaucgaccugcaggagcucgggaaguacgagcaguacaucaaguggccgugguacaucuggcugggcuucaucgccggccugaucgcgaucgugauggugaccaucaugcucugcugcaugaccagcugcugcuccugccugaaggggugcugcagcugcggcuccugcugcaaguucgacgaggacgacagcgagcccguccugaagggggugaagcuccacuacacgugaggacuaguuauaagacugacuagcccgaugggccucccaacgggcccuccuccccuccuugcaccgagauuaauaaaaaaaaaaaaaaaaaaaaaaaaaaaaaaaaaaaaaaaaaaaaaaaaaaaaaaaaaaaaaaaaugcaucccccccccccccccccccccccccccccccaaaggcucuuuucagagccaccagaauu

SEQ ID NO: 12823 - RNA, 4039 nt, Artificial Sequence
  SARS-CoV-2/Wuhan/WIV05/2019__EPI_ISL_402128 spike protein mRNA gc (1-1273)(T874C_S1055C) R9563
aggagaaagcuuaccauguucguguuccugguccuccugccccuggugagcucccagugcgugaaccucaccacccgcacgcagcugccgcccgccuacaccaacagcuucacccggggcgucuacuaccccgacaagguguuccgcuccagcgugcugcacuccacccaggaccucuuccugcccuucuucagcaacgucacgugguuccacgccauccacguguccgggaccaacggcaccaagcgguucgacaacccggugcugcccuucaacgacggggucuacuucgcgagcaccgagaaguccaacaucauccgcggcuggaucuucgggacgacccucgacagcaagacccagucccugcugaucgugaacaacgccaccaacguggucaucaaggugugcgaguuccaguucugcaacgaccccuuccucggcguguacuaccacaagaacaacaagagcuggauggaguccgaguuccgggucuacagcuccgccaacaacugcacguucgaguacgugagccagcccuuccugauggaccuggagggcaagcaggggaacuucaagaaccuccgcgaguucguguucaagaacaucgacggcuacuucaagaucuacuccaagcacaccccgaucaaccugguccgggaccugccccagggguucagcgcccucgagccccugguggaccugcccaucggcaucaacaucacccgcuuccagacccuccuggcccugcaccgguccuaccucacgccgggggacagcagcuccggcuggaccgcgggcgccgccgccuacuacgugggguaccugcagccccgcaccuuccugcucaaguacaacgagaacggcaccaucacggacgcggucgacugcgcccuggacccccugagcgagaccaagugcacccucaaguccuucaccguggagaaggggaucuaccagacgagcaacuuccgggugcagcccaccgaguccaucguccgcuucccgaacaucaccaaccugugccccuucggcgagguguucaacgccacccgguucgccagcgucuacgccuggaaccgcaagcggaucuccaacugcguggcggacuacagcgugcuguacaacuccgccagcuucuccacguucaagugcuacggcgucagccccaccaagcucaacgaccugugcuucaccaacguguacgccgacuccuucgugauccgcggggacgagguccggcagaucgcccccggccagaccgggaagaucgccgacuacaacuacaagcugccggacgacuucacgggcugcgugaucgcguggaacagcaacaaccucgacuccaaggucgggggcaacuacaacuaccuguaccgccuguuccgcaagagcaaccucaagcccuucgagcgggacaucuccaccgagaucuaccaggccggcagcacccccugcaacgggguggagggcuucaacugcuacuucccccugcaguccuacggguuccagccgaccaacggcgugggguaccagcccuaccggguggucgugcugagcuucgagcuccugcacgcccccgccacggugugcggccccaagaaguccaccaaccuggucaagaacaagugcgugaacuucaacuucaacggccucaccgggaccggcgugcugaccgagagcaacaagaaguuccugccguuccagcaguucgggcgcgacaucgccgacacgaccgacgcgguccgcgacccccagacccuggagauccucgacaucacccccugcagcuucggcgggguguccgugaucacgccgggcaccaacaccagcaaccaggucgccgugcuguaccaggacgugaacugcaccgagguccccguggccauccacgccgaccagcugacgcccaccuggcggguguacuccaccggcagcaacgucuuccagacccgcgccgggugccucaucggcgcggagcacgugaacaacuccuacgagugcgacauccccaucggggccggcaucugcgccagcuaccagacgcagaccaacuccccgcggcgcgcccggagcguggcgucccagagcaucaucgccuacaccaugucccugggcgccgagaacagcgucgccuacuccaacaacagcaucgccauccccaccaacuucacgaucuccgugaccaccgagauccugcccgugagcaugaccaagacgagcgucgacugcaccauguacaucugcggggacuccaccgagugcagcaaccuccugcugcaguacggcuccuucugcacccagcucaaccgcgcgcugacggggaucgccguggagcaggacaagaacacccaggagguguucgcccaggucaagcagaucuacaagacgcccccgaucaaggacuucggcggguucaacuucagccagauccugcccgaccccuccaagcccagcaagcgguccuucaucgaggaccuccuguucaacaaggugacccuggccgacgccggcuucaucaagcaguacggcgacugccucggggacaucgcggcccgcgaccugaucugcgcccagaaguucaacggccugaccgugcucccgccccugcugaccgacgagaugaucgcccaguacugcagcgcccuccuggcggggaccaucacguccggcuggaccuucggggccggcgccgcccugcagauccccuucgcgaugcagauggccuaccgguucaacggcaucggggucacccagaacgugcucuacgagaaccagaagcugaucgccaaccaguucaacagcgccaucggcaagauccaggacucccugagcuccaccgccagcgcgcucgggaagcugcaggacguggucaaccagaacgcccaggcccugaacacgcucgugaagcagcuguccagcaacuucggcgccaucuccagcgugcugaacgacauccucucccgccuggacaaggucgaggccgaggugcagaucgaccggcugaucaccgggcgccuccagagccugcagaccuacgugacccagcagcugauccgggcggccgagauccgcgccagcgccaaccucgccgcgaccaagauguccgagugcguccugggccagagcaagcggguggacuucugcggcaagggguaccaccugauguccuucccccagugcgccccgcacggcguggucuuccuccacgugacguacguccccgcccaggagaagaacuucaccaccgcccccgcgaucugccacgacgggaaggcccacuucccccgcgagggcguguucguguccaacgggacccacugguucgucacgcagcggaacuucuacgagccgcagaucaucaccaccgacaacaccuucgugagcggcaacugcgacguggucaucggcaucgugaacaacacgguguacgacccccugcagcccgagcuggacuccuucaaggaggagcucgacaaguacuucaagaaccacaccagccccgacgucgaccugggggacaucuccggcaucaacgccagcguggugaacauccagaaggagaucgaccgccugaacgaggucgccaagaaccucaacgagucccugaucgaccugcaggagcucgggaaguacgagcaguacaucaaguggccgugguacaucuggcugggcuucaucgccggccugaucgcgaucgugauggugaccaucaugcucugcugcaugaccagcugcugcuccugccugaaggggugcugcagcugcggcuccugcugcaaguucgacgaggacgacagcgagcccguccugaagggggugaagcuccacuacacgugaggacuaguuauaagacugacuagcccgaugggccucccaacgggcccuccuccccuccuugcaccgagauuaauaaaaaaaaaaaaaaaaaaaaaaaaaaaaaaaaaaaaaaaaaaaaaaaaaaaaaaaaaaaaaaaaugcaucccccccccccccccccccccccccccccccaaaggcucuuuucagagccaccagaauu

SEQ ID NO: 12824 - RNA, 2263 nt, Artificial Sequence; identical to SEQ ID NO: 166
  SARS-CoV-2/Wuhan/WIV05/2019__EPI_ISL_402128 spike protein mRNA gc (1-681) R9506, R9513

SEQ ID NO: 12825 - RNA, 4333 nt, Artificial Sequence
  SARS-CoV-2/Wuhan/WIV05/2019__EPI_ISL_402128 spike protein mRNA gc (1-1211) LumSynth construct
aggagaaagcuuaccauguucguguuccugguccuccugccccuggugagcucccagugcgugaaccucaccacccgcacgcagcugccgcccgccuacaccaacagcuucacccggggcgucuacuaccccgacaagguguuccgcuccagcgugcugcacuccacccaggaccucuuccugcccuucuucagcaacgucacgugguuccacgccauccacguguccgggaccaacggcaccaagcgguucgacaacccggugcugcccuucaacgacggggucuacuucgcgagcaccgagaaguccaacaucauccgcggcuggaucuucgggacgacccucgacagcaagacccagucccugcugaucgugaacaacgccaccaacguggucaucaaggugugcgaguuccaguucugcaacgaccccuuccucggcguguacuaccacaagaacaacaagagcuggauggaguccgaguuccgggucuacagcuccgccaacaacugcacguucgaguacgugagccagcccuuccugauggaccuggagggcaagcaggggaacuucaagaaccuccgcgaguucguguucaagaacaucgacggcuacuucaagaucuacuccaagcacaccccgaucaaccugguccgggaccugccccagggguucagcgcccucgagccccugguggaccugcccaucggcaucaacaucacccgcuuccagacccuccuggcccugcaccgguccuaccucacgccgggggacagcagcuccggcuggaccgcgggcgccgccgccuacuacgugggguaccugcagccccgcaccuuccugcucaaguacaacgagaacggcaccaucacggacgcggucgacugcgcccuggacccccugagcgagaccaagugcacccucaaguccuucaccguggagaaggggaucuaccagacgagcaacuuccgggugcagcccaccgaguccaucguccgcuucccgaacaucaccaaccugugccccuucggcgagguguucaacgccacccgguucgccagcgucuacgccuggaaccgcaagcggaucuccaacugcguggcggacuacagcgugcuguacaacuccgccagcuucuccacguucaagugcuacggcgucagccccaccaagcucaacgaccugugcuucaccaacguguacgccgacuccuucgugauccgcggggacgagguccggcagaucgcccccggccagaccgggaagaucgccgacuacaacuacaagcugccggacgacuucacgggcugcgugaucgcguggaacagcaacaaccucgacuccaaggucgggggcaacuacaacuaccuguaccgccuguuccgcaagagcaaccucaagcccuucgagcgggacaucuccaccgagaucuaccaggccggcagcacccccugcaacgggguggagggcuucaacugcuacuucccccugcaguccuacggguuccagccgaccaacggcgugggguaccagcccuaccggguggucgugcugagcuucgagcuccugcacgcccccgccacggugugcggccccaagaaguccaccaaccuggucaagaacaagugcgugaacuucaacuucaacggccucaccgggaccggcgugcugaccgagagcaacaagaaguuccugccguuccagcaguucgggcgcgacaucgccgacacgaccgacgcgguccgcgacccccagacccuggagauccucgacaucacccccugcagcuucggcgggguguccgugaucacgccgggcaccaacaccagcaaccaggucgccgugcuguaccaggacgugaacugcaccgagguccccguggccauccacgccgaccagcugacgcccaccuggcggguguacuccaccggcagcaacgucuuccagacccgcgccgggugccucaucggcgcggagcacgugaacaacuccuacgagugcgacauccccaucggggccggcaucugcgccagcuaccagacgcagaccaacuccccgcggcgcgcccggagcguggcgucccagagcaucaucgccuacaccaugucccugggcgccgagaacagcgucgccuacuccaacaacagcaucgccauccccaccaacuucacgaucuccgugaccaccgagauccugcccgugagcaugaccaagacgagcgucgacugcaccauguacaucugcggggacuccaccgagugcagcaaccuccugcugcaguacggcuccuucugcacccagcucaaccgcgcgcugacggggaucgccguggagcaggacaagaacacccaggagguguucgcccaggucaagcagaucuacaagacgcccccgaucaaggacuucggcggguucaacuucagccagauccugcccgaccccuccaagcccagcaagcgguccuucaucgaggaccuccuguucaacaaggugacccuggccgacgccggcuucaucaagcaguacggcgacugccucggggacaucgcggcccgcgaccugaucugcgcccagaaguucaacggccugaccgugcucccgccccugcugaccgacgagaugaucgcccaguacaccagcgcccuccuggcggggaccaucacguccggcuggaccuucggggccggcgccgcccugcagauccccuucgcgaugcagauggccuaccgguucaacggcaucggggucacccagaacgugcucuacgagaaccagaagcugaucgccaaccaguucaacagcgccaucggcaagauccaggacucccugagcuccaccgccagcgcgcucgggaagcugcaggacguggucaaccagaacgcccaggcccugaacacgcucgugaagcagcuguccagcaacuucggcgccaucuccagcgugcugaacgacauccucucccgccuggacaaggucgaggccgaggugcagaucgaccggcugaucaccgggcgccuccagagccugcagaccuacgugacccagcagcugauccgggcggccgagauccgcgccagcgccaaccucgccgcgaccaagauguccgagugcguccugggccagagcaagcggguggacuucugcggcaagggguaccaccugauguccuucccccagagcgccccgcacggcguggucuuccuccacgugacguacguccccgcccaggagaagaacuucaccaccgcccccgcgaucugccacgacgggaaggcccacuucccccgcgagggcguguucguguccaacgggacccacugguucgucacgcagcggaacuucuacgagccgcagaucaucaccaccgacaacaccuucgugagcggcaacugcgacguggucaucggcaucgugaacaacacgguguacgacccccugcagcccgagcuggacuccuucaaggaggagcucgacaaguacuucaagaaccacaccagccccgacgucgaccugggggacaucuccggcaucaacgccagcguggugaacauccagaaggagaucgaccgccugaacgaggucgccaagaaccucaacgagucccugaucgaccugcaggagcucgggaaguacgagcaguacaucaagggcggcgggagcgggggcgggcagaucuacgagggcaagcugaccgccgaggggcuccgcuucggcaucguggccagccgguucaaccacgcgcuggucgaccgccugguggagggggccaucgacgccaucgugcggcacggcgggcgcgaggaggacaucacccucguccgggugcccggcuccugggagaucccgguggccgccggcgagcuggcccgcaaggaggacaucgacgcggucaucgccaucggggugcugauccggggcgccacgccccacuucgacuacaucgccagcgagguguccaaggggcucgcggaccugagccuggagcuccgcaagcccaucaccuucggcgucaucaccgccgacacccuggagcaggccaucgagcgggccgggacgaagcacggcaacaagggcugggaggccgcgcuguccgccaucgagauggccaaccucuucaagagccugcgcugaggacuaguuauaagacugacuagcccgaugggccucccaacgggcccuccuccccuccuugcaccgagauuaauaaaaaaaaaaaaaaaaaaaaaaaaaaaaaaaaaaaaaaaaaaaaaaaaaaaaaaaaaaaaaaaaugcaucccccccccccccccccccccccccccccccaaaggcucuuuucagagccaccagaauu

SEQ ID NO: 12826 - RNA, 4333 nt, Artificial Sequence
  SARS-CoV-2/Wuhan/WIV05/2019__EPI_ISL_402128 spike protein mRNA gc (1-1211)(K986P_V987P) LumSynth construct
aggagaaagcuuaccauguucguguuccugguccuccugccccuggugagcucccagugcgugaaccucaccacccgcacgcagcugccgcccgccuacaccaacagcuucacccggggcgucuacuaccccgacaagguguuccgcuccagcgugcugcacuccacccaggaccucuuccugcccuucuucagcaacgucacgugguuccacgccauccacguguccgggaccaacggcaccaagcgguucgacaacccggugcugcccuucaacgacggggucuacuucgcgagcaccgagaaguccaacaucauccgcggcuggaucuucgggacgacccucgacagcaagacccagucccugcugaucgugaacaacgccaccaacguggucaucaaggugugcgaguuccaguucugcaacgaccccuuccucggcguguacuaccacaagaacaacaagagcuggauggaguccgaguuccgggucuacagcuccgccaacaacugcacguucgaguacgugagccagcccuuccugauggaccuggagggcaagcaggggaacuucaagaaccuccgcgaguucguguucaagaacaucgacggcuacuucaagaucuacuccaagcacaccccgaucaaccugguccgggaccugccccagggguucagcgcccucgagccccugguggaccugcccaucggcaucaacaucacccgcuuccagacccuccuggcccugcaccgguccuaccucacgccgggggacagcagcuccggcuggaccgcgggcgccgccgccuacuacgugggguaccugcagccccgcaccuuccugcucaaguacaacgagaacggcaccaucacggacgcggucgacugcgcccuggacccccugagcgagaccaagugcacccucaaguccuucaccguggagaaggggaucuaccagacgagcaacuuccgggugcagcccaccgaguccaucguccgcuucccgaacaucaccaaccugugccccuucggcgagguguucaacgccacccgguucgccagcgucuacgccuggaaccgcaagcggaucuccaacugcguggcggacuacagcgugcuguacaacuccgccagcuucuccacguucaagugcuacggcgucagccccaccaagcucaacgaccugugcuucaccaacguguacgccgacuccuucgugauccgcggggacgagguccggcagaucgcccccggccagaccgggaagaucgccgacuacaacuacaagcugccggacgacuucacgggcugcgugaucgcguggaacagcaacaaccucgacuccaaggucgggggcaacuacaacuaccuguaccgccuguuccgcaagagcaaccucaagcccuucgagcgggacaucuccaccgagaucuaccaggccggcagcacccccugcaacgggguggagggcuucaacugcuacuucccccugcaguccuacggguuccagccgaccaacggcgugggguaccagcccuaccggguggucgugcugagcuucgagcuccugcacgcccccgccacggugugcggccccaagaaguccaccaaccuggucaagaacaagugcgugaacuucaacuucaacggccucaccgggaccggcgugcugaccgagagcaacaagaaguuccugccguuccagcaguucgggcgcgacaucgccgacacgaccgacgcgguccgcgacccccagacccuggagauccucgacaucacccccugcagcuucggcgggguguccgugaucacgccgggcaccaacaccagcaaccaggucgccgugcuguaccaggacgugaacugcaccgagguccccguggccauccacgccgaccagcugacgcccaccuggcggguguacuccaccggcagcaacgucuuccagacccgcgccgggugccucaucggcgcggagcacgugaacaacuccuacgagugcgacauccccaucggggccggcaucugcgccagcuaccagacgcagaccaacuccccgcggcgcgcccggagcguggcgucccagagcaucaucgccuacaccaugucccugggcgccgagaacagcgucgccuacuccaacaacagcaucgccauccccaccaacuucacgaucuccgugaccaccgagauccugcccgugagcaugaccaagacgagcgucgacugcaccauguacaucugcggggacuccaccgagugcagcaaccuccugcugcaguacggcuccuucugcacccagcucaaccgcgcgcugacggggaucgccguggagcaggacaagaacacccaggagguguucgcccaggucaagcagaucuacaagacgcccccgaucaaggacuucggcggguucaacuucagccagauccugcccgaccccuccaagcccagcaagcgguccuucaucgaggaccuccuguucaacaaggugacccuggccgacgccggcuucaucaagcaguacggcgacugccucggggacaucgcggcccgcgaccugaucugcgcccagaaguucaacggccugaccgugcucccgccccugcugaccgacgagaugaucgcccaguacaccagcgcccuccuggcggggaccaucacguccggcuggaccuucggggccggcgccgcccugcagauccccuucgcgaugcagauggccuaccgguucaacggcaucggggucacccagaacgugcucuacgagaaccagaagcugaucgccaaccaguucaacagcgccaucggcaagauccaggacucccugagcuccaccgccagcgcgcucgggaagcugcaggacguggucaaccagaacgcccaggcccugaacacgcucgugaagcagcuguccagcaacuucggcgccaucuccagcgugcugaacgacauccucucccgccuggacccgcccgaggccgaggugcagaucgaccggcugaucaccgggcgccuccagagccugcagaccuacgugacccagcagcugauccgggcggccgagauccgcgccagcgccaaccucgccgcgaccaagauguccgagugcguccugggccagagcaagcggguggacuucugcggcaagggguaccaccugauguccuucccccagagcgccccgcacggcguggucuuccuccacgugacguacguccccgcccaggagaagaacuucaccaccgcccccgcgaucugccacgacgggaaggcccacuucccccgcgagggcguguucguguccaacgggacccacugguucgucacgcagcggaacuucuacgagccgcagaucaucaccaccgacaacaccuucgugagcggcaacugcgacguggucaucggcaucgugaacaacacgguguacgacccccugcagcccgagcuggacuccuucaaggaggagcucgacaaguacuucaagaaccacaccagccccgacgucgaccugggggacaucuccggcaucaacgccagcguggugaacauccagaaggagaucgaccgccugaacgaggucgccaagaaccucaacgagucccugaucgaccugcaggagcucgggaaguacgagcaguacaucaagggcggcgggagcgggggcgggcagaucuacgagggcaagcugaccgccgaggggcuccgcuucggcaucguggccagccgguucaaccacgcgcuggucgaccgccugguggagggggccaucgacgccaucgugcggcacggcgggcgcgaggaggacaucacccucguccgggugcccggcuccugggagaucccgguggccgccggcgagcuggcccgcaaggaggacaucgacgcggucaucgccaucggggugcugauccggggcgccacgccccacuucgacuacaucgccagcgagguguccaaggggcucgcggaccugagccuggagcuccgcaagcccaucaccuucggcgucaucaccgccgacacccuggagcaggccaucgagcgggccgggacgaagcacggcaacaagggcugggaggccgcgcuguccgccaucgagauggccaaccucuucaagagccugcgcugaggacuaguuauaagacugacuagcccgaugggccucccaacgggcccuccuccccuccuugcaccgagauuaauaaaaaaaaaaaaaaaaaaaaaaaaaaaaaaaaaaaaaaaaaaaaaaaaaaaaaaaaaaaaaaaaugcaucccccccccccccccccccccccccccccccaaaggcucuuuucagagccaccagaauu

SEQ ID NO: 12827 - RNA, 4333 nt, Artificial Sequence
  SARS-CoV-2/Wuhan/WIV05/2019__EPI_ISL_402128 spike protein mRNA gc (1-1211)(K986P_V987P_T887WN_A1020W) LumSynth construct
aggagaaagcuuaccauguucguguuccugguccuccugccccuggugagcucccagugcgugaaccucaccacccgcacgcagcugccgcccgccuacaccaacagcuucacccggggcgucuacuaccccgacaagguguuccgcuccagcgugcugcacuccacccaggaccucuuccugcccuucuucagcaacgucacgugguuccacgccauccacguguccgggaccaacggcaccaagcgguucgacaacccggugcugcccuucaacgacggggucuacuucgcgagcaccgagaaguccaacaucauccgcggcuggaucuucgggacgacccucgacagcaagacccagucccugcugaucgugaacaacgccaccaacguggucaucaaggugugcgaguuccaguucugcaacgaccccuuccucggcguguacuaccacaagaacaacaagagcuggauggaguccgaguuccgggucuacagcuccgccaacaacugcacguucgaguacgugagccagcccuuccugauggaccuggagggcaagcaggggaacuucaagaaccuccgcgaguucguguucaagaacaucgacggcuacuucaagaucuacuccaagcacaccccgaucaaccugguccgggaccugccccagggguucagcgcccucgagccccugguggaccugcccaucggcaucaacaucacccgcuuccagacccuccuggcccugcaccgguccuaccucacgccgggggacagcagcuccggcuggaccgcgggcgccgccgccuacuacgugggguaccugcagccccgcaccuuccugcucaaguacaacgagaacggcaccaucacggacgcggucgacugcgcccuggacccccugagcgagaccaagugcacccucaaguccuucaccguggagaaggggaucuaccagacgagcaacuuccgggugcagcccaccgaguccaucguccgcuucccgaacaucaccaaccugugccccuucggcgagguguucaacgccacccgguucgccagcgucuacgccuggaaccgcaagcggaucuccaacugcguggcggacuacagcgugcuguacaacuccgccagcuucuccacguucaagugcuacggcgucagccccaccaagcucaacgaccugugcuucaccaacguguacgccgacuccuucgugauccgcggggacgagguccggcagaucgcccccggccagaccgggaagaucgccgacuacaacuacaagcugccggacgacuucacgggcugcgugaucgcguggaacagcaacaaccucgacuccaaggucgggggcaacuacaacuaccuguaccgccuguuccgcaagagcaaccucaagcccuucgagcgggacaucuccaccgagaucuaccaggccggcagcacccccugcaacgggguggagggcuucaacugcuacuucccccugcaguccuacggguuccagccgaccaacggcgugggguaccagcccuaccggguggucgugcugagcuucgagcuccugcacgcccccgccacggugugcggccccaagaaguccaccaaccuggucaagaacaagugcgugaacuucaacuucaacggccucaccgggaccggcgugcugaccgagagcaacaagaaguuccugccguuccagcaguucgggcgcgacaucgccgacacgaccgacgcgguccgcgacccccagacccuggagauccucgacaucacccccugcagcuucggcgggguguccgugaucacgccgggcaccaacaccagcaaccaggucgccgugcuguaccaggacgugaacugcaccgagguccccguggccauccacgccgaccagcugacgcccaccuggcggguguacuccaccggcagcaacgucuuccagacccgcgccgggugccucaucggcgcggagcacgugaacaacuccuacgagugcgacauccccaucggggccggcaucugcgccagcuaccagacgcagaccaacuccccgcggcgcgcccggagcguggcgucccagagcaucaucgccuacaccaugucccugggcgccgagaacagcgucgccuacuccaacaacagcaucgccauccccaccaacuucacgaucuccgugaccaccgagauccugcccgugagcaugaccaagacgagcgucgacugcaccauguacaucugcggggacuccaccgagugcagcaaccuccugcugcaguacggcuccuucugcacccagcucaaccgcgcgcugacggggaucgccguggagcaggacaagaacacccaggagguguucgcccaggucaagcagaucuacaagacgcccccgaucaaggacuucggcggguucaacuucagccagauccugcccgaccccuccaagcccagcaagcgguccuucaucgaggaccuccuguucaacaaggugacccuggccgacgccggcuucaucaagcaguacggcgacugccucggggacaucgcggcccgcgaccugaucugcgcccagaaguucaacggccugaccgugcucccgccccugcugaccgacgagaugaucgcccaguacaccagcgcccuccuggcggggaccaucacguccggcuggugguucggggccggcgccgcccugcagauccccuucgcgaugcagauggccuaccgguucaacggcaucggggucacccagaacgugcucuacgagaaccagaagcugaucgccaaccaguucaacagcgccaucggcaagauccaggacucccugagcuccaccgccagcgcgcucgggaagcugcaggacguggucaaccagaacgcccaggcccugaacacgcucgugaagcagcuguccagcaacuucggcgccaucuccagcgugcugaacgacauccucucccgccuggacccgcccgaggccgaggugcagaucgaccggcugaucaccgggcgccuccagagccugcagaccuacgugacccagcagcugauccgggcggccgagauccgcuggagcgccaaccucgccgcgaccaagauguccgagugcguccugggccagagcaagcggguggacuucugcggcaagggguaccaccugauguccuucccccagagcgccccgcacggcguggucuuccuccacgugacguacguccccgcccaggagaagaacuucaccaccgcccccgcgaucugccacgacgggaaggcccacuucccccgcgagggcguguucguguccaacgggacccacugguucgucacgcagcggaacuucuacgagccgcagaucaucaccaccgacaacaccuucgugagcggcaacugcgacguggucaucggcaucgugaacaacacgguguacgacccccugcagcccgagcuggacuccuucaaggaggagcucgacaaguacuucaagaaccacaccagccccgacgucgaccugggggacaucuccggcaucaacgccagcguggugaacauccagaaggagaucgaccgccugaacgaggucgccaagaaccucaacgagucccugaucgaccugcaggagcucgggaaguacgagcaguacaucaagggcggcgggagcgggggcgggcagaucuacgagggcaagcugaccgccgaggggcuccgcuucggcaucguggccagccgguucaaccacgcgcuggucgaccgccugguggagggggccaucgacgccaucgugcggcacggcgggcgcgaggaggacaucacccucguccgggugcccggcuccugggagaucccgguggccgccggcgagcuggcccgcaaggaggacaucgacgcggucaucgccaucggggugcugauccggggcgccacgccccacuucgacuacaucgccagcgagguguccaaggggcucgcggaccugagccuggagcuccgcaagcccaucaccuucggcgucaucaccgccgacacccuggagcaggccaucgagcgggccgggacgaagcacggcaacaagggcugggaggccgcgcuguccgccaucgagauggccaaccucuucaagagccugcgcugaggacuaguuauaagacugacuagcccgaugggccucccaacgggcccuccuccccuccuugcaccgagauuaauaaaaaaaaaaaaaaaaaaaaaaaaaaaaaaaaaaaaaaaaaaaaaaaaaaaaaaaaaaaaaaaaugcaucccccccccccccccccccccccccccccccaaaggcucuuuucagagccaccagaauu

SEQ ID NO: 12828 - RNA, 4333 nt, Artificial Sequence
  SARS-CoV-2/Wuhan/WIV05/2019__EPI_ISL_402128 spike protein mRNA gc (1-1211)(K986P_V987P_P1069F) LumSynth construct
aggagaaagcuuaccauguucguguuccugguccuccugccccuggugagcucccagugcgugaaccucaccacccgcacgcagcugccgcccgccuacaccaacagcuucacccggggcgucuacuaccccgacaagguguuccgcuccagcgugcugcacuccacccaggaccucuuccugcccuucuucagcaacgucacgugguuccacgccauccacguguccgggaccaacggcaccaagcgguucgacaacccggugcugcccuucaacgacggggucuacuucgcgagcaccgagaaguccaacaucauccgcggcuggaucuucgggacgacccucgacagcaagacccagucccugcugaucgugaacaacgccaccaacguggucaucaaggugugcgaguuccaguucugcaacgaccccuuccucggcguguacuaccacaagaacaacaagagcuggauggaguccgaguuccgggucuacagcuccgccaacaacugcacguucgaguacgugagccagcccuuccugauggaccuggagggcaagcaggggaacuucaagaaccuccgcgaguucguguucaagaacaucgacggcuacuucaagaucuacuccaagcacaccccgaucaaccugguccgggaccugccccagggguucagcgcccucgagccccugguggaccugcccaucggcaucaacaucacccgcuuccagacccuccuggcccugcaccgguccuaccucacgccgggggacagcagcuccggcuggaccgcgggcgccgccgccuacuacgugggguaccugcagccccgcaccuuccugcucaaguacaacgagaacggcaccaucacggacgcggucgacugcgcccuggacccccugagcgagaccaagugcacccucaaguccuucaccguggagaaggggaucuaccagacgagcaacuuccgggugcagcccaccgaguccaucguccgcuucccgaacaucaccaaccugugccccuucggcgagguguucaacgccacccgguucgccagcgucuacgccuggaaccgcaagcggaucuccaacugcguggcggacuacagcgugcuguacaacuccgccagcuucuccacguucaagugcuacggcgucagccccaccaagcucaacgaccugugcuucaccaacguguacgccgacuccuucgugauccgcggggacgagguccggcagaucgcccccggccagaccgggaagaucgccgacuacaacuacaagcugccggacgacuucacgggcugcgugaucgcguggaacagcaacaaccucgacuccaaggucgggggcaacuacaacuaccuguaccgccuguuccgcaagagcaaccucaagcccuucgagcgggacaucuccaccgagaucuaccaggccggcagcacccccugcaacgggguggagggcuucaacugcuacuucccccugcaguccuacggguuccagccgaccaacggcgugggguaccagcccuaccggguggucgugcugagcuucgagcuccugcacgcccccgccacggugugcggccccaagaaguccaccaaccuggucaagaacaagugcgugaacuucaacuucaacggccucaccgggaccggcgugcugaccgagagcaacaagaaguuccugccguuccagcaguucgggcgcgacaucgccgacacgaccgacgcgguccgcgacccccagacccuggagauccucgacaucacccccugcagcuucggcgggguguccgugaucacgccgggcaccaacaccagcaaccaggucgccgugcuguaccaggacgugaacugcaccgagguccccguggccauccacgccgaccagcugacgcccaccuggcggguguacuccaccggcagcaacgucuuccagacccgcgccgggugccucaucggcgcggagcacgugaacaacuccuacgagugcgacauccccaucggggccggcaucugcgccagcuaccagacgcagaccaacuccccgcggcgcgcccggagcguggcgucccagagcaucaucgccuacaccaugucccugggcgccgagaacagcgucgccuacuccaacaacagcaucgccauccccaccaacuucacgaucuccgugaccaccgagauccugcccgugagcaugaccaagacgagcgucgacugcaccauguacaucugcggggacuccaccgagugcagcaaccuccugcugcaguacggcuccuucugcacccagcucaaccgcgcgcugacggggaucgccguggagcaggacaagaacacccaggagguguucgcccaggucaagcagaucuacaagacgcccccgaucaaggacuucggcggguucaacuucagccagauccugcccgaccccuccaagcccagcaagcgguccuucaucgaggaccuccuguucaacaaggugacccuggccgacgccggcuucaucaagcaguacggcgacugccucggggacaucgcggcccgcgaccugaucugcgcccagaaguucaacggccugaccgugcucccgccccugcugaccgacgagaugaucgcccaguacaccagcgcccuccuggcggggaccaucacguccggcuggaccuucggggccggcgccgcccugcagauccccuucgcgaugcagauggccuaccgguucaacggcaucggggucacccagaacgugcucuacgagaaccagaagcugaucgccaaccaguucaacagcgccaucggcaagauccaggacucccugagcuccaccgccagcgcgcucgggaagcugcaggacguggucaaccagaacgcccaggcccugaacacgcucgugaagcagcuguccagcaacuucggcgccaucuccagcgugcugaacgacauccucucccgccuggacccgcccgaggccgaggugcagaucgaccggcugaucaccgggcgccuccagagccugcagaccuacgugacccagcagcugauccgggcggccgagauccgcgccagcgccaaccucgccgcgaccaagauguccgagugcguccugggccagagcaagcggguggacuucugcggcaagggguaccaccugauguccuucccccagagcgccccgcacggcguggucuuccuccacgugacguacgucuucgcccaggagaagaacuucaccaccgcccccgcgaucugccacgacgggaaggcccacuucccccgcgagggcguguucguguccaacgggacccacugguucgucacgcagcggaacuucuacgagccgcagaucaucaccaccgacaacaccuucgugagcggcaacugcgacguggucaucggcaucgugaacaacacgguguacgacccccugcagcccgagcuggacuccuucaaggaggagcucgacaaguacuucaagaaccacaccagccccgacgucgaccugggggacaucuccggcaucaacgccagcguggugaacauccagaaggagaucgaccgccugaacgaggucgccaagaaccucaacgagucccugaucgaccugcaggagcucgggaaguacgagcaguacaucaagggcggcgggagcgggggcgggcagaucuacgagggcaagcugaccgccgaggggcuccgcuucggcaucguggccagccgguucaaccacgcgcuggucgaccgccugguggagggggccaucgacgccaucgugcggcacggcgggcgcgaggaggacaucacccucguccgggugcccggcuccugggagaucccgguggccgccggcgagcuggcccgcaaggaggacaucgacgcggucaucgccaucggggugcugauccggggcgccacgccccacuucgacuacaucgccagcgagguguccaaggggcucgcggaccugagccuggagcuccgcaagcccaucaccuucggcgucaucaccgccgacacccuggagcaggccaucgagcgggccgggacgaagcacggcaacaagggcugggaggccgcgcuguccgccaucgagauggccaaccucuucaagagccugcgcugaggacuaguuauaagacugacuagcccgaugggccucccaacgggcccuccuccccuccuugcaccgagauuaauaaaaaaaaaaaaaaaaaaaaaaaaaaaaaaaaaaaaaaaaaaaaaaaaaaaaaaaaaaaaaaaaugcaucccccccccccccccccccccccccccccccaaaggcucuuuucagagccaccagaauu

SEQ ID NO: 12829 - RNA, 4333 nt, Artificial Sequence
  SARS-CoV-2/Wuhan/WIV05/2019__EPI_ISL_402128 spike protein mRNA gc (1-1211)(K986P_V987P_ H1048Q_H1064N_ H1083N_H1101N) LumSynth construct
aggagaaagcuuaccauguucguguuccugguccuccugccccuggugagcucccagugcgugaaccucaccacccgcacgcagcugccgcccgccuacaccaacagcuucacccggggcgucuacuaccccgacaagguguuccgcuccagcgugcugcacuccacccaggaccucuuccugcccuucuucagcaacgucacgugguuccacgccauccacguguccgggaccaacggcaccaagcgguucgacaacccggugcugcccuucaacgacggggucuacuucgcgagcaccgagaaguccaacaucauccgcggcuggaucuucgggacgacccucgacagcaagacccagucccugcugaucgugaacaacgccaccaacguggucaucaaggugugcgaguuccaguucugcaacgaccccuuccucggcguguacuaccacaagaacaacaagagcuggauggaguccgaguuccgggucuacagcuccgccaacaacugcacguucgaguacgugagccagcccuuccugauggaccuggagggcaagcaggggaacuucaagaaccuccgcgaguucguguucaagaacaucgacggcuacuucaagaucuacuccaagcacaccccgaucaaccugguccgggaccugccccagggguucagcgcccucgagccccugguggaccugcccaucggcaucaacaucacccgcuuccagacccuccuggcccugcaccgguccuaccucacgccgggggacagcagcuccggcuggaccgcgggcgccgccgccuacuacgugggguaccugcagccccgcaccuuccugcucaaguacaacgagaacggcaccaucacggacgcggucgacugcgcccuggacccccugagcgagaccaagugcacccucaaguccuucaccguggagaaggggaucuaccagacgagcaacuuccgggugcagcccaccgaguccaucguccgcuucccgaacaucaccaaccugugccccuucggcgagguguucaacgccacccgguucgccagcgucuacgccuggaaccgcaagcggaucuccaacugcguggcggacuacagcgugcuguacaacuccgccagcuucuccacguucaagugcuacggcgucagccccaccaagcucaacgaccugugcuucaccaacguguacgccgacuccuucgugauccgcggggacgagguccggcagaucgcccccggccagaccgggaagaucgccgacuacaacuacaagcugccggacgacuucacgggcugcgugaucgcguggaacagcaacaaccucgacuccaaggucgggggcaacuacaacuaccuguaccgccuguuccgcaagagcaaccucaagcccuucgagcgggacaucuccaccgagaucuaccaggccggcagcacccccugcaacgggguggagggcuucaacugcuacuucccccugcaguccuacggguuccagccgaccaacggcgugggguaccagcccuaccggguggucgugcugagcuucgagcuccugcacgcccccgccacggugugcggccccaagaaguccaccaaccuggucaagaacaagugcgugaacuucaacuucaacggccucaccgggaccggcgugcugaccgagagcaacaagaaguuccugccguuccagcaguucgggcgcgacaucgccgacacgaccgacgcgguccgcgacccccagacccuggagauccucgacaucacccccugcagcuucggcgggguguccgugaucacgccgggcaccaacaccagcaaccaggucgccgugcuguaccaggacgugaacugcaccgagguccccguggccauccacgccgaccagcugacgcccaccuggcggguguacuccaccggcagcaacgucuuccagacccgcgccgggugccucaucggcgcggagcacgugaacaacuccuacgagugcgacauccccaucggggccggcaucugcgccagcuaccagacgcagaccaacuccccgcggcgcgcccggagcguggcgucccagagcaucaucgccuacaccaugucccugggcgccgagaacagcgucgccuacuccaacaacagcaucgccauccccaccaacuucacgaucuccgugaccaccgagauccugcccgugagcaugaccaagacgagcgucgacugcaccauguacaucugcggggacuccaccgagugcagcaaccuccugcugcaguacggcuccuucugcacccagcucaaccgcgcgcugacggggaucgccguggagcaggacaagaacacccaggagguguucgcccaggucaagcagaucuacaagacgcccccgaucaaggacuucggcggguucaacuucagccagauccugcccgaccccuccaagcccagcaagcgguccuucaucgaggaccuccuguucaacaaggugacccuggccgacgccggcuucaucaagcaguacggcgacugccucggggacaucgcggcccgcgaccugaucugcgcccagaaguucaacggccugaccgugcucccgccccugcugaccgacgagaugaucgcccaguacaccagcgcccuccuggcggggaccaucacguccggcuggaccuucggggccggcgccgcccugcagauccccuucgcgaugcagauggccuaccgguucaacggcaucggggucacccagaacgugcucuacgagaaccagaagcugaucgccaaccaguucaacagcgccaucggcaagauccaggacucccugagcuccaccgccagcgcgcucgggaagcugcaggacguggucaaccagaacgcccaggcccugaacacgcucgugaagcagcuguccagcaacuucggcgccaucuccagcgugcugaacgacauccucucccgccuggacccgcccgaggccgaggugcagaucgaccggcugaucaccgggcgccuccagagccugcagaccuacgugacccagcagcugauccgggcggccgagauccgcgccagcgccaaccucgccgcgaccaagauguccgagugcguccugggccagagcaagcggguggacuucugcggcaagggguaccagcugauguccuucccccagagcgccccgcacggcguggucuuccucaacgugacguacguccccgcccaggagaagaacuucaccaccgcccccgcgaucugcaacgacgggaaggcccacuucccccgcgagggcguguucguguccaacgggaccaacugguucgucacgcagcggaacuucuacgagccgcagaucaucaccaccgacaacaccuucgugagcggcaacugcgacguggucaucggcaucgugaacaacacgguguacgacccccugcagcccgagcuggacuccuucaaggaggagcucgacaaguacuucaagaaccacaccagccccgacgucgaccugggggacaucuccggcaucaacgccagcguggugaacauccagaaggagaucgaccgccugaacgaggucgccaagaaccucaacgagucccugaucgaccugcaggagcucgggaaguacgagcaguacaucaagggcggcgggagcgggggcgggcagaucuacgagggcaagcugaccgccgaggggcuccgcuucggcaucguggccagccgguucaaccacgcgcuggucgaccgccugguggagggggccaucgacgccaucgugcggcacggcgggcgcgaggaggacaucacccucguccgggugcccggcuccugggagaucccgguggccgccggcgagcuggcccgcaaggaggacaucgacgcggucaucgccaucggggugcugauccggggcgccacgccccacuucgacuacaucgccagcgagguguccaaggggcucgcggaccugagccuggagcuccgcaagcccaucaccuucggcgucaucaccgccgacacccuggagcaggccaucgagcgggccgggacgaagcacggcaacaagggcugggaggccgcgcuguccgccaucgagauggccaaccucuucaagagccugcgcugaggacuaguuauaagacugacuagcccgaugggccucccaacgggcccuccuccccuccuugcaccgagauuaauaaaaaaaaaaaaaaaaaaaaaaaaaaaaaaaaaaaaaaaaaaaaaaaaaaaaaaaaaaaaaaaaugcaucccccccccccccccccccccccccccccccaaaggcucuuuucagagccaccagaauu

SEQ ID NO: 12830 - RNA, 4333 nt, Artificial Sequence
  SARS-CoV-2/Wuhan/WIV05/2019__EPI_ISL_402128 spike protein mRNA gc (1-1211)(I712C_T1077C) LumSynth construct
aggagaaagcuuaccauguucguguuccugguccuccugccccuggugagcucccagugcgugaaccucaccacccgcacgcagcugccgcccgccuacaccaacagcuucacccggggcgucuacuaccccgacaagguguuccgcuccagcgugcugcacuccacccaggaccucuuccugcccuucuucagcaacgucacgugguuccacgccauccacguguccgggaccaacggcaccaagcgguucgacaacccggugcugcccuucaacgacggggucuacuucgcgagcaccgagaaguccaacaucauccgcggcuggaucuucgggacgacccucgacagcaagacccagucccugcugaucgugaacaacgccaccaacguggucaucaaggugugcgaguuccaguucugcaacgaccccuuccucggcguguacuaccacaagaacaacaagagcuggauggaguccgaguuccgggucuacagcuccgccaacaacugcacguucgaguacgugagccagcccuuccugauggaccuggagggcaagcaggggaacuucaagaaccuccgcgaguucguguucaagaacaucgacggcuacuucaagaucuacuccaagcacaccccgaucaaccugguccgggaccugccccagggguucagcgcccucgagccccugguggaccugcccaucggcaucaacaucacccgcuuccagacccuccuggcccugcaccgguccuaccucacgccgggggacagcagcuccggcuggaccgcgggcgccgccgccuacuacgugggguaccugcagccccgcaccuuccugcucaaguacaacgagaacggcaccaucacggacgcggucgacugcgcccuggacccccugagcgagaccaagugcacccucaaguccuucaccguggagaaggggaucuaccagacgagcaacuuccgggugcagcccaccgaguccaucguccgcuucccgaacaucaccaaccugugccccuucggcgagguguucaacgccacccgguucgccagcgucuacgccuggaaccgcaagcggaucuccaacugcguggcggacuacagcgugcuguacaacuccgccagcuucuccacguucaagugcuacggcgucagccccaccaagcucaacgaccugugcuucaccaacguguacgccgacuccuucgugauccgcggggacgagguccggcagaucgcccccggccagaccgggaagaucgccgacuacaacuacaagcugccggacgacuucacgggcugcgugaucgcguggaacagcaacaaccucgacuccaaggucgggggcaacuacaacuaccuguaccgccuguuccgcaagagcaaccucaagcccuucgagcgggacaucuccaccgagaucuaccaggccggcagcacccccugcaacgggguggagggcuucaacugcuacuucccccugcaguccuacggguuccagccgaccaacggcgugggguaccagcccuaccggguggucgugcugagcuucgagcuccugcacgcccccgccacggugugcggccccaagaaguccaccaaccuggucaagaacaagugcgugaacuucaacuucaacggccucaccgggaccggcgugcugaccgagagcaacaagaaguuccugccguuccagcaguucgggcgcgacaucgccgacacgaccgacgcgguccgcgacccccagacccuggagauccucgacaucacccccugcagcuucggcgggguguccgugaucacgccgggcaccaacaccagcaaccaggucgccgugcuguaccaggacgugaacugcaccgagguccccguggccauccacgccgaccagcugacgcccaccuggcggguguacuccaccggcagcaacgucuuccagacccgcgccgggugccucaucggcgcggagcacgugaacaacuccuacgagugcgacauccccaucggggccggcaucugcgccagcuaccagacgcagaccaacuccccgcggcgcgcccggagcguggcgucccagagcaucaucgccuacaccaugucccugggcgccgagaacagcgucgccuacuccaacaacagcugcgccauccccaccaacuucacgaucuccgugaccaccgagauccugcccgugagcaugaccaagacgagcgucgacugcaccauguacaucugcggggacuccaccgagugcagcaaccuccugcugcaguacggcuccuucugcacccagcucaaccgcgcgcugacggggaucgccguggagcaggacaagaacacccaggagguguucgcccaggucaagcagaucuacaagacgcccccgaucaaggacuucggcggguucaacuucagccagauccugcccgaccccuccaagcccagcaagcgguccuucaucgaggaccuccuguucaacaaggugacccuggccgacgccggcuucaucaagcaguacggcgacugccucggggacaucgcggcccgcgaccugaucugcgcccagaaguucaacggccugaccgugcucccgccccugcugaccgacgagaugaucgcccaguacaccagcgcccuccuggcggggaccaucacguccggcuggaccuucggggccggcgccgcccugcagauccccuucgcgaugcagauggccuaccgguucaacggcaucggggucacccagaacgugcucuacgagaaccagaagcugaucgccaaccaguucaacagcgccaucggcaagauccaggacucccugagcuccaccgccagcgcgcucgggaagcugcaggacguggucaaccagaacgcccaggcccugaacacgcucgugaagcagcuguccagcaacuucggcgccaucuccagcgugcugaacgacauccucucccgccuggacaaggucgaggccgaggugcagaucgaccggcugaucaccgggcgccuccagagccugcagaccuacgugacccagcagcugauccgggcggccgagauccgcgccagcgccaaccucgccgcgaccaagauguccgagugcguccugggccagagcaagcggguggacuucugcggcaagggguaccaccugauguccuucccccagagcgccccgcacggcguggucuuccuccacgugacguacguccccgcccaggagaagaacuucaccugcgcccccgcgaucugccacgacgggaaggcccacuucccccgcgagggcguguucguguccaacgggacccacugguucgucacgcagcggaacuucuacgagccgcagaucaucaccaccgacaacaccuucgugagcggcaacugcgacguggucaucggcaucgugaacaacacgguguacgacccccugcagcccgagcuggacuccuucaaggaggagcucgacaaguacuucaagaaccacaccagccccgacgucgaccugggggacaucuccggcaucaacgccagcguggugaacauccagaaggagaucgaccgccugaacgaggucgccaagaaccucaacgagucccugaucgaccugcaggagcucgggaaguacgagcaguacaucaagggcggcgggagcgggggcgggcagaucuacgagggcaagcugaccgccgaggggcuccgcuucggcaucguggccagccgguucaaccacgcgcuggucgaccgccugguggagggggccaucgacgccaucgugcggcacggcgggcgcgaggaggacaucacccucguccgggugcccggcuccugggagaucccgguggccgccggcgagcuggcccgcaaggaggacaucgacgcggucaucgccaucggggugcugauccggggcgccacgccccacuucgacuacaucgccagcgagguguccaaggggcucgcggaccugagccuggagcuccgcaagcccaucaccuucggcgucaucaccgccgacacccuggagcaggccaucgagcgggccgggacgaagcacggcaacaagggcugggaggccgcgcuguccgccaucgagauggccaaccucuucaagagccugcgcugaggacuaguuauaagacugacuagcccgaugggccucccaacgggcccuccuccccuccuugcaccgagauuaauaaaaaaaaaaaaaaaaaaaaaaaaaaaaaaaaaaaaaaaaaaaaaaaaaaaaaaaaaaaaaaaaugcaucccccccccccccccccccccccccccccccaaaggcucuuuucagagccaccagaauu

SEQ ID NO: 12831 - RNA, 4333 nt, Artificial Sequence
  SARS-CoV-2/Wuhan/WIV05/2019__EPI_ISL_402128 spike protein mRNA gc (1-1211)(I714C_Y1110C) LumSynth construct
aggagaaagcuuaccauguucguguuccugguccuccugccccuggugagcucccagugcgugaaccucaccacccgcacgcagcugccgcccgccuacaccaacagcuucacccggggcgucuacuaccccgacaagguguuccgcuccagcgugcugcacuccacccaggaccucuuccugcccuucuucagcaacgucacgugguuccacgccauccacguguccgggaccaacggcaccaagcgguucgacaacccggugcugcccuucaacgacggggucuacuucgcgagcaccgagaaguccaacaucauccgcggcuggaucuucgggacgacccucgacagcaagacccagucccugcugaucgugaacaacgccaccaacguggucaucaaggugugcgaguuccaguucugcaacgaccccuuccucggcguguacuaccacaagaacaacaagagcuggauggaguccgaguuccgggucuacagcuccgccaacaacugcacguucgaguacgugagccagcccuuccugauggaccuggagggcaagcaggggaacuucaagaaccuccgcgaguucguguucaagaacaucgacggcuacuucaagaucuacuccaagcacaccccgaucaaccugguccgggaccugccccagggguucagcgcccucgagccccugguggaccugcccaucggcaucaacaucacccgcuuccagacccuccuggcccugcaccgguccuaccucacgccgggggacagcagcuccggcuggaccgcgggcgccgccgccuacuacgugggguaccugcagccccgcaccuuccugcucaaguacaacgagaacggcaccaucacggacgcggucgacugcgcccuggacccccugagcgagaccaagugcacccucaaguccuucaccguggagaaggggaucuaccagacgagcaacuuccgggugcagcccaccgaguccaucguccgcuucccgaacaucaccaaccugugccccuucggcgagguguucaacgccacccgguucgccagcgucuacgccuggaaccgcaagcggaucuccaacugcguggcggacuacagcgugcuguacaacuccgccagcuucuccacguucaagugcuacggcgucagccccaccaagcucaacgaccugugcuucaccaacguguacgccgacuccuucgugauccgcggggacgagguccggcagaucgcccccggccagaccgggaagaucgccgacuacaacuacaagcugccggacgacuucacgggcugcgugaucgcguggaacagcaacaaccucgacuccaaggucgggggcaacuacaacuaccuguaccgccuguuccgcaagagcaaccucaagcccuucgagcgggacaucuccaccgagaucuaccaggccggcagcacccccugcaacgggguggagggcuucaacugcuacuucccccugcaguccuacggguuccagccgaccaacggcgugggguaccagcccuaccggguggucgugcugagcuucgagcuccugcacgcccccgccacggugugcggccccaagaaguccaccaaccuggucaagaacaagugcgugaacuucaacuucaacggccucaccgggaccggcgugcugaccgagagcaacaagaaguuccugccguuccagcaguucgggcgcgacaucgccgacacgaccgacgcgguccgcgacccccagacccuggagauccucgacaucacccccugcagcuucggcgggguguccgugaucacgccgggcaccaacaccagcaaccaggucgccgugcuguaccaggacgugaacugcaccgagguccccguggccauccacgccgaccagcugacgcccaccuggcggguguacuccaccggcagcaacgucuuccagacccgcgccgggugccucaucggcgcggagcacgugaacaacuccuacgagugcgacauccccaucggggccggcaucugcgccagcuaccagacgcagaccaacuccccgcggcgcgcccggagcguggcgucccagagcaucaucgccuacaccaugucccugggcgccgagaacagcgucgccuacuccaacaacagcaucgccugccccaccaacuucacgaucuccgugaccaccgagauccugcccgugagcaugaccaagacgagcgucgacugcaccauguacaucugcggggacuccaccgagugcagcaaccuccugcugcaguacggcuccuucugcacccagcucaaccgcgcgcugacggggaucgccguggagcaggacaagaacacccaggagguguucgcccaggucaagcagaucuacaagacgcccccgaucaaggacuucggcggguucaacuucagccagauccugcccgaccccuccaagcccagcaagcgguccuucaucgaggaccuccuguucaacaaggugacccuggccgacgccggcuucaucaagcaguacggcgacugccucggggacaucgcggcccgcgaccugaucugcgcccagaaguucaacggccugaccgugcucccgccccugcugaccgacgagaugaucgcccaguacaccagcgcccuccuggcggggaccaucacguccggcuggaccuucggggccggcgccgcccugcagauccccuucgcgaugcagauggccuaccgguucaacggcaucggggucacccagaacgugcucuacgagaaccagaagcugaucgccaaccaguucaacagcgccaucggcaagauccaggacucccugagcuccaccgccagcgcgcucgggaagcugcaggacguggucaaccagaacgcccaggcccugaacacgcucgugaagcagcuguccagcaacuucggcgccaucuccagcgugcugaacgacauccucucccgccuggacaaggucgaggccgaggugcagaucgaccggcugaucaccgggcgccuccagagccugcagaccuacgugacccagcagcugauccgggcggccgagauccgcgccagcgccaaccucgccgcgaccaagauguccgagugcguccugggccagagcaagcggguggacuucugcggcaagggguaccaccugauguccuucccccagagcgccccgcacggcguggucuuccuccacgugacguacguccccgcccaggagaagaacuucaccaccgcccccgcgaucugccacgacgggaaggcccacuucccccgcgagggcguguucguguccaacgggacccacugguucgucacgcagcggaacuucugcgagccgcagaucaucaccaccgacaacaccuucgugagcggcaacugcgacguggucaucggcaucgugaacaacacgguguacgacccccugcagcccgagcuggacuccuucaaggaggagcucgacaaguacuucaagaaccacaccagccccgacgucgaccugggggacaucuccggcaucaacgccagcguggugaacauccagaaggagaucgaccgccugaacgaggucgccaagaaccucaacgagucccugaucgaccugcaggagcucgggaaguacgagcaguacaucaagggcggcgggagcgggggcgggcagaucuacgagggcaagcugaccgccgaggggcuccgcuucggcaucguggccagccgguucaaccacgcgcuggucgaccgccugguggagggggccaucgacgccaucgugcggcacggcgggcgcgaggaggacaucacccucguccgggugcccggcuccugggagaucccgguggccgccggcgagcuggcccgcaaggaggacaucgacgcggucaucgccaucggggugcugauccggggcgccacgccccacuucgacuacaucgccagcgagguguccaaggggcucgcggaccugagccuggagcuccgcaagcccaucaccuucggcgucaucaccgccgacacccuggagcaggccaucgagcgggccgggacgaagcacggcaacaagggcugggaggccgcgcuguccgccaucgagauggccaaccucuucaagagccugcgcugaggacuaguuauaagacugacuagcccgaugggccucccaacgggcccuccuccccuccuugcaccgagauuaauaaaaaaaaaaaaaaaaaaaaaaaaaaaaaaaaaaaaaaaaaaaaaaaaaaaaaaaaaaaaaaaaugcaucccccccccccccccccccccccccccccccaaaggcucuuuucagagccaccagaauu

SEQ ID NO: 12832 - RNA, 4333 nt, Artificial Sequence
  SARS-CoV-2/Wuhan/WIV05/2019__EPI_ISL_402128 spike protein mRNA gc (1-1211)(P715C_P1069C) LumSynth construct
aggagaaagcuuaccauguucguguuccugguccuccugccccuggugagcucccagugcgugaaccucaccacccgcacgcagcugccgcccgccuacaccaacagcuucacccggggcgucuacuaccccgacaagguguuccgcuccagcgugcugcacuccacccaggaccucuuccugcccuucuucagcaacgucacgugguuccacgccauccacguguccgggaccaacggcaccaagcgguucgacaacccggugcugcccuucaacgacggggucuacuucgcgagcaccgagaaguccaacaucauccgcggcuggaucuucgggacgacccucgacagcaagacccagucccugcugaucgugaacaacgccaccaacguggucaucaaggugugcgaguuccaguucugcaacgaccccuuccucggcguguacuaccacaagaacaacaagagcuggauggaguccgaguuccgggucuacagcuccgccaacaacugcacguucgaguacgugagccagcccuuccugauggaccuggagggcaagcaggggaacuucaagaaccuccgcgaguucguguucaagaacaucgacggcuacuucaagaucuacuccaagcacaccccgaucaaccugguccgggaccugccccagggguucagcgcccucgagccccugguggaccugcccaucggcaucaacaucacccgcuuccagacccuccuggcccugcaccgguccuaccucacgccgggggacagcagcuccggcuggaccgcgggcgccgccgccuacuacgugggguaccugcagccccgcaccuuccugcucaaguacaacgagaacggcaccaucacggacgcggucgacugcgcccuggacccccugagcgagaccaagugcacccucaaguccuucaccguggagaaggggaucuaccagacgagcaacuuccgggugcagcccaccgaguccaucguccgcuucccgaacaucaccaaccugugccccuucggcgagguguucaacgccacccgguucgccagcgucuacgccuggaaccgcaagcggaucuccaacugcguggcggacuacagcgugcuguacaacuccgccagcuucuccacguucaagugcuacggcgucagccccaccaagcucaacgaccugugcuucaccaacguguacgccgacuccuucgugauccgcggggacgagguccggcagaucgcccccggccagaccgggaagaucgccgacuacaacuacaagcugccggacgacuucacgggcugcgugaucgcguggaacagcaacaaccucgacuccaaggucgggggcaacuacaacuaccuguaccgccuguuccgcaagagcaaccucaagcccuucgagcgggacaucuccaccgagaucuaccaggccggcagcacccccugcaacgggguggagggcuucaacugcuacuucccccugcaguccuacggguuccagccgaccaacggcgugggguaccagcccuaccggguggucgugcugagcuucgagcuccugcacgcccccgccacggugugcggccccaagaaguccaccaaccuggucaagaacaagugcgugaacuucaacuucaacggccucaccgggaccggcgugcugaccgagagcaacaagaaguuccugccguuccagcaguucgggcgcgacaucgccgacacgaccgacgcgguccgcgacccccagacccuggagauccucgacaucacccccugcagcuucggcgggguguccgugaucacgccgggcaccaacaccagcaaccaggucgccgugcuguaccaggacgugaacugcaccgagguccccguggccauccacgccgaccagcugacgcccaccuggcggguguacuccaccggcagcaacgucuuccagacccgcgccgggugccucaucggcgcggagcacgugaacaacuccuacgagugcgacauccccaucggggccggcaucugcgccagcuaccagacgcagaccaacuccccgcggcgcgcccggagcguggcgucccagagcaucaucgccuacaccaugucccugggcgccgagaacagcgucgccuacuccaacaacagcaucgccaucugcaccaacuucacgaucuccgugaccaccgagauccugcccgugagcaugaccaagacgagcgucgacugcaccauguacaucugcggggacuccaccgagugcagcaaccuccugcugcaguacggcuccuucugcacccagcucaaccgcgcgcugacggggaucgccguggagcaggacaagaacacccaggagguguucgcccaggucaagcagaucuacaagacgcccccgaucaaggacuucggcggguucaacuucagccagauccugcccgaccccuccaagcccagcaagcgguccuucaucgaggaccuccuguucaacaaggugacccuggccgacgccggcuucaucaagcaguacggcgacugccucggggacaucgcggcccgcgaccugaucugcgcccagaaguucaacggccugaccgugcucccgccccugcugaccgacgagaugaucgcccaguacaccagcgcccuccuggcggggaccaucacguccggcuggaccuucggggccggcgccgcccugcagauccccuucgcgaugcagauggccuaccgguucaacggcaucggggucacccagaacgugcucuacgagaaccagaagcugaucgccaaccaguucaacagcgccaucggcaagauccaggacucccugagcuccaccgccagcgcgcucgggaagcugcaggacguggucaaccagaacgcccaggcccugaacacgcucgugaagcagcuguccagcaacuucggcgccaucuccagcgugcugaacgacauccucucccgccuggacaaggucgaggccgaggugcagaucgaccggcugaucaccgggcgccuccagagccugcagaccuacgugacccagcagcugauccgggcggccgagauccgcgccagcgccaaccucgccgcgaccaagauguccgagugcguccugggccagagcaagcggguggacuucugcggcaagggguaccaccugauguccuucccccagagcgccccgcacggcguggucuuccuccacgugacguacgucugcgcccaggagaagaacuucaccaccgcccccgcgaucugccacgacgggaaggcccacuucccccgcgagggcguguucguguccaacgggacccacugguucgucacgcagcggaacuucuacgagccgcagaucaucaccaccgacaacaccuucgugagcggcaacugcgacguggucaucggcaucgugaacaacacgguguacgacccccugcagcccgagcuggacuccuucaaggaggagcucgacaaguacuucaagaaccacaccagccccgacgucgaccugggggacaucuccggcaucaacgccagcguggugaacauccagaaggagaucgaccgccugaacgaggucgccaagaaccucaacgagucccugaucgaccugcaggagcucgggaaguacgagcaguacaucaagggcggcgggagcgggggcgggcagaucuacgagggcaagcugaccgccgaggggcuccgcuucggcaucguggccagccgguucaaccacgcgcuggucgaccgccugguggagggggccaucgacgccaucgugcggcacggcgggcgcgaggaggacaucacccucguccgggugcccggcuccugggagaucccgguggccgccggcgagcuggcccgcaaggaggacaucgacgcggucaucgccaucggggugcugauccggggcgccacgccccacuucgacuacaucgccagcgagguguccaaggggcucgcggaccugagccuggagcuccgcaagcccaucaccuucggcgucaucaccgccgacacccuggagcaggccaucgagcgggccgggacgaagcacggcaacaagggcugggaggccgcgcuguccgccaucgagauggccaaccucuucaagagccugcgcugaggacuaguuauaagacugacuagcccgaugggccucccaacgggcccuccuccccuccuugcaccgagauuaauaaaaaaaaaaaaaaaaaaaaaaaaaaaaaaaaaaaaaaaaaaaaaaaaaaaaaaaaaaaaaaaaugcaucccccccccccccccccccccccccccccccaaaggcucuuuucagagccaccagaauu

SEQ ID NO: 12833 - RNA, 4333 nt, Artificial Sequence
  SARS-CoV-2/Wuhan/WIV05/2019__EPI_ISL_402128 spike protein mRNA gc (1-1211)(G889C_L1034C) LumSynth construct
aggagaaagcuuaccauguucguguuccugguccuccugccccuggugagcucccagugcgugaaccucaccacccgcacgcagcugccgcccgccuacaccaacagcuucacccggggcgucuacuaccccgacaagguguuccgcuccagcgugcugcacuccacccaggaccucuuccugcccuucuucagcaacgucacgugguuccacgccauccacguguccgggaccaacggcaccaagcgguucgacaacccggugcugcccuucaacgacggggucuacuucgcgagcaccgagaaguccaacaucauccgcggcuggaucuucgggacgacccucgacagcaagacccagucccugcugaucgugaacaacgccaccaacguggucaucaaggugugcgaguuccaguucugcaacgaccccuuccucggcguguacuaccacaagaacaacaagagcuggauggaguccgaguuccgggucuacagcuccgccaacaacugcacguucgaguacgugagccagcccuuccugauggaccuggagggcaagcaggggaacuucaagaaccuccgcgaguucguguucaagaacaucgacggcuacuucaagaucuacuccaagcacaccccgaucaaccugguccgggaccugccccagggguucagcgcccucgagccccugguggaccugcccaucggcaucaacaucacccgcuuccagacccuccuggcccugcaccgguccuaccucacgccgggggacagcagcuccggcuggaccgcgggcgccgccgccuacuacgugggguaccugcagccccgcaccuuccugcucaaguacaacgagaacggcaccaucacggacgcggucgacugcgcccuggacccccugagcgagaccaagugcacccucaaguccuucaccguggagaaggggaucuaccagacgagcaacuuccgggugcagcccaccgaguccaucguccgcuucccgaacaucaccaaccugugccccuucggcgagguguucaacgccacccgguucgccagcgucuacgccuggaaccgcaagcggaucuccaacugcguggcggacuacagcgugcuguacaacuccgccagcuucuccacguucaagugcuacggcgucagccccaccaagcucaacgaccugugcuucaccaacguguacgccgacuccuucgugauccgcggggacgagguccggcagaucgcccccggccagaccgggaagaucgccgacuacaacuacaagcugccggacgacuucacgggcugcgugaucgcguggaacagcaacaaccucgacuccaaggucgggggcaacuacaacuaccuguaccgccuguuccgcaagagcaaccucaagcccuucgagcgggacaucuccaccgagaucuaccaggccggcagcacccccugcaacgggguggagggcuucaacugcuacuucccccugcaguccuacggguuccagccgaccaacggcgugggguaccagcccuaccggguggucgugcugagcuucgagcuccugcacgcccccgccacggugugcggccccaagaaguccaccaaccuggucaagaacaagugcgugaacuucaacuucaacggccucaccgggaccggcgugcugaccgagagcaacaagaaguuccugccguuccagcaguucgggcgcgacaucgccgacacgaccgacgcgguccgcgacccccagacccuggagauccucgacaucacccccugcagcuucggcgggguguccgugaucacgccgggcaccaacaccagcaaccaggucgccgugcuguaccaggacgugaacugcaccgagguccccguggccauccacgccgaccagcugacgcccaccuggcggguguacuccaccggcagcaacgucuuccagacccgcgccgggugccucaucggcgcggagcacgugaacaacuccuacgagugcgacauccccaucggggccggcaucugcgccagcuaccagacgcagaccaacuccccgcggcgcgcccggagcguggcgucccagagcaucaucgccuacaccaugucccugggcgccgagaacagcgucgccuacuccaacaacagcaucgccauccccaccaacuucacgaucuccgugaccaccgagauccugcccgugagcaugaccaagacgagcgucgacugcaccauguacaucugcggggacuccaccgagugcagcaaccuccugcugcaguacggcuccuucugcacccagcucaaccgcgcgcugacggggaucgccguggagcaggacaagaacacccaggagguguucgcccaggucaagcagaucuacaagacgcccccgaucaaggacuucggcggguucaacuucagccagauccugcccgaccccuccaagcccagcaagcgguccuucaucgaggaccuccuguucaacaaggugacccuggccgacgccggcuucaucaagcaguacggcgacugccucggggacaucgcggcccgcgaccugaucugcgcccagaaguucaacggccugaccgugcucccgccccugcugaccgacgagaugaucgcccaguacaccagcgcccuccuggcggggaccaucacguccggcuggaccuucugcgccggcgccgcccugcagauccccuucgcgaugcagauggccuaccgguucaacggcaucggggucacccagaacgugcucuacgagaaccagaagcugaucgccaaccaguucaacagcgccaucggcaagauccaggacucccugagcuccaccgccagcgcgcucgggaagcugcaggacguggucaaccagaacgcccaggcccugaacacgcucgugaagcagcuguccagcaacuucggcgccaucuccagcgugcugaacgacauccucucccgccuggacaaggucgaggccgaggugcagaucgaccggcugaucaccgggcgccuccagagccugcagaccuacgugacccagcagcugauccgggcggccgagauccgcgccagcgccaaccucgccgcgaccaagauguccgagugcgucugcggccagagcaagcggguggacuucugcggcaagggguaccaccugauguccuucccccagagcgccccgcacggcguggucuuccuccacgugacguacguccccgcccaggagaagaacuucaccaccgcccccgcgaucugccacgacgggaaggcccacuucccccgcgagggcguguucguguccaacgggacccacugguucgucacgcagcggaacuucuacgagccgcagaucaucaccaccgacaacaccuucgugagcggcaacugcgacguggucaucggcaucgugaacaacacgguguacgacccccugcagcccgagcuggacuccuucaaggaggagcucgacaaguacuucaagaaccacaccagccccgacgucgaccugggggacaucuccggcaucaacgccagcguggugaacauccagaaggagaucgaccgccugaacgaggucgccaagaaccucaacgagucccugaucgaccugcaggagcucgggaaguacgagcaguacaucaagggcggcgggagcgggggcgggcagaucuacgagggcaagcugaccgccgaggggcuccgcuucggcaucguggccagccgguucaaccacgcgcuggucgaccgccugguggagggggccaucgacgccaucgugcggcacggcgggcgcgaggaggacaucacccucguccgggugcccggcuccugggagaucccgguggccgccggcgagcuggcccgcaaggaggacaucgacgcggucaucgccaucggggugcugauccggggcgccacgccccacuucgacuacaucgccagcgagguguccaaggggcucgcggaccugagccuggagcuccgcaagcccaucaccuucggcgucaucaccgccgacacccuggagcaggccaucgagcgggccgggacgaagcacggcaacaagggcugggaggccgcgcuguccgccaucgagauggccaaccucuucaagagccugcgcugaggacuaguuauaagacugacuagcccgaugggccucccaacgggcccuccuccccuccuugcaccgagauuaauaaaaaaaaaaaaaaaaaaaaaaaaaaaaaaaaaaaaaaaaaaaaaaaaaaaaaaaaaaaaaaaaugcaucccccccccccccccccccccccccccccccaaaggcucuuuucagagccaccagaauu

SEQ ID NO: 12834 - RNA, 4333 nt, Artificial Sequence
  SARS-CoV-2/Wuhan/WIV05/2019__EPI_ISL_402128 spike protein mRNA gc (1-1211)(I909C_Y1047C) LumSynth construct
aggagaaagcuuaccauguucguguuccugguccuccugccccuggugagcucccagugcgugaaccucaccacccgcacgcagcugccgcccgccuacaccaacagcuucacccggggcgucuacuaccccgacaagguguuccgcuccagcgugcugcacuccacccaggaccucuuccugcccuucuucagcaacgucacgugguuccacgccauccacguguccgggaccaacggcaccaagcgguucgacaacccggugcugcccuucaacgacggggucuacuucgcgagcaccgagaaguccaacaucauccgcggcuggaucuucgggacgacccucgacagcaagacccagucccugcugaucgugaacaacgccaccaacguggucaucaaggugugcgaguuccaguucugcaacgaccccuuccucggcguguacuaccacaagaacaacaagagcuggauggaguccgaguuccgggucuacagcuccgccaacaacugcacguucgaguacgugagccagcccuuccugauggaccuggagggcaagcaggggaacuucaagaaccuccgcgaguucguguucaagaacaucgacggcuacuucaagaucuacuccaagcacaccccgaucaaccugguccgggaccugccccagggguucagcgcccucgagccccugguggaccugcccaucggcaucaacaucacccgcuuccagacccuccuggcccugcaccgguccuaccucacgccgggggacagcagcuccggcuggaccgcgggcgccgccgccuacuacgugggguaccugcagccccgcaccuuccugcucaaguacaacgagaacggcaccaucacggacgcggucgacugcgcccuggacccccugagcgagaccaagugcacccucaaguccuucaccguggagaaggggaucuaccagacgagcaacuuccgggugcagcccaccgaguccaucguccgcuucccgaacaucaccaaccugugccccuucggcgagguguucaacgccacccgguucgccagcgucuacgccuggaaccgcaagcggaucuccaacugcguggcggacuacagcgugcuguacaacuccgccagcuucuccacguucaagugcuacggcgucagccccaccaagcucaacgaccugugcuucaccaacguguacgccgacuccuucgugauccgcggggacgagguccggcagaucgcccccggccagaccgggaagaucgccgacuacaacuacaagcugccggacgacuucacgggcugcgugaucgcguggaacagcaacaaccucgacuccaaggucgggggcaacuacaacuaccuguaccgccuguuccgcaagagcaaccucaagcccuucgagcgggacaucuccaccgagaucuaccaggccggcagcacccccugcaacgggguggagggcuucaacugcuacuucccccugcaguccuacggguuccagccgaccaacggcgugggguaccagcccuaccggguggucgugcugagcuucgagcuccugcacgcccccgccacggugugcggccccaagaaguccaccaaccuggucaagaacaagugcgugaacuucaacuucaacggccucaccgggaccggcgugcugaccgagagcaacaagaaguuccugccguuccagcaguucgggcgcgacaucgccgacacgaccgacgcgguccgcgacccccagacccuggagauccucgacaucacccccugcagcuucggcgggguguccgugaucacgccgggcaccaacaccagcaaccaggucgccgugcuguaccaggacgugaacugcaccgagguccccguggccauccacgccgaccagcugacgcccaccuggcggguguacuccaccggcagcaacgucuuccagacccgcgccgggugccucaucggcgcggagcacgugaacaacuccuacgagugcgacauccccaucggggccggcaucugcgccagcuaccagacgcagaccaacuccccgcggcgcgcccggagcguggcgucccagagcaucaucgccuacaccaugucccugggcgccgagaacagcgucgccuacuccaacaacagcaucgccauccccaccaacuucacgaucuccgugaccaccgagauccugcccgugagcaugaccaagacgagcgucgacugcaccauguacaucugcggggacuccaccgagugcagcaaccuccugcugcaguacggcuccuucugcacccagcucaaccgcgcgcugacggggaucgccguggagcaggacaagaacacccaggagguguucgcccaggucaagcagaucuacaagacgcccccgaucaaggacuucggcggguucaacuucagccagauccugcccgaccccuccaagcccagcaagcgguccuucaucgaggaccuccuguucaacaaggugacccuggccgacgccggcuucaucaagcaguacggcgacugccucggggacaucgcggcccgcgaccugaucugcgcccagaaguucaacggccugaccgugcucccgccccugcugaccgacgagaugaucgcccaguacaccagcgcccuccuggcggggaccaucacguccggcuggaccuucggggccggcgccgcccugcagauccccuucgcgaugcagauggccuaccgguucaacggcugcggggucacccagaacgugcucuacgagaaccagaagcugaucgccaaccaguucaacagcgccaucggcaagauccaggacucccugagcuccaccgccagcgcgcucgggaagcugcaggacguggucaaccagaacgcccaggcccugaacacgcucgugaagcagcuguccagcaacuucggcgccaucuccagcgugcugaacgacauccucucccgccuggacaaggucgaggccgaggugcagaucgaccggcugaucaccgggcgccuccagagccugcagaccuacgugacccagcagcugauccgggcggccgagauccgcgccagcgccaaccucgccgcgaccaagauguccgagugcguccugggccagagcaagcggguggacuucugcggcaaggggugccaccugauguccuucccccagagcgccccgcacggcguggucuuccuccacgugacguacguccccgcccaggagaagaacuucaccaccgcccccgcgaucugccacgacgggaaggcccacuucccccgcgagggcguguucguguccaacgggacccacugguucgucacgcagcggaacuucuacgagccgcagaucaucaccaccgacaacaccuucgugagcggcaacugcgacguggucaucggcaucgugaacaacacgguguacgacccccugcagcccgagcuggacuccuucaaggaggagcucgacaaguacuucaagaaccacaccagccccgacgucgaccugggggacaucuccggcaucaacgccagcguggugaacauccagaaggagaucgaccgccugaacgaggucgccaagaaccucaacgagucccugaucgaccugcaggagcucgggaaguacgagcaguacaucaagggcggcgggagcgggggcgggcagaucuacgagggcaagcugaccgccgaggggcuccgcuucggcaucguggccagccgguucaaccacgcgcuggucgaccgccugguggagggggccaucgacgccaucgugcggcacggcgggcgcgaggaggacaucacccucguccgggugcccggcuccugggagaucccgguggccgccggcgagcuggcccgcaaggaggacaucgacgcggucaucgccaucggggugcugauccggggcgccacgccccacuucgacuacaucgccagcgagguguccaaggggcucgcggaccugagccuggagcuccgcaagcccaucaccuucggcgucaucaccgccgacacccuggagcaggccaucgagcgggccgggacgaagcacggcaacaagggcugggaggccgcgcuguccgccaucgagauggccaaccucuucaagagccugcgcugaggacuaguuauaagacugacuagcccgaugggccucccaacgggcccuccuccccuccuugcaccgagauuaauaaaaaaaaaaaaaaaaaaaaaaaaaaaaaaaaaaaaaaaaaaaaaaaaaaaaaaaaaaaaaaaaugcaucccccccccccccccccccccccccccccccaaaggcucuuuucagagccaccagaauu

SEQ ID NO: 12835 - RNA, 4333 nt, Artificial Sequence
  SARS-CoV-2/Wuhan/WIV05/2019__EPI_ISL_402128 spike protein mRNA gc (1-1211)(Q965C_S1003C) LumSynth construct
aggagaaagcuuaccauguucguguuccugguccuccugccccuggugagcucccagugcgugaaccucaccacccgcacgcagcugccgcccgccuacaccaacagcuucacccggggcgucuacuaccccgacaagguguuccgcuccagcgugcugcacuccacccaggaccucuuccugcccuucuucagcaacgucacgugguuccacgccauccacguguccgggaccaacggcaccaagcgguucgacaacccggugcugcccuucaacgacggggucuacuucgcgagcaccgagaaguccaacaucauccgcggcuggaucuucgggacgacccucgacagcaagacccagucccugcugaucgugaacaacgccaccaacguggucaucaaggugugcgaguuccaguucugcaacgaccccuuccucggcguguacuaccacaagaacaacaagagcuggauggaguccgaguuccgggucuacagcuccgccaacaacugcacguucgaguacgugagccagcccuuccugauggaccuggagggcaagcaggggaacuucaagaaccuccgcgaguucguguucaagaacaucgacggcuacuucaagaucuacuccaagcacaccccgaucaaccugguccgggaccugccccagggguucagcgcccucgagccccugguggaccugcccaucggcaucaacaucacccgcuuccagacccuccuggcccugcaccgguccuaccucacgccgggggacagcagcuccggcuggaccgcgggcgccgccgccuacuacgugggguaccugcagccccgcaccuuccugcucaaguacaacgagaacggcaccaucacggacgcggucgacugcgcccuggacccccugagcgagaccaagugcacccucaaguccuucaccguggagaaggggaucuaccagacgagcaacuuccgggugcagcccaccgaguccaucguccgcuucccgaacaucaccaaccugugccccuucggcgagguguucaacgccacccgguucgccagcgucuacgccuggaaccgcaagcggaucuccaacugcguggcggacuacagcgugcuguacaacuccgccagcuucuccacguucaagugcuacggcgucagccccaccaagcucaacgaccugugcuucaccaacguguacgccgacuccuucgugauccgcggggacgagguccggcagaucgcccccggccagaccgggaagaucgccgacuacaacuacaagcugccggacgacuucacgggcugcgugaucgcguggaacagcaacaaccucgacuccaaggucgggggcaacuacaacuaccuguaccgccuguuccgcaagagcaaccucaagcccuucgagcgggacaucuccaccgagaucuaccaggccggcagcacccccugcaacgggguggagggcuucaacugcuacuucccccugcaguccuacggguuccagccgaccaacggcgugggguaccagcccuaccggguggucgugcugagcuucgagcuccugcacgcccccgccacggugugcggccccaagaaguccaccaaccuggucaagaacaagugcgugaacuucaacuucaacggccucaccgggaccggcgugcugaccgagagcaacaagaaguuccugccguuccagcaguucgggcgcgacaucgccgacacgaccgacgcgguccgcgacccccagacccuggagauccucgacaucacccccugcagcuucggcgggguguccgugaucacgccgggcaccaacaccagcaaccaggucgccgugcuguaccaggacgugaacugcaccgagguccccguggccauccacgccgaccagcugacgcccaccuggcggguguacuccaccggcagcaacgucuuccagacccgcgccgggugccucaucggcgcggagcacgugaacaacuccuacgagugcgacauccccaucggggccggcaucugcgccagcuaccagacgcagaccaacuccccgcggcgcgcccggagcguggcgucccagagcaucaucgccuacaccaugucccugggcgccgagaacagcgucgccuacuccaacaacagcaucgccauccccaccaacuucacgaucuccgugaccaccgagauccugcccgugagcaugaccaagacgagcgucgacugcaccauguacaucugcggggacuccaccgagugcagcaaccuccugcugcaguacggcuccuucugcacccagcucaaccgcgcgcugacggggaucgccguggagcaggacaagaacacccaggagguguucgcccaggucaagcagaucuacaagacgcccccgaucaaggacuucggcggguucaacuucagccagauccugcccgaccccuccaagcccagcaagcgguccuucaucgaggaccuccuguucaacaaggugacccuggccgacgccggcuucaucaagcaguacggcgacugccucggggacaucgcggcccgcgaccugaucugcgcccagaaguucaacggccugaccgugcucccgccccugcugaccgacgagaugaucgcccaguacaccagcgcccuccuggcggggaccaucacguccggcuggaccuucggggccggcgccgcccugcagauccccuucgcgaugcagauggccuaccgguucaacggcaucggggucacccagaacgugcucuacgagaaccagaagcugaucgccaaccaguucaacagcgccaucggcaagauccaggacucccugagcuccaccgccagcgcgcucgggaagcugcaggacguggucaaccagaacgcccaggcccugaacacgcucgugaagugccuguccagcaacuucggcgccaucuccagcgugcugaacgacauccucucccgccuggacaaggucgaggccgaggugcagaucgaccggcugaucaccgggcgccuccagugccugcagaccuacgugacccagcagcugauccgggcggccgagauccgcgccagcgccaaccucgccgcgaccaagauguccgagugcguccugggccagagcaagcggguggacuucugcggcaagggguaccaccugauguccuucccccagagcgccccgcacggcguggucuuccuccacgugacguacguccccgcccaggagaagaacuucaccaccgcccccgcgaucugccacgacgggaaggcccacuucccccgcgagggcguguucguguccaacgggacccacugguucgucacgcagcggaacuucuacgagccgcagaucaucaccaccgacaacaccuucgugagcggcaacugcgacguggucaucggcaucgugaacaacacgguguacgacccccugcagcccgagcuggacuccuucaaggaggagcucgacaaguacuucaagaaccacaccagccccgacgucgaccugggggacaucuccggcaucaacgccagcguggugaacauccagaaggagaucgaccgccugaacgaggucgccaagaaccucaacgagucccugaucgaccugcaggagcucgggaaguacgagcaguacaucaagggcggcgggagcgggggcgggcagaucuacgagggcaagcugaccgccgaggggcuccgcuucggcaucguggccagccgguucaaccacgcgcuggucgaccgccugguggagggggccaucgacgccaucgugcggcacggcgggcgcgaggaggacaucacccucguccgggugcccggcuccugggagaucccgguggccgccggcgagcuggcccgcaaggaggacaucgacgcggucaucgccaucggggugcugauccggggcgccacgccccacuucgacuacaucgccagcgagguguccaaggggcucgcggaccugagccuggagcuccgcaagcccaucaccuucggcgucaucaccgccgacacccuggagcaggccaucgagcgggccgggacgaagcacggcaacaagggcugggaggccgcgcuguccgccaucgagauggccaaccucuucaagagccugcgcugaggacuaguuauaagacugacuagcccgaugggccucccaacgggcccuccuccccuccuugcaccgagauuaauaaaaaaaaaaaaaaaaaaaaaaaaaaaaaaaaaaaaaaaaaaaaaaaaaaaaaaaaaaaaaaaaugcaucccccccccccccccccccccccccccccccaaaggcucuuuucagagccaccagaauu

SEQ ID NO: 12836 - RNA, 4333 nt, Artificial Sequence
  SARS-CoV-2/Wuhan/WIV05/2019__EPI_ISL_402128 spike protein mRNA gc (1-1211)(F970C_G999C) LumSynth construct
aggagaaagcuuaccauguucguguuccugguccuccugccccuggugagcucccagugcgugaaccucaccacccgcacgcagcugccgcccgccuacaccaacagcuucacccggggcgucuacuaccccgacaagguguuccgcuccagcgugcugcacuccacccaggaccucuuccugcccuucuucagcaacgucacgugguuccacgccauccacguguccgggaccaacggcaccaagcgguucgacaacccggugcugcccuucaacgacggggucuacuucgcgagcaccgagaaguccaacaucauccgcggcuggaucuucgggacgacccucgacagcaagacccagucccugcugaucgugaacaacgccaccaacguggucaucaaggugugcgaguuccaguucugcaacgaccccuuccucggcguguacuaccacaagaacaacaagagcuggauggaguccgaguuccgggucuacagcuccgccaacaacugcacguucgaguacgugagccagcccuuccugauggaccuggagggcaagcaggggaacuucaagaaccuccgcgaguucguguucaagaacaucgacggcuacuucaagaucuacuccaagcacaccccgaucaaccugguccgggaccugccccagggguucagcgcccucgagccccugguggaccugcccaucggcaucaacaucacccgcuuccagacccuccuggcccugcaccgguccuaccucacgccgggggacagcagcuccggcuggaccgcgggcgccgccgccuacuacgugggguaccugcagccccgcaccuuccugcucaaguacaacgagaacggcaccaucacggacgcggucgacugcgcccuggacccccugagcgagaccaagugcacccucaaguccuucaccguggagaaggggaucuaccagacgagcaacuuccgggugcagcccaccgaguccaucguccgcuucccgaacaucaccaaccugugccccuucggcgagguguucaacgccacccgguucgccagcgucuacgccuggaaccgcaagcggaucuccaacugcguggcggacuacagcgugcuguacaacuccgccagcuucuccacguucaagugcuacggcgucagccccaccaagcucaacgaccugugcuucaccaacguguacgccgacuccuucgugauccgcggggacgagguccggcagaucgcccccggccagaccgggaagaucgccgacuacaacuacaagcugccggacgacuucacgggcugcgugaucgcguggaacagcaacaaccucgacuccaaggucgggggcaacuacaacuaccuguaccgccuguuccgcaagagcaaccucaagcccuucgagcgggacaucuccaccgagaucuaccaggccggcagcacccccugcaacgggguggagggcuucaacugcuacuucccccugcaguccuacggguuccagccgaccaacggcgugggguaccagcccuaccggguggucgugcugagcuucgagcuccugcacgcccccgccacggugugcggccccaagaaguccaccaaccuggucaagaacaagugcgugaacuucaacuucaacggccucaccgggaccggcgugcugaccgagagcaacaagaaguuccugccguuccagcaguucgggcgcgacaucgccgacacgaccgacgcgguccgcgacccccagacccuggagauccucgacaucacccccugcagcuucggcgggguguccgugaucacgccgggcaccaacaccagcaaccaggucgccgugcuguaccaggacgugaacugcaccgagguccccguggccauccacgccgaccagcugacgcccaccuggcggguguacuccaccggcagcaacgucuuccagacccgcgccgggugccucaucggcgcggagcacgugaacaacuccuacgagugcgacauccccaucggggccggcaucugcgccagcuaccagacgcagaccaacuccccgcggcgcgcccggagcguggcgucccagagcaucaucgccuacaccaugucccugggcgccgagaacagcgucgccuacuccaacaacagcaucgccauccccaccaacuucacgaucuccgugaccaccgagauccugcccgugagcaugaccaagacgagcgucgacugcaccauguacaucugcggggacuccaccgagugcagcaaccuccugcugcaguacggcuccuucugcacccagcucaaccgcgcgcugacggggaucgccguggagcaggacaagaacacccaggagguguucgcccaggucaagcagaucuacaagacgcccccgaucaaggacuucggcggguucaacuucagccagauccugcccgaccccuccaagcccagcaagcgguccuucaucgaggaccuccuguucaacaaggugacccuggccgacgccggcuucaucaagcaguacggcgacugccucggggacaucgcggcccgcgaccugaucugcgcccagaaguucaacggccugaccgugcucccgccccugcugaccgacgagaugaucgcccaguacaccagcgcccuccuggcggggaccaucacguccggcuggaccuucggggccggcgccgcccugcagauccccuucgcgaugcagauggccuaccgguucaacggcaucggggucacccagaacgugcucuacgagaaccagaagcugaucgccaaccaguucaacagcgccaucggcaagauccaggacucccugagcuccaccgccagcgcgcucgggaagcugcaggacguggucaaccagaacgcccaggcccugaacacgcucgugaagcagcuguccagcaacugcggcgccaucuccagcgugcugaacgacauccucucccgccuggacaaggucgaggccgaggugcagaucgaccggcugaucaccugucgccuccagagccugcagaccuacgugacccagcagcugauccgggcggccgagauccgcgccagcgccaaccucgccgcgaccaagauguccgagugcguccugggccagagcaagcggguggacuucugcggcaagggguaccaccugauguccuucccccagagcgccccgcacggcguggucuuccuccacgugacguacguccccgcccaggagaagaacuucaccaccgcccccgcgaucugccacgacgggaaggcccacuucccccgcgagggcguguucguguccaacgggacccacugguucgucacgcagcggaacuucuacgagccgcagaucaucaccaccgacaacaccuucgugagcggcaacugcgacguggucaucggcaucgugaacaacacgguguacgacccccugcagcccgagcuggacuccuucaaggaggagcucgacaaguacuucaagaaccacaccagccccgacgucgaccugggggacaucuccggcaucaacgccagcguggugaacauccagaaggagaucgaccgccugaacgaggucgccaagaaccucaacgagucccugaucgaccugcaggagcucgggaaguacgagcaguacaucaagggcggcgggagcgggggcgggcagaucuacgagggcaagcugaccgccgaggggcuccgcuucggcaucguggccagccgguucaaccacgcgcuggucgaccgccugguggagggggccaucgacgccaucgugcggcacggcgggcgcgaggaggacaucacccucguccgggugcccggcuccugggagaucccgguggccgccggcgagcuggcccgcaaggaggacaucgacgcggucaucgccaucggggugcugauccggggcgccacgccccacuucgacuacaucgccagcgagguguccaaggggcucgcggaccugagccuggagcuccgcaagcccaucaccuucggcgucaucaccgccgacacccuggagcaggccaucgagcgggccgggacgaagcacggcaacaagggcugggaggccgcgcuguccgccaucgagauggccaaccucuucaagagccugcgcugaggacuaguuauaagacugacuagcccgaugggccucccaacgggcccuccuccccuccuugcaccgagauuaauaaaaaaaaaaaaaaaaaaaaaaaaaaaaaaaaaaaaaaaaaaaaaaaaaaaaaaaaaaaaaaaaugcaucccccccccccccccccccccccccccccccaaaggcucuuuucagagccaccagaauu

SEQ ID NO: 12837 - RNA, 4333 nt, Artificial Sequence
  SARS-CoV-2/Wuhan/WIV05/2019__EPI_ISL_402128 spike protein mRNA gc (1-1211)(A972C_R995C) LumSynth construct
aggagaaagcuuaccauguucguguuccugguccuccugccccuggugagcucccagugcgugaaccucaccacccgcacgcagcugccgcccgccuacaccaacagcuucacccggggcgucuacuaccccgacaagguguuccgcuccagcgugcugcacuccacccaggaccucuuccugcccuucuucagcaacgucacgugguuccacgccauccacguguccgggaccaacggcaccaagcgguucgacaacccggugcugcccuucaacgacggggucuacuucgcgagcaccgagaaguccaacaucauccgcggcuggaucuucgggacgacccucgacagcaagacccagucccugcugaucgugaacaacgccaccaacguggucaucaaggugugcgaguuccaguucugcaacgaccccuuccucggcguguacuaccacaagaacaacaagagcuggauggaguccgaguuccgggucuacagcuccgccaacaacugcacguucgaguacgugagccagcccuuccugauggaccuggagggcaagcaggggaacuucaagaaccuccgcgaguucguguucaagaacaucgacggcuacuucaagaucuacuccaagcacaccccgaucaaccugguccgggaccugccccagggguucagcgcccucgagccccugguggaccugcccaucggcaucaacaucacccgcuuccagacccuccuggcccugcaccgguccuaccucacgccgggggacagcagcuccggcuggaccgcgggcgccgccgccuacuacgugggguaccugcagccccgcaccuuccugcucaaguacaacgagaacggcaccaucacggacgcggucgacugcgcccuggacccccugagcgagaccaagugcacccucaaguccuucaccguggagaaggggaucuaccagacgagcaacuuccgggugcagcccaccgaguccaucguccgcuucccgaacaucaccaaccugugccccuucggcgagguguucaacgccacccgguucgccagcgucuacgccuggaaccgcaagcggaucuccaacugcguggcggacuacagcgugcuguacaacuccgccagcuucuccacguucaagugcuacggcgucagccccaccaagcucaacgaccugugcuucaccaacguguacgccgacuccuucgugauccgcggggacgagguccggcagaucgcccccggccagaccgggaagaucgccgacuacaacuacaagcugccggacgacuucacgggcugcgugaucgcguggaacagcaacaaccucgacuccaaggucgggggcaacuacaacuaccuguaccgccuguuccgcaagagcaaccucaagcccuucgagcgggacaucuccaccgagaucuaccaggccggcagcacccccugcaacgggguggagggcuucaacugcuacuucccccugcaguccuacggguuccagccgaccaacggcgugggguaccagcccuaccggguggucgugcugagcuucgagcuccugcacgcccccgccacggugugcggccccaagaaguccaccaaccuggucaagaacaagugcgugaacuucaacuucaacggccucaccgggaccggcgugcugaccgagagcaacaagaaguuccugccguuccagcaguucgggcgcgacaucgccgacacgaccgacgcgguccgcgacccccagacccuggagauccucgacaucacccccugcagcuucggcgggguguccgugaucacgccgggcaccaacaccagcaaccaggucgccgugcuguaccaggacgugaacugcaccgagguccccguggccauccacgccgaccagcugacgcccaccuggcggguguacuccaccggcagcaacgucuuccagacccgcgccgggugccucaucggcgcggagcacgugaacaacuccuacgagugcgacauccccaucggggccggcaucugcgccagcuaccagacgcagaccaacuccccgcggcgcgcccggagcguggcgucccagagcaucaucgccuacaccaugucccugggcgccgagaacagcgucgccuacuccaacaacagcaucgccauccccaccaacuucacgaucuccgugaccaccgagauccugcccgugagcaugaccaagacgagcgucgacugcaccauguacaucugcggggacuccaccgagugcagcaaccuccugcugcaguacggcuccuucugcacccagcucaaccgcgcgcugacggggaucgccguggagcaggacaagaacacccaggagguguucgcccaggucaagcagaucuacaagacgcccccgaucaaggacuucggcggguucaacuucagccagauccugcccgaccccuccaagcccagcaagcgguccuucaucgaggaccuccuguucaacaaggugacccuggccgacgccggcuucaucaagcaguacggcgacugccucggggacaucgcggcccgcgaccugaucugcgcccagaaguucaacggccugaccgugcucccgccccugcugaccgacgagaugaucgcccaguacaccagcgcccuccuggcggggaccaucacguccggcuggaccuucggggccggcgccgcccugcagauccccuucgcgaugcagauggccuaccgguucaacggcaucggggucacccagaacgugcucuacgagaaccagaagcugaucgccaaccaguucaacagcgccaucggcaagauccaggacucccugagcuccaccgccagcgcgcucgggaagcugcaggacguggucaaccagaacgcccaggcccugaacacgcucgugaagcagcuguccagcaacuucggcugcaucuccagcgugcugaacgacauccucucccgccuggacaaggucgaggccgaggugcagaucgacugccugaucaccgggcgccuccagagccugcagaccuacgugacccagcagcugauccgggcggccgagauccgcgccagcgccaaccucgccgcgaccaagauguccgagugcguccugggccagagcaagcggguggacuucugcggcaagggguaccaccugauguccuucccccagagcgccccgcacggcguggucuuccuccacgugacguacguccccgcccaggagaagaacuucaccaccgcccccgcgaucugccacgacgggaaggcccacuucccccgcgagggcguguucguguccaacgggacccacugguucgucacgcagcggaacuucuacgagccgcagaucaucaccaccgacaacaccuucgugagcggcaacugcgacguggucaucggcaucgugaacaacacgguguacgacccccugcagcccgagcuggacuccuucaaggaggagcucgacaaguacuucaagaaccacaccagccccgacgucgaccugggggacaucuccggcaucaacgccagcguggugaacauccagaaggagaucgaccgccugaacgaggucgccaagaaccucaacgagucccugaucgaccugcaggagcucgggaaguacgagcaguacaucaagggcggcgggagcgggggcgggcagaucuacgagggcaagcugaccgccgaggggcuccgcuucggcaucguggccagccgguucaaccacgcgcuggucgaccgccugguggagggggccaucgacgccaucgugcggcacggcgggcgcgaggaggacaucacccucguccgggugcccggcuccugggagaucccgguggccgccggcgagcuggcccgcaaggaggacaucgacgcggucaucgccaucggggugcugauccggggcgccacgccccacuucgacuacaucgccagcgagguguccaaggggcucgcggaccugagccuggagcuccgcaagcccaucaccuucggcgucaucaccgccgacacccuggagcaggccaucgagcgggccgggacgaagcacggcaacaagggcugggaggccgcgcuguccgccaucgagauggccaaccucuucaagagccugcgcugaggacuaguuauaagacugacuagcccgaugggccucccaacgggcccuccuccccuccuugcaccgagauuaauaaaaaaaaaaaaaaaaaaaaaaaaaaaaaaaaaaaaaaaaaaaaaaaaaaaaaaaaaaaaaaaaugcaucccccccccccccccccccccccccccccccaaaggcucuuuucagagccaccagaauu

SEQ ID NO: 12838 - RNA, 4333 nt, Artificial Sequence
  SARS-CoV-2/Wuhan/WIV05/2019__EPI_ISL_402128 spike protein mRNA gc (1-1211)(A890C_V1040C) LumSynth construct
aggagaaagcuuaccauguucguguuccugguccuccugccccuggugagcucccagugcgugaaccucaccacccgcacgcagcugccgcccgccuacaccaacagcuucacccggggcgucuacuaccccgacaagguguuccgcuccagcgugcugcacuccacccaggaccucuuccugcccuucuucagcaacgucacgugguuccacgccauccacguguccgggaccaacggcaccaagcgguucgacaacccggugcugcccuucaacgacggggucuacuucgcgagcaccgagaaguccaacaucauccgcggcuggaucuucgggacgacccucgacagcaagacccagucccugcugaucgugaacaacgccaccaacguggucaucaaggugugcgaguuccaguucugcaacgaccccuuccucggcguguacuaccacaagaacaacaagagcuggauggaguccgaguuccgggucuacagcuccgccaacaacugcacguucgaguacgugagccagcccuuccugauggaccuggagggcaagcaggggaacuucaagaaccuccgcgaguucguguucaagaacaucgacggcuacuucaagaucuacuccaagcacaccccgaucaaccugguccgggaccugccccagggguucagcgcccucgagccccugguggaccugcccaucggcaucaacaucacccgcuuccagacccuccuggcccugcaccgguccuaccucacgccgggggacagcagcuccggcuggaccgcgggcgccgccgccuacuacgugggguaccugcagccccgcaccuuccugcucaaguacaacgagaacggcaccaucacggacgcggucgacugcgcccuggacccccugagcgagaccaagugcacccucaaguccuucaccguggagaaggggaucuaccagacgagcaacuuccgggugcagcccaccgaguccaucguccgcuucccgaacaucaccaaccugugccccuucggcgagguguucaacgccacccgguucgccagcgucuacgccuggaaccgcaagcggaucuccaacugcguggcggacuacagcgugcuguacaacuccgccagcuucuccacguucaagugcuacggcgucagccccaccaagcucaacgaccugugcuucaccaacguguacgccgacuccuucgugauccgcggggacgagguccggcagaucgcccccggccagaccgggaagaucgccgacuacaacuacaagcugccggacgacuucacgggcugcgugaucgcguggaacagcaacaaccucgacuccaaggucgggggcaacuacaacuaccuguaccgccuguuccgcaagagcaaccucaagcccuucgagcgggacaucuccaccgagaucuaccaggccggcagcacccccugcaacgggguggagggcuucaacugcuacuucccccugcaguccuacggguuccagccgaccaacggcgugggguaccagcccuaccggguggucgugcugagcuucgagcuccugcacgcccccgccacggugugcggccccaagaaguccaccaaccuggucaagaacaagugcgugaacuucaacuucaacggccucaccgggaccggcgugcugaccgagagcaacaagaaguuccugccguuccagcaguucgggcgcgacaucgccgacacgaccgacgcgguccgcgacccccagacccuggagauccucgacaucacccccugcagcuucggcgggguguccgugaucacgccgggcaccaacaccagcaaccaggucgccgugcuguaccaggacgugaacugcaccgagguccccguggccauccacgccgaccagcugacgcccaccuggcggguguacuccaccggcagcaacgucuuccagacccgcgccgggugccucaucggcgcggagcacgugaacaacuccuacgagugcgacauccccaucggggccggcaucugcgccagcuaccagacgcagaccaacuccccgcggcgcgcccggagcguggcgucccagagcaucaucgccuacaccaugucccugggcgccgagaacagcgucgccuacuccaacaacagcaucgccauccccaccaacuucacgaucuccgugaccaccgagauccugcccgugagcaugaccaagacgagcgucgacugcaccauguacaucugcggggacuccaccgagugcagcaaccuccugcugcaguacggcuccuucugcacccagcucaaccgcgcgcugacggggaucgccguggagcaggacaagaacacccaggagguguucgcccaggucaagcagaucuacaagacgcccccgaucaaggacuucggcggguucaacuucagccagauccugcccgaccccuccaagcccagcaagcgguccuucaucgaggaccuccuguucaacaaggugacccuggccgacgccggcuucaucaagcaguacggcgacugccucggggacaucgcggcccgcgaccugaucugcgcccagaaguucaacggccugaccgugcucccgccccugcugaccgacgagaugaucgcccaguacaccagcgcccuccuggcggggaccaucacguccggcuggaccuucgggugcggcgccgcccugcagauccccuucgcgaugcagauggccuaccgguucaacggcaucggggucacccagaacgugcucuacgagaaccagaagcugaucgccaaccaguucaacagcgccaucggcaagauccaggacucccugagcuccaccgccagcgcgcucgggaagcugcaggacguggucaaccagaacgcccaggcccugaacacgcucgugaagcagcuguccagcaacuucggcgccaucuccagcgugcugaacgacauccucucccgccuggacaaggucgaggccgaggugcagaucgaccggcugaucaccgggcgccuccagagccugcagaccuacgugacccagcagcugauccgggcggccgagauccgcgccagcgccaaccucgccgcgaccaagauguccgagugcguccugggccagagcaagcggugcgacuucugcggcaagggguaccaccugauguccuucccccagagcgccccgcacggcguggucuuccuccacgugacguacguccccgcccaggagaagaacuucaccaccgcccccgcgaucugccacgacgggaaggcccacuucccccgcgagggcguguucguguccaacgggacccacugguucgucacgcagcggaacuucuacgagccgcagaucaucaccaccgacaacaccuucgugagcggcaacugcgacguggucaucggcaucgugaacaacacgguguacgacccccugcagcccgagcuggacuccuucaaggaggagcucgacaaguacuucaagaaccacaccagccccgacgucgaccugggggacaucuccggcaucaacgccagcguggugaacauccagaaggagaucgaccgccugaacgaggucgccaagaaccucaacgagucccugaucgaccugcaggagcucgggaaguacgagcaguacaucaagggcggcgggagcgggggcgggcagaucuacgagggcaagcugaccgccgaggggcuccgcuucggcaucguggccagccgguucaaccacgcgcuggucgaccgccugguggagggggccaucgacgccaucgugcggcacggcgggcgcgaggaggacaucacccucguccgggugcccggcuccugggagaucccgguggccgccggcgagcuggcccgcaaggaggacaucgacgcggucaucgccaucggggugcugauccggggcgccacgccccacuucgacuacaucgccagcgagguguccaaggggcucgcggaccugagccuggagcuccgcaagcccaucaccuucggcgucaucaccgccgacacccuggagcaggccaucgagcgggccgggacgaagcacggcaacaagggcugggaggccgcgcuguccgccaucgagauggccaaccucuucaagagccugcgcugaggacuaguuauaagacugacuagcccgaugggccucccaacgggcccuccuccccuccuugcaccgagauuaauaaaaaaaaaaaaaaaaaaaaaaaaaaaaaaaaaaaaaaaaaaaaaaaaaaaaaaaaaaaaaaaaugcaucccccccccccccccccccccccccccccccaaaggcucuuuucagagccaccagaauu

SEQ ID NO: 12839 - RNA, 4333 nt, Artificial Sequence
  SARS-CoV-2/Wuhan/WIV05/2019__EPI_ISL_402128 spike protein mRNA gc (1-1211)(T874C_S1055C) LumSynth construct
aggagaaagcuuaccauguucguguuccugguccuccugccccuggugagcucccagugcgugaaccucaccacccgcacgcagcugccgcccgccuacaccaacagcuucacccggggcgucuacuaccccgacaagguguuccgcuccagcgugcugcacuccacccaggaccucuuccugcccuucuucagcaacgucacgugguuccacgccauccacguguccgggaccaacggcaccaagcgguucgacaacccggugcugcccuucaacgacggggucuacuucgcgagcaccgagaaguccaacaucauccgcggcuggaucuucgggacgacccucgacagcaagacccagucccugcugaucgugaacaacgccaccaacguggucaucaaggugugcgaguuccaguucugcaacgaccccuuccucggcguguacuaccacaagaacaacaagagcuggauggaguccgaguuccgggucuacagcuccgccaacaacugcacguucgaguacgugagccagcccuuccugauggaccuggagggcaagcaggggaacuucaagaaccuccgcgaguucguguucaagaacaucgacggcuacuucaagaucuacuccaagcacaccccgaucaaccugguccgggaccugccccagggguucagcgcccucgagccccugguggaccugcccaucggcaucaacaucacccgcuuccagacccuccuggcccugcaccgguccuaccucacgccgggggacagcagcuccggcuggaccgcgggcgccgccgccuacuacgugggguaccugcagccccgcaccuuccugcucaaguacaacgagaacggcaccaucacggacgcggucgacugcgcccuggacccccugagcgagaccaagugcacccucaaguccuucaccguggagaaggggaucuaccagacgagcaacuuccgggugcagcccaccgaguccaucguccgcuucccgaacaucaccaaccugugccccuucggcgagguguucaacgccacccgguucgccagcgucuacgccuggaaccgcaagcggaucuccaacugcguggcggacuacagcgugcuguacaacuccgccagcuucuccacguucaagugcuacggcgucagccccaccaagcucaacgaccugugcuucaccaacguguacgccgacuccuucgugauccgcggggacgagguccggcagaucgcccccggccagaccgggaagaucgccgacuacaacuacaagcugccggacgacuucacgggcugcgugaucgcguggaacagcaacaaccucgacuccaaggucgggggcaacuacaacuaccuguaccgccuguuccgcaagagcaaccucaagcccuucgagcgggacaucuccaccgagaucuaccaggccggcagcacccccugcaacgggguggagggcuucaacugcuacuucccccugcaguccuacggguuccagccgaccaacggcgugggguaccagcccuaccggguggucgugcugagcuucgagcuccugcacgcccccgccacggugugcggccccaagaaguccaccaaccuggucaagaacaagugcgugaacuucaacuucaacggccucaccgggaccggcgugcugaccgagagcaacaagaaguuccugccguuccagcaguucgggcgcgacaucgccgacacgaccgacgcgguccgcgacccccagacccuggagauccucgacaucacccccugcagcuucggcgggguguccgugaucacgccgggcaccaacaccagcaaccaggucgccgugcuguaccaggacgugaacugcaccgagguccccguggccauccacgccgaccagcugacgcccaccuggcggguguacuccaccggcagcaacgucuuccagacccgcgccgggugccucaucggcgcggagcacgugaacaacuccuacgagugcgacauccccaucggggccggcaucugcgccagcuaccagacgcagaccaacuccccgcggcgcgcccggagcguggcgucccagagcaucaucgccuacaccaugucccugggcgccgagaacagcgucgccuacuccaacaacagcaucgccauccccaccaacuucacgaucuccgugaccaccgagauccugcccgugagcaugaccaagacgagcgucgacugcaccauguacaucugcggggacuccaccgagugcagcaaccuccugcugcaguacggcuccuucugcacccagcucaaccgcgcgcugacggggaucgccguggagcaggacaagaacacccaggagguguucgcccaggucaagcagaucuacaagacgcccccgaucaaggacuucggcggguucaacuucagccagauccugcccgaccccuccaagcccagcaagcgguccuucaucgaggaccuccuguucaacaaggugacccuggccgacgccggcuucaucaagcaguacggcgacugccucggggacaucgcggcccgcgaccugaucugcgcccagaaguucaacggccugaccgugcucccgccccugcugaccgacgagaugaucgcccaguacugcagcgcccuccuggcggggaccaucacguccggcuggaccuucggggccggcgccgcccugcagauccccuucgcgaugcagauggccuaccgguucaacggcaucggggucacccagaacgugcucuacgagaaccagaagcugaucgccaaccaguucaacagcgccaucggcaagauccaggacucccugagcuccaccgccagcgcgcucgggaagcugcaggacguggucaaccagaacgcccaggcccugaacacgcucgugaagcagcuguccagcaacuucggcgccaucuccagcgugcugaacgacauccucucccgccuggacaaggucgaggccgaggugcagaucgaccggcugaucaccgggcgccuccagagccugcagaccuacgugacccagcagcugauccgggcggccgagauccgcgccagcgccaaccucgccgcgaccaagauguccgagugcguccugggccagagcaagcggguggacuucugcggcaagggguaccaccugauguccuucccccagugcgccccgcacggcguggucuuccuccacgugacguacguccccgcccaggagaagaacuucaccaccgcccccgcgaucugccacgacgggaaggcccacuucccccgcgagggcguguucguguccaacgggacccacugguucgucacgcagcggaacuucuacgagccgcagaucaucaccaccgacaacaccuucgugagcggcaacugcgacguggucaucggcaucgugaacaacacgguguacgacccccugcagcccgagcuggacuccuucaaggaggagcucgacaaguacuucaagaaccacaccagccccgacgucgaccugggggacaucuccggcaucaacgccagcguggugaacauccagaaggagaucgaccgccugaacgaggucgccaagaaccucaacgagucccugaucgaccugcaggagcucgggaaguacgagcaguacaucaagggcggcgggagcgggggcgggcagaucuacgagggcaagcugaccgccgaggggcuccgcuucggcaucguggccagccgguucaaccacgcgcuggucgaccgccugguggagggggccaucgacgccaucgugcggcacggcgggcgcgaggaggacaucacccucguccgggugcccggcuccugggagaucccgguggccgccggcgagcuggcccgcaaggaggacaucgacgcggucaucgccaucggggugcugauccggggcgccacgccccacuucgacuacaucgccagcgagguguccaaggggcucgcggaccugagccuggagcuccgcaagcccaucaccuucggcgucaucaccgccgacacccuggagcaggccaucgagcgggccgggacgaagcacggcaacaagggcugggaggccgcgcuguccgccaucgagauggccaaccucuucaagagccugcgcugaggacuaguuauaagacugacuagcccgaugggccucccaacgggcccuccuccccuccuugcaccgagauuaauaaaaaaaaaaaaaaaaaaaaaaaaaaaaaaaaaaaaaaaaaaaaaaaaaaaaaaaaaaaaaaaaugcaucccccccccccccccccccccccccccccccaaaggcucuuuucagagccaccagaauu

SEQ ID NO: 12840 - RNA, 4357 nt, Artificial Sequence
  SARS-CoV-2/Wuhan/WIV05/2019__EPI_ISL_402128 spike protein mRNA gc (1-1211) Ferritin construct
aggagaaagcuuaccauguucguguuccugguccuccugccccuggugagcucccagugcgugaaccucaccacccgcacgcagcugccgcccgccuacaccaacagcuucacccggggcgucuacuaccccgacaagguguuccgcuccagcgugcugcacuccacccaggaccucuuccugcccuucuucagcaacgucacgugguuccacgccauccacguguccgggaccaacggcaccaagcgguucgacaacccggugcugcccuucaacgacggggucuacuucgcgagcaccgagaaguccaacaucauccgcggcuggaucuucgggacgacccucgacagcaagacccagucccugcugaucgugaacaacgccaccaacguggucaucaaggugugcgaguuccaguucugcaacgaccccuuccucggcguguacuaccacaagaacaacaagagcuggauggaguccgaguuccgggucuacagcuccgccaacaacugcacguucgaguacgugagccagcccuuccugauggaccuggagggcaagcaggggaacuucaagaaccuccgcgaguucguguucaagaacaucgacggcuacuucaagaucuacuccaagcacaccccgaucaaccugguccgggaccugccccagggguucagcgcccucgagccccugguggaccugcccaucggcaucaacaucacccgcuuccagacccuccuggcccugcaccgguccuaccucacgccgggggacagcagcuccggcuggaccgcgggcgccgccgccuacuacgugggguaccugcagccccgcaccuuccugcucaaguacaacgagaacggcaccaucacggacgcggucgacugcgcccuggacccccugagcgagaccaagugcacccucaaguccuucaccguggagaaggggaucuaccagacgagcaacuuccgggugcagcccaccgaguccaucguccgcuucccgaacaucaccaaccugugccccuucggcgagguguucaacgccacccgguucgccagcgucuacgccuggaaccgcaagcggaucuccaacugcguggcggacuacagcgugcuguacaacuccgccagcuucuccacguucaagugcuacggcgucagccccaccaagcucaacgaccugugcuucaccaacguguacgccgacuccuucgugauccgcggggacgagguccggcagaucgcccccggccagaccgggaagaucgccgacuacaacuacaagcugccggacgacuucacgggcugcgugaucgcguggaacagcaacaaccucgacuccaaggucgggggcaacuacaacuaccuguaccgccuguuccgcaagagcaaccucaagcccuucgagcgggacaucuccaccgagaucuaccaggccggcagcacccccugcaacgggguggagggcuucaacugcuacuucccccugcaguccuacggguuccagccgaccaacggcgugggguaccagcccuaccggguggucgugcugagcuucgagcuccugcacgcccccgccacggugugcggccccaagaaguccaccaaccuggucaagaacaagugcgugaacuucaacuucaacggccucaccgggaccggcgugcugaccgagagcaacaagaaguuccugccguuccagcaguucgggcgcgacaucgccgacacgaccgacgcgguccgcgacccccagacccuggagauccucgacaucacccccugcagcuucggcgggguguccgugaucacgccgggcaccaacaccagcaaccaggucgccgugcuguaccaggacgugaacugcaccgagguccccguggccauccacgccgaccagcugacgcccaccuggcggguguacuccaccggcagcaacgucuuccagacccgcgccgggugccucaucggcgcggagcacgugaacaacuccuacgagugcgacauccccaucggggccggcaucugcgccagcuaccagacgcagaccaacuccccgcggcgcgcccggagcguggcgucccagagcaucaucgccuacaccaugucccugggcgccgagaacagcgucgccuacuccaacaacagcaucgccauccccaccaacuucacgaucuccgugaccaccgagauccugcccgugagcaugaccaagacgagcgucgacugcaccauguacaucugcggggacuccaccgagugcagcaaccuccugcugcaguacggcuccuucugcacccagcucaaccgcgcgcugacggggaucgccguggagcaggacaagaacacccaggagguguucgcccaggucaagcagaucuacaagacgcccccgaucaaggacuucggcggguucaacuucagccagauccugcccgaccccuccaagcccagcaagcgguccuucaucgaggaccuccuguucaacaaggugacccuggccgacgccggcuucaucaagcaguacggcgacugccucggggacaucgcggcccgcgaccugaucugcgcccagaaguucaacggccugaccgugcucccgccccugcugaccgacgagaugaucgcccaguacaccagcgcccuccuggcggggaccaucacguccggcuggaccuucggggccggcgccgcccugcagauccccuucgcgaugcagauggccuaccgguucaacggcaucggggucacccagaacgugcucuacgagaaccagaagcugaucgccaaccaguucaacagcgccaucggcaagauccaggacucccugagcuccaccgccagcgcgcucgggaagcugcaggacguggucaaccagaacgcccaggcccugaacacgcucgugaagcagcuguccagcaacuucggcgccaucuccagcgugcugaacgacauccucucccgccuggacaaggucgaggccgaggugcagaucgaccggcugaucaccgggcgccuccagagccugcagaccuacgugacccagcagcugauccgggcggccgagauccgcgccagcgccaaccucgccgcgaccaagauguccgagugcguccugggccagagcaagcggguggacuucugcggcaagggguaccaccugauguccuucccccagagcgccccgcacggcguggucuuccuccacgugacguacguccccgcccaggagaagaacuucaccaccgcccccgcgaucugccacgacgggaaggcccacuucccccgcgagggcguguucguguccaacgggacccacugguucgucacgcagcggaacuucuacgagccgcagaucaucaccaccgacaacaccuucgugagcggcaacugcgacguggucaucggcaucgugaacaacacgguguacgacccccugcagcccgagcuggacuccuucaaggaggagcucgacaaguacuucaagaaccacaccagccccgacgucgaccugggggacaucuccggcaucaacgccagcguggugaacauccagaaggagaucgaccgccugaacgaggucgccaagaaccucaacgagucccugaucgaccugcaggagcucgggaaguacgagcaguacaucaagggcgggggcgggagcgacaucaucaagcuccugaacgagcaggucaacaaggagaugcaguccagcaaccuguacauguccaugagcuccuggugcuacacccacagccucgacggcgccgggcuguuccuguucgaccacgccgcggaggaguacgagcacgccaagaagcucaucaucuuccugaacgagaacaacgugcccgugcagcugaccuccaucagcgccccggagcacaaguucgagggccucacgcagaucuuccagaaggccuacgagcacgagcagcacaucuccgagagcaucaacaacaucguggaccacgccaucaaguccaaggaccacgcgaccuucaacuuccugcagugguacgucgccgagcagcacgaggaggaggugcuguucaaggacauccucgacaagaucgagcugaucgggaacgagaaccacggccuguaccucgccgaccaguacgugaaggggaucgccaagagccgcaaguccugaggacuaguuauaagacugacuagcccgaugggccucccaacgggcccuccuccccuccuugcaccgagauuaauaaaaaaaaaaaaaaaaaaaaaaaaaaaaaaaaaaaaaaaaaaaaaaaaaaaaaaaaaaaaaaaaugcaucccccccccccccccccccccccccccccccaaaggcucuuuucagagccaccagaauu

SEQ ID NO: 12841 - RNA, 4357 nt, Artificial Sequence
  SARS-CoV-2/Wuhan/WIV05/2019__EPI_ISL_402128 spike protein mRNA gc (1-1211)(K986P_V987P) Ferritin construct
aggagaaagcuuaccauguucguguuccugguccuccugccccuggugagcucccagugcgugaaccucaccacccgcacgcagcugccgcccgccuacaccaacagcuucacccggggcgucuacuaccccgacaagguguuccgcuccagcgugcugcacuccacccaggaccucuuccugcccuucuucagcaacgucacgugguuccacgccauccacguguccgggaccaacggcaccaagcgguucgacaacccggugcugcccuucaacgacggggucuacuucgcgagcaccgagaaguccaacaucauccgcggcuggaucuucgggacgacccucgacagcaagacccagucccugcugaucgugaacaacgccaccaacguggucaucaaggugugcgaguuccaguucugcaacgaccccuuccucggcguguacuaccacaagaacaacaagagcuggauggaguccgaguuccgggucuacagcuccgccaacaacugcacguucgaguacgugagccagcccuuccugauggaccuggagggcaagcaggggaacuucaagaaccuccgcgaguucguguucaagaacaucgacggcuacuucaagaucuacuccaagcacaccccgaucaaccugguccgggaccugccccagggguucagcgcccucgagccccugguggaccugcccaucggcaucaacaucacccgcuuccagacccuccuggcccugcaccgguccuaccucacgccgggggacagcagcuccggcuggaccgcgggcgccgccgccuacuacgugggguaccugcagccccgcaccuuccugcucaaguacaacgagaacggcaccaucacggacgcggucgacugcgcccuggacccccugagcgagaccaagugcacccucaaguccuucaccguggagaaggggaucuaccagacgagcaacuuccgggugcagcccaccgaguccaucguccgcuucccgaacaucaccaaccugugccccuucggcgagguguucaacgccacccgguucgccagcgucuacgccuggaaccgcaagcggaucuccaacugcguggcggacuacagcgugcuguacaacuccgccagcuucuccacguucaagugcuacggcgucagccccaccaagcucaacgaccugugcuucaccaacguguacgccgacuccuucgugauccgcggggacgagguccggcagaucgcccccggccagaccgggaagaucgccgacuacaacuacaagcugccggacgacuucacgggcugcgugaucgcguggaacagcaacaaccucgacuccaaggucgggggcaacuacaacuaccuguaccgccuguuccgcaagagcaaccucaagcccuucgagcgggacaucuccaccgagaucuaccaggccggcagcacccccugcaacgggguggagggcuucaacugcuacuucccccugcaguccuacggguuccagccgaccaacggcgugggguaccagcccuaccggguggucgugcugagcuucgagcuccugcacgcccccgccacggugugcggccccaagaaguccaccaaccuggucaagaacaagugcgugaacuucaacuucaacggccucaccgggaccggcgugcugaccgagagcaacaagaaguuccugccguuccagcaguucgggcgcgacaucgccgacacgaccgacgcgguccgcgacccccagacccuggagauccucgacaucacccccugcagcuucggcgggguguccgugaucacgccgggcaccaacaccagcaaccaggucgccgugcuguaccaggacgugaacugcaccgagguccccguggccauccacgccgaccagcugacgcccaccuggcggguguacuccaccggcagcaacgucuuccagacccgcgccgggugccucaucggcgcggagcacgugaacaacuccuacgagugcgacauccccaucggggccggcaucugcgccagcuaccagacgcagaccaacuccccgcggcgcgcccggagcguggcgucccagagcaucaucgccuacaccaugucccugggcgccgagaacagcgucgccuacuccaacaacagcaucgccauccccaccaacuucacgaucuccgugaccaccgagauccugcccgugagcaugaccaagacgagcgucgacugcaccauguacaucugcggggacuccaccgagugcagcaaccuccugcugcaguacggcuccuucugcacccagcucaaccgcgcgcugacggggaucgccguggagcaggacaagaacacccaggagguguucgcccaggucaagcagaucuacaagacgcccccgaucaaggacuucggcggguucaacuucagccagauccugcccgaccccuccaagcccagcaagcgguccuucaucgaggaccuccuguucaacaaggugacccuggccgacgccggcuucaucaagcaguacggcgacugccucggggacaucgcggcccgcgaccugaucugcgcccagaaguucaacggccugaccgugcucccgccccugcugaccgacgagaugaucgcccaguacaccagcgcccuccuggcggggaccaucacguccggcuggaccuucggggccggcgccgcccugcagauccccuucgcgaugcagauggccuaccgguucaacggcaucggggucacccagaacgugcucuacgagaaccagaagcugaucgccaaccaguucaacagcgccaucggcaagauccaggacucccugagcuccaccgccagcgcgcucgggaagcugcaggacguggucaaccagaacgcccaggcccugaacacgcucgugaagcagcuguccagcaacuucggcgccaucuccagcgugcugaacgacauccucucccgccuggacccgcccgaggccgaggugcagaucgaccggcugaucaccgggcgccuccagagccugcagaccuacgugacccagcagcugauccgggcggccgagauccgcgccagcgccaaccucgccgcgaccaagauguccgagugcguccugggccagagcaagcggguggacuucugcggcaagggguaccaccugauguccuucccccagagcgccccgcacggcguggucuuccuccacgugacguacguccccgcccaggagaagaacuucaccaccgcccccgcgaucugccacgacgggaaggcccacuucccccgcgagggcguguucguguccaacgggacccacugguucgucacgcagcggaacuucuacgagccgcagaucaucaccaccgacaacaccuucgugagcggcaacugcgacguggucaucggcaucgugaacaacacgguguacgacccccugcagcccgagcuggacuccuucaaggaggagcucgacaaguacuucaagaaccacaccagccccgacgucgaccugggggacaucuccggcaucaacgccagcguggugaacauccagaaggagaucgaccgccugaacgaggucgccaagaaccucaacgagucccugaucgaccugcaggagcucgggaaguacgagcaguacaucaagggcgggggcgggagcgacaucaucaagcuccugaacgagcaggucaacaaggagaugcaguccagcaaccuguacauguccaugagcuccuggugcuacacccacagccucgacggcgccgggcuguuccuguucgaccacgccgcggaggaguacgagcacgccaagaagcucaucaucuuccugaacgagaacaacgugcccgugcagcugaccuccaucagcgccccggagcacaaguucgagggccucacgcagaucuuccagaaggccuacgagcacgagcagcacaucuccgagagcaucaacaacaucguggaccacgccaucaaguccaaggaccacgcgaccuucaacuuccugcagugguacgucgccgagcagcacgaggaggaggugcuguucaaggacauccucgacaagaucgagcugaucgggaacgagaaccacggccuguaccucgccgaccaguacgugaaggggaucgccaagagccgcaaguccugaggacuaguuauaagacugacuagcccgaugggccucccaacgggcccuccuccccuccuugcaccgagauuaauaaaaaaaaaaaaaaaaaaaaaaaaaaaaaaaaaaaaaaaaaaaaaaaaaaaaaaaaaaaaaaaaugcaucccccccccccccccccccccccccccccccaaaggcucuuuucagagccaccagaauu

SEQ ID NO: 12842 - RNA, 4357 nt, Artificial Sequence
  SARS-CoV-2/Wuhan/WIV05/2019__EPI_ISL_402128 spike protein mRNA gc (1-1211)(K986P_V987P_T887WN_A1020W) Ferritin construct
aggagaaagcuuaccauguucguguuccugguccuccugccccuggugagcucccagugcgugaaccucaccacccgcacgcagcugccgcccgccuacaccaacagcuucacccggggcgucuacuaccccgacaagguguuccgcuccagcgugcugcacuccacccaggaccucuuccugcccuucuucagcaacgucacgugguuccacgccauccacguguccgggaccaacggcaccaagcgguucgacaacccggugcugcccuucaacgacggggucuacuucgcgagcaccgagaaguccaacaucauccgcggcuggaucuucgggacgacccucgacagcaagacccagucccugcugaucgugaacaacgccaccaacguggucaucaaggugugcgaguuccaguucugcaacgaccccuuccucggcguguacuaccacaagaacaacaagagcuggauggaguccgaguuccgggucuacagcuccgccaacaacugcacguucgaguacgugagccagcccuuccugauggaccuggagggcaagcaggggaacuucaagaaccuccgcgaguucguguucaagaacaucgacggcuacuucaagaucuacuccaagcacaccccgaucaaccugguccgggaccugccccagggguucagcgcccucgagccccugguggaccugcccaucggcaucaacaucacccgcuuccagacccuccuggcccugcaccgguccuaccucacgccgggggacagcagcuccggcuggaccgcgggcgccgccgccuacuacgugggguaccugcagccccgcaccuuccugcucaaguacaacgagaacggcaccaucacggacgcggucgacugcgcccuggacccccugagcgagaccaagugcacccucaaguccuucaccguggagaaggggaucuaccagacgagcaacuuccgggugcagcccaccgaguccaucguccgcuucccgaacaucaccaaccugugccccuucggcgagguguucaacgccacccgguucgccagcgucuacgccuggaaccgcaagcggaucuccaacugcguggcggacuacagcgugcuguacaacuccgccagcuucuccacguucaagugcuacggcgucagccccaccaagcucaacgaccugugcuucaccaacguguacgccgacuccuucgugauccgcggggacgagguccggcagaucgcccccggccagaccgggaagaucgccgacuacaacuacaagcugccggacgacuucacgggcugcgugaucgcguggaacagcaacaaccucgacuccaaggucgggggcaacuacaacuaccuguaccgccuguuccgcaagagcaaccucaagcccuucgagcgggacaucuccaccgagaucuaccaggccggcagcacccccugcaacgggguggagggcuucaacugcuacuucccccugcaguccuacggguuccagccgaccaacggcgugggguaccagcccuaccggguggucgugcugagcuucgagcuccugcacgcccccgccacggugugcggccccaagaaguccaccaaccuggucaagaacaagugcgugaacuucaacuucaacggccucaccgggaccggcgugcugaccgagagcaacaagaaguuccugccguuccagcaguucgggcgcgacaucgccgacacgaccgacgcgguccgcgacccccagacccuggagauccucgacaucacccccugcagcuucggcgggguguccgugaucacgccgggcaccaacaccagcaaccaggucgccgugcuguaccaggacgugaacugcaccgagguccccguggccauccacgccgaccagcugacgcccaccuggcggguguacuccaccggcagcaacgucuuccagacccgcgccgggugccucaucggcgcggagcacgugaacaacuccuacgagugcgacauccccaucggggccggcaucugcgccagcuaccagacgcagaccaacuccccgcggcgcgcccggagcguggcgucccagagcaucaucgccuacaccaugucccugggcgccgagaacagcgucgccuacuccaacaacagcaucgccauccccaccaacuucacgaucuccgugaccaccgagauccugcccgugagcaugaccaagacgagcgucgacugcaccauguacaucugcggggacuccaccgagugcagcaaccuccugcugcaguacggcuccuucugcacccagcucaaccgcgcgcugacggggaucgccguggagcaggacaagaacacccaggagguguucgcccaggucaagcagaucuacaagacgcccccgaucaaggacuucggcggguucaacuucagccagauccugcccgaccccuccaagcccagcaagcgguccuucaucgaggaccuccuguucaacaaggugacccuggccgacgccggcuucaucaagcaguacggcgacugccucggggacaucgcggcccgcgaccugaucugcgcccagaaguucaacggccugaccgugcucccgccccugcugaccgacgagaugaucgcccaguacaccagcgcccuccuggcggggaccaucacguccggcuggugguucggggccggcgccgcccugcagauccccuucgcgaugcagauggccuaccgguucaacggcaucggggucacccagaacgugcucuacgagaaccagaagcugaucgccaaccaguucaacagcgccaucggcaagauccaggacucccugagcuccaccgccagcgcgcucgggaagcugcaggacguggucaaccagaacgcccaggcccugaacacgcucgugaagcagcuguccagcaacuucggcgccaucuccagcgugcugaacgacauccucucccgccuggacccgcccgaggccgaggugcagaucgaccggcugaucaccgggcgccuccagagccugcagaccuacgugacccagcagcugauccgggcggccgagauccgcuggagcgccaaccucgccgcgaccaagauguccgagugcguccugggccagagcaagcggguggacuucugcggcaagggguaccaccugauguccuucccccagagcgccccgcacggcguggucuuccuccacgugacguacguccccgcccaggagaagaacuucaccaccgcccccgcgaucugccacgacgggaaggcccacuucccccgcgagggcguguucguguccaacgggacccacugguucgucacgcagcggaacuucuacgagccgcagaucaucaccaccgacaacaccuucgugagcggcaacugcgacguggucaucggcaucgugaacaacacgguguacgacccccugcagcccgagcuggacuccuucaaggaggagcucgacaaguacuucaagaaccacaccagccccgacgucgaccugggggacaucuccggcaucaacgccagcguggugaacauccagaaggagaucgaccgccugaacgaggucgccaagaaccucaacgagucccugaucgaccugcaggagcucgggaaguacgagcaguacaucaagggcgggggcgggagcgacaucaucaagcuccugaacgagcaggucaacaaggagaugcaguccagcaaccuguacauguccaugagcuccuggugcuacacccacagccucgacggcgccgggcuguuccuguucgaccacgccgcggaggaguacgagcacgccaagaagcucaucaucuuccugaacgagaacaacgugcccgugcagcugaccuccaucagcgccccggagcacaaguucgagggccucacgcagaucuuccagaaggccuacgagcacgagcagcacaucuccgagagcaucaacaacaucguggaccacgccaucaaguccaaggaccacgcgaccuucaacuuccugcagugguacgucgccgagcagcacgaggaggaggugcuguucaaggacauccucgacaagaucgagcugaucgggaacgagaaccacggccuguaccucgccgaccaguacgugaaggggaucgccaagagccgcaaguccugaggacuaguuauaagacugacuagcccgaugggccucccaacgggcccuccuccccuccuugcaccgagauuaauaaaaaaaaaaaaaaaaaaaaaaaaaaaaaaaaaaaaaaaaaaaaaaaaaaaaaaaaaaaaaaaaugcaucccccccccccccccccccccccccccccccaaaggcucuuuucagagccaccagaauu

SEQ ID NO: 12843 - RNA, 4357 nt, Artificial Sequence
  SARS-CoV-2/Wuhan/WIV05/2019__EPI_ISL_402128 spike protein mRNA gc (1-1211)(K986P_V987P_P1069F) Ferritin construct
aggagaaagcuuaccauguucguguuccugguccuccugccccuggugagcucccagugcgugaaccucaccacccgcacgcagcugccgcccgccuacaccaacagcuucacccggggcgucuacuaccccgacaagguguuccgcuccagcgugcugcacuccacccaggaccucuuccugcccuucuucagcaacgucacgugguuccacgccauccacguguccgggaccaacggcaccaagcgguucgacaacccggugcugcccuucaacgacggggucuacuucgcgagcaccgagaaguccaacaucauccgcggcuggaucuucgggacgacccucgacagcaagacccagucccugcugaucgugaacaacgccaccaacguggucaucaaggugugcgaguuccaguucugcaacgaccccuuccucggcguguacuaccacaagaacaacaagagcuggauggaguccgaguuccgggucuacagcuccgccaacaacugcacguucgaguacgugagccagcccuuccugauggaccuggagggcaagcaggggaacuucaagaaccuccgcgaguucguguucaagaacaucgacggcuacuucaagaucuacuccaagcacaccccgaucaaccugguccgggaccugccccagggguucagcgcccucgagccccugguggaccugcccaucggcaucaacaucacccgcuuccagacccuccuggcccugcaccgguccuaccucacgccgggggacagcagcuccggcuggaccgcgggcgccgccgccuacuacgugggguaccugcagccccgcaccuuccugcucaaguacaacgagaacggcaccaucacggacgcggucgacugcgcccuggacccccugagcgagaccaagugcacccucaaguccuucaccguggagaaggggaucuaccagacgagcaacuuccgggugcagcccaccgaguccaucguccgcuucccgaacaucaccaaccugugccccuucggcgagguguucaacgccacccgguucgccagcgucuacgccuggaaccgcaagcggaucuccaacugcguggcggacuacagcgugcuguacaacuccgccagcuucuccacguucaagugcuacggcgucagccccaccaagcucaacgaccugugcuucaccaacguguacgccgacuccuucgugauccgcggggacgagguccggcagaucgcccccggccagaccgggaagaucgccgacuacaacuacaagcugccggacgacuucacgggcugcgugaucgcguggaacagcaacaaccucgacuccaaggucgggggcaacuacaacuaccuguaccgccuguuccgcaagagcaaccucaagcccuucgagcgggacaucuccaccgagaucuaccaggccggcagcacccccugcaacgggguggagggcuucaacugcuacuucccccugcaguccuacggguuccagccgaccaacggcgugggguaccagcccuaccggguggucgugcugagcuucgagcuccugcacgcccccgccacggugugcggccccaagaaguccaccaaccuggucaagaacaagugcgugaacuucaacuucaacggccucaccgggaccggcgugcugaccgagagcaacaagaaguuccugccguuccagcaguucgggcgcgacaucgccgacacgaccgacgcgguccgcgacccccagacccuggagauccucgacaucacccccugcagcuucggcgggguguccgugaucacgccgggcaccaacaccagcaaccaggucgccgugcuguaccaggacgugaacugcaccgagguccccguggccauccacgccgaccagcugacgcccaccuggcggguguacuccaccggcagcaacgucuuccagacccgcgccgggugccucaucggcgcggagcacgugaacaacuccuacgagugcgacauccccaucggggccggcaucugcgccagcuaccagacgcagaccaacuccccgcggcgcgcccggagcguggcgucccagagcaucaucgccuacaccaugucccugggcgccgagaacagcgucgccuacuccaacaacagcaucgccauccccaccaacuucacgaucuccgugaccaccgagauccugcccgugagcaugaccaagacgagcgucgacugcaccauguacaucugcggggacuccaccgagugcagcaaccuccugcugcaguacggcuccuucugcacccagcucaaccgcgcgcugacggggaucgccguggagcaggacaagaacacccaggagguguucgcccaggucaagcagaucuacaagacgcccccgaucaaggacuucggcggguucaacuucagccagauccugcccgaccccuccaagcccagcaagcgguccuucaucgaggaccuccuguucaacaaggugacccuggccgacgccggcuucaucaagcaguacggcgacugccucggggacaucgcggcccgcgaccugaucugcgcccagaaguucaacggccugaccgugcucccgccccugcugaccgacgagaugaucgcccaguacaccagcgcccuccuggcggggaccaucacguccggcuggaccuucggggccggcgccgcccugcagauccccuucgcgaugcagauggccuaccgguucaacggcaucggggucacccagaacgugcucuacgagaaccagaagcugaucgccaaccaguucaacagcgccaucggcaagauccaggacucccugagcuccaccgccagcgcgcucgggaagcugcaggacguggucaaccagaacgcccaggcccugaacacgcucgugaagcagcuguccagcaacuucggcgccaucuccagcgugcugaacgacauccucucccgccuggacccgcccgaggccgaggugcagaucgaccggcugaucaccgggcgccuccagagccugcagaccuacgugacccagcagcugauccgggcggccgagauccgcgccagcgccaaccucgccgcgaccaagauguccgagugcguccugggccagagcaagcggguggacuucugcggcaagggguaccaccugauguccuucccccagagcgccccgcacggcguggucuuccuccacgugacguacgucuucgcccaggagaagaacuucaccaccgcccccgcgaucugccacgacgggaaggcccacuucccccgcgagggcguguucguguccaacgggacccacugguucgucacgcagcggaacuucuacgagccgcagaucaucaccaccgacaacaccuucgugagcggcaacugcgacguggucaucggcaucgugaacaacacgguguacgacccccugcagcccgagcuggacuccuucaaggaggagcucgacaaguacuucaagaaccacaccagccccgacgucgaccugggggacaucuccggcaucaacgccagcguggugaacauccagaaggagaucgaccgccugaacgaggucgccaagaaccucaacgagucccugaucgaccugcaggagcucgggaaguacgagcaguacaucaagggcgggggcgggagcgacaucaucaagcuccugaacgagcaggucaacaaggagaugcaguccagcaaccuguacauguccaugagcuccuggugcuacacccacagccucgacggcgccgggcuguuccuguucgaccacgccgcggaggaguacgagcacgccaagaagcucaucaucuuccugaacgagaacaacgugcccgugcagcugaccuccaucagcgccccggagcacaaguucgagggccucacgcagaucuuccagaaggccuacgagcacgagcagcacaucuccgagagcaucaacaacaucguggaccacgccaucaaguccaaggaccacgcgaccuucaacuuccugcagugguacgucgccgagcagcacgaggaggaggugcuguucaaggacauccucgacaagaucgagcugaucgggaacgagaaccacggccuguaccucgccgaccaguacgugaaggggaucgccaagagccgcaaguccugaggacuaguuauaagacugacuagcccgaugggccucccaacgggcccuccuccccuccuugcaccgagauuaauaaaaaaaaaaaaaaaaaaaaaaaaaaaaaaaaaaaaaaaaaaaaaaaaaaaaaaaaaaaaaaaaugcaucccccccccccccccccccccccccccccccaaaggcucuuuucagagccaccagaauu

SEQ ID NO: 12844 - RNA, 4357 nt, Artificial Sequence
  SARS-CoV-2/Wuhan/WIV05/2019__EPI_ISL_402128 spike protein mRNA gc (1-1211)(K986P_V987P_ H1048Q_H1064N_ H1083N_H1101N) Ferritin construct
aggagaaagcuuaccauguucguguuccugguccuccugccccuggugagcucccagugcgugaaccucaccacccgcacgcagcugccgcccgccuacaccaacagcuucacccggggcgucuacuaccccgacaagguguuccgcuccagcgugcugcacuccacccaggaccucuuccugcccuucuucagcaacgucacgugguuccacgccauccacguguccgggaccaacggcaccaagcgguucgacaacccggugcugcccuucaacgacggggucuacuucgcgagcaccgagaaguccaacaucauccgcggcuggaucuucgggacgacccucgacagcaagacccagucccugcugaucgugaacaacgccaccaacguggucaucaaggugugcgaguuccaguucugcaacgaccccuuccucggcguguacuaccacaagaacaacaagagcuggauggaguccgaguuccgggucuacagcuccgccaacaacugcacguucgaguacgugagccagcccuuccugauggaccuggagggcaagcaggggaacuucaagaaccuccgcgaguucguguucaagaacaucgacggcuacuucaagaucuacuccaagcacaccccgaucaaccugguccgggaccugccccagggguucagcgcccucgagccccugguggaccugcccaucggcaucaacaucacccgcuuccagacccuccuggcccugcaccgguccuaccucacgccgggggacagcagcuccggcuggaccgcgggcgccgccgccuacuacgugggguaccugcagccccgcaccuuccugcucaaguacaacgagaacggcaccaucacggacgcggucgacugcgcccuggacccccugagcgagaccaagugcacccucaaguccuucaccguggagaaggggaucuaccagacgagcaacuuccgggugcagcccaccgaguccaucguccgcuucccgaacaucaccaaccugugccccuucggcgagguguucaacgccacccgguucgccagcgucuacgccuggaaccgcaagcggaucuccaacugcguggcggacuacagcgugcuguacaacuccgccagcuucuccacguucaagugcuacggcgucagccccaccaagcucaacgaccugugcuucaccaacguguacgccgacuccuucgugauccgcggggacgagguccggcagaucgcccccggccagaccgggaagaucgccgacuacaacuacaagcugccggacgacuucacgggcugcgugaucgcguggaacagcaacaaccucgacuccaaggucgggggcaacuacaacuaccuguaccgccuguuccgcaagagcaaccucaagcccuucgagcgggacaucuccaccgagaucuaccaggccggcagcacccccugcaacgggguggagggcuucaacugcuacuucccccugcaguccuacggguuccagccgaccaacggcgugggguaccagcccuaccggguggucgugcugagcuucgagcuccugcacgcccccgccacggugugcggccccaagaaguccaccaaccuggucaagaacaagugcgugaacuucaacuucaacggccucaccgggaccggcgugcugaccgagagcaacaagaaguuccugccguuccagcaguucgggcgcgacaucgccgacacgaccgacgcgguccgcgacccccagacccuggagauccucgacaucacccccugcagcuucggcgggguguccgugaucacgccgggcaccaacaccagcaaccaggucgccgugcuguaccaggacgugaacugcaccgagguccccguggccauccacgccgaccagcugacgcccaccuggcggguguacuccaccggcagcaacgucuuccagacccgcgccgggugccucaucggcgcggagcacgugaacaacuccuacgagugcgacauccccaucggggccggcaucugcgccagcuaccagacgcagaccaacuccccgcggcgcgcccggagcguggcgucccagagcaucaucgccuacaccaugucccugggcgccgagaacagcgucgccuacuccaacaacagcaucgccauccccaccaacuucacgaucuccgugaccaccgagauccugcccgugagcaugaccaagacgagcgucgacugcaccauguacaucugcggggacuccaccgagugcagcaaccuccugcugcaguacggcuccuucugcacccagcucaaccgcgcgcugacggggaucgccguggagcaggacaagaacacccaggagguguucgcccaggucaagcagaucuacaagacgcccccgaucaaggacuucggcggguucaacuucagccagauccugcccgaccccuccaagcccagcaagcgguccuucaucgaggaccuccuguucaacaaggugacccuggccgacgccggcuucaucaagcaguacggcgacugccucggggacaucgcggcccgcgaccugaucugcgcccagaaguucaacggccugaccgugcucccgccccugcugaccgacgagaugaucgcccaguacaccagcgcccuccuggcggggaccaucacguccggcuggaccuucggggccggcgccgcccugcagauccccuucgcgaugcagauggccuaccgguucaacggcaucggggucacccagaacgugcucuacgagaaccagaagcugaucgccaaccaguucaacagcgccaucggcaagauccaggacucccugagcuccaccgccagcgcgcucgggaagcugcaggacguggucaaccagaacgcccaggcccugaacacgcucgugaagcagcuguccagcaacuucggcgccaucuccagcgugcugaacgacauccucucccgccuggacccgcccgaggccgaggugcagaucgaccggcugaucaccgggcgccuccagagccugcagaccuacgugacccagcagcugauccgggcggccgagauccgcgccagcgccaaccucgccgcgaccaagauguccgagugcguccugggccagagcaagcggguggacuucugcggcaagggguaccagcugauguccuucccccagagcgccccgcacggcguggucuuccucaacgugacguacguccccgcccaggagaagaacuucaccaccgcccccgcgaucugcaacgacgggaaggcccacuucccccgcgagggcguguucguguccaacgggaccaacugguucgucacgcagcggaacuucuacgagccgcagaucaucaccaccgacaacaccuucgugagcggcaacugcgacguggucaucggcaucgugaacaacacgguguacgacccccugcagcccgagcuggacuccuucaaggaggagcucgacaaguacuucaagaaccacaccagccccgacgucgaccugggggacaucuccggcaucaacgccagcguggugaacauccagaaggagaucgaccgccugaacgaggucgccaagaaccucaacgagucccugaucgaccugcaggagcucgggaaguacgagcaguacaucaagggcgggggcgggagcgacaucaucaagcuccugaacgagcaggucaacaaggagaugcaguccagcaaccuguacauguccaugagcuccuggugcuacacccacagccucgacggcgccgggcuguuccuguucgaccacgccgcggaggaguacgagcacgccaagaagcucaucaucuuccugaacgagaacaacgugcccgugcagcugaccuccaucagcgccccggagcacaaguucgagggccucacgcagaucuuccagaaggccuacgagcacgagcagcacaucuccgagagcaucaacaacaucguggaccacgccaucaaguccaaggaccacgcgaccuucaacuuccugcagugguacgucgccgagcagcacgaggaggaggugcuguucaaggacauccucgacaagaucgagcugaucgggaacgagaaccacggccuguaccucgccgaccaguacgugaaggggaucgccaagagccgcaaguccugaggacuaguuauaagacugacuagcccgaugggccucccaacgggcccuccuccccuccuugcaccgagauuaauaaaaaaaaaaaaaaaaaaaaaaaaaaaaaaaaaaaaaaaaaaaaaaaaaaaaaaaaaaaaaaaaugcaucccccccccccccccccccccccccccccccaaaggcucuuuucagagccaccagaauu

SEQ ID NO: 12845 - RNA, 4357 nt, Artificial Sequence
  SARS-CoV-2/Wuhan/WIV05/2019__EPI_ISL_402128 spike protein mRNA gc (1-1211)(I712C_T1077C) Ferritin construct
aggagaaagcuuaccauguucguguuccugguccuccugccccuggugagcucccagugcgugaaccucaccacccgcacgcagcugccgcccgccuacaccaacagcuucacccggggcgucuacuaccccgacaagguguuccgcuccagcgugcugcacuccacccaggaccucuuccugcccuucuucagcaacgucacgugguuccacgccauccacguguccgggaccaacggcaccaagcgguucgacaacccggugcugcccuucaacgacggggucuacuucgcgagcaccgagaaguccaacaucauccgcggcuggaucuucgggacgacccucgacagcaagacccagucccugcugaucgugaacaacgccaccaacguggucaucaaggugugcgaguuccaguucugcaacgaccccuuccucggcguguacuaccacaagaacaacaagagcuggauggaguccgaguuccgggucuacagcuccgccaacaacugcacguucgaguacgugagccagcccuuccugauggaccuggagggcaagcaggggaacuucaagaaccuccgcgaguucguguucaagaacaucgacggcuacuucaagaucuacuccaagcacaccccgaucaaccugguccgggaccugccccagggguucagcgcccucgagccccugguggaccugcccaucggcaucaacaucacccgcuuccagacccuccuggcccugcaccgguccuaccucacgccgggggacagcagcuccggcuggaccgcgggcgccgccgccuacuacgugggguaccugcagccccgcaccuuccugcucaaguacaacgagaacggcaccaucacggacgcggucgacugcgcccuggacccccugagcgagaccaagugcacccucaaguccuucaccguggagaaggggaucuaccagacgagcaacuuccgggugcagcccaccgaguccaucguccgcuucccgaacaucaccaaccugugccccuucggcgagguguucaacgccacccgguucgccagcgucuacgccuggaaccgcaagcggaucuccaacugcguggcggacuacagcgugcuguacaacuccgccagcuucuccacguucaagugcuacggcgucagccccaccaagcucaacgaccugugcuucaccaacguguacgccgacuccuucgugauccgcggggacgagguccggcagaucgcccccggccagaccgggaagaucgccgacuacaacuacaagcugccggacgacuucacgggcugcgugaucgcguggaacagcaacaaccucgacuccaaggucgggggcaacuacaacuaccuguaccgccuguuccgcaagagcaaccucaagcccuucgagcgggacaucuccaccgagaucuaccaggccggcagcacccccugcaacgggguggagggcuucaacugcuacuucccccugcaguccuacggguuccagccgaccaacggcgugggguaccagcccuaccggguggucgugcugagcuucgagcuccugcacgcccccgccacggugugcggccccaagaaguccaccaaccuggucaagaacaagugcgugaacuucaacuucaacggccucaccgggaccggcgugcugaccgagagcaacaagaaguuccugccguuccagcaguucgggcgcgacaucgccgacacgaccgacgcgguccgcgacccccagacccuggagauccucgacaucacccccugcagcuucggcgggguguccgugaucacgccgggcaccaacaccagcaaccaggucgccgugcuguaccaggacgugaacugcaccgagguccccguggccauccacgccgaccagcugacgcccaccuggcggguguacuccaccggcagcaacgucuuccagacccgcgccgggugccucaucggcgcggagcacgugaacaacuccuacgagugcgacauccccaucggggccggcaucugcgccagcuaccagacgcagaccaacuccccgcggcgcgcccggagcguggcgucccagagcaucaucgccuacaccaugucccugggcgccgagaacagcgucgccuacuccaacaacagcugcgccauccccaccaacuucacgaucuccgugaccaccgagauccugcccgugagcaugaccaagacgagcgucgacugcaccauguacaucugcggggacuccaccgagugcagcaaccuccugcugcaguacggcuccuucugcacccagcucaaccgcgcgcugacggggaucgccguggagcaggacaagaacacccaggagguguucgcccaggucaagcagaucuacaagacgcccccgaucaaggacuucggcggguucaacuucagccagauccugcccgaccccuccaagcccagcaagcgguccuucaucgaggaccuccuguucaacaaggugacccuggccgacgccggcuucaucaagcaguacggcgacugccucggggacaucgcggcccgcgaccugaucugcgcccagaaguucaacggccugaccgugcucccgccccugcugaccgacgagaugaucgcccaguacaccagcgcccuccuggcggggaccaucacguccggcuggaccuucggggccggcgccgcccugcagauccccuucgcgaugcagauggccuaccgguucaacggcaucggggucacccagaacgugcucuacgagaaccagaagcugaucgccaaccaguucaacagcgccaucggcaagauccaggacucccugagcuccaccgccagcgcgcucgggaagcugcaggacguggucaaccagaacgcccaggcccugaacacgcucgugaagcagcuguccagcaacuucggcgccaucuccagcgugcugaacgacauccucucccgccuggacaaggucgaggccgaggugcagaucgaccggcugaucaccgggcgccuccagagccugcagaccuacgugacccagcagcugauccgggcggccgagauccgcgccagcgccaaccucgccgcgaccaagauguccgagugcguccugggccagagcaagcggguggacuucugcggcaagggguaccaccugauguccuucccccagagcgccccgcacggcguggucuuccuccacgugacguacguccccgcccaggagaagaacuucaccugcgcccccgcgaucugccacgacgggaaggcccacuucccccgcgagggcguguucguguccaacgggacccacugguucgucacgcagcggaacuucuacgagccgcagaucaucaccaccgacaacaccuucgugagcggcaacugcgacguggucaucggcaucgugaacaacacgguguacgacccccugcagcccgagcuggacuccuucaaggaggagcucgacaaguacuucaagaaccacaccagccccgacgucgaccugggggacaucuccggcaucaacgccagcguggugaacauccagaaggagaucgaccgccugaacgaggucgccaagaaccucaacgagucccugaucgaccugcaggagcucgggaaguacgagcaguacaucaagggcgggggcgggagcgacaucaucaagcuccugaacgagcaggucaacaaggagaugcaguccagcaaccuguacauguccaugagcuccuggugcuacacccacagccucgacggcgccgggcuguuccuguucgaccacgccgcggaggaguacgagcacgccaagaagcucaucaucuuccugaacgagaacaacgugcccgugcagcugaccuccaucagcgccccggagcacaaguucgagggccucacgcagaucuuccagaaggccuacgagcacgagcagcacaucuccgagagcaucaacaacaucguggaccacgccaucaaguccaaggaccacgcgaccuucaacuuccugcagugguacgucgccgagcagcacgaggaggaggugcuguucaaggacauccucgacaagaucgagcugaucgggaacgagaaccacggccuguaccucgccgaccaguacgugaaggggaucgccaagagccgcaaguccugaggacuaguuauaagacugacuagcccgaugggccucccaacgggcccuccuccccuccuugcaccgagauuaauaaaaaaaaaaaaaaaaaaaaaaaaaaaaaaaaaaaaaaaaaaaaaaaaaaaaaaaaaaaaaaaaugcaucccccccccccccccccccccccccccccccaaaggcucuuuucagagccaccagaauu

SEQ ID NO: 12846 - RNA, 4357 nt, Artificial Sequence
  SARS-CoV-2/Wuhan/WIV05/2019__EPI_ISL_402128 spike protein mRNA gc (1-1211)(I714C_Y1110C) Ferritin construct
aggagaaagcuuaccauguucguguuccugguccuccugccccuggugagcucccagugcgugaaccucaccacccgcacgcagcugccgcccgccuacaccaacagcuucacccggggcgucuacuaccccgacaagguguuccgcuccagcgugcugcacuccacccaggaccucuuccugcccuucuucagcaacgucacgugguuccacgccauccacguguccgggaccaacggcaccaagcgguucgacaacccggugcugcccuucaacgacggggucuacuucgcgagcaccgagaaguccaacaucauccgcggcuggaucuucgggacgacccucgacagcaagacccagucccugcugaucgugaacaacgccaccaacguggucaucaaggugugcgaguuccaguucugcaacgaccccuuccucggcguguacuaccacaagaacaacaagagcuggauggaguccgaguuccgggucuacagcuccgccaacaacugcacguucgaguacgugagccagcccuuccugauggaccuggagggcaagcaggggaacuucaagaaccuccgcgaguucguguucaagaacaucgacggcuacuucaagaucuacuccaagcacaccccgaucaaccugguccgggaccugccccagggguucagcgcccucgagccccugguggaccugcccaucggcaucaacaucacccgcuuccagacccuccuggcccugcaccgguccuaccucacgccgggggacagcagcuccggcuggaccgcgggcgccgccgccuacuacgugggguaccugcagccccgcaccuuccugcucaaguacaacgagaacggcaccaucacggacgcggucgacugcgcccuggacccccugagcgagaccaagugcacccucaaguccuucaccguggagaaggggaucuaccagacgagcaacuuccgggugcagcccaccgaguccaucguccgcuucccgaacaucaccaaccugugccccuucggcgagguguucaacgccacccgguucgccagcgucuacgccuggaaccgcaagcggaucuccaacugcguggcggacuacagcgugcuguacaacuccgccagcuucuccacguucaagugcuacggcgucagccccaccaagcucaacgaccugugcuucaccaacguguacgccgacuccuucgugauccgcggggacgagguccggcagaucgcccccggccagaccgggaagaucgccgacuacaacuacaagcugccggacgacuucacgggcugcgugaucgcguggaacagcaacaaccucgacuccaaggucgggggcaacuacaacuaccuguaccgccuguuccgcaagagcaaccucaagcccuucgagcgggacaucuccaccgagaucuaccaggccggcagcacccccugcaacgggguggagggcuucaacugcuacuucccccugcaguccuacggguuccagccgaccaacggcgugggguaccagcccuaccggguggucgugcugagcuucgagcuccugcacgcccccgccacggugugcggccccaagaaguccaccaaccuggucaagaacaagugcgugaacuucaacuucaacggccucaccgggaccggcgugcugaccgagagcaacaagaaguuccugccguuccagcaguucgggcgcgacaucgccgacacgaccgacgcgguccgcgacccccagacccuggagauccucgacaucacccccugcagcuucggcgggguguccgugaucacgccgggcaccaacaccagcaaccaggucgccgugcuguaccaggacgugaacugcaccgagguccccguggccauccacgccgaccagcugacgcccaccuggcggguguacuccaccggcagcaacgucuuccagacccgcgccgggugccucaucggcgcggagcacgugaacaacuccuacgagugcgacauccccaucggggccggcaucugcgccagcuaccagacgcagaccaacuccccgcggcgcgcccggagcguggcgucccagagcaucaucgccuacaccaugucccugggcgccgagaacagcgucgccuacuccaacaacagcaucgccugccccaccaacuucacgaucuccgugaccaccgagauccugcccgugagcaugaccaagacgagcgucgacugcaccauguacaucugcggggacuccaccgagugcagcaaccuccugcugcaguacggcuccuucugcacccagcucaaccgcgcgcugacggggaucgccguggagcaggacaagaacacccaggagguguucgcccaggucaagcagaucuacaagacgcccccgaucaaggacuucggcggguucaacuucagccagauccugcccgaccccuccaagcccagcaagcgguccuucaucgaggaccuccuguucaacaaggugacccuggccgacgccggcuucaucaagcaguacggcgacugccucggggacaucgcggcccgcgaccugaucugcgcccagaaguucaacggccugaccgugcucccgccccugcugaccgacgagaugaucgcccaguacaccagcgcccuccuggcggggaccaucacguccggcuggaccuucggggccggcgccgcccugcagauccccuucgcgaugcagauggccuaccgguucaacggcaucggggucacccagaacgugcucuacgagaaccagaagcugaucgccaaccaguucaacagcgccaucggcaagauccaggacucccugagcuccaccgccagcgcgcucgggaagcugcaggacguggucaaccagaacgcccaggcccugaacacgcucgugaagcagcuguccagcaacuucggcgccaucuccagcgugcugaacgacauccucucccgccuggacaaggucgaggccgaggugcagaucgaccggcugaucaccgggcgccuccagagccugcagaccuacgugacccagcagcugauccgggcggccgagauccgcgccagcgccaaccucgccgcgaccaagauguccgagugcguccugggccagagcaagcggguggacuucugcggcaagggguaccaccugauguccuucccccagagcgccccgcacggcguggucuuccuccacgugacguacguccccgcccaggagaagaacuucaccaccgcccccgcgaucugccacgacgggaaggcccacuucccccgcgagggcguguucguguccaacgggacccacugguucgucacgcagcggaacuucugcgagccgcagaucaucaccaccgacaacaccuucgugagcggcaacugcgacguggucaucggcaucgugaacaacacgguguacgacccccugcagcccgagcuggacuccuucaaggaggagcucgacaaguacuucaagaaccacaccagccccgacgucgaccugggggacaucuccggcaucaacgccagcguggugaacauccagaaggagaucgaccgccugaacgaggucgccaagaaccucaacgagucccugaucgaccugcaggagcucgggaaguacgagcaguacaucaagggcgggggcgggagcgacaucaucaagcuccugaacgagcaggucaacaaggagaugcaguccagcaaccuguacauguccaugagcuccuggugcuacacccacagccucgacggcgccgggcuguuccuguucgaccacgccgcggaggaguacgagcacgccaagaagcucaucaucuuccugaacgagaacaacgugcccgugcagcugaccuccaucagcgccccggagcacaaguucgagggccucacgcagaucuuccagaaggccuacgagcacgagcagcacaucuccgagagcaucaacaacaucguggaccacgccaucaaguccaaggaccacgcgaccuucaacuuccugcagugguacgucgccgagcagcacgaggaggaggugcuguucaaggacauccucgacaagaucgagcugaucgggaacgagaaccacggccuguaccucgccgaccaguacgugaaggggaucgccaagagccgcaaguccugaggacuaguuauaagacugacuagcccgaugggccucccaacgggcccuccuccccuccuugcaccgagauuaauaaaaaaaaaaaaaaaaaaaaaaaaaaaaaaaaaaaaaaaaaaaaaaaaaaaaaaaaaaaaaaaaugcaucccccccccccccccccccccccccccccccaaaggcucuuuucagagccaccagaauu

SEQ ID NO: 12847 - RNA, 4357 nt, Artificial Sequence
  SARS-CoV-2/Wuhan/WIV05/2019__EPI_ISL_402128 spike protein mRNA gc (1-1211)(P715C_P1069C) Ferritin construct
aggagaaagcuuaccauguucguguuccugguccuccugccccuggugagcucccagugcgugaaccucaccacccgcacgcagcugccgcccgccuacaccaacagcuucacccggggcgucuacuaccccgacaagguguuccgcuccagcgugcugcacuccacccaggaccucuuccugcccuucuucagcaacgucacgugguuccacgccauccacguguccgggaccaacggcaccaagcgguucgacaacccggugcugcccuucaacgacggggucuacuucgcgagcaccgagaaguccaacaucauccgcggcuggaucuucgggacgacccucgacagcaagacccagucccugcugaucgugaacaacgccaccaacguggucaucaaggugugcgaguuccaguucugcaacgaccccuuccucggcguguacuaccacaagaacaacaagagcuggauggaguccgaguuccgggucuacagcuccgccaacaacugcacguucgaguacgugagccagcccuuccugauggaccuggagggcaagcaggggaacuucaagaaccuccgcgaguucguguucaagaacaucgacggcuacuucaagaucuacuccaagcacaccccgaucaaccugguccgggaccugccccagggguucagcgcccucgagccccugguggaccugcccaucggcaucaacaucacccgcuuccagacccuccuggcccugcaccgguccuaccucacgccgggggacagcagcuccggcuggaccgcgggcgccgccgccuacuacgugggguaccugcagccccgcaccuuccugcucaaguacaacgagaacggcaccaucacggacgcggucgacugcgcccuggacccccugagcgagaccaagugcacccucaaguccuucaccguggagaaggggaucuaccagacgagcaacuuccgggugcagcccaccgaguccaucguccgcuucccgaacaucaccaaccugugccccuucggcgagguguucaacgccacccgguucgccagcgucuacgccuggaaccgcaagcggaucuccaacugcguggcggacuacagcgugcuguacaacuccgccagcuucuccacguucaagugcuacggcgucagccccaccaagcucaacgaccugugcuucaccaacguguacgccgacuccuucgugauccgcggggacgagguccggcagaucgcccccggccagaccgggaagaucgccgacuacaacuacaagcugccggacgacuucacgggcugcgugaucgcguggaacagcaacaaccucgacuccaaggucgggggcaacuacaacuaccuguaccgccuguuccgcaagagcaaccucaagcccuucgagcgggacaucuccaccgagaucuaccaggccggcagcacccccugcaacgggguggagggcuucaacugcuacuucccccugcaguccuacggguuccagccgaccaacggcgugggguaccagcccuaccggguggucgugcugagcuucgagcuccugcacgcccccgccacggugugcggccccaagaaguccaccaaccuggucaagaacaagugcgugaacuucaacuucaacggccucaccgggaccggcgugcugaccgagagcaacaagaaguuccugccguuccagcaguucgggcgcgacaucgccgacacgaccgacgcgguccgcgacccccagacccuggagauccucgacaucacccccugcagcuucggcgggguguccgugaucacgccgggcaccaacaccagcaaccaggucgccgugcuguaccaggacgugaacugcaccgagguccccguggccauccacgccgaccagcugacgcccaccuggcggguguacuccaccggcagcaacgucuuccagacccgcgccgggugccucaucggcgcggagcacgugaacaacuccuacgagugcgacauccccaucggggccggcaucugcgccagcuaccagacgcagaccaacuccccgcggcgcgcccggagcguggcgucccagagcaucaucgccuacaccaugucccugggcgccgagaacagcgucgccuacuccaacaacagcaucgccaucugcaccaacuucacgaucuccgugaccaccgagauccugcccgugagcaugaccaagacgagcgucgacugcaccauguacaucugcggggacuccaccgagugcagcaaccuccugcugcaguacggcuccuucugcacccagcucaaccgcgcgcugacggggaucgccguggagcaggacaagaacacccaggagguguucgcccaggucaagcagaucuacaagacgcccccgaucaaggacuucggcggguucaacuucagccagauccugcccgaccccuccaagcccagcaagcgguccuucaucgaggaccuccuguucaacaaggugacccuggccgacgccggcuucaucaagcaguacggcgacugccucggggacaucgcggcccgcgaccugaucugcgcccagaaguucaacggccugaccgugcucccgccccugcugaccgacgagaugaucgcccaguacaccagcgcccuccuggcggggaccaucacguccggcuggaccuucggggccggcgccgcccugcagauccccuucgcgaugcagauggccuaccgguucaacggcaucggggucacccagaacgugcucuacgagaaccagaagcugaucgccaaccaguucaacagcgccaucggcaagauccaggacucccugagcuccaccgccagcgcgcucgggaagcugcaggacguggucaaccagaacgcccaggcccugaacacgcucgugaagcagcuguccagcaacuucggcgccaucuccagcgugcugaacgacauccucucccgccuggacaaggucgaggccgaggugcagaucgaccggcugaucaccgggcgccuccagagccugcagaccuacgugacccagcagcugauccgggcggccgagauccgcgccagcgccaaccucgccgcgaccaagauguccgagugcguccugggccagagcaagcggguggacuucugcggcaagggguaccaccugauguccuucccccagagcgccccgcacggcguggucuuccuccacgugacguacgucugcgcccaggagaagaacuucaccaccgcccccgcgaucugccacgacgggaaggcccacuucccccgcgagggcguguucguguccaacgggacccacugguucgucacgcagcggaacuucuacgagccgcagaucaucaccaccgacaacaccuucgugagcggcaacugcgacguggucaucggcaucgugaacaacacgguguacgacccccugcagcccgagcuggacuccuucaaggaggagcucgacaaguacuucaagaaccacaccagccccgacgucgaccugggggacaucuccggcaucaacgccagcguggugaacauccagaaggagaucgaccgccugaacgaggucgccaagaaccucaacgagucccugaucgaccugcaggagcucgggaaguacgagcaguacaucaagggcgggggcgggagcgacaucaucaagcuccugaacgagcaggucaacaaggagaugcaguccagcaaccuguacauguccaugagcuccuggugcuacacccacagccucgacggcgccgggcuguuccuguucgaccacgccgcggaggaguacgagcacgccaagaagcucaucaucuuccugaacgagaacaacgugcccgugcagcugaccuccaucagcgccccggagcacaaguucgagggccucacgcagaucuuccagaaggccuacgagcacgagcagcacaucuccgagagcaucaacaacaucguggaccacgccaucaaguccaaggaccacgcgaccuucaacuuccugcagugguacgucgccgagcagcacgaggaggaggugcuguucaaggacauccucgacaagaucgagcugaucgggaacgagaaccacggccuguaccucgccgaccaguacgugaaggggaucgccaagagccgcaaguccugaggacuaguuauaagacugacuagcccgaugggccucccaacgggcccuccuccccuccuugcaccgagauuaauaaaaaaaaaaaaaaaaaaaaaaaaaaaaaaaaaaaaaaaaaaaaaaaaaaaaaaaaaaaaaaaaugcaucccccccccccccccccccccccccccccccaaaggcucuuuucagagccaccagaauu

SEQ ID NO: 12848 - RNA, 4357 nt, Artificial Sequence
  SARS-CoV-2/Wuhan/WIV05/2019__EPI_ISL_402128 spike protein mRNA gc (1-1211)(G889C_L1034C) Ferritin construct
aggagaaagcuuaccauguucguguuccugguccuccugccccuggugagcucccagugcgugaaccucaccacccgcacgcagcugccgcccgccuacaccaacagcuucacccggggcgucuacuaccccgacaagguguuccgcuccagcgugcugcacuccacccaggaccucuuccugcccuucuucagcaacgucacgugguuccacgccauccacguguccgggaccaacggcaccaagcgguucgacaacccggugcugcccuucaacgacggggucuacuucgcgagcaccgagaaguccaacaucauccgcggcuggaucuucgggacgacccucgacagcaagacccagucccugcugaucgugaacaacgccaccaacguggucaucaaggugugcgaguuccaguucugcaacgaccccuuccucggcguguacuaccacaagaacaacaagagcuggauggaguccgaguuccgggucuacagcuccgccaacaacugcacguucgaguacgugagccagcccuuccugauggaccuggagggcaagcaggggaacuucaagaaccuccgcgaguucguguucaagaacaucgacggcuacuucaagaucuacuccaagcacaccccgaucaaccugguccgggaccugccccagggguucagcgcccucgagccccugguggaccugcccaucggcaucaacaucacccgcuuccagacccuccuggcccugcaccgguccuaccucacgccgggggacagcagcuccggcuggaccgcgggcgccgccgccuacuacgugggguaccugcagccccgcaccuuccugcucaaguacaacgagaacggcaccaucacggacgcggucgacugcgcccuggacccccugagcgagaccaagugcacccucaaguccuucaccguggagaaggggaucuaccagacgagcaacuuccgggugcagcccaccgaguccaucguccgcuucccgaacaucaccaaccugugccccuucggcgagguguucaacgccacccgguucgccagcgucuacgccuggaaccgcaagcggaucuccaacugcguggcggacuacagcgugcuguacaacuccgccagcuucuccacguucaagugcuacggcgucagccccaccaagcucaacgaccugugcuucaccaacguguacgccgacuccuucgugauccgcggggacgagguccggcagaucgcccccggccagaccgggaagaucgccgacuacaacuacaagcugccggacgacuucacgggcugcgugaucgcguggaacagcaacaaccucgacuccaaggucgggggcaacuacaacuaccuguaccgccuguuccgcaagagcaaccucaagcccuucgagcgggacaucuccaccgagaucuaccaggccggcagcacccccugcaacgggguggagggcuucaacugcuacuucccccugcaguccuacggguuccagccgaccaacggcgugggguaccagcccuaccggguggucgugcugagcuucgagcuccugcacgcccccgccacggugugcggccccaagaaguccaccaaccuggucaagaacaagugcgugaacuucaacuucaacggccucaccgggaccggcgugcugaccgagagcaacaagaaguuccugccguuccagcaguucgggcgcgacaucgccgacacgaccgacgcgguccgcgacccccagacccuggagauccucgacaucacccccugcagcuucggcgggguguccgugaucacgccgggcaccaacaccagcaaccaggucgccgugcuguaccaggacgugaacugcaccgagguccccguggccauccacgccgaccagcugacgcccaccuggcggguguacuccaccggcagcaacgucuuccagacccgcgccgggugccucaucggcgcggagcacgugaacaacuccuacgagugcgacauccccaucggggccggcaucugcgccagcuaccagacgcagaccaacuccccgcggcgcgcccggagcguggcgucccagagcaucaucgccuacaccaugucccugggcgccgagaacagcgucgccuacuccaacaacagcaucgccauccccaccaacuucacgaucuccgugaccaccgagauccugcccgugagcaugaccaagacgagcgucgacugcaccauguacaucugcggggacuccaccgagugcagcaaccuccugcugcaguacggcuccuucugcacccagcucaaccgcgcgcugacggggaucgccguggagcaggacaagaacacccaggagguguucgcccaggucaagcagaucuacaagacgcccccgaucaaggacuucggcggguucaacuucagccagauccugcccgaccccuccaagcccagcaagcgguccuucaucgaggaccuccuguucaacaaggugacccuggccgacgccggcuucaucaagcaguacggcgacugccucggggacaucgcggcccgcgaccugaucugcgcccagaaguucaacggccugaccgugcucccgccccugcugaccgacgagaugaucgcccaguacaccagcgcccuccuggcggggaccaucacguccggcuggaccuucugcgccggcgccgcccugcagauccccuucgcgaugcagauggccuaccgguucaacggcaucggggucacccagaacgugcucuacgagaaccagaagcugaucgccaaccaguucaacagcgccaucggcaagauccaggacucccugagcuccaccgccagcgcgcucgggaagcugcaggacguggucaaccagaacgcccaggcccugaacacgcucgugaagcagcuguccagcaacuucggcgccaucuccagcgugcugaacgacauccucucccgccuggacaaggucgaggccgaggugcagaucgaccggcugaucaccgggcgccuccagagccugcagaccuacgugacccagcagcugauccgggcggccgagauccgcgccagcgccaaccucgccgcgaccaagauguccgagugcgucugcggccagagcaagcggguggacuucugcggcaagggguaccaccugauguccuucccccagagcgccccgcacggcguggucuuccuccacgugacguacguccccgcccaggagaagaacuucaccaccgcccccgcgaucugccacgacgggaaggcccacuucccccgcgagggcguguucguguccaacgggacccacugguucgucacgcagcggaacuucuacgagccgcagaucaucaccaccgacaacaccuucgugagcggcaacugcgacguggucaucggcaucgugaacaacacgguguacgacccccugcagcccgagcuggacuccuucaaggaggagcucgacaaguacuucaagaaccacaccagccccgacgucgaccugggggacaucuccggcaucaacgccagcguggugaacauccagaaggagaucgaccgccugaacgaggucgccaagaaccucaacgagucccugaucgaccugcaggagcucgggaaguacgagcaguacaucaagggcgggggcgggagcgacaucaucaagcuccugaacgagcaggucaacaaggagaugcaguccagcaaccuguacauguccaugagcuccuggugcuacacccacagccucgacggcgccgggcuguuccuguucgaccacgccgcggaggaguacgagcacgccaagaagcucaucaucuuccugaacgagaacaacgugcccgugcagcugaccuccaucagcgccccggagcacaaguucgagggccucacgcagaucuuccagaaggccuacgagcacgagcagcacaucuccgagagcaucaacaacaucguggaccacgccaucaaguccaaggaccacgcgaccuucaacuuccugcagugguacgucgccgagcagcacgaggaggaggugcuguucaaggacauccucgacaagaucgagcugaucgggaacgagaaccacggccuguaccucgccgaccaguacgugaaggggaucgccaagagccgcaaguccugaggacuaguuauaagacugacuagcccgaugggccucccaacgggcccuccuccccuccuugcaccgagauuaauaaaaaaaaaaaaaaaaaaaaaaaaaaaaaaaaaaaaaaaaaaaaaaaaaaaaaaaaaaaaaaaaugcaucccccccccccccccccccccccccccccccaaaggcucuuuucagagccaccagaauu

SEQ ID NO: 12849 - RNA, 4357 nt, Artificial Sequence
  SARS-CoV-2/Wuhan/WIV05/2019__EPI_ISL_402128 spike protein mRNA gc (1-1211)(I909C_Y1047C) Ferritin construct
aggagaaagcuuaccauguucguguuccugguccuccugccccuggugagcucccagugcgugaaccucaccacccgcacgcagcugccgcccgccuacaccaacagcuucacccggggcgucuacuaccccgacaagguguuccgcuccagcgugcugcacuccacccaggaccucuuccugcccuucuucagcaacgucacgugguuccacgccauccacguguccgggaccaacggcaccaagcgguucgacaacccggugcugcccuucaacgacggggucuacuucgcgagcaccgagaaguccaacaucauccgcggcuggaucuucgggacgacccucgacagcaagacccagucccugcugaucgugaacaacgccaccaacguggucaucaaggugugcgaguuccaguucugcaacgaccccuuccucggcguguacuaccacaagaacaacaagagcuggauggaguccgaguuccgggucuacagcuccgccaacaacugcacguucgaguacgugagccagcccuuccugauggaccuggagggcaagcaggggaacuucaagaaccuccgcgaguucguguucaagaacaucgacggcuacuucaagaucuacuccaagcacaccccgaucaaccugguccgggaccugccccagggguucagcgcccucgagccccugguggaccugcccaucggcaucaacaucacccgcuuccagacccuccuggcccugcaccgguccuaccucacgccgggggacagcagcuccggcuggaccgcgggcgccgccgccuacuacgugggguaccugcagccccgcaccuuccugcucaaguacaacgagaacggcaccaucacggacgcggucgacugcgcccuggacccccugagcgagaccaagugcacccucaaguccuucaccguggagaaggggaucuaccagacgagcaacuuccgggugcagcccaccgaguccaucguccgcuucccgaacaucaccaaccugugccccuucggcgagguguucaacgccacccgguucgccagcgucuacgccuggaaccgcaagcggaucuccaacugcguggcggacuacagcgugcuguacaacuccgccagcuucuccacguucaagugcuacggcgucagccccaccaagcucaacgaccugugcuucaccaacguguacgccgacuccuucgugauccgcggggacgagguccggcagaucgcccccggccagaccgggaagaucgccgacuacaacuacaagcugccggacgacuucacgggcugcgugaucgcguggaacagcaacaaccucgacuccaaggucgggggcaacuacaacuaccuguaccgccuguuccgcaagagcaaccucaagcccuucgagcgggacaucuccaccgagaucuaccaggccggcagcacccccugcaacgggguggagggcuucaacugcuacuucccccugcaguccuacggguuccagccgaccaacggcgugggguaccagcccuaccggguggucgugcugagcuucgagcuccugcacgcccccgccacggugugcggccccaagaaguccaccaaccuggucaagaacaagugcgugaacuucaacuucaacggccucaccgggaccggcgugcugaccgagagcaacaagaaguuccugccguuccagcaguucgggcgcgacaucgccgacacgaccgacgcgguccgcgacccccagacccuggagauccucgacaucacccccugcagcuucggcgggguguccgugaucacgccgggcaccaacaccagcaaccaggucgccgugcuguaccaggacgugaacugcaccgagguccccguggccauccacgccgaccagcugacgcccaccuggcggguguacuccaccggcagcaacgucuuccagacccgcgccgggugccucaucggcgcggagcacgugaacaacuccuacgagugcgacauccccaucggggccggcaucugcgccagcuaccagacgcagaccaacuccccgcggcgcgcccggagcguggcgucccagagcaucaucgccuacaccaugucccugggcgccgagaacagcgucgccuacuccaacaacagcaucgccauccccaccaacuucacgaucuccgugaccaccgagauccugcccgugagcaugaccaagacgagcgucgacugcaccauguacaucugcggggacuccaccgagugcagcaaccuccugcugcaguacggcuccuucugcacccagcucaaccgcgcgcugacggggaucgccguggagcaggacaagaacacccaggagguguucgcccaggucaagcagaucuacaagacgcccccgaucaaggacuucggcggguucaacuucagccagauccugcccgaccccuccaagcccagcaagcgguccuucaucgaggaccuccuguucaacaaggugacccuggccgacgccggcuucaucaagcaguacggcgacugccucggggacaucgcggcccgcgaccugaucugcgcccagaaguucaacggccugaccgugcucccgccccugcugaccgacgagaugaucgcccaguacaccagcgcccuccuggcggggaccaucacguccggcuggaccuucggggccggcgccgcccugcagauccccuucgcgaugcagauggccuaccgguucaacggcugcggggucacccagaacgugcucuacgagaaccagaagcugaucgccaaccaguucaacagcgccaucggcaagauccaggacucccugagcuccaccgccagcgcgcucgggaagcugcaggacguggucaaccagaacgcccaggcccugaacacgcucgugaagcagcuguccagcaacuucggcgccaucuccagcgugcugaacgacauccucucccgccuggacaaggucgaggccgaggugcagaucgaccggcugaucaccgggcgccuccagagccugcagaccuacgugacccagcagcugauccgggcggccgagauccgcgccagcgccaaccucgccgcgaccaagauguccgagugcguccugggccagagcaagcggguggacuucugcggcaaggggugccaccugauguccuucccccagagcgccccgcacggcguggucuuccuccacgugacguacguccccgcccaggagaagaacuucaccaccgcccccgcgaucugccacgacgggaaggcccacuucccccgcgagggcguguucguguccaacgggacccacugguucgucacgcagcggaacuucuacgagccgcagaucaucaccaccgacaacaccuucgugagcggcaacugcgacguggucaucggcaucgugaacaacacgguguacgacccccugcagcccgagcuggacuccuucaaggaggagcucgacaaguacuucaagaaccacaccagccccgacgucgaccugggggacaucuccggcaucaacgccagcguggugaacauccagaaggagaucgaccgccugaacgaggucgccaagaaccucaacgagucccugaucgaccugcaggagcucgggaaguacgagcaguacaucaagggcgggggcgggagcgacaucaucaagcuccugaacgagcaggucaacaaggagaugcaguccagcaaccuguacauguccaugagcuccuggugcuacacccacagccucgacggcgccgggcuguuccuguucgaccacgccgcggaggaguacgagcacgccaagaagcucaucaucuuccugaacgagaacaacgugcccgugcagcugaccuccaucagcgccccggagcacaaguucgagggccucacgcagaucuuccagaaggccuacgagcacgagcagcacaucuccgagagcaucaacaacaucguggaccacgccaucaaguccaaggaccacgcgaccuucaacuuccugcagugguacgucgccgagcagcacgaggaggaggugcuguucaaggacauccucgacaagaucgagcugaucgggaacgagaaccacggccuguaccucgccgaccaguacgugaaggggaucgccaagagccgcaaguccugaggacuaguuauaagacugacuagcccgaugggccucccaacgggcccuccuccccuccuugcaccgagauuaauaaaaaaaaaaaaaaaaaaaaaaaaaaaaaaaaaaaaaaaaaaaaaaaaaaaaaaaaaaaaaaaaugcaucccccccccccccccccccccccccccccccaaaggcucuuuucagagccaccagaauu

SEQ ID NO: 12850 - RNA, 4357 nt, Artificial Sequence
  SARS-CoV-2/Wuhan/WIV05/2019__EPI_ISL_402128 spike protein mRNA gc (1-1211)(Q965C_S1003C) Ferritin construct
aggagaaagcuuaccauguucguguuccugguccuccugccccuggugagcucccagugcgugaaccucaccacccgcacgcagcugccgcccgccuacaccaacagcuucacccggggcgucuacuaccccgacaagguguuccgcuccagcgugcugcacuccacccaggaccucuuccugcccuucuucagcaacgucacgugguuccacgccauccacguguccgggaccaacggcaccaagcgguucgacaacccggugcugcccuucaacgacggggucuacuucgcgagcaccgagaaguccaacaucauccgcggcuggaucuucgggacgacccucgacagcaagacccagucccugcugaucgugaacaacgccaccaacguggucaucaaggugugcgaguuccaguucugcaacgaccccuuccucggcguguacuaccacaagaacaacaagagcuggauggaguccgaguuccgggucuacagcuccgccaacaacugcacguucgaguacgugagccagcccuuccugauggaccuggagggcaagcaggggaacuucaagaaccuccgcgaguucguguucaagaacaucgacggcuacuucaagaucuacuccaagcacaccccgaucaaccugguccgggaccugccccagggguucagcgcccucgagccccugguggaccugcccaucggcaucaacaucacccgcuuccagacccuccuggcccugcaccgguccuaccucacgccgggggacagcagcuccggcuggaccgcgggcgccgccgccuacuacgugggguaccugcagccccgcaccuuccugcucaaguacaacgagaacggcaccaucacggacgcggucgacugcgcccuggacccccugagcgagaccaagugcacccucaaguccuucaccguggagaaggggaucuaccagacgagcaacuuccgggugcagcccaccgaguccaucguccgcuucccgaacaucaccaaccugugccccuucggcgagguguucaacgccacccgguucgccagcgucuacgccuggaaccgcaagcggaucuccaacugcguggcggacuacagcgugcuguacaacuccgccagcuucuccacguucaagugcuacggcgucagccccaccaagcucaacgaccugugcuucaccaacguguacgccgacuccuucgugauccgcggggacgagguccggcagaucgcccccggccagaccgggaagaucgccgacuacaacuacaagcugccggacgacuucacgggcugcgugaucgcguggaacagcaacaaccucgacuccaaggucgggggcaacuacaacuaccuguaccgccuguuccgcaagagcaaccucaagcccuucgagcgggacaucuccaccgagaucuaccaggccggcagcacccccugcaacgggguggagggcuucaacugcuacuucccccugcaguccuacggguuccagccgaccaacggcgugggguaccagcccuaccggguggucgugcugagcuucgagcuccugcacgcccccgccacggugugcggccccaagaaguccaccaaccuggucaagaacaagugcgugaacuucaacuucaacggccucaccgggaccggcgugcugaccgagagcaacaagaaguuccugccguuccagcaguucgggcgcgacaucgccgacacgaccgacgcgguccgcgacccccagacccuggagauccucgacaucacccccugcagcuucggcgggguguccgugaucacgccgggcaccaacaccagcaaccaggucgccgugcuguaccaggacgugaacugcaccgagguccccguggccauccacgccgaccagcugacgcccaccuggcggguguacuccaccggcagcaacgucuuccagacccgcgccgggugccucaucggcgcggagcacgugaacaacuccuacgagugcgacauccccaucggggccggcaucugcgccagcuaccagacgcagaccaacuccccgcggcgcgcccggagcguggcgucccagagcaucaucgccuacaccaugucccugggcgccgagaacagcgucgccuacuccaacaacagcaucgccauccccaccaacuucacgaucuccgugaccaccgagauccugcccgugagcaugaccaagacgagcgucgacugcaccauguacaucugcggggacuccaccgagugcagcaaccuccugcugcaguacggcuccuucugcacccagcucaaccgcgcgcugacggggaucgccguggagcaggacaagaacacccaggagguguucgcccaggucaagcagaucuacaagacgcccccgaucaaggacuucggcggguucaacuucagccagauccugcccgaccccuccaagcccagcaagcgguccuucaucgaggaccuccuguucaacaaggugacccuggccgacgccggcuucaucaagcaguacggcgacugccucggggacaucgcggcccgcgaccugaucugcgcccagaaguucaacggccugaccgugcucccgccccugcugaccgacgagaugaucgcccaguacaccagcgcccuccuggcggggaccaucacguccggcuggaccuucggggccggcgccgcccugcagauccccuucgcgaugcagauggccuaccgguucaacggcaucggggucacccagaacgugcucuacgagaaccagaagcugaucgccaaccaguucaacagcgccaucggcaagauccaggacucccugagcuccaccgccagcgcgcucgggaagcugcaggacguggucaaccagaacgcccaggcccugaacacgcucgugaagugccuguccagcaacuucggcgccaucuccagcgugcugaacgacauccucucccgccuggacaaggucgaggccgaggugcagaucgaccggcugaucaccgggcgccuccagugccugcagaccuacgugacccagcagcugauccgggcggccgagauccgcgccagcgccaaccucgccgcgaccaagauguccgagugcguccugggccagagcaagcggguggacuucugcggcaagggguaccaccugauguccuucccccagagcgccccgcacggcguggucuuccuccacgugacguacguccccgcccaggagaagaacuucaccaccgcccccgcgaucugccacgacgggaaggcccacuucccccgcgagggcguguucguguccaacgggacccacugguucgucacgcagcggaacuucuacgagccgcagaucaucaccaccgacaacaccuucgugagcggcaacugcgacguggucaucggcaucgugaacaacacgguguacgacccccugcagcccgagcuggacuccuucaaggaggagcucgacaaguacuucaagaaccacaccagccccgacgucgaccugggggacaucuccggcaucaacgccagcguggugaacauccagaaggagaucgaccgccugaacgaggucgccaagaaccucaacgagucccugaucgaccugcaggagcucgggaaguacgagcaguacaucaagggcgggggcgggagcgacaucaucaagcuccugaacgagcaggucaacaaggagaugcaguccagcaaccuguacauguccaugagcuccuggugcuacacccacagccucgacggcgccgggcuguuccuguucgaccacgccgcggaggaguacgagcacgccaagaagcucaucaucuuccugaacgagaacaacgugcccgugcagcugaccuccaucagcgccccggagcacaaguucgagggccucacgcagaucuuccagaaggccuacgagcacgagcagcacaucuccgagagcaucaacaacaucguggaccacgccaucaaguccaaggaccacgcgaccuucaacuuccugcagugguacgucgccgagcagcacgaggaggaggugcuguucaaggacauccucgacaagaucgagcugaucgggaacgagaaccacggccuguaccucgccgaccaguacgugaaggggaucgccaagagccgcaaguccugaggacuaguuauaagacugacuagcccgaugggccucccaacgggcccuccuccccuccuugcaccgagauuaauaaaaaaaaaaaaaaaaaaaaaaaaaaaaaaaaaaaaaaaaaaaaaaaaaaaaaaaaaaaaaaaaugcaucccccccccccccccccccccccccccccccaaaggcucuuuucagagccaccagaauu

SEQ ID NO: 12851 - RNA, 4357 nt, Artificial Sequence
  SARS-CoV-2/Wuhan/WIV05/2019__EPI_ISL_402128 spike protein mRNA gc (1-1211)(F970C_G999C) Ferritin construct
aggagaaagcuuaccauguucguguuccugguccuccugccccuggugagcucccagugcgugaaccucaccacccgcacgcagcugccgcccgccuacaccaacagcuucacccggggcgucuacuaccccgacaagguguuccgcuccagcgugcugcacuccacccaggaccucuuccugcccuucuucagcaacgucacgugguuccacgccauccacguguccgggaccaacggcaccaagcgguucgacaacccggugcugcccuucaacgacggggucuacuucgcgagcaccgagaaguccaacaucauccgcggcuggaucuucgggacgacccucgacagcaagacccagucccugcugaucgugaacaacgccaccaacguggucaucaaggugugcgaguuccaguucugcaacgaccccuuccucggcguguacuaccacaagaacaacaagagcuggauggaguccgaguuccgggucuacagcuccgccaacaacugcacguucgaguacgugagccagcccuuccugauggaccuggagggcaagcaggggaacuucaagaaccuccgcgaguucguguucaagaacaucgacggcuacuucaagaucuacuccaagcacaccccgaucaaccugguccgggaccugccccagggguucagcgcccucgagccccugguggaccugcccaucggcaucaacaucacccgcuuccagacccuccuggcccugcaccgguccuaccucacgccgggggacagcagcuccggcuggaccgcgggcgccgccgccuacuacgugggguaccugcagccccgcaccuuccugcucaaguacaacgagaacggcaccaucacggacgcggucgacugcgcccuggacccccugagcgagaccaagugcacccucaaguccuucaccguggagaaggggaucuaccagacgagcaacuuccgggugcagcccaccgaguccaucguccgcuucccgaacaucaccaaccugugccccuucggcgagguguucaacgccacccgguucgccagcgucuacgccuggaaccgcaagcggaucuccaacugcguggcggacuacagcgugcuguacaacuccgccagcuucuccacguucaagugcuacggcgucagccccaccaagcucaacgaccugugcuucaccaacguguacgccgacuccuucgugauccgcggggacgagguccggcagaucgcccccggccagaccgggaagaucgccgacuacaacuacaagcugccggacgacuucacgggcugcgugaucgcguggaacagcaacaaccucgacuccaaggucgggggcaacuacaacuaccuguaccgccuguuccgcaagagcaaccucaagcccuucgagcgggacaucuccaccgagaucuaccaggccggcagcacccccugcaacgggguggagggcuucaacugcuacuucccccugcaguccuacggguuccagccgaccaacggcgugggguaccagcccuaccggguggucgugcugagcuucgagcuccugcacgcccccgccacggugugcggccccaagaaguccaccaaccuggucaagaacaagugcgugaacuucaacuucaacggccucaccgggaccggcgugcugaccgagagcaacaagaaguuccugccguuccagcaguucgggcgcgacaucgccgacacgaccgacgcgguccgcgacccccagacccuggagauccucgacaucacccccugcagcuucggcgggguguccgugaucacgccgggcaccaacaccagcaaccaggucgccgugcuguaccaggacgugaacugcaccgagguccccguggccauccacgccgaccagcugacgcccaccuggcggguguacuccaccggcagcaacgucuuccagacccgcgccgggugccucaucggcgcggagcacgugaacaacuccuacgagugcgacauccccaucggggccggcaucugcgccagcuaccagacgcagaccaacuccccgcggcgcgcccggagcguggcgucccagagcaucaucgccuacaccaugucccugggcgccgagaacagcgucgccuacuccaacaacagcaucgccauccccaccaacuucacgaucuccgugaccaccgagauccugcccgugagcaugaccaagacgagcgucgacugcaccauguacaucugcggggacuccaccgagugcagcaaccuccugcugcaguacggcuccuucugcacccagcucaaccgcgcgcugacggggaucgccguggagcaggacaagaacacccaggagguguucgcccaggucaagcagaucuacaagacgcccccgaucaaggacuucggcggguucaacuucagccagauccugcccgaccccuccaagcccagcaagcgguccuucaucgaggaccuccuguucaacaaggugacccuggccgacgccggcuucaucaagcaguacggcgacugccucggggacaucgcggcccgcgaccugaucugcgcccagaaguucaacggccugaccgugcucccgccccugcugaccgacgagaugaucgcccaguacaccagcgcccuccuggcggggaccaucacguccggcuggaccuucggggccggcgccgcccugcagauccccuucgcgaugcagauggccuaccgguucaacggcaucggggucacccagaacgugcucuacgagaaccagaagcugaucgccaaccaguucaacagcgccaucggcaagauccaggacucccugagcuccaccgccagcgcgcucgggaagcugcaggacguggucaaccagaacgcccaggcccugaacacgcucgugaagcagcuguccagcaacugcggcgccaucuccagcgugcugaacgacauccucucccgccuggacaaggucgaggccgaggugcagaucgaccggcugaucaccugucgccuccagagccugcagaccuacgugacccagcagcugauccgggcggccgagauccgcgccagcgccaaccucgccgcgaccaagauguccgagugcguccugggccagagcaagcggguggacuucugcggcaagggguaccaccugauguccuucccccagagcgccccgcacggcguggucuuccuccacgugacguacguccccgcccaggagaagaacuucaccaccgcccccgcgaucugccacgacgggaaggcccacuucccccgcgagggcguguucguguccaacgggacccacugguucgucacgcagcggaacuucuacgagccgcagaucaucaccaccgacaacaccuucgugagcggcaacugcgacguggucaucggcaucgugaacaacacgguguacgacccccugcagcccgagcuggacuccuucaaggaggagcucgacaaguacuucaagaaccacaccagccccgacgucgaccugggggacaucuccggcaucaacgccagcguggugaacauccagaaggagaucgaccgccugaacgaggucgccaagaaccucaacgagucccugaucgaccugcaggagcucgggaaguacgagcaguacaucaagggcgggggcgggagcgacaucaucaagcuccugaacgagcaggucaacaaggagaugcaguccagcaaccuguacauguccaugagcuccuggugcuacacccacagccucgacggcgccgggcuguuccuguucgaccacgccgcggaggaguacgagcacgccaagaagcucaucaucuuccugaacgagaacaacgugcccgugcagcugaccuccaucagcgccccggagcacaaguucgagggccucacgcagaucuuccagaaggccuacgagcacgagcagcacaucuccgagagcaucaacaacaucguggaccacgccaucaaguccaaggaccacgcgaccuucaacuuccugcagugguacgucgccgagcagcacgaggaggaggugcuguucaaggacauccucgacaagaucgagcugaucgggaacgagaaccacggccuguaccucgccgaccaguacgugaaggggaucgccaagagccgcaaguccugaggacuaguuauaagacugacuagcccgaugggccucccaacgggcccuccuccccuccuugcaccgagauuaauaaaaaaaaaaaaaaaaaaaaaaaaaaaaaaaaaaaaaaaaaaaaaaaaaaaaaaaaaaaaaaaaugcaucccccccccccccccccccccccccccccccaaaggcucuuuucagagccaccagaauu

SEQ ID NO: 12852 - RNA, 4357 nt, Artificial Sequence
  SARS-CoV-2/Wuhan/WIV05/2019__EPI_ISL_402128 spike protein mRNA gc (1-1211)(A972C_R995C) Ferritin construct
aggagaaagcuuaccauguucguguuccugguccuccugccccuggugagcucccagugcgugaaccucaccacccgcacgcagcugccgcccgccuacaccaacagcuucacccggggcgucuacuaccccgacaagguguuccgcuccagcgugcugcacuccacccaggaccucuuccugcccuucuucagcaacgucacgugguuccacgccauccacguguccgggaccaacggcaccaagcgguucgacaacccggugcugcccuucaacgacggggucuacuucgcgagcaccgagaaguccaacaucauccgcggcuggaucuucgggacgacccucgacagcaagacccagucccugcugaucgugaacaacgccaccaacguggucaucaaggugugcgaguuccaguucugcaacgaccccuuccucggcguguacuaccacaagaacaacaagagcuggauggaguccgaguuccgggucuacagcuccgccaacaacugcacguucgaguacgugagccagcccuuccugauggaccuggagggcaagcaggggaacuucaagaaccuccgcgaguucguguucaagaacaucgacggcuacuucaagaucuacuccaagcacaccccgaucaaccugguccgggaccugccccagggguucagcgcccucgagccccugguggaccugcccaucggcaucaacaucacccgcuuccagacccuccuggcccugcaccgguccuaccucacgccgggggacagcagcuccggcuggaccgcgggcgccgccgccuacuacgugggguaccugcagccccgcaccuuccugcucaaguacaacgagaacggcaccaucacggacgcggucgacugcgcccuggacccccugagcgagaccaagugcacccucaaguccuucaccguggagaaggggaucuaccagacgagcaacuuccgggugcagcccaccgaguccaucguccgcuucccgaacaucaccaaccugugccccuucggcgagguguucaacgccacccgguucgccagcgucuacgccuggaaccgcaagcggaucuccaacugcguggcggacuacagcgugcuguacaacuccgccagcuucuccacguucaagugcuacggcgucagccccaccaagcucaacgaccugugcuucaccaacguguacgccgacuccuucgugauccgcggggacgagguccggcagaucgcccccggccagaccgggaagaucgccgacuacaacuacaagcugccggacgacuucacgggcugcgugaucgcguggaacagcaacaaccucgacuccaaggucgggggcaacuacaacuaccuguaccgccuguuccgcaagagcaaccucaagcccuucgagcgggacaucuccaccgagaucuaccaggccggcagcacccccugcaacgggguggagggcuucaacugcuacuucccccugcaguccuacggguuccagccgaccaacggcgugggguaccagcccuaccggguggucgugcugagcuucgagcuccugcacgcccccgccacggugugcggccccaagaaguccaccaaccuggucaagaacaagugcgugaacuucaacuucaacggccucaccgggaccggcgugcugaccgagagcaacaagaaguuccugccguuccagcaguucgggcgcgacaucgccgacacgaccgacgcgguccgcgacccccagacccuggagauccucgacaucacccccugcagcuucggcgggguguccgugaucacgccgggcaccaacaccagcaaccaggucgccgugcuguaccaggacgugaacugcaccgagguccccguggccauccacgccgaccagcugacgcccaccuggcggguguacuccaccggcagcaacgucuuccagacccgcgccgggugccucaucggcgcggagcacgugaacaacuccuacgagugcgacauccccaucggggccggcaucugcgccagcuaccagacgcagaccaacuccccgcggcgcgcccggagcguggcgucccagagcaucaucgccuacaccaugucccugggcgccgagaacagcgucgccuacuccaacaacagcaucgccauccccaccaacuucacgaucuccgugaccaccgagauccugcccgugagcaugaccaagacgagcgucgacugcaccauguacaucugcggggacuccaccgagugcagcaaccuccugcugcaguacggcuccuucugcacccagcucaaccgcgcgcugacggggaucgccguggagcaggacaagaacacccaggagguguucgcccaggucaagcagaucuacaagacgcccccgaucaaggacuucggcggguucaacuucagccagauccugcccgaccccuccaagcccagcaagcgguccuucaucgaggaccuccuguucaacaaggugacccuggccgacgccggcuucaucaagcaguacggcgacugccucggggacaucgcggcccgcgaccugaucugcgcccagaaguucaacggccugaccgugcucccgccccugcugaccgacgagaugaucgcccaguacaccagcgcccuccuggcggggaccaucacguccggcuggaccuucggggccggcgccgcccugcagauccccuucgcgaugcagauggccuaccgguucaacggcaucggggucacccagaacgugcucuacgagaaccagaagcugaucgccaaccaguucaacagcgccaucggcaagauccaggacucccugagcuccaccgccagcgcgcucgggaagcugcaggacguggucaaccagaacgcccaggcccugaacacgcucgugaagcagcuguccagcaacuucggcugcaucuccagcgugcugaacgacauccucucccgccuggacaaggucgaggccgaggugcagaucgacugccugaucaccgggcgccuccagagccugcagaccuacgugacccagcagcugauccgggcggccgagauccgcgccagcgccaaccucgccgcgaccaagauguccgagugcguccugggccagagcaagcggguggacuucugcggcaagggguaccaccugauguccuucccccagagcgccccgcacggcguggucuuccuccacgugacguacguccccgcccaggagaagaacuucaccaccgcccccgcgaucugccacgacgggaaggcccacuucccccgcgagggcguguucguguccaacgggacccacugguucgucacgcagcggaacuucuacgagccgcagaucaucaccaccgacaacaccuucgugagcggcaacugcgacguggucaucggcaucgugaacaacacgguguacgacccccugcagcccgagcuggacuccuucaaggaggagcucgacaaguacuucaagaaccacaccagccccgacgucgaccugggggacaucuccggcaucaacgccagcguggugaacauccagaaggagaucgaccgccugaacgaggucgccaagaaccucaacgagucccugaucgaccugcaggagcucgggaaguacgagcaguacaucaagggcgggggcgggagcgacaucaucaagcuccugaacgagcaggucaacaaggagaugcaguccagcaaccuguacauguccaugagcuccuggugcuacacccacagccucgacggcgccgggcuguuccuguucgaccacgccgcggaggaguacgagcacgccaagaagcucaucaucuuccugaacgagaacaacgugcccgugcagcugaccuccaucagcgccccggagcacaaguucgagggccucacgcagaucuuccagaaggccuacgagcacgagcagcacaucuccgagagcaucaacaacaucguggaccacgccaucaaguccaaggaccacgcgaccuucaacuuccugcagugguacgucgccgagcagcacgaggaggaggugcuguucaaggacauccucgacaagaucgagcugaucgggaacgagaaccacggccuguaccucgccgaccaguacgugaaggggaucgccaagagccgcaaguccugaggacuaguuauaagacugacuagcccgaugggccucccaacgggcccuccuccccuccuugcaccgagauuaauaaaaaaaaaaaaaaaaaaaaaaaaaaaaaaaaaaaaaaaaaaaaaaaaaaaaaaaaaaaaaaaaugcaucccccccccccccccccccccccccccccccaaaggcucuuuucagagccaccagaauu

SEQ ID NO: 12853 - RNA, 4357 nt, Artificial Sequence
  SARS-CoV-2/Wuhan/WIV05/2019__EPI_ISL_402128 spike protein mRNA gc (1-1211)(A890C_V1040C) Ferritin construct
aggagaaagcuuaccauguucguguuccugguccuccugccccuggugagcucccagugcgugaaccucaccacccgcacgcagcugccgcccgccuacaccaacagcuucacccggggcgucuacuaccccgacaagguguuccgcuccagcgugcugcacuccacccaggaccucuuccugcccuucuucagcaacgucacgugguuccacgccauccacguguccgggaccaacggcaccaagcgguucgacaacccggugcugcccuucaacgacggggucuacuucgcgagcaccgagaaguccaacaucauccgcggcuggaucuucgggacgacccucgacagcaagacccagucccugcugaucgugaacaacgccaccaacguggucaucaaggugugcgaguuccaguucugcaacgaccccuuccucggcguguacuaccacaagaacaacaagagcuggauggaguccgaguuccgggucuacagcuccgccaacaacugcacguucgaguacgugagccagcccuuccugauggaccuggagggcaagcaggggaacuucaagaaccuccgcgaguucguguucaagaacaucgacggcuacuucaagaucuacuccaagcacaccccgaucaaccugguccgggaccugccccagggguucagcgcccucgagccccugguggaccugcccaucggcaucaacaucacccgcuuccagacccuccuggcccugcaccgguccuaccucacgccgggggacagcagcuccggcuggaccgcgggcgccgccgccuacuacgugggguaccugcagccccgcaccuuccugcucaaguacaacgagaacggcaccaucacggacgcggucgacugcgcccuggacccccugagcgagaccaagugcacccucaaguccuucaccguggagaaggggaucuaccagacgagcaacuuccgggugcagcccaccgaguccaucguccgcuucccgaacaucaccaaccugugccccuucggcgagguguucaacgccacccgguucgccagcgucuacgccuggaaccgcaagcggaucuccaacugcguggcggacuacagcgugcuguacaacuccgccagcuucuccacguucaagugcuacggcgucagccccaccaagcucaacgaccugugcuucaccaacguguacgccgacuccuucgugauccgcggggacgagguccggcagaucgcccccggccagaccgggaagaucgccgacuacaacuacaagcugccggacgacuucacgggcugcgugaucgcguggaacagcaacaaccucgacuccaaggucgggggcaacuacaacuaccuguaccgccuguuccgcaagagcaaccucaagcccuucgagcgggacaucuccaccgagaucuaccaggccggcagcacccccugcaacgggguggagggcuucaacugcuacuucccccugcaguccuacggguuccagccgaccaacggcgugggguaccagcccuaccggguggucgugcugagcuucgagcuccugcacgcccccgccacggugugcggccccaagaaguccaccaaccuggucaagaacaagugcgugaacuucaacuucaacggccucaccgggaccggcgugcugaccgagagcaacaagaaguuccugccguuccagcaguucgggcgcgacaucgccgacacgaccgacgcgguccgcgacccccagacccuggagauccucgacaucacccccugcagcuucggcgggguguccgugaucacgccgggcaccaacaccagcaaccaggucgccgugcuguaccaggacgugaacugcaccgagguccccguggccauccacgccgaccagcugacgcccaccuggcggguguacuccaccggcagcaacgucuuccagacccgcgccgggugccucaucggcgcggagcacgugaacaacuccuacgagugcgacauccccaucggggccggcaucugcgccagcuaccagacgcagaccaacuccccgcggcgcgcccggagcguggcgucccagagcaucaucgccuacaccaugucccugggcgccgagaacagcgucgccuacuccaacaacagcaucgccauccccaccaacuucacgaucuccgugaccaccgagauccugcccgugagcaugaccaagacgagcgucgacugcaccauguacaucugcggggacuccaccgagugcagcaaccuccugcugcaguacggcuccuucugcacccagcucaaccgcgcgcugacggggaucgccguggagcaggacaagaacacccaggagguguucgcccaggucaagcagaucuacaagacgcccccgaucaaggacuucggcggguucaacuucagccagauccugcccgaccccuccaagcccagcaagcgguccuucaucgaggaccuccuguucaacaaggugacccuggccgacgccggcuucaucaagcaguacggcgacugccucggggacaucgcggcccgcgaccugaucugcgcccagaaguucaacggccugaccgugcucccgccccugcugaccgacgagaugaucgcccaguacaccagcgcccuccuggcggggaccaucacguccggcuggaccuucgggugcggcgccgcccugcagauccccuucgcgaugcagauggccuaccgguucaacggcaucggggucacccagaacgugcucuacgagaaccagaagcugaucgccaaccaguucaacagcgccaucggcaagauccaggacucccugagcuccaccgccagcgcgcucgggaagcugcaggacguggucaaccagaacgcccaggcccugaacacgcucgugaagcagcuguccagcaacuucggcgccaucuccagcgugcugaacgacauccucucccgccuggacaaggucgaggccgaggugcagaucgaccggcugaucaccgggcgccuccagagccugcagaccuacgugacccagcagcugauccgggcggccgagauccgcgccagcgccaaccucgccgcgaccaagauguccgagugcguccugggccagagcaagcggugcgacuucugcggcaagggguaccaccugauguccuucccccagagcgccccgcacggcguggucuuccuccacgugacguacguccccgcccaggagaagaacuucaccaccgcccccgcgaucugccacgacgggaaggcccacuucccccgcgagggcguguucguguccaacgggacccacugguucgucacgcagcggaacuucuacgagccgcagaucaucaccaccgacaacaccuucgugagcggcaacugcgacguggucaucggcaucgugaacaacacgguguacgacccccugcagcccgagcuggacuccuucaaggaggagcucgacaaguacuucaagaaccacaccagccccgacgucgaccugggggacaucuccggcaucaacgccagcguggugaacauccagaaggagaucgaccgccugaacgaggucgccaagaaccucaacgagucccugaucgaccugcaggagcucgggaaguacgagcaguacaucaagggcgggggcgggagcgacaucaucaagcuccugaacgagcaggucaacaaggagaugcaguccagcaaccuguacauguccaugagcuccuggugcuacacccacagccucgacggcgccgggcuguuccuguucgaccacgccgcggaggaguacgagcacgccaagaagcucaucaucuuccugaacgagaacaacgugcccgugcagcugaccuccaucagcgccccggagcacaaguucgagggccucacgcagaucuuccagaaggccuacgagcacgagcagcacaucuccgagagcaucaacaacaucguggaccacgccaucaaguccaaggaccacgcgaccuucaacuuccugcagugguacgucgccgagcagcacgaggaggaggugcuguucaaggacauccucgacaagaucgagcugaucgggaacgagaaccacggccuguaccucgccgaccaguacgugaaggggaucgccaagagccgcaaguccugaggacuaguuauaagacugacuagcccgaugggccucccaacgggcccuccuccccuccuugcaccgagauuaauaaaaaaaaaaaaaaaaaaaaaaaaaaaaaaaaaaaaaaaaaaaaaaaaaaaaaaaaaaaaaaaaugcaucccccccccccccccccccccccccccccccaaaggcucuuuucagagccaccagaauu

SEQ ID NO: 12854 - RNA, 4357 nt, Artificial Sequence
  SARS-CoV-2/Wuhan/WIV05/2019__EPI_ISL_402128 spike protein mRNA gc (1-1211)(T874C_S1055C) Ferritin construct
aggagaaagcuuaccauguucguguuccugguccuccugccccuggugagcucccagugcgugaaccucaccacccgcacgcagcugccgcccgccuacaccaacagcuucacccggggcgucuacuaccccgacaagguguuccgcuccagcgugcugcacuccacccaggaccucuuccugcccuucuucagcaacgucacgugguuccacgccauccacguguccgggaccaacggcaccaagcgguucgacaacccggugcugcccuucaacgacggggucuacuucgcgagcaccgagaaguccaacaucauccgcggcuggaucuucgggacgacccucgacagcaagacccagucccugcugaucgugaacaacgccaccaacguggucaucaaggugugcgaguuccaguucugcaacgaccccuuccucggcguguacuaccacaagaacaacaagagcuggauggaguccgaguuccgggucuacagcuccgccaacaacugcacguucgaguacgugagccagcccuuccugauggaccuggagggcaagcaggggaacuucaagaaccuccgcgaguucguguucaagaacaucgacggcuacuucaagaucuacuccaagcacaccccgaucaaccugguccgggaccugccccagggguucagcgcccucgagccccugguggaccugcccaucggcaucaacaucacccgcuuccagacccuccuggcccugcaccgguccuaccucacgccgggggacagcagcuccggcuggaccgcgggcgccgccgccuacuacgugggguaccugcagccccgcaccuuccugcucaaguacaacgagaacggcaccaucacggacgcggucgacugcgcccuggacccccugagcgagaccaagugcacccucaaguccuucaccguggagaaggggaucuaccagacgagcaacuuccgggugcagcccaccgaguccaucguccgcuucccgaacaucaccaaccugugccccuucggcgagguguucaacgccacccgguucgccagcgucuacgccuggaaccgcaagcggaucuccaacugcguggcggacuacagcgugcuguacaacuccgccagcuucuccacguucaagugcuacggcgucagccccaccaagcucaacgaccugugcuucaccaacguguacgccgacuccuucgugauccgcggggacgagguccggcagaucgcccccggccagaccgggaagaucgccgacuacaacuacaagcugccggacgacuucacgggcugcgugaucgcguggaacagcaacaaccucgacuccaaggucgggggcaacuacaacuaccuguaccgccuguuccgcaagagcaaccucaagcccuucgagcgggacaucuccaccgagaucuaccaggccggcagcacccccugcaacgggguggagggcuucaacugcuacuucccccugcaguccuacggguuccagccgaccaacggcgugggguaccagcccuaccggguggucgugcugagcuucgagcuccugcacgcccccgccacggugugcggccccaagaaguccaccaaccuggucaagaacaagugcgugaacuucaacuucaacggccucaccgggaccggcgugcugaccgagagcaacaagaaguuccugccguuccagcaguucgggcgcgacaucgccgacacgaccgacgcgguccgcgacccccagacccuggagauccucgacaucacccccugcagcuucggcgggguguccgugaucacgccgggcaccaacaccagcaaccaggucgccgugcuguaccaggacgugaacugcaccgagguccccguggccauccacgccgaccagcugacgcccaccuggcggguguacuccaccggcagcaacgucuuccagacccgcgccgggugccucaucggcgcggagcacgugaacaacuccuacgagugcgacauccccaucggggccggcaucugcgccagcuaccagacgcagaccaacuccccgcggcgcgcccggagcguggcgucccagagcaucaucgccuacaccaugucccugggcgccgagaacagcgucgccuacuccaacaacagcaucgccauccccaccaacuucacgaucuccgugaccaccgagauccugcccgugagcaugaccaagacgagcgucgacugcaccauguacaucugcggggacuccaccgagugcagcaaccuccugcugcaguacggcuccuucugcacccagcucaaccgcgcgcugacggggaucgccguggagcaggacaagaacacccaggagguguucgcccaggucaagcagaucuacaagacgcccccgaucaaggacuucggcggguucaacuucagccagauccugcccgaccccuccaagcccagcaagcgguccuucaucgaggaccuccuguucaacaaggugacccuggccgacgccggcuucaucaagcaguacggcgacugccucggggacaucgcggcccgcgaccugaucugcgcccagaaguucaacggccugaccgugcucccgccccugcugaccgacgagaugaucgcccaguacugcagcgcccuccuggcggggaccaucacguccggcuggaccuucggggccggcgccgcccugcagauccccuucgcgaugcagauggccuaccgguucaacggcaucggggucacccagaacgugcucuacgagaaccagaagcugaucgccaaccaguucaacagcgccaucggcaagauccaggacucccugagcuccaccgccagcgcgcucgggaagcugcaggacguggucaaccagaacgcccaggcccugaacacgcucgugaagcagcuguccagcaacuucggcgccaucuccagcgugcugaacgacauccucucccgccuggacaaggucgaggccgaggugcagaucgaccggcugaucaccgggcgccuccagagccugcagaccuacgugacccagcagcugauccgggcggccgagauccgcgccagcgccaaccucgccgcgaccaagauguccgagugcguccugggccagagcaagcggguggacuucugcggcaagggguaccaccugauguccuucccccagugcgccccgcacggcguggucuuccuccacgugacguacguccccgcccaggagaagaacuucaccaccgcccccgcgaucugccacgacgggaaggcccacuucccccgcgagggcguguucguguccaacgggacccacugguucgucacgcagcggaacuucuacgagccgcagaucaucaccaccgacaacaccuucgugagcggcaacugcgacguggucaucggcaucgugaacaacacgguguacgacccccugcagcccgagcuggacuccuucaaggaggagcucgacaaguacuucaagaaccacaccagccccgacgucgaccugggggacaucuccggcaucaacgccagcguggugaacauccagaaggagaucgaccgccugaacgaggucgccaagaaccucaacgagucccugaucgaccugcaggagcucgggaaguacgagcaguacaucaagggcgggggcgggagcgacaucaucaagcuccugaacgagcaggucaacaaggagaugcaguccagcaaccuguacauguccaugagcuccuggugcuacacccacagccucgacggcgccgggcuguuccuguucgaccacgccgcggaggaguacgagcacgccaagaagcucaucaucuuccugaacgagaacaacgugcccgugcagcugaccuccaucagcgccccggagcacaaguucgagggccucacgcagaucuuccagaaggccuacgagcacgagcagcacaucuccgagagcaucaacaacaucguggaccacgccaucaaguccaaggaccacgcgaccuucaacuuccugcagugguacgucgccgagcagcacgaggaggaggugcuguucaaggacauccucgacaagaucgagcugaucgggaacgagaaccacggccuguaccucgccgaccaguacgugaaggggaucgccaagagccgcaaguccugaggacuaguuauaagacugacuagcccgaugggccucccaacgggcccuccuccccuccuugcaccgagauuaauaaaaaaaaaaaaaaaaaaaaaaaaaaaaaaaaaaaaaaaaaaaaaaaaaaaaaaaaaaaaaaaaugcaucccccccccccccccccccccccccccccccaaaggcucuuuucagagccaccagaauu

SEQ ID NO: 12855 - RNA, 3943 nt, Artificial Sequence
  SARS-CoV-2/Wuhan/WIV05/2019__EPI_ISL_402128 spike protein mRNA gc (1-1211) Foldon construct
aggagaaagcuuaccauguucguguuccugguccuccugccccuggugagcucccagugcgugaaccucaccacccgcacgcagcugccgcccgccuacaccaacagcuucacccggggcgucuacuaccccgacaagguguuccgcuccagcgugcugcacuccacccaggaccucuuccugcccuucuucagcaacgucacgugguuccacgccauccacguguccgggaccaacggcaccaagcgguucgacaacccggugcugcccuucaacgacggggucuacuucgcgagcaccgagaaguccaacaucauccgcggcuggaucuucgggacgacccucgacagcaagacccagucccugcugaucgugaacaacgccaccaacguggucaucaaggugugcgaguuccaguucugcaacgaccccuuccucggcguguacuaccacaagaacaacaagagcuggauggaguccgaguuccgggucuacagcuccgccaacaacugcacguucgaguacgugagccagcccuuccugauggaccuggagggcaagcaggggaacuucaagaaccuccgcgaguucguguucaagaacaucgacggcuacuucaagaucuacuccaagcacaccccgaucaaccugguccgggaccugccccagggguucagcgcccucgagccccugguggaccugcccaucggcaucaacaucacccgcuuccagacccuccuggcccugcaccgguccuaccucacgccgggggacagcagcuccggcuggaccgcgggcgccgccgccuacuacgugggguaccugcagccccgcaccuuccugcucaaguacaacgagaacggcaccaucacggacgcggucgacugcgcccuggacccccugagcgagaccaagugcacccucaaguccuucaccguggagaaggggaucuaccagacgagcaacuuccgggugcagcccaccgaguccaucguccgcuucccgaacaucaccaaccugugccccuucggcgagguguucaacgccacccgguucgccagcgucuacgccuggaaccgcaagcggaucuccaacugcguggcggacuacagcgugcuguacaacuccgccagcuucuccacguucaagugcuacggcgucagccccaccaagcucaacgaccugugcuucaccaacguguacgccgacuccuucgugauccgcggggacgagguccggcagaucgcccccggccagaccgggaagaucgccgacuacaacuacaagcugccggacgacuucacgggcugcgugaucgcguggaacagcaacaaccucgacuccaaggucgggggcaacuacaacuaccuguaccgccuguuccgcaagagcaaccucaagcccuucgagcgggacaucuccaccgagaucuaccaggccggcagcacccccugcaacgggguggagggcuucaacugcuacuucccccugcaguccuacggguuccagccgaccaacggcgugggguaccagcccuaccggguggucgugcugagcuucgagcuccugcacgcccccgccacggugugcggccccaagaaguccaccaaccuggucaagaacaagugcgugaacuucaacuucaacggccucaccgggaccggcgugcugaccgagagcaacaagaaguuccugccguuccagcaguucgggcgcgacaucgccgacacgaccgacgcgguccgcgacccccagacccuggagauccucgacaucacccccugcagcuucggcgggguguccgugaucacgccgggcaccaacaccagcaaccaggucgccgugcuguaccaggacgugaacugcaccgagguccccguggccauccacgccgaccagcugacgcccaccuggcggguguacuccaccggcagcaacgucuuccagacccgcgccgggugccucaucggcgcggagcacgugaacaacuccuacgagugcgacauccccaucggggccggcaucugcgccagcuaccagacgcagaccaacuccccgcggcgcgcccggagcguggcgucccagagcaucaucgccuacaccaugucccugggcgccgagaacagcgucgccuacuccaacaacagcaucgccauccccaccaacuucacgaucuccgugaccaccgagauccugcccgugagcaugaccaagacgagcgucgacugcaccauguacaucugcggggacuccaccgagugcagcaaccuccugcugcaguacggcuccuucugcacccagcucaaccgcgcgcugacggggaucgccguggagcaggacaagaacacccaggagguguucgcccaggucaagcagaucuacaagacgcccccgaucaaggacuucggcggguucaacuucagccagauccugcccgaccccuccaagcccagcaagcgguccuucaucgaggaccuccuguucaacaaggugacccuggccgacgccggcuucaucaagcaguacggcgacugccucggggacaucgcggcccgcgaccugaucugcgcccagaaguucaacggccugaccgugcucccgccccugcugaccgacgagaugaucgcccaguacaccagcgcccuccuggcggggaccaucacguccggcuggaccuucggggccggcgccgcccugcagauccccuucgcgaugcagauggccuaccgguucaacggcaucggggucacccagaacgugcucuacgagaaccagaagcugaucgccaaccaguucaacagcgccaucggcaagauccaggacucccugagcuccaccgccagcgcgcucgggaagcugcaggacguggucaaccagaacgcccaggcccugaacacgcucgugaagcagcuguccagcaacuucggcgccaucuccagcgugcugaacgacauccucucccgccuggacaaggucgaggccgaggugcagaucgaccggcugaucaccgggcgccuccagagccugcagaccuacgugacccagcagcugauccgggcggccgagauccgcgccagcgccaaccucgccgcgaccaagauguccgagugcguccugggccagagcaagcggguggacuucugcggcaagggguaccaccugauguccuucccccagagcgccccgcacggcguggucuuccuccacgugacguacguccccgcccaggagaagaacuucaccaccgcccccgcgaucugccacgacgggaaggcccacuucccccgcgagggcguguucguguccaacgggacccacugguucgucacgcagcggaacuucuacgagccgcagaucaucaccaccgacaacaccuucgugagcggcaacugcgacguggucaucggcaucgugaacaacacgguguacgacccccugcagcccgagcuggacuccuucaaggaggagcucgacaaguacuucaagaaccacaccagccccgacgucgaccugggggacaucuccggcaucaacgccagcguggugaacauccagaaggagaucgaccgccugaacgaggucgccaagaaccucaacgagucccugaucgaccugcaggagcucgggaaguacgagcaguacaucaagggcgggagcggcuacauccccgaggccccgcgcgacgggcaggccuacgugcggaaggacggcgaguggguccugcucagcaccuuccugugaggacuaguuauaagacugacuagcccgaugggccucccaacgggcccuccuccccuccuugcaccgagauuaauaaaaaaaaaaaaaaaaaaaaaaaaaaaaaaaaaaaaaaaaaaaaaaaaaaaaaaaaaaaaaaaaugcaucccccccccccccccccccccccccccccccaaaggcucuuuucagagccaccagaauu

SEQ ID NO: 12856 - RNA, 3943 nt, Artificial Sequence
  SARS-CoV-2/Wuhan/WIV05/2019__EPI_ISL_402128 spike protein mRNA gc (1-1211)(K986P_V987P) Foldon construct
aggagaaagcuuaccauguucguguuccugguccuccugccccuggugagcucccagugcgugaaccucaccacccgcacgcagcugccgcccgccuacaccaacagcuucacccggggcgucuacuaccccgacaagguguuccgcuccagcgugcugcacuccacccaggaccucuuccugcccuucuucagcaacgucacgugguuccacgccauccacguguccgggaccaacggcaccaagcgguucgacaacccggugcugcccuucaacgacggggucuacuucgcgagcaccgagaaguccaacaucauccgcggcuggaucuucgggacgacccucgacagcaagacccagucccugcugaucgugaacaacgccaccaacguggucaucaaggugugcgaguuccaguucugcaacgaccccuuccucggcguguacuaccacaagaacaacaagagcuggauggaguccgaguuccgggucuacagcuccgccaacaacugcacguucgaguacgugagccagcccuuccugauggaccuggagggcaagcaggggaacuucaagaaccuccgcgaguucguguucaagaacaucgacggcuacuucaagaucuacuccaagcacaccccgaucaaccugguccgggaccugccccagggguucagcgcccucgagccccugguggaccugcccaucggcaucaacaucacccgcuuccagacccuccuggcccugcaccgguccuaccucacgccgggggacagcagcuccggcuggaccgcgggcgccgccgccuacuacgugggguaccugcagccccgcaccuuccugcucaaguacaacgagaacggcaccaucacggacgcggucgacugcgcccuggacccccugagcgagaccaagugcacccucaaguccuucaccguggagaaggggaucuaccagacgagcaacuuccgggugcagcccaccgaguccaucguccgcuucccgaacaucaccaaccugugccccuucggcgagguguucaacgccacccgguucgccagcgucuacgccuggaaccgcaagcggaucuccaacugcguggcggacuacagcgugcuguacaacuccgccagcuucuccacguucaagugcuacggcgucagccccaccaagcucaacgaccugugcuucaccaacguguacgccgacuccuucgugauccgcggggacgagguccggcagaucgcccccggccagaccgggaagaucgccgacuacaacuacaagcugccggacgacuucacgggcugcgugaucgcguggaacagcaacaaccucgacuccaaggucgggggcaacuacaacuaccuguaccgccuguuccgcaagagcaaccucaagcccuucgagcgggacaucuccaccgagaucuaccaggccggcagcacccccugcaacgggguggagggcuucaacugcuacuucccccugcaguccuacggguuccagccgaccaacggcgugggguaccagcccuaccggguggucgugcugagcuucgagcuccugcacgcccccgccacggugugcggccccaagaaguccaccaaccuggucaagaacaagugcgugaacuucaacuucaacggccucaccgggaccggcgugcugaccgagagcaacaagaaguuccugccguuccagcaguucgggcgcgacaucgccgacacgaccgacgcgguccgcgacccccagacccuggagauccucgacaucacccccugcagcuucggcgggguguccgugaucacgccgggcaccaacaccagcaaccaggucgccgugcuguaccaggacgugaacugcaccgagguccccguggccauccacgccgaccagcugacgcccaccuggcggguguacuccaccggcagcaacgucuuccagacccgcgccgggugccucaucggcgcggagcacgugaacaacuccuacgagugcgacauccccaucggggccggcaucugcgccagcuaccagacgcagaccaacuccccgcggcgcgcccggagcguggcgucccagagcaucaucgccuacaccaugucccugggcgccgagaacagcgucgccuacuccaacaacagcaucgccauccccaccaacuucacgaucuccgugaccaccgagauccugcccgugagcaugaccaagacgagcgucgacugcaccauguacaucugcggggacuccaccgagugcagcaaccuccugcugcaguacggcuccuucugcacccagcucaaccgcgcgcugacggggaucgccguggagcaggacaagaacacccaggagguguucgcccaggucaagcagaucuacaagacgcccccgaucaaggacuucggcggguucaacuucagccagauccugcccgaccccuccaagcccagcaagcgguccuucaucgaggaccuccuguucaacaaggugacccuggccgacgccggcuucaucaagcaguacggcgacugccucggggacaucgcggcccgcgaccugaucugcgcccagaaguucaacggccugaccgugcucccgccccugcugaccgacgagaugaucgcccaguacaccagcgcccuccuggcggggaccaucacguccggcuggaccuucggggccggcgccgcccugcagauccccuucgcgaugcagauggccuaccgguucaacggcaucggggucacccagaacgugcucuacgagaaccagaagcugaucgccaaccaguucaacagcgccaucggcaagauccaggacucccugagcuccaccgccagcgcgcucgggaagcugcaggacguggucaaccagaacgcccaggcccugaacacgcucgugaagcagcuguccagcaacuucggcgccaucuccagcgugcugaacgacauccucucccgccuggacccgcccgaggccgaggugcagaucgaccggcugaucaccgggcgccuccagagccugcagaccuacgugacccagcagcugauccgggcggccgagauccgcgccagcgccaaccucgccgcgaccaagauguccgagugcguccugggccagagcaagcggguggacuucugcggcaagggguaccaccugauguccuucccccagagcgccccgcacggcguggucuuccuccacgugacguacguccccgcccaggagaagaacuucaccaccgcccccgcgaucugccacgacgggaaggcccacuucccccgcgagggcguguucguguccaacgggacccacugguucgucacgcagcggaacuucuacgagccgcagaucaucaccaccgacaacaccuucgugagcggcaacugcgacguggucaucggcaucgugaacaacacgguguacgacccccugcagcccgagcuggacuccuucaaggaggagcucgacaaguacuucaagaaccacaccagccccgacgucgaccugggggacaucuccggcaucaacgccagcguggugaacauccagaaggagaucgaccgccugaacgaggucgccaagaaccucaacgagucccugaucgaccugcaggagcucgggaaguacgagcaguacaucaagggcgggagcggcuacauccccgaggccccgcgcgacgggcaggccuacgugcggaaggacggcgaguggguccugcucagcaccuuccugugaggacuaguuauaagacugacuagcccgaugggccucccaacgggcccuccuccccuccuugcaccgagauuaauaaaaaaaaaaaaaaaaaaaaaaaaaaaaaaaaaaaaaaaaaaaaaaaaaaaaaaaaaaaaaaaaugcaucccccccccccccccccccccccccccccccaaaggcucuuuucagagccaccagaauu

SEQ ID NO: 12857 - RNA, 3943 nt, Artificial Sequence
  SARS-CoV-2/Wuhan/WIV05/2019__EPI_ISL_402128 spike protein mRNA gc (1-1211)(K986P_V987P_T887WN_A1020W) Foldon construct
aggagaaagcuuaccauguucguguuccugguccuccugccccuggugagcucccagugcgugaaccucaccacccgcacgcagcugccgcccgccuacaccaacagcuucacccggggcgucuacuaccccgacaagguguuccgcuccagcgugcugcacuccacccaggaccucuuccugcccuucuucagcaacgucacgugguuccacgccauccacguguccgggaccaacggcaccaagcgguucgacaacccggugcugcccuucaacgacggggucuacuucgcgagcaccgagaaguccaacaucauccgcggcuggaucuucgggacgacccucgacagcaagacccagucccugcugaucgugaacaacgccaccaacguggucaucaaggugugcgaguuccaguucugcaacgaccccuuccucggcguguacuaccacaagaacaacaagagcuggauggaguccgaguuccgggucuacagcuccgccaacaacugcacguucgaguacgugagccagcccuuccugauggaccuggagggcaagcaggggaacuucaagaaccuccgcgaguucguguucaagaacaucgacggcuacuucaagaucuacuccaagcacaccccgaucaaccugguccgggaccugccccagggguucagcgcccucgagccccugguggaccugcccaucggcaucaacaucacccgcuuccagacccuccuggcccugcaccgguccuaccucacgccgggggacagcagcuccggcuggaccgcgggcgccgccgccuacuacgugggguaccugcagccccgcaccuuccugcucaaguacaacgagaacggcaccaucacggacgcggucgacugcgcccuggacccccugagcgagaccaagugcacccucaaguccuucaccguggagaaggggaucuaccagacgagcaacuuccgggugcagcccaccgaguccaucguccgcuucccgaacaucaccaaccugugccccuucggcgagguguucaacgccacccgguucgccagcgucuacgccuggaaccgcaagcggaucuccaacugcguggcggacuacagcgugcuguacaacuccgccagcuucuccacguucaagugcuacggcgucagccccaccaagcucaacgaccugugcuucaccaacguguacgccgacuccuucgugauccgcggggacgagguccggcagaucgcccccggccagaccgggaagaucgccgacuacaacuacaagcugccggacgacuucacgggcugcgugaucgcguggaacagcaacaaccucgacuccaaggucgggggcaacuacaacuaccuguaccgccuguuccgcaagagcaaccucaagcccuucgagcgggacaucuccaccgagaucuaccaggccggcagcacccccugcaacgggguggagggcuucaacugcuacuucccccugcaguccuacggguuccagccgaccaacggcgugggguaccagcccuaccggguggucgugcugagcuucgagcuccugcacgcccccgccacggugugcggccccaagaaguccaccaaccuggucaagaacaagugcgugaacuucaacuucaacggccucaccgggaccggcgugcugaccgagagcaacaagaaguuccugccguuccagcaguucgggcgcgacaucgccgacacgaccgacgcgguccgcgacccccagacccuggagauccucgacaucacccccugcagcuucggcgggguguccgugaucacgccgggcaccaacaccagcaaccaggucgccgugcuguaccaggacgugaacugcaccgagguccccguggccauccacgccgaccagcugacgcccaccuggcggguguacuccaccggcagcaacgucuuccagacccgcgccgggugccucaucggcgcggagcacgugaacaacuccuacgagugcgacauccccaucggggccggcaucugcgccagcuaccagacgcagaccaacuccccgcggcgcgcccggagcguggcgucccagagcaucaucgccuacaccaugucccugggcgccgagaacagcgucgccuacuccaacaacagcaucgccauccccaccaacuucacgaucuccgugaccaccgagauccugcccgugagcaugaccaagacgagcgucgacugcaccauguacaucugcggggacuccaccgagugcagcaaccuccugcugcaguacggcuccuucugcacccagcucaaccgcgcgcugacggggaucgccguggagcaggacaagaacacccaggagguguucgcccaggucaagcagaucuacaagacgcccccgaucaaggacuucggcggguucaacuucagccagauccugcccgaccccuccaagcccagcaagcgguccuucaucgaggaccuccuguucaacaaggugacccuggccgacgccggcuucaucaagcaguacggcgacugccucggggacaucgcggcccgcgaccugaucugcgcccagaaguucaacggccugaccgugcucccgccccugcugaccgacgagaugaucgcccaguacaccagcgcccuccuggcggggaccaucacguccggcuggugguucggggccggcgccgcccugcagauccccuucgcgaugcagauggccuaccgguucaacggcaucggggucacccagaacgugcucuacgagaaccagaagcugaucgccaaccaguucaacagcgccaucggcaagauccaggacucccugagcuccaccgccagcgcgcucgggaagcugcaggacguggucaaccagaacgcccaggcccugaacacgcucgugaagcagcuguccagcaacuucggcgccaucuccagcgugcugaacgacauccucucccgccuggacccgcccgaggccgaggugcagaucgaccggcugaucaccgggcgccuccagagccugcagaccuacgugacccagcagcugauccgggcggccgagauccgcuggagcgccaaccucgccgcgaccaagauguccgagugcguccugggccagagcaagcggguggacuucugcggcaagggguaccaccugauguccuucccccagagcgccccgcacggcguggucuuccuccacgugacguacguccccgcccaggagaagaacuucaccaccgcccccgcgaucugccacgacgggaaggcccacuucccccgcgagggcguguucguguccaacgggacccacugguucgucacgcagcggaacuucuacgagccgcagaucaucaccaccgacaacaccuucgugagcggcaacugcgacguggucaucggcaucgugaacaacacgguguacgacccccugcagcccgagcuggacuccuucaaggaggagcucgacaaguacuucaagaaccacaccagccccgacgucgaccugggggacaucuccggcaucaacgccagcguggugaacauccagaaggagaucgaccgccugaacgaggucgccaagaaccucaacgagucccugaucgaccugcaggagcucgggaaguacgagcaguacaucaagggcgggagcggcuacauccccgaggccccgcgcgacgggcaggccuacgugcggaaggacggcgaguggguccugcucagcaccuuccugugaggacuaguuauaagacugacuagcccgaugggccucccaacgggcccuccuccccuccuugcaccgagauuaauaaaaaaaaaaaaaaaaaaaaaaaaaaaaaaaaaaaaaaaaaaaaaaaaaaaaaaaaaaaaaaaaugcaucccccccccccccccccccccccccccccccaaaggcucuuuucagagccaccagaauu

SEQ ID NO: 12858 - RNA, 3943 nt, Artificial Sequence
  SARS-CoV-2/Wuhan/WIV05/2019__EPI_ISL_402128 spike protein mRNA gc (1-1211)(K986P_V987P_P1069F) Foldon construct
aggagaaagcuuaccauguucguguuccugguccuccugccccuggugagcucccagugcgugaaccucaccacccgcacgcagcugccgcccgccuacaccaacagcuucacccggggcgucuacuaccccgacaagguguuccgcuccagcgugcugcacuccacccaggaccucuuccugcccuucuucagcaacgucacgugguuccacgccauccacguguccgggaccaacggcaccaagcgguucgacaacccggugcugcccuucaacgacggggucuacuucgcgagcaccgagaaguccaacaucauccgcggcuggaucuucgggacgacccucgacagcaagacccagucccugcugaucgugaacaacgccaccaacguggucaucaaggugugcgaguuccaguucugcaacgaccccuuccucggcguguacuaccacaagaacaacaagagcuggauggaguccgaguuccgggucuacagcuccgccaacaacugcacguucgaguacgugagccagcccuuccugauggaccuggagggcaagcaggggaacuucaagaaccuccgcgaguucguguucaagaacaucgacggcuacuucaagaucuacuccaagcacaccccgaucaaccugguccgggaccugccccagggguucagcgcccucgagccccugguggaccugcccaucggcaucaacaucacccgcuuccagacccuccuggcccugcaccgguccuaccucacgccgggggacagcagcuccggcuggaccgcgggcgccgccgccuacuacgugggguaccugcagccccgcaccuuccugcucaaguacaacgagaacggcaccaucacggacgcggucgacugcgcccuggacccccugagcgagaccaagugcacccucaaguccuucaccguggagaaggggaucuaccagacgagcaacuuccgggugcagcccaccgaguccaucguccgcuucccgaacaucaccaaccugugccccuucggcgagguguucaacgccacccgguucgccagcgucuacgccuggaaccgcaagcggaucuccaacugcguggcggacuacagcgugcuguacaacuccgccagcuucuccacguucaagugcuacggcgucagccccaccaagcucaacgaccugugcuucaccaacguguacgccgacuccuucgugauccgcggggacgagguccggcagaucgcccccggccagaccgggaagaucgccgacuacaacuacaagcugccggacgacuucacgggcugcgugaucgcguggaacagcaacaaccucgacuccaaggucgggggcaacuacaacuaccuguaccgccuguuccgcaagagcaaccucaagcccuucgagcgggacaucuccaccgagaucuaccaggccggcagcacccccugcaacgggguggagggcuucaacugcuacuucccccugcaguccuacggguuccagccgaccaacggcgugggguaccagcccuaccggguggucgugcugagcuucgagcuccugcacgcccccgccacggugugcggccccaagaaguccaccaaccuggucaagaacaagugcgugaacuucaacuucaacggccucaccgggaccggcgugcugaccgagagcaacaagaaguuccugccguuccagcaguucgggcgcgacaucgccgacacgaccgacgcgguccgcgacccccagacccuggagauccucgacaucacccccugcagcuucggcgggguguccgugaucacgccgggcaccaacaccagcaaccaggucgccgugcuguaccaggacgugaacugcaccgagguccccguggccauccacgccgaccagcugacgcccaccuggcggguguacuccaccggcagcaacgucuuccagacccgcgccgggugccucaucggcgcggagcacgugaacaacuccuacgagugcgacauccccaucggggccggcaucugcgccagcuaccagacgcagaccaacuccccgcggcgcgcccggagcguggcgucccagagcaucaucgccuacaccaugucccugggcgccgagaacagcgucgccuacuccaacaacagcaucgccauccccaccaacuucacgaucuccgugaccaccgagauccugcccgugagcaugaccaagacgagcgucgacugcaccauguacaucugcggggacuccaccgagugcagcaaccuccugcugcaguacggcuccuucugcacccagcucaaccgcgcgcugacggggaucgccguggagcaggacaagaacacccaggagguguucgcccaggucaagcagaucuacaagacgcccccgaucaaggacuucggcggguucaacuucagccagauccugcccgaccccuccaagcccagcaagcgguccuucaucgaggaccuccuguucaacaaggugacccuggccgacgccggcuucaucaagcaguacggcgacugccucggggacaucgcggcccgcgaccugaucugcgcccagaaguucaacggccugaccgugcucccgccccugcugaccgacgagaugaucgcccaguacaccagcgcccuccuggcggggaccaucacguccggcuggaccuucggggccggcgccgcccugcagauccccuucgcgaugcagauggccuaccgguucaacggcaucggggucacccagaacgugcucuacgagaaccagaagcugaucgccaaccaguucaacagcgccaucggcaagauccaggacucccugagcuccaccgccagcgcgcucgggaagcugcaggacguggucaaccagaacgcccaggcccugaacacgcucgugaagcagcuguccagcaacuucggcgccaucuccagcgugcugaacgacauccucucccgccuggacccgcccgaggccgaggugcagaucgaccggcugaucaccgggcgccuccagagccugcagaccuacgugacccagcagcugauccgggcggccgagauccgcgccagcgccaaccucgccgcgaccaagauguccgagugcguccugggccagagcaagcggguggacuucugcggcaagggguaccaccugauguccuucccccagagcgccccgcacggcguggucuuccuccacgugacguacgucuucgcccaggagaagaacuucaccaccgcccccgcgaucugccacgacgggaaggcccacuucccccgcgagggcguguucguguccaacgggacccacugguucgucacgcagcggaacuucuacgagccgcagaucaucaccaccgacaacaccuucgugagcggcaacugcgacguggucaucggcaucgugaacaacacgguguacgacccccugcagcccgagcuggacuccuucaaggaggagcucgacaaguacuucaagaaccacaccagccccgacgucgaccugggggacaucuccggcaucaacgccagcguggugaacauccagaaggagaucgaccgccugaacgaggucgccaagaaccucaacgagucccugaucgaccugcaggagcucgggaaguacgagcaguacaucaagggcgggagcggcuacauccccgaggccccgcgcgacgggcaggccuacgugcggaaggacggcgaguggguccugcucagcaccuuccugugaggacuaguuauaagacugacuagcccgaugggccucccaacgggcccuccuccccuccuugcaccgagauuaauaaaaaaaaaaaaaaaaaaaaaaaaaaaaaaaaaaaaaaaaaaaaaaaaaaaaaaaaaaaaaaaaugcaucccccccccccccccccccccccccccccccaaaggcucuuuucagagccaccagaauu

SEQ ID NO: 12859 - RNA, 3943 nt, Artificial Sequence
  SARS-CoV-2/Wuhan/WIV05/2019__EPI_ISL_402128 spike protein mRNA gc (1-1211)(K986P_V987P_ H1048Q_H1064N_ H1083N_H1101N) Foldon construct
aggagaaagcuuaccauguucguguuccugguccuccugccccuggugagcucccagugcgugaaccucaccacccgcacgcagcugccgcccgccuacaccaacagcuucacccggggcgucuacuaccccgacaagguguuccgcuccagcgugcugcacuccacccaggaccucuuccugcccuucuucagcaacgucacgugguuccacgccauccacguguccgggaccaacggcaccaagcgguucgacaacccggugcugcccuucaacgacggggucuacuucgcgagcaccgagaaguccaacaucauccgcggcuggaucuucgggacgacccucgacagcaagacccagucccugcugaucgugaacaacgccaccaacguggucaucaaggugugcgaguuccaguucugcaacgaccccuuccucggcguguacuaccacaagaacaacaagagcuggauggaguccgaguuccgggucuacagcuccgccaacaacugcacguucgaguacgugagccagcccuuccugauggaccuggagggcaagcaggggaacuucaagaaccuccgcgaguucguguucaagaacaucgacggcuacuucaagaucuacuccaagcacaccccgaucaaccugguccgggaccugccccagggguucagcgcccucgagccccugguggaccugcccaucggcaucaacaucacccgcuuccagacccuccuggcccugcaccgguccuaccucacgccgggggacagcagcuccggcuggaccgcgggcgccgccgccuacuacgugggguaccugcagccccgcaccuuccugcucaaguacaacgagaacggcaccaucacggacgcggucgacugcgcccuggacccccugagcgagaccaagugcacccucaaguccuucaccguggagaaggggaucuaccagacgagcaacuuccgggugcagcccaccgaguccaucguccgcuucccgaacaucaccaaccugugccccuucggcgagguguucaacgccacccgguucgccagcgucuacgccuggaaccgcaagcggaucuccaacugcguggcggacuacagcgugcuguacaacuccgccagcuucuccacguucaagugcuacggcgucagccccaccaagcucaacgaccugugcuucaccaacguguacgccgacuccuucgugauccgcggggacgagguccggcagaucgcccccggccagaccgggaagaucgccgacuacaacuacaagcugccggacgacuucacgggcugcgugaucgcguggaacagcaacaaccucgacuccaaggucgggggcaacuacaacuaccuguaccgccuguuccgcaagagcaaccucaagcccuucgagcgggacaucuccaccgagaucuaccaggccggcagcacccccugcaacgggguggagggcuucaacugcuacuucccccugcaguccuacggguuccagccgaccaacggcgugggguaccagcccuaccggguggucgugcugagcuucgagcuccugcacgcccccgccacggugugcggccccaagaaguccaccaaccuggucaagaacaagugcgugaacuucaacuucaacggccucaccgggaccggcgugcugaccgagagcaacaagaaguuccugccguuccagcaguucgggcgcgacaucgccgacacgaccgacgcgguccgcgacccccagacccuggagauccucgacaucacccccugcagcuucggcgggguguccgugaucacgccgggcaccaacaccagcaaccaggucgccgugcuguaccaggacgugaacugcaccgagguccccguggccauccacgccgaccagcugacgcccaccuggcggguguacuccaccggcagcaacgucuuccagacccgcgccgggugccucaucggcgcggagcacgugaacaacuccuacgagugcgacauccccaucggggccggcaucugcgccagcuaccagacgcagaccaacuccccgcggcgcgcccggagcguggcgucccagagcaucaucgccuacaccaugucccugggcgccgagaacagcgucgccuacuccaacaacagcaucgccauccccaccaacuucacgaucuccgugaccaccgagauccugcccgugagcaugaccaagacgagcgucgacugcaccauguacaucugcggggacuccaccgagugcagcaaccuccugcugcaguacggcuccuucugcacccagcucaaccgcgcgcugacggggaucgccguggagcaggacaagaacacccaggagguguucgcccaggucaagcagaucuacaagacgcccccgaucaaggacuucggcggguucaacuucagccagauccugcccgaccccuccaagcccagcaagcgguccuucaucgaggaccuccuguucaacaaggugacccuggccgacgccggcuucaucaagcaguacggcgacugccucggggacaucgcggcccgcgaccugaucugcgcccagaaguucaacggccugaccgugcucccgccccugcugaccgacgagaugaucgcccaguacaccagcgcccuccuggcggggaccaucacguccggcuggaccuucggggccggcgccgcccugcagauccccuucgcgaugcagauggccuaccgguucaacggcaucggggucacccagaacgugcucuacgagaaccagaagcugaucgccaaccaguucaacagcgccaucggcaagauccaggacucccugagcuccaccgccagcgcgcucgggaagcugcaggacguggucaaccagaacgcccaggcccugaacacgcucgugaagcagcuguccagcaacuucggcgccaucuccagcgugcugaacgacauccucucccgccuggacccgcccgaggccgaggugcagaucgaccggcugaucaccgggcgccuccagagccugcagaccuacgugacccagcagcugauccgggcggccgagauccgcgccagcgccaaccucgccgcgaccaagauguccgagugcguccugggccagagcaagcggguggacuucugcggcaagggguaccagcugauguccuucccccagagcgccccgcacggcguggucuuccucaacgugacguacguccccgcccaggagaagaacuucaccaccgcccccgcgaucugcaacgacgggaaggcccacuucccccgcgagggcguguucguguccaacgggaccaacugguucgucacgcagcggaacuucuacgagccgcagaucaucaccaccgacaacaccuucgugagcggcaacugcgacguggucaucggcaucgugaacaacacgguguacgacccccugcagcccgagcuggacuccuucaaggaggagcucgacaaguacuucaagaaccacaccagccccgacgucgaccugggggacaucuccggcaucaacgccagcguggugaacauccagaaggagaucgaccgccugaacgaggucgccaagaaccucaacgagucccugaucgaccugcaggagcucgggaaguacgagcaguacaucaagggcgggagcggcuacauccccgaggccccgcgcgacgggcaggccuacgugcggaaggacggcgaguggguccugcucagcaccuuccugugaggacuaguuauaagacugacuagcccgaugggccucccaacgggcccuccuccccuccuugcaccgagauuaauaaaaaaaaaaaaaaaaaaaaaaaaaaaaaaaaaaaaaaaaaaaaaaaaaaaaaaaaaaaaaaaaugcaucccccccccccccccccccccccccccccccaaaggcucuuuucagagccaccagaauu

SEQ ID NO: 12860 - RNA, 3943 nt, Artificial Sequence
  SARS-CoV-2/Wuhan/WIV05/2019__EPI_ISL_402128 spike protein mRNA gc (1-1211)(I712C_T1077C) Foldon construct
aggagaaagcuuaccauguucguguuccugguccuccugccccuggugagcucccagugcgugaaccucaccacccgcacgcagcugccgcccgccuacaccaacagcuucacccggggcgucuacuaccccgacaagguguuccgcuccagcgugcugcacuccacccaggaccucuuccugcccuucuucagcaacgucacgugguuccacgccauccacguguccgggaccaacggcaccaagcgguucgacaacccggugcugcccuucaacgacggggucuacuucgcgagcaccgagaaguccaacaucauccgcggcuggaucuucgggacgacccucgacagcaagacccagucccugcugaucgugaacaacgccaccaacguggucaucaaggugugcgaguuccaguucugcaacgaccccuuccucggcguguacuaccacaagaacaacaagagcuggauggaguccgaguuccgggucuacagcuccgccaacaacugcacguucgaguacgugagccagcccuuccugauggaccuggagggcaagcaggggaacuucaagaaccuccgcgaguucguguucaagaacaucgacggcuacuucaagaucuacuccaagcacaccccgaucaaccugguccgggaccugccccagggguucagcgcccucgagccccugguggaccugcccaucggcaucaacaucacccgcuuccagacccuccuggcccugcaccgguccuaccucacgccgggggacagcagcuccggcuggaccgcgggcgccgccgccuacuacgugggguaccugcagccccgcaccuuccugcucaaguacaacgagaacggcaccaucacggacgcggucgacugcgcccuggacccccugagcgagaccaagugcacccucaaguccuucaccguggagaaggggaucuaccagacgagcaacuuccgggugcagcccaccgaguccaucguccgcuucccgaacaucaccaaccugugccccuucggcgagguguucaacgccacccgguucgccagcgucuacgccuggaaccgcaagcggaucuccaacugcguggcggacuacagcgugcuguacaacuccgccagcuucuccacguucaagugcuacggcgucagccccaccaagcucaacgaccugugcuucaccaacguguacgccgacuccuucgugauccgcggggacgagguccggcagaucgcccccggccagaccgggaagaucgccgacuacaacuacaagcugccggacgacuucacgggcugcgugaucgcguggaacagcaacaaccucgacuccaaggucgggggcaacuacaacuaccuguaccgccuguuccgcaagagcaaccucaagcccuucgagcgggacaucuccaccgagaucuaccaggccggcagcacccccugcaacgggguggagggcuucaacugcuacuucccccugcaguccuacggguuccagccgaccaacggcgugggguaccagcccuaccggguggucgugcugagcuucgagcuccugcacgcccccgccacggugugcggccccaagaaguccaccaaccuggucaagaacaagugcgugaacuucaacuucaacggccucaccgggaccggcgugcugaccgagagcaacaagaaguuccugccguuccagcaguucgggcgcgacaucgccgacacgaccgacgcgguccgcgacccccagacccuggagauccucgacaucacccccugcagcuucggcgggguguccgugaucacgccgggcaccaacaccagcaaccaggucgccgugcuguaccaggacgugaacugcaccgagguccccguggccauccacgccgaccagcugacgcccaccuggcggguguacuccaccggcagcaacgucuuccagacccgcgccgggugccucaucggcgcggagcacgugaacaacuccuacgagugcgacauccccaucggggccggcaucugcgccagcuaccagacgcagaccaacuccccgcggcgcgcccggagcguggcgucccagagcaucaucgccuacaccaugucccugggcgccgagaacagcgucgccuacuccaacaacagcugcgccauccccaccaacuucacgaucuccgugaccaccgagauccugcccgugagcaugaccaagacgagcgucgacugcaccauguacaucugcggggacuccaccgagugcagcaaccuccugcugcaguacggcuccuucugcacccagcucaaccgcgcgcugacggggaucgccguggagcaggacaagaacacccaggagguguucgcccaggucaagcagaucuacaagacgcccccgaucaaggacuucggcggguucaacuucagccagauccugcccgaccccuccaagcccagcaagcgguccuucaucgaggaccuccuguucaacaaggugacccuggccgacgccggcuucaucaagcaguacggcgacugccucggggacaucgcggcccgcgaccugaucugcgcccagaaguucaacggccugaccgugcucccgccccugcugaccgacgagaugaucgcccaguacaccagcgcccuccuggcggggaccaucacguccggcuggaccuucggggccggcgccgcccugcagauccccuucgcgaugcagauggccuaccgguucaacggcaucggggucacccagaacgugcucuacgagaaccagaagcugaucgccaaccaguucaacagcgccaucggcaagauccaggacucccugagcuccaccgccagcgcgcucgggaagcugcaggacguggucaaccagaacgcccaggcccugaacacgcucgugaagcagcuguccagcaacuucggcgccaucuccagcgugcugaacgacauccucucccgccuggacaaggucgaggccgaggugcagaucgaccggcugaucaccgggcgccuccagagccugcagaccuacgugacccagcagcugauccgggcggccgagauccgcgccagcgccaaccucgccgcgaccaagauguccgagugcguccugggccagagcaagcggguggacuucugcggcaagggguaccaccugauguccuucccccagagcgccccgcacggcguggucuuccuccacgugacguacguccccgcccaggagaagaacuucaccugcgcccccgcgaucugccacgacgggaaggcccacuucccccgcgagggcguguucguguccaacgggacccacugguucgucacgcagcggaacuucuacgagccgcagaucaucaccaccgacaacaccuucgugagcggcaacugcgacguggucaucggcaucgugaacaacacgguguacgacccccugcagcccgagcuggacuccuucaaggaggagcucgacaaguacuucaagaaccacaccagccccgacgucgaccugggggacaucuccggcaucaacgccagcguggugaacauccagaaggagaucgaccgccugaacgaggucgccaagaaccucaacgagucccugaucgaccugcaggagcucgggaaguacgagcaguacaucaagggcgggagcggcuacauccccgaggccccgcgcgacgggcaggccuacgugcggaaggacggcgaguggguccugcucagcaccuuccugugaggacuaguuauaagacugacuagcccgaugggccucccaacgggcccuccuccccuccuugcaccgagauuaauaaaaaaaaaaaaaaaaaaaaaaaaaaaaaaaaaaaaaaaaaaaaaaaaaaaaaaaaaaaaaaaaugcaucccccccccccccccccccccccccccccccaaaggcucuuuucagagccaccagaauu

SEQ ID NO: 12861 - RNA, 3943 nt, Artificial Sequence
  SARS-CoV-2/Wuhan/WIV05/2019__EPI_ISL_402128 spike protein mRNA gc (1-1211)(I714C_Y1110C) Foldon construct
aggagaaagcuuaccauguucguguuccugguccuccugccccuggugagcucccagugcgugaaccucaccacccgcacgcagcugccgcccgccuacaccaacagcuucacccggggcgucuacuaccccgacaagguguuccgcuccagcgugcugcacuccacccaggaccucuuccugcccuucuucagcaacgucacgugguuccacgccauccacguguccgggaccaacggcaccaagcgguucgacaacccggugcugcccuucaacgacggggucuacuucgcgagcaccgagaaguccaacaucauccgcggcuggaucuucgggacgacccucgacagcaagacccagucccugcugaucgugaacaacgccaccaacguggucaucaaggugugcgaguuccaguucugcaacgaccccuuccucggcguguacuaccacaagaacaacaagagcuggauggaguccgaguuccgggucuacagcuccgccaacaacugcacguucgaguacgugagccagcccuuccugauggaccuggagggcaagcaggggaacuucaagaaccuccgcgaguucguguucaagaacaucgacggcuacuucaagaucuacuccaagcacaccccgaucaaccugguccgggaccugccccagggguucagcgcccucgagccccugguggaccugcccaucggcaucaacaucacccgcuuccagacccuccuggcccugcaccgguccuaccucacgccgggggacagcagcuccggcuggaccgcgggcgccgccgccuacuacgugggguaccugcagccccgcaccuuccugcucaaguacaacgagaacggcaccaucacggacgcggucgacugcgcccuggacccccugagcgagaccaagugcacccucaaguccuucaccguggagaaggggaucuaccagacgagcaacuuccgggugcagcccaccgaguccaucguccgcuucccgaacaucaccaaccugugccccuucggcgagguguucaacgccacccgguucgccagcgucuacgccuggaaccgcaagcggaucuccaacugcguggcggacuacagcgugcuguacaacuccgccagcuucuccacguucaagugcuacggcgucagccccaccaagcucaacgaccugugcuucaccaacguguacgccgacuccuucgugauccgcggggacgagguccggcagaucgcccccggccagaccgggaagaucgccgacuacaacuacaagcugccggacgacuucacgggcugcgugaucgcguggaacagcaacaaccucgacuccaaggucgggggcaacuacaacuaccuguaccgccuguuccgcaagagcaaccucaagcccuucgagcgggacaucuccaccgagaucuaccaggccggcagcacccccugcaacgggguggagggcuucaacugcuacuucccccugcaguccuacggguuccagccgaccaacggcgugggguaccagcccuaccggguggucgugcugagcuucgagcuccugcacgcccccgccacggugugcggccccaagaaguccaccaaccuggucaagaacaagugcgugaacuucaacuucaacggccucaccgggaccggcgugcugaccgagagcaacaagaaguuccugccguuccagcaguucgggcgcgacaucgccgacacgaccgacgcgguccgcgacccccagacccuggagauccucgacaucacccccugcagcuucggcgggguguccgugaucacgccgggcaccaacaccagcaaccaggucgccgugcuguaccaggacgugaacugcaccgagguccccguggccauccacgccgaccagcugacgcccaccuggcggguguacuccaccggcagcaacgucuuccagacccgcgccgggugccucaucggcgcggagcacgugaacaacuccuacgagugcgacauccccaucggggccggcaucugcgccagcuaccagacgcagaccaacuccccgcggcgcgcccggagcguggcgucccagagcaucaucgccuacaccaugucccugggcgccgagaacagcgucgccuacuccaacaacagcaucgccugccccaccaacuucacgaucuccgugaccaccgagauccugcccgugagcaugaccaagacgagcgucgacugcaccauguacaucugcggggacuccaccgagugcagcaaccuccugcugcaguacggcuccuucugcacccagcucaaccgcgcgcugacggggaucgccguggagcaggacaagaacacccaggagguguucgcccaggucaagcagaucuacaagacgcccccgaucaaggacuucggcggguucaacuucagccagauccugcccgaccccuccaagcccagcaagcgguccuucaucgaggaccuccuguucaacaaggugacccuggccgacgccggcuucaucaagcaguacggcgacugccucggggacaucgcggcccgcgaccugaucugcgcccagaaguucaacggccugaccgugcucccgccccugcugaccgacgagaugaucgcccaguacaccagcgcccuccuggcggggaccaucacguccggcuggaccuucggggccggcgccgcccugcagauccccuucgcgaugcagauggccuaccgguucaacggcaucggggucacccagaacgugcucuacgagaaccagaagcugaucgccaaccaguucaacagcgccaucggcaagauccaggacucccugagcuccaccgccagcgcgcucgggaagcugcaggacguggucaaccagaacgcccaggcccugaacacgcucgugaagcagcuguccagcaacuucggcgccaucuccagcgugcugaacgacauccucucccgccuggacaaggucgaggccgaggugcagaucgaccggcugaucaccgggcgccuccagagccugcagaccuacgugacccagcagcugauccgggcggccgagauccgcgccagcgccaaccucgccgcgaccaagauguccgagugcguccugggccagagcaagcggguggacuucugcggcaagggguaccaccugauguccuucccccagagcgccccgcacggcguggucuuccuccacgugacguacguccccgcccaggagaagaacuucaccaccgcccccgcgaucugccacgacgggaaggcccacuucccccgcgagggcguguucguguccaacgggacccacugguucgucacgcagcggaacuucugcgagccgcagaucaucaccaccgacaacaccuucgugagcggcaacugcgacguggucaucggcaucgugaacaacacgguguacgacccccugcagcccgagcuggacuccuucaaggaggagcucgacaaguacuucaagaaccacaccagccccgacgucgaccugggggacaucuccggcaucaacgccagcguggugaacauccagaaggagaucgaccgccugaacgaggucgccaagaaccucaacgagucccugaucgaccugcaggagcucgggaaguacgagcaguacaucaagggcgggagcggcuacauccccgaggccccgcgcgacgggcaggccuacgugcggaaggacggcgaguggguccugcucagcaccuuccugugaggacuaguuauaagacugacuagcccgaugggccucccaacgggcccuccuccccuccuugcaccgagauuaauaaaaaaaaaaaaaaaaaaaaaaaaaaaaaaaaaaaaaaaaaaaaaaaaaaaaaaaaaaaaaaaaugcaucccccccccccccccccccccccccccccccaaaggcucuuuucagagccaccagaauu

SEQ ID NO: 12862 - RNA, 3943 nt, Artificial Sequence
  SARS-CoV-2/Wuhan/WIV05/2019__EPI_ISL_402128 spike protein mRNA gc (1-1211)(P715C_P1069C) Foldon construct
aggagaaagcuuaccauguucguguuccugguccuccugccccuggugagcucccagugcgugaaccucaccacccgcacgcagcugccgcccgccuacaccaacagcuucacccggggcgucuacuaccccgacaagguguuccgcuccagcgugcugcacuccacccaggaccucuuccugcccuucuucagcaacgucacgugguuccacgccauccacguguccgggaccaacggcaccaagcgguucgacaacccggugcugcccuucaacgacggggucuacuucgcgagcaccgagaaguccaacaucauccgcggcuggaucuucgggacgacccucgacagcaagacccagucccugcugaucgugaacaacgccaccaacguggucaucaaggugugcgaguuccaguucugcaacgaccccuuccucggcguguacuaccacaagaacaacaagagcuggauggaguccgaguuccgggucuacagcuccgccaacaacugcacguucgaguacgugagccagcccuuccugauggaccuggagggcaagcaggggaacuucaagaaccuccgcgaguucguguucaagaacaucgacggcuacuucaagaucuacuccaagcacaccccgaucaaccugguccgggaccugccccagggguucagcgcccucgagccccugguggaccugcccaucggcaucaacaucacccgcuuccagacccuccuggcccugcaccgguccuaccucacgccgggggacagcagcuccggcuggaccgcgggcgccgccgccuacuacgugggguaccugcagccccgcaccuuccugcucaaguacaacgagaacggcaccaucacggacgcggucgacugcgcccuggacccccugagcgagaccaagugcacccucaaguccuucaccguggagaaggggaucuaccagacgagcaacuuccgggugcagcccaccgaguccaucguccgcuucccgaacaucaccaaccugugccccuucggcgagguguucaacgccacccgguucgccagcgucuacgccuggaaccgcaagcggaucuccaacugcguggcggacuacagcgugcuguacaacuccgccagcuucuccacguucaagugcuacggcgucagccccaccaagcucaacgaccugugcuucaccaacguguacgccgacuccuucgugauccgcggggacgagguccggcagaucgcccccggccagaccgggaagaucgccgacuacaacuacaagcugccggacgacuucacgggcugcgugaucgcguggaacagcaacaaccucgacuccaaggucgggggcaacuacaacuaccuguaccgccuguuccgcaagagcaaccucaagcccuucgagcgggacaucuccaccgagaucuaccaggccggcagcacccccugcaacgggguggagggcuucaacugcuacuucccccugcaguccuacggguuccagccgaccaacggcgugggguaccagcccuaccggguggucgugcugagcuucgagcuccugcacgcccccgccacggugugcggccccaagaaguccaccaaccuggucaagaacaagugcgugaacuucaacuucaacggccucaccgggaccggcgugcugaccgagagcaacaagaaguuccugccguuccagcaguucgggcgcgacaucgccgacacgaccgacgcgguccgcgacccccagacccuggagauccucgacaucacccccugcagcuucggcgggguguccgugaucacgccgggcaccaacaccagcaaccaggucgccgugcuguaccaggacgugaacugcaccgagguccccguggccauccacgccgaccagcugacgcccaccuggcggguguacuccaccggcagcaacgucuuccagacccgcgccgggugccucaucggcgcggagcacgugaacaacuccuacgagugcgacauccccaucggggccggcaucugcgccagcuaccagacgcagaccaacuccccgcggcgcgcccggagcguggcgucccagagcaucaucgccuacaccaugucccugggcgccgagaacagcgucgccuacuccaacaacagcaucgccaucugcaccaacuucacgaucuccgugaccaccgagauccugcccgugagcaugaccaagacgagcgucgacugcaccauguacaucugcggggacuccaccgagugcagcaaccuccugcugcaguacggcuccuucugcacccagcucaaccgcgcgcugacggggaucgccguggagcaggacaagaacacccaggagguguucgcccaggucaagcagaucuacaagacgcccccgaucaaggacuucggcggguucaacuucagccagauccugcccgaccccuccaagcccagcaagcgguccuucaucgaggaccuccuguucaacaaggugacccuggccgacgccggcuucaucaagcaguacggcgacugccucggggacaucgcggcccgcgaccugaucugcgcccagaaguucaacggccugaccgugcucccgccccugcugaccgacgagaugaucgcccaguacaccagcgcccuccuggcggggaccaucacguccggcuggaccuucggggccggcgccgcccugcagauccccuucgcgaugcagauggccuaccgguucaacggcaucggggucacccagaacgugcucuacgagaaccagaagcugaucgccaaccaguucaacagcgccaucggcaagauccaggacucccugagcuccaccgccagcgcgcucgggaagcugcaggacguggucaaccagaacgcccaggcccugaacacgcucgugaagcagcuguccagcaacuucggcgccaucuccagcgugcugaacgacauccucucccgccuggacaaggucgaggccgaggugcagaucgaccggcugaucaccgggcgccuccagagccugcagaccuacgugacccagcagcugauccgggcggccgagauccgcgccagcgccaaccucgccgcgaccaagauguccgagugcguccugggccagagcaagcggguggacuucugcggcaagggguaccaccugauguccuucccccagagcgccccgcacggcguggucuuccuccacgugacguacgucugcgcccaggagaagaacuucaccaccgcccccgcgaucugccacgacgggaaggcccacuucccccgcgagggcguguucguguccaacgggacccacugguucgucacgcagcggaacuucuacgagccgcagaucaucaccaccgacaacaccuucgugagcggcaacugcgacguggucaucggcaucgugaacaacacgguguacgacccccugcagcccgagcuggacuccuucaaggaggagcucgacaaguacuucaagaaccacaccagccccgacgucgaccugggggacaucuccggcaucaacgccagcguggugaacauccagaaggagaucgaccgccugaacgaggucgccaagaaccucaacgagucccugaucgaccugcaggagcucgggaaguacgagcaguacaucaagggcgggagcggcuacauccccgaggccccgcgcgacgggcaggccuacgugcggaaggacggcgaguggguccugcucagcaccuuccugugaggacuaguuauaagacugacuagcccgaugggccucccaacgggcccuccuccccuccuugcaccgagauuaauaaaaaaaaaaaaaaaaaaaaaaaaaaaaaaaaaaaaaaaaaaaaaaaaaaaaaaaaaaaaaaaaugcaucccccccccccccccccccccccccccccccaaaggcucuuuucagagccaccagaauu

SEQ ID NO: 12863 - RNA, 3943 nt, Artificial Sequence
  SARS-CoV-2/Wuhan/WIV05/2019__EPI_ISL_402128 spike protein mRNA gc (1-1211)(G889C_L1034C) Foldon construct
aggagaaagcuuaccauguucguguuccugguccuccugccccuggugagcucccagugcgugaaccucaccacccgcacgcagcugccgcccgccuacaccaacagcuucacccggggcgucuacuaccccgacaagguguuccgcuccagcgugcugcacuccacccaggaccucuuccugcccuucuucagcaacgucacgugguuccacgccauccacguguccgggaccaacggcaccaagcgguucgacaacccggugcugcccuucaacgacggggucuacuucgcgagcaccgagaaguccaacaucauccgcggcuggaucuucgggacgacccucgacagcaagacccagucccugcugaucgugaacaacgccaccaacguggucaucaaggugugcgaguuccaguucugcaacgaccccuuccucggcguguacuaccacaagaacaacaagagcuggauggaguccgaguuccgggucuacagcuccgccaacaacugcacguucgaguacgugagccagcccuuccugauggaccuggagggcaagcaggggaacuucaagaaccuccgcgaguucguguucaagaacaucgacggcuacuucaagaucuacuccaagcacaccccgaucaaccugguccgggaccugccccagggguucagcgcccucgagccccugguggaccugcccaucggcaucaacaucacccgcuuccagacccuccuggcccugcaccgguccuaccucacgccgggggacagcagcuccggcuggaccgcgggcgccgccgccuacuacgugggguaccugcagccccgcaccuuccugcucaaguacaacgagaacggcaccaucacggacgcggucgacugcgcccuggacccccugagcgagaccaagugcacccucaaguccuucaccguggagaaggggaucuaccagacgagcaacuuccgggugcagcccaccgaguccaucguccgcuucccgaacaucaccaaccugugccccuucggcgagguguucaacgccacccgguucgccagcgucuacgccuggaaccgcaagcggaucuccaacugcguggcggacuacagcgugcuguacaacuccgccagcuucuccacguucaagugcuacggcgucagccccaccaagcucaacgaccugugcuucaccaacguguacgccgacuccuucgugauccgcggggacgagguccggcagaucgcccccggccagaccgggaagaucgccgacuacaacuacaagcugccggacgacuucacgggcugcgugaucgcguggaacagcaacaaccucgacuccaaggucgggggcaacuacaacuaccuguaccgccuguuccgcaagagcaaccucaagcccuucgagcgggacaucuccaccgagaucuaccaggccggcagcacccccugcaacgggguggagggcuucaacugcuacuucccccugcaguccuacggguuccagccgaccaacggcgugggguaccagcccuaccggguggucgugcugagcuucgagcuccugcacgcccccgccacggugugcggccccaagaaguccaccaaccuggucaagaacaagugcgugaacuucaacuucaacggccucaccgggaccggcgugcugaccgagagcaacaagaaguuccugccguuccagcaguucgggcgcgacaucgccgacacgaccgacgcgguccgcgacccccagacccuggagauccucgacaucacccccugcagcuucggcgggguguccgugaucacgccgggcaccaacaccagcaaccaggucgccgugcuguaccaggacgugaacugcaccgagguccccguggccauccacgccgaccagcugacgcccaccuggcggguguacuccaccggcagcaacgucuuccagacccgcgccgggugccucaucggcgcggagcacgugaacaacuccuacgagugcgacauccccaucggggccggcaucugcgccagcuaccagacgcagaccaacuccccgcggcgcgcccggagcguggcgucccagagcaucaucgccuacaccaugucccugggcgccgagaacagcgucgccuacuccaacaacagcaucgccauccccaccaacuucacgaucuccgugaccaccgagauccugcccgugagcaugaccaagacgagcgucgacugcaccauguacaucugcggggacuccaccgagugcagcaaccuccugcugcaguacggcuccuucugcacccagcucaaccgcgcgcugacggggaucgccguggagcaggacaagaacacccaggagguguucgcccaggucaagcagaucuacaagacgcccccgaucaaggacuucggcggguucaacuucagccagauccugcccgaccccuccaagcccagcaagcgguccuucaucgaggaccuccuguucaacaaggugacccuggccgacgccggcuucaucaagcaguacggcgacugccucggggacaucgcggcccgcgaccugaucugcgcccagaaguucaacggccugaccgugcucccgccccugcugaccgacgagaugaucgcccaguacaccagcgcccuccuggcggggaccaucacguccggcuggaccuucugcgccggcgccgcccugcagauccccuucgcgaugcagauggccuaccgguucaacggcaucggggucacccagaacgugcucuacgagaaccagaagcugaucgccaaccaguucaacagcgccaucggcaagauccaggacucccugagcuccaccgccagcgcgcucgggaagcugcaggacguggucaaccagaacgcccaggcccugaacacgcucgugaagcagcuguccagcaacuucggcgccaucuccagcgugcugaacgacauccucucccgccuggacaaggucgaggccgaggugcagaucgaccggcugaucaccgggcgccuccagagccugcagaccuacgugacccagcagcugauccgggcggccgagauccgcgccagcgccaaccucgccgcgaccaagauguccgagugcgucugcggccagagcaagcggguggacuucugcggcaagggguaccaccugauguccuucccccagagcgccccgcacggcguggucuuccuccacgugacguacguccccgcccaggagaagaacuucaccaccgcccccgcgaucugccacgacgggaaggcccacuucccccgcgagggcguguucguguccaacgggacccacugguucgucacgcagcggaacuucuacgagccgcagaucaucaccaccgacaacaccuucgugagcggcaacugcgacguggucaucggcaucgugaacaacacgguguacgacccccugcagcccgagcuggacuccuucaaggaggagcucgacaaguacuucaagaaccacaccagccccgacgucgaccugggggacaucuccggcaucaacgccagcguggugaacauccagaaggagaucgaccgccugaacgaggucgccaagaaccucaacgagucccugaucgaccugcaggagcucgggaaguacgagcaguacaucaagggcgggagcggcuacauccccgaggccccgcgcgacgggcaggccuacgugcggaaggacggcgaguggguccugcucagcaccuuccugugaggacuaguuauaagacugacuagcccgaugggccucccaacgggcccuccuccccuccuugcaccgagauuaauaaaaaaaaaaaaaaaaaaaaaaaaaaaaaaaaaaaaaaaaaaaaaaaaaaaaaaaaaaaaaaaaugcaucccccccccccccccccccccccccccccccaaaggcucuuuucagagccaccagaauu

SEQ ID NO: 12864 - RNA, 3943 nt, Artificial Sequence
  SARS-CoV-2/Wuhan/WIV05/2019__EPI_ISL_402128 spike protein mRNA gc (1-1211)(I909C_Y1047C) Foldon construct
aggagaaagcuuaccauguucguguuccugguccuccugccccuggugagcucccagugcgugaaccucaccacccgcacgcagcugccgcccgccuacaccaacagcuucacccggggcgucuacuaccccgacaagguguuccgcuccagcgugcugcacuccacccaggaccucuuccugcccuucuucagcaacgucacgugguuccacgccauccacguguccgggaccaacggcaccaagcgguucgacaacccggugcugcccuucaacgacggggucuacuucgcgagcaccgagaaguccaacaucauccgcggcuggaucuucgggacgacccucgacagcaagacccagucccugcugaucgugaacaacgccaccaacguggucaucaaggugugcgaguuccaguucugcaacgaccccuuccucggcguguacuaccacaagaacaacaagagcuggauggaguccgaguuccgggucuacagcuccgccaacaacugcacguucgaguacgugagccagcccuuccugauggaccuggagggcaagcaggggaacuucaagaaccuccgcgaguucguguucaagaacaucgacggcuacuucaagaucuacuccaagcacaccccgaucaaccugguccgggaccugccccagggguucagcgcccucgagccccugguggaccugcccaucggcaucaacaucacccgcuuccagacccuccuggcccugcaccgguccuaccucacgccgggggacagcagcuccggcuggaccgcgggcgccgccgccuacuacgugggguaccugcagccccgcaccuuccugcucaaguacaacgagaacggcaccaucacggacgcggucgacugcgcccuggacccccugagcgagaccaagugcacccucaaguccuucaccguggagaaggggaucuaccagacgagcaacuuccgggugcagcccaccgaguccaucguccgcuucccgaacaucaccaaccugugccccuucggcgagguguucaacgccacccgguucgccagcgucuacgccuggaaccgcaagcggaucuccaacugcguggcggacuacagcgugcuguacaacuccgccagcuucuccacguucaagugcuacggcgucagccccaccaagcucaacgaccugugcuucaccaacguguacgccgacuccuucgugauccgcggggacgagguccggcagaucgcccccggccagaccgggaagaucgccgacuacaacuacaagcugccggacgacuucacgggcugcgugaucgcguggaacagcaacaaccucgacuccaaggucgggggcaacuacaacuaccuguaccgccuguuccgcaagagcaaccucaagcccuucgagcgggacaucuccaccgagaucuaccaggccggcagcacccccugcaacgggguggagggcuucaacugcuacuucccccugcaguccuacggguuccagccgaccaacggcgugggguaccagcccuaccggguggucgugcugagcuucgagcuccugcacgcccccgccacggugugcggccccaagaaguccaccaaccuggucaagaacaagugcgugaacuucaacuucaacggccucaccgggaccggcgugcugaccgagagcaacaagaaguuccugccguuccagcaguucgggcgcgacaucgccgacacgaccgacgcgguccgcgacccccagacccuggagauccucgacaucacccccugcagcuucggcgggguguccgugaucacgccgggcaccaacaccagcaaccaggucgccgugcuguaccaggacgugaacugcaccgagguccccguggccauccacgccgaccagcugacgcccaccuggcggguguacuccaccggcagcaacgucuuccagacccgcgccgggugccucaucggcgcggagcacgugaacaacuccuacgagugcgacauccccaucggggccggcaucugcgccagcuaccagacgcagaccaacuccccgcggcgcgcccggagcguggcgucccagagcaucaucgccuacaccaugucccugggcgccgagaacagcgucgccuacuccaacaacagcaucgccauccccaccaacuucacgaucuccgugaccaccgagauccugcccgugagcaugaccaagacgagcgucgacugcaccauguacaucugcggggacuccaccgagugcagcaaccuccugcugcaguacggcuccuucugcacccagcucaaccgcgcgcugacggggaucgccguggagcaggacaagaacacccaggagguguucgcccaggucaagcagaucuacaagacgcccccgaucaaggacuucggcggguucaacuucagccagauccugcccgaccccuccaagcccagcaagcgguccuucaucgaggaccuccuguucaacaaggugacccuggccgacgccggcuucaucaagcaguacggcgacugccucggggacaucgcggcccgcgaccugaucugcgcccagaaguucaacggccugaccgugcucccgccccugcugaccgacgagaugaucgcccaguacaccagcgcccuccuggcggggaccaucacguccggcuggaccuucggggccggcgccgcccugcagauccccuucgcgaugcagauggccuaccgguucaacggcugcggggucacccagaacgugcucuacgagaaccagaagcugaucgccaaccaguucaacagcgccaucggcaagauccaggacucccugagcuccaccgccagcgcgcucgggaagcugcaggacguggucaaccagaacgcccaggcccugaacacgcucgugaagcagcuguccagcaacuucggcgccaucuccagcgugcugaacgacauccucucccgccuggacaaggucgaggccgaggugcagaucgaccggcugaucaccgggcgccuccagagccugcagaccuacgugacccagcagcugauccgggcggccgagauccgcgccagcgccaaccucgccgcgaccaagauguccgagugcguccugggccagagcaagcggguggacuucugcggcaaggggugccaccugauguccuucccccagagcgccccgcacggcguggucuuccuccacgugacguacguccccgcccaggagaagaacuucaccaccgcccccgcgaucugccacgacgggaaggcccacuucccccgcgagggcguguucguguccaacgggacccacugguucgucacgcagcggaacuucuacgagccgcagaucaucaccaccgacaacaccuucgugagcggcaacugcgacguggucaucggcaucgugaacaacacgguguacgacccccugcagcccgagcuggacuccuucaaggaggagcucgacaaguacuucaagaaccacaccagccccgacgucgaccugggggacaucuccggcaucaacgccagcguggugaacauccagaaggagaucgaccgccugaacgaggucgccaagaaccucaacgagucccugaucgaccugcaggagcucgggaaguacgagcaguacaucaagggcgggagcggcuacauccccgaggccccgcgcgacgggcaggccuacgugcggaaggacggcgaguggguccugcucagcaccuuccugugaggacuaguuauaagacugacuagcccgaugggccucccaacgggcccuccuccccuccuugcaccgagauuaauaaaaaaaaaaaaaaaaaaaaaaaaaaaaaaaaaaaaaaaaaaaaaaaaaaaaaaaaaaaaaaaaugcaucccccccccccccccccccccccccccccccaaaggcucuuuucagagccaccagaauu

SEQ ID NO: 12865 - RNA, 3943 nt, Artificial Sequence
  SARS-CoV-2/Wuhan/WIV05/2019__EPI_ISL_402128 spike protein mRNA gc (1-1211)(Q965C_S1003C) Foldon construct
aggagaaagcuuaccauguucguguuccugguccuccugccccuggugagcucccagugcgugaaccucaccacccgcacgcagcugccgcccgccuacaccaacagcuucacccggggcgucuacuaccccgacaagguguuccgcuccagcgugcugcacuccacccaggaccucuuccugcccuucuucagcaacgucacgugguuccacgccauccacguguccgggaccaacggcaccaagcgguucgacaacccggugcugcccuucaacgacggggucuacuucgcgagcaccgagaaguccaacaucauccgcggcuggaucuucgggacgacccucgacagcaagacccagucccugcugaucgugaacaacgccaccaacguggucaucaaggugugcgaguuccaguucugcaacgaccccuuccucggcguguacuaccacaagaacaacaagagcuggauggaguccgaguuccgggucuacagcuccgccaacaacugcacguucgaguacgugagccagcccuuccugauggaccuggagggcaagcaggggaacuucaagaaccuccgcgaguucguguucaagaacaucgacggcuacuucaagaucuacuccaagcacaccccgaucaaccugguccgggaccugccccagggguucagcgcccucgagccccugguggaccugcccaucggcaucaacaucacccgcuuccagacccuccuggcccugcaccgguccuaccucacgccgggggacagcagcuccggcuggaccgcgggcgccgccgccuacuacgugggguaccugcagccccgcaccuuccugcucaaguacaacgagaacggcaccaucacggacgcggucgacugcgcccuggacccccugagcgagaccaagugcacccucaaguccuucaccguggagaaggggaucuaccagacgagcaacuuccgggugcagcccaccgaguccaucguccgcuucccgaacaucaccaaccugugccccuucggcgagguguucaacgccacccgguucgccagcgucuacgccuggaaccgcaagcggaucuccaacugcguggcggacuacagcgugcuguacaacuccgccagcuucuccacguucaagugcuacggcgucagccccaccaagcucaacgaccugugcuucaccaacguguacgccgacuccuucgugauccgcggggacgagguccggcagaucgcccccggccagaccgggaagaucgccgacuacaacuacaagcugccggacgacuucacgggcugcgugaucgcguggaacagcaacaaccucgacuccaaggucgggggcaacuacaacuaccuguaccgccuguuccgcaagagcaaccucaagcccuucgagcgggacaucuccaccgagaucuaccaggccggcagcacccccugcaacgggguggagggcuucaacugcuacuucccccugcaguccuacggguuccagccgaccaacggcgugggguaccagcccuaccggguggucgugcugagcuucgagcuccugcacgcccccgccacggugugcggccccaagaaguccaccaaccuggucaagaacaagugcgugaacuucaacuucaacggccucaccgggaccggcgugcugaccgagagcaacaagaaguuccugccguuccagcaguucgggcgcgacaucgccgacacgaccgacgcgguccgcgacccccagacccuggagauccucgacaucacccccugcagcuucggcgggguguccgugaucacgccgggcaccaacaccagcaaccaggucgccgugcuguaccaggacgugaacugcaccgagguccccguggccauccacgccgaccagcugacgcccaccuggcggguguacuccaccggcagcaacgucuuccagacccgcgccgggugccucaucggcgcggagcacgugaacaacuccuacgagugcgacauccccaucggggccggcaucugcgccagcuaccagacgcagaccaacuccccgcggcgcgcccggagcguggcgucccagagcaucaucgccuacaccaugucccugggcgccgagaacagcgucgccuacuccaacaacagcaucgccauccccaccaacuucacgaucuccgugaccaccgagauccugcccgugagcaugaccaagacgagcgucgacugcaccauguacaucugcggggacuccaccgagugcagcaaccuccugcugcaguacggcuccuucugcacccagcucaaccgcgcgcugacggggaucgccguggagcaggacaagaacacccaggagguguucgcccaggucaagcagaucuacaagacgcccccgaucaaggacuucggcggguucaacuucagccagauccugcccgaccccuccaagcccagcaagcgguccuucaucgaggaccuccuguucaacaaggugacccuggccgacgccggcuucaucaagcaguacggcgacugccucggggacaucgcggcccgcgaccugaucugcgcccagaaguucaacggccugaccgugcucccgccccugcugaccgacgagaugaucgcccaguacaccagcgcccuccuggcggggaccaucacguccggcuggaccuucggggccggcgccgcccugcagauccccuucgcgaugcagauggccuaccgguucaacggcaucggggucacccagaacgugcucuacgagaaccagaagcugaucgccaaccaguucaacagcgccaucggcaagauccaggacucccugagcuccaccgccagcgcgcucgggaagcugcaggacguggucaaccagaacgcccaggcccugaacacgcucgugaagugccuguccagcaacuucggcgccaucuccagcgugcugaacgacauccucucccgccuggacaaggucgaggccgaggugcagaucgaccggcugaucaccgggcgccuccagugccugcagaccuacgugacccagcagcugauccgggcggccgagauccgcgccagcgccaaccucgccgcgaccaagauguccgagugcguccugggccagagcaagcggguggacuucugcggcaagggguaccaccugauguccuucccccagagcgccccgcacggcguggucuuccuccacgugacguacguccccgcccaggagaagaacuucaccaccgcccccgcgaucugccacgacgggaaggcccacuucccccgcgagggcguguucguguccaacgggacccacugguucgucacgcagcggaacuucuacgagccgcagaucaucaccaccgacaacaccuucgugagcggcaacugcgacguggucaucggcaucgugaacaacacgguguacgacccccugcagcccgagcuggacuccuucaaggaggagcucgacaaguacuucaagaaccacaccagccccgacgucgaccugggggacaucuccggcaucaacgccagcguggugaacauccagaaggagaucgaccgccugaacgaggucgccaagaaccucaacgagucccugaucgaccugcaggagcucgggaaguacgagcaguacaucaagggcgggagcggcuacauccccgaggccccgcgcgacgggcaggccuacgugcggaaggacggcgaguggguccugcucagcaccuuccugugaggacuaguuauaagacugacuagcccgaugggccucccaacgggcccuccuccccuccuugcaccgagauuaauaaaaaaaaaaaaaaaaaaaaaaaaaaaaaaaaaaaaaaaaaaaaaaaaaaaaaaaaaaaaaaaaugcaucccccccccccccccccccccccccccccccaaaggcucuuuucagagccaccagaauu

SEQ ID NO: 12866 - RNA, 3943 nt, Artificial Sequence
  SARS-CoV-2/Wuhan/WIV05/2019__EPI_ISL_402128 spike protein mRNA gc (1-1211)(F970C_G999C) Foldon construct
aggagaaagcuuaccauguucguguuccugguccuccugccccuggugagcucccagugcgugaaccucaccacccgcacgcagcugccgcccgccuacaccaacagcuucacccggggcgucuacuaccccgacaagguguuccgcuccagcgugcugcacuccacccaggaccucuuccugcccuucuucagcaacgucacgugguuccacgccauccacguguccgggaccaacggcaccaagcgguucgacaacccggugcugcccuucaacgacggggucuacuucgcgagcaccgagaaguccaacaucauccgcggcuggaucuucgggacgacccucgacagcaagacccagucccugcugaucgugaacaacgccaccaacguggucaucaaggugugcgaguuccaguucugcaacgaccccuuccucggcguguacuaccacaagaacaacaagagcuggauggaguccgaguuccgggucuacagcuccgccaacaacugcacguucgaguacgugagccagcccuuccugauggaccuggagggcaagcaggggaacuucaagaaccuccgcgaguucguguucaagaacaucgacggcuacuucaagaucuacuccaagcacaccccgaucaaccugguccgggaccugccccagggguucagcgcccucgagccccugguggaccugcccaucggcaucaacaucacccgcuuccagacccuccuggcccugcaccgguccuaccucacgccgggggacagcagcuccggcuggaccgcgggcgccgccgccuacuacgugggguaccugcagccccgcaccuuccugcucaaguacaacgagaacggcaccaucacggacgcggucgacugcgcccuggacccccugagcgagaccaagugcacccucaaguccuucaccguggagaaggggaucuaccagacgagcaacuuccgggugcagcccaccgaguccaucguccgcuucccgaacaucaccaaccugugccccuucggcgagguguucaacgccacccgguucgccagcgucuacgccuggaaccgcaagcggaucuccaacugcguggcggacuacagcgugcuguacaacuccgccagcuucuccacguucaagugcuacggcgucagccccaccaagcucaacgaccugugcuucaccaacguguacgccgacuccuucgugauccgcggggacgagguccggcagaucgcccccggccagaccgggaagaucgccgacuacaacuacaagcugccggacgacuucacgggcugcgugaucgcguggaacagcaacaaccucgacuccaaggucgggggcaacuacaacuaccuguaccgccuguuccgcaagagcaaccucaagcccuucgagcgggacaucuccaccgagaucuaccaggccggcagcacccccugcaacgggguggagggcuucaacugcuacuucccccugcaguccuacggguuccagccgaccaacggcgugggguaccagcccuaccggguggucgugcugagcuucgagcuccugcacgcccccgccacggugugcggccccaagaaguccaccaaccuggucaagaacaagugcgugaacuucaacuucaacggccucaccgggaccggcgugcugaccgagagcaacaagaaguuccugccguuccagcaguucgggcgcgacaucgccgacacgaccgacgcgguccgcgacccccagacccuggagauccucgacaucacccccugcagcuucggcgggguguccgugaucacgccgggcaccaacaccagcaaccaggucgccgugcuguaccaggacgugaacugcaccgagguccccguggccauccacgccgaccagcugacgcccaccuggcggguguacuccaccggcagcaacgucuuccagacccgcgccgggugccucaucggcgcggagcacgugaacaacuccuacgagugcgacauccccaucggggccggcaucugcgccagcuaccagacgcagaccaacuccccgcggcgcgcccggagcguggcgucccagagcaucaucgccuacaccaugucccugggcgccgagaacagcgucgccuacuccaacaacagcaucgccauccccaccaacuucacgaucuccgugaccaccgagauccugcccgugagcaugaccaagacgagcgucgacugcaccauguacaucugcggggacuccaccgagugcagcaaccuccugcugcaguacggcuccuucugcacccagcucaaccgcgcgcugacggggaucgccguggagcaggacaagaacacccaggagguguucgcccaggucaagcagaucuacaagacgcccccgaucaaggacuucggcggguucaacuucagccagauccugcccgaccccuccaagcccagcaagcgguccuucaucgaggaccuccuguucaacaaggugacccuggccgacgccggcuucaucaagcaguacggcgacugccucggggacaucgcggcccgcgaccugaucugcgcccagaaguucaacggccugaccgugcucccgccccugcugaccgacgagaugaucgcccaguacaccagcgcccuccuggcggggaccaucacguccggcuggaccuucggggccggcgccgcccugcagauccccuucgcgaugcagauggccuaccgguucaacggcaucggggucacccagaacgugcucuacgagaaccagaagcugaucgccaaccaguucaacagcgccaucggcaagauccaggacucccugagcuccaccgccagcgcgcucgggaagcugcaggacguggucaaccagaacgcccaggcccugaacacgcucgugaagcagcuguccagcaacugcggcgccaucuccagcgugcugaacgacauccucucccgccuggacaaggucgaggccgaggugcagaucgaccggcugaucaccugucgccuccagagccugcagaccuacgugacccagcagcugauccgggcggccgagauccgcgccagcgccaaccucgccgcgaccaagauguccgagugcguccugggccagagcaagcggguggacuucugcggcaagggguaccaccugauguccuucccccagagcgccccgcacggcguggucuuccuccacgugacguacguccccgcccaggagaagaacuucaccaccgcccccgcgaucugccacgacgggaaggcccacuucccccgcgagggcguguucguguccaacgggacccacugguucgucacgcagcggaacuucuacgagccgcagaucaucaccaccgacaacaccuucgugagcggcaacugcgacguggucaucggcaucgugaacaacacgguguacgacccccugcagcccgagcuggacuccuucaaggaggagcucgacaaguacuucaagaaccacaccagccccgacgucgaccugggggacaucuccggcaucaacgccagcguggugaacauccagaaggagaucgaccgccugaacgaggucgccaagaaccucaacgagucccugaucgaccugcaggagcucgggaaguacgagcaguacaucaagggcgggagcggcuacauccccgaggccccgcgcgacgggcaggccuacgugcggaaggacggcgaguggguccugcucagcaccuuccugugaggacuaguuauaagacugacuagcccgaugggccucccaacgggcccuccuccccuccuugcaccgagauuaauaaaaaaaaaaaaaaaaaaaaaaaaaaaaaaaaaaaaaaaaaaaaaaaaaaaaaaaaaaaaaaaaugcaucccccccccccccccccccccccccccccccaaaggcucuuuucagagccaccagaauu

SEQ ID NO: 12867 - RNA, 3943 nt, Artificial Sequence
  SARS-CoV-2/Wuhan/WIV05/2019__EPI_ISL_402128 spike protein mRNA gc (1-1211)(A972C_R995C) Foldon construct
aggagaaagcuuaccauguucguguuccugguccuccugccccuggugagcucccagugcgugaaccucaccacccgcacgcagcugccgcccgccuacaccaacagcuucacccggggcgucuacuaccccgacaagguguuccgcuccagcgugcugcacuccacccaggaccucuuccugcccuucuucagcaacgucacgugguuccacgccauccacguguccgggaccaacggcaccaagcgguucgacaacccggugcugcccuucaacgacggggucuacuucgcgagcaccgagaaguccaacaucauccgcggcuggaucuucgggacgacccucgacagcaagacccagucccugcugaucgugaacaacgccaccaacguggucaucaaggugugcgaguuccaguucugcaacgaccccuuccucggcguguacuaccacaagaacaacaagagcuggauggaguccgaguuccgggucuacagcuccgccaacaacugcacguucgaguacgugagccagcccuuccugauggaccuggagggcaagcaggggaacuucaagaaccuccgcgaguucguguucaagaacaucgacggcuacuucaagaucuacuccaagcacaccccgaucaaccugguccgggaccugccccagggguucagcgcccucgagccccugguggaccugcccaucggcaucaacaucacccgcuuccagacccuccuggcccugcaccgguccuaccucacgccgggggacagcagcuccggcuggaccgcgggcgccgccgccuacuacgugggguaccugcagccccgcaccuuccugcucaaguacaacgagaacggcaccaucacggacgcggucgacugcgcccuggacccccugagcgagaccaagugcacccucaaguccuucaccguggagaaggggaucuaccagacgagcaacuuccgggugcagcccaccgaguccaucguccgcuucccgaacaucaccaaccugugccccuucggcgagguguucaacgccacccgguucgccagcgucuacgccuggaaccgcaagcggaucuccaacugcguggcggacuacagcgugcuguacaacuccgccagcuucuccacguucaagugcuacggcgucagccccaccaagcucaacgaccugugcuucaccaacguguacgccgacuccuucgugauccgcggggacgagguccggcagaucgcccccggccagaccgggaagaucgccgacuacaacuacaagcugccggacgacuucacgggcugcgugaucgcguggaacagcaacaaccucgacuccaaggucgggggcaacuacaacuaccuguaccgccuguuccgcaagagcaaccucaagcccuucgagcgggacaucuccaccgagaucuaccaggccggcagcacccccugcaacgggguggagggcuucaacugcuacuucccccugcaguccuacggguuccagccgaccaacggcgugggguaccagcccuaccggguggucgugcugagcuucgagcuccugcacgcccccgccacggugugcggccccaagaaguccaccaaccuggucaagaacaagugcgugaacuucaacuucaacggccucaccgggaccggcgugcugaccgagagcaacaagaaguuccugccguuccagcaguucgggcgcgacaucgccgacacgaccgacgcgguccgcgacccccagacccuggagauccucgacaucacccccugcagcuucggcgggguguccgugaucacgccgggcaccaacaccagcaaccaggucgccgugcuguaccaggacgugaacugcaccgagguccccguggccauccacgccgaccagcugacgcccaccuggcggguguacuccaccggcagcaacgucuuccagacccgcgccgggugccucaucggcgcggagcacgugaacaacuccuacgagugcgacauccccaucggggccggcaucugcgccagcuaccagacgcagaccaacuccccgcggcgcgcccggagcguggcgucccagagcaucaucgccuacaccaugucccugggcgccgagaacagcgucgccuacuccaacaacagcaucgccauccccaccaacuucacgaucuccgugaccaccgagauccugcccgugagcaugaccaagacgagcgucgacugcaccauguacaucugcggggacuccaccgagugcagcaaccuccugcugcaguacggcuccuucugcacccagcucaaccgcgcgcugacggggaucgccguggagcaggacaagaacacccaggagguguucgcccaggucaagcagaucuacaagacgcccccgaucaaggacuucggcggguucaacuucagccagauccugcccgaccccuccaagcccagcaagcgguccuucaucgaggaccuccuguucaacaaggugacccuggccgacgccggcuucaucaagcaguacggcgacugccucggggacaucgcggcccgcgaccugaucugcgcccagaaguucaacggccugaccgugcucccgccccugcugaccgacgagaugaucgcccaguacaccagcgcccuccuggcggggaccaucacguccggcuggaccuucggggccggcgccgcccugcagauccccuucgcgaugcagauggccuaccgguucaacggcaucggggucacccagaacgugcucuacgagaaccagaagcugaucgccaaccaguucaacagcgccaucggcaagauccaggacucccugagcuccaccgccagcgcgcucgggaagcugcaggacguggucaaccagaacgcccaggcccugaacacgcucgugaagcagcuguccagcaacuucggcugcaucuccagcgugcugaacgacauccucucccgccuggacaaggucgaggccgaggugcagaucgacugccugaucaccgggcgccuccagagccugcagaccuacgugacccagcagcugauccgggcggccgagauccgcgccagcgccaaccucgccgcgaccaagauguccgagugcguccugggccagagcaagcggguggacuucugcggcaagggguaccaccugauguccuucccccagagcgccccgcacggcguggucuuccuccacgugacguacguccccgcccaggagaagaacuucaccaccgcccccgcgaucugccacgacgggaaggcccacuucccccgcgagggcguguucguguccaacgggacccacugguucgucacgcagcggaacuucuacgagccgcagaucaucaccaccgacaacaccuucgugagcggcaacugcgacguggucaucggcaucgugaacaacacgguguacgacccccugcagcccgagcuggacuccuucaaggaggagcucgacaaguacuucaagaaccacaccagccccgacgucgaccugggggacaucuccggcaucaacgccagcguggugaacauccagaaggagaucgaccgccugaacgaggucgccaagaaccucaacgagucccugaucgaccugcaggagcucgggaaguacgagcaguacaucaagggcgggagcggcuacauccccgaggccccgcgcgacgggcaggccuacgugcggaaggacggcgaguggguccugcucagcaccuuccugugaggacuaguuauaagacugacuagcccgaugggccucccaacgggcccuccuccccuccuugcaccgagauuaauaaaaaaaaaaaaaaaaaaaaaaaaaaaaaaaaaaaaaaaaaaaaaaaaaaaaaaaaaaaaaaaaugcaucccccccccccccccccccccccccccccccaaaggcucuuuucagagccaccagaauu

SEQ ID NO: 12868 - RNA, 3943 nt, Artificial Sequence
  SARS-CoV-2/Wuhan/WIV05/2019__EPI_ISL_402128 spike protein mRNA gc (1-1211)(A890C_V1040C) Foldon construct
aggagaaagcuuaccauguucguguuccugguccuccugccccuggugagcucccagugcgugaaccucaccacccgcacgcagcugccgcccgccuacaccaacagcuucacccggggcgucuacuaccccgacaagguguuccgcuccagcgugcugcacuccacccaggaccucuuccugcccuucuucagcaacgucacgugguuccacgccauccacguguccgggaccaacggcaccaagcgguucgacaacccggugcugcccuucaacgacggggucuacuucgcgagcaccgagaaguccaacaucauccgcggcuggaucuucgggacgacccucgacagcaagacccagucccugcugaucgugaacaacgccaccaacguggucaucaaggugugcgaguuccaguucugcaacgaccccuuccucggcguguacuaccacaagaacaacaagagcuggauggaguccgaguuccgggucuacagcuccgccaacaacugcacguucgaguacgugagccagcccuuccugauggaccuggagggcaagcaggggaacuucaagaaccuccgcgaguucguguucaagaacaucgacggcuacuucaagaucuacuccaagcacaccccgaucaaccugguccgggaccugccccagggguucagcgcccucgagccccugguggaccugcccaucggcaucaacaucacccgcuuccagacccuccuggcccugcaccgguccuaccucacgccgggggacagcagcuccggcuggaccgcgggcgccgccgccuacuacgugggguaccugcagccccgcaccuuccugcucaaguacaacgagaacggcaccaucacggacgcggucgacugcgcccuggacccccugagcgagaccaagugcacccucaaguccuucaccguggagaaggggaucuaccagacgagcaacuuccgggugcagcccaccgaguccaucguccgcuucccgaacaucaccaaccugugccccuucggcgagguguucaacgccacccgguucgccagcgucuacgccuggaaccgcaagcggaucuccaacugcguggcggacuacagcgugcuguacaacuccgccagcuucuccacguucaagugcuacggcgucagccccaccaagcucaacgaccugugcuucaccaacguguacgccgacuccuucgugauccgcggggacgagguccggcagaucgcccccggccagaccgggaagaucgccgacuacaacuacaagcugccggacgacuucacgggcugcgugaucgcguggaacagcaacaaccucgacuccaaggucgggggcaacuacaacuaccuguaccgccuguuccgcaagagcaaccucaagcccuucgagcgggacaucuccaccgagaucuaccaggccggcagcacccccugcaacgggguggagggcuucaacugcuacuucccccugcaguccuacggguuccagccgaccaacggcgugggguaccagcccuaccggguggucgugcugagcuucgagcuccugcacgcccccgccacggugugcggccccaagaaguccaccaaccuggucaagaacaagugcgugaacuucaacuucaacggccucaccgggaccggcgugcugaccgagagcaacaagaaguuccugccguuccagcaguucgggcgcgacaucgccgacacgaccgacgcgguccgcgacccccagacccuggagauccucgacaucacccccugcagcuucggcgggguguccgugaucacgccgggcaccaacaccagcaaccaggucgccgugcuguaccaggacgugaacugcaccgagguccccguggccauccacgccgaccagcugacgcccaccuggcggguguacuccaccggcagcaacgucuuccagacccgcgccgggugccucaucggcgcggagcacgugaacaacuccuacgagugcgacauccccaucggggccggcaucugcgccagcuaccagacgcagaccaacuccccgcggcgcgcccggagcguggcgucccagagcaucaucgccuacaccaugucccugggcgccgagaacagcgucgccuacuccaacaacagcaucgccauccccaccaacuucacgaucuccgugaccaccgagauccugcccgugagcaugaccaagacgagcgucgacugcaccauguacaucugcggggacuccaccgagugcagcaaccuccugcugcaguacggcuccuucugcacccagcucaaccgcgcgcugacggggaucgccguggagcaggacaagaacacccaggagguguucgcccaggucaagcagaucuacaagacgcccccgaucaaggacuucggcggguucaacuucagccagauccugcccgaccccuccaagcccagcaagcgguccuucaucgaggaccuccuguucaacaaggugacccuggccgacgccggcuucaucaagcaguacggcgacugccucggggacaucgcggcccgcgaccugaucugcgcccagaaguucaacggccugaccgugcucccgccccugcugaccgacgagaugaucgcccaguacaccagcgcccuccuggcggggaccaucacguccggcuggaccuucgggugcggcgccgcccugcagauccccuucgcgaugcagauggccuaccgguucaacggcaucggggucacccagaacgugcucuacgagaaccagaagcugaucgccaaccaguucaacagcgccaucggcaagauccaggacucccugagcuccaccgccagcgcgcucgggaagcugcaggacguggucaaccagaacgcccaggcccugaacacgcucgugaagcagcuguccagcaacuucggcgccaucuccagcgugcugaacgacauccucucccgccuggacaaggucgaggccgaggugcagaucgaccggcugaucaccgggcgccuccagagccugcagaccuacgugacccagcagcugauccgggcggccgagauccgcgccagcgccaaccucgccgcgaccaagauguccgagugcguccugggccagagcaagcggugcgacuucugcggcaagggguaccaccugauguccuucccccagagcgccccgcacggcguggucuuccuccacgugacguacguccccgcccaggagaagaacuucaccaccgcccccgcgaucugccacgacgggaaggcccacuucccccgcgagggcguguucguguccaacgggacccacugguucgucacgcagcggaacuucuacgagccgcagaucaucaccaccgacaacaccuucgugagcggcaacugcgacguggucaucggcaucgugaacaacacgguguacgacccccugcagcccgagcuggacuccuucaaggaggagcucgacaaguacuucaagaaccacaccagccccgacgucgaccugggggacaucuccggcaucaacgccagcguggugaacauccagaaggagaucgaccgccugaacgaggucgccaagaaccucaacgagucccugaucgaccugcaggagcucgggaaguacgagcaguacaucaagggcgggagcggcuacauccccgaggccccgcgcgacgggcaggccuacgugcggaaggacggcgaguggguccugcucagcaccuuccugugaggacuaguuauaagacugacuagcccgaugggccucccaacgggcccuccuccccuccuugcaccgagauuaauaaaaaaaaaaaaaaaaaaaaaaaaaaaaaaaaaaaaaaaaaaaaaaaaaaaaaaaaaaaaaaaaugcaucccccccccccccccccccccccccccccccaaaggcucuuuucagagccaccagaauu

SEQ ID NO: 12869 - RNA, 3943 nt, Artificial Sequence
  SARS-CoV-2/Wuhan/WIV05/2019__EPI_ISL_402128 spike protein mRNA gc (1-1211)(T874C_S1055C) Foldon construct
aggagaaagcuuaccauguucguguuccugguccuccugccccuggugagcucccagugcgugaaccucaccacccgcacgcagcugccgcccgccuacaccaacagcuucacccggggcgucuacuaccccgacaagguguuccgcuccagcgugcugcacuccacccaggaccucuuccugcccuucuucagcaacgucacgugguuccacgccauccacguguccgggaccaacggcaccaagcgguucgacaacccggugcugcccuucaacgacggggucuacuucgcgagcaccgagaaguccaacaucauccgcggcuggaucuucgggacgacccucgacagcaagacccagucccugcugaucgugaacaacgccaccaacguggucaucaaggugugcgaguuccaguucugcaacgaccccuuccucggcguguacuaccacaagaacaacaagagcuggauggaguccgaguuccgggucuacagcuccgccaacaacugcacguucgaguacgugagccagcccuuccugauggaccuggagggcaagcaggggaacuucaagaaccuccgcgaguucguguucaagaacaucgacggcuacuucaagaucuacuccaagcacaccccgaucaaccugguccgggaccugccccagggguucagcgcccucgagccccugguggaccugcccaucggcaucaacaucacccgcuuccagacccuccuggcccugcaccgguccuaccucacgccgggggacagcagcuccggcuggaccgcgggcgccgccgccuacuacgugggguaccugcagccccgcaccuuccugcucaaguacaacgagaacggcaccaucacggacgcggucgacugcgcccuggacccccugagcgagaccaagugcacccucaaguccuucaccguggagaaggggaucuaccagacgagcaacuuccgggugcagcccaccgaguccaucguccgcuucccgaacaucaccaaccugugccccuucggcgagguguucaacgccacccgguucgccagcgucuacgccuggaaccgcaagcggaucuccaacugcguggcggacuacagcgugcuguacaacuccgccagcuucuccacguucaagugcuacggcgucagccccaccaagcucaacgaccugugcuucaccaacguguacgccgacuccuucgugauccgcggggacgagguccggcagaucgcccccggccagaccgggaagaucgccgacuacaacuacaagcugccggacgacuucacgggcugcgugaucgcguggaacagcaacaaccucgacuccaaggucgggggcaacuacaacuaccuguaccgccuguuccgcaagagcaaccucaagcccuucgagcgggacaucuccaccgagaucuaccaggccggcagcacccccugcaacgggguggagggcuucaacugcuacuucccccugcaguccuacggguuccagccgaccaacggcgugggguaccagcccuaccggguggucgugcugagcuucgagcuccugcacgcccccgccacggugugcggccccaagaaguccaccaaccuggucaagaacaagugcgugaacuucaacuucaacggccucaccgggaccggcgugcugaccgagagcaacaagaaguuccugccguuccagcaguucgggcgcgacaucgccgacacgaccgacgcgguccgcgacccccagacccuggagauccucgacaucacccccugcagcuucggcgggguguccgugaucacgccgggcaccaacaccagcaaccaggucgccgugcuguaccaggacgugaacugcaccgagguccccguggccauccacgccgaccagcugacgcccaccuggcggguguacuccaccggcagcaacgucuuccagacccgcgccgggugccucaucggcgcggagcacgugaacaacuccuacgagugcgacauccccaucggggccggcaucugcgccagcuaccagacgcagaccaacuccccgcggcgcgcccggagcguggcgucccagagcaucaucgccuacaccaugucccugggcgccgagaacagcgucgccuacuccaacaacagcaucgccauccccaccaacuucacgaucuccgugaccaccgagauccugcccgugagcaugaccaagacgagcgucgacugcaccauguacaucugcggggacuccaccgagugcagcaaccuccugcugcaguacggcuccuucugcacccagcucaaccgcgcgcugacggggaucgccguggagcaggacaagaacacccaggagguguucgcccaggucaagcagaucuacaagacgcccccgaucaaggacuucggcggguucaacuucagccagauccugcccgaccccuccaagcccagcaagcgguccuucaucgaggaccuccuguucaacaaggugacccuggccgacgccggcuucaucaagcaguacggcgacugccucggggacaucgcggcccgcgaccugaucugcgcccagaaguucaacggccugaccgugcucccgccccugcugaccgacgagaugaucgcccaguacugcagcgcccuccuggcggggaccaucacguccggcuggaccuucggggccggcgccgcccugcagauccccuucgcgaugcagauggccuaccgguucaacggcaucggggucacccagaacgugcucuacgagaaccagaagcugaucgccaaccaguucaacagcgccaucggcaagauccaggacucccugagcuccaccgccagcgcgcucgggaagcugcaggacguggucaaccagaacgcccaggcccugaacacgcucgugaagcagcuguccagcaacuucggcgccaucuccagcgugcugaacgacauccucucccgccuggacaaggucgaggccgaggugcagaucgaccggcugaucaccgggcgccuccagagccugcagaccuacgugacccagcagcugauccgggcggccgagauccgcgccagcgccaaccucgccgcgaccaagauguccgagugcguccugggccagagcaagcggguggacuucugcggcaagggguaccaccugauguccuucccccagugcgccccgcacggcguggucuuccuccacgugacguacguccccgcccaggagaagaacuucaccaccgcccccgcgaucugccacgacgggaaggcccacuucccccgcgagggcguguucguguccaacgggacccacugguucgucacgcagcggaacuucuacgagccgcagaucaucaccaccgacaacaccuucgugagcggcaacugcgacguggucaucggcaucgugaacaacacgguguacgacccccugcagcccgagcuggacuccuucaaggaggagcucgacaaguacuucaagaaccacaccagccccgacgucgaccugggggacaucuccggcaucaacgccagcguggugaacauccagaaggagaucgaccgccugaacgaggucgccaagaaccucaacgagucccugaucgaccugcaggagcucgggaaguacgagcaguacaucaagggcgggagcggcuacauccccgaggccccgcgcgacgggcaggccuacgugcggaaggacggcgaguggguccugcucagcaccuuccugugaggacuaguuauaagacugacuagcccgaugggccucccaacgggcccuccuccccuccuugcaccgagauuaauaaaaaaaaaaaaaaaaaaaaaaaaaaaaaaaaaaaaaaaaaaaaaaaaaaaaaaaaaaaaaaaaugcaucccccccccccccccccccccccccccccccaaaggcucuuuucagagccaccagaauu

SEQ ID NO: 12870 - RNA, 4315 nt, Artificial Sequence
  SARS-CoV-2/Wuhan/WIV05/2019__EPI_ISL_402128 spike protein mRNA gc (1-1211) WhcAg construct
aggagaaagcuuaccauguucguguuccugguccuccugccccuggugagcucccagugcgugaaccucaccacccgcacgcagcugccgcccgccuacaccaacagcuucacccggggcgucuacuaccccgacaagguguuccgcuccagcgugcugcacuccacccaggaccucuuccugcccuucuucagcaacgucacgugguuccacgccauccacguguccgggaccaacggcaccaagcgguucgacaacccggugcugcccuucaacgacggggucuacuucgcgagcaccgagaaguccaacaucauccgcggcuggaucuucgggacgacccucgacagcaagacccagucccugcugaucgugaacaacgccaccaacguggucaucaaggugugcgaguuccaguucugcaacgaccccuuccucggcguguacuaccacaagaacaacaagagcuggauggaguccgaguuccgggucuacagcuccgccaacaacugcacguucgaguacgugagccagcccuuccugauggaccuggagggcaagcaggggaacuucaagaaccuccgcgaguucguguucaagaacaucgacggcuacuucaagaucuacuccaagcacaccccgaucaaccugguccgggaccugccccagggguucagcgcccucgagccccugguggaccugcccaucggcaucaacaucacccgcuuccagacccuccuggcccugcaccgguccuaccucacgccgggggacagcagcuccggcuggaccgcgggcgccgccgccuacuacgugggguaccugcagccccgcaccuuccugcucaaguacaacgagaacggcaccaucacggacgcggucgacugcgcccuggacccccugagcgagaccaagugcacccucaaguccuucaccguggagaaggggaucuaccagacgagcaacuuccgggugcagcccaccgaguccaucguccgcuucccgaacaucaccaaccugugccccuucggcgagguguucaacgccacccgguucgccagcgucuacgccuggaaccgcaagcggaucuccaacugcguggcggacuacagcgugcuguacaacuccgccagcuucuccacguucaagugcuacggcgucagccccaccaagcucaacgaccugugcuucaccaacguguacgccgacuccuucgugauccgcggggacgagguccggcagaucgcccccggccagaccgggaagaucgccgacuacaacuacaagcugccggacgacuucacgggcugcgugaucgcguggaacagcaacaaccucgacuccaaggucgggggcaacuacaacuaccuguaccgccuguuccgcaagagcaaccucaagcccuucgagcgggacaucuccaccgagaucuaccaggccggcagcacccccugcaacgggguggagggcuucaacugcuacuucccccugcaguccuacggguuccagccgaccaacggcgugggguaccagcccuaccggguggucgugcugagcuucgagcuccugcacgcccccgccacggugugcggccccaagaaguccaccaaccuggucaagaacaagugcgugaacuucaacuucaacggccucaccgggaccggcgugcugaccgagagcaacaagaaguuccugccguuccagcaguucgggcgcgacaucgccgacacgaccgacgcgguccgcgacccccagacccuggagauccucgacaucacccccugcagcuucggcgggguguccgugaucacgccgggcaccaacaccagcaaccaggucgccgugcuguaccaggacgugaacugcaccgagguccccguggccauccacgccgaccagcugacgcccaccuggcggguguacuccaccggcagcaacgucuuccagacccgcgccgggugccucaucggcgcggagcacgugaacaacuccuacgagugcgacauccccaucggggccggcaucugcgccagcuaccagacgcagaccaacuccccgcggcgcgcccggagcguggcgucccagagcaucaucgccuacaccaugucccugggcgccgagaacagcgucgccuacuccaacaacagcaucgccauccccaccaacuucacgaucuccgugaccaccgagauccugcccgugagcaugaccaagacgagcgucgacugcaccauguacaucugcggggacuccaccgagugcagcaaccuccugcugcaguacggcuccuucugcacccagcucaaccgcgcgcugacggggaucgccguggagcaggacaagaacacccaggagguguucgcccaggucaagcagaucuacaagacgcccccgaucaaggacuucggcggguucaacuucagccagauccugcccgaccccuccaagcccagcaagcgguccuucaucgaggaccuccuguucaacaaggugacccuggccgacgccggcuucaucaagcaguacggcgacugccucggggacaucgcggcccgcgaccugaucugcgcccagaaguucaacggccugaccgugcucccgccccugcugaccgacgagaugaucgcccaguacaccagcgcccuccuggcggggaccaucacguccggcuggaccuucggggccggcgccgcccugcagauccccuucgcgaugcagauggccuaccgguucaacggcaucggggucacccagaacgugcucuacgagaaccagaagcugaucgccaaccaguucaacagcgccaucggcaagauccaggacucccugagcuccaccgccagcgcgcucgggaagcugcaggacguggucaaccagaacgcccaggcccugaacacgcucgugaagcagcuguccagcaacuucggcgccaucuccagcgugcugaacgacauccucucccgccuggacaaggucgaggccgaggugcagaucgaccggcugaucaccgggcgccuccagagccugcagaccuacgugacccagcagcugauccgggcggccgagauccgcgccagcgccaaccucgccgcgaccaagauguccgagugcguccugggccagagcaagcggguggacuucugcggcaagggguaccaccugauguccuucccccagagcgccccgcacggcguggucuuccuccacgugacguacguccccgcccaggagaagaacuucaccaccgcccccgcgaucugccacgacgggaaggcccacuucccccgcgagggcguguucguguccaacgggacccacugguucgucacgcagcggaacuucuacgagccgcagaucaucaccaccgacaacaccuucgugagcggcaacugcgacguggucaucggcaucgugaacaacacgguguacgacccccugcagcccgagcuggacuccuucaaggaggagcucgacaaguacuucaagaaccacaccagccccgacgucgaccugggggacaucuccggcaucaacgccagcguggugaacauccagaaggagaucgaccgccugaacgaggucgccaagaaccucaacgagucccugaucgaccugcaggagcucgggaaguacgagcaguacaucaagggcgggggcgggagcgacaucgaccccuacaaggaguucggcagcuccuaccagcugcucaacuuccugccccuggacuucuuccccgaccucaacgcccugguggacaccgccaccgcgcuguacgaggaggagcucacggggcgcgagcacugcagcccccaccacaccgccauccggcaggcccuggucugcugggacgagcugaccaagcucaucgccuggauguccagcaacaucaccuccgagcagguccgcacgaucaucgugaaccacgucaacgacaccuggggccugaaggugcggcagagccugugguuccaccucuccugccugaccuucgggcagcacaccgugcaggaguuccuggucagcuucggcguguggauccgcacgcccgccccguaccggccgcccaacgcgccgauccucuccacccugccggagcacaccgugaucugcugaggacuaguuauaagacugacuagcccgaugggccucccaacgggcccuccuccccuccuugcaccgagauuaauaaaaaaaaaaaaaaaaaaaaaaaaaaaaaaaaaaaaaaaaaaaaaaaaaaaaaaaaaaaaaaaaugcaucccccccccccccccccccccccccccccccaaaggcucuuuucagagccaccagaauu

SEQ ID NO: 12871 - RNA, 4315 nt, Artificial Sequence
  SARS-CoV-2/Wuhan/WIV05/2019__EPI_ISL_402128 spike protein mRNA gc (1-1211)(K986P_V987P) WhcAg construct
aggagaaagcuuaccauguucguguuccugguccuccugccccuggugagcucccagugcgugaaccucaccacccgcacgcagcugccgcccgccuacaccaacagcuucacccggggcgucuacuaccccgacaagguguuccgcuccagcgugcugcacuccacccaggaccucuuccugcccuucuucagcaacgucacgugguuccacgccauccacguguccgggaccaacggcaccaagcgguucgacaacccggugcugcccuucaacgacggggucuacuucgcgagcaccgagaaguccaacaucauccgcggcuggaucuucgggacgacccucgacagcaagacccagucccugcugaucgugaacaacgccaccaacguggucaucaaggugugcgaguuccaguucugcaacgaccccuuccucggcguguacuaccacaagaacaacaagagcuggauggaguccgaguuccgggucuacagcuccgccaacaacugcacguucgaguacgugagccagcccuuccugauggaccuggagggcaagcaggggaacuucaagaaccuccgcgaguucguguucaagaacaucgacggcuacuucaagaucuacuccaagcacaccccgaucaaccugguccgggaccugccccagggguucagcgcccucgagccccugguggaccugcccaucggcaucaacaucacccgcuuccagacccuccuggcccugcaccgguccuaccucacgccgggggacagcagcuccggcuggaccgcgggcgccgccgccuacuacgugggguaccugcagccccgcaccuuccugcucaaguacaacgagaacggcaccaucacggacgcggucgacugcgcccuggacccccugagcgagaccaagugcacccucaaguccuucaccguggagaaggggaucuaccagacgagcaacuuccgggugcagcccaccgaguccaucguccgcuucccgaacaucaccaaccugugccccuucggcgagguguucaacgccacccgguucgccagcgucuacgccuggaaccgcaagcggaucuccaacugcguggcggacuacagcgugcuguacaacuccgccagcuucuccacguucaagugcuacggcgucagccccaccaagcucaacgaccugugcuucaccaacguguacgccgacuccuucgugauccgcggggacgagguccggcagaucgcccccggccagaccgggaagaucgccgacuacaacuacaagcugccggacgacuucacgggcugcgugaucgcguggaacagcaacaaccucgacuccaaggucgggggcaacuacaacuaccuguaccgccuguuccgcaagagcaaccucaagcccuucgagcgggacaucuccaccgagaucuaccaggccggcagcacccccugcaacgggguggagggcuucaacugcuacuucccccugcaguccuacggguuccagccgaccaacggcgugggguaccagcccuaccggguggucgugcugagcuucgagcuccugcacgcccccgccacggugugcggccccaagaaguccaccaaccuggucaagaacaagugcgugaacuucaacuucaacggccucaccgggaccggcgugcugaccgagagcaacaagaaguuccugccguuccagcaguucgggcgcgacaucgccgacacgaccgacgcgguccgcgacccccagacccuggagauccucgacaucacccccugcagcuucggcgggguguccgugaucacgccgggcaccaacaccagcaaccaggucgccgugcuguaccaggacgugaacugcaccgagguccccguggccauccacgccgaccagcugacgcccaccuggcggguguacuccaccggcagcaacgucuuccagacccgcgccgggugccucaucggcgcggagcacgugaacaacuccuacgagugcgacauccccaucggggccggcaucugcgccagcuaccagacgcagaccaacuccccgcggcgcgcccggagcguggcgucccagagcaucaucgccuacaccaugucccugggcgccgagaacagcgucgccuacuccaacaacagcaucgccauccccaccaacuucacgaucuccgugaccaccgagauccugcccgugagcaugaccaagacgagcgucgacugcaccauguacaucugcggggacuccaccgagugcagcaaccuccugcugcaguacggcuccuucugcacccagcucaaccgcgcgcugacggggaucgccguggagcaggacaagaacacccaggagguguucgcccaggucaagcagaucuacaagacgcccccgaucaaggacuucggcggguucaacuucagccagauccugcccgaccccuccaagcccagcaagcgguccuucaucgaggaccuccuguucaacaaggugacccuggccgacgccggcuucaucaagcaguacggcgacugccucggggacaucgcggcccgcgaccugaucugcgcccagaaguucaacggccugaccgugcucccgccccugcugaccgacgagaugaucgcccaguacaccagcgcccuccuggcggggaccaucacguccggcuggaccuucggggccggcgccgcccugcagauccccuucgcgaugcagauggccuaccgguucaacggcaucggggucacccagaacgugcucuacgagaaccagaagcugaucgccaaccaguucaacagcgccaucggcaagauccaggacucccugagcuccaccgccagcgcgcucgggaagcugcaggacguggucaaccagaacgcccaggcccugaacacgcucgugaagcagcuguccagcaacuucggcgccaucuccagcgugcugaacgacauccucucccgccuggacccgcccgaggccgaggugcagaucgaccggcugaucaccgggcgccuccagagccugcagaccuacgugacccagcagcugauccgggcggccgagauccgcgccagcgccaaccucgccgcgaccaagauguccgagugcguccugggccagagcaagcggguggacuucugcggcaagggguaccaccugauguccuucccccagagcgccccgcacggcguggucuuccuccacgugacguacguccccgcccaggagaagaacuucaccaccgcccccgcgaucugccacgacgggaaggcccacuucccccgcgagggcguguucguguccaacgggacccacugguucgucacgcagcggaacuucuacgagccgcagaucaucaccaccgacaacaccuucgugagcggcaacugcgacguggucaucggcaucgugaacaacacgguguacgacccccugcagcccgagcuggacuccuucaaggaggagcucgacaaguacuucaagaaccacaccagccccgacgucgaccugggggacaucuccggcaucaacgccagcguggugaacauccagaaggagaucgaccgccugaacgaggucgccaagaaccucaacgagucccugaucgaccugcaggagcucgggaaguacgagcaguacaucaagggcgggggcgggagcgacaucgaccccuacaaggaguucggcagcuccuaccagcugcucaacuuccugccccuggacuucuuccccgaccucaacgcccugguggacaccgccaccgcgcuguacgaggaggagcucacggggcgcgagcacugcagcccccaccacaccgccauccggcaggcccuggucugcugggacgagcugaccaagcucaucgccuggauguccagcaacaucaccuccgagcagguccgcacgaucaucgugaaccacgucaacgacaccuggggccugaaggugcggcagagccugugguuccaccucuccugccugaccuucgggcagcacaccgugcaggaguuccuggucagcuucggcguguggauccgcacgcccgccccguaccggccgcccaacgcgccgauccucuccacccugccggagcacaccgugaucugcugaggacuaguuauaagacugacuagcccgaugggccucccaacgggcccuccuccccuccuugcaccgagauuaauaaaaaaaaaaaaaaaaaaaaaaaaaaaaaaaaaaaaaaaaaaaaaaaaaaaaaaaaaaaaaaaaugcaucccccccccccccccccccccccccccccccaaaggcucuuuucagagccaccagaauu

SEQ ID NO: 12872 - RNA, 4315 nt, Artificial Sequence
  SARS-CoV-2/Wuhan/WIV05/2019__EPI_ISL_402128 spike protein mRNA gc (1-1211)(K986P_V987P_T887WN_A1020W) WhcAg construct
aggagaaagcuuaccauguucguguuccugguccuccugccccuggugagcucccagugcgugaaccucaccacccgcacgcagcugccgcccgccuacaccaacagcuucacccggggcgucuacuaccccgacaagguguuccgcuccagcgugcugcacuccacccaggaccucuuccugcccuucuucagcaacgucacgugguuccacgccauccacguguccgggaccaacggcaccaagcgguucgacaacccggugcugcccuucaacgacggggucuacuucgcgagcaccgagaaguccaacaucauccgcggcuggaucuucgggacgacccucgacagcaagacccagucccugcugaucgugaacaacgccaccaacguggucaucaaggugugcgaguuccaguucugcaacgaccccuuccucggcguguacuaccacaagaacaacaagagcuggauggaguccgaguuccgggucuacagcuccgccaacaacugcacguucgaguacgugagccagcccuuccugauggaccuggagggcaagcaggggaacuucaagaaccuccgcgaguucguguucaagaacaucgacggcuacuucaagaucuacuccaagcacaccccgaucaaccugguccgggaccugccccagggguucagcgcccucgagccccugguggaccugcccaucggcaucaacaucacccgcuuccagacccuccuggcccugcaccgguccuaccucacgccgggggacagcagcuccggcuggaccgcgggcgccgccgccuacuacgugggguaccugcagccccgcaccuuccugcucaaguacaacgagaacggcaccaucacggacgcggucgacugcgcccuggacccccugagcgagaccaagugcacccucaaguccuucaccguggagaaggggaucuaccagacgagcaacuuccgggugcagcccaccgaguccaucguccgcuucccgaacaucaccaaccugugccccuucggcgagguguucaacgccacccgguucgccagcgucuacgccuggaaccgcaagcggaucuccaacugcguggcggacuacagcgugcuguacaacuccgccagcuucuccacguucaagugcuacggcgucagccccaccaagcucaacgaccugugcuucaccaacguguacgccgacuccuucgugauccgcggggacgagguccggcagaucgcccccggccagaccgggaagaucgccgacuacaacuacaagcugccggacgacuucacgggcugcgugaucgcguggaacagcaacaaccucgacuccaaggucgggggcaacuacaacuaccuguaccgccuguuccgcaagagcaaccucaagcccuucgagcgggacaucuccaccgagaucuaccaggccggcagcacccccugcaacgggguggagggcuucaacugcuacuucccccugcaguccuacggguuccagccgaccaacggcgugggguaccagcccuaccggguggucgugcugagcuucgagcuccugcacgcccccgccacggugugcggccccaagaaguccaccaaccuggucaagaacaagugcgugaacuucaacuucaacggccucaccgggaccggcgugcugaccgagagcaacaagaaguuccugccguuccagcaguucgggcgcgacaucgccgacacgaccgacgcgguccgcgacccccagacccuggagauccucgacaucacccccugcagcuucggcgggguguccgugaucacgccgggcaccaacaccagcaaccaggucgccgugcuguaccaggacgugaacugcaccgagguccccguggccauccacgccgaccagcugacgcccaccuggcggguguacuccaccggcagcaacgucuuccagacccgcgccgggugccucaucggcgcggagcacgugaacaacuccuacgagugcgacauccccaucggggccggcaucugcgccagcuaccagacgcagaccaacuccccgcggcgcgcccggagcguggcgucccagagcaucaucgccuacaccaugucccugggcgccgagaacagcgucgccuacuccaacaacagcaucgccauccccaccaacuucacgaucuccgugaccaccgagauccugcccgugagcaugaccaagacgagcgucgacugcaccauguacaucugcggggacuccaccgagugcagcaaccuccugcugcaguacggcuccuucugcacccagcucaaccgcgcgcugacggggaucgccguggagcaggacaagaacacccaggagguguucgcccaggucaagcagaucuacaagacgcccccgaucaaggacuucggcggguucaacuucagccagauccugcccgaccccuccaagcccagcaagcgguccuucaucgaggaccuccuguucaacaaggugacccuggccgacgccggcuucaucaagcaguacggcgacugccucggggacaucgcggcccgcgaccugaucugcgcccagaaguucaacggccugaccgugcucccgccccugcugaccgacgagaugaucgcccaguacaccagcgcccuccuggcggggaccaucacguccggcuggugguucggggccggcgccgcccugcagauccccuucgcgaugcagauggccuaccgguucaacggcaucggggucacccagaacgugcucuacgagaaccagaagcugaucgccaaccaguucaacagcgccaucggcaagauccaggacucccugagcuccaccgccagcgcgcucgggaagcugcaggacguggucaaccagaacgcccaggcccugaacacgcucgugaagcagcuguccagcaacuucggcgccaucuccagcgugcugaacgacauccucucccgccuggacccgcccgaggccgaggugcagaucgaccggcugaucaccgggcgccuccagagccugcagaccuacgugacccagcagcugauccgggcggccgagauccgcuggagcgccaaccucgccgcgaccaagauguccgagugcguccugggccagagcaagcggguggacuucugcggcaagggguaccaccugauguccuucccccagagcgccccgcacggcguggucuuccuccacgugacguacguccccgcccaggagaagaacuucaccaccgcccccgcgaucugccacgacgggaaggcccacuucccccgcgagggcguguucguguccaacgggacccacugguucgucacgcagcggaacuucuacgagccgcagaucaucaccaccgacaacaccuucgugagcggcaacugcgacguggucaucggcaucgugaacaacacgguguacgacccccugcagcccgagcuggacuccuucaaggaggagcucgacaaguacuucaagaaccacaccagccccgacgucgaccugggggacaucuccggcaucaacgccagcguggugaacauccagaaggagaucgaccgccugaacgaggucgccaagaaccucaacgagucccugaucgaccugcaggagcucgggaaguacgagcaguacaucaagggcgggggcgggagcgacaucgaccccuacaaggaguucggcagcuccuaccagcugcucaacuuccugccccuggacuucuuccccgaccucaacgcccugguggacaccgccaccgcgcuguacgaggaggagcucacggggcgcgagcacugcagcccccaccacaccgccauccggcaggcccuggucugcugggacgagcugaccaagcucaucgccuggauguccagcaacaucaccuccgagcagguccgcacgaucaucgugaaccacgucaacgacaccuggggccugaaggugcggcagagccugugguuccaccucuccugccugaccuucgggcagcacaccgugcaggaguuccuggucagcuucggcguguggauccgcacgcccgccccguaccggccgcccaacgcgccgauccucuccacccugccggagcacaccgugaucugcugaggacuaguuauaagacugacuagcccgaugggccucccaacgggcccuccuccccuccuugcaccgagauuaauaaaaaaaaaaaaaaaaaaaaaaaaaaaaaaaaaaaaaaaaaaaaaaaaaaaaaaaaaaaaaaaaugcaucccccccccccccccccccccccccccccccaaaggcucuuuucagagccaccagaauu

SEQ ID NO: 12873 - RNA, 4315 nt, Artificial Sequence
  SARS-CoV-2/Wuhan/WIV05/2019__EPI_ISL_402128 spike protein mRNA gc (1-1211)(K986P_V987P_P1069F) WhcAg construct
aggagaaagcuuaccauguucguguuccugguccuccugccccuggugagcucccagugcgugaaccucaccacccgcacgcagcugccgcccgccuacaccaacagcuucacccggggcgucuacuaccccgacaagguguuccgcuccagcgugcugcacuccacccaggaccucuuccugcccuucuucagcaacgucacgugguuccacgccauccacguguccgggaccaacggcaccaagcgguucgacaacccggugcugcccuucaacgacggggucuacuucgcgagcaccgagaaguccaacaucauccgcggcuggaucuucgggacgacccucgacagcaagacccagucccugcugaucgugaacaacgccaccaacguggucaucaaggugugcgaguuccaguucugcaacgaccccuuccucggcguguacuaccacaagaacaacaagagcuggauggaguccgaguuccgggucuacagcuccgccaacaacugcacguucgaguacgugagccagcccuuccugauggaccuggagggcaagcaggggaacuucaagaaccuccgcgaguucguguucaagaacaucgacggcuacuucaagaucuacuccaagcacaccccgaucaaccugguccgggaccugccccagggguucagcgcccucgagccccugguggaccugcccaucggcaucaacaucacccgcuuccagacccuccuggcccugcaccgguccuaccucacgccgggggacagcagcuccggcuggaccgcgggcgccgccgccuacuacgugggguaccugcagccccgcaccuuccugcucaaguacaacgagaacggcaccaucacggacgcggucgacugcgcccuggacccccugagcgagaccaagugcacccucaaguccuucaccguggagaaggggaucuaccagacgagcaacuuccgggugcagcccaccgaguccaucguccgcuucccgaacaucaccaaccugugccccuucggcgagguguucaacgccacccgguucgccagcgucuacgccuggaaccgcaagcggaucuccaacugcguggcggacuacagcgugcuguacaacuccgccagcuucuccacguucaagugcuacggcgucagccccaccaagcucaacgaccugugcuucaccaacguguacgccgacuccuucgugauccgcggggacgagguccggcagaucgcccccggccagaccgggaagaucgccgacuacaacuacaagcugccggacgacuucacgggcugcgugaucgcguggaacagcaacaaccucgacuccaaggucgggggcaacuacaacuaccuguaccgccuguuccgcaagagcaaccucaagcccuucgagcgggacaucuccaccgagaucuaccaggccggcagcacccccugcaacgggguggagggcuucaacugcuacuucccccugcaguccuacggguuccagccgaccaacggcgugggguaccagcccuaccggguggucgugcugagcuucgagcuccugcacgcccccgccacggugugcggccccaagaaguccaccaaccuggucaagaacaagugcgugaacuucaacuucaacggccucaccgggaccggcgugcugaccgagagcaacaagaaguuccugccguuccagcaguucgggcgcgacaucgccgacacgaccgacgcgguccgcgacccccagacccuggagauccucgacaucacccccugcagcuucggcgggguguccgugaucacgccgggcaccaacaccagcaaccaggucgccgugcuguaccaggacgugaacugcaccgagguccccguggccauccacgccgaccagcugacgcccaccuggcggguguacuccaccggcagcaacgucuuccagacccgcgccgggugccucaucggcgcggagcacgugaacaacuccuacgagugcgacauccccaucggggccggcaucugcgccagcuaccagacgcagaccaacuccccgcggcgcgcccggagcguggcgucccagagcaucaucgccuacaccaugucccugggcgccgagaacagcgucgccuacuccaacaacagcaucgccauccccaccaacuucacgaucuccgugaccaccgagauccugcccgugagcaugaccaagacgagcgucgacugcaccauguacaucugcggggacuccaccgagugcagcaaccuccugcugcaguacggcuccuucugcacccagcucaaccgcgcgcugacggggaucgccguggagcaggacaagaacacccaggagguguucgcccaggucaagcagaucuacaagacgcccccgaucaaggacuucggcggguucaacuucagccagauccugcccgaccccuccaagcccagcaagcgguccuucaucgaggaccuccuguucaacaaggugacccuggccgacgccggcuucaucaagcaguacggcgacugccucggggacaucgcggcccgcgaccugaucugcgcccagaaguucaacggccugaccgugcucccgccccugcugaccgacgagaugaucgcccaguacaccagcgcccuccuggcggggaccaucacguccggcuggaccuucggggccggcgccgcccugcagauccccuucgcgaugcagauggccuaccgguucaacggcaucggggucacccagaacgugcucuacgagaaccagaagcugaucgccaaccaguucaacagcgccaucggcaagauccaggacucccugagcuccaccgccagcgcgcucgggaagcugcaggacguggucaaccagaacgcccaggcccugaacacgcucgugaagcagcuguccagcaacuucggcgccaucuccagcgugcugaacgacauccucucccgccuggacccgcccgaggccgaggugcagaucgaccggcugaucaccgggcgccuccagagccugcagaccuacgugacccagcagcugauccgggcggccgagauccgcgccagcgccaaccucgccgcgaccaagauguccgagugcguccugggccagagcaagcggguggacuucugcggcaagggguaccaccugauguccuucccccagagcgccccgcacggcguggucuuccuccacgugacguacgucuucgcccaggagaagaacuucaccaccgcccccgcgaucugccacgacgggaaggcccacuucccccgcgagggcguguucguguccaacgggacccacugguucgucacgcagcggaacuucuacgagccgcagaucaucaccaccgacaacaccuucgugagcggcaacugcgacguggucaucggcaucgugaacaacacgguguacgacccccugcagcccgagcuggacuccuucaaggaggagcucgacaaguacuucaagaaccacaccagccccgacgucgaccugggggacaucuccggcaucaacgccagcguggugaacauccagaaggagaucgaccgccugaacgaggucgccaagaaccucaacgagucccugaucgaccugcaggagcucgggaaguacgagcaguacaucaagggcgggggcgggagcgacaucgaccccuacaaggaguucggcagcuccuaccagcugcucaacuuccugccccuggacuucuuccccgaccucaacgcccugguggacaccgccaccgcgcuguacgaggaggagcucacggggcgcgagcacugcagcccccaccacaccgccauccggcaggcccuggucugcugggacgagcugaccaagcucaucgccuggauguccagcaacaucaccuccgagcagguccgcacgaucaucgugaaccacgucaacgacaccuggggccugaaggugcggcagagccugugguuccaccucuccugccugaccuucgggcagcacaccgugcaggaguuccuggucagcuucggcguguggauccgcacgcccgccccguaccggccgcccaacgcgccgauccucuccacccugccggagcacaccgugaucugcugaggacuaguuauaagacugacuagcccgaugggccucccaacgggcccuccuccccuccuugcaccgagauuaauaaaaaaaaaaaaaaaaaaaaaaaaaaaaaaaaaaaaaaaaaaaaaaaaaaaaaaaaaaaaaaaaugcaucccccccccccccccccccccccccccccccaaaggcucuuuucagagccaccagaauu

SEQ ID NO: 12874 - RNA, 4315 nt, Artificial Sequence
  SARS-CoV-2/Wuhan/WIV05/2019__EPI_ISL_402128 spike protein mRNA gc (1-1211)(K986P_V987P_ H1048Q_H1064N_ H1083N_H1101N) WhcAg construct
aggagaaagcuuaccauguucguguuccugguccuccugccccuggugagcucccagugcgugaaccucaccacccgcacgcagcugccgcccgccuacaccaacagcuucacccggggcgucuacuaccccgacaagguguuccgcuccagcgugcugcacuccacccaggaccucuuccugcccuucuucagcaacgucacgugguuccacgccauccacguguccgggaccaacggcaccaagcgguucgacaacccggugcugcccuucaacgacggggucuacuucgcgagcaccgagaaguccaacaucauccgcggcuggaucuucgggacgacccucgacagcaagacccagucccugcugaucgugaacaacgccaccaacguggucaucaaggugugcgaguuccaguucugcaacgaccccuuccucggcguguacuaccacaagaacaacaagagcuggauggaguccgaguuccgggucuacagcuccgccaacaacugcacguucgaguacgugagccagcccuuccugauggaccuggagggcaagcaggggaacuucaagaaccuccgcgaguucguguucaagaacaucgacggcuacuucaagaucuacuccaagcacaccccgaucaaccugguccgggaccugccccagggguucagcgcccucgagccccugguggaccugcccaucggcaucaacaucacccgcuuccagacccuccuggcccugcaccgguccuaccucacgccgggggacagcagcuccggcuggaccgcgggcgccgccgccuacuacgugggguaccugcagccccgcaccuuccugcucaaguacaacgagaacggcaccaucacggacgcggucgacugcgcccuggacccccugagcgagaccaagugcacccucaaguccuucaccguggagaaggggaucuaccagacgagcaacuuccgggugcagcccaccgaguccaucguccgcuucccgaacaucaccaaccugugccccuucggcgagguguucaacgccacccgguucgccagcgucuacgccuggaaccgcaagcggaucuccaacugcguggcggacuacagcgugcuguacaacuccgccagcuucuccacguucaagugcuacggcgucagccccaccaagcucaacgaccugugcuucaccaacguguacgccgacuccuucgugauccgcggggacgagguccggcagaucgcccccggccagaccgggaagaucgccgacuacaacuacaagcugccggacgacuucacgggcugcgugaucgcguggaacagcaacaaccucgacuccaaggucgggggcaacuacaacuaccuguaccgccuguuccgcaagagcaaccucaagcccuucgagcgggacaucuccaccgagaucuaccaggccggcagcacccccugcaacgggguggagggcuucaacugcuacuucccccugcaguccuacggguuccagccgaccaacggcgugggguaccagcccuaccggguggucgugcugagcuucgagcuccugcacgcccccgccacggugugcggccccaagaaguccaccaaccuggucaagaacaagugcgugaacuucaacuucaacggccucaccgggaccggcgugcugaccgagagcaacaagaaguuccugccguuccagcaguucgggcgcgacaucgccgacacgaccgacgcgguccgcgacccccagacccuggagauccucgacaucacccccugcagcuucggcgggguguccgugaucacgccgggcaccaacaccagcaaccaggucgccgugcuguaccaggacgugaacugcaccgagguccccguggccauccacgccgaccagcugacgcccaccuggcggguguacuccaccggcagcaacgucuuccagacccgcgccgggugccucaucggcgcggagcacgugaacaacuccuacgagugcgacauccccaucggggccggcaucugcgccagcuaccagacgcagaccaacuccccgcggcgcgcccggagcguggcgucccagagcaucaucgccuacaccaugucccugggcgccgagaacagcgucgccuacuccaacaacagcaucgccauccccaccaacuucacgaucuccgugaccaccgagauccugcccgugagcaugaccaagacgagcgucgacugcaccauguacaucugcggggacuccaccgagugcagcaaccuccugcugcaguacggcuccuucugcacccagcucaaccgcgcgcugacggggaucgccguggagcaggacaagaacacccaggagguguucgcccaggucaagcagaucuacaagacgcccccgaucaaggacuucggcggguucaacuucagccagauccugcccgaccccuccaagcccagcaagcgguccuucaucgaggaccuccuguucaacaaggugacccuggccgacgccggcuucaucaagcaguacggcgacugccucggggacaucgcggcccgcgaccugaucugcgcccagaaguucaacggccugaccgugcucccgccccugcugaccgacgagaugaucgcccaguacaccagcgcccuccuggcggggaccaucacguccggcuggaccuucggggccggcgccgcccugcagauccccuucgcgaugcagauggccuaccgguucaacggcaucggggucacccagaacgugcucuacgagaaccagaagcugaucgccaaccaguucaacagcgccaucggcaagauccaggacucccugagcuccaccgccagcgcgcucgggaagcugcaggacguggucaaccagaacgcccaggcccugaacacgcucgugaagcagcuguccagcaacuucggcgccaucuccagcgugcugaacgacauccucucccgccuggacccgcccgaggccgaggugcagaucgaccggcugaucaccgggcgccuccagagccugcagaccuacgugacccagcagcugauccgggcggccgagauccgcgccagcgccaaccucgccgcgaccaagauguccgagugcguccugggccagagcaagcggguggacuucugcggcaagggguaccagcugauguccuucccccagagcgccccgcacggcguggucuuccucaacgugacguacguccccgcccaggagaagaacuucaccaccgcccccgcgaucugcaacgacgggaaggcccacuucccccgcgagggcguguucguguccaacgggaccaacugguucgucacgcagcggaacuucuacgagccgcagaucaucaccaccgacaacaccuucgugagcggcaacugcgacguggucaucggcaucgugaacaacacgguguacgacccccugcagcccgagcuggacuccuucaaggaggagcucgacaaguacuucaagaaccacaccagccccgacgucgaccugggggacaucuccggcaucaacgccagcguggugaacauccagaaggagaucgaccgccugaacgaggucgccaagaaccucaacgagucccugaucgaccugcaggagcucgggaaguacgagcaguacaucaagggcgggggcgggagcgacaucgaccccuacaaggaguucggcagcuccuaccagcugcucaacuuccugccccuggacuucuuccccgaccucaacgcccugguggacaccgccaccgcgcuguacgaggaggagcucacggggcgcgagcacugcagcccccaccacaccgccauccggcaggcccuggucugcugggacgagcugaccaagcucaucgccuggauguccagcaacaucaccuccgagcagguccgcacgaucaucgugaaccacgucaacgacaccuggggccugaaggugcggcagagccugugguuccaccucuccugccugaccuucgggcagcacaccgugcaggaguuccuggucagcuucggcguguggauccgcacgcccgccccguaccggccgcccaacgcgccgauccucuccacccugccggagcacaccgugaucugcugaggacuaguuauaagacugacuagcccgaugggccucccaacgggcccuccuccccuccuugcaccgagauuaauaaaaaaaaaaaaaaaaaaaaaaaaaaaaaaaaaaaaaaaaaaaaaaaaaaaaaaaaaaaaaaaaugcaucccccccccccccccccccccccccccccccaaaggcucuuuucagagccaccagaauu

SEQ ID NO: 12875 - RNA, 4315 nt, Artificial Sequence
  SARS-CoV-2/Wuhan/WIV05/2019__EPI_ISL_402128 spike protein mRNA gc (1-1211)(I712C_T1077C) WhcAg construct
aggagaaagcuuaccauguucguguuccugguccuccugccccuggugagcucccagugcgugaaccucaccacccgcacgcagcugccgcccgccuacaccaacagcuucacccggggcgucuacuaccccgacaagguguuccgcuccagcgugcugcacuccacccaggaccucuuccugcccuucuucagcaacgucacgugguuccacgccauccacguguccgggaccaacggcaccaagcgguucgacaacccggugcugcccuucaacgacggggucuacuucgcgagcaccgagaaguccaacaucauccgcggcuggaucuucgggacgacccucgacagcaagacccagucccugcugaucgugaacaacgccaccaacguggucaucaaggugugcgaguuccaguucugcaacgaccccuuccucggcguguacuaccacaagaacaacaagagcuggauggaguccgaguuccgggucuacagcuccgccaacaacugcacguucgaguacgugagccagcccuuccugauggaccuggagggcaagcaggggaacuucaagaaccuccgcgaguucguguucaagaacaucgacggcuacuucaagaucuacuccaagcacaccccgaucaaccugguccgggaccugccccagggguucagcgcccucgagccccugguggaccugcccaucggcaucaacaucacccgcuuccagacccuccuggcccugcaccgguccuaccucacgccgggggacagcagcuccggcuggaccgcgggcgccgccgccuacuacgugggguaccugcagccccgcaccuuccugcucaaguacaacgagaacggcaccaucacggacgcggucgacugcgcccuggacccccugagcgagaccaagugcacccucaaguccuucaccguggagaaggggaucuaccagacgagcaacuuccgggugcagcccaccgaguccaucguccgcuucccgaacaucaccaaccugugccccuucggcgagguguucaacgccacccgguucgccagcgucuacgccuggaaccgcaagcggaucuccaacugcguggcggacuacagcgugcuguacaacuccgccagcuucuccacguucaagugcuacggcgucagccccaccaagcucaacgaccugugcuucaccaacguguacgccgacuccuucgugauccgcggggacgagguccggcagaucgcccccggccagaccgggaagaucgccgacuacaacuacaagcugccggacgacuucacgggcugcgugaucgcguggaacagcaacaaccucgacuccaaggucgggggcaacuacaacuaccuguaccgccuguuccgcaagagcaaccucaagcccuucgagcgggacaucuccaccgagaucuaccaggccggcagcacccccugcaacgggguggagggcuucaacugcuacuucccccugcaguccuacggguuccagccgaccaacggcgugggguaccagcccuaccggguggucgugcugagcuucgagcuccugcacgcccccgccacggugugcggccccaagaaguccaccaaccuggucaagaacaagugcgugaacuucaacuucaacggccucaccgggaccggcgugcugaccgagagcaacaagaaguuccugccguuccagcaguucgggcgcgacaucgccgacacgaccgacgcgguccgcgacccccagacccuggagauccucgacaucacccccugcagcuucggcgggguguccgugaucacgccgggcaccaacaccagcaaccaggucgccgugcuguaccaggacgugaacugcaccgagguccccguggccauccacgccgaccagcugacgcccaccuggcggguguacuccaccggcagcaacgucuuccagacccgcgccgggugccucaucggcgcggagcacgugaacaacuccuacgagugcgacauccccaucggggccggcaucugcgccagcuaccagacgcagaccaacuccccgcggcgcgcccggagcguggcgucccagagcaucaucgccuacaccaugucccugggcgccgagaacagcgucgccuacuccaacaacagcugcgccauccccaccaacuucacgaucuccgugaccaccgagauccugcccgugagcaugaccaagacgagcgucgacugcaccauguacaucugcggggacuccaccgagugcagcaaccuccugcugcaguacggcuccuucugcacccagcucaaccgcgcgcugacggggaucgccguggagcaggacaagaacacccaggagguguucgcccaggucaagcagaucuacaagacgcccccgaucaaggacuucggcggguucaacuucagccagauccugcccgaccccuccaagcccagcaagcgguccuucaucgaggaccuccuguucaacaaggugacccuggccgacgccggcuucaucaagcaguacggcgacugccucggggacaucgcggcccgcgaccugaucugcgcccagaaguucaacggccugaccgugcucccgccccugcugaccgacgagaugaucgcccaguacaccagcgcccuccuggcggggaccaucacguccggcuggaccuucggggccggcgccgcccugcagauccccuucgcgaugcagauggccuaccgguucaacggcaucggggucacccagaacgugcucuacgagaaccagaagcugaucgccaaccaguucaacagcgccaucggcaagauccaggacucccugagcuccaccgccagcgcgcucgggaagcugcaggacguggucaaccagaacgcccaggcccugaacacgcucgugaagcagcuguccagcaacuucggcgccaucuccagcgugcugaacgacauccucucccgccuggacaaggucgaggccgaggugcagaucgaccggcugaucaccgggcgccuccagagccugcagaccuacgugacccagcagcugauccgggcggccgagauccgcgccagcgccaaccucgccgcgaccaagauguccgagugcguccugggccagagcaagcggguggacuucugcggcaagggguaccaccugauguccuucccccagagcgccccgcacggcguggucuuccuccacgugacguacguccccgcccaggagaagaacuucaccugcgcccccgcgaucugccacgacgggaaggcccacuucccccgcgagggcguguucguguccaacgggacccacugguucgucacgcagcggaacuucuacgagccgcagaucaucaccaccgacaacaccuucgugagcggcaacugcgacguggucaucggcaucgugaacaacacgguguacgacccccugcagcccgagcuggacuccuucaaggaggagcucgacaaguacuucaagaaccacaccagccccgacgucgaccugggggacaucuccggcaucaacgccagcguggugaacauccagaaggagaucgaccgccugaacgaggucgccaagaaccucaacgagucccugaucgaccugcaggagcucgggaaguacgagcaguacaucaagggcgggggcgggagcgacaucgaccccuacaaggaguucggcagcuccuaccagcugcucaacuuccugccccuggacuucuuccccgaccucaacgcccugguggacaccgccaccgcgcuguacgaggaggagcucacggggcgcgagcacugcagcccccaccacaccgccauccggcaggcccuggucugcugggacgagcugaccaagcucaucgccuggauguccagcaacaucaccuccgagcagguccgcacgaucaucgugaaccacgucaacgacaccuggggccugaaggugcggcagagccugugguuccaccucuccugccugaccuucgggcagcacaccgugcaggaguuccuggucagcuucggcguguggauccgcacgcccgccccguaccggccgcccaacgcgccgauccucuccacccugccggagcacaccgugaucugcugaggacuaguuauaagacugacuagcccgaugggccucccaacgggcccuccuccccuccuugcaccgagauuaauaaaaaaaaaaaaaaaaaaaaaaaaaaaaaaaaaaaaaaaaaaaaaaaaaaaaaaaaaaaaaaaaugcaucccccccccccccccccccccccccccccccaaaggcucuuuucagagccaccagaauu

SEQ ID NO: 12876 - RNA, 4315 nt, Artificial Sequence
  SARS-CoV-2/Wuhan/WIV05/2019__EPI_ISL_402128 spike protein mRNA gc (1-1211)(I714C_Y1110C) WhcAg construct
aggagaaagcuuaccauguucguguuccugguccuccugccccuggugagcucccagugcgugaaccucaccacccgcacgcagcugccgcccgccuacaccaacagcuucacccggggcgucuacuaccccgacaagguguuccgcuccagcgugcugcacuccacccaggaccucuuccugcccuucuucagcaacgucacgugguuccacgccauccacguguccgggaccaacggcaccaagcgguucgacaacccggugcugcccuucaacgacggggucuacuucgcgagcaccgagaaguccaacaucauccgcggcuggaucuucgggacgacccucgacagcaagacccagucccugcugaucgugaacaacgccaccaacguggucaucaaggugugcgaguuccaguucugcaacgaccccuuccucggcguguacuaccacaagaacaacaagagcuggauggaguccgaguuccgggucuacagcuccgccaacaacugcacguucgaguacgugagccagcccuuccugauggaccuggagggcaagcaggggaacuucaagaaccuccgcgaguucguguucaagaacaucgacggcuacuucaagaucuacuccaagcacaccccgaucaaccugguccgggaccugccccagggguucagcgcccucgagccccugguggaccugcccaucggcaucaacaucacccgcuuccagacccuccuggcccugcaccgguccuaccucacgccgggggacagcagcuccggcuggaccgcgggcgccgccgccuacuacgugggguaccugcagccccgcaccuuccugcucaaguacaacgagaacggcaccaucacggacgcggucgacugcgcccuggacccccugagcgagaccaagugcacccucaaguccuucaccguggagaaggggaucuaccagacgagcaacuuccgggugcagcccaccgaguccaucguccgcuucccgaacaucaccaaccugugccccuucggcgagguguucaacgccacccgguucgccagcgucuacgccuggaaccgcaagcggaucuccaacugcguggcggacuacagcgugcuguacaacuccgccagcuucuccacguucaagugcuacggcgucagccccaccaagcucaacgaccugugcuucaccaacguguacgccgacuccuucgugauccgcggggacgagguccggcagaucgcccccggccagaccgggaagaucgccgacuacaacuacaagcugccggacgacuucacgggcugcgugaucgcguggaacagcaacaaccucgacuccaaggucgggggcaacuacaacuaccuguaccgccuguuccgcaagagcaaccucaagcccuucgagcgggacaucuccaccgagaucuaccaggccggcagcacccccugcaacgggguggagggcuucaacugcuacuucccccugcaguccuacggguuccagccgaccaacggcgugggguaccagcccuaccggguggucgugcugagcuucgagcuccugcacgcccccgccacggugugcggccccaagaaguccaccaaccuggucaagaacaagugcgugaacuucaacuucaacggccucaccgggaccggcgugcugaccgagagcaacaagaaguuccugccguuccagcaguucgggcgcgacaucgccgacacgaccgacgcgguccgcgacccccagacccuggagauccucgacaucacccccugcagcuucggcgggguguccgugaucacgccgggcaccaacaccagcaaccaggucgccgugcuguaccaggacgugaacugcaccgagguccccguggccauccacgccgaccagcugacgcccaccuggcggguguacuccaccggcagcaacgucuuccagacccgcgccgggugccucaucggcgcggagcacgugaacaacuccuacgagugcgacauccccaucggggccggcaucugcgccagcuaccagacgcagaccaacuccccgcggcgcgcccggagcguggcgucccagagcaucaucgccuacaccaugucccugggcgccgagaacagcgucgccuacuccaacaacagcaucgccugccccaccaacuucacgaucuccgugaccaccgagauccugcccgugagcaugaccaagacgagcgucgacugcaccauguacaucugcggggacuccaccgagugcagcaaccuccugcugcaguacggcuccuucugcacccagcucaaccgcgcgcugacggggaucgccguggagcaggacaagaacacccaggagguguucgcccaggucaagcagaucuacaagacgcccccgaucaaggacuucggcggguucaacuucagccagauccugcccgaccccuccaagcccagcaagcgguccuucaucgaggaccuccuguucaacaaggugacccuggccgacgccggcuucaucaagcaguacggcgacugccucggggacaucgcggcccgcgaccugaucugcgcccagaaguucaacggccugaccgugcucccgccccugcugaccgacgagaugaucgcccaguacaccagcgcccuccuggcggggaccaucacguccggcuggaccuucggggccggcgccgcccugcagauccccuucgcgaugcagauggccuaccgguucaacggcaucggggucacccagaacgugcucuacgagaaccagaagcugaucgccaaccaguucaacagcgccaucggcaagauccaggacucccugagcuccaccgccagcgcgcucgggaagcugcaggacguggucaaccagaacgcccaggcccugaacacgcucgugaagcagcuguccagcaacuucggcgccaucuccagcgugcugaacgacauccucucccgccuggacaaggucgaggccgaggugcagaucgaccggcugaucaccgggcgccuccagagccugcagaccuacgugacccagcagcugauccgggcggccgagauccgcgccagcgccaaccucgccgcgaccaagauguccgagugcguccugggccagagcaagcggguggacuucugcggcaagggguaccaccugauguccuucccccagagcgccccgcacggcguggucuuccuccacgugacguacguccccgcccaggagaagaacuucaccaccgcccccgcgaucugccacgacgggaaggcccacuucccccgcgagggcguguucguguccaacgggacccacugguucgucacgcagcggaacuucugcgagccgcagaucaucaccaccgacaacaccuucgugagcggcaacugcgacguggucaucggcaucgugaacaacacgguguacgacccccugcagcccgagcuggacuccuucaaggaggagcucgacaaguacuucaagaaccacaccagccccgacgucgaccugggggacaucuccggcaucaacgccagcguggugaacauccagaaggagaucgaccgccugaacgaggucgccaagaaccucaacgagucccugaucgaccugcaggagcucgggaaguacgagcaguacaucaagggcgggggcgggagcgacaucgaccccuacaaggaguucggcagcuccuaccagcugcucaacuuccugccccuggacuucuuccccgaccucaacgcccugguggacaccgccaccgcgcuguacgaggaggagcucacggggcgcgagcacugcagcccccaccacaccgccauccggcaggcccuggucugcugggacgagcugaccaagcucaucgccuggauguccagcaacaucaccuccgagcagguccgcacgaucaucgugaaccacgucaacgacaccuggggccugaaggugcggcagagccugugguuccaccucuccugccugaccuucgggcagcacaccgugcaggaguuccuggucagcuucggcguguggauccgcacgcccgccccguaccggccgcccaacgcgccgauccucuccacccugccggagcacaccgugaucugcugaggacuaguuauaagacugacuagcccgaugggccucccaacgggcccuccuccccuccuugcaccgagauuaauaaaaaaaaaaaaaaaaaaaaaaaaaaaaaaaaaaaaaaaaaaaaaaaaaaaaaaaaaaaaaaaaugcaucccccccccccccccccccccccccccccccaaaggcucuuuucagagccaccagaauu

SEQ ID NO: 12877 - RNA, 4315 nt, Artificial Sequence
  SARS-CoV-2/Wuhan/WIV05/2019__EPI_ISL_402128 spike protein mRNA gc (1-1211)(P715C_P1069C) WhcAg construct
aggagaaagcuuaccauguucguguuccugguccuccugccccuggugagcucccagugcgugaaccucaccacccgcacgcagcugccgcccgccuacaccaacagcuucacccggggcgucuacuaccccgacaagguguuccgcuccagcgugcugcacuccacccaggaccucuuccugcccuucuucagcaacgucacgugguuccacgccauccacguguccgggaccaacggcaccaagcgguucgacaacccggugcugcccuucaacgacggggucuacuucgcgagcaccgagaaguccaacaucauccgcggcuggaucuucgggacgacccucgacagcaagacccagucccugcugaucgugaacaacgccaccaacguggucaucaaggugugcgaguuccaguucugcaacgaccccuuccucggcguguacuaccacaagaacaacaagagcuggauggaguccgaguuccgggucuacagcuccgccaacaacugcacguucgaguacgugagccagcccuuccugauggaccuggagggcaagcaggggaacuucaagaaccuccgcgaguucguguucaagaacaucgacggcuacuucaagaucuacuccaagcacaccccgaucaaccugguccgggaccugccccagggguucagcgcccucgagccccugguggaccugcccaucggcaucaacaucacccgcuuccagacccuccuggcccugcaccgguccuaccucacgccgggggacagcagcuccggcuggaccgcgggcgccgccgccuacuacgugggguaccugcagccccgcaccuuccugcucaaguacaacgagaacggcaccaucacggacgcggucgacugcgcccuggacccccugagcgagaccaagugcacccucaaguccuucaccguggagaaggggaucuaccagacgagcaacuuccgggugcagcccaccgaguccaucguccgcuucccgaacaucaccaaccugugccccuucggcgagguguucaacgccacccgguucgccagcgucuacgccuggaaccgcaagcggaucuccaacugcguggcggacuacagcgugcuguacaacuccgccagcuucuccacguucaagugcuacggcgucagccccaccaagcucaacgaccugugcuucaccaacguguacgccgacuccuucgugauccgcggggacgagguccggcagaucgcccccggccagaccgggaagaucgccgacuacaacuacaagcugccggacgacuucacgggcugcgugaucgcguggaacagcaacaaccucgacuccaaggucgggggcaacuacaacuaccuguaccgccuguuccgcaagagcaaccucaagcccuucgagcgggacaucuccaccgagaucuaccaggccggcagcacccccugcaacgggguggagggcuucaacugcuacuucccccugcaguccuacggguuccagccgaccaacggcgugggguaccagcccuaccggguggucgugcugagcuucgagcuccugcacgcccccgccacggugugcggccccaagaaguccaccaaccuggucaagaacaagugcgugaacuucaacuucaacggccucaccgggaccggcgugcugaccgagagcaacaagaaguuccugccguuccagcaguucgggcgcgacaucgccgacacgaccgacgcgguccgcgacccccagacccuggagauccucgacaucacccccugcagcuucggcgggguguccgugaucacgccgggcaccaacaccagcaaccaggucgccgugcuguaccaggacgugaacugcaccgagguccccguggccauccacgccgaccagcugacgcccaccuggcggguguacuccaccggcagcaacgucuuccagacccgcgccgggugccucaucggcgcggagcacgugaacaacuccuacgagugcgacauccccaucggggccggcaucugcgccagcuaccagacgcagaccaacuccccgcggcgcgcccggagcguggcgucccagagcaucaucgccuacaccaugucccugggcgccgagaacagcgucgccuacuccaacaacagcaucgccaucugcaccaacuucacgaucuccgugaccaccgagauccugcccgugagcaugaccaagacgagcgucgacugcaccauguacaucugcggggacuccaccgagugcagcaaccuccugcugcaguacggcuccuucugcacccagcucaaccgcgcgcugacggggaucgccguggagcaggacaagaacacccaggagguguucgcccaggucaagcagaucuacaagacgcccccgaucaaggacuucggcggguucaacuucagccagauccugcccgaccccuccaagcccagcaagcgguccuucaucgaggaccuccuguucaacaaggugacccuggccgacgccggcuucaucaagcaguacggcgacugccucggggacaucgcggcccgcgaccugaucugcgcccagaaguucaacggccugaccgugcucccgccccugcugaccgacgagaugaucgcccaguacaccagcgcccuccuggcggggaccaucacguccggcuggaccuucggggccggcgccgcccugcagauccccuucgcgaugcagauggccuaccgguucaacggcaucggggucacccagaacgugcucuacgagaaccagaagcugaucgccaaccaguucaacagcgccaucggcaagauccaggacucccugagcuccaccgccagcgcgcucgggaagcugcaggacguggucaaccagaacgcccaggcccugaacacgcucgugaagcagcuguccagcaacuucggcgccaucuccagcgugcugaacgacauccucucccgccuggacaaggucgaggccgaggugcagaucgaccggcugaucaccgggcgccuccagagccugcagaccuacgugacccagcagcugauccgggcggccgagauccgcgccagcgccaaccucgccgcgaccaagauguccgagugcguccugggccagagcaagcggguggacuucugcggcaagggguaccaccugauguccuucccccagagcgccccgcacggcguggucuuccuccacgugacguacgucugcgcccaggagaagaacuucaccaccgcccccgcgaucugccacgacgggaaggcccacuucccccgcgagggcguguucguguccaacgggacccacugguucgucacgcagcggaacuucuacgagccgcagaucaucaccaccgacaacaccuucgugagcggcaacugcgacguggucaucggcaucgugaacaacacgguguacgacccccugcagcccgagcuggacuccuucaaggaggagcucgacaaguacuucaagaaccacaccagccccgacgucgaccugggggacaucuccggcaucaacgccagcguggugaacauccagaaggagaucgaccgccugaacgaggucgccaagaaccucaacgagucccugaucgaccugcaggagcucgggaaguacgagcaguacaucaagggcgggggcgggagcgacaucgaccccuacaaggaguucggcagcuccuaccagcugcucaacuuccugccccuggacuucuuccccgaccucaacgcccugguggacaccgccaccgcgcuguacgaggaggagcucacggggcgcgagcacugcagcccccaccacaccgccauccggcaggcccuggucugcugggacgagcugaccaagcucaucgccuggauguccagcaacaucaccuccgagcagguccgcacgaucaucgugaaccacgucaacgacaccuggggccugaaggugcggcagagccugugguuccaccucuccugccugaccuucgggcagcacaccgugcaggaguuccuggucagcuucggcguguggauccgcacgcccgccccguaccggccgcccaacgcgccgauccucuccacccugccggagcacaccgugaucugcugaggacuaguuauaagacugacuagcccgaugggccucccaacgggcccuccuccccuccuugcaccgagauuaauaaaaaaaaaaaaaaaaaaaaaaaaaaaaaaaaaaaaaaaaaaaaaaaaaaaaaaaaaaaaaaaaugcaucccccccccccccccccccccccccccccccaaaggcucuuuucagagccaccagaauu

SEQ ID NO: 12878 - RNA, 4315 nt, Artificial Sequence
  SARS-CoV-2/Wuhan/WIV05/2019__EPI_ISL_402128 spike protein mRNA gc (1-1211)(G889C_L1034C) WhcAg construct
aggagaaagcuuaccauguucguguuccugguccuccugccccuggugagcucccagugcgugaaccucaccacccgcacgcagcugccgcccgccuacaccaacagcuucacccggggcgucuacuaccccgacaagguguuccgcuccagcgugcugcacuccacccaggaccucuuccugcccuucuucagcaacgucacgugguuccacgccauccacguguccgggaccaacggcaccaagcgguucgacaacccggugcugcccuucaacgacggggucuacuucgcgagcaccgagaaguccaacaucauccgcggcuggaucuucgggacgacccucgacagcaagacccagucccugcugaucgugaacaacgccaccaacguggucaucaaggugugcgaguuccaguucugcaacgaccccuuccucggcguguacuaccacaagaacaacaagagcuggauggaguccgaguuccgggucuacagcuccgccaacaacugcacguucgaguacgugagccagcccuuccugauggaccuggagggcaagcaggggaacuucaagaaccuccgcgaguucguguucaagaacaucgacggcuacuucaagaucuacuccaagcacaccccgaucaaccugguccgggaccugccccagggguucagcgcccucgagccccugguggaccugcccaucggcaucaacaucacccgcuuccagacccuccuggcccugcaccgguccuaccucacgccgggggacagcagcuccggcuggaccgcgggcgccgccgccuacuacgugggguaccugcagccccgcaccuuccugcucaaguacaacgagaacggcaccaucacggacgcggucgacugcgcccuggacccccugagcgagaccaagugcacccucaaguccuucaccguggagaaggggaucuaccagacgagcaacuuccgggugcagcccaccgaguccaucguccgcuucccgaacaucaccaaccugugccccuucggcgagguguucaacgccacccgguucgccagcgucuacgccuggaaccgcaagcggaucuccaacugcguggcggacuacagcgugcuguacaacuccgccagcuucuccacguucaagugcuacggcgucagccccaccaagcucaacgaccugugcuucaccaacguguacgccgacuccuucgugauccgcggggacgagguccggcagaucgcccccggccagaccgggaagaucgccgacuacaacuacaagcugccggacgacuucacgggcugcgugaucgcguggaacagcaacaaccucgacuccaaggucgggggcaacuacaacuaccuguaccgccuguuccgcaagagcaaccucaagcccuucgagcgggacaucuccaccgagaucuaccaggccggcagcacccccugcaacgggguggagggcuucaacugcuacuucccccugcaguccuacggguuccagccgaccaacggcgugggguaccagcccuaccggguggucgugcugagcuucgagcuccugcacgcccccgccacggugugcggccccaagaaguccaccaaccuggucaagaacaagugcgugaacuucaacuucaacggccucaccgggaccggcgugcugaccgagagcaacaagaaguuccugccguuccagcaguucgggcgcgacaucgccgacacgaccgacgcgguccgcgacccccagacccuggagauccucgacaucacccccugcagcuucggcgggguguccgugaucacgccgggcaccaacaccagcaaccaggucgccgugcuguaccaggacgugaacugcaccgagguccccguggccauccacgccgaccagcugacgcccaccuggcggguguacuccaccggcagcaacgucuuccagacccgcgccgggugccucaucggcgcggagcacgugaacaacuccuacgagugcgacauccccaucggggccggcaucugcgccagcuaccagacgcagaccaacuccccgcggcgcgcccggagcguggcgucccagagcaucaucgccuacaccaugucccugggcgccgagaacagcgucgccuacuccaacaacagcaucgccauccccaccaacuucacgaucuccgugaccaccgagauccugcccgugagcaugaccaagacgagcgucgacugcaccauguacaucugcggggacuccaccgagugcagcaaccuccugcugcaguacggcuccuucugcacccagcucaaccgcgcgcugacggggaucgccguggagcaggacaagaacacccaggagguguucgcccaggucaagcagaucuacaagacgcccccgaucaaggacuucggcggguucaacuucagccagauccugcccgaccccuccaagcccagcaagcgguccuucaucgaggaccuccuguucaacaaggugacccuggccgacgccggcuucaucaagcaguacggcgacugccucggggacaucgcggcccgcgaccugaucugcgcccagaaguucaacggccugaccgugcucccgccccugcugaccgacgagaugaucgcccaguacaccagcgcccuccuggcggggaccaucacguccggcuggaccuucugcgccggcgccgcccugcagauccccuucgcgaugcagauggccuaccgguucaacggcaucggggucacccagaacgugcucuacgagaaccagaagcugaucgccaaccaguucaacagcgccaucggcaagauccaggacucccugagcuccaccgccagcgcgcucgggaagcugcaggacguggucaaccagaacgcccaggcccugaacacgcucgugaagcagcuguccagcaacuucggcgccaucuccagcgugcugaacgacauccucucccgccuggacaaggucgaggccgaggugcagaucgaccggcugaucaccgggcgccuccagagccugcagaccuacgugacccagcagcugauccgggcggccgagauccgcgccagcgccaaccucgccgcgaccaagauguccgagugcgucugcggccagagcaagcggguggacuucugcggcaagggguaccaccugauguccuucccccagagcgccccgcacggcguggucuuccuccacgugacguacguccccgcccaggagaagaacuucaccaccgcccccgcgaucugccacgacgggaaggcccacuucccccgcgagggcguguucguguccaacgggacccacugguucgucacgcagcggaacuucuacgagccgcagaucaucaccaccgacaacaccuucgugagcggcaacugcgacguggucaucggcaucgugaacaacacgguguacgacccccugcagcccgagcuggacuccuucaaggaggagcucgacaaguacuucaagaaccacaccagccccgacgucgaccugggggacaucuccggcaucaacgccagcguggugaacauccagaaggagaucgaccgccugaacgaggucgccaagaaccucaacgagucccugaucgaccugcaggagcucgggaaguacgagcaguacaucaagggcgggggcgggagcgacaucgaccccuacaaggaguucggcagcuccuaccagcugcucaacuuccugccccuggacuucuuccccgaccucaacgcccugguggacaccgccaccgcgcuguacgaggaggagcucacggggcgcgagcacugcagcccccaccacaccgccauccggcaggcccuggucugcugggacgagcugaccaagcucaucgccuggauguccagcaacaucaccuccgagcagguccgcacgaucaucgugaaccacgucaacgacaccuggggccugaaggugcggcagagccugugguuccaccucuccugccugaccuucgggcagcacaccgugcaggaguuccuggucagcuucggcguguggauccgcacgcccgccccguaccggccgcccaacgcgccgauccucuccacccugccggagcacaccgugaucugcugaggacuaguuauaagacugacuagcccgaugggccucccaacgggcccuccuccccuccuugcaccgagauuaauaaaaaaaaaaaaaaaaaaaaaaaaaaaaaaaaaaaaaaaaaaaaaaaaaaaaaaaaaaaaaaaaugcaucccccccccccccccccccccccccccccccaaaggcucuuuucagagccaccagaauu

SEQ ID NO: 12879 - RNA, 4315 nt, Artificial Sequence
  SARS-CoV-2/Wuhan/WIV05/2019__EPI_ISL_402128 spike protein mRNA gc (1-1211)(I909C_Y1047C) WhcAg construct
aggagaaagcuuaccauguucguguuccugguccuccugccccuggugagcucccagugcgugaaccucaccacccgcacgcagcugccgcccgccuacaccaacagcuucacccggggcgucuacuaccccgacaagguguuccgcuccagcgugcugcacuccacccaggaccucuuccugcccuucuucagcaacgucacgugguuccacgccauccacguguccgggaccaacggcaccaagcgguucgacaacccggugcugcccuucaacgacggggucuacuucgcgagcaccgagaaguccaacaucauccgcggcuggaucuucgggacgacccucgacagcaagacccagucccugcugaucgugaacaacgccaccaacguggucaucaaggugugcgaguuccaguucugcaacgaccccuuccucggcguguacuaccacaagaacaacaagagcuggauggaguccgaguuccgggucuacagcuccgccaacaacugcacguucgaguacgugagccagcccuuccugauggaccuggagggcaagcaggggaacuucaagaaccuccgcgaguucguguucaagaacaucgacggcuacuucaagaucuacuccaagcacaccccgaucaaccugguccgggaccugccccagggguucagcgcccucgagccccugguggaccugcccaucggcaucaacaucacccgcuuccagacccuccuggcccugcaccgguccuaccucacgccgggggacagcagcuccggcuggaccgcgggcgccgccgccuacuacgugggguaccugcagccccgcaccuuccugcucaaguacaacgagaacggcaccaucacggacgcggucgacugcgcccuggacccccugagcgagaccaagugcacccucaaguccuucaccguggagaaggggaucuaccagacgagcaacuuccgggugcagcccaccgaguccaucguccgcuucccgaacaucaccaaccugugccccuucggcgagguguucaacgccacccgguucgccagcgucuacgccuggaaccgcaagcggaucuccaacugcguggcggacuacagcgugcuguacaacuccgccagcuucuccacguucaagugcuacggcgucagccccaccaagcucaacgaccugugcuucaccaacguguacgccgacuccuucgugauccgcggggacgagguccggcagaucgcccccggccagaccgggaagaucgccgacuacaacuacaagcugccggacgacuucacgggcugcgugaucgcguggaacagcaacaaccucgacuccaaggucgggggcaacuacaacuaccuguaccgccuguuccgcaagagcaaccucaagcccuucgagcgggacaucuccaccgagaucuaccaggccggcagcacccccugcaacgggguggagggcuucaacugcuacuucccccugcaguccuacggguuccagccgaccaacggcgugggguaccagcccuaccggguggucgugcugagcuucgagcuccugcacgcccccgccacggugugcggccccaagaaguccaccaaccuggucaagaacaagugcgugaacuucaacuucaacggccucaccgggaccggcgugcugaccgagagcaacaagaaguuccugccguuccagcaguucgggcgcgacaucgccgacacgaccgacgcgguccgcgacccccagacccuggagauccucgacaucacccccugcagcuucggcgggguguccgugaucacgccgggcaccaacaccagcaaccaggucgccgugcuguaccaggacgugaacugcaccgagguccccguggccauccacgccgaccagcugacgcccaccuggcggguguacuccaccggcagcaacgucuuccagacccgcgccgggugccucaucggcgcggagcacgugaacaacuccuacgagugcgacauccccaucggggccggcaucugcgccagcuaccagacgcagaccaacuccccgcggcgcgcccggagcguggcgucccagagcaucaucgccuacaccaugucccugggcgccgagaacagcgucgccuacuccaacaacagcaucgccauccccaccaacuucacgaucuccgugaccaccgagauccugcccgugagcaugaccaagacgagcgucgacugcaccauguacaucugcggggacuccaccgagugcagcaaccuccugcugcaguacggcuccuucugcacccagcucaaccgcgcgcugacggggaucgccguggagcaggacaagaacacccaggagguguucgcccaggucaagcagaucuacaagacgcccccgaucaaggacuucggcggguucaacuucagccagauccugcccgaccccuccaagcccagcaagcgguccuucaucgaggaccuccuguucaacaaggugacccuggccgacgccggcuucaucaagcaguacggcgacugccucggggacaucgcggcccgcgaccugaucugcgcccagaaguucaacggccugaccgugcucccgccccugcugaccgacgagaugaucgcccaguacaccagcgcccuccuggcggggaccaucacguccggcuggaccuucggggccggcgccgcccugcagauccccuucgcgaugcagauggccuaccgguucaacggcugcggggucacccagaacgugcucuacgagaaccagaagcugaucgccaaccaguucaacagcgccaucggcaagauccaggacucccugagcuccaccgccagcgcgcucgggaagcugcaggacguggucaaccagaacgcccaggcccugaacacgcucgugaagcagcuguccagcaacuucggcgccaucuccagcgugcugaacgacauccucucccgccuggacaaggucgaggccgaggugcagaucgaccggcugaucaccgggcgccuccagagccugcagaccuacgugacccagcagcugauccgggcggccgagauccgcgccagcgccaaccucgccgcgaccaagauguccgagugcguccugggccagagcaagcggguggacuucugcggcaaggggugccaccugauguccuucccccagagcgccccgcacggcguggucuuccuccacgugacguacguccccgcccaggagaagaacuucaccaccgcccccgcgaucugccacgacgggaaggcccacuucccccgcgagggcguguucguguccaacgggacccacugguucgucacgcagcggaacuucuacgagccgcagaucaucaccaccgacaacaccuucgugagcggcaacugcgacguggucaucggcaucgugaacaacacgguguacgacccccugcagcccgagcuggacuccuucaaggaggagcucgacaaguacuucaagaaccacaccagccccgacgucgaccugggggacaucuccggcaucaacgccagcguggugaacauccagaaggagaucgaccgccugaacgaggucgccaagaaccucaacgagucccugaucgaccugcaggagcucgggaaguacgagcaguacaucaagggcgggggcgggagcgacaucgaccccuacaaggaguucggcagcuccuaccagcugcucaacuuccugccccuggacuucuuccccgaccucaacgcccugguggacaccgccaccgcgcuguacgaggaggagcucacggggcgcgagcacugcagcccccaccacaccgccauccggcaggcccuggucugcugggacgagcugaccaagcucaucgccuggauguccagcaacaucaccuccgagcagguccgcacgaucaucgugaaccacgucaacgacaccuggggccugaaggugcggcagagccugugguuccaccucuccugccugaccuucgggcagcacaccgugcaggaguuccuggucagcuucggcguguggauccgcacgcccgccccguaccggccgcccaacgcgccgauccucuccacccugccggagcacaccgugaucugcugaggacuaguuauaagacugacuagcccgaugggccucccaacgggcccuccuccccuccuugcaccgagauuaauaaaaaaaaaaaaaaaaaaaaaaaaaaaaaaaaaaaaaaaaaaaaaaaaaaaaaaaaaaaaaaaaugcaucccccccccccccccccccccccccccccccaaaggcucuuuucagagccaccagaauu

SEQ ID NO: 12880 - RNA, 4315 nt, Artificial Sequence
  SARS-CoV-2/Wuhan/WIV05/2019__EPI_ISL_402128 spike protein mRNA gc (1-1211)(Q965C_S1003C) WhcAg construct
aggagaaagcuuaccauguucguguuccugguccuccugccccuggugagcucccagugcgugaaccucaccacccgcacgcagcugccgcccgccuacaccaacagcuucacccggggcgucuacuaccccgacaagguguuccgcuccagcgugcugcacuccacccaggaccucuuccugcccuucuucagcaacgucacgugguuccacgccauccacguguccgggaccaacggcaccaagcgguucgacaacccggugcugcccuucaacgacggggucuacuucgcgagcaccgagaaguccaacaucauccgcggcuggaucuucgggacgacccucgacagcaagacccagucccugcugaucgugaacaacgccaccaacguggucaucaaggugugcgaguuccaguucugcaacgaccccuuccucggcguguacuaccacaagaacaacaagagcuggauggaguccgaguuccgggucuacagcuccgccaacaacugcacguucgaguacgugagccagcccuuccugauggaccuggagggcaagcaggggaacuucaagaaccuccgcgaguucguguucaagaacaucgacggcuacuucaagaucuacuccaagcacaccccgaucaaccugguccgggaccugccccagggguucagcgcccucgagccccugguggaccugcccaucggcaucaacaucacccgcuuccagacccuccuggcccugcaccgguccuaccucacgccgggggacagcagcuccggcuggaccgcgggcgccgccgccuacuacgugggguaccugcagccccgcaccuuccugcucaaguacaacgagaacggcaccaucacggacgcggucgacugcgcccuggacccccugagcgagaccaagugcacccucaaguccuucaccguggagaaggggaucuaccagacgagcaacuuccgggugcagcccaccgaguccaucguccgcuucccgaacaucaccaaccugugccccuucggcgagguguucaacgccacccgguucgccagcgucuacgccuggaaccgcaagcggaucuccaacugcguggcggacuacagcgugcuguacaacuccgccagcuucuccacguucaagugcuacggcgucagccccaccaagcucaacgaccugugcuucaccaacguguacgccgacuccuucgugauccgcggggacgagguccggcagaucgcccccggccagaccgggaagaucgccgacuacaacuacaagcugccggacgacuucacgggcugcgugaucgcguggaacagcaacaaccucgacuccaaggucgggggcaacuacaacuaccuguaccgccuguuccgcaagagcaaccucaagcccuucgagcgggacaucuccaccgagaucuaccaggccggcagcacccccugcaacgggguggagggcuucaacugcuacuucccccugcaguccuacggguuccagccgaccaacggcgugggguaccagcccuaccggguggucgugcugagcuucgagcuccugcacgcccccgccacggugugcggccccaagaaguccaccaaccuggucaagaacaagugcgugaacuucaacuucaacggccucaccgggaccggcgugcugaccgagagcaacaagaaguuccugccguuccagcaguucgggcgcgacaucgccgacacgaccgacgcgguccgcgacccccagacccuggagauccucgacaucacccccugcagcuucggcgggguguccgugaucacgccgggcaccaacaccagcaaccaggucgccgugcuguaccaggacgugaacugcaccgagguccccguggccauccacgccgaccagcugacgcccaccuggcggguguacuccaccggcagcaacgucuuccagacccgcgccgggugccucaucggcgcggagcacgugaacaacuccuacgagugcgacauccccaucggggccggcaucugcgccagcuaccagacgcagaccaacuccccgcggcgcgcccggagcguggcgucccagagcaucaucgccuacaccaugucccugggcgccgagaacagcgucgccuacuccaacaacagcaucgccauccccaccaacuucacgaucuccgugaccaccgagauccugcccgugagcaugaccaagacgagcgucgacugcaccauguacaucugcggggacuccaccgagugcagcaaccuccugcugcaguacggcuccuucugcacccagcucaaccgcgcgcugacggggaucgccguggagcaggacaagaacacccaggagguguucgcccaggucaagcagaucuacaagacgcccccgaucaaggacuucggcggguucaacuucagccagauccugcccgaccccuccaagcccagcaagcgguccuucaucgaggaccuccuguucaacaaggugacccuggccgacgccggcuucaucaagcaguacggcgacugccucggggacaucgcggcccgcgaccugaucugcgcccagaaguucaacggccugaccgugcucccgccccugcugaccgacgagaugaucgcccaguacaccagcgcccuccuggcggggaccaucacguccggcuggaccuucggggccggcgccgcccugcagauccccuucgcgaugcagauggccuaccgguucaacggcaucggggucacccagaacgugcucuacgagaaccagaagcugaucgccaaccaguucaacagcgccaucggcaagauccaggacucccugagcuccaccgccagcgcgcucgggaagcugcaggacguggucaaccagaacgcccaggcccugaacacgcucgugaagugccuguccagcaacuucggcgccaucuccagcgugcugaacgacauccucucccgccuggacaaggucgaggccgaggugcagaucgaccggcugaucaccgggcgccuccagugccugcagaccuacgugacccagcagcugauccgggcggccgagauccgcgccagcgccaaccucgccgcgaccaagauguccgagugcguccugggccagagcaagcggguggacuucugcggcaagggguaccaccugauguccuucccccagagcgccccgcacggcguggucuuccuccacgugacguacguccccgcccaggagaagaacuucaccaccgcccccgcgaucugccacgacgggaaggcccacuucccccgcgagggcguguucguguccaacgggacccacugguucgucacgcagcggaacuucuacgagccgcagaucaucaccaccgacaacaccuucgugagcggcaacugcgacguggucaucggcaucgugaacaacacgguguacgacccccugcagcccgagcuggacuccuucaaggaggagcucgacaaguacuucaagaaccacaccagccccgacgucgaccugggggacaucuccggcaucaacgccagcguggugaacauccagaaggagaucgaccgccugaacgaggucgccaagaaccucaacgagucccugaucgaccugcaggagcucgggaaguacgagcaguacaucaagggcgggggcgggagcgacaucgaccccuacaaggaguucggcagcuccuaccagcugcucaacuuccugccccuggacuucuuccccgaccucaacgcccugguggacaccgccaccgcgcuguacgaggaggagcucacggggcgcgagcacugcagcccccaccacaccgccauccggcaggcccuggucugcugggacgagcugaccaagcucaucgccuggauguccagcaacaucaccuccgagcagguccgcacgaucaucgugaaccacgucaacgacaccuggggccugaaggugcggcagagccugugguuccaccucuccugccugaccuucgggcagcacaccgugcaggaguuccuggucagcuucggcguguggauccgcacgcccgccccguaccggccgcccaacgcgccgauccucuccacccugccggagcacaccgugaucugcugaggacuaguuauaagacugacuagcccgaugggccucccaacgggcccuccuccccuccuugcaccgagauuaauaaaaaaaaaaaaaaaaaaaaaaaaaaaaaaaaaaaaaaaaaaaaaaaaaaaaaaaaaaaaaaaaugcaucccccccccccccccccccccccccccccccaaaggcucuuuucagagccaccagaauu

SEQ ID NO: 12881 - RNA, 4315 nt, Artificial Sequence
  SARS-CoV-2/Wuhan/WIV05/2019__EPI_ISL_402128 spike protein mRNA gc (1-1211)(F970C_G999C) WhcAg construct
aggagaaagcuuaccauguucguguuccugguccuccugccccuggugagcucccagugcgugaaccucaccacccgcacgcagcugccgcccgccuacaccaacagcuucacccggggcgucuacuaccccgacaagguguuccgcuccagcgugcugcacuccacccaggaccucuuccugcccuucuucagcaacgucacgugguuccacgccauccacguguccgggaccaacggcaccaagcgguucgacaacccggugcugcccuucaacgacggggucuacuucgcgagcaccgagaaguccaacaucauccgcggcuggaucuucgggacgacccucgacagcaagacccagucccugcugaucgugaacaacgccaccaacguggucaucaaggugugcgaguuccaguucugcaacgaccccuuccucggcguguacuaccacaagaacaacaagagcuggauggaguccgaguuccgggucuacagcuccgccaacaacugcacguucgaguacgugagccagcccuuccugauggaccuggagggcaagcaggggaacuucaagaaccuccgcgaguucguguucaagaacaucgacggcuacuucaagaucuacuccaagcacaccccgaucaaccugguccgggaccugccccagggguucagcgcccucgagccccugguggaccugcccaucggcaucaacaucacccgcuuccagacccuccuggcccugcaccgguccuaccucacgccgggggacagcagcuccggcuggaccgcgggcgccgccgccuacuacgugggguaccugcagccccgcaccuuccugcucaaguacaacgagaacggcaccaucacggacgcggucgacugcgcccuggacccccugagcgagaccaagugcacccucaaguccuucaccguggagaaggggaucuaccagacgagcaacuuccgggugcagcccaccgaguccaucguccgcuucccgaacaucaccaaccugugccccuucggcgagguguucaacgccacccgguucgccagcgucuacgccuggaaccgcaagcggaucuccaacugcguggcggacuacagcgugcuguacaacuccgccagcuucuccacguucaagugcuacggcgucagccccaccaagcucaacgaccugugcuucaccaacguguacgccgacuccuucgugauccgcggggacgagguccggcagaucgcccccggccagaccgggaagaucgccgacuacaacuacaagcugccggacgacuucacgggcugcgugaucgcguggaacagcaacaaccucgacuccaaggucgggggcaacuacaacuaccuguaccgccuguuccgcaagagcaaccucaagcccuucgagcgggacaucuccaccgagaucuaccaggccggcagcacccccugcaacgggguggagggcuucaacugcuacuucccccugcaguccuacggguuccagccgaccaacggcgugggguaccagcccuaccggguggucgugcugagcuucgagcuccugcacgcccccgccacggugugcggccccaagaaguccaccaaccuggucaagaacaagugcgugaacuucaacuucaacggccucaccgggaccggcgugcugaccgagagcaacaagaaguuccugccguuccagcaguucgggcgcgacaucgccgacacgaccgacgcgguccgcgacccccagacccuggagauccucgacaucacccccugcagcuucggcgggguguccgugaucacgccgggcaccaacaccagcaaccaggucgccgugcuguaccaggacgugaacugcaccgagguccccguggccauccacgccgaccagcugacgcccaccuggcggguguacuccaccggcagcaacgucuuccagacccgcgccgggugccucaucggcgcggagcacgugaacaacuccuacgagugcgacauccccaucggggccggcaucugcgccagcuaccagacgcagaccaacuccccgcggcgcgcccggagcguggcgucccagagcaucaucgccuacaccaugucccugggcgccgagaacagcgucgccuacuccaacaacagcaucgccauccccaccaacuucacgaucuccgugaccaccgagauccugcccgugagcaugaccaagacgagcgucgacugcaccauguacaucugcggggacuccaccgagugcagcaaccuccugcugcaguacggcuccuucugcacccagcucaaccgcgcgcugacggggaucgccguggagcaggacaagaacacccaggagguguucgcccaggucaagcagaucuacaagacgcccccgaucaaggacuucggcggguucaacuucagccagauccugcccgaccccuccaagcccagcaagcgguccuucaucgaggaccuccuguucaacaaggugacccuggccgacgccggcuucaucaagcaguacggcgacugccucggggacaucgcggcccgcgaccugaucugcgcccagaaguucaacggccugaccgugcucccgccccugcugaccgacgagaugaucgcccaguacaccagcgcccuccuggcggggaccaucacguccggcuggaccuucggggccggcgccgcccugcagauccccuucgcgaugcagauggccuaccgguucaacggcaucggggucacccagaacgugcucuacgagaaccagaagcugaucgccaaccaguucaacagcgccaucggcaagauccaggacucccugagcuccaccgccagcgcgcucgggaagcugcaggacguggucaaccagaacgcccaggcccugaacacgcucgugaagcagcuguccagcaacugcggcgccaucuccagcgugcugaacgacauccucucccgccuggacaaggucgaggccgaggugcagaucgaccggcugaucaccugucgccuccagagccugcagaccuacgugacccagcagcugauccgggcggccgagauccgcgccagcgccaaccucgccgcgaccaagauguccgagugcguccugggccagagcaagcggguggacuucugcggcaagggguaccaccugauguccuucccccagagcgccccgcacggcguggucuuccuccacgugacguacguccccgcccaggagaagaacuucaccaccgcccccgcgaucugccacgacgggaaggcccacuucccccgcgagggcguguucguguccaacgggacccacugguucgucacgcagcggaacuucuacgagccgcagaucaucaccaccgacaacaccuucgugagcggcaacugcgacguggucaucggcaucgugaacaacacgguguacgacccccugcagcccgagcuggacuccuucaaggaggagcucgacaaguacuucaagaaccacaccagccccgacgucgaccugggggacaucuccggcaucaacgccagcguggugaacauccagaaggagaucgaccgccugaacgaggucgccaagaaccucaacgagucccugaucgaccugcaggagcucgggaaguacgagcaguacaucaagggcgggggcgggagcgacaucgaccccuacaaggaguucggcagcuccuaccagcugcucaacuuccugccccuggacuucuuccccgaccucaacgcccugguggacaccgccaccgcgcuguacgaggaggagcucacggggcgcgagcacugcagcccccaccacaccgccauccggcaggcccuggucugcugggacgagcugaccaagcucaucgccuggauguccagcaacaucaccuccgagcagguccgcacgaucaucgugaaccacgucaacgacaccuggggccugaaggugcggcagagccugugguuccaccucuccugccugaccuucgggcagcacaccgugcaggaguuccuggucagcuucggcguguggauccgcacgcccgccccguaccggccgcccaacgcgccgauccucuccacccugccggagcacaccgugaucugcugaggacuaguuauaagacugacuagcccgaugggccucccaacgggcccuccuccccuccuugcaccgagauuaauaaaaaaaaaaaaaaaaaaaaaaaaaaaaaaaaaaaaaaaaaaaaaaaaaaaaaaaaaaaaaaaaugcaucccccccccccccccccccccccccccccccaaaggcucuuuucagagccaccagaauu

SEQ ID NO: 12882 - RNA, 4315 nt, Artificial Sequence
  SARS-CoV-2/Wuhan/WIV05/2019__EPI_ISL_402128 spike protein mRNA gc (1-1211)(A972C_R995C) WhcAg construct
aggagaaagcuuaccauguucguguuccugguccuccugccccuggugagcucccagugcgugaaccucaccacccgcacgcagcugccgcccgccuacaccaacagcuucacccggggcgucuacuaccccgacaagguguuccgcuccagcgugcugcacuccacccaggaccucuuccugcccuucuucagcaacgucacgugguuccacgccauccacguguccgggaccaacggcaccaagcgguucgacaacccggugcugcccuucaacgacggggucuacuucgcgagcaccgagaaguccaacaucauccgcggcuggaucuucgggacgacccucgacagcaagacccagucccugcugaucgugaacaacgccaccaacguggucaucaaggugugcgaguuccaguucugcaacgaccccuuccucggcguguacuaccacaagaacaacaagagcuggauggaguccgaguuccgggucuacagcuccgccaacaacugcacguucgaguacgugagccagcccuuccugauggaccuggagggcaagcaggggaacuucaagaaccuccgcgaguucguguucaagaacaucgacggcuacuucaagaucuacuccaagcacaccccgaucaaccugguccgggaccugccccagggguucagcgcccucgagccccugguggaccugcccaucggcaucaacaucacccgcuuccagacccuccuggcccugcaccgguccuaccucacgccgggggacagcagcuccggcuggaccgcgggcgccgccgccuacuacgugggguaccugcagccccgcaccuuccugcucaaguacaacgagaacggcaccaucacggacgcggucgacugcgcccuggacccccugagcgagaccaagugcacccucaaguccuucaccguggagaaggggaucuaccagacgagcaacuuccgggugcagcccaccgaguccaucguccgcuucccgaacaucaccaaccugugccccuucggcgagguguucaacgccacccgguucgccagcgucuacgccuggaaccgcaagcggaucuccaacugcguggcggacuacagcgugcuguacaacuccgccagcuucuccacguucaagugcuacggcgucagccccaccaagcucaacgaccugugcuucaccaacguguacgccgacuccuucgugauccgcggggacgagguccggcagaucgcccccggccagaccgggaagaucgccgacuacaacuacaagcugccggacgacuucacgggcugcgugaucgcguggaacagcaacaaccucgacuccaaggucgggggcaacuacaacuaccuguaccgccuguuccgcaagagcaaccucaagcccuucgagcgggacaucuccaccgagaucuaccaggccggcagcacccccugcaacgggguggagggcuucaacugcuacuucccccugcaguccuacggguuccagccgaccaacggcgugggguaccagcccuaccggguggucgugcugagcuucgagcuccugcacgcccccgccacggugugcggccccaagaaguccaccaaccuggucaagaacaagugcgugaacuucaacuucaacggccucaccgggaccggcgugcugaccgagagcaacaagaaguuccugccguuccagcaguucgggcgcgacaucgccgacacgaccgacgcgguccgcgacccccagacccuggagauccucgacaucacccccugcagcuucggcgggguguccgugaucacgccgggcaccaacaccagcaaccaggucgccgugcuguaccaggacgugaacugcaccgagguccccguggccauccacgccgaccagcugacgcccaccuggcggguguacuccaccggcagcaacgucuuccagacccgcgccgggugccucaucggcgcggagcacgugaacaacuccuacgagugcgacauccccaucggggccggcaucugcgccagcuaccagacgcagaccaacuccccgcggcgcgcccggagcguggcgucccagagcaucaucgccuacaccaugucccugggcgccgagaacagcgucgccuacuccaacaacagcaucgccauccccaccaacuucacgaucuccgugaccaccgagauccugcccgugagcaugaccaagacgagcgucgacugcaccauguacaucugcggggacuccaccgagugcagcaaccuccugcugcaguacggcuccuucugcacccagcucaaccgcgcgcugacggggaucgccguggagcaggacaagaacacccaggagguguucgcccaggucaagcagaucuacaagacgcccccgaucaaggacuucggcggguucaacuucagccagauccugcccgaccccuccaagcccagcaagcgguccuucaucgaggaccuccuguucaacaaggugacccuggccgacgccggcuucaucaagcaguacggcgacugccucggggacaucgcggcccgcgaccugaucugcgcccagaaguucaacggccugaccgugcucccgccccugcugaccgacgagaugaucgcccaguacaccagcgcccuccuggcggggaccaucacguccggcuggaccuucggggccggcgccgcccugcagauccccuucgcgaugcagauggccuaccgguucaacggcaucggggucacccagaacgugcucuacgagaaccagaagcugaucgccaaccaguucaacagcgccaucggcaagauccaggacucccugagcuccaccgccagcgcgcucgggaagcugcaggacguggucaaccagaacgcccaggcccugaacacgcucgugaagcagcuguccagcaacuucggcugcaucuccagcgugcugaacgacauccucucccgccuggacaaggucgaggccgaggugcagaucgacugccugaucaccgggcgccuccagagccugcagaccuacgugacccagcagcugauccgggcggccgagauccgcgccagcgccaaccucgccgcgaccaagauguccgagugcguccugggccagagcaagcggguggacuucugcggcaagggguaccaccugauguccuucccccagagcgccccgcacggcguggucuuccuccacgugacguacguccccgcccaggagaagaacuucaccaccgcccccgcgaucugccacgacgggaaggcccacuucccccgcgagggcguguucguguccaacgggacccacugguucgucacgcagcggaacuucuacgagccgcagaucaucaccaccgacaacaccuucgugagcggcaacugcgacguggucaucggcaucgugaacaacacgguguacgacccccugcagcccgagcuggacuccuucaaggaggagcucgacaaguacuucaagaaccacaccagccccgacgucgaccugggggacaucuccggcaucaacgccagcguggugaacauccagaaggagaucgaccgccugaacgaggucgccaagaaccucaacgagucccugaucgaccugcaggagcucgggaaguacgagcaguacaucaagggcgggggcgggagcgacaucgaccccuacaaggaguucggcagcuccuaccagcugcucaacuuccugccccuggacuucuuccccgaccucaacgcccugguggacaccgccaccgcgcuguacgaggaggagcucacggggcgcgagcacugcagcccccaccacaccgccauccggcaggcccuggucugcugggacgagcugaccaagcucaucgccuggauguccagcaacaucaccuccgagcagguccgcacgaucaucgugaaccacgucaacgacaccuggggccugaaggugcggcagagccugugguuccaccucuccugccugaccuucgggcagcacaccgugcaggaguuccuggucagcuucggcguguggauccgcacgcccgccccguaccggccgcccaacgcgccgauccucuccacccugccggagcacaccgugaucugcugaggacuaguuauaagacugacuagcccgaugggccucccaacgggcccuccuccccuccuugcaccgagauuaauaaaaaaaaaaaaaaaaaaaaaaaaaaaaaaaaaaaaaaaaaaaaaaaaaaaaaaaaaaaaaaaaugcaucccccccccccccccccccccccccccccccaaaggcucuuuucagagccaccagaauu

SEQ ID NO: 12883 - RNA, 4315 nt, Artificial Sequence
  SARS-CoV-2/Wuhan/WIV05/2019__EPI_ISL_402128 spike protein mRNA gc (1-1211)(A890C_V1040C) WhcAg construct
aggagaaagcuuaccauguucguguuccugguccuccugccccuggugagcucccagugcgugaaccucaccacccgcacgcagcugccgcccgccuacaccaacagcuucacccggggcgucuacuaccccgacaagguguuccgcuccagcgugcugcacuccacccaggaccucuuccugcccuucuucagcaacgucacgugguuccacgccauccacguguccgggaccaacggcaccaagcgguucgacaacccggugcugcccuucaacgacggggucuacuucgcgagcaccgagaaguccaacaucauccgcggcuggaucuucgggacgacccucgacagcaagacccagucccugcugaucgugaacaacgccaccaacguggucaucaaggugugcgaguuccaguucugcaacgaccccuuccucggcguguacuaccacaagaacaacaagagcuggauggaguccgaguuccgggucuacagcuccgccaacaacugcacguucgaguacgugagccagcccuuccugauggaccuggagggcaagcaggggaacuucaagaaccuccgcgaguucguguucaagaacaucgacggcuacuucaagaucuacuccaagcacaccccgaucaaccugguccgggaccugccccagggguucagcgcccucgagccccugguggaccugcccaucggcaucaacaucacccgcuuccagacccuccuggcccugcaccgguccuaccucacgccgggggacagcagcuccggcuggaccgcgggcgccgccgccuacuacgugggguaccugcagccccgcaccuuccugcucaaguacaacgagaacggcaccaucacggacgcggucgacugcgcccuggacccccugagcgagaccaagugcacccucaaguccuucaccguggagaaggggaucuaccagacgagcaacuuccgggugcagcccaccgaguccaucguccgcuucccgaacaucaccaaccugugccccuucggcgagguguucaacgccacccgguucgccagcgucuacgccuggaaccgcaagcggaucuccaacugcguggcggacuacagcgugcuguacaacuccgccagcuucuccacguucaagugcuacggcgucagccccaccaagcucaacgaccugugcuucaccaacguguacgccgacuccuucgugauccgcggggacgagguccggcagaucgcccccggccagaccgggaagaucgccgacuacaacuacaagcugccggacgacuucacgggcugcgugaucgcguggaacagcaacaaccucgacuccaaggucgggggcaacuacaacuaccuguaccgccuguuccgcaagagcaaccucaagcccuucgagcgggacaucuccaccgagaucuaccaggccggcagcacccccugcaacgggguggagggcuucaacugcuacuucccccugcaguccuacggguuccagccgaccaacggcgugggguaccagcccuaccggguggucgugcugagcuucgagcuccugcacgcccccgccacggugugcggccccaagaaguccaccaaccuggucaagaacaagugcgugaacuucaacuucaacggccucaccgggaccggcgugcugaccgagagcaacaagaaguuccugccguuccagcaguucgggcgcgacaucgccgacacgaccgacgcgguccgcgacccccagacccuggagauccucgacaucacccccugcagcuucggcgggguguccgugaucacgccgggcaccaacaccagcaaccaggucgccgugcuguaccaggacgugaacugcaccgagguccccguggccauccacgccgaccagcugacgcccaccuggcggguguacuccaccggcagcaacgucuuccagacccgcgccgggugccucaucggcgcggagcacgugaacaacuccuacgagugcgacauccccaucggggccggcaucugcgccagcuaccagacgcagaccaacuccccgcggcgcgcccggagcguggcgucccagagcaucaucgccuacaccaugucccugggcgccgagaacagcgucgccuacuccaacaacagcaucgccauccccaccaacuucacgaucuccgugaccaccgagauccugcccgugagcaugaccaagacgagcgucgacugcaccauguacaucugcggggacuccaccgagugcagcaaccuccugcugcaguacggcuccuucugcacccagcucaaccgcgcgcugacggggaucgccguggagcaggacaagaacacccaggagguguucgcccaggucaagcagaucuacaagacgcccccgaucaaggacuucggcggguucaacuucagccagauccugcccgaccccuccaagcccagcaagcgguccuucaucgaggaccuccuguucaacaaggugacccuggccgacgccggcuucaucaagcaguacggcgacugccucggggacaucgcggcccgcgaccugaucugcgcccagaaguucaacggccugaccgugcucccgccccugcugaccgacgagaugaucgcccaguacaccagcgcccuccuggcggggaccaucacguccggcuggaccuucgggugcggcgccgcccugcagauccccuucgcgaugcagauggccuaccgguucaacggcaucggggucacccagaacgugcucuacgagaaccagaagcugaucgccaaccaguucaacagcgccaucggcaagauccaggacucccugagcuccaccgccagcgcgcucgggaagcugcaggacguggucaaccagaacgcccaggcccugaacacgcucgugaagcagcuguccagcaacuucggcgccaucuccagcgugcugaacgacauccucucccgccuggacaaggucgaggccgaggugcagaucgaccggcugaucaccgggcgccuccagagccugcagaccuacgugacccagcagcugauccgggcggccgagauccgcgccagcgccaaccucgccgcgaccaagauguccgagugcguccugggccagagcaagcggugcgacuucugcggcaagggguaccaccugauguccuucccccagagcgccccgcacggcguggucuuccuccacgugacguacguccccgcccaggagaagaacuucaccaccgcccccgcgaucugccacgacgggaaggcccacuucccccgcgagggcguguucguguccaacgggacccacugguucgucacgcagcggaacuucuacgagccgcagaucaucaccaccgacaacaccuucgugagcggcaacugcgacguggucaucggcaucgugaacaacacgguguacgacccccugcagcccgagcuggacuccuucaaggaggagcucgacaaguacuucaagaaccacaccagccccgacgucgaccugggggacaucuccggcaucaacgccagcguggugaacauccagaaggagaucgaccgccugaacgaggucgccaagaaccucaacgagucccugaucgaccugcaggagcucgggaaguacgagcaguacaucaagggcgggggcgggagcgacaucgaccccuacaaggaguucggcagcuccuaccagcugcucaacuuccugccccuggacuucuuccccgaccucaacgcccugguggacaccgccaccgcgcuguacgaggaggagcucacggggcgcgagcacugcagcccccaccacaccgccauccggcaggcccuggucugcugggacgagcugaccaagcucaucgccuggauguccagcaacaucaccuccgagcagguccgcacgaucaucgugaaccacgucaacgacaccuggggccugaaggugcggcagagccugugguuccaccucuccugccugaccuucgggcagcacaccgugcaggaguuccuggucagcuucggcguguggauccgcacgcccgccccguaccggccgcccaacgcgccgauccucuccacccugccggagcacaccgugaucugcugaggacuaguuauaagacugacuagcccgaugggccucccaacgggcccuccuccccuccuugcaccgagauuaauaaaaaaaaaaaaaaaaaaaaaaaaaaaaaaaaaaaaaaaaaaaaaaaaaaaaaaaaaaaaaaaaugcaucccccccccccccccccccccccccccccccaaaggcucuuuucagagccaccagaauu

SEQ ID NO: 12884 - RNA, 4315 nt, Artificial Sequence
  SARS-CoV-2/Wuhan/WIV05/2019__EPI_ISL_402128 spike protein mRNA gc (1-1211)(T874C_S1055C) WhcAg construct
aggagaaagcuuaccauguucguguuccugguccuccugccccuggugagcucccagugcgugaaccucaccacccgcacgcagcugccgcccgccuacaccaacagcuucacccggggcgucuacuaccccgacaagguguuccgcuccagcgugcugcacuccacccaggaccucuuccugcccuucuucagcaacgucacgugguuccacgccauccacguguccgggaccaacggcaccaagcgguucgacaacccggugcugcccuucaacgacggggucuacuucgcgagcaccgagaaguccaacaucauccgcggcuggaucuucgggacgacccucgacagcaagacccagucccugcugaucgugaacaacgccaccaacguggucaucaaggugugcgaguuccaguucugcaacgaccccuuccucggcguguacuaccacaagaacaacaagagcuggauggaguccgaguuccgggucuacagcuccgccaacaacugcacguucgaguacgugagccagcccuuccugauggaccuggagggcaagcaggggaacuucaagaaccuccgcgaguucguguucaagaacaucgacggcuacuucaagaucuacuccaagcacaccccgaucaaccugguccgggaccugccccagggguucagcgcccucgagccccugguggaccugcccaucggcaucaacaucacccgcuuccagacccuccuggcccugcaccgguccuaccucacgccgggggacagcagcuccggcuggaccgcgggcgccgccgccuacuacgugggguaccugcagccccgcaccuuccugcucaaguacaacgagaacggcaccaucacggacgcggucgacugcgcccuggacccccugagcgagaccaagugcacccucaaguccuucaccguggagaaggggaucuaccagacgagcaacuuccgggugcagcccaccgaguccaucguccgcuucccgaacaucaccaaccugugccccuucggcgagguguucaacgccacccgguucgccagcgucuacgccuggaaccgcaagcggaucuccaacugcguggcggacuacagcgugcuguacaacuccgccagcuucuccacguucaagugcuacggcgucagccccaccaagcucaacgaccugugcuucaccaacguguacgccgacuccuucgugauccgcggggacgagguccggcagaucgcccccggccagaccgggaagaucgccgacuacaacuacaagcugccggacgacuucacgggcugcgugaucgcguggaacagcaacaaccucgacuccaaggucgggggcaacuacaacuaccuguaccgccuguuccgcaagagcaaccucaagcccuucgagcgggacaucuccaccgagaucuaccaggccggcagcacccccugcaacgggguggagggcuucaacugcuacuucccccugcaguccuacggguuccagccgaccaacggcgugggguaccagcccuaccggguggucgugcugagcuucgagcuccugcacgcccccgccacggugugcggccccaagaaguccaccaaccuggucaagaacaagugcgugaacuucaacuucaacggccucaccgggaccggcgugcugaccgagagcaacaagaaguuccugccguuccagcaguucgggcgcgacaucgccgacacgaccgacgcgguccgcgacccccagacccuggagauccucgacaucacccccugcagcuucggcgggguguccgugaucacgccgggcaccaacaccagcaaccaggucgccgugcuguaccaggacgugaacugcaccgagguccccguggccauccacgccgaccagcugacgcccaccuggcggguguacuccaccggcagcaacgucuuccagacccgcgccgggugccucaucggcgcggagcacgugaacaacuccuacgagugcgacauccccaucggggccggcaucugcgccagcuaccagacgcagaccaacuccccgcggcgcgcccggagcguggcgucccagagcaucaucgccuacaccaugucccugggcgccgagaacagcgucgccuacuccaacaacagcaucgccauccccaccaacuucacgaucuccgugaccaccgagauccugcccgugagcaugaccaagacgagcgucgacugcaccauguacaucugcggggacuccaccgagugcagcaaccuccugcugcaguacggcuccuucugcacccagcucaaccgcgcgcugacggggaucgccguggagcaggacaagaacacccaggagguguucgcccaggucaagcagaucuacaagacgcccccgaucaaggacuucggcggguucaacuucagccagauccugcccgaccccuccaagcccagcaagcgguccuucaucgaggaccuccuguucaacaaggugacccuggccgacgccggcuucaucaagcaguacggcgacugccucggggacaucgcggcccgcgaccugaucugcgcccagaaguucaacggccugaccgugcucccgccccugcugaccgacgagaugaucgcccaguacugcagcgcccuccuggcggggaccaucacguccggcuggaccuucggggccggcgccgcccugcagauccccuucgcgaugcagauggccuaccgguucaacggcaucggggucacccagaacgugcucuacgagaaccagaagcugaucgccaaccaguucaacagcgccaucggcaagauccaggacucccugagcuccaccgccagcgcgcucgggaagcugcaggacguggucaaccagaacgcccaggcccugaacacgcucgugaagcagcuguccagcaacuucggcgccaucuccagcgugcugaacgacauccucucccgccuggacaaggucgaggccgaggugcagaucgaccggcugaucaccgggcgccuccagagccugcagaccuacgugacccagcagcugauccgggcggccgagauccgcgccagcgccaaccucgccgcgaccaagauguccgagugcguccugggccagagcaagcggguggacuucugcggcaagggguaccaccugauguccuucccccagugcgccccgcacggcguggucuuccuccacgugacguacguccccgcccaggagaagaacuucaccaccgcccccgcgaucugccacgacgggaaggcccacuucccccgcgagggcguguucguguccaacgggacccacugguucgucacgcagcggaacuucuacgagccgcagaucaucaccaccgacaacaccuucgugagcggcaacugcgacguggucaucggcaucgugaacaacacgguguacgacccccugcagcccgagcuggacuccuucaaggaggagcucgacaaguacuucaagaaccacaccagccccgacgucgaccugggggacaucuccggcaucaacgccagcguggugaacauccagaaggagaucgaccgccugaacgaggucgccaagaaccucaacgagucccugaucgaccugcaggagcucgggaaguacgagcaguacaucaagggcgggggcgggagcgacaucgaccccuacaaggaguucggcagcuccuaccagcugcucaacuuccugccccuggacuucuuccccgaccucaacgcccugguggacaccgccaccgcgcuguacgaggaggagcucacggggcgcgagcacugcagcccccaccacaccgccauccggcaggcccuggucugcugggacgagcugaccaagcucaucgccuggauguccagcaacaucaccuccgagcagguccgcacgaucaucgugaaccacgucaacgacaccuggggccugaaggugcggcagagccugugguuccaccucuccugccugaccuucgggcagcacaccgugcaggaguuccuggucagcuucggcguguggauccgcacgcccgccccguaccggccgcccaacgcgccgauccucuccacccugccggagcacaccgugaucugcugaggacuaguuauaagacugacuagcccgaugggccucccaacgggcccuccuccccuccuugcaccgagauuaauaaaaaaaaaaaaaaaaaaaaaaaaaaaaaaaaaaaaaaaaaaaaaaaaaaaaaaaaaaaaaaaaugcaucccccccccccccccccccccccccccccccaaaggcucuuuucagagccaccagaauu

SEQ ID NO: 12885 - RNA, 4141 nt, Artificial Sequence
  SARS-CoV-2/Wuhan/WIV05/2019__EPI_ISL_402128 spike protein mRNA gc (1-1147) LumSynth construct
aggagaaagcuuaccauguucguguuccugguccuccugccccuggugagcucccagugcgugaaccucaccacccgcacgcagcugccgcccgccuacaccaacagcuucacccggggcgucuacuaccccgacaagguguuccgcuccagcgugcugcacuccacccaggaccucuuccugcccuucuucagcaacgucacgugguuccacgccauccacguguccgggaccaacggcaccaagcgguucgacaacccggugcugcccuucaacgacggggucuacuucgcgagcaccgagaaguccaacaucauccgcggcuggaucuucgggacgacccucgacagcaagacccagucccugcugaucgugaacaacgccaccaacguggucaucaaggugugcgaguuccaguucugcaacgaccccuuccucggcguguacuaccacaagaacaacaagagcuggauggaguccgaguuccgggucuacagcuccgccaacaacugcacguucgaguacgugagccagcccuuccugauggaccuggagggcaagcaggggaacuucaagaaccuccgcgaguucguguucaagaacaucgacggcuacuucaagaucuacuccaagcacaccccgaucaaccugguccgggaccugccccagggguucagcgcccucgagccccugguggaccugcccaucggcaucaacaucacccgcuuccagacccuccuggcccugcaccgguccuaccucacgccgggggacagcagcuccggcuggaccgcgggcgccgccgccuacuacgugggguaccugcagccccgcaccuuccugcucaaguacaacgagaacggcaccaucacggacgcggucgacugcgcccuggacccccugagcgagaccaagugcacccucaaguccuucaccguggagaaggggaucuaccagacgagcaacuuccgggugcagcccaccgaguccaucguccgcuucccgaacaucaccaaccugugccccuucggcgagguguucaacgccacccgguucgccagcgucuacgccuggaaccgcaagcggaucuccaacugcguggcggacuacagcgugcuguacaacuccgccagcuucuccacguucaagugcuacggcgucagccccaccaagcucaacgaccugugcuucaccaacguguacgccgacuccuucgugauccgcggggacgagguccggcagaucgcccccggccagaccgggaagaucgccgacuacaacuacaagcugccggacgacuucacgggcugcgugaucgcguggaacagcaacaaccucgacuccaaggucgggggcaacuacaacuaccuguaccgccuguuccgcaagagcaaccucaagcccuucgagcgggacaucuccaccgagaucuaccaggccggcagcacccccugcaacgggguggagggcuucaacugcuacuucccccugcaguccuacggguuccagccgaccaacggcgugggguaccagcccuaccggguggucgugcugagcuucgagcuccugcacgcccccgccacggugugcggccccaagaaguccaccaaccuggucaagaacaagugcgugaacuucaacuucaacggccucaccgggaccggcgugcugaccgagagcaacaagaaguuccugccguuccagcaguucgggcgcgacaucgccgacacgaccgacgcgguccgcgacccccagacccuggagauccucgacaucacccccugcagcuucggcgggguguccgugaucacgccgggcaccaacaccagcaaccaggucgccgugcuguaccaggacgugaacugcaccgagguccccguggccauccacgccgaccagcugacgcccaccuggcggguguacuccaccggcagcaacgucuuccagacccgcgccgggugccucaucggcgcggagcacgugaacaacuccuacgagugcgacauccccaucggggccggcaucugcgccagcuaccagacgcagaccaacuccccgcggcgcgcccggagcguggcgucccagagcaucaucgccuacaccaugucccugggcgccgagaacagcgucgccuacuccaacaacagcaucgccauccccaccaacuucacgaucuccgugaccaccgagauccugcccgugagcaugaccaagacgagcgucgacugcaccauguacaucugcggggacuccaccgagugcagcaaccuccugcugcaguacggcuccuucugcacccagcucaaccgcgcgcugacggggaucgccguggagcaggacaagaacacccaggagguguucgcccaggucaagcagaucuacaagacgcccccgaucaaggacuucggcggguucaacuucagccagauccugcccgaccccuccaagcccagcaagcgguccuucaucgaggaccuccuguucaacaaggugacccuggccgacgccggcuucaucaagcaguacggcgacugccucggggacaucgcggcccgcgaccugaucugcgcccagaaguucaacggccugaccgugcucccgccccugcugaccgacgagaugaucgcccaguacaccagcgcccuccuggcggggaccaucacguccggcuggaccuucggggccggcgccgcccugcagauccccuucgcgaugcagauggccuaccgguucaacggcaucggggucacccagaacgugcucuacgagaaccagaagcugaucgccaaccaguucaacagcgccaucggcaagauccaggacucccugagcuccaccgccagcgcgcucgggaagcugcaggacguggucaaccagaacgcccaggcccugaacacgcucgugaagcagcuguccagcaacuucggcgccaucuccagcgugcugaacgacauccucucccgccuggacaaggucgaggccgaggugcagaucgaccggcugaucaccgggcgccuccagagccugcagaccuacgugacccagcagcugauccgggcggccgagauccgcgccagcgccaaccucgccgcgaccaagauguccgagugcguccugggccagagcaagcggguggacuucugcggcaagggguaccaccugauguccuucccccagagcgccccgcacggcguggucuuccuccacgugacguacguccccgcccaggagaagaacuucaccaccgcccccgcgaucugccacgacgggaaggcccacuucccccgcgagggcguguucguguccaacgggacccacugguucgucacgcagcggaacuucuacgagccgcagaucaucaccaccgacaacaccuucgugagcggcaacugcgacguggucaucggcaucgugaacaacacgguguacgacccccugcagcccgagcuggacuccggcggcgggagcgggggcgggcagaucuacgagggcaagcugaccgccgaggggcuccgcuucggcaucguggccagccgguucaaccacgcgcuggucgaccgccugguggagggggccaucgacgccaucgugcggcacggcgggcgcgaggaggacaucacccucguccgggugcccggcuccugggagaucccgguggccgccggcgagcuggcccgcaaggaggacaucgacgcggucaucgccaucggggugcugauccggggcgccacgccccacuucgacuacaucgccagcgagguguccaaggggcucgcggaccugagccuggagcuccgcaagcccaucaccuucggcgucaucaccgccgacacccuggagcaggccaucgagcgggccgggacgaagcacggcaacaagggcugggaggccgcgcuguccgccaucgagauggccaaccucuucaagagccugcgcugaggacuaguuauaagacugacuagcccgaugggccucccaacgggcccuccuccccuccuugcaccgagauuaauaaaaaaaaaaaaaaaaaaaaaaaaaaaaaaaaaaaaaaaaaaaaaaaaaaaaaaaaaaaaaaaaugcaucccccccccccccccccccccccccccccccaaaggcucuuuucagagccaccagaauu

SEQ ID NO: 12886 - RNA, 4141 nt, Artificial Sequence
  SARS-CoV-2/Wuhan/WIV05/2019__EPI_ISL_402128 spike protein mRNA gc (1-1147)(K986P_V987P) LumSynth construct
aggagaaagcuuaccauguucguguuccugguccuccugccccuggugagcucccagugcgugaaccucaccacccgcacgcagcugccgcccgccuacaccaacagcuucacccggggcgucuacuaccccgacaagguguuccgcuccagcgugcugcacuccacccaggaccucuuccugcccuucuucagcaacgucacgugguuccacgccauccacguguccgggaccaacggcaccaagcgguucgacaacccggugcugcccuucaacgacggggucuacuucgcgagcaccgagaaguccaacaucauccgcggcuggaucuucgggacgacccucgacagcaagacccagucccugcugaucgugaacaacgccaccaacguggucaucaaggugugcgaguuccaguucugcaacgaccccuuccucggcguguacuaccacaagaacaacaagagcuggauggaguccgaguuccgggucuacagcuccgccaacaacugcacguucgaguacgugagccagcccuuccugauggaccuggagggcaagcaggggaacuucaagaaccuccgcgaguucguguucaagaacaucgacggcuacuucaagaucuacuccaagcacaccccgaucaaccugguccgggaccugccccagggguucagcgcccucgagccccugguggaccugcccaucggcaucaacaucacccgcuuccagacccuccuggcccugcaccgguccuaccucacgccgggggacagcagcuccggcuggaccgcgggcgccgccgccuacuacgugggguaccugcagccccgcaccuuccugcucaaguacaacgagaacggcaccaucacggacgcggucgacugcgcccuggacccccugagcgagaccaagugcacccucaaguccuucaccguggagaaggggaucuaccagacgagcaacuuccgggugcagcccaccgaguccaucguccgcuucccgaacaucaccaaccugugccccuucggcgagguguucaacgccacccgguucgccagcgucuacgccuggaaccgcaagcggaucuccaacugcguggcggacuacagcgugcuguacaacuccgccagcuucuccacguucaagugcuacggcgucagccccaccaagcucaacgaccugugcuucaccaacguguacgccgacuccuucgugauccgcggggacgagguccggcagaucgcccccggccagaccgggaagaucgccgacuacaacuacaagcugccggacgacuucacgggcugcgugaucgcguggaacagcaacaaccucgacuccaaggucgggggcaacuacaacuaccuguaccgccuguuccgcaagagcaaccucaagcccuucgagcgggacaucuccaccgagaucuaccaggccggcagcacccccugcaacgggguggagggcuucaacugcuacuucccccugcaguccuacggguuccagccgaccaacggcgugggguaccagcccuaccggguggucgugcugagcuucgagcuccugcacgcccccgccacggugugcggccccaagaaguccaccaaccuggucaagaacaagugcgugaacuucaacuucaacggccucaccgggaccggcgugcugaccgagagcaacaagaaguuccugccguuccagcaguucgggcgcgacaucgccgacacgaccgacgcgguccgcgacccccagacccuggagauccucgacaucacccccugcagcuucggcgggguguccgugaucacgccgggcaccaacaccagcaaccaggucgccgugcuguaccaggacgugaacugcaccgagguccccguggccauccacgccgaccagcugacgcccaccuggcggguguacuccaccggcagcaacgucuuccagacccgcgccgggugccucaucggcgcggagcacgugaacaacuccuacgagugcgacauccccaucggggccggcaucugcgccagcuaccagacgcagaccaacuccccgcggcgcgcccggagcguggcgucccagagcaucaucgccuacaccaugucccugggcgccgagaacagcgucgccuacuccaacaacagcaucgccauccccaccaacuucacgaucuccgugaccaccgagauccugcccgugagcaugaccaagacgagcgucgacugcaccauguacaucugcggggacuccaccgagugcagcaaccuccugcugcaguacggcuccuucugcacccagcucaaccgcgcgcugacggggaucgccguggagcaggacaagaacacccaggagguguucgcccaggucaagcagaucuacaagacgcccccgaucaaggacuucggcggguucaacuucagccagauccugcccgaccccuccaagcccagcaagcgguccuucaucgaggaccuccuguucaacaaggugacccuggccgacgccggcuucaucaagcaguacggcgacugccucggggacaucgcggcccgcgaccugaucugcgcccagaaguucaacggccugaccgugcucccgccccugcugaccgacgagaugaucgcccaguacaccagcgcccuccuggcggggaccaucacguccggcuggaccuucggggccggcgccgcccugcagauccccuucgcgaugcagauggccuaccgguucaacggcaucggggucacccagaacgugcucuacgagaaccagaagcugaucgccaaccaguucaacagcgccaucggcaagauccaggacucccugagcuccaccgccagcgcgcucgggaagcugcaggacguggucaaccagaacgcccaggcccugaacacgcucgugaagcagcuguccagcaacuucggcgccaucuccagcgugcugaacgacauccucucccgccuggacccgcccgaggccgaggugcagaucgaccggcugaucaccgggcgccuccagagccugcagaccuacgugacccagcagcugauccgggcggccgagauccgcgccagcgccaaccucgccgcgaccaagauguccgagugcguccugggccagagcaagcggguggacuucugcggcaagggguaccaccugauguccuucccccagagcgccccgcacggcguggucuuccuccacgugacguacguccccgcccaggagaagaacuucaccaccgcccccgcgaucugccacgacgggaaggcccacuucccccgcgagggcguguucguguccaacgggacccacugguucgucacgcagcggaacuucuacgagccgcagaucaucaccaccgacaacaccuucgugagcggcaacugcgacguggucaucggcaucgugaacaacacgguguacgacccccugcagcccgagcuggacuccggcggcgggagcgggggcgggcagaucuacgagggcaagcugaccgccgaggggcuccgcuucggcaucguggccagccgguucaaccacgcgcuggucgaccgccugguggagggggccaucgacgccaucgugcggcacggcgggcgcgaggaggacaucacccucguccgggugcccggcuccugggagaucccgguggccgccggcgagcuggcccgcaaggaggacaucgacgcggucaucgccaucggggugcugauccggggcgccacgccccacuucgacuacaucgccagcgagguguccaaggggcucgcggaccugagccuggagcuccgcaagcccaucaccuucggcgucaucaccgccgacacccuggagcaggccaucgagcgggccgggacgaagcacggcaacaagggcugggaggccgcgcuguccgccaucgagauggccaaccucuucaagagccugcgcugaggacuaguuauaagacugacuagcccgaugggccucccaacgggcccuccuccccuccuugcaccgagauuaauaaaaaaaaaaaaaaaaaaaaaaaaaaaaaaaaaaaaaaaaaaaaaaaaaaaaaaaaaaaaaaaaugcaucccccccccccccccccccccccccccccccaaaggcucuuuucagagccaccagaauu

SEQ ID NO: 12887 - RNA, 4141 nt, Artificial Sequence
  SARS-CoV-2/Wuhan/WIV05/2019__EPI_ISL_402128 spike protein mRNA gc (1-1147)(K986P_V987P_T887WN_A1020W) LumSynth construct
aggagaaagcuuaccauguucguguuccugguccuccugccccuggugagcucccagugcgugaaccucaccacccgcacgcagcugccgcccgccuacaccaacagcuucacccggggcgucuacuaccccgacaagguguuccgcuccagcgugcugcacuccacccaggaccucuuccugcccuucuucagcaacgucacgugguuccacgccauccacguguccgggaccaacggcaccaagcgguucgacaacccggugcugcccuucaacgacggggucuacuucgcgagcaccgagaaguccaacaucauccgcggcuggaucuucgggacgacccucgacagcaagacccagucccugcugaucgugaacaacgccaccaacguggucaucaaggugugcgaguuccaguucugcaacgaccccuuccucggcguguacuaccacaagaacaacaagagcuggauggaguccgaguuccgggucuacagcuccgccaacaacugcacguucgaguacgugagccagcccuuccugauggaccuggagggcaagcaggggaacuucaagaaccuccgcgaguucguguucaagaacaucgacggcuacuucaagaucuacuccaagcacaccccgaucaaccugguccgggaccugccccagggguucagcgcccucgagccccugguggaccugcccaucggcaucaacaucacccgcuuccagacccuccuggcccugcaccgguccuaccucacgccgggggacagcagcuccggcuggaccgcgggcgccgccgccuacuacgugggguaccugcagccccgcaccuuccugcucaaguacaacgagaacggcaccaucacggacgcggucgacugcgcccuggacccccugagcgagaccaagugcacccucaaguccuucaccguggagaaggggaucuaccagacgagcaacuuccgggugcagcccaccgaguccaucguccgcuucccgaacaucaccaaccugugccccuucggcgagguguucaacgccacccgguucgccagcgucuacgccuggaaccgcaagcggaucuccaacugcguggcggacuacagcgugcuguacaacuccgccagcuucuccacguucaagugcuacggcgucagccccaccaagcucaacgaccugugcuucaccaacguguacgccgacuccuucgugauccgcggggacgagguccggcagaucgcccccggccagaccgggaagaucgccgacuacaacuacaagcugccggacgacuucacgggcugcgugaucgcguggaacagcaacaaccucgacuccaaggucgggggcaacuacaacuaccuguaccgccuguuccgcaagagcaaccucaagcccuucgagcgggacaucuccaccgagaucuaccaggccggcagcacccccugcaacgggguggagggcuucaacugcuacuucccccugcaguccuacggguuccagccgaccaacggcgugggguaccagcccuaccggguggucgugcugagcuucgagcuccugcacgcccccgccacggugugcggccccaagaaguccaccaaccuggucaagaacaagugcgugaacuucaacuucaacggccucaccgggaccggcgugcugaccgagagcaacaagaaguuccugccguuccagcaguucgggcgcgacaucgccgacacgaccgacgcgguccgcgacccccagacccuggagauccucgacaucacccccugcagcuucggcgggguguccgugaucacgccgggcaccaacaccagcaaccaggucgccgugcuguaccaggacgugaacugcaccgagguccccguggccauccacgccgaccagcugacgcccaccuggcggguguacuccaccggcagcaacgucuuccagacccgcgccgggugccucaucggcgcggagcacgugaacaacuccuacgagugcgacauccccaucggggccggcaucugcgccagcuaccagacgcagaccaacuccccgcggcgcgcccggagcguggcgucccagagcaucaucgccuacaccaugucccugggcgccgagaacagcgucgccuacuccaacaacagcaucgccauccccaccaacuucacgaucuccgugaccaccgagauccugcccgugagcaugaccaagacgagcgucgacugcaccauguacaucugcggggacuccaccgagugcagcaaccuccugcugcaguacggcuccuucugcacccagcucaaccgcgcgcugacggggaucgccguggagcaggacaagaacacccaggagguguucgcccaggucaagcagaucuacaagacgcccccgaucaaggacuucggcggguucaacuucagccagauccugcccgaccccuccaagcccagcaagcgguccuucaucgaggaccuccuguucaacaaggugacccuggccgacgccggcuucaucaagcaguacggcgacugccucggggacaucgcggcccgcgaccugaucugcgcccagaaguucaacggccugaccgugcucccgccccugcugaccgacgagaugaucgcccaguacaccagcgcccuccuggcggggaccaucacguccggcuggugguucggggccggcgccgcccugcagauccccuucgcgaugcagauggccuaccgguucaacggcaucggggucacccagaacgugcucuacgagaaccagaagcugaucgccaaccaguucaacagcgccaucggcaagauccaggacucccugagcuccaccgccagcgcgcucgggaagcugcaggacguggucaaccagaacgcccaggcccugaacacgcucgugaagcagcuguccagcaacuucggcgccaucuccagcgugcugaacgacauccucucccgccuggacccgcccgaggccgaggugcagaucgaccggcugaucaccgggcgccuccagagccugcagaccuacgugacccagcagcugauccgggcggccgagauccgcuggagcgccaaccucgccgcgaccaagauguccgagugcguccugggccagagcaagcggguggacuucugcggcaagggguaccaccugauguccuucccccagagcgccccgcacggcguggucuuccuccacgugacguacguccccgcccaggagaagaacuucaccaccgcccccgcgaucugccacgacgggaaggcccacuucccccgcgagggcguguucguguccaacgggacccacugguucgucacgcagcggaacuucuacgagccgcagaucaucaccaccgacaacaccuucgugagcggcaacugcgacguggucaucggcaucgugaacaacacgguguacgacccccugcagcccgagcuggacuccggcggcgggagcgggggcgggcagaucuacgagggcaagcugaccgccgaggggcuccgcuucggcaucguggccagccgguucaaccacgcgcuggucgaccgccugguggagggggccaucgacgccaucgugcggcacggcgggcgcgaggaggacaucacccucguccgggugcccggcuccugggagaucccgguggccgccggcgagcuggcccgcaaggaggacaucgacgcggucaucgccaucggggugcugauccggggcgccacgccccacuucgacuacaucgccagcgagguguccaaggggcucgcggaccugagccuggagcuccgcaagcccaucaccuucggcgucaucaccgccgacacccuggagcaggccaucgagcgggccgggacgaagcacggcaacaagggcugggaggccgcgcuguccgccaucgagauggccaaccucuucaagagccugcgcugaggacuaguuauaagacugacuagcccgaugggccucccaacgggcccuccuccccuccuugcaccgagauuaauaaaaaaaaaaaaaaaaaaaaaaaaaaaaaaaaaaaaaaaaaaaaaaaaaaaaaaaaaaaaaaaaugcaucccccccccccccccccccccccccccccccaaaggcucuuuucagagccaccagaauu

SEQ ID NO: 12888 - RNA, 4141 nt, Artificial Sequence
  SARS-CoV-2/Wuhan/WIV05/2019__EPI_ISL_402128 spike protein mRNA gc (1-1147)(K986P_V987P_P1069F) LumSynth construct
aggagaaagcuuaccauguucguguuccugguccuccugccccuggugagcucccagugcgugaaccucaccacccgcacgcagcugccgcccgccuacaccaacagcuucacccggggcgucuacuaccccgacaagguguuccgcuccagcgugcugcacuccacccaggaccucuuccugcccuucuucagcaacgucacgugguuccacgccauccacguguccgggaccaacggcaccaagcgguucgacaacccggugcugcccuucaacgacggggucuacuucgcgagcaccgagaaguccaacaucauccgcggcuggaucuucgggacgacccucgacagcaagacccagucccugcugaucgugaacaacgccaccaacguggucaucaaggugugcgaguuccaguucugcaacgaccccuuccucggcguguacuaccacaagaacaacaagagcuggauggaguccgaguuccgggucuacagcuccgccaacaacugcacguucgaguacgugagccagcccuuccugauggaccuggagggcaagcaggggaacuucaagaaccuccgcgaguucguguucaagaacaucgacggcuacuucaagaucuacuccaagcacaccccgaucaaccugguccgggaccugccccagggguucagcgcccucgagccccugguggaccugcccaucggcaucaacaucacccgcuuccagacccuccuggcccugcaccgguccuaccucacgccgggggacagcagcuccggcuggaccgcgggcgccgccgccuacuacgugggguaccugcagccccgcaccuuccugcucaaguacaacgagaacggcaccaucacggacgcggucgacugcgcccuggacccccugagcgagaccaagugcacccucaaguccuucaccguggagaaggggaucuaccagacgagcaacuuccgggugcagcccaccgaguccaucguccgcuucccgaacaucaccaaccugugccccuucggcgagguguucaacgccacccgguucgccagcgucuacgccuggaaccgcaagcggaucuccaacugcguggcggacuacagcgugcuguacaacuccgccagcuucuccacguucaagugcuacggcgucagccccaccaagcucaacgaccugugcuucaccaacguguacgccgacuccuucgugauccgcggggacgagguccggcagaucgcccccggccagaccgggaagaucgccgacuacaacuacaagcugccggacgacuucacgggcugcgugaucgcguggaacagcaacaaccucgacuccaaggucgggggcaacuacaacuaccuguaccgccuguuccgcaagagcaaccucaagcccuucgagcgggacaucuccaccgagaucuaccaggccggcagcacccccugcaacgggguggagggcuucaacugcuacuucccccugcaguccuacggguuccagccgaccaacggcgugggguaccagcccuaccggguggucgugcugagcuucgagcuccugcacgcccccgccacggugugcggccccaagaaguccaccaaccuggucaagaacaagugcgugaacuucaacuucaacggccucaccgggaccggcgugcugaccgagagcaacaagaaguuccugccguuccagcaguucgggcgcgacaucgccgacacgaccgacgcgguccgcgacccccagacccuggagauccucgacaucacccccugcagcuucggcgggguguccgugaucacgccgggcaccaacaccagcaaccaggucgccgugcuguaccaggacgugaacugcaccgagguccccguggccauccacgccgaccagcugacgcccaccuggcggguguacuccaccggcagcaacgucuuccagacccgcgccgggugccucaucggcgcggagcacgugaacaacuccuacgagugcgacauccccaucggggccggcaucugcgccagcuaccagacgcagaccaacuccccgcggcgcgcccggagcguggcgucccagagcaucaucgccuacaccaugucccugggcgccgagaacagcgucgccuacuccaacaacagcaucgccauccccaccaacuucacgaucuccgugaccaccgagauccugcccgugagcaugaccaagacgagcgucgacugcaccauguacaucugcggggacuccaccgagugcagcaaccuccugcugcaguacggcuccuucugcacccagcucaaccgcgcgcugacggggaucgccguggagcaggacaagaacacccaggagguguucgcccaggucaagcagaucuacaagacgcccccgaucaaggacuucggcggguucaacuucagccagauccugcccgaccccuccaagcccagcaagcgguccuucaucgaggaccuccuguucaacaaggugacccuggccgacgccggcuucaucaagcaguacggcgacugccucggggacaucgcggcccgcgaccugaucugcgcccagaaguucaacggccugaccgugcucccgccccugcugaccgacgagaugaucgcccaguacaccagcgcccuccuggcggggaccaucacguccggcuggaccuucggggccggcgccgcccugcagauccccuucgcgaugcagauggccuaccgguucaacggcaucggggucacccagaacgugcucuacgagaaccagaagcugaucgccaaccaguucaacagcgccaucggcaagauccaggacucccugagcuccaccgccagcgcgcucgggaagcugcaggacguggucaaccagaacgcccaggcccugaacacgcucgugaagcagcuguccagcaacuucggcgccaucuccagcgugcugaacgacauccucucccgccuggacccgcccgaggccgaggugcagaucgaccggcugaucaccgggcgccuccagagccugcagaccuacgugacccagcagcugauccgggcggccgagauccgcgccagcgccaaccucgccgcgaccaagauguccgagugcguccugggccagagcaagcggguggacuucugcggcaagggguaccaccugauguccuucccccagagcgccccgcacggcguggucuuccuccacgugacguacgucuucgcccaggagaagaacuucaccaccgcccccgcgaucugccacgacgggaaggcccacuucccccgcgagggcguguucguguccaacgggacccacugguucgucacgcagcggaacuucuacgagccgcagaucaucaccaccgacaacaccuucgugagcggcaacugcgacguggucaucggcaucgugaacaacacgguguacgacccccugcagcccgagcuggacuccggcggcgggagcgggggcgggcagaucuacgagggcaagcugaccgccgaggggcuccgcuucggcaucguggccagccgguucaaccacgcgcuggucgaccgccugguggagggggccaucgacgccaucgugcggcacggcgggcgcgaggaggacaucacccucguccgggugcccggcuccugggagaucccgguggccgccggcgagcuggcccgcaaggaggacaucgacgcggucaucgccaucggggugcugauccggggcgccacgccccacuucgacuacaucgccagcgagguguccaaggggcucgcggaccugagccuggagcuccgcaagcccaucaccuucggcgucaucaccgccgacacccuggagcaggccaucgagcgggccgggacgaagcacggcaacaagggcugggaggccgcgcuguccgccaucgagauggccaaccucuucaagagccugcgcugaggacuaguuauaagacugacuagcccgaugggccucccaacgggcccuccuccccuccuugcaccgagauuaauaaaaaaaaaaaaaaaaaaaaaaaaaaaaaaaaaaaaaaaaaaaaaaaaaaaaaaaaaaaaaaaaugcaucccccccccccccccccccccccccccccccaaaggcucuuuucagagccaccagaauu

SEQ ID NO: 12889 - RNA, 4141 nt, Artificial Sequence
  SARS-CoV-2/Wuhan/WIV05/2019__EPI_ISL_402128 spike protein mRNA gc (1-1147)(K986P_V987P_ H1048Q_H1064N_ H1083N_H1101N) LumSynth construct
aggagaaagcuuaccauguucguguuccugguccuccugccccuggugagcucccagugcgugaaccucaccacccgcacgcagcugccgcccgccuacaccaacagcuucacccggggcgucuacuaccccgacaagguguuccgcuccagcgugcugcacuccacccaggaccucuuccugcccuucuucagcaacgucacgugguuccacgccauccacguguccgggaccaacggcaccaagcgguucgacaacccggugcugcccuucaacgacggggucuacuucgcgagcaccgagaaguccaacaucauccgcggcuggaucuucgggacgacccucgacagcaagacccagucccugcugaucgugaacaacgccaccaacguggucaucaaggugugcgaguuccaguucugcaacgaccccuuccucggcguguacuaccacaagaacaacaagagcuggauggaguccgaguuccgggucuacagcuccgccaacaacugcacguucgaguacgugagccagcccuuccugauggaccuggagggcaagcaggggaacuucaagaaccuccgcgaguucguguucaagaacaucgacggcuacuucaagaucuacuccaagcacaccccgaucaaccugguccgggaccugccccagggguucagcgcccucgagccccugguggaccugcccaucggcaucaacaucacccgcuuccagacccuccuggcccugcaccgguccuaccucacgccgggggacagcagcuccggcuggaccgcgggcgccgccgccuacuacgugggguaccugcagccccgcaccuuccugcucaaguacaacgagaacggcaccaucacggacgcggucgacugcgcccuggacccccugagcgagaccaagugcacccucaaguccuucaccguggagaaggggaucuaccagacgagcaacuuccgggugcagcccaccgaguccaucguccgcuucccgaacaucaccaaccugugccccuucggcgagguguucaacgccacccgguucgccagcgucuacgccuggaaccgcaagcggaucuccaacugcguggcggacuacagcgugcuguacaacuccgccagcuucuccacguucaagugcuacggcgucagccccaccaagcucaacgaccugugcuucaccaacguguacgccgacuccuucgugauccgcggggacgagguccggcagaucgcccccggccagaccgggaagaucgccgacuacaacuacaagcugccggacgacuucacgggcugcgugaucgcguggaacagcaacaaccucgacuccaaggucgggggcaacuacaacuaccuguaccgccuguuccgcaagagcaaccucaagcccuucgagcgggacaucuccaccgagaucuaccaggccggcagcacccccugcaacgggguggagggcuucaacugcuacuucccccugcaguccuacggguuccagccgaccaacggcgugggguaccagcccuaccggguggucgugcugagcuucgagcuccugcacgcccccgccacggugugcggccccaagaaguccaccaaccuggucaagaacaagugcgugaacuucaacuucaacggccucaccgggaccggcgugcugaccgagagcaacaagaaguuccugccguuccagcaguucgggcgcgacaucgccgacacgaccgacgcgguccgcgacccccagacccuggagauccucgacaucacccccugcagcuucggcgggguguccgugaucacgccgggcaccaacaccagcaaccaggucgccgugcuguaccaggacgugaacugcaccgagguccccguggccauccacgccgaccagcugacgcccaccuggcggguguacuccaccggcagcaacgucuuccagacccgcgccgggugccucaucggcgcggagcacgugaacaacuccuacgagugcgacauccccaucggggccggcaucugcgccagcuaccagacgcagaccaacuccccgcggcgcgcccggagcguggcgucccagagcaucaucgccuacaccaugucccugggcgccgagaacagcgucgccuacuccaacaacagcaucgccauccccaccaacuucacgaucuccgugaccaccgagauccugcccgugagcaugaccaagacgagcgucgacugcaccauguacaucugcggggacuccaccgagugcagcaaccuccugcugcaguacggcuccuucugcacccagcucaaccgcgcgcugacggggaucgccguggagcaggacaagaacacccaggagguguucgcccaggucaagcagaucuacaagacgcccccgaucaaggacuucggcggguucaacuucagccagauccugcccgaccccuccaagcccagcaagcgguccuucaucgaggaccuccuguucaacaaggugacccuggccgacgccggcuucaucaagcaguacggcgacugccucggggacaucgcggcccgcgaccugaucugcgcccagaaguucaacggccugaccgugcucccgccccugcugaccgacgagaugaucgcccaguacaccagcgcccuccuggcggggaccaucacguccggcuggaccuucggggccggcgccgcccugcagauccccuucgcgaugcagauggccuaccgguucaacggcaucggggucacccagaacgugcucuacgagaaccagaagcugaucgccaaccaguucaacagcgccaucggcaagauccaggacucccugagcuccaccgccagcgcgcucgggaagcugcaggacguggucaaccagaacgcccaggcccugaacacgcucgugaagcagcuguccagcaacuucggcgccaucuccagcgugcugaacgacauccucucccgccuggacccgcccgaggccgaggugcagaucgaccggcugaucaccgggcgccuccagagccugcagaccuacgugacccagcagcugauccgggcggccgagauccgcgccagcgccaaccucgccgcgaccaagauguccgagugcguccugggccagagcaagcggguggacuucugcggcaagggguaccagcugauguccuucccccagagcgccccgcacggcguggucuuccucaacgugacguacguccccgcccaggagaagaacuucaccaccgcccccgcgaucugcaacgacgggaaggcccacuucccccgcgagggcguguucguguccaacgggaccaacugguucgucacgcagcggaacuucuacgagccgcagaucaucaccaccgacaacaccuucgugagcggcaacugcgacguggucaucggcaucgugaacaacacgguguacgacccccugcagcccgagcuggacuccggcggcgggagcgggggcgggcagaucuacgagggcaagcugaccgccgaggggcuccgcuucggcaucguggccagccgguucaaccacgcgcuggucgaccgccugguggagggggccaucgacgccaucgugcggcacggcgggcgcgaggaggacaucacccucguccgggugcccggcuccugggagaucccgguggccgccggcgagcuggcccgcaaggaggacaucgacgcggucaucgccaucggggugcugauccggggcgccacgccccacuucgacuacaucgccagcgagguguccaaggggcucgcggaccugagccuggagcuccgcaagcccaucaccuucggcgucaucaccgccgacacccuggagcaggccaucgagcgggccgggacgaagcacggcaacaagggcugggaggccgcgcuguccgccaucgagauggccaaccucuucaagagccugcgcugaggacuaguuauaagacugacuagcccgaugggccucccaacgggcccuccuccccuccuugcaccgagauuaauaaaaaaaaaaaaaaaaaaaaaaaaaaaaaaaaaaaaaaaaaaaaaaaaaaaaaaaaaaaaaaaaugcaucccccccccccccccccccccccccccccccaaaggcucuuuucagagccaccagaauu

SEQ ID NO: 12890 - RNA, 4141 nt, Artificial Sequence
  SARS-CoV-2/Wuhan/WIV05/2019__EPI_ISL_402128 spike protein mRNA gc (1-1147)(I712C_T1077C) LumSynth construct
aggagaaagcuuaccauguucguguuccugguccuccugccccuggugagcucccagugcgugaaccucaccacccgcacgcagcugccgcccgccuacaccaacagcuucacccggggcgucuacuaccccgacaagguguuccgcuccagcgugcugcacuccacccaggaccucuuccugcccuucuucagcaacgucacgugguuccacgccauccacguguccgggaccaacggcaccaagcgguucgacaacccggugcugcccuucaacgacggggucuacuucgcgagcaccgagaaguccaacaucauccgcggcuggaucuucgggacgacccucgacagcaagacccagucccugcugaucgugaacaacgccaccaacguggucaucaaggugugcgaguuccaguucugcaacgaccccuuccucggcguguacuaccacaagaacaacaagagcuggauggaguccgaguuccgggucuacagcuccgccaacaacugcacguucgaguacgugagccagcccuuccugauggaccuggagggcaagcaggggaacuucaagaaccuccgcgaguucguguucaagaacaucgacggcuacuucaagaucuacuccaagcacaccccgaucaaccugguccgggaccugccccagggguucagcgcccucgagccccugguggaccugcccaucggcaucaacaucacccgcuuccagacccuccuggcccugcaccgguccuaccucacgccgggggacagcagcuccggcuggaccgcgggcgccgccgccuacuacgugggguaccugcagccccgcaccuuccugcucaaguacaacgagaacggcaccaucacggacgcggucgacugcgcccuggacccccugagcgagaccaagugcacccucaaguccuucaccguggagaaggggaucuaccagacgagcaacuuccgggugcagcccaccgaguccaucguccgcuucccgaacaucaccaaccugugccccuucggcgagguguucaacgccacccgguucgccagcgucuacgccuggaaccgcaagcggaucuccaacugcguggcggacuacagcgugcuguacaacuccgccagcuucuccacguucaagugcuacggcgucagccccaccaagcucaacgaccugugcuucaccaacguguacgccgacuccuucgugauccgcggggacgagguccggcagaucgcccccggccagaccgggaagaucgccgacuacaacuacaagcugccggacgacuucacgggcugcgugaucgcguggaacagcaacaaccucgacuccaaggucgggggcaacuacaacuaccuguaccgccuguuccgcaagagcaaccucaagcccuucgagcgggacaucuccaccgagaucuaccaggccggcagcacccccugcaacgggguggagggcuucaacugcuacuucccccugcaguccuacggguuccagccgaccaacggcgugggguaccagcccuaccggguggucgugcugagcuucgagcuccugcacgcccccgccacggugugcggccccaagaaguccaccaaccuggucaagaacaagugcgugaacuucaacuucaacggccucaccgggaccggcgugcugaccgagagcaacaagaaguuccugccguuccagcaguucgggcgcgacaucgccgacacgaccgacgcgguccgcgacccccagacccuggagauccucgacaucacccccugcagcuucggcgggguguccgugaucacgccgggcaccaacaccagcaaccaggucgccgugcuguaccaggacgugaacugcaccgagguccccguggccauccacgccgaccagcugacgcccaccuggcggguguacuccaccggcagcaacgucuuccagacccgcgccgggugccucaucggcgcggagcacgugaacaacuccuacgagugcgacauccccaucggggccggcaucugcgccagcuaccagacgcagaccaacuccccgcggcgcgcccggagcguggcgucccagagcaucaucgccuacaccaugucccugggcgccgagaacagcgucgccuacuccaacaacagcugcgccauccccaccaacuucacgaucuccgugaccaccgagauccugcccgugagcaugaccaagacgagcgucgacugcaccauguacaucugcggggacuccaccgagugcagcaaccuccugcugcaguacggcuccuucugcacccagcucaaccgcgcgcugacggggaucgccguggagcaggacaagaacacccaggagguguucgcccaggucaagcagaucuacaagacgcccccgaucaaggacuucggcggguucaacuucagccagauccugcccgaccccuccaagcccagcaagcgguccuucaucgaggaccuccuguucaacaaggugacccuggccgacgccggcuucaucaagcaguacggcgacugccucggggacaucgcggcccgcgaccugaucugcgcccagaaguucaacggccugaccgugcucccgccccugcugaccgacgagaugaucgcccaguacaccagcgcccuccuggcggggaccaucacguccggcuggaccuucggggccggcgccgcccugcagauccccuucgcgaugcagauggccuaccgguucaacggcaucggggucacccagaacgugcucuacgagaaccagaagcugaucgccaaccaguucaacagcgccaucggcaagauccaggacucccugagcuccaccgccagcgcgcucgggaagcugcaggacguggucaaccagaacgcccaggcccugaacacgcucgugaagcagcuguccagcaacuucggcgccaucuccagcgugcugaacgacauccucucccgccuggacaaggucgaggccgaggugcagaucgaccggcugaucaccgggcgccuccagagccugcagaccuacgugacccagcagcugauccgggcggccgagauccgcgccagcgccaaccucgccgcgaccaagauguccgagugcguccugggccagagcaagcggguggacuucugcggcaagggguaccaccugauguccuucccccagagcgccccgcacggcguggucuuccuccacgugacguacguccccgcccaggagaagaacuucaccugcgcccccgcgaucugccacgacgggaaggcccacuucccccgcgagggcguguucguguccaacgggacccacugguucgucacgcagcggaacuucuacgagccgcagaucaucaccaccgacaacaccuucgugagcggcaacugcgacguggucaucggcaucgugaacaacacgguguacgacccccugcagcccgagcuggacuccggcggcgggagcgggggcgggcagaucuacgagggcaagcugaccgccgaggggcuccgcuucggcaucguggccagccgguucaaccacgcgcuggucgaccgccugguggagggggccaucgacgccaucgugcggcacggcgggcgcgaggaggacaucacccucguccgggugcccggcuccugggagaucccgguggccgccggcgagcuggcccgcaaggaggacaucgacgcggucaucgccaucggggugcugauccggggcgccacgccccacuucgacuacaucgccagcgagguguccaaggggcucgcggaccugagccuggagcuccgcaagcccaucaccuucggcgucaucaccgccgacacccuggagcaggccaucgagcgggccgggacgaagcacggcaacaagggcugggaggccgcgcuguccgccaucgagauggccaaccucuucaagagccugcgcugaggacuaguuauaagacugacuagcccgaugggccucccaacgggcccuccuccccuccuugcaccgagauuaauaaaaaaaaaaaaaaaaaaaaaaaaaaaaaaaaaaaaaaaaaaaaaaaaaaaaaaaaaaaaaaaaugcaucccccccccccccccccccccccccccccccaaaggcucuuuucagagccaccagaauu

SEQ ID NO: 12891 - RNA, 4141 nt, Artificial Sequence
  SARS-CoV-2/Wuhan/WIV05/2019__EPI_ISL_402128 spike protein mRNA gc (1-1147)(I714C_Y1110C) LumSynth construct
aggagaaagcuuaccauguucguguuccugguccuccugccccuggugagcucccagugcgugaaccucaccacccgcacgcagcugccgcccgccuacaccaacagcuucacccggggcgucuacuaccccgacaagguguuccgcuccagcgugcugcacuccacccaggaccucuuccugcccuucuucagcaacgucacgugguuccacgccauccacguguccgggaccaacggcaccaagcgguucgacaacccggugcugcccuucaacgacggggucuacuucgcgagcaccgagaaguccaacaucauccgcggcuggaucuucgggacgacccucgacagcaagacccagucccugcugaucgugaacaacgccaccaacguggucaucaaggugugcgaguuccaguucugcaacgaccccuuccucggcguguacuaccacaagaacaacaagagcuggauggaguccgaguuccgggucuacagcuccgccaacaacugcacguucgaguacgugagccagcccuuccugauggaccuggagggcaagcaggggaacuucaagaaccuccgcgaguucguguucaagaacaucgacggcuacuucaagaucuacuccaagcacaccccgaucaaccugguccgggaccugccccagggguucagcgcccucgagccccugguggaccugcccaucggcaucaacaucacccgcuuccagacccuccuggcccugcaccgguccuaccucacgccgggggacagcagcuccggcuggaccgcgggcgccgccgccuacuacgugggguaccugcagccccgcaccuuccugcucaaguacaacgagaacggcaccaucacggacgcggucgacugcgcccuggacccccugagcgagaccaagugcacccucaaguccuucaccguggagaaggggaucuaccagacgagcaacuuccgggugcagcccaccgaguccaucguccgcuucccgaacaucaccaaccugugccccuucggcgagguguucaacgccacccgguucgccagcgucuacgccuggaaccgcaagcggaucuccaacugcguggcggacuacagcgugcuguacaacuccgccagcuucuccacguucaagugcuacggcgucagccccaccaagcucaacgaccugugcuucaccaacguguacgccgacuccuucgugauccgcggggacgagguccggcagaucgcccccggccagaccgggaagaucgccgacuacaacuacaagcugccggacgacuucacgggcugcgugaucgcguggaacagcaacaaccucgacuccaaggucgggggcaacuacaacuaccuguaccgccuguuccgcaagagcaaccucaagcccuucgagcgggacaucuccaccgagaucuaccaggccggcagcacccccugcaacgggguggagggcuucaacugcuacuucccccugcaguccuacggguuccagccgaccaacggcgugggguaccagcccuaccggguggucgugcugagcuucgagcuccugcacgcccccgccacggugugcggccccaagaaguccaccaaccuggucaagaacaagugcgugaacuucaacuucaacggccucaccgggaccggcgugcugaccgagagcaacaagaaguuccugccguuccagcaguucgggcgcgacaucgccgacacgaccgacgcgguccgcgacccccagacccuggagauccucgacaucacccccugcagcuucggcgggguguccgugaucacgccgggcaccaacaccagcaaccaggucgccgugcuguaccaggacgugaacugcaccgagguccccguggccauccacgccgaccagcugacgcccaccuggcggguguacuccaccggcagcaacgucuuccagacccgcgccgggugccucaucggcgcggagcacgugaacaacuccuacgagugcgacauccccaucggggccggcaucugcgccagcuaccagacgcagaccaacuccccgcggcgcgcccggagcguggcgucccagagcaucaucgccuacaccaugucccugggcgccgagaacagcgucgccuacuccaacaacagcaucgccugccccaccaacuucacgaucuccgugaccaccgagauccugcccgugagcaugaccaagacgagcgucgacugcaccauguacaucugcggggacuccaccgagugcagcaaccuccugcugcaguacggcuccuucugcacccagcucaaccgcgcgcugacggggaucgccguggagcaggacaagaacacccaggagguguucgcccaggucaagcagaucuacaagacgcccccgaucaaggacuucggcggguucaacuucagccagauccugcccgaccccuccaagcccagcaagcgguccuucaucgaggaccuccuguucaacaaggugacccuggccgacgccggcuucaucaagcaguacggcgacugccucggggacaucgcggcccgcgaccugaucugcgcccagaaguucaacggccugaccgugcucccgccccugcugaccgacgagaugaucgcccaguacaccagcgcccuccuggcggggaccaucacguccggcuggaccuucggggccggcgccgcccugcagauccccuucgcgaugcagauggccuaccgguucaacggcaucggggucacccagaacgugcucuacgagaaccagaagcugaucgccaaccaguucaacagcgccaucggcaagauccaggacucccugagcuccaccgccagcgcgcucgggaagcugcaggacguggucaaccagaacgcccaggcccugaacacgcucgugaagcagcuguccagcaacuucggcgccaucuccagcgugcugaacgacauccucucccgccuggacaaggucgaggccgaggugcagaucgaccggcugaucaccgggcgccuccagagccugcagaccuacgugacccagcagcugauccgggcggccgagauccgcgccagcgccaaccucgccgcgaccaagauguccgagugcguccugggccagagcaagcggguggacuucugcggcaagggguaccaccugauguccuucccccagagcgccccgcacggcguggucuuccuccacgugacguacguccccgcccaggagaagaacuucaccaccgcccccgcgaucugccacgacgggaaggcccacuucccccgcgagggcguguucguguccaacgggacccacugguucgucacgcagcggaacuucugcgagccgcagaucaucaccaccgacaacaccuucgugagcggcaacugcgacguggucaucggcaucgugaacaacacgguguacgacccccugcagcccgagcuggacuccggcggcgggagcgggggcgggcagaucuacgagggcaagcugaccgccgaggggcuccgcuucggcaucguggccagccgguucaaccacgcgcuggucgaccgccugguggagggggccaucgacgccaucgugcggcacggcgggcgcgaggaggacaucacccucguccgggugcccggcuccugggagaucccgguggccgccggcgagcuggcccgcaaggaggacaucgacgcggucaucgccaucggggugcugauccggggcgccacgccccacuucgacuacaucgccagcgagguguccaaggggcucgcggaccugagccuggagcuccgcaagcccaucaccuucggcgucaucaccgccgacacccuggagcaggccaucgagcgggccgggacgaagcacggcaacaagggcugggaggccgcgcuguccgccaucgagauggccaaccucuucaagagccugcgcugaggacuaguuauaagacugacuagcccgaugggccucccaacgggcccuccuccccuccuugcaccgagauuaauaaaaaaaaaaaaaaaaaaaaaaaaaaaaaaaaaaaaaaaaaaaaaaaaaaaaaaaaaaaaaaaaugcaucccccccccccccccccccccccccccccccaaaggcucuuuucagagccaccagaauu

SEQ ID NO: 12892 - RNA, 4141 nt, Artificial Sequence
  SARS-CoV-2/Wuhan/WIV05/2019__EPI_ISL_402128 spike protein mRNA gc (1-1147)(P715C_P1069C) LumSynth construct
aggagaaagcuuaccauguucguguuccugguccuccugccccuggugagcucccagugcgugaaccucaccacccgcacgcagcugccgcccgccuacaccaacagcuucacccggggcgucuacuaccccgacaagguguuccgcuccagcgugcugcacuccacccaggaccucuuccugcccuucuucagcaacgucacgugguuccacgccauccacguguccgggaccaacggcaccaagcgguucgacaacccggugcugcccuucaacgacggggucuacuucgcgagcaccgagaaguccaacaucauccgcggcuggaucuucgggacgacccucgacagcaagacccagucccugcugaucgugaacaacgccaccaacguggucaucaaggugugcgaguuccaguucugcaacgaccccuuccucggcguguacuaccacaagaacaacaagagcuggauggaguccgaguuccgggucuacagcuccgccaacaacugcacguucgaguacgugagccagcccuuccugauggaccuggagggcaagcaggggaacuucaagaaccuccgcgaguucguguucaagaacaucgacggcuacuucaagaucuacuccaagcacaccccgaucaaccugguccgggaccugccccagggguucagcgcccucgagccccugguggaccugcccaucggcaucaacaucacccgcuuccagacccuccuggcccugcaccgguccuaccucacgccgggggacagcagcuccggcuggaccgcgggcgccgccgccuacuacgugggguaccugcagccccgcaccuuccugcucaaguacaacgagaacggcaccaucacggacgcggucgacugcgcccuggacccccugagcgagaccaagugcacccucaaguccuucaccguggagaaggggaucuaccagacgagcaacuuccgggugcagcccaccgaguccaucguccgcuucccgaacaucaccaaccugugccccuucggcgagguguucaacgccacccgguucgccagcgucuacgccuggaaccgcaagcggaucuccaacugcguggcggacuacagcgugcuguacaacuccgccagcuucuccacguucaagugcuacggcgucagccccaccaagcucaacgaccugugcuucaccaacguguacgccgacuccuucgugauccgcggggacgagguccggcagaucgcccccggccagaccgggaagaucgccgacuacaacuacaagcugccggacgacuucacgggcugcgugaucgcguggaacagcaacaaccucgacuccaaggucgggggcaacuacaacuaccuguaccgccuguuccgcaagagcaaccucaagcccuucgagcgggacaucuccaccgagaucuaccaggccggcagcacccccugcaacgggguggagggcuucaacugcuacuucccccugcaguccuacggguuccagccgaccaacggcgugggguaccagcccuaccggguggucgugcugagcuucgagcuccugcacgcccccgccacggugugcggccccaagaaguccaccaaccuggucaagaacaagugcgugaacuucaacuucaacggccucaccgggaccggcgugcugaccgagagcaacaagaaguuccugccguuccagcaguucgggcgcgacaucgccgacacgaccgacgcgguccgcgacccccagacccuggagauccucgacaucacccccugcagcuucggcgggguguccgugaucacgccgggcaccaacaccagcaaccaggucgccgugcuguaccaggacgugaacugcaccgagguccccguggccauccacgccgaccagcugacgcccaccuggcggguguacuccaccggcagcaacgucuuccagacccgcgccgggugccucaucggcgcggagcacgugaacaacuccuacgagugcgacauccccaucggggccggcaucugcgccagcuaccagacgcagaccaacuccccgcggcgcgcccggagcguggcgucccagagcaucaucgccuacaccaugucccugggcgccgagaacagcgucgccuacuccaacaacagcaucgccaucugcaccaacuucacgaucuccgugaccaccgagauccugcccgugagcaugaccaagacgagcgucgacugcaccauguacaucugcggggacuccaccgagugcagcaaccuccugcugcaguacggcuccuucugcacccagcucaaccgcgcgcugacggggaucgccguggagcaggacaagaacacccaggagguguucgcccaggucaagcagaucuacaagacgcccccgaucaaggacuucggcggguucaacuucagccagauccugcccgaccccuccaagcccagcaagcgguccuucaucgaggaccuccuguucaacaaggugacccuggccgacgccggcuucaucaagcaguacggcgacugccucggggacaucgcggcccgcgaccugaucugcgcccagaaguucaacggccugaccgugcucccgccccugcugaccgacgagaugaucgcccaguacaccagcgcccuccuggcggggaccaucacguccggcuggaccuucggggccggcgccgcccugcagauccccuucgcgaugcagauggccuaccgguucaacggcaucggggucacccagaacgugcucuacgagaaccagaagcugaucgccaaccaguucaacagcgccaucggcaagauccaggacucccugagcuccaccgccagcgcgcucgggaagcugcaggacguggucaaccagaacgcccaggcccugaacacgcucgugaagcagcuguccagcaacuucggcgccaucuccagcgugcugaacgacauccucucccgccuggacaaggucgaggccgaggugcagaucgaccggcugaucaccgggcgccuccagagccugcagaccuacgugacccagcagcugauccgggcggccgagauccgcgccagcgccaaccucgccgcgaccaagauguccgagugcguccugggccagagcaagcggguggacuucugcggcaagggguaccaccugauguccuucccccagagcgccccgcacggcguggucuuccuccacgugacguacgucugcgcccaggagaagaacuucaccaccgcccccgcgaucugccacgacgggaaggcccacuucccccgcgagggcguguucguguccaacgggacccacugguucgucacgcagcggaacuucuacgagccgcagaucaucaccaccgacaacaccuucgugagcggcaacugcgacguggucaucggcaucgugaacaacacgguguacgacccccugcagcccgagcuggacuccggcggcgggagcgggggcgggcagaucuacgagggcaagcugaccgccgaggggcuccgcuucggcaucguggccagccgguucaaccacgcgcuggucgaccgccugguggagggggccaucgacgccaucgugcggcacggcgggcgcgaggaggacaucacccucguccgggugcccggcuccugggagaucccgguggccgccggcgagcuggcccgcaaggaggacaucgacgcggucaucgccaucggggugcugauccggggcgccacgccccacuucgacuacaucgccagcgagguguccaaggggcucgcggaccugagccuggagcuccgcaagcccaucaccuucggcgucaucaccgccgacacccuggagcaggccaucgagcgggccgggacgaagcacggcaacaagggcugggaggccgcgcuguccgccaucgagauggccaaccucuucaagagccugcgcugaggacuaguuauaagacugacuagcccgaugggccucccaacgggcccuccuccccuccuugcaccgagauuaauaaaaaaaaaaaaaaaaaaaaaaaaaaaaaaaaaaaaaaaaaaaaaaaaaaaaaaaaaaaaaaaaugcaucccccccccccccccccccccccccccccccaaaggcucuuuucagagccaccagaauu

SEQ ID NO: 12893 - RNA, 4141 nt, Artificial Sequence
  SARS-CoV-2/Wuhan/WIV05/2019__EPI_ISL_402128 spike protein mRNA gc (1-1147)(G889C_L1034C) LumSynth construct
aggagaaagcuuaccauguucguguuccugguccuccugccccuggugagcucccagugcgugaaccucaccacccgcacgcagcugccgcccgccuacaccaacagcuucacccggggcgucuacuaccccgacaagguguuccgcuccagcgugcugcacuccacccaggaccucuuccugcccuucuucagcaacgucacgugguuccacgccauccacguguccgggaccaacggcaccaagcgguucgacaacccggugcugcccuucaacgacggggucuacuucgcgagcaccgagaaguccaacaucauccgcggcuggaucuucgggacgacccucgacagcaagacccagucccugcugaucgugaacaacgccaccaacguggucaucaaggugugcgaguuccaguucugcaacgaccccuuccucggcguguacuaccacaagaacaacaagagcuggauggaguccgaguuccgggucuacagcuccgccaacaacugcacguucgaguacgugagccagcccuuccugauggaccuggagggcaagcaggggaacuucaagaaccuccgcgaguucguguucaagaacaucgacggcuacuucaagaucuacuccaagcacaccccgaucaaccugguccgggaccugccccagggguucagcgcccucgagccccugguggaccugcccaucggcaucaacaucacccgcuuccagacccuccuggcccugcaccgguccuaccucacgccgggggacagcagcuccggcuggaccgcgggcgccgccgccuacuacgugggguaccugcagccccgcaccuuccugcucaaguacaacgagaacggcaccaucacggacgcggucgacugcgcccuggacccccugagcgagaccaagugcacccucaaguccuucaccguggagaaggggaucuaccagacgagcaacuuccgggugcagcccaccgaguccaucguccgcuucccgaacaucaccaaccugugccccuucggcgagguguucaacgccacccgguucgccagcgucuacgccuggaaccgcaagcggaucuccaacugcguggcggacuacagcgugcuguacaacuccgccagcuucuccacguucaagugcuacggcgucagccccaccaagcucaacgaccugugcuucaccaacguguacgccgacuccuucgugauccgcggggacgagguccggcagaucgcccccggccagaccgggaagaucgccgacuacaacuacaagcugccggacgacuucacgggcugcgugaucgcguggaacagcaacaaccucgacuccaaggucgggggcaacuacaacuaccuguaccgccuguuccgcaagagcaaccucaagcccuucgagcgggacaucuccaccgagaucuaccaggccggcagcacccccugcaacgggguggagggcuucaacugcuacuucccccugcaguccuacggguuccagccgaccaacggcgugggguaccagcccuaccggguggucgugcugagcuucgagcuccugcacgcccccgccacggugugcggccccaagaaguccaccaaccuggucaagaacaagugcgugaacuucaacuucaacggccucaccgggaccggcgugcugaccgagagcaacaagaaguuccugccguuccagcaguucgggcgcgacaucgccgacacgaccgacgcgguccgcgacccccagacccuggagauccucgacaucacccccugcagcuucggcgggguguccgugaucacgccgggcaccaacaccagcaaccaggucgccgugcuguaccaggacgugaacugcaccgagguccccguggccauccacgccgaccagcugacgcccaccuggcggguguacuccaccggcagcaacgucuuccagacccgcgccgggugccucaucggcgcggagcacgugaacaacuccuacgagugcgacauccccaucggggccggcaucugcgccagcuaccagacgcagaccaacuccccgcggcgcgcccggagcguggcgucccagagcaucaucgccuacaccaugucccugggcgccgagaacagcgucgccuacuccaacaacagcaucgccauccccaccaacuucacgaucuccgugaccaccgagauccugcccgugagcaugaccaagacgagcgucgacugcaccauguacaucugcggggacuccaccgagugcagcaaccuccugcugcaguacggcuccuucugcacccagcucaaccgcgcgcugacggggaucgccguggagcaggacaagaacacccaggagguguucgcccaggucaagcagaucuacaagacgcccccgaucaaggacuucggcggguucaacuucagccagauccugcccgaccccuccaagcccagcaagcgguccuucaucgaggaccuccuguucaacaaggugacccuggccgacgccggcuucaucaagcaguacggcgacugccucggggacaucgcggcccgcgaccugaucugcgcccagaaguucaacggccugaccgugcucccgccccugcugaccgacgagaugaucgcccaguacaccagcgcccuccuggcggggaccaucacguccggcuggaccuucugcgccggcgccgcccugcagauccccuucgcgaugcagauggccuaccgguucaacggcaucggggucacccagaacgugcucuacgagaaccagaagcugaucgccaaccaguucaacagcgccaucggcaagauccaggacucccugagcuccaccgccagcgcgcucgggaagcugcaggacguggucaaccagaacgcccaggcccugaacacgcucgugaagcagcuguccagcaacuucggcgccaucuccagcgugcugaacgacauccucucccgccuggacaaggucgaggccgaggugcagaucgaccggcugaucaccgggcgccuccagagccugcagaccuacgugacccagcagcugauccgggcggccgagauccgcgccagcgccaaccucgccgcgaccaagauguccgagugcgucugcggccagagcaagcggguggacuucugcggcaagggguaccaccugauguccuucccccagagcgccccgcacggcguggucuuccuccacgugacguacguccccgcccaggagaagaacuucaccaccgcccccgcgaucugccacgacgggaaggcccacuucccccgcgagggcguguucguguccaacgggacccacugguucgucacgcagcggaacuucuacgagccgcagaucaucaccaccgacaacaccuucgugagcggcaacugcgacguggucaucggcaucgugaacaacacgguguacgacccccugcagcccgagcuggacuccggcggcgggagcgggggcgggcagaucuacgagggcaagcugaccgccgaggggcuccgcuucggcaucguggccagccgguucaaccacgcgcuggucgaccgccugguggagggggccaucgacgccaucgugcggcacggcgggcgcgaggaggacaucacccucguccgggugcccggcuccugggagaucccgguggccgccggcgagcuggcccgcaaggaggacaucgacgcggucaucgccaucggggugcugauccggggcgccacgccccacuucgacuacaucgccagcgagguguccaaggggcucgcggaccugagccuggagcuccgcaagcccaucaccuucggcgucaucaccgccgacacccuggagcaggccaucgagcgggccgggacgaagcacggcaacaagggcugggaggccgcgcuguccgccaucgagauggccaaccucuucaagagccugcgcugaggacuaguuauaagacugacuagcccgaugggccucccaacgggcccuccuccccuccuugcaccgagauuaauaaaaaaaaaaaaaaaaaaaaaaaaaaaaaaaaaaaaaaaaaaaaaaaaaaaaaaaaaaaaaaaaugcaucccccccccccccccccccccccccccccccaaaggcucuuuucagagccaccagaauu

SEQ ID NO: 12894 - RNA, 4141 nt, Artificial Sequence
  SARS-CoV-2/Wuhan/WIV05/2019__EPI_ISL_402128 spike protein mRNA gc (1-1147)(I909C_Y1047C) LumSynth construct
aggagaaagcuuaccauguucguguuccugguccuccugccccuggugagcucccagugcgugaaccucaccacccgcacgcagcugccgcccgccuacaccaacagcuucacccggggcgucuacuaccccgacaagguguuccgcuccagcgugcugcacuccacccaggaccucuuccugcccuucuucagcaacgucacgugguuccacgccauccacguguccgggaccaacggcaccaagcgguucgacaacccggugcugcccuucaacgacggggucuacuucgcgagcaccgagaaguccaacaucauccgcggcuggaucuucgggacgacccucgacagcaagacccagucccugcugaucgugaacaacgccaccaacguggucaucaaggugugcgaguuccaguucugcaacgaccccuuccucggcguguacuaccacaagaacaacaagagcuggauggaguccgaguuccgggucuacagcuccgccaacaacugcacguucgaguacgugagccagcccuuccugauggaccuggagggcaagcaggggaacuucaagaaccuccgcgaguucguguucaagaacaucgacggcuacuucaagaucuacuccaagcacaccccgaucaaccugguccgggaccugccccagggguucagcgcccucgagccccugguggaccugcccaucggcaucaacaucacccgcuuccagacccuccuggcccugcaccgguccuaccucacgccgggggacagcagcuccggcuggaccgcgggcgccgccgccuacuacgugggguaccugcagccccgcaccuuccugcucaaguacaacgagaacggcaccaucacggacgcggucgacugcgcccuggacccccugagcgagaccaagugcacccucaaguccuucaccguggagaaggggaucuaccagacgagcaacuuccgggugcagcccaccgaguccaucguccgcuucccgaacaucaccaaccugugccccuucggcgagguguucaacgccacccgguucgccagcgucuacgccuggaaccgcaagcggaucuccaacugcguggcggacuacagcgugcuguacaacuccgccagcuucuccacguucaagugcuacggcgucagccccaccaagcucaacgaccugugcuucaccaacguguacgccgacuccuucgugauccgcggggacgagguccggcagaucgcccccggccagaccgggaagaucgccgacuacaacuacaagcugccggacgacuucacgggcugcgugaucgcguggaacagcaacaaccucgacuccaaggucgggggcaacuacaacuaccuguaccgccuguuccgcaagagcaaccucaagcccuucgagcgggacaucuccaccgagaucuaccaggccggcagcacccccugcaacgggguggagggcuucaacugcuacuucccccugcaguccuacggguuccagccgaccaacggcgugggguaccagcccuaccggguggucgugcugagcuucgagcuccugcacgcccccgccacggugugcggccccaagaaguccaccaaccuggucaagaacaagugcgugaacuucaacuucaacggccucaccgggaccggcgugcugaccgagagcaacaagaaguuccugccguuccagcaguucgggcgcgacaucgccgacacgaccgacgcgguccgcgacccccagacccuggagauccucgacaucacccccugcagcuucggcgggguguccgugaucacgccgggcaccaacaccagcaaccaggucgccgugcuguaccaggacgugaacugcaccgagguccccguggccauccacgccgaccagcugacgcccaccuggcggguguacuccaccggcagcaacgucuuccagacccgcgccgggugccucaucggcgcggagcacgugaacaacuccuacgagugcgacauccccaucggggccggcaucugcgccagcuaccagacgcagaccaacuccccgcggcgcgcccggagcguggcgucccagagcaucaucgccuacaccaugucccugggcgccgagaacagcgucgccuacuccaacaacagcaucgccauccccaccaacuucacgaucuccgugaccaccgagauccugcccgugagcaugaccaagacgagcgucgacugcaccauguacaucugcggggacuccaccgagugcagcaaccuccugcugcaguacggcuccuucugcacccagcucaaccgcgcgcugacggggaucgccguggagcaggacaagaacacccaggagguguucgcccaggucaagcagaucuacaagacgcccccgaucaaggacuucggcggguucaacuucagccagauccugcccgaccccuccaagcccagcaagcgguccuucaucgaggaccuccuguucaacaaggugacccuggccgacgccggcuucaucaagcaguacggcgacugccucggggacaucgcggcccgcgaccugaucugcgcccagaaguucaacggccugaccgugcucccgccccugcugaccgacgagaugaucgcccaguacaccagcgcccuccuggcggggaccaucacguccggcuggaccuucggggccggcgccgcccugcagauccccuucgcgaugcagauggccuaccgguucaacggcugcggggucacccagaacgugcucuacgagaaccagaagcugaucgccaaccaguucaacagcgccaucggcaagauccaggacucccugagcuccaccgccagcgcgcucgggaagcugcaggacguggucaaccagaacgcccaggcccugaacacgcucgugaagcagcuguccagcaacuucggcgccaucuccagcgugcugaacgacauccucucccgccuggacaaggucgaggccgaggugcagaucgaccggcugaucaccgggcgccuccagagccugcagaccuacgugacccagcagcugauccgggcggccgagauccgcgccagcgccaaccucgccgcgaccaagauguccgagugcguccugggccagagcaagcggguggacuucugcggcaaggggugccaccugauguccuucccccagagcgccccgcacggcguggucuuccuccacgugacguacguccccgcccaggagaagaacuucaccaccgcccccgcgaucugccacgacgggaaggcccacuucccccgcgagggcguguucguguccaacgggacccacugguucgucacgcagcggaacuucuacgagccgcagaucaucaccaccgacaacaccuucgugagcggcaacugcgacguggucaucggcaucgugaacaacacgguguacgacccccugcagcccgagcuggacuccggcggcgggagcgggggcgggcagaucuacgagggcaagcugaccgccgaggggcuccgcuucggcaucguggccagccgguucaaccacgcgcuggucgaccgccugguggagggggccaucgacgccaucgugcggcacggcgggcgcgaggaggacaucacccucguccgggugcccggcuccugggagaucccgguggccgccggcgagcuggcccgcaaggaggacaucgacgcggucaucgccaucggggugcugauccggggcgccacgccccacuucgacuacaucgccagcgagguguccaaggggcucgcggaccugagccuggagcuccgcaagcccaucaccuucggcgucaucaccgccgacacccuggagcaggccaucgagcgggccgggacgaagcacggcaacaagggcugggaggccgcgcuguccgccaucgagauggccaaccucuucaagagccugcgcugaggacuaguuauaagacugacuagcccgaugggccucccaacgggcccuccuccccuccuugcaccgagauuaauaaaaaaaaaaaaaaaaaaaaaaaaaaaaaaaaaaaaaaaaaaaaaaaaaaaaaaaaaaaaaaaaugcaucccccccccccccccccccccccccccccccaaaggcucuuuucagagccaccagaauu

SEQ ID NO: 12895 - RNA, 4141 nt, Artificial Sequence
  SARS-CoV-2/Wuhan/WIV05/2019__EPI_ISL_402128 spike protein mRNA gc (1-1147)(Q965C_S1003C) LumSynth construct
aggagaaagcuuaccauguucguguuccugguccuccugccccuggugagcucccagugcgugaaccucaccacccgcacgcagcugccgcccgccuacaccaacagcuucacccggggcgucuacuaccccgacaagguguuccgcuccagcgugcugcacuccacccaggaccucuuccugcccuucuucagcaacgucacgugguuccacgccauccacguguccgggaccaacggcaccaagcgguucgacaacccggugcugcccuucaacgacggggucuacuucgcgagcaccgagaaguccaacaucauccgcggcuggaucuucgggacgacccucgacagcaagacccagucccugcugaucgugaacaacgccaccaacguggucaucaaggugugcgaguuccaguucugcaacgaccccuuccucggcguguacuaccacaagaacaacaagagcuggauggaguccgaguuccgggucuacagcuccgccaacaacugcacguucgaguacgugagccagcccuuccugauggaccuggagggcaagcaggggaacuucaagaaccuccgcgaguucguguucaagaacaucgacggcuacuucaagaucuacuccaagcacaccccgaucaaccugguccgggaccugccccagggguucagcgcccucgagccccugguggaccugcccaucggcaucaacaucacccgcuuccagacccuccuggcccugcaccgguccuaccucacgccgggggacagcagcuccggcuggaccgcgggcgccgccgccuacuacgugggguaccugcagccccgcaccuuccugcucaaguacaacgagaacggcaccaucacggacgcggucgacugcgcccuggacccccugagcgagaccaagugcacccucaaguccuucaccguggagaaggggaucuaccagacgagcaacuuccgggugcagcccaccgaguccaucguccgcuucccgaacaucaccaaccugugccccuucggcgagguguucaacgccacccgguucgccagcgucuacgccuggaaccgcaagcggaucuccaacugcguggcggacuacagcgugcuguacaacuccgccagcuucuccacguucaagugcuacggcgucagccccaccaagcucaacgaccugugcuucaccaacguguacgccgacuccuucgugauccgcggggacgagguccggcagaucgcccccggccagaccgggaagaucgccgacuacaacuacaagcugccggacgacuucacgggcugcgugaucgcguggaacagcaacaaccucgacuccaaggucgggggcaacuacaacuaccuguaccgccuguuccgcaagagcaaccucaagcccuucgagcgggacaucuccaccgagaucuaccaggccggcagcacccccugcaacgggguggagggcuucaacugcuacuucccccugcaguccuacggguuccagccgaccaacggcgugggguaccagcccuaccggguggucgugcugagcuucgagcuccugcacgcccccgccacggugugcggccccaagaaguccaccaaccuggucaagaacaagugcgugaacuucaacuucaacggccucaccgggaccggcgugcugaccgagagcaacaagaaguuccugccguuccagcaguucgggcgcgacaucgccgacacgaccgacgcgguccgcgacccccagacccuggagauccucgacaucacccccugcagcuucggcgggguguccgugaucacgccgggcaccaacaccagcaaccaggucgccgugcuguaccaggacgugaacugcaccgagguccccguggccauccacgccgaccagcugacgcccaccuggcggguguacuccaccggcagcaacgucuuccagacccgcgccgggugccucaucggcgcggagcacgugaacaacuccuacgagugcgacauccccaucggggccggcaucugcgccagcuaccagacgcagaccaacuccccgcggcgcgcccggagcguggcgucccagagcaucaucgccuacaccaugucccugggcgccgagaacagcgucgccuacuccaacaacagcaucgccauccccaccaacuucacgaucuccgugaccaccgagauccugcccgugagcaugaccaagacgagcgucgacugcaccauguacaucugcggggacuccaccgagugcagcaaccuccugcugcaguacggcuccuucugcacccagcucaaccgcgcgcugacggggaucgccguggagcaggacaagaacacccaggagguguucgcccaggucaagcagaucuacaagacgcccccgaucaaggacuucggcggguucaacuucagccagauccugcccgaccccuccaagcccagcaagcgguccuucaucgaggaccuccuguucaacaaggugacccuggccgacgccggcuucaucaagcaguacggcgacugccucggggacaucgcggcccgcgaccugaucugcgcccagaaguucaacggccugaccgugcucccgccccugcugaccgacgagaugaucgcccaguacaccagcgcccuccuggcggggaccaucacguccggcuggaccuucggggccggcgccgcccugcagauccccuucgcgaugcagauggccuaccgguucaacggcaucggggucacccagaacgugcucuacgagaaccagaagcugaucgccaaccaguucaacagcgccaucggcaagauccaggacucccugagcuccaccgccagcgcgcucgggaagcugcaggacguggucaaccagaacgcccaggcccugaacacgcucgugaagugccuguccagcaacuucggcgccaucuccagcgugcugaacgacauccucucccgccuggacaaggucgaggccgaggugcagaucgaccggcugaucaccgggcgccuccagugccugcagaccuacgugacccagcagcugauccgggcggccgagauccgcgccagcgccaaccucgccgcgaccaagauguccgagugcguccugggccagagcaagcggguggacuucugcggcaagggguaccaccugauguccuucccccagagcgccccgcacggcguggucuuccuccacgugacguacguccccgcccaggagaagaacuucaccaccgcccccgcgaucugccacgacgggaaggcccacuucccccgcgagggcguguucguguccaacgggacccacugguucgucacgcagcggaacuucuacgagccgcagaucaucaccaccgacaacaccuucgugagcggcaacugcgacguggucaucggcaucgugaacaacacgguguacgacccccugcagcccgagcuggacuccggcggcgggagcgggggcgggcagaucuacgagggcaagcugaccgccgaggggcuccgcuucggcaucguggccagccgguucaaccacgcgcuggucgaccgccugguggagggggccaucgacgccaucgugcggcacggcgggcgcgaggaggacaucacccucguccgggugcccggcuccugggagaucccgguggccgccggcgagcuggcccgcaaggaggacaucgacgcggucaucgccaucggggugcugauccggggcgccacgccccacuucgacuacaucgccagcgagguguccaaggggcucgcggaccugagccuggagcuccgcaagcccaucaccuucggcgucaucaccgccgacacccuggagcaggccaucgagcgggccgggacgaagcacggcaacaagggcugggaggccgcgcuguccgccaucgagauggccaaccucuucaagagccugcgcugaggacuaguuauaagacugacuagcccgaugggccucccaacgggcccuccuccccuccuugcaccgagauuaauaaaaaaaaaaaaaaaaaaaaaaaaaaaaaaaaaaaaaaaaaaaaaaaaaaaaaaaaaaaaaaaaugcaucccccccccccccccccccccccccccccccaaaggcucuuuucagagccaccagaauu

SEQ ID NO: 12896 - RNA, 4141 nt, Artificial Sequence
  SARS-CoV-2/Wuhan/WIV05/2019__EPI_ISL_402128 spike protein mRNA gc (1-1147)(F970C_G999C) LumSynth construct
aggagaaagcuuaccauguucguguuccugguccuccugccccuggugagcucccagugcgugaaccucaccacccgcacgcagcugccgcccgccuacaccaacagcuucacccggggcgucuacuaccccgacaagguguuccgcuccagcgugcugcacuccacccaggaccucuuccugcccuucuucagcaacgucacgugguuccacgccauccacguguccgggaccaacggcaccaagcgguucgacaacccggugcugcccuucaacgacggggucuacuucgcgagcaccgagaaguccaacaucauccgcggcuggaucuucgggacgacccucgacagcaagacccagucccugcugaucgugaacaacgccaccaacguggucaucaaggugugcgaguuccaguucugcaacgaccccuuccucggcguguacuaccacaagaacaacaagagcuggauggaguccgaguuccgggucuacagcuccgccaacaacugcacguucgaguacgugagccagcccuuccugauggaccuggagggcaagcaggggaacuucaagaaccuccgcgaguucguguucaagaacaucgacggcuacuucaagaucuacuccaagcacaccccgaucaaccugguccgggaccugccccagggguucagcgcccucgagccccugguggaccugcccaucggcaucaacaucacccgcuuccagacccuccuggcccugcaccgguccuaccucacgccgggggacagcagcuccggcuggaccgcgggcgccgccgccuacuacgugggguaccugcagccccgcaccuuccugcucaaguacaacgagaacggcaccaucacggacgcggucgacugcgcccuggacccccugagcgagaccaagugcacccucaaguccuucaccguggagaaggggaucuaccagacgagcaacuuccgggugcagcccaccgaguccaucguccgcuucccgaacaucaccaaccugugccccuucggcgagguguucaacgccacccgguucgccagcgucuacgccuggaaccgcaagcggaucuccaacugcguggcggacuacagcgugcuguacaacuccgccagcuucuccacguucaagugcuacggcgucagccccaccaagcucaacgaccugugcuucaccaacguguacgccgacuccuucgugauccgcggggacgagguccggcagaucgcccccggccagaccgggaagaucgccgacuacaacuacaagcugccggacgacuucacgggcugcgugaucgcguggaacagcaacaaccucgacuccaaggucgggggcaacuacaacuaccuguaccgccuguuccgcaagagcaaccucaagcccuucgagcgggacaucuccaccgagaucuaccaggccggcagcacccccugcaacgggguggagggcuucaacugcuacuucccccugcaguccuacggguuccagccgaccaacggcgugggguaccagcccuaccggguggucgugcugagcuucgagcuccugcacgcccccgccacggugugcggccccaagaaguccaccaaccuggucaagaacaagugcgugaacuucaacuucaacggccucaccgggaccggcgugcugaccgagagcaacaagaaguuccugccguuccagcaguucgggcgcgacaucgccgacacgaccgacgcgguccgcgacccccagacccuggagauccucgacaucacccccugcagcuucggcgggguguccgugaucacgccgggcaccaacaccagcaaccaggucgccgugcuguaccaggacgugaacugcaccgagguccccguggccauccacgccgaccagcugacgcccaccuggcggguguacuccaccggcagcaacgucuuccagacccgcgccgggugccucaucggcgcggagcacgugaacaacuccuacgagugcgacauccccaucggggccggcaucugcgccagcuaccagacgcagaccaacuccccgcggcgcgcccggagcguggcgucccagagcaucaucgccuacaccaugucccugggcgccgagaacagcgucgccuacuccaacaacagcaucgccauccccaccaacuucacgaucuccgugaccaccgagauccugcccgugagcaugaccaagacgagcgucgacugcaccauguacaucugcggggacuccaccgagugcagcaaccuccugcugcaguacggcuccuucugcacccagcucaaccgcgcgcugacggggaucgccguggagcaggacaagaacacccaggagguguucgcccaggucaagcagaucuacaagacgcccccgaucaaggacuucggcggguucaacuucagccagauccugcccgaccccuccaagcccagcaagcgguccuucaucgaggaccuccuguucaacaaggugacccuggccgacgccggcuucaucaagcaguacggcgacugccucggggacaucgcggcccgcgaccugaucugcgcccagaaguucaacggccugaccgugcucccgccccugcugaccgacgagaugaucgcccaguacaccagcgcccuccuggcggggaccaucacguccggcuggaccuucggggccggcgccgcccugcagauccccuucgcgaugcagauggccuaccgguucaacggcaucggggucacccagaacgugcucuacgagaaccagaagcugaucgccaaccaguucaacagcgccaucggcaagauccaggacucccugagcuccaccgccagcgcgcucgggaagcugcaggacguggucaaccagaacgcccaggcccugaacacgcucgugaagcagcuguccagcaacugcggcgccaucuccagcgugcugaacgacauccucucccgccuggacaaggucgaggccgaggugcagaucgaccggcugaucaccugucgccuccagagccugcagaccuacgugacccagcagcugauccgggcggccgagauccgcgccagcgccaaccucgccgcgaccaagauguccgagugcguccugggccagagcaagcggguggacuucugcggcaagggguaccaccugauguccuucccccagagcgccccgcacggcguggucuuccuccacgugacguacguccccgcccaggagaagaacuucaccaccgcccccgcgaucugccacgacgggaaggcccacuucccccgcgagggcguguucguguccaacgggacccacugguucgucacgcagcggaacuucuacgagccgcagaucaucaccaccgacaacaccuucgugagcggcaacugcgacguggucaucggcaucgugaacaacacgguguacgacccccugcagcccgagcuggacuccggcggcgggagcgggggcgggcagaucuacgagggcaagcugaccgccgaggggcuccgcuucggcaucguggccagccgguucaaccacgcgcuggucgaccgccugguggagggggccaucgacgccaucgugcggcacggcgggcgcgaggaggacaucacccucguccgggugcccggcuccugggagaucccgguggccgccggcgagcuggcccgcaaggaggacaucgacgcggucaucgccaucggggugcugauccggggcgccacgccccacuucgacuacaucgccagcgagguguccaaggggcucgcggaccugagccuggagcuccgcaagcccaucaccuucggcgucaucaccgccgacacccuggagcaggccaucgagcgggccgggacgaagcacggcaacaagggcugggaggccgcgcuguccgccaucgagauggccaaccucuucaagagccugcgcugaggacuaguuauaagacugacuagcccgaugggccucccaacgggcccuccuccccuccuugcaccgagauuaauaaaaaaaaaaaaaaaaaaaaaaaaaaaaaaaaaaaaaaaaaaaaaaaaaaaaaaaaaaaaaaaaugcaucccccccccccccccccccccccccccccccaaaggcucuuuucagagccaccagaauu

SEQ ID NO: 12897 - RNA, 4141 nt, Artificial Sequence
  SARS-CoV-2/Wuhan/WIV05/2019__EPI_ISL_402128 spike protein mRNA gc (1-1147)(A972C_R995C) LumSynth construct
aggagaaagcuuaccauguucguguuccugguccuccugccccuggugagcucccagugcgugaaccucaccacccgcacgcagcugccgcccgccuacaccaacagcuucacccggggcgucuacuaccccgacaagguguuccgcuccagcgugcugcacuccacccaggaccucuuccugcccuucuucagcaacgucacgugguuccacgccauccacguguccgggaccaacggcaccaagcgguucgacaacccggugcugcccuucaacgacggggucuacuucgcgagcaccgagaaguccaacaucauccgcggcuggaucuucgggacgacccucgacagcaagacccagucccugcugaucgugaacaacgccaccaacguggucaucaaggugugcgaguuccaguucugcaacgaccccuuccucggcguguacuaccacaagaacaacaagagcuggauggaguccgaguuccgggucuacagcuccgccaacaacugcacguucgaguacgugagccagcccuuccugauggaccuggagggcaagcaggggaacuucaagaaccuccgcgaguucguguucaagaacaucgacggcuacuucaagaucuacuccaagcacaccccgaucaaccugguccgggaccugccccagggguucagcgcccucgagccccugguggaccugcccaucggcaucaacaucacccgcuuccagacccuccuggcccugcaccgguccuaccucacgccgggggacagcagcuccggcuggaccgcgggcgccgccgccuacuacgugggguaccugcagccccgcaccuuccugcucaaguacaacgagaacggcaccaucacggacgcggucgacugcgcccuggacccccugagcgagaccaagugcacccucaaguccuucaccguggagaaggggaucuaccagacgagcaacuuccgggugcagcccaccgaguccaucguccgcuucccgaacaucaccaaccugugccccuucggcgagguguucaacgccacccgguucgccagcgucuacgccuggaaccgcaagcggaucuccaacugcguggcggacuacagcgugcuguacaacuccgccagcuucuccacguucaagugcuacggcgucagccccaccaagcucaacgaccugugcuucaccaacguguacgccgacuccuucgugauccgcggggacgagguccggcagaucgcccccggccagaccgggaagaucgccgacuacaacuacaagcugccggacgacuucacgggcugcgugaucgcguggaacagcaacaaccucgacuccaaggucgggggcaacuacaacuaccuguaccgccuguuccgcaagagcaaccucaagcccuucgagcgggacaucuccaccgagaucuaccaggccggcagcacccccugcaacgggguggagggcuucaacugcuacuucccccugcaguccuacggguuccagccgaccaacggcgugggguaccagcccuaccggguggucgugcugagcuucgagcuccugcacgcccccgccacggugugcggccccaagaaguccaccaaccuggucaagaacaagugcgugaacuucaacuucaacggccucaccgggaccggcgugcugaccgagagcaacaagaaguuccugccguuccagcaguucgggcgcgacaucgccgacacgaccgacgcgguccgcgacccccagacccuggagauccucgacaucacccccugcagcuucggcgggguguccgugaucacgccgggcaccaacaccagcaaccaggucgccgugcuguaccaggacgugaacugcaccgagguccccguggccauccacgccgaccagcugacgcccaccuggcggguguacuccaccggcagcaacgucuuccagacccgcgccgggugccucaucggcgcggagcacgugaacaacuccuacgagugcgacauccccaucggggccggcaucugcgccagcuaccagacgcagaccaacuccccgcggcgcgcccggagcguggcgucccagagcaucaucgccuacaccaugucccugggcgccgagaacagcgucgccuacuccaacaacagcaucgccauccccaccaacuucacgaucuccgugaccaccgagauccugcccgugagcaugaccaagacgagcgucgacugcaccauguacaucugcggggacuccaccgagugcagcaaccuccugcugcaguacggcuccuucugcacccagcucaaccgcgcgcugacggggaucgccguggagcaggacaagaacacccaggagguguucgcccaggucaagcagaucuacaagacgcccccgaucaaggacuucggcggguucaacuucagccagauccugcccgaccccuccaagcccagcaagcgguccuucaucgaggaccuccuguucaacaaggugacccuggccgacgccggcuucaucaagcaguacggcgacugccucggggacaucgcggcccgcgaccugaucugcgcccagaaguucaacggccugaccgugcucccgccccugcugaccgacgagaugaucgcccaguacaccagcgcccuccuggcggggaccaucacguccggcuggaccuucggggccggcgccgcccugcagauccccuucgcgaugcagauggccuaccgguucaacggcaucggggucacccagaacgugcucuacgagaaccagaagcugaucgccaaccaguucaacagcgccaucggcaagauccaggacucccugagcuccaccgccagcgcgcucgggaagcugcaggacguggucaaccagaacgcccaggcccugaacacgcucgugaagcagcuguccagcaacuucggcugcaucuccagcgugcugaacgacauccucucccgccuggacaaggucgaggccgaggugcagaucgacugccugaucaccgggcgccuccagagccugcagaccuacgugacccagcagcugauccgggcggccgagauccgcgccagcgccaaccucgccgcgaccaagauguccgagugcguccugggccagagcaagcggguggacuucugcggcaagggguaccaccugauguccuucccccagagcgccccgcacggcguggucuuccuccacgugacguacguccccgcccaggagaagaacuucaccaccgcccccgcgaucugccacgacgggaaggcccacuucccccgcgagggcguguucguguccaacgggacccacugguucgucacgcagcggaacuucuacgagccgcagaucaucaccaccgacaacaccuucgugagcggcaacugcgacguggucaucggcaucgugaacaacacgguguacgacccccugcagcccgagcuggacuccggcggcgggagcgggggcgggcagaucuacgagggcaagcugaccgccgaggggcuccgcuucggcaucguggccagccgguucaaccacgcgcuggucgaccgccugguggagggggccaucgacgccaucgugcggcacggcgggcgcgaggaggacaucacccucguccgggugcccggcuccugggagaucccgguggccgccggcgagcuggcccgcaaggaggacaucgacgcggucaucgccaucggggugcugauccggggcgccacgccccacuucgacuacaucgccagcgagguguccaaggggcucgcggaccugagccuggagcuccgcaagcccaucaccuucggcgucaucaccgccgacacccuggagcaggccaucgagcgggccgggacgaagcacggcaacaagggcugggaggccgcgcuguccgccaucgagauggccaaccucuucaagagccugcgcugaggacuaguuauaagacugacuagcccgaugggccucccaacgggcccuccuccccuccuugcaccgagauuaauaaaaaaaaaaaaaaaaaaaaaaaaaaaaaaaaaaaaaaaaaaaaaaaaaaaaaaaaaaaaaaaaugcaucccccccccccccccccccccccccccccccaaaggcucuuuucagagccaccagaauu

SEQ ID NO: 12898 - RNA, 4141 nt, Artificial Sequence
  SARS-CoV-2/Wuhan/WIV05/2019__EPI_ISL_402128 spike protein mRNA gc (1-1147)(A890C_V1040C) LumSynth construct
aggagaaagcuuaccauguucguguuccugguccuccugccccuggugagcucccagugcgugaaccucaccacccgcacgcagcugccgcccgccuacaccaacagcuucacccggggcgucuacuaccccgacaagguguuccgcuccagcgugcugcacuccacccaggaccucuuccugcccuucuucagcaacgucacgugguuccacgccauccacguguccgggaccaacggcaccaagcgguucgacaacccggugcugcccuucaacgacggggucuacuucgcgagcaccgagaaguccaacaucauccgcggcuggaucuucgggacgacccucgacagcaagacccagucccugcugaucgugaacaacgccaccaacguggucaucaaggugugcgaguuccaguucugcaacgaccccuuccucggcguguacuaccacaagaacaacaagagcuggauggaguccgaguuccgggucuacagcuccgccaacaacugcacguucgaguacgugagccagcccuuccugauggaccuggagggcaagcaggggaacuucaagaaccuccgcgaguucguguucaagaacaucgacggcuacuucaagaucuacuccaagcacaccccgaucaaccugguccgggaccugccccagggguucagcgcccucgagccccugguggaccugcccaucggcaucaacaucacccgcuuccagacccuccuggcccugcaccgguccuaccucacgccgggggacagcagcuccggcuggaccgcgggcgccgccgccuacuacgugggguaccugcagccccgcaccuuccugcucaaguacaacgagaacggcaccaucacggacgcggucgacugcgcccuggacccccugagcgagaccaagugcacccucaaguccuucaccguggagaaggggaucuaccagacgagcaacuuccgggugcagcccaccgaguccaucguccgcuucccgaacaucaccaaccugugccccuucggcgagguguucaacgccacccgguucgccagcgucuacgccuggaaccgcaagcggaucuccaacugcguggcggacuacagcgugcuguacaacuccgccagcuucuccacguucaagugcuacggcgucagccccaccaagcucaacgaccugugcuucaccaacguguacgccgacuccuucgugauccgcggggacgagguccggcagaucgcccccggccagaccgggaagaucgccgacuacaacuacaagcugccggacgacuucacgggcugcgugaucgcguggaacagcaacaaccucgacuccaaggucgggggcaacuacaacuaccuguaccgccuguuccgcaagagcaaccucaagcccuucgagcgggacaucuccaccgagaucuaccaggccggcagcacccccugcaacgggguggagggcuucaacugcuacuucccccugcaguccuacggguuccagccgaccaacggcgugggguaccagcccuaccggguggucgugcugagcuucgagcuccugcacgcccccgccacggugugcggccccaagaaguccaccaaccuggucaagaacaagugcgugaacuucaacuucaacggccucaccgggaccggcgugcugaccgagagcaacaagaaguuccugccguuccagcaguucgggcgcgacaucgccgacacgaccgacgcgguccgcgacccccagacccuggagauccucgacaucacccccugcagcuucggcgggguguccgugaucacgccgggcaccaacaccagcaaccaggucgccgugcuguaccaggacgugaacugcaccgagguccccguggccauccacgccgaccagcugacgcccaccuggcggguguacuccaccggcagcaacgucuuccagacccgcgccgggugccucaucggcgcggagcacgugaacaacuccuacgagugcgacauccccaucggggccggcaucugcgccagcuaccagacgcagaccaacuccccgcggcgcgcccggagcguggcgucccagagcaucaucgccuacaccaugucccugggcgccgagaacagcgucgccuacuccaacaacagcaucgccauccccaccaacuucacgaucuccgugaccaccgagauccugcccgugagcaugaccaagacgagcgucgacugcaccauguacaucugcggggacuccaccgagugcagcaaccuccugcugcaguacggcuccuucugcacccagcucaaccgcgcgcugacggggaucgccguggagcaggacaagaacacccaggagguguucgcccaggucaagcagaucuacaagacgcccccgaucaaggacuucggcggguucaacuucagccagauccugcccgaccccuccaagcccagcaagcgguccuucaucgaggaccuccuguucaacaaggugacccuggccgacgccggcuucaucaagcaguacggcgacugccucggggacaucgcggcccgcgaccugaucugcgcccagaaguucaacggccugaccgugcucccgccccugcugaccgacgagaugaucgcccaguacaccagcgcccuccuggcggggaccaucacguccggcuggaccuucgggugcggcgccgcccugcagauccccuucgcgaugcagauggccuaccgguucaacggcaucggggucacccagaacgugcucuacgagaaccagaagcugaucgccaaccaguucaacagcgccaucggcaagauccaggacucccugagcuccaccgccagcgcgcucgggaagcugcaggacguggucaaccagaacgcccaggcccugaacacgcucgugaagcagcuguccagcaacuucggcgccaucuccagcgugcugaacgacauccucucccgccuggacaaggucgaggccgaggugcagaucgaccggcugaucaccgggcgccuccagagccugcagaccuacgugacccagcagcugauccgggcggccgagauccgcgccagcgccaaccucgccgcgaccaagauguccgagugcguccugggccagagcaagcggugcgacuucugcggcaagggguaccaccugauguccuucccccagagcgccccgcacggcguggucuuccuccacgugacguacguccccgcccaggagaagaacuucaccaccgcccccgcgaucugccacgacgggaaggcccacuucccccgcgagggcguguucguguccaacgggacccacugguucgucacgcagcggaacuucuacgagccgcagaucaucaccaccgacaacaccuucgugagcggcaacugcgacguggucaucggcaucgugaacaacacgguguacgacccccugcagcccgagcuggacuccggcggcgggagcgggggcgggcagaucuacgagggcaagcugaccgccgaggggcuccgcuucggcaucguggccagccgguucaaccacgcgcuggucgaccgccugguggagggggccaucgacgccaucgugcggcacggcgggcgcgaggaggacaucacccucguccgggugcccggcuccugggagaucccgguggccgccggcgagcuggcccgcaaggaggacaucgacgcggucaucgccaucggggugcugauccggggcgccacgccccacuucgacuacaucgccagcgagguguccaaggggcucgcggaccugagccuggagcuccgcaagcccaucaccuucggcgucaucaccgccgacacccuggagcaggccaucgagcgggccgggacgaagcacggcaacaagggcugggaggccgcgcuguccgccaucgagauggccaaccucuucaagagccugcgcugaggacuaguuauaagacugacuagcccgaugggccucccaacgggcccuccuccccuccuugcaccgagauuaauaaaaaaaaaaaaaaaaaaaaaaaaaaaaaaaaaaaaaaaaaaaaaaaaaaaaaaaaaaaaaaaaugcaucccccccccccccccccccccccccccccccaaaggcucuuuucagagccaccagaauu

SEQ ID NO: 12899 - RNA, 4141 nt, Artificial Sequence
  SARS-CoV-2/Wuhan/WIV05/2019__EPI_ISL_402128 spike protein mRNA gc (1-1147)(T874C_S1055C) LumSynth construct
aggagaaagcuuaccauguucguguuccugguccuccugccccuggugagcucccagugcgugaaccucaccacccgcacgcagcugccgcccgccuacaccaacagcuucacccggggcgucuacuaccccgacaagguguuccgcuccagcgugcugcacuccacccaggaccucuuccugcccuucuucagcaacgucacgugguuccacgccauccacguguccgggaccaacggcaccaagcgguucgacaacccggugcugcccuucaacgacggggucuacuucgcgagcaccgagaaguccaacaucauccgcggcuggaucuucgggacgacccucgacagcaagacccagucccugcugaucgugaacaacgccaccaacguggucaucaaggugugcgaguuccaguucugcaacgaccccuuccucggcguguacuaccacaagaacaacaagagcuggauggaguccgaguuccgggucuacagcuccgccaacaacugcacguucgaguacgugagccagcccuuccugauggaccuggagggcaagcaggggaacuucaagaaccuccgcgaguucguguucaagaacaucgacggcuacuucaagaucuacuccaagcacaccccgaucaaccugguccgggaccugccccagggguucagcgcccucgagccccugguggaccugcccaucggcaucaacaucacccgcuuccagacccuccuggcccugcaccgguccuaccucacgccgggggacagcagcuccggcuggaccgcgggcgccgccgccuacuacgugggguaccugcagccccgcaccuuccugcucaaguacaacgagaacggcaccaucacggacgcggucgacugcgcccuggacccccugagcgagaccaagugcacccucaaguccuucaccguggagaaggggaucuaccagacgagcaacuuccgggugcagcccaccgaguccaucguccgcuucccgaacaucaccaaccugugccccuucggcgagguguucaacgccacccgguucgccagcgucuacgccuggaaccgcaagcggaucuccaacugcguggcggacuacagcgugcuguacaacuccgccagcuucuccacguucaagugcuacggcgucagccccaccaagcucaacgaccugugcuucaccaacguguacgccgacuccuucgugauccgcggggacgagguccggcagaucgcccccggccagaccgggaagaucgccgacuacaacuacaagcugccggacgacuucacgggcugcgugaucgcguggaacagcaacaaccucgacuccaaggucgggggcaacuacaacuaccuguaccgccuguuccgcaagagcaaccucaagcccuucgagcgggacaucuccaccgagaucuaccaggccggcagcacccccugcaacgggguggagggcuucaacugcuacuucccccugcaguccuacggguuccagccgaccaacggcgugggguaccagcccuaccggguggucgugcugagcuucgagcuccugcacgcccccgccacggugugcggccccaagaaguccaccaaccuggucaagaacaagugcgugaacuucaacuucaacggccucaccgggaccggcgugcugaccgagagcaacaagaaguuccugccguuccagcaguucgggcgcgacaucgccgacacgaccgacgcgguccgcgacccccagacccuggagauccucgacaucacccccugcagcuucggcgggguguccgugaucacgccgggcaccaacaccagcaaccaggucgccgugcuguaccaggacgugaacugcaccgagguccccguggccauccacgccgaccagcugacgcccaccuggcggguguacuccaccggcagcaacgucuuccagacccgcgccgggugccucaucggcgcggagcacgugaacaacuccuacgagugcgacauccccaucggggccggcaucugcgccagcuaccagacgcagaccaacuccccgcggcgcgcccggagcguggcgucccagagcaucaucgccuacaccaugucccugggcgccgagaacagcgucgccuacuccaacaacagcaucgccauccccaccaacuucacgaucuccgugaccaccgagauccugcccgugagcaugaccaagacgagcgucgacugcaccauguacaucugcggggacuccaccgagugcagcaaccuccugcugcaguacggcuccuucugcacccagcucaaccgcgcgcugacggggaucgccguggagcaggacaagaacacccaggagguguucgcccaggucaagcagaucuacaagacgcccccgaucaaggacuucggcggguucaacuucagccagauccugcccgaccccuccaagcccagcaagcgguccuucaucgaggaccuccuguucaacaaggugacccuggccgacgccggcuucaucaagcaguacggcgacugccucggggacaucgcggcccgcgaccugaucugcgcccagaaguucaacggccugaccgugcucccgccccugcugaccgacgagaugaucgcccaguacugcagcgcccuccuggcggggaccaucacguccggcuggaccuucggggccggcgccgcccugcagauccccuucgcgaugcagauggccuaccgguucaacggcaucggggucacccagaacgugcucuacgagaaccagaagcugaucgccaaccaguucaacagcgccaucggcaagauccaggacucccugagcuccaccgccagcgcgcucgggaagcugcaggacguggucaaccagaacgcccaggcccugaacacgcucgugaagcagcuguccagcaacuucggcgccaucuccagcgugcugaacgacauccucucccgccuggacaaggucgaggccgaggugcagaucgaccggcugaucaccgggcgccuccagagccugcagaccuacgugacccagcagcugauccgggcggccgagauccgcgccagcgccaaccucgccgcgaccaagauguccgagugcguccugggccagagcaagcggguggacuucugcggcaagggguaccaccugauguccuucccccagugcgccccgcacggcguggucuuccuccacgugacguacguccccgcccaggagaagaacuucaccaccgcccccgcgaucugccacgacgggaaggcccacuucccccgcgagggcguguucguguccaacgggacccacugguucgucacgcagcggaacuucuacgagccgcagaucaucaccaccgacaacaccuucgugagcggcaacugcgacguggucaucggcaucgugaacaacacgguguacgacccccugcagcccgagcuggacuccggcggcgggagcgggggcgggcagaucuacgagggcaagcugaccgccgaggggcuccgcuucggcaucguggccagccgguucaaccacgcgcuggucgaccgccugguggagggggccaucgacgccaucgugcggcacggcgggcgcgaggaggacaucacccucguccgggugcccggcuccugggagaucccgguggccgccggcgagcuggcccgcaaggaggacaucgacgcggucaucgccaucggggugcugauccggggcgccacgccccacuucgacuacaucgccagcgagguguccaaggggcucgcggaccugagccuggagcuccgcaagcccaucaccuucggcgucaucaccgccgacacccuggagcaggccaucgagcgggccgggacgaagcacggcaacaagggcugggaggccgcgcuguccgccaucgagauggccaaccucuucaagagccugcgcugaggacuaguuauaagacugacuagcccgaugggccucccaacgggcccuccuccccuccuugcaccgagauuaauaaaaaaaaaaaaaaaaaaaaaaaaaaaaaaaaaaaaaaaaaaaaaaaaaaaaaaaaaaaaaaaaugcaucccccccccccccccccccccccccccccccaaaggcucuuuucagagccaccagaauu

SEQ ID NO: 12900 - RNA, 4165 nt, Artificial Sequence
  SARS-CoV-2/Wuhan/WIV05/2019__EPI_ISL_402128 spike protein mRNA gc (1-1147) Ferritin construct
aggagaaagcuuaccauguucguguuccugguccuccugccccuggugagcucccagugcgugaaccucaccacccgcacgcagcugccgcccgccuacaccaacagcuucacccggggcgucuacuaccccgacaagguguuccgcuccagcgugcugcacuccacccaggaccucuuccugcccuucuucagcaacgucacgugguuccacgccauccacguguccgggaccaacggcaccaagcgguucgacaacccggugcugcccuucaacgacggggucuacuucgcgagcaccgagaaguccaacaucauccgcggcuggaucuucgggacgacccucgacagcaagacccagucccugcugaucgugaacaacgccaccaacguggucaucaaggugugcgaguuccaguucugcaacgaccccuuccucggcguguacuaccacaagaacaacaagagcuggauggaguccgaguuccgggucuacagcuccgccaacaacugcacguucgaguacgugagccagcccuuccugauggaccuggagggcaagcaggggaacuucaagaaccuccgcgaguucguguucaagaacaucgacggcuacuucaagaucuacuccaagcacaccccgaucaaccugguccgggaccugccccagggguucagcgcccucgagccccugguggaccugcccaucggcaucaacaucacccgcuuccagacccuccuggcccugcaccgguccuaccucacgccgggggacagcagcuccggcuggaccgcgggcgccgccgccuacuacgugggguaccugcagccccgcaccuuccugcucaaguacaacgagaacggcaccaucacggacgcggucgacugcgcccuggacccccugagcgagaccaagugcacccucaaguccuucaccguggagaaggggaucuaccagacgagcaacuuccgggugcagcccaccgaguccaucguccgcuucccgaacaucaccaaccugugccccuucggcgagguguucaacgccacccgguucgccagcgucuacgccuggaaccgcaagcggaucuccaacugcguggcggacuacagcgugcuguacaacuccgccagcuucuccacguucaagugcuacggcgucagccccaccaagcucaacgaccugugcuucaccaacguguacgccgacuccuucgugauccgcggggacgagguccggcagaucgcccccggccagaccgggaagaucgccgacuacaacuacaagcugccggacgacuucacgggcugcgugaucgcguggaacagcaacaaccucgacuccaaggucgggggcaacuacaacuaccuguaccgccuguuccgcaagagcaaccucaagcccuucgagcgggacaucuccaccgagaucuaccaggccggcagcacccccugcaacgggguggagggcuucaacugcuacuucccccugcaguccuacggguuccagccgaccaacggcgugggguaccagcccuaccggguggucgugcugagcuucgagcuccugcacgcccccgccacggugugcggccccaagaaguccaccaaccuggucaagaacaagugcgugaacuucaacuucaacggccucaccgggaccggcgugcugaccgagagcaacaagaaguuccugccguuccagcaguucgggcgcgacaucgccgacacgaccgacgcgguccgcgacccccagacccuggagauccucgacaucacccccugcagcuucggcgggguguccgugaucacgccgggcaccaacaccagcaaccaggucgccgugcuguaccaggacgugaacugcaccgagguccccguggccauccacgccgaccagcugacgcccaccuggcggguguacuccaccggcagcaacgucuuccagacccgcgccgggugccucaucggcgcggagcacgugaacaacuccuacgagugcgacauccccaucggggccggcaucugcgccagcuaccagacgcagaccaacuccccgcggcgcgcccggagcguggcgucccagagcaucaucgccuacaccaugucccugggcgccgagaacagcgucgccuacuccaacaacagcaucgccauccccaccaacuucacgaucuccgugaccaccgagauccugcccgugagcaugaccaagacgagcgucgacugcaccauguacaucugcggggacuccaccgagugcagcaaccuccugcugcaguacggcuccuucugcacccagcucaaccgcgcgcugacggggaucgccguggagcaggacaagaacacccaggagguguucgcccaggucaagcagaucuacaagacgcccccgaucaaggacuucggcggguucaacuucagccagauccugcccgaccccuccaagcccagcaagcgguccuucaucgaggaccuccuguucaacaaggugacccuggccgacgccggcuucaucaagcaguacggcgacugccucggggacaucgcggcccgcgaccugaucugcgcccagaaguucaacggccugaccgugcucccgccccugcugaccgacgagaugaucgcccaguacaccagcgcccuccuggcggggaccaucacguccggcuggaccuucggggccggcgccgcccugcagauccccuucgcgaugcagauggccuaccgguucaacggcaucggggucacccagaacgugcucuacgagaaccagaagcugaucgccaaccaguucaacagcgccaucggcaagauccaggacucccugagcuccaccgccagcgcgcucgggaagcugcaggacguggucaaccagaacgcccaggcccugaacacgcucgugaagcagcuguccagcaacuucggcgccaucuccagcgugcugaacgacauccucucccgccuggacaaggucgaggccgaggugcagaucgaccggcugaucaccgggcgccuccagagccugcagaccuacgugacccagcagcugauccgggcggccgagauccgcgccagcgccaaccucgccgcgaccaagauguccgagugcguccugggccagagcaagcggguggacuucugcggcaagggguaccaccugauguccuucccccagagcgccccgcacggcguggucuuccuccacgugacguacguccccgcccaggagaagaacuucaccaccgcccccgcgaucugccacgacgggaaggcccacuucccccgcgagggcguguucguguccaacgggacccacugguucgucacgcagcggaacuucuacgagccgcagaucaucaccaccgacaacaccuucgugagcggcaacugcgacguggucaucggcaucgugaacaacacgguguacgacccccugcagcccgagcuggacuccggcgggggcgggagcgacaucaucaagcuccugaacgagcaggucaacaaggagaugcaguccagcaaccuguacauguccaugagcuccuggugcuacacccacagccucgacggcgccgggcuguuccuguucgaccacgccgcggaggaguacgagcacgccaagaagcucaucaucuuccugaacgagaacaacgugcccgugcagcugaccuccaucagcgccccggagcacaaguucgagggccucacgcagaucuuccagaaggccuacgagcacgagcagcacaucuccgagagcaucaacaacaucguggaccacgccaucaaguccaaggaccacgcgaccuucaacuuccugcagugguacgucgccgagcagcacgaggaggaggugcuguucaaggacauccucgacaagaucgagcugaucgggaacgagaaccacggccuguaccucgccgaccaguacgugaaggggaucgccaagagccgcaaguccugaggacuaguuauaagacugacuagcccgaugggccucccaacgggcccuccuccccuccuugcaccgagauuaauaaaaaaaaaaaaaaaaaaaaaaaaaaaaaaaaaaaaaaaaaaaaaaaaaaaaaaaaaaaaaaaaugcaucccccccccccccccccccccccccccccccaaaggcucuuuucagagccaccagaauu

SEQ ID NO: 12901 - RNA, 4165 nt, Artificial Sequence
  SARS-CoV-2/Wuhan/WIV05/2019__EPI_ISL_402128 spike protein mRNA gc (1-1147)(K986P_V987P) Ferritin construct R9664
aggagaaagcuuaccauguucguguuccugguccuccugccccuggugagcucccagugcgugaaccucaccacccgcacgcagcugccgcccgccuacaccaacagcuucacccggggcgucuacuaccccgacaagguguuccgcuccagcgugcugcacuccacccaggaccucuuccugcccuucuucagcaacgucacgugguuccacgccauccacguguccgggaccaacggcaccaagcgguucgacaacccggugcugcccuucaacgacggggucuacuucgcgagcaccgagaaguccaacaucauccgcggcuggaucuucgggacgacccucgacagcaagacccagucccugcugaucgugaacaacgccaccaacguggucaucaaggugugcgaguuccaguucugcaacgaccccuuccucggcguguacuaccacaagaacaacaagagcuggauggaguccgaguuccgggucuacagcuccgccaacaacugcacguucgaguacgugagccagcccuuccugauggaccuggagggcaagcaggggaacuucaagaaccuccgcgaguucguguucaagaacaucgacggcuacuucaagaucuacuccaagcacaccccgaucaaccugguccgggaccugccccagggguucagcgcccucgagccccugguggaccugcccaucggcaucaacaucacccgcuuccagacccuccuggcccugcaccgguccuaccucacgccgggggacagcagcuccggcuggaccgcgggcgccgccgccuacuacgugggguaccugcagccccgcaccuuccugcucaaguacaacgagaacggcaccaucacggacgcggucgacugcgcccuggacccccugagcgagaccaagugcacccucaaguccuucaccguggagaaggggaucuaccagacgagcaacuuccgggugcagcccaccgaguccaucguccgcuucccgaacaucaccaaccugugccccuucggcgagguguucaacgccacccgguucgccagcgucuacgccuggaaccgcaagcggaucuccaacugcguggcggacuacagcgugcuguacaacuccgccagcuucuccacguucaagugcuacggcgucagccccaccaagcucaacgaccugugcuucaccaacguguacgccgacuccuucgugauccgcggggacgagguccggcagaucgcccccggccagaccgggaagaucgccgacuacaacuacaagcugccggacgacuucacgggcugcgugaucgcguggaacagcaacaaccucgacuccaaggucgggggcaacuacaacuaccuguaccgccuguuccgcaagagcaaccucaagcccuucgagcgggacaucuccaccgagaucuaccaggccggcagcacccccugcaacgggguggagggcuucaacugcuacuucccccugcaguccuacggguuccagccgaccaacggcgugggguaccagcccuaccggguggucgugcugagcuucgagcuccugcacgcccccgccacggugugcggccccaagaaguccaccaaccuggucaagaacaagugcgugaacuucaacuucaacggccucaccgggaccggcgugcugaccgagagcaacaagaaguuccugccguuccagcaguucgggcgcgacaucgccgacacgaccgacgcgguccgcgacccccagacccuggagauccucgacaucacccccugcagcuucggcgggguguccgugaucacgccgggcaccaacaccagcaaccaggucgccgugcuguaccaggacgugaacugcaccgagguccccguggccauccacgccgaccagcugacgcccaccuggcggguguacuccaccggcagcaacgucuuccagacccgcgccgggugccucaucggcgcggagcacgugaacaacuccuacgagugcgacauccccaucggggccggcaucugcgccagcuaccagacgcagaccaacuccccgcggcgcgcccggagcguggcgucccagagcaucaucgccuacaccaugucccugggcgccgagaacagcgucgccuacuccaacaacagcaucgccauccccaccaacuucacgaucuccgugaccaccgagauccugcccgugagcaugaccaagacgagcgucgacugcaccauguacaucugcggggacuccaccgagugcagcaaccuccugcugcaguacggcuccuucugcacccagcucaaccgcgcgcugacggggaucgccguggagcaggacaagaacacccaggagguguucgcccaggucaagcagaucuacaagacgcccccgaucaaggacuucggcggguucaacuucagccagauccugcccgaccccuccaagcccagcaagcgguccuucaucgaggaccuccuguucaacaaggugacccuggccgacgccggcuucaucaagcaguacggcgacugccucggggacaucgcggcccgcgaccugaucugcgcccagaaguucaacggccugaccgugcucccgccccugcugaccgacgagaugaucgcccaguacaccagcgcccuccuggcggggaccaucacguccggcuggaccuucggggccggcgccgcccugcagauccccuucgcgaugcagauggccuaccgguucaacggcaucggggucacccagaacgugcucuacgagaaccagaagcugaucgccaaccaguucaacagcgccaucggcaagauccaggacucccugagcuccaccgccagcgcgcucgggaagcugcaggacguggucaaccagaacgcccaggcccugaacacgcucgugaagcagcuguccagcaacuucggcgccaucuccagcgugcugaacgacauccucucccgccuggacccgcccgaggccgaggugcagaucgaccggcugaucaccgggcgccuccagagccugcagaccuacgugacccagcagcugauccgggcggccgagauccgcgccagcgccaaccucgccgcgaccaagauguccgagugcguccugggccagagcaagcggguggacuucugcggcaagggguaccaccugauguccuucccccagagcgccccgcacggcguggucuuccuccacgugacguacguccccgcccaggagaagaacuucaccaccgcccccgcgaucugccacgacgggaaggcccacuucccccgcgagggcguguucguguccaacgggacccacugguucgucacgcagcggaacuucuacgagccgcagaucaucaccaccgacaacaccuucgugagcggcaacugcgacguggucaucggcaucgugaacaacacgguguacgacccccugcagcccgagcuggacuccggcgggggcgggagcgacaucaucaagcuccugaacgagcaggucaacaaggagaugcaguccagcaaccuguacauguccaugagcuccuggugcuacacccacagccucgacggcgccgggcuguuccuguucgaccacgccgcggaggaguacgagcacgccaagaagcucaucaucuuccugaacgagaacaacgugcccgugcagcugaccuccaucagcgccccggagcacaaguucgagggccucacgcagaucuuccagaaggccuacgagcacgagcagcacaucuccgagagcaucaacaacaucguggaccacgccaucaaguccaaggaccacgcgaccuucaacuuccugcagugguacgucgccgagcagcacgaggaggaggugcuguucaaggacauccucgacaagaucgagcugaucgggaacgagaaccacggccuguaccucgccgaccaguacgugaaggggaucgccaagagccgcaaguccugaggacuaguuauaagacugacuagcccgaugggccucccaacgggcccuccuccccuccuugcaccgagauuaauaaaaaaaaaaaaaaaaaaaaaaaaaaaaaaaaaaaaaaaaaaaaaaaaaaaaaaaaaaaaaaaaugcaucccccccccccccccccccccccccccccccaaaggcucuuuucagagccaccagaauu

SEQ ID NO: 12902 - RNA, 4165 nt, Artificial Sequence
  SARS-CoV-2/Wuhan/WIV05/2019__EPI_ISL_402128 spike protein mRNA gc (1-1147)(K986P_V987P_T887WN_A1020W) Ferritin construct
aggagaaagcuuaccauguucguguuccugguccuccugccccuggugagcucccagugcgugaaccucaccacccgcacgcagcugccgcccgccuacaccaacagcuucacccggggcgucuacuaccccgacaagguguuccgcuccagcgugcugcacuccacccaggaccucuuccugcccuucuucagcaacgucacgugguuccacgccauccacguguccgggaccaacggcaccaagcgguucgacaacccggugcugcccuucaacgacggggucuacuucgcgagcaccgagaaguccaacaucauccgcggcuggaucuucgggacgacccucgacagcaagacccagucccugcugaucgugaacaacgccaccaacguggucaucaaggugugcgaguuccaguucugcaacgaccccuuccucggcguguacuaccacaagaacaacaagagcuggauggaguccgaguuccgggucuacagcuccgccaacaacugcacguucgaguacgugagccagcccuuccugauggaccuggagggcaagcaggggaacuucaagaaccuccgcgaguucguguucaagaacaucgacggcuacuucaagaucuacuccaagcacaccccgaucaaccugguccgggaccugccccagggguucagcgcccucgagccccugguggaccugcccaucggcaucaacaucacccgcuuccagacccuccuggcccugcaccgguccuaccucacgccgggggacagcagcuccggcuggaccgcgggcgccgccgccuacuacgugggguaccugcagccccgcaccuuccugcucaaguacaacgagaacggcaccaucacggacgcggucgacugcgcccuggacccccugagcgagaccaagugcacccucaaguccuucaccguggagaaggggaucuaccagacgagcaacuuccgggugcagcccaccgaguccaucguccgcuucccgaacaucaccaaccugugccccuucggcgagguguucaacgccacccgguucgccagcgucuacgccuggaaccgcaagcggaucuccaacugcguggcggacuacagcgugcuguacaacuccgccagcuucuccacguucaagugcuacggcgucagccccaccaagcucaacgaccugugcuucaccaacguguacgccgacuccuucgugauccgcggggacgagguccggcagaucgcccccggccagaccgggaagaucgccgacuacaacuacaagcugccggacgacuucacgggcugcgugaucgcguggaacagcaacaaccucgacuccaaggucgggggcaacuacaacuaccuguaccgccuguuccgcaagagcaaccucaagcccuucgagcgggacaucuccaccgagaucuaccaggccggcagcacccccugcaacgggguggagggcuucaacugcuacuucccccugcaguccuacggguuccagccgaccaacggcgugggguaccagcccuaccggguggucgugcugagcuucgagcuccugcacgcccccgccacggugugcggccccaagaaguccaccaaccuggucaagaacaagugcgugaacuucaacuucaacggccucaccgggaccggcgugcugaccgagagcaacaagaaguuccugccguuccagcaguucgggcgcgacaucgccgacacgaccgacgcgguccgcgacccccagacccuggagauccucgacaucacccccugcagcuucggcgggguguccgugaucacgccgggcaccaacaccagcaaccaggucgccgugcuguaccaggacgugaacugcaccgagguccccguggccauccacgccgaccagcugacgcccaccuggcggguguacuccaccggcagcaacgucuuccagacccgcgccgggugccucaucggcgcggagcacgugaacaacuccuacgagugcgacauccccaucggggccggcaucugcgccagcuaccagacgcagaccaacuccccgcggcgcgcccggagcguggcgucccagagcaucaucgccuacaccaugucccugggcgccgagaacagcgucgccuacuccaacaacagcaucgccauccccaccaacuucacgaucuccgugaccaccgagauccugcccgugagcaugaccaagacgagcgucgacugcaccauguacaucugcggggacuccaccgagugcagcaaccuccugcugcaguacggcuccuucugcacccagcucaaccgcgcgcugacggggaucgccguggagcaggacaagaacacccaggagguguucgcccaggucaagcagaucuacaagacgcccccgaucaaggacuucggcggguucaacuucagccagauccugcccgaccccuccaagcccagcaagcgguccuucaucgaggaccuccuguucaacaaggugacccuggccgacgccggcuucaucaagcaguacggcgacugccucggggacaucgcggcccgcgaccugaucugcgcccagaaguucaacggccugaccgugcucccgccccugcugaccgacgagaugaucgcccaguacaccagcgcccuccuggcggggaccaucacguccggcuggugguucggggccggcgccgcccugcagauccccuucgcgaugcagauggccuaccgguucaacggcaucggggucacccagaacgugcucuacgagaaccagaagcugaucgccaaccaguucaacagcgccaucggcaagauccaggacucccugagcuccaccgccagcgcgcucgggaagcugcaggacguggucaaccagaacgcccaggcccugaacacgcucgugaagcagcuguccagcaacuucggcgccaucuccagcgugcugaacgacauccucucccgccuggacccgcccgaggccgaggugcagaucgaccggcugaucaccgggcgccuccagagccugcagaccuacgugacccagcagcugauccgggcggccgagauccgcuggagcgccaaccucgccgcgaccaagauguccgagugcguccugggccagagcaagcggguggacuucugcggcaagggguaccaccugauguccuucccccagagcgccccgcacggcguggucuuccuccacgugacguacguccccgcccaggagaagaacuucaccaccgcccccgcgaucugccacgacgggaaggcccacuucccccgcgagggcguguucguguccaacgggacccacugguucgucacgcagcggaacuucuacgagccgcagaucaucaccaccgacaacaccuucgugagcggcaacugcgacguggucaucggcaucgugaacaacacgguguacgacccccugcagcccgagcuggacuccggcgggggcgggagcgacaucaucaagcuccugaacgagcaggucaacaaggagaugcaguccagcaaccuguacauguccaugagcuccuggugcuacacccacagccucgacggcgccgggcuguuccuguucgaccacgccgcggaggaguacgagcacgccaagaagcucaucaucuuccugaacgagaacaacgugcccgugcagcugaccuccaucagcgccccggagcacaaguucgagggccucacgcagaucuuccagaaggccuacgagcacgagcagcacaucuccgagagcaucaacaacaucguggaccacgccaucaaguccaaggaccacgcgaccuucaacuuccugcagugguacgucgccgagcagcacgaggaggaggugcuguucaaggacauccucgacaagaucgagcugaucgggaacgagaaccacggccuguaccucgccgaccaguacgugaaggggaucgccaagagccgcaaguccugaggacuaguuauaagacugacuagcccgaugggccucccaacgggcccuccuccccuccuugcaccgagauuaauaaaaaaaaaaaaaaaaaaaaaaaaaaaaaaaaaaaaaaaaaaaaaaaaaaaaaaaaaaaaaaaaugcaucccccccccccccccccccccccccccccccaaaggcucuuuucagagccaccagaauu

SEQ ID NO: 12903 - RNA, 4165 nt, Artificial Sequence
  SARS-CoV-2/Wuhan/WIV05/2019__EPI_ISL_402128 spike protein mRNA gc (1-1147)(K986P_V987P_P1069F) Ferritin construct
aggagaaagcuuaccauguucguguuccugguccuccugccccuggugagcucccagugcgugaaccucaccacccgcacgcagcugccgcccgccuacaccaacagcuucacccggggcgucuacuaccccgacaagguguuccgcuccagcgugcugcacuccacccaggaccucuuccugcccuucuucagcaacgucacgugguuccacgccauccacguguccgggaccaacggcaccaagcgguucgacaacccggugcugcccuucaacgacggggucuacuucgcgagcaccgagaaguccaacaucauccgcggcuggaucuucgggacgacccucgacagcaagacccagucccugcugaucgugaacaacgccaccaacguggucaucaaggugugcgaguuccaguucugcaacgaccccuuccucggcguguacuaccacaagaacaacaagagcuggauggaguccgaguuccgggucuacagcuccgccaacaacugcacguucgaguacgugagccagcccuuccugauggaccuggagggcaagcaggggaacuucaagaaccuccgcgaguucguguucaagaacaucgacggcuacuucaagaucuacuccaagcacaccccgaucaaccugguccgggaccugccccagggguucagcgcccucgagccccugguggaccugcccaucggcaucaacaucacccgcuuccagacccuccuggcccugcaccgguccuaccucacgccgggggacagcagcuccggcuggaccgcgggcgccgccgccuacuacgugggguaccugcagccccgcaccuuccugcucaaguacaacgagaacggcaccaucacggacgcggucgacugcgcccuggacccccugagcgagaccaagugcacccucaaguccuucaccguggagaaggggaucuaccagacgagcaacuuccgggugcagcccaccgaguccaucguccgcuucccgaacaucaccaaccugugccccuucggcgagguguucaacgccacccgguucgccagcgucuacgccuggaaccgcaagcggaucuccaacugcguggcggacuacagcgugcuguacaacuccgccagcuucuccacguucaagugcuacggcgucagccccaccaagcucaacgaccugugcuucaccaacguguacgccgacuccuucgugauccgcggggacgagguccggcagaucgcccccggccagaccgggaagaucgccgacuacaacuacaagcugccggacgacuucacgggcugcgugaucgcguggaacagcaacaaccucgacuccaaggucgggggcaacuacaacuaccuguaccgccuguuccgcaagagcaaccucaagcccuucgagcgggacaucuccaccgagaucuaccaggccggcagcacccccugcaacgggguggagggcuucaacugcuacuucccccugcaguccuacggguuccagccgaccaacggcgugggguaccagcccuaccggguggucgugcugagcuucgagcuccugcacgcccccgccacggugugcggccccaagaaguccaccaaccuggucaagaacaagugcgugaacuucaacuucaacggccucaccgggaccggcgugcugaccgagagcaacaagaaguuccugccguuccagcaguucgggcgcgacaucgccgacacgaccgacgcgguccgcgacccccagacccuggagauccucgacaucacccccugcagcuucggcgggguguccgugaucacgccgggcaccaacaccagcaaccaggucgccgugcuguaccaggacgugaacugcaccgagguccccguggccauccacgccgaccagcugacgcccaccuggcggguguacuccaccggcagcaacgucuuccagacccgcgccgggugccucaucggcgcggagcacgugaacaacuccuacgagugcgacauccccaucggggccggcaucugcgccagcuaccagacgcagaccaacuccccgcggcgcgcccggagcguggcgucccagagcaucaucgccuacaccaugucccugggcgccgagaacagcgucgccuacuccaacaacagcaucgccauccccaccaacuucacgaucuccgugaccaccgagauccugcccgugagcaugaccaagacgagcgucgacugcaccauguacaucugcggggacuccaccgagugcagcaaccuccugcugcaguacggcuccuucugcacccagcucaaccgcgcgcugacggggaucgccguggagcaggacaagaacacccaggagguguucgcccaggucaagcagaucuacaagacgcccccgaucaaggacuucggcggguucaacuucagccagauccugcccgaccccuccaagcccagcaagcgguccuucaucgaggaccuccuguucaacaaggugacccuggccgacgccggcuucaucaagcaguacggcgacugccucggggacaucgcggcccgcgaccugaucugcgcccagaaguucaacggccugaccgugcucccgccccugcugaccgacgagaugaucgcccaguacaccagcgcccuccuggcggggaccaucacguccggcuggaccuucggggccggcgccgcccugcagauccccuucgcgaugcagauggccuaccgguucaacggcaucggggucacccagaacgugcucuacgagaaccagaagcugaucgccaaccaguucaacagcgccaucggcaagauccaggacucccugagcuccaccgccagcgcgcucgggaagcugcaggacguggucaaccagaacgcccaggcccugaacacgcucgugaagcagcuguccagcaacuucggcgccaucuccagcgugcugaacgacauccucucccgccuggacccgcccgaggccgaggugcagaucgaccggcugaucaccgggcgccuccagagccugcagaccuacgugacccagcagcugauccgggcggccgagauccgcgccagcgccaaccucgccgcgaccaagauguccgagugcguccugggccagagcaagcggguggacuucugcggcaagggguaccaccugauguccuucccccagagcgccccgcacggcguggucuuccuccacgugacguacgucuucgcccaggagaagaacuucaccaccgcccccgcgaucugccacgacgggaaggcccacuucccccgcgagggcguguucguguccaacgggacccacugguucgucacgcagcggaacuucuacgagccgcagaucaucaccaccgacaacaccuucgugagcggcaacugcgacguggucaucggcaucgugaacaacacgguguacgacccccugcagcccgagcuggacuccggcgggggcgggagcgacaucaucaagcuccugaacgagcaggucaacaaggagaugcaguccagcaaccuguacauguccaugagcuccuggugcuacacccacagccucgacggcgccgggcuguuccuguucgaccacgccgcggaggaguacgagcacgccaagaagcucaucaucuuccugaacgagaacaacgugcccgugcagcugaccuccaucagcgccccggagcacaaguucgagggccucacgcagaucuuccagaaggccuacgagcacgagcagcacaucuccgagagcaucaacaacaucguggaccacgccaucaaguccaaggaccacgcgaccuucaacuuccugcagugguacgucgccgagcagcacgaggaggaggugcuguucaaggacauccucgacaagaucgagcugaucgggaacgagaaccacggccuguaccucgccgaccaguacgugaaggggaucgccaagagccgcaaguccugaggacuaguuauaagacugacuagcccgaugggccucccaacgggcccuccuccccuccuugcaccgagauuaauaaaaaaaaaaaaaaaaaaaaaaaaaaaaaaaaaaaaaaaaaaaaaaaaaaaaaaaaaaaaaaaaugcaucccccccccccccccccccccccccccccccaaaggcucuuuucagagccaccagaauu

SEQ ID NO: 12904 - RNA, 4165 nt, Artificial Sequence
  SARS-CoV-2/Wuhan/WIV05/2019__EPI_ISL_402128 spike protein mRNA gc (1-1147)(K986P_V987P_ H1048Q_H1064N_ H1083N_H1101N) Ferritin construct
aggagaaagcuuaccauguucguguuccugguccuccugccccuggugagcucccagugcgugaaccucaccacccgcacgcagcugccgcccgccuacaccaacagcuucacccggggcgucuacuaccccgacaagguguuccgcuccagcgugcugcacuccacccaggaccucuuccugcccuucuucagcaacgucacgugguuccacgccauccacguguccgggaccaacggcaccaagcgguucgacaacccggugcugcccuucaacgacggggucuacuucgcgagcaccgagaaguccaacaucauccgcggcuggaucuucgggacgacccucgacagcaagacccagucccugcugaucgugaacaacgccaccaacguggucaucaaggugugcgaguuccaguucugcaacgaccccuuccucggcguguacuaccacaagaacaacaagagcuggauggaguccgaguuccgggucuacagcuccgccaacaacugcacguucgaguacgugagccagcccuuccugauggaccuggagggcaagcaggggaacuucaagaaccuccgcgaguucguguucaagaacaucgacggcuacuucaagaucuacuccaagcacaccccgaucaaccugguccgggaccugccccagggguucagcgcccucgagccccugguggaccugcccaucggcaucaacaucacccgcuuccagacccuccuggcccugcaccgguccuaccucacgccgggggacagcagcuccggcuggaccgcgggcgccgccgccuacuacgugggguaccugcagccccgcaccuuccugcucaaguacaacgagaacggcaccaucacggacgcggucgacugcgcccuggacccccugagcgagaccaagugcacccucaaguccuucaccguggagaaggggaucuaccagacgagcaacuuccgggugcagcccaccgaguccaucguccgcuucccgaacaucaccaaccugugccccuucggcgagguguucaacgccacccgguucgccagcgucuacgccuggaaccgcaagcggaucuccaacugcguggcggacuacagcgugcuguacaacuccgccagcuucuccacguucaagugcuacggcgucagccccaccaagcucaacgaccugugcuucaccaacguguacgccgacuccuucgugauccgcggggacgagguccggcagaucgcccccggccagaccgggaagaucgccgacuacaacuacaagcugccggacgacuucacgggcugcgugaucgcguggaacagcaacaaccucgacuccaaggucgggggcaacuacaacuaccuguaccgccuguuccgcaagagcaaccucaagcccuucgagcgggacaucuccaccgagaucuaccaggccggcagcacccccugcaacgggguggagggcuucaacugcuacuucccccugcaguccuacggguuccagccgaccaacggcgugggguaccagcccuaccggguggucgugcugagcuucgagcuccugcacgcccccgccacggugugcggccccaagaaguccaccaaccuggucaagaacaagugcgugaacuucaacuucaacggccucaccgggaccggcgugcugaccgagagcaacaagaaguuccugccguuccagcaguucgggcgcgacaucgccgacacgaccgacgcgguccgcgacccccagacccuggagauccucgacaucacccccugcagcuucggcgggguguccgugaucacgccgggcaccaacaccagcaaccaggucgccgugcuguaccaggacgugaacugcaccgagguccccguggccauccacgccgaccagcugacgcccaccuggcggguguacuccaccggcagcaacgucuuccagacccgcgccgggugccucaucggcgcggagcacgugaacaacuccuacgagugcgacauccccaucggggccggcaucugcgccagcuaccagacgcagaccaacuccccgcggcgcgcccggagcguggcgucccagagcaucaucgccuacaccaugucccugggcgccgagaacagcgucgccuacuccaacaacagcaucgccauccccaccaacuucacgaucuccgugaccaccgagauccugcccgugagcaugaccaagacgagcgucgacugcaccauguacaucugcggggacuccaccgagugcagcaaccuccugcugcaguacggcuccuucugcacccagcucaaccgcgcgcugacggggaucgccguggagcaggacaagaacacccaggagguguucgcccaggucaagcagaucuacaagacgcccccgaucaaggacuucggcggguucaacuucagccagauccugcccgaccccuccaagcccagcaagcgguccuucaucgaggaccuccuguucaacaaggugacccuggccgacgccggcuucaucaagcaguacggcgacugccucggggacaucgcggcccgcgaccugaucugcgcccagaaguucaacggccugaccgugcucccgccccugcugaccgacgagaugaucgcccaguacaccagcgcccuccuggcggggaccaucacguccggcuggaccuucggggccggcgccgcccugcagauccccuucgcgaugcagauggccuaccgguucaacggcaucggggucacccagaacgugcucuacgagaaccagaagcugaucgccaaccaguucaacagcgccaucggcaagauccaggacucccugagcuccaccgccagcgcgcucgggaagcugcaggacguggucaaccagaacgcccaggcccugaacacgcucgugaagcagcuguccagcaacuucggcgccaucuccagcgugcugaacgacauccucucccgccuggacccgcccgaggccgaggugcagaucgaccggcugaucaccgggcgccuccagagccugcagaccuacgugacccagcagcugauccgggcggccgagauccgcgccagcgccaaccucgccgcgaccaagauguccgagugcguccugggccagagcaagcggguggacuucugcggcaagggguaccagcugauguccuucccccagagcgccccgcacggcguggucuuccucaacgugacguacguccccgcccaggagaagaacuucaccaccgcccccgcgaucugcaacgacgggaaggcccacuucccccgcgagggcguguucguguccaacgggaccaacugguucgucacgcagcggaacuucuacgagccgcagaucaucaccaccgacaacaccuucgugagcggcaacugcgacguggucaucggcaucgugaacaacacgguguacgacccccugcagcccgagcuggacuccggcgggggcgggagcgacaucaucaagcuccugaacgagcaggucaacaaggagaugcaguccagcaaccuguacauguccaugagcuccuggugcuacacccacagccucgacggcgccgggcuguuccuguucgaccacgccgcggaggaguacgagcacgccaagaagcucaucaucuuccugaacgagaacaacgugcccgugcagcugaccuccaucagcgccccggagcacaaguucgagggccucacgcagaucuuccagaaggccuacgagcacgagcagcacaucuccgagagcaucaacaacaucguggaccacgccaucaaguccaaggaccacgcgaccuucaacuuccugcagugguacgucgccgagcagcacgaggaggaggugcuguucaaggacauccucgacaagaucgagcugaucgggaacgagaaccacggccuguaccucgccgaccaguacgugaaggggaucgccaagagccgcaaguccugaggacuaguuauaagacugacuagcccgaugggccucccaacgggcccuccuccccuccuugcaccgagauuaauaaaaaaaaaaaaaaaaaaaaaaaaaaaaaaaaaaaaaaaaaaaaaaaaaaaaaaaaaaaaaaaaugcaucccccccccccccccccccccccccccccccaaaggcucuuuucagagccaccagaauu

SEQ ID NO: 12905 - RNA, 4165 nt, Artificial Sequence
  SARS-CoV-2/Wuhan/WIV05/2019__EPI_ISL_402128 spike protein mRNA gc (1-1147)(I712C_T1077C) Ferritin construct
aggagaaagcuuaccauguucguguuccugguccuccugccccuggugagcucccagugcgugaaccucaccacccgcacgcagcugccgcccgccuacaccaacagcuucacccggggcgucuacuaccccgacaagguguuccgcuccagcgugcugcacuccacccaggaccucuuccugcccuucuucagcaacgucacgugguuccacgccauccacguguccgggaccaacggcaccaagcgguucgacaacccggugcugcccuucaacgacggggucuacuucgcgagcaccgagaaguccaacaucauccgcggcuggaucuucgggacgacccucgacagcaagacccagucccugcugaucgugaacaacgccaccaacguggucaucaaggugugcgaguuccaguucugcaacgaccccuuccucggcguguacuaccacaagaacaacaagagcuggauggaguccgaguuccgggucuacagcuccgccaacaacugcacguucgaguacgugagccagcccuuccugauggaccuggagggcaagcaggggaacuucaagaaccuccgcgaguucguguucaagaacaucgacggcuacuucaagaucuacuccaagcacaccccgaucaaccugguccgggaccugccccagggguucagcgcccucgagccccugguggaccugcccaucggcaucaacaucacccgcuuccagacccuccuggcccugcaccgguccuaccucacgccgggggacagcagcuccggcuggaccgcgggcgccgccgccuacuacgugggguaccugcagccccgcaccuuccugcucaaguacaacgagaacggcaccaucacggacgcggucgacugcgcccuggacccccugagcgagaccaagugcacccucaaguccuucaccguggagaaggggaucuaccagacgagcaacuuccgggugcagcccaccgaguccaucguccgcuucccgaacaucaccaaccugugccccuucggcgagguguucaacgccacccgguucgccagcgucuacgccuggaaccgcaagcggaucuccaacugcguggcggacuacagcgugcuguacaacuccgccagcuucuccacguucaagugcuacggcgucagccccaccaagcucaacgaccugugcuucaccaacguguacgccgacuccuucgugauccgcggggacgagguccggcagaucgcccccggccagaccgggaagaucgccgacuacaacuacaagcugccggacgacuucacgggcugcgugaucgcguggaacagcaacaaccucgacuccaaggucgggggcaacuacaacuaccuguaccgccuguuccgcaagagcaaccucaagcccuucgagcgggacaucuccaccgagaucuaccaggccggcagcacccccugcaacgggguggagggcuucaacugcuacuucccccugcaguccuacggguuccagccgaccaacggcgugggguaccagcccuaccggguggucgugcugagcuucgagcuccugcacgcccccgccacggugugcggccccaagaaguccaccaaccuggucaagaacaagugcgugaacuucaacuucaacggccucaccgggaccggcgugcugaccgagagcaacaagaaguuccugccguuccagcaguucgggcgcgacaucgccgacacgaccgacgcgguccgcgacccccagacccuggagauccucgacaucacccccugcagcuucggcgggguguccgugaucacgccgggcaccaacaccagcaaccaggucgccgugcuguaccaggacgugaacugcaccgagguccccguggccauccacgccgaccagcugacgcccaccuggcggguguacuccaccggcagcaacgucuuccagacccgcgccgggugccucaucggcgcggagcacgugaacaacuccuacgagugcgacauccccaucggggccggcaucugcgccagcuaccagacgcagaccaacuccccgcggcgcgcccggagcguggcgucccagagcaucaucgccuacaccaugucccugggcgccgagaacagcgucgccuacuccaacaacagcugcgccauccccaccaacuucacgaucuccgugaccaccgagauccugcccgugagcaugaccaagacgagcgucgacugcaccauguacaucugcggggacuccaccgagugcagcaaccuccugcugcaguacggcuccuucugcacccagcucaaccgcgcgcugacggggaucgccguggagcaggacaagaacacccaggagguguucgcccaggucaagcagaucuacaagacgcccccgaucaaggacuucggcggguucaacuucagccagauccugcccgaccccuccaagcccagcaagcgguccuucaucgaggaccuccuguucaacaaggugacccuggccgacgccggcuucaucaagcaguacggcgacugccucggggacaucgcggcccgcgaccugaucugcgcccagaaguucaacggccugaccgugcucccgccccugcugaccgacgagaugaucgcccaguacaccagcgcccuccuggcggggaccaucacguccggcuggaccuucggggccggcgccgcccugcagauccccuucgcgaugcagauggccuaccgguucaacggcaucggggucacccagaacgugcucuacgagaaccagaagcugaucgccaaccaguucaacagcgccaucggcaagauccaggacucccugagcuccaccgccagcgcgcucgggaagcugcaggacguggucaaccagaacgcccaggcccugaacacgcucgugaagcagcuguccagcaacuucggcgccaucuccagcgugcugaacgacauccucucccgccuggacaaggucgaggccgaggugcagaucgaccggcugaucaccgggcgccuccagagccugcagaccuacgugacccagcagcugauccgggcggccgagauccgcgccagcgccaaccucgccgcgaccaagauguccgagugcguccugggccagagcaagcggguggacuucugcggcaagggguaccaccugauguccuucccccagagcgccccgcacggcguggucuuccuccacgugacguacguccccgcccaggagaagaacuucaccugcgcccccgcgaucugccacgacgggaaggcccacuucccccgcgagggcguguucguguccaacgggacccacugguucgucacgcagcggaacuucuacgagccgcagaucaucaccaccgacaacaccuucgugagcggcaacugcgacguggucaucggcaucgugaacaacacgguguacgacccccugcagcccgagcuggacuccggcgggggcgggagcgacaucaucaagcuccugaacgagcaggucaacaaggagaugcaguccagcaaccuguacauguccaugagcuccuggugcuacacccacagccucgacggcgccgggcuguuccuguucgaccacgccgcggaggaguacgagcacgccaagaagcucaucaucuuccugaacgagaacaacgugcccgugcagcugaccuccaucagcgccccggagcacaaguucgagggccucacgcagaucuuccagaaggccuacgagcacgagcagcacaucuccgagagcaucaacaacaucguggaccacgccaucaaguccaaggaccacgcgaccuucaacuuccugcagugguacgucgccgagcagcacgaggaggaggugcuguucaaggacauccucgacaagaucgagcugaucgggaacgagaaccacggccuguaccucgccgaccaguacgugaaggggaucgccaagagccgcaaguccugaggacuaguuauaagacugacuagcccgaugggccucccaacgggcccuccuccccuccuugcaccgagauuaauaaaaaaaaaaaaaaaaaaaaaaaaaaaaaaaaaaaaaaaaaaaaaaaaaaaaaaaaaaaaaaaaugcaucccccccccccccccccccccccccccccccaaaggcucuuuucagagccaccagaauu

SEQ ID NO: 12906 - RNA, 4165 nt, Artificial Sequence
  SARS-CoV-2/Wuhan/WIV05/2019__EPI_ISL_402128 spike protein mRNA gc (1-1147)(I714C_Y1110C) Ferritin construct
aggagaaagcuuaccauguucguguuccugguccuccugccccuggugagcucccagugcgugaaccucaccacccgcacgcagcugccgcccgccuacaccaacagcuucacccggggcgucuacuaccccgacaagguguuccgcuccagcgugcugcacuccacccaggaccucuuccugcccuucuucagcaacgucacgugguuccacgccauccacguguccgggaccaacggcaccaagcgguucgacaacccggugcugcccuucaacgacggggucuacuucgcgagcaccgagaaguccaacaucauccgcggcuggaucuucgggacgacccucgacagcaagacccagucccugcugaucgugaacaacgccaccaacguggucaucaaggugugcgaguuccaguucugcaacgaccccuuccucggcguguacuaccacaagaacaacaagagcuggauggaguccgaguuccgggucuacagcuccgccaacaacugcacguucgaguacgugagccagcccuuccugauggaccuggagggcaagcaggggaacuucaagaaccuccgcgaguucguguucaagaacaucgacggcuacuucaagaucuacuccaagcacaccccgaucaaccugguccgggaccugccccagggguucagcgcccucgagccccugguggaccugcccaucggcaucaacaucacccgcuuccagacccuccuggcccugcaccgguccuaccucacgccgggggacagcagcuccggcuggaccgcgggcgccgccgccuacuacgugggguaccugcagccccgcaccuuccugcucaaguacaacgagaacggcaccaucacggacgcggucgacugcgcccuggacccccugagcgagaccaagugcacccucaaguccuucaccguggagaaggggaucuaccagacgagcaacuuccgggugcagcccaccgaguccaucguccgcuucccgaacaucaccaaccugugccccuucggcgagguguucaacgccacccgguucgccagcgucuacgccuggaaccgcaagcggaucuccaacugcguggcggacuacagcgugcuguacaacuccgccagcuucuccacguucaagugcuacggcgucagccccaccaagcucaacgaccugugcuucaccaacguguacgccgacuccuucgugauccgcggggacgagguccggcagaucgcccccggccagaccgggaagaucgccgacuacaacuacaagcugccggacgacuucacgggcugcgugaucgcguggaacagcaacaaccucgacuccaaggucgggggcaacuacaacuaccuguaccgccuguuccgcaagagcaaccucaagcccuucgagcgggacaucuccaccgagaucuaccaggccggcagcacccccugcaacgggguggagggcuucaacugcuacuucccccugcaguccuacggguuccagccgaccaacggcgugggguaccagcccuaccggguggucgugcugagcuucgagcuccugcacgcccccgccacggugugcggccccaagaaguccaccaaccuggucaagaacaagugcgugaacuucaacuucaacggccucaccgggaccggcgugcugaccgagagcaacaagaaguuccugccguuccagcaguucgggcgcgacaucgccgacacgaccgacgcgguccgcgacccccagacccuggagauccucgacaucacccccugcagcuucggcgggguguccgugaucacgccgggcaccaacaccagcaaccaggucgccgugcuguaccaggacgugaacugcaccgagguccccguggccauccacgccgaccagcugacgcccaccuggcggguguacuccaccggcagcaacgucuuccagacccgcgccgggugccucaucggcgcggagcacgugaacaacuccuacgagugcgacauccccaucggggccggcaucugcgccagcuaccagacgcagaccaacuccccgcggcgcgcccggagcguggcgucccagagcaucaucgccuacaccaugucccugggcgccgagaacagcgucgccuacuccaacaacagcaucgccugccccaccaacuucacgaucuccgugaccaccgagauccugcccgugagcaugaccaagacgagcgucgacugcaccauguacaucugcggggacuccaccgagugcagcaaccuccugcugcaguacggcuccuucugcacccagcucaaccgcgcgcugacggggaucgccguggagcaggacaagaacacccaggagguguucgcccaggucaagcagaucuacaagacgcccccgaucaaggacuucggcggguucaacuucagccagauccugcccgaccccuccaagcccagcaagcgguccuucaucgaggaccuccuguucaacaaggugacccuggccgacgccggcuucaucaagcaguacggcgacugccucggggacaucgcggcccgcgaccugaucugcgcccagaaguucaacggccugaccgugcucccgccccugcugaccgacgagaugaucgcccaguacaccagcgcccuccuggcggggaccaucacguccggcuggaccuucggggccggcgccgcccugcagauccccuucgcgaugcagauggccuaccgguucaacggcaucggggucacccagaacgugcucuacgagaaccagaagcugaucgccaaccaguucaacagcgccaucggcaagauccaggacucccugagcuccaccgccagcgcgcucgggaagcugcaggacguggucaaccagaacgcccaggcccugaacacgcucgugaagcagcuguccagcaacuucggcgccaucuccagcgugcugaacgacauccucucccgccuggacaaggucgaggccgaggugcagaucgaccggcugaucaccgggcgccuccagagccugcagaccuacgugacccagcagcugauccgggcggccgagauccgcgccagcgccaaccucgccgcgaccaagauguccgagugcguccugggccagagcaagcggguggacuucugcggcaagggguaccaccugauguccuucccccagagcgccccgcacggcguggucuuccuccacgugacguacguccccgcccaggagaagaacuucaccaccgcccccgcgaucugccacgacgggaaggcccacuucccccgcgagggcguguucguguccaacgggacccacugguucgucacgcagcggaacuucugcgagccgcagaucaucaccaccgacaacaccuucgugagcggcaacugcgacguggucaucggcaucgugaacaacacgguguacgacccccugcagcccgagcuggacuccggcgggggcgggagcgacaucaucaagcuccugaacgagcaggucaacaaggagaugcaguccagcaaccuguacauguccaugagcuccuggugcuacacccacagccucgacggcgccgggcuguuccuguucgaccacgccgcggaggaguacgagcacgccaagaagcucaucaucuuccugaacgagaacaacgugcccgugcagcugaccuccaucagcgccccggagcacaaguucgagggccucacgcagaucuuccagaaggccuacgagcacgagcagcacaucuccgagagcaucaacaacaucguggaccacgccaucaaguccaaggaccacgcgaccuucaacuuccugcagugguacgucgccgagcagcacgaggaggaggugcuguucaaggacauccucgacaagaucgagcugaucgggaacgagaaccacggccuguaccucgccgaccaguacgugaaggggaucgccaagagccgcaaguccugaggacuaguuauaagacugacuagcccgaugggccucccaacgggcccuccuccccuccuugcaccgagauuaauaaaaaaaaaaaaaaaaaaaaaaaaaaaaaaaaaaaaaaaaaaaaaaaaaaaaaaaaaaaaaaaaugcaucccccccccccccccccccccccccccccccaaaggcucuuuucagagccaccagaauu

SEQ ID NO: 12907 - RNA, 4165 nt, Artificial Sequence
  SARS-CoV-2/Wuhan/WIV05/2019__EPI_ISL_402128 spike protein mRNA gc (1-1147)(P715C_P1069C) Ferritin construct
aggagaaagcuuaccauguucguguuccugguccuccugccccuggugagcucccagugcgugaaccucaccacccgcacgcagcugccgcccgccuacaccaacagcuucacccggggcgucuacuaccccgacaagguguuccgcuccagcgugcugcacuccacccaggaccucuuccugcccuucuucagcaacgucacgugguuccacgccauccacguguccgggaccaacggcaccaagcgguucgacaacccggugcugcccuucaacgacggggucuacuucgcgagcaccgagaaguccaacaucauccgcggcuggaucuucgggacgacccucgacagcaagacccagucccugcugaucgugaacaacgccaccaacguggucaucaaggugugcgaguuccaguucugcaacgaccccuuccucggcguguacuaccacaagaacaacaagagcuggauggaguccgaguuccgggucuacagcuccgccaacaacugcacguucgaguacgugagccagcccuuccugauggaccuggagggcaagcaggggaacuucaagaaccuccgcgaguucguguucaagaacaucgacggcuacuucaagaucuacuccaagcacaccccgaucaaccugguccgggaccugccccagggguucagcgcccucgagccccugguggaccugcccaucggcaucaacaucacccgcuuccagacccuccuggcccugcaccgguccuaccucacgccgggggacagcagcuccggcuggaccgcgggcgccgccgccuacuacgugggguaccugcagccccgcaccuuccugcucaaguacaacgagaacggcaccaucacggacgcggucgacugcgcccuggacccccugagcgagaccaagugcacccucaaguccuucaccguggagaaggggaucuaccagacgagcaacuuccgggugcagcccaccgaguccaucguccgcuucccgaacaucaccaaccugugccccuucggcgagguguucaacgccacccgguucgccagcgucuacgccuggaaccgcaagcggaucuccaacugcguggcggacuacagcgugcuguacaacuccgccagcuucuccacguucaagugcuacggcgucagccccaccaagcucaacgaccugugcuucaccaacguguacgccgacuccuucgugauccgcggggacgagguccggcagaucgcccccggccagaccgggaagaucgccgacuacaacuacaagcugccggacgacuucacgggcugcgugaucgcguggaacagcaacaaccucgacuccaaggucgggggcaacuacaacuaccuguaccgccuguuccgcaagagcaaccucaagcccuucgagcgggacaucuccaccgagaucuaccaggccggcagcacccccugcaacgggguggagggcuucaacugcuacuucccccugcaguccuacggguuccagccgaccaacggcgugggguaccagcccuaccggguggucgugcugagcuucgagcuccugcacgcccccgccacggugugcggccccaagaaguccaccaaccuggucaagaacaagugcgugaacuucaacuucaacggccucaccgggaccggcgugcugaccgagagcaacaagaaguuccugccguuccagcaguucgggcgcgacaucgccgacacgaccgacgcgguccgcgacccccagacccuggagauccucgacaucacccccugcagcuucggcgggguguccgugaucacgccgggcaccaacaccagcaaccaggucgccgugcuguaccaggacgugaacugcaccgagguccccguggccauccacgccgaccagcugacgcccaccuggcggguguacuccaccggcagcaacgucuuccagacccgcgccgggugccucaucggcgcggagcacgugaacaacuccuacgagugcgacauccccaucggggccggcaucugcgccagcuaccagacgcagaccaacuccccgcggcgcgcccggagcguggcgucccagagcaucaucgccuacaccaugucccugggcgccgagaacagcgucgccuacuccaacaacagcaucgccaucugcaccaacuucacgaucuccgugaccaccgagauccugcccgugagcaugaccaagacgagcgucgacugcaccauguacaucugcggggacuccaccgagugcagcaaccuccugcugcaguacggcuccuucugcacccagcucaaccgcgcgcugacggggaucgccguggagcaggacaagaacacccaggagguguucgcccaggucaagcagaucuacaagacgcccccgaucaaggacuucggcggguucaacuucagccagauccugcccgaccccuccaagcccagcaagcgguccuucaucgaggaccuccuguucaacaaggugacccuggccgacgccggcuucaucaagcaguacggcgacugccucggggacaucgcggcccgcgaccugaucugcgcccagaaguucaacggccugaccgugcucccgccccugcugaccgacgagaugaucgcccaguacaccagcgcccuccuggcggggaccaucacguccggcuggaccuucggggccggcgccgcccugcagauccccuucgcgaugcagauggccuaccgguucaacggcaucggggucacccagaacgugcucuacgagaaccagaagcugaucgccaaccaguucaacagcgccaucggcaagauccaggacucccugagcuccaccgccagcgcgcucgggaagcugcaggacguggucaaccagaacgcccaggcccugaacacgcucgugaagcagcuguccagcaacuucggcgccaucuccagcgugcugaacgacauccucucccgccuggacaaggucgaggccgaggugcagaucgaccggcugaucaccgggcgccuccagagccugcagaccuacgugacccagcagcugauccgggcggccgagauccgcgccagcgccaaccucgccgcgaccaagauguccgagugcguccugggccagagcaagcggguggacuucugcggcaagggguaccaccugauguccuucccccagagcgccccgcacggcguggucuuccuccacgugacguacgucugcgcccaggagaagaacuucaccaccgcccccgcgaucugccacgacgggaaggcccacuucccccgcgagggcguguucguguccaacgggacccacugguucgucacgcagcggaacuucuacgagccgcagaucaucaccaccgacaacaccuucgugagcggcaacugcgacguggucaucggcaucgugaacaacacgguguacgacccccugcagcccgagcuggacuccggcgggggcgggagcgacaucaucaagcuccugaacgagcaggucaacaaggagaugcaguccagcaaccuguacauguccaugagcuccuggugcuacacccacagccucgacggcgccgggcuguuccuguucgaccacgccgcggaggaguacgagcacgccaagaagcucaucaucuuccugaacgagaacaacgugcccgugcagcugaccuccaucagcgccccggagcacaaguucgagggccucacgcagaucuuccagaaggccuacgagcacgagcagcacaucuccgagagcaucaacaacaucguggaccacgccaucaaguccaaggaccacgcgaccuucaacuuccugcagugguacgucgccgagcagcacgaggaggaggugcuguucaaggacauccucgacaagaucgagcugaucgggaacgagaaccacggccuguaccucgccgaccaguacgugaaggggaucgccaagagccgcaaguccugaggacuaguuauaagacugacuagcccgaugggccucccaacgggcccuccuccccuccuugcaccgagauuaauaaaaaaaaaaaaaaaaaaaaaaaaaaaaaaaaaaaaaaaaaaaaaaaaaaaaaaaaaaaaaaaaugcaucccccccccccccccccccccccccccccccaaaggcucuuuucagagccaccagaauu

SEQ ID NO: 12908 - RNA, 4165 nt, Artificial Sequence
  SARS-CoV-2/Wuhan/WIV05/2019__EPI_ISL_402128 spike protein mRNA gc (1-1147)(G889C_L1034C) Ferritin construct
aggagaaagcuuaccauguucguguuccugguccuccugccccuggugagcucccagugcgugaaccucaccacccgcacgcagcugccgcccgccuacaccaacagcuucacccggggcgucuacuaccccgacaagguguuccgcuccagcgugcugcacuccacccaggaccucuuccugcccuucuucagcaacgucacgugguuccacgccauccacguguccgggaccaacggcaccaagcgguucgacaacccggugcugcccuucaacgacggggucuacuucgcgagcaccgagaaguccaacaucauccgcggcuggaucuucgggacgacccucgacagcaagacccagucccugcugaucgugaacaacgccaccaacguggucaucaaggugugcgaguuccaguucugcaacgaccccuuccucggcguguacuaccacaagaacaacaagagcuggauggaguccgaguuccgggucuacagcuccgccaacaacugcacguucgaguacgugagccagcccuuccugauggaccuggagggcaagcaggggaacuucaagaaccuccgcgaguucguguucaagaacaucgacggcuacuucaagaucuacuccaagcacaccccgaucaaccugguccgggaccugccccagggguucagcgcccucgagccccugguggaccugcccaucggcaucaacaucacccgcuuccagacccuccuggcccugcaccgguccuaccucacgccgggggacagcagcuccggcuggaccgcgggcgccgccgccuacuacgugggguaccugcagccccgcaccuuccugcucaaguacaacgagaacggcaccaucacggacgcggucgacugcgcccuggacccccugagcgagaccaagugcacccucaaguccuucaccguggagaaggggaucuaccagacgagcaacuuccgggugcagcccaccgaguccaucguccgcuucccgaacaucaccaaccugugccccuucggcgagguguucaacgccacccgguucgccagcgucuacgccuggaaccgcaagcggaucuccaacugcguggcggacuacagcgugcuguacaacuccgccagcuucuccacguucaagugcuacggcgucagccccaccaagcucaacgaccugugcuucaccaacguguacgccgacuccuucgugauccgcggggacgagguccggcagaucgcccccggccagaccgggaagaucgccgacuacaacuacaagcugccggacgacuucacgggcugcgugaucgcguggaacagcaacaaccucgacuccaaggucgggggcaacuacaacuaccuguaccgccuguuccgcaagagcaaccucaagcccuucgagcgggacaucuccaccgagaucuaccaggccggcagcacccccugcaacgggguggagggcuucaacugcuacuucccccugcaguccuacggguuccagccgaccaacggcgugggguaccagcccuaccggguggucgugcugagcuucgagcuccugcacgcccccgccacggugugcggccccaagaaguccaccaaccuggucaagaacaagugcgugaacuucaacuucaacggccucaccgggaccggcgugcugaccgagagcaacaagaaguuccugccguuccagcaguucgggcgcgacaucgccgacacgaccgacgcgguccgcgacccccagacccuggagauccucgacaucacccccugcagcuucggcgggguguccgugaucacgccgggcaccaacaccagcaaccaggucgccgugcuguaccaggacgugaacugcaccgagguccccguggccauccacgccgaccagcugacgcccaccuggcggguguacuccaccggcagcaacgucuuccagacccgcgccgggugccucaucggcgcggagcacgugaacaacuccuacgagugcgacauccccaucggggccggcaucugcgccagcuaccagacgcagaccaacuccccgcggcgcgcccggagcguggcgucccagagcaucaucgccuacaccaugucccugggcgccgagaacagcgucgccuacuccaacaacagcaucgccauccccaccaacuucacgaucuccgugaccaccgagauccugcccgugagcaugaccaagacgagcgucgacugcaccauguacaucugcggggacuccaccgagugcagcaaccuccugcugcaguacggcuccuucugcacccagcucaaccgcgcgcugacggggaucgccguggagcaggacaagaacacccaggagguguucgcccaggucaagcagaucuacaagacgcccccgaucaaggacuucggcggguucaacuucagccagauccugcccgaccccuccaagcccagcaagcgguccuucaucgaggaccuccuguucaacaaggugacccuggccgacgccggcuucaucaagcaguacggcgacugccucggggacaucgcggcccgcgaccugaucugcgcccagaaguucaacggccugaccgugcucccgccccugcugaccgacgagaugaucgcccaguacaccagcgcccuccuggcggggaccaucacguccggcuggaccuucugcgccggcgccgcccugcagauccccuucgcgaugcagauggccuaccgguucaacggcaucggggucacccagaacgugcucuacgagaaccagaagcugaucgccaaccaguucaacagcgccaucggcaagauccaggacucccugagcuccaccgccagcgcgcucgggaagcugcaggacguggucaaccagaacgcccaggcccugaacacgcucgugaagcagcuguccagcaacuucggcgccaucuccagcgugcugaacgacauccucucccgccuggacaaggucgaggccgaggugcagaucgaccggcugaucaccgggcgccuccagagccugcagaccuacgugacccagcagcugauccgggcggccgagauccgcgccagcgccaaccucgccgcgaccaagauguccgagugcgucugcggccagagcaagcggguggacuucugcggcaagggguaccaccugauguccuucccccagagcgccccgcacggcguggucuuccuccacgugacguacguccccgcccaggagaagaacuucaccaccgcccccgcgaucugccacgacgggaaggcccacuucccccgcgagggcguguucguguccaacgggacccacugguucgucacgcagcggaacuucuacgagccgcagaucaucaccaccgacaacaccuucgugagcggcaacugcgacguggucaucggcaucgugaacaacacgguguacgacccccugcagcccgagcuggacuccggcgggggcgggagcgacaucaucaagcuccugaacgagcaggucaacaaggagaugcaguccagcaaccuguacauguccaugagcuccuggugcuacacccacagccucgacggcgccgggcuguuccuguucgaccacgccgcggaggaguacgagcacgccaagaagcucaucaucuuccugaacgagaacaacgugcccgugcagcugaccuccaucagcgccccggagcacaaguucgagggccucacgcagaucuuccagaaggccuacgagcacgagcagcacaucuccgagagcaucaacaacaucguggaccacgccaucaaguccaaggaccacgcgaccuucaacuuccugcagugguacgucgccgagcagcacgaggaggaggugcuguucaaggacauccucgacaagaucgagcugaucgggaacgagaaccacggccuguaccucgccgaccaguacgugaaggggaucgccaagagccgcaaguccugaggacuaguuauaagacugacuagcccgaugggccucccaacgggcccuccuccccuccuugcaccgagauuaauaaaaaaaaaaaaaaaaaaaaaaaaaaaaaaaaaaaaaaaaaaaaaaaaaaaaaaaaaaaaaaaaugcaucccccccccccccccccccccccccccccccaaaggcucuuuucagagccaccagaauu

SEQ ID NO: 12909 - RNA, 4165 nt, Artificial Sequence
  SARS-CoV-2/Wuhan/WIV05/2019__EPI_ISL_402128 spike protein mRNA gc (1-1147)(I909C_Y1047C) Ferritin construct
aggagaaagcuuaccauguucguguuccugguccuccugccccuggugagcucccagugcgugaaccucaccacccgcacgcagcugccgcccgccuacaccaacagcuucacccggggcgucuacuaccccgacaagguguuccgcuccagcgugcugcacuccacccaggaccucuuccugcccuucuucagcaacgucacgugguuccacgccauccacguguccgggaccaacggcaccaagcgguucgacaacccggugcugcccuucaacgacggggucuacuucgcgagcaccgagaaguccaacaucauccgcggcuggaucuucgggacgacccucgacagcaagacccagucccugcugaucgugaacaacgccaccaacguggucaucaaggugugcgaguuccaguucugcaacgaccccuuccucggcguguacuaccacaagaacaacaagagcuggauggaguccgaguuccgggucuacagcuccgccaacaacugcacguucgaguacgugagccagcccuuccugauggaccuggagggcaagcaggggaacuucaagaaccuccgcgaguucguguucaagaacaucgacggcuacuucaagaucuacuccaagcacaccccgaucaaccugguccgggaccugccccagggguucagcgcccucgagccccugguggaccugcccaucggcaucaacaucacccgcuuccagacccuccuggcccugcaccgguccuaccucacgccgggggacagcagcuccggcuggaccgcgggcgccgccgccuacuacgugggguaccugcagccccgcaccuuccugcucaaguacaacgagaacggcaccaucacggacgcggucgacugcgcccuggacccccugagcgagaccaagugcacccucaaguccuucaccguggagaaggggaucuaccagacgagcaacuuccgggugcagcccaccgaguccaucguccgcuucccgaacaucaccaaccugugccccuucggcgagguguucaacgccacccgguucgccagcgucuacgccuggaaccgcaagcggaucuccaacugcguggcggacuacagcgugcuguacaacuccgccagcuucuccacguucaagugcuacggcgucagccccaccaagcucaacgaccugugcuucaccaacguguacgccgacuccuucgugauccgcggggacgagguccggcagaucgcccccggccagaccgggaagaucgccgacuacaacuacaagcugccggacgacuucacgggcugcgugaucgcguggaacagcaacaaccucgacuccaaggucgggggcaacuacaacuaccuguaccgccuguuccgcaagagcaaccucaagcccuucgagcgggacaucuccaccgagaucuaccaggccggcagcacccccugcaacgggguggagggcuucaacugcuacuucccccugcaguccuacggguuccagccgaccaacggcgugggguaccagcccuaccggguggucgugcugagcuucgagcuccugcacgcccccgccacggugugcggccccaagaaguccaccaaccuggucaagaacaagugcgugaacuucaacuucaacggccucaccgggaccggcgugcugaccgagagcaacaagaaguuccugccguuccagcaguucgggcgcgacaucgccgacacgaccgacgcgguccgcgacccccagacccuggagauccucgacaucacccccugcagcuucggcgggguguccgugaucacgccgggcaccaacaccagcaaccaggucgccgugcuguaccaggacgugaacugcaccgagguccccguggccauccacgccgaccagcugacgcccaccuggcggguguacuccaccggcagcaacgucuuccagacccgcgccgggugccucaucggcgcggagcacgugaacaacuccuacgagugcgacauccccaucggggccggcaucugcgccagcuaccagacgcagaccaacuccccgcggcgcgcccggagcguggcgucccagagcaucaucgccuacaccaugucccugggcgccgagaacagcgucgccuacuccaacaacagcaucgccauccccaccaacuucacgaucuccgugaccaccgagauccugcccgugagcaugaccaagacgagcgucgacugcaccauguacaucugcggggacuccaccgagugcagcaaccuccugcugcaguacggcuccuucugcacccagcucaaccgcgcgcugacggggaucgccguggagcaggacaagaacacccaggagguguucgcccaggucaagcagaucuacaagacgcccccgaucaaggacuucggcggguucaacuucagccagauccugcccgaccccuccaagcccagcaagcgguccuucaucgaggaccuccuguucaacaaggugacccuggccgacgccggcuucaucaagcaguacggcgacugccucggggacaucgcggcccgcgaccugaucugcgcccagaaguucaacggccugaccgugcucccgccccugcugaccgacgagaugaucgcccaguacaccagcgcccuccuggcggggaccaucacguccggcuggaccuucggggccggcgccgcccugcagauccccuucgcgaugcagauggccuaccgguucaacggcugcggggucacccagaacgugcucuacgagaaccagaagcugaucgccaaccaguucaacagcgccaucggcaagauccaggacucccugagcuccaccgccagcgcgcucgggaagcugcaggacguggucaaccagaacgcccaggcccugaacacgcucgugaagcagcuguccagcaacuucggcgccaucuccagcgugcugaacgacauccucucccgccuggacaaggucgaggccgaggugcagaucgaccggcugaucaccgggcgccuccagagccugcagaccuacgugacccagcagcugauccgggcggccgagauccgcgccagcgccaaccucgccgcgaccaagauguccgagugcguccugggccagagcaagcggguggacuucugcggcaaggggugccaccugauguccuucccccagagcgccccgcacggcguggucuuccuccacgugacguacguccccgcccaggagaagaacuucaccaccgcccccgcgaucugccacgacgggaaggcccacuucccccgcgagggcguguucguguccaacgggacccacugguucgucacgcagcggaacuucuacgagccgcagaucaucaccaccgacaacaccuucgugagcggcaacugcgacguggucaucggcaucgugaacaacacgguguacgacccccugcagcccgagcuggacuccggcgggggcgggagcgacaucaucaagcuccugaacgagcaggucaacaaggagaugcaguccagcaaccuguacauguccaugagcuccuggugcuacacccacagccucgacggcgccgggcuguuccuguucgaccacgccgcggaggaguacgagcacgccaagaagcucaucaucuuccugaacgagaacaacgugcccgugcagcugaccuccaucagcgccccggagcacaaguucgagggccucacgcagaucuuccagaaggccuacgagcacgagcagcacaucuccgagagcaucaacaacaucguggaccacgccaucaaguccaaggaccacgcgaccuucaacuuccugcagugguacgucgccgagcagcacgaggaggaggugcuguucaaggacauccucgacaagaucgagcugaucgggaacgagaaccacggccuguaccucgccgaccaguacgugaaggggaucgccaagagccgcaaguccugaggacuaguuauaagacugacuagcccgaugggccucccaacgggcccuccuccccuccuugcaccgagauuaauaaaaaaaaaaaaaaaaaaaaaaaaaaaaaaaaaaaaaaaaaaaaaaaaaaaaaaaaaaaaaaaaugcaucccccccccccccccccccccccccccccccaaaggcucuuuucagagccaccagaauu

SEQ ID NO: 12910 - RNA, 4165 nt, Artificial Sequence
  SARS-CoV-2/Wuhan/WIV05/2019__EPI_ISL_402128 spike protein mRNA gc (1-1147)(Q965C_S1003C) Ferritin construct
aggagaaagcuuaccauguucguguuccugguccuccugccccuggugagcucccagugcgugaaccucaccacccgcacgcagcugccgcccgccuacaccaacagcuucacccggggcgucuacuaccccgacaagguguuccgcuccagcgugcugcacuccacccaggaccucuuccugcccuucuucagcaacgucacgugguuccacgccauccacguguccgggaccaacggcaccaagcgguucgacaacccggugcugcccuucaacgacggggucuacuucgcgagcaccgagaaguccaacaucauccgcggcuggaucuucgggacgacccucgacagcaagacccagucccugcugaucgugaacaacgccaccaacguggucaucaaggugugcgaguuccaguucugcaacgaccccuuccucggcguguacuaccacaagaacaacaagagcuggauggaguccgaguuccgggucuacagcuccgccaacaacugcacguucgaguacgugagccagcccuuccugauggaccuggagggcaagcaggggaacuucaagaaccuccgcgaguucguguucaagaacaucgacggcuacuucaagaucuacuccaagcacaccccgaucaaccugguccgggaccugccccagggguucagcgcccucgagccccugguggaccugcccaucggcaucaacaucacccgcuuccagacccuccuggcccugcaccgguccuaccucacgccgggggacagcagcuccggcuggaccgcgggcgccgccgccuacuacgugggguaccugcagccccgcaccuuccugcucaaguacaacgagaacggcaccaucacggacgcggucgacugcgcccuggacccccugagcgagaccaagugcacccucaaguccuucaccguggagaaggggaucuaccagacgagcaacuuccgggugcagcccaccgaguccaucguccgcuucccgaacaucaccaaccugugccccuucggcgagguguucaacgccacccgguucgccagcgucuacgccuggaaccgcaagcggaucuccaacugcguggcggacuacagcgugcuguacaacuccgccagcuucuccacguucaagugcuacggcgucagccccaccaagcucaacgaccugugcuucaccaacguguacgccgacuccuucgugauccgcggggacgagguccggcagaucgcccccggccagaccgggaagaucgccgacuacaacuacaagcugccggacgacuucacgggcugcgugaucgcguggaacagcaacaaccucgacuccaaggucgggggcaacuacaacuaccuguaccgccuguuccgcaagagcaaccucaagcccuucgagcgggacaucuccaccgagaucuaccaggccggcagcacccccugcaacgggguggagggcuucaacugcuacuucccccugcaguccuacggguuccagccgaccaacggcgugggguaccagcccuaccggguggucgugcugagcuucgagcuccugcacgcccccgccacggugugcggccccaagaaguccaccaaccuggucaagaacaagugcgugaacuucaacuucaacggccucaccgggaccggcgugcugaccgagagcaacaagaaguuccugccguuccagcaguucgggcgcgacaucgccgacacgaccgacgcgguccgcgacccccagacccuggagauccucgacaucacccccugcagcuucggcgggguguccgugaucacgccgggcaccaacaccagcaaccaggucgccgugcuguaccaggacgugaacugcaccgagguccccguggccauccacgccgaccagcugacgcccaccuggcggguguacuccaccggcagcaacgucuuccagacccgcgccgggugccucaucggcgcggagcacgugaacaacuccuacgagugcgacauccccaucggggccggcaucugcgccagcuaccagacgcagaccaacuccccgcggcgcgcccggagcguggcgucccagagcaucaucgccuacaccaugucccugggcgccgagaacagcgucgccuacuccaacaacagcaucgccauccccaccaacuucacgaucuccgugaccaccgagauccugcccgugagcaugaccaagacgagcgucgacugcaccauguacaucugcggggacuccaccgagugcagcaaccuccugcugcaguacggcuccuucugcacccagcucaaccgcgcgcugacggggaucgccguggagcaggacaagaacacccaggagguguucgcccaggucaagcagaucuacaagacgcccccgaucaaggacuucggcggguucaacuucagccagauccugcccgaccccuccaagcccagcaagcgguccuucaucgaggaccuccuguucaacaaggugacccuggccgacgccggcuucaucaagcaguacggcgacugccucggggacaucgcggcccgcgaccugaucugcgcccagaaguucaacggccugaccgugcucccgccccugcugaccgacgagaugaucgcccaguacaccagcgcccuccuggcggggaccaucacguccggcuggaccuucggggccggcgccgcccugcagauccccuucgcgaugcagauggccuaccgguucaacggcaucggggucacccagaacgugcucuacgagaaccagaagcugaucgccaaccaguucaacagcgccaucggcaagauccaggacucccugagcuccaccgccagcgcgcucgggaagcugcaggacguggucaaccagaacgcccaggcccugaacacgcucgugaagugccuguccagcaacuucggcgccaucuccagcgugcugaacgacauccucucccgccuggacaaggucgaggccgaggugcagaucgaccggcugaucaccgggcgccuccagugccugcagaccuacgugacccagcagcugauccgggcggccgagauccgcgccagcgccaaccucgccgcgaccaagauguccgagugcguccugggccagagcaagcggguggacuucugcggcaagggguaccaccugauguccuucccccagagcgccccgcacggcguggucuuccuccacgugacguacguccccgcccaggagaagaacuucaccaccgcccccgcgaucugccacgacgggaaggcccacuucccccgcgagggcguguucguguccaacgggacccacugguucgucacgcagcggaacuucuacgagccgcagaucaucaccaccgacaacaccuucgugagcggcaacugcgacguggucaucggcaucgugaacaacacgguguacgacccccugcagcccgagcuggacuccggcgggggcgggagcgacaucaucaagcuccugaacgagcaggucaacaaggagaugcaguccagcaaccuguacauguccaugagcuccuggugcuacacccacagccucgacggcgccgggcuguuccuguucgaccacgccgcggaggaguacgagcacgccaagaagcucaucaucuuccugaacgagaacaacgugcccgugcagcugaccuccaucagcgccccggagcacaaguucgagggccucacgcagaucuuccagaaggccuacgagcacgagcagcacaucuccgagagcaucaacaacaucguggaccacgccaucaaguccaaggaccacgcgaccuucaacuuccugcagugguacgucgccgagcagcacgaggaggaggugcuguucaaggacauccucgacaagaucgagcugaucgggaacgagaaccacggccuguaccucgccgaccaguacgugaaggggaucgccaagagccgcaaguccugaggacuaguuauaagacugacuagcccgaugggccucccaacgggcccuccuccccuccuugcaccgagauuaauaaaaaaaaaaaaaaaaaaaaaaaaaaaaaaaaaaaaaaaaaaaaaaaaaaaaaaaaaaaaaaaaugcaucccccccccccccccccccccccccccccccaaaggcucuuuucagagccaccagaauu

SEQ ID NO: 12911 - RNA, 4165 nt, Artificial Sequence
  SARS-CoV-2/Wuhan/WIV05/2019__EPI_ISL_402128 spike protein mRNA gc (1-1147)(F970C_G999C) Ferritin construct
aggagaaagcuuaccauguucguguuccugguccuccugccccuggugagcucccagugcgugaaccucaccacccgcacgcagcugccgcccgccuacaccaacagcuucacccggggcgucuacuaccccgacaagguguuccgcuccagcgugcugcacuccacccaggaccucuuccugcccuucuucagcaacgucacgugguuccacgccauccacguguccgggaccaacggcaccaagcgguucgacaacccggugcugcccuucaacgacggggucuacuucgcgagcaccgagaaguccaacaucauccgcggcuggaucuucgggacgacccucgacagcaagacccagucccugcugaucgugaacaacgccaccaacguggucaucaaggugugcgaguuccaguucugcaacgaccccuuccucggcguguacuaccacaagaacaacaagagcuggauggaguccgaguuccgggucuacagcuccgccaacaacugcacguucgaguacgugagccagcccuuccugauggaccuggagggcaagcaggggaacuucaagaaccuccgcgaguucguguucaagaacaucgacggcuacuucaagaucuacuccaagcacaccccgaucaaccugguccgggaccugccccagggguucagcgcccucgagccccugguggaccugcccaucggcaucaacaucacccgcuuccagacccuccuggcccugcaccgguccuaccucacgccgggggacagcagcuccggcuggaccgcgggcgccgccgccuacuacgugggguaccugcagccccgcaccuuccugcucaaguacaacgagaacggcaccaucacggacgcggucgacugcgcccuggacccccugagcgagaccaagugcacccucaaguccuucaccguggagaaggggaucuaccagacgagcaacuuccgggugcagcccaccgaguccaucguccgcuucccgaacaucaccaaccugugccccuucggcgagguguucaacgccacccgguucgccagcgucuacgccuggaaccgcaagcggaucuccaacugcguggcggacuacagcgugcuguacaacuccgccagcuucuccacguucaagugcuacggcgucagccccaccaagcucaacgaccugugcuucaccaacguguacgccgacuccuucgugauccgcggggacgagguccggcagaucgcccccggccagaccgggaagaucgccgacuacaacuacaagcugccggacgacuucacgggcugcgugaucgcguggaacagcaacaaccucgacuccaaggucgggggcaacuacaacuaccuguaccgccuguuccgcaagagcaaccucaagcccuucgagcgggacaucuccaccgagaucuaccaggccggcagcacccccugcaacgggguggagggcuucaacugcuacuucccccugcaguccuacggguuccagccgaccaacggcgugggguaccagcccuaccggguggucgugcugagcuucgagcuccugcacgcccccgccacggugugcggccccaagaaguccaccaaccuggucaagaacaagugcgugaacuucaacuucaacggccucaccgggaccggcgugcugaccgagagcaacaagaaguuccugccguuccagcaguucgggcgcgacaucgccgacacgaccgacgcgguccgcgacccccagacccuggagauccucgacaucacccccugcagcuucggcgggguguccgugaucacgccgggcaccaacaccagcaaccaggucgccgugcuguaccaggacgugaacugcaccgagguccccguggccauccacgccgaccagcugacgcccaccuggcggguguacuccaccggcagcaacgucuuccagacccgcgccgggugccucaucggcgcggagcacgugaacaacuccuacgagugcgacauccccaucggggccggcaucugcgccagcuaccagacgcagaccaacuccccgcggcgcgcccggagcguggcgucccagagcaucaucgccuacaccaugucccugggcgccgagaacagcgucgccuacuccaacaacagcaucgccauccccaccaacuucacgaucuccgugaccaccgagauccugcccgugagcaugaccaagacgagcgucgacugcaccauguacaucugcggggacuccaccgagugcagcaaccuccugcugcaguacggcuccuucugcacccagcucaaccgcgcgcugacggggaucgccguggagcaggacaagaacacccaggagguguucgcccaggucaagcagaucuacaagacgcccccgaucaaggacuucggcggguucaacuucagccagauccugcccgaccccuccaagcccagcaagcgguccuucaucgaggaccuccuguucaacaaggugacccuggccgacgccggcuucaucaagcaguacggcgacugccucggggacaucgcggcccgcgaccugaucugcgcccagaaguucaacggccugaccgugcucccgccccugcugaccgacgagaugaucgcccaguacaccagcgcccuccuggcggggaccaucacguccggcuggaccuucggggccggcgccgcccugcagauccccuucgcgaugcagauggccuaccgguucaacggcaucggggucacccagaacgugcucuacgagaaccagaagcugaucgccaaccaguucaacagcgccaucggcaagauccaggacucccugagcuccaccgccagcgcgcucgggaagcugcaggacguggucaaccagaacgcccaggcccugaacacgcucgugaagcagcuguccagcaacugcggcgccaucuccagcgugcugaacgacauccucucccgccuggacaaggucgaggccgaggugcagaucgaccggcugaucaccugucgccuccagagccugcagaccuacgugacccagcagcugauccgggcggccgagauccgcgccagcgccaaccucgccgcgaccaagauguccgagugcguccugggccagagcaagcggguggacuucugcggcaagggguaccaccugauguccuucccccagagcgccccgcacggcguggucuuccuccacgugacguacguccccgcccaggagaagaacuucaccaccgcccccgcgaucugccacgacgggaaggcccacuucccccgcgagggcguguucguguccaacgggacccacugguucgucacgcagcggaacuucuacgagccgcagaucaucaccaccgacaacaccuucgugagcggcaacugcgacguggucaucggcaucgugaacaacacgguguacgacccccugcagcccgagcuggacuccggcgggggcgggagcgacaucaucaagcuccugaacgagcaggucaacaaggagaugcaguccagcaaccuguacauguccaugagcuccuggugcuacacccacagccucgacggcgccgggcuguuccuguucgaccacgccgcggaggaguacgagcacgccaagaagcucaucaucuuccugaacgagaacaacgugcccgugcagcugaccuccaucagcgccccggagcacaaguucgagggccucacgcagaucuuccagaaggccuacgagcacgagcagcacaucuccgagagcaucaacaacaucguggaccacgccaucaaguccaaggaccacgcgaccuucaacuuccugcagugguacgucgccgagcagcacgaggaggaggugcuguucaaggacauccucgacaagaucgagcugaucgggaacgagaaccacggccuguaccucgccgaccaguacgugaaggggaucgccaagagccgcaaguccugaggacuaguuauaagacugacuagcccgaugggccucccaacgggcccuccuccccuccuugcaccgagauuaauaaaaaaaaaaaaaaaaaaaaaaaaaaaaaaaaaaaaaaaaaaaaaaaaaaaaaaaaaaaaaaaaugcaucccccccccccccccccccccccccccccccaaaggcucuuuucagagccaccagaauu

SEQ ID NO: 12912 - RNA, 4165 nt, Artificial Sequence
  SARS-CoV-2/Wuhan/WIV05/2019__EPI_ISL_402128 spike protein mRNA gc (1-1147)(A972C_R995C) Ferritin construct
aggagaaagcuuaccauguucguguuccugguccuccugccccuggugagcucccagugcgugaaccucaccacccgcacgcagcugccgcccgccuacaccaacagcuucacccggggcgucuacuaccccgacaagguguuccgcuccagcgugcugcacuccacccaggaccucuuccugcccuucuucagcaacgucacgugguuccacgccauccacguguccgggaccaacggcaccaagcgguucgacaacccggugcugcccuucaacgacggggucuacuucgcgagcaccgagaaguccaacaucauccgcggcuggaucuucgggacgacccucgacagcaagacccagucccugcugaucgugaacaacgccaccaacguggucaucaaggugugcgaguuccaguucugcaacgaccccuuccucggcguguacuaccacaagaacaacaagagcuggauggaguccgaguuccgggucuacagcuccgccaacaacugcacguucgaguacgugagccagcccuuccugauggaccuggagggcaagcaggggaacuucaagaaccuccgcgaguucguguucaagaacaucgacggcuacuucaagaucuacuccaagcacaccccgaucaaccugguccgggaccugccccagggguucagcgcccucgagccccugguggaccugcccaucggcaucaacaucacccgcuuccagacccuccuggcccugcaccgguccuaccucacgccgggggacagcagcuccggcuggaccgcgggcgccgccgccuacuacgugggguaccugcagccccgcaccuuccugcucaaguacaacgagaacggcaccaucacggacgcggucgacugcgcccuggacccccugagcgagaccaagugcacccucaaguccuucaccguggagaaggggaucuaccagacgagcaacuuccgggugcagcccaccgaguccaucguccgcuucccgaacaucaccaaccugugccccuucggcgagguguucaacgccacccgguucgccagcgucuacgccuggaaccgcaagcggaucuccaacugcguggcggacuacagcgugcuguacaacuccgccagcuucuccacguucaagugcuacggcgucagccccaccaagcucaacgaccugugcuucaccaacguguacgccgacuccuucgugauccgcggggacgagguccggcagaucgcccccggccagaccgggaagaucgccgacuacaacuacaagcugccggacgacuucacgggcugcgugaucgcguggaacagcaacaaccucgacuccaaggucgggggcaacuacaacuaccuguaccgccuguuccgcaagagcaaccucaagcccuucgagcgggacaucuccaccgagaucuaccaggccggcagcacccccugcaacgggguggagggcuucaacugcuacuucccccugcaguccuacggguuccagccgaccaacggcgugggguaccagcccuaccggguggucgugcugagcuucgagcuccugcacgcccccgccacggugugcggccccaagaaguccaccaaccuggucaagaacaagugcgugaacuucaacuucaacggccucaccgggaccggcgugcugaccgagagcaacaagaaguuccugccguuccagcaguucgggcgcgacaucgccgacacgaccgacgcgguccgcgacccccagacccuggagauccucgacaucacccccugcagcuucggcgggguguccgugaucacgccgggcaccaacaccagcaaccaggucgccgugcuguaccaggacgugaacugcaccgagguccccguggccauccacgccgaccagcugacgcccaccuggcggguguacuccaccggcagcaacgucuuccagacccgcgccgggugccucaucggcgcggagcacgugaacaacuccuacgagugcgacauccccaucggggccggcaucugcgccagcuaccagacgcagaccaacuccccgcggcgcgcccggagcguggcgucccagagcaucaucgccuacaccaugucccugggcgccgagaacagcgucgccuacuccaacaacagcaucgccauccccaccaacuucacgaucuccgugaccaccgagauccugcccgugagcaugaccaagacgagcgucgacugcaccauguacaucugcggggacuccaccgagugcagcaaccuccugcugcaguacggcuccuucugcacccagcucaaccgcgcgcugacggggaucgccguggagcaggacaagaacacccaggagguguucgcccaggucaagcagaucuacaagacgcccccgaucaaggacuucggcggguucaacuucagccagauccugcccgaccccuccaagcccagcaagcgguccuucaucgaggaccuccuguucaacaaggugacccuggccgacgccggcuucaucaagcaguacggcgacugccucggggacaucgcggcccgcgaccugaucugcgcccagaaguucaacggccugaccgugcucccgccccugcugaccgacgagaugaucgcccaguacaccagcgcccuccuggcggggaccaucacguccggcuggaccuucggggccggcgccgcccugcagauccccuucgcgaugcagauggccuaccgguucaacggcaucggggucacccagaacgugcucuacgagaaccagaagcugaucgccaaccaguucaacagcgccaucggcaagauccaggacucccugagcuccaccgccagcgcgcucgggaagcugcaggacguggucaaccagaacgcccaggcccugaacacgcucgugaagcagcuguccagcaacuucggcugcaucuccagcgugcugaacgacauccucucccgccuggacaaggucgaggccgaggugcagaucgacugccugaucaccgggcgccuccagagccugcagaccuacgugacccagcagcugauccgggcggccgagauccgcgccagcgccaaccucgccgcgaccaagauguccgagugcguccugggccagagcaagcggguggacuucugcggcaagggguaccaccugauguccuucccccagagcgccccgcacggcguggucuuccuccacgugacguacguccccgcccaggagaagaacuucaccaccgcccccgcgaucugccacgacgggaaggcccacuucccccgcgagggcguguucguguccaacgggacccacugguucgucacgcagcggaacuucuacgagccgcagaucaucaccaccgacaacaccuucgugagcggcaacugcgacguggucaucggcaucgugaacaacacgguguacgacccccugcagcccgagcuggacuccggcgggggcgggagcgacaucaucaagcuccugaacgagcaggucaacaaggagaugcaguccagcaaccuguacauguccaugagcuccuggugcuacacccacagccucgacggcgccgggcuguuccuguucgaccacgccgcggaggaguacgagcacgccaagaagcucaucaucuuccugaacgagaacaacgugcccgugcagcugaccuccaucagcgccccggagcacaaguucgagggccucacgcagaucuuccagaaggccuacgagcacgagcagcacaucuccgagagcaucaacaacaucguggaccacgccaucaaguccaaggaccacgcgaccuucaacuuccugcagugguacgucgccgagcagcacgaggaggaggugcuguucaaggacauccucgacaagaucgagcugaucgggaacgagaaccacggccuguaccucgccgaccaguacgugaaggggaucgccaagagccgcaaguccugaggacuaguuauaagacugacuagcccgaugggccucccaacgggcccuccuccccuccuugcaccgagauuaauaaaaaaaaaaaaaaaaaaaaaaaaaaaaaaaaaaaaaaaaaaaaaaaaaaaaaaaaaaaaaaaaugcaucccccccccccccccccccccccccccccccaaaggcucuuuucagagccaccagaauu

SEQ ID NO: 12913 - RNA, 4165 nt, Artificial Sequence
  SARS-CoV-2/Wuhan/WIV05/2019__EPI_ISL_402128 spike protein mRNA gc (1-1147)(A890C_V1040C) Ferritin construct
aggagaaagcuuaccauguucguguuccugguccuccugccccuggugagcucccagugcgugaaccucaccacccgcacgcagcugccgcccgccuacaccaacagcuucacccggggcgucuacuaccccgacaagguguuccgcuccagcgugcugcacuccacccaggaccucuuccugcccuucuucagcaacgucacgugguuccacgccauccacguguccgggaccaacggcaccaagcgguucgacaacccggugcugcccuucaacgacggggucuacuucgcgagcaccgagaaguccaacaucauccgcggcuggaucuucgggacgacccucgacagcaagacccagucccugcugaucgugaacaacgccaccaacguggucaucaaggugugcgaguuccaguucugcaacgaccccuuccucggcguguacuaccacaagaacaacaagagcuggauggaguccgaguuccgggucuacagcuccgccaacaacugcacguucgaguacgugagccagcccuuccugauggaccuggagggcaagcaggggaacuucaagaaccuccgcgaguucguguucaagaacaucgacggcuacuucaagaucuacuccaagcacaccccgaucaaccugguccgggaccugccccagggguucagcgcccucgagccccugguggaccugcccaucggcaucaacaucacccgcuuccagacccuccuggcccugcaccgguccuaccucacgccgggggacagcagcuccggcuggaccgcgggcgccgccgccuacuacgugggguaccugcagccccgcaccuuccugcucaaguacaacgagaacggcaccaucacggacgcggucgacugcgcccuggacccccugagcgagaccaagugcacccucaaguccuucaccguggagaaggggaucuaccagacgagcaacuuccgggugcagcccaccgaguccaucguccgcuucccgaacaucaccaaccugugccccuucggcgagguguucaacgccacccgguucgccagcgucuacgccuggaaccgcaagcggaucuccaacugcguggcggacuacagcgugcuguacaacuccgccagcuucuccacguucaagugcuacggcgucagccccaccaagcucaacgaccugugcuucaccaacguguacgccgacuccuucgugauccgcggggacgagguccggcagaucgcccccggccagaccgggaagaucgccgacuacaacuacaagcugccggacgacuucacgggcugcgugaucgcguggaacagcaacaaccucgacuccaaggucgggggcaacuacaacuaccuguaccgccuguuccgcaagagcaaccucaagcccuucgagcgggacaucuccaccgagaucuaccaggccggcagcacccccugcaacgggguggagggcuucaacugcuacuucccccugcaguccuacggguuccagccgaccaacggcgugggguaccagcccuaccggguggucgugcugagcuucgagcuccugcacgcccccgccacggugugcggccccaagaaguccaccaaccuggucaagaacaagugcgugaacuucaacuucaacggccucaccgggaccggcgugcugaccgagagcaacaagaaguuccugccguuccagcaguucgggcgcgacaucgccgacacgaccgacgcgguccgcgacccccagacccuggagauccucgacaucacccccugcagcuucggcgggguguccgugaucacgccgggcaccaacaccagcaaccaggucgccgugcuguaccaggacgugaacugcaccgagguccccguggccauccacgccgaccagcugacgcccaccuggcggguguacuccaccggcagcaacgucuuccagacccgcgccgggugccucaucggcgcggagcacgugaacaacuccuacgagugcgacauccccaucggggccggcaucugcgccagcuaccagacgcagaccaacuccccgcggcgcgcccggagcguggcgucccagagcaucaucgccuacaccaugucccugggcgccgagaacagcgucgccuacuccaacaacagcaucgccauccccaccaacuucacgaucuccgugaccaccgagauccugcccgugagcaugaccaagacgagcgucgacugcaccauguacaucugcggggacuccaccgagugcagcaaccuccugcugcaguacggcuccuucugcacccagcucaaccgcgcgcugacggggaucgccguggagcaggacaagaacacccaggagguguucgcccaggucaagcagaucuacaagacgcccccgaucaaggacuucggcggguucaacuucagccagauccugcccgaccccuccaagcccagcaagcgguccuucaucgaggaccuccuguucaacaaggugacccuggccgacgccggcuucaucaagcaguacggcgacugccucggggacaucgcggcccgcgaccugaucugcgcccagaaguucaacggccugaccgugcucccgccccugcugaccgacgagaugaucgcccaguacaccagcgcccuccuggcggggaccaucacguccggcuggaccuucgggugcggcgccgcccugcagauccccuucgcgaugcagauggccuaccgguucaacggcaucggggucacccagaacgugcucuacgagaaccagaagcugaucgccaaccaguucaacagcgccaucggcaagauccaggacucccugagcuccaccgccagcgcgcucgggaagcugcaggacguggucaaccagaacgcccaggcccugaacacgcucgugaagcagcuguccagcaacuucggcgccaucuccagcgugcugaacgacauccucucccgccuggacaaggucgaggccgaggugcagaucgaccggcugaucaccgggcgccuccagagccugcagaccuacgugacccagcagcugauccgggcggccgagauccgcgccagcgccaaccucgccgcgaccaagauguccgagugcguccugggccagagcaagcggugcgacuucugcggcaagggguaccaccugauguccuucccccagagcgccccgcacggcguggucuuccuccacgugacguacguccccgcccaggagaagaacuucaccaccgcccccgcgaucugccacgacgggaaggcccacuucccccgcgagggcguguucguguccaacgggacccacugguucgucacgcagcggaacuucuacgagccgcagaucaucaccaccgacaacaccuucgugagcggcaacugcgacguggucaucggcaucgugaacaacacgguguacgacccccugcagcccgagcuggacuccggcgggggcgggagcgacaucaucaagcuccugaacgagcaggucaacaaggagaugcaguccagcaaccuguacauguccaugagcuccuggugcuacacccacagccucgacggcgccgggcuguuccuguucgaccacgccgcggaggaguacgagcacgccaagaagcucaucaucuuccugaacgagaacaacgugcccgugcagcugaccuccaucagcgccccggagcacaaguucgagggccucacgcagaucuuccagaaggccuacgagcacgagcagcacaucuccgagagcaucaacaacaucguggaccacgccaucaaguccaaggaccacgcgaccuucaacuuccugcagugguacgucgccgagcagcacgaggaggaggugcuguucaaggacauccucgacaagaucgagcugaucgggaacgagaaccacggccuguaccucgccgaccaguacgugaaggggaucgccaagagccgcaaguccugaggacuaguuauaagacugacuagcccgaugggccucccaacgggcccuccuccccuccuugcaccgagauuaauaaaaaaaaaaaaaaaaaaaaaaaaaaaaaaaaaaaaaaaaaaaaaaaaaaaaaaaaaaaaaaaaugcaucccccccccccccccccccccccccccccccaaaggcucuuuucagagccaccagaauu

SEQ ID NO: 12914 - RNA, 4165 nt, Artificial Sequence
  SARS-CoV-2/Wuhan/WIV05/2019__EPI_ISL_402128 spike protein mRNA gc (1-1147)(T874C_S1055C) Ferritin construct
aggagaaagcuuaccauguucguguuccugguccuccugccccuggugagcucccagugcgugaaccucaccacccgcacgcagcugccgcccgccuacaccaacagcuucacccggggcgucuacuaccccgacaagguguuccgcuccagcgugcugcacuccacccaggaccucuuccugcccuucuucagcaacgucacgugguuccacgccauccacguguccgggaccaacggcaccaagcgguucgacaacccggugcugcccuucaacgacggggucuacuucgcgagcaccgagaaguccaacaucauccgcggcuggaucuucgggacgacccucgacagcaagacccagucccugcugaucgugaacaacgccaccaacguggucaucaaggugugcgaguuccaguucugcaacgaccccuuccucggcguguacuaccacaagaacaacaagagcuggauggaguccgaguuccgggucuacagcuccgccaacaacugcacguucgaguacgugagccagcccuuccugauggaccuggagggcaagcaggggaacuucaagaaccuccgcgaguucguguucaagaacaucgacggcuacuucaagaucuacuccaagcacaccccgaucaaccugguccgggaccugccccagggguucagcgcccucgagccccugguggaccugcccaucggcaucaacaucacccgcuuccagacccuccuggcccugcaccgguccuaccucacgccgggggacagcagcuccggcuggaccgcgggcgccgccgccuacuacgugggguaccugcagccccgcaccuuccugcucaaguacaacgagaacggcaccaucacggacgcggucgacugcgcccuggacccccugagcgagaccaagugcacccucaaguccuucaccguggagaaggggaucuaccagacgagcaacuuccgggugcagcccaccgaguccaucguccgcuucccgaacaucaccaaccugugccccuucggcgagguguucaacgccacccgguucgccagcgucuacgccuggaaccgcaagcggaucuccaacugcguggcggacuacagcgugcuguacaacuccgccagcuucuccacguucaagugcuacggcgucagccccaccaagcucaacgaccugugcuucaccaacguguacgccgacuccuucgugauccgcggggacgagguccggcagaucgcccccggccagaccgggaagaucgccgacuacaacuacaagcugccggacgacuucacgggcugcgugaucgcguggaacagcaacaaccucgacuccaaggucgggggcaacuacaacuaccuguaccgccuguuccgcaagagcaaccucaagcccuucgagcgggacaucuccaccgagaucuaccaggccggcagcacccccugcaacgggguggagggcuucaacugcuacuucccccugcaguccuacggguuccagccgaccaacggcgugggguaccagcccuaccggguggucgugcugagcuucgagcuccugcacgcccccgccacggugugcggccccaagaaguccaccaaccuggucaagaacaagugcgugaacuucaacuucaacggccucaccgggaccggcgugcugaccgagagcaacaagaaguuccugccguuccagcaguucgggcgcgacaucgccgacacgaccgacgcgguccgcgacccccagacccuggagauccucgacaucacccccugcagcuucggcgggguguccgugaucacgccgggcaccaacaccagcaaccaggucgccgugcuguaccaggacgugaacugcaccgagguccccguggccauccacgccgaccagcugacgcccaccuggcggguguacuccaccggcagcaacgucuuccagacccgcgccgggugccucaucggcgcggagcacgugaacaacuccuacgagugcgacauccccaucggggccggcaucugcgccagcuaccagacgcagaccaacuccccgcggcgcgcccggagcguggcgucccagagcaucaucgccuacaccaugucccugggcgccgagaacagcgucgccuacuccaacaacagcaucgccauccccaccaacuucacgaucuccgugaccaccgagauccugcccgugagcaugaccaagacgagcgucgacugcaccauguacaucugcggggacuccaccgagugcagcaaccuccugcugcaguacggcuccuucugcacccagcucaaccgcgcgcugacggggaucgccguggagcaggacaagaacacccaggagguguucgcccaggucaagcagaucuacaagacgcccccgaucaaggacuucggcggguucaacuucagccagauccugcccgaccccuccaagcccagcaagcgguccuucaucgaggaccuccuguucaacaaggugacccuggccgacgccggcuucaucaagcaguacggcgacugccucggggacaucgcggcccgcgaccugaucugcgcccagaaguucaacggccugaccgugcucccgccccugcugaccgacgagaugaucgcccaguacugcagcgcccuccuggcggggaccaucacguccggcuggaccuucggggccggcgccgcccugcagauccccuucgcgaugcagauggccuaccgguucaacggcaucggggucacccagaacgugcucuacgagaaccagaagcugaucgccaaccaguucaacagcgccaucggcaagauccaggacucccugagcuccaccgccagcgcgcucgggaagcugcaggacguggucaaccagaacgcccaggcccugaacacgcucgugaagcagcuguccagcaacuucggcgccaucuccagcgugcugaacgacauccucucccgccuggacaaggucgaggccgaggugcagaucgaccggcugaucaccgggcgccuccagagccugcagaccuacgugacccagcagcugauccgggcggccgagauccgcgccagcgccaaccucgccgcgaccaagauguccgagugcguccugggccagagcaagcggguggacuucugcggcaagggguaccaccugauguccuucccccagugcgccccgcacggcguggucuuccuccacgugacguacguccccgcccaggagaagaacuucaccaccgcccccgcgaucugccacgacgggaaggcccacuucccccgcgagggcguguucguguccaacgggacccacugguucgucacgcagcggaacuucuacgagccgcagaucaucaccaccgacaacaccuucgugagcggcaacugcgacguggucaucggcaucgugaacaacacgguguacgacccccugcagcccgagcuggacuccggcgggggcgggagcgacaucaucaagcuccugaacgagcaggucaacaaggagaugcaguccagcaaccuguacauguccaugagcuccuggugcuacacccacagccucgacggcgccgggcuguuccuguucgaccacgccgcggaggaguacgagcacgccaagaagcucaucaucuuccugaacgagaacaacgugcccgugcagcugaccuccaucagcgccccggagcacaaguucgagggccucacgcagaucuuccagaaggccuacgagcacgagcagcacaucuccgagagcaucaacaacaucguggaccacgccaucaaguccaaggaccacgcgaccuucaacuuccugcagugguacgucgccgagcagcacgaggaggaggugcuguucaaggacauccucgacaagaucgagcugaucgggaacgagaaccacggccuguaccucgccgaccaguacgugaaggggaucgccaagagccgcaaguccugaggacuaguuauaagacugacuagcccgaugggccucccaacgggcccuccuccccuccuugcaccgagauuaauaaaaaaaaaaaaaaaaaaaaaaaaaaaaaaaaaaaaaaaaaaaaaaaaaaaaaaaaaaaaaaaaugcaucccccccccccccccccccccccccccccccaaaggcucuuuucagagccaccagaauu

SEQ ID NO: 12915 - RNA, 3751 nt, Artificial Sequence
  SARS-CoV-2/Wuhan/WIV05/2019__EPI_ISL_402128 spike protein mRNA gc (1-1147) Foldon construct
aggagaaagcuuaccauguucguguuccugguccuccugccccuggugagcucccagugcgugaaccucaccacccgcacgcagcugccgcccgccuacaccaacagcuucacccggggcgucuacuaccccgacaagguguuccgcuccagcgugcugcacuccacccaggaccucuuccugcccuucuucagcaacgucacgugguuccacgccauccacguguccgggaccaacggcaccaagcgguucgacaacccggugcugcccuucaacgacggggucuacuucgcgagcaccgagaaguccaacaucauccgcggcuggaucuucgggacgacccucgacagcaagacccagucccugcugaucgugaacaacgccaccaacguggucaucaaggugugcgaguuccaguucugcaacgaccccuuccucggcguguacuaccacaagaacaacaagagcuggauggaguccgaguuccgggucuacagcuccgccaacaacugcacguucgaguacgugagccagcccuuccugauggaccuggagggcaagcaggggaacuucaagaaccuccgcgaguucguguucaagaacaucgacggcuacuucaagaucuacuccaagcacaccccgaucaaccugguccgggaccugccccagggguucagcgcccucgagccccugguggaccugcccaucggcaucaacaucacccgcuuccagacccuccuggcccugcaccgguccuaccucacgccgggggacagcagcuccggcuggaccgcgggcgccgccgccuacuacgugggguaccugcagccccgcaccuuccugcucaaguacaacgagaacggcaccaucacggacgcggucgacugcgcccuggacccccugagcgagaccaagugcacccucaaguccuucaccguggagaaggggaucuaccagacgagcaacuuccgggugcagcccaccgaguccaucguccgcuucccgaacaucaccaaccugugccccuucggcgagguguucaacgccacccgguucgccagcgucuacgccuggaaccgcaagcggaucuccaacugcguggcggacuacagcgugcuguacaacuccgccagcuucuccacguucaagugcuacggcgucagccccaccaagcucaacgaccugugcuucaccaacguguacgccgacuccuucgugauccgcggggacgagguccggcagaucgcccccggccagaccgggaagaucgccgacuacaacuacaagcugccggacgacuucacgggcugcgugaucgcguggaacagcaacaaccucgacuccaaggucgggggcaacuacaacuaccuguaccgccuguuccgcaagagcaaccucaagcccuucgagcgggacaucuccaccgagaucuaccaggccggcagcacccccugcaacgggguggagggcuucaacugcuacuucccccugcaguccuacggguuccagccgaccaacggcgugggguaccagcccuaccggguggucgugcugagcuucgagcuccugcacgcccccgccacggugugcggccccaagaaguccaccaaccuggucaagaacaagugcgugaacuucaacuucaacggccucaccgggaccggcgugcugaccgagagcaacaagaaguuccugccguuccagcaguucgggcgcgacaucgccgacacgaccgacgcgguccgcgacccccagacccuggagauccucgacaucacccccugcagcuucggcgggguguccgugaucacgccgggcaccaacaccagcaaccaggucgccgugcuguaccaggacgugaacugcaccgagguccccguggccauccacgccgaccagcugacgcccaccuggcggguguacuccaccggcagcaacgucuuccagacccgcgccgggugccucaucggcgcggagcacgugaacaacuccuacgagugcgacauccccaucggggccggcaucugcgccagcuaccagacgcagaccaacuccccgcggcgcgcccggagcguggcgucccagagcaucaucgccuacaccaugucccugggcgccgagaacagcgucgccuacuccaacaacagcaucgccauccccaccaacuucacgaucuccgugaccaccgagauccugcccgugagcaugaccaagacgagcgucgacugcaccauguacaucugcggggacuccaccgagugcagcaaccuccugcugcaguacggcuccuucugcacccagcucaaccgcgcgcugacggggaucgccguggagcaggacaagaacacccaggagguguucgcccaggucaagcagaucuacaagacgcccccgaucaaggacuucggcggguucaacuucagccagauccugcccgaccccuccaagcccagcaagcgguccuucaucgaggaccuccuguucaacaaggugacccuggccgacgccggcuucaucaagcaguacggcgacugccucggggacaucgcggcccgcgaccugaucugcgcccagaaguucaacggccugaccgugcucccgccccugcugaccgacgagaugaucgcccaguacaccagcgcccuccuggcggggaccaucacguccggcuggaccuucggggccggcgccgcccugcagauccccuucgcgaugcagauggccuaccgguucaacggcaucggggucacccagaacgugcucuacgagaaccagaagcugaucgccaaccaguucaacagcgccaucggcaagauccaggacucccugagcuccaccgccagcgcgcucgggaagcugcaggacguggucaaccagaacgcccaggcccugaacacgcucgugaagcagcuguccagcaacuucggcgccaucuccagcgugcugaacgacauccucucccgccuggacaaggucgaggccgaggugcagaucgaccggcugaucaccgggcgccuccagagccugcagaccuacgugacccagcagcugauccgggcggccgagauccgcgccagcgccaaccucgccgcgaccaagauguccgagugcguccugggccagagcaagcggguggacuucugcggcaagggguaccaccugauguccuucccccagagcgccccgcacggcguggucuuccuccacgugacguacguccccgcccaggagaagaacuucaccaccgcccccgcgaucugccacgacgggaaggcccacuucccccgcgagggcguguucguguccaacgggacccacugguucgucacgcagcggaacuucuacgagccgcagaucaucaccaccgacaacaccuucgugagcggcaacugcgacguggucaucggcaucgugaacaacacgguguacgacccccugcagcccgagcuggacuccggcgggagcggcuacauccccgaggccccgcgcgacgggcaggccuacgugcggaaggacggcgaguggguccugcucagcaccuuccugugaggacuaguuauaagacugacuagcccgaugggccucccaacgggcccuccuccccuccuugcaccgagauuaauaaaaaaaaaaaaaaaaaaaaaaaaaaaaaaaaaaaaaaaaaaaaaaaaaaaaaaaaaaaaaaaaugcaucccccccccccccccccccccccccccccccaaaggcucuuuucagagccaccagaauu

SEQ ID NO: 12916 - RNA, 3751 nt, Artificial Sequence
  SARS-CoV-2/Wuhan/WIV05/2019__EPI_ISL_402128 spike protein mRNA gc (1-1147)(K986P_V987P) Foldon construct
aggagaaagcuuaccauguucguguuccugguccuccugccccuggugagcucccagugcgugaaccucaccacccgcacgcagcugccgcccgccuacaccaacagcuucacccggggcgucuacuaccccgacaagguguuccgcuccagcgugcugcacuccacccaggaccucuuccugcccuucuucagcaacgucacgugguuccacgccauccacguguccgggaccaacggcaccaagcgguucgacaacccggugcugcccuucaacgacggggucuacuucgcgagcaccgagaaguccaacaucauccgcggcuggaucuucgggacgacccucgacagcaagacccagucccugcugaucgugaacaacgccaccaacguggucaucaaggugugcgaguuccaguucugcaacgaccccuuccucggcguguacuaccacaagaacaacaagagcuggauggaguccgaguuccgggucuacagcuccgccaacaacugcacguucgaguacgugagccagcccuuccugauggaccuggagggcaagcaggggaacuucaagaaccuccgcgaguucguguucaagaacaucgacggcuacuucaagaucuacuccaagcacaccccgaucaaccugguccgggaccugccccagggguucagcgcccucgagccccugguggaccugcccaucggcaucaacaucacccgcuuccagacccuccuggcccugcaccgguccuaccucacgccgggggacagcagcuccggcuggaccgcgggcgccgccgccuacuacgugggguaccugcagccccgcaccuuccugcucaaguacaacgagaacggcaccaucacggacgcggucgacugcgcccuggacccccugagcgagaccaagugcacccucaaguccuucaccguggagaaggggaucuaccagacgagcaacuuccgggugcagcccaccgaguccaucguccgcuucccgaacaucaccaaccugugccccuucggcgagguguucaacgccacccgguucgccagcgucuacgccuggaaccgcaagcggaucuccaacugcguggcggacuacagcgugcuguacaacuccgccagcuucuccacguucaagugcuacggcgucagccccaccaagcucaacgaccugugcuucaccaacguguacgccgacuccuucgugauccgcggggacgagguccggcagaucgcccccggccagaccgggaagaucgccgacuacaacuacaagcugccggacgacuucacgggcugcgugaucgcguggaacagcaacaaccucgacuccaaggucgggggcaacuacaacuaccuguaccgccuguuccgcaagagcaaccucaagcccuucgagcgggacaucuccaccgagaucuaccaggccggcagcacccccugcaacgggguggagggcuucaacugcuacuucccccugcaguccuacggguuccagccgaccaacggcgugggguaccagcccuaccggguggucgugcugagcuucgagcuccugcacgcccccgccacggugugcggccccaagaaguccaccaaccuggucaagaacaagugcgugaacuucaacuucaacggccucaccgggaccggcgugcugaccgagagcaacaagaaguuccugccguuccagcaguucgggcgcgacaucgccgacacgaccgacgcgguccgcgacccccagacccuggagauccucgacaucacccccugcagcuucggcgggguguccgugaucacgccgggcaccaacaccagcaaccaggucgccgugcuguaccaggacgugaacugcaccgagguccccguggccauccacgccgaccagcugacgcccaccuggcggguguacuccaccggcagcaacgucuuccagacccgcgccgggugccucaucggcgcggagcacgugaacaacuccuacgagugcgacauccccaucggggccggcaucugcgccagcuaccagacgcagaccaacuccccgcggcgcgcccggagcguggcgucccagagcaucaucgccuacaccaugucccugggcgccgagaacagcgucgccuacuccaacaacagcaucgccauccccaccaacuucacgaucuccgugaccaccgagauccugcccgugagcaugaccaagacgagcgucgacugcaccauguacaucugcggggacuccaccgagugcagcaaccuccugcugcaguacggcuccuucugcacccagcucaaccgcgcgcugacggggaucgccguggagcaggacaagaacacccaggagguguucgcccaggucaagcagaucuacaagacgcccccgaucaaggacuucggcggguucaacuucagccagauccugcccgaccccuccaagcccagcaagcgguccuucaucgaggaccuccuguucaacaaggugacccuggccgacgccggcuucaucaagcaguacggcgacugccucggggacaucgcggcccgcgaccugaucugcgcccagaaguucaacggccugaccgugcucccgccccugcugaccgacgagaugaucgcccaguacaccagcgcccuccuggcggggaccaucacguccggcuggaccuucggggccggcgccgcccugcagauccccuucgcgaugcagauggccuaccgguucaacggcaucggggucacccagaacgugcucuacgagaaccagaagcugaucgccaaccaguucaacagcgccaucggcaagauccaggacucccugagcuccaccgccagcgcgcucgggaagcugcaggacguggucaaccagaacgcccaggcccugaacacgcucgugaagcagcuguccagcaacuucggcgccaucuccagcgugcugaacgacauccucucccgccuggacccgcccgaggccgaggugcagaucgaccggcugaucaccgggcgccuccagagccugcagaccuacgugacccagcagcugauccgggcggccgagauccgcgccagcgccaaccucgccgcgaccaagauguccgagugcguccugggccagagcaagcggguggacuucugcggcaagggguaccaccugauguccuucccccagagcgccccgcacggcguggucuuccuccacgugacguacguccccgcccaggagaagaacuucaccaccgcccccgcgaucugccacgacgggaaggcccacuucccccgcgagggcguguucguguccaacgggacccacugguucgucacgcagcggaacuucuacgagccgcagaucaucaccaccgacaacaccuucgugagcggcaacugcgacguggucaucggcaucgugaacaacacgguguacgacccccugcagcccgagcuggacuccggcgggagcggcuacauccccgaggccccgcgcgacgggcaggccuacgugcggaaggacggcgaguggguccugcucagcaccuuccugugaggacuaguuauaagacugacuagcccgaugggccucccaacgggcccuccuccccuccuugcaccgagauuaauaaaaaaaaaaaaaaaaaaaaaaaaaaaaaaaaaaaaaaaaaaaaaaaaaaaaaaaaaaaaaaaaugcaucccccccccccccccccccccccccccccccaaaggcucuuuucagagccaccagaauu

SEQ ID NO: 12917 - RNA, 3751 nt, Artificial Sequence
  SARS-CoV-2/Wuhan/WIV05/2019__EPI_ISL_402128 spike protein mRNA gc (1-1147)(K986P_V987P_T887WN_A1020W) Foldon construct
aggagaaagcuuaccauguucguguuccugguccuccugccccuggugagcucccagugcgugaaccucaccacccgcacgcagcugccgcccgccuacaccaacagcuucacccggggcgucuacuaccccgacaagguguuccgcuccagcgugcugcacuccacccaggaccucuuccugcccuucuucagcaacgucacgugguuccacgccauccacguguccgggaccaacggcaccaagcgguucgacaacccggugcugcccuucaacgacggggucuacuucgcgagcaccgagaaguccaacaucauccgcggcuggaucuucgggacgacccucgacagcaagacccagucccugcugaucgugaacaacgccaccaacguggucaucaaggugugcgaguuccaguucugcaacgaccccuuccucggcguguacuaccacaagaacaacaagagcuggauggaguccgaguuccgggucuacagcuccgccaacaacugcacguucgaguacgugagccagcccuuccugauggaccuggagggcaagcaggggaacuucaagaaccuccgcgaguucguguucaagaacaucgacggcuacuucaagaucuacuccaagcacaccccgaucaaccugguccgggaccugccccagggguucagcgcccucgagccccugguggaccugcccaucggcaucaacaucacccgcuuccagacccuccuggcccugcaccgguccuaccucacgccgggggacagcagcuccggcuggaccgcgggcgccgccgccuacuacgugggguaccugcagccccgcaccuuccugcucaaguacaacgagaacggcaccaucacggacgcggucgacugcgcccuggacccccugagcgagaccaagugcacccucaaguccuucaccguggagaaggggaucuaccagacgagcaacuuccgggugcagcccaccgaguccaucguccgcuucccgaacaucaccaaccugugccccuucggcgagguguucaacgccacccgguucgccagcgucuacgccuggaaccgcaagcggaucuccaacugcguggcggacuacagcgugcuguacaacuccgccagcuucuccacguucaagugcuacggcgucagccccaccaagcucaacgaccugugcuucaccaacguguacgccgacuccuucgugauccgcggggacgagguccggcagaucgcccccggccagaccgggaagaucgccgacuacaacuacaagcugccggacgacuucacgggcugcgugaucgcguggaacagcaacaaccucgacuccaaggucgggggcaacuacaacuaccuguaccgccuguuccgcaagagcaaccucaagcccuucgagcgggacaucuccaccgagaucuaccaggccggcagcacccccugcaacgggguggagggcuucaacugcuacuucccccugcaguccuacggguuccagccgaccaacggcgugggguaccagcccuaccggguggucgugcugagcuucgagcuccugcacgcccccgccacggugugcggccccaagaaguccaccaaccuggucaagaacaagugcgugaacuucaacuucaacggccucaccgggaccggcgugcugaccgagagcaacaagaaguuccugccguuccagcaguucgggcgcgacaucgccgacacgaccgacgcgguccgcgacccccagacccuggagauccucgacaucacccccugcagcuucggcgggguguccgugaucacgccgggcaccaacaccagcaaccaggucgccgugcuguaccaggacgugaacugcaccgagguccccguggccauccacgccgaccagcugacgcccaccuggcggguguacuccaccggcagcaacgucuuccagacccgcgccgggugccucaucggcgcggagcacgugaacaacuccuacgagugcgacauccccaucggggccggcaucugcgccagcuaccagacgcagaccaacuccccgcggcgcgcccggagcguggcgucccagagcaucaucgccuacaccaugucccugggcgccgagaacagcgucgccuacuccaacaacagcaucgccauccccaccaacuucacgaucuccgugaccaccgagauccugcccgugagcaugaccaagacgagcgucgacugcaccauguacaucugcggggacuccaccgagugcagcaaccuccugcugcaguacggcuccuucugcacccagcucaaccgcgcgcugacggggaucgccguggagcaggacaagaacacccaggagguguucgcccaggucaagcagaucuacaagacgcccccgaucaaggacuucggcggguucaacuucagccagauccugcccgaccccuccaagcccagcaagcgguccuucaucgaggaccuccuguucaacaaggugacccuggccgacgccggcuucaucaagcaguacggcgacugccucggggacaucgcggcccgcgaccugaucugcgcccagaaguucaacggccugaccgugcucccgccccugcugaccgacgagaugaucgcccaguacaccagcgcccuccuggcggggaccaucacguccggcuggugguucggggccggcgccgcccugcagauccccuucgcgaugcagauggccuaccgguucaacggcaucggggucacccagaacgugcucuacgagaaccagaagcugaucgccaaccaguucaacagcgccaucggcaagauccaggacucccugagcuccaccgccagcgcgcucgggaagcugcaggacguggucaaccagaacgcccaggcccugaacacgcucgugaagcagcuguccagcaacuucggcgccaucuccagcgugcugaacgacauccucucccgccuggacccgcccgaggccgaggugcagaucgaccggcugaucaccgggcgccuccagagccugcagaccuacgugacccagcagcugauccgggcggccgagauccgcuggagcgccaaccucgccgcgaccaagauguccgagugcguccugggccagagcaagcggguggacuucugcggcaagggguaccaccugauguccuucccccagagcgccccgcacggcguggucuuccuccacgugacguacguccccgcccaggagaagaacuucaccaccgcccccgcgaucugccacgacgggaaggcccacuucccccgcgagggcguguucguguccaacgggacccacugguucgucacgcagcggaacuucuacgagccgcagaucaucaccaccgacaacaccuucgugagcggcaacugcgacguggucaucggcaucgugaacaacacgguguacgacccccugcagcccgagcuggacuccggcgggagcggcuacauccccgaggccccgcgcgacgggcaggccuacgugcggaaggacggcgaguggguccugcucagcaccuuccugugaggacuaguuauaagacugacuagcccgaugggccucccaacgggcccuccuccccuccuugcaccgagauuaauaaaaaaaaaaaaaaaaaaaaaaaaaaaaaaaaaaaaaaaaaaaaaaaaaaaaaaaaaaaaaaaaugcaucccccccccccccccccccccccccccccccaaaggcucuuuucagagccaccagaauu

SEQ ID NO: 12918 - RNA, 3751 nt, Artificial Sequence
  SARS-CoV-2/Wuhan/WIV05/2019__EPI_ISL_402128 spike protein mRNA gc (1-1147)(K986P_V987P_P1069F) Foldon construct
aggagaaagcuuaccauguucguguuccugguccuccugccccuggugagcucccagugcgugaaccucaccacccgcacgcagcugccgcccgccuacaccaacagcuucacccggggcgucuacuaccccgacaagguguuccgcuccagcgugcugcacuccacccaggaccucuuccugcccuucuucagcaacgucacgugguuccacgccauccacguguccgggaccaacggcaccaagcgguucgacaacccggugcugcccuucaacgacggggucuacuucgcgagcaccgagaaguccaacaucauccgcggcuggaucuucgggacgacccucgacagcaagacccagucccugcugaucgugaacaacgccaccaacguggucaucaaggugugcgaguuccaguucugcaacgaccccuuccucggcguguacuaccacaagaacaacaagagcuggauggaguccgaguuccgggucuacagcuccgccaacaacugcacguucgaguacgugagccagcccuuccugauggaccuggagggcaagcaggggaacuucaagaaccuccgcgaguucguguucaagaacaucgacggcuacuucaagaucuacuccaagcacaccccgaucaaccugguccgggaccugccccagggguucagcgcccucgagccccugguggaccugcccaucggcaucaacaucacccgcuuccagacccuccuggcccugcaccgguccuaccucacgccgggggacagcagcuccggcuggaccgcgggcgccgccgccuacuacgugggguaccugcagccccgcaccuuccugcucaaguacaacgagaacggcaccaucacggacgcggucgacugcgcccuggacccccugagcgagaccaagugcacccucaaguccuucaccguggagaaggggaucuaccagacgagcaacuuccgggugcagcccaccgaguccaucguccgcuucccgaacaucaccaaccugugccccuucggcgagguguucaacgccacccgguucgccagcgucuacgccuggaaccgcaagcggaucuccaacugcguggcggacuacagcgugcuguacaacuccgccagcuucuccacguucaagugcuacggcgucagccccaccaagcucaacgaccugugcuucaccaacguguacgccgacuccuucgugauccgcggggacgagguccggcagaucgcccccggccagaccgggaagaucgccgacuacaacuacaagcugccggacgacuucacgggcugcgugaucgcguggaacagcaacaaccucgacuccaaggucgggggcaacuacaacuaccuguaccgccuguuccgcaagagcaaccucaagcccuucgagcgggacaucuccaccgagaucuaccaggccggcagcacccccugcaacgggguggagggcuucaacugcuacuucccccugcaguccuacggguuccagccgaccaacggcgugggguaccagcccuaccggguggucgugcugagcuucgagcuccugcacgcccccgccacggugugcggccccaagaaguccaccaaccuggucaagaacaagugcgugaacuucaacuucaacggccucaccgggaccggcgugcugaccgagagcaacaagaaguuccugccguuccagcaguucgggcgcgacaucgccgacacgaccgacgcgguccgcgacccccagacccuggagauccucgacaucacccccugcagcuucggcgggguguccgugaucacgccgggcaccaacaccagcaaccaggucgccgugcuguaccaggacgugaacugcaccgagguccccguggccauccacgccgaccagcugacgcccaccuggcggguguacuccaccggcagcaacgucuuccagacccgcgccgggugccucaucggcgcggagcacgugaacaacuccuacgagugcgacauccccaucggggccggcaucugcgccagcuaccagacgcagaccaacuccccgcggcgcgcccggagcguggcgucccagagcaucaucgccuacaccaugucccugggcgccgagaacagcgucgccuacuccaacaacagcaucgccauccccaccaacuucacgaucuccgugaccaccgagauccugcccgugagcaugaccaagacgagcgucgacugcaccauguacaucugcggggacuccaccgagugcagcaaccuccugcugcaguacggcuccuucugcacccagcucaaccgcgcgcugacggggaucgccguggagcaggacaagaacacccaggagguguucgcccaggucaagcagaucuacaagacgcccccgaucaaggacuucggcggguucaacuucagccagauccugcccgaccccuccaagcccagcaagcgguccuucaucgaggaccuccuguucaacaaggugacccuggccgacgccggcuucaucaagcaguacggcgacugccucggggacaucgcggcccgcgaccugaucugcgcccagaaguucaacggccugaccgugcucccgccccugcugaccgacgagaugaucgcccaguacaccagcgcccuccuggcggggaccaucacguccggcuggaccuucggggccggcgccgcccugcagauccccuucgcgaugcagauggccuaccgguucaacggcaucggggucacccagaacgugcucuacgagaaccagaagcugaucgccaaccaguucaacagcgccaucggcaagauccaggacucccugagcuccaccgccagcgcgcucgggaagcugcaggacguggucaaccagaacgcccaggcccugaacacgcucgugaagcagcuguccagcaacuucggcgccaucuccagcgugcugaacgacauccucucccgccuggacccgcccgaggccgaggugcagaucgaccggcugaucaccgggcgccuccagagccugcagaccuacgugacccagcagcugauccgggcggccgagauccgcgccagcgccaaccucgccgcgaccaagauguccgagugcguccugggccagagcaagcggguggacuucugcggcaagggguaccaccugauguccuucccccagagcgccccgcacggcguggucuuccuccacgugacguacgucuucgcccaggagaagaacuucaccaccgcccccgcgaucugccacgacgggaaggcccacuucccccgcgagggcguguucguguccaacgggacccacugguucgucacgcagcggaacuucuacgagccgcagaucaucaccaccgacaacaccuucgugagcggcaacugcgacguggucaucggcaucgugaacaacacgguguacgacccccugcagcccgagcuggacuccggcgggagcggcuacauccccgaggccccgcgcgacgggcaggccuacgugcggaaggacggcgaguggguccugcucagcaccuuccugugaggacuaguuauaagacugacuagcccgaugggccucccaacgggcccuccuccccuccuugcaccgagauuaauaaaaaaaaaaaaaaaaaaaaaaaaaaaaaaaaaaaaaaaaaaaaaaaaaaaaaaaaaaaaaaaaugcaucccccccccccccccccccccccccccccccaaaggcucuuuucagagccaccagaauu

SEQ ID NO: 12919 - RNA, 3751 nt, Artificial Sequence
  SARS-CoV-2/Wuhan/WIV05/2019__EPI_ISL_402128 spike protein mRNA gc (1-1147)(K986P_V987P_ H1048Q_H1064N_ H1083N_H1101N) Foldon construct
aggagaaagcuuaccauguucguguuccugguccuccugccccuggugagcucccagugcgugaaccucaccacccgcacgcagcugccgcccgccuacaccaacagcuucacccggggcgucuacuaccccgacaagguguuccgcuccagcgugcugcacuccacccaggaccucuuccugcccuucuucagcaacgucacgugguuccacgccauccacguguccgggaccaacggcaccaagcgguucgacaacccggugcugcccuucaacgacggggucuacuucgcgagcaccgagaaguccaacaucauccgcggcuggaucuucgggacgacccucgacagcaagacccagucccugcugaucgugaacaacgccaccaacguggucaucaaggugugcgaguuccaguucugcaacgaccccuuccucggcguguacuaccacaagaacaacaagagcuggauggaguccgaguuccgggucuacagcuccgccaacaacugcacguucgaguacgugagccagcccuuccugauggaccuggagggcaagcaggggaacuucaagaaccuccgcgaguucguguucaagaacaucgacggcuacuucaagaucuacuccaagcacaccccgaucaaccugguccgggaccugccccagggguucagcgcccucgagccccugguggaccugcccaucggcaucaacaucacccgcuuccagacccuccuggcccugcaccgguccuaccucacgccgggggacagcagcuccggcuggaccgcgggcgccgccgccuacuacgugggguaccugcagccccgcaccuuccugcucaaguacaacgagaacggcaccaucacggacgcggucgacugcgcccuggacccccugagcgagaccaagugcacccucaaguccuucaccguggagaaggggaucuaccagacgagcaacuuccgggugcagcccaccgaguccaucguccgcuucccgaacaucaccaaccugugccccuucggcgagguguucaacgccacccgguucgccagcgucuacgccuggaaccgcaagcggaucuccaacugcguggcggacuacagcgugcuguacaacuccgccagcuucuccacguucaagugcuacggcgucagccccaccaagcucaacgaccugugcuucaccaacguguacgccgacuccuucgugauccgcggggacgagguccggcagaucgcccccggccagaccgggaagaucgccgacuacaacuacaagcugccggacgacuucacgggcugcgugaucgcguggaacagcaacaaccucgacuccaaggucgggggcaacuacaacuaccuguaccgccuguuccgcaagagcaaccucaagcccuucgagcgggacaucuccaccgagaucuaccaggccggcagcacccccugcaacgggguggagggcuucaacugcuacuucccccugcaguccuacggguuccagccgaccaacggcgugggguaccagcccuaccggguggucgugcugagcuucgagcuccugcacgcccccgccacggugugcggccccaagaaguccaccaaccuggucaagaacaagugcgugaacuucaacuucaacggccucaccgggaccggcgugcugaccgagagcaacaagaaguuccugccguuccagcaguucgggcgcgacaucgccgacacgaccgacgcgguccgcgacccccagacccuggagauccucgacaucacccccugcagcuucggcgggguguccgugaucacgccgggcaccaacaccagcaaccaggucgccgugcuguaccaggacgugaacugcaccgagguccccguggccauccacgccgaccagcugacgcccaccuggcggguguacuccaccggcagcaacgucuuccagacccgcgccgggugccucaucggcgcggagcacgugaacaacuccuacgagugcgacauccccaucggggccggcaucugcgccagcuaccagacgcagaccaacuccccgcggcgcgcccggagcguggcgucccagagcaucaucgccuacaccaugucccugggcgccgagaacagcgucgccuacuccaacaacagcaucgccauccccaccaacuucacgaucuccgugaccaccgagauccugcccgugagcaugaccaagacgagcgucgacugcaccauguacaucugcggggacuccaccgagugcagcaaccuccugcugcaguacggcuccuucugcacccagcucaaccgcgcgcugacggggaucgccguggagcaggacaagaacacccaggagguguucgcccaggucaagcagaucuacaagacgcccccgaucaaggacuucggcggguucaacuucagccagauccugcccgaccccuccaagcccagcaagcgguccuucaucgaggaccuccuguucaacaaggugacccuggccgacgccggcuucaucaagcaguacggcgacugccucggggacaucgcggcccgcgaccugaucugcgcccagaaguucaacggccugaccgugcucccgccccugcugaccgacgagaugaucgcccaguacaccagcgcccuccuggcggggaccaucacguccggcuggaccuucggggccggcgccgcccugcagauccccuucgcgaugcagauggccuaccgguucaacggcaucggggucacccagaacgugcucuacgagaaccagaagcugaucgccaaccaguucaacagcgccaucggcaagauccaggacucccugagcuccaccgccagcgcgcucgggaagcugcaggacguggucaaccagaacgcccaggcccugaacacgcucgugaagcagcuguccagcaacuucggcgccaucuccagcgugcugaacgacauccucucccgccuggacccgcccgaggccgaggugcagaucgaccggcugaucaccgggcgccuccagagccugcagaccuacgugacccagcagcugauccgggcggccgagauccgcgccagcgccaaccucgccgcgaccaagauguccgagugcguccugggccagagcaagcggguggacuucugcggcaagggguaccagcugauguccuucccccagagcgccccgcacggcguggucuuccucaacgugacguacguccccgcccaggagaagaacuucaccaccgcccccgcgaucugcaacgacgggaaggcccacuucccccgcgagggcguguucguguccaacgggaccaacugguucgucacgcagcggaacuucuacgagccgcagaucaucaccaccgacaacaccuucgugagcggcaacugcgacguggucaucggcaucgugaacaacacgguguacgacccccugcagcccgagcuggacuccggcgggagcggcuacauccccgaggccccgcgcgacgggcaggccuacgugcggaaggacggcgaguggguccugcucagcaccuuccugugaggacuaguuauaagacugacuagcccgaugggccucccaacgggcccuccuccccuccuugcaccgagauuaauaaaaaaaaaaaaaaaaaaaaaaaaaaaaaaaaaaaaaaaaaaaaaaaaaaaaaaaaaaaaaaaaugcaucccccccccccccccccccccccccccccccaaaggcucuuuucagagccaccagaauu

SEQ ID NO: 12920 - RNA, 3751 nt, Artificial Sequence
  SARS-CoV-2/Wuhan/WIV05/2019__EPI_ISL_402128 spike protein mRNA gc (1-1147)(I712C_T1077C) Foldon construct
aggagaaagcuuaccauguucguguuccugguccuccugccccuggugagcucccagugcgugaaccucaccacccgcacgcagcugccgcccgccuacaccaacagcuucacccggggcgucuacuaccccgacaagguguuccgcuccagcgugcugcacuccacccaggaccucuuccugcccuucuucagcaacgucacgugguuccacgccauccacguguccgggaccaacggcaccaagcgguucgacaacccggugcugcccuucaacgacggggucuacuucgcgagcaccgagaaguccaacaucauccgcggcuggaucuucgggacgacccucgacagcaagacccagucccugcugaucgugaacaacgccaccaacguggucaucaaggugugcgaguuccaguucugcaacgaccccuuccucggcguguacuaccacaagaacaacaagagcuggauggaguccgaguuccgggucuacagcuccgccaacaacugcacguucgaguacgugagccagcccuuccugauggaccuggagggcaagcaggggaacuucaagaaccuccgcgaguucguguucaagaacaucgacggcuacuucaagaucuacuccaagcacaccccgaucaaccugguccgggaccugccccagggguucagcgcccucgagccccugguggaccugcccaucggcaucaacaucacccgcuuccagacccuccuggcccugcaccgguccuaccucacgccgggggacagcagcuccggcuggaccgcgggcgccgccgccuacuacgugggguaccugcagccccgcaccuuccugcucaaguacaacgagaacggcaccaucacggacgcggucgacugcgcccuggacccccugagcgagaccaagugcacccucaaguccuucaccguggagaaggggaucuaccagacgagcaacuuccgggugcagcccaccgaguccaucguccgcuucccgaacaucaccaaccugugccccuucggcgagguguucaacgccacccgguucgccagcgucuacgccuggaaccgcaagcggaucuccaacugcguggcggacuacagcgugcuguacaacuccgccagcuucuccacguucaagugcuacggcgucagccccaccaagcucaacgaccugugcuucaccaacguguacgccgacuccuucgugauccgcggggacgagguccggcagaucgcccccggccagaccgggaagaucgccgacuacaacuacaagcugccggacgacuucacgggcugcgugaucgcguggaacagcaacaaccucgacuccaaggucgggggcaacuacaacuaccuguaccgccuguuccgcaagagcaaccucaagcccuucgagcgggacaucuccaccgagaucuaccaggccggcagcacccccugcaacgggguggagggcuucaacugcuacuucccccugcaguccuacggguuccagccgaccaacggcgugggguaccagcccuaccggguggucgugcugagcuucgagcuccugcacgcccccgccacggugugcggccccaagaaguccaccaaccuggucaagaacaagugcgugaacuucaacuucaacggccucaccgggaccggcgugcugaccgagagcaacaagaaguuccugccguuccagcaguucgggcgcgacaucgccgacacgaccgacgcgguccgcgacccccagacccuggagauccucgacaucacccccugcagcuucggcgggguguccgugaucacgccgggcaccaacaccagcaaccaggucgccgugcuguaccaggacgugaacugcaccgagguccccguggccauccacgccgaccagcugacgcccaccuggcggguguacuccaccggcagcaacgucuuccagacccgcgccgggugccucaucggcgcggagcacgugaacaacuccuacgagugcgacauccccaucggggccggcaucugcgccagcuaccagacgcagaccaacuccccgcggcgcgcccggagcguggcgucccagagcaucaucgccuacaccaugucccugggcgccgagaacagcgucgccuacuccaacaacagcugcgccauccccaccaacuucacgaucuccgugaccaccgagauccugcccgugagcaugaccaagacgagcgucgacugcaccauguacaucugcggggacuccaccgagugcagcaaccuccugcugcaguacggcuccuucugcacccagcucaaccgcgcgcugacggggaucgccguggagcaggacaagaacacccaggagguguucgcccaggucaagcagaucuacaagacgcccccgaucaaggacuucggcggguucaacuucagccagauccugcccgaccccuccaagcccagcaagcgguccuucaucgaggaccuccuguucaacaaggugacccuggccgacgccggcuucaucaagcaguacggcgacugccucggggacaucgcggcccgcgaccugaucugcgcccagaaguucaacggccugaccgugcucccgccccugcugaccgacgagaugaucgcccaguacaccagcgcccuccuggcggggaccaucacguccggcuggaccuucggggccggcgccgcccugcagauccccuucgcgaugcagauggccuaccgguucaacggcaucggggucacccagaacgugcucuacgagaaccagaagcugaucgccaaccaguucaacagcgccaucggcaagauccaggacucccugagcuccaccgccagcgcgcucgggaagcugcaggacguggucaaccagaacgcccaggcccugaacacgcucgugaagcagcuguccagcaacuucggcgccaucuccagcgugcugaacgacauccucucccgccuggacaaggucgaggccgaggugcagaucgaccggcugaucaccgggcgccuccagagccugcagaccuacgugacccagcagcugauccgggcggccgagauccgcgccagcgccaaccucgccgcgaccaagauguccgagugcguccugggccagagcaagcggguggacuucugcggcaagggguaccaccugauguccuucccccagagcgccccgcacggcguggucuuccuccacgugacguacguccccgcccaggagaagaacuucaccugcgcccccgcgaucugccacgacgggaaggcccacuucccccgcgagggcguguucguguccaacgggacccacugguucgucacgcagcggaacuucuacgagccgcagaucaucaccaccgacaacaccuucgugagcggcaacugcgacguggucaucggcaucgugaacaacacgguguacgacccccugcagcccgagcuggacuccggcgggagcggcuacauccccgaggccccgcgcgacgggcaggccuacgugcggaaggacggcgaguggguccugcucagcaccuuccugugaggacuaguuauaagacugacuagcccgaugggccucccaacgggcccuccuccccuccuugcaccgagauuaauaaaaaaaaaaaaaaaaaaaaaaaaaaaaaaaaaaaaaaaaaaaaaaaaaaaaaaaaaaaaaaaaugcaucccccccccccccccccccccccccccccccaaaggcucuuuucagagccaccagaauu

SEQ ID NO: 12921 - RNA, 3751 nt, Artificial Sequence
  SARS-CoV-2/Wuhan/WIV05/2019__EPI_ISL_402128 spike protein mRNA gc (1-1147)(I714C_Y1110C) Foldon construct
aggagaaagcuuaccauguucguguuccugguccuccugccccuggugagcucccagugcgugaaccucaccacccgcacgcagcugccgcccgccuacaccaacagcuucacccggggcgucuacuaccccgacaagguguuccgcuccagcgugcugcacuccacccaggaccucuuccugcccuucuucagcaacgucacgugguuccacgccauccacguguccgggaccaacggcaccaagcgguucgacaacccggugcugcccuucaacgacggggucuacuucgcgagcaccgagaaguccaacaucauccgcggcuggaucuucgggacgacccucgacagcaagacccagucccugcugaucgugaacaacgccaccaacguggucaucaaggugugcgaguuccaguucugcaacgaccccuuccucggcguguacuaccacaagaacaacaagagcuggauggaguccgaguuccgggucuacagcuccgccaacaacugcacguucgaguacgugagccagcccuuccugauggaccuggagggcaagcaggggaacuucaagaaccuccgcgaguucguguucaagaacaucgacggcuacuucaagaucuacuccaagcacaccccgaucaaccugguccgggaccugccccagggguucagcgcccucgagccccugguggaccugcccaucggcaucaacaucacccgcuuccagacccuccuggcccugcaccgguccuaccucacgccgggggacagcagcuccggcuggaccgcgggcgccgccgccuacuacgugggguaccugcagccccgcaccuuccugcucaaguacaacgagaacggcaccaucacggacgcggucgacugcgcccuggacccccugagcgagaccaagugcacccucaaguccuucaccguggagaaggggaucuaccagacgagcaacuuccgggugcagcccaccgaguccaucguccgcuucccgaacaucaccaaccugugccccuucggcgagguguucaacgccacccgguucgccagcgucuacgccuggaaccgcaagcggaucuccaacugcguggcggacuacagcgugcuguacaacuccgccagcuucuccacguucaagugcuacggcgucagccccaccaagcucaacgaccugugcuucaccaacguguacgccgacuccuucgugauccgcggggacgagguccggcagaucgcccccggccagaccgggaagaucgccgacuacaacuacaagcugccggacgacuucacgggcugcgugaucgcguggaacagcaacaaccucgacuccaaggucgggggcaacuacaacuaccuguaccgccuguuccgcaagagcaaccucaagcccuucgagcgggacaucuccaccgagaucuaccaggccggcagcacccccugcaacgggguggagggcuucaacugcuacuucccccugcaguccuacggguuccagccgaccaacggcgugggguaccagcccuaccggguggucgugcugagcuucgagcuccugcacgcccccgccacggugugcggccccaagaaguccaccaaccuggucaagaacaagugcgugaacuucaacuucaacggccucaccgggaccggcgugcugaccgagagcaacaagaaguuccugccguuccagcaguucgggcgcgacaucgccgacacgaccgacgcgguccgcgacccccagacccuggagauccucgacaucacccccugcagcuucggcgggguguccgugaucacgccgggcaccaacaccagcaaccaggucgccgugcuguaccaggacgugaacugcaccgagguccccguggccauccacgccgaccagcugacgcccaccuggcggguguacuccaccggcagcaacgucuuccagacccgcgccgggugccucaucggcgcggagcacgugaacaacuccuacgagugcgacauccccaucggggccggcaucugcgccagcuaccagacgcagaccaacuccccgcggcgcgcccggagcguggcgucccagagcaucaucgccuacaccaugucccugggcgccgagaacagcgucgccuacuccaacaacagcaucgccugccccaccaacuucacgaucuccgugaccaccgagauccugcccgugagcaugaccaagacgagcgucgacugcaccauguacaucugcggggacuccaccgagugcagcaaccuccugcugcaguacggcuccuucugcacccagcucaaccgcgcgcugacggggaucgccguggagcaggacaagaacacccaggagguguucgcccaggucaagcagaucuacaagacgcccccgaucaaggacuucggcggguucaacuucagccagauccugcccgaccccuccaagcccagcaagcgguccuucaucgaggaccuccuguucaacaaggugacccuggccgacgccggcuucaucaagcaguacggcgacugccucggggacaucgcggcccgcgaccugaucugcgcccagaaguucaacggccugaccgugcucccgccccugcugaccgacgagaugaucgcccaguacaccagcgcccuccuggcggggaccaucacguccggcuggaccuucggggccggcgccgcccugcagauccccuucgcgaugcagauggccuaccgguucaacggcaucggggucacccagaacgugcucuacgagaaccagaagcugaucgccaaccaguucaacagcgccaucggcaagauccaggacucccugagcuccaccgccagcgcgcucgggaagcugcaggacguggucaaccagaacgcccaggcccugaacacgcucgugaagcagcuguccagcaacuucggcgccaucuccagcgugcugaacgacauccucucccgccuggacaaggucgaggccgaggugcagaucgaccggcugaucaccgggcgccuccagagccugcagaccuacgugacccagcagcugauccgggcggccgagauccgcgccagcgccaaccucgccgcgaccaagauguccgagugcguccugggccagagcaagcggguggacuucugcggcaagggguaccaccugauguccuucccccagagcgccccgcacggcguggucuuccuccacgugacguacguccccgcccaggagaagaacuucaccaccgcccccgcgaucugccacgacgggaaggcccacuucccccgcgagggcguguucguguccaacgggacccacugguucgucacgcagcggaacuucugcgagccgcagaucaucaccaccgacaacaccuucgugagcggcaacugcgacguggucaucggcaucgugaacaacacgguguacgacccccugcagcccgagcuggacuccggcgggagcggcuacauccccgaggccccgcgcgacgggcaggccuacgugcggaaggacggcgaguggguccugcucagcaccuuccugugaggacuaguuauaagacugacuagcccgaugggccucccaacgggcccuccuccccuccuugcaccgagauuaauaaaaaaaaaaaaaaaaaaaaaaaaaaaaaaaaaaaaaaaaaaaaaaaaaaaaaaaaaaaaaaaaugcaucccccccccccccccccccccccccccccccaaaggcucuuuucagagccaccagaauu

SEQ ID NO: 12922 - RNA, 3751 nt, Artificial Sequence
  SARS-CoV-2/Wuhan/WIV05/2019__EPI_ISL_402128 spike protein mRNA gc (1-1147)(P715C_P1069C) Foldon construct
aggagaaagcuuaccauguucguguuccugguccuccugccccuggugagcucccagugcgugaaccucaccacccgcacgcagcugccgcccgccuacaccaacagcuucacccggggcgucuacuaccccgacaagguguuccgcuccagcgugcugcacuccacccaggaccucuuccugcccuucuucagcaacgucacgugguuccacgccauccacguguccgggaccaacggcaccaagcgguucgacaacccggugcugcccuucaacgacggggucuacuucgcgagcaccgagaaguccaacaucauccgcggcuggaucuucgggacgacccucgacagcaagacccagucccugcugaucgugaacaacgccaccaacguggucaucaaggugugcgaguuccaguucugcaacgaccccuuccucggcguguacuaccacaagaacaacaagagcuggauggaguccgaguuccgggucuacagcuccgccaacaacugcacguucgaguacgugagccagcccuuccugauggaccuggagggcaagcaggggaacuucaagaaccuccgcgaguucguguucaagaacaucgacggcuacuucaagaucuacuccaagcacaccccgaucaaccugguccgggaccugccccagggguucagcgcccucgagccccugguggaccugcccaucggcaucaacaucacccgcuuccagacccuccuggcccugcaccgguccuaccucacgccgggggacagcagcuccggcuggaccgcgggcgccgccgccuacuacgugggguaccugcagccccgcaccuuccugcucaaguacaacgagaacggcaccaucacggacgcggucgacugcgcccuggacccccugagcgagaccaagugcacccucaaguccuucaccguggagaaggggaucuaccagacgagcaacuuccgggugcagcccaccgaguccaucguccgcuucccgaacaucaccaaccugugccccuucggcgagguguucaacgccacccgguucgccagcgucuacgccuggaaccgcaagcggaucuccaacugcguggcggacuacagcgugcuguacaacuccgccagcuucuccacguucaagugcuacggcgucagccccaccaagcucaacgaccugugcuucaccaacguguacgccgacuccuucgugauccgcggggacgagguccggcagaucgcccccggccagaccgggaagaucgccgacuacaacuacaagcugccggacgacuucacgggcugcgugaucgcguggaacagcaacaaccucgacuccaaggucgggggcaacuacaacuaccuguaccgccuguuccgcaagagcaaccucaagcccuucgagcgggacaucuccaccgagaucuaccaggccggcagcacccccugcaacgggguggagggcuucaacugcuacuucccccugcaguccuacggguuccagccgaccaacggcgugggguaccagcccuaccggguggucgugcugagcuucgagcuccugcacgcccccgccacggugugcggccccaagaaguccaccaaccuggucaagaacaagugcgugaacuucaacuucaacggccucaccgggaccggcgugcugaccgagagcaacaagaaguuccugccguuccagcaguucgggcgcgacaucgccgacacgaccgacgcgguccgcgacccccagacccuggagauccucgacaucacccccugcagcuucggcgggguguccgugaucacgccgggcaccaacaccagcaaccaggucgccgugcuguaccaggacgugaacugcaccgagguccccguggccauccacgccgaccagcugacgcccaccuggcggguguacuccaccggcagcaacgucuuccagacccgcgccgggugccucaucggcgcggagcacgugaacaacuccuacgagugcgacauccccaucggggccggcaucugcgccagcuaccagacgcagaccaacuccccgcggcgcgcccggagcguggcgucccagagcaucaucgccuacaccaugucccugggcgccgagaacagcgucgccuacuccaacaacagcaucgccaucugcaccaacuucacgaucuccgugaccaccgagauccugcccgugagcaugaccaagacgagcgucgacugcaccauguacaucugcggggacuccaccgagugcagcaaccuccugcugcaguacggcuccuucugcacccagcucaaccgcgcgcugacggggaucgccguggagcaggacaagaacacccaggagguguucgcccaggucaagcagaucuacaagacgcccccgaucaaggacuucggcggguucaacuucagccagauccugcccgaccccuccaagcccagcaagcgguccuucaucgaggaccuccuguucaacaaggugacccuggccgacgccggcuucaucaagcaguacggcgacugccucggggacaucgcggcccgcgaccugaucugcgcccagaaguucaacggccugaccgugcucccgccccugcugaccgacgagaugaucgcccaguacaccagcgcccuccuggcggggaccaucacguccggcuggaccuucggggccggcgccgcccugcagauccccuucgcgaugcagauggccuaccgguucaacggcaucggggucacccagaacgugcucuacgagaaccagaagcugaucgccaaccaguucaacagcgccaucggcaagauccaggacucccugagcuccaccgccagcgcgcucgggaagcugcaggacguggucaaccagaacgcccaggcccugaacacgcucgugaagcagcuguccagcaacuucggcgccaucuccagcgugcugaacgacauccucucccgccuggacaaggucgaggccgaggugcagaucgaccggcugaucaccgggcgccuccagagccugcagaccuacgugacccagcagcugauccgggcggccgagauccgcgccagcgccaaccucgccgcgaccaagauguccgagugcguccugggccagagcaagcggguggacuucugcggcaagggguaccaccugauguccuucccccagagcgccccgcacggcguggucuuccuccacgugacguacgucugcgcccaggagaagaacuucaccaccgcccccgcgaucugccacgacgggaaggcccacuucccccgcgagggcguguucguguccaacgggacccacugguucgucacgcagcggaacuucuacgagccgcagaucaucaccaccgacaacaccuucgugagcggcaacugcgacguggucaucggcaucgugaacaacacgguguacgacccccugcagcccgagcuggacuccggcgggagcggcuacauccccgaggccccgcgcgacgggcaggccuacgugcggaaggacggcgaguggguccugcucagcaccuuccugugaggacuaguuauaagacugacuagcccgaugggccucccaacgggcccuccuccccuccuugcaccgagauuaauaaaaaaaaaaaaaaaaaaaaaaaaaaaaaaaaaaaaaaaaaaaaaaaaaaaaaaaaaaaaaaaaugcaucccccccccccccccccccccccccccccccaaaggcucuuuucagagccaccagaauu

SEQ ID NO: 12923 - RNA, 3751 nt, Artificial Sequence
  SARS-CoV-2/Wuhan/WIV05/2019__EPI_ISL_402128 spike protein mRNA gc (1-1147)(G889C_L1034C) Foldon construct
aggagaaagcuuaccauguucguguuccugguccuccugccccuggugagcucccagugcgugaaccucaccacccgcacgcagcugccgcccgccuacaccaacagcuucacccggggcgucuacuaccccgacaagguguuccgcuccagcgugcugcacuccacccaggaccucuuccugcccuucuucagcaacgucacgugguuccacgccauccacguguccgggaccaacggcaccaagcgguucgacaacccggugcugcccuucaacgacggggucuacuucgcgagcaccgagaaguccaacaucauccgcggcuggaucuucgggacgacccucgacagcaagacccagucccugcugaucgugaacaacgccaccaacguggucaucaaggugugcgaguuccaguucugcaacgaccccuuccucggcguguacuaccacaagaacaacaagagcuggauggaguccgaguuccgggucuacagcuccgccaacaacugcacguucgaguacgugagccagcccuuccugauggaccuggagggcaagcaggggaacuucaagaaccuccgcgaguucguguucaagaacaucgacggcuacuucaagaucuacuccaagcacaccccgaucaaccugguccgggaccugccccagggguucagcgcccucgagccccugguggaccugcccaucggcaucaacaucacccgcuuccagacccuccuggcccugcaccgguccuaccucacgccgggggacagcagcuccggcuggaccgcgggcgccgccgccuacuacgugggguaccugcagccccgcaccuuccugcucaaguacaacgagaacggcaccaucacggacgcggucgacugcgcccuggacccccugagcgagaccaagugcacccucaaguccuucaccguggagaaggggaucuaccagacgagcaacuuccgggugcagcccaccgaguccaucguccgcuucccgaacaucaccaaccugugccccuucggcgagguguucaacgccacccgguucgccagcgucuacgccuggaaccgcaagcggaucuccaacugcguggcggacuacagcgugcuguacaacuccgccagcuucuccacguucaagugcuacggcgucagccccaccaagcucaacgaccugugcuucaccaacguguacgccgacuccuucgugauccgcggggacgagguccggcagaucgcccccggccagaccgggaagaucgccgacuacaacuacaagcugccggacgacuucacgggcugcgugaucgcguggaacagcaacaaccucgacuccaaggucgggggcaacuacaacuaccuguaccgccuguuccgcaagagcaaccucaagcccuucgagcgggacaucuccaccgagaucuaccaggccggcagcacccccugcaacgggguggagggcuucaacugcuacuucccccugcaguccuacggguuccagccgaccaacggcgugggguaccagcccuaccggguggucgugcugagcuucgagcuccugcacgcccccgccacggugugcggccccaagaaguccaccaaccuggucaagaacaagugcgugaacuucaacuucaacggccucaccgggaccggcgugcugaccgagagcaacaagaaguuccugccguuccagcaguucgggcgcgacaucgccgacacgaccgacgcgguccgcgacccccagacccuggagauccucgacaucacccccugcagcuucggcgggguguccgugaucacgccgggcaccaacaccagcaaccaggucgccgugcuguaccaggacgugaacugcaccgagguccccguggccauccacgccgaccagcugacgcccaccuggcggguguacuccaccggcagcaacgucuuccagacccgcgccgggugccucaucggcgcggagcacgugaacaacuccuacgagugcgacauccccaucggggccggcaucugcgccagcuaccagacgcagaccaacuccccgcggcgcgcccggagcguggcgucccagagcaucaucgccuacaccaugucccugggcgccgagaacagcgucgccuacuccaacaacagcaucgccauccccaccaacuucacgaucuccgugaccaccgagauccugcccgugagcaugaccaagacgagcgucgacugcaccauguacaucugcggggacuccaccgagugcagcaaccuccugcugcaguacggcuccuucugcacccagcucaaccgcgcgcugacggggaucgccguggagcaggacaagaacacccaggagguguucgcccaggucaagcagaucuacaagacgcccccgaucaaggacuucggcggguucaacuucagccagauccugcccgaccccuccaagcccagcaagcgguccuucaucgaggaccuccuguucaacaaggugacccuggccgacgccggcuucaucaagcaguacggcgacugccucggggacaucgcggcccgcgaccugaucugcgcccagaaguucaacggccugaccgugcucccgccccugcugaccgacgagaugaucgcccaguacaccagcgcccuccuggcggggaccaucacguccggcuggaccuucugcgccggcgccgcccugcagauccccuucgcgaugcagauggccuaccgguucaacggcaucggggucacccagaacgugcucuacgagaaccagaagcugaucgccaaccaguucaacagcgccaucggcaagauccaggacucccugagcuccaccgccagcgcgcucgggaagcugcaggacguggucaaccagaacgcccaggcccugaacacgcucgugaagcagcuguccagcaacuucggcgccaucuccagcgugcugaacgacauccucucccgccuggacaaggucgaggccgaggugcagaucgaccggcugaucaccgggcgccuccagagccugcagaccuacgugacccagcagcugauccgggcggccgagauccgcgccagcgccaaccucgccgcgaccaagauguccgagugcgucugcggccagagcaagcggguggacuucugcggcaagggguaccaccugauguccuucccccagagcgccccgcacggcguggucuuccuccacgugacguacguccccgcccaggagaagaacuucaccaccgcccccgcgaucugccacgacgggaaggcccacuucccccgcgagggcguguucguguccaacgggacccacugguucgucacgcagcggaacuucuacgagccgcagaucaucaccaccgacaacaccuucgugagcggcaacugcgacguggucaucggcaucgugaacaacacgguguacgacccccugcagcccgagcuggacuccggcgggagcggcuacauccccgaggccccgcgcgacgggcaggccuacgugcggaaggacggcgaguggguccugcucagcaccuuccugugaggacuaguuauaagacugacuagcccgaugggccucccaacgggcccuccuccccuccuugcaccgagauuaauaaaaaaaaaaaaaaaaaaaaaaaaaaaaaaaaaaaaaaaaaaaaaaaaaaaaaaaaaaaaaaaaugcaucccccccccccccccccccccccccccccccaaaggcucuuuucagagccaccagaauu

SEQ ID NO: 12924 - RNA, 3751 nt, Artificial Sequence
  SARS-CoV-2/Wuhan/WIV05/2019__EPI_ISL_402128 spike protein mRNA gc (1-1147)(I909C_Y1047C) Foldon construct
aggagaaagcuuaccauguucguguuccugguccuccugccccuggugagcucccagugcgugaaccucaccacccgcacgcagcugccgcccgccuacaccaacagcuucacccggggcgucuacuaccccgacaagguguuccgcuccagcgugcugcacuccacccaggaccucuuccugcccuucuucagcaacgucacgugguuccacgccauccacguguccgggaccaacggcaccaagcgguucgacaacccggugcugcccuucaacgacggggucuacuucgcgagcaccgagaaguccaacaucauccgcggcuggaucuucgggacgacccucgacagcaagacccagucccugcugaucgugaacaacgccaccaacguggucaucaaggugugcgaguuccaguucugcaacgaccccuuccucggcguguacuaccacaagaacaacaagagcuggauggaguccgaguuccgggucuacagcuccgccaacaacugcacguucgaguacgugagccagcccuuccugauggaccuggagggcaagcaggggaacuucaagaaccuccgcgaguucguguucaagaacaucgacggcuacuucaagaucuacuccaagcacaccccgaucaaccugguccgggaccugccccagggguucagcgcccucgagccccugguggaccugcccaucggcaucaacaucacccgcuuccagacccuccuggcccugcaccgguccuaccucacgccgggggacagcagcuccggcuggaccgcgggcgccgccgccuacuacgugggguaccugcagccccgcaccuuccugcucaaguacaacgagaacggcaccaucacggacgcggucgacugcgcccuggacccccugagcgagaccaagugcacccucaaguccuucaccguggagaaggggaucuaccagacgagcaacuuccgggugcagcccaccgaguccaucguccgcuucccgaacaucaccaaccugugccccuucggcgagguguucaacgccacccgguucgccagcgucuacgccuggaaccgcaagcggaucuccaacugcguggcggacuacagcgugcuguacaacuccgccagcuucuccacguucaagugcuacggcgucagccccaccaagcucaacgaccugugcuucaccaacguguacgccgacuccuucgugauccgcggggacgagguccggcagaucgcccccggccagaccgggaagaucgccgacuacaacuacaagcugccggacgacuucacgggcugcgugaucgcguggaacagcaacaaccucgacuccaaggucgggggcaacuacaacuaccuguaccgccuguuccgcaagagcaaccucaagcccuucgagcgggacaucuccaccgagaucuaccaggccggcagcacccccugcaacgggguggagggcuucaacugcuacuucccccugcaguccuacggguuccagccgaccaacggcgugggguaccagcccuaccggguggucgugcugagcuucgagcuccugcacgcccccgccacggugugcggccccaagaaguccaccaaccuggucaagaacaagugcgugaacuucaacuucaacggccucaccgggaccggcgugcugaccgagagcaacaagaaguuccugccguuccagcaguucgggcgcgacaucgccgacacgaccgacgcgguccgcgacccccagacccuggagauccucgacaucacccccugcagcuucggcgggguguccgugaucacgccgggcaccaacaccagcaaccaggucgccgugcuguaccaggacgugaacugcaccgagguccccguggccauccacgccgaccagcugacgcccaccuggcggguguacuccaccggcagcaacgucuuccagacccgcgccgggugccucaucggcgcggagcacgugaacaacuccuacgagugcgacauccccaucggggccggcaucugcgccagcuaccagacgcagaccaacuccccgcggcgcgcccggagcguggcgucccagagcaucaucgccuacaccaugucccugggcgccgagaacagcgucgccuacuccaacaacagcaucgccauccccaccaacuucacgaucuccgugaccaccgagauccugcccgugagcaugaccaagacgagcgucgacugcaccauguacaucugcggggacuccaccgagugcagcaaccuccugcugcaguacggcuccuucugcacccagcucaaccgcgcgcugacggggaucgccguggagcaggacaagaacacccaggagguguucgcccaggucaagcagaucuacaagacgcccccgaucaaggacuucggcggguucaacuucagccagauccugcccgaccccuccaagcccagcaagcgguccuucaucgaggaccuccuguucaacaaggugacccuggccgacgccggcuucaucaagcaguacggcgacugccucggggacaucgcggcccgcgaccugaucugcgcccagaaguucaacggccugaccgugcucccgccccugcugaccgacgagaugaucgcccaguacaccagcgcccuccuggcggggaccaucacguccggcuggaccuucggggccggcgccgcccugcagauccccuucgcgaugcagauggccuaccgguucaacggcugcggggucacccagaacgugcucuacgagaaccagaagcugaucgccaaccaguucaacagcgccaucggcaagauccaggacucccugagcuccaccgccagcgcgcucgggaagcugcaggacguggucaaccagaacgcccaggcccugaacacgcucgugaagcagcuguccagcaacuucggcgccaucuccagcgugcugaacgacauccucucccgccuggacaaggucgaggccgaggugcagaucgaccggcugaucaccgggcgccuccagagccugcagaccuacgugacccagcagcugauccgggcggccgagauccgcgccagcgccaaccucgccgcgaccaagauguccgagugcguccugggccagagcaagcggguggacuucugcggcaaggggugccaccugauguccuucccccagagcgccccgcacggcguggucuuccuccacgugacguacguccccgcccaggagaagaacuucaccaccgcccccgcgaucugccacgacgggaaggcccacuucccccgcgagggcguguucguguccaacgggacccacugguucgucacgcagcggaacuucuacgagccgcagaucaucaccaccgacaacaccuucgugagcggcaacugcgacguggucaucggcaucgugaacaacacgguguacgacccccugcagcccgagcuggacuccggcgggagcggcuacauccccgaggccccgcgcgacgggcaggccuacgugcggaaggacggcgaguggguccugcucagcaccuuccugugaggacuaguuauaagacugacuagcccgaugggccucccaacgggcccuccuccccuccuugcaccgagauuaauaaaaaaaaaaaaaaaaaaaaaaaaaaaaaaaaaaaaaaaaaaaaaaaaaaaaaaaaaaaaaaaaugcaucccccccccccccccccccccccccccccccaaaggcucuuuucagagccaccagaauu

SEQ ID NO: 12925 - RNA, 3751 nt, Artificial Sequence
  SARS-CoV-2/Wuhan/WIV05/2019__EPI_ISL_402128 spike protein mRNA gc (1-1147)(Q965C_S1003C) Foldon construct
aggagaaagcuuaccauguucguguuccugguccuccugccccuggugagcucccagugcgugaaccucaccacccgcacgcagcugccgcccgccuacaccaacagcuucacccggggcgucuacuaccccgacaagguguuccgcuccagcgugcugcacuccacccaggaccucuuccugcccuucuucagcaacgucacgugguuccacgccauccacguguccgggaccaacggcaccaagcgguucgacaacccggugcugcccuucaacgacggggucuacuucgcgagcaccgagaaguccaacaucauccgcggcuggaucuucgggacgacccucgacagcaagacccagucccugcugaucgugaacaacgccaccaacguggucaucaaggugugcgaguuccaguucugcaacgaccccuuccucggcguguacuaccacaagaacaacaagagcuggauggaguccgaguuccgggucuacagcuccgccaacaacugcacguucgaguacgugagccagcccuuccugauggaccuggagggcaagcaggggaacuucaagaaccuccgcgaguucguguucaagaacaucgacggcuacuucaagaucuacuccaagcacaccccgaucaaccugguccgggaccugccccagggguucagcgcccucgagccccugguggaccugcccaucggcaucaacaucacccgcuuccagacccuccuggcccugcaccgguccuaccucacgccgggggacagcagcuccggcuggaccgcgggcgccgccgccuacuacgugggguaccugcagccccgcaccuuccugcucaaguacaacgagaacggcaccaucacggacgcggucgacugcgcccuggacccccugagcgagaccaagugcacccucaaguccuucaccguggagaaggggaucuaccagacgagcaacuuccgggugcagcccaccgaguccaucguccgcuucccgaacaucaccaaccugugccccuucggcgagguguucaacgccacccgguucgccagcgucuacgccuggaaccgcaagcggaucuccaacugcguggcggacuacagcgugcuguacaacuccgccagcuucuccacguucaagugcuacggcgucagccccaccaagcucaacgaccugugcuucaccaacguguacgccgacuccuucgugauccgcggggacgagguccggcagaucgcccccggccagaccgggaagaucgccgacuacaacuacaagcugccggacgacuucacgggcugcgugaucgcguggaacagcaacaaccucgacuccaaggucgggggcaacuacaacuaccuguaccgccuguuccgcaagagcaaccucaagcccuucgagcgggacaucuccaccgagaucuaccaggccggcagcacccccugcaacgggguggagggcuucaacugcuacuucccccugcaguccuacggguuccagccgaccaacggcgugggguaccagcccuaccggguggucgugcugagcuucgagcuccugcacgcccccgccacggugugcggccccaagaaguccaccaaccuggucaagaacaagugcgugaacuucaacuucaacggccucaccgggaccggcgugcugaccgagagcaacaagaaguuccugccguuccagcaguucgggcgcgacaucgccgacacgaccgacgcgguccgcgacccccagacccuggagauccucgacaucacccccugcagcuucggcgggguguccgugaucacgccgggcaccaacaccagcaaccaggucgccgugcuguaccaggacgugaacugcaccgagguccccguggccauccacgccgaccagcugacgcccaccuggcggguguacuccaccggcagcaacgucuuccagacccgcgccgggugccucaucggcgcggagcacgugaacaacuccuacgagugcgacauccccaucggggccggcaucugcgccagcuaccagacgcagaccaacuccccgcggcgcgcccggagcguggcgucccagagcaucaucgccuacaccaugucccugggcgccgagaacagcgucgccuacuccaacaacagcaucgccauccccaccaacuucacgaucuccgugaccaccgagauccugcccgugagcaugaccaagacgagcgucgacugcaccauguacaucugcggggacuccaccgagugcagcaaccuccugcugcaguacggcuccuucugcacccagcucaaccgcgcgcugacggggaucgccguggagcaggacaagaacacccaggagguguucgcccaggucaagcagaucuacaagacgcccccgaucaaggacuucggcggguucaacuucagccagauccugcccgaccccuccaagcccagcaagcgguccuucaucgaggaccuccuguucaacaaggugacccuggccgacgccggcuucaucaagcaguacggcgacugccucggggacaucgcggcccgcgaccugaucugcgcccagaaguucaacggccugaccgugcucccgccccugcugaccgacgagaugaucgcccaguacaccagcgcccuccuggcggggaccaucacguccggcuggaccuucggggccggcgccgcccugcagauccccuucgcgaugcagauggccuaccgguucaacggcaucggggucacccagaacgugcucuacgagaaccagaagcugaucgccaaccaguucaacagcgccaucggcaagauccaggacucccugagcuccaccgccagcgcgcucgggaagcugcaggacguggucaaccagaacgcccaggcccugaacacgcucgugaagugccuguccagcaacuucggcgccaucuccagcgugcugaacgacauccucucccgccuggacaaggucgaggccgaggugcagaucgaccggcugaucaccgggcgccuccagugccugcagaccuacgugacccagcagcugauccgggcggccgagauccgcgccagcgccaaccucgccgcgaccaagauguccgagugcguccugggccagagcaagcggguggacuucugcggcaagggguaccaccugauguccuucccccagagcgccccgcacggcguggucuuccuccacgugacguacguccccgcccaggagaagaacuucaccaccgcccccgcgaucugccacgacgggaaggcccacuucccccgcgagggcguguucguguccaacgggacccacugguucgucacgcagcggaacuucuacgagccgcagaucaucaccaccgacaacaccuucgugagcggcaacugcgacguggucaucggcaucgugaacaacacgguguacgacccccugcagcccgagcuggacuccggcgggagcggcuacauccccgaggccccgcgcgacgggcaggccuacgugcggaaggacggcgaguggguccugcucagcaccuuccugugaggacuaguuauaagacugacuagcccgaugggccucccaacgggcccuccuccccuccuugcaccgagauuaauaaaaaaaaaaaaaaaaaaaaaaaaaaaaaaaaaaaaaaaaaaaaaaaaaaaaaaaaaaaaaaaaugcaucccccccccccccccccccccccccccccccaaaggcucuuuucagagccaccagaauu

SEQ ID NO: 12926 - RNA, 3751 nt, Artificial Sequence
  SARS-CoV-2/Wuhan/WIV05/2019__EPI_ISL_402128 spike protein mRNA gc (1-1147)(F970C_G999C) Foldon construct
aggagaaagcuuaccauguucguguuccugguccuccugccccuggugagcucccagugcgugaaccucaccacccgcacgcagcugccgcccgccuacaccaacagcuucacccggggcgucuacuaccccgacaagguguuccgcuccagcgugcugcacuccacccaggaccucuuccugcccuucuucagcaacgucacgugguuccacgccauccacguguccgggaccaacggcaccaagcgguucgacaacccggugcugcccuucaacgacggggucuacuucgcgagcaccgagaaguccaacaucauccgcggcuggaucuucgggacgacccucgacagcaagacccagucccugcugaucgugaacaacgccaccaacguggucaucaaggugugcgaguuccaguucugcaacgaccccuuccucggcguguacuaccacaagaacaacaagagcuggauggaguccgaguuccgggucuacagcuccgccaacaacugcacguucgaguacgugagccagcccuuccugauggaccuggagggcaagcaggggaacuucaagaaccuccgcgaguucguguucaagaacaucgacggcuacuucaagaucuacuccaagcacaccccgaucaaccugguccgggaccugccccagggguucagcgcccucgagccccugguggaccugcccaucggcaucaacaucacccgcuuccagacccuccuggcccugcaccgguccuaccucacgccgggggacagcagcuccggcuggaccgcgggcgccgccgccuacuacgugggguaccugcagccccgcaccuuccugcucaaguacaacgagaacggcaccaucacggacgcggucgacugcgcccuggacccccugagcgagaccaagugcacccucaaguccuucaccguggagaaggggaucuaccagacgagcaacuuccgggugcagcccaccgaguccaucguccgcuucccgaacaucaccaaccugugccccuucggcgagguguucaacgccacccgguucgccagcgucuacgccuggaaccgcaagcggaucuccaacugcguggcggacuacagcgugcuguacaacuccgccagcuucuccacguucaagugcuacggcgucagccccaccaagcucaacgaccugugcuucaccaacguguacgccgacuccuucgugauccgcggggacgagguccggcagaucgcccccggccagaccgggaagaucgccgacuacaacuacaagcugccggacgacuucacgggcugcgugaucgcguggaacagcaacaaccucgacuccaaggucgggggcaacuacaacuaccuguaccgccuguuccgcaagagcaaccucaagcccuucgagcgggacaucuccaccgagaucuaccaggccggcagcacccccugcaacgggguggagggcuucaacugcuacuucccccugcaguccuacggguuccagccgaccaacggcgugggguaccagcccuaccggguggucgugcugagcuucgagcuccugcacgcccccgccacggugugcggccccaagaaguccaccaaccuggucaagaacaagugcgugaacuucaacuucaacggccucaccgggaccggcgugcugaccgagagcaacaagaaguuccugccguuccagcaguucgggcgcgacaucgccgacacgaccgacgcgguccgcgacccccagacccuggagauccucgacaucacccccugcagcuucggcgggguguccgugaucacgccgggcaccaacaccagcaaccaggucgccgugcuguaccaggacgugaacugcaccgagguccccguggccauccacgccgaccagcugacgcccaccuggcggguguacuccaccggcagcaacgucuuccagacccgcgccgggugccucaucggcgcggagcacgugaacaacuccuacgagugcgacauccccaucggggccggcaucugcgccagcuaccagacgcagaccaacuccccgcggcgcgcccggagcguggcgucccagagcaucaucgccuacaccaugucccugggcgccgagaacagcgucgccuacuccaacaacagcaucgccauccccaccaacuucacgaucuccgugaccaccgagauccugcccgugagcaugaccaagacgagcgucgacugcaccauguacaucugcggggacuccaccgagugcagcaaccuccugcugcaguacggcuccuucugcacccagcucaaccgcgcgcugacggggaucgccguggagcaggacaagaacacccaggagguguucgcccaggucaagcagaucuacaagacgcccccgaucaaggacuucggcggguucaacuucagccagauccugcccgaccccuccaagcccagcaagcgguccuucaucgaggaccuccuguucaacaaggugacccuggccgacgccggcuucaucaagcaguacggcgacugccucggggacaucgcggcccgcgaccugaucugcgcccagaaguucaacggccugaccgugcucccgccccugcugaccgacgagaugaucgcccaguacaccagcgcccuccuggcggggaccaucacguccggcuggaccuucggggccggcgccgcccugcagauccccuucgcgaugcagauggccuaccgguucaacggcaucggggucacccagaacgugcucuacgagaaccagaagcugaucgccaaccaguucaacagcgccaucggcaagauccaggacucccugagcuccaccgccagcgcgcucgggaagcugcaggacguggucaaccagaacgcccaggcccugaacacgcucgugaagcagcuguccagcaacugcggcgccaucuccagcgugcugaacgacauccucucccgccuggacaaggucgaggccgaggugcagaucgaccggcugaucaccugucgccuccagagccugcagaccuacgugacccagcagcugauccgggcggccgagauccgcgccagcgccaaccucgccgcgaccaagauguccgagugcguccugggccagagcaagcggguggacuucugcggcaagggguaccaccugauguccuucccccagagcgccccgcacggcguggucuuccuccacgugacguacguccccgcccaggagaagaacuucaccaccgcccccgcgaucugccacgacgggaaggcccacuucccccgcgagggcguguucguguccaacgggacccacugguucgucacgcagcggaacuucuacgagccgcagaucaucaccaccgacaacaccuucgugagcggcaacugcgacguggucaucggcaucgugaacaacacgguguacgacccccugcagcccgagcuggacuccggcgggagcggcuacauccccgaggccccgcgcgacgggcaggccuacgugcggaaggacggcgaguggguccugcucagcaccuuccugugaggacuaguuauaagacugacuagcccgaugggccucccaacgggcccuccuccccuccuugcaccgagauuaauaaaaaaaaaaaaaaaaaaaaaaaaaaaaaaaaaaaaaaaaaaaaaaaaaaaaaaaaaaaaaaaaugcaucccccccccccccccccccccccccccccccaaaggcucuuuucagagccaccagaauu

SEQ ID NO: 12927 - RNA, 3751 nt, Artificial Sequence
  SARS-CoV-2/Wuhan/WIV05/2019__EPI_ISL_402128 spike protein mRNA gc (1-1147)(A972C_R995C) Foldon construct
aggagaaagcuuaccauguucguguuccugguccuccugccccuggugagcucccagugcgugaaccucaccacccgcacgcagcugccgcccgccuacaccaacagcuucacccggggcgucuacuaccccgacaagguguuccgcuccagcgugcugcacuccacccaggaccucuuccugcccuucuucagcaacgucacgugguuccacgccauccacguguccgggaccaacggcaccaagcgguucgacaacccggugcugcccuucaacgacggggucuacuucgcgagcaccgagaaguccaacaucauccgcggcuggaucuucgggacgacccucgacagcaagacccagucccugcugaucgugaacaacgccaccaacguggucaucaaggugugcgaguuccaguucugcaacgaccccuuccucggcguguacuaccacaagaacaacaagagcuggauggaguccgaguuccgggucuacagcuccgccaacaacugcacguucgaguacgugagccagcccuuccugauggaccuggagggcaagcaggggaacuucaagaaccuccgcgaguucguguucaagaacaucgacggcuacuucaagaucuacuccaagcacaccccgaucaaccugguccgggaccugccccagggguucagcgcccucgagccccugguggaccugcccaucggcaucaacaucacccgcuuccagacccuccuggcccugcaccgguccuaccucacgccgggggacagcagcuccggcuggaccgcgggcgccgccgccuacuacgugggguaccugcagccccgcaccuuccugcucaaguacaacgagaacggcaccaucacggacgcggucgacugcgcccuggacccccugagcgagaccaagugcacccucaaguccuucaccguggagaaggggaucuaccagacgagcaacuuccgggugcagcccaccgaguccaucguccgcuucccgaacaucaccaaccugugccccuucggcgagguguucaacgccacccgguucgccagcgucuacgccuggaaccgcaagcggaucuccaacugcguggcggacuacagcgugcuguacaacuccgccagcuucuccacguucaagugcuacggcgucagccccaccaagcucaacgaccugugcuucaccaacguguacgccgacuccuucgugauccgcggggacgagguccggcagaucgcccccggccagaccgggaagaucgccgacuacaacuacaagcugccggacgacuucacgggcugcgugaucgcguggaacagcaacaaccucgacuccaaggucgggggcaacuacaacuaccuguaccgccuguuccgcaagagcaaccucaagcccuucgagcgggacaucuccaccgagaucuaccaggccggcagcacccccugcaacgggguggagggcuucaacugcuacuucccccugcaguccuacggguuccagccgaccaacggcgugggguaccagcccuaccggguggucgugcugagcuucgagcuccugcacgcccccgccacggugugcggccccaagaaguccaccaaccuggucaagaacaagugcgugaacuucaacuucaacggccucaccgggaccggcgugcugaccgagagcaacaagaaguuccugccguuccagcaguucgggcgcgacaucgccgacacgaccgacgcgguccgcgacccccagacccuggagauccucgacaucacccccugcagcuucggcgggguguccgugaucacgccgggcaccaacaccagcaaccaggucgccgugcuguaccaggacgugaacugcaccgagguccccguggccauccacgccgaccagcugacgcccaccuggcggguguacuccaccggcagcaacgucuuccagacccgcgccgggugccucaucggcgcggagcacgugaacaacuccuacgagugcgacauccccaucggggccggcaucugcgccagcuaccagacgcagaccaacuccccgcggcgcgcccggagcguggcgucccagagcaucaucgccuacaccaugucccugggcgccgagaacagcgucgccuacuccaacaacagcaucgccauccccaccaacuucacgaucuccgugaccaccgagauccugcccgugagcaugaccaagacgagcgucgacugcaccauguacaucugcggggacuccaccgagugcagcaaccuccugcugcaguacggcuccuucugcacccagcucaaccgcgcgcugacggggaucgccguggagcaggacaagaacacccaggagguguucgcccaggucaagcagaucuacaagacgcccccgaucaaggacuucggcggguucaacuucagccagauccugcccgaccccuccaagcccagcaagcgguccuucaucgaggaccuccuguucaacaaggugacccuggccgacgccggcuucaucaagcaguacggcgacugccucggggacaucgcggcccgcgaccugaucugcgcccagaaguucaacggccugaccgugcucccgccccugcugaccgacgagaugaucgcccaguacaccagcgcccuccuggcggggaccaucacguccggcuggaccuucggggccggcgccgcccugcagauccccuucgcgaugcagauggccuaccgguucaacggcaucggggucacccagaacgugcucuacgagaaccagaagcugaucgccaaccaguucaacagcgccaucggcaagauccaggacucccugagcuccaccgccagcgcgcucgggaagcugcaggacguggucaaccagaacgcccaggcccugaacacgcucgugaagcagcuguccagcaacuucggcugcaucuccagcgugcugaacgacauccucucccgccuggacaaggucgaggccgaggugcagaucgacugccugaucaccgggcgccuccagagccugcagaccuacgugacccagcagcugauccgggcggccgagauccgcgccagcgccaaccucgccgcgaccaagauguccgagugcguccugggccagagcaagcggguggacuucugcggcaagggguaccaccugauguccuucccccagagcgccccgcacggcguggucuuccuccacgugacguacguccccgcccaggagaagaacuucaccaccgcccccgcgaucugccacgacgggaaggcccacuucccccgcgagggcguguucguguccaacgggacccacugguucgucacgcagcggaacuucuacgagccgcagaucaucaccaccgacaacaccuucgugagcggcaacugcgacguggucaucggcaucgugaacaacacgguguacgacccccugcagcccgagcuggacuccggcgggagcggcuacauccccgaggccccgcgcgacgggcaggccuacgugcggaaggacggcgaguggguccugcucagcaccuuccugugaggacuaguuauaagacugacuagcccgaugggccucccaacgggcccuccuccccuccuugcaccgagauuaauaaaaaaaaaaaaaaaaaaaaaaaaaaaaaaaaaaaaaaaaaaaaaaaaaaaaaaaaaaaaaaaaugcaucccccccccccccccccccccccccccccccaaaggcucuuuucagagccaccagaauu

SEQ ID NO: 12928 - RNA, 3751 nt, Artificial Sequence
  SARS-CoV-2/Wuhan/WIV05/2019__EPI_ISL_402128 spike protein mRNA gc (1-1147)(A890C_V1040C) Foldon construct
aggagaaagcuuaccauguucguguuccugguccuccugccccuggugagcucccagugcgugaaccucaccacccgcacgcagcugccgcccgccuacaccaacagcuucacccggggcgucuacuaccccgacaagguguuccgcuccagcgugcugcacuccacccaggaccucuuccugcccuucuucagcaacgucacgugguuccacgccauccacguguccgggaccaacggcaccaagcgguucgacaacccggugcugcccuucaacgacggggucuacuucgcgagcaccgagaaguccaacaucauccgcggcuggaucuucgggacgacccucgacagcaagacccagucccugcugaucgugaacaacgccaccaacguggucaucaaggugugcgaguuccaguucugcaacgaccccuuccucggcguguacuaccacaagaacaacaagagcuggauggaguccgaguuccgggucuacagcuccgccaacaacugcacguucgaguacgugagccagcccuuccugauggaccuggagggcaagcaggggaacuucaagaaccuccgcgaguucguguucaagaacaucgacggcuacuucaagaucuacuccaagcacaccccgaucaaccugguccgggaccugccccagggguucagcgcccucgagccccugguggaccugcccaucggcaucaacaucacccgcuuccagacccuccuggcccugcaccgguccuaccucacgccgggggacagcagcuccggcuggaccgcgggcgccgccgccuacuacgugggguaccugcagccccgcaccuuccugcucaaguacaacgagaacggcaccaucacggacgcggucgacugcgcccuggacccccugagcgagaccaagugcacccucaaguccuucaccguggagaaggggaucuaccagacgagcaacuuccgggugcagcccaccgaguccaucguccgcuucccgaacaucaccaaccugugccccuucggcgagguguucaacgccacccgguucgccagcgucuacgccuggaaccgcaagcggaucuccaacugcguggcggacuacagcgugcuguacaacuccgccagcuucuccacguucaagugcuacggcgucagccccaccaagcucaacgaccugugcuucaccaacguguacgccgacuccuucgugauccgcggggacgagguccggcagaucgcccccggccagaccgggaagaucgccgacuacaacuacaagcugccggacgacuucacgggcugcgugaucgcguggaacagcaacaaccucgacuccaaggucgggggcaacuacaacuaccuguaccgccuguuccgcaagagcaaccucaagcccuucgagcgggacaucuccaccgagaucuaccaggccggcagcacccccugcaacgggguggagggcuucaacugcuacuucccccugcaguccuacggguuccagccgaccaacggcgugggguaccagcccuaccggguggucgugcugagcuucgagcuccugcacgcccccgccacggugugcggccccaagaaguccaccaaccuggucaagaacaagugcgugaacuucaacuucaacggccucaccgggaccggcgugcugaccgagagcaacaagaaguuccugccguuccagcaguucgggcgcgacaucgccgacacgaccgacgcgguccgcgacccccagacccuggagauccucgacaucacccccugcagcuucggcgggguguccgugaucacgccgggcaccaacaccagcaaccaggucgccgugcuguaccaggacgugaacugcaccgagguccccguggccauccacgccgaccagcugacgcccaccuggcggguguacuccaccggcagcaacgucuuccagacccgcgccgggugccucaucggcgcggagcacgugaacaacuccuacgagugcgacauccccaucggggccggcaucugcgccagcuaccagacgcagaccaacuccccgcggcgcgcccggagcguggcgucccagagcaucaucgccuacaccaugucccugggcgccgagaacagcgucgccuacuccaacaacagcaucgccauccccaccaacuucacgaucuccgugaccaccgagauccugcccgugagcaugaccaagacgagcgucgacugcaccauguacaucugcggggacuccaccgagugcagcaaccuccugcugcaguacggcuccuucugcacccagcucaaccgcgcgcugacggggaucgccguggagcaggacaagaacacccaggagguguucgcccaggucaagcagaucuacaagacgcccccgaucaaggacuucggcggguucaacuucagccagauccugcccgaccccuccaagcccagcaagcgguccuucaucgaggaccuccuguucaacaaggugacccuggccgacgccggcuucaucaagcaguacggcgacugccucggggacaucgcggcccgcgaccugaucugcgcccagaaguucaacggccugaccgugcucccgccccugcugaccgacgagaugaucgcccaguacaccagcgcccuccuggcggggaccaucacguccggcuggaccuucgggugcggcgccgcccugcagauccccuucgcgaugcagauggccuaccgguucaacggcaucggggucacccagaacgugcucuacgagaaccagaagcugaucgccaaccaguucaacagcgccaucggcaagauccaggacucccugagcuccaccgccagcgcgcucgggaagcugcaggacguggucaaccagaacgcccaggcccugaacacgcucgugaagcagcuguccagcaacuucggcgccaucuccagcgugcugaacgacauccucucccgccuggacaaggucgaggccgaggugcagaucgaccggcugaucaccgggcgccuccagagccugcagaccuacgugacccagcagcugauccgggcggccgagauccgcgccagcgccaaccucgccgcgaccaagauguccgagugcguccugggccagagcaagcggugcgacuucugcggcaagggguaccaccugauguccuucccccagagcgccccgcacggcguggucuuccuccacgugacguacguccccgcccaggagaagaacuucaccaccgcccccgcgaucugccacgacgggaaggcccacuucccccgcgagggcguguucguguccaacgggacccacugguucgucacgcagcggaacuucuacgagccgcagaucaucaccaccgacaacaccuucgugagcggcaacugcgacguggucaucggcaucgugaacaacacgguguacgacccccugcagcccgagcuggacuccggcgggagcggcuacauccccgaggccccgcgcgacgggcaggccuacgugcggaaggacggcgaguggguccugcucagcaccuuccugugaggacuaguuauaagacugacuagcccgaugggccucccaacgggcccuccuccccuccuugcaccgagauuaauaaaaaaaaaaaaaaaaaaaaaaaaaaaaaaaaaaaaaaaaaaaaaaaaaaaaaaaaaaaaaaaaugcaucccccccccccccccccccccccccccccccaaaggcucuuuucagagccaccagaauu

SEQ ID NO: 12929 - RNA, 3751 nt, Artificial Sequence
  SARS-CoV-2/Wuhan/WIV05/2019__EPI_ISL_402128 spike protein mRNA gc (1-1147)(T874C_S1055C) Foldon construct
aggagaaagcuuaccauguucguguuccugguccuccugccccuggugagcucccagugcgugaaccucaccacccgcacgcagcugccgcccgccuacaccaacagcuucacccggggcgucuacuaccccgacaagguguuccgcuccagcgugcugcacuccacccaggaccucuuccugcccuucuucagcaacgucacgugguuccacgccauccacguguccgggaccaacggcaccaagcgguucgacaacccggugcugcccuucaacgacggggucuacuucgcgagcaccgagaaguccaacaucauccgcggcuggaucuucgggacgacccucgacagcaagacccagucccugcugaucgugaacaacgccaccaacguggucaucaaggugugcgaguuccaguucugcaacgaccccuuccucggcguguacuaccacaagaacaacaagagcuggauggaguccgaguuccgggucuacagcuccgccaacaacugcacguucgaguacgugagccagcccuuccugauggaccuggagggcaagcaggggaacuucaagaaccuccgcgaguucguguucaagaacaucgacggcuacuucaagaucuacuccaagcacaccccgaucaaccugguccgggaccugccccagggguucagcgcccucgagccccugguggaccugcccaucggcaucaacaucacccgcuuccagacccuccuggcccugcaccgguccuaccucacgccgggggacagcagcuccggcuggaccgcgggcgccgccgccuacuacgugggguaccugcagccccgcaccuuccugcucaaguacaacgagaacggcaccaucacggacgcggucgacugcgcccuggacccccugagcgagaccaagugcacccucaaguccuucaccguggagaaggggaucuaccagacgagcaacuuccgggugcagcccaccgaguccaucguccgcuucccgaacaucaccaaccugugccccuucggcgagguguucaacgccacccgguucgccagcgucuacgccuggaaccgcaagcggaucuccaacugcguggcggacuacagcgugcuguacaacuccgccagcuucuccacguucaagugcuacggcgucagccccaccaagcucaacgaccugugcuucaccaacguguacgccgacuccuucgugauccgcggggacgagguccggcagaucgcccccggccagaccgggaagaucgccgacuacaacuacaagcugccggacgacuucacgggcugcgugaucgcguggaacagcaacaaccucgacuccaaggucgggggcaacuacaacuaccuguaccgccuguuccgcaagagcaaccucaagcccuucgagcgggacaucuccaccgagaucuaccaggccggcagcacccccugcaacgggguggagggcuucaacugcuacuucccccugcaguccuacggguuccagccgaccaacggcgugggguaccagcccuaccggguggucgugcugagcuucgagcuccugcacgcccccgccacggugugcggccccaagaaguccaccaaccuggucaagaacaagugcgugaacuucaacuucaacggccucaccgggaccggcgugcugaccgagagcaacaagaaguuccugccguuccagcaguucgggcgcgacaucgccgacacgaccgacgcgguccgcgacccccagacccuggagauccucgacaucacccccugcagcuucggcgggguguccgugaucacgccgggcaccaacaccagcaaccaggucgccgugcuguaccaggacgugaacugcaccgagguccccguggccauccacgccgaccagcugacgcccaccuggcggguguacuccaccggcagcaacgucuuccagacccgcgccgggugccucaucggcgcggagcacgugaacaacuccuacgagugcgacauccccaucggggccggcaucugcgccagcuaccagacgcagaccaacuccccgcggcgcgcccggagcguggcgucccagagcaucaucgccuacaccaugucccugggcgccgagaacagcgucgccuacuccaacaacagcaucgccauccccaccaacuucacgaucuccgugaccaccgagauccugcccgugagcaugaccaagacgagcgucgacugcaccauguacaucugcggggacuccaccgagugcagcaaccuccugcugcaguacggcuccuucugcacccagcucaaccgcgcgcugacggggaucgccguggagcaggacaagaacacccaggagguguucgcccaggucaagcagaucuacaagacgcccccgaucaaggacuucggcggguucaacuucagccagauccugcccgaccccuccaagcccagcaagcgguccuucaucgaggaccuccuguucaacaaggugacccuggccgacgccggcuucaucaagcaguacggcgacugccucggggacaucgcggcccgcgaccugaucugcgcccagaaguucaacggccugaccgugcucccgccccugcugaccgacgagaugaucgcccaguacugcagcgcccuccuggcggggaccaucacguccggcuggaccuucggggccggcgccgcccugcagauccccuucgcgaugcagauggccuaccgguucaacggcaucggggucacccagaacgugcucuacgagaaccagaagcugaucgccaaccaguucaacagcgccaucggcaagauccaggacucccugagcuccaccgccagcgcgcucgggaagcugcaggacguggucaaccagaacgcccaggcccugaacacgcucgugaagcagcuguccagcaacuucggcgccaucuccagcgugcugaacgacauccucucccgccuggacaaggucgaggccgaggugcagaucgaccggcugaucaccgggcgccuccagagccugcagaccuacgugacccagcagcugauccgggcggccgagauccgcgccagcgccaaccucgccgcgaccaagauguccgagugcguccugggccagagcaagcggguggacuucugcggcaagggguaccaccugauguccuucccccagugcgccccgcacggcguggucuuccuccacgugacguacguccccgcccaggagaagaacuucaccaccgcccccgcgaucugccacgacgggaaggcccacuucccccgcgagggcguguucguguccaacgggacccacugguucgucacgcagcggaacuucuacgagccgcagaucaucaccaccgacaacaccuucgugagcggcaacugcgacguggucaucggcaucgugaacaacacgguguacgacccccugcagcccgagcuggacuccggcgggagcggcuacauccccgaggccccgcgcgacgggcaggccuacgugcggaaggacggcgaguggguccugcucagcaccuuccugugaggacuaguuauaagacugacuagcccgaugggccucccaacgggcccuccuccccuccuugcaccgagauuaauaaaaaaaaaaaaaaaaaaaaaaaaaaaaaaaaaaaaaaaaaaaaaaaaaaaaaaaaaaaaaaaaugcaucccccccccccccccccccccccccccccccaaaggcucuuuucagagccaccagaauu

SEQ ID NO: 12930 - RNA, 4123 nt, Artificial Sequence
  SARS-CoV-2/Wuhan/WIV05/2019__EPI_ISL_402128 spike protein mRNA gc (1-1147) WhcAg construct
aggagaaagcuuaccauguucguguuccugguccuccugccccuggugagcucccagugcgugaaccucaccacccgcacgcagcugccgcccgccuacaccaacagcuucacccggggcgucuacuaccccgacaagguguuccgcuccagcgugcugcacuccacccaggaccucuuccugcccuucuucagcaacgucacgugguuccacgccauccacguguccgggaccaacggcaccaagcgguucgacaacccggugcugcccuucaacgacggggucuacuucgcgagcaccgagaaguccaacaucauccgcggcuggaucuucgggacgacccucgacagcaagacccagucccugcugaucgugaacaacgccaccaacguggucaucaaggugugcgaguuccaguucugcaacgaccccuuccucggcguguacuaccacaagaacaacaagagcuggauggaguccgaguuccgggucuacagcuccgccaacaacugcacguucgaguacgugagccagcccuuccugauggaccuggagggcaagcaggggaacuucaagaaccuccgcgaguucguguucaagaacaucgacggcuacuucaagaucuacuccaagcacaccccgaucaaccugguccgggaccugccccagggguucagcgcccucgagccccugguggaccugcccaucggcaucaacaucacccgcuuccagacccuccuggcccugcaccgguccuaccucacgccgggggacagcagcuccggcuggaccgcgggcgccgccgccuacuacgugggguaccugcagccccgcaccuuccugcucaaguacaacgagaacggcaccaucacggacgcggucgacugcgcccuggacccccugagcgagaccaagugcacccucaaguccuucaccguggagaaggggaucuaccagacgagcaacuuccgggugcagcccaccgaguccaucguccgcuucccgaacaucaccaaccugugccccuucggcgagguguucaacgccacccgguucgccagcgucuacgccuggaaccgcaagcggaucuccaacugcguggcggacuacagcgugcuguacaacuccgccagcuucuccacguucaagugcuacggcgucagccccaccaagcucaacgaccugugcuucaccaacguguacgccgacuccuucgugauccgcggggacgagguccggcagaucgcccccggccagaccgggaagaucgccgacuacaacuacaagcugccggacgacuucacgggcugcgugaucgcguggaacagcaacaaccucgacuccaaggucgggggcaacuacaacuaccuguaccgccuguuccgcaagagcaaccucaagcccuucgagcgggacaucuccaccgagaucuaccaggccggcagcacccccugcaacgggguggagggcuucaacugcuacuucccccugcaguccuacggguuccagccgaccaacggcgugggguaccagcccuaccggguggucgugcugagcuucgagcuccugcacgcccccgccacggugugcggccccaagaaguccaccaaccuggucaagaacaagugcgugaacuucaacuucaacggccucaccgggaccggcgugcugaccgagagcaacaagaaguuccugccguuccagcaguucgggcgcgacaucgccgacacgaccgacgcgguccgcgacccccagacccuggagauccucgacaucacccccugcagcuucggcgggguguccgugaucacgccgggcaccaacaccagcaaccaggucgccgugcuguaccaggacgugaacugcaccgagguccccguggccauccacgccgaccagcugacgcccaccuggcggguguacuccaccggcagcaacgucuuccagacccgcgccgggugccucaucggcgcggagcacgugaacaacuccuacgagugcgacauccccaucggggccggcaucugcgccagcuaccagacgcagaccaacuccccgcggcgcgcccggagcguggcgucccagagcaucaucgccuacaccaugucccugggcgccgagaacagcgucgccuacuccaacaacagcaucgccauccccaccaacuucacgaucuccgugaccaccgagauccugcccgugagcaugaccaagacgagcgucgacugcaccauguacaucugcggggacuccaccgagugcagcaaccuccugcugcaguacggcuccuucugcacccagcucaaccgcgcgcugacggggaucgccguggagcaggacaagaacacccaggagguguucgcccaggucaagcagaucuacaagacgcccccgaucaaggacuucggcggguucaacuucagccagauccugcccgaccccuccaagcccagcaagcgguccuucaucgaggaccuccuguucaacaaggugacccuggccgacgccggcuucaucaagcaguacggcgacugccucggggacaucgcggcccgcgaccugaucugcgcccagaaguucaacggccugaccgugcucccgccccugcugaccgacgagaugaucgcccaguacaccagcgcccuccuggcggggaccaucacguccggcuggaccuucggggccggcgccgcccugcagauccccuucgcgaugcagauggccuaccgguucaacggcaucggggucacccagaacgugcucuacgagaaccagaagcugaucgccaaccaguucaacagcgccaucggcaagauccaggacucccugagcuccaccgccagcgcgcucgggaagcugcaggacguggucaaccagaacgcccaggcccugaacacgcucgugaagcagcuguccagcaacuucggcgccaucuccagcgugcugaacgacauccucucccgccuggacaaggucgaggccgaggugcagaucgaccggcugaucaccgggcgccuccagagccugcagaccuacgugacccagcagcugauccgggcggccgagauccgcgccagcgccaaccucgccgcgaccaagauguccgagugcguccugggccagagcaagcggguggacuucugcggcaagggguaccaccugauguccuucccccagagcgccccgcacggcguggucuuccuccacgugacguacguccccgcccaggagaagaacuucaccaccgcccccgcgaucugccacgacgggaaggcccacuucccccgcgagggcguguucguguccaacgggacccacugguucgucacgcagcggaacuucuacgagccgcagaucaucaccaccgacaacaccuucgugagcggcaacugcgacguggucaucggcaucgugaacaacacgguguacgacccccugcagcccgagcuggacuccggcgggggcgggagcgacaucgaccccuacaaggaguucggcagcuccuaccagcugcucaacuuccugccccuggacuucuuccccgaccucaacgcccugguggacaccgccaccgcgcuguacgaggaggagcucacggggcgcgagcacugcagcccccaccacaccgccauccggcaggcccuggucugcugggacgagcugaccaagcucaucgccuggauguccagcaacaucaccuccgagcagguccgcacgaucaucgugaaccacgucaacgacaccuggggccugaaggugcggcagagccugugguuccaccucuccugccugaccuucgggcagcacaccgugcaggaguuccuggucagcuucggcguguggauccgcacgcccgccccguaccggccgcccaacgcgccgauccucuccacccugccggagcacaccgugaucugcugaggacuaguuauaagacugacuagcccgaugggccucccaacgggcccuccuccccuccuugcaccgagauuaauaaaaaaaaaaaaaaaaaaaaaaaaaaaaaaaaaaaaaaaaaaaaaaaaaaaaaaaaaaaaaaaaugcaucccccccccccccccccccccccccccccccaaaggcucuuuucagagccaccagaauu

SEQ ID NO: 12931 - RNA, 4123 nt, Artificial Sequence
  SARS-CoV-2/Wuhan/WIV05/2019__EPI_ISL_402128 spike protein mRNA gc (1-1147)(K986P_V987P) WhcAg construct R9663
aggagaaagcuuaccauguucguguuccugguccuccugccccuggugagcucccagugcgugaaccucaccacccgcacgcagcugccgcccgccuacaccaacagcuucacccggggcgucuacuaccccgacaagguguuccgcuccagcgugcugcacuccacccaggaccucuuccugcccuucuucagcaacgucacgugguuccacgccauccacguguccgggaccaacggcaccaagcgguucgacaacccggugcugcccuucaacgacggggucuacuucgcgagcaccgagaaguccaacaucauccgcggcuggaucuucgggacgacccucgacagcaagacccagucccugcugaucgugaacaacgccaccaacguggucaucaaggugugcgaguuccaguucugcaacgaccccuuccucggcguguacuaccacaagaacaacaagagcuggauggaguccgaguuccgggucuacagcuccgccaacaacugcacguucgaguacgugagccagcccuuccugauggaccuggagggcaagcaggggaacuucaagaaccuccgcgaguucguguucaagaacaucgacggcuacuucaagaucuacuccaagcacaccccgaucaaccugguccgggaccugccccagggguucagcgcccucgagccccugguggaccugcccaucggcaucaacaucacccgcuuccagacccuccuggcccugcaccgguccuaccucacgccgggggacagcagcuccggcuggaccgcgggcgccgccgccuacuacgugggguaccugcagccccgcaccuuccugcucaaguacaacgagaacggcaccaucacggacgcggucgacugcgcccuggacccccugagcgagaccaagugcacccucaaguccuucaccguggagaaggggaucuaccagacgagcaacuuccgggugcagcccaccgaguccaucguccgcuucccgaacaucaccaaccugugccccuucggcgagguguucaacgccacccgguucgccagcgucuacgccuggaaccgcaagcggaucuccaacugcguggcggacuacagcgugcuguacaacuccgccagcuucuccacguucaagugcuacggcgucagccccaccaagcucaacgaccugugcuucaccaacguguacgccgacuccuucgugauccgcggggacgagguccggcagaucgcccccggccagaccgggaagaucgccgacuacaacuacaagcugccggacgacuucacgggcugcgugaucgcguggaacagcaacaaccucgacuccaaggucgggggcaacuacaacuaccuguaccgccuguuccgcaagagcaaccucaagcccuucgagcgggacaucuccaccgagaucuaccaggccggcagcacccccugcaacgggguggagggcuucaacugcuacuucccccugcaguccuacggguuccagccgaccaacggcgugggguaccagcccuaccggguggucgugcugagcuucgagcuccugcacgcccccgccacggugugcggccccaagaaguccaccaaccuggucaagaacaagugcgugaacuucaacuucaacggccucaccgggaccggcgugcugaccgagagcaacaagaaguuccugccguuccagcaguucgggcgcgacaucgccgacacgaccgacgcgguccgcgacccccagacccuggagauccucgacaucacccccugcagcuucggcgggguguccgugaucacgccgggcaccaacaccagcaaccaggucgccgugcuguaccaggacgugaacugcaccgagguccccguggccauccacgccgaccagcugacgcccaccuggcggguguacuccaccggcagcaacgucuuccagacccgcgccgggugccucaucggcgcggagcacgugaacaacuccuacgagugcgacauccccaucggggccggcaucugcgccagcuaccagacgcagaccaacuccccgcggcgcgcccggagcguggcgucccagagcaucaucgccuacaccaugucccugggcgccgagaacagcgucgccuacuccaacaacagcaucgccauccccaccaacuucacgaucuccgugaccaccgagauccugcccgugagcaugaccaagacgagcgucgacugcaccauguacaucugcggggacuccaccgagugcagcaaccuccugcugcaguacggcuccuucugcacccagcucaaccgcgcgcugacggggaucgccguggagcaggacaagaacacccaggagguguucgcccaggucaagcagaucuacaagacgcccccgaucaaggacuucggcggguucaacuucagccagauccugcccgaccccuccaagcccagcaagcgguccuucaucgaggaccuccuguucaacaaggugacccuggccgacgccggcuucaucaagcaguacggcgacugccucggggacaucgcggcccgcgaccugaucugcgcccagaaguucaacggccugaccgugcucccgccccugcugaccgacgagaugaucgcccaguacaccagcgcccuccuggcggggaccaucacguccggcuggaccuucggggccggcgccgcccugcagauccccuucgcgaugcagauggccuaccgguucaacggcaucggggucacccagaacgugcucuacgagaaccagaagcugaucgccaaccaguucaacagcgccaucggcaagauccaggacucccugagcuccaccgccagcgcgcucgggaagcugcaggacguggucaaccagaacgcccaggcccugaacacgcucgugaagcagcuguccagcaacuucggcgccaucuccagcgugcugaacgacauccucucccgccuggacccgcccgaggccgaggugcagaucgaccggcugaucaccgggcgccuccagagccugcagaccuacgugacccagcagcugauccgggcggccgagauccgcgccagcgccaaccucgccgcgaccaagauguccgagugcguccugggccagagcaagcggguggacuucugcggcaagggguaccaccugauguccuucccccagagcgccccgcacggcguggucuuccuccacgugacguacguccccgcccaggagaagaacuucaccaccgcccccgcgaucugccacgacgggaaggcccacuucccccgcgagggcguguucguguccaacgggacccacugguucgucacgcagcggaacuucuacgagccgcagaucaucaccaccgacaacaccuucgugagcggcaacugcgacguggucaucggcaucgugaacaacacgguguacgacccccugcagcccgagcuggacuccggcgggggcgggagcgacaucgaccccuacaaggaguucggcagcuccuaccagcugcucaacuuccugccccuggacuucuuccccgaccucaacgcccugguggacaccgccaccgcgcuguacgaggaggagcucacggggcgcgagcacugcagcccccaccacaccgccauccggcaggcccuggucugcugggacgagcugaccaagcucaucgccuggauguccagcaacaucaccuccgagcagguccgcacgaucaucgugaaccacgucaacgacaccuggggccugaaggugcggcagagccugugguuccaccucuccugccugaccuucgggcagcacaccgugcaggaguuccuggucagcuucggcguguggauccgcacgcccgccccguaccggccgcccaacgcgccgauccucuccacccugccggagcacaccgugaucugcugaggacuaguuauaagacugacuagcccgaugggccucccaacgggcccuccuccccuccuugcaccgagauuaauaaaaaaaaaaaaaaaaaaaaaaaaaaaaaaaaaaaaaaaaaaaaaaaaaaaaaaaaaaaaaaaaugcaucccccccccccccccccccccccccccccccaaaggcucuuuucagagccaccagaauu

SEQ ID NO: 12932 - RNA, 4123 nt, Artificial Sequence
  SARS-CoV-2/Wuhan/WIV05/2019__EPI_ISL_402128 spike protein mRNA gc (1-1147)(K986P_V987P_T887WN_A1020W) WhcAg construct
aggagaaagcuuaccauguucguguuccugguccuccugccccuggugagcucccagugcgugaaccucaccacccgcacgcagcugccgcccgccuacaccaacagcuucacccggggcgucuacuaccccgacaagguguuccgcuccagcgugcugcacuccacccaggaccucuuccugcccuucuucagcaacgucacgugguuccacgccauccacguguccgggaccaacggcaccaagcgguucgacaacccggugcugcccuucaacgacggggucuacuucgcgagcaccgagaaguccaacaucauccgcggcuggaucuucgggacgacccucgacagcaagacccagucccugcugaucgugaacaacgccaccaacguggucaucaaggugugcgaguuccaguucugcaacgaccccuuccucggcguguacuaccacaagaacaacaagagcuggauggaguccgaguuccgggucuacagcuccgccaacaacugcacguucgaguacgugagccagcccuuccugauggaccuggagggcaagcaggggaacuucaagaaccuccgcgaguucguguucaagaacaucgacggcuacuucaagaucuacuccaagcacaccccgaucaaccugguccgggaccugccccagggguucagcgcccucgagccccugguggaccugcccaucggcaucaacaucacccgcuuccagacccuccuggcccugcaccgguccuaccucacgccgggggacagcagcuccggcuggaccgcgggcgccgccgccuacuacgugggguaccugcagccccgcaccuuccugcucaaguacaacgagaacggcaccaucacggacgcggucgacugcgcccuggacccccugagcgagaccaagugcacccucaaguccuucaccguggagaaggggaucuaccagacgagcaacuuccgggugcagcccaccgaguccaucguccgcuucccgaacaucaccaaccugugccccuucggcgagguguucaacgccacccgguucgccagcgucuacgccuggaaccgcaagcggaucuccaacugcguggcggacuacagcgugcuguacaacuccgccagcuucuccacguucaagugcuacggcgucagccccaccaagcucaacgaccugugcuucaccaacguguacgccgacuccuucgugauccgcggggacgagguccggcagaucgcccccggccagaccgggaagaucgccgacuacaacuacaagcugccggacgacuucacgggcugcgugaucgcguggaacagcaacaaccucgacuccaaggucgggggcaacuacaacuaccuguaccgccuguuccgcaagagcaaccucaagcccuucgagcgggacaucuccaccgagaucuaccaggccggcagcacccccugcaacgggguggagggcuucaacugcuacuucccccugcaguccuacggguuccagccgaccaacggcgugggguaccagcccuaccggguggucgugcugagcuucgagcuccugcacgcccccgccacggugugcggccccaagaaguccaccaaccuggucaagaacaagugcgugaacuucaacuucaacggccucaccgggaccggcgugcugaccgagagcaacaagaaguuccugccguuccagcaguucgggcgcgacaucgccgacacgaccgacgcgguccgcgacccccagacccuggagauccucgacaucacccccugcagcuucggcgggguguccgugaucacgccgggcaccaacaccagcaaccaggucgccgugcuguaccaggacgugaacugcaccgagguccccguggccauccacgccgaccagcugacgcccaccuggcggguguacuccaccggcagcaacgucuuccagacccgcgccgggugccucaucggcgcggagcacgugaacaacuccuacgagugcgacauccccaucggggccggcaucugcgccagcuaccagacgcagaccaacuccccgcggcgcgcccggagcguggcgucccagagcaucaucgccuacaccaugucccugggcgccgagaacagcgucgccuacuccaacaacagcaucgccauccccaccaacuucacgaucuccgugaccaccgagauccugcccgugagcaugaccaagacgagcgucgacugcaccauguacaucugcggggacuccaccgagugcagcaaccuccugcugcaguacggcuccuucugcacccagcucaaccgcgcgcugacggggaucgccguggagcaggacaagaacacccaggagguguucgcccaggucaagcagaucuacaagacgcccccgaucaaggacuucggcggguucaacuucagccagauccugcccgaccccuccaagcccagcaagcgguccuucaucgaggaccuccuguucaacaaggugacccuggccgacgccggcuucaucaagcaguacggcgacugccucggggacaucgcggcccgcgaccugaucugcgcccagaaguucaacggccugaccgugcucccgccccugcugaccgacgagaugaucgcccaguacaccagcgcccuccuggcggggaccaucacguccggcuggugguucggggccggcgccgcccugcagauccccuucgcgaugcagauggccuaccgguucaacggcaucggggucacccagaacgugcucuacgagaaccagaagcugaucgccaaccaguucaacagcgccaucggcaagauccaggacucccugagcuccaccgccagcgcgcucgggaagcugcaggacguggucaaccagaacgcccaggcccugaacacgcucgugaagcagcuguccagcaacuucggcgccaucuccagcgugcugaacgacauccucucccgccuggacccgcccgaggccgaggugcagaucgaccggcugaucaccgggcgccuccagagccugcagaccuacgugacccagcagcugauccgggcggccgagauccgcuggagcgccaaccucgccgcgaccaagauguccgagugcguccugggccagagcaagcggguggacuucugcggcaagggguaccaccugauguccuucccccagagcgccccgcacggcguggucuuccuccacgugacguacguccccgcccaggagaagaacuucaccaccgcccccgcgaucugccacgacgggaaggcccacuucccccgcgagggcguguucguguccaacgggacccacugguucgucacgcagcggaacuucuacgagccgcagaucaucaccaccgacaacaccuucgugagcggcaacugcgacguggucaucggcaucgugaacaacacgguguacgacccccugcagcccgagcuggacuccggcgggggcgggagcgacaucgaccccuacaaggaguucggcagcuccuaccagcugcucaacuuccugccccuggacuucuuccccgaccucaacgcccugguggacaccgccaccgcgcuguacgaggaggagcucacggggcgcgagcacugcagcccccaccacaccgccauccggcaggcccuggucugcugggacgagcugaccaagcucaucgccuggauguccagcaacaucaccuccgagcagguccgcacgaucaucgugaaccacgucaacgacaccuggggccugaaggugcggcagagccugugguuccaccucuccugccugaccuucgggcagcacaccgugcaggaguuccuggucagcuucggcguguggauccgcacgcccgccccguaccggccgcccaacgcgccgauccucuccacccugccggagcacaccgugaucugcugaggacuaguuauaagacugacuagcccgaugggccucccaacgggcccuccuccccuccuugcaccgagauuaauaaaaaaaaaaaaaaaaaaaaaaaaaaaaaaaaaaaaaaaaaaaaaaaaaaaaaaaaaaaaaaaaugcaucccccccccccccccccccccccccccccccaaaggcucuuuucagagccaccagaauu

SEQ ID NO: 12933 - RNA, 4123 nt, Artificial Sequence
  SARS-CoV-2/Wuhan/WIV05/2019__EPI_ISL_402128 spike protein mRNA gc (1-1147)(K986P_V987P_P1069F) WhcAg construct
aggagaaagcuuaccauguucguguuccugguccuccugccccuggugagcucccagugcgugaaccucaccacccgcacgcagcugccgcccgccuacaccaacagcuucacccggggcgucuacuaccccgacaagguguuccgcuccagcgugcugcacuccacccaggaccucuuccugcccuucuucagcaacgucacgugguuccacgccauccacguguccgggaccaacggcaccaagcgguucgacaacccggugcugcccuucaacgacggggucuacuucgcgagcaccgagaaguccaacaucauccgcggcuggaucuucgggacgacccucgacagcaagacccagucccugcugaucgugaacaacgccaccaacguggucaucaaggugugcgaguuccaguucugcaacgaccccuuccucggcguguacuaccacaagaacaacaagagcuggauggaguccgaguuccgggucuacagcuccgccaacaacugcacguucgaguacgugagccagcccuuccugauggaccuggagggcaagcaggggaacuucaagaaccuccgcgaguucguguucaagaacaucgacggcuacuucaagaucuacuccaagcacaccccgaucaaccugguccgggaccugccccagggguucagcgcccucgagccccugguggaccugcccaucggcaucaacaucacccgcuuccagacccuccuggcccugcaccgguccuaccucacgccgggggacagcagcuccggcuggaccgcgggcgccgccgccuacuacgugggguaccugcagccccgcaccuuccugcucaaguacaacgagaacggcaccaucacggacgcggucgacugcgcccuggacccccugagcgagaccaagugcacccucaaguccuucaccguggagaaggggaucuaccagacgagcaacuuccgggugcagcccaccgaguccaucguccgcuucccgaacaucaccaaccugugccccuucggcgagguguucaacgccacccgguucgccagcgucuacgccuggaaccgcaagcggaucuccaacugcguggcggacuacagcgugcuguacaacuccgccagcuucuccacguucaagugcuacggcgucagccccaccaagcucaacgaccugugcuucaccaacguguacgccgacuccuucgugauccgcggggacgagguccggcagaucgcccccggccagaccgggaagaucgccgacuacaacuacaagcugccggacgacuucacgggcugcgugaucgcguggaacagcaacaaccucgacuccaaggucgggggcaacuacaacuaccuguaccgccuguuccgcaagagcaaccucaagcccuucgagcgggacaucuccaccgagaucuaccaggccggcagcacccccugcaacgggguggagggcuucaacugcuacuucccccugcaguccuacggguuccagccgaccaacggcgugggguaccagcccuaccggguggucgugcugagcuucgagcuccugcacgcccccgccacggugugcggccccaagaaguccaccaaccuggucaagaacaagugcgugaacuucaacuucaacggccucaccgggaccggcgugcugaccgagagcaacaagaaguuccugccguuccagcaguucgggcgcgacaucgccgacacgaccgacgcgguccgcgacccccagacccuggagauccucgacaucacccccugcagcuucggcgggguguccgugaucacgccgggcaccaacaccagcaaccaggucgccgugcuguaccaggacgugaacugcaccgagguccccguggccauccacgccgaccagcugacgcccaccuggcggguguacuccaccggcagcaacgucuuccagacccgcgccgggugccucaucggcgcggagcacgugaacaacuccuacgagugcgacauccccaucggggccggcaucugcgccagcuaccagacgcagaccaacuccccgcggcgcgcccggagcguggcgucccagagcaucaucgccuacaccaugucccugggcgccgagaacagcgucgccuacuccaacaacagcaucgccauccccaccaacuucacgaucuccgugaccaccgagauccugcccgugagcaugaccaagacgagcgucgacugcaccauguacaucugcggggacuccaccgagugcagcaaccuccugcugcaguacggcuccuucugcacccagcucaaccgcgcgcugacggggaucgccguggagcaggacaagaacacccaggagguguucgcccaggucaagcagaucuacaagacgcccccgaucaaggacuucggcggguucaacuucagccagauccugcccgaccccuccaagcccagcaagcgguccuucaucgaggaccuccuguucaacaaggugacccuggccgacgccggcuucaucaagcaguacggcgacugccucggggacaucgcggcccgcgaccugaucugcgcccagaaguucaacggccugaccgugcucccgccccugcugaccgacgagaugaucgcccaguacaccagcgcccuccuggcggggaccaucacguccggcuggaccuucggggccggcgccgcccugcagauccccuucgcgaugcagauggccuaccgguucaacggcaucggggucacccagaacgugcucuacgagaaccagaagcugaucgccaaccaguucaacagcgccaucggcaagauccaggacucccugagcuccaccgccagcgcgcucgggaagcugcaggacguggucaaccagaacgcccaggcccugaacacgcucgugaagcagcuguccagcaacuucggcgccaucuccagcgugcugaacgacauccucucccgccuggacccgcccgaggccgaggugcagaucgaccggcugaucaccgggcgccuccagagccugcagaccuacgugacccagcagcugauccgggcggccgagauccgcgccagcgccaaccucgccgcgaccaagauguccgagugcguccugggccagagcaagcggguggacuucugcggcaagggguaccaccugauguccuucccccagagcgccccgcacggcguggucuuccuccacgugacguacgucuucgcccaggagaagaacuucaccaccgcccccgcgaucugccacgacgggaaggcccacuucccccgcgagggcguguucguguccaacgggacccacugguucgucacgcagcggaacuucuacgagccgcagaucaucaccaccgacaacaccuucgugagcggcaacugcgacguggucaucggcaucgugaacaacacgguguacgacccccugcagcccgagcuggacuccggcgggggcgggagcgacaucgaccccuacaaggaguucggcagcuccuaccagcugcucaacuuccugccccuggacuucuuccccgaccucaacgcccugguggacaccgccaccgcgcuguacgaggaggagcucacggggcgcgagcacugcagcccccaccacaccgccauccggcaggcccuggucugcugggacgagcugaccaagcucaucgccuggauguccagcaacaucaccuccgagcagguccgcacgaucaucgugaaccacgucaacgacaccuggggccugaaggugcggcagagccugugguuccaccucuccugccugaccuucgggcagcacaccgugcaggaguuccuggucagcuucggcguguggauccgcacgcccgccccguaccggccgcccaacgcgccgauccucuccacccugccggagcacaccgugaucugcugaggacuaguuauaagacugacuagcccgaugggccucccaacgggcccuccuccccuccuugcaccgagauuaauaaaaaaaaaaaaaaaaaaaaaaaaaaaaaaaaaaaaaaaaaaaaaaaaaaaaaaaaaaaaaaaaugcaucccccccccccccccccccccccccccccccaaaggcucuuuucagagccaccagaauu

SEQ ID NO: 12934 - RNA, 4123 nt, Artificial Sequence
  SARS-CoV-2/Wuhan/WIV05/2019__EPI_ISL_402128 spike protein mRNA gc (1-1147)(K986P_V987P_ H1048Q_H1064N_ H1083N_H1101N) WhcAg construct
aggagaaagcuuaccauguucguguuccugguccuccugccccuggugagcucccagugcgugaaccucaccacccgcacgcagcugccgcccgccuacaccaacagcuucacccggggcgucuacuaccccgacaagguguuccgcuccagcgugcugcacuccacccaggaccucuuccugcccuucuucagcaacgucacgugguuccacgccauccacguguccgggaccaacggcaccaagcgguucgacaacccggugcugcccuucaacgacggggucuacuucgcgagcaccgagaaguccaacaucauccgcggcuggaucuucgggacgacccucgacagcaagacccagucccugcugaucgugaacaacgccaccaacguggucaucaaggugugcgaguuccaguucugcaacgaccccuuccucggcguguacuaccacaagaacaacaagagcuggauggaguccgaguuccgggucuacagcuccgccaacaacugcacguucgaguacgugagccagcccuuccugauggaccuggagggcaagcaggggaacuucaagaaccuccgcgaguucguguucaagaacaucgacggcuacuucaagaucuacuccaagcacaccccgaucaaccugguccgggaccugccccagggguucagcgcccucgagccccugguggaccugcccaucggcaucaacaucacccgcuuccagacccuccuggcccugcaccgguccuaccucacgccgggggacagcagcuccggcuggaccgcgggcgccgccgccuacuacgugggguaccugcagccccgcaccuuccugcucaaguacaacgagaacggcaccaucacggacgcggucgacugcgcccuggacccccugagcgagaccaagugcacccucaaguccuucaccguggagaaggggaucuaccagacgagcaacuuccgggugcagcccaccgaguccaucguccgcuucccgaacaucaccaaccugugccccuucggcgagguguucaacgccacccgguucgccagcgucuacgccuggaaccgcaagcggaucuccaacugcguggcggacuacagcgugcuguacaacuccgccagcuucuccacguucaagugcuacggcgucagccccaccaagcucaacgaccugugcuucaccaacguguacgccgacuccuucgugauccgcggggacgagguccggcagaucgcccccggccagaccgggaagaucgccgacuacaacuacaagcugccggacgacuucacgggcugcgugaucgcguggaacagcaacaaccucgacuccaaggucgggggcaacuacaacuaccuguaccgccuguuccgcaagagcaaccucaagcccuucgagcgggacaucuccaccgagaucuaccaggccggcagcacccccugcaacgggguggagggcuucaacugcuacuucccccugcaguccuacggguuccagccgaccaacggcgugggguaccagcccuaccggguggucgugcugagcuucgagcuccugcacgcccccgccacggugugcggccccaagaaguccaccaaccuggucaagaacaagugcgugaacuucaacuucaacggccucaccgggaccggcgugcugaccgagagcaacaagaaguuccugccguuccagcaguucgggcgcgacaucgccgacacgaccgacgcgguccgcgacccccagacccuggagauccucgacaucacccccugcagcuucggcgggguguccgugaucacgccgggcaccaacaccagcaaccaggucgccgugcuguaccaggacgugaacugcaccgagguccccguggccauccacgccgaccagcugacgcccaccuggcggguguacuccaccggcagcaacgucuuccagacccgcgccgggugccucaucggcgcggagcacgugaacaacuccuacgagugcgacauccccaucggggccggcaucugcgccagcuaccagacgcagaccaacuccccgcggcgcgcccggagcguggcgucccagagcaucaucgccuacaccaugucccugggcgccgagaacagcgucgccuacuccaacaacagcaucgccauccccaccaacuucacgaucuccgugaccaccgagauccugcccgugagcaugaccaagacgagcgucgacugcaccauguacaucugcggggacuccaccgagugcagcaaccuccugcugcaguacggcuccuucugcacccagcucaaccgcgcgcugacggggaucgccguggagcaggacaagaacacccaggagguguucgcccaggucaagcagaucuacaagacgcccccgaucaaggacuucggcggguucaacuucagccagauccugcccgaccccuccaagcccagcaagcgguccuucaucgaggaccuccuguucaacaaggugacccuggccgacgccggcuucaucaagcaguacggcgacugccucggggacaucgcggcccgcgaccugaucugcgcccagaaguucaacggccugaccgugcucccgccccugcugaccgacgagaugaucgcccaguacaccagcgcccuccuggcggggaccaucacguccggcuggaccuucggggccggcgccgcccugcagauccccuucgcgaugcagauggccuaccgguucaacggcaucggggucacccagaacgugcucuacgagaaccagaagcugaucgccaaccaguucaacagcgccaucggcaagauccaggacucccugagcuccaccgccagcgcgcucgggaagcugcaggacguggucaaccagaacgcccaggcccugaacacgcucgugaagcagcuguccagcaacuucggcgccaucuccagcgugcugaacgacauccucucccgccuggacccgcccgaggccgaggugcagaucgaccggcugaucaccgggcgccuccagagccugcagaccuacgugacccagcagcugauccgggcggccgagauccgcgccagcgccaaccucgccgcgaccaagauguccgagugcguccugggccagagcaagcggguggacuucugcggcaagggguaccagcugauguccuucccccagagcgccccgcacggcguggucuuccucaacgugacguacguccccgcccaggagaagaacuucaccaccgcccccgcgaucugcaacgacgggaaggcccacuucccccgcgagggcguguucguguccaacgggaccaacugguucgucacgcagcggaacuucuacgagccgcagaucaucaccaccgacaacaccuucgugagcggcaacugcgacguggucaucggcaucgugaacaacacgguguacgacccccugcagcccgagcuggacuccggcgggggcgggagcgacaucgaccccuacaaggaguucggcagcuccuaccagcugcucaacuuccugccccuggacuucuuccccgaccucaacgcccugguggacaccgccaccgcgcuguacgaggaggagcucacggggcgcgagcacugcagcccccaccacaccgccauccggcaggcccuggucugcugggacgagcugaccaagcucaucgccuggauguccagcaacaucaccuccgagcagguccgcacgaucaucgugaaccacgucaacgacaccuggggccugaaggugcggcagagccugugguuccaccucuccugccugaccuucgggcagcacaccgugcaggaguuccuggucagcuucggcguguggauccgcacgcccgccccguaccggccgcccaacgcgccgauccucuccacccugccggagcacaccgugaucugcugaggacuaguuauaagacugacuagcccgaugggccucccaacgggcccuccuccccuccuugcaccgagauuaauaaaaaaaaaaaaaaaaaaaaaaaaaaaaaaaaaaaaaaaaaaaaaaaaaaaaaaaaaaaaaaaaugcaucccccccccccccccccccccccccccccccaaaggcucuuuucagagccaccagaauu

SEQ ID NO: 12935 - RNA, 4123 nt, Artificial Sequence
  SARS-CoV-2/Wuhan/WIV05/2019__EPI_ISL_402128 spike protein mRNA gc (1-1147)(I712C_T1077C) WhcAg construct
aggagaaagcuuaccauguucguguuccugguccuccugccccuggugagcucccagugcgugaaccucaccacccgcacgcagcugccgcccgccuacaccaacagcuucacccggggcgucuacuaccccgacaagguguuccgcuccagcgugcugcacuccacccaggaccucuuccugcccuucuucagcaacgucacgugguuccacgccauccacguguccgggaccaacggcaccaagcgguucgacaacccggugcugcccuucaacgacggggucuacuucgcgagcaccgagaaguccaacaucauccgcggcuggaucuucgggacgacccucgacagcaagacccagucccugcugaucgugaacaacgccaccaacguggucaucaaggugugcgaguuccaguucugcaacgaccccuuccucggcguguacuaccacaagaacaacaagagcuggauggaguccgaguuccgggucuacagcuccgccaacaacugcacguucgaguacgugagccagcccuuccugauggaccuggagggcaagcaggggaacuucaagaaccuccgcgaguucguguucaagaacaucgacggcuacuucaagaucuacuccaagcacaccccgaucaaccugguccgggaccugccccagggguucagcgcccucgagccccugguggaccugcccaucggcaucaacaucacccgcuuccagacccuccuggcccugcaccgguccuaccucacgccgggggacagcagcuccggcuggaccgcgggcgccgccgccuacuacgugggguaccugcagccccgcaccuuccugcucaaguacaacgagaacggcaccaucacggacgcggucgacugcgcccuggacccccugagcgagaccaagugcacccucaaguccuucaccguggagaaggggaucuaccagacgagcaacuuccgggugcagcccaccgaguccaucguccgcuucccgaacaucaccaaccugugccccuucggcgagguguucaacgccacccgguucgccagcgucuacgccuggaaccgcaagcggaucuccaacugcguggcggacuacagcgugcuguacaacuccgccagcuucuccacguucaagugcuacggcgucagccccaccaagcucaacgaccugugcuucaccaacguguacgccgacuccuucgugauccgcggggacgagguccggcagaucgcccccggccagaccgggaagaucgccgacuacaacuacaagcugccggacgacuucacgggcugcgugaucgcguggaacagcaacaaccucgacuccaaggucgggggcaacuacaacuaccuguaccgccuguuccgcaagagcaaccucaagcccuucgagcgggacaucuccaccgagaucuaccaggccggcagcacccccugcaacgggguggagggcuucaacugcuacuucccccugcaguccuacggguuccagccgaccaacggcgugggguaccagcccuaccggguggucgugcugagcuucgagcuccugcacgcccccgccacggugugcggccccaagaaguccaccaaccuggucaagaacaagugcgugaacuucaacuucaacggccucaccgggaccggcgugcugaccgagagcaacaagaaguuccugccguuccagcaguucgggcgcgacaucgccgacacgaccgacgcgguccgcgacccccagacccuggagauccucgacaucacccccugcagcuucggcgggguguccgugaucacgccgggcaccaacaccagcaaccaggucgccgugcuguaccaggacgugaacugcaccgagguccccguggccauccacgccgaccagcugacgcccaccuggcggguguacuccaccggcagcaacgucuuccagacccgcgccgggugccucaucggcgcggagcacgugaacaacuccuacgagugcgacauccccaucggggccggcaucugcgccagcuaccagacgcagaccaacuccccgcggcgcgcccggagcguggcgucccagagcaucaucgccuacaccaugucccugggcgccgagaacagcgucgccuacuccaacaacagcugcgccauccccaccaacuucacgaucuccgugaccaccgagauccugcccgugagcaugaccaagacgagcgucgacugcaccauguacaucugcggggacuccaccgagugcagcaaccuccugcugcaguacggcuccuucugcacccagcucaaccgcgcgcugacggggaucgccguggagcaggacaagaacacccaggagguguucgcccaggucaagcagaucuacaagacgcccccgaucaaggacuucggcggguucaacuucagccagauccugcccgaccccuccaagcccagcaagcgguccuucaucgaggaccuccuguucaacaaggugacccuggccgacgccggcuucaucaagcaguacggcgacugccucggggacaucgcggcccgcgaccugaucugcgcccagaaguucaacggccugaccgugcucccgccccugcugaccgacgagaugaucgcccaguacaccagcgcccuccuggcggggaccaucacguccggcuggaccuucggggccggcgccgcccugcagauccccuucgcgaugcagauggccuaccgguucaacggcaucggggucacccagaacgugcucuacgagaaccagaagcugaucgccaaccaguucaacagcgccaucggcaagauccaggacucccugagcuccaccgccagcgcgcucgggaagcugcaggacguggucaaccagaacgcccaggcccugaacacgcucgugaagcagcuguccagcaacuucggcgccaucuccagcgugcugaacgacauccucucccgccuggacaaggucgaggccgaggugcagaucgaccggcugaucaccgggcgccuccagagccugcagaccuacgugacccagcagcugauccgggcggccgagauccgcgccagcgccaaccucgccgcgaccaagauguccgagugcguccugggccagagcaagcggguggacuucugcggcaagggguaccaccugauguccuucccccagagcgccccgcacggcguggucuuccuccacgugacguacguccccgcccaggagaagaacuucaccugcgcccccgcgaucugccacgacgggaaggcccacuucccccgcgagggcguguucguguccaacgggacccacugguucgucacgcagcggaacuucuacgagccgcagaucaucaccaccgacaacaccuucgugagcggcaacugcgacguggucaucggcaucgugaacaacacgguguacgacccccugcagcccgagcuggacuccggcgggggcgggagcgacaucgaccccuacaaggaguucggcagcuccuaccagcugcucaacuuccugccccuggacuucuuccccgaccucaacgcccugguggacaccgccaccgcgcuguacgaggaggagcucacggggcgcgagcacugcagcccccaccacaccgccauccggcaggcccuggucugcugggacgagcugaccaagcucaucgccuggauguccagcaacaucaccuccgagcagguccgcacgaucaucgugaaccacgucaacgacaccuggggccugaaggugcggcagagccugugguuccaccucuccugccugaccuucgggcagcacaccgugcaggaguuccuggucagcuucggcguguggauccgcacgcccgccccguaccggccgcccaacgcgccgauccucuccacccugccggagcacaccgugaucugcugaggacuaguuauaagacugacuagcccgaugggccucccaacgggcccuccuccccuccuugcaccgagauuaauaaaaaaaaaaaaaaaaaaaaaaaaaaaaaaaaaaaaaaaaaaaaaaaaaaaaaaaaaaaaaaaaugcaucccccccccccccccccccccccccccccccaaaggcucuuuucagagccaccagaauu

SEQ ID NO: 12936 - RNA, 4123 nt, Artificial Sequence
  SARS-CoV-2/Wuhan/WIV05/2019__EPI_ISL_402128 spike protein mRNA gc (1-1147)(I714C_Y1110C) WhcAg construct
aggagaaagcuuaccauguucguguuccugguccuccugccccuggugagcucccagugcgugaaccucaccacccgcacgcagcugccgcccgccuacaccaacagcuucacccggggcgucuacuaccccgacaagguguuccgcuccagcgugcugcacuccacccaggaccucuuccugcccuucuucagcaacgucacgugguuccacgccauccacguguccgggaccaacggcaccaagcgguucgacaacccggugcugcccuucaacgacggggucuacuucgcgagcaccgagaaguccaacaucauccgcggcuggaucuucgggacgacccucgacagcaagacccagucccugcugaucgugaacaacgccaccaacguggucaucaaggugugcgaguuccaguucugcaacgaccccuuccucggcguguacuaccacaagaacaacaagagcuggauggaguccgaguuccgggucuacagcuccgccaacaacugcacguucgaguacgugagccagcccuuccugauggaccuggagggcaagcaggggaacuucaagaaccuccgcgaguucguguucaagaacaucgacggcuacuucaagaucuacuccaagcacaccccgaucaaccugguccgggaccugccccagggguucagcgcccucgagccccugguggaccugcccaucggcaucaacaucacccgcuuccagacccuccuggcccugcaccgguccuaccucacgccgggggacagcagcuccggcuggaccgcgggcgccgccgccuacuacgugggguaccugcagccccgcaccuuccugcucaaguacaacgagaacggcaccaucacggacgcggucgacugcgcccuggacccccugagcgagaccaagugcacccucaaguccuucaccguggagaaggggaucuaccagacgagcaacuuccgggugcagcccaccgaguccaucguccgcuucccgaacaucaccaaccugugccccuucggcgagguguucaacgccacccgguucgccagcgucuacgccuggaaccgcaagcggaucuccaacugcguggcggacuacagcgugcuguacaacuccgccagcuucuccacguucaagugcuacggcgucagccccaccaagcucaacgaccugugcuucaccaacguguacgccgacuccuucgugauccgcggggacgagguccggcagaucgcccccggccagaccgggaagaucgccgacuacaacuacaagcugccggacgacuucacgggcugcgugaucgcguggaacagcaacaaccucgacuccaaggucgggggcaacuacaacuaccuguaccgccuguuccgcaagagcaaccucaagcccuucgagcgggacaucuccaccgagaucuaccaggccggcagcacccccugcaacgggguggagggcuucaacugcuacuucccccugcaguccuacggguuccagccgaccaacggcgugggguaccagcccuaccggguggucgugcugagcuucgagcuccugcacgcccccgccacggugugcggccccaagaaguccaccaaccuggucaagaacaagugcgugaacuucaacuucaacggccucaccgggaccggcgugcugaccgagagcaacaagaaguuccugccguuccagcaguucgggcgcgacaucgccgacacgaccgacgcgguccgcgacccccagacccuggagauccucgacaucacccccugcagcuucggcgggguguccgugaucacgccgggcaccaacaccagcaaccaggucgccgugcuguaccaggacgugaacugcaccgagguccccguggccauccacgccgaccagcugacgcccaccuggcggguguacuccaccggcagcaacgucuuccagacccgcgccgggugccucaucggcgcggagcacgugaacaacuccuacgagugcgacauccccaucggggccggcaucugcgccagcuaccagacgcagaccaacuccccgcggcgcgcccggagcguggcgucccagagcaucaucgccuacaccaugucccugggcgccgagaacagcgucgccuacuccaacaacagcaucgccugccccaccaacuucacgaucuccgugaccaccgagauccugcccgugagcaugaccaagacgagcgucgacugcaccauguacaucugcggggacuccaccgagugcagcaaccuccugcugcaguacggcuccuucugcacccagcucaaccgcgcgcugacggggaucgccguggagcaggacaagaacacccaggagguguucgcccaggucaagcagaucuacaagacgcccccgaucaaggacuucggcggguucaacuucagccagauccugcccgaccccuccaagcccagcaagcgguccuucaucgaggaccuccuguucaacaaggugacccuggccgacgccggcuucaucaagcaguacggcgacugccucggggacaucgcggcccgcgaccugaucugcgcccagaaguucaacggccugaccgugcucccgccccugcugaccgacgagaugaucgcccaguacaccagcgcccuccuggcggggaccaucacguccggcuggaccuucggggccggcgccgcccugcagauccccuucgcgaugcagauggccuaccgguucaacggcaucggggucacccagaacgugcucuacgagaaccagaagcugaucgccaaccaguucaacagcgccaucggcaagauccaggacucccugagcuccaccgccagcgcgcucgggaagcugcaggacguggucaaccagaacgcccaggcccugaacacgcucgugaagcagcuguccagcaacuucggcgccaucuccagcgugcugaacgacauccucucccgccuggacaaggucgaggccgaggugcagaucgaccggcugaucaccgggcgccuccagagccugcagaccuacgugacccagcagcugauccgggcggccgagauccgcgccagcgccaaccucgccgcgaccaagauguccgagugcguccugggccagagcaagcggguggacuucugcggcaagggguaccaccugauguccuucccccagagcgccccgcacggcguggucuuccuccacgugacguacguccccgcccaggagaagaacuucaccaccgcccccgcgaucugccacgacgggaaggcccacuucccccgcgagggcguguucguguccaacgggacccacugguucgucacgcagcggaacuucugcgagccgcagaucaucaccaccgacaacaccuucgugagcggcaacugcgacguggucaucggcaucgugaacaacacgguguacgacccccugcagcccgagcuggacuccggcgggggcgggagcgacaucgaccccuacaaggaguucggcagcuccuaccagcugcucaacuuccugccccuggacuucuuccccgaccucaacgcccugguggacaccgccaccgcgcuguacgaggaggagcucacggggcgcgagcacugcagcccccaccacaccgccauccggcaggcccuggucugcugggacgagcugaccaagcucaucgccuggauguccagcaacaucaccuccgagcagguccgcacgaucaucgugaaccacgucaacgacaccuggggccugaaggugcggcagagccugugguuccaccucuccugccugaccuucgggcagcacaccgugcaggaguuccuggucagcuucggcguguggauccgcacgcccgccccguaccggccgcccaacgcgccgauccucuccacccugccggagcacaccgugaucugcugaggacuaguuauaagacugacuagcccgaugggccucccaacgggcccuccuccccuccuugcaccgagauuaauaaaaaaaaaaaaaaaaaaaaaaaaaaaaaaaaaaaaaaaaaaaaaaaaaaaaaaaaaaaaaaaaugcaucccccccccccccccccccccccccccccccaaaggcucuuuucagagccaccagaauu

SEQ ID NO: 12937 - RNA, 4123 nt, Artificial Sequence
  SARS-CoV-2/Wuhan/WIV05/2019__EPI_ISL_402128 spike protein mRNA gc (1-1147)(P715C_P1069C) WhcAg construct
aggagaaagcuuaccauguucguguuccugguccuccugccccuggugagcucccagugcgugaaccucaccacccgcacgcagcugccgcccgccuacaccaacagcuucacccggggcgucuacuaccccgacaagguguuccgcuccagcgugcugcacuccacccaggaccucuuccugcccuucuucagcaacgucacgugguuccacgccauccacguguccgggaccaacggcaccaagcgguucgacaacccggugcugcccuucaacgacggggucuacuucgcgagcaccgagaaguccaacaucauccgcggcuggaucuucgggacgacccucgacagcaagacccagucccugcugaucgugaacaacgccaccaacguggucaucaaggugugcgaguuccaguucugcaacgaccccuuccucggcguguacuaccacaagaacaacaagagcuggauggaguccgaguuccgggucuacagcuccgccaacaacugcacguucgaguacgugagccagcccuuccugauggaccuggagggcaagcaggggaacuucaagaaccuccgcgaguucguguucaagaacaucgacggcuacuucaagaucuacuccaagcacaccccgaucaaccugguccgggaccugccccagggguucagcgcccucgagccccugguggaccugcccaucggcaucaacaucacccgcuuccagacccuccuggcccugcaccgguccuaccucacgccgggggacagcagcuccggcuggaccgcgggcgccgccgccuacuacgugggguaccugcagccccgcaccuuccugcucaaguacaacgagaacggcaccaucacggacgcggucgacugcgcccuggacccccugagcgagaccaagugcacccucaaguccuucaccguggagaaggggaucuaccagacgagcaacuuccgggugcagcccaccgaguccaucguccgcuucccgaacaucaccaaccugugccccuucggcgagguguucaacgccacccgguucgccagcgucuacgccuggaaccgcaagcggaucuccaacugcguggcggacuacagcgugcuguacaacuccgccagcuucuccacguucaagugcuacggcgucagccccaccaagcucaacgaccugugcuucaccaacguguacgccgacuccuucgugauccgcggggacgagguccggcagaucgcccccggccagaccgggaagaucgccgacuacaacuacaagcugccggacgacuucacgggcugcgugaucgcguggaacagcaacaaccucgacuccaaggucgggggcaacuacaacuaccuguaccgccuguuccgcaagagcaaccucaagcccuucgagcgggacaucuccaccgagaucuaccaggccggcagcacccccugcaacgggguggagggcuucaacugcuacuucccccugcaguccuacggguuccagccgaccaacggcgugggguaccagcccuaccggguggucgugcugagcuucgagcuccugcacgcccccgccacggugugcggccccaagaaguccaccaaccuggucaagaacaagugcgugaacuucaacuucaacggccucaccgggaccggcgugcugaccgagagcaacaagaaguuccugccguuccagcaguucgggcgcgacaucgccgacacgaccgacgcgguccgcgacccccagacccuggagauccucgacaucacccccugcagcuucggcgggguguccgugaucacgccgggcaccaacaccagcaaccaggucgccgugcuguaccaggacgugaacugcaccgagguccccguggccauccacgccgaccagcugacgcccaccuggcggguguacuccaccggcagcaacgucuuccagacccgcgccgggugccucaucggcgcggagcacgugaacaacuccuacgagugcgacauccccaucggggccggcaucugcgccagcuaccagacgcagaccaacuccccgcggcgcgcccggagcguggcgucccagagcaucaucgccuacaccaugucccugggcgccgagaacagcgucgccuacuccaacaacagcaucgccaucugcaccaacuucacgaucuccgugaccaccgagauccugcccgugagcaugaccaagacgagcgucgacugcaccauguacaucugcggggacuccaccgagugcagcaaccuccugcugcaguacggcuccuucugcacccagcucaaccgcgcgcugacggggaucgccguggagcaggacaagaacacccaggagguguucgcccaggucaagcagaucuacaagacgcccccgaucaaggacuucggcggguucaacuucagccagauccugcccgaccccuccaagcccagcaagcgguccuucaucgaggaccuccuguucaacaaggugacccuggccgacgccggcuucaucaagcaguacggcgacugccucggggacaucgcggcccgcgaccugaucugcgcccagaaguucaacggccugaccgugcucccgccccugcugaccgacgagaugaucgcccaguacaccagcgcccuccuggcggggaccaucacguccggcuggaccuucggggccggcgccgcccugcagauccccuucgcgaugcagauggccuaccgguucaacggcaucggggucacccagaacgugcucuacgagaaccagaagcugaucgccaaccaguucaacagcgccaucggcaagauccaggacucccugagcuccaccgccagcgcgcucgggaagcugcaggacguggucaaccagaacgcccaggcccugaacacgcucgugaagcagcuguccagcaacuucggcgccaucuccagcgugcugaacgacauccucucccgccuggacaaggucgaggccgaggugcagaucgaccggcugaucaccgggcgccuccagagccugcagaccuacgugacccagcagcugauccgggcggccgagauccgcgccagcgccaaccucgccgcgaccaagauguccgagugcguccugggccagagcaagcggguggacuucugcggcaagggguaccaccugauguccuucccccagagcgccccgcacggcguggucuuccuccacgugacguacgucugcgcccaggagaagaacuucaccaccgcccccgcgaucugccacgacgggaaggcccacuucccccgcgagggcguguucguguccaacgggacccacugguucgucacgcagcggaacuucuacgagccgcagaucaucaccaccgacaacaccuucgugagcggcaacugcgacguggucaucggcaucgugaacaacacgguguacgacccccugcagcccgagcuggacuccggcgggggcgggagcgacaucgaccccuacaaggaguucggcagcuccuaccagcugcucaacuuccugccccuggacuucuuccccgaccucaacgcccugguggacaccgccaccgcgcuguacgaggaggagcucacggggcgcgagcacugcagcccccaccacaccgccauccggcaggcccuggucugcugggacgagcugaccaagcucaucgccuggauguccagcaacaucaccuccgagcagguccgcacgaucaucgugaaccacgucaacgacaccuggggccugaaggugcggcagagccugugguuccaccucuccugccugaccuucgggcagcacaccgugcaggaguuccuggucagcuucggcguguggauccgcacgcccgccccguaccggccgcccaacgcgccgauccucuccacccugccggagcacaccgugaucugcugaggacuaguuauaagacugacuagcccgaugggccucccaacgggcccuccuccccuccuugcaccgagauuaauaaaaaaaaaaaaaaaaaaaaaaaaaaaaaaaaaaaaaaaaaaaaaaaaaaaaaaaaaaaaaaaaugcaucccccccccccccccccccccccccccccccaaaggcucuuuucagagccaccagaauu

SEQ ID NO: 12938 - RNA, 4123 nt, Artificial Sequence
  SARS-CoV-2/Wuhan/WIV05/2019__EPI_ISL_402128 spike protein mRNA gc (1-1147)(G889C_L1034C) WhcAg construct
aggagaaagcuuaccauguucguguuccugguccuccugccccuggugagcucccagugcgugaaccucaccacccgcacgcagcugccgcccgccuacaccaacagcuucacccggggcgucuacuaccccgacaagguguuccgcuccagcgugcugcacuccacccaggaccucuuccugcccuucuucagcaacgucacgugguuccacgccauccacguguccgggaccaacggcaccaagcgguucgacaacccggugcugcccuucaacgacggggucuacuucgcgagcaccgagaaguccaacaucauccgcggcuggaucuucgggacgacccucgacagcaagacccagucccugcugaucgugaacaacgccaccaacguggucaucaaggugugcgaguuccaguucugcaacgaccccuuccucggcguguacuaccacaagaacaacaagagcuggauggaguccgaguuccgggucuacagcuccgccaacaacugcacguucgaguacgugagccagcccuuccugauggaccuggagggcaagcaggggaacuucaagaaccuccgcgaguucguguucaagaacaucgacggcuacuucaagaucuacuccaagcacaccccgaucaaccugguccgggaccugccccagggguucagcgcccucgagccccugguggaccugcccaucggcaucaacaucacccgcuuccagacccuccuggcccugcaccgguccuaccucacgccgggggacagcagcuccggcuggaccgcgggcgccgccgccuacuacgugggguaccugcagccccgcaccuuccugcucaaguacaacgagaacggcaccaucacggacgcggucgacugcgcccuggacccccugagcgagaccaagugcacccucaaguccuucaccguggagaaggggaucuaccagacgagcaacuuccgggugcagcccaccgaguccaucguccgcuucccgaacaucaccaaccugugccccuucggcgagguguucaacgccacccgguucgccagcgucuacgccuggaaccgcaagcggaucuccaacugcguggcggacuacagcgugcuguacaacuccgccagcuucuccacguucaagugcuacggcgucagccccaccaagcucaacgaccugugcuucaccaacguguacgccgacuccuucgugauccgcggggacgagguccggcagaucgcccccggccagaccgggaagaucgccgacuacaacuacaagcugccggacgacuucacgggcugcgugaucgcguggaacagcaacaaccucgacuccaaggucgggggcaacuacaacuaccuguaccgccuguuccgcaagagcaaccucaagcccuucgagcgggacaucuccaccgagaucuaccaggccggcagcacccccugcaacgggguggagggcuucaacugcuacuucccccugcaguccuacggguuccagccgaccaacggcgugggguaccagcccuaccggguggucgugcugagcuucgagcuccugcacgcccccgccacggugugcggccccaagaaguccaccaaccuggucaagaacaagugcgugaacuucaacuucaacggccucaccgggaccggcgugcugaccgagagcaacaagaaguuccugccguuccagcaguucgggcgcgacaucgccgacacgaccgacgcgguccgcgacccccagacccuggagauccucgacaucacccccugcagcuucggcgggguguccgugaucacgccgggcaccaacaccagcaaccaggucgccgugcuguaccaggacgugaacugcaccgagguccccguggccauccacgccgaccagcugacgcccaccuggcggguguacuccaccggcagcaacgucuuccagacccgcgccgggugccucaucggcgcggagcacgugaacaacuccuacgagugcgacauccccaucggggccggcaucugcgccagcuaccagacgcagaccaacuccccgcggcgcgcccggagcguggcgucccagagcaucaucgccuacaccaugucccugggcgccgagaacagcgucgccuacuccaacaacagcaucgccauccccaccaacuucacgaucuccgugaccaccgagauccugcccgugagcaugaccaagacgagcgucgacugcaccauguacaucugcggggacuccaccgagugcagcaaccuccugcugcaguacggcuccuucugcacccagcucaaccgcgcgcugacggggaucgccguggagcaggacaagaacacccaggagguguucgcccaggucaagcagaucuacaagacgcccccgaucaaggacuucggcggguucaacuucagccagauccugcccgaccccuccaagcccagcaagcgguccuucaucgaggaccuccuguucaacaaggugacccuggccgacgccggcuucaucaagcaguacggcgacugccucggggacaucgcggcccgcgaccugaucugcgcccagaaguucaacggccugaccgugcucccgccccugcugaccgacgagaugaucgcccaguacaccagcgcccuccuggcggggaccaucacguccggcuggaccuucugcgccggcgccgcccugcagauccccuucgcgaugcagauggccuaccgguucaacggcaucggggucacccagaacgugcucuacgagaaccagaagcugaucgccaaccaguucaacagcgccaucggcaagauccaggacucccugagcuccaccgccagcgcgcucgggaagcugcaggacguggucaaccagaacgcccaggcccugaacacgcucgugaagcagcuguccagcaacuucggcgccaucuccagcgugcugaacgacauccucucccgccuggacaaggucgaggccgaggugcagaucgaccggcugaucaccgggcgccuccagagccugcagaccuacgugacccagcagcugauccgggcggccgagauccgcgccagcgccaaccucgccgcgaccaagauguccgagugcgucugcggccagagcaagcggguggacuucugcggcaagggguaccaccugauguccuucccccagagcgccccgcacggcguggucuuccuccacgugacguacguccccgcccaggagaagaacuucaccaccgcccccgcgaucugccacgacgggaaggcccacuucccccgcgagggcguguucguguccaacgggacccacugguucgucacgcagcggaacuucuacgagccgcagaucaucaccaccgacaacaccuucgugagcggcaacugcgacguggucaucggcaucgugaacaacacgguguacgacccccugcagcccgagcuggacuccggcgggggcgggagcgacaucgaccccuacaaggaguucggcagcuccuaccagcugcucaacuuccugccccuggacuucuuccccgaccucaacgcccugguggacaccgccaccgcgcuguacgaggaggagcucacggggcgcgagcacugcagcccccaccacaccgccauccggcaggcccuggucugcugggacgagcugaccaagcucaucgccuggauguccagcaacaucaccuccgagcagguccgcacgaucaucgugaaccacgucaacgacaccuggggccugaaggugcggcagagccugugguuccaccucuccugccugaccuucgggcagcacaccgugcaggaguuccuggucagcuucggcguguggauccgcacgcccgccccguaccggccgcccaacgcgccgauccucuccacccugccggagcacaccgugaucugcugaggacuaguuauaagacugacuagcccgaugggccucccaacgggcccuccuccccuccuugcaccgagauuaauaaaaaaaaaaaaaaaaaaaaaaaaaaaaaaaaaaaaaaaaaaaaaaaaaaaaaaaaaaaaaaaaugcaucccccccccccccccccccccccccccccccaaaggcucuuuucagagccaccagaauu

SEQ ID NO: 12939 - RNA, 4123 nt, Artificial Sequence
  SARS-CoV-2/Wuhan/WIV05/2019__EPI_ISL_402128 spike protein mRNA gc (1-1147)(I909C_Y1047C) WhcAg construct
aggagaaagcuuaccauguucguguuccugguccuccugccccuggugagcucccagugcgugaaccucaccacccgcacgcagcugccgcccgccuacaccaacagcuucacccggggcgucuacuaccccgacaagguguuccgcuccagcgugcugcacuccacccaggaccucuuccugcccuucuucagcaacgucacgugguuccacgccauccacguguccgggaccaacggcaccaagcgguucgacaacccggugcugcccuucaacgacggggucuacuucgcgagcaccgagaaguccaacaucauccgcggcuggaucuucgggacgacccucgacagcaagacccagucccugcugaucgugaacaacgccaccaacguggucaucaaggugugcgaguuccaguucugcaacgaccccuuccucggcguguacuaccacaagaacaacaagagcuggauggaguccgaguuccgggucuacagcuccgccaacaacugcacguucgaguacgugagccagcccuuccugauggaccuggagggcaagcaggggaacuucaagaaccuccgcgaguucguguucaagaacaucgacggcuacuucaagaucuacuccaagcacaccccgaucaaccugguccgggaccugccccagggguucagcgcccucgagccccugguggaccugcccaucggcaucaacaucacccgcuuccagacccuccuggcccugcaccgguccuaccucacgccgggggacagcagcuccggcuggaccgcgggcgccgccgccuacuacgugggguaccugcagccccgcaccuuccugcucaaguacaacgagaacggcaccaucacggacgcggucgacugcgcccuggacccccugagcgagaccaagugcacccucaaguccuucaccguggagaaggggaucuaccagacgagcaacuuccgggugcagcccaccgaguccaucguccgcuucccgaacaucaccaaccugugccccuucggcgagguguucaacgccacccgguucgccagcgucuacgccuggaaccgcaagcggaucuccaacugcguggcggacuacagcgugcuguacaacuccgccagcuucuccacguucaagugcuacggcgucagccccaccaagcucaacgaccugugcuucaccaacguguacgccgacuccuucgugauccgcggggacgagguccggcagaucgcccccggccagaccgggaagaucgccgacuacaacuacaagcugccggacgacuucacgggcugcgugaucgcguggaacagcaacaaccucgacuccaaggucgggggcaacuacaacuaccuguaccgccuguuccgcaagagcaaccucaagcccuucgagcgggacaucuccaccgagaucuaccaggccggcagcacccccugcaacgggguggagggcuucaacugcuacuucccccugcaguccuacggguuccagccgaccaacggcgugggguaccagcccuaccggguggucgugcugagcuucgagcuccugcacgcccccgccacggugugcggccccaagaaguccaccaaccuggucaagaacaagugcgugaacuucaacuucaacggccucaccgggaccggcgugcugaccgagagcaacaagaaguuccugccguuccagcaguucgggcgcgacaucgccgacacgaccgacgcgguccgcgacccccagacccuggagauccucgacaucacccccugcagcuucggcgggguguccgugaucacgccgggcaccaacaccagcaaccaggucgccgugcuguaccaggacgugaacugcaccgagguccccguggccauccacgccgaccagcugacgcccaccuggcggguguacuccaccggcagcaacgucuuccagacccgcgccgggugccucaucggcgcggagcacgugaacaacuccuacgagugcgacauccccaucggggccggcaucugcgccagcuaccagacgcagaccaacuccccgcggcgcgcccggagcguggcgucccagagcaucaucgccuacaccaugucccugggcgccgagaacagcgucgccuacuccaacaacagcaucgccauccccaccaacuucacgaucuccgugaccaccgagauccugcccgugagcaugaccaagacgagcgucgacugcaccauguacaucugcggggacuccaccgagugcagcaaccuccugcugcaguacggcuccuucugcacccagcucaaccgcgcgcugacggggaucgccguggagcaggacaagaacacccaggagguguucgcccaggucaagcagaucuacaagacgcccccgaucaaggacuucggcggguucaacuucagccagauccugcccgaccccuccaagcccagcaagcgguccuucaucgaggaccuccuguucaacaaggugacccuggccgacgccggcuucaucaagcaguacggcgacugccucggggacaucgcggcccgcgaccugaucugcgcccagaaguucaacggccugaccgugcucccgccccugcugaccgacgagaugaucgcccaguacaccagcgcccuccuggcggggaccaucacguccggcuggaccuucggggccggcgccgcccugcagauccccuucgcgaugcagauggccuaccgguucaacggcugcggggucacccagaacgugcucuacgagaaccagaagcugaucgccaaccaguucaacagcgccaucggcaagauccaggacucccugagcuccaccgccagcgcgcucgggaagcugcaggacguggucaaccagaacgcccaggcccugaacacgcucgugaagcagcuguccagcaacuucggcgccaucuccagcgugcugaacgacauccucucccgccuggacaaggucgaggccgaggugcagaucgaccggcugaucaccgggcgccuccagagccugcagaccuacgugacccagcagcugauccgggcggccgagauccgcgccagcgccaaccucgccgcgaccaagauguccgagugcguccugggccagagcaagcggguggacuucugcggcaaggggugccaccugauguccuucccccagagcgccccgcacggcguggucuuccuccacgugacguacguccccgcccaggagaagaacuucaccaccgcccccgcgaucugccacgacgggaaggcccacuucccccgcgagggcguguucguguccaacgggacccacugguucgucacgcagcggaacuucuacgagccgcagaucaucaccaccgacaacaccuucgugagcggcaacugcgacguggucaucggcaucgugaacaacacgguguacgacccccugcagcccgagcuggacuccggcgggggcgggagcgacaucgaccccuacaaggaguucggcagcuccuaccagcugcucaacuuccugccccuggacuucuuccccgaccucaacgcccugguggacaccgccaccgcgcuguacgaggaggagcucacggggcgcgagcacugcagcccccaccacaccgccauccggcaggcccuggucugcugggacgagcugaccaagcucaucgccuggauguccagcaacaucaccuccgagcagguccgcacgaucaucgugaaccacgucaacgacaccuggggccugaaggugcggcagagccugugguuccaccucuccugccugaccuucgggcagcacaccgugcaggaguuccuggucagcuucggcguguggauccgcacgcccgccccguaccggccgcccaacgcgccgauccucuccacccugccggagcacaccgugaucugcugaggacuaguuauaagacugacuagcccgaugggccucccaacgggcccuccuccccuccuugcaccgagauuaauaaaaaaaaaaaaaaaaaaaaaaaaaaaaaaaaaaaaaaaaaaaaaaaaaaaaaaaaaaaaaaaaugcaucccccccccccccccccccccccccccccccaaaggcucuuuucagagccaccagaauu

SEQ ID NO: 12940 - RNA, 4123 nt, Artificial Sequence
  SARS-CoV-2/Wuhan/WIV05/2019__EPI_ISL_402128 spike protein mRNA gc (1-1147)(Q965C_S1003C) WhcAg construct
aggagaaagcuuaccauguucguguuccugguccuccugccccuggugagcucccagugcgugaaccucaccacccgcacgcagcugccgcccgccuacaccaacagcuucacccggggcgucuacuaccccgacaagguguuccgcuccagcgugcugcacuccacccaggaccucuuccugcccuucuucagcaacgucacgugguuccacgccauccacguguccgggaccaacggcaccaagcgguucgacaacccggugcugcccuucaacgacggggucuacuucgcgagcaccgagaaguccaacaucauccgcggcuggaucuucgggacgacccucgacagcaagacccagucccugcugaucgugaacaacgccaccaacguggucaucaaggugugcgaguuccaguucugcaacgaccccuuccucggcguguacuaccacaagaacaacaagagcuggauggaguccgaguuccgggucuacagcuccgccaacaacugcacguucgaguacgugagccagcccuuccugauggaccuggagggcaagcaggggaacuucaagaaccuccgcgaguucguguucaagaacaucgacggcuacuucaagaucuacuccaagcacaccccgaucaaccugguccgggaccugccccagggguucagcgcccucgagccccugguggaccugcccaucggcaucaacaucacccgcuuccagacccuccuggcccugcaccgguccuaccucacgccgggggacagcagcuccggcuggaccgcgggcgccgccgccuacuacgugggguaccugcagccccgcaccuuccugcucaaguacaacgagaacggcaccaucacggacgcggucgacugcgcccuggacccccugagcgagaccaagugcacccucaaguccuucaccguggagaaggggaucuaccagacgagcaacuuccgggugcagcccaccgaguccaucguccgcuucccgaacaucaccaaccugugccccuucggcgagguguucaacgccacccgguucgccagcgucuacgccuggaaccgcaagcggaucuccaacugcguggcggacuacagcgugcuguacaacuccgccagcuucuccacguucaagugcuacggcgucagccccaccaagcucaacgaccugugcuucaccaacguguacgccgacuccuucgugauccgcggggacgagguccggcagaucgcccccggccagaccgggaagaucgccgacuacaacuacaagcugccggacgacuucacgggcugcgugaucgcguggaacagcaacaaccucgacuccaaggucgggggcaacuacaacuaccuguaccgccuguuccgcaagagcaaccucaagcccuucgagcgggacaucuccaccgagaucuaccaggccggcagcacccccugcaacgggguggagggcuucaacugcuacuucccccugcaguccuacggguuccagccgaccaacggcgugggguaccagcccuaccggguggucgugcugagcuucgagcuccugcacgcccccgccacggugugcggccccaagaaguccaccaaccuggucaagaacaagugcgugaacuucaacuucaacggccucaccgggaccggcgugcugaccgagagcaacaagaaguuccugccguuccagcaguucgggcgcgacaucgccgacacgaccgacgcgguccgcgacccccagacccuggagauccucgacaucacccccugcagcuucggcgggguguccgugaucacgccgggcaccaacaccagcaaccaggucgccgugcuguaccaggacgugaacugcaccgagguccccguggccauccacgccgaccagcugacgcccaccuggcggguguacuccaccggcagcaacgucuuccagacccgcgccgggugccucaucggcgcggagcacgugaacaacuccuacgagugcgacauccccaucggggccggcaucugcgccagcuaccagacgcagaccaacuccccgcggcgcgcccggagcguggcgucccagagcaucaucgccuacaccaugucccugggcgccgagaacagcgucgccuacuccaacaacagcaucgccauccccaccaacuucacgaucuccgugaccaccgagauccugcccgugagcaugaccaagacgagcgucgacugcaccauguacaucugcggggacuccaccgagugcagcaaccuccugcugcaguacggcuccuucugcacccagcucaaccgcgcgcugacggggaucgccguggagcaggacaagaacacccaggagguguucgcccaggucaagcagaucuacaagacgcccccgaucaaggacuucggcggguucaacuucagccagauccugcccgaccccuccaagcccagcaagcgguccuucaucgaggaccuccuguucaacaaggugacccuggccgacgccggcuucaucaagcaguacggcgacugccucggggacaucgcggcccgcgaccugaucugcgcccagaaguucaacggccugaccgugcucccgccccugcugaccgacgagaugaucgcccaguacaccagcgcccuccuggcggggaccaucacguccggcuggaccuucggggccggcgccgcccugcagauccccuucgcgaugcagauggccuaccgguucaacggcaucggggucacccagaacgugcucuacgagaaccagaagcugaucgccaaccaguucaacagcgccaucggcaagauccaggacucccugagcuccaccgccagcgcgcucgggaagcugcaggacguggucaaccagaacgcccaggcccugaacacgcucgugaagugccuguccagcaacuucggcgccaucuccagcgugcugaacgacauccucucccgccuggacaaggucgaggccgaggugcagaucgaccggcugaucaccgggcgccuccagugccugcagaccuacgugacccagcagcugauccgggcggccgagauccgcgccagcgccaaccucgccgcgaccaagauguccgagugcguccugggccagagcaagcggguggacuucugcggcaagggguaccaccugauguccuucccccagagcgccccgcacggcguggucuuccuccacgugacguacguccccgcccaggagaagaacuucaccaccgcccccgcgaucugccacgacgggaaggcccacuucccccgcgagggcguguucguguccaacgggacccacugguucgucacgcagcggaacuucuacgagccgcagaucaucaccaccgacaacaccuucgugagcggcaacugcgacguggucaucggcaucgugaacaacacgguguacgacccccugcagcccgagcuggacuccggcgggggcgggagcgacaucgaccccuacaaggaguucggcagcuccuaccagcugcucaacuuccugccccuggacuucuuccccgaccucaacgcccugguggacaccgccaccgcgcuguacgaggaggagcucacggggcgcgagcacugcagcccccaccacaccgccauccggcaggcccuggucugcugggacgagcugaccaagcucaucgccuggauguccagcaacaucaccuccgagcagguccgcacgaucaucgugaaccacgucaacgacaccuggggccugaaggugcggcagagccugugguuccaccucuccugccugaccuucgggcagcacaccgugcaggaguuccuggucagcuucggcguguggauccgcacgcccgccccguaccggccgcccaacgcgccgauccucuccacccugccggagcacaccgugaucugcugaggacuaguuauaagacugacuagcccgaugggccucccaacgggcccuccuccccuccuugcaccgagauuaauaaaaaaaaaaaaaaaaaaaaaaaaaaaaaaaaaaaaaaaaaaaaaaaaaaaaaaaaaaaaaaaaugcaucccccccccccccccccccccccccccccccaaaggcucuuuucagagccaccagaauu

SEQ ID NO: 12941 - RNA, 4123 nt, Artificial Sequence
  SARS-CoV-2/Wuhan/WIV05/2019__EPI_ISL_402128 spike protein mRNA gc (1-1147)(F970C_G999C) WhcAg construct
aggagaaagcuuaccauguucguguuccugguccuccugccccuggugagcucccagugcgugaaccucaccacccgcacgcagcugccgcccgccuacaccaacagcuucacccggggcgucuacuaccccgacaagguguuccgcuccagcgugcugcacuccacccaggaccucuuccugcccuucuucagcaacgucacgugguuccacgccauccacguguccgggaccaacggcaccaagcgguucgacaacccggugcugcccuucaacgacggggucuacuucgcgagcaccgagaaguccaacaucauccgcggcuggaucuucgggacgacccucgacagcaagacccagucccugcugaucgugaacaacgccaccaacguggucaucaaggugugcgaguuccaguucugcaacgaccccuuccucggcguguacuaccacaagaacaacaagagcuggauggaguccgaguuccgggucuacagcuccgccaacaacugcacguucgaguacgugagccagcccuuccugauggaccuggagggcaagcaggggaacuucaagaaccuccgcgaguucguguucaagaacaucgacggcuacuucaagaucuacuccaagcacaccccgaucaaccugguccgggaccugccccagggguucagcgcccucgagccccugguggaccugcccaucggcaucaacaucacccgcuuccagacccuccuggcccugcaccgguccuaccucacgccgggggacagcagcuccggcuggaccgcgggcgccgccgccuacuacgugggguaccugcagccccgcaccuuccugcucaaguacaacgagaacggcaccaucacggacgcggucgacugcgcccuggacccccugagcgagaccaagugcacccucaaguccuucaccguggagaaggggaucuaccagacgagcaacuuccgggugcagcccaccgaguccaucguccgcuucccgaacaucaccaaccugugccccuucggcgagguguucaacgccacccgguucgccagcgucuacgccuggaaccgcaagcggaucuccaacugcguggcggacuacagcgugcuguacaacuccgccagcuucuccacguucaagugcuacggcgucagccccaccaagcucaacgaccugugcuucaccaacguguacgccgacuccuucgugauccgcggggacgagguccggcagaucgcccccggccagaccgggaagaucgccgacuacaacuacaagcugccggacgacuucacgggcugcgugaucgcguggaacagcaacaaccucgacuccaaggucgggggcaacuacaacuaccuguaccgccuguuccgcaagagcaaccucaagcccuucgagcgggacaucuccaccgagaucuaccaggccggcagcacccccugcaacgggguggagggcuucaacugcuacuucccccugcaguccuacggguuccagccgaccaacggcgugggguaccagcccuaccggguggucgugcugagcuucgagcuccugcacgcccccgccacggugugcggccccaagaaguccaccaaccuggucaagaacaagugcgugaacuucaacuucaacggccucaccgggaccggcgugcugaccgagagcaacaagaaguuccugccguuccagcaguucgggcgcgacaucgccgacacgaccgacgcgguccgcgacccccagacccuggagauccucgacaucacccccugcagcuucggcgggguguccgugaucacgccgggcaccaacaccagcaaccaggucgccgugcuguaccaggacgugaacugcaccgagguccccguggccauccacgccgaccagcugacgcccaccuggcggguguacuccaccggcagcaacgucuuccagacccgcgccgggugccucaucggcgcggagcacgugaacaacuccuacgagugcgacauccccaucggggccggcaucugcgccagcuaccagacgcagaccaacuccccgcggcgcgcccggagcguggcgucccagagcaucaucgccuacaccaugucccugggcgccgagaacagcgucgccuacuccaacaacagcaucgccauccccaccaacuucacgaucuccgugaccaccgagauccugcccgugagcaugaccaagacgagcgucgacugcaccauguacaucugcggggacuccaccgagugcagcaaccuccugcugcaguacggcuccuucugcacccagcucaaccgcgcgcugacggggaucgccguggagcaggacaagaacacccaggagguguucgcccaggucaagcagaucuacaagacgcccccgaucaaggacuucggcggguucaacuucagccagauccugcccgaccccuccaagcccagcaagcgguccuucaucgaggaccuccuguucaacaaggugacccuggccgacgccggcuucaucaagcaguacggcgacugccucggggacaucgcggcccgcgaccugaucugcgcccagaaguucaacggccugaccgugcucccgccccugcugaccgacgagaugaucgcccaguacaccagcgcccuccuggcggggaccaucacguccggcuggaccuucggggccggcgccgcccugcagauccccuucgcgaugcagauggccuaccgguucaacggcaucggggucacccagaacgugcucuacgagaaccagaagcugaucgccaaccaguucaacagcgccaucggcaagauccaggacucccugagcuccaccgccagcgcgcucgggaagcugcaggacguggucaaccagaacgcccaggcccugaacacgcucgugaagcagcuguccagcaacugcggcgccaucuccagcgugcugaacgacauccucucccgccuggacaaggucgaggccgaggugcagaucgaccggcugaucaccugucgccuccagagccugcagaccuacgugacccagcagcugauccgggcggccgagauccgcgccagcgccaaccucgccgcgaccaagauguccgagugcguccugggccagagcaagcggguggacuucugcggcaagggguaccaccugauguccuucccccagagcgccccgcacggcguggucuuccuccacgugacguacguccccgcccaggagaagaacuucaccaccgcccccgcgaucugccacgacgggaaggcccacuucccccgcgagggcguguucguguccaacgggacccacugguucgucacgcagcggaacuucuacgagccgcagaucaucaccaccgacaacaccuucgugagcggcaacugcgacguggucaucggcaucgugaacaacacgguguacgacccccugcagcccgagcuggacuccggcgggggcgggagcgacaucgaccccuacaaggaguucggcagcuccuaccagcugcucaacuuccugccccuggacuucuuccccgaccucaacgcccugguggacaccgccaccgcgcuguacgaggaggagcucacggggcgcgagcacugcagcccccaccacaccgccauccggcaggcccuggucugcugggacgagcugaccaagcucaucgccuggauguccagcaacaucaccuccgagcagguccgcacgaucaucgugaaccacgucaacgacaccuggggccugaaggugcggcagagccugugguuccaccucuccugccugaccuucgggcagcacaccgugcaggaguuccuggucagcuucggcguguggauccgcacgcccgccccguaccggccgcccaacgcgccgauccucuccacccugccggagcacaccgugaucugcugaggacuaguuauaagacugacuagcccgaugggccucccaacgggcccuccuccccuccuugcaccgagauuaauaaaaaaaaaaaaaaaaaaaaaaaaaaaaaaaaaaaaaaaaaaaaaaaaaaaaaaaaaaaaaaaaugcaucccccccccccccccccccccccccccccccaaaggcucuuuucagagccaccagaauu

SEQ ID NO: 12942 - RNA, 4123 nt, Artificial Sequence
  SARS-CoV-2/Wuhan/WIV05/2019__EPI_ISL_402128 spike protein mRNA gc (1-1147)(A972C_R995C) WhcAg construct
aggagaaagcuuaccauguucguguuccugguccuccugccccuggugagcucccagugcgugaaccucaccacccgcacgcagcugccgcccgccuacaccaacagcuucacccggggcgucuacuaccccgacaagguguuccgcuccagcgugcugcacuccacccaggaccucuuccugcccuucuucagcaacgucacgugguuccacgccauccacguguccgggaccaacggcaccaagcgguucgacaacccggugcugcccuucaacgacggggucuacuucgcgagcaccgagaaguccaacaucauccgcggcuggaucuucgggacgacccucgacagcaagacccagucccugcugaucgugaacaacgccaccaacguggucaucaaggugugcgaguuccaguucugcaacgaccccuuccucggcguguacuaccacaagaacaacaagagcuggauggaguccgaguuccgggucuacagcuccgccaacaacugcacguucgaguacgugagccagcccuuccugauggaccuggagggcaagcaggggaacuucaagaaccuccgcgaguucguguucaagaacaucgacggcuacuucaagaucuacuccaagcacaccccgaucaaccugguccgggaccugccccagggguucagcgcccucgagccccugguggaccugcccaucggcaucaacaucacccgcuuccagacccuccuggcccugcaccgguccuaccucacgccgggggacagcagcuccggcuggaccgcgggcgccgccgccuacuacgugggguaccugcagccccgcaccuuccugcucaaguacaacgagaacggcaccaucacggacgcggucgacugcgcccuggacccccugagcgagaccaagugcacccucaaguccuucaccguggagaaggggaucuaccagacgagcaacuuccgggugcagcccaccgaguccaucguccgcuucccgaacaucaccaaccugugccccuucggcgagguguucaacgccacccgguucgccagcgucuacgccuggaaccgcaagcggaucuccaacugcguggcggacuacagcgugcuguacaacuccgccagcuucuccacguucaagugcuacggcgucagccccaccaagcucaacgaccugugcuucaccaacguguacgccgacuccuucgugauccgcggggacgagguccggcagaucgcccccggccagaccgggaagaucgccgacuacaacuacaagcugccggacgacuucacgggcugcgugaucgcguggaacagcaacaaccucgacuccaaggucgggggcaacuacaacuaccuguaccgccuguuccgcaagagcaaccucaagcccuucgagcgggacaucuccaccgagaucuaccaggccggcagcacccccugcaacgggguggagggcuucaacugcuacuucccccugcaguccuacggguuccagccgaccaacggcgugggguaccagcccuaccggguggucgugcugagcuucgagcuccugcacgcccccgccacggugugcggccccaagaaguccaccaaccuggucaagaacaagugcgugaacuucaacuucaacggccucaccgggaccggcgugcugaccgagagcaacaagaaguuccugccguuccagcaguucgggcgcgacaucgccgacacgaccgacgcgguccgcgacccccagacccuggagauccucgacaucacccccugcagcuucggcgggguguccgugaucacgccgggcaccaacaccagcaaccaggucgccgugcuguaccaggacgugaacugcaccgagguccccguggccauccacgccgaccagcugacgcccaccuggcggguguacuccaccggcagcaacgucuuccagacccgcgccgggugccucaucggcgcggagcacgugaacaacuccuacgagugcgacauccccaucggggccggcaucugcgccagcuaccagacgcagaccaacuccccgcggcgcgcccggagcguggcgucccagagcaucaucgccuacaccaugucccugggcgccgagaacagcgucgccuacuccaacaacagcaucgccauccccaccaacuucacgaucuccgugaccaccgagauccugcccgugagcaugaccaagacgagcgucgacugcaccauguacaucugcggggacuccaccgagugcagcaaccuccugcugcaguacggcuccuucugcacccagcucaaccgcgcgcugacggggaucgccguggagcaggacaagaacacccaggagguguucgcccaggucaagcagaucuacaagacgcccccgaucaaggacuucggcggguucaacuucagccagauccugcccgaccccuccaagcccagcaagcgguccuucaucgaggaccuccuguucaacaaggugacccuggccgacgccggcuucaucaagcaguacggcgacugccucggggacaucgcggcccgcgaccugaucugcgcccagaaguucaacggccugaccgugcucccgccccugcugaccgacgagaugaucgcccaguacaccagcgcccuccuggcggggaccaucacguccggcuggaccuucggggccggcgccgcccugcagauccccuucgcgaugcagauggccuaccgguucaacggcaucggggucacccagaacgugcucuacgagaaccagaagcugaucgccaaccaguucaacagcgccaucggcaagauccaggacucccugagcuccaccgccagcgcgcucgggaagcugcaggacguggucaaccagaacgcccaggcccugaacacgcucgugaagcagcuguccagcaacuucggcugcaucuccagcgugcugaacgacauccucucccgccuggacaaggucgaggccgaggugcagaucgacugccugaucaccgggcgccuccagagccugcagaccuacgugacccagcagcugauccgggcggccgagauccgcgccagcgccaaccucgccgcgaccaagauguccgagugcguccugggccagagcaagcggguggacuucugcggcaagggguaccaccugauguccuucccccagagcgccccgcacggcguggucuuccuccacgugacguacguccccgcccaggagaagaacuucaccaccgcccccgcgaucugccacgacgggaaggcccacuucccccgcgagggcguguucguguccaacgggacccacugguucgucacgcagcggaacuucuacgagccgcagaucaucaccaccgacaacaccuucgugagcggcaacugcgacguggucaucggcaucgugaacaacacgguguacgacccccugcagcccgagcuggacuccggcgggggcgggagcgacaucgaccccuacaaggaguucggcagcuccuaccagcugcucaacuuccugccccuggacuucuuccccgaccucaacgcccugguggacaccgccaccgcgcuguacgaggaggagcucacggggcgcgagcacugcagcccccaccacaccgccauccggcaggcccuggucugcugggacgagcugaccaagcucaucgccuggauguccagcaacaucaccuccgagcagguccgcacgaucaucgugaaccacgucaacgacaccuggggccugaaggugcggcagagccugugguuccaccucuccugccugaccuucgggcagcacaccgugcaggaguuccuggucagcuucggcguguggauccgcacgcccgccccguaccggccgcccaacgcgccgauccucuccacccugccggagcacaccgugaucugcugaggacuaguuauaagacugacuagcccgaugggccucccaacgggcccuccuccccuccuugcaccgagauuaauaaaaaaaaaaaaaaaaaaaaaaaaaaaaaaaaaaaaaaaaaaaaaaaaaaaaaaaaaaaaaaaaugcaucccccccccccccccccccccccccccccccaaaggcucuuuucagagccaccagaauu

SEQ ID NO: 12943 - RNA, 4123 nt, Artificial Sequence
  SARS-CoV-2/Wuhan/WIV05/2019__EPI_ISL_402128 spike protein mRNA gc (1-1147)(A890C_V1040C) WhcAg construct
aggagaaagcuuaccauguucguguuccugguccuccugccccuggugagcucccagugcgugaaccucaccacccgcacgcagcugccgcccgccuacaccaacagcuucacccggggcgucuacuaccccgacaagguguuccgcuccagcgugcugcacuccacccaggaccucuuccugcccuucuucagcaacgucacgugguuccacgccauccacguguccgggaccaacggcaccaagcgguucgacaacccggugcugcccuucaacgacggggucuacuucgcgagcaccgagaaguccaacaucauccgcggcuggaucuucgggacgacccucgacagcaagacccagucccugcugaucgugaacaacgccaccaacguggucaucaaggugugcgaguuccaguucugcaacgaccccuuccucggcguguacuaccacaagaacaacaagagcuggauggaguccgaguuccgggucuacagcuccgccaacaacugcacguucgaguacgugagccagcccuuccugauggaccuggagggcaagcaggggaacuucaagaaccuccgcgaguucguguucaagaacaucgacggcuacuucaagaucuacuccaagcacaccccgaucaaccugguccgggaccugccccagggguucagcgcccucgagccccugguggaccugcccaucggcaucaacaucacccgcuuccagacccuccuggcccugcaccgguccuaccucacgccgggggacagcagcuccggcuggaccgcgggcgccgccgccuacuacgugggguaccugcagccccgcaccuuccugcucaaguacaacgagaacggcaccaucacggacgcggucgacugcgcccuggacccccugagcgagaccaagugcacccucaaguccuucaccguggagaaggggaucuaccagacgagcaacuuccgggugcagcccaccgaguccaucguccgcuucccgaacaucaccaaccugugccccuucggcgagguguucaacgccacccgguucgccagcgucuacgccuggaaccgcaagcggaucuccaacugcguggcggacuacagcgugcuguacaacuccgccagcuucuccacguucaagugcuacggcgucagccccaccaagcucaacgaccugugcuucaccaacguguacgccgacuccuucgugauccgcggggacgagguccggcagaucgcccccggccagaccgggaagaucgccgacuacaacuacaagcugccggacgacuucacgggcugcgugaucgcguggaacagcaacaaccucgacuccaaggucgggggcaacuacaacuaccuguaccgccuguuccgcaagagcaaccucaagcccuucgagcgggacaucuccaccgagaucuaccaggccggcagcacccccugcaacgggguggagggcuucaacugcuacuucccccugcaguccuacggguuccagccgaccaacggcgugggguaccagcccuaccggguggucgugcugagcuucgagcuccugcacgcccccgccacggugugcggccccaagaaguccaccaaccuggucaagaacaagugcgugaacuucaacuucaacggccucaccgggaccggcgugcugaccgagagcaacaagaaguuccugccguuccagcaguucgggcgcgacaucgccgacacgaccgacgcgguccgcgacccccagacccuggagauccucgacaucacccccugcagcuucggcgggguguccgugaucacgccgggcaccaacaccagcaaccaggucgccgugcuguaccaggacgugaacugcaccgagguccccguggccauccacgccgaccagcugacgcccaccuggcggguguacuccaccggcagcaacgucuuccagacccgcgccgggugccucaucggcgcggagcacgugaacaacuccuacgagugcgacauccccaucggggccggcaucugcgccagcuaccagacgcagaccaacuccccgcggcgcgcccggagcguggcgucccagagcaucaucgccuacaccaugucccugggcgccgagaacagcgucgccuacuccaacaacagcaucgccauccccaccaacuucacgaucuccgugaccaccgagauccugcccgugagcaugaccaagacgagcgucgacugcaccauguacaucugcggggacuccaccgagugcagcaaccuccugcugcaguacggcuccuucugcacccagcucaaccgcgcgcugacggggaucgccguggagcaggacaagaacacccaggagguguucgcccaggucaagcagaucuacaagacgcccccgaucaaggacuucggcggguucaacuucagccagauccugcccgaccccuccaagcccagcaagcgguccuucaucgaggaccuccuguucaacaaggugacccuggccgacgccggcuucaucaagcaguacggcgacugccucggggacaucgcggcccgcgaccugaucugcgcccagaaguucaacggccugaccgugcucccgccccugcugaccgacgagaugaucgcccaguacaccagcgcccuccuggcggggaccaucacguccggcuggaccuucgggugcggcgccgcccugcagauccccuucgcgaugcagauggccuaccgguucaacggcaucggggucacccagaacgugcucuacgagaaccagaagcugaucgccaaccaguucaacagcgccaucggcaagauccaggacucccugagcuccaccgccagcgcgcucgggaagcugcaggacguggucaaccagaacgcccaggcccugaacacgcucgugaagcagcuguccagcaacuucggcgccaucuccagcgugcugaacgacauccucucccgccuggacaaggucgaggccgaggugcagaucgaccggcugaucaccgggcgccuccagagccugcagaccuacgugacccagcagcugauccgggcggccgagauccgcgccagcgccaaccucgccgcgaccaagauguccgagugcguccugggccagagcaagcggugcgacuucugcggcaagggguaccaccugauguccuucccccagagcgccccgcacggcguggucuuccuccacgugacguacguccccgcccaggagaagaacuucaccaccgcccccgcgaucugccacgacgggaaggcccacuucccccgcgagggcguguucguguccaacgggacccacugguucgucacgcagcggaacuucuacgagccgcagaucaucaccaccgacaacaccuucgugagcggcaacugcgacguggucaucggcaucgugaacaacacgguguacgacccccugcagcccgagcuggacuccggcgggggcgggagcgacaucgaccccuacaaggaguucggcagcuccuaccagcugcucaacuuccugccccuggacuucuuccccgaccucaacgcccugguggacaccgccaccgcgcuguacgaggaggagcucacggggcgcgagcacugcagcccccaccacaccgccauccggcaggcccuggucugcugggacgagcugaccaagcucaucgccuggauguccagcaacaucaccuccgagcagguccgcacgaucaucgugaaccacgucaacgacaccuggggccugaaggugcggcagagccugugguuccaccucuccugccugaccuucgggcagcacaccgugcaggaguuccuggucagcuucggcguguggauccgcacgcccgccccguaccggccgcccaacgcgccgauccucuccacccugccggagcacaccgugaucugcugaggacuaguuauaagacugacuagcccgaugggccucccaacgggcccuccuccccuccuugcaccgagauuaauaaaaaaaaaaaaaaaaaaaaaaaaaaaaaaaaaaaaaaaaaaaaaaaaaaaaaaaaaaaaaaaaugcaucccccccccccccccccccccccccccccccaaaggcucuuuucagagccaccagaauu

SEQ ID NO: 12944 - RNA, 4123 nt, Artificial Sequence
  SARS-CoV-2/Wuhan/WIV05/2019__EPI_ISL_402128 spike protein mRNA gc (1-1147)(T874C_S1055C) WhcAg construct
aggagaaagcuuaccauguucguguuccugguccuccugccccuggugagcucccagugcgugaaccucaccacccgcacgcagcugccgcccgccuacaccaacagcuucacccggggcgucuacuaccccgacaagguguuccgcuccagcgugcugcacuccacccaggaccucuuccugcccuucuucagcaacgucacgugguuccacgccauccacguguccgggaccaacggcaccaagcgguucgacaacccggugcugcccuucaacgacggggucuacuucgcgagcaccgagaaguccaacaucauccgcggcuggaucuucgggacgacccucgacagcaagacccagucccugcugaucgugaacaacgccaccaacguggucaucaaggugugcgaguuccaguucugcaacgaccccuuccucggcguguacuaccacaagaacaacaagagcuggauggaguccgaguuccgggucuacagcuccgccaacaacugcacguucgaguacgugagccagcccuuccugauggaccuggagggcaagcaggggaacuucaagaaccuccgcgaguucguguucaagaacaucgacggcuacuucaagaucuacuccaagcacaccccgaucaaccugguccgggaccugccccagggguucagcgcccucgagccccugguggaccugcccaucggcaucaacaucacccgcuuccagacccuccuggcccugcaccgguccuaccucacgccgggggacagcagcuccggcuggaccgcgggcgccgccgccuacuacgugggguaccugcagccccgcaccuuccugcucaaguacaacgagaacggcaccaucacggacgcggucgacugcgcccuggacccccugagcgagaccaagugcacccucaaguccuucaccguggagaaggggaucuaccagacgagcaacuuccgggugcagcccaccgaguccaucguccgcuucccgaacaucaccaaccugugccccuucggcgagguguucaacgccacccgguucgccagcgucuacgccuggaaccgcaagcggaucuccaacugcguggcggacuacagcgugcuguacaacuccgccagcuucuccacguucaagugcuacggcgucagccccaccaagcucaacgaccugugcuucaccaacguguacgccgacuccuucgugauccgcggggacgagguccggcagaucgcccccggccagaccgggaagaucgccgacuacaacuacaagcugccggacgacuucacgggcugcgugaucgcguggaacagcaacaaccucgacuccaaggucgggggcaacuacaacuaccuguaccgccuguuccgcaagagcaaccucaagcccuucgagcgggacaucuccaccgagaucuaccaggccggcagcacccccugcaacgggguggagggcuucaacugcuacuucccccugcaguccuacggguuccagccgaccaacggcgugggguaccagcccuaccggguggucgugcugagcuucgagcuccugcacgcccccgccacggugugcggccccaagaaguccaccaaccuggucaagaacaagugcgugaacuucaacuucaacggccucaccgggaccggcgugcugaccgagagcaacaagaaguuccugccguuccagcaguucgggcgcgacaucgccgacacgaccgacgcgguccgcgacccccagacccuggagauccucgacaucacccccugcagcuucggcgggguguccgugaucacgccgggcaccaacaccagcaaccaggucgccgugcuguaccaggacgugaacugcaccgagguccccguggccauccacgccgaccagcugacgcccaccuggcggguguacuccaccggcagcaacgucuuccagacccgcgccgggugccucaucggcgcggagcacgugaacaacuccuacgagugcgacauccccaucggggccggcaucugcgccagcuaccagacgcagaccaacuccccgcggcgcgcccggagcguggcgucccagagcaucaucgccuacaccaugucccugggcgccgagaacagcgucgccuacuccaacaacagcaucgccauccccaccaacuucacgaucuccgugaccaccgagauccugcccgugagcaugaccaagacgagcgucgacugcaccauguacaucugcggggacuccaccgagugcagcaaccuccugcugcaguacggcuccuucugcacccagcucaaccgcgcgcugacggggaucgccguggagcaggacaagaacacccaggagguguucgcccaggucaagcagaucuacaagacgcccccgaucaaggacuucggcggguucaacuucagccagauccugcccgaccccuccaagcccagcaagcgguccuucaucgaggaccuccuguucaacaaggugacccuggccgacgccggcuucaucaagcaguacggcgacugccucggggacaucgcggcccgcgaccugaucugcgcccagaaguucaacggccugaccgugcucccgccccugcugaccgacgagaugaucgcccaguacugcagcgcccuccuggcggggaccaucacguccggcuggaccuucggggccggcgccgcccugcagauccccuucgcgaugcagauggccuaccgguucaacggcaucggggucacccagaacgugcucuacgagaaccagaagcugaucgccaaccaguucaacagcgccaucggcaagauccaggacucccugagcuccaccgccagcgcgcucgggaagcugcaggacguggucaaccagaacgcccaggcccugaacacgcucgugaagcagcuguccagcaacuucggcgccaucuccagcgugcugaacgacauccucucccgccuggacaaggucgaggccgaggugcagaucgaccggcugaucaccgggcgccuccagagccugcagaccuacgugacccagcagcugauccgggcggccgagauccgcgccagcgccaaccucgccgcgaccaagauguccgagugcguccugggccagagcaagcggguggacuucugcggcaagggguaccaccugauguccuucccccagugcgccccgcacggcguggucuuccuccacgugacguacguccccgcccaggagaagaacuucaccaccgcccccgcgaucugccacgacgggaaggcccacuucccccgcgagggcguguucguguccaacgggacccacugguucgucacgcagcggaacuucuacgagccgcagaucaucaccaccgacaacaccuucgugagcggcaacugcgacguggucaucggcaucgugaacaacacgguguacgacccccugcagcccgagcuggacuccggcgggggcgggagcgacaucgaccccuacaaggaguucggcagcuccuaccagcugcucaacuuccugccccuggacuucuuccccgaccucaacgcccugguggacaccgccaccgcgcuguacgaggaggagcucacggggcgcgagcacugcagcccccaccacaccgccauccggcaggcccuggucugcugggacgagcugaccaagcucaucgccuggauguccagcaacaucaccuccgagcagguccgcacgaucaucgugaaccacgucaacgacaccuggggccugaaggugcggcagagccugugguuccaccucuccugccugaccuucgggcagcacaccgugcaggaguuccuggucagcuucggcguguggauccgcacgcccgccccguaccggccgcccaacgcgccgauccucuccacccugccggagcacaccgugaucugcugaggacuaguuauaagacugacuagcccgaugggccucccaacgggcccuccuccccuccuugcaccgagauuaauaaaaaaaaaaaaaaaaaaaaaaaaaaaaaaaaaaaaaaaaaaaaaaaaaaaaaaaaaaaaaaaaugcaucccccccccccccccccccccccccccccccaaaggcucuuuucagagccaccagaauu

SEQ ID NO: 12945 - RNA, 4039 nt, Artificial Sequence
  SARS-CoV-2/Wuhan/WIV05/2019__EPI_ISL_402128 spike protein mRNA human (1-1273)
aggagaaagcuuaccauguucguguuucugguccuccuuccccugguuagcucccagugcgugaacuugaccacaagaacucaauuaccuccagccuacacuaauucuuucaccaggggcguauauuacccggacaagguguuucggucaaguguccugcacagcacacaggaucuauuccuccccuuuuucuccaacgugacuugguuucaugcuauccacguuucugggaccaauggaacaaaacgcuucgacaacccugugcugccauuuaaugauggugucuauuucgcaucgaccgagaagucaaacauuauacgaggcuggaucuuugggacuacacuugacagcaaaacccagagucuguugauugugaauaacgccacgaauguaguuaucaaggugugugaguuccaguuuugcaacgaucccuuccucggagucuacuaucauaaaaauaacaaguccuggauggagucugaguuccguguguacagcuccgcgaauaacuguacuuuugaauaugugucacaaccuuuccugauggaccuggaaggcaagcaggguaauuuuaaaaaccucagagaguucgucuuuaagaacauugauggguacuucaaaaucuacaguaagcacaccccaauaaauuuaguuagggaccugccccagggauuuagcgcucuugagccuuugguggaucugccaaucggcauuaacaucacacgguuccagacucuacucgcccugcaucgcucuuaucuuaccccgggcgacuccucaagcggguggacagcaggagccgcugcauacuauguagguuaccugcaacccagaaccuuuuugcucaaauauaaugaaaacggcacgauuacugaugccguggacugcgcucuggauccuuuaagugagacaaaguguacccugaagucuuucacugucgaaaaagggaucuaccagacauccaauuuuagggugcagccaaccgagagcauaguucgguuccccaacauuacgaaucucugcccuuuuggagagguguucaacgccacccgcuucgcgucggucuaugcauggaaucgaaagagaaucucuaacuguguggccgacuacuccguacuuuacaauucagcuaguuuuagcacauucaaaugcuauggcguuuccccaacuaagcugaacgacuuguguuuuaccaauguguacgccgauucuuucgucauuaggggugacgaagugcggcagaucgcacccgggcaaacaggaaaaaucgcugauuauaacuacaagcuaccggacgauuuuacuggcugcgucauugccuggaauagcaacaaccuggacucaaaagugggcgggaauuauaacuaccucuaucgucuguuccgcaagaguaaucuuaagccuuuugagagagauauauccaccgaaaucuaccaggcgggaagcacacccuguaacgguguugagggcuucaauugcuacuuuccacugcagucuuauggguuccaaccuaccaacggagugggcuaccagcccuauaggguagucguguugucauuugaacuccugcacgccccagcaacuguuugcggucccaaaaagaguacgaauuuagugaaaaacaagugugucaauuucaacuuuaaugggcugacaggcaccggagugcuaacugagagcaacaaaaaguuccucccuuuccagcaguuuggccgggacauugcugauaccacagacgccguacgagauccacaaacccuggagauccuugacauaacuccgugcuccuucgggggagugucuguuauuacacccgguacgaauaccucgaaccaggucgcuguguuguaccaggacgugaauuguacugaagucccuguugccauccacgcagaucagcugacaccaaccuggcgcguguauagcacaggcuccaacguguuucaaacuagagccgggugccucaucggagcugagcauguaaacaauucauacgaaugugacauucccaucggcgcggguauuugcgcaaguuaucagacccagacgaacucuccuaggcgggcccgcagcgucgcuucccagucaauaaucgccuacaccaugagccugggggcagaaaauucuguggccuacuccaacaauaguauugcuaucccaacaaacuucacuaucagcguuaccacagaaauucuucccgugucuaugacuaagaccuccgucgauuguacgauguauauaugcggcgacucaacagaguguaguaaucuguugcuccaauacggcagcuuuugcacccagcugaacagagccuuaacuggaaucgcaguggagcaggauaaaaauacacaggaaguuuucgcgcaagugaagcagauuuauaaaaccccgccuaucaaggacuuugggggauucaacuuuucgcagauucugccagaucccuccaaaccuucuaagaggagcuucaucgaggaccuacucuuuaauaagguaacucuggcugaugccgguuucauaaaacaauacggcgacugucuuggggauaucgcagcccgugacuugauuugcgcucagaaguucaacggacugaccguccugcccccacucuuaacagaugaaaugaucgcccaguauacgucagcacugcuugcuggcaccauuacgagugguuggacauuuggggccggcgcggccuugcagaucccuuucgcuaugcaaauggcauaccgguuuaauggaauaggcgugacccagaacgugcucuaugagaaucagaaacugauugccaaccaguucaacuccgcuaucgggaagauucaagacucucuaagcuccacagccucagcacugggaaaacuccaggacgucguuaaucagaacgcgcaggcccugaauacucuugugaagcaauugagcaguaacuuuggcgcuaucucuuccguacugaaugauauauuaagccgacucgacaagguggaagccgagguccagaucgauagacugauuaccgguaggcuucagucgcugcaaacguacgugacacagcaguugauccgcgcagcugagauucgggccucagcaaaccucgccgcuaccaaaaugucugaaugcguucuggggcagaguaagagaguggacuucuguggaaaaggcuaccaccuaauguccuuuccccaaagcgcgccacauggugucguguuccugcacguuacuuaugugccggcccaggagaagaauuuuaccacagcuccugcaaucugccacgauggcaaagcccauuuccccagggaaggggucuuuguaucuaacggaacucacugguucgugacccagcgcaauuuuuacgagccacagauaauuacaacggacaacaccuucguuagcggcaauugugauguggucaucgggaucgugaacaauacuguauaugacccccuccaaccugagcuggauuccuucaaggaggaacuugacaaauacuuuaagaaccauacaucaccagauguggacuugggagauauuaguggcaucaaugccagcgucguuaacauucagaaggaaauagaccgacugaaugagguggcuaaaaacuuaaacgaaucucucaucgaccugcaggagcuugguaaguaugagcaguacauuaaauggcccugguauaucuggcugggguucauugcaggacuaaucgccauagugauggucaccaucaugcucugcuguaugacuuccugcuguucaugccugaagggcuguugcaguugugguagcugcugcaaauuugaugaagacgauuccgagccuguguugaagggcguuaagcugcacuacacaugaggacuaguuauaagacugacuagcccgaugggccucccaacgggcccuccuccccuccuugcaccgagauuaauaaaaaaaaaaaaaaaaaaaaaaaaaaaaaaaaaaaaaaaaaaaaaaaaaaaaaaaaaaaaaaaaugcaucccccccccccccccccccccccccccccccaaaggcucuuuucagagccaccagaauu

SEQ ID NO: 12946 - RNA, 4027 nt, Artificial Sequence
  SARS-CoV-2/bat/Yunnan/RaTG13/2013__EPI_ISL_402131 spike protein mRNA human (1-1269)
aggagaaagcuuaccauguucguguuucugguccuccuuccccugguuagcucccagugcgugaacuugaccacaagaacucaauuaccuccagccuacaccaauucuucaacgaggggcguauauuacccggacaagguguuccggaguagcguccugcaccuaacacaggaucucuuucugcccuucuuuuccaacgugacuugguuccaugcuauccacguuucugggaccaauggaauuaaacgcuuugacaacccugugcuuccauucaaugauggugucuauuuugcaucgacagagaagucaaacauaauccgaggcuggauuuucgggaccacucuggacagcaaaacacagaguuugcucaucgugaauaacgccaccaauguaguuauuaaggugugugaauuucaguucugcaacgaucccuuucugggagucuacuaucauaaaaauaacaaguccuggauggagucugaguuccguguguacagcuccgcgaauaacuguacguucgaauaugugucacaaccuuuucugauggaccucgaaggcaagcaggguaauuucaaaaacuuaagagaguuugucuucaagaacaucgauggguacuuuaaaauauacaguaagcacacuccaaucaaucugguuagggaccuucccccuggauucagcgcuuuggagccacugguggaucuaccgauuggcaucaacauuacccgguuucagacacuccuggcccuucaucgcucuuaucugacucccggcgacuccucaagcggguggaccgcaggagccgcugcauacuauguagguuacuugcagccuagaacauuccuccugaaauauaaugaaaacggcaccaucacggaugccguggacugcgcuuuagauccacugagugagacuaaguguacacucaagucuuuuaccgucgaaaaagggauauaccaaacuuccaauuucagggugcagcccacagacagcauuguucgguuuccuaacaucaccaaucuuugcccauucggagagguguuuaacgccacgaccuucgcgucggucuaugcauggaaucgcaagcgaauuucuaacuguguggccgacuacuccguacuguacaauucaacaaguuucagcacuuuuaaaugcuauggcguuucccccaccaaguugaacgaucuauguuucacaaauguguacgcugacucuuuugucaucacuggugaugaggugagacagaucgccccggggcagaccggaaaaauugcagacuauaacuacaagcugccugaugacuucacaggcugcgucauagcuuggaauagcaaacacaucgaugccaaggaaggcgggaacuuuaacuaucucuacaggcuguuccggaaggcgaaucuuaaacccuuugagcgugacauuucaaccgaaaucuaucaagccggaaguaagccauguaacggucagacuggccugaauugcuacuacccuuuguaucgcuacggguucuaucccacggauggagugggccaccagccauacagaguugugguacucuccuuugagcuguuaaacgcacccgcuacagucugcgguccuaaaaagagcaccaaucuggugaaaaacaaguguguuaauuucaacuuuaaugggcuaacuggcaccggagugcucacagaaucuaacaagaaauuccugccauuucaacaguucggcagggacauagccgauaccacugacgcuguccgggacccgcagacacuugagauuuuggauaucacgcccugcucauucgggggagugaguguaaucaccccugguacuaaugccagcaaccagguggcaguucuguaucaagacgucaauuguacagaggugccaguggccauucaugcugaucagcucacccccacauggcgagucuacuccacuggcucuaacguuuuucagacccgcgcggggugccugaucggagcagaacacgugaauaacucguaugagugugacauuccuauaggcgccgguaucugcgcuagcuaccagacgcaaaccaacuccagaucaguggccagucagucuauuaucgcauacacaaugagccuuggggccgaaaauuccguagcuuauucaaacaauagcaucgccauuccaacuaacuucaccauaucugucacaacugagauccugcccguguccaugaccaagacgaguguugauuguacaauguacauuugcggcgacagcaccgaauguucuaauuugcuccugcaguauggauccuuuugcacucaguuaaacagggcacugacaggcaucgcgguggagcaagauaaaaauacccaggaggucuucgcucaggugaagcagauuuacaaaacuccgccuaucaaggacuuugggggauucaacuuuucacaaauacuaccagaucccaguaagccuagcaaacggucguucaucgaagaccuccuguuuaauaagguuacccuugccgaugcagguuucauuaaacaguauggcgacuguuugggggauaucgccgcucgcgaccugauuugcgcccagaaguuuaacggacucacagugcugcccccauuacugacggacgagaugaucgcacaauacaccuccgcucuuuuggccggcacuauaacaucugguuggaccuucggggcgggcgccgcucuccagauuccuuucgcaaugcagauggccuauagauuuaauggaaucggcguaacacagaacguccuguacgaaaaucaaaaacuaauugcuaaccaguucaauagcgccaucgggaagauacaggauucacugaguuccacugcaucugcgcucggaaagcugcaggacguggugaaccaaaacgcccaggcucuuaauaccuuggucaaacagcugagcuccaacuuuggcgccaucucaagcguuuuaaaugauauucucaguaggcuggacaagguggaggcagaaguacagaucgaucgucuuauuacgggucggcugcaaucuuugcagacauacgugacccagcaacucauccgagcugccgagauaagagcauccgccaaccuggcugcgacuaaaaugagcgagugcguccuagggcagucgaagaggguggacuucuguggaaaaggcuaucaucugaugucauuuccccagucugccccacacgguguuguguuccuccacgucaccuacgugccggcacaggaaaagaauuuuacaacugcuccugccauuugccaugauggcaaagcccacuucccccgcgaggggguuuuugugaguaacggaacccauugguucgucacacaacggaauuuuuaugaaccacagaucaucacgaccgacaacacuuucguauccggcagcugugaugugguuauugggaucgugaauaacacagucuacgacccccugcagccugagcuugauucuuuuaaggaggaauuggacaaguauuucaaaaaucacaccagcccagauguggaccugggagacauuuccggcauaaacgcuucaguagugaauauccagaaggagauugauagauuaaacgaagucgccaaaaaucucaacgagagucugaucgaccuucaagaacuggguaaguacgagcaguauauuaaauggcccugguacaucuggcuaggguucauagcaggacucaucgcgauuaucaugguuacuauuaugcugugcuguaugacaagcugcuguucuugcuugaagggcuguugcuccugugguucaugcugcaaguuugaugaggacgauagugaaccugugcugaaaggcgugaaguuacauuacaccugaggacuaguuauaagacugacuagcccgaugggccucccaacgggcccuccuccccuccuugcaccgagauuaauaaaaaaaaaaaaaaaaaaaaaaaaaaaaaaaaaaaaaaaaaaaaaaaaaaaaaaaaaaaaaaaaugcaucccccccccccccccccccccccccccccccaaaggcucuuuucagagccaccagaauu

SEQ ID NO: 12947 - RNA, 4039 nt, Artificial Sequence
  SARS-CoV-2/Wuhan/HBCDC-HB-01/2019__EPI_ISL_402132 spike protein mRNA human (1-1273)
aggagaaagcuuaccauguucguguuucugguccuccuuccccugguuagcucccagugcgugaacuugaccacaagaacucaauuaccuccagccuacacuaauucuaucaccaggggcguauauuacccggacaagguguuccggucaaguguccugcacagcacacaggaucuauuucuccccuucuuuuccaacgugacuugguuccaugcuauucacguuucugggaccaauggaacaaaacgcuuugacaacccugugcugccauucaaugauggugucuauuuugcaucgaccgagaagucaaacauaauccgaggcuggauuuucgggacuacacuugacagcaaaacccagagucuguugaucgugaauaacgccacgaauguaguuauuaaggugugugaauuucaguucugcaacgaucccuuucucggagucuacuaucauaaaaauaacaaguccuggauggagucugaguuccguguguacagcuccgcgaauaacuguacuuucgaguaugugucacaaccuuuucugauggaccuggaaggcaagcaggguaauuucaaaaaccucagagaguuugucuucaagaacaucgauggguacuuuaaaauauacaguaagcacaccccaaucaauuuaguuagggaccugccccagggauucagcgcucuugagccuuugguggaucugccaauuggcaucaacauuacacgguuucagacucuacucgcccugcaucgcucuuaucuuaccccgggcgacuccucaagcggguggacagcaggagccgcugcauacuauguagguuaccugcaacccagaaccuucuugcucaaauauaaugaaaacggcacgaucacugaugccguggacugcgcucuggauccuuuaagugagacaaaguguacccugaagucuuuuacugucgaaaaagggauauaccagacauccaauuucagggugcagccaaccgagagcauuguucgguuucccaacaucacgaaucucugcccuuucggagagguguuuaacgccacccgcuucgcgucggucuaugcauggaaucgaaagagaauuucuaacuguguggccgacuacuccguacuuuacaauucagcuaguuucagcacauuuaaaugcuauggcguuuccccaacuaagcugaacgacuuguguuucaccaauguguacgccgauucuuuugucaucaggggugacgaagugcggcagaucgcacccgggcaaacaggaaaaauugcugauuauaacuacaagcuaccggacgauuucacuggcugcgucauagccuggaauagcaacaaccuggacucaaaagugggcgggaauuauaacuaccucuaucgucuguuucgcaagaguaaucuuaagccuuucgagagagauaucuccaccgaaauuuaccaggcgggaagcacacccuguaacgguguugagggcuuuaauugcuacuucccacugcagucuuauggguuucaaccuaccaacggagugggcuaccagcccuauaggguagucguguugucauucgaacuccugcacgccccagcaacuguuugcggucccaaaaagaguacgaauuuagugaaaaacaagugugucaauuuuaacuucaaugggcugacaggcaccggagugcuaacugagagcaacaaaaaguuucucccuuuccagcaguucggccgggacaucgcugauaccacagacgccguacgagauccacaaacccuggagauacuugacauuacuccgugcuccuuugggggagugucuguuaucacacccgguacgaauaccucgaaccaggucgcuguguuguaccaggacgugaauuguacugaagucccuguugccauccacgcagaucagcugacaccaaccuggcgcguguauagcacaggcuccaacguguuccaaacuagagccgggugccucauuggagcugagcauguaaacaauucauacgaaugugacauccccauuggcgcggguauaugcgcaaguuaucagacccagacgaacucuccuaggcgggcccgcagcgucgcuucccagucaaucauugccuacaccaugagccugggggcagaaaauucuguggccuacuccaacaauaguaucgcuaucccaacaaacuuuacuauuagcguuaccacagaaauacuucccgugucuaugacuaagaccuccgucgauuguacgauguauaucugcggcgacucaacagaguguaguaaucuguugcuccaauacggcagcuucugcacccagcugaacagagccuuaacuggaauugcaguggagcaggauaaaaauacacaggaaguuuuugcgcaagugaagcagaucuauaaaaccccgccuauuaaggacuucgggggauuuaacuucucgcagauccugccagaucccuccaaaccuucuaagaggagcuuuauagaggaccuacucuucaauaagguaacucuggcugaugccgguuuuaucaaacaauacggcgacugucuuggggauauugcagcccgugacuugaucugcgcucagaaguucaacggacugaccguccugcccccacucuuaacagaugaaaugauugcccaguauacgucagcacugcuugcuggcaccaucacgagugguuggacauucggggccggcgcggccuugcagauaccuuuugcuaugcaaauggcauaccgguucaauggaauuggcgugacccagaacgugcucuaugagaaucagaaacugaucgccaaccaguuuaacuccgcuauugggaagauccaagacucucuaagcuccacagccucagcacugggaaaacuccaggacgucguuaaucagaacgcgcaggcccugaauacucuugugaagcaauugagcaguaacuucggcgcuauaucuuccguacugaaugauaucuuaagccgacucgacaagguggaagccgagguccagauugauagacugaucaccgguaggcuucagucgcugcaaacguacgugacacagcaguugauucgcgcagcugagauccgggccucagcaaaccucgccgcuaccaaaaugucugaaugcguucuggggcagaguaagagaguggacuuuuguggaaaaggcuaccaccuaauguccuucccccaaagcgcgccacauggugucguguuucugcacguuacuuaugugccggcccaggagaagaauuucaccacagcuccugcaauaugccacgauggcaaagcccauuuucccagggaaggggucuucguaucuaacggaacucacugguuugugacccagcgcaauuucuacgagccacagauuaucacaacggacaacaccuuuguuagcggcaauugugauguggucaucgggauugugaacaauacuguauaugacccccuccaaccugagcuggauuccuucaaggaggaacuugacaaauacuucaagaaccauacaucaccagauguggacuugggagauaucaguggcauuaaugccagcgucguuaacauacagaaggaaaucgaccgacugaaugagguggcuaaaaacuuaaacgaaucucucauugaccugcaggagcuugguaaguaugagcaguacaucaaauggcccugguauauuuggcugggguuuaucgcaggacuaauagccaucgugauggucaccauuaugcucugcuguaugacuuccugcuguucaugccugaagggcuguugcaguugugguagcugcugcaaauucgaugaagacgauuccgagccuguguugaagggcguuaagcugcacuacacaugaggacuaguuauaagacugacuagcccgaugggccucccaacgggcccuccuccccuccuugcaccgagauuaauaaaaaaaaaaaaaaaaaaaaaaaaaaaaaaaaaaaaaaaaaaaaaaaaaaaaaaaaaaaaaaaaugcaucccccccccccccccccccccccccccccccaaaggcucuuuucagagccaccagaauu

SEQ ID NO: 12948 - RNA, 4039 nt, Artificial Sequence
  SARS-CoV-2/Guangdong/20SF028/2020__EPI_ISL_403936 spike protein mRNA human (1-1273)
aggagaaagcuuaccauguucguguuucugguccuccuuccccugguuagcucccagugcgugaacuugaccacaagaacucaauuaccuccagccuacacuaauucuuucaccaggggcguauauuacccggacaagguguuucggucaaguguccuguauagcacacaggaucuauuccuccccuuuuucuccaacgugacuugguuucacgcuauccauguuucugggaccaauggaacaaaacgcuucgacaacccugugcugccauuuaaugauggugucuacuucgcaucgaccgagaagucaaacauuauacgaggcuggaucuuugggacuacacuugacagcaaaacccagagucuguugauugugaauaacgccacgaauguaguuaucaaggugugugaguuccaguuuugcaacgaucccuuccucggagucuauuaccacaaaaauaacaaguccuggauggagucugaguuccguguguauagcuccgcgaauaacuguacuuuugaauacgugucacaaccuuuccugauggaccuggaaggcaagcaggguaauuuuaaaaaccucagagaguucgucuuuaagaacauugauggguacuucaaaaucuauaguaagcauaccccaauaaauuuaguuagggaccugccccagggauuuagcgcucuugagccuuugguggaucugccaaucggcauuaacaucacacgguuccagacucuacucgcccugcaccgcucuuaccuuaccccgggcgacuccucaagcggguggacagcaggagccgcugcauauuacguagguuaucugcaacccagaaccuuuuugcucaaauacaaugaaaacggcacgauuacugaugccguggacugcgcucuggauccuuuaagugagacaaaguguacccugaagucuuucacugucgaaaaagggaucuaucagacauccaauuuuagggugcagccaaccgagagcauaguucgguuccccaacauuacgaaucucugcccuuuuggagagguguucaacgccacccgcuucgcgucggucuacgcauggaaucgaaagagaaucucuaacuguguggccgacuacuccguacuuuauaauucagcuaguuuuagcacauucaaaugcuacggcguuuccccaacuaagcugaacgacuuguguuuuaccaauguguaugccgauucuuucgucauuaggggugacgaagugcggcagaucgcacccgggcaaacaggaaaaaucgcugauuacaacuauaagcuaccggacgauuuuacuggcugcgucauugccuggaauagcaacaaccuggacucaaaagugggcgggaauuacaacuaucucuaccgucuguuccgcaagaguaaucuuaagccuuuugagagagauauauccaccgaaaucuaccaggcgggaagcacacccuguaacgguguugagggcuucaauugcuauuuuccacugcagucuuacggguuccaaccuaccaacggagugggcuaucagcccuacaggguagucguguugucauuugaacuccugcaugccccagcaacuguuugcggucccaaaaagaguacgaauuuagugaaaaacaagugugucaauuucaacuuuaaugggcugacaggcaccggagugcuaacugagagcaacaaaaaguuccucccuuuccagcaguuuggccgggacauugcugauaccacagacgccguacgagauccacaaacccuggagauccuugacauaacuccgugcuccuucgggggagugucuguuauuacacccgguacgaauaccucgaaccaggucgcuguguuguaucaggacgugaauuguacugaagucccuguugccauccacgcagaucagcugacaccaaccuggcgcguguacagcacaggcuccaacguguuucaaacuagagccgggugccucaucggagcugagcacguaaacaauucauaugaaugugacauucccaucggcgcggguauuugcgcaaguuaccagacccagacgaacucuccuaggcgggcccgcagcgucgcuucccagucaauaaucgccuacaccaugagccugggggcagaaaauucuguggccuauuccaacaauaguauugcuaucccaacaaacuucacuaucagcguuaccacagaaauucuucccgugucuaugacuaagaccuccgucgauuguacgauguacauaugcggcgacucaacagaguguaguaaucuguugcuccaauauggcagcuuuugcacccagcugaacagagccuuaacuggaaucgcaguggagcaggauaaaaauacacaggaaguuuucgcgcaagugaagcagauuuacaaaaccccgccuaucaaggacuuugggggauucaacuuuucgcagauucugccagaucccuccaaaccuucuaagaggagcuucaucgaggaccuacucuuuaauaagguaacucuggcugaugccgguuucauaaaacaauauggcgacugucuuggggauaucgcagcccgugacuugauuugcgcucagaaguucaacggacugaccguccugcccccacucuuaacagaugaaaugaucgcccaguacacgucagcacugcuugcuggcaccauuacgagugguuggacauuuggggccggcgcggccuugcagaucccuuucgcuaugcaaauggcauaucgguuuaauggaauaggcgugacccagaacgugcucuacgagaaucagaaacugauugccaaccaguucaacuccgcuaucgggaagauucaagacucucuaagcuccacagccucagcacugggaaaacuccaggacgucguuaaucagaacgcgcaggcccugaauacucuugugaagcaauugagcaguaacuuuggcgcuaucucuuccguacugaaugauauauuaagccgacucgacaagguggaagccgagguccagaucgauagacugauuaccgguaggcuucagucgcugcaaacguacgugacacagcaguugauccgcgcagcugagauucgggccucagcaaaccucgccgcuaccaaaaugucugaaugcguucuggggcagaguaagagaguggacuucuguggaaaaggcuaucaucuaauguccuuuccccaaagcgcgccacacggugucguguuccugcauguuacuuacgugccggcccaggagaagaauuuuaccacagcuccugcaaucugccacgauggcaaagcccacuuccccagggaaggggucuuuguaucuaacggaacucauugguucgugacccagcgcaauuuuuaugagccacagauaauuacaacggacaacaccuucguuagcggcaauugugauguggucaucgggaucgugaacaauacuguauacgacccccuccaaccugagcuggauuccuucaaggaggaacuugacaaauauuuuaagaaccacacaucaccagauguggacuugggagauauuaguggcaucaaugccagcgucguuaacauucagaaggaaauagaccgacugaaugagguggcuaaaaacuuaaacgaaucucucaucgaccugcaggagcuugguaaguacgagcaguauauuaaauggcccugguacaucuggcugggguucauugcaggacuaaucgccauagugauggucaccaucaugcucugcuguaugacuuccugcuguucaugccugaagggcuguugcaguugugguagcugcugcaaauuugaugaagacgauuccgagccuguguugaagggcguuaagcugcauuacacaugaggacuaguuauaagacugacuagcccgaugggccucccaacgggcccuccuccccuccuugcaccgagauuaauaaaaaaaaaaaaaaaaaaaaaaaaaaaaaaaaaaaaaaaaaaaaaaaaaaaaaaaaaaaaaaaaugcaucccccccccccccccccccccccccccccccaaaggcucuuuucagagccaccagaauu

SEQ ID NO: 12949 - RNA, 4039 nt, Artificial Sequence
  SARS-CoV-2/Shenzhen/SZTH-001/2020__EPI_ISL_406592 spike protein mRNA human (1-1273)
aggagaaagcuuaccauguucguguuucugguccuccuuccccugguuagcucccagugcgugaacuugaccacaagaacucaauuaccuccagccuacacuaauucuuucaccaggggcguauauuacccggacaagguguuucggucaaguguccugcacagcacacaggaucuauuccuccccuuuuucuccaacgugacuugguuucaugcuauccacguuucugggaccaauggaacaaaacgcuucgacaacccugugcugccauuuaaugauggugucuauuucgcaucgaccgagaagucaaacauuauacgaggcuggaucuuugggacuacacuugacagcaaaacccagagucuguugauugugaauaacgccacgaauguaguuaucaaggugugugaguuccaguuuugcaacgaucccuuccucggagucuacuaucauaaaaauaacaaguccuggauggagucugaguuccguguguacagcuccgcgaauaacuguacuuuugaauaugugucacaaccuuuccugauggaccuggaaggcaagcaggguaauuuuaaaaaccucagagaguucgucuuuaagaacauugauggguacuucaaaaucuacaguaagcacaccccaauaaauuuaguuagggaccugccccagggauuuagcgcucuugagccuuugguggaucugccaaucggcauuaacaucacacgguuccagacucuacucgcccugcaucgcucuuaucuuaccccgggcgacuccucaagcggguggacagcaggagccgcugcauacuauguagguuaccugcaacccagaaccuuuuugcucaaauauaaugaaaacggcacgauuacugaugccguggacugcgcucuggauccuuuaagugagacaaaguguacccugaagucuuucacugucgaaaaagggaucuaccagacauccaauuuuagggugcagccaaccgagagcauaguucgguuccccaacauuacgaaucucugcccuuuuggagagguguucaacgccacccgcuucgcgucggucuaugcauggaaucgaaagagaaucucuaacuguguggccgacuacuccguacuuuacaauucagcuaguuuuagcacauucaaaugcuauggcguuuccccaacuaagcugaacgacuuguguuuuaccaauguguacgccgauucuuucgucauuaggggugacgaagugcggcagaucgcacccgggcaaacaggaaaaaucgcugauuauaacuacaagcuaccggacgauuuuacuggcugcgucauugccuggaauagcaacaaccuggacucaaaagugggcgggaauuauaacuaccucuaucgucuguuccgcaagaguaaucuuaagccuuuugagagagauauauccaccgaaaucuaccaggcgggaagcacacccuguaacgguguugagggcuucaauugcuacuuuccacugcagucuuauggguuccaaccuaccaacggagugggcuaccagcccuauaggguagucguguugucauuugaacuccugcacgccccagcaacuguuugcggucccaaaaagaguacgaauuuagugaaaaacaagugugucaauuucaacuuuaaugggcugacaggcaccggagugcuaacugagagcaacaaaaaguuccucccuuuccagcaguuuggccgggacauugcugauaccacagacgccguacgagauccacaaacccuggagauccuugacauaacuccgugcuccuucgggggagugucuguuauuacacccgguacgaauaccucgaaccaggucgcuguguuguaccaggacgugaauuguacugaagucccuguugccauccacgcagaucagcugacaccaaccuggcgcguguauagcacaggcuccaacguguuucaaacuagagccgggugccucaucggagcugagcauguaaacaauucauacgaaugugacauucccaucggcgcggguauuugcgcaaguuaucagacccagacgaacucuccuaggcgggcccgcagcgucgcuucccagucaauaaucgccuacaccaugagccugggggcagaaaauucuguggccuacuccaacaauaguauugcuaucccaacaaacuucacuaucagcguuaccacagaaauucuucccgugucuaugacuaagaccuccgucgauuguacgauguauauaugcggcgacucaacagaguguaguaaucuguugcuccaauacggcagcuuuugcacccagcugaacagagccuuaacuggaaucgcaguggagcaggauaaaaauacacaggaaguuuucgcgcaagugaagcagauuuauaaaaccccgccuaucaaggacuuugggggauucaacuuuucgcagauucugccagaucccuccaaaccuucuaagaggagcuucaucgaggaccuacucuuuaauaagguaacucuggcugaugccgguuucauaaaacaauacggcgacugucuuggggauaucgcagcccgugacuugauuugcgcucagaaguucaacggacugaccguccugcccccacucuuaacagaugaaaugaucgcccaguauacgucagcacugcuugcuggcaccauuacgagugguuggacauuuggggccggcgcggccuugcagaucccuuucgcuaugcaaauggcauaccgguuuaauggaauaggcgugacccagaacgugcucuaugagaaucagaaacugauugccaaccaguucaacuccgcuaucgggaagauucaagacucucuaagcuccacagccucagcacugggaaaacuccaggacgucguuaaucagaacgcgcaggcccugaauacucuugugaagcaauugagcaguaacuuuggcgcuaucucuuccguacugaaugauauauuaagccgacucgacaagguggaagccgagguccagaucgauagacugauuaccgguaggcuucagucgcugcaaacguacgugacacagcaguugauccgcgcagcugagauucgggccucagcaaaccucgccgcuaccaaaaugucugaaugcguucuggggcagaguaagagaguggacuucuguggaaaaggcuaccaccuaauguccuuuccccaaagcgcgccacauggugucguguuccugcacguuacuuaugugccggcccaggagaagaauuuuaccacagcuccugcaaucugccacgauggcaaagcccauuuccccagggaaggggucuuuguaucuaacggaacucacugguucgugacccagcgcaauuuuuacgagccacagauaauuacaacggacaacaccuucguuagcggcaauugugaugugcucaucgggaucgucaacaauacuguguaugacccccugcaaccugagcuugauuccuucaaggaagaguuggacaaauacuuuaagaaccauacaucaccagauguagaccugggagauauuaguggcaucaaugccagcguggucaacauucagaaggaaauagaccgauuaaaugagguugcuaaaaaccucaacgaaucucugaucgaccuucaggagcuggguaaguaugagcaguacauuaaauggcccugguauaucuggcuaggguucauugcaggacucaucgccauagugauggugaccaucaugcugugcuguaugacuuccugcuguucaugcuugaagggcuguugcaguugugguagcugcugcaaauuugaugaagacgauuccggcccuguccugaagggggugaaguuacacuacacaugaggacuaguuauaagacugacuagcccgaugggccucccaacgggcccuccuccccuccuugcaccgagauuaauaaaaaaaaaaaaaaaaaaaaaaaaaaaaaaaaaaaaaaaaaaaaaaaaaaaaaaaaaaaaaaaaugcaucccccccccccccccccccccccccccccccaaaggcucuuuucagagccaccagaauu

SEQ ID NO: 12950 - RNA, 4039 nt, Artificial Sequence
  SARS-CoV-2/Shenzhen/SZTH-004/2020__EPI_ISL_406595 spike protein mRNA human (1-1273)
aggagaaagcuuaccauguucguguuucugguccuccuuccccugguuagcucccagugcgugaacuugaccacaagaacucaauuaccuccagccuacacgaauagcuucaccaggggcguauauuacccggacaagguguuucggucaaguguccugcacagcacacaggaucuauuccuccccuuuuucuccaacgugacuugguuucaugcuauccacguuucugggaccaauggaacaaaacgcuucgacaacccugugcugccauuuaaugauggugucuauuucgcaucgaccgagaagucaaacauuauacgaggcuggaucuuugggacuacacuugacagcaaaacccagagucuguugauugugaauaacgccacgaauguaguuaucaaggugugugaguuccaguuuugcaacgaucccuuccucggagucuacuaucauaaaaauaacaaguccuggauggagucugaguuccguguguacagcuccgcgaauaacuguacuuuugaauaugugucacaaccuuuccugauggaccuggaaggcaagcaggguaauuuuaaaaaccucagagaguucgucuuuaagaacauugauggguacuucaaaaucuacaguaagcacaccccaauaaauuuaguuagggaccugccccagggauuuagcgcucuugagccuuugguggaucugccaaucggcauuaacaucacacgguuccagacucuacucgcccugcaucgcucuuaucuuaccccgggcgacuccucaagcggguggacagcaggagccgcugcauacuauguagguuaccugcaacccagaaccuuuuugcucaaauauaaugaaaacggcacgauuacugaugccguggacugcgcucuggauccuuuaagugagacaaaguguacccugaagucuuucacugucgaaaaagggaucuaccagacauccaauuuuagggugcagccaaccgagagcauaguucgguuccccaacauuacgaaucucugcccuuuuggagagguguucaacgccacccgcuucgcgucggucuaugcaugggaccgaaagagaaucucuaauuguguggccuacuacuccguacuuuauaacucagcuaguuuuagcacauucaaaugcuacggcguuuccccaacuaagcugaaugacuuguguuuuaccaacguguaugccgauucuuucgucauuaggggugacgaagugcggcagaucgcacccgggcaaacaggaaaaaucgcugauuacaauuauaagcuaccggacgauuuuacuggcugcgucauugccuggaacagcaauaaccuggacucaaaagugggcgggaacuacaauuaucucuaccgucuguuccgcaagaguaaccuuaagccuuuugagagagauauauccaccgaaaucuaccaggcgggaagcacacccuguaaugguguugagggcuucaacugcuauuuuccacugcagucuuacggguuccaaccuaccaauggagugggcuaucagcccuacaggguagucguguugucauuugaacuccugcacgccccagcaacuguuugcggucccaaaaagaguacgaacuuagugaaaaauaagugugucaacuucaauuuuaacgggcugacaggcaccggagugcuaacugagagcaauaaaaaguuccucccuuuccagcaguuuggccgggacauugcugauaccacagacgccguacgagauccacaaacccuggagauccuugacauaacuccgugcuccuucgggggagugucuguuauuacacccgguacgaacaccucgaaucaggucgcuguguuguaucaggacgugaacuguacugaagucccuguugccauccacgcagaucagcugacaccaaccuggcgcguguacagcacaggcuccaauguguuucaaacuagagccgggugccucaucggagcugagcauguaaacaacucauaugaaugugacauucccaucggcgcggguauuugcgcaaguuaccagacccagacuaauucuccuaggcgggcccgcagcgucgcuucccagucaauaaucgccuacaccaugagccugggggcagagaacucuguggccuauuccaauaacaguauugcuaucccaacaaauuucacuaucagcguuaccacagaaauucuucccgugucuaugacuaagaccuccgucgauuguacgauguacauaugcggcgacucaacagaguguaguaaccuguugcuccaauauggaucuuuuugcacccagcugaauagagccuuaacuggcaucgcaguggagcaggauaaaaacacacaggaaguuuucgcgcaagugaagcagauuuacaaaaccccgccuaucaaggacuuugggggauucaauuuuucgcagauucugccagaucccuccaaaccuucuaagaggagcuucaucgaggaccuacucuuuaacaagguaacucuggcugaugccgguuucauaaaacaauauggcgacugucuuggggauaucgcagcccgugacuugauuugcgcucagaaguucaauggacugaccguccugcccccacucuuaacagaugaaaugaucgcccaguacacgucagcacugcuugcuggcaccauuacgagugguuggacauuuggggccggcgcggccuugcagaucccuuucgcuaugcaaauggcauaucgguuuaacggaauaggcgugacccagaaugugcucuacgagaaccagaaacugauugccaaucaguucaacuccgcuaucgggaagauucaagacucucuaagcuccacagccucagcacugggaaaacuccaggacgucguuaaccagaaugcgcaggcccugaacacucuugugaagcaauugagcaguaauuuuggcgcuaucucuuccguacugaacgauauauuaagccgacucgacaagguggaagccgagguccagaucgauagacugauuaccgguaggcuucagucgcugcaaacguacgugacacagcaguugauccgcgcagcugagauucgggccucagcaaaucucgccgcuaccaaaaugucugaaugcguucuggggcagaguaagagaguggacuucuguggaaaaggcuaucaccuaauguccuuuccccaaagcgcgccacauggugucguguuccugcacguuacuuacgugccggcccaggagaagaacuuuaccacagcuccugcaaucugccacgauggcaaagcccauuuccccagggaaggggucuuuguaucuaauggaacucacugguucgugacccagcgcaacuuuuaugagccacagauaauuacaacggacaauaccuucguuagcggcaacugugauguggucaucgggaucgugaauaacacuguauacgacccccuccaaccugagcuggauuccuucaaggaagaacuugacaaauauuuuaagaaucauacaucaccagauguggacuugggagauauuaguggcaucaacgccagcgucguuaauauucagaaggaaauagaccgacugaacgagguggcuaaaaauuuaaacgaaucucucaucgaccugcaggagcuugguaaguacgagcaguauauuaaauggcccugguacaucuggcugggguucauugcaggacuaaucgccauagugauggucaccaucaugcucugcuguaugacuuccugcuguucaugccugaagggcuguugcaguugugguagcugcugcaaauuugaugaagacgauuccgagccuguguugaagggcguuaagcugcacuacacaugaggacuaguuauaagacugacuagcccgaugggccucccaacgggcccuccuccccuccuugcaccgagauuaauaaaaaaaaaaaaaaaaaaaaaaaaaaaaaaaaaaaaaaaaaaaaaaaaaaaaaaaaaaaaaaaaugcaucccccccccccccccccccccccccccccccaaaggcucuuuucagagccaccagaauu

SEQ ID NO: 12951 - RNA, 4039 nt, Artificial Sequence
  SARS-CoV-2/France/IDF0372/2020__EPI_ISL_406596 spike protein mRNA human (1-1273)
aggagaaagcuuaccauguucguguuucugguccuccuuccccugguuagcucccagugcgugaacuugaccacaagaacucaauuaccuccagccuacacuaauucuuucaccaggggcguauauuacccggacaagguguuucggucaaguguccugcacagcacacaggaucuauuccuccccuuuuucuccaacgugacuugguuucaugcuauccacguuucugggaccaauggaacaaaacgcuucgacaacccugugcugccauuuaaugauggugucuauuucgcaucgaccgagaagucaaacauuauacgaggcuggaucuuugggacuacacuugacagcaaaacccagagucuguugauugugaauaacgccacgaauguaguuaucaaggugugugaguuccaguuuugcaacgaucccuuccucggagucuacuaucauaaaaauaacaaguccuggauggagucugaguuccguguguacagcuccgcgaauaacuguacuuuugaauaugugucacaaccuuuccugauggaccuggaaggcaagcaggguaauuuuaaaaaccucagagaguucgucuuuaagaacauugauggguacuucaaaaucuacaguaagcacaccccaauaaauuuaguuagggaccugccccagggauuuagcgcucuugagccuuugguggaucugccaaucggcauuaacaucacacgguuccagacucuacucgcccugcaucgcucuuaucuuaccccgggcgacuccucaagcggguggacagcaggagccgcugcauacuauguagguuaccugcaacccagaaccuuuuugcucaaauauaaugaaaacggcacgauuacugaugccguggacugcgcucuggauccuuuaagugagacaaaguguacccugaagucuuucacugucgaaaaagggaucuaccagacauccaauuuuagggugcagccaaccgagagcauaguucgguuccccaacauuacgaaucucugcccuuuuggagagguguucaacgccacccgcuucgcgucggucuaugcauggaaucgaaagagaaucucuaacuguguggccgacuacuccuuucuuuacaauucagcuaguuucagcacauuuaaaugcuauggcguauccccaacuaagcugaacgacuuguguuucaccaauguuuacgccgauucuuuugugauuaggggugacgaaguccggcagaucgcacccgggcaaacaggaaaaaucgcugauuauaacuacaagcuaccggacgauuucacuggcugcgugauugccuggaauagcaacaaccuggacucaaaagucggcgggaauuauaacuaccucuaucgucuguuucgcaagaguaaucuuaagccuuucgagagagauauauccaccgaaaucuaccaggcgggaagcacacccuguaacgguguggagggcuuuaauugcuacuucccacugcagucuuauggguuucaaccuaccaacggaguuggcuaccagcccuauagggugguagucuugucauucgaacuccugcacgccccagcaacugugugcggucccaaaaagaguacgaauuuaguuaaaaacaagugugugaauuuuaacuucaaugggcugacaggcaccggaguccuaacugagagcaacaaaaaguuccucccuuuucagcaguucggccgggacauugcugauaccacagacgccgugcgagauccacaaacccuggagauccuugacauaacuccgugcuccuuugggggaguaucugugauuacacccgguacgaauaccucgaaccagguugcugucuuguaccaggacgugaauuguacugaagugccugucgccauccacgcagaucagcugacaccaaccuggcgcguuuauagcacaggcuccaacguguuccaaacuagagccgggugccucaucggagcugagcaugugaacaauucauacgaaugugacauucccaucggcgcggguauuugcgcaaguuaucagacccagacgaacucuccuaggcgggcccgcagcguagcuucccagucaauaaucgccuacaccaugagccugggggcagaaaauucugucgccuacuccaacaauaguauugcuaucccaacaaacuuuacuaucagcgugaccacagaaauucuucccguuucuaugacuaagaccuccguggauuguacgauguauauaugcggcgacucaacagaguguaguaaucuguugcuccaauacggcagcuucugcacccagcugaacagagccuuaacuggaaucgcagucgagcaggauaaaaauacacaggaaguguuugcgcaaguuaagcagauuuauaaaaccccgccuaucaaggacuucgggggauuuaacuucucgcagauucugccagaucccuccaaaccuucuaagaggagcuuuaucgaggaccuacucuucaauaaggugacucuggcugaugccgguuucauaaaacaauacggcgacugucuuggggauaucgcagcccgugacuugauuugcgcucagaaguuuaacggacugaccguacugcccccacucuuaacagaugaaaugaucgcccaguauacgucagcacugcuugcuggcaccauuacgagugguuggacauucggggccggcgcggccuugcagaucccuuuugcuaugcaaauggcauaccgguucaauggaauaggcgucacccagaacgugcucuaugagaaucagaaacugauugccaaccaguuuaacuccgcuaucgggaagauucaagacucucuaagcuccacagccucagcacugggaaaacuccaggacguggucaaucagaacgcgcaggcccugaauacucuuguuaagcaauugagcaguaacuucggcgcuaucucuuccgugcugaaugauauauuaagccgacucgacaagguagaagccgaggugcagaucgauagacugauuaccgguaggcuucagucgcugcaaacguacgucacacagcaguugauccgcgcagcugagauucgggccucagcaaaccucgccgcuaccaaaaugucugaaugcgugcuggggcagaguaagagaguugacuuuuguggaaaaggcuaccaccuaauguccuucccccaaagcgcgccacaugguguggucuuucugcacgugacuuauguuccggcccaggagaagaauuucaccacagcuccugcaaucugccacgauggcaaagcccauuuucccagggaagggguguucgucucuaacggaacucacugguuuguaacccagcgcaauuucuacgagccacagauaauuacaacggacaacaccuucgugagcggcaauugugauguugugaucgggaucgucaacaauacuguguaugacccccuccaaccugagcuggauuccuuuaaggaggaacuugacaaauacuucaagaaccauacaucaccagauguagacuugggagauauuaguggcaucaaugccagcguggucaacauucagaaggaaauagaccgacugaaugagguugcuaaaaacuuaaacgaaucucucaucgaccugcaggagcuugguaaguaugagcaguacauuaaauggcccugguauaucuggcugggguuuauugcaggacuaaucgccauagugauggugaccaucaugcucugcuguaugacuuccugcuguucaugccugaagggcuguugcaguugugguagcugcugcaaauucgaugaagacgauuccgagccugucuugaagggcgugaagcugcacuacacaugaggacuaguuauaagacugacuagcccgaugggccucccaacgggcccuccuccccuccuugcaccgagauuaauaaaaaaaaaaaaaaaaaaaaaaaaaaaaaaaaaaaaaaaaaaaaaaaaaaaaaaaaaaaaaaaaugcaucccccccccccccccccccccccccccccccaaaggcucuuuucagagccaccagaauu

SEQ ID NO: 12952 - RNA, 4039 nt, Artificial Sequence
  SARS-CoV-2/Australia/VIC01/2020__EPI_ISL_406844 spike protein mRNA human (1-1273)
aggagaaagcuuaccauguucguguuucugguccuccuuccccugguuagcucccagugcgugaacuugaccacaagaacucaauuaccuccagccuacaccaauucuuucacgaggggcguauauuacccggacaagguguuucggucaaguguccugcacagcacacaggaucuauuccuccccuuuuucuccaacgugacuugguuucaugcuauccacguuucugggaccaauggaacaaaacgcuucgacaacccugugcugccauuuaaugauggugucuauuucgcaucgaccgagaagucaaacauuauacgaggcuggaucuuugggacuacacuugacagcaaaacccagagucuguugauugugaauaacgccacgaauguaguuaucaaggugugugaguuccaguuuugcaacgaucccuuccucggagucuacuaucauaaaaauaacaaguccuggauggagucugaguuccguguguacagcuccgcgaauaacuguacuuuugaauaugugucacaaccuuuccugauggaccuggaaggcaagcaggguaauuuuaaaaaccucagagaguucgucuuuaagaacauugauggguacuucaaaaucuacaguaagcacaccccaauaaauuuaguuagggaccugccccagggauuuagcgcucuugagccuuugguggaucugccaaucggcauuaacaucacacgguuccagacucuacucgcccugcaucgcagauaucuuaccccgggcgacucuuccucaggguggacagcaggagccgcugcauacuauguagguuaccugcaacccaggaccuuuuugcucaaauauaaugaaaacggcacgauuacugaugccguggacugcgcucuggauccuuuaagcgagacaaaguguacccugaagaguuucacugucgaaaaagggaucuaccagacaucuaauuuucgggugcagccaaccgaguccauaguucgcuuccccaacauuacgaaucucugcccuuuuggagagguguucaacgccacccgauucgcgagcgucuaugcauggaauagaaagaggaucucgaacuguguggccgacuacucuguacuuuacaauuccgcuucauuuaguacauucaaaugcuauggcguuagcccaacuaagcugaacgacuuguguuuuaccaauguguacgccgauuccuucgucauucggggugacgaagugcgucagaucgcacccgggcaaacaggaaaaaucgcugauuauaacuacaagcuaccggacgauuuuacuggcugcgucauugccuggaacucuaauaaccuggacagcaaagugggcgggaauuauaacuaccucuaucgccuguucagaaagucaaaucuuaagccuuuugagagggauauaaguaccgaaaucuaccaggcgggauccacacccuguaacgguguugagggcuucaauugcuacuuuccacugcagagcuauggguuccaaccuaccaacggagugggcuaccagcccuaucggguagucguguugucuuuugaacuccugcacgccccagcaacuguuugcggucccaaaaagucaacgaauuuagugaaaaacaagugugucaauuucaacuuuaaugggcugacaggcaccggagugcuaacugagaguaacaaaaaguuccucccuuuccagcaguuuggccgagacauugcugauaccacagacgccguacgcgauccacaaacccuggagauccuugacauaacuccgugcagcuucgggggaguguccguuauuacacccgguacgaauaccucuaaccaggucgcuguguuguaccaggacgugaauuguacugaagucccuguugccauccacgcagaucagcugacaccaaccuggagaguguauucgacaggcagcaacguguuucaaacuagggccgggugccucaucggagcugagcauguaaacaauuccuacgaaugugacauucccaucggcgcggguauuugcgcaucauaucagacccagacgaacaguccucggcgcgccagaucugucgcuagccaguccauaaucgccuacaccaugucacugggggcagagaauagcguggccuacucuaacaauuccauugcuaucccaacaaacuucacuaucaguguuaccacagaaauucuucccgugagcaugacuaagaccucugucgauuguacgauguauauaugcggcgacuccacagaguguucaaaucuguugcuccaauacggaaguuuuugcacccagcugaacagggccuuaacuggcaucgcaguggagcaggauaaaaauacacaggaaguuuucgcgcaagugaagcagauuuauaaaaccccgccuaucaaggacuuugggggauucaacuuuagccagauucugccagaucccucgaaaccuuccaagcguucuuucaucgaggaccuacucuuuaauaagguaacucuggcugaugccgguuucauaaaacaauacggcgacugucuuggggauaucgcagcccgggacuugauuugcgcucagaaguucaacggacugaccguccucccuccacuguuaacagaugaaaugaucgcccaguauacgagcgcacugcuugcuggcaccauuacuucagguuggacauuuggggccggcgcggccuugcagaucccuuucgcuaugcaaauggcauaccgauuuaauggaauaggcgugacccagaacgugcucuaugagaaucagaaacugauugccaaccaguucaacagugcuaucgggaagauucaagacucccuaucuagcacagccuccgcacugggaaaacuccaggacgucguuaaucagaacgcgcaggcccugaauacucuugugaagcaauugucaagcaacuuuggcgcuaucaguucuguacugaaugauauauuauccagacucgacaagguggaagccgagguccagaucgauaggcugauuaccggucgccuucagagccugcaaacguacgugacacagcaguugauccgggcagcugagauuagagccucggcaaaccucgccgcuaccaaaaugucagaaugcguucuggggcagucuaagaggguggacuucuguggaaaaggcuaccaccuaaugaguuuuccccaauccgcgccacauggugucguguuccugcacguuacuuaugugccggcccaggagaagaauuuuaccacagcacccgcuaucugccacgauggcaaagcccauuucccccgcgaaggggucuuuguaagcaacggaacucacugguucgugacccagcgaaauuuuuacgagccacagauaauuacaacggacaacaccuucguuucuggcaauugugauguggucaucgggaucgugaacaauacuguauaugacccccuccaaccugagcuggauagcuucaaggaagaacuugacaaauacuuuaagaaccauacauccccagauguggacuugggagauauuucaggcaucaaugccagugucguuaacauucagaaggaaauagaccggcugaaugagguggcuaaaaacuuaaacgaaagccucaucgaccugcaggagcuugguaaguaugagcaguacauuaaauggcccugguauaucuggcugggguucauugcaggacuaaucgccauagugauggucaccaucaugcucugcuguaugacuucuugcuguuccugccugaagggcuguugcucaugugguaguugcugcaaauuugaugaagacgauagcgagccuguguugaagggcguuaagcugcacuacacaugaggacuaguuauaagacugacuagcccgaugggccucccaacgggcccuccuccccuccuugcaccgagauuaauaaaaaaaaaaaaaaaaaaaaaaaaaaaaaaaaaaaaaaaaaaaaaaaaaaaaaaaaaaaaaaaaugcaucccccccccccccccccccccccccccccccaaaggcucuuuucagagccaccagaauu

SEQ ID NO: 12953 - RNA, 4039 nt, Artificial Sequence
  SARS-CoV-2/Germany/BavPat1/2020__EPI_ISL_406862 spike protein mRNA human (1-1273)
aggagaaagcuuaccauguucguguuucugguccuccuuccccugguuagcucccagugcgugaacuugaccacaagaacucaauuaccuccagccuacacuaauucuuucaccaggggcguauauuacccggacaagguguuucggucaaguguccugcacagcacacaggaucuauuccuccccuuuuucuccaacgugacuugguuucaugcuauccacguuucugggaccaauggaacaaaacgcuucgacaacccugugcugccauuuaaugauggugucuauuucgcaucgaccgagaagucaaacauuauacgaggcuggaucuuugggacuacacuugacagcaaaacccagagucuguugauugugaauaacgccacgaauguaguuaucaaggugugugaguuccaguuuugcaacgaucccuuccucggagucuacuaucauaaaaauaacaaguccuggauggagucugaguuccguguguacagcuccgcgaauaacuguacuuuugaguaugugucacaaccuuuccugauggaccuggaaggcaagcaggguaauuuuaaaaaccucagagaguucgucuuuaagaacauugauggguacuucaaaaucuacaguaagcacaccccaauaaauuuaguuagggaccugccccagggauuuagcgcucuugagccuuugguggaucugccaaucggcauuaacaucacacgguuccagacucuacucgcccugcaucgcucuuaucuuaccccgggcgacuccucaagcggguggacagcaggagccgcugcauacuauguagguuaccugcaacccagaaccuuuuugcucaaauauaaugaaaacggcacgauuacugaugccguggacugcgcucuggauccuuuaagugagacaaaguguacccugaagucuuucacugucgaaaaagggaucuaccagacauccaauuuuagggugcagccaaccgagagcauaguucgguuccccaacauuacgaaucucugcccuuuuggagagguguucaacgccacccgcuucgcgucggucuaugcauggaaucgaaagagaaucucuaacuguguggccgacuacuccguacuuuacaauucagcuaguuuuagcacauucaaaugcuauggcguuuccccaacuaagcugaacgacuuguguuuuaccaauguguacgccgauucuuucgucauuaggggugacgaagugcggcagaucgcacccgggcaaacaggaaaaaucgcugauuauaacuacaagcuaccggacgauuuuacuggcugcgucauugccuggaauagcaacaaccuggacucaaaagugggcgggaauuauaacuaccucuaucgucuguuccgcaagaguaaucuuaagccuuuugagagagauauauccaccgaaaucuaccaggcgggaagcacacccuguaacgguguugagggcuucaauugcuacuuuccacugcagucuuauggguuccaaccuaccaacggagugggcuaccagcccuauaggguagucguguugucauuugaacuccugcacgccccagcaacuguuugcggucccaaaaagaguacgaauuuagugaaaaacaagugugucaauuucaacuuuaaugggcugacaggcaccggagugcuaacugagagcaacaaaaaguuccucccuuuccagcaguuuggccgggacauugcugauaccacagacgccguacgagauccacaaacccuggagauccuugacauaacuccgugcuccuucgggggagugucuguuauuacacccgguacgaauaccucgaaccaggucgcuguguuguaccagggcgugaauuguacugaagucccuguugccauccacgcagaccagcugacaccaaccuggcgcguguauagcacaggguccaacguguuucaaacuagagccggaugccucaucggcgcugagcauguaaacaauucauacgaaugugauauucccaucggugcggggauuugcgcaaguuaucagacccagacgaacucuccuaggcgggcccgcagcgucgcuucccagucaauaaucgccuacaccaugagccugggcgcagaaaauucuguggccuacuccaacaauaguauugcuaucccaacaaacuucacuaucagcguuaccacagaaauucuucccgugucuaugacuaagaccuccgucgacuguacgauguauauaugcggagauucaacagaguguaguaaucuguugcuccaauacggcagcuuuugcacccagcugaacagagccuuaacugggaucgcaguggagcaggacaaaaauacacaggaaguuuucgcgcaagugaagcagauuuauaaaaccccgccuaucaaggauuuuggagguuucaacuuuucgcagauucugccagaccccuccaaaccuucuaagaggagcuucaucgaggaucuacucuuuaauaagguaacucuggcugacgccggcuucauaaaacaauacggggauugucuuggagacaucgcagcccgugauuugauuugcgcucagaaguucaacggccugaccguccugcccccacucuuaacagacgaaaugaucgcccaguauacgucagcacugcuugcugguaccauuacgaguggguggacauuuggcgccggagcggccuugcagaucccuuucgcuaugcaaauggcauaccgguuuaauggcauaggggugacccagaacgugcucuaugagaaucagaaacugauugccaaccaguucaacuccgcuaucggaaagauucaagauucucuaagcuccacagccucagcacugggcaaacuccaggacgucguuaaucagaacgcgcaggcccugaauacucuugugaagcaauugagcaguaacuuuggugcuaucucuuccguacugaaugacauauuaagccgacucgauaagguggaagccgagguccagaucgacagacugauuaccgggaggcuucagucgcugcaaacguacgugacacagcaguugauccgcgcagcugagauucgggccucagcaaaccucgccgcuaccaaaaugucugaaugcguucugggacagaguaagagaguggauuucuguggcaaagguuaccaccuaauguccuuuccccaaagcgcgccacauggcgucguguuccugcacguuacuuaugugccggcccaggagaagaauuuuaccacagcuccugcaaucugccacgacgggaaagcccauuuccccagggaaggagucuuuguaucuaacggcacucacugguucgugacccagcgcaauuuuuacgagccacagauaauuacaacggauaacaccuucguuagcgggaauugugacguggucaucggaaucgugaacaauacuguauaugauccccuccaaccugagcuggacuccuucaaggaagaacuugauaaauacuuuaagaaccauacaucaccagacguggauuugggcgacauuagugguaucaaugccagcgucguuaacauucagaaggaaauagaucgacugaaugagguggcuaaaaacuuaaacgaaucucucaucgaccugcaggagcuugggaaguaugagcaguacauuaaauggcccugguauaucuggcugggauucauugcaggccuaaucgccauagugauggucaccaucaugcucugcuguaugacuuccugcuguucaugccugaaggguuguugcaguuguggcagcugcugcaaauuugacgaagaugacuccgagccuguguugaaggggguuaagcugcacuacacaugaggacuaguuauaagacugacuagcccgaugggccucccaacgggcccuccuccccuccuugcaccgagauuaauaaaaaaaaaaaaaaaaaaaaaaaaaaaaaaaaaaaaaaaaaaaaaaaaaaaaaaaaaaaaaaaaugcaucccccccccccccccccccccccccccccccaaaggcucuuuucagagccaccagaauu

SEQ ID NO: 12954 - RNA, 4039 nt, Artificial Sequence
  SARS-CoV-2/Wuhan/HBCDC-HB-02/2020__EPI_ISL_412978 spike protein mRNA human (1-1273)
aggagaaagcuuaccauguucguguuucugguccuccuuccccugguuagcucccagugcgugaacuugaccacaagaacucaauuaccuccagccuacacuaauucuuucaccaggggcguauauuacccggacaagguguuucggucaaguguccugcacagcacacaggaucuauuccuccccuuuuucuccaacgugacuugguuucaugcuauccacguuucugggaccaauggaacaaaacgcuucgacaacccugugcugccauuuaaugauggugucuauuucgcaucgaccgagaagucaaacauuauacgaggcuggaucuuugggacuacacuugacagcaaaacccagagucuguugauugugaauaacgccacgaauguaguuaucaaggugugugaguuccaguuuugcaacgaucccuuccucggagucuacuaucauaaaaauaacaaguccuggauggagucugaguuccguguguacagcuccgcgaauaacuguacuuuugaguaugugucacaaccuuuccugauggaccuggaaggcaagcaggguaauuuuaaaaaccucagagaguucgucuuuaagaacauugauggguacuucaaaaucuacaguaagcacaccccaauaaauuuaguuagggaccugccccagggauuuagcgcucuugagccuuugguggaucugccaaucggcauuaacaucacacgguuccagacucuacucgcccugcaucgcucuuaucuuaccccgggcgacuccucaagcggguggacagcaggagccgcugcauacuauguagguuaccugcaacccagaaccuuuuugcucaaauauaaugaaaacggcacgauuacugaugccguggacugcgcucuggauccuuuaagugagacaaaguguacccugaagucuuucacugucgaaaaagggaucuaccagacauccaauuuuagggugcagccaaccgagagcauaguucgguuccccaacauuacgaaucucugcccuuuuggagagguguucaacgccacccgcuucgcgucggucuaugcauggaaucgaaagagaaucucuaacuguguggccgacuacuccguacuuuacaauucagcuaguuuuagcacauucaaaugcuauggcguuuccccaacuaagcugaacgacuuguguuuuaccaauguguacgccgauucuuucgucauuaggggugacgaagugcggcagaucgcacccgggcaaacaggaaaaaucgcugauuauaacuacaagcuaccggacgauuuuacuggcugcgucauugccuggaauagcaacaaccuggacucaaaagugggcgggaauuauaacuaccucuaucgucuguuccgcaagaguaaucuuaagccuuuugagagagauauauccaccgaaaucuaccaggcgggaagcacacccuguaacgguguugagggcuucaauugcuacuuuccacugcagucuuauggguuccaaccuaccaacggagugggcuaccagcccuauaggguagucguguugucauuugaacuccugcacgccccagcaacuguuugcggucccaaaaagaguacgaauuuagugaaaaacaagugugucaauuucaacuuuaaugggcugacaggcaccggagugcuaacugagagcaacaaaaaguuccucccuuuccagcaguuuggccgggacauugcugauaccacagacgccguacgagauccacaaacccuggagauccuugacauaacuccgugcuccuucgggggagugucuguuauuacacccgguacgaauaccucgaaccaggucgcuguguuguaccaggacgugaauuguacugaagucccuguugccauccacgcagaucagcugacaccaaccuggcgcguguauagcacaggcuccaacguguuucaaacuagagccgggugccucaucggagcugagcauguaaacaauucauacgaaugugacauucccaucggcgcggguauuugcgcaaguuaucagacccagacgaacucuccuaggcgggcccgcagcgucgcuucccagucaauaaucgccuacaccaugagccugggggcagaaaauucuguggccuacuccaacaauaguauugcuaucccaacaaacuucacuaucagcguuaccacagaaauucuucccgugucuaugacuaagaccuccgucgauuguacgauguauauaugcggcgacucaacagaguguaguaauuuucuguugcaauacggcagcuucugcacccagcucaacagagcccugacuggaaucgcaguggagcaggauaaaaauacacaggaaguuuuugcgcaagugaagcagauuuauaaaaccccgccuaucaaggacuucgggggauuuaacuucucgcagauuuuaccagaucccuccaaaccuucuaagaggagcuuuaucgaggaccugcuauucaauaagguaacucucgcugaugccgguuucauaaaacaauacggcgacugucugggggauaucgcagcccgugaccuuauuugcgcucagaaguuuaacggauugaccguccugcccccacuccugacagaugaaaugaucgcccaguauacgucagcauuacuggcuggcaccauuacgagugguuggacauucggggccggcgcggcccuucagaucccuuuugcuaugcaaauggcauaccgguucaauggaauaggcgugacccagaacguguuguaugagaaucagaaacucauugccaaccaguuuaacuccgcuaucgggaagauucaagacucucugagcuccacagccucagcacuaggaaaacugcaggacgucguuaaucagaacgcgcaggcccucaauacucuggugaagcaacuuagcaguaacuucggcgcuaucucuuccguauugaaugauauacugagccgauuagacaagguggaagccgagguccagaucgauagacucauuaccgguaggcugcagucgcuucaaacguacgugacacagcagcugauccgcgcagcugagauucgggccucagcaaacuuggccgcuaccaaaaugucugaaugcguucucgggcagaguaagagaguggacuuuuguggaaaaggcuaccaccugauguccuucccccaaagcgcgccacauggugucguguuucuacacguuacuuaugugccggcccaggagaagaauuucaccacagcuccugcaaucugccacgauggcaaagcccauuuucccagggaaggggucuucguaucuaacggaacucacugguuugugacccagcgcaauuucuacgagccacagauaauuacaacggacaacaccuucguuagcggcaauugugauguggucaucgggaucgugaacaauacuguauaugacccccugcaaccugagcucgauuccuuuaaggaagaacuggacaaauacuucaagaaccauacaucaccagauguggaccuuggagauauuaguggcaucaaugccagcgucguuaacauucagaaggaaauagaccgauugaaugagguggcuaaaaaccugaacgaaucuuuaaucgaccuccaggagcuggguaaguaugagcaguacauuaaauggcccugguauaucuggcuuggguuuauugcaggacugaucgccauagugauggucaccaucaugcuaugcuguaugacuuccugcuguucaugccucaagggcuguugcaguugugguagcugcugcaaauucgaugaagacgauuccgagccugugcugaagggcguuaaguugcacuacacaugaggacuaguuauaagacugacuagcccgaugggccucccaacgggcccuccuccccuccuugcaccgagauuaauaaaaaaaaaaaaaaaaaaaaaaaaaaaaaaaaaaaaaaaaaaaaaaaaaaaaaaaaaaaaaaaaugcaucccccccccccccccccccccccccccccccaaaggcucuuuucagagccaccagaauu

SEQ ID NO: 12955 - RNA, 4039 nt, Artificial Sequence
  SARS-CoV-2/Australia/QLD02/2020__EPI_ISL_407896 spike protein mRNA human (1-1273)
aggagaaagcuuaccauguucguguuucugguccuccuuccccugguuagcucccagugcgugaacuugaccacaagaacucaauuaccuccagccuacacuaauucuuucaccaggggcguauauuacccggacaagguguuucggucaaguguccugcacagcacacaggaucuauuccuccccuuuuucuccaacgugacuugguuucaugcuauccacguuucugggaccaauggaacaaaacgcuucgacaacccugugcugccauuuaaugauggugucuauuucgcaucgaccgagaagucaaacauuauacgaggcuggaucuuugggacuacacuugacagcaaaacccagagucuguugauugugaauaacgccacgaauguaguuaucaaggugugugaguuccaguuuugcaacgaucccuuccucggagucuacuaucauaaaaauaacaaguccuggauggagucugaguuccguguguacagcuccgcgaauaacuguacuuuugaauaugugucacaaccuuuccugauggaccuggaaggcaagcaggguaauuuuaaaaaccucagagaguucgucuuuaagaacauugauggguacuucaaaaucuacaguaagcacaccccaauaaauuuaguuagggaccugccccagggauuuagcgcucuugagccuuugguggaucugccaaucggcauuaacaucacacgguuccagacucuacucgcccugcaucgcucuuaucuuaccccgggcgacuccucaagcggguggacagcaggagccgcugcauacuauguagguuaccugcaacccagaaccuuuuugcucaaauauaaugaaaacggcacgauuacugaugccguggacugcgcucuggauccuuuaagugagacaaaguguacccugaagucuuucacugucgaaaaagggaucuaccagacauccaauuuuagggugcagccaaccgagagcauaguucgguuccccaacauuacgaaucucugcccuuuuggagagguguucaacgccacccgcuucgcgucggucuaugcauggaaucgaaagagaaucucuaacuguguggccgacuacuccguacuuuacaauucagcuaguuuuagcacauucaaaugcuauggcguuuccccaacuaagcugaacgacuuguguuuuaccaauguguacgccgauucuuucgucauuaggggugacgaagugcggcagaucgcacccgggcaaacaggaaaaaucgcugauuauaacuacaagcuaccggacgauuuuacuggcugcgucauugccuggaauagcaacaaccuggacucaaaagugggcgggaauuauaacuaccucuaucgucuguuccgcaagaguaaucuuaagccuuuugagagagauauauccaccgaaaucuaccaggcgggaagcacacccuguaacgguguugagggcuucaauugcuacuuuccacugcagucuuauggguuccaaccuaccaacggagugggcuaccagcccuauaggguagucguguugucauuugaacuccugcacgccccagcaacuguuugcggucccaaaaagaguacgaauuuagugaaaaacaagugugucaauuucaacuuuaaugggcugacaggcaccggagugcuaacugagagcaacaaaaaguuccucccuuuccagcaguuuggccgggacauugcugauaccacagacgccguacgagauccacaaacccuggagauccuugacauaacuccgugcuccuucgggggagugucuguuauuacacccgguacgaauaccucgaaccaggucgcuguguuguaccaggacgugaauuguacugaagucccuguugccauccacgcagaucagcugacaccaaccuggcgcguguauagcacaggcuccaacguguuucaaacuagagccgggugccucaucggagcugagcauguaaacaauucauacgaaugugacauucccaucggcgcggguauuugcgcaaguuaucagacccagacgaacucuccuaggcgggcccgcagcgucgcuucccagucaauaaucgccuacaccaugagccugggggcagaaaauucuguggccuacuccaacaauaguauugcuaucccaacaaacuucacuaucagcguuaccacagaaauucuucccgugucuaugacuaagaccuccgucgauuguacgauguauauaugcggcgacucaacagaguguaguaaucuguugcuccaauacggcagcuuuugcacccagcugaacagagccuuaacuggaaucgcaguggagcaggauaaaaauacacaggaaguuuucgcgcaagugaagcagauuuauaaaaccccgccuaucaaggacuuugggggauucaacuuuucgcagauucugccagaucccuccaaaccuucuaagaggagcuucaucgaggaccuacucuuuaauaagguaacucuggcugaugccgguuucauaaaacaauacggcgacugucuuggggauaucgcagcccgugacuugauuugcgcucagaaguucaacggacugaccguccugcccccacucuuaacagaugaaaugaucgcccaguauacgucagcacugcuugcuggcaccauuacgagugguuggacauuuggggccggcgcggccuugcagaucccuuucgcuaugcaaauggcauaccgguuuaauggaauaggcgugacccagaacgugcucuaugagaaucagaaacugauugccaaccaguucaacuccgcuaucgggaagauucaagacucucuaagcuccacagccucagcacugggaaaacuccaggacgucguuaaucagaacgcgcaggcccugaauacucuugugaagcaauugagcaguaacuuuggcgcuaucucuuccguacugaaugauauauuaagccgacucgacaagguggaagccgagguccagaucgauagacugauuaccgguaggcuucagucgcugcaaacguacgugacacagcaguugauccgcgcagcugagauucgggccucagcaaaccucgccgcuaccaaaaugucugaaugcguucuggggcagaguaagagaguggacuucuguggaaaaggcuaccaccuaauguccuuuccccaaagcgcgccacauggugucguguuccugcacguuacuuaugugccggcccaggagaagaauuuuaccacagcuccugcaaucugccacgauggcaaagcccauuuccccagggaaggggucuuuguaucuaacggaacucacugguucgugacccagcgcaauuuuuacgagccacagauaauuacaacggacaacaccuucguuagcggcaauugugauguggucaucgggaucgugaacaauacuguauaugacccccuccaacuggagcuugauuccuucaaggaagaguuggacaaauacuuuaagaaccauacaucaccugauguggaccugggagauauuaguggcaucaaugccagcgucguuaacauucagaaggaaauagaccgauuaaaugagguggcuaaaaaccucaacgaaucucugaucgaccuucaggagcuggguaaguaugagcaguacauuaaauggccaugguauaucuggcuaggguucauugcaggacucaucgccauagugauggucaccaucaugcugugcuguaugacuuccugcuguucaugcuugaagggcuguugcaguugugguagcugcugcaaauuugaugaagacgauuccgagcccgugcugaagggcguuaaguuacacuacacaugaggacuaguuauaagacugacuagcccgaugggccucccaacgggcccuccuccccuccuugcaccgagauuaauaaaaaaaaaaaaaaaaaaaaaaaaaaaaaaaaaaaaaaaaaaaaaaaaaaaaaaaaaaaaaaaaugcaucccccccccccccccccccccccccccccccaaaggcucuuuucagagccaccagaauu

SEQ ID NO: 12956 - RNA, 4039 nt, Artificial Sequence
  SARS-CoV-2/India/1-31/2020__EPI_ISL_413523 spike protein mRNA human (1-1273)
aggagaaagcuuaccauguucguguuucugguccuccuuccccugguuagcucccagugcgugaacuugaccacaagaacucaauuaccuccagccuacacuaauucuuucaccaggggcguauauuacccggacaagguguuucggucaaguguccugcacagcacacaggaucuauuccuccccuuuuucuccaacgugacuugguuucaugcuauccacguuucugggaccaauggaacaaaacgcuucgacaacccugugcugccauuuaaugauggugucuauuucgcaucgaccgagaagucaaacauuauacgaggcuggaucuuugggacuacacuugacagcaaaacccagagucuguugauugugaauaacgccacgaauguaguuaucaaggugugugaguuccaguuuugcaacgaucccuuccucggagucuacuaucauaaaaauaacaaguccuggauggagucugaguuccguguguacagcuccgcgaauaacuguacuuuugaauaugugucacaaccuuuccugauggaccuggaaggcaagcaggguaauuuuaaaaaccucagagaguucgucuuuaagaacauugauggguacuucaaaaucuacaguaagcacaccccaauaaauuuaguuagggaccugccccagggauuuagcgcucuugagccuuugguggaucugccaaucggcauuaacaucacacgguuccagacucuacucgcccugcaucgcucuuaucuuaccccgggcgacuccucaagcggguggacagcaggagccgcugcauacuauguagguuaccugcaacccagaaccuuuuugcucaaauauaaugaaaacggcacgauuacugaugccguggacugcgcucuggauccuuuaagugagacaaaguguacccugaagucuuucacugucgaaaaagggaucuaccagacauccaauuuuagggugcagccaaccgagagcauaguucgguuccccaacauuacgaaucucugcccuuuuggagagguguucaacgccacccgcuucgcgucggucuaugcauggaaucgaaagagaaucucuaacuguguggccgacuacuccguacuuuacaauucagcuaguuuuagcacauucaaaugcuauggcguuuccccaacuaagcugaacgacuuguguuuuaccaauguguacgccgauucuuucgucauuaggggugacgaagugcggcagaucgcacccgggcaaacaggaaaaaucgcugauuauaacuacaagcuaccggacgauuuuacuggcugcgucauugccuggaauagcaacaaccuggacucaaaagugggcgggaauuauaacuaccucuaucgucuguuccgcaagaguaaucuuaagccuuuugagagagauauauccaccgaaaucuaccaggcgggaagcacacccuguaacgguguugagggcuucaauugcuacuuuccacugcagucuuauggguuccaaccuaccaacggagugggcuaccagcccuauaggguagucguguugucauuugaacuccugcacgccccagcaacuguuugcggucccaaaaagaguacgaauuuagugaaaaacaagugugucaauuucaacuuuaaugggcugacaggcaccggagugcuaacugagagcaacaaaaaguuccucccuuuccagcaguuuggccgggacauugcugauaccacagacgccguacgagauccacaaacccuggagauccuugacauaacuccgugcuccuucgggggagugucuguuauuacacccgguacgaauaccucgaaccaggucgcuguguuguaccaggacgugaauuguacugaagucccuguugccauccacgcagaucagcugacaccaaccuggcgcguguauagcacaggcuccaacguguuucaaacuagagccgggugccucaucggagcugagcauguaaacaauucauacgaaugugacauucccaucggcgcggguauuugcgcaaguuaucagacccagacgaacucuccuaggcgggcccgcagcgucgcuucccagucaauaaucgccuacaccaugagccugggggcagaaaauucuguggccuacuccaacaauaguauugcuaucccaacaaacuucacuaucagcguuaccacagaaauucuucccgugucuaugacuaagaccuccgucgauuguacgauguauauaugcggcgacucaacagaguguaguaaucuguugcuccaauacggcagcuuuugcacccagcugaacagagccuuaacuggaaucgcaguggagcaggauaaaaauacacaggaaguuuucgcgcaagugaagcagauuuauaaaaccccgccuaucaaggacuuugggggauucaacuuuucgcagauucugccagaucccuccaaaccuucuaagaggagcuucaucgaggaccuacucuuuaauaagguaacucuggcugaugccgguuucauaaaacaauacggcgacugucuuggggauaucgcagcccgugacuugauuugcgcucagaaguucaacggacugaccguccugcccccacucuuaacagaugaaaugaucgcccaguauacgucagcacugcuugcuggcaccauuacgagugguuggacauuuggggccggcgcggccuugcagaucccuuucgcuaugcaaauggcauaccgguuuaauggaauaggcgugacccagaacgugcucuaugagaaucagaaacugauugccaaccaguucaacuccgucaucgggaagauucaagacucucuaagcuccacagcuucagcccugggaaaacuccaggacguugugaaucagaacgcacaggcgcugaauacucuuguaaagcaauugagcaguaacuuuggcgccaucucuuccgugcugaaugauauauuaagccgacucgacaaggucgaagcugaggugcagaucgauagacugauuaccgguaggcuucagucgcugcaaacguacguuacacagcaguugauccgcgccgcagagauucgggcuucagccaaccucgcagccaccaaaaugucugaaugcgugcuggggcagaguaagagagucgacuucuguggaaaaggcuaccaccuaauguccuuuccccaaagcgcuccacauggugugguuuuccugcacgugacuuaugucccggcgcaggagaagaauuuuaccacagccccugcaaucugccacgauggcaaagcucauuuccccagggaagggguauuugugucuaacggaacucacugguucguuacccagcgcaauuuuuacgagccacagauaauuacaacggacaacaccuucgugagcggcaauugugaugucgugaucgggaucguaaacaauacuguguaugacccccuccaaccugagcuggauuccuucaaggaggaacuugacaaauacuuuaagaaccauacaucaccagaugucgacuugggagauauuaguggcaucaaugccagcguugugaacauucagaaggaaauagaccgacugaaugagguggccaaaaacuuaaacgaaucucucaucgaccugcaggagcuugguaaguaugagcaguacauuaaauggcccugguauaucuggcugggguucauugcuggacuaaucgcaauagucauggugaccaucaugcucugcuguaugacuuccugcuguucaugccugaagggcuguugcaguugugguagcugcugcaaauuugaugaagacgauuccgagccuguuuugaagggcguaaagcugcacuacacaugaggacuaguuauaagacugacuagcccgaugggccucccaacgggcccuccuccccuccuugcaccgagauuaauaaaaaaaaaaaaaaaaaaaaaaaaaaaaaaaaaaaaaaaaaaaaaaaaaaaaaaaaaaaaaaaaugcaucccccccccccccccccccccccccccccccaaaggcucuuuucagagccaccagaauu

SEQ ID NO: 12957 - RNA, 4039 nt, Artificial Sequence
  SARS-CoV-2/Guangdong/GD2020087-P0008/2020__EPI_ISL_413863 spike protein mRNA human (1-1273)
aggagaaagcuuaccauguucguguuucugguccuccuuccccugguuagcucccagugcgugaacuugaccacaagaacucaauuaccuccagccuacacuaauucuuucaccaggggcguauauuacccggacaagguguuucggucaaguguccugcacagcacacaggaucuauuccuccccuuuuucuccaacgugacuugguuucaugcuauccacguuucugggaccaauggaacaaaacgcuucgacaacccugugcugccauuuaaugauggugucuauuucgcaucgaccgagaagucaaacauuauacgaggcuggaucuuugggacuacacuugacagcaaaacccagagucuguugauugugaauaacgccacgaauguaguuaucaaggugugugaguuccaguuuugcaacgaucccuuccucggagucuacuaucauaaaaauaacaaguccuggauggaaucugaguuccguguguacagcuccgcgaauaacuguacuuuugaauaugugucacaaccuuuccugauggaccuggaaggcaagcaggguaauuuuaaaaaccucagagaguucgucuuuaagaacauugauggguacuucaaaaucuacaguaagcacaccccaauaaauuuaguuagggaccugccccagggauuuagcgcucuugagccuuugguggaucugccaaucggcauuaacaucacacgguuccagacucuacucgcccugcaucgcucuuaucuuaccccgggcgacuccucaagcggguggacagcaggagccgcugcauacuauguagguuaccugcaacccagaaccuuuuugcucaaauauaaugaaaacggcacgauuacugaugccguggacugcgcucuggauccuuuaagugagacaaaguguacccugaagucuuucacugucgaaaaagggaucuaccagacauccaauuuuagggugcagccaaccgagagcauaguucgguuccccaacauuacgaaucucugcccuuuuggagagguguucaacgccacccgcuucgcgucggucuaugcauggaaucgaaagagaaucucuaacuguguggccgacuacuccguacuuuacaauucagcuaguuuuagcacauucaaaugcuauggcguuuccccaacuaagcugaacgacuuguguuuuaccaauguguacgccgauucuuucgucauuaggggugacgaagugcgggagaucgcacccgggcagacaggaaaaaucgcugauuauaacuacaagcuaccggacgauuuuacuggcugcgucauugccuggaauagcaacaaccuggacucaaaagugggcgggaauuauaacuaccucuaucgucuguuccgcaagaguaaucuuaagccuuuugaaagagauauauccaccgagaucuaccaagcgggaagcacacccuguaacgguguugaaggcuucaauugcuacuuuccacugcagucuuauggguuccagccuaccaacggagugggcuaccaacccuauaggguagucguguugucauuugagcuccugcacgccccagcaacuguuugcggucccaaaaagaguacgaauuuagugaaaaacaagugugucaauuucaacuuuaaugggcugacaggcaccggagugcuaacugagagcaacaaaaaguuccucccuuuccagcaguuuggccgggacauugcugauaccacagacgccguacgagauccacagacccuggaaauccuugacauaacuccgugcuccuucgggggagugucuguuauuacacccgguacgaauaccucgaaccaagucgcuguguuguaccaggacgugaauuguacugaggucccuguugccauccacgcagaucagcugacaccaaccuggcgcguguauagcacaggcuccaacguguuucagacuagagccgggugccucaucggagcugaacauguaaacaauucauacgagugugacauucccaucggcgcggguauuugcgcaaguuaucaaacccagacgaacucuccuaggcgggcccgcagcgucgcuucccagucaauaaucgccuacaccaugagccugggggcagaaaauucuguggccuacuccaacaauaguauugcuaucccaacaaacuucacuaucagcguuaccacagagauucuucccgugucuaugacuaagaccuccgucgauuguacgauguauauaugcggcgacucaacagaguguaguaaucuguugcuccaguacggcagcuuuugcacccaacugaacagagccuuaacuggaaucgcaguggaacaggauaaaaauacacaggagguuuucgcacaggugaagcaaauuuauaaaaccccgccuaucaaggacuuugggggauucaacuuuucgcagauucugccagaucccuccaaaccuucuaagaggagcuucaucgaagaccuacucuuuaauaagguaacucuggcugaugccgguuucauaaaacaguacggcgacugucuuggggauaucgcagcccgugacuugauuugcgcucaaaaguucaacggacugaccguccugcccccacucuuaacagaugagaugaucgcccaguauacgucagcacugcuugcuggcaccauuacgagugguuggacauuuggggccggcgcggccuugcagaucccuuucgcuaugcagauggcauaccgguuuaauggaauaggcgugacccaaaacgugcucuaugaaaaucagaaacugauugccaaccaguucaacuccgcuaucgggaagauucaggacucucuaagcuccacagccucagcacugggaaaacuccaagacgucguuaaucagaacgcgcaggcccugaauacucuugugaagcaguugagcaguaacuuuggcgcuaucucuuccguacugaaugauauauuaagccgacucgacaagguggaggccgagguccaaaucgauagacugauuaccgguaggcuucagucgcugcagacguacgugacacaacaguugauccgcgcagcugaaauucgggccucagcaaaccucgccgcuaccaaaaugucugagugcguucuggggcagaguaagagaguggacuucuguggaaaaggcuaccaccuaauguccuuuccccagagcgcgccacauggugucguguuccugcacguuacuuaugugccggcccaagaaaagaauuuuaccacagcgccugcuaucugccacgauggcaaagcccauuuccccagggagggggucuuuguaucuaacggaacucacugguucgugacccagcgcaauuuuuacgagccacagauaauuacaacggacaacaccuucguuagcggcaauugugauguggucaucgggaucgugaacaauacuguauaugacccccuccagccugaacuggauuccuucaaggaggaacuugacaaauacuuuaagaaccauacaucaccagauguggacuugggagauauuaguggcaucaaugccagcgucguuaacauucaaaaggagauagaccgacugaaugaaguggcuaaaaacuuaaacgagucucucaucgaccugcaggagcuugguaaguaugaacaguacauuaaauggcccugguauaucuggcugggguucauugcaggacuaaucgccauagugauggucaccaucaugcucugcuguaugacuuccugcuguucaugccugaagggcuguugcaguugugguagcugcugcaaauuugaugaggacgauuccgaaccuguguugaagggcguuaagcugcacuacacaugaggacuaguuauaagacugacuagcccgaugggccucccaacgggcccuccuccccuccuugcaccgagauuaauaaaaaaaaaaaaaaaaaaaaaaaaaaaaaaaaaaaaaaaaaaaaaaaaaaaaaaaaaaaaaaaaugcaucccccccccccccccccccccccccccccccaaaggcucuuuucagagccaccagaauu

SEQ ID NO: 12958 - RNA, 4039 nt, Artificial Sequence
  SARS-CoV-2/Sweden/01/2020__EPI_ISL_411951 spike protein mRNA human (1-1273)
aggagaaagcuuaccauguucguguuucugguccuccuuccccugguuagcucccagugcgugaacuugaccacaagaacucaauuaccuccagccuacacuaauucuuucaccaggggcguauauuacccggacaagguguuucggucaaguguccugcacagcacacaggaucuauuccuccccuuuuucuccaacgugacuugguuucaugcuauccacguuucugggaccaauggaacaaaacgcuucgacaacccugugcugccauuuaaugauggugucuauuucgcaucgaccgagaagucaaacauuauacgaggcuggaucuuugggacuacacuugacagcaaaacccagagucuguugauugugaauaacgccacgaauguaguuaucaaggugugugaguuccaguuuugcaacgaucccuuccucggagucuacuaucauaaaaauaacaaguccuggauggagucugaguuccguguguacagcuccgcgaauaacuguacuuuugaauaugugucacaaccuuuccugauggaccuggaaggcaagcaggguaauuuuaaaaaccucagagaguucgucuuuaagaacauugauggguacuucaaaaucuacaguaagcacaccccaauaaauuuaguuagggaccugccccagggauuuagcgcucuugagccuuugguggaucugccaaucggcauuaacaucacacgguuccagacucuacucgcccugcaucgcucuuaucuuaccccgggcgacuccucaagcggguggacagcaggagccgcugcauacuauguagguuaccugcaacccagaaccuuuuugcucaaauauaaugaaaacggcacgauuacugaugccguggacugcgcucuggauccuuuaagugagacaaaguguacccugaagucuuucacugucgaaaaagggaucuaccagacauccaauuuuagggugcagccaaccgagagcauaguucgguuccccaacauuacgaaucucugcccuuuuggagagguguucaacgccacccgcuucgcgucggucuaugcauggaaucgaaagagaaucucuaacuguguggccgacuacuccguacuuuacaauucagcuaguuuuagcacauucaaaugcuauggcguuuccccaacuaagcugaacgacuuguguuuuaccaauguguacgccgauucuuucgucauuaggggugacgaagugcggcagaucgcacccgggcaaacaggaaaaaucgcugauuauaacuacaagcuaccggacgauuuuacuggcugcgucauugccuggaauagcaacaaccuggacucaaaagugggcgggaauuauaacuaccucuaucgucuguuccgcaagaguaaucuuaagccuuuugagagagauauauccaccgaaaucuaccaggcgggaagcacacccuguaacgguguugagggcuucaauugcuacuuuccacugcagucuuauggguuccaaccuaccaacggagugggcuaccagcccuauaggguagucguguugucauuugaacuccugcacgccccagcaacuguuugcggucccaaaaagaguacgaauuuagugaaaaacaagugugucaauuucaacuuuaaugggcugacaggcaccggagugcuaacugagagcaacaaaaaguuccucccuuuccagcaguuuggccgggacauugcugauaccacagacgccguacgagauccacaaacccuggagauccuugacauaacuccgugcuccuucgggggagugucuguuauuacacccgguacgaauaccucgaaccaggucgcuguguuguaccaggacgugaauuguacugaagucccuguugccauccacgcagaucagcugacaccaaccuggcgcguguauagcacaggcuccaacguguuucaaacuagagccgggugccucaucggagcugagcauguaaacaauucauacgaaugugacauucccaucggcgcggguauuugcgcaaguuaucagacccagacgaacucuccuaggcgggcccgcagcgucgcuucccagucaauaaucgccuacaccaugagccugggggcagaaaauucuguggccuacuccaacaauaguauugcuaucccaacaaacuucacuaucagcguuaccacagaaauucuucccgugucuaugacuaagaccuccgucgauuguacgauguauauaugcggcgacucaacagaguguaguaaucuguugcuccaauacggcagcuuuugcacccagcugaacagagccuuaacuggaaucgcaguggagcaggauaaaaauacacaggaaguuuucgcgcaagugaagcagauuuauaaaaccccgccuaucaaggacugugggggauuuaacuucucgcagauucugccagaucccuccaaaccuucuaagaggagcuuuaucgaggaccuacucuucaauaagguaacucuggcugaugccgguuuuauaaaacaauacggcgacugccuuggggauaucgcagcccgugacuugauuugcgcucagaaguucaacggacugaccguccugcccccacucuuaacagaugaaaugaucgcccaguauacgucagcacugcuugcuggcaccauuacgagugguuggacauucggggccggcgcggccuugcagaucccuuuugcuaugcaaauggcauaccgguucaauggaauaggcgugacccagaacgugcucuaugagaaucagaaacugauugccaaccaguuuaacuccgcuaucgggaagauucaagacucucuaagcuccacagccucagcacugggaaaacuccaggacgucguuaaucagaacgcgcaggcccugaauacucuugugaagcaauugagcaguaacuucggcgcuaucucuuccguacugaaugauauauuaagccgacucgacaagguggaagccgagguccagaucgauagacugauuaccgguaggcuucagucgcugcaaacguacgugacacagcaguugauccgcgcagcugagauucgggccucagcaaaccucgccgcuaccaaaaugucugaauguguucuggggcagaguaagagaguggacuuuugcggaaaaggcuaccaccuaauguccuucccccaaagcgcgccacauggugucguguuucugcacguuacuuaugugccggcccaggagaagaauuucaccacagcuccugcaaucugucacgauggcaaagcccauuuucccagggaaggggucuucguaucuaacggaacucacugguuugugacccagcgcaauuucuacgagccacagauaauuacaacggacaacaccuuuguuagcggcaauugcgauguggucaucgggaucgugaacaauacuguauaugacccccuccaaccugagcuggauuccuucaaggaggaacuugacaaauacuucaagaaccauacaucaccagauguggacuugggagauauuaguggcaucaaugccagcgucguuaacauucagaaggaaauagaccgacugaaugagguggcuaaaaacuuaaacgaaucucucaucgaccugcaggagcuugguaaguaugagcaguacauuaaauggcccugguauaucuggcugggguuuauugcaggacuaaucgccauagugauggucaccaucaugcucuguugcaugacuuccuguugcucaugucugaagggcugcuguaguugcgguagcugcuguaaauucgaugaagacgauuccgagccuguguugaagggcguuaagcugcacuacacaugaggacuaguuauaagacugacuagcccgaugggccucccaacgggcccuccuccccuccuugcaccgagauuaauaaaaaaaaaaaaaaaaaaaaaaaaaaaaaaaaaaaaaaaaaaaaaaaaaaaaaaaaaaaaaaaaugcaucccccccccccccccccccccccccccccccaaaggcucuuuucagagccaccagaauu

SEQ ID NO: 12959 - RNA, 4039 nt, Artificial Sequence
  SARS-CoV-2/Tianmen/HBCDC-HB-07/2020__EPI_ISL_412983 spike protein mRNA human (1-1273)
aggagaaagcuuaccauguucguguuucugguccuccuuccccugguuagcucccagugcgugaacuugaccacaagaacucaauuaccuccagccuacacuaauucuuucaccaggggcguauauuacccggacaagguguuucggucaaguguccugcacagcacacaggaucuauuccuccccuuuuucuccaacgugacuugguuucaugcuauccacguuucugggaccaauggaacaaaacgcuucgacaacccugugcugccauuuaaugauggugucuauuucgcaucgaccgagaagucaaacauuauacgaggcuggaucuuugggacuacacuugacagcaaaacccagagucuguugauugugaauaacgccacgaauguaguuaucaaggugugugaguuccaguuuugcaacgaucccuuccucggagucuacuaucauaaaaauaacaaguccuggauggagucugaguuccguguguacagcuccgcgaauaacuguacuuuugaauaugugucacaaccuuuccugauggaccuggaaggcaagcaggguaauuuuaaaaaccucagagaguucgucuuuaagaacauugauggguacuucaaaaucuacaguaagcacaccccaauaaauuuaguuagggaccugccccagggauuuagcgcucuugagccuuugguggaucugccaaucggcauuaacaucacacgguuccagacucuacucgcccugcaucgcucuuaucuuaccccgggcgacuccucaagcggguggacagcaggagccgcugcauacuauguagguuaccugcaacccagaaccuuuuugcucaaauauaaugaaaacggcacgauuacugaugccguggacugcgcucuggauccuuuaagugagacaaaguguacccugaagucuuucacugucgaaaaagggaucuaccagacauccaauuuuagggugcagccaaccgagagcauaguucgguuccccaacauuacgaaucucugcccuuuuggagagguguucaacgccacccgcuucgcgucggucuaugcauggaaucgaaagagaaucucuaacuguguggccgacuacuccguacuuuacaauucagcuaguuuuagcacauucaaaugcuauggcguuuccccaacuaagcugaacgacuuguguuuuaccaauguguacgccgauucuuucgucauuaggggugacgaagugcggcagaucgcacccgggcaaacaggaaaaaucgcugauuauaacuacaagcuaccggacgauuuuacuggcugcgucauugccuggaauagcaacaaccuggacucaaaagugggcgggaauuauaacuaccucuaucgucuguuccgcaagaguaaucuuaagccuuuugagagagauauauccaccgaaaucuaccaggcgggaagcacacccuguaacgguguugagggcuucaauugcuacuuuccacugcagucuuauggguuccaaccuaccaacggagugggcuaccagcccuauaggguagucguguugucauuugaacuccugcacgccccagcaacuguuugcggucccaaaaagaguacgaauuuagugaaaaacaagugugucaauuucaacuuuaaugggcugacaggcaccggagugcuaacugagagcaacaaaaaguuccucccuuuccagcaguuuggccgggacauugcugauaccacagacgccguacgagauccacaaacccuggagauccuugacauaacuccgugcuccuucgggggagugucuguuauuacacccgguacgaauaccucgaaccaggucgcuguguuguaccaggaccugaauuguacugaagugccugucgccauccacgcagaucagcucacaccaaccuggcgcguuuauagcacaggcuccaacguguuucaaacuagagccgggugccugaucggagcugagcaugugaacaauucauacgaaugugacauucccaucggcgcggguauuugcgcaaguuaucagacccagacgaacucuccuaggcgggcccgcagcguagcuucccagucaauaaucgccuacaccaugagccuuggggcagaaaauucugucgccuacuccaacaauaguauugcuaucccaacaaacuucacuaucagcgugaccacagaaauucugcccguuucuaugacuaagaccuccguggauuguacgauguauauaugcggcgacucaacagaguguaguaauuugcuccugcaauacggcagcuuuugcacccaguuaaacagagcccugacuggaaucgcagucgagcaggauaaaaauacacaggaaguguucgcgcaaguuaagcagauuuauaaaaccccgccuaucaaggacuuugggggauucaacuuuucgcagauucuaccagaucccuccaaaccuucuaagaggagcuucaucgaggaccuccuguuuaauaaggugacucuugcugaugccgguuucauaaaacaauacggcgacuguuugggggauaucgcagcccgugaccugauuugcgcucagaaguucaacggacucaccguacugcccccauuacugacagaugaaaugaucgcccaguauacgucagcacuuuuggcuggcaccauuacgagugguuggacauuuggggccggcgcggcccuccagaucccuuucgcuaugcaaauggcauaccgguuuaauggaauaggcgucacccagaacgugcuguaugagaaucagaaacuaauugccaaccaguucaacuccgcuaucgggaagauucaagacucucugagcuccacagccucagcacucggaaaacugcaggacguggucaaucagaacgcgcaggcccuuaauacuuugguuaagcaacugagcaguaacuuuggcgcuaucucuuccguguuaaaugauauacucagccgacuggacaagguagaagccgaggugcagaucgauagacuuauuaccgguaggcugcagucguugcaaacguacgucacacagcagcucauccgcgcagcugagauucgggccucagcaaaccuggccgcuaccaaaaugucugaaugcgugcuagggcagaguaagagaguugacuucuguggaaaaggcuaccaccugauguccuuuccccaaagcgcgccacaugguguggucuuccuccacgugacuuauguuccggcccaggagaagaauuuuaccacagcuccugcaaucugccacgauggcaaagcccauuuccccagggaagggguguuugucucuaacggaacucacugguucguaacccagcgcaauuuuuacgagccacagauaauuacaacggacaacaccuucgugagcggcaauugugauguugugaucgggaucgucaacaauacuguguaugacccccugcaaccugagcuugauuccuucaaggaagaguuggacaaauacuuuaagaaccauacaucaccagauguagaccugggagauauuaguggcaucaaugccagcguggucaacauucagaaggaaauagaccgauuaaaugagguugcuaaaaaccucaacgaaucucugaucgaccuucaggagcuggguaaguaugagcaguacauuaaauggcccugguauaucuggcuaggguucauugcaggacucaucgccauagugauggugaccaucaugcugugcuguaugacuuccugcuguucaugcuugaagggcuguugcaguugugguagcugcugcaaauuugaugaagacgauuccgagccuguccugaagggcgugaaguuacacuacacaugaggacuaguuauaagacugacuagcccgaugggccucccaacgggcccuccuccccuccuugcaccgagauuaauaaaaaaaaaaaaaaaaaaaaaaaaaaaaaaaaaaaaaaaaaaaaaaaaaaaaaaaaaaaaaaaaugcaucccccccccccccccccccccccccccccccaaaggcucuuuucagagccaccagaauu

SEQ ID NO: 12960 - RNA, 4039 nt, Artificial Sequence
  SARS-CoV-2/Hong Kong/case42_VM20002493/2020__EPI_ISL_414527 spike protein mRNA human (1-1273)
aggagaaagcuuaccauguucguguuucugguccuccuuccccugguuagcucccagugcgugaacuugaccacaagaacucaauuaccuccagccuacacgaauagcuucaccaggggcguauauuacccggacaagguguuucggucaaguguccugcacagcacacaggaucuauuccuccccuuuuucuccaacgugacuugguuucaugcuauccacguuucugggaccaauggaacaaaacgcuucgacaacccugugcugccauuuaaugauggugucuauuucgcaucgaccgagaagucaaacauuauacgaggcuggaucuuugggacuacacuugacagcaaaacccagagucuguugauugugaauaacgccacgaauguaguuaucaaggugugugaguuccaguuuugcaacgaucccuuccucggagucuacuaucauaaaaauaacaaguccuggauggagucugaguuccguguguacagcuccgcgaauaacuguacuuuugaauaugugucacaaccuuuccugauggaccuggaaggcaagcaggguaauuuuaaaaaccucagagaguucgucuuuaagaacauugauggguacuucaaaaucuacaguaagcacaccccaauaaauuuaguuagggaccugccccagggauuuagcgcucuugagccuuugguggaucugccaaucggcauuaacaucacacgguuccagacucuacucgcccugcaucgcucuuaucuuaccccgggcgacuccucaagcggguggacagcaggagccgcugcauacuauguagguuaccugcaacccagaaccuuuuugcucaaauauaaugaaaacggcacgauuacugaugccguggacugcgcucuggauccuuuaagugagacaaaguguacccugaagucuuucacugucgaaaaagggaucuaccagacauccaauuuuagggugcagccaaccgagagcauaguucgguuccccaacauuacgaaucucugcccuuuuggagagguguucaacgccacccgcuucgcgucggucuaugcauggaaucgaaagagaaucucuaacuguguggccgacuacuccguacuuuacaauucagcuaguuuuagcacauucaaaugcuauggcguuuccccaacuaagcugaacgacuuguguuuuaccaauguguacgccgauucuuucgucauuaggggugacgaagugcggcagaucgcacccgggcaaacaggaaaaaucgcugauuauaacuacaagcuaccggacgauuuuacuggcugcgucauugccuggaauagcaacaaccuggacucaaaagugggcgggaauuauaacuaccucuaucgucuguuccgcaagaguaaucuuaagccuuuugagagagauauauccaccgaaaucuaccaggcgggaagcacacccuguaacgguguugagggcuucaauugcuacuuuccacugcagucuuauggguuccaaccuaccaacggagugggcuaccagcccuauaggguagucguguugucauuugaacuccugcacgccccagcaacuguuugcggucccaaaaagaguacgaauuuagugaaaaacaagugugucaauuucaacuuuaaugggcugacaggcaccggagugcuaacugagagcaacaaaaaguuccucccuuuccagcaguuuggccgggacauugcugauaccacagacgccguacgagauccacaaacccuggagauccuugacauaacuccgugcuccuucgggggagugucuguuauuacacccgguacgaauaccucgaaccaggucgcuguguuguaccaggacgugaauuguacugaagucccuguugccauccacgcagaucagcugacaccaaccuggcgcguguauagcacaggcuccaacguguuucaaacuagagccgggugccucaucggagcugagcauguaaacaauucauacgaaugugacauucccaucggcgcggguauuugcgcaaguuaucagacccagacgaacucuccuaggcgggcccgcagcgucgcuucccagucaauaaucgccuacaccaugagccugggggcagaaaauucuguggccuacuccaacaauaguauugcuaucccaacaaacuucgccaucagcguuacuaccgaaauucuucccgugucuaugacaaagacuuccgucgauuguaccauguauauaugcggcgacucaacggaguguaguaaucuguugcuccaauacggaucuuuuugcacacagcugaacagagcauuaaccggcaucgcgguggagcaggauaaaaauacucaggaaguuuucgcucaagugaagcagauuuauaaaacaccgccuaucaaggacuuugggggauucaacuuuucgcagauucugccagaucccuccaaaccuucuaagaggagcuucaucgaggaccuacucuuuaauaagguaacccuggccgaugcagguuucauaaaacaauacggcgacugucuuggggauaucgccgcucgugacuugauuugcgcccagaaguucaacggacugacuguccugcccccacucuuaaccgaugaaaugaucgcacaguauacaucagcucugcuugccggcacgauuaccagugguuggacuuuuggggcgggcgccgcuuugcagaucccuuucgcaaugcaaauggccuaccgguuuaauggaauaggcgugacacagaacgugcucuaugagaaucagaaacugauugcuaaccaguucaacuccgccaucgggaagauucaagacucucuaagcuccaccgcaucagcgcugggaaaacuccaggacgucguuaaucagaacgcccaggcucugaauacacuugugaagcaauugagcaguaacuuuggcgccaucucuuccguacugaaugauauauuaagccgacucgacaagguggaagcagagguccagaucgauagacugauuacugguaggcuucagucgcugcaaaccuacgugacgcagcaguugauccgcgcugccgagauucgggcaucagccaaccucgcugcgacaaaaaugucugaaugcguucuggggcagaguaagagaguggacuucuguggaaaaggcuaccaccuaauguccuuuccccaaagcgccccacauggugucguguuccugcacguuaccuaugugccggcacaggagaagaauuuuacuaccgcuccugccaucugccacgauggcaaagcccauuuccccagggaaggggucuuuguaucuaacggaacacacugguucgugacucagcgcaauuuuuacgagccacagauaauuaccacagacaacacguucguuagcggcaauugugauguggucaucgggaucgugaacaauaccguauaugacccccuccaaccugagcuggauuccuucaaggaggaacuugacaaauacuuuaagaaccauacuucaccagauguggacuugggagauauuaguggcaucaaugcuagcgucguuaacauucagaaggaaauagaccgacugaaugagguggccaaaaacuuaaacgaaucucucaucgaccugcaggagcuugguaaguaugagcaguacauuaaauggcccugguauaucuggcugggguucauugcaggacuaaucgcgauagugauggucacaaucaugcucugcuguaugaccuccugcuguucaugccugaagggcuguugcaguugugguagcugcugcaaauuugaugaagacgauuccgagccuguguugaagggcguuaagcugcacuacacuugaggacuaguuauaagacugacuagcccgaugggccucccaacgggcccuccuccccuccuugcaccgagauuaauaaaaaaaaaaaaaaaaaaaaaaaaaaaaaaaaaaaaaaaaaaaaaaaaaaaaaaaaaaaaaaaaugcaucccccccccccccccccccccccccccccccaaaggcucuuuucagagccaccagaauu

SEQ ID NO: 12961 - RNA, 4039 nt, Artificial Sequence
  SARS-CoV-2/USA/CruiseA-23/2020__EPI_ISL_414482 spike protein mRNA human (1-1273)
aggagaaagcuuaccauguucguguuucugguccuccuuccccugguuagcucccagugcgugaacuugaccacaagaacucaauuaccuccagccuacacuaauucuuucaccaggggcguauauuacccggacaagguguuucggucaaguguccugcacagcacacaggaucuauuccuccccuuuuucuccaacgugacuugguuucaugcuauccacguuucugggaccaauggaacaaaacgcuucgacaacccugugcugccauuuaaugauggugucuauuucgcaucgaccgagaagucaaacauuauacgaggcuggaucuuugggacuacacuugacagcaaaacccagagucuguugauugugaauaacgccacgaauguaguuaucaaggugugugaguuccaguuuugcaacgaucccuuccucggagucuacuaucauaaaaauaacaaguccuggauggagucugaguuccguguguacagcuccgcgaauaacuguacuuuugaguaugugucacaaccuuuccugauggaccuggaagucaagcagggcaauuuuaaaaaccucagagaguucguuuuuaagaacauugaugguuacuucaaaaucuacaguaagcacaccccaauaaauuuagugagggaccugccccagggguuuagcgcucuugagccuuugguagaucugccaaucggaauuaacaucacacgguuccagacucuacucgcccugcaucgcucuuaucuuaccccgggcgacuccucaagcggcuggacagcaggggccgcugcauacuaugugggauaccugcaacccagaaccuuuuugcucaaauauaaugaaaacgguacgauuacugaugccgucgacugcgcucuggauccuuuaagugagacaaaguguacccugaagucuuucacuguggaaaaaggcaucuaccagacauccaauuuuaggguucagccaaccgagagcauagugcgguuccccaacauuacgaaucucugcccuuuuggggaggucuucaacgccacccgcuucgcgucgguguaugcauggaaucgaaagagaaucucuaacuguguagccgacuacuccguucuuuacaauucagcuaguuuuagcacauucaaaugcuauggaguguccccaacuaagcugaacgacuuguguuuuaccaaugucuacgccgauucuuucgugauuaggggcgacgaaguccggcagaucgcacccggucaaacagggaaaaucgcugauuauaacuacaagcuaccggacgauuuuacuggaugcgugauugccuggaauagcaacaaccuggacucaaaaguuggcggcaauuauaacuaccucuaucgucuguuccgcaagaguaaucuuaagccuuuugagagagauauauccaccgaaaucuaccaggcggggagcacacccuguaacggaguggaggguuucaauugcuacuuuccacugcagucuuauggcuuccaaccuaccaacgggguaggauaccagcccuauagggucgugguuuugucauuugaacuccugcacgccccagcaacugugugcggccccaaaaagaguacgaauuuagucaaaaacaagugugugaauuucaacuuuaauggucugacagggaccggcguacuaacugagagcaacaaaaaguuccucccuuuccagcaguuuggacgggacauugcugauaccacagacgccgugcgagauccacaaacccuggagauccuugacauaacuccgugcuccuucggcgggguuucugucauuacacccggaacgaauaccucgaaccagguggcuguguuguaccaggacgucaauuguacugaaguuccuguggccauccacgcagaucagcugacaccaaccuggcgcguguauagcacagguuccaacguauuucaaacuagagccggcugccucaucggggcugagcaugucaacaauucauacgaaugugacauucccaucggagcgggcauuugcgcaaguuaucagacccagacgaacucuccuaggcgggcccgcagcguggcuucccagucaauaaucgccuacaccaugagccugggugcagaaaauucuguugccuacuccaacaauaguauugcuaucccaacaaacuucacuaucagcgugaccacagaaauucuucccgucucuaugacuaagaccuccguggauuguacgauguauauaugcggggacucaacagaguguaguaaucuguugcuccaauacggcagcuuuugcacccagcugaacagagccuuaacuggaaucgcaguugagcaggauaaaaauacacaggaaguguucgcgcaaguaaagcagauuuauaaaaccccgccuaucaaggacuuuggcggguucaacuuuucgcagauucugccagaucccuccaaaccuucuaagaggagcuucaucgaggaccuacucuuuaauaaggucacucuggcugaugccggauucauaaaacaauacggugacugucuuggcgauaucgcagcccgugacuugauuugcgcucagaaguucaacgggcugaccgugcugcccccacucuuaacagaugaaaugaucgcccaguauacgucagcacugcuugcuggaaccauuacgaguggcuggacauuuggugccggggcggccuugcagaucccuuucgcuaugcaaauggcauaccgguuuaauggcauaggagugacccagaacguccucuaugagaaucagaaacugauugccaaccaguucaacuccgcuaucggcaagauucaagacucucuaagcuccacagccucagcacuggggaaacuccaggacguugugaaucagaacgcgcaggcccugaauacucuuguaaagcaauugagcaguaacuuuggagcuaucucuuccgugcugaaugauauauuaagccgacucgacaaggucgaagccgaggugcagaucgauagacugauuaccggcaggcuucagucgcugcaaacguacguuacacagcaguugauccgcgcagcugagauucgggccucagcaaaccucgccgcuaccaaaaugucugaaugcgugcugggucagaguaagagagucgacuucugugggaaaggauaccaccuaauguccuuuccccaaagcgcgccacauggcgugguuuuccugcacgugacuuaugucccggcccaggagaagaauuuuaccacagcuccugcaaucugccacgaugguaaagcccauuuccccagggaaggcguauuugugucuaacgggacucacugguucguuacccagcgcaauuuuuacgagccacagauaauuacaacggacaacaccuucgugagcggaaauugugaugucgugaucggcaucguaaacaauacuguguaugacccccuccaaccugagcuggauuccuucaaggaagaacuugacaaauacuuuaagaaccauacaucaccagaugucgacuugggggauauuaguggaaucaaugccagcguugugaacauucagaaggaaauagaccgacugaaugagguggcuaaaaacuuaaacgaaucucucaucgaccugcaggagcuuggcaaguaugagcaguacauuaaauggcccugguauaucuggcuggguuucauugcagggcuaaucgccauagucauggugaccaucaugcucugcuguaugacuuccugcuguucaugccugaagggauguugcaguuguggcagcugcugcaaauuugaugaagacgauuccgagccuguuuugaaggguguaaagcugcacuacacaugaggacuaguuauaagacugacuagcccgaugggccucccaacgggcccuccuccccuccuugcaccgagauuaauaaaaaaaaaaaaaaaaaaaaaaaaaaaaaaaaaaaaaaaaaaaaaaaaaaaaaaaaaaaaaaaaugcaucccccccccccccccccccccccccccccccaaaggcucuuuucagagccaccagaauu

SEQ ID NO: 12962 - RNA, 4039 nt, Artificial Sequence
  SARS-CoV-2/Hong Kong/case85_VM20002868/2020__EPI_ISL_414519 spike protein mRNA human (1-1273)
aggagaaagcuuaccauguucguguuucugguccucguuccccuugugagcucccagugcguaaaccugaccacaagaacucaauugccuccagccuacacuaauucuuucaccaggggcguguauuacccggacaaggucuuucggucaaguguguuacacagcacacaggaucuguuccuacccuuuuucuccaacguuacuugguuucaugcuauccacgugucugggaccaauggaacaaaacgcuucgacaacccuguccucccauuuaaugaugguguguauuucgcaucgaccgagaagucaaacauuauacgaggcuggaucuuugggacuacacuggacagcaaaacccagagucuucugauuguaaauaacgccacgaauguugugaucaaggucugugaguuccaguuuugcaacgaucccuucuugggaguguacuaucauaaaaauaacaaguccuggauggagucugaguuccguguguacagcuccgcgaauaacuguacuuuugaauaugucucacaaccuuuccucauggaccuggaaggcaagcaggguaauuuuaaaaaccugagagaguucguuuuuaagaacauugauggguacuucaaaaucuacaguaagcacaccccaauaaaucucgugagggacuuaccccagggauuuagcgcucuggagccucuuguagauuugccaaucggcauuaacaucacacgguuccagacucugcuagcccuccaucgcucuuaucugaccccgggcgacuccucaagcggguggacagcaggagccgcugcauacuauguggguuaccuucaacccagaaccuuucuguugaaauauaaugaaaacggcacgauuacugaugccgucgacugcgcucucgauccucugagugagacaaaguguaccuuaaagucuuucacuguggaaaaagggaucuaccagacauccaauuuuaggguucagccaaccgagagcauagugcgguuccccaacauuacgaaucugugcccuuuuggagaggucuucaacgccacccgcuucgcgucgguguaugcauggaaucgaaagagaaucucuaacuguguagccgacuacuccguucucuacaauucagcuaguuuuagcacauucaaaugcuauggcguguccccaacuaaacuuaacgaccuguguuuuaccaaugucuacgccgauucuuucgugauuaggggugacgaaguccggcagaucgcacccgggcaaacaggaaagaucgcugauuauaacuacaaguugccggacgauuuuacuggcugcgugauugccuggaauagcaacaaccuagacucaaaaguuggcgggaauuauaacuaccuguaucgucucuuccgcaagaguaaucugaagccuuuugagagagauauauccaccgaaaucuaccaggcgggaagcacacccuguaacgguguggagggcuucaauugcuacuuuccacuucagucuuauggguuccaaccuaccaacggaguaggcuaccagcccuauagggucgugguucugucauuugaauugcuccacgccccagcaacugugugcggucccaaaaagaguacgaaucuggucaaaaacaagugugugaauuucaacuuuaauggguuaacaggcaccggaguacugacugagagcaacaaaaaguuccuaccuuuccagcaguuuggccgggacauugcugauaccacagacgccgugcgagauccacaaacccucgagauccuggacauaacuccgugcuccuucgggggaguuucugucauuacacccgguacgaauaccucgaaccagguggcugugcuuuaccaggacgucaauuguacugaaguuccuguggccauccacgcagaucaguugacaccaaccuggcgcguguauagcacaggcuccaacguauuucaaacuagagccgggugccugaucggagcugagcaugucaacaauucauacgaaugugacauucccaucggcgcggguauuugcgcaaguuaucagacccagacgaacucuccuaggcgggcccgcagcguggcuucccagucaauaaucgccuacaccaugagccucggggcagaaaauucuguugccuacuccaacaauaguauugcuaucccaacaaacuucacuaucagcgugaccacagaaauucugcccgucucuaugacuaagaccuccguggauuguacgauguauauaugcggcgacucaacagaguguaguaaucuucuguugcaauacggcagcuuuugcacccagcucaacagagcccugacuggaaucgcaguugagcaggauaaaaauacacaggaaguguucgcgcaaguaaagcagauuuauaaaaccccgccuaucaaggacuuugggggauucaacuuuucgcagauuuuaccagaucccuccaaaccuucuaagaggagcuucaucgaggaccugcuauuuaauaaggucacucucgcugaugccgguuucauaaaacaauacggcgacugucugggggauaucgcagcccgugaccuuauuugcgcucagaaguucaacggauugaccgugcugcccccacuccugacagaugaaaugaucgcccaguauacgucagcauuacuggcuggcaccauuacgagugguuggacauuuggggccggcgcggcccuucagaucccuuucgcuaugcaaauggcauaccgguuuaauggaauaggcgugacccagaacgucuuguaugagaaucagaaacucauugccaaccaguucaacuccgcuaucgggaagauucaagacucucugagcuccacagccucagcacuaggaaaacugcaggacguugugaaucagaacgcgcaggcccucaauacucugguaaagcaacuuagcaguaacuuuggcgcuaucucuuccguguugaaugauauacugagccgauuagacaaggucgaagccgaggugcagaucgauagacucauuaccgguaggcugcagucgcuucaaacguacguuacacagcagcugauccgcgcagcugagauucgggccucagcaaacuuggccgcuaccaaaaugucugaaugcgugcucgggcagaguaagagagucgacuucuguggaaaaggcuaccaccugauguccuuuccccaaagcgcgccacauggugugguuuuccuacacgugacuuaugucccggcccaggagaagaauuuuaccacagcuccugcaaucugccacgauggcaaagcccauuuccccagggaagggguauuugugucuaacggaacucacugguucguuacccagcgcaauuuuuacgagccacagauaauuacaacggacaacaccuucgugagcggcaauugugaugucgugaucgggaucguaaacaauacuguguaugacccccugcaaccugagcucgauuccuucaaggaggaacuggacaaauacuuuaagaaccauacaucaccagaugucgaccuuggagauauuaguggcaucaaugccagcguugugaacauucagaaggaaauagaccgauugaaugagguggcuaaaaaccugaacgaaucuuuaaucgaccuccaggagcuggguaaguaugagcaguacauuaaauggcccugguauaucuggcuuggguucauugcaggacugaucgccauagucauggugaccaucaugcuaugcuguaugacuuccugcuguucaugccucaagggcuguugcaguugugguagcugcugcaaauuugaugaagacgauuccgagccuguucugaagggcguaaaguugcacuacacaugaggacuaguuauaagacugacuagcccgaugggccucccaacgggcccuccuccccuccuugcaccgagauuaauaaaaaaaaaaaaaaaaaaaaaaaaaaaaaaaaaaaaaaaaaaaaaaaaaaaaaaaaaaaaaaaaugcaucccccccccccccccccccccccccccccccaaaggcucuuuucagagccaccagaauu

SEQ ID NO: 12963 - RNA, 4039 nt, Artificial Sequence
  SARS-CoV-2/England/200990660/2020__EPI_ISL_414523 spike protein mRNA human (1-1273)
aggagaaagcuuaccauguucguguuucugguccuccuuccccugguuagcucccagugcgugaacuugaccacaagaacucaauuaccuccagccuacacuaauucuuucaccaggggcguauauuacccggacaagguguuucggucaaguguccugcacagcacacaggaucuauuccuccccuuuuucuccaacgugacuugguuucaugcuauccacguuucugggaccaauggaacaaaacgcuucgacaacccugugcugccauuuaaugauggugucuauuucgcaucgaccgagaagucaaacauuauacgaggcuggaucuuugggacuacacuugacagcaaaacccagagucuguugauugugaauaacgccacgaauguaguuaucaaggugugugaguuccaguuuugcaacgaucccuuccucggagucuacuaucauaaaaauaacaaguccuggauggagucugaguuccguguguacagcuccgcgaauaacuguacuuuugaguaugugucacaaccuuuccugauggaccuggaaggcaagcaggguaauuuuaaaaaccucagagaguucgucuuuaagaacauugauggguacuucaaaaucuacaguaagcacaccccaauaaauuuaguuagggaccugccccagggauuuagcgcucuugagccuuugguggaucugccaaucggcauuaacaucacacgguuccagacucuacucgcccugcaucgcucuuaucuuaccccgggcgacuccucaagcggguggacagcaggagccgcugcauacuauguagguuaccugcaacccagaaccuuuuugcucaaauauaaugaaaacggcacgauuacugaugccguggacugcgcucuggauccuuuaagugagacaaaguguacccugaagucuuucacugucgaaaaagggaucuaccagacauccaauuuuagggugcagccaaccgagagcauaguucgguuccccaacauuacgaaucucugcccuuuuggagagguguucaacgccacccgcuucgcgucggucuaugcauggaaucgaaagagaaucucuaacuguguggccgacuacuccguacuuuacaauucagcuaguuuuagcacauucaaaugcuauggcguuuccccaacuaagcugaacgacuuguguuuuaccaauguguacgccgauucuuucgucauuaggggugacgaagugcggcagaucgcacccgggcaaacaggaaaaaucgcugauuauaacuacaagcuaccggacgauuuuacuggcugcgucauugccuggaauagcaacaaccuggacucaaaagugggcgggaauuauaacuaccucuaucgucuguuccgcaagaguaaucuuaagccuuuugagagagauauauccaccgaaaucuaccaggcgggaagcacacccuguaacgguguugagggcuucaauugcuacuuuccacugcagucuuauggguuccaaccuaccaacggagugggcuaccagcccuauaggguagucguguugucauuugaacuccugcacgccccagcaacuguuugcggucccaaaaagaguacgaauuuagugaaaaacaagugugucaauuucaacuuuaaugggcugacaggcaccggagugcuaacugagagcaacaaaaaguuccucccuuuccagcaguuuggccgggacauugcugauaccacagacgccguacgagauccacaaacccuggagauccuugacauaacuccgugcuccuucgggggagugucuguuauuacacccgguacgaauaccucgaaccaggucgcuguguuguaccagggcgugaauuguacugaagucccuguugccauccacgcagaccagcugacaccaaccuggcgcguguauagcacaggguccaacguguuucaaacuagagccggaugccucaucggcgcugagcauguaaacaauucauacgaaugugauauucccaucggugcggggauuugcgcaaguuaucagacccagacgaacucuccuaggcgggcccgcagcgucgcuucccagucaauaaucgccuacaccaugagccugggcgcagaaaauucuguggccuacuccaacaauaguauugcuaucccaacaaacuucacuaucagcguuaccacagaaauucuucccgugucuaugacuaagaccuccgucgacuguacgauguauauaugcggagauucaacagaguguaguaaucuguugcuccaauacggcagcuuuugcacccagcugaacagagccuuaacugggaucgcaguggagcaggacaaaaauacacaggaaguuuucgcgcaagugaagcagauuuauaaaaccccgccuaucaaggauuuuggagguuucaacuuuucgcagauucugccagaccccuccaaaccuucuaagaggagcuucaucgaggaucuacucuuuaauaagguaacucuggcugacgccggcuucauaaaacaauacggggauugucuuggagacaucgcagcccgugauuugauuugcgcucagaaguucaacggccugaccguccugcccccacucuuaacagacgaaaugaucgcccaguauacgucagcacugcuugcugguaccauuacgaguggguggacauuuggcgccggagcggccuugcagaucccuuucgcuaugcaaauggcauaccgguuuaauggcauaggggugacccagaacgugcucuaugagaaucagaaacugauugccaaccaguucaacuccgcuaucggaaagauucaagauucucuaagcuccacagccucagcacugggcaaacuccaggacgucguuaaucagaacgcgcaggcccugaauacucuugugaagcaauugagcaguaacuuuggugcuaucucuuccguacugaaugacauauuaagccgacucgauaagguggaagccgagguccagaucgacagacugauuaccgggaggcuucagucgcugcaaacguacgugacacagcaguugauccgcgcagcugagauucgggccucagcaaaccucgccgcuaccaaaaugucugaaugcguucugggacagaguaagagaguggauuucuguggcaaagguuaccaccuaauguccuuuccccaaagcgcgccacauggcgucguguuccugcacguuacuuaugugccggcccaggagaagaauuuuaccacagcuccugcaaucugccacgacgggaaagcccauuuccccagggaaggagucuuuguaucuaacggcacucacugguucgugacccagcgcaauuuuuacgagccacagauaauuacaacggauaacaccuucguuagcgggaauugugacguggucaucggaaucgugaacaauacuguauaugauccccuccaaccugagcuggacuccuucaaggaagaacuugauaaauacuuuaagaaccauacaucaccagacguggauuugggcgacauuagugguaucaaugccagcgucguuaacauucagaaggaaauagaucgacugaaugagguggcuaaaaacuuaaacgaaucucucaucgaccugcaggagcuugggaaguaugagcaguacauuaaauggcccugguauaucuggcugggauucauugcaggccuaaucgccauagugauggucaccaucaugcucugcuguaugacuuccugcuguucaugccugaaggguuguugcaguuguggcagcugcugcaaauuugacgaagaugacuccgaguuggugcugaaggggguuaaguuacacuacacaugaggacuaguuauaagacugacuagcccgaugggccucccaacgggcccuccuccccuccuugcaccgagauuaauaaaaaaaaaaaaaaaaaaaaaaaaaaaaaaaaaaaaaaaaaaaaaaaaaaaaaaaaaaaaaaaaugcaucccccccccccccccccccccccccccccccaaaggcucuuuucagagccaccagaauu

SEQ ID NO: 12964 - RNA, 4039 nt, Artificial Sequence
  SARS-CoV-2/Australia/NSW09/2020__EPI_ISL_413595 spike protein mRNA human (1-1273)
aggagaaagcuuaccauguucguguuucugguccuccuuccccugguuagcucccagugcgugaacuugaccacaagaacucaauuaccuccagccuacacuaauucuuucaccaggggcguauauuacccggacaagguguuucggucaaguguccugcacagcacacaggaucuauuccuccccuuuuucuccaacgugacuugguuucaugcuauccacguuucugggaccaauggaacaaaacgcuucgacaacccugugcugccauuuaaugauggugucuauuucgcaucgaccgagaagucaaacauuauacgaggcuggaucuuugggacuacacuugacagcaaaacccagagucuguugauugugaauaacgccacgaauguaguuaucaaggugugugaguuccaguuuugcaacgaucccuuccucggagucuacuaucauaaaaauaacaaguccuggauggagucugaguuccguguguacagcuccgcgaauaacuguacuuuugaauaugugucacaaccuuuccugauggaccuggaaggcaagcaggguaauuuuaaaaaccucagagaguucgucuuuaagaacauugauggguacuucaaaaucuacaguaagcacaccccaauaaauuuaguuagggaccugccccagggauuuagcgcucuugagccuuugguggaucugccaaucggcauuaacaucacacgguuccagacucuacucgcccugcaucgcucuuaucuuaccccgggcgacuccucaagcggguggacagcaggagccgcugcauacuauguagguuaccugcaacccagaaccuuuuugcucaaauauaaugaaaacggcacgauuacugaugccguggacugcgcucuggauccuuuaagugagacaaaguguacccugaagucuuucacugucgaaaaagggaucuaccagacauccaauuuuagggugcagccaaccgagagcauaguucgguuccccaacauuacgaaucucugcccuuuuggagagguguucaacgccacccgcuucgcgucggucuaugcauggaaucgaaagagaaucucuaacuguguggccgacuacuccguacuuuacaauucagcuaguuuuagcacauucaaaugcuauggcguuuccccaacuaagcugaacgacuuguguuuuaccaauguguacgccgauucuuucgucauuaggggugacgaagugcggcagaucgcacccgggcaaacaggaaaaaucgcugauuauaacuacaagcuaccggacgauuuuacuggcugcgucauugccuggaauagcaacaaccuggacucaaaagugggcgggaauuauaacuaccucuaucgucuguuccgcaagaguaaucuuaagccuuuugagagagauauauccaccgaaaucuaccaggcgggaagcacacccuguaacgguguugagggcuucaauugcuacuuuccacugcagucuuauggguuccaaccuaccaacggagugggcuaccagcccuauaggguagucguguugucauuugaacuccugcacgccccagcaacuguuugcggucccaaaaagaguacgaauuuagugaaaaacaagugugucaauuucaacuuuaaugggcugacaggcaccggagugcuaacugagagcaacaaaaaguuccucccuuuccagcaguuuggccgggacauugcugauaccacagacgccguacgagauccacaaacccuggagauccuugacauaacuccgugcuccuucgggggagugucuguuauuacacccgguacgaauaccucgaaccaggucgcuguguuguaccaggacgugaauuguacugaagucccuguugccauccacgcagaucagcugacaccaaccuggcgcguguauagcacaggcuccaacguguuucaaacuagagccgggugccucaucggagcugagcauguaaacaauucauacgaaugugacauucccaucggcgcggguauuugcgcaaguuaucagacccagacgaacucuccuaggcgggcccgcagcgucgcuucccagucaauaaucgccuacaccaugagccugggggcagaaaauucuguggccuacuccaacaauaguauugcuaucccaacaaacuucacuaucagcguuaccacagaaauucuucccgugucuaugacuaagaccuccgucgauuguacgauguauauaugcggcgacucaacagaguguaguaaucuguugcuccaauacggcagcuuuugcacccagcugaacagagccuuaacuggaaucgcaguggagcaggauaaaaauacacaggaaguuuucgcgcaagugaagcagauuuauaaaaccccgccuaucaaggacuuugggggauucaacuuuucgcagauucugccagaucccuccaaaccuucuaagaggagcuucaucgaggaccuacucuuuaauaagguaacucuggcugaugccgguuucauaaaacaauacggcgacugucuuggggauaucgcagcccgugacuugauuugcgcucagaaguucaacggacugaccguccuacccccacuguuaacagaugaaaugaucgcccaguauacgucagcacugcuugcuggcaccauuacgagugguuggacauuuggggccggcgcggccuugcagaucccuuucgcuaugcaaauggcauaccgguuuaauggaauaggcgugacccagaacgugcucuaugagaaucagaaacugauugccaaccaguucaacuccgcuaucgggaagauucaagacucucucagcuuuacagccuccgcacugggaaaacuccaggacgucguuaaucagaacgcgcaggcccugaauacucuugugaagcaauugucaagcaacuucggcgcuaucaguucuguacugaaugauauauuaucccgacucgacaagguggaagccgagguccagaucgauagacugauuaccgguaggcuucagagccugcaaacguacgugacacagcaguugauccgcgcagcugagauucgggccucggcaaaccucgccgcuaccaaaaugucagaaugcguucuggggcagucuaagagaguggacuuuuguggaaaaggcuaccaccuaaugaguuucccccaauccgcgccacauggugucguguuucugcacguuacuuaugugccggcccaggagaagaauuucaccacagcuccugcaaucugccacgauggcaaagcccauuuucccagggaaggggucuucguaagcaacggaacucacugguuugugacccagcgcaauuucuacgagccacagauaauuacaacggacaacaccuucguuucuggcaauugugauguggucaucgggaucgugaacaauacuguauaugacccccuccaaccugagcuggauagcuuuaaggaggaacuugacaaauacuucaagaaccauacauccccagauguggacuugggagauauuucaggcaucaaugccagugucguuaacauucagaaggaaauagaccgacugaaugagguggcuaaaaacuuaaacgaaagccucaucgaccugcaggagcuugguaaguaugagcaguacauuaaauggcccugguauaucuggcugggguuuauugcaggacuaaucgccauagugauggucaccaucaugcucugcuguaugacuucuugcuguuccugccugaagggcuguugcucaugugguaguugcugcaaauucgaugaagacgauagcgagccuguguugaagggcguuaagcugcacuacacaugaggacuaguuauaagacugacuagcccgaugggccucccaacgggcccuccuccccuccuugcaccgagauuaauaaaaaaaaaaaaaaaaaaaaaaaaaaaaaaaaaaaaaaaaaaaaaaaaaaaaaaaaaaaaaaaaugcaucccccccccccccccccccccccccccccccaaaggcucuuuucagagccaccagaauu

SEQ ID NO: 12965 - RNA, 4039 nt, Artificial Sequence
  SARS-CoV-2/Australia/NSW10/2020__EPI_ISL_413596 spike protein mRNA human (1-1273)
aggagaaagcuuaccauguucguguuucugguccuccuuccccugguuagcucccagugcgugaacuugaccacaagaacucaauuaccuccagccuacacuaauucuuucaccaggggcguauauuacccggacaagguguuucggucaaguguccugcacagcacacaggaucuauuccuccccuuuuucuccaacgugacuugguuucaugcuauccacguuucugggaccaauggaacaaaacgcuucgacaacccugugcugccauuuaaugauggugucuauuucgcaucgaccgagaagucaaacauuauacgaggcuggaucuuugggacuacacuugacagcaaaacccagagucuguugauugugaauaacgccacgaauguaguuaucaaggugugugaguuccaguuuugcaacgaucccuuccucggagucuacuaucauaaaaauaacaaguccuggauggagucugaguuccguguguacagcuccgcgaauaacuguacuuuugaauaugugucacaaccuuuccugauggaccuggaaggcaagcaggguaauuuuaaaaaccucagagaguucgucuuuaagaacauugauggguacuucaaaaucuacaguaagcacaccccaauaaauuuaguuagggaccugccccagggauuuagcgcucuugagccuuugguggaucugccaaucggcauuaacaucacacgguuccagacucuacucgcccugcaucgcucuuaucuuaccccgggcgacuccucaagcggguggacagcaggagccgcugcauacuauguagguuaccugcaacccagaaccuuuuugcucaaauauaaugaaaacggcacgauuacugaugccguggacugcgcucuggauccuuuaagugagacaaaguguacccugaagucuuucacugucgaaaaagggaucuaccagacauccaauuuuagggugcagccaaccgagagcauaguucgguuccccaacauuacgaaucucugcccuuuuggagagguguucaacgccacccgcuucgcgucggucuaugcauggaaucgaaagagaaucucuaacuguguggccgacuacuccguacuuuacaauucagcuaguuuuagcacauucaaaugcuauggcguuuccccaacuaagcugaacgacuuguguuuuaccaauguguacgccgauucuuucgucauuaggggugacgaagugcggcagaucgcacccgggcaaacaggaaaaaucgcugauuauaacuacaagcuaccggacgauuuuacuggcugcgucauugccuggaauagcaacaaccuggacucaaaagugggcgggaauuauaacuaccucuaucgucuguuccgcaagaguaaucuuaagccuuuugagagagauauauccaccgaaaucuaccaggcgggaagcacacccuguaacgguguugagggcuucaauugcuacuuuccacugcagucuuauggguuccaaccuaccaacggagugggcuaccagcccuauaggguagucguguugucauuugaacuccugcacgccccagcaacuguuugcggucccaaaaagaguacgaauuuagugaaaaacaagugugucaauuucaacuuuaaugggcugacaggcaccggagugcuaacugagagcaacaaaaaguuccucccuuuccagcaguuuggccgggacauugcugauaccacagacgccguacgagauccacaaacccuggagauccuugacauaacuccgugcuccuucgggggagugucuguuauuacacccgguacgaauaccucgaaccaggucgcuguguuguaccaggacgugaauuguacugaagucccuguugccauccacgcagaucagcugacaccaaccuggcgcguguauagcacaggcuccaacguguuucaaacuagagccgggugccucaucggagcugagcauguaaacaauucauacgaaugugacauucccaucggcgcggguauuugcgcaaguuaucagacccagacgaacucuccuaggcgggcccgcagcgucgcuucccagucaauaaucgccuacaccaugagccugggggcagaaaauucuguggccuacuccaacaauaguauugcuaucccaacaaacuucacuaucagcguuaccacagaaauucuucccgugucuaugacuaagaccuccgucgauuguacgauguauauaugcggcgacucaacagaguguaguaaucuguugcuccaauacggcagcuuuugcacccagcugaacagagccuuaacuggaaucgcaguggagcaggauaaaaauacacaggaaguuuucgcgcaagugaagcagauuuauaaaaccccgccuaucaaggacuuugggggauucaacuuuucgcagauucugccagaucccuccaaaccuucuaagaggagcuucaucgaggaccuacucuuuaauaagguaacucuggcugaugccgguuucauaaaacaauacggcgacugucuuggggauaucgcagcccgugacuugauuugcgcucagaaguucaacggacugaccguccugcccccacucuuaacagaugaaaugaucgcccaguauacgucagcacugcuugcuggcaccauuacgagugguuggacauuuggggccggcgcggccuugcagaucccuuucgcuaugcaaauggcauaccgguuuaauggaauaggcgugacccagaacgugcucuaugagaaucagaaacugauugccaaccaguucaacuccgcuaucgggaagauucaagacucucuaagcuccacagccucagcacugggaaaacuccaggacgucguuaaucagaacgcgcaggcccugaauacucuugugaagcaauugagcaguaacuuuggcgcuaucucuuccguacugaaugauauauuaagccgacucgacaagguggaagccgagguccagaucgauagacugauuaccgguaggcuucagucgcugcaaacguacgugacacagcaguugauccgcgcagcugagauucgggccucagcaaaccucgccgcuaccaaaaugucugaaugcguucuggggcagaguaagagaguggacuucuguggaaaaggcuaccaccuaauguccuuuccccaaagcgcgccacauggugucguguuccugcacguuacuuaugugccggcccaggagaagaauuuuaccacagcuccugcaaucugccacgauggcaaagcccauuuccccagggaaggggucuuuguaucuaacggaacucacugguucgugacccagcgcaauuuuuacgagccacagauaauuacaacggacaacaccuucguuagcggcaauugugauguggucaucgggaucgugaacaauacuguauaugacccccuccaaccugagcuggauuccuucaaggaggaacuugacaaauacuuuaagaaccauacaucaccagauguggacuugggagauauuaguggcaucaaugccagcgucguuaacauucagaaggaaauagaccgacugaaugagguggcuaaaaacuuaaacgaaucucucaucgaccugcaggagcuugguaaguaugagcaguacauuaaauggcccugguauaucuggcugggguucauugcaggacuaaucgccauagugauggucaccaucaugcucugcuguaugacuuccugcuguucaugccugaagggcuguugcaguugugguagcugcuuuaaauucgaugaagacgauuccgagccuguguugaagggcguuaagcugcacuacacaugaggacuaguuauaagacugacuagcccgaugggccucccaacgggcccuccuccccuccuugcaccgagauuaauaaaaaaaaaaaaaaaaaaaaaaaaaaaaaaaaaaaaaaaaaaaaaaaaaaaaaaaaaaaaaaaaugcaucccccccccccccccccccccccccccccccaaaggcucuuuucagagccaccagaauu

SEQ ID NO: 12966 - RNA, 4039 nt, Artificial Sequence
  SARS-CoV-2/Switzerland/1000477797/2020__EPI_ISL_413023 spike protein mRNA human (1-1273)
aggagaaagcuuaccauguucguguuucugguccuccuuccccugguuagcucccagugcgugaacuugaccacaagaacucaauuaccuccagccuacacuaauucuuucaccaggggcguauauuacccggacaagguguuucggucaaguguccugcacagcacacaggaucuauuccuccccuuuuucuccaacgugacuugguuucaugcuauccacguuucugggaccaauggaacaaaacgcuucgacaacccugugcugccauuuaaugauggugucuauuucgcaucgaccgagaagucaaacauuauacgaggcuggaucuuugggacuacacuugacagcaaaacccagagucuguugauugugaauaacgccacgaauguaguuaucaaggugugugaguuccaguuuugcaacgaucccuuccucggagucuacuaucauaaaaauaacaaguccuggauggagucugaguuccguguguacagcuccgcgaauaacuguacuuuugaauaugugucacaaccuuuccugauggaccuggaaggcaagcaggguaauuuuaaaaaccucagagaguucgucuuuaagaacauugauggguacuucaauaucuacaguaaacacaccccaauaaacuuaguuagggaccugccccagggauuuagcgcucuugagccuuugguggaucugccaaucggcauuaauaucacacgguuccagacucuacucgcccugcaucgcucuuaucuuaccccgggcgacuccucaagcggguggacagcaggagccgcugcauacuauguagguuaccugcaacccagaaccuuuuugcucaaguauaacgaaaauggcacgauuacugaugccguggacugcgcucuggauccuuuaagugagacaaaauguacccugaagucuuucacugucgaaaaggggaucuaccagacauccaacuuuagggugcagccaaccgagagcauaguucgguuccccaauauuacgaaccucugcccuuuuggagagguguucaaugccacccgcuucgcgucggucuaugcauggaaccgaaaaagaaucucuaauuguguggccgacuacuccguacuuuacaacucagcuaguuuuagcacauucaagugcuauggcguuuccccaacuaaacugaaugacuuguguuuuaccaacguguacgccgauucuuucgucauuaggggugacgaagugcggcagaucgcacccgggcaaacaggaaagaucgcugauuauaauuacaaacuaccggacgauuuuacuggcugcgucauugccuggaacagcaacaaucuggacucaaaggugggcgggaacuauaauuaccucuaucgucuguuccgcaaaaguaaccuuaagccuuuugagagagauauauccaccgaaaucuaccaggcgggaagcacacccuguaaugguguugagggcuucaacugcuacuuuccacugcagucuuauggguuccaaccuaccaauggagugggcuaccagcccuauaggguagucguguugucauuugaacuccugcacgccccagcaacuguuugcggucccaagaaaaguacgaacuuagugaagaauaaaugugucaacuucaauuuuaacgggcugacaggcaccggagugcuaacugagagcaauaagaaauuccucccuuuccagcaguuuggccgggacauugcugauaccacagacgccguacgagauccacaaacccuggagauccuugacauaacuccgugcuccuucgggggagugucuguuauuacacccgguacgaacaccucgaaucaggucgcuguguuguaccagggcgugaacuguacugaagucccuguugccauccacgcagaccagcugacaccaaccuggcgcguguauagcacaggguccaacguguuucaaacuagagccggaugccucaucggcgcugagcauguaaauaacucauacgaaugugauauucccaucggugcggggauuugcgcaaguuaucagacccagaccaauucuccuaggcgggcccgcagcgucgcuucccagucaauaaucgccuacacgaugagccugggcgcagagaacucuguggccuacuccaauaacaguauugcuaucccaacaaauuucacuaucagcguuaccacagaaauucuucccgugucuaugacuaagaccuccgucgacuguacgauguauauaugcggagauucaacagaguguaguaaccuguugcuccaauacggcagcuuuugcacccagcugaauagagccuuaacugggaucgcaguggagcaggacaagaacacacaggaaguuuucgcgcaagugaaacagauuuauaagaccccgccuaucaaagauuuuggagguuucaauuuuucgcagauucugccagaccccuccaagccuucuaaaaggagcuucaucgaggaucuacucuuuaacaagguaacucuggcugacgccggcuucauaaagcaauacggggauugucuuggagacaucgcagcccgugauuugauuugcgcucagaaauucaauggccugaccguccugcccccacucuuaacagacgaaaugaucgcccaguauacgucagcacugcuugcugguaccauuacgaguggguggacauuuggcgccggagcggccuugcagaucccuuucgcuaugcaaauggcauaccgguuuaacggcauaggggugacccagaaugugcucuaugagaaccagaagcugauugccaaccaguucaauuccgcuaucggaaaaauucaagauucucuaagcuccacagccucagcacugggcaagcuccaggacgucguuaaccagaaugcgcaggcccugaacacucuugugaaacaauugagcaguaauuuuggugcuaucucuuccguacugaacgacauauuaagccgacucgauaagguggaagccgagguccagaucgacagacugauuaccgggaggcuucagucgcugcaaacguacgugacacagcaguugauccgcgcagcugagauucgggccucagcaaaucucgccgcuaccaagaugucugaaugcguucugggacagaguaaaagaguggauuucuguggcaaggguuaccaccuaauguccuuuccccaaagcgcgccacauggcgucguguuccugcacguuacuuaugugccggcccaggagaaaaacuuuaccacagcuccugcaaucugccacgacgggaaggcccauuuccccagggaaggagucuuuguaucuaauggcacucacugguucgugacccagcgcaacuuuuacgagccacagauaauuacaacggauaauaccuucguuagcgggaacugugacguggucaucggaaucgugaauaacacuguauaugauccccuccaaccugagcuggacuccuucaaagaagaacuugauaaguacuuuaaaaaucauacaucaccagacguggauuugggcgacauuagugguaucaacgccagcgucguuaauauucagaaggaaauagaucgacugaacgagguggcuaagaacuuaaaugaaucucucaucgaccugcaggagcuugggaaauaugagcaguacauuaaguggcccugguauaucuggcugggauucauugcaggccuaaucgccauagugauggucaccaucaugcucugcuguaugacuuccugcuguucaugccugaaagguuguugcaguuguggcagcugcugcaaguuugacgaagaugacuccgagccuguguugaaagggguuaagcugcacuacacaugaggacuaguuauaagacugacuagcccgaugggccucccaacgggcccuccuccccuccuugcaccgagauuaauaaaaaaaaaaaaaaaaaaaaaaaaaaaaaaaaaaaaaaaaaaaaaaaaaaaaaaaaaaaaaaaaugcaucccccccccccccccccccccccccccccccaaaggcucuuuucagagccaccagaauu

SEQ ID NO: 12967 - RNA, 4039 nt, Artificial Sequence
  SARS-CoV-2/Belgium/BA-02291/2020__EPI_ISL_415159 spike protein mRNA human (1-1273)
aggagaaagcuuaccauguucguguuucugguccuccuuccccugguuagcucccagugcgugaacuugaccacaagaacucaauuaccuccagccuacacuaauucuuucaccaggggcguauauuacccggacaagguguuucggucaaguguccugcacagcacacaggaucuauuccuccccuuuuucuccaacgugacuugguuucaugcuauccacguuucugggaccaauggaacaaaacgcuucgacaacccugugcugccauuuaaugauggugucuauuucgcaucgaccgagaagucaaacauuauacgaggcuggaucuuugggacuacacuugacagcaaaacccagagucuguugauugugaauaacgccacgaauguaguuaucaaggugugugaguuccaguuuugcaacgaucccuuccucggagucuacuaucauaaaaauaacaaguccuggauggagucugaguuccguguguacagcuccgcgaauaacuguacuuuugaguaugugucacaaccuuuccugauggaccuggaaggcaagcaggguaauuuuaaaaaccucagagaguucgucuuuaagaacauugauggguacuucaaaaucuacaguaagcacaccccaauaaauuuaguuagggaccugccccagggauuuagcgcucuugagccuuugguggaucugccaaucggcauuaacaucacacgguuccagacucuacucgcccugcaucgcucuuaucuuaccccgggcgacuccucaagcggguggacagcaggagccgcugcauacuauguagguuaccugcaacccagaaccuuuuugcucaaauauaaugaaaacggcacgauuacugaugccguggacugcgcucuggauccuuuaagugagacaaaguguacccugaagucuuucacugucgaaaaagggaucuaccagacauccaauuuuagggugcagccaaccgagagcauaguucgguuccccaacauuacgaaucucugcccuuuuggagagguguucaacgccacccgcuucgcgucggucuaugcauggaaucgaaagagaaucucuaacuguguggccgacuacuccguacuuuacaauucagcuaguuuuagcacauucaaaugcuauggcguuuccccaacuaagcugaacgacuuguguuuuaccaauguguacgccgauucuuucgucauuaggggugacgaagugcggcagaucgcacccgggcaaacaggaaaaaucgcugauuauaacuacaagcuaccggacgauuuuacuggcugcgucauugccuggaauagcaacaaccuggacucaaaagugggcgggaauuauaacuaccucuaucgucuguuccgcagaaguaaucuuaagccuuuugagagggauauauccaccgaaaucuaccaggcgggaagcacacccuguaacgguguugagggcuucaauugcuacuuuccacugcagucuuauggguuccaaccuaccaacggagugggcuaccagcccuaucggguagucguguugucauuugaacuccugccagcccccgcaacuguuugcgguccuaagaaaaguacgaauuuagugaagaacaaaugugucaauuucaacuuuaaugggcugacaggcaccggagugcuaacugagagcaacaagaaauuccucccauuccagcaguuuggccgagacauugcugauaccacagacgccguacgcgauccgcaaacccuggagauccuugacauaacucccugcuccuucgggggagugucuguuauuacaccugguacgaauaccucgaaccaggucgcuguguuguaccagggcgugaauuguacugaagucccaguugccauccacgcagaccagcugacacccaccuggagaguguauagcacaggguccaacguguuucaaacuagggccggaugccucaucggcgcugagcacguaaacaauucauacgaaugugauauuccuaucggugcggggauuugcgcaaguuaucagacccagacgaacucuccacggcgcgccagaagcgucgcuucccagucaauaaucgccuacaccaugagccugggcgcagaaaauucuguggccuacuccaacaauaguauugcuauccccacaaacuucacuaucagcguuaccacagaaauucuuccggugucuaugacuaagaccuccgucgacuguacgauguauauaugcggagauucaacagaguguaguaaucuguugcuccaauacggcagcuuuugcacccagcugaacagggccuuaacugggaucgcaguggagcaggacaagaauacacaggaaguuuucgcgcaagugaaacagauuuauaagaccccuccaaucaaagauuuuggagguuucaacuuuucgcagauucugcccgacccuuccaagcccucuaaacguagcuucaucgaggaucuacucuuuaauaagguaacucuggcugacgccggcuucauaaagcaauacggggauugucuuggagacaucgcagcccgggauuugauuugcgcucagaaauucaacggccugaccguccucccaccucuguuaacagacgaaaugaucgcccaguauacgucagcacugcuugcugguaccauuacgaguggguggacauuuggcgccggagcggccuugcagauccccuucgcuaugcaaauggcauaccgauuuaauggcauaggggugacccagaacgugcucuaugagaaucagaagcugauugccaaccaguucaacuccgcuaucggaaaaauucaagauucucuaagcuccgccgcaccagcgcugggcaagcuccaggacgucguuaaucagaacgcccaggcucugaauacacuugugaaacaauugucaagcaacuuuggugccaucaguucuguacugaaugacauauuauccagacucgauaagguggaagcagagguccagaucgacaggcugauuacugggcgccuucagagccugcaaaccuacgugacgcagcaguugauccgggcugccgagauuagagcaucggccaaccucgcugcgacaaagaugucagaaugcguucugggacagucuaaaaggguggauuucuguggcaaggguuaccaucuaaugaguuuuccgcaauccgccccucacggcgucguguuccugcauguuaccuaugugcccgcacaggagaaaaauuuuacuaccgcuccagccaucugccacgacgggaaggcccacuucccccgcgaaggagucuuuguaagcaacggcacacauugguucgugacucagcgaaauuuuuacgagccucagauaauuaccacagauaacacguucguuucugggaauugugacguggucaucggaaucgugaacaauaccguauaugauccacuccaacccgagcuggacagcuucaaagaagaacuugauaaguacuuuaaaaaccacacuuccccugacguggauuugggcgacauuucagguaucaaugcuagugucguuaacauucagaaggaaauagaucggcugaaugagguggcaaagaacuuaaacgaaagccucaucgaccugcaggagcuugggaaauaugagcaguacauuaaguggccgugguauaucuggcugggauucauugccggccuaaucgcgauagugauggucacaaucaugcucugcuguaugaccucuugcuguuccugccugaaagguuguugcucauguggcaguugcugcaaguuugacgaagaugacagcgagccaguguugaaagggguuaagcugcauuacacuugaggacuaguuauaagacugacuagcccgaugggccucccaacgggcccuccuccccuccuugcaccgagauuaauaaaaaaaaaaaaaaaaaaaaaaaaaaaaaaaaaaaaaaaaaaaaaaaaaaaaaaaaaaaaaaaaugcaucccccccccccccccccccccccccccccccaaaggcucuuuucagagccaccagaauu

SEQ ID NO: 12968 - RNA, 4039 nt, Artificial Sequence
  SARS-CoV-2/USA/WA8-UW5/2020__EPI_ISL_413486 spike protein mRNA human (1-1273)
aggagaaagcuuaccauguucguguuucugguccuccuuccccugguuagcucccagugcgugaacuugaccacaagaacucaauuaccuccagccuacacuaauucuuucaccaggggcguauauuacccggacaagguguuucggucaaguguccugcacagcacacaggaucuauuccuccccuuuuucuccaacgugacuugguuucaugcuauccacguuucugggaccaauggaacaaaacgcuucgacaacccugugcugccauuuaaugauggugucuauuucgcaucgaccgagaagucaaacauuauacgaggcuggaucuuugggacuacacuugacagcaaaacccagagucuguugauugugaauaacgccacgaauguaguuaucaaggugugugaguuccaguuuugcaacgaucccuuccucggagucuacuaucauaaaaauaacaaguccuggauggagucugaguuccguguguacagcuccgcgaauaacuguacuuuugaauaugugucacaaccuuuccugauggaccuggaaggcaagcaggguaauuuuaaaaaccucagagaguucgucuuuaagaacauugauggguacuucaaaaucuacaguaagcacaccccaauaaauuuaguuagggaccugccccagggauuuagcgcucuugagccuuugguggaucugccaaucggcauuaacaucacacgguuccagacucuacucgcccugcaucgcucuuaucuuaccccgggcgacuccucaagcggguggacagcaggagccgcugcauacuauguagguuaccugcaacccagaaccuuuuugcucaaauauaaugaaaacggcacgauuacugaugccguggacugcgcucuggauccuuuaagugagacaaaguguacccugaagucuuucacugucgaaaaagggaucuaccagacauccaauuuuagggugcagccaaccgagagcauaguucgguuccccaacauuacgaaucucugcccuuuuggagagguguucaacgccacccgcuucgcgucggucuaugcauggaaucgaaagagaaucucuaacuguguggccgacuacuccguacuuuacaauucagcuaguuuuagcacauucaaaugcuauggcguuuccccaacuaagcugaacgacuuguguuuuaccaauguguacgccgauucuuucgucauuaggggugacgaagugcggcagaucgcacccgggcaaacaggaaaaaucgcugauuauaacuacaagcuaccggacgauuuuacuggcugcgucauugccuggaauagcaacaaccuggacucaaaagugggcgggaauuauaacuaccucuaucgucuguuccgcaagaguaaucuuaagccuuuugagagagauauauccaccgaaaucuaccaggcgggaagcacacccuguaacgguguugagggcuucaauugcuacuuuccacugcagucuuauggguuccaaccuaccaacggagugggcuaccagcccuauaggguagucguguugucauuugaacuccugcacgccccagcaacuguuugcggucccaaaaagaguacgaauuuagugaaaaacaagugugucaauuucaacuuuaaugggcugacaggcaccggagugcuaacugagagcaacaaaaaguuccucccuuuccagcaguuuggccgggacauugcugauaccacagacgccguacgagauccacaaacccuggagauccuugacauaacuccgugcuccuucgggggagugucuguuauuacacccgguacgaauaccucgaaccaggucgcuguguuguaccaggacgugaauuguacugaagucccuguugccauccacgcagaucagcugacaccaaccuggcgcguguauagcacaggcuccaacguguuucaaacuagagccgggugccucaucggagcugaguacguaaacaauucauaugaaugugacauucccaucggcgcggguauuugcgcaaguuaccagacccagacgaacucuccuaggcgggcccgcagcgucgcuucccagucaauaaucgccuacaccaugagccugggggcagaaaauucuguggccuauuccaacaauaguauugcuaucccaacaaacuucacuaucagcguuaccacagaaauucuucccgugucuaugacuaagaccuccgucgauuguacgauguacauaugcggcgacucaacagaguguaguaaucuguugcuccaauauggcagcuuuugcacccagcugaacagagccuuaacuggaaucgcaguggagcaggauaaaaauacacaggaaguuuucgcgcaagugaagcagauuuacaaaaccccgccuaucaaggacuuugggggauucaacuuuucgcagauucugccagaucccuccaaaccuucuaagaggagcuucaucgaggaccuacucuuuaauaagguaacucuggcugaugccgguuucauaaaacaauauggcgacugucuuggggauaucgcagcccgugacuugauuugcgcucagaaguucaacggacugaccguccugcccccacucuuaacagaugaaaugaucgcccaguacacgucagcacugcuugcuggcaccauuacgagugguuggacauuuggggccggcgcggccuugcagaucccuuucgcuaugcaaauggcauaucgguuuaauggaauaggcgugacccagaacgugcucuacgagaaucagaaacugauugccaaccaguucaacuccgcuaucgggaagauucaagacucucuaagcuccacagccucagcacugggaaaacuccaggacgucguuaaucagaacgcgcaggcccugaauacucuugugaagcaauugagcaguaacuuuggcgcuaucucuuccguacugaaugauauauuaagccgacucgacaagguggaagccgagguccagaucgauagacugauuaccgguaggcuucagucgcugcaaacguacgugacacagcaguugauccgcgcagcugagauucgggccucagcaaaccucgccgcuaccaaaaugucugaaugcguucuggggcagaguaagagaguggacuucuguggaaaaggcuaucaucuaauguccuuuccccaaagcgcgccacacggugucguguuccugcauguuacuuacgugccggcccaggagaagaauuuuaccacagcuccugcaaucugccacgauggcaaagcccacuuccccagggaaggggucuuuguaucuaacggaacucauugguucgugacccagcgcaauuuuuaugagccacagauaauuacaacggacaacaccuucguuagcggcaauugugauguggucaucgggaucgugaacaauacuguauacgacccccuccaaccugagcuggauuccuucaaggaggaacuugacaaauauuuuaagaaccacacaucaccagauguggacuugggagauauuaguggcaucaaugccagcgucguuaacauucagaaggaaauagaccgacugaaugagguggcuaaaaacuuaaacgaaucucucaucgaccugcaggagcuugguaaguacgagcaguauauuaaauggcccugguacaucuggcugggguucauugcaggacuaaucgccauagugauggucaccaucaugcucugcuguaugacuuccugcuguucaugccugaagggcuguugcaguugugguagcugcugcaaauuugaugaagacgauuccgagccuguguugaagggcguuaagcugcauuacacaugaggacuaguuauaagacugacuagcccgaugggccucccaacgggcccuccuccccuccuugcaccgagauuaauaaaaaaaaaaaaaaaaaaaaaaaaaaaaaaaaaaaaaaaaaaaaaaaaaaaaaaaaaaaaaaaaugcaucccccccccccccccccccccccccccccccaaaggcucuuuucagagccaccagaauu

SEQ ID NO: 12969 - RNA, 4039 nt, Artificial Sequence
  SARS-CoV-2/England/20102000506/2020__EPI_ISL_415147 spike protein mRNA human (1-1273)
aggagaaagcuuaccauguucguguuucugguccuccuuccccugguuagcucccagugcgugaacuugaccacaagaacucaauuaccuccagccuacacuaauucuuucaccaggggcguauauuacccggacaagguguuucggucaaguguccugcacagcacacaggaucuauuccuccccuuuuucuccaacgugacuugguuucaugcuauccacguuucugggaccaauggaacaaaacgcuucgacaacccugugcugccauuuaaugauggugucuauuucgcaucgaccgagaagucaaacauuauacgaggcuggaucuuugggacuacacuugacagcaaaacccagagucuguugauugugaauaacgccacgaauguaguuaucaaggugugugaguuccaguuuugcaacgaucccuuccucggagucuacuaucauaaaaauaacaaguccuggauggagucugaguuccguguguacagcuccgcgaauaacuguacuuuugaguaugugucacaaccuuuccugauggaccuggaaggcaagcaggguaauuuuaaaaaccucagagaguucgucuuuaagaacauugauggguacuucaaaaucuacaguaagcacaccccaauaaauuuaguuagggaccugccccagggauuuagcgcucuugagccuuugguggaucugccaaucggcauuaacaucacacgguuccagacucuacucgcccugcaucgcucuuaucuuaccccgggcgacuccucaagcggguggacagcaggagccgcugcauacuauguagguuaccugcaacccagaaccuuuuugcucaaauauaaugaaaacggcacgauuacugaugccguggacugcgcucuggauccuuuaagugagacaaaguguacccugaagucuuucacugucgaaaaagggaucuaccagacauccaauuuuagggugcagccaaccgagagcauaguucgguuccccaacauuacgaaucucugcccuuuuggagagguguucaacgccacccgcuucgcgucggucuaugcauggaaucgaaagagaaucucuaacuguguggccgacuacuccguacuuuacaauucagcuaguuuuagcacauucaaaugcuauggcguuuccccaacuaagcugaacgacuuguguuuuaccaauguguacgccgauucuuucgucauuaggggugacgaagugcggcagaucgcacccgggcaaacaggaaaaaucgcugauuauaacuacaagcuaccggacgauuuuacuggcugcgucauugccuggaauagcaacaaccuggacucaaaagugggcgggaauuauaacuaccucuaucgucuguuccgcaagaguaaucuuaagccuuuugagagagauauauccaccgaaaucuaccaggcgggaagcacacccuguaacgguguugagggcuucaauugcuacuuuccacugcagucuuauggguuccaaccuaccaacggagugggcuaccagcccuauaggguagucguguugucauuugaacuccugcacgccccagcaacuguuugcggucccaaaaagaguacgaauuuagugaaaaacaagugugucaauuucaacuuuaaugggcugacaggcaccggagugcuaacugagagcaacaaaaaguuccucccuuuccagcaguuuggccgggacauugcugauaccacagacgccguacgagauccacaaacccuggagauccuugacauaacuccgugcuccuucgggggagugucuguuauuacacccgguacgaauaccucgaaccaggucgcuguguuguaccagggcgugaauuguacugaagucccuguugccauccacgcagaccagcugacaccaaccuggcgcguguauagcacaggguccaacguguuucaaacuagagccggaugccucaucggcgcugagcauguaaacaauucauacgaaugugauauucccaucggugcggggauuugcgcaaguuaucagacccagacgaacucuccuaggcgggcccgcagcgucgcuucccagucaauaaucgccuacaccaugagccugggcgcagaaaauucuguggccuacuccaacaauaguauugcuaucccaacaaacuucacuaucagcguuaccacagaaauucuucccgugucuaugacuaagaccuccgucgacuguacgauguauauaugcggagauucaacagaguguaguaaucuguugcuccaauacggcagcuuuugcacccagcugaacagagccuuaacugggaucgcaguggagcaggacaaaaauacacaggaaguuuucgcgcaagugaagcagauuuauaaaaccccgccuaucaaggauuuuggagguuucaacuuuucgcagauucugccagaccccuccaaaccuucuaagaggagcuucaucgaggaucuacucuuuaauaagguaacucuggcugacgccggcuucauaaaacaauacggguauugucuuggagauaucgcagcccgugacuugauuugcgcucagaaguucaacggccugaccguccugcccccacucuuaacagaugaaaugaucgcccaguacacgucagcacugcuugcugguaccauuacgaguggguggacauuuggcgccggagcggccuugcagaucccuuucgcuaugcaaauggcauaucgguuuaauggcauaggggugacccagaacgugcucuacgagaaucagaaacugauugccaaccaguucaacuccgcuaucggaaagauucaagacucucuaagcuccacagccucagcacugggcaaacuccaggaugucguuaaucagaacgcgcaggcccugaauacucuugugaagcaauugagcaguaacuuuggugcuaucucuuccguacugaaugacauauuaagccgacucgacaagguggaagccgagguccagaucgauagacugauuaccgggaggcuucagucgcugcaaacguacgugacacagcaguugauccgcgcagcugagauucgggccucagcaaaccucgccgcuaccaaaaugucugaaugcguucugggacagaguaagagaguggacuucuguggcaaagguuaucaccuaauguccuuuccccaaagcgcgccacauggcgucguguuccugcacguuacuuacgugccggcccaggagaagaauuuuaccacagcuccugcaaucugccacgaugggaaagcccauuuccccagggaaggagucuuuguaucuaacggcacucacugguucgugacccagcgcaauuuuuaugagccacagauaauuacaacggacaacaccuucguuagcgggaauugugauguggucaucggaaucgugaacaauacuguauacgacccccuccaaccugagcuggauuccuucaaggaagaacuugacaaauauuuuaagaaccauacaucaccagauguggacuugggcgauauuagugguaucaaugccagcgucguuaacauucagaaggaaauagaccgacugaaugagguggcuaaaaacuuaaacgaaucucucaucgaucugcaggagcuugggaaguacgagcaguauauuaaauggcccugguacaucuggcugggauucauugcaggccuaaucgccauagugauggucaccaucaugcucugcuguaugacuuccugcuguucaugccugaaggguuguugcaguuguggcagcugcugcaaauuugacgaagacgauuccgagccuguguugaaggggguuaagcugcacuacacaugaggacuaguuauaagacugacuagcccgaugggccucccaacgggcccuccuccccuccuugcaccgagauuaauaaaaaaaaaaaaaaaaaaaaaaaaaaaaaaaaaaaaaaaaaaaaaaaaaaaaaaaaaaaaaaaaugcaucccccccccccccccccccccccccccccccaaaggcucuuuucagagccaccagaauu

SEQ ID NO: 12970 - RNA, 4039 nt, Artificial Sequence
  SARS-CoV-2/Belgium/VAG-03013/2020__EPI_ISL_415155 spike protein mRNA human (1-1273)
aggagaaagcuuaccauguucguguuucugguccuccuuccccugguuagcucccagugcgugaacuugaccacaagaacucaauuaccuccagccuacacuaauucuuucaccaggggcguauauuacccggacaagguguuucggucaaguguccugcacagcacacaggaucuauuccuccccuuuuucuccaacgugacuugguuucaugcuauccacguuucugggaccaauggaacaaaacgcuucgacaacccugugcugccauuuaaugauggugucuauuucgcaucgaccgagaagucaaacauuauacgaggcuggaucuuugggacuacacuugacagcaaaacccagagucuguugauugugaauaacgccacgaauguaguuaucaaggugugugaguuccaguuuugcaacgaucccuuccucggagucuacuaucauaaaaauaacaaguccuggauggagucugaguuccguguguacagcuccgcgaauaacuguacuuuugaguaugugucacaaccuuuccugauggaccuggaaggcaagcaggguaauuuuaaaaaccucagagaguucgucuuuaagaacauugauggguacuucaaaaucuacaguaagcacaccccaauaaauuuaguuagggaccugccccagggauuuagcgcucuugagccuuugguggaucugccaaucggcauuaacaucacacgguuccagacucuacucgcccugcaucgcucuuaucuuaccccgggcgacuccucaagcggguggacagcaggagccgcugcauacuauguagguuaccugcaacccagaaccuuuuugcucaaauauaaugaaaacggcacgauuacugaugccguggacugcgcucuggauccuuuaagugagacaaaguguacccugaagucuuucacugucgaaaaagggaucuaccagacauccaauuuuagggugcagccaaccgagagcauaguucgguuccccaacauuacgaaucucugcccuuuuggagagguguucaacgccacccgcuucgcgucggucuaugcauggaaucgaaagagaaucucuaacuguguggccgacuacuccguacuuuacaauucagcuaguuuuagcacauucaaaugcuauggcguuuccccaacuaagcugaacgacuuguguuuuaccaauguguacgccgauucuuucgucauuaggggugacgaagugcggcagaucgcacccgggcaaacaggaaaaaucgcugauuauaacuacaagcuaccggacgauuuuacuggcugcgucauugccuggaauagcaacaaccuggacucaaaagugggcgggaauuauaacuaccucuaucgucuguuccgcaagaguaaucuuaagccuuuugagagagauauauccaccgaaaucuaccaggcgggaagcacacccuguaacgguguugagggcuucaauugcuacuuuccacugcagucuuauggguuccaaccuaccaacggagugggcuaccagcccuauaggguagucguguugucauuugaacuccugcacgccccagcaacuguuugcggucccaaaaagaguacgaauuuagugaaaaacaagugugucaauuucaacuuuaaugggcugacaggcaccggagugcuaacugagagcaacaaaaaguuccucccuuuccagcaguuuggccgggacauugcugauaccacagacgccguacgagauccacaaacccuggagauccuugacauaacuccgugcuccuucgggggagugucuguuauuacacccgguacgaauaccucgaaccaggucgcuguguuguaccagggcgugaauuguacugaagucccuguugccauccacgcagaccagcugacaccaaccuggcgcguguauagcacaggguccaacguguuucaaacuagagccggaugccucaucggcgcugagcauguaaacaauucauacgaaugugauauucccaucggugcggggauuugcgcaaguuaucagacccagacgaacucuccuaggcgggcccgcagcgucgcuucccagucaauaaucgccuacaccaugagccugggcgcagaaaauucuguggccuacuccaacaauaguauugcuaucccaacaaacuucacuaucagcguuaccacagaaauucuucccgugucuaugacuaagaccuccgucgacuguacgauguauauaugcggagauucaacagaguguaguaaucuguugcuccaauacggcagcuuuugcacccagcugaacagagccuuaacugggaucgcaguggagcaggacaaaaauacacaggaaguuuucgcgcaagugaagcagauuuauaaaaccccgccuaucaaggauuuuggagguuucaacuuuucgcagauucugccagaccccuccaaaccuucuaagaggagcuucaucgaggaucuacucuuuaauaagguaacucuggcugacgccggcuucauaaaacaauacggggauugucuuggagacaucgcagcccgugauuugauuugcgcucagaaguucaacggccugaccguccugcccccacucuuaacagacgaaaugaucgcccaguauacgucagcacugcuugcugguaccauuacgaguggguggacauuuggcgccggagcggccuugcagaucccuuucgcuaugcaaauggcauaccgguuuaauggcauaggggugacccagaacgugcucuaugagaaucagaaacugauugccaaccaguucaacuccgcuaucggaaagauucaagauucucuaagcuccacagccacugcacugggcaaacuccaggacgucguuaaucagaacgcgcaggcccugaauacccuugugaagcaauugucaagcaacuuuggugcuaucaguucuguacugaaugacauauuaucccgacucgauaagguggaagccgagguccagaucgacagacugauuacggggaggcuucagagccugcaaacauacgugacccagcaguugauccgcgcagcugagauucgggccucggcaaaccucgccgcuacuaaaaugucagaaugcguucugggacagucuaagagaguggauuucuguggcaaagguuaccaccuaaugaguuuuccccaauccgcgccacauggcgucguguuccugcacguuaccuaugugccggcccaggagaagaauuuuacaacugcuccugcaaucugccacgacgggaaagcccauuuccccagggaaggagucuuuguaagcaacggcacccacugguucgugacacagcgcaauuuuuacgagccacagauaauuacgaccgauaacacuuucguuucugggaauugugacguggucaucggaaucgugaacaauacaguauaugauccccuccaaccugagcuggacagcuucaaggaagaacuugauaaauacuuuaagaaccauaccuccccagacguggauuugggcgacauuucagguaucaaugccagugucguuaacauucagaaggaaauagaucgacugaaugagguggcuaaaaacuuaaacgaaagccucaucgaccugcaggagcuugggaaguaugagcaguacauuaaauggcccugguauaucuggcugggauucauugcaggccuaaucgccauagugauggucacuaucaugcucugcuguaugacaucuugcuguuccugccugaaggguuguugcucauguggcaguugcugcaaauuugacgaagaugacagcgagccuguguugaaggggguuaagcugcacuacaccugaggacuaguuauaagacugacuagcccgaugggccucccaacgggcccuccuccccuccuugcaccgagauuaauaaaaaaaaaaaaaaaaaaaaaaaaaaaaaaaaaaaaaaaaaaaaaaaaaaaaaaaaaaaaaaaaugcaucccccccccccccccccccccccccccccccaaaggcucuuuucagagccaccagaauu

SEQ ID NO: 12971 - RNA, 4039 nt, Artificial Sequence
  SARS-CoV-2/Belgium/BC-03016/2020__EPI_ISL_415157 spike protein mRNA human (1-1273)
aggagaaagcuuaccauguucguguuucugguccuccuuccccugguuagcucccagugcgugaacuugaccacaagaacucaauuaccuccagccuacacuaauucuuucaccaggggcguauauuacccggacaagguguuucggucaaguguccugcacagcacacaggaucuauuccuccccuuuuucuccaacgugacuugguuucaugcuauccacguuucugggaccaauggaacaaaacgcuucgacaacccugugcugccauuuaaugauggugucuauuucgcaucgaccgagaagucaaacauuauacgaggcuggaucuuugggacuacacuugacagcaaaacccagagucuguugauugugaauaacgccacgaauguaguuaucaaggugugugaguuccaguuuugcaacgaucccuuccucggagucuacuaucauaaaaauaacaaguccuggauggagucugaguuccguguguacagcuccgcgaauaacuguacuuuugaguaugugucacaaccuuuccugauggaccuggaaggcaagcaggguaauuuuaaaaaccucagagaguucgucuuuaagaacauugauggguacuucaaaaucuacaguaagcacaccccaauaaauuuaguuagggaccugccccagggauuuagcgcucuugagccuuugguggaucugccaaucggcauuaacaucacacgguuccagacucuacucgcccugcaucgcucuuaucuuaccccgggcgacuccucaagcggguggacagcaggagccgcugcauacuauguagguuaccugcaacccagaaccuuuuugcucaaauauaaugaaaacggcacgauuacugaugccguggacugcgcucuggauccuuuaagugagacaaaguguacccugaagucuuucacugucgaaaaagggaucuaccagacauccaauuuuagggugcagccaaccgagagcauaguucgguuccccaacauuacgaaucucugcccuuuuggagagguguucaacgccacccgcuucgcgucggucuaugcauggaaucgaaagagaaucucuaacuguguggccgacuacuccguacuuuacaauucagcuaguuuuagcacauucaaaugcuauggcguuuccccaacuaagcugaacgacuuguguuuuaccaauguguacgccgauucuuucgucauuaggggugacgaagugcggcagaucgcacccgggcaaacaggaaaaaucgcugauuauaacuacaagcuaccggacgauuuuacuggcugcgucauugccuggaauagcaacaaccuggacucaaaagugggcgggaauuauaacuaccucuaucgucuguuccgcaagaguaaucuuaagccuuuugagagagauauauccaccgaaaucuaccaggcgggaagcacacccuguaacgguguugagggcuucaauugcuacuuuccacugcagucuuauggguuccaaccuaccaacggagugggcuaccagcccuauaggguagucguguugucauuugaacuccugcacgccccagcaacuguuugcggucccaaaaagaguacgaauuuagugaaaaacaagugugucaauuucaacuuuaaugggcugacaggcaccggagugcuaacugagagcaacaaaaaguuccucccuuuccagcaguuuggccgggacauugcugauaccacagacgccguacgagauccacaaacccuggagauccuugacauaacuccgugcuccuucgggggagugucuguuauuacacccgguacgaauaccucgaaccaggucgcuguguuguaccagggcgugaauuguacugaagucccuguugccauccacgcagaccagcugacaccaaccuggcgcguguauagcacaggguccaacguguuucaaacuagagccggaugccucaucggcgcugagcauguaaacaauucauacgaaugugauauucccaucggugcggggauuugcgcaaguuaucagacccagacgaacucuccuaggcgggcccgcagcgucgcuucccagucaauaaucgccuacaccaugagccugggcgcagaaaauucuguggccuacuccaacaauaguauugcuaucccaacaaacuucacuaucagcguuaccacagaaauucuucccgugucuaugacuaagaccuccgucgacuguacgauguauauaugcggagauucaacagaguguaguaaucuguugcuccaauacggcagcuuuugcacccagcugaacagagccuuaacugggaucgcaguggagcaggacaaaaauacacaggaaguuuucgcgcaagugaagcagauuuauaaaaccccgccuaucaaggauuuuggagguuucaacuuuucgcagauucugccagaccccuccaaaccuucuaagaggagcuucaucgaggaucuacucuuuaauaagguaacucuggcugacgccggcuucauaaaacaauacggggauugucuuggagacaucgcagcccgugauuugauuugcgcucagaaguucaacggccugaccguccugcccccacucuuaacagacgaaaugaucgcccaguauacgucagcacugcuugcugguaccauuacgaguggguggacauuuggcgccggagcggccuugcagaucccuuucgcuaugcaaauggcauaccgguuuaauggcauaggggugacccagaacgugcucuaugagaaucagaaacugauugccaaccaguucaacuccgcuaucggaaagauucaagauucucuaagcuccacagcccccgcacugggcaaacuccaggacgucguuaaucagaacgcgcaggcccugaauacucuugugaagcaauugucaagcaacuuuggugcuaucaguucuguacugaaugacauauuaucccgacucgauaagguggaagccgagguccagaucgacagacugauuaccgggaggcuucagagccugcaaacguacgugacacagcaguugauccgcgcagcugagauucgggccucggcaaaccucgccgcuaccaaaaugucagaaugcguucugggacagucuaagagaguggauuucuguggcaaagguuaccaccuaaugaguuuuccacaauccgcgccgcauggcgucguguuccugcacguuacuuaugugccugcccaggagaagaauuuuaccacagcacccgcuaucugccacgacgggaaagcccauuucccaagggaaggagucuuuguaagcaacggcacucacugguucgugacccagcgcaauuuuuacgagccccagauaauuacaacggauaacaccuucguuucugggaauugugacguggucaucggaaucgugaacaauacuguauaugauccucuccaaccagagcuggacagcuucaaggaagaacuugauaaauacuuuaagaaccauacaucccccgacguggauuugggcgacauuucagguaucaaugccagugucguuaacauucagaaggaaauagaucgacugaaugagguggcuaaaaacuuaaacgaaagccucaucgaccugcaggagcuugggaaguaugagcaguacauuaaauggccuugguauaucuggcugggauucauugcaggccuaaucgccauagugauggucaccaucaugcucugcuguaugacuucuugcuguuccugccugaaggguuguugcucauguggcaguugcugcaaauuugacgaagaugacagcgagccgguguugaaggggguuaagcugcacuacacaugaggacuaguuauaagacugacuagcccgaugggccucccaacgggcccuccuccccuccuugcaccgagauuaauaaaaaaaaaaaaaaaaaaaaaaaaaaaaaaaaaaaaaaaaaaaaaaaaaaaaaaaaaaaaaaaaugcaucccccccccccccccccccccccccccccccaaaggcucuuuucagagccaccagaauu

SEQ ID NO: 12972 - RNA, 4039 nt, Artificial Sequence
  SARS-CoV-2/Germany/BavPat3/2020__EPI_ISL_414521 spike protein mRNA human (1-1273)
aggagaaagcuuaccauguucguguuucugguccuccuuccccugguuagcucccagugcgugaacuugaccacaagaacucaauuaccuccagccuacacuaauucuuucaccaggggcguauauuacccggacaagguguuucggucaaguguccugcacagcacacaggaucuauuccuccccuuuuucuccaacgugacuugguuucaugcuauccacguuucugggaccaauggaacaaaacgcuucgacaacccugugcugccauuuaaugauggugucuauuucgcaucgaccgagaagucaaacauuauacgaggcuggaucuuugggacuacacuugacagcaaaacccagagucuguugauugugaauaacgccacgaauguaguuaucaaggugugugaguuccaguuuugcaacgaucccuuccucggagucuacuaucauaaaaauaacaaguccuggauggagucugaguuccguguguacagcuccgcgaauaacuguacuuuugaauaugugucacaaccuuuccugauggaccuggaaggcaagcaggguaauuuuaaaaaccucagagaguucgucuuuaagaacauugauggguacuucaaaaucuacaguaagcacaccccaauaaauuuaguuagggaccugccccagggauuuagcgcucuugagccuuugguggaucugccaaucggcauuaacaucacacgguuccagacucuacucgcccugcaucgcucuuaucuuaccccgggcgacuccucaagcggguggacagcaggagccgcugcauacuauguagguuaccugcaacccagaaccuuuuugcucaaauauaaugaaaacggcacgauuacugaugccguggacugcgcucuggauccuuuaagugagacaaaguguacccugaagucuuucacugucgaaaaagggaucuaccagacauccaauuuuagggugcagccaaccgagagcauaguucgguuccccaacauuacgaaucucugcccuuuuggagagguguucaacgccacccgcuucgcgucggucuaugcauggaaucgaaagagaaucucuaacuguguggccgacuacuccguacuuuacaauucagcuaguuuuagcacauucaaaugcuauggcguuuccccaacuaagcugaacgacuuguguuuuaccaauguguacgccgauucuuucgucauuaggggugacgaagugcggcagaucgcacccgggcaaacaggaaaaaucgcugauuauaacuacaagcuaccggacgauuuuacuggcugcgucauugccuggaauagcaacaaccuggacucaaaagugggcgggaauuauaacuaccucuaucgucuguuccgcaagaguaaucuuaagccuuuugagagagauauauccaccgaaaucuaccaggcgggaagcacacccuguaacgguguugagggcuucaauugcuacuuuccacugcagucuuauggguuccaaccuaccaacggagugggcuaccagcccuauaggguagucguguugucauuugaacuccugcacgccccagcaacuguuugcggucccaaaaagaguacgaauuuagugaaaaacaagugugucaauuucaacuuuaaugggcugacaggcaccggagugcuaacugagagcaacaaaaaguuccucccuuuccagcaguuuggccgggacauugcugauaccacagacgccguacgagauccacaaacccuggagauccuugacauaacuccgugcuccuucgggggagugucuguuauuacacccgguacgaauaccucgaaccaggucgcuguguuguaccaggacgugaauuguacugaagucccuguugccauccacgcagaucagcugacaccaaccuggcgcguguauagcacaggcuccaacguguuucaaacuagagccgggugccucaucggagcugagcauguaaacaauucauacgaaugugacauucccaucggcgcggguauuugcgcaaguuaucagacccagacgaacucuccuaggcgggcccgcagcgucgcuucccagucaauaaucgccuacaccaugagccugggggcagaaaauucuguggccuacuccaacaauaguauugcuaucccaacaaacuucacuaucagcguuaccacagaaauucuucccgugucuaugacuaagaccuccgucgauuguacgauguauauaugcggcgacucaacagaguguaguaaucuguugcuccaauacggcagcuuuugcacccagcugaacagagccuuaacuggaaucgcaguggagcaggauaaaaauacacagcaaguuuucgcacaggugaagcagauuuauaaaaccccgccuaucaaggacuuugggggauucaacuuuucgcaaauucugccagaucccuccaaaccuucuaagaggagcuucaucgaagaccuacucuuuaauaagguaacucuggcugaugccgguuucauaaaacaguacggcgacugucuuggggauaucgcagcccgugacuugauuugcgcucagaaguucaacggacugaccguccugcccccacucuuaacagaugagaugaucgcccaguauacgucagcacugcuugcuggcaccauuacgagugguuggacauuuggggccggcgcggccuugcaaaucccuuucgcuaugcagauggcauaccgguuuaauggaauaggcgugacccagaacgugcucuaugaaaaucagaaacugauugccaaccaauucaacuccgcuaucgggaagauucaggacucucuaagcuccacagccucagcacugggaaaacuccaggacgucguuaaucagaacgcgcaagcccugaauacucuugugaagcaguugagcaguaacuuuggcgcuaucucuuccguacugaaugauauauuaagccgacucgacaagguggaggccgaaguccagaucgauagacugauuaccgguaggcuucaaucgcugcagacguacgugacacagcaguugauccgcgcagcugagauucgggccucagcaaaccucgccgcuaccaaaaugucugagugcguucuggggcaaaguaagagaguggacuucuguggaaaaggcuaccaccuaauguccuuuccccagagcgcgccacauggugucguguuccugcacguuacuuaugugccggcccaggaaaagaauuuuaccacagcgccugcuaucugccacgauggcaaagcccauuuccccagggagggggucuuuguaucuaacggaacucacugguucgugacccagcgcaauuuuuacgaaccacaaauaauuacaacggacaacaccuucguuagcggcaauugugauguggucaucgggaucgugaacaauacuguauaugacccccuccagccugagcuggauuccuucaaggaggaacuugacaaauacuuuaagaaccauacaucaccagauguggacuugggagauauuaguggcaucaaugccagcgucguuaacauucagaaggagauagaccgacugaaugaaguggcuaaaaacuuaaacgagucucucaucgaccugcaggaacuugguaaguaugagcaauacauuaaauggcccugguauaucuggcugggguucauugcaggacuaaucgccauagugauggucaccaucaugcucugcuguaugacuuccugcuguucaugccugaagggcuguugcaguugugguagcugcugcaaauuugaugaggacgauuccgaaccuguguugaagggcguuaagcugcacuacacaugaggacuaguuauaagacugacuagcccgaugggccucccaacgggcccuccuccccuccuugcaccgagauuaauaaaaaaaaaaaaaaaaaaaaaaaaaaaaaaaaaaaaaaaaaaaaaaaaaaaaaaaaaaaaaaaaugcaucccccccccccccccccccccccccccccccaaaggcucuuuucagagccaccagaauu

SEQ ID NO: 12973 - RNA, 4039 nt, Artificial Sequence
  SARS-CoV-2/France/HF1805/2020__EPI_ISL_414628 spike protein mRNA human (1-1273)
aggagaaagcuuaccauguucguguuucugguccuccuuccccugguuagcucccagugcgugaacuugaccacaagaacucaauuaccuccagccuacacuaauucuuucaccaggggcguauauuacccggacaagguguuucggucaaguguccugcacagcacacaggaucuauuccuccccuuuuucuccaacgugacuugguuucaugcuauccacguuucugggaccaauggaacaaaacgcuucgacaacccugugcugccauuuaaugauggugucuauuucgcaucgaccgagaagucaaacauuauacgaggcuggaucuuugggacuacacuugacagcaaaacccagagucuguugauugugaauaacgccacgaauguaguuaucaaggugugugaguuccaguuuugcaacgaucccuuccucggagucuacuaucauaaaaauaacaaguccuggauggagucugaguuccguguguacagcuccgcgaauaacuguacuuuugaguaugugucacaaccuuuccugauggaccuggaaggcaagcaggguaauuuuaaaaaccucagagaguucgucuuuaagaacauugauggguacuucaaaaucuacaguaagcacaccccaauaaauuuaguuagggaccugccccagggauuuagcgcucuugagccuuugguggaucugccaaucggcauuaacaucacacgguuccagacucuacucgcccugcaucgcucuuaucuuaccccgggcgacuccucaagcggguggacagcaggagccgcugcauacuauguagguuaccugcaacccagaaccuuuuugcucaaauauaaugaaaacggcacgauuacugaugccguggacugcgcucuggauccuuuaagugagacaaaguguacccugaagucuuucacugucgaaaaagggaucuaccagacauccaauuuuagggugcagccaaccgagagcauaguucgguuccccaacauuacgaaucucugcccuuuuggagagguguucaacgccacccgcuucgcgucggucuaugcauggaaucgaaagagaaucucuaacuguguggccgacuacuccguacuuuacaauucagcuaguuuuagcacauucaaaugcuauggcguuuccccaacuaagcugaacgacuuguguuuuaccaauguguacgccgauucuuucgucauuaggggugacgaagugcggcagaucgcacccgggcaaacaggaaaaaucgcugauuauaacuacaagcuaccggacgauuuuacuggcugcgucauugccuggaauagcaacaaccuggacucaaaagugggcgggaauuauaacuaccucuaucgucuguuccgcaagaguaaucuuaagccuuuugagagagauauauccaccgaaaucuaccaggcgggaagcacacccuguaacgguguugagggcuucaauugcuacuuuccacugcagucuuauggguuccaaccuaccaacggagugggcuaccagcccuauaggguagucguguugucauuugaacuccugcacgccccagcaacuguuugcggucccaaaaagaguacgaauuuagugaaaaacaagugugucaauuucaacuuuaaugggcugacaggcaccggagugcuaacugagagcaacaaaaaguuccucccuuuccagcaguuuggccgggacauugcugauaccacagacgccguacgagauccacaaacccuggagauccuugacauaacuccgugcuccuucgggggagugucuguuauuacacccgguacgaauaccucgaaccaggucgcuguguuguaccagggcgugaauuguacugaagucccuguugccauccacgcagaccagcugacaccaaccuggcgcguguauagcacaggguccaacguguuucaaacuagagccggaugccucaucggcgcugagcauguaaacaauucauacgaaugugauauucccaucggugcggggauuugcgcaaguuaucagacccagacgaacucuccuaggcgggcccgcagcgucgcuucccagucaauaaucgccuacaccaugagccugggcgcagaaaauucuguggccuacuccaacaauaguauugcuaucccaacaaacuucacuaucagcguuaccacagaaauucuucccgugucuaugacuaagaccuccgucgacuguacgauguauauaugcggagauucaacagaguguaguaaucuguugcuccaauacggcagcuuuugcacccagcugaacagagccuuaacugggaucgcaguggagcaggacaaaaauacacaggaaguuuucgcgcaagugaagcagauuuauaaaaccccgccuaucaaggauuuuggagguuucaacuuuucgcagauucugccagaccccuccaaaccuucuaagaggagcuucaucgaggaucuacucuuuaauaagguaacucuggcugacgccggcuucauaaaacaauacggggauugucuuggagacaucgcagcccgugauuugauuugcgcucagaaguucaacggccugaccguccugcccccacucuuaacagacgaaaugaucgcccaguauacgucagcacugcuugcugguaccauuacgaguggguggacauuuggcgccggagcggccuugcagaucccuuucgcuaugcaaauggcauaccgguuuaauggcauaggggugacccagaacgugcucuaugagaaucagaaacugauugccaaccaguucaacuccgcuaucggaaagauucaagauucucuaagcuccacagccucagcacugggcaaacuccaggacgucguuaaucagaacgcgcaggcccugaauacucuugugaagcaauugagcaguaacuuuggugcuaucucuuccguacugaaugacauauuaagccgacucgauaagguggaagccgagguccagaucgacagacugauuaccgggaggcuucagucgcugcaaacguacgugacacagcaguugauccgcgcagcugagauucgggccucagcaaaccucgccgcuaccaaaaugucugaaugcguucugggacagaguaagagaguggauuucuguggcaaagguuaccaccuaauguccuuuccccaaagcgcgccacauggcgucguguuccugcacguuacuuaugugccggcccaggagaagaauuuuaccacagcuccugcaaucugccacgacgggaaagcccauuuccccagggaaggagucuuuguaucuaacggcacucacugguucgugacccagcgcaauuuuuacgagccacagauaauuacaacggauaacaccuucguuagcgggaauugugacguggucaucggagugguaaacaauacuguguaugauccccuccaaccugagcuggacuccuucaaggaagaacuugauaaauacuuuaagaaccauacaucaccagacgucgauuugggcgacaucagugguauuaaugccagcguugugaacauccagaaggaaauugaucgacugaaugagguggcuaaaaacuuaaacgaaucucucauagaccugcaggagcuugggaaguaugagcaguacaucaaauggcccugguauauuuggcugggauucaucgcaggccuaauugccaucgucauggugaccauaaugcucugcuguaugacuuccugcuguucaugccugaaggguuguugcaguuguggcagcugcugcaaauuugacgaagaugacuccgagccuguuuugaaggggguaaagcugcacuacacaugaggacuaguuauaagacugacuagcccgaugggccucccaacgggcccuccuccccuccuugcaccgagauuaauaaaaaaaaaaaaaaaaaaaaaaaaaaaaaaaaaaaaaaaaaaaaaaaaaaaaaaaaaaaaaaaaugcaucccccccccccccccccccccccccccccccaaaggcucuuuucagagccaccagaauu

SEQ ID NO: 12974 - RNA, 4039 nt, Artificial Sequence
  SARS-CoV-2/Netherlands/ZuidHolland_9/2020__EPI_ISL_414445 spike protein mRNA human (1-1273)
aggagaaagcuuaccauguucguguuucugguccuccuuccccugguuagcucccagugcgugaacuugaccacaagaacucaauuaccuccagccuacacuaauucuuucaccaggggcguauauuacccggacaagguguuucggucaaguguccugcacagcacacaggaucuauuccuccccuuuuucuccaacgugacuugguuucaugcuauccacguuucugggaccaauggaacaaaacgcuucgacaacccugugcugccauuuaaugauggugucuauuucgcaucgaccgagaagucaaacauuauacgaggcuggaucuuugggacuacacuugacagcaaaacccagagucuguugauugugaauaacgccacgaauguaguuaucaaggugugugaguuccaguuuugcaacgaucccuuccucggagucuacuaucauaaaaauaacaaguccuggauggagucugaguuccguguguacagcuccgcgaauaacuguacuuuugaguaugugucacaaccuuuccugauggaccuggaaggcaagcaggguaauuuuaaaaaccucagagaguucgucuuuaagaacauugauggguacuucaaaaucuacaguaagcacaccccaauaaauuuaguuagggaccugccccagggauuuagcgcucuugagccuuugguggaucugccaaucggcauuaacaucacacgguuccagacucuacucgcccugcaucgcucuuaucuuaccccgggcgacuccucaagcggguggacagcaggagccgcugcauacuauguagguuaccugcaacccagaaccuuuuugcucaaauauaaugaaaacggcacgauuacugaugccguggacugcgcucuggauccuuuaagugagacaaaguguacccugaagucuuucacugucgaaaaagggaucuaccagacauccaauuuuagggugcagccaaccgagagcauaguucgguuccccaacauuacgaaucucugcccuuuuggagagguguucaacgccacccgcuucgcgucggucuaugcauggaaucgaaagagaaucucuaacuguguggccgacuacuccguacuuuacaauucagcuaguuuuagcacauucaaaugcuauggcguuuccccaacuaagcugaacgacuuguguuuuaccaauguguacgccgauucuuucgucauuaggggugacgaagugcggcagaucgcacccgggcaaacaggaaaaaucgcugauuauaacuacaagcuaccggacgauuuuacuggcugcgucauugccuggaauagcaacaaccuggacucaaaagugggcgggaauuauaacuaccucuaucgucuguuccgcaagaguaaucuuaagccuuuugagagagauauauccaccgaaaucuaccaggcgggaagcacacccuguaacgguguugagggcuucaauugcuacuuuccacugcagucuuauggguuccaaccuaccaacggagugggcuaccagcccuauaggguagucguguugucauuugaacuccugcacgccccagcaacuguuugcggucccaaaaagaguacgaauuuagugaaaaacaagugugucaauuucaacuuuaaugggcugacaggcaccggagugcuaacugagagcaacaaaaaguuccucccuuuccagcaguuuggccgggacauugcugauaccacagacgccguacgagauccacaaacccuggagauccuugacauaacuccgugcuccuucgggggagugucuguuauuacacccgguacgaauaccucgaaccaggucgcuguguuguaccagggcgugaauuguacugaagucccuguugccauccacgcagaccagcugacaccaaccuggcgcguguauagcacaggguccaacguguuucaaacuagagccggaugccucaucggcgcugagcauguaaacaauucauacgaaugugauauucccaucggugcggggauuugcgcaaguuaucagacccagacgaacucuccuaggcgggcccgcagcgucgcuucccagucaauaaucgccuacaccaugagccugggcgcagaaaauucuguggccuacuccaacaauaguauugcuaucccaacaaacuucacuaucagcguuaccacagaaauucuucccgugucuaugacuaagaccuccgucgacuguacgauguauauaugcggagauucaacagaguguaguaaucuguugcuccaauacggcagcuuuugcacccagcugaacagagccuuaacugggaucgcaguggagcaggacaaaaauacacaggaaguuuucgcgcaagugaagcagauuuauaaaaccccgccuaucaaggauuuuggagguuucaacuuuucgcagauucugccagaccccuccaaaccuucuaagaggagcuucaucgaggaucuacucuuuaauaagguaacucuggcugacgccggcuucauaaaacaauacggggauugucuuggagacaucgcagcccgugauuugauuugcguccagaaguucaacggccugaccgugcugcccccacucuuaacagacgaaaugaucgcucaguauacgucagcccugcuugcagguaccauuacgaguggguggacauuuggcgcuggagccgcguugcagaucccuuucgccaugcaaauggcuuaccgguuuaauggcauaggggugacccagaacguccucuaugagaaucagaaacugauugcaaaccaguucaacuccgccaucggaaagauucaagauucucuaagcuccacagcuucagcccugggcaaacuccaggacguugugaaucagaacgcacaggcgcugaauacucuuguaaagcaauugagcaguaacuuuggugccaucucuuccgugcugaaugacauauuaagccgacucgauaaggucgaagcugaggugcagaucgacagacugauuaccgggaggcuucagucgcugcaaacguacguuacacagcaguugauccgcgccgcagagauucgggcuucagccaaccucgcagccaccaaaaugucugaaugcgugcugggacagaguaagagagucgauuucuguggcaaagguuaccaccuaauguccuuuccccaaagcgcuccacauggcgugguuuuccugcacgugacuuaugucccggcgcaggagaagaauuuuaccacagccccugcaaucugccacgacgggaaagcucauuuccccagggaaggaguauuugugucuaacggcacucacugguucguuacccagcgcaauuuuuacgagccacagauaauuacaacggauaacaccuucgugagcgggaauugugacgucgugaucggaaucguaaacaauacuguguaugauccccuccaaccugagcuggacuccuucaaggaagaacuugauaaauacuuuaagaaccauacaucaccagacgucgauuugggcgacauuagugguaucaaugccagcguugugaacauucagaaggaaauagaucgacugaaugagguggccaaaaacuuaaacgaaucucucaucgaccugcaggagcuugggaaguaugagcaguacauuaaauggcccugguauaucuggcugggauucauugcuggccuaaucgcaauagucauggugaccaucaugcucugcuguaugacuuccugcuguucaugccugaaggguuguugcaguuguggcagcugcugcaaauuugacgaagaugacuccgagccuguuuugaaggggguaaagcugcacuacacaugaggacuaguuauaagacugacuagcccgaugggccucccaacgggcccuccuccccuccuugcaccgagauuaauaaaaaaaaaaaaaaaaaaaaaaaaaaaaaaaaaaaaaaaaaaaaaaaaaaaaaaaaaaaaaaaaugcaucccccccccccccccccccccccccccccccaaaggcucuuuucagagccaccagaauu

SEQ ID NO: 12975 - RNA, 4039 nt, Artificial Sequence
  SARS-CoV-2/Finland/FIN03032020A/2020__EPI_ISL_413602 spike protein mRNA human (1-1273)
aggagaaagcuuaccauguucguguuucugguccuccuuccccugguuagcucccagugcgugaacuugaccacaagaacucaauuaccuccagccuacaccaauucuuucacgaggggcguauauuacccggacaagguguuucggucaaguguccugcacagcacacaggaucuauuccuccccuuuuucuccaacgugacuugguuucaugcuauccacguuucugggaccaauggaacaaaacgcuucgacaacccugugcugccauuuaaugauggugucuauuucgcaucgaccgagaagucaaacauuauacgaggcuggaucuuugggacuacacuugacagcaaaacccagagucuguugauugugaauaacgccacgaauguaguuaucaaggugugugaguuccaguuuugcaacgaucccuuccucggagucuacuaucauaaaaauaacaaguccuggauggagucugaguuccguguguacagcuccgcgaauaacuguacuuuugaguaugugucacaaccuuuccugauggaccuggaaggcaagcaggguaauuuuaaaaaccucagagaguucgucuuuaagaacauugauggguacuucaaaaucuacaguaagcacaccccaauaaauuuaguuagggaccugccccagggauuuagcgcucuugagccuuugguggaucugccaaucggcauuaacaucacacgguuccagacucuacucgcccugcaucgcucuuaucuuaccccgggcgacuccucaagcggguggacagcaggagccgcugcauacuauguagguuaccugcaacccagaaccuuuuugcucaaauauaaugaaaacggcacgauuacugaugccguggacugcgcucuggauccuuuaagugagacaaaguguacccugaagucuuucacugucgaaaaagggaucuaccagacauccaauuuuagggugcagccaaccgagagcauaguucgguuccccaacauuacgaaucucugcccuuuuggagagguguucaacgccacccgcuucgcgucggucuaugcauggaaucgaaagagaaucucuaacuguguggccgacuacuccguacuuuacaauucagcuaguuuuagcacauucaaaugcuauggcguuuccccaacuaagcugaacgacuuguguuuuaccaauguguacgccgauucuuucgucauuaggggugacgaagugcggcagaucgcacccgggcaaacaggaaaaaucgcugauuauaacuacaagcuaccggacgauuuuacuggcugcgucauuagcuggaacucaaauaaccuggacaguaaagugggcgggaauuauaacuaccucuaucgucuguuccgcaaguccaaucuuaagccuuuugagagagauauaagcaccgaaaucuaccaggccggaucuacacccuguaacgguguugagggcuucaauugcuacuuuccacugcagucauauggguuccaaccuaccaacggagugggcuaccagcccuauaggguagucguguugaguuuugaacuccugcacgcgccagccacuguuugcggucccaaaaagagcacgaauuuagugaaaaacaagugugucaauuucaacuuuaaugggcugacaggcaccggagugcuaacugaguccaacaaaaaguuccucccuuuccagcaguuuggccgggacauugcagauaccacagacgcuguacgagauccacaaacccuggagauccuugacauaacuccgugcucuuucgggggagugucgguuauuacacccgguacgaauaccagcaaccaggucgccguguuguaccagggcgugaauuguacugaagucccuguugcuauccacgccgaccagcugacaccaaccuggcgcguguauuccacagggucaaacguguuucaaacuagagcaggaugccucaucggcgccgagcauguaaacaauaguuacgaaugugauauucccaucggugcugggauuugcgcgucuuaucagacccagacgaacagcccuaggcgggcacgcuccgucgccucacagagcauaaucgcuuacaccaugucucugggcgccgaaaauuccguggcauacaguaacaauagcauugccaucccaacaaacuucacuaucucuguuaccacagaaauucuucccguguccaugacuaagaccucagucgacuguacgauguauauaugcggagauaguacagaguguagcaaucuguugcuccaauacggcucguuuugcacccagcugaacagagcuuuaacugggaucgccguggagcaggacaaaaauacacaggaaguuuucgcacaagugaagcagauuuauaaaaccccgccuaucaaggauuuuggagguuucaacuuuucccagauucugccagaccccucuaaaccuagcaagaggucauucaucgaggaucuacucuuuaauaagguaacucuggcggacgcuggcuucauaaaacaauacggggauugucuuggagacaucgccgcacgugauuugauuugcgcccagaaguucaacggccugaccguccugcccccacucuuaacagacgaaaugaucgcucaguauacgagugcccugcuugcagguaccauuacuuccggguggacauuuggcgcuggagccgcguugcagaucccuuucgccaugcaaauggcuuaccgguuuaauggcauaggggugacccagaacgugcucuaugagaaucagaaacugauugcaaaccaguucaacucugccaucggaaagauucaagauagccuauccucaacagcuagcgcccugggcaaacuccaggacgucguuaaucagaacgcacaggcgcugaauacucuugugaagcaauugaguucuaacuuuggugccaucuccagcguacugaaugacauauuaucgcgacucgauaagguggaagcugagguccagaucgacagacugauuaccgggaggcuucagucacugcaaacguacgugacacagcaguugauccgcgccgcagagauucgggcuucugccaaccucgcagccaccaaaaugagugaaugcguucugggacaguccaagagaguggauuucuguggcaaagguuaccaccuaaugagcuuuccccaaucugcuccacauggcgucguguuccugcacguuacuuaugugccggcgcaggagaagaauuuuaccacagccccugcaaucugccacgacgggaaagcucauuuccccagggaaggagucuuuguaagcaacggcacucacugguucgugacccagcgcaauuuuuacgagccacagauaauuacaacggauaacaccuucguuuccgggaauugugacguggucaucggaaucgugaacaauacuguauaugauccccuccaaccugagcuggacucauucaaggaagaacuugauaaauacuuuaagaaccauacaaguccagacguggauuugggcgacauuagcgguaucaaugccucugucguuaacauucagaaggaaauagaucgacugaaugagguggccaaaaacuuaaacgaaucccucaucgaccugcaggagcuugggaaguaugagcaguacauuaaauggcccugguauaucuggcugggauucauugcuggccuaaucgcaauagugauggucaccaucaugcucugcuguaugacuucaugcuguaguugccugaaggguuguugcagcuguggcuccugcugcaaauuugacgaagaugacucugagccuguguugaaggggguuaagcugcacuacacaugaggacuaguuauaagacugacuagcccgaugggccucccaacgggcccuccuccccuccuugcaccgagauuaauaaaaaaaaaaaaaaaaaaaaaaaaaaaaaaaaaaaaaaaaaaaaaaaaaaaaaaaaaaaaaaaaugcaucccccccccccccccccccccccccccccccaaaggcucuuuucagagccaccagaauu

SEQ ID NO: 12976 - RNA, 4039 nt, Artificial Sequence
  SARS-CoV-2/France/GE1977/2020__EPI_ISL_414632 spike protein mRNA human (1-1273)
aggagaaagcuuaccauguucguguuucugguccuccuuccccugguuagcucccagugcgugaacuugaccacaagaacucaauuaccuccagccuacacuaauucuuucaccaggggcguauauuacccggacaagguguuucggucaaguguccugcacagcacacaggaucuauuccuccccuuuuucuccaacgugacuugguuucaugcuauccacguuucugggaccaauggaacaaaacgcuucgacaacccugugcugccauuuaaugauggugucuauuucgcaucgaccgagaagucaaacauuauacgaggcuggaucuuugggacuacacuugacagcaaaacccagagucuguugauugugaauaacgccacgaauguaguuaucaaggugugugaguuccaguuuugcaacgaucccuuccucggagucuacuaucauaaaaauaacaaguccuggauggagucugaguuccguguguacagcuccgcgaauaacuguacuuuugaguaugugucacaaccuuuccugauggaccuggaaggcaagcaggguaauuuuaaaaaccucagagaguucgucuuuaagaacauugauggguacuucaaaaucuacaguaagcacaccccaauaaauuuaguuagggaccugccccagggauuuagcgcucuugagccuuugguggaucugccaaucggcauuaacaucacacgguuccagacucuacucgcccugcaucgcucuuaucuuaccccgggcgacuccucaagcggguggacagcaggagccgcugcauacuauguagguuaccugcaacccagaaccuuuuugcucaaauauaaugaaaacggcacgauuacugaugccguggacugcgcucuggauccuuuaagugagacaaaguguacccugaagucuuucacugucgaaaaagggaucuaccagacauccaauuuuagggugcagccaaccgagagcauaguucgguuccccaacauuacgaaucucugcccuuuuggagagguguucaacgccacccgcuucgcgucggucuaugcauggaaucgaaagagaaucucuaacuguguggccgacuacuccguacuuuacaauucagcuaguuuuagcacauucaaaugcuauggcguuuccccaacuaagcugaacgacuuguguuuuaccaauguguacgccgauucuuucgucauuaggggugacgaagugcggcagaucgcacccgggcaaacaggaaaaaucgcugauuauaacuacaagcuaccggacgauuuuacuggcugcgucauugccuggaauagcaacaaccuggacucaaaagugggcgggaauuauaacuaccucuaucgucuguuccgcaagaguaaucuuaagccuuuugagagagauauauccaccgaaaucuaccaggcgggaagcacacccuguaacgguguugagggcuucaauugcuacuuuccacugcagucuuauggguuccaaccuaccaacggagugggcuaccagcccuauaggguagucguguugucauuugaacuccugcacgccccagcaacuguuugcggucccaaaaagaguacgaauuuagugaaaaacaagugugucaauuucaacuuuaaugggcugacaggcaccggagugcuaacugagagcaacaaaaaguuccucccuuuccagcaguuuggccgggacauugcugauaccacagacgccguacgagauccacaaacccuggagauccuugacauaacuccgugcuccuucgggggagugucuguuauuacacccgguacgaauaccucgaaccaggucgcuguguuguaccagggcgugaauuguacugaagucccuguugccauccacgcagaccagcugacaccaaccuggcgcguguauagcacaggguccaacguguuucaaacuagagccggaugccucaucggcgcugagcauguaaacaauucauacgaaugugauauucccaucggugcggggauuugcgcaaguuaucagacccagacgaacucuccuaggcgggcccgcagcgucgcuucccagucaauaaucgccuacaccaugagccugggcgcagaaaauucuguggccuacuccaacaauaguauugcuaucccaacaaacuucacuaucagcguuaccacagaaauucuucccgugucuaugacuaagaccuccgucgacuguacgauguauauaugcggagauucaacagaguguaguaaucuguugcuccaauacggcagcuuuugcacccagcugaacagagccuuaacugggaucgcaguggagcaggacaaaaauacacaggaaguuuucgcgcaagugaagcagauuuauaaaaccccgccuaucaaggauuuuggagguuucaacuuuucgcagauucugccagaccccuccaaaccuucuaagaggagcuucaucgaggaucuacucuuuaauaagguaacucuggcugacgccggcuucauaaaacaauacggggauugucuuggagacaucgcagcccgugauuugauuugcgcucagaaguucaacggccugaccguccugcccccacucuuaacagacgaaaugaucgcccaguauacgucagcacugcuugcugguaccauuacgaguggguggacauuuggcgccggagcggccuugcagaucccuuucgcuaugcaaauggcauaccgguuuaauggcauaggggugacccagaacgugcucuaugagaaucagaaacugauugccaaccaguucaacuccgcuaucggaaagauucaagauucucuauuuagcacagccuccgcacugggcaaacuccaggacgucguuaaucagaacgcgcaggcccugaauacucuugugaagcaauugucaagcaacuucggugcuaucaguucuguacugaaugacauauuaucccgacucgauaagguggaagccgagguccagaucgacagacugauuaccgggaggcuucagagccugcaaacguacgugacacagcaguugauccgcgcagcugagauucgggccucggcaaaccucgccgcuaccaaaaugucagaaugcguucugggacagucuaagagaguggauuuuuguggcaaagguuaccaccuaaugaguuucccccaauccgcgccacauggcgucguguuucugcacguuacuuaugugccggcccaggagaagaauuucaccacagcuccugcaaucugccacgacgggaaagcccauuuucccagggaaggagucuucguaagcaacggcacucacugguuugugacccagcgcaauuucuacgagccacagauaauuacaacggauaacaccuucguuucugggaauugugacguggucaucggaaucgugaacaauacuguauaugauccccuccaaccugagcuggacagcuuuaaggaagaacuugauaaauacuucaagaaccauacauccccagacguggauuugggcgacauuucagguaucaaugccagugucguuaacauucagaaggaaauagaucgacugaaugagguggcuaaaaacuuaaacgaaagccucaucgaccugcaggagcuugggaaguaugagcaguacauuaaauggcccugguauaucuggcugggauuuauugcaggccuaaucgccauagugauggucaccaucaugcucugcuguaugacuucuugcuguuccugccugaaggguuguugcucauguggcaguugcugcaaauucgacgaagaugacagcgagccuguguugaaggggguuaagcugcacuacacaugaggacuaguuauaagacugacuagcccgaugggccucccaacgggcccuccuccccuccuugcaccgagauuaauaaaaaaaaaaaaaaaaaaaaaaaaaaaaaaaaaaaaaaaaaaaaaaaaaaaaaaaaaaaaaaaaugcaucccccccccccccccccccccccccccccccaaaggcucuuuucagagccaccagaauu

SEQ ID NO: 12977 - RNA, 4039 nt, Artificial Sequence
  SARS-CoV-2/Finland/FIN-313/2020__EPI_ISL_414641 spike protein mRNA human (1-1273)
aggagaaagcuuaccauguucguguuucugguccuccuuccccugguuagcucccagugcgugaacuugaccacaagaacucaauuaccuccagccuacacuaauucuuucaccaggggcguauauuacccggacaagguguuucggucaaguguccugcacagcacacaggaucuauuccuccccuuuuucuccaacgugacuugguuucaugcuauccacguuucugggaccaauggaacaaaacgcuucgacaacccugugcugccauuuaaugauggugucuauuucgcaucgaccgagaagucaaacauuauacgaggcuggaucuuugggacuacacuugacagcaaaacccagagucuguugauugugaauaacgccacgaauguaguuaucaaggugugugaguuccaguuuugcaacgaucccuuccucggagucuacuaucauaaaaauaacaaguccuggauggagucugaguuccguguguacagcuccgcgaauaacuguacuuuugaguaugugucacaaccuuuccugauggaccuggaaggcaagcaggguaauuuuaaaaaccucagagaguucgucuuuaagaacauugauggguacuucaaaaucuacaguaagcacaccccaauaaauuuaguuagggaccugccccagggauuuagcgcucuugagccuuugguggaucugccaaucggcauuaacaucacacgguucaaaacucuacucgcccugcaucgcucuuaucuuaccccgggcgacuccucaagcggguggacagcaggagccgcugcauacuauguagguuaccugcagcccagaaccuuuuugcucaaguauaaugaaaacggcacgauuacugaugccguggacugcgcucuggauccuuuaagugagacaaaguguacccugaaaucuuucacugucgaaaaggggaucuaccaaacauccaauuuuagggugcagccaaccgagagcauaguucgguuccccaacauuacgaaucucugcccuuuuggagagguguucaacgccacccgcuucgcgucggucuaugcauggaaucgaaaaagaaucucuaacuguguggccgacuacuccguacuuuacaauucagcuaguuuuagcacauucaagugcuauggcguuuccccaacuaaacugaacgacuuguguuuuaccaauguguacgccgauucuuucgucauuaggggugacgaagugcggcagaucgcacccgggcagacaggaaagaucgcugauuauaacuacaaacuaccggacgauuuuacuggcugcgucauugccuggaauagcaacaaccuggacucaaaggugggcgggaauuauaacuaccucuaucgucuguuccgcaagaguaaucuuaaaccuuuugagagagauauauccaccgaaaucuaccaagcgggaagcacacccuguaacgguguugagggcuucaauugcuacuuuccacugcagucuuauggguuccagccuaccaacggagugggcuaccaacccuauaggguagucguguugucauuugaacuccugcacgccccagcaacuguuugcggucccaagaaaaguacgaauuuagugaagaacaaaugugucaauuucaacuuuaaugggcugacaggcaccggagugcuaacugagagcaacaagaaguuccucccuuuccagcaguuuggccgggacauugcugauaccacagacgccguacgagauccacagacccuggagauccuugacauaacuccgugcuccuucgggggagugucuguuauuacacccgguacgaauaccucgaaccaagucgcuguguuguaccagggcgugaauuguacugaagucccuguugccauccacgcagaccagcugacaccaaccuggcgcguguauagcacaggguccaacguguuucagacuagagccggaugccucaucggcgcugagcauguaaacaauucauacgaaugugauauucccaucggugcggggauuugcgcaaguuaucaaacccagacgaacucuccuaggcgggcccgcagcgucgcuucccagucaauaaucgccuacaccaugagccugggcgcagaaaauucuguggccuacuccaacaauaguauugcuaucccaacaaacuucacuaucagcguuaccacagaaauucuucccgugucuaugacuaaaaccuccgucgacuguacgauguauauaugcggagauucaacagaguguaguaaucuguugcuccaguacggcagcuuuugcacccaacugaacagagccuuaacugggaucgcaguggagcaggacaagaauacacaggaaguuuucgcacaggugaaacaaauuuauaagaccccgccuaucaaagauuuuggagguuucaacuuuucgcagauucugccagaccccuccaagccuucuaagaggagcuucaucgaggaucuacucuuuaauaaaguaacucuggcugacgccggcuucauaaagcaguacggggauugucuuggagacaucgcagcccgugauuugauuugcgcucaaaaauucaacggccugaccguccugcccccacucuuaacagacgaaaugaucgcccaguauacgucagcacugcuugcugguaccauuacgaguggguggacauuuggcgccggagcggccuugcagaucccuuucgcuaugcagauggcauaccgguuuaauggcauaggggugacccaaaacgugcucuaugagaaucagaagcugauugccaaccaguucaacuccgcuaucggaaaaauucaggauucucuaagcuccacagccucagcacugggcaagcuccaagacgucguuaaucagaacgcgcaggcccugaauacucuugugaagcaguugagcaguaacuuuggugcuaucucuuccguacugaaugacauauuaagccgacucgauaaaguggaagccgagguccaaaucgacagacugauuaccgggaggcuucagucgcugcagacguacgugacacaacaguugauccgcgcagcugagauucgggccucagcaaaccucgccgcuaccaagaugucugaaugcguucugggacagaguaaaagaguggauuucuguggcaaggguuaccaccuaauguccuuuccccagagcgcgccacauggcgucguguuccugcacguuacuuaugugccggcccaagagaaaaauuuuaccacagcgccugcuaucugccacgacgggaaggcccauuuccccagggaaggagucuuuguaucuaacggcacucacugguucgugacccagcgcaauuuuuacgagccacagauaauuacaacggauaacaccuucguuagcgggaauugugacguggucaucggaaucgugaacaauacuguauaugauccccuccagccugagcuggacuccuucaaagaagaacuugauaaguacuuuaagaaccauacaucaccagacguggauuugggcgacauuagugguaucaaugccagcgucguuaacauucaaaaagaaauagaucgacugaaugagguggcuaagaacuuaaacgaaucucucaucgaccugcaggagcuugggaaauaugagcaguacauuaaguggcccugguauaucuggcugggauucauugcaggccuaaucgccauagugauggucaccaucaugcucugcuguaugacuuccugcuguucaugccugaaagguuguugcaguuguggcagcugcugcaaguuugacgaagaugacuccgagccuguguugaaggggguuaaacugcacuacacaugaggacuaguuauaagacugacuagcccgaugggccucccaacgggcccuccuccccuccuugcaccgagauuaauaaaaaaaaaaaaaaaaaaaaaaaaaaaaaaaaaaaaaaaaaaaaaaaaaaaaaaaaaaaaaaaaugcaucccccccccccccccccccccccccccccccaaaggcucuuuucagagccaccagaauu

SEQ ID NO: 12978 - RNA, 4039 nt, Artificial Sequence
  SARS-CoV-2/Netherlands/ZuidHolland_2/2020__EPI_ISL_414556 spike protein mRNA human (1-1273)
aggagaaagcuuaccauguucguguuucugguccuccuuccccugguuagcucccagugcgugaacuugaccacaagaacucaauuaccuccagccuacacuaauucuuucaccaggggcguauauuacccggacaagguguuucggucaaguguccugcacagcacacaggaucuauuccuccccuuuuucuccaacgugacuugguuucaugcuauccacguuucugggaccaauggaacaaaacgcuucgacaacccugugcugccauuuaaugauggugucuauuucgcaucgaccgagaagucaaacauuauacgaggcuggaucuuugggacuacacuugacagcaaaacccagagucuguugauugugaauaacgccacgaauguaguuaucaaggugugugaguuccaguuuugcaacgaucccuuccucggagucuacuaucauaaaaauaacaaguccuggauggagucugaguuccguguguacagcuccgcgaauaacuguacuuuugaauaugugucacaaccuuuccugauggaccuggaaggcaagcaggguaauuuuaaaaaccucagagaguucgucuuuaagaacauugauggguacuucaaaaucuacaguaagcacaccccaauaaauuuaguuagggaccugccccagggauuuagcgcucuugagccuuugguggaucugccaaucggcauuaacaucacacgguuccagacucuacucgcccugcaucgcucuuaucuuaccccgggcgacuccucaagcggguggacagcaggagccgcugcauacuauguagguuaccugcaacccagaaccuuuuugcucaaauauaaugaaaacggcacgauuacugaugccguggacugcgcucuggauccuuuaagugagacaaaguguacccugaagucuuucacugucgaaaaagggaucuaccagacauccaauuuuagggugcagccaaccgagagcauaguucgguuccccaacauuacgaaucucugcccuuuuggagagguguucaacgccacccgcuucgcgucggucuaugcauggaaucgaaagagaaucucuaacuguguggccgacuacuccguacuuuacaauucagcuaguuuuagcacauucaaaugcuauggcguuuccccaacuaagcugaacgacuuguguuuuaccaauguguacgccgauucuuucgucauuaggggugacgaagugcggcagaucgcacccgggcaaacaggaaaaaucgcugauuauaacuacaagcuaccggacgauuuuacuggcugcgucauugccuggaauagcaacaaccuggacucaaaagugggcgggaauuauaacuaccucuaucgucuguuccgcaagaguaaucuuaagccuuuugagagagauauauccaccgaaaucuaccaggcgggaagcacacccuguaacgguguugagggcuucaauugcuacuuuccacugcagucuuauggguuccaaccuaccaacggagugggcuaccagcccuauaggguagucguguugucauuugaacuccugcacgccccagcaacuguuugcggucccaaaaagaguacgaauuuagugaaaaacaagugugucaauuucaacuuuaaugggcugacaggcaccggagugcuaacugagagcaacaaaaaguuccucccuuuccagcaguuuggccgggacauugcugauaccacagacgccguacgagauccacaaacccuggagauccuugacauaacuccgugcuccuucgggggagugucuguuauuacacccgguacgaauaccucgaaccaggucgcuguguuguaccagggcgugaauuguacugaagucccuguugccauccacgcagaccagcugacaccaaccuggcgcguguauagcacaggguccaacguguuucaaacuagagccggaugccucaucggcgcugagcauguaaacaauucauacgaaugugauauucccaucggugcggggauuugcgcaaguuaucagacccagacgaacucuccuaggcgggcccgcagcgucgcuucccagucaauaaucgccuacaccaugagccugggcgcagaaaauucuguggccuacuccaacaauaguauugcuaucccaacaaacuucacuaucagcguuaccacagaaauucuucccgugucuaugacuaagaccuccgucgacuguacgauguauauaugcggagauucaacagaguguaguaaucuguugcuccaauacggcagcuuuugcacccagcugaacagagccuuaacugggaucgcacuggagcaggacaaaaauacacaggaaguguucgcgcaaguuaagcagauuuauaaaaccccgccuaucaaggauuuuggagguuucaacuuuucgcagauucuaccagaccccuccaaaccuucuaagaggagcuucaucgaggaucuccuguuuaauaaggugacucuugcugacgccggcuucauaaaacaauacggggauuguuugggagacaucgcagcccgugaucugauuugcgcucagaaguucaacggccucaccguacugcccccauuacugacagacgaaaugaucgcccaguauacgucagcacuuuuggcugguaccauuacgaguggguggacauuuggcgccggagcggcccuccagaucccuuucgcuaugcaaauggcauaccgguuuaauggcauaggggucacccagaacgugcuguaugagaaucagaaacuaauugccaaccaguucaacuccgcuaucggaaagauucaagauucucugagcuccacagccucagcacucggcaaacugcaggacguggucaaucagaacgcgcaggcccuuaauacuuugguuaagcaacugagcaguaacuuuggugcuaucucuuccguguuaaaugacauacucagccgacuggauaagguagaagccgaggugcagaucgacagacuuauuaccgggaggcugcagucguugcaaacguacgucacacagcagcucauccgcgcagcugagauucgggccucagcaaaccuggccgcuaccaaaaugucugaaugcgugcuaggacagaguaagagaguugauuucuguggcaaagguuaccaccugauguccuuuccccaaagcgcgccacauggcguggucuuccuccacgugacuuauguuccggcccaggagaagaauuuuaccacagcuccugcaaucugccacgacgggaaagcccauuuccccagggaaggaguguuugucucuaacggcacucacugguucguaacccagcgcaauuuuuacgagccacagauaauuacaacggauaacaccuucgugagcgggaauugugacguugugaucggaaucgucaacaauacuguguaugauccccugcaaccugagcuugacuccuucaaggaagaguuggauaaauacuuuaagaaccauacaucaccagacguagaucugggcgacauuagugguaucaaugccagcguggucaacauucagaaggaaauagaucgauuaaaugagguugcuaaaaaccucaacgaaucucugaucgaccuucaggagcuggggaaguaugagcaguacauuaaauggcccugguauaucuggcuaggauucauugcaggccucaucgccauagugauggugaccaucaugcugugcuguaugacuuccugcuguucaugcuugaaggguuguugcaguuguggcagcugcugcaaauuugacgaagaugacuccgagccuguccugaagggggugaaguuacacuacacaugaggacuaguuauaagacugacuagcccgaugggccucccaacgggcccuccuccccuccuugcaccgagauuaauaaaaaaaaaaaaaaaaaaaaaaaaaaaaaaaaaaaaaaaaaaaaaaaaaaaaaaaaaaaaaaaaugcaucccccccccccccccccccccccccccccccaaaggcucuuuucagagccaccagaauu

SEQ ID NO: 12979 - RNA, 4039 nt, Artificial Sequence
  SARS-CoV-2/USA/WA-UW31/2020__EPI_ISL_414618 spike protein mRNA human (1-1273)
aggagaaagcuuaccauguucguguuucugguccuccuuccccugguuagcucccagugcgugaacuugaccacaagaacucaauuaccuccagccuacacuaauucuuucaccaggggcguauauuacccggacaagguguuucggucaaguguccugcacagcacacaggaucuauuccuccccuuuuucuccaacgugacuugguuucaugcuauccacguuucugggaccaauggaacaaaacgcuucgacaacccugugcugccauuuaaugauggugucuauuucgcaucgaccgagaagucaaacauuauacgaggcuggaucuuugggacuacacuugacagcaaaacccagagucuguugauugugaauaacgccacgaauguaguuaucaaggugugugaguuccaguuuugcaacgaucccuuccucggagucuacuaucauaaaaauaacaaguccuggauggagucugaguuccguguguacagcuccgcgaauaacuguacuuuugaauaugugucacaaccuuuccugauggaccuggaaggcaagcaggguaauuuuaaaaaccucagagaguucgucuuuaagaacauugauggguacuucaaaaucuacaguaagcacaccccaauaaauuuaguuagggaccugccccagggauuuagcgcucuugagccuuugguggaucugccaaucggcauuaacaucacacgguuccagacucuacucgcccugcaucgcucuuaucuuaccccgggcgacuccucaagcggguggacagcaggagccgcugcauacuauguagguuaccugcaacccagaaccuuuuugcucaaauauaaugaaaacggcacgauuacugaugccguggacugcgcucuggauccuuuaagugagacaaaguguacccugaagucuuucacugucgaaaaagggaucuaccagacauccaauuuuagggugcagccaaccgagagcauaguucgguuccccaacauuacgaaucucugcccuuuuggagagguguucaacgccacccgcuucgcgucggucuaugcauggaaucgaaagagaaucucuaacuguguggccgacuacuccguacuuuacaauucagcuaguuuuagcacauucaaaugcuauggcguuuccccaacuaagcugaacgacuuguguuuuaccaauguguacgccgauucuuucgucauuaggggugacgaagugcggcagaucgcacccgggcaaacaggaaaaaucgcugauuauaacuacaagcuaccggacgauuuuacuggcugcgucauugccuggaauagcaacaaccuggacucaaaagugggcgggaauuauaacuaccucuaucgucuguuccgcaagaguaaucuuaagccuuuugagagagauauauccaccgaaaucuaccaggcgggaagcacacccuguaacggugccgagggcuucaauugcuacuuuccacugcagucuuauggguuccaaccuaccaacggaguuggcuaccagcccuauagggugguagucuugucauuugaacuccugcacgcaccagcuacugugugcggucccaaaaagaguacgaauuuaguuaaaaacaagugugugaauuucaacuuuaaugggcugacaggcaccggaguccuaacugagagcaacaaaaaguuccucccuuuccagcaguuuggccgggacauugccgauaccacagacgcugugcgagauccacaaacccuggagauccuugacauaacuccgugcuccuucgggggaguaucugugauuacacccgguacgaauaccucgaaccagguugccgucuuguaccaggacgugaauuguacugaagugccugucgcaauccacgccgaucagcugacaccaaccuggcgcguuuauagcacaggcuccaacguguuucaaacuagagcugggugccucaucggagcggagcaugugaacaauucauacgaaugugacauucccaucggcgcagguauuugcgccaguuaucagacccagacgaacucuccuaggcgggcucgcagcguagccucccagucaauaaucgcauacaccaugagccugggggccgaaaauucugucgcuuacuccaacaauaguauugccaucccaacaaacuucacuaucagcgugaccacagaaauucuucccguuucuaugacuaagaccuccguggauuguacgauguauauaugcggcgacucaacagaguguaguaaucuguugcuccaauacggcagcuuuugcacccagcugaacagagcauuaacuggaaucgcggucgagcaggauaaaaauacacaggaaguguucgcucaaguuaagcagauuuauaaaaccccgccuaucaaggacuuugggggauucaacuuuucgcagauucugccagaucccuccaaaccuucuaagaggagcuucaucgaggaccuacucuuuaauaaggugacucuggccgaugcagguuucauaaaacaauacggcgacugucuuggggauaucgccgcucgugacuugauuugcgcccagaaguucaacggacugaccguacugcccccacucuuaacagaugaaaugaucgcacaguauacgucagcucugcuugccggcaccauuacgagugguuggacauuuggggcgggcgccgcuuugcagaucccuuucgcaaugcaaauggccuaccgguuuaauggaauaggcgucacccagaacgugcucuaugagaaucagaaacugauugcuaaccaguucaacuccgccaucgggaagauucaagacucucuaagcuccacagcaucagcgcugggaaaacuccaggacguggucaaucagaacgcccaggcucugaauacucuuguuaagcaauugagcaguaacuuuggcgccaucucuuccgugcugaaugauauauuaagccgacucgacaagguagaagcagaggugcagaucgauagacugauuaccgguaggcuucagucgcugcaaacguacgucacacagcaguugauccgcgcugccgagauucgggcaucagccaaccucgcugcgaccaaaaugucugaaugcgugcuggggcagaguaagagaguugacuucuguggaaaaggcuaccaccuaauguccuuuccccaaagcgccccacaugguguggucuuccugcacgugacuuauguuccggcacaggagaagaauuuuaccacagcuccugccaucugccacgauggcaaagcccauuuccccagggaagggguguuugucucuaacggaacucacugguucguaacccagcgcaauuuuuacgagccacagauaauuacaacggacaacaccuucgugagcggcaauugugauguugugaucgggaucgucaacaauacuguguaugacccccuccaaccugagcuggauuccuucaaggaggaacuugacaaauacuuuaagaaccauacaucaccagauguagacuugggagauauuaguggcaucaaugcuagcguggucaacauucagaaggaaauagaccgacugaaugagguugccaaaaacuuaaacgaaucucucaucgaccugcaggagcuugguaaguaugagcaguacauuaaauggcccugguauaucuggcugggguucauugcaggacuaaucgcgauagugauggugaccaucaugcucugcuguaugacuuccugcuguucaugccugaagggcuguugcaguugugguagcugcugcaaauuugaugaagacgauuccgagccugucuugaagggcgugaagcugcacuacacaugaggacuaguuauaagacugacuagcccgaugggccucccaacgggcccuccuccccuccuugcaccgagauuaauaaaaaaaaaaaaaaaaaaaaaaaaaaaaaaaaaaaaaaaaaaaaaaaaaaaaaaaaaaaaaaaaugcaucccccccccccccccccccccccccccccccaaaggcucuuuucagagccaccagaauu

SEQ ID NO: 12980 - RNA, 4039 nt, Artificial Sequence
  SARS-CoV-2/South Korea/SNU01/2020__EPI_ISL_411929 spike protein mRNA human (1-1273)
aggagaaagcuuaccauguucguguuucugguccuccuuccccugguuagcucccagugcgugaacuugaccacaagaacucaauuaccuccagccuacaccaauucuuucacgaggggcguauauuacccggacaagguguuucggucaaguguccugcacagcacacaggaucuauuccuccccuuuuucuccaacgugacuugguuucaugcuauccacguuucugggaccaauggaacaaaacgcuucgacaacccugugcugccauuuaaugauggugucuauuucgcaucgaccgagaagucaaacauuauacgaggcuggaucuuugggacuacacuugacagcaaaacccagagucuguugauugugaauaacgccacgaauguaguuaucaaggugugugaguuccaguuuugcaacgaucccuuccucggagucuacuaucauaaaaauaacaaguccuggauggagucugaguuccguguguacagcuccgcgaauaacuguacuuuugaauaugugucacaaccuuuccugauggaccuggaaggcaagcaggguaauuuuaaaaaccucagagaguucgucuuuaagaacauugauggguacuucaaaaucuacaguaagcacaccccaauaaauuuaguuagggaccugccccagggauuuugggcucuugagccuuugguggaucugccaaucggcauuaacaucacacgguuccagacucuacucgcccugcaucgcagcuaucuuaccccgggcgacucuuccucaggguggacagcaggagccgcugcauacuauguagguuaccugcaacccagaaccuuuuugcucaaauauaaugaaaacggcacgauuacugaugccguggacugcgcucuggauccuuuaagcgagacaaaguguacccugaagaguuucacugucgaaaaagggaucuaccagacaucuaauuuuagggugcagccaaccgaguccauaguucgguuccccaacauuacgaaucucugcccuuuuggagagguguucaacgccacccgcuucgcgagcgucuaugcauggaaucgaaagagaaucucgaacuguguggccgacuacucuguacuuuacaauuccgcuucauuuaguacauucaaaugcuauggcguuagcccaacuaagcugaacgacuuguguuuuaccaauguguacgccgauuccuucgucauuaggggugacgaagugcggcagaucgcacccgggcaaacaggaaaaaucgcugauuauaacuacaagcuaccggacgauuuuacuggcugcgucauugccuggaacucuaauaaccuggacagcaaagugggcgggaauuauaacuaccucuaucgucuguuccgcaagucaaaucuuaagccuuuugagagagauauaaguaccgaaaucuaccaggcgggauccacacccuguaacgguguugagggcuucaauugcuacuuuccacugcagagcuauggguuccaaccuaccaacggagugggcuaccagcccuauaggguagucguguugucuuuugaacuccugcacgccccagcaacuguuugcggucccaaaaagucaacgaauuuagugaaaaacaagugugucaauuucaacuuuaaugggcugacaggcaccggagugcuaacugagaguaacaaaaaguuccucccuuuccagcaguuuggccgggacauugcugauaccacagacgccguacgagauccacaaacccuggagauccuugacauaacuccgugcagcuucgggggaguguccguuauuacacccgguacgaauaccucuaaccaggucgcuguguuguaccaggacgugaauuguacugaagucccuguugccauccacgcagaucagcugacaccaaccuggcgcguguauucgacaggcagcaacguguuucaaacuagagccgggugccucaucggagcugagcauguaaacaauuccuacgaaugugacauucccaucggcgcggguauuugcgcaucauaucagacccagacgaacaguccuaggcgggcccgcucugucgcuagccaguccauaaucgccuacaccaugucacugggggcagagaauagcguggccuacucuaacaauuccauugcuaucccaacaaacuucacuaucaguguuaccacagaaauucuucccgugagcaugacuaagaccucugucgauuguacgauguauauaugcggcgacuccacagaguguucaaaucuguugcuccaauacggaaguuuuugcacccagcugaacagagccuuaacuggcaucgcaguggagcaggauaaaaauacacaggaaguuuucgcgcaagugaagcagauuuauaaaaccccgccuaucaaggacuuugggggauucaacuuuagccagauucugccagaucccucgaaaccuuccaagaggucuuucaucgaggaccuacucuuuaauaagguaacucuggcugaugccgguuucauaaaacaauacggcgacugucuuggggauaucgcagcccgugacuugauuugcgcucagaaguucaacggacugaccguccucccuccacuguuaacagaugaaaugaucgcccaguauacgagcgcacugcuugcuggcaccauuacuucagguuggacauuuggggccggcgcggccuugcagaucccuuucgcuaugcaaauggcauaccgguuuaauggaauaggcgugacccagaacgugcucuaugagaaucagaaacugauugccaaccaguucaacagugcuaucgggaagauucaagacucccuaucuagcacagccuccgcacugggaaaacuccaggacgucguuaaucagaacgcgcaggcccugaauacucuugugaagcaauugucaagcaacuuuggcgcuaucaguucuguacugaaugauauauuaucccgacucgacaagguggaagccgagguccagaucgauagacugauuaccgguaggcuucagagccugcaaacguacgugacacagcaguugauccgcgcagcugagauucgggccucggcaaaccucgccgcuaccaaaaugucagaaugcguucuggggcagucuaagagaguggacuucuguggaaaaggcuaccaccuaaugaguuuuccccaauccgcgccacauggugucguguuccugcacguuacuuaugugccggcccaggagaagaauuuuaccacagcacccgcuaucugccacgauggcaaagcccauuuccccagggaaggggucuuuguaagcaacggaacucacugguucgugacccagcgcaauuuuuacgagccacagauaauuacaacggacaacaccuucguuucuggcaauugugauguggucaucgggaucgugaacaauacuguauaugacccccuccaaccugagcuggauagcuucaaggaagaacuugacaaauacuuuaagaaccauacauccccagauguggacuugggagauauuucaggcaucaaugccagugucguuaacauucagaaggaaauagaccgacugaaugagguggcuaaaaacuuaaacgaaagccucaucgaccugcaggagcuugguaaguaugagcaguacauuaaauggcccugguauaucuggcugggguucauugcaggacuaaucgccauagugauggucaccaucaugcucugcuguaugacuucuugcuguuccugccugaagggcuguugcucaugugguaguugcugcaaauuugaugaagacgauagcgagccuguguugaagggcguuaagcugcacuacacaugaggacuaguuauaagacugacuagcccgaugggccucccaacgggcccuccuccccuccuugcaccgagauuaauaaaaaaaaaaaaaaaaaaaaaaaaaaaaaaaaaaaaaaaaaaaaaaaaaaaaaaaaaaaaaaaaugcaucccccccccccccccccccccccccccccccaaaggcucuuuucagagccaccagaauu

SEQ ID NO: 12981 - RNA, 4039 nt, Artificial Sequence
  SARS-CoV-2/China/WF0004/2020__EPI_ISL_413694 spike protein mRNA human (1-1273)
aggagaaagcuuaccauguucguguuucugguccuccuuccccugguuagcucccagugcgugaacuugaccacaagaacucaauuaccuccagccuacacgaauagcuucaccaggggcguauauuacccggacaagguguuucggucaaguguccugcacagcacacaggaucuauuccuccccuuuuucuccaacgugacuugguuucaugcuauccacguuucugggaccaauggaacaaaacgcuucgacaacccugugcugccauuuaaugauggugucuauuucgcaucgaccgagaagucaaacauuauacgaggcuggaucuuugggacuacacuugacagcaaaacccagagucuguugauugugaauaacgccacgaauguaguuaucaaggugugugaguuccaguuuugcaacgaucccuuccucggagucuacuaucauaaaaauaacaaguccuggacugagucugaguuccguguguacagcuccgcgaauaacuguaccuuugaguaugugucacaaccuuuccugauggaccuggaaggcaagcaggguaauuuuaaaaaccucagagaguucgucuuuaagaacauugauggguacuucaaaaucuacaguaagcacacaccaauaaauuuaguuagggaccugccccagggauuuagcgcucuugagccuuugguggaucugccaaucggcauuaacaucacucgguuccagacccuacucgcccugcaucgcucuuaucuuacaccgggcgacuccucaagcggguggaccgcaggagccgcugcauacuauguagguuaccugcaacccagaacguuuuugcucaaauauaaugaaaacggcacuauuacagaugccguggacugcgcucuggauccuuuaagugagaccaaguguacucugaagucuuucacagucgaaaaagggaucuaccagaccuccaauuuuagggugcagccaacggagagcauaguucgguuccccaacauuaccaaucucugcccuuuuggagagguguucaacgccacacgcuucgcgucggucuaugcauggaaucgaaagagaaucucuaacuguguggccgacuacuccguacuuuacaauucagcuaguuuuagcacuuucaaaugcuauggcguuuccccaaccaagcugaacgacuuguguuuuacaaauguguacgccgauucuuucgucauuaggggugacgaagugcggcagaucgcacccgggcaaacuggaaaaaucgcugauuauaacuacaagcuaccggacgauuuuaccggcugcgucauugccuggaauagcaacaaccuggacucaaaagugggcgggaauuauaacuaccucuaucgucuguuccgcaagaguaaucuuaagccuuuugagagagauauauccacagaaaucuaccaggcgggaagcacccccuguaacgguguugagggcuucaauugcuacuuuccacugcagucuuauggguuccaaccuacuaacggagugggcuaccagcccuauaggguagucguguugucauuugaacuccugcacgccccagcaacgguuugcggucccaaaaagaguacaaauuuagugaaaaacaagugugucaauuucaacuuuaaugggcugaccggcacuggagugcuaaccgagagcaacaaaaaguuccucccuuuccagcaguuuggccgggacauugcugauacaaccgacgccguacgagauccacaaacucuggagauccuugacauaacaccgugcuccuucgggggagugucuguuauuacgcccgguaccaauacuucgaaccaggucgcuguguuguaccaggacgugaauuguacagaagucccuguugccauccacgcagaucagcugaccccaacauggcgcguguauagcacuggcuccaacguguuucaaaccagagccgggugccucaucggagcugagcauguaaacaauucauacgaaugugacauucccaucggcgcggguauuugcgcaaguuaucagacgcagaccaacucuccuaggcgggcccgcagcgucgcuucccagucaauaaucgccuacacaaugagccugggggcagaaaauucuguggccuacuccaacaauaguauugcuaucccaacuaacuucaccaucagcguuacaacugaaauucuucccgugucuaugaccaagacguccgucgauuguacaauguauauaugcggcgacucaaccgaguguaguaaucuguugcuccaauacggaucuuuuugcacucagcugaacagagccuuaacaggcaucgcaguggagcaggauaaaaauacccaggaaguuuucgcgcaagugaagcagauuuauaaaacuccgccuaucaaggacuuugggggauucaacuuuucgcagauucugccagaucccuccaaaccuucuaagaggagcuucaucgaggaccuacucuuuaauaagguaacccuggcugaugccgguuucauaaaacaauacggcgacugucuuggggauaucgcagcccgugacuugauuugcgcucagaaguucaacggacugacaguccugcccccacucuuaacggaugaaaugaucgcccaguauaccucagcacugcuugcuggcacuauuacaagugguuggaccuuuggggccggcgcggccuugcagaucccuuucgcuaugcaaauggcauaccgguuuaauggaauaggcgugacacagaacgugcucuaugagaaucagaaacugauugccaaccaguucaacuccgcuaucgggaagauucaagacucucuaagcuccacugccucagcacugggaaaacuccaggacgucguuaaucagaacgcgcaggcccugaauacccuugugaagcaauugagcaguaacuuuggcgcuaucucuuccguacugaaugauauauuaagccgacucgacaagguggaagccgagguccagaucgauagacugauuacggguaggcuucagucgcugcaaacauacgugacccagcaguugauccgcgcagcugagauucgggccucagcaaaccucgccgcuacuaaaaugucugaaugcguucuggggcagaguaagagauucgacuuuuguggaaaaggcuaccaccuaauguccuucccccaaagcgcgccacaugguguggucuuucugcacgugaccuauguuccggcccaggagaagaauuucacaacugcuccugcaaucugccacgauggcaaagcccauuuucccagggaagggguguucgucucuaacggaacccacugguuuguaacacagcgcaauuucuacgagccacagauaauuacgaccgacaacacuuucgugagcggcaauugugauguugugaucgggaucgucaacaauacaguguaugacccccuccaaccugagcuggauuccuuuaaggaagaacuugacaaauacuucaagaaccauaccucaccagauguagacuugggagauauuaguggcaucaaugccagcguggucaacauucagaaggaaauagaccgacugaaugagguugcuaaaaacuuaaacgaaucucucaucgaccugcaggagcuugguaaguaugagcaguacauuaaauggcccugguauaucuggcugggguuuauugcaggacuaaucgccauagugauggugacuaucaugcucugcuguaugacauccugcuguucaugccugaagggcuguugcaguugugguagcugcugcaaauucgaugaagacgauuccgagccugucuugaagggcgugaagcugcacuacaccugaggacuaguuauaagacugacuagcccgaugggccucccaacgggcccuccuccccuccuugcaccgagauuaauaaaaaaaaaaaaaaaaaaaaaaaaaaaaaaaaaaaaaaaaaaaaaaaaaaaaaaaaaaaaaaaaugcaucccccccccccccccccccccccccccccccaaaggcucuuuucagagccaccagaauu

SEQ ID NO: 12982 - RNA, 4039 nt, Artificial Sequence
  SARS-CoV-2/China/WF0028/2020__EPI_ISL_413791 spike protein mRNA human (1-1273)
aggagaaagcuuaccauguucguguuucugguccuccuuccccugguuagcucccagugcgugaacuugaccacaagaacucaauuaccuccagccuacacuaauucuuucaccaggggcguauauuacccggacaagguguuucggucaaguguccugcacagcacacaggaucuauuccuccccuuuuucuccaacgugacuugguuucaugcuauccacguuucugggaccaauggaacaaaacgcuucgacaacccugugcugccauuuaaugauggugucuauuucgcaucgaccgagaagucaaacauuauacgaggcuggaucuuugggacuacacuugacagcaaaacccagagucuguugauugugaauaacgccacgaauguaguuaucaaggugugugaguuccaguuuugcaacgaucccuuccucggagucuacuaucauaaaaauaacaaguccuggauggagucugaguuccguguguacagcuccgcgaauaacuguacuuuugaauaugugucacaaccuuuccugauggaccuggaaggcaagcaggguaauuuuaaaaaccucagagaguucgucuuuaagaacauugauggguacuucaaaaucuacaguaagcacaccccaauaaauuuaguuagggaccugccccagggauuuagcgcucuugagccuuugguggaucugccaaucggcauuaacaucacacgguuccagacucuacucgcccugcaucgcucuuaucuuaccccgggcgacuccucaagcggguggacagcaggagccgcugcauacuauguagguuaccugcaacccagaaccuuuuugcucaaauauaaugaaaacggcacgauuacugaugccguggacugcgcucuggauccuuuaagugagacaaaguguacccugaagucuuucacugucgaaaaagggaucuaccagacauccaauuuuagggugcagccaaccgagagcauaguucgguuccccaacauuacgaaucucugcccuuuuggagagguguucaacgccacccgcuucgcgucggucuaugcauggaaucgaaagagaaucucuaacuguguggccgacuacuccguacuuuacaauucagcuaguuuuagcacauucaaaugcuauggcguuuccccaacuaagcugaacgacuuguguuuuaccaauguguacgccgauucuuucgucauuaggggugacgaagugcggcagaucgcacccgggcaaacaggaaaaaucgcugauuauaacuacaagcuaccggacgauuuuacuggcugcgucauugccuggaauagcaacaaccuggacucaaaagugggcgggaauuauaacuaccucuaucgucuguuccgcaagaguaaucuuaagccuuuugagagagauauauccaccgaaaucuaccaggcgggaagcacacccuguaacgguguugagggcuucaauugcuacuuuccacugcagucuuauggguuccaaccuaccaacggagugggcuaccagcccuauaggguagucguguugucauuugaacuccugcacgccccagcaacuguuugcggucccaaaaagaguacgaauuuagugaaaaacaagugugucaauuucaacuuuaaugggcugacaggcaccggagugcuaacugagagcaacaaaaaguuccucccuuuccagcaguuuggccgggacauugcugauaccacagacgccguacgagauccacaaacccuggagauccuugacauaacuccgugcuccuucgggggagugucuguuauuacacccgguacgaauaccucgaaccaggucgcuguguuguaccaggacgugaauuguacugaagucccuguugccauccacgcagaucagcugacaccaaccuggcgcguguauagcacaggcuccaacguguuucaaacuagagccgggugccucaucggagcugagcauguaaacaauucauacgaaugugacauucccaucggcgcggguauuugcgcaaguuaucagacccagacgaacucuccuaggcgggcccgcagcgucgcuucccagucaauaaucgccuacaccaugagccugggggcagaaaauucuguggccuacuccaacaauaguauugcuaucccaacaaacuucacuaucagcguuaccacagaaauucuucccgugucuaugacuaagaccuccgucgauuguacgauguauauaugcggcgacucaacagaguguaguaaucuguugcuccaauacggcagcuuuugcacccagcugaacagagccuuaacuggaaucgcaguggagcaggauaaaaauacacaggaaguuuucgcgcaagugaagcagauuuauaaaaccccgccuaucaaggacuuugggggauucaacuuuucgcagauucugccagaucccuccaaaccuucuaagaggagcuucaucgaggaccuacucuuuaauaagguaacucuggcugaugccgguuucauaaaacaauacggcgacugucuuggggauaucgcagcccgugacuugauuugcgcucagaaguucaacggacugaccguccugcccccacucuuaacagaugaaaugaucgcccaguauacgucagcacugcuugcuggcaccauuacgagugguuggacauuuggggccggcgcggccuugcagaucccuuucgcuaugcaaauggcauaccgguuuaauggaauaggcgugacccagaacgugcucuaugagaaucagaaacugauugccaaccaguucaacuccgcuaucgggaagauucaagacucucuaagcuccacagccucagcacugggaaaacuccaggacgucguuaaucagaacgcgcaggcccugaauacucuugugaagcaauugagcaguaacuuuggcgcuaucucuuccguacugaaugauauauuaagccgacucgacaagguggaagccgagguccagaucgauagacugauuaccgguaggcuucagucgcugcaaacguacgugacacagcaguugauccgcgcagcugagauucgggccucagcaaaccucgccgcuaccaaaaugucugaaugcguucuggggcagaguaagagaguggacuucuguggaaaaggcuaccaccuaauguccuuuccccaaagcgcgccacauggugucguguuccugcacguuacuuaugugccggcccaggagaagaauuuuaccacagcuccugcaaucugccacgauggcaaagcccauuuccccagggaaggggucuuuguaucuaacggaacucacugguucgugacccagcgcaauuuuuacgagccacagauaauuacaacggacaacaccuucguuagcggcaauugugauguggucaucgggaucgugaacaauacuguauaugacccccuccaaccugagcuggaauccuucaaggaggaacuugauaaauacuuuaagaaccauacaucaccagacguggauuugggagacauuaguggcaucaaugccagcgucguuaacauucagaaggagauagaucgacugaaugaaguggcuaaaaacuuaaacgagucucucaucgaccugcaggagcuugguaaguaugaacaguacauuaaauggcccugguauaucuggcugggguucauugcaggacuaaucgccauagugauggucaccaucaugcucugcuguaugacuuccugcuguucaugccugaagggcuguugcaguugugguagcugcugcaaauuugacgaggaugacuccgaaccuguguugaagggcguuaagcugcacuacacaugaggacuaguuauaagacugacuagcccgaugggccucccaacgggcccuccuccccuccuugcaccgagauuaauaaaaaaaaaaaaaaaaaaaaaaaaaaaaaaaaaaaaaaaaaaaaaaaaaaaaaaaaaaaaaaaaugcaucccccccccccccccccccccccccccccccaaaggcucuuuucagagccaccagaauu

SEQ ID NO: 12983 - RNA, 4039 nt, Artificial Sequence
  SARS-CoV-2/2019-nCoV/USA-CruiseA-18/2020__MT159716.1 spike protein mRNA human (1-1273)
aggagaaagcuuaccauguucguguuucugguccuccuuccccugguuagcucccagugcgugaacuugaccacaagaacucaauuaccuccagccuacacuaauucuuucaccaggggcguauauuacccggacaagguguuucggucaaguguccugcacagcacacaggaucuauuccuccccuuuuucuccaacgugacuugguuucaugcuauccacguuucugggaccaauggaacaaaacgcuucgacaacccugugcugccauuuaaugauggugucuauuucgcaucgaccgagaagucaaacauuauacgaggcuggaucuuugggacuacacuugacagcaaaacccagagucuguugauugugaauaacgccacgaauguaguuaucaaggugugugaguuccaguuuugcaacgaucccuuccucggagucuacuaucauaaaaauaacaaguccuggauggagucugaacugcguguguacagcuccgcgaauaacuguacuuucgaguaugugucacaaccuuuucugauggaccucgaaggcaagcaggguaauuucaaaaacuuaagagaguuugucuucaagaacauugauggguacuuuaaaaucuacaguaagcacaccccaauaaaucugguuagggaccuuccccagggauucagcgcuuuggagccucugguggaucuaccaaucggcauuaacaucacacgguuucagacucuccuggcccuucaucgcucuuaucugaccccgggcgacuccucaagcggguggacagcaggagccgcugcauacuauguagguuacuugcaacccagaaccuuccuccugaaauauaaugaaaacggcacgauuacugaugccguggacugcgcuuuagauccucugagugagacaaaguguacccucaagucuuuuacugucgaaaaagggaucuaccagacauccaauuucagggugcagccaaccgagagcauaguucgguuucccaacauuacgaaucuuugcccuuucggagagguguuuaacgccacccgcuucgcgucggucuaugcauggaaucgaaagagaaucucuaacuguguggccgacuacuccguacuguacaauucagcuaguuucagcacauuuaaaugcuauggcguuuccccaacuaaguugaacgaccuauguuucaccaauguguacgccgauucuuuugucauuaggggugacgaagugcggcagaucgcacccgggcaaacaggaaaaaucgcugauuauaacuacaagcugccggacgauuucacuggcugcgucauugccuggaauagcaacaaccucgacucaaaagugggcgggaauuauaacuaccuguaucgucuuuuucgcaagaguaaucugaagccuuucgagagagauauauccaccgaaaucuaccaggcgggaagcacacccuguaacgguguugagggcuuuaauugcuacuucccauugcagucuuauggguuucaaccuaccaacggagugggcuaccagcccuauaggguagucgugcucucauucgaacuguuacacgccccagcaacuguuugcggucccaaaaagaguacgaaucuggugaaaaacaagugugucaauuuuaacuucaaugggcuaacaggcaccggagugcucacugagagcaacaaaaaguuucugccuuuccagcaguucggccgggacauugcugauaccacagacgccguacgagauccacaaacccuugagaucuuggacauaacuccgugcuccuuugggggagugucuguuauuacacccgguacgaauaccucgaaccaggucgcugugcuguaccaggacgugaauuguacugaagucccuguugccauccacgcagaucagcucacaccaaccuggcgcguguauagcacaggcuccaacguguuccaaacuagagccgggugccugaucggagcugagcauguaaacaauucauacgaaugugacauucccaucggcgcggguauuugcgcaaguuaucagacccagacgaacucuccuaggcgggcccgcagcgucgcuucccagucaauaaucgccuacaccaugagccuuggggcagaaaauucuguggccuacuccaacaauaguauugcuaucccaacaaacuuuacuaucagcguuaccacagaaauucugcccgugucuaugacuaagaccuccgucgauuguacgauguauauaugcggcgacucaacagaguguaguaauuugcuccugcaauacggcagcuucugcacccaguuaaacagagcccugacuggaaucgcaguggagcaggauaaaaauacacaggaaguuuuugcgcaagugaagcagauuuauaaaaccccgccuaucaaggacuucgggggauuuaacuucucgcagauucuaccagaucccuccaaaccuucuaagaggagcuuuaucgaggaccuccuguucaauaagguaacucuugcugaugccgguuuuauaaaacaauacggcgacuguuugggggauaucgcagcccgugaccugauuugcgcucagaaguucaacggacucaccguccugcccccauuacugacagaugaaaugaucgcccaguauacgucagcacuuuuggcuggcaccauuacgagugguuggacauucggggccggcgcggcccuccagaucccuuuugcuaugcaaauggcauaccgguucaauggaauaggcgugacccagaacgugcuguaugagaaucagaaacuaauugccaaccaguuuaacuccgcuaucgggaagauucaagacucucugagcuccacagccucagcacucggaaaacugcaggacgucguuaaucagaacgcgcaggcccuuaauacuuuggugaagcaacugagcaguaacuucggcgcuaucucuuccguauuaaaugauauacucagccgacuggacaagguggaagccgagguccagaucgauagacuuauuaccgguaggcugcagucguugcaaacguacgugacacagcagcucauccgcgcagcugagauucgggccucagcaaaccuggccgcuaccaaaaugucugaaugcguucuagggcagaguaagagaguggacuuuuguggaaaaggcuaccaccugauguccuucccccaaagcgcgccacauggugucguguuucuccacguuacuuaugugccggcccaggagaagaauuucaccacagcuccugcaaucugccacgauggcaaagcccauuuucccagggaaggggucuucguaucuaacggaacucacugguuugugacccagcgcaauuucuacgagccacagauaauuacaacggacaacaccuuuguuagcggcaauugugauguggucaucgggaucgugaacaauacuguauaugacccccugcaaccugagcuugauuccuucaaggaagaguuggacaaauacuucaagaaccauacaucaccagauguggaccugggagauauuaguggcaucaaugccagcgucguuaacauucagaaggaaauagaccgauuaaaugagguggcuaaaaaccucaacgaaucucugaucgaccuucaggagcuggguaaguaugagcaguacauuaaauggcccugguauaucuggcuaggguuuauugcaggacucaucgccauagugauggucaccaucaugcugugcuguaugacuuccugcuguucaugcuugaagggcuguugcaguugugguagcugcugcaaauucgaugaagacgauuccgagccugugcugaagggcguuaaguuacacuacacaugaggacuaguuauaagacugacuagcccgaugggccucccaacgggcccuccuccccuccuugcaccgagauuaauaaaaaaaaaaaaaaaaaaaaaaaaaaaaaaaaaaaaaaaaaaaaaaaaaaaaaaaaaaaaaaaaugcaucccccccccccccccccccccccccccccccaaaggcucuuuucagagccaccagaauu

SEQ ID NO: 12984 - RNA, 4039 nt, Artificial Sequence
  SARS-CoV-2/SARS-CoV-2/Yunnan-01/human/2020/CHN__MT049951.1 spike protein mRNA human (1-1273)
aggagaaagcuuaccauguucguguuucugguccuccuuccccugguuagcucccagugcgugaacuugaccacaagaacucaauuaccuccagccaauacgaacucuuucaccaggggcguauacuauccggacaagguguuucggucaaguguccugcacagcacacaggaucuauuccuccccuuuuucuccaaugugacuugguuucaugcuauccacguuucugggaccaacggaacaaaacgcuucgacaauccugugcugccauuuaacgauggugucuacuucgcaucgaccgagaagucaaauauuauacgaggcuggaucuuugggacuacacuugacagcaaaacccagagucuguugauugugaacaaugccacgaacguaguuaucaaggugugugaguuccaguuuugcaaugaucccuuccucggagucuauuaccauaaaaacaauaaguccuggauggagucugaguuccguguguauagcuccgcgaacaauuguacuuuugaauacgugucacaaccuuuccugauggaccuggaaggcaagcaggguaacuuuaaaaaccucagagaguucgucuuuaagaauauugauggguauuucaaaaucuacaguaagcacaccccaauaaacuuaguuagggaccugccccagggauuuagcgcucuugagccuuugguggaucugccaaucggcauuaauaucacacgguuccagacucuacucgcccugcaucgcucuuaccuuaccccgggcgacuccucaagcggguggacagcaggagccgcugcauauuacguagguuaucugcaacccagaaccuuuuugcucaaauacaacgaaaauggcacgauuacugaugccguggacugcgcucuggauccuuuaagugagacaaaguguacccugaagucuuucacugucgaaaaagggaucuaucagacauccaacuuuagggugcagccaaccgagagcauaguucgguuccccaauauuacgaaccucugcccuuuuggagagguguucaaugccacccgcuucgcgucggucuacgcauggaaccgaaagagaaucucuaauuguguggccgacuauuccguacuuuacaacucagcuaguuuuagcacauucaaaugcuacggcguuuccccaacuaagcugaaugacuuguguuuuaccaacguguaugccgauucuuucgucauuaggggugacgaagugcggcagaucgcacccgggcaaacaggaaaaaucgcugauuacaauuauaagcuaccggacgauuuuacuggcugcgucauugccuggaacagcaacaaucuggacucaaaagugggcgggaacuacaauuaucucuaccgucuguuccgcaagaguaaccuuaagccuuuugagagagauauauccaccgaaaucuaucaggcgggaagcacacccuguaaugguguugagggcuucaacugcuacuuuccacugcagucuuacggguuccaaccuaccaauggagugggcuaucagcccuacaggguagucguguugucauuugaacuccugcacgccccagcaacuguuugcggucccaaaaagaguacgaacuuagugaaaaauaagugugucaacuucaauuuuaacgggcugacaggcaccggagugcuaacugagagcaauaaaaaguuccucccuuuccagcaguuuggccgggacauugcugauaccacagacgccguacgagauccacaaacccuggagauccuugacauaacuccgugcuccuucgggggagugucuguuauuacacccgguacgaacaccucgaaucaggucgcuguguuguaucaggacgugaacuguacugaagucccuguugccauccacgcagaucagcugacaccaaccuggcgcguguacagcacaggcuccaacguguuucaaacuagagccgggugccucaucggagcugagcauguaaauaacucauaugaaugugacauucccaucggcgcggguauuugcgcaaguuaccagacccagacuaauucuccuaggcgggcccgcagcgucgcuucccagucaauaaucgccuauaccaugagccugggggcagagaacucuguggccuacuccaauaacaguauugcuaucccaacaaauuucacuaucagcguuaccacagaaauucuucccgugucuaugacuaagaccuccgucgauuguacgauguacauaugcggcgacucaacagaguguaguaaccuguugcuccaauauggcagcuuuugcacccagcugaauagagccuuaacuggaaucgcaguggagcaggauaaaaacacacaggaaguuuucgcgcaagugaagcagauuuacaaaaccccgccuaucaaggacuuugggggauucaauuuuucgcagauucugccagaucccuccaaaccuucuaagaggagcuucaucgaggaccuacucuuuaacaagguaacucuggcugaugccgguuucauaaaacaauauggcgacugucuuggggauaucgcagcccgugacuugauuugcgcucagaaguucaauggacugaccguccugcccccacucuuaacagaugaaaugaucgcccaguacacgucagcacugcuugcuggcaccauuacgagugguuggacauuuggggccggcgcggccuugcagaucccuuucgcuaugcaaauggcauaucgguuuaacggaauaggcgugacccagaaugugcucuacgagaaccagaaacugauugccaaccaguucaauuccgcuaucgggaagauucaagacucucuaagcuccacagccucagcacugggaaaacuccaggacgucguuaaccagaaugcgcaggcccugaacacucuugugaagcaauugagcaguaauuuuggcgcuaucucuuccguacugaacgauauauuaagccgacucgacaagguggaagccgagguccagaucgauagacugauuaccgguaggcuucagucgcugcaaacguaugugacacagcaguugauccgcgcagcugagauucgggccucagcaaaucucgccgcuaccaaaaugucugaaugcguucuggggcagaguaagagaguggacuucuguggaaaaggcuaccaccuaauguccuuuccccaaagcgcgccacauggugucguguuccugcacguuacuuacgugccggcccaggagaagaacuuuaccacagcuccugcaaucugccacgauggcaaagcccauuuccccagggaaggggucuuuguaucuaauggaacucacugguucgugacccagcgcaacuuuuaugagccacagauaauuacaacggacaauaccuucguuagcggcaacugugauguggucaucgggaucgugaauaacacuguauacgacccccuccaaccugagcuggauuccuucaaggaagaacuugacaaauauuuuaagaaucauacaucaccagauguggacuugggagauauuaguggcaucaacgccagcgucguuaauauucagaaggaaauagaccgacugaacgagguggcuaaaaacuuaaaugaaucucucaucgaccugcaggagcuugguaaguacgagcaguauauuaaauggcccugguacaucuggcugggguucauugcaggacuaaucgccauagugauggucaccaucaugcucugcuguaugacuuccugcuguucaugccugaagggcuguugcaguugugguagcugcugcaaauuugaugaagacgauuccgagccuguguugaagggcguuaagcugcacuauacaugaggacuaguuauaagacugacuagcccgaugggccucccaacgggcccuccuccccuccuugcaccgagauuaauaaaaaaaaaaaaaaaaaaaaaaaaaaaaaaaaaaaaaaaaaaaaaaaaaaaaaaaaaaaaaaaaugcaucccccccccccccccccccccccccccccccaaaggcucuuuucagagccaccagaauu

SEQ ID NO: 12985 - RNA, 4039 nt, Artificial Sequence
  SARS-CoV-2/USA/WA-UW292/2020__EPI_ISL_418077 spike protein mRNA human (1-1273)
aggagaaagcuuaccauguucguguuucugguccuccuuccccugguuagcucccagugcgugaacuugaccacaagaacucaauuaccuccagccuacaccaauucuuucacgaggggcguauauuacccggacaagguguuucggucaaguguccugcacagcacacaggaucuauuccuccccuuuuucuccaacgugacuugguuucaugcuauccacguuucugggaccaauggaacaaaacgcuucgacaacccugugcugccauuuaaugauggugucuauuucgcaucgaccgagaagucaaacauuauacgaggcuggaucuuugggacuacacuugacagcaaaacccagagucuguugauugugaauaacgccacgaauguaguuaucaaggugugugaguuccaguuuugcaacgaucccuuccucggagucuacuaucauaaaaauaacaaguccuggauggagucugaguuccguguguacagcuccgcgaauaacuguacuuuugaguaugugucacaaccuuuccugauggaccuggaaggcaagcaggguaauuuuaaaaaccucagagaguucgucuuuaagaacauugauggguacuucaaaaucuacaguaagcacaccccaauaaauuuaguuagggaccugccccagggauuuagcgcucuugagccuuugguggaucugccaaucggcauuaacaucacacgguuccagacucuacucgcccugcaucgcucuuaucuuaccccgggcgacuccucaagcggguggacagcaggagccgcugcauacuauguagguuaccugcaacccagaaccuuuuugcucaaauauaaugaaaacggcacgauuacugaugccguggacugcgcucuggauccuuuaagugagacaaaguguacccugaagucuuucacugucgaaaaagggaucuaccagacauccaauuuuagggugcagccaaccgagagcauaguucgguuccccaacauuacgaaucucugcccuuuuggagagguguucaacgccacccgcuucgcgucggucuaugcauggaaucgaaagagaaucucuaacuguguggccgacuacuccguacuuuacaauucagcuaguuuuagcacauucaaaugcuauggcguuuccccaacuaagcugaacgacuuguguuuuaccaauguguacgccgauucuuucgucauuaggggugacgaagugcggcagaucgcacccgggcaaacaggaaaaaucgcugauuauaacuacaagcuaccggacgauuuuacuggcugcgucauugccuggaauagcaacaaccuggacucaaaagugggcgggaauuauaacuaccucuaucgucuguuccgcaagaguaaucuuaagccuuuugagagagauauauccaccgaaaucuaccaggcgagcucuacacccuguaacggaguugaggguuucaauugcuacuuuccacugcagucauauggcuuccaaccuaccaacggggugggauaccagcccuauaggguagucguguugaguuuugaacuccugcacgccccagcaacuguuugcggccccaaaaagagcacgaauuuagugaaaaacaagugugucaauuucaacuuuaauggucugacagggaccggcgugcuaacugaguccaacaaaaaguuccucccuuuccagcaguuuggacgggacauugcugauaccacagacgccguacgagauccacaaacccuggagauccuugacauaacuccgugcucuuucggcggggugucgguuauuacacccggaacgaauaccagcaaccaggucgcuguguuguaccaggacgugaauuguacugaagucccuguugccauccacgcagaucagcugacaccaaccuggcgcguguauuccacagguucaaacguguuucaaacuagagccggcugccucaucggggcugagcauguaaacaauaguuacgaaugugacauucccaucggagcgggcauuugcgcaucuuaucagacccagacgaacagcccuaggcgggcccgcuccgucgcuucacagagcauaaucgccuacaccaugucucugggugcagaaaauuccguggccuacaguaacaauagcauugcuaucccaacaaacuucacuaucucuguuaccacagaaauucuucccguguccaugacuaagaccucagucgauuguacgauguauauaugcggggacaguacagaguguagcaaucuguugcuccaauacggcucguuuugcacccagcugaacagagccuuaacuggaaucgcaguggagcaggauaaaaauacacaggaaguuuucgcgcaagugaagcagauuuauaaaaccccgccuaucaaggacuuuggcggguucaacuuuucccagauucugccagaucccucuaaaccuagcaagaggucauucaucgaggaccuacucuuuaauaagguaacucuggcugaugccggauucauaaaacaauacggugacugucuuggcgauaucgcagcccgugacuugauuugcgcucagaaguucaacgggcugaccguccucccuccacuguuaacagaugaaaugaucgcccaguauacgagugcacugcuugcuggaaccauuacuuccggcuggacauuuggugccggggcggccuugcagaucccuuucgcuaugcaaauggcauaccgguuuaauggcauaggagugacccagaacgugcucuaugagaaucagaaacugauugccaaccaguucaacucugcuaucggcaagauucaagacagccuauccucaacagccagcgcacuggggaaacuccaggacgucguuaaucagaacgcgcaggcccugaauacucuugugaagcaauugaguucuaacuuuggagcuaucuccagcguacugaaugauauauuaucgcgacucgacaagguggaagccgagguccagaucgauagacugauuaccggcaggcuucagucacugcaaacguacgugacacagcaguugauccgcgcagcugagauucgggccucugcaaaccucgccgcuaccaaaaugagugaaugcguucugggucaguccaagagaguggacuucugugggaaaggauaccaccuaaugagcuuuccccaaucugcgccacauggcgucguguuccugcacguuacuuaugugccggcccaggagaagaauuuuaccacagcacccgcuaucugccacgaugguaaagcccauuuccccagggaaggcgucuuuguaagcaacgggacucacugguucgugacccagcgcaauuuuuacgagccacagauaauuacaacggacaacaccuucguuuccggaaauugugauguggucaucggcaucgugaacaauacuguauaugacccccuccaaccugagcuggauucauucaaggaagaacuugacaaauacuuuaagaaccauacaaguccagauguggacuugggggauauuagcggaaucaaugccucugucguuaacauucagaaggaaauagaccgacugaaugagguggcuaaaaacuuaaacgaaucccucaucgaccugcaggagcuuggcaaguaugagcaguacauuaaauggcccugguauaucuggcuggguuucauugcagggcuaaucgccauagugauggucaccaucaugcucugcuguaugacuucaugcuguaguugccugaagggauguugcagcuguggcuccugcugcaaauuugaugaagacgauucugagccuguguugaaggguguuaagcugcacuacacaugaggacuaguuauaagacugacuagcccgaugggccucccaacgggcccuccuccccuccuugcaccgagauuaauaaaaaaaaaaaaaaaaaaaaaaaaaaaaaaaaaaaaaaaaaaaaaaaaaaaaaaaaaaaaaaaaugcaucccccccccccccccccccccccccccccccaaaggcucuuuucagagccaccagaauu

SEQ ID NO: 12986 - RNA, 4039 nt, Artificial Sequence
  SARS-CoV-2/Iceland/192/2020__EPI_ISL_417819 spike protein mRNA human (1-1273)
aggagaaagcuuaccauguucguguuuuucguccugcucccccuuguuagcucccagugcgugaaccugaccacaagaacucaauugccuccagccuacacuaauucuuuuaccaggggcguauauuacccggacaagguguuccggucaagugucuuacacagcacacaggaucuguuucuacccuucuuuuccaacgugacuugguuccaugcuauccacguuucugggaccaauggaacaaaacgcuuugacaacccugugcucccauucaaugauggugucuauuuugcaucgaccgagaagucaaacauuauacgaggcuggaucuucgggacuacacuggacagcaaaacccagagucuucugauugugaauaacgccacgaauguaguuaucaaggugugugaauuucaguucugcaacgaucccuucuugggagucuacuaucauaaaaauaacaaguccuggauggagucugaauuucguguguacagcuccgcgaauaacuguacuuucgaguaugugucacaaccuuuucucauggaccuggaaggcaagcaggguaauuucaaaaaccugagagaguuugucuucaagaacauugauggguacuuuaaaaucuacaguaagcacaccccaauaaaucucguuagggacuuaccccagggauucagcgcucuggagccucuuguggauuugccaaucggcauuaacaucacacgguuucagacucugcuagcccuccaucgcucuuaucugaccccgggcgacuccucaagcggguggacagcaggagccgcugcauacuauguagguuaccuucaacccagaaccuuccuguugaaauauaaugaaaacggcacgauuacugaugccguggacugcgcucucgauccucugagugagacaaaguguaccuuaaagucuuuuacugucgaaaaagggaucuaccagacauccaauuucagggugcagccaaccgagagcauaguucgguuucccaacauuacgaaucugugcccuuucggagagguguucaacgccacccgcuuugcgucggucuaugcauggaaucgaaagagaaucucuaacuguguggccgacuacuccguacucuacaauucagcuaguuucagcacauuuaaaugcuauggcguuuccccaacuaaacuuaacgaccuguguuucaccaauguguacgccgauucuuuugucauuaggggugacgaagugcggcagaucgcacccgggcaaacaggaaagaucgcugauuauaacuacaaguugccggacgauuucacuggcugcgucauugccuggaauagcaacaaccuagacucaaaagugggcgggaauuauaacuaccuguaucgucucuuucgcaagaguaaucugaagccuuucgagagagauauauccaccgaaaucuaccaggcgggaagcacacccuguaacgguguugagggcuuuaauugcuacuucccacuucagucuuauggguuucaaccuaccaacggagugggcuaccagcccuauaggguagucgugcugucauucgaauugcuccacgccccagcaacuguuugcggucccaaaaagaguacgaaucuggugaaaaacaagugugucaauuuuaacuucaauggguuaacaggcaccggagugcugacugagagcaacaaaaaguuccuaccuuuucagcaguucggccgggacauugcugauaccacagacgccguacgagauccacaaacccucgagauccuggacauaacuccgugcuccuuugggggagugucuguuauuacacccgguacgaauaccucgaaccaggucgcugugcuuuaccagggcgugaauuguacugaagucccuguugccauccacgcagaccaguugacaccaaccuggcgcguguauagcacaggguccaacguguuccaaacuagagccggaugccugaucggcgcugagcauguaaacaauucauacgaaugugauauucccaucggugcggggauuugcgcaaguuaucagacccagacgaacucuccuaggcgggcccgcagcgucgcuucccagucaauaaucgccuacaccaugagccucggcgcagaaaauucuguggccuacuccaacaauaguauugcuaucccaacaaacuuuacuaucagcguuaccacagaaauucugcccgugucuaugacuaagaccuccgucgacuguacgauguauauaugcggagauucaacagaguguaguaaucuucuguugcaauacggcagcuucugcacccagcucaacagagcccugacugggaucgcaguggagcaggacaaaaauacacaggaaguuuuugcgcaagugaagcagauuuauaaaaccccgccuaucaaggauuucggagguuuuaacuucucgcagauuuuaccagaccccuccaaaccuucuaagaggagcuuuaucgaggaucugcuauucaauaagguaacucucgcugacgccggcuucauaaaacaauacggggauugucugggagacaucgcagcccgugaucuuauuugcgcucagaaguuuaacggcuugaccguccugcccccacuccugacagacgaaaugaucgcccaguauacgucagcauuacuggcugguaccauuacgaguggguggacauucggcgccggagcggcccuucagaucccuuuugcuaugcaaauggcauaccgguucaauggcauaggggugacccagaacguguuguaugagaaucagaaacucauugccaaccaguuuaacuccgcuaucggaaagauucaagauucucugagcuccacagccucagcacuaggcaaacugcaggacgucguuaaucagaacgcgcaggcccucaauacucuggugaagcaacuuagcaguaacuucggugcuaucucuuccguauugaaugacauacugagccgauuagauaagguggaagccgagguccagaucgacagacucauuaccgggaggcugcagucgcuucaaacguacgugacacagcagcugauccgcgcagcugagauucgggccucagcaaacuuggccgcuaccaaaaugucugaaugcguucucggacagaguaagagaguggauuuuuguggcaaagguuaccaccugauguccuucccccaaagcgcgccacauggcgucguguuucuacacguuacuuaugugccggcccaggagaagaauuucaccacagcuccugcaaucugccacgacgggaaagcccauuuucccagggaaggagucuucguaucuaacggcacucacugguuugugacccagcgcaauuucuacgagccacagauaauuacaacggauaacaccuucguuagcgggaauugugacguggucaucggaaucgugaacaauacuguauaugauccccugcaaccugagcucgacuccuuuaaggaggagcuggauaaauacuucaagaaccauacaucaccagacguggaucuuggcgacauuagugguaucaaugccagcgucguuaacauucagaaggaaauagaucgauugaaugagguggcuaaaaaccugaacgaaucuuuaaucgaccuccaggagcuggggaaguaugagcaguacauuaaauggcccugguauaucuggcuuggauuuauugcaggccugaucgccauagugauggucaccaucaugcuaugcuguaugacuuccugcuguucaugccucaaggguuguugcaguuguggcagcugcugcaaauucgacgaagaugacuccgagccugugcugaaggggguuaaguugcacuacacaugaggacuaguuauaagacugacuagcccgaugggccucccaacgggcccuccuccccuccuugcaccgagauuaauaaaaaaaaaaaaaaaaaaaaaaaaaaaaaaaaaaaaaaaaaaaaaaaaaaaaaaaaaaaaaaaaugcaucccccccccccccccccccccccccccccccaaaggcucuuuucagagccaccagaauu

SEQ ID NO: 12987 - RNA, 4039 nt, Artificial Sequence
  SARS-CoV-2/Belgium/ULG-6939/2020__EPI_ISL_417020 spike protein mRNA human (1-1273)
aggagaaagcuuaccauguucguguuucugguccuccuuccccugguuagcucccagugcgugaacuugaccacaagaacucaauuaccuccagccuacacuaauucuuucaccaggggcguauauuacccggacaagguguuucggucaaguguccugcacagcacacaggaucuauuccuccccuuuuucuccaacgugacuugguuucaugcuauccacguuucugggaccaauggaacaaaacgcuucgacaacccugugcugccauuuaaugauggugucuauuucgcaucgaccgagaagucaaacauuauacgaggcuggaucuuugggacuacacuugacagcaaaacccagagucuguugauugugaauaacgccacgaauguaguuaucaaggugugugaguuccaguuuugcaacgaucccuuccucggagucuacuaucauaaaaauaacaaguccuggauggagucugaguuccguguguacagcuccgcgaauaacuguacuuuugaguaugugucacaaccuuuccugauggaccuggaaggcaagcaggguaauuuuaaaaaccucagagaguucgucuuuaagaacauugauggguacuucaaaaucuacaguaagcacaccccaauaaauuuaguuagggaccugccccagggauuuagcgcucuugagccuuugguggaucugccaaucggcauuaacaucacacgguuccagacucuacucgcccugcaucgcucuuaucuuaccccgggcgacuccucaagcggguggacagcaggagccgcugcauacuauguagguuaccugcaacccagaaccuuuuugcucaaauauaaugaaaacggcacgauuacugaugccguggacugcgcucuggauccuuuaagugagacaaaguguacccugaagucuuucacugucgaaaaagggaucuaccagacauccaauuuuagggugcagccaaccgagagcauaguucgguuccccaacauuacgaaucucugcccuuuuggagagguguucaacgccacccgcuucgcgucggucuaugcauggaaucgaaagagaaucucuaacuguguggccgacuacuccguacuuuacaauucagcuaguuuuagcacauucaaaugcuauggcguuuccccaacuaagcugaacgacuuguguuuuaccaauguguacgccgauucuuucgucauuaggggugacgaagugcggcagaucgcacccgggcaaacaggaaaaaucgcugauuauaacuacaagcuaccggacgauuuuacuggcugcgucauugccuggaauagcaacaaccuggacucaaaagugggcgggaauuauaacuaccucuaucgucuguuccgcaagaguaaucuuaagccuuuugagagagauauauccaccgaaaucuaccaggcgggaagcacacccuguaacgguguugagggcuucaauugcuacuuuccacugcagucuuauggguuccaaccuaccaacggagugggcuaccagcccuauaggguagucguguugucauuugaacuccugcacgccccagcaacuguuugcggucccaaaaagaguacgaauuuagugaaaaacaagugugucaauuucaacuuuaaugggcugacaggcaccggagugcuaacugagagcaacaaaaaguuccucccuuuccagcaguuuggccgggacauugcugauaccacagacgccguacgagauccacaaacccuggagauccuugacauaacuccgugcuccuucgggggagugucuguuauuacacccgguacgaauaccucgaaccaggucgcuguguuguaccagggcgugaauuguacugaagucccuguugccauccacgcagaccagcugacaccaaccuggcgcguguauagcacaggguccaacguguuucaaacuagagccggaugccucaucggcgcugagcauguaaacaauucauacgaaugugauauucccaucggugcggggauuugcgcaaguuaucagacccagacgaacucuccuaggcgggcccgcagcgucgcuucccagucaauaaucgccuacaccaugagccugggcgcagaaaauucugugguuuacuccaacaauaguauugccaucccaacaaacuucacuaucagcgugaccacagaaauucuucccgucucuaugacuaagaccuccguggacuguacgauguauauaugcggagauucaacagaguguaguaaucuguugcuccaauacggcagcuuuugcacccagcugaacagagcuuuaacugggaucgccguugagcaggacaaaaauacacaggaaguguucgcacaaguaaagcagauuuauaaaaccccgccuaucaaggauuuuggagguuucaacuuuucgcagauucugccagaccccuccaaaccuucuaagaggagcuucaucgaggaucuacucuuuaauaaggucacucuggcggacgcuggcuucauaaaacaauacggggauugucuuggagacaucgccgcacgugauuugauuugcgcccagaaguucaacggccugaccgugcugcccccacucuuaacagacgaaaugaucgcucaguauacgucagcccugcuugcagguaccauuacgaguggguggacauuuggcgcuggagccgcguugcagaucccuuucgccaugcaaauggcuuaccgguuuaauggcauaggggugacccagaacguccucuaugagaaucagaaacugauugcaaaccaguucaacuccgccaucggaaagauucaagauucucuaagcuccacagcuucagcccugggcaaacuccaggacguugugaaucagaacgcacaggcgcugaauacucuuguaaagcaauugagcaguaacuuuggugccaucucuuccgugcugaaugacauauuaagccgacucgauaaggucgaagcugaggugcagaucgacagacugauuaccgggaggcuucagucgcugcaaacguacguuacacagcaguugauccgcgccgcagagauucgggcuucagccaaccucgcagccaccaaaaugucugaaugcgugcugggacagaguaagagagucgauuucuguggcaaagguuaccaccuaauguccuuuccccaaagcgcuccacauggcgugguuuuccugcacgugacuuaugucccggcgcaggagaagaauuuuaccacagccccugcaaucugccacgacgggaaagcucauuuccccagggaaggaguauuugugucuaacggcacucacugguucguuacccagcgcaauuuuuacgagccacagauaauuacaacggauaacaccuucgugagcgggaauugugacgucgugaucggaaucguaaacaauacuguguaugauccccuccaaccugagcuggacuccuucaaggaagaacuugauaaauacuuuaagaaccauacaucaccagacgucgauuugggcgacauuagugguaucaaugccagcguugugaacauucagaaggaaauagaucgacugaaugagguggccaaaaacuuaaacgaaucucucaucgaccugcaggagcuugggaaguaugagcaguacauuaaauggcccugguauaucuggcugggauucauugcuggccuaaucgcaauagucauggugaccaucaugcucugcuguaugacuuccugcuguucaugccugaaggguuguugcaguuguggcagcugcugcaaauuugacgaagaugacuccgagccuguuuugaaggggguaaagcugcacuacacaugaggacuaguuauaagacugacuagcccgaugggccucccaacgggcccuccuccccuccuugcaccgagauuaauaaaaaaaaaaaaaaaaaaaaaaaaaaaaaaaaaaaaaaaaaaaaaaaaaaaaaaaaaaaaaaaaugcaucccccccccccccccccccccccccccccccaaaggcucuuuucagagccaccagaauu

SEQ ID NO: 12988 - RNA, 4039 nt, Artificial Sequence
  SARS-CoV-2/France/HF2496/2020__EPI_ISL_418231 spike protein mRNA human (1-1273)
aggagaaagcuuaccauguucguguuucugguccuccuuccccugguuagcucccagugcgugaacuugaccacaagaacucaauuaccuccagccuacacuaauucuuucaccaggggcguauauuacccggacaagguguuucggucaaguguccugcacagcacacaggaucuauuccuccccuuuuucuccaacgugacuugguuucaugcuauccacguuucugggaccaauggaacaaaacgcuucgacaacccugugcugccauuuaaugauggugucuauuucgcaucgaccgagaagucaaacauuauacgaggcuggaucuuugggacuacacuugacagcaaaacccagagucuguugauugugaauaacgccacgaauguaguuaucaaggugugugaguuccaguuuugcaacgaucccuuccucggagucuacuaucauaaaaauaacaaguccuggauggagucugaguuccguguguacagcuccgcgaauaacuguacuuuugaguaugugucacaaccuuuccugauggaccuggaaggcaagcaggguaauuuuaaaaaccucagagaguucgucuuuaagaacauugauggguacuucaaaaucuacaguaagcacaccccaauaaauuuaguuagggaccugccccagggauuuagcgcucuugagccuuugguggaucugccaaucggcauuaacaucacacgguuccagacucuacucgcccugcaucgcucuuaucuuaccccgggcgacuccucaagcggguggacagcaggagccgcugcauacuauguagguuaccugcaacccagaaccuuuuugcucaaauauaaugaaaacggcacgauuacugaugccguggacugcgcucuggauccuuuaagugagacaaaguguacccugaagucuuucacugucgaaaaagggaucuaccagacauccaauuuuagggugcagccaaccgagagcauaguucgguuccccaacauuacgaaucucugcccuuuuggagagguguucaacgccacccgcuucgcgucggucuaugcauggaaucgaaagagaaucucuaacuguguggccgacuacuccguacuuuacaauucagcuaguuuuagcacauucaaaugcuauggcguuuccccaacuaagcugaacgacuuguguuuuaccaauguguacgccgauucuuucgucauuaggggugacgaagugcggcagaucgcacccgggcaaacaggaaaaaucgcugauuauaacuacaagcuaccggacgauuuuacuggcugcgucauugccuggaauagcaacaaccuggacucaaaagugggcgggaauuauaacuaccucuaucgucuguuccgcaagaguaaucuuaagccuuuugagagagauauauccaccgaaaucuaccaggcgggaagcacacccuguaacgguguugagggcuucaauugcuacuuuccacugcagucuuauggguuccaaccuaccaacggagugggcuaccagcccuauaggguagucguguugucauuugaacuccugcacgccccagcaacuguuugcggucccaaaaagaguacgaauuuagugaaaaacaagugugucaauuucaacuuuaaugggcugacaggcaccggagugcuaacugagagcaacaaaaaguuccucccuuuccagcaguuuggccgggacauugcugauaccacagacgccguacgagauccacaaacccuggagauccuugacauaacuccgugcuccuucgggggagugucuguuauuacacccgguacgaauaccucgaaccaggucgcuguguuguaccagggcgugaauuguacugaagucccuguugccauccacgcagaccagcugacaccaaccuggcgcguguauagcacaggguccaacguguuucaaacuagagccggaugccucaucggcgcugagcauguaaacaauucauacgaaugugauauucccaucggugcggggauuugcgcaaguuaucagacccagacgaacucuccuaggcgggcccgcagcgucgcuucccagucaauaaucgccuacaccaugagccugggcgcagaaaauucuguggccuacuccaacaauaguauugcuaucccaacaaacuucacuaucagcguuaccacagaaauucuucccgugucuaugacuaagaccuccgucgacuguacgauguauauaugcggagauucaacagaguguaguaaucuguugcuccaauacggcagcuuuugcacccagcugaacagagccuuaacugggaucgcaguggagcaggacaaaaauacacaggaaguuuucgcgcaagugaagcagauuuauaaaaccccgccuaucaaggauuuuggagguuucaacuuuucgcagauucugccagaccccuccaaaccuucuaagaggagcuucaucgaggaucuacucuuuaauaagguaacucuggcugacgccggcuucauaaaacaauacggggauugucuuggagacaucgucgcacgugauuugauuugcgcccagaaguucaacggccugaccgugcugcccccacucuuaacagacgaaaugaucgcucaguauacgucagcccugcuugcagguaccauuacgaguggguggacauuuggcgcuggagccgcguugcagaucccuuucgccaugcaaauggcuuaccgguuuaauggcauaggggugacccagaacguccucuaugagaaucagaaacugauugcaaaccaguucaacuccgccaucggaaagauucaagauucucuaagcuccacagcuucagcccugggcaaacuccaggacguugugaaucagaacgcacaggcgcugaauacucuuguaaagcaauugagcaguaacuuuggugccaucucuuccgugcugaaugacauauuaagccgacucgauaaggucgaagcugaggugcagaucgacagacugauuaccgggaggcuucagucgcugcaaacguacguuacacagcaguugauccgcgccgcagagauucgggcuucagccaaccucgcagccaccaaaaugucugaaugcgugcugggacagaguaagagagucgauuucuguggcaaagguuaccaccuaauguccuuuccccaaagcgcuccacauggcgugguuuuccugcacgugacuuaugucccggcgcaggagaagaauuuuaccacagccccugcaaucugccacgacgggaaagcucauuuccccagggaaggaguauuugugucuaacggcacucacugguucguuacccagcgcaauuuuuacgagccacagauaauuacaacggauaacaccuucgugagcgggaauugugacgucgugaucggaaucguaaacaauacuguguaugauccccuccaaccugagcuggacuccuucaaggaagaacuugauaaauacuuuaagaaccauacaucaccagacgucgauuugggcgacauuagugguaucaaugccagcguugugaacauucagaaggaaauagaucgacugaaugagguggccaaaaacuuaaacgaaucucucaucgaccugcaggagcuugggaaguaugagcaguacauuaaauggcccugguauaucuggcugggauucauugcuggccuaaucgcaauagucauggugaccaucaugcucugcuguaugacuuccugcuguucaugccugaaggguuguugcaguuguggcagcugcugcaaauuugacgaagaugacuccgagccuguuuugaaggggguaaagcugcacuacacaugaggacuaguuauaagacugacuagcccgaugggccucccaacgggcccuccuccccuccuugcaccgagauuaauaaaaaaaaaaaaaaaaaaaaaaaaaaaaaaaaaaaaaaaaaaaaaaaaaaaaaaaaaaaaaaaaugcaucccccccccccccccccccccccccccccccaaaggcucuuuucagagccaccagaauu

SEQ ID NO: 12989 - RNA, 4039 nt, Artificial Sequence
  SARS-CoV-2/USA/WA-UW291/2020__EPI_ISL_418076 spike protein mRNA human (1-1273)
aggagaaagcuuaccauguucguguuucugguccuccuuccccugguuagcucccagugcgugaacuugaccacaagaacucaauuaccuccagccuacacuaauucuuucaccaggggcguauauuacccggacaagguguuucggucaaguguccugcacagcacacaggaucuauuccuccccuuuuucuccaacgugacuugguuucaugcuauccacguuucugggaccaauggaacaaaacgcuucgacaacccugugcugccauuuaaugauggugucuauuucgcaucgaccgagaagucaaacauuauacgaggcuggaucuuugggacuacacuugacagcaaaacccagagucuguugauugugaauaacgccacgaauguaguuaucaaggugugugaguuccaguuuugcaacgaucccuuccucggagucuacuaucauaaaaauaacaaguccuggauggagucugaguuccguguguacagcuccgcgaauaacuguacuuuugaguaugugucacaaccuuuccugauggaccuggaaggcaagcaggguaauuuuaaaaaccucagagaguucgucuuuaagaacauugauggguacuucaaaaucuacaguaagcacaccccaauaaauuuaguuagggaccugccccagggauuuagcgcucuugagccuuugguggaucugccaaucggcauuaacaucacacgguuccagacucuacucgcccugcaucgcucuuaucuuaccccgggcgacuccucaagcggguggacagcaggagccgcugcauacuauguagguuaccugcaacccagaaccuuuuugcucaaauauaaugaaaacggcacgauuacugaugccguggacugcgcucuggauccuuuaagugagacaaaguguacccugaagucuuucacugucgaaaaagggaucuaccagacauccaauuuuagggugcagccaaccgagagcauaguucgguuccccaacauuacgaaucucugcccuuuuggagagguguucaacgccacccgcuucgcgucggucuaugcauggaaucgaaagagaaucucuaacuguguggccgacuacuccguacuuuacaauucagcuaguuuuagcacauucaaaugcuauggcguuuccccaacuaagcugaacgacuuguguuuuaccaauguguacgccgauucuuucgucauuaggggugacgaagugcggcagaucgcacccgggcaaacaggaaaaaucgcugauuauaacuacaagcuaccggacgauuuuacuggcugcgucauugccuggaauagcaacaaccuggacucaaaagugggcgggaauuauaacuaccucuaucgucuguuccgcaagaguaaucuuaagccuuuugagagagauauauccaccgaaaucuaccaggcgggaagcacacccuguaacgguguugagggcuucaauugcuacuuuccacugcagucuuauggguuccaaccuaccaacggagugggcuaccagcccuauaggguagucguguugucauuugaacuccugcacgccccagcaacuguuugcggucccaaaaagaguacgaauuuagugaaaaacaagugugucaauuucaacuuuaaugggcugacaggcaccggagugcuaacugagagcaacaaaaaguuccucccuuuccagcaguuuggccgggacauugcugauaccacagacgccguacgagauccacaaacccuggagauccuugacauaacuccgugcuccuucgggggagugucuguuauuacacccgguacgaauaccucgaaccaggucgcuguguuguaccagggcgugaauuguacugaagucccuguugccauccacgcagaccagcugacaccaaccuggcgcguguauagcacaggguccaacguguuucaaacuagagccggaugccucaucggcgcugagcauguaaacaauucauacgaaugugauauucccaucggugcggggauuugcgcaaguuaucagacccagacgaacucuccuaggcgggcccgcagcgucgcuucccagucaauaaucgccuacaccaugagccugggcgcagaaaauucuguggccuacuccaacaauaguauugcuaucccaacaaacuucacuaucagcguuaccacagaaauucuucccgugucuaugacuaagaccuccgucgacuguacgauguauauaugcggagauucaacagaguguaguaaucuguugcuccaauacggcagcuuuugcacccagcugaacagagccuuaacugggaucgcaguggagcaggacaaaaauacacaggaaguuuucgcgcaagugaagcagauuuauaaaaccccgccuaucaaggauuuuggagguuucaacuuuucgcagauucugccagaccccuccaaaccuucuaagaggagcuucaucgaggaucuacucuuuaauaagguaacucuggcugacgccggcuucauaaaacaauacggggauugucuuggagacaucgcagcccgugauuugauuugcgcucagaaguucaacggccugaccguccugcccccacucuuaacagacgaaaugaucgcccaguauacgucagcacugcuugcugguaccauuacgaguggguggacauuuggcgccggagcggccuugcagaucccuuucgcuaugcaaauggcauaccgguuuaauggcauaggggugacccagaacgugcucuaugagaaucagaaacugauugccaaccaguucaacuccgcuaucggaaagauucaauacucucuaagcuccacagccucagcacugggcaaacuccaggaugucguuaaucagaacgcgcaggcccugaauacucuugugaagcaauugagcaguaacuuuggugcuaucucuuccguacugaaugacauauuaagccgacucgacaagguggaagccgagguccagaucgauagacugauuaccgggaggcuucagucgcugcaaacguacgugacacagcaguugauccgcgcagcugagauucgggccucagcaaaccucgccgcuaccaaaaugucugaaugcguucugggacagaguaagagaguggacuucuguggcaaagguuaucaccuaauguccuuuccccaaagcgcgccacauggcgucguguuccugcacguuacuuacgugccggcccaggagaagaauuuuaccacagcuccugcaaucugccacgaugggaaagcccauuuccccagggaaggagucuuuguaucuaacggcacucacugguucgugacccagcgcaauuuuuaugagccacagauaauuacaacggacaacaccuucguuagcgggaauugugauguggucaucggaaucgugaacaauacuguauacgacccccuccaaccugagcuggauuccuucaaggaagaacuugacaaauauuuuaagaaccauacaucaccagauguggacuugggcgauauuagugguaucaaugccagcgucguuaacauucagaaggaaauagaccgacugaaugagguggcuaaaaacuuaaacgaaucucucaucgaucugcaggagcuugggaaguacgagcaguauauuaaauggcccugguacaucuggcugggauucauugcaggccuaaucgccauagugauggucaccaucaugcucugcuguaugacuuccugcuguucaugccugaaggguuguugcaguuguggcagcugcugcaaauuugacgaagacgauuccgagccuguguugaaggggguuaagcugcacuacacaugaggacuaguuauaagacugacuagcccgaugggccucccaacgggcccuccuccccuccuugcaccgagauuaauaaaaaaaaaaaaaaaaaaaaaaaaaaaaaaaaaaaaaaaaaaaaaaaaaaaaaaaaaaaaaaaaugcaucccccccccccccccccccccccccccccccaaaggcucuuuucagagccaccagaauu

SEQ ID NO: 12990 - RNA, 4039 nt, Artificial Sequence
  SARS-CoV-2/Portugal/PT0034/2020__EPI_ISL_418019 spike protein mRNA human (1-1273)
aggagaaagcuuaccauguucguguuucugguccuccuuccccugguuagcucccagugcgugaacuugaccacaagaacucaauuaccuccagccuacacuaauucuuucaccaggggcguauauuacccggacaagguguuucggucaaguguccugcacagcacacaggaucuauuccuccccuuuuucuccaacgugacuugguuucaugcuauccacguuucugggaccaauggaacaaaacgcuucgacaacccugugcugccauuuaaugauggugucuauuucgcaucgaccgagaagucaaacauuauacgaggcuggaucuuugggacuacacuugacagcaaaacccagagucuguugauugugaauaacgccacgaauguaguuaucaaggugugugaguuccaguuuugcaacgaucccuuccucggagucuacuaucauaaaaauaacaaguccuggauggagucugaguuccguguguacagcuccgcgaauaacuguacuuuugaguaugugucacaaccuuuccugauggaccuggaaggcaagcaggguaauuuuaaaaaccucagagaguucgucuuuaagaacauugauggguacuucaaaaucuacaguaagcacaccccaauaaauuuaguuagggaccugccccagggauuuagcgcucuugagccuuugguggaucugccaaucggcauuaacaucacacgguuccagacucuacucgcccugcaucgcucuuaucuuaccccgggcgacuccucaagcggguggacagcaggagccgcugcauacuauguagguuaccugcaacccagaaccuuuuugcucaaauauaaugaaaacggcacgauuacugaugccguggacugcgcucuggauccuuuaagugagacaaaguguacccugaagucuuucacugucgaaaaagggaucuaccagacauccaauuuuagggugcagccaaccgagagcauaguucgguuccccaacauuacgaaucucugcccuuuuggagagguguucaacgccacccgcuucgcgucggucuaugcauggaaucgaaagagaaucucuaacuguguggccgacuacuccguacuuuacaauucagcuaguuuuagcacauucaaaugcuauggcguuuccccaacuaagcugaacgacuuguguuuuaccaauguguacgccgauucuuucgucauuaggggugacgaagugcggcagaucgcacccgggcaaacaggaaaaaucgcugauuauaacuacaagcuaccggacgauuuuacuggcugcgucauugccuggaauagcaacaaccuggacucaaaagugggcgggaauuauaacuaccucuaucgucuguuccgcaagaguaaucuuaagccuuuugagagagauauauccaccgaaaucuaccaggcgggaagcacacccuguaacgguguugagggcuucaauugcuacuuuccacugcagucuuauggguuccaaccuaccaacggagugggcuaccagcccuauaggguagucguguugucauuugaacuccugcacgccccagcaacuguuugcggucccaaaaagaguacgaauuuagugaaaaacaagugugucaauuucaacuuuaaugggcugacaggcaccggagugcuaacugagagcaacaaaaaguuccucccuuuccagcaguuuggccgggacauugcugauaccacagacgccguacgagauccacaaacccuggagauccuugacauaacuccgugcuccuucgggggagugucuguuauuacacccgguacgaauaccucgaaccaggucgcuguguuguaccagggcgugaauuguacugaagucccuguugccauccacgcagaccagcugacaccaaccuggcgcguguauagcacaggguccaacguguuucaaacuagagccggaugccucaucggcgcugagcauguaaacaauucauacgaaugugauauucccaucggugcggggauuugcgcaaguuaucagacccagacgaacucuccuaggcgggcccgcagcgucgcuucccagucaauaaucgccuacaccaugagccugggcgcagaaaauucuguggccuacuccaacaauaguauugcuaucccaacaaacuucacuaucagcguuaccacagaaauucuucccgugucuaugacuaagaccuccgucgacuguacgauguauauaugcggagauucaacagaguguaguaaucuguugcuccaauacggcagcuuuugcacccagcugaacagagccuuaacugggaucgcaguggagcaggacaaaaauacacaggaaguuuucgcgcaagugaagcagauuuauaaaaccccgccuaucaaggauuuuggagguuucaacuuuucgcagauucugccagaccccuccaaaccuucuaagaggagcuucaucgaggaucuacucuuuaauaagguaacucuggcugacgccggcuucauaaaacaauacggggauugucuuggagacaucgcagcccgugauuugauuugcgcucagaaguucaacggccugaccguccugcccccacucuuaacagacgaaaugaucgcccaguauacgucagcacugcuugcugguaccauuacgaguggguggacauuuggcgccggagcggccuugcagaucccuuucgcuaugcaaauggcauaccgguuuaauggcauaggggugacccagaacgugcucuaugagaaucagaaacugauugccaaccaguucaacuccgcuaucggaaagauucaagauucucuaagcuccacagccucagcacugggcaaacuccaggacgucguuaaucagaacgcgcaggcccugaauacucuugugaagcaauugagcaguaacuuuggugcuaucucuuccguacugaaugacauauuaagccgacucgauaagguggaagccgagguccagaucgacagacugauuaccgggaggcuucagucgcugcaaacguacgugacacagcaguugauccgcgcagcugagauucgggccucagcaaaccucgccgcuaccaaaaugucugaaugcguucugggacagaguaagagaguggauuucuguggcaaagguuaccaccuaauguccuuuccccaaagcgcgccacauggcgucguguuccugcacguuacuuaugugccggcccaggagaagaauuuuaccacagcuccugcaaucugccacgacgggaaagcccauuuccccagggaaggagucuuuguaucuaacggcacucacugguucgugacccagcgcaauuuuuacgagccacagauaauuacaacggauaacaccuucguuagcgggaauugugacguggucaucggaaucgugaacaauacuguauaugauccccuccaaccugagcuggacuccuucaaggaagaacuugauaaauacuuuaagaaccauacaucaccagacguggauuugggcgacauuagugguaucaaugccagcgucguuaacauucagaaggaaauagaucgacugaaugagguggcuaaaaacuuaaacgaaucucucaucgaccugcaggagcuugggaaguaugagcaguacauuaaauggcccugguauaucuggcugggauucauugcaggccuaaucgccauagugauggucaccaucaugcucugcuguauuacuuccugcuguucaugccugaaggguuguugcaguuguggcagcugcugcaaauuugacgaagaugacuccgagccuguguugaaggggguuaagcugcacuacacaugaggacuaguuauaagacugacuagcccgaugggccucccaacgggcccuccuccccuccuugcaccgagauuaauaaaaaaaaaaaaaaaaaaaaaaaaaaaaaaaaaaaaaaaaaaaaaaaaaaaaaaaaaaaaaaaaugcaucccccccccccccccccccccccccccccccaaaggcucuuuucagagccaccagaauu

SEQ ID NO: 12991 - RNA, 4039 nt, Artificial Sequence
  SARS-CoV-2/Iceland/202/2020__EPI_ISL_417750 spike protein mRNA human (1-1273)
aggagaaagcuuaccauguucguguuucugguccuccuuccccugguuagcucccagugcgugaacuugaccacaagaacucaauuaccuccagccuacacuaauucuuucaccaggggcguauauuacccggacaagguguuucggucaaguguccugcacagcacacaggaucuauuccuccccuuuuucuccaacgugacuugguuucaugcuauccacguuucugggaccaauggaacaaaacgcuucgacaacccugugcugccauuuaaugauggugucuauuucgcaucgaccgagaagucaaacauuauacgaggcuggaucuuugggacuacacuugacagcaaaacccagagucuguugauugugaauaacgccacgaauguaguuaucaaggugugugaguuccaguuuugcaacgaucccuuccucggagucuacuaucauaaaaauaacaaguccuggauggagucugaguuccguguguacagcuccgcgaauaacuguacuuuugaauaugugucacaaccuuuccugauggaccuggaaggcaagcaggguaauuuuaaaaaccucagagaguucgucuuuaagaacauugauggguacuucaaaaucuacaguaagcacaccccaauaaauuuaguuagggaccugccccagggauuuagcgcucuugagccuuugguggaucugccaaucggcauuaacaucacacgguuccagacucuacucgcccugcaucgcucuuaucuuaccccgggcgacuccucaagcggguggacagcaggagccgcugcauacuauguagguuaccugcaacccagaaccuuuuugcucaaauauaaugaaaacggcacgauuacugaugccguggacugcgcucuggauccuuuaagugagacaaaguguacccugaagucuuucacugucgaaaaagggaucuaccagacauccaauuuuagggugcagccaaccgagagcauaguucgguuccccaacauuacgaaucucugcccuuuuggagagguguucaacgccacccgcuucgcgucggucuaugcauggaaucgaaagagaaucucuaacuguguggccgacuacuccguacuuuacaauucagcuaguuuuagcacauucaaaugcuauggcguuuccccaacuaagcugaacgacuuguguuuuaccaauguguacgccgauucuuucgucauuaggggugacgaagugcggcagaucgcacccgggcaaacaggaaaaaucgcugauuauaacuacaagcuaccggacgauuuuacuggcugcgucauugccuggaauagcaacaaccuggacucaaaagugggcgggaauuauaacuaccucuaucgucuguuccgcaagaguaaucuuaagccuuuugagagagauauauccaccgaaaucuaccaggcgggaagcacacccuguaacgguguugagggcuucaauugcuacuuuccacugcagucuuauggguuccaaccuaccaacggagugggcuaccagcccuauaggguagucguguugucauuugaacuccugcacgccccagcaacuguuugcggucccaaaaagaguacgaauuuagugaaaaacaagugugucaauuucaacuuuaaugggcugacaggcaccggagugcuaacugagagcaacaaaaaguuccucccuuuccagcaguuuggccgggacauugcugauaccacagacgccguacgagauccacaaacccuggagauccuugacauaacuccgugcuccuucgggggagugucuguuauuacacccgguacgaauaccucgaaccaggucgcuguguuguaccaggacgugaauuguacugaagucccuguugccauccacgcagaucagcugacaccaaccuggcgcguguauagcacaggcuccaacguguuucaaacuagagccgggugccucaucggagcugagcauguaaacaauucauacgaaugugacauucccaucggcgcggguauuugcgcaaguuaucagacccagacgaacucuccuaggcgggcccgcagcgucgcuucccagucaauaaucgccuacaccaugagccugggggcagaaaauucuguggccuacuccaacaauaguauugcuaucccaacaaacuucacuaucagcguuaccacagaaauucuucccgugucuaugacuaagaccuccgucgauuguacgauguauauaugcggcgacucaacagaguguaguaaucuguugcuccaauacggcagcuuuugcacccagcugaacagagccuuaacuggaaucgcaguggagcaggauaaaaauacacaggaaguuuucgcgcaagugaagcagauuuauaaaaccccgccuaucaaggacuuugggggauucaacuuuucgcagauucugccagaucccuccaaaccuucuaagaggagcuucaucgaggaccuacucuuuaauaagguaacucuggcugaugccgguuucauaaaacaauacggcgacugucuuggggauaucgcagcccgugacuugauuugcgcucagaaguucaacggacugaccguccugcccccacucuuaacagaugaaaugaucgcccaguauacgucagcacugcuugcuggcaccauuacgagugguuggacauuuggggccggcgcggccuugcagaucccuuucgcuaugcaaauggcauaccgguuuaauggaauaggcgugacccagaacgugcucuaugagaaucagaaacugauugccaaccaguucaacuccgcuaucgggaagauucaagacucucuaagcuccacagccucagcacugggaaaacuccaggacgucguuaaucagaacgcgcaggcccugaauacucuugugaagcaauugagcaguaacuuuggcgcuaucucuuccguacugaaugauauauuaagccgacucgacaagguggaagccgagguccagaucgauagacugauuaccgguaggcuucagucgcugcaaacguacgugacacagcaguugauccgcgcagcugagauucgggccucagcaaaccucgccgcuaccaaaaugucugaaugcguucuggggcagaguaagagaguggacuucuguggaaaaggcuaccaccuaauguccuuuccccaaagcgcgccacauggugucguguuccugcacguuacuuaugugccggcccaggagaagaauuuuaccacagcuccugcaaucugccacgauggcaaagcccauuuccccagggaaggggucuuuguaucuaacggaacucacugguucgugacccagcgcaauuuuuacgagccacagauaauuacaacggacaacaccuucguuagcggcaauugugauguggucaucgggaucgugaacaauacuguauaugacccccuccaaccugagcuggauuccuucaaggaggaacuugacaaauacuuuaagaaccauacaucaccagauguggacuugggagauauucccggcaucaaugccagugucguuaacauucagaaggaaauagaccgacugaaugagguggcuaaaaacuuaaacgaaagccucaucgaccugcaggagcuugguaaguaugagcaguacauuaaauggccuugguauaucuggcugggguucauugcaggacuaaucgccauagugauggucaccaucaugcucugcuguaugacuucuugcuguuccugccugaagggcuguugcucaugugguaguugcugcaaauuugaugaagacgauagcgagccgguguugaagggcguuaagcugcacuacacaugaggacuaguuauaagacugacuagcccgaugggccucccaacgggcccuccuccccuccuugcaccgagauuaauaaaaaaaaaaaaaaaaaaaaaaaaaaaaaaaaaaaaaaaaaaaaaaaaaaaaaaaaaaaaaaaaugcaucccccccccccccccccccccccccccccccaaaggcucuuuucagagccaccagaauu

SEQ ID NO: 12992 - RNA, 4039 nt, Artificial Sequence
  SARS-CoV-2/USA/WA-UW261/2020__EPI_ISL_418046 spike protein mRNA human (1-1273)
aggagaaagcuuaccauguucguguuucugguccuccuuccccugguuagcucccagugcgugaacuugaccacaagaacucaauuaccuccagccuacacgaauagcuucaccaggggcguauauuacccggacaagguguuucggucaaguguccugcacagcacacaggaucuauuccuccccuuuuucuccaacgugacuugguuucaugcuauccacguuucugggaccaauggaacaaaacgcuucgacaacccugugcugccauuuaaugauggugucuauuucgcaucgaccgagaagucaaacauuauacgaggcuggaucuuugggacuacacuugacagcaaaacccagagucuguugauugugaauaacgccacgaauguaguuaucaaggugugugaguuccaguuuugcaacgaucccuuccucggagucuacuaucauaaaaauaacaaguccuggauggagucugaguuccguguguacagcuccgcgaauaacuguacuuuugaguaugugucacaaccuuuccugauggaccuggaaggcaagcaggguaauuuuaaaaaccucagagaguucgucuuuaagaacauugauggguacuucaaaaucuacaguaagcacaccccaauaaauuuaguuagggaccugccccagggauuuagcgcucuugagccuuugguggaucugccaaucggcauuaacaucacacgguuccagacucuacucgcccugcaucgcucuuaucuuaccccgggcgacuccucaagcggguggacagcaggagccgcugcauacuauguagguuaccugcaacccagaaccuuuuugcucaaauauaaugaaaacggcacgauuacugaugccguggacugcgcucuggauccuuuaagugagacaaaguguacccugaagucuuucacugucgaaaaagggaucuaccagacauccaauuuuagggugcagccaaccgagagcauaguucgguuccccaacauuacgaaucucugcccuuuuggagagguguucaacgccacccgcuucacaucggucuaugcguggaaucgaaagagaaucucuaacuguguggcagacuacuccguacuuuacaauucagccaguuuuagcacuuucaaaugcuauggcguuuccccaaccaagcugaacgacuuguguuuuacaaauguguacgcugauucuuucgucauuaggggugacgaagugcggcagaucgcccccgggcaaacuggaaaaaucgcagauuauaacuacaagcuaccggacgauuuuaccggcugcgucauugcuuggaauagcaacaaccuggacucaaaagugggcgggaauuauaacuaccucuaucgucuguuccgcaagaguaaucuuaagccuuuugagagagauauauccacagaaaucuaccaggccggaagcacccccuguaacgguguugagggcuucaauugcuacuuuccacugcagucuuauggguuccaaccuacuaacggagugggcuaccagcccuauaggguagucguguugucauuugaacuccugcacgcgccagccacgguuugcggucccaaaaagaguacaaauuuagugaaaaacaagugugucaauuucaacuuuaaugggcugaccggcacuggagugcuaaccgagagcaacaaaaaguuccucccuuuccagcaguuuggccgggacauugcagauacaaccgacgcuguacgagauccacaaacucuggagauccuugacauaacaccgugcuccuucgggggagugucuguuauuacgcccgguaccaauacuucgaaccaggucgccguguuguaccaggacgugaauuguacagaagucccuguugcuauccacgccgaucagcugaccccaacauggcgcguguauagcacuggcuccaacguguuucaaaccagagcagggugccucaucggagccgagcauguaaacaauucauacgaaugugacauucccaucggcgcugguauuugcgcgaguuaucagacgcagaccaacucuccuaggcgggcacgcagcgucgccucccagucaauaaucgcuuacacaaugagccugggggccgaaaauucuguggcauacuccaacaauaguauugccaucccaacuaacuucaccaucagcguuacaacugaaauucuucccgugucuaugaccaagacguccgucgauuguacaauguauauaugcggcgacucaaccgaguguaguaaucuguugcuccaauacggaucuuuuugcacucagcugaacagagcuuuaacaggcaucgccguggagcaggauaaaaauacccaggaaguuuucgcacaagugaagcagauuuauaaaacuccgccuaucaaggacuuugggggauucaacuuuucgcagauucugccagaucccuccaaaccuucuaagaggagcuucaucgaggaccuacucuuuaauaagguaacccuggcggaugcugguuucauaaaacaauacggcgacugucuuggggauaucgccgcacgugacuugauuugcgcccagaaguucaacggacugacaguccugcccccacucuuaacggaugaaaugaucgcucaguauaccucagcccugcuugcaggcacuauuacaagugguuggaccuuuggggcuggcgccgcguugcagaucccuuucgccaugcaaauggcuuaccgguuuaauggaauaggcgugacacagaacgugcucuaugagaaucagaaacugauugcaaaccaguucaacuccgccaucgggaagauucaagacucucuaagcuccacugcuucagcccugggaaaacuccaggacgucguuaaucagaacgcacaggcgcugaauacccuugugaagcaauugagcaguaacuuuggcgccaucucuuccguacugaaugauauauuaagccgacucgacaagguggaagcugagguccagaucgauagacugauuacggguaggcuucagucgcugcaaacauacgugacccagcaguugauccgcgccgcagagauucgggcuucagccaaccucgcagccacuaaaaugucugaaugcguucuggggcagaguaagagaguggacuucuguggaaaaggcuaccaccuaauguccuuuccccaaagcgcuccacauggugucguguuccugcacguuaccuaugugccggcgcaggagaagaauuuuacaacugccccugcaaucugccacgauggcaaagcucauuuccccagggaaggggucuuuguaucuaacggaacccacugguucgugacacagcgcaauuuuuacgagccacagauaauuacgaccgacaacacuuucguuagcggcaauugugauguggucaucgggaucgugaacaauacaguauaugacccccuccaaccugagcuggauuccuucaaggaagaacuugacaaauacuuuaagaaccauaccucaccagauguggacuugggagauauuaguggcaucaaugccagcgucguuaacauucagaaggaaauagaccgacugaaugagguggccaaaaacuuaaacgaaucucucaucgaccugcaggagcuugguaaguaugagcaguacauuaaauggcccugguauaucuggcugggguucauugcuggacuaaucgcaauagugauggucacuaucaugcucugcuguaugacauccugcuguucaugccugaagggcuguugcaguugugguagcugcugcaaauuugaugaagacgauuccgagccuguguugaagggcguuaagcugcacuacaccugaggacuaguuauaagacugacuagcccgaugggccucccaacgggcccuccuccccuccuugcaccgagauuaauaaaaaaaaaaaaaaaaaaaaaaaaaaaaaaaaaaaaaaaaaaaaaaaaaaaaaaaaaaaaaaaaugcaucccccccccccccccccccccccccccccccaaaggcucuuuucagagccaccagaauu

SEQ ID NO: 12993 - RNA, 4039 nt, Artificial Sequence
  SARS-CoV-2/Portugal/PT0035/2020__EPI_ISL_418020 spike protein mRNA human (1-1273)
aggagaaagcuuaccauguucguguuucugguccuccuuccccugguuagcucccagugcgugaacuugaccacaagaacucaauuaccuccagccuacacgaauagcuucaccaggggcguauauuacccggacaagguguuucggucaaguguccugcacagcacacaggaucuauuccuccccuuuuucuccaacgugacuugguuucaugcuauccacguuucugggaccaauggaacaaaacgcuucgacaacccugugcugccauuuaaugauggugucuauuucgcaucgaccgagaagucaaacauuauacgaggcuggaucuuugggacuacacuugacagcaaaacccagagucuguugauugugaauaacgccacgaauguaguuaucaaggugugugaguuccaguuuugcaacgaucccuuccucggagucuacuaucauaaaaauaacaaguccuggauggagucugaguuccguguguacagcuccgcgaauaacuguacuuuugaguaugugucacaaccuuuccugauggaccuggaaggcaagcaggguaauuuuaaaaaccucagagaguucgucuuuaagaacauugauggguacuucaaaaucuacaguaagcacaccccaauaaauuuaguuagggaccugccccagggauuuagcgcucuugagccuuugguggaucugccaaucggcauuaacaucacacgguuccagacucuacucgcccugcaucgcucuuaucuuaccccgggcgacuccucaagcggguggacagcaggagccgcugcauacuauguagguuaccugcaacccagaaccuuuuugcucaaauauaaugaaaacggcacgauuacugaugccguggacugcgcucuggauccuuuaagugagacaaaguguacccugaagucuuucacugucgaaaaagggaucuaccagacauccaauuuuagggugcagccaaccgagagcauaguucgguuccccaacauuacgaaucucugcccuuuuggagagguguucaacgccacccgcuucgcgucggucuaugcauggaaucgaaagagaaucucuaacuguguggccgacuacuccguacuuuacaauucagcuaguuuuagcacauucaaaugcuauggcguuuccccaacuaagcugaacgacuuguguuuuaccaauguguacgccgauucuuucgucauuaggggugacgaagugcggcagaucgcacccgggcaaacaggaaaaaucgcugauuauaacuacaagcuaccggacgauuuuacuggcugcgucauugccuggaauagcaacaaccuggacucaaaagugggcgggaauuauaacuaccucuaucgucuguuccgcaagaguaaucuuaagccuuuugagagagauauauccaccgaaaucuaccaggcgggaagcacacccuguaacgguguugagggcuucaauugcuacuuuccacugcagucuuauggguuccaaccuaccaacggagugggcuaccagcccuauaggguagucguguugucauuugaacuccugcacgccccagcaacuguuugcggucccaaaaagaguacgaauuuagugaaaaacaagugugucaauuucaacuuuaaugggcugacaggcaccggagugcuaacugagagcaacaaaaaguuccucccuuuccagcaguuuggccgggacauugcugauaccacagacgccguacgagauccacaaacccuggagauccuugacauaacuccgugcuccuucgggggagugucuguuauuacacccgguacgaauaccucgaaccaggucgcuguguuguaccaggacgugaauuguacugaagucccuguugccauccacgcagaucagcugacaccaaccuggcgcguguauagcacaggcuccaacguguuucaaacuagagccgggugccucaucggagcugagcauguaaacaauucauacgaaugugacauucccaucggcgcggguauuugcgcaaguuaucagacccagacgaacucuccuaggcgggcccgcagcgucgcuucccagucaauaaucgccuacaccaugagccugggggcagaaaauucuguggccuacuccaacaauaguauugcuaucccaacaaacuucacuaucagcguuaccacagaaauucuucccgugucuaugacuaagaccuccgucgauuguacgauguauauaugcggcgacucaacagaguguaguaaucuguugcuccaauacggaucuuuuugcacccagcugaacagagccuuaacuggcaucgcaguggagcaggauaaaaauacacaggaaguuuucgcgcaagugaagcagauuuauaaaaccccgccuaucaaggacuuugggggauucaacuuuucgcagauucugccagaucccuccaaaccuucuaagaggagcuucaucgaggaccuacucuuuaauaagguaacucuggcugaugccgguuucauaaaacaauacggcgacugucuuggggauaucucagcacgugacuugauuugcgcccagaaguucaacggacugaccguccugcccccacucuuaacagaugaaaugaucgcucaguauacgagugcccugcuugcaggcaccauuacuuccgguuggacauuuggggcuggcgccgcguugcagaucccuuucgccaugcaaauggcuuaccgguuuaauggaauaggcgugacccagaacgugcucuaugagaaucagaaacugauugcaaaccaguucaacucugccaucgggaagauucaagacagccuauccucaacagcuagcgcccugggaaaacuccaggacgucguuaaucagaacgcacaggcgcugaauacucuugugaagcaauugaguucuaacuuuggcgccaucuccagcguacugaaugauauauuaucgcgacucgacaagguggaagcugagguccagaucgauagacugauuaccgguaggcuucagucacugcaaacguacgugacacagcaguugauccgcgccgcagagauucgggcuucugccaaccucgcagccaccaaaaugagugaaugcguucuggggcaguccaagagaguggacuucuguggaaaaggcuaccaccuaaugagcuuuccccaaucugcuccacauggugucguguuccugcacguuacuuaugugccggcgcaggagaagaauuuuaccacagccccugcaaucugccacgauggcaaagcucauuuccccagggaaggggucuuuguaagcaacggaacucacugguucgugacccagcgcaauuuuuacgagccacagauaauuacaacggacaacaccuucguuuccggcaauugugauguggucaucgggaucgugaacaauacuguauaugacccccuccaaccugagcuggauucauucaaggaagaacuugacaaauacuuuaagaaccauacaaguccagauguggacuugggagauauuagcggcaucaaugccucugucguuaacauucagaaggaaauagaccgacugaaugagguggccaaaaacuuaaacgaaucccucaucgaccugcaggagcuugguaaguaugagcaguacauuaaauggcccugguauaucuggcugggguucauugcuggacuaaucgcaauagugauggucaccaucaugcucugcuguaugacuucaugcuguaguugccugaagggcuguugcagcugugguuccugcugcaaauuugaugaagacgauucugagccuguguugaagggcguuaagcugcacuacacaugaggacuaguuauaagacugacuagcccgaugggccucccaacgggcccuccuccccuccuugcaccgagauuaauaaaaaaaaaaaaaaaaaaaaaaaaaaaaaaaaaaaaaaaaaaaaaaaaaaaaaaaaaaaaaaaaugcaucccccccccccccccccccccccccccccccaaaggcucuuuucagagccaccagaauu

SEQ ID NO: 12994 - RNA, 4039 nt, Artificial Sequence
  SARS-CoV-2/USA/NY-NYUMC7/2020__EPI_ISL_418192 spike protein mRNA human (1-1273)
aggagaaagcuuaccauguucguguuucugguccuccuuccccugguuagcucccagugcgugaacuugaccacaagaacucaauuaccuccagccuacacuaauucuuucaccaggggcguauauuacccggacaagguguuucggucaaguguccugcacagcacacaggaucuauuccuccccuuuuucuccaacgugacuugguuucaugcuauccacguuucugggaccaauggaacaaaacgcuucgacaacccugugcugccauuuaaugauggugucuauuucgcaucgaccgagaagucaaacauuauacgaggcuggaucuuugggacuacacuugacagcaaaacccagagucuguugauugugaauaacgccacgaauguaguuaucaaggugugugaguuccaguuuugcaacgaucccuuccucggagucuaccaucacaaaaauaacaaguccuggauggagucugaguuccguguguauagcuccgcgaauaacuguacuuuugaguacgugucacaaccuuuccugauggaccuggaaggcaagcaggguaauuuuaaaaaccucagagaguucgucuuuaagaacauugauggguauuucaaaaucuacaguaagcauaccccaauaaauuuaguuagggaccugccccagggauuuagcgcucuugagccuuugguggaucugccaaucggcauuaacaucacacgguuccagacucuacucgcccugcaccgcucuuaccuuaccccgggcgacuccucaagcggguggacagcaggagccgcugcauauuacguagguuaucugcaacccagaaccuuuuugcucaaauacaaugaaaacggcacgauuacugaugccguggacugcgcucuggauccuuuaagugagacaaaguguacccugaagucuuucacugucgaaaaagggaucuaucagacauccaauuuuagggugcagccaaccgagagcauaguucgguuccccaacauuacgaaucucugcccuuuuggagagguguucaacgccacccgcuucgcgucggucuacgcauggaaucgaaagagaaucucuaacuguguggccgacuauuccguacuuuacaauucagcuaguuuuagcacauucaaaugcuacggcguuuccccaacuaagcugaacgacuuguguuuuaccaauguguaugccgauucuuucgucauuaggggugacgaagugcggcagaucgcacccgggcaaacaggaaaaaucgcugauuacaacuauaagcuaccggacgauuuuacuggcugcgucauugccuggaauagcaacaaccuggacucaaaagugggcgggaauuacaacuaucucuaccgucuguuccgcaagaguaaucuuaagccuuuugagagagauauauccaccgaaaucuaucaggcgggaagcacacccuguaacgguguugagggcuucaauugcuacuuuccacugcagucuuacggguuccaaccuaccaacggagugggcuaucagcccuacaggguagucguguugucauuugaacuccugcacgccccagcaacuguuugcggucccaaaaagaguacgaauuuagugaaaaacaagugugucaauuucaacuuuaaugggcugacaggcaccggagugcuaacugagagcaacaaaaaguuccucccuuuccagcaguuuggccgggacauugcugauaccacagacgccguacgagauccacaaacccuggagauccuugacauaacuccgugcuccuucgggggagugucuguuauuacacccgguacgaauaccucgaaccaggucgcuguguuguaucagggcgugaauuguacugaagucccuguugccauccaugcagaccagcugacaccaaccuggcgcguguacagcacaggguccaacguguuucaaacuagagccggaugccucaucggcgcugagcacguaaacaauucauaugaaugugauauucccaucggugcggggauuugcgcaaguuaccagacccagacgaacucuccuaggcgggcccgcagcgucgcuucccagucaauaaucgccuauaccaugagccugggcgcagaaaauucuguggccuacuccaacaauaguauugcuaucccaacaaacuucacuaucagcguuaccacagaaauucuucccgugucuaugacuaagaccuccgucgacuguacgauguacauaugcggagauucaacagaguguaguaaucuguugcuccaauauggcagcuuuugcacccagcugaacagagccuuaacugggaucgcaguggagcaggacaaaaauacacaggaaguuuucgcgcaagugaagcagauuuacaaaaccccgccuaucaaggauuuuggagguuucaacuuuucgcagauucugccagaccccuccaaaccuucuaagaggagcuucaucgaggaucuacucuuuaauaagguaacucuggcugacgccggcuucauaaaacaauauggggauugucuuggagacaucgcagcccgugauuugauuugcgcucagaaguucaacggccugaccguccugcccccacucuuaacagacgaaaugaucgcccaguacacgucagcacugcuugcugguaccauuacgaguggguggacauuuggcgccggagcggccuugcagaucccuuucgcuaugcaaauggcauaucgguuuaauggcauaggggugacccagaacgugcucuacgagaaucagaaacugauugccaaccaguucaacuccgcuaucggaaagauucaagauucucuaagcuccacagccucagcacugggcaaacuccaggacgucguuaaucagaacgcgcaggcccugaauacucuugugaagcaauugagcaguaacuuuggugcuaucucuuccguacugaaugacauauuaagccgacucgauaagguggaagccgagguccagaucgacagacugauuaccgggaggcuucagucgcugcaaacguaugugacacagcaguugauccgcgcagcugagauucgggccucagcaaaccucgccgcuaccaaaaugucugaaugcguucugggacagaguaagagaguggauuucuguggcaaagguuaccaucuaauguccuuuccccaaagcgcgccacacggcgucguguuccugcacguuacuuacgugccggcccaggagaagaauuuuaccacagcuccugcaaucugccaugacgggaaagcccacuuccccagggaaggagucuuuguaucuaacggcacucauugguucgugacccagcgcaauuuuuaugagccacagauaauuacaacggauaacaccuucguuagcgggaauugugacguggucaucggaaucgugaacaauacuguauacgauccccuccaaccugagcuggacuccuucaaggaagaacuugauaaauauuuuaagaaccacacaucaccagacguggauuugggcgacauuagugguaucaaugccagcgucguuaacauucagaaggaaauagaucgacugaaugagguggcuaaaaacuuaaacgaaucucucaucgaccugcaggagcuugggaaguacgagcaguauauuaaauggcccugguacaucuggcugggauucauugcaggccuaaucgccauagugauggucaccaucaugcucugcuguaugacuuccugcuguucaugccugaaggguuguugcaguuguggcagcugcugcaaauuugacgaagaugacuccgagccuguguugaaggggguuaagcugcauuauacaugaggacuaguuauaagacugacuagcccgaugggccucccaacgggcccuccuccccuccuugcaccgagauuaauaaaaaaaaaaaaaaaaaaaaaaaaaaaaaaaaaaaaaaaaaaaaaaaaaaaaaaaaaaaaaaaaugcaucccccccccccccccccccccccccccccccaaaggcucuuuucagagccaccagaauu

SEQ ID NO: 12995 - RNA, 4039 nt, Artificial Sequence
  SARS-CoV-2/Iceland/189/2020__EPI_ISL_417709 spike protein mRNA human (1-1273)
aggagaaagcuuaccauguucguguuucugguccuccuuccccugguuagcucccagugcgugaacuugaccacaagaacucaauuaccuccagccuacaccaauucuuucacgaggggcguauauuacccggacaagguguuucggucaaguguccugcacagcacacaggaucuauuccuccccuuuuucuccaacgugacuugguuucaugcuauccacguuucugggaccaauggaacaaaacgcuucgacaacccugugcugccauuuaaugauggugucuauuucgcaucgaccgagaagucaaacauuauacgaggcuggaucuuugggacuacacuugacagcaaaacccagagucuguugauugugaauaacgccacgaauguaguuaucaaggugugugaguuccaguuuugcaacgaucccuuccucggagucuacuaucauaaaaauaacaaguccuggauggagucugaguuccguguguacagcuccgcgaauaacuguacuuuugaguaugugucacaaccuuuccugauggaccuggaaggcaagcaggguaauuuuaaaaaccucagagaguucgucuuuaagaacauugauggguacuucaaaaucuacaguaagcacaccccaauaaauuuaguuagggaccugccccagggauuuagcgcucuugagccuuugguggaucugccaaucggcauuaacaucacacgguuccagacucuacucgcccugcaucgcucuuaucuuaccccgggcgacuccucaagcggguggacagcaggagccgcugcauacuauguagguuaccugcaacccagaaccuuuuugcucaaauauaaugaaaacggcacgauuacugaugccguggacugcgcucuggauccuuuaagugagacaaaguguacccugaagucuuucacugucgaaaaagggaucuaccagacauccaauuuuagggugcagccaaccgagagcauaguucgguuccccaacauuacgaaucucugcccuuuuggagagguguucaacgccacccgcuucgcgucggucuaugcauggaaucgaaagagaaucucuaacuguguggccgacuacuccguacuuuacaauucagcuaguuuuagcacauucaaaugcuauggcguuuccccaacuaagcugaacgacuuguguuuuaccaauguguacgccgauucuuucgucauuaggggugacgaagugcggcagaucgcacccgggcaaacaggaaaaaucgcugauuauaacuacaagcuaccggacgauuuuacuggcugcgucauugccuggaauagcaacaaccuggacucaaaagugggcgggaauuauaacuaccucuaucgucuguuccgcaagaguaaucuuaagccuuuugagagagauauauccaccgaaaucuaccaggcgggaagcacacccuguaacgguguugagggcuucaauugcuacuuuccacugcagucuuauggguuccaaccuaccaacggagugggcuaccagcccuauaggguagucguguugucauuugaacuccugcacgccccagcaacuguuugcggucccaaaaagaguacgaauuuagugaaaaacaagugugucaauuucaacuuuaaugggcugacaggcaccggagugcuaacugagagcaacaaaaaguuccucccuuuccagcaguuuggccgggacauugcugauaccacagacgccguacgagauccacaaacccuggagauccuugacauaacuccgugcuccuucgggggagugucuguuauuacacccgguacgaauaccucgaaccaggucgcuguguuguaccagggcgugaauuguacugaagucccuguugccauccacgcagaccagcugacaccaaccuggcgcguguauagcacaggguccaacguguuucaaacuagagccggaugccucaucggcgcugagcauguaaacaauucauacgaaugugauauucccaucggugcggggauuugcgcaaguuaucagacccagacgaacucuccuaggcgggcccgcagcgucgcuucccagucaauaaucgccuacaccaugagccugggcgcagaaaauucuguggccuacuccaacaauaguauugcuaucccaacaaacuucacuaucagcguuaccacagaaauucuucccgugucuaugacuaagaccuccgucgacuguacgauguauauaugcggagauucaacagaguguaguaaucuguugcuccaauacggcagcuuuugcacccagcugaacagagccuuaacugggaucgcaguggagcaggacaaaaauacacaggaaguuuucgcgcaagugaagcagauuuauaaaaccccgccuaucaaggauuuuggagguuucaacuuuucgcagauucugccagaccccuccaaaccuucuaagaggagcuucaucgaggaucuacucuuuaauaagguaacucuggcugacgccggcuucaccaaacaauacggggauugucuuggagacauagcagcccgugauuugaucugcgcucagaaguucaacggccugacaguccucccuccacuguuaacggacgaaaugauugcccaguauaccucagcacugcuugcugguacuaucacaaguggguggaccuuuggcgccggagcggccuugcagauuccuuucgcuaugcaaauggcauaccgguuuaauggcaucggggugacacagaacgugcucuaugagaaucagaaacugauagccaaccaguucaacuccgcuauuggaaagauccaagauucucuaagcuccacugccucagcacugggcaaacuccaggacgucguuaaucagaacgcgcaggcccugaauacccuugugaagcaauugagcaguaacuuuggugcuauuucuuccguacugaaugacaucuuaagccgacucgauaagguggaagccgagguccagauagacagacugaucacggggaggcuucagucgcugcaaacauacgugacccagcaguugauucgcgcagcugagauccgggccucagcaaaccucgccgcuacuaaaaugucugaaugcguucugggacagaguaagagaguggauuucuguggcaaagguuaccaccuaauguccuuuccccaaagcgcgccacauggcgucguguuccugcacguuaccuaugugccggcccaggagaagaauuuuacaacugcacccgcuauuugccacgacgggaaagcccauuuccccagggaaggagucuuuguaucuaacggcacccacugguucgugacacagcgcaauuuuuacgagccacagaucauaacgaccgauaacacuuucguuagcgggaauugugacguggucauuggaaucgugaacaauacaguauaugauccccuccaaccugagcuggacuccuucaaggaagaacuugauaaauacuuuaagaaccauaccucaccagacguggauuugggcgacaucagugguauuaaugccagcgucguuaacauccagaaggaaauugaucgacugaaugagguggcuaaaaacuuaaacgaaucucucauagaccugcaggagcuugggaaguaugagcaguacaucaaauggcccugguauauuuggcugggauucaucgcaggccuaauugccaucgugauggucacuauaaugcucugcuguaugacauccugcuguucaugccugaaggguuguugcaguuguggcagcugcugcaaauuugacgaagaugacuccgagccuguguugaaggggguuaagcugcacuacaccugaggacuaguuauaagacugacuagcccgaugggccucccaacgggcccuccuccccuccuugcaccgagauuaauaaaaaaaaaaaaaaaaaaaaaaaaaaaaaaaaaaaaaaaaaaaaaaaaaaaaaaaaaaaaaaaaugcaucccccccccccccccccccccccccccccccaaaggcucuuuucagagccaccagaauu

SEQ ID NO: 12996 - RNA, 4039 nt, Artificial Sequence
  SARS-CoV-2/Australia/NSW56/2020__EPI_ISL_417408 spike protein mRNA human (1-1273)
aggagaaagcuuaccauguucguguuucugguccuccuuccccugguuagcucccagugcgugaacuugaccacaagaacucaauuaccuccagccuacacgaauagcuucaccaggggcguauauuacccggacaagguguuucggucaaguguccugcacagcacacaggaucuauuccuccccuuuuucuccaacgugacuugguuucaugcuauccacguuucugggaccaauggaacaaaacgcuucgacaacccugugcugccauuuaaugauggugucuauuucgcaucgaccgagaagucaaacauuauacgaggcuggaucuuugggacuacacuugacagcaaaacccagagucuguugauugugaauaacgccacgaauguaguuaucaaggugugugaguuccaguuuugcaacgaucccuuccucggagucuacuaucauaaaaauaacaaguccuggauggagucugaguuccguguguacagcuccgcgaauaacuguacuuuugaguaugugucacaaccuuuccugauggaccuggaaggcaagcaggguaauuuuaaaaaccucagagaguucgucuuuaagaacauugauggguacuucaaaaucuacaguaagcacaccccaauaaauuuaguuagggaccugccccagggauuuagcgcucuugagccuuugguggaucugccaaucggcauuaacaucacacgguuccagacucuacucgcccugcaucgcucuuaucuuaccccgggcgacuccucaagcggguggacagcaggagccgcugcauacuauguagguuaccugcaacccagaaccuuuuugcucaaauauaaugaaaacggcacgauuacugaugccguggacugcgcucuggauccuuuaagugagacaaaguguacccugaagucuuucacugucgaaaaagggaucuaccagacauccaauuuuagggugcagccaaccgagagcauaguucgguuccccaacauuacgaaucucugcccuuuuggagagguguucaacgccacccgcuucgcgucggucuaugcauggaaucgaaagagaaucucuaacuguguggccgacuacuccguacuuuacaauucagcuaguuuuagcacauucaaaugcuauggcguuuccccaacuaagcugaacgacuuguguuuuaccaauguguacgccgauucuuucgucauuaggggugacgaagugcggcagaucgcacccgggcaaacaggaaaaaucgcugauuauaacuacaagcuaccggacgauuuuacuggcugcgucauugccuggaauagcaacaaccuggacucaaaagugggcgggaauuauaacuaccucuaucgucuguuccgcaagaguaaucuuaagccuuuugagagagauauauccaccgaaaucuaccaggcgggaagcacacccuguaacgguguugagggcuucaauugcuacuuuccacugcagucuuauggguuccaaccuaccaacggagugggcuaccagcccuauaggguagucguguugucauuugaacuccugcacgccccagcaacuguuugcggucccaaaaagaguacgaauuuagugaaaaacaagugugucaauuucaacuuuaaugggcugacaggcaccggagugcuaacugagagcaacaaaaaguuccucccuuuccagcaguuuggccgggacauugcugauaccacagacgccguacgagauccacaaacccuggagauccuugacauaacuccgugcuccuucgggggagugucuguuauuacacccgguacgaauaccucgaaccaggucgcuguguuguaccaggacgugaauuguacugaagucccuguugccauccacgcagaucagcugacaccaaccuggcgcguguauagcacaggcuccaacguguuucaaacuagagccgggugccucaucggagcugagcauguaaacaauucauacgaaugugacauucccaucggcgcggguauuugcgcaaguuaucagacccagacgaacucuccuaggcgggcccgcagcgucgcuucccagucaauaaucgccuacaccaugagccugggggcagaaaauucuguggccuacuccaacaauaguauugcuaucccaacaaacuucacuaucagcguuaccacagaaauucuucccgugucuaugacuaagaccuccgucgauuguacgauguauauaugcggcgacucaacagaguguaguaaucuguugcuccaauacggaucuuuuugcacccagcugaacagagccuuaacuggcaucgcaguggagcaggauaaaaauacacaggaaguuuucgcgcaagugaagcagauuuauaaaaccccgccuaucaaggacuuugggggauucaacuuuucgcagauucugccagauuccucuaaacccagcaagaggucauucaucgaggaccuacucuuuaauaagguaacucuggcugaugccgguuucauaaaacaauacggcgacugucuuggggauaucgcagcccgugacuugauuugcgcucagaaguucaacggacugaccguccucccuccccuguuaacagaugaaaugaucgcccaguauacgagugcacugcuugcuggcaccauuacuuccgguuggacauuuggggccggcgcggccuugcagaucccauucgcuaugcaaauggcauaccgguuuaauggaauaggcgugacccagaacgugcucuaugagaaucagaaacugauugccaaccaguucaacucugcuaucgggaagauucaagacagccuauccucaacagccagcgcacugggaaaacuccaggacgucguuaaucagaacgcgcaggcccugaauacucuugugaagcaauugaguucuaacuuuggcgcuaucuccagcguacugaaugauauauuaucgcgacucgacaagguggaagccgagguccagaucgauagacugauuaccgguaggcuucagucacugcaaacguacgugacacagcaguugauccgcgcagcugagauucgggccucugcaaaccucgccgcuaccaaaaugagugaaugcguucuggggcaguccaagagaguggacuucuguggaaaaggcuaccaccuaaugagcuuuccucaaucugcgccccauggugucguguuccugcacguuacuuaugugccagcccaggagaagaauuuuaccacagcaccggcuaucugccacgauggcaaagcccauuucccuagggaaggggucuuuguaagcaacggaacucacugguucgugacccagcgcaauuuuuacgagccccagauaauuacaacggacaacaccuucguuuccggcaauugugauguggucaucgggaucgugaacaauacuguauaugacccacuccaacccgagcuggauucauucaaggaagaacuugacaaauacuuuaagaaccauacaaguccugauguggacuugggagauauuagcggcaucaaugccucugucguuaacauucagaaggaaauagaccgacugaaugagguggcuaaaaacuuaaacgaaucccucaucgaccugcaggagcuugguaaguaugagcaguacauuaaauggccaugguauaucuggcugggguucauugcaggacuaaucgccauagugauggucaccaucaugcucugcuguaugacuucaugcuguaguugccugaagggcuguugcagcugugguuccugcugcaaauuugaugaagacgauucugagcccguguugaagggcguuaagcugcacuacacaugaggacuaguuauaagacugacuagcccgaugggccucccaacgggcccuccuccccuccuugcaccgagauuaauaaaaaaaaaaaaaaaaaaaaaaaaaaaaaaaaaaaaaaaaaaaaaaaaaaaaaaaaaaaaaaaaugcaucccccccccccccccccccccccccccccccaaaggcucuuuucagagccaccagaauu

SEQ ID NO: 12997 - RNA, 4039 nt, Artificial Sequence
  SARS-CoV-2/Iceland/280/2020__EPI_ISL_417608 spike protein mRNA human (1-1273)
aggagaaagcuuaccauguucguguuucugguccuccuuccccugguuagcucccagugcgugaacuugaccacaagaacucaauuaccuccagccuacacuaauucuuucaccaggggcguauauuacccggacaagguguuucggucaaguguccugcacagcacacaggaucuauuccuccccuuuuucuccaacgugacuugguuucaugcuauccacguuucugggaccaauggaacaaaacgcuucgacaacccugugcugccauuuaaugauggugucuauuucgcaucgaccgagaagucaaacauuauacgaggcuggaucuuugggacuacacuugacagcaaaacccagagucuguugauugugaauaacgccacgaauguaguuaucaaggugugugaguuccaguuuugcaacgaucccuuccucggagucuacuaucauaaaaauaacaaguccuggauggagucugaguuccguguguacagcuccgcgaauaacuguacuuuugaguaugugucacaaccuuuccugauggaccuggaaggcaagcaggguaauuuuaaaaaccucagagaguucgucuuuaagaacauugauggguacuucaaaaucuacaguaagcacaccccaauaaauuuaguuagggaccugccccagggauuuagcgcucuugagccuuugguggaucugccaaucggcauuaacaucacacgguuccagacucuacucgcccugcaucgcucuuaucuuaccccgggcgacuccucaagcggguggacagcaggagccgcugcauacuauguagguuaccugcaacccagaaccuuuuugcucaaauauaaugaaaacggcacgauuacugaugccguggacugcgcucuggauccuuuaagugagacaaaguguacccugaagucuuucacugucgaaaaagggaucuaccagacauccaauuuuagggugcagccaaccgagagcauaguucgguuccccaacauuacgaaucucugcccuuuuggagagguguucaacgccacccgcuucgcgucggucuaugcauggaaucgaaagagaaucucuaacuguguggccgacuacuccguacuuuacaauucagcuaguuuuagcacauucaaaugcuauggcguuuccccaacuaagcugaacgacuuguguuuuaccaauguguacgccgauucuuucgucauuaggggugacgaagugcggcagaucgcacccgggcaaacaggaaaaaucgcugauuauaacuacaagcuaccggacgauuuuacuggcugcgucauugccuggaauagcaacaaccuggacucaaaagugggcgggaauuauaacuaccucuaucgucuguuccgcaagaguaaucuuaagccuuuugagagagauauauccaccgaaaucuaccaggcgggaagcacacccuguaacgguguugagggcuucaauugcuacuuuccacugcagucuuauggguuccaaccuaccaacggagugggcuaccagcccuauaggguagucguguugucauuugaacuccugcacgccccagcaacuguuugcggucccaaaaagaguacgaauuuagugaaaaacaagugugucaauuucaacuuuaaugggcugacaggcaccggagugcuaacugagagcaacaaaaaguuccucccuuuccagcaguuuggccgggacauugcugauaccacagacgccguacgagauccacaaacccuggagauccuugacauaacuccgugcuccuucgggggagugucuguuauuacacccgguacgaauaccucgaaccaggucgcuguguuguaccagggcgugaauuguacugaagucccuguugccauccacgcagaccagcugacaccaaccuggcgcguguauagcacaggguccaacguguuucaaacuagagccggaugccucaucggcgcugagcauguaaacaauucauacgaaugugauauucccaucggugcggggauuugcgcaaguuaucacacccagacgaacucuccuaggcgggcccgcagcgucgcuucccagucaauaaucgccuacaccaugagccugggcgcagaaaauucuguggccuacuccaacaauaguauugcuaucccaacaaacuucacuaucagcguuaccacagaaauucuucccgugucuaugacuaagaccuccgucgacuguacgauguauauaugcggagauucaacagaguguaguaaucuguugcuccaguacggcagcuuuugcacccaacugaacagagccuuaacugggaucgcaguggagcaggacaaaaauacacaggaaguuuucgcacaggugaagcaaauuuauaaaaccccgccuaucaaggauuuuggagguuucaacuuuucgcagauucugccagaccccuccaaaccuucuaagaggagcuucaucgaggaucuacucuuuaauaagguaacucuggcugacgccggcuucauaaaacaguacggggauugucuuggagacaucgcagcccgugauuugauuugcgcucaaaaguucaacggccugaccguccugcccccacucuuaacagacgaaaugaucgcccaguauacgucagcacugcuugcugguaccauuacgaguggguggacauuuggcgccggagcggccuugcagaucccuuucgcuaugcagauggcauaccgguuuaauggcauaggggugacccaaaacgugcucuaugagaaucagaaacugauugccaaccaguucaacuccgcuaucggaaagauucaggauucucuaagcuccacagccucagcacugggcaaacuccaagacgucguuaaucagaacgcgcaggcccugaauacucuugugaagcaguugagcaguaacuuuggugcuaucucuuccguacugaaugacauauuaagccgacucgauaagguggaagccgagguccaaaucgacagacugauuaccgggaggcuucagucgcugcagacguacgugacacaacaguugauccgcgcagcugagauucgggccucagcaaaccucgccgcuaccaaaaugucugaaugcguucugggacagaguaagagaguggauuucuguggcaaagguuaccaucuaauguccuuuccccagagcgcgccacacggcgucguguuccugcacguuacuuaugugccggcccaagagaagaauuuuaccacagcgccugcuaucugccaugacgggaaagcccacuuccccagggaaggagucuuuguaucuaacggcacucauugguucgugacccagcgcaauuuuuacgagccacagauaauuacaacggauaacaccuucguuagcgggaauugugacguggucaucggaaucgugaacaauacuguauaugauccccuccagccugagcuggacuccuucaaggaagaacuugauaaauacuuuaagaaccacacaucaccagacguggauuugggcgacauuagugguaucaaugccagcgucguuaacauucaaaaggaaauagaucgacugaaugagguggcuaaaaacuuaaacgaaucucucaucgaccugcaggagcuugggaaguaugagcaguacauuaaauggcccugguauaucuggcugggauucauugcaggccuaaucgccauagugauggucaccaucaugcucugcuguaugacuuccugcuguucaugccugaaggguuguugcaguuguggcagcugcugcaaauuugacgaagaugacuccgagccuguguugaaggggguuaagcugcauuacacaugaggacuaguuauaagacugacuagcccgaugggccucccaacgggcccuccuccccuccuugcaccgagauuaauaaaaaaaaaaaaaaaaaaaaaaaaaaaaaaaaaaaaaaaaaaaaaaaaaaaaaaaaaaaaaaaaugcaucccccccccccccccccccccccccccccccaaaggcucuuuucagagccaccagaauu

SEQ ID NO: 12998 - RNA, 4039 nt, Artificial Sequence
  SARS-CoV-2/Iceland/247/2020__EPI_ISL_417575 spike protein mRNA human (1-1273)
aggagaaagcuuaccauguucguguuucugguccuccuuccccugguuagcucccagugcgugaacuugaccacaagaacucaauuaccuccagccuacacuaauucuuucaccaggggcguauauuacccggacaagguguuucggucaaguguccugcacagcacacaggaucuauuccuccccuuuuucuccaacgugacuugguuucaugcuauccacguuucugggaccaauggaacaaaacgcuucgacaacccugugcugccauuuaaugauggugucuauuucgcaucgaccgagaagucaaacauuauacgaggcuggaucuuugggacuacacuugacagcaaaacccagagucuguugauugugaauaacgccacgaauguaguuaucaaggugugugaguuccaguuuugcaacgaucccuuccucggagucuacuaucauaaaaauaacaaguccuggauggagucugaguuccguguguacagcuccgcgaauaacuguacuuuugaguaugugucacaaccuuuccugauggaccuggaaggcaagcaggguaauuuuaaaaaccucagagaguucgucuuuaagaacauugauggguacuucaaaaucuacaguaagcacaccccaauaaauuuaguuagggaccugccccagggauuuagcgcucuugagccuuugguggaucugccaaucggcauuaacaucacacgguuccagacucuacucgcccugcaucgcucuuaucuuaccccgggcgacuccucaagcggguggacagcaggagccgcugcauacuauguagguuaccugcaacccagaaccuuuuugcucaaauauaaugaaaacggcacgauuacugaugccguggacugcgcucuggauccuuuaagugagacaaaguguacccugaagucuuucacugucgaaaaagggaucuaccagacauccaauuuuagggugcagccaaccgagagcauaguucgguuccccaacauuacgaaucucugcccuuuuggagagguguucaacgccacccgcuucgcgucggucuaugcauggaaucgaaagagaaucucuaacuguguggccgacuacuccguacuuuacaauucagcuaguuuuagcacauucaaaugcuauggcguuuccccaacuaagcugaacgacuuguguuuuaccaauguguacgccgauucuuucgucauuaggggugacgaagugcggcagaucgcacccgggcaaacaggaaaaaucgcugauuauaacuacaagcuaccggacgauuuuacuggcugcgucauugccuggaauagcaacaaccuggacucaaaagugggcgggaauuauaacuaccucuaucgucuguuccgcaagaguaaucuuaagccuuuugagagagauauauccaccgaaaucuaccaggcgggaagcacacccuguaacgguguugagggcuucaauugcuacuuuccacugcagucuuauggguuccaaccuaccaacggagugggcuaccagcccuauaggguagucguguugucauuugaacuccugcacgccccagcaacuguuugcggucccaaaaagaguacgaauuuagugaaaaacaagugugucaauuucaacuuuaaugggcugacaggcaccggagugcuaacugagagcaacaaaaaguuccucccuuuccagcaguuuggccgggacauugcugauaccacagacgccguacgagauccacaaacccuggagauccuugacauaacuccgugcuccuucgggggagugucuguuauuacacccgguacgaauaccucgaaccaggucgcuguguuguaccagggcgugaauuguacugaagucccuguugccauccacgcagaccagcugacaccaaccuggcgcguguauagcacaggguccaacguguuucaaacuagagccggaugccucaucggcgcugagcauguaaacaauucauacgaaugugauauucccaucggugcggggauuugcgcaaguuaucagacccagacgaacucuccuaggcgggcccgcagcgucgcuucccagucaauaaucgccuacaccaugagccugggcgcagaaaauucuguggccuacuccaacaauaguauugcuaucccaacaaacuucacuaucagcguuaccacagaaauucuucccgugucuaugacuaagaccuccgucgacuguacgauguauauaugcggagauucaacagaguguaguaaucuguugcuccaauacggcagcuuuugcacccagcugaacagagccuuaacugggaucgcaguggagcaggacaaaaauacacaggaaguuuucgcgcaagugaagcagauuuauaaaaccccgccuaucaaggauuuuggagguuucaacuuuucgcagauucugccagaccccuccaaaccuucuaagaggagcuucaucgaggaucuacucuuuaauaagguaacucuggcugacgccggcuucauaaaacaauacggggauugucuuggagacaucgcagcccgugauuugauuugcgcucagaaguucaacggccugaccguccugcccccacucuuaacagacgaaaugaucgcccaguauacgucagcacugcuugcugguaccauuacgaguggguggacauuuggcgccggagcggccuugcagaucccuuucgcuaugcaaauggcauaccgguuuaauggcauaggggugacccagaacgugcucuaugagaaucagaaacugauugccaaccaguucaacuccgcuaucggaaagauucaagauucucuaagcuccacagccucagcacugggcaaacuccaggacgucguuaaucagaacgcgcaggcccugaauacucuugugaagcaauugagcaguaacuuuggugcuaucucuuccguacugaaugacauauuaagccgacucgauaagguggaagccgagguccagaucgacagacugauuaccgggaggcuucagucgcugcaaacguacgugacacagcaguugauccgcgcagcugagauucgggccucagcaaaccucgccgcuaccaaaaugucugaaugcguucugggacagaguaagagaguggauuucuguggcaaagguuaccaccuaauguccuuuccccaaagcgcgccacauggcgucguguuccugcacguuacuuaugugccggcccaggagaagaauuuuaccacagcuccugcaaucugccacgacgggaaagcccauuuccccagggaaggagucuuuguaucuaacggcacucacugguucgugacccagcgcaauuuuuacgagccacagauaauuacaacggauaacaccuucguuagcgggaauugugacguggucaucggaaucgugaacaauacuguauaugauccccuccaaccugagcuggacuccuucaaggaagaacuugauaaauacuuuaagaaccauacaucaccagacguggauuugggcgacauuagugguaucaaugccagcgucguuaacauucagaaggaaauagaucgacugaaugagguggcuaaaaacuuaaacgaaucucucaucgaccugcaggagcuugggaaguaugagcaguacauuaaauggcccugguauaucuggcugggauucauugcaggccuaaucgccauagugaucgucaccauuaugcucugcuguaugacuuccugcuguucaugccugaaggguuguugcaguuguggcagcugcugcaaauuugacgaagaugacuccgagccuguguugaaggggguuaagcugcacuacacaugaggacuaguuauaagacugacuagcccgaugggccucccaacgggcccuccuccccuccuugcaccgagauuaauaaaaaaaaaaaaaaaaaaaaaaaaaaaaaaaaaaaaaaaaaaaaaaaaaaaaaaaaaaaaaaaaugcaucccccccccccccccccccccccccccccccaaaggcucuuuucagagccaccagaauu

SEQ ID NO: 12999 - RNA, 4039 nt, Artificial Sequence
  SARS-CoV-2/Iceland/238/2020__EPI_ISL_417566 spike protein mRNA human (1-1273)
aggagaaagcuuaccauguucguguuucugguccuccuuccccugguuagcucccagugcgugaacuugaccacaagaacucaauuaccuccagccuacacuaauucuuucaccaggggcguauauuacccggacaagguguuucggucaaguguccugcacagcacacaggaucuauuccuccccuuuuucuccaacgugacuugguuucaugcuauccacguuucugggaccaauggaacaaaacgcuucgacaacccugugcugccauuuaaugauggugucuauuucgcaucgaccgagaagucaaacauuauacgaggcuggaucuuugggacuacacuugacagcaaaacccagagucuguugauugugaauaacgccacgaauguaguuaucaaggugugugaguuccaguuuugcaacgaucccuuccucggagucuacuaucauaaaaauaacaaguccuggauggagucugaguuccguguguacagcuccgcgaauaacuguacuuuugaguaugugucacaaccuuuccugauggaccuggaaggcaagcaggguaauuuuaaaaaccucagagaguucgucuuuaagaacauugauggguacuucaaaaucuacaguaagcacaccccaauaaauuuaguuagggaccugccccagggauuuagcgcucuugagccuuugguggaucugccaaucggcauuaacaucacacgguuccagacucuacucgcccugcaucgcucuuaucuuaccccgggcgacuccucaagcggguggacagcaggagccgcugcauacuauguagguuaccugcaacccagaaccuuuuugcucaaauauaaugaaaacggcacgauuacugaugccguggacugcgcucuggauccuuuaagugagacaaaguguacccugaagucuuucacugucgaaaaagggaucuaccagacauccaauuuuagggugcagccaaccgagagcauaguucgguuccccaacauuacgaaucucugcccuuuuggagagguguucaacgccacccgcuucgcgucggucuaugcauggaaucgaaagagaaucucuaacuguguggccgacuacuccguacuuuacaauucagcuaguuuuagcacauucaaaugcuauggcguuuccccaacuaagcugaacgacuuguguuuuaccaauguguacgccgauucuuucgucauuaggggugacgaagugcggcagaucgcacccgggcaaacaggaaaaaucgcugauuauaacuacaagcuaccggacgauuuuacuggcugcgucauugccuggaauagcaacaaccuggacucaaaagugggcgggaauuauaacuaccucuaucgucuguuccgcaagaguaaucuuaagccuuuugagagagauauauccaccgaaaucuaccaggcgggaagcacacccuguaacgguguugagggcuucaauugcuacuuuccacugcagucuuauggguuccaaccuaccaacggagugggcuaccagcccuauaggguagucguguugucauuugaacuccugcacgccccagcaacuguuugcggucccaaaaagaguacgaauuuagugaaaaacaagugugucaauuucaacuuuaaugggcugacaggcaccggagugcuaacugagagcaacaaaaaguuccucccuuuccagcaguuuggccgggacauugcugauaccacagacgccguacgagauccacaaacccuggagauccuugacauaacuccgugcuccuucgggggagugucuguuauuacacccgguacgaauaccucgaaccaggucgcuguguuguaccagggcgugaauuguacugaagucccuguugccauccacgcagaccagcugacaccaaccuggcgcguguauagcacaggguccaacguguuucaaacuagagccggaugccucaucggcgcugagcauguaaacaauucauacgaaugugauauucccaucggugcggggauuugcgcaaguuaucagacccagacgaacucuccuaggcgggcccgcagcgucgcuucccagucaauaaucgccuacaccaugagccugggcgcagaaaauucuguggccuacuccaacaauaguauugcuaucccaacaaacuucacuaucagcguuaccacagaaauucuucccgugucuaugacuaagaccuccgucgacuguacgauguauauaugcggagauucaacagaguguaguaaucuguugcuccaauacggcagcuuuugcacccagcugaacagagccuuaacugggaucgcaguggagcaggacaaaaauacacaggaaguuuucgcgcaagugaagcagauuuauaaaaccccgccuaucaaggauuuuggagguuucaacuuuucgcagauucugccagaccccuccaaaccuucuaagaggagcuucaucgaggaucuacucuuuaauaagguaacucuggcugacgucggcuucauaaaacaauacggggauugucuuggagacaucgccgcacgugauuugauuugcgcccagaaguucaacggccugaccgugcugcccccacucuuaacagacgaaaugaucgcucaguauacgucagcccugcuugcagguaccauuacgaguggguggacauuuggcgcuggagccgcguugcagaucccuuucgccaugcaaauggcuuaccgguuuaauggcauaggggugacccagaacguccucuaugagaaucagaaacugauugcaaaccaguucaacuccgccaucggaaagauucaagauucucuaagcuccacagcuucagcccugggcaaacuccaggacguugugaaucagaacgcacaggcgcugaauacucuuguaaagcaauugagcaguaacuuuggugccaucucuuccgugcugaaugacauauuaagccgacucgauaaggucgaagcugaggugcagaucgacagacugauuaccgggaggcuucagucgcugcaaacguacguuacacagcaguugauccgcgccgcagagauucgggcuucagccaaccucgcagccaccaaaaugucugaaugcgugcugggacagaguaagagagucgauuucuguggcaaagguuaccaccuaauguccuuuccccaaagcgcuccacauggcgugguuuuccugcacgugacuuaugucccggcgcaggagaagaauuuuaccacagccccugcaaucugccacgacgggaaagcucauuuccccagggaaggaguauuugugucuaacggcacucacugguucguuacccagcgcaauuuuuacgagccacagauaauuacaacggauaacaccuucgugagcgggaauugugacgucgugaucggaaucguaaacaauacuguguaugauccccuccaaccugagcuggacuccuucaaggaagaacuugauaaauacuuuaagaaccauacaucaccagacgucgauuugggcgacauuagugguaucaaugccagcguugugaacauucagaaggaaauagaucgacugaaugagguggccaaaaacuuaaacgaaucucucaucgaccugcaggagcuugggaaguaugagcaguacauuaaauggcccugguauaucuggcugggauucauugcuggccuaaucgcaauagucauggugaccaucaugcucugcuguaugacuuccugcuguucaugccugaaggguuguugcaguuguggcagcugcugcaaauuugacgaagaugacuccgagccuguuuugaaggggguaaagcugcacuacacaugaggacuaguuauaagacugacuagcccgaugggccucccaacgggcccuccuccccuccuugcaccgagauuaauaaaaaaaaaaaaaaaaaaaaaaaaaaaaaaaaaaaaaaaaaaaaaaaaaaaaaaaaaaaaaaaaugcaucccccccccccccccccccccccccccccccaaaggcucuuuucagagccaccagaauu

SEQ ID NO: 13000 - RNA, 4039 nt, Artificial Sequence
  SARS-CoV-2/Greece/16/2020__EPI_ISL_418265 spike protein mRNA human (1-1273)
aggagaaagcuuaccauguucguguuucugguccuccuuccccugguuagcucccagugcgugaacuugaccacaagaacucaauuaccuccagccuacacuaauucuuucaccaggggcguauauuacccggacaagguguuucggucaaguguccugcacagcacacaggaucuauuccuccccuuuuucuccaacgugacuugguuucaugcuauccacguuucugggaccaauggaacaaaacgcuucgacaacccugugcugccauuuaaugauggugucuauuucgcaucgaccgagaagucaaacauuauacgaggcuggaucuuugggacuacacuugacagcaaaacccagagucuguugauugugaauaacgccacgaauguaguuaucaaggugugugaguuccaguuuugcaacgaucccuuccucggagucuacuaucauaaaaauaacaaguccuggauggagucugaguuccguguguacagcuccgcgaauaacuguacuuuugaauaugugucacaaccuuuccugauggaccuggaaggcaagcaggguaauuuuaaaaaccucagagaguucgucuuuaagaacguugauggguacuucaaaauuuacaguaagcacaccccaaucaauuuagugagggaccugccccagggauuuagcgcucuugagccuuugguagaucugccaauaggcaucaacauuacacgguuccagacucuacucgcccugcaucgcucuuaucuuaccccgggcgacuccucaagcggguggacagcaggagccgcugcauacuauguggguuaccugcaacccagaaccuuuuugcucaaauauaaugaaaacggcacgaucacugaugccgucgacugcgcucuggauccuuuaagugagacaaaguguacccugaagucuuucacuguggaaaaagggauuuaccagacauccaauuuuaggguucagccaaccgagagcaucgugcgguuccccaacauaacgaaucucugcccuuuuggagaggucuucaacgccacccgcuucgcgucgguguaugcauggaaucgaaagagaauuucuaacuguguagccgacuacuccguucuuuacaauucagcuaguuuuagcacauucaaaugcuauggcguguccccaacuaagcugaacgacuuguguuuuaccaaugucuacgccgauucuuucgugaucaggggugacgaaguccggcagauugcacccgggcaaacaggaaaaaucgcugauuauaacuacaagcuaccggacgauuuuacuggcugcgugaucgccuggaauagcaacaaccuggacucaaaaguuggcgggaauuauaacuaccucuaucgucuguuccgcaagaguaaucuuaagccuuuugagagagauauuuccaccgaaauauaccaggcgggaagcacacccuguaacgguguggagggcuucaauugcuacuuuccacugcagucuuauggguuccaaccuaccaacggaguaggcuaccagcccuauagggucgugguuuugucauuugaacuccugcacgccccagcaacugugugcggucccaaaaagaguacgaauuuagucaaaaacaagugugugaauuucaacuuuaaugggcugacaggcaccggaguacuaacugagagcaacaaaaaguuccucccuuuccagcaguuuggccgggacaucgcugauaccacagacgccgugcgagauccacaaacccuggagauucuugacaucacuccgugcuccuucgggggaguuucugucauaacacccgguacgaauaccucgaaccagguggcuguguuguaccaggacgucaauuguacugaaguuccuguggccauucacgcagaucagcugacaccaaccuggcgcguguauagcacaggcuccaacguauuucaaacuagagccgggugccucaucggagcugagcaugucaacaauucauacgaaugugacauccccauuggcgcggguaucugcgcaaguuaucagacccagacgaacucuccuaggcgggcccgcagcguggcuucccagucaauuauagccuacaccaugagccugggggcagaaaauucuguugccuacuccaacaauaguaucgcuauuccaacaaacuucacuaucagcgugaccacagaaauccuucccgucucuaugacuaagaccuccguggauuguacgauguauauuugcggcgacucaacagaguguaguaaucuguugcuccaauacggcagcuuuugcacccagcugaacagagccuuaacuggaauagcaguugagcaggauaaaaauacacaggaaguguucgcgcaaguaaagcagaucuauaaaaccccgccuauuaaggacuuugggggauucaacuuuucgcagauccugccagaucccuccaaaccuucuaagaggagcuucauugaggaccuacucuuuaauaaggucacucuggcugaugccgguuucaucaaacaauacggcgacugucuuggggauauagcagcccgugacuugaucugcgcucagaaguucaacggacugaccgugcugcccccacucuuaacagaugaaaugauugcccaguauacgucagcacugcuugcuggcaccaucacgagugguuggacauuuggggccggcgcggccuugcagauuccuuucgcuaugcaaauggcauaccgguuuaauggaaucggcgugacccagaacguccucuaugagaaucagaaacugauagccaaccaguucaacuccgcuauugggaagauccaagacucucuaagcuccacagccucagcacugggaaaacuccaggacguugugaaucagaacgcgcaggcccugaauacucuuguaaagcaauugagcaguaacuuuggcgcuauuucuuccgugcugaaugauaucuuaagccgacucgacaaggucgaagccgaggugcagauagauagacugaucaccgguaggcuucagucgcugcaaacguacguuacacagcaguugauucgcgcagcugagauccgggccucagcaaaccucgccgcuaccaaaaugucugaaugcgugcuggggcagaguaagagagucgacuucuguggaaaaggcuaccaccuaauguccuuuccccaaagcgcgccacauggugugguuuuccugcacgugacuuaugucccggcccaggagaagaauuuuaccacagcuccugcaauuugccacgauggcaaagcccauuuccccagggaagggguauuugugucuaacggaacucacugguucguuacccagcgcaauuuuuacgagccacagaucauaacaacggacaacaccuucgugagcggcaauugugaugucgugauugggaucguaaacaauacuguguaugacccccuccaaccugagcuggauuccuucaaggaggaacuugacaaauacuuuaagaaccauacaucaccagaugucgacuugggagauaucaguggcauuaaugccagcguugugaacauccagaaggaaauugaccgacugaaugagguggcuaaaaacuuaaacgaaucucucauagaccugcaggagcuugguaaguaugagcaguacaucaaauggcccugguauauuuggcugggguucaucgcaggacuaauugccaucgucauggugaccauaaugcucugcuguaugacuuccugcuguucaugccugaagggcuguugcaguugugguagcugcugcaaauuugaugaagacgauuccgagccuguuuugaagggcguaaagcugcacuacacaugaggacuaguuauaagacugacuagcccgaugggccucccaacgggcccuccuccccuccuugcaccgagauuaauaaaaaaaaaaaaaaaaaaaaaaaaaaaaaaaaaaaaaaaaaaaaaaaaaaaaaaaaaaaaaaaaugcaucccccccccccccccccccccccccccccccaaaggcucuuuucagagccaccagaauu

SEQ ID NO: 13001 - RNA, 4039 nt, Artificial Sequence
  SARS-CoV-2/Iceland/319/2020__EPI_ISL_417648 spike protein mRNA human (1-1273)
aggagaaagcuuaccauguucguguuucugguccuccuuccccugguuagcucccagugcgugaacuugaccacaagaacucaauuaccuccagccuacacuaauucuuucaccaggggcguauauuacccggacaagguguuucggucaaguguccugcacagcacacaggaucuauuccuccccuuuuucuccaacgugacuugguuucaugcuauccacguuucugggaccaauggaacaaaacgcuucgacaacccugugcugccauuuaaugauggugucuauuucgcaucgaccgagaagucaaacauuauacgaggcuggaucuuugggacuacacuugacagcaaaacccagagucuguugauugugaauaacgccacgaauguaguuaucaaggugugugaguuccaguuuugcaacgaucccuuccucggagucuacuaucauaaaaauaacaaguccuggauggagucugaguuccguguguacagcuccgcgaauaacuguacuuuugaguaugugucacaaccuuuccugauugaccuggaaggcaagcaggguaauuuuaaaaaccucagagaguucgucuuuaagaacaucgauggguacuucaaaauauacaguaagcacaccccaaucaauuuaguuagggaccugccccagggauuuagcgcucuugagccuuugguggaucugccaauuggcaucaacauuacacgguuccagacucuacucgcccugcaucgcucuuaucuuaccccgggcgacuccucaagcggguggacagcaggagccgcugcauacuauguagguuaccugcaacccagaaccuuuuugcucaaauauaaugaaaacggcacgaucacugaugccguggacugcgcucuggauccuuuaagugagacaaaguguacccugaagucuuucacugucgaaaaagggauauaccagacauccaauuuuagggugcagccaaccgagagcauuguucgguuccccaacaucacgaaucucugcccuuuuggagagguguucaacgccacccgcuucgcgucggucuaugcauggaaucgaaagagaauuucuaacuguguggccgacuacuccguacuuuacaauucagcuaguuuuagcacauucaaaugcuauggcguuuccccaacuaagcugaacgacuuguguuuuaccaauguguacgccgauucuuucgucaucaggggugacgaagugcggcagaucgcacccgggcaaacaggaaaaauugcugauuauaacuacaagcuaccggacgauuuuacuggcugcgucauagccuggaauagcaacaaccuggacucaaaagugggcgggaauuauaacuaccucuaucgucuguuccgcaagaguaaucuuaagccuuuugagagagauaucuccaccgaaauuuaccaggcgggaagcacacccuguaacgguguugagggcuucaauugcuacuuuccacugcagucuuauggguuccaaccuaccaacggagugggcuaccagcccuauaggguagucguguugucauuugaacuccugcacgccccagcaacuguuugcggucccaaaaagaguacgaauuuagugaaaaacaagugugucaauuucaacuuuaaugggcugacaggcaccggagugcuaacugagagcaacaaaaaguuccucccuuuccagcaguuuggccgggacaucgcugauaccacagacgccguacgagauccacaaacccuggagauacuugacauuacuccgugcuccuucgggggagugucuguuaucacacccgguacgaauaccucgaaccaggucgcuguguuguaccagggcgugaauuguacugaagucccuguugccauccacgcagaccagcugacaccaaccuggcgcguguauagcacaggguccaacguguuucaaacuagagccggaugccucauuggcgcugagcauguaaacaauucauacgaaugugauauccccauuggugcggggauaugcgcaaguuaucagacccagacgaacucuccuaggcgggcccgcagcgucgcuucccagucaaucauugccuacaccaugagccugggcgcagaaaauucuguggccuacuccaacaauaguaucgcuaucccaacaaacuucacuauuagcguuaccacagaaauacuucccgugucuaugacuaagaccuccgucgacuguacgauguauaucugcggagauucaacagaguguaguaaucuguugcuccaauacggcagcuuuugcacccagcugaacagagccuuaacugggauugcaguggagcaggacaaaaauacacaggaaguuuucgcgcaagugaagcagaucuauaaaaccccgccuauuaaggauuuuggagguuucaacuuuucgcagauccugccagaccccuccaaaccuucuaagaggagcuucauagaggaucuacucuuuaauaagguaacucuggcugacgccggcuucaucaaacaauacggggauugucuuggagacauugcagcccgugauuugaucugcgcucagaaguucaacggccugaccguccugcccccacucuuaacagacgaaaugauugcccaguauacgucagcacugcuugcugguaccaucacgaguggguggacauuuggcgccggagcggccuugcagauaccuuucgcuaugcaaauggcauaccgguuuaauggcauuggggugacccagaacgugcucuaugagaaucagaaacugaucgccaaccaguucaacuccgcuauuggaaagauccaagauucucuaagcuccacagccucagcacugggcaaacuccaggacgucguuaaucagaacgcgcaggcccugaauacucuugugaagcaauugagcaguaacuuuggugcuauaucuuccguacugaaugacaucuuaagccgacucgauaagguggaagccgagguccagauugacagacugaucaccgggaggcuucagucgcugcaaacguacgugacacagcaguugauucgcgcagcugagauccgggccucagcaaaccucgccgcuaccaaaaugucugaaugcguucugggacagaguaagagaguggauuucuguggcaaagguuaccaccuaauguccuuuccccaaagcgcgccacauggcgucguguuccugcacguuacuuaugugccggcccaggagaagaauuuuaccacagcuccugcaauaugccacgacgggaaagcccauuuccccagggaaggagucuuuguaucuaacggcacucacugguucgugacccagcgcaauuuuuacgagccacagauuaucacaacggauaacaccuucguuagcgggaauugugacguggucaucggaauugugaacaauacuguauaugauccccuccaaccugagcuggacuccuucaaggaagaacuugauaaauacuuuaagaaccauacaucaccagacguggauuugggcgacaucagugguauuaaugccagcgucguuaacauacagaaggaaaucgaucgacugaaugagguggcuaaaaacuuaaacgaaucucucauugaccugcaggagcuugggaaguaugagcaguacaucaaauggcccugguauauuuggcugggauucaucgcaggccuaauagccaucgugauggucaccauuaugcucugcuguaugacuuccugcuguucaugccugaaggguuguugcaguuguggcagcugcugcaaauuugacgaagaugacuccgagccuguguugaaggggguuaagcugcacuacacaugaggacuaguuauaagacugacuagcccgaugggccucccaacgggcccuccuccccuccuugcaccgagauuaauaaaaaaaaaaaaaaaaaaaaaaaaaaaaaaaaaaaaaaaaaaaaaaaaaaaaaaaaaaaaaaaaugcaucccccccccccccccccccccccccccccccaaaggcucuuuucagagccaccagaauu

SEQ ID NO: 13002 - RNA, 4039 nt, Artificial Sequence
  SARS-CoV-2/Congo/94/2020__EPI_ISL_417947 spike protein mRNA human (1-1273)
aggagaaagcuuaccauguucguguuucugguccuccuuccccugguuagcucccagugcgugaacuugaccacaagaacucaauuaccuccagccuacacuaauucuuucaccaggggcguauauuacccggacaagguguuucggucaaguguccugcacagcacacaggaucuauuccuccccuuuuucuccaacgugacuugguuucaugcuauccacguuucugggaccaauggaacaaaacgcuucgacaacccugugcugccauuuaaugauggugucuauuucgcaucgaccgagaagucaaacauuauacgaggcuggaucuuugggacuacacuugacagcaaaacccagagucuguugauugugaauaacgccacgaauguaguuaucaaggugugugaguuccaguuuugcaacgaucccuuccucggagucuacuaucauaaaaauaacaaguccuggauggagucugaguuccguguguacagcuccgcgaauaacuguacuuuugaguaugugucacaaccuuuccugauggaccuggaaggcaagcaggguaauuuuaaaaaccucagagaguucgucuuuaagaacauugauggguacuucaaaaucuacaguaagcacaccccaauaaauuuaguuagggaccugccccagggauuuagcgcucuugagccuuugguggaucugccaaucggcauuaacaucacacgguuccagacucuacucgcccugcaucgcucuuaucuuaccccgggcgacuccucaagcggguggacagcaggagccgcugcauacuauguagguuaccugcaacccagaaccuuuuugcucaaauauaaugaaaacggcacgauuacugaugccguggacugcgcucuggauccuuuaagugagacaaaguguacccugaagucuuucacugucgaaaaagggaucuaccagacauccaauuuuagggugcagccaaccgagagcauaguucgguuccccaacauuacgaaucucugcccuuuuggagagguguucaacgccacccgcuucgcgucggucuaugcauggaaucgaaagagaaucucuaacuguguggccgacuacuccguacuuuacaauucagcuaguuuuagcacauucaaaugcuauggcguuuccccaacuaagcugaacgacuuguguuuuaccaauguguacgccgauucuuucgucauuaggggugacgaagugcggcagaucgcacccgggcaaacaggaaaaaucgcugauuauaacuacaagcuaccggacgauuuuacuggcugcgucauugccuggaauagcaacaaccuggacucaaaagugggcgggaauuauaacuaccucuaucgucuguuccgcaagaguaaucuuaagccuuuugagagagauauauccaccgaaaucuaccaggcgggaagcacacccuguaacgguguugagggcuucaauugcuacuuuccacugcagucuuauggguuccaaccuaccaacggagugggcuaccagcccuauaggguagucguguugucauuugaacuccugcacgccccagcaacuguuugcggucccaaaaagaguacgaauuuagugaaaaacaagugugucaauuucaacuuuaaugggcugacaggcaccggagugcuaacugagagcaacaaaaaguuccucccuuuccagcaguuuggccgggacauugcugauaccacagacgccguacgagauccacaaacccuggagauccuugacauaacuccgugcuccuucgggggagugucuguuauuacacccgguacgaauaccucgaaccaggucgcuguguuguaccagggcgugaauuguacugaagucccuguugccauccacgcagaccagcugacaccaaccuggcgcguguauagcacaggguccaacguguuucaaacuagagccggaugccucaucggcgcugagcauguaaacaauucauacgaaugugauauucccaucggugcggggauuugcgcaaguuaucagacccagacgaacucuccuaggcgggcccgcagcgucgcuucccagucaauaaucgccuacaccaugagccugggcgcagaaaauucuguggccuacuccaacaauaguauugcuaucccaacaaacuucacuaucagcguuaccacagaaauucuucccgugucuaugacuaagaccuccgucgacuguacgauguauauaugcggagauucaacagaguguaguaaucuguugcuccaauacggcagcuuuugcacccagcugaacagagccuuaacugggaucgcaguggagcaggacaaaaauacacaggaaguuuucgcgcaagugaagcagauuuauaaaaccccgccuaucaaggauuuuggagguuucaacuuuucgcagauucugccagaccccuccaaaccuucuaagaggagcuucaucgaggauauacuauuuaauaagguaacucucgcugacgccggcuucaucaaacaauacggggauugucugggagacauugcagcccgugaucuuaucugcgcucagaaguucaacggcuugaccguccugcccccacuccugacagacgaaaugauugcccaguauacgucagcauuacuggcugguaccaucacgaguggguggacauuuggcgccggagcggcccuucagauaccuuucgcuaugcaaauggcauaccgguuuaauggcauuggggugacccagaacguguuguaugagaaucagaaacucaucgccaaccaguucaacuccgcuauuggaaagauccaagauucucugagcuccacagccucagcacuaggcaaacugcaggacgucguuaaucagaacgcgcaggcccucaauacucuggugaagcaacuuagcaguaacuuuggugcuauaucuuccguauugaaugacauccugagccgauuagauaagguggaagccgagguccagauugacagacucaucaccgggaggcugcagucgcuucaaacguacgugacacagcagcugauucgcgcagcugagauccgggccucagcaaacuuggccgcuaccaaaaugucugaaugcguucucggacagaguaagagaguggauuucuguggcaaagguuaccaccugauguccuuuccccaaagcgcgccacauggcgucguguuccuacacguuacuuaugugccggcccaggagaagaauuuuaccacagcuccugcaauaugccacgacgggaaagcccauuuccccagggaaggagucuuuguaucuaacggcacucacugguucgugacccagcgcaauuuuuacgagccacagauuaucacaacggauaacaccuucguuagcgggaauugugacguggucaucggaauugugaacaauacuguauaugauccccugcaaccugagcucgacuccuucaaggaagaacuggauaaauacuuuaagaaccauacaucaccagacguggaucuuggcgacaucagugguauuaaugccagcgucguuaacauacagaaggaaaucgaucgauugaaugagguggcuaaaaaccugaacgaaucuuuaauugaccuccaggagcuggggaaguaugagcaguacaucaaauggcccugguauauuuggcuuggauucaucgcaggccugauagccaucgugauggucaccauuaugcuaugcuguaugacuuccugcuguucaugccucaaggguuguugcaguuguggcagcugcugcaaauuugacgaagaugacuccgagccugugcugaaggggguuaaguugcacuacacaugaggacuaguuauaagacugacuagcccgaugggccucccaacgggcccuccuccccuccuugcaccgagauuaauaaaaaaaaaaaaaaaaaaaaaaaaaaaaaaaaaaaaaaaaaaaaaaaaaaaaaaaaaaaaaaaaugcaucccccccccccccccccccccccccccccccaaaggcucuuuucagagccaccagaauu

SEQ ID NO: 13003 - RNA, 4039 nt, Artificial Sequence
  SARS-CoV-2/Congo/158/2020__EPI_ISL_417950 spike protein mRNA human (1-1273)
aggagaaagcuuaccauguucguguuucugguccuccuuccccugguuagcucccagugcgugaacuugaccacaagaacucaauuaccuccagccuacacuaauucuuucaccaggggcguauauuacccggacaagguguuucggucaaguguccugcacagcacacaggaucuauuccuccccuuuuucuccaacgugacuugguuucaugcuauccacguuucugggaccaauggaacaaaacgcuucgacaacccugugcugccauuuaaugauggugucuauuucgcaucgaccgagaagucaaacauuauacgaggcuggaucuuugggacuacacuugacagcaaaacccagagucuguugauugugaauaacgccacgaauguaguuaucaaggugugugaguuccaguuuugcaacgaucccuuccucggagucuacuaucauaaaaauaacaaguccuggauggagucugaguuccguguguacagcuccgcgaauaacuguacuuuugaauaugugucacaaccuuuccugauggaccuggaaggcaagcaggguaauuuuaaaaaccucagagaguucgucuuuaagaacauugauggguacuucaaaaucuacaguaagcacaccccaauaaauuuaguuagggaccugccccagggauuuagcgcucuugagccuuugguggaucugccaaucggcauuaacaucacacgguuccagacucuacucgcccugcaucgcucuuaucuuaccccgggcgacuccucaagcggguggacagcaggagccgcugcauacuauguagguuaccugcaacccagaaccuuuuugcucaaauauaaugaaaacggcacgauuacugaugccguggacugcgcucuggauccuuuaagugagacaaaguguacccugaagucuuucacugucgaaaaagggaucuaccagacauccaauuuuagggugcagccaaccgagagcauaguucgguuccccaacauuacgaaucucugcccuuuuggagagguguucaacgccacccgcuucgcgucggucuaugcauggaaucgaaagagaaucucuaacuguguggccgacuacuccguacuuuacaauucagcuaguuuuagcacauucaaaugcuauggcguuuccccaacuaagcugaacgacuuguguuuuaccaauguguacgccgauucuuucgucauuaggggugacgaagugcggcagaucgcacccgggcaaacaggaaaaaucgcugauuauaacuacaagcuaccggacgauuuuacuggcugcgucauugccuggaauagcaacaaccuggacucaaaagugggcgggaauuauaacuaccucuaucgucuguuccgcaagaguaaucuuaagccuuuugagagagauauauccaccgaaaucuaccaggcgggaagcacacccuguaacgguguugagggcuucaauugcuacuuuccacugcagucuuauggguuccaaccuaccaacggagugggcuaccagcccuauaggguagucguguugucauuugaacuccugcacgccccagcaacuguuugcggucccaaaaagaguacgaauuuagugaaaaacaagugugucaauuucaacuuuaaugggcugacaggcaccggagugcuaacugagagcaacaaaaaguuccucccuuuccagcaguuuggccgggacauugcugauaccacagacgccguacgagauccacaaacccuggagauccuugacauaacuccgugcuccuucgggggagugucuguuauuacacccgguacgaauaccucgaaccaggucgcuguguuguaccaggacgugaauuguacugaagucccuguugccauccacgcagaucagcugacaccaaccuggcgcguguauagcacaggcuccaacguguuucaaacuagagccgggugccucaucggagcugagcauguaaacaauucauacgaaugugacauucccaucggcgcggguauuugcgcaaguuaucagacccagacgaacucuccuaggcgggcccgcagcgucgcuucccagucaauaaucgccuacaccaugagccugggggcagaaaauucuguggccuacuccaacaauaguauugcuaucccaacaaacuucacuaucagcguuaccacagaaauucuucccgugucuaugacuaagaccuccgucgauuguacgauguauauaugcggcgacucaacagaguguaguaaucuguugcuccaauacggcagcuuuugcacccagcugaacagagccuuaacuggaaucgcaguggagcaggauaaaaauacacaggaaguuuucgcgcaagugaagcagauuuauaaaaccccgccuaucaaggacuuugggggauucaacuuuucgcagauucugccagaucccuccaaaccuucuaagaggagcuucaucgaggaccuacucuuuaauaagguaacucuggcugaugccgguuucauaaaacaauacggcgacugucuuggggauaucgcagcccgugacuugauuugcgcucagaaguucaacggacugaccguccugcccccacucuuaacagaugaaaugaucgcccaguauacgucagcacugcuugcuggcaccauuacgagugguuggacauuuggggccggcgcggccuugcagaucccuuucgcuaugcaaauggcauaccgguuuaauggaauaggcgugacccagaacgugcucuaugagaaucagaaacugauugccaaccaguucaacuccgcuaucgggaagauucaagacucucuaagcuccacagccucagcacugggaaaacuccaggacgucguuaaucagaacgcgcaggcccugaauacucuugugaagcaauugagcaguaacuuuggcgcuaucucuuccguacugaaugauauauuaagccgacucgacaagguggaagccgagguccagaucgauagacugauuaccgguaggcuucagucgcugcaaacguacgugacacagcaguugauccgcgcagcugagauucgggccucagcaaaccucgccgcuaccaaaaugucugaaugcguucuggggcagaguaagagaguggacuucuguggaaaaggcuaccaccuaauguccuuuccccaaagcgcgccacauggugucguguuccugcacguuacuuaugugccggcccaggagaagaauuuuaccacagcuccugcaaucugccacgauggcaaagcccauuuccccagggaaggggucuuuguaucuaacggaacucacugguucgugacccagcgcaauuuuuacgagccacagauaauuacaacggacaacaccuuccucagcggcaauugugauguugugaucgggaucgucaacaauacuguguaugacccccugcaaccugagcuugauuccuucaaggaagaguuggacaaauacuuuaagaaccauacaucaccagauguagaccugggagauauuaguggcaucaaugccagcguggucaacauucagaaggaaauagaccgauuaaaugagguugcuaaaaaccucaacgaaucucugaucgaccuucaggagcuggguaaguaugagcaguacauuaaauggcccugguauaucuggcuaggguucauugcaggacucaucgccauagugauggugaccaucaugcugugcuguaugacuuccugcuguucaugcuugaagggcuguugcaguugugguagcugcugcaaauuugaugaagacgauuccgagccuguccugaagggcgugaaguuacacuacacaugaggacuaguuauaagacugacuagcccgaugggccucccaacgggcccuccuccccuccuugcaccgagauuaauaaaaaaaaaaaaaaaaaaaaaaaaaaaaaaaaaaaaaaaaaaaaaaaaaaaaaaaaaaaaaaaaugcaucccccccccccccccccccccccccccccccaaaggcucuuuucagagccaccagaauu

SEQ ID NO: 13004 - RNA, 4039 nt, Artificial Sequence
  SARS-CoV-2/USA/UT-00034/2020__EPI_ISL_417977 spike protein mRNA human (1-1273)
aggagaaagcuuaccauguucguguuucugguccuccuuccccugguuagcucccagugcgugaacuugaccacaagaacucaauuaccuccagccuacacuaauucuuucaccaggggcguauauuacccggacaagguguuucggucaaguguccugcacagcacacaggaucuauuccuccccuuuuucuccaacgugacuugguuucaugcuauccacguuucugggaccaauggaacaaaacgcuucgacaacccugugcugccauuuaaugauggugucuauuucgcaucgaccgagaagucaaacauuauacgaggcuggaucuuugggacuacacuugacagcaaaacccagagucuguugauugugaauaacgccacgaauguaguuaucaaggugugugaguuccaguuuugcaacgaucccuuccucggagucuacuauuacaaaaauaacaaguccuggauggagucugaguuccguguguauagcuccgcgaauaacuguacuuuugaguacgugucacaaccuuuccugauggaccuggaaggcaagcaggguaauuuuaaaaaccucagagaguucgucuuuaagaacauugauggguacuucaaaaucuauaguaagcauaccccaauaaauuuaguuagggaccugccccagggauuuagcgcucuugagccuuugguggaucugccaaucggcauuaacaucacacgguuccagacucuacucgcccugcaccgcucuuaccuuaccccgggcgacuccucaagcggguggacagcaggagccgcugcauauuacguagguuaucugcaacccagaaccuuuuugcucaaauacaaugaaaacggcacgauuacugaugccguggacugcgcucuggauccuuuaagugagacaaaguguacccugaagucuuucacugucgaaaaagggaucuaucagacauccaauuuuagggugcagccaaccgagagcauaguucgguuccccaacauuacgaaucucugcccuuuuggagagguguucaacgccacccgcuucgcgucggucuacgcauggaaucgaaagagaaucucuaacuguguggccgacuacuccguacuuuauaauucagcuaguuuuagcacauucaaaugcuacggcguuuccccaacuaagcugaacgacuuguguuuuaccaauguguaugccgauucuuucgucauuaggggugacgaagugcggcagaucgcacccgggcaaacaggaaaaaucgcugauuacaacuauaagcuaccggacgauuuuacuggcugcgucauugccuggaauagcaacaaccuggacucaaaagugggcgggaauuacaacuaucucuaccgucuguuccgcaagaguaaucuuaagccuuuugagagagauauauccaccgaaaucuaccaggcgggaagcacacccuguaacgguguugagggcuucaauugcuauuuuccacugcagucuuacggguuccaaccuaccaacggagugggcuaucagcccuacaggguagucguguugucauuugaacuccugcaugccccagcaacuguuugcggucccaaaaagaguacgaauuuagugaaaaacaagugugucaauuucaacuuuaaugggcugacaggcaccggagugcuaacugagagcaacaaaaaguuccucccuuuccagcaguuuggccgggacauugcugauaccacagacgccguacgagauccacaaacccuggagauccuugacauaacuccgugcuccuucgggggagugucuguuauuacacccgguacgaauaccucgaaccaggucgcuguguuguaucagggcgugaauuguacugaagucccuguugccauccacgcagaccagcugacaccaaccuggcgcguguacagcacaggguccaacguguuucaaacuagagccggaugccucaucggcgcugagcacguaaacaauucauaugaaugugauauucccaucggugcggggauuugcgcaaguuaccagacccagacgaacucuccuaggcgggcccgcagcgucgcuucccagucaauaaucgccuacaccaugagccugggcgcagaaaauucuguggccuauuccaacaauaguauugcuaucccaacaaacuucacuaucagcguuaccacagaaauucuucccgugucuaugacuaagaccuccgucgacuguacgauguacauaugcggagauucaacagaguguaguaaucuguugcuccaauauggcagcuuuugcacccagcugaacagagccuuaacugggaucgcaguggagcaggacaaaaauacacaggaaguuuucgcgcaagugaagcagauuuacaaaaccccgccuaucaaggauuuuggagguuucaacuuuucgcagauucugccagaccccuccaaaccuucuaagaggagcuucaucgaggaucuacucuuuaauaagguaacucuggcugacgccggcuucauaaaacaauauggggauugucuuggagacaucgcagcccgugauuugauuugcgcucagaaguucaacggccugaccguccugcccccacucuuaacagacgaaaugaucgcccaguacacgucagcacugcuugcugguaccauuacgaguggguggacauuuggcgccggagcggccuugcagaucccuuucgcuaugcaaauggcauaucgguuuaauggcauaggggugacccagaacgugcucuacgagaaucagaaacugauugccaaccaguucaacuccgcuaucggaaagauucaagauucucuaagcuccacagccucagcacugggcaaacuccaggacgucguuaaucagaacgcgcaggcccugaauacucuugugaagcaauugagcaguaacuuuggugcuaucucuuccguacugaaugacauauuaagccgacucgauaagguggaagccgagguccagaucgacagacugauuaccgggaggcuucagucgcugcaaacguacgugacacagcaguugauccgcgcagcugagauucgggccucagcaaaccucgccgcuaccaaaaugucugaaugcguucugggacagaguaagagaguggauuucuguggcaaagguuaucaucuaauguccuuuccccaaagcgcgccacacggcgucguguuccugcauguuacuuacgugccggcccaggagaagaauuuuaccacagcuccugcaaucugccacgacgggaaagcccacuuccccagggaaggagucuuuguaucuaacggcacucauugguucgugacccagcgcaauuuuuaugagccacagauaauuacaacggauaacaccuucguuagcgggaauugugacguggucaucggaaucgugaacaauacuguauacgauccccuccaaccugagcuggacuccuucaaggaagaacuugauaaauauuuuaagaaccacacaucaccagacguggauuugggcgacauuagugguaucaaugccagcgucguuaacauucagaaggaaauagaucgacugaaugagguggcuaaaaacuuaaacgaaucucucaucgaccugcaggagcuugggaaguacgagcaguauauuaaauggcccugguacaucuggcugggauucauugcaggccuaaucgccauagugauggucaccaucaugcucugcuguaugacuuccugcuguucaugccugaaggguuguugcaguuguggcagcugcugcaaauuugacgaagaugacuccgagccuguguugaaggggguuaagcugcauuacacaugaggacuaguuauaagacugacuagcccgaugggccucccaacgggcccuccuccccuccuugcaccgagauuaauaaaaaaaaaaaaaaaaaaaaaaaaaaaaaaaaaaaaaaaaaaaaaaaaaaaaaaaaaaaaaaaaugcaucccccccccccccccccccccccccccccccaaaggcucuuuucagagccaccagaauu

SEQ ID NO: 13005 - RNA, 4039 nt, Artificial Sequence
  SARS-CoV-2/USA/UT-00033/2020__EPI_ISL_417976 spike protein mRNA human (1-1273)
aggagaaagcuuaccauguucguguuucugguccuccuuccccugguuagcucccagugcgugaacuugaccacaagaacucaauuaccuccagccuacacuaauucuuucaccaggggcguauauuacccggacaagguguuucggucaaguguccugcacagcacacaggaucuauuccuccccuuuuucuccaacgugacuugguuucaugcuauccacguuucugggaccaauggaacaaaacgcuucgacaacccugugcugccauuuaaugauggugucuauuucgcaucgaccgagaagucaaacauuauacgaggcuggaucuuugggacuacacuugacagcaaaacccagagucuguugauugugaauaacgccacgaauguaguuaucaaggugugugaguuccaguuuugcaacgaucccuuccucggagucuacuaucauaaaaauaacaaguccuggauggagucugaguuccguguguacagcuccgcgaauaacuguacuuuugaauaugugucacaaccuuuccugauggaccuggaaggcaagcaggguaauuuuaaaaaccucagagaguucgucuuuaagaacauugauggguacuucaaaaucuacaguaagcacaccccaauaaauuuaguuagggaccugccccagggauuuagcgcucuugagccuuugguggaucugccaaucggcauuaacaucacacgguuccagacucuacucgcccugcaucgcucuuaucuuaccccgggcgacuccucaagcgggcugacagcaggagccgcugcauacuauguagguuacuugcaacccagaaccuuucuccugaaauauaaugaaaacggcacgauuacugaugccguggacugcgcuuuagauccucugagugagacaaaguguacccucaagucuuucacugucgaaaaagggaucuaccagacauccaauuuuagggugcagccaaccgagagcauaguucgguuccccaacauuacgaaucuuugcccuuuuggagagguguucaacgccacccgcuucgcgucggucuaugcauggaaucgaaagagaaucucuaacuguguggccgacuacuccguacuguacaauucagcuaguuuuagcacauucaaaugcuauggcguuuccccaacuaaguugaacgaccuauguuuuaccaauguguacgccgauucuuucgucauuaggggugacgaagugcggcagaucgcacccgggcaaacaggaaaaaucgcugauuauaacuacaagcugccggacgauuuuacuggcugcgucauugccuggaauagcaacaaccucgacucaaaagugggcgggaauuauaacuaccuguaucgucuuuuccgcaagaguaaucugaagccuuuugagagagauauauccaccgaaaucuaccaggcgggaagcacacccuguaacgguguugagggcuucaauugcuacuuuccauugcagucuuauggguuccaaccuaccaacggagugggcuaccagcccuauaggguagucgugcucucauuugaacuguuacacgccccagcaacuguuugcggucccaaaaagaguacgaaucuggugaaaaacaagugugucaauuucaacuuuaaugggcuaacaggcaccggagugcucacugagagcaacaaaaaguuccugccuuuccagcaguuuggccgggacauugcugauaccacagacgccguacgagauccacaaacccuugagaucuuggacauaacuccgugcuccuucgggggagugucuguuauuacacccgguacgaauaccucgaaccaggucgcugugcuguaccagggcgugaauuguacugaagucccuguugccauccacgcagaccagcucacaccaaccuggcgcguguauagcacaggguccaacguguuucaaacuagagccggaugccugaucggcgcugagcauguaaacaauucauacgaaugugauauucccaucggugcggggauuugcgcaaguuaucagacccagacgaacucuccuaggcgggcccgcagcgucgcuucccagucaauaaucgccuacaccaugagccuuggcgcagaaaauucuguggccuacuccaacaauaguauugcuaucccaacaaacuucacuaucagcguuaccacagaaauucugcccgugucuaugacuaagaccuccgucgacuguacgauguauauaugcggagauucaacagaguguaguaauuugcuccugcaauacggcagcuuuugcacccaguuaaacagagcccugacugggaucgcaguggagcaggacaaaaauacacaggaaguuuucgcgcaagugaagcagauuuauaaaaccccgccuaucaaggauuuuggagguuucaacuuuucgcagauucuaccagaccccuccaaaccuucuaagaggagcuucaucgaggaucuccuguuuaauaagguaacucuugcugacgccggcuucauaaaacaauacggggauuguuugggagacaucgcagcccgugaucugauuugcgcucagaaguucaacggccucaccguccugcccccauuacugacagacgaaaugaucgcccaguauacgucagcacuuuuggcugguaccauuacgaguggguggacauuuggcgccggagcggcccuccagaucccuuucgcuaugcaaauggcauaccgguuuaauggcauaggggugacccagaacgugcuguaugagaaucagaaacuaauugccaaccaguucaacuccgcuaucggaaagauucaagauucucugagcuccacagccucagcacucggcaaacugcaggacgucguuaaucagaacgcgcaggcccuuaauacuuuggugaagcaacugagcaguaacuuuggugcuaucucuuccguauuaaaugacauacucagccgacuggauaagguggaagccgagguccagaucgacagacuuauuaccgggaggcugcagucguugcaaacguacgugacacagcagcucauccgcgcagcugagauucgggccucagcaaaccuggccgcuaccaaaaugucugaaugcguucuaggacagaguaagagaguggauuucuguggcaaagguuaccaccugauguccuuuccccaaagcgcgccacauggcgucguguuccuccacguuacuuaugugccggcccaggagaagaauuuuaccacagcuccugcaaucugccacgacgggaaagcccauuuccccagggaaggagucuuuguaucuaacggcacucacugguucgugacccagcgcaauuuuuacgagccacagauaauuacaacggauaacaccuucguuagcgggaauugugacguggucaucggaaucgugaacaauacuguauaugauccccugcaaccugagcuugacuccuucaaggaagaguuggauaaauacuuuaagaaccauacaucaccagacguggaucugggcgacauuagugguaucaaugccagcgucguuaacauucagaaggaaauagaucgauuaaaugagguggcuaaaaaccucaacgaaucucugaucgaccuucaggagcuggggaaguaugagcaguacauuaaauggcccugguauaucuggcuaggauucauugcaggccucaucgccauagugauggucaccaucaugcugugcuguaugacuuccugcuguucaugcuugaaggguuguugcaguuguggcagcugcugcaaauuugacgaagaugacuccgagccugugcugaaggggguuaaguuacacuacacaugaggacuaguuauaagacugacuagcccgaugggccucccaacgggcccuccuccccuccuugcaccgagauuaauaaaaaaaaaaaaaaaaaaaaaaaaaaaaaaaaaaaaaaaaaaaaaaaaaaaaaaaaaaaaaaaaugcaucccccccccccccccccccccccccccccccaaaggcucuuuucagagccaccagaauu

SEQ ID NO: 13006 - RNA, 4039 nt, Artificial Sequence
  SARS-CoV-2/USA/WI-13/2020__EPI_ISL_417516 spike protein mRNA human (1-1273)
aggagaaagcuuaccauguucguguuucugguccuccuuccccugguuagcucccagugcgugaacuugaccacaagaacucaauuaccuccagccuacacuaauucuuucaccaggggcguauauuacccggacaagguguuucggucaaguguccugcacagcacacaggaucuauuccuccccuuuuucuccaacgugacuugguuucaugcuauccacguuucugggaccaauggaacaaaacgcuucgacaacccugugcugccauuuaaugauggugucuauuucgcaucgaccgagaagucaaacauuauacgaggcuggaucuuugggacuacacuugacagcaaaacccagagucuguugauugugaauaacgccacgaauguaguuaucaaggugugugaguuccaguuuugcaacgaucccuuccucggagucuacuaucauaaaaauaacaaguccuggauggagucugaguuccguguguacagcuccgcgaauaacuguacuuuugaauaugugucacaaccuuuccugauggaccuggaaggcaagcaggguaauuuuaaaaaccucagagaguucgucuuuaagaacauugauggguacuucaaaaucuacaguaagcacaccccaauaaauuuaguuagggaccugccccagggauuuagcgcucuugagccuuugguggaucugccaaucggcauuaacaucacacgguuccagacucuacucgcccugcaucgcucuuaucuuaccccgggcgacuccucaagcggguggacagcaggagccgcugcauacuauguagguuaccugcaacccagaaccuuuuugcucaaauauaaugaaaacggcacgauuacugaugccguggacugcgcucuggauccuuuaagugagacaaaguguacccugaagucuuucacugucgaaaaagggaucuaccagacauccaauuuuagggugcucccaaccgagagcauaguucgguuccccaacauuacgaaucuuugcccuuuuggagagguguucaacgccacccgcuucgcgucggucuaugcauggaaucgaaagagaaucucuaacuguguggccgacuacuccguacuguacaauucagcuaguuuuagcacauucaaaugcuauggcguuuccccaacuaaguugaacgaccuauguuuuaccaauguguacgccgauucuuucgucauuaggggugacgaagugcggcagaucgcacccgggcagacaggaaaaaucgcugauuauaacuacaagcugccggacgauuuuacuggcugcgucauugccuggaauagcaacaaccucgacucaaaagugggcgggaauuauaacuaccuguaucgucuuuuccgcaagaguaaucugaagccuuuugagagagauauauccaccgaaaucuaccaagcgggaagcacacccuguaacgguguugagggcuucaauugcuacuuuccauugcagucuuauggguuccagccuaccaacggagugggcuaccaacccuauaggguagucgugcucucauuugaacuguuacacgccccagcaacuguuugcggucccaaaaagaguacgaaucuggugaaaaacaagugugucaauuucaacuuuaaugggcuaacaggcaccggagugcucacugagagcaacaaaaaguuccugccuuuccagcaguuuggccgggacauugcugauaccacagacgccguacgagauccacagacccuugagaucuuggacauaacuccgugcuccuucgggggagugucuguuauuacacccgguacgaauaccucgaaccaagucgcugugcuguaccagggcgugaauuguacugaagucccuguugccauccacgcagaccagcucacaccaaccuggcgcguguauagcacaggguccaacguguuucagacuagagccggaugccugaucggcgcugagcauguaaacaauucauacgaaugugauauucccaucggugcggggauuugcgcaaguuaucaaacccagacgaacucuccuaggcgggcccgcagcgucgcuucccagucaauaaucgccuacaccaugagccuuggcgcagaaaauucuguggccuacuccaacaauaguauugcuaucccaacaaacuucacuaucagcguuaccacagaaauucugcccgugucuaugacuaagaccuccgucgacuguacgauguauauaugcggagauucaacagaguguaguaauuugcuccugcaguacggcagcuuuugcacccaauuaaacagagcccugacugggaucgcaguggagcaggacaaaaauacacaggaaguuuucgcacaggugaagcaaauuuauaaaaccccgccuaucaaggauuuuggagguuucaacuuuucgcagauucuaccagaccccuccaaaccuucuaagaggagcuucaucgaggaucuccuguuuaauaagguaacucuugcugacgccggcuucauaaaacaguacggggauuguuugggagacaucgcagcccgugaucugauuugcgcucaaaaguucaacggccucaccguccugcccccauuacugacagacgaaaugaucgcccaguauacgucagcacuuuuggcugguaccauuacgaguggguggacauuuggcgccggagcggcccuccagaucccuuucgcuaugcagauggcauaccgguuuaauggcauaggggugacccaaaacgugcuguaugagaaucagaaacuaauugccaaccaguucaacuccgcuaucggaaagauucaggauucucugagcuccacagccucagcacucggcaaacugcaagacgucguuaaucagaacgcgcaggcccuuaauacuuuggugaagcagcugagcaguaacuuuggugcuaucucuuccguauuaaaugacauacucagccgacuggauaagguggaagccgagguccaaaucgacagacuuauuaccgggaggcugcagucguugcagacguacgugacacaacagcucauccgcgcagcugagauucgggccucagcaaaccuggccgcuaccaaaaugucugaaugcguucuaggacagaguaagagaguggauuucuguggcaaagguuaccaccugauguccuuuccccagagcgcgccacauggcgucguguuccuccacguuacuuaugugccggcccaagagaagaauuuuaccacagcgccugcuaucugccacgacgggaaagcccauuuccccagggaaggagucuuuguaucuaacggcacucacugguucgugacccagcgcaauuuuuacgagccacagauaauuacaacggauaacaccuucguuagcgggaauugugacguggucaucggaaucgugaacaauacuguauaugauccccugcagccugagcuugacuccuucaaggaagaguuggauaaauacuuuaagaaccauacaucaccagacguggaucugggcgacauuagugguaucaaugccagcgucguuaacauucaaaaggaaauagaucgauuaaaugagguggcuaaaaaccucaacgaaucucugaucgaccuucaggagcuggggaaguaugagcaguacauuaaauggcccugguauaucuggcuaggauucauugcaggccucaucgccauagugauggucaccaucaugcugugcuguaugacuuccugcuguucaugcuugaaggguuguugcaguuguggcagcugcugcaaauuugacgaagaugacuccgagccugugcugaaggggguuaaguuacacuacacaugaggacuaguuauaagacugacuagcccgaugggccucccaacgggcccuccuccccuccuugcaccgagauuaauaaaaaaaaaaaaaaaaaaaaaaaaaaaaaaaaaaaaaaaaaaaaaaaaaaaaaaaaaaaaaaaaugcaucccccccccccccccccccccccccccccccaaaggcucuuuucagagccaccagaauu

SEQ ID NO: 13007 - RNA, 4036 nt, Artificial Sequence
  SARS-CoV-2/India/1-27/2020__EPI_ISL_413522 spike protein mRNA human (1-1272)
aggagaaagcuuaccauguucguguuucugguccuccuuccccugguuagcucccagugcgugaacuugaccacaagaacucaauuaccuccagccuacacgaauagcuucaccaggggcguauauuacccggacaagguguuucggucaaguguccugcacagcacacaggaucuauuccuccccuuuuucuccaacgugacuugguuucaugcuauccacguuucugggaccaauggaacaaaacgcuucgacaacccugugcugccauuuaaugauggugucuauuucgcaucgaccgagaagucaaacauuauacgaggcuggaucuuugggacuacacuugacagcaaaacccagagucuguugauugugaauaacgccacgaauguaguuaucaaggugugugaguuccaguuuugcaacgaucccuuccucggagucuaccauaaaaauaacaaguccuggauggagucugaguuccguguguauagcuccgcgaauaacuguacuuuugaauacgugucacaaccuuuccugauggaccuggaaggcaagcaggguaauuuuaaaaaccucagagaguucgucuuuaagaacauugauggguauuucaaaaucuacaguaagcacaccccaauaaauuuaguuagggaccugccccagggauuuagcgcucuugagccuuugguggaucugccaaucggcauuaacaucacacgguuccagacucuacucgcccugcaucgcucuuaccuuaccccgggcgacuccucaagcggguggacagcaggagccgcugcauauuacguagguuaucugcaacccagaaccuuuuugcucaaauacaaugaaaacggcacgauuacugaugccguggacugcgcucuggauccuuuaagugagacaaaguguacccugaagucuuucacugucgaaaaagggaucuaucagacauccaauuuuagggugcagccaaccgagagcauaguucgguuccccaacauuacgaaucucugcccuuuuggagagguguucaacgccacccgcuucgcgucggucuacgcauggaaucgaaagagaaucucuaacuguguggccgacuauuccguacuuuacaauucagcuaguuuuagcacauucaaaugcuacggcguuuccccaacuaagcugaacgacuuguguuuuaccaauguguaugccgauucuuucgucauuaggggugacgaagugauccagaucgcacccgggcaaacaggaaaaauugcugauuacaacuauaagcuaccggacgauuuuacuggcugcgucauagccuggaauagcaacaaccuggacucaaaagugggcgggaauuacaacuaucucuaccggcuguuccguaagaguaaucuuaagccuuuugagcgcgauaucuccaccgaaauuuaucaggcgggaagcacacccuguaacgguguugagggcuucaauugcuacuuuccacugcagucuuacggguuccaaccuaccaacggagugggcuaucagcccuacagaguagucguguugucauuugaacuccugcacgccccagcaacuguuugcggucccaaaaagaguacgaauuuagugaaaaacaagugugucaauuucaacuuuaaugggcugacaggcaccggagugcuaacugagagcaacaaaaaguuccucccuuuccagcaguuuggcagggacaucgcugauaccacagacgccguacgggauccacaaacccuggagauacuugacauuacuccgugcuccuucgggggagugucuguuaucacacccgguacgaauaccucgaaccaggucgcuguguuguaucaggacgugaauuguacugaagucccuguugccauccacgcagaucagcugacaccaaccuggcgaguguacagcacaggcuccaacguguuucaaacucgcgccgggugccucauuggagcugagcauguaaacaauucauaugaaugugacauccccauuggcgcggguauaugcgcaaguuaccagacccagacgaacucuccuagaagggcccggagcgucgcuucccagucaaucauugccuauaccaugagccugggggcagaaaauucuguggccuacuccaacaauaguaucgcuaucccaacaaacuucacuauuagcguuaccacagaaauacuucccgugucuaugacuaagaccuccgucgauuguacgauguacaucugcggcgacucaacagaguguaguaaucuguugcuccaauauggaucuuuuugcacccagcugaaccgcgccuuaacuggcauugcaguggagcaggauaaaaauacacaggaaguuuucgcgcaagugaagcagaucuacaaaaccccgccuauuaaggacuuugggggauucaacuuuucgcagauccugccagaucccuccaaaccuucuaagagaaguuucauagaggaccuacucuuuaauaagguaacucuggcugaugccgguuucaucaaacaauauggcgacugucuuggggauauugcagccagggacuugaucugcgcucagaaguucaacggacugaccguccugcccccacucuuaacagaugaaaugauugcccaguacacgucagcacugcuugcuggcaccaucacuagcgguuggacauuuggggccggcgcggccuugcagauaccuuucgcuaugcaaauggcauaucguuuuaauggaauuggcgugacccagaacgugcucuacgagaaucagaaacugaucgccaaccaguucaacuccgcuauugggaagauccaagacucucuaagcuccacagccucagcacugggaaaacuccaggacgucguuaaucagaacgcgcaggcccugaauacucuugugaagcaauugagcaguaacuuuggcgcuauaucuuccguacugaaugauaucuuaagccggcucgacaagguggaagccgagguccagauugaucgacugaucaccgguagacuucagucgcugcaaacguaugugacacagcaguugauuagggcagcugagauccgcgccucagcaaaccucgccgcuaccaaaaugucugaaugcguucuggggcagaguaagcggguggacuucuguggaaaaggcuaccaccuaauguccuuuccccaaagcgcgccacauggugucguguuccugcacguuacuuacgugccggcccaggagaagaauuuuaccacagcuccugcaauaugccacgauggcaaagcccauuuccccagagaaggggucuuuguaucuaacggaacucacugguucgugacccagaggaauuuuuaugagccacagauuaucacaacggacaacaccuucguuagcggcaauugugauguggucaucgggauugugaacaauacuguauacgacccccuccaaccugagcuggauuccuucaaggaggaacuugacaaauauuuuaagaaccauacaucaccagauguggacuugggagauaucaguggcauuaaugccagcgucguuaacauacagaaggaaaucgaccgccugaaugagguggcuaaaaacuuaaacgaaucucucauugaccugcaggagcuugguaaguacgagcaguauaucaaauggcccugguacauuuggcugggguucaucgcaggacuaauagccaucgugauggucaccauuaugcucugcuguaugacuuccugcuguucaugccugaagggcuguugcaguugugguagcugcugcaaauuugaugaagacgauuccgagccuguguugaagggcguuaagcugcacuauacaugaggacuaguuauaagacugacuagcccgaugggccucccaacgggcccuccuccccuccuugcaccgagauuaauaaaaaaaaaaaaaaaaaaaaaaaaaaaaaaaaaaaaaaaaaaaaaaaaaaaaaaaaaaaaaaaaugcaucccccccccccccccccccccccccccccccaaaggcucuuuucagagccaccagaauu

SEQ ID NO: 13008 - RNA, 4021 nt, Artificial Sequence
  SARS-CoV-2/pangolin/Guangxi/P4L/2017__EPI_ISL_410538 spike protein mRNA human (1-1267)
aggagaaagcuuaccauguucguguuucuguucguccucccccuuguuagcucccagugcgugaaccugaccacaagaacuggcaucccuccaggguacacgaauagcucaaccaggggaguauauuacccggacaagguguuucggaguagcauuuugcacuuaacacaagaucuguuccuacccuuuuucuccaacgucacuugguuuaauaccauaaacuaucaggguggcuucaaaaaguuugacaauccugugcucccauucaacgaugggguuuacuuugccucuacagagaaaucgaauaucauucgcggauggaucuucggcaccacucuggacgcucgaacacagucacuucugauugugaacaaugcaaccaacgucgugaucaagguaugugaauuucaguucugcacggaucccuucuuggguguuuauuaccauaauaacaauaaaacuuggguggagaacgaauuucgugucuauagcagugccaauaacuguaccuucgaguacauaucccaaccuuuucucauggaccuggaagggaagcagggaaacuucaagaaucugagagaguuuguguucaaaaacguggauggcuacuuuaagaucuauucuaaacacacaccaauugaccucgucagggauuuaccccggggcuucgcggcucuggagccucuuguugacuugccaaucgggauuaauaucacucgcuuucagacccugcuagcccuccauagaagcuaccugacaccgggaaaccuugaauccgguuggaccacgggcgcagccgcuuauuacgugggguaucugcagcaaaggacuuucuugcucucauacaaucagaacggaacaauaaccgaugcaguagacugcagucuggaucccuuaagcgagacuaaguguacacugaaaucucucaccguggaaaagggcauuuaucagacguccaauuuucggguccagccuaccaucucaauugugcgcuucccaaacaucacaaaucuuugccccuuuggugagguuuucaacgccagcaaguucgcuaguguguacgccuggaaucgaaaaagaaucucuaacugugucgcggacuacuccgugcuguauaauagcacuucguuuucuaccuucaagugcuacgggguauccccuacaaaauugaacgaccuauguuuuacuaauguuuaugcagauucauucguggucaagggagacgaggugaggcaaauugccccaggccagaccggcgucauagcugauuacaacuauaaacugcccgacgauuuuacagggugcgugaucgccuggaacaguguuaagcaggacgcacucaccggagguaauuacggcuaucuguaccggcuuuuccguaaaagcaagcugaagccguuugaacgcgauauuuccacugagaucuaccaagcugggucuacgccuuguaacggacaggugggcuugaauugcuauuacccccucgaaagauaugguuuccacccaacaaccgggguaaacuaccagccuuuuagggucgugguucugagcuucgaguuacugaauggccccgccacugugugcggaccaaaacuaucaaccacacucgucaaggacaaaugugugaacuuuaauuucaacggccugaccgggacuggaguacuuacaacgaguaagaaacaguuuuugcccuuccaacaguucggucgggauauauccgacaccacugaugcggugcgagacccucagacacuggaaauucucgacaucaccccaugcagcuuuggcgggguuucugucaucacaccgggaacuaauaccucaaaccagguggccgugcuguaucaagaugucaauuguacggagguucccauggcaauucaugcugagcagcuuaccccugccuggcgcguguacagugcuggcgccaacguguuccagacaagagcagguugccugguaggggccgaacacgucaauaacagcuaugagugugacaucccagugggcgcuggaauuugcgcguccuaccacucuaugucgagcuugagguccguuaaucagcggucaauaaucgcauacacuaugagucucggcgccgaaaacucuguggcuuauagcaacaauuccauugccauccccaccaacuuuacaaucucagucacuaccgagauucugccugugagcaugacgaagacaucuguugauuguaccauguacauaugcggggacuccaucgaauguaguaauuuacugcuacaauauggaucuuucugcacucagcucaaccgcgcacugacagguauugccguggagcaggauaagaauacccaggagguauuugcucaagucaaacagaucuacaagacuccacccauuaaagacuucggcggguuuaacuucucucagauccuuccggauccuuccaagccaucaaaaagaaguuuuauagaagacuugcuguucaauaaggugacccucgccgaugcaggauuuaucaagcaauauggcgacugucugggugauauugcggcuagggacuuaaucugcgcccagaaauucaacgggcugacagugcuucccccuuugcucacggaugagaugauugcacaguacaccagcgcccugcuagcuggcacuaucacaucgggauggaccuucggcgccggggcagcucugcagauacccuuugccaugcaaauggcguaucguuucaauggaauuggcgucacacagaacguucucuacgaaaaucagaagcugaucgccaaccaguuuaauuccgcuauugguaaaauccaagacucucuuagcucaacugcaagugccuuggggaagcugcaggacgugguaaaccagaaugcucaggccuuaaacacccucgugaaacaacuguccucuaacuucggagcaauaagcuccguccuuaaugauauccugucacgguuggacaagguggaggcggaaguucagauugaucgacucaucacgggcagacugcagagccuacaaacauacgugacccagcagcugauuagggccgcugagauccgcgccagugcaaaccucgcugccacuaagaugucugagugcguccugggucaguccaaacggguggacuuuuguggcaagggguaucaucuuaugagcuucccacaaucggcaccucacggaguuguguuuuugcaugucaccuacguacccgcccaggagaaaaauuucacaacugcuccagcgauaugccacgagggcaaggcccacuuuccgagagaagggguguucguuucaaacggaacccauugguuuauuacacagaggaauuucuaugagccucagaucaucacgaccgauaacacuuuugugucuggcaguugugacgucgugauugguaucguaaauaacacaguguacgauccccugcaaccagaguuagacuccuucaaagaagaacucgauaaguauuucaaaaaucacaccagccccgacgucgaucugggggacauuucuggaauaaacgcaagcguugugaauauccagaaggaaauugaucgccuuaacgagguggcuaagaaucugaacgaauccccuaucgaccuacaggagcucggcaaauacgagcaguauauuaaguggccaugguacaucuggcuggguuuuauagccggcuugaucgccauuaucauggucacuauuaugcugugcuguaugacaucaugcuguaguugcuuaaaaggguguugcagcuguggaucuugcugcaaguucgacgaagaugacuccgagcccgugcucaaaggcguuaagcugcauuacaccugaggacuaguuauaagacugacuagcccgaugggccucccaacgggcccuccuccccuccuugcaccgagauuaauaaaaaaaaaaaaaaaaaaaaaaaaaaaaaaaaaaaaaaaaaaaaaaaaaaaaaaaaaaaaaaaaugcaucccccccccccccccccccccccccccccccaaaggcucuuuucagagccaccagaauu

SEQ ID NO: 13009 - RNA, 4021 nt, Artificial Sequence
  SARS-CoV-2/pangolin/Guangxi/P5L/2017__EPI_ISL_410540 spike protein mRNA human (1-1267)
aggagaaagcuuaccauguucguguuucuguucguccucccccuuguuagcucccagugcgugaaccugaccacaagaacuggcaucccuccaggguacacgaauagcucaaccaggggaguauauuacccggacaagguguuucggaguagcauuuugcacuuaacacaagaucuguuccuacccuuuuucuccaacgucacuugguuuaauaccauaaacuaucaggguggcuucaaaaaguuugacaauccugugcucccauucaacgaugggguuuacuuugccucuacagagaaaucgaauaucauucgcggauggaucuucggcaccacucuggacgcucgaacacagucacuucugauugugaacaaugcaaccaacgucgugaucaagguaugugaauuucaguucugcacggaucccuucuuggguguuuauuaccauaauaacaauaaaacuuggguggagaacgaauuucgugucuauagcagugccaauaacuguaccuucgaguacauaucccaaccuuuucucauggaccuggaagggaagcagggaaacuucaagaaucugagagaguuuguguucaaaaacguggauggcuacuuuaagaucuauucuaaacacacaccaauugaccucgucagggauuuaccccggggcuucgcggcucuggagccucuuguugacuugccaaucgggauuaauaucacucgcuuucagacccugcuagcccuccauagaagcuaccugacaccgggaaaacuugaauccgguuggaccacgggcgcagccgcuuauuacgugggguaucugcagcaaaggacuuucuugcucucauacaaccagaauggaacaauaaccgaugcaguagacugcagucuggaucccuuaagcgagacuaaguguacacugaagucucucaccguggaaaagggcauuuaucagacguccaacuuucggguccagccuaccaucucaauugugcgcuucccaaauaucacaaaccuuugccccuuuggugagguuuucaaugccagcaaauucgcuaguguguacgccuggaaccgaaagagaaucucuaauugugucgcggacuacuccgugcuguauaacagcacuucguuuucuaccuucaaaugcuacgggguauccccuacaaaguugaaugaccuauguuuuacuaacguuuaugcagauucauucguggucaaaggagacgaggugaggcaaauugccccaggccagaccggcgucauagcugauuacaauuauaagcugcccgacgauuuuacagggugcgugaucgccuggaacaguguuaaacaggacgcacucaccggagguaacuacggcuaucuguaccggcuuuuccguaagagcaagcugaaaccguuugaacgcgauauuuccacugagaucuaccaagcugggucuacgccuuguaauggacaggugggcuugaacugcuauuacccccucgaaagauaugguuuccacccaacaaccgggguaaauuaccagccuuuuagggucgugguucugagcuucgaguuacugaacggccccgccacugugugcggaccaaagcuaucaaccacacucgucaaagacaagugugugaauuuuaacuucaauggccugaccgggacuggaguacuuacaacgaguaaaaagcaguuuuugcccuuccaacaguucggucgggauauauccgacaccacugaugcggugcgagacccucagacacuggaaauucucgacaucaccccaugcagcuuuggcgggguuucugucaucacaccgggaacuaacaccucaaaucagguggccgugcuguaucaagaugucaacuguacggagguucccauggcaauucaugcugagcagcuuaccccugccuggcgcguguacagugcuggcgccaauguguuccagacaagagcagguugccugguaggggccgaacacgucaacaauagcuaugagugugacaucccagugggcgcuggaauuugcgcguccuaccacucuaugucgagcuuuagguccguuaaccagcggucaauaaucgcauacacuaugaguuugggcgccgaaaauucuguggcuuauagcaacaacuccauugccauccccaccaauuucacaaucucagucacuaccgagauucucccugugagcaugacgaagacaucuguugauuguaccauguacauaugcggggacuccaucgaauguaguaaccuguuacugcaauauggaucuuuuugcacucagcuaaaucgcgcacucacagguauugccguggagcaggauaaaaacacccaggagguauucgcucaagucaagcagaucuacaaaacuccacccauuaaggacuuuggcggguucaauuuuucucagauccugccggauccuuccaaaccaucaaagagaaguuucauagaagaccuuuuguuuaacaaggugacccuggccgaugcaggauucaucaaacaauauggcgacugucucggugauauugcggcuagggaccugaucugcgcccagaaguucaauggguuaacagugcugcccccucuuuugacggaugagaugauugcacaguacaccagcgcccuccuggcuggcacuaucacaucgggauggaccuuuggcgccggggcagcucuacagauacccuucgccaugcaaauggcguaucguuuuaacggaauuggcgucacacagaauguucuguacgaaaaccagaaacucaucgccaaucaguucaacuccgcuauugguaagauccaagacucucugagcucaacugcaagugcccuugggaaauugcaggacgugguaaaucagaacgcucaggcccugaauaccuuagugaagcaacucuccucuaacuuuggagcaauaagcuccguccugaacgauauccuuucacggcuggacaagguggaggcggaaguucagauugaucgauugaucacgggcagacuccagagccugcaaacauacgugacccagcagcuaauuagggccgcugagauccgcgccagugcaaaucuggcugccacuaaaaugucugagugcguccucggucaguccaagcggguggacuucuguggcaaaggguaucaucugaugagcuuuccacaaucggcaccucacggaguuguguuccuucaugucaccuacguacccgcccaggaaaagaacuuuacaacugcuccagcgauaugccacgagggcaaagcccacuucccgagagaagggguguuuguuucaaauggaacccauugguucauuacacagaggaacuuuuaugagccucagaucaucacgaccgauaauacuuucgugucuggcaguugugacgucgugauugguaucguaaacaauacaguguacgaucccuugcaaccagagcuggacuccuucaaggaagaguuagauaaauauuuuaagaaccacaccagccccgacgucgaucucggggacauuucuggaauaaaugcaagcguugugaacauccagaaggaaauugaucgccugaaugagguggcuaaaaaccuuaaugaaucccugaucgaccuacaggagcucggcaaguacgagcaguauauuaaauggccuugguacaucuggcuggguuucauagccggcuugaucgccauuaucauggucacuauuaugcugugcuguaugacaucaugcuguaguugcuuaaagggguguugcagcuguggaucuugcugcaaauuugacgaagaugacuccgagccagugcucaagggcguuaagcugcauuacaccugaggacuaguuauaagacugacuagcccgaugggccucccaacgggcccuccuccccuccuugcaccgagauuaauaaaaaaaaaaaaaaaaaaaaaaaaaaaaaaaaaaaaaaaaaaaaaaaaaaaaaaaaaaaaaaaaugcaucccccccccccccccccccccccccccccccaaaggcucuuuucagagccaccagaauu

SEQ ID NO: 13010 - RNA, 4021 nt, Artificial Sequence
  SARS-CoV-2/pangolin/Guangxi/P5E/2017__EPI_ISL_410541 spike protein mRNA human (1-1267)
aggagaaagcuuaccauguucguguuucuguucguccucccccuuguuagcucccagugcgugaaccugaccacaagaacuggcaucccuccaggguacacaaauucuucaaccaggggaguauauuacccggacaagguguuucggaguagcauuuugcacuuaacacaagaucuguuccuacccuuuuucuccaacgucacuugguuuaauaccauaacauaucaggguggcucuaaaaaguucgacaacccugugcucccauuuaaugaugggguuuacuucgccucgaccgagaaaucaaacaucauucgcggauggaucuuuggcacuacacuggacgcucgaacccagagccuucugauugugaauaacgcaacgaaugucgugaucaagguaugugaguuccaguuuugcacugaucccuucuuggguguuuauuaccauaacaauaacaaaaccuggguggaaaaugaguuccgugucuauaguuccgccaacaauuguacauuugaauacauaucucaaccuuuccucauggaccuggaagggaagcagggaaacuuuaagaaccugagagaguucguguuuaaaaauguggauggcuacuucaagaucuauagcaaacacacuccaauugaccucgucagggauuuaccccggggcuuugcggcucuggagccucuuguugacuugccaaucgggauuaacaucacccgcuuccagacacugcuagcccuccauagauccuaccugaccccgggaaaacuugaaucagguuggacgacuggcgcagccgcuuauuacgugggguaucugcagcaaaggacauuuuugcucaguuacaaucagaacggaaccauaacugaugcaguagacugcagccuggaucccuuaucugagacaaaguguacccugaagucccucacgguggaaaagggcauuuaucagaccucaaauuuccggguccagccuacaaucagcauugugcgcuuuccaaacaucacuaaucuuugccccuucggugagguuuuuaacgccaguaaauucgcuucuguguacgccuggaaucgaaagagaaucuccaacugugucgcggacuacagcgugcuguauaauucgaccucuuucuccacauuuaaaugcuacgggguaucaccuacuaaguugaacgaccuauguuucaccaauguuuaugcagauaguuuuguggucaaaggagacgaggugaggcaaauugccccaggccagacaggcgucauagcugauuacaacuauaagcugcccgacgauuucaccgggugcgugaucgccuggaauagcguuaaacaggacgcacucacuggagauaacuacgguuaucuguaccggcuuuuucguaaguccaagcugaaaccguucgaacgcgacauuucuacggagaucuaccaagcuggcagcacaccuuguaacggacaggugggguugaauugcuauuacccccucgaaagauauggcuuucacccaaccacugguguaaacuaccagccuuucagggucgugguucugucauuugaguuacugaaugggcccgccaccgugugcggcccaaagcuaaguacaacccucgucaaagauaagugugugaacuucaauuuuaacggacugacuggcacagggguacuuacgaccuccaaaaagcaguucuugcccuuucaacaguucggacgggacauaagcgauacuacagacgcggugcgagacccucagacccuggaaauucucgauaucacaccaugcucuuucgguggcguuucagucaucacuccggggaccaauacgaguaaccagguggccgugcuguaucaagacgucaauuguaccgagguucccauggcaauucaugcugagcagcuuacgccugccuggcgcguguacagcgcuggagccaacguguuucagacuagagcaggcugccugguaggugccgaacacgucaauaacuccuaugagugugauaucccagugggggcuggcauuugcgcgucuuaccacucgaugagcuccuucaggucaguuaaucagcggaguauaaucgcauacaccaugucuuugggagccgaaaacagcguggcuuauuccaauaacucaauugccauccccacaaacuuuacuaucagcgucaccacggagauucucccugugucuaugacaaagaccuccguugacuguacuauguacauaugcggcgauaguaucgaauguagcaaucuguuacugcaauaugggucuuucugcacacagcuaaaccgcgcacucaccggaauugccguggagcaggacaaaaauacucaggagguauuugcucaagucaagcagaucuacaaaaccccacccauuaaggauuucgguggcuuuaacuucucccagauccugccggacccuucaaaaccaaguaagaggagcuuuauagaagaucuuuuguucaauaaggugacacuggccgacgcaggguuuaucaaacaauauggagauugucucggcgacauugcggcuagagaucugaucugcgcccagaaguucaacgguuuaacggugcugcccccucuuuugaccgacgagaugauugcacaguacacuucggcccuccuggcugggacaaucaccuccggcuggacauucggagccggcgcagcucuacagauacccuuugccaugcaaauggcguaucguuucaaugggauuggagucacucagaacguucuguacgaaaaucagaaacucaucgccaaccaguuuaauucugcuauuggcaagauccaagacagccugucaaguaccgcauccgcccuugguaaauugcaggaugugguaaaccagaaugcucaggcccugaacacguuagugaagcaacucucuagcaauuucggggcaauauccucaguccugaacgacauccuuagccggcuggauaagguggaggcggaaguucagauugaccgauugaucacaggaagacuccagagucugcaaaccuacgugacucagcagcuaauuagggccgcugagauccgcgccucugcaaaccuggcugccaccaaaauguccgagugcguccucggccagagcaagcggguggauuuuugugguaaaggcuaucaucugaugucguucccacaaucagcaccucacgggguuguguuucuucaugucacauacguacccgcccaggaaaagaauuucacuaccgcuccagcgauaugccacgagggaaaagcccacuuuccgagagaaggcguguucguuucuaacgggacacauugguuuauuacgcagaggaauuucuaugagccucagaucaucaccacugacaacacauuugugaguggauccugugaugucgugauuggcaucguaaauaacaccguguacgaccccuugcaaccagagcuggauagcuucaaggaagaguuagacaaauauuucaagaaucacacuucucccgaugucgaccucggugauauuagcgggauaaacgcauccguugugaauauccagaaggaaauugaccgccugaacgagguggcuaaaaaucuuaacgaaucacugaucgaccuacaggagcucggaaaguacgagcaguauauuaaauggccuugguacaucuggcugggcuuuauagccgguuugaucgccauuaucauggucacaauuaugcugugcuguaugaccaguugcuguagcugcuuaaagggcuguugcucuuguggguccugcugcaaauucgaugaagacgauucagagccagugcucaagggaguuaagcugcauuacacgugaggacuaguuauaagacugacuagcccgaugggccucccaacgggcccuccuccccuccuugcaccgagauuaauaaaaaaaaaaaaaaaaaaaaaaaaaaaaaaaaaaaaaaaaaaaaaaaaaaaaaaaaaaaaaaaaugcaucccccccccccccccccccccccccccccccaaaggcucuuuucagagccaccagaauu

SEQ ID NO: 13011 - RNA, 4015 nt, Artificial Sequence
  SARS-CoV-2/pangolin/Guangxi/P1E/2017__EPI_ISL_410539 spike protein mRNA human (1-1265)
aggagaaagcuuaccauguucguguuucuguucguccucccccuuguuagcucccagugcgugaaccugaccacaagaacuggcauccaaccuggguacaccaauucuucaacgaggggaguauauuacccagacaagguguuucggaguagcauuuugcacuuaacacaggaucuguuccuaccguuuuucuccaacgucacuugguuuaauaccauaaacuaucaggguggcuucaagaaguuugacaaucccgugcucccuuucaacgaugggguuuacuuugccucuacagagaaaucgaauaucauucgcggauggaucuucggcaccacucuggacgcucgaacacagucacuucugauugugaacaaugcaaccaacgucgugaucaagguaugugaauuucaauucugcacggauccauucuuggguguuuauuaccauaauaacaauaaaacuuggguggagaacgaauuucgugucuauagcagugccaauaacuguaccuucgaguacauaucccagcccuuucucauggaccuggaagggaagcagggaaacuucaagaaucugagagaguuuguguucaaaaacguggauggcuacuuuaagaucuauucuaaacacacaccuauugaccucgucagggauuuaccacggggcuucgcggcucuggagccccuuguugacuugccuaucgggauuaauaucacucgcuuucagacccugcuagcccuccauagaagcuaccugacaccaggaaaacuugaauccgguuggaccacgggcgcagccgcuuauuacgugggguaucugcaacagaggacuuucuugcucucauacaaccagaauggaacaauaaccgaugcaguagacugcagucuggauccguuaagcgagacuaaguguacacugaagucucucaccguggaaaagggcauuuaucagacguccaacuuucggguccaacccaccaucucaauugugcgcuucccuaauaucacaaaccuuugcccauuuggugagguuuucaaugccagcaaauucgcuaguguguacgccuggaaccgaaagagaaucucuaauugugucgcggacuacuccgugcuguauaacagcacuucguuuucuaccuucaaaugcuacgggguaucccccacaaaguugaaugaccuauguuuuacuaacguuuaugcagauucauucguggucaaaggagacgaggugaggcagauugccccuggccagaccggcgucauagcugauuacaauuauaagcugccagacgauuuuacagggugcgugaucgccuggaacaguguuaaacaagacgcacucaccggagguaacuaccuguaucggcuuuuccguaagagcaagcugaaacccuuugaacgcgauauuuccacugagaucuaccaggcuggcucuacgccguguaauggacaggugggguugaacugcuacuauccucucgaaagauacggcuuccaccccacaaccgguguaaauuaucagccauuuagggucgugguucugagcuucgaguuacugaacgggccugccacugugugcggccccaagcuaucaaccacacucgucaaagacaagugugugaauuuuaacuucaauggacugaccggcacugggguacuuacaacgaguaaaaagcaauuuuugccauuccagcaguucggacgggauauauccgacaccacugaugcggugcgagacccccagacacuggaaauucucgacaucaccccuugcagcuuugguggcguuucugucaucacaccagggacuaacaccucaaaucaaguggccgugcuguaccaggaugucaacuguacggagguuccgauggcaauucaugcugagcagcuuacccccgccuggcgcguguauagugcuggagccaauguguuccagacaagagcaggcugccugguaggugccgaacacgucaacaauagcuacgagugugacaucccugugggggcuggcauuugcgcguccuaucacucuaugucgagcuugagguccguuaaccaacggucaauaaucgcauacacuaugagucucggagccgaaaauucuguggcuuacagcaacaacuccauugccaucccaaccaauuuuacaaucucagucacuaccgagauucugcccgugagcaugacgaagacaucuguugauuguaccauguauauaugcggcgacuccaucgaauguaguaacuuacugcuacaguacgggagcuucugcacucagcucaaucgcgcacugacaggaauugccguggagcaggauaaaaacacccaagagguauuugcucaggucaagcagaucuauaaaacuccuccaauuaaggacuucgguggcuuuaauuucucucaaauccuucccgauccguccaaaccuucaaagagaaguuuuauagaagacuugcuguucaacaaggugacccucgccgaugcaggguuuaucaaacaguacggagacugucugggcgauauugcggcuagggacuuaaucugcgcccagaaguucaauggucugacagugcuuccacccuugcucacggaugagaugauugcacaguauaccagcgcccugcuagcugggacuaucacaucgggcuggaccuucggagccggcgcagcucugcaaauaccuuuugccaugcagauggcguaccguuucaacgggauuggagucacacagaauguucucuaugaaaaccagaaacugaucgccaaucaauuuaacuccgcuauuggcaagauccaggacucucuuagcucaacugcaagugccuuggguaaacugcaggacgugguaaaucagaacgcucaagccuuaaauacccucgugaagcagcuguccucuaacuucggggcaauaagcuccguccuuaacgauauccugucacgguuggacaagguggaggcggaaguucagauugaucgacucaucacgggaagacugcaaagccuacagacauacgugacccagcagcugauuagggccgcugagauccgcgccagugcaaaucucgcugccacuaaaaugucugagugcguccugggccaauccaagcggguggacuuuugugguaaaggcuaccaucuuaugagcuucccccagucggcaccacacgggguuguguuuuugcaugucaccuauguaccugcccaggaaaagaacuucacaacugcucccgcgauaugccacgagggaaaagcccacuuuccaagagaaggcguguucguuucaaaugggacccauugguuuauuacacagaggaacuucuacgagccgcaaaucaucacgaccgauaauacuuuugugucuggaaguugugacgucgugauuggcaucguaaacaauacaguguaugauccucugcagcccgaguuagacuccuucaaggaggaacucgauaaauacuucaagaaccacaccagcccagacgucgaucugggugacauuucugggauaaaugcaagcguugugaacauccagaaggaaauugaucgccuuaaugagguggcuaaaaaccugaaugaaucccuaaucgaccuccaggagcugggaaaguaugagcaauacauuaaauggcccugguauaucugguugggcuuuauagccggucugaucgccauuaucauggucacuauuauguuaugcuguaugacaucaugcuguaguugccucaagggcuguugcagcugugggucuugcugcaaauucgacgaagaugacuccgagccugugcugaagggaguuaaacuucauuacaccugaggacuaguuauaagacugacuagcccgaugggccucccaacgggcccuccuccccuccuugcaccgagauuaauaaaaaaaaaaaaaaaaaaaaaaaaaaaaaaaaaaaaaaaaaaaaaaaaaaaaaaaaaaaaaaaaugcaucccccccccccccccccccccccccccccccaaaggcucuuuucagagccaccagaauu

SEQ ID NO: 13012 - RNA, 4039 nt, Artificial Sequence
  SARS-CoV-2/Wuhan/WIV05/2019__EPI_ISL_402128 spike protein mRNA gc mod (1-1273)
aggagaaagcuuaccauguucguguuucuggugcugcugccccugguguccagccagugugugaaccugaccaccagaacacagcugccuccagccuacaccaacagcuucaccagaggcguguacuaccccgacaagguguucagauccagcgugcugcacucuacccaggaccuguuccugccuuucuucagcaacgugaccugguuccacgccauccacguguccggcaccaauggcaccaagagauucgacaaccccgugcugcccuucaacgacgggguguacuuugccagcaccgagaaguccaacaucaucagaggcuggaucuucggcaccacacuggacagcaagacccagagccugcugaucgugaacaacgccaccaacguggucaucaaagugugcgaguuccaguucugcaacgaccccuuccugggcgucuacuaccacaagaacaacaagagcuggauggaaagcgaguuccggguguacagcagcgccaacaacugcaccuucgaguacgugucccagccuuuccugauggaccuggaaggcaagcagggcaacuucaagaaccugcgcgaguucguguucaagaacaucgacggcuacuucaaaaucuacagcaagcacaccccuaucaaccucgugcgggaucugccucagggcuucucugcucuggaaccccugguggaucugcccaucggcaucaacaucacccgguuucagacacugcuggcccugcacagaagcuaccugacaccuggcgauagcagcagcggauggacagcuggugccgccgcuuacuaugugggcuaccugcagccuagaaccuuccugcugaaguacaacgagaacggcaccaucaccgacgccguggauugugcucuggauccucugagcgagacaaagugcacccugaaguccuucaccguggaaaagggcaucuaccagaccagcaacuuccgggugcagcccaccgaauccaucgugcgguuccccaauaucaccaaucugugccccuucggcgagguguucaaugccaccagauucgccucuguguacgccuggaaccggaagcggaucagcaauugcguggccgacuacuccgugcuguacaacuccgccagcuucagcaccuucaagugcuacggcguguccccuaccaagcugaacgaccugugcuucacaaacguguacgccgacagcuucgugauccggggagaugaagugcggcagauugccccuggacagacaggcaagaucgccgacuacaacuacaagcugcccgacgacuucaccggcugugugauugccuggaacagcaacaaccuggacuccaaagucggcggcaacuacaauuaccuguaccggcuguuccggaaguccaaucugaagcccuucgagcgggacaucagcaccgaaaucuaucaggccggcagcaccccuugcaacggcguggaaggcuucaacugcuacuucccacugcaguccuacggcuuucagcccacaaauggcgugggcuaucagcccuacagagugguggugcugagcuucgaacugcugcaugcuccugccacagugugcggcccuaagaaaagcaccaaucucgugaagaacaaaugcgugaacuucaacuucaacggccugaccggcaccggcgugcugacagagagcaacaagaaguuccugccauuccagcaguuuggccgggauaucgccgauaccacagacgccguuagagauccccagacacuggaaauccuggacaucaccccaugcagcuucggcggagugucugugaucaccccuggcaccaacaccagcaaucagguggcagugcuguaccaggacgugaacuguaccgaagugcccguggccauucacgccgaucagcugacaccuacauggcggguguacuccaccggcagcaauguguuucagaccagagccggcugucugaucggagccgagcacgugaacaauagcuacgagugcgacauccccaucggcgcuggcaucugugccagcuaccagacacagacaaacagccccagacgggcuagaagcguggccagccagagcaucauugccuacacaaugucucugggcgccgagaacagcguggccuacuccaacaacucuaucgcuauccccaccaacuucaccaucagcgugaccaccgagauccugccuguguccaugaccaagaccagcguggacugcaccauguacaucugcggcgauuccaccgagugcuccaaccugcugcugcaguacggcagcuucugcacccagcugaauagagcccugacagggaucgccguggaacaggacaagaacacccaagagguguucgcccaagugaagcaaaucuacaagaccccuccuaucaaggacuucggcggcuucaauuucagccagauucugcccgauccuagcaagcccagcaagcggagcuucaucgaggaccugcuguucaacaaagugacacuggccgacgccggcuucaucaagcaguauggcgauugucugggcgacauugccgccagggaucugauuugcgcccagaaguuuaacggacugacagugcugccuccucugcugaccgaugagaugaucgcccaguacacaucugcccugcuggccggcacaaucacaagcggcuggacauuuggagcuggcgccgcucugcagauccccuuugcuaugcagauggccuaccgguucaacggcaucggagugacccagaaugugcuguacgagaaccagaagcugaucgccaaccaguucaacagcgccaucggcaagauccaggacagccugagcagcacagcaagcgcccugggaaagcugcaggacguggucaaccagaaugcccaggcacugaacacccuggucaagcagcuguccuccaacuucggcgccaucagcucugugcugaacgauauccugagcagacuggacaaggucgaggccgaggugcagaucgacagacugaucacaggcagacugcagagccuccagacauacgugacccagcagcugaucagagccgccgagauuagagccucugccaaucuggccgccaccaagaugucugagugugugcugggccagagcaagagaguggacuuuugcggcaagggcuaccaccugaugagcuucccucagucugccccucacggcgugguguuucugcacgugacauaugugcccgcucaagagaagaauuucaccaccgcuccagccaucugccacgacggcaaagcccacuuuccuagagaaggcguguucguguccaacggcacccauugguucgugacacagcggaacuucuacgagccccagaucaucaccaccgacaacaccuucgugucuggcaacugcgacguugugaucggcauugugaacaauaccguguacgacccucugcagcccgagcuggacagcuucaaagaggaacuggacaaguacuuuaagaaccacacaagccccgacguggaccugggcgauaucagcggaaucaaugccagcgucgugaacauccagaaagagaucgaccggcugaacgagguggccaagaaucugaacgagagccugaucgaccugcaagaacuggggaaguacgagcaguacaucaaguggcccugguacaucuggcugggcuuuaucgccggacugauugccaucgugauggucacaaucaugcuguguugcaugaccagcugcuguagcugccugaagggcuguuguagcuguggcagcugcugcaaguucgacgaggacgauucugagcccgugcugaagggcgugaaacugcacuacaccugaggacuaguuauaagacugacuagcccgaugggccucccaacgggcccuccuccccuccuugcaccgagauuaauaaaaaaaaaaaaaaaaaaaaaaaaaaaaaaaaaaaaaaaaaaaaaaaaaaaaaaaaaaaaaaaaugcaucccccccccccccccccccccccccccccccaaaggcucuuuucagagccaccagaauu

SEQ ID NO: 13013 - RNA, 4039 nt, Artificial Sequence; identical to SEQ ID NO: 165
  SARS-CoV-2/Wuhan/WIV05/2019__EPI_ISL_402128 spike protein mRNA gc mod (1-1273)(K986P_V987P) R9519

SEQ ID NO: 13014 - RNA, 4039 nt, Artificial Sequence
  SARS-CoV-2/Wuhan/WIV05/2019__EPI_ISL_402128 spike protein mRNA gc mod (1-1273)(K986P_V987P_T887WN_A1020W)
aggagaaagcuuaccauguucguguuucuggugcugcugccccugguguccagccagugugugaaccugaccaccagaacacagcugccuccagccuacaccaacagcuucaccagaggcguguacuaccccgacaagguguucagauccagcgugcugcacucuacccaggaccuguuccugccuuucuucagcaacgugaccugguuccacgccauccacguguccggcaccaauggcaccaagagauucgacaaccccgugcugcccuucaacgacgggguguacuuugccagcaccgagaaguccaacaucaucagaggcuggaucuucggcaccacacuggacagcaagacccagagccugcugaucgugaacaacgccaccaacguggucaucaaagugugcgaguuccaguucugcaacgaccccuuccugggcgucuacuaccacaagaacaacaagagcuggauggaaagcgaguuccggguguacagcagcgccaacaacugcaccuucgaguacgugucccagccuuuccugauggaccuggaaggcaagcagggcaacuucaagaaccugcgcgaguucguguucaagaacaucgacggcuacuucaaaaucuacagcaagcacaccccuaucaaccucgugcgggaucugccucagggcuucucugcucuggaaccccugguggaucugcccaucggcaucaacaucacccgguuucagacacugcuggcccugcacagaagcuaccugacaccuggcgauagcagcagcggauggacagcuggugccgccgcuuacuaugugggcuaccugcagccuagaaccuuccugcugaaguacaacgagaacggcaccaucaccgacgccguggauugugcucuggauccucugagcgagacaaagugcacccugaaguccuucaccguggaaaagggcaucuaccagaccagcaacuuccgggugcagcccaccgaauccaucgugcgguuccccaauaucaccaaucugugccccuucggcgagguguucaaugccaccagauucgccucuguguacgccuggaaccggaagcggaucagcaauugcguggccgacuacuccgugcuguacaacuccgccagcuucagcaccuucaagugcuacggcguguccccuaccaagcugaacgaccugugcuucacaaacguguacgccgacagcuucgugauccggggagaugaagugcggcagauugccccuggacagacaggcaagaucgccgacuacaacuacaagcugcccgacgacuucaccggcugugugauugccuggaacagcaacaaccuggacuccaaagucggcggcaacuacaauuaccuguaccggcuguuccggaaguccaaucugaagcccuucgagcgggacaucagcaccgaaaucuaucaggccggcagcaccccuugcaacggcguggaaggcuucaacugcuacuucccacugcaguccuacggcuuucagcccacaaauggcgugggcuaucagcccuacagagugguggugcugagcuucgaacugcugcaugcuccugccacagugugcggcccuaagaaaagcaccaaucucgugaagaacaaaugcgugaacuucaacuucaacggccugaccggcaccggcgugcugacagagagcaacaagaaguuccugccauuccagcaguuuggccgggauaucgccgauaccacagacgccguuagagauccccagacacuggaaauccuggacaucaccccaugcagcuucggcggagugucugugaucaccccuggcaccaacaccagcaaucagguggcagugcuguaccaggacgugaacuguaccgaagugcccguggccauucacgccgaucagcugacaccuacauggcggguguacuccaccggcagcaauguguuucagaccagagccggcugucugaucggagccgagcacgugaacaauagcuacgagugcgacauccccaucggcgcuggcaucugugccagcuaccagacacagacaaacagccccagacgggcuagaagcguggccagccagagcaucauugccuacacaaugucucugggcgccgagaacagcguggccuacuccaacaacucuaucgcuauccccaccaacuucaccaucagcgugaccaccgagauccugccuguguccaugaccaagaccagcguggacugcaccauguacaucugcggcgauuccaccgagugcuccaaccugcugcugcaguacggcagcuucugcacccagcugaauagagcccugacagggaucgccguggaacaggacaagaacacccaagagguguucgcccaagugaagcaaaucuacaagaccccuccuaucaaggacuucggcggcuucaauuucagccagauucugcccgauccuagcaagcccagcaagcggagcuucaucgaggaccugcuguucaacaaagugacacuggccgacgccggcuucaucaagcaguauggcgauugucugggcgacauugccgccagggaucugauuugcgcccagaaguuuaacggacugacagugcugccuccucugcugaccgaugagaugaucgcccaguacacaucugcccugcuggccggcacaaucacaagcggcuggugguuuggagcuggcgccgcucugcagauccccuuugcuaugcagauggccuaccgguucaacggcaucggagugacccagaaugugcuguacgagaaccagaagcugaucgccaaccaguucaacagcgccaucggcaagauccaggacagccugagcagcacagcaagcgcccugggaaagcugcaggacguggucaaccagaaugcccaggcacugaacacccuggucaagcagcuguccuccaacuucggcgccaucagcucugugcugaacgauauccugagcagacuggacccuccugaggccgaggugcagaucgacagacugaucacaggcagacugcagagccuccagacauacgugacccagcagcugaucagagccgccgagauuagauggucugccaaucuggccgccaccaagaugucugagugugugcugggccagagcaagagaguggacuuuugcggcaagggcuaccaccugaugagcuucccucagucugccccucacggcgugguguuucugcacgugacauaugugcccgcucaagagaagaauuucaccaccgcuccagccaucugccacgacggcaaagcccacuuuccuagagaaggcguguucguguccaacggcacccauugguucgugacacagcggaacuucuacgagccccagaucaucaccaccgacaacaccuucgugucuggcaacugcgacguugugaucggcauugugaacaauaccguguacgacccucugcagcccgagcuggacagcuucaaagaggaacuggacaaguacuuuaagaaccacacaagccccgacguggaccugggcgauaucagcggaaucaaugccagcgucgugaacauccagaaagagaucgaccggcugaacgagguggccaagaaucugaacgagagccugaucgaccugcaagaacuggggaaguacgagcaguacaucaaguggcccugguacaucuggcugggcuuuaucgccggacugauugccaucgugauggucacaaucaugcuguguugcaugaccagcugcuguagcugccugaagggcuguuguagcuguggcagcugcugcaaguucgacgaggacgauucugagcccgugcugaagggcgugaaacugcacuacaccugaggacuaguuauaagacugacuagcccgaugggccucccaacgggcccuccuccccuccuugcaccgagauuaauaaaaaaaaaaaaaaaaaaaaaaaaaaaaaaaaaaaaaaaaaaaaaaaaaaaaaaaaaaaaaaaaugcaucccccccccccccccccccccccccccccccaaaggcucuuuucagagccaccagaauu

SEQ ID NO: 13015 - RNA, 4039 nt, Artificial Sequence
  SARS-CoV-2/Wuhan/WIV05/2019__EPI_ISL_402128 spike protein mRNA gc mod (1-1273)(K986P_V987P_P1069F)
aggagaaagcuuaccauguucguguuucuggugcugcugccccugguguccagccagugugugaaccugaccaccagaacacagcugccuccagccuacaccaacagcuucaccagaggcguguacuaccccgacaagguguucagauccagcgugcugcacucuacccaggaccuguuccugccuuucuucagcaacgugaccugguuccacgccauccacguguccggcaccaauggcaccaagagauucgacaaccccgugcugcccuucaacgacgggguguacuuugccagcaccgagaaguccaacaucaucagaggcuggaucuucggcaccacacuggacagcaagacccagagccugcugaucgugaacaacgccaccaacguggucaucaaagugugcgaguuccaguucugcaacgaccccuuccugggcgucuacuaccacaagaacaacaagagcuggauggaaagcgaguuccggguguacagcagcgccaacaacugcaccuucgaguacgugucccagccuuuccugauggaccuggaaggcaagcagggcaacuucaagaaccugcgcgaguucguguucaagaacaucgacggcuacuucaaaaucuacagcaagcacaccccuaucaaccucgugcgggaucugccucagggcuucucugcucuggaaccccugguggaucugcccaucggcaucaacaucacccgguuucagacacugcuggcccugcacagaagcuaccugacaccuggcgauagcagcagcggauggacagcuggugccgccgcuuacuaugugggcuaccugcagccuagaaccuuccugcugaaguacaacgagaacggcaccaucaccgacgccguggauugugcucuggauccucugagcgagacaaagugcacccugaaguccuucaccguggaaaagggcaucuaccagaccagcaacuuccgggugcagcccaccgaauccaucgugcgguuccccaauaucaccaaucugugccccuucggcgagguguucaaugccaccagauucgccucuguguacgccuggaaccggaagcggaucagcaauugcguggccgacuacuccgugcuguacaacuccgccagcuucagcaccuucaagugcuacggcguguccccuaccaagcugaacgaccugugcuucacaaacguguacgccgacagcuucgugauccggggagaugaagugcggcagauugccccuggacagacaggcaagaucgccgacuacaacuacaagcugcccgacgacuucaccggcugugugauugccuggaacagcaacaaccuggacuccaaagucggcggcaacuacaauuaccuguaccggcuguuccggaaguccaaucugaagcccuucgagcgggacaucagcaccgaaaucuaucaggccggcagcaccccuugcaacggcguggaaggcuucaacugcuacuucccacugcaguccuacggcuuucagcccacaaauggcgugggcuaucagcccuacagagugguggugcugagcuucgaacugcugcaugcuccugccacagugugcggcccuaagaaaagcaccaaucucgugaagaacaaaugcgugaacuucaacuucaacggccugaccggcaccggcgugcugacagagagcaacaagaaguuccugccauuccagcaguuuggccgggauaucgccgauaccacagacgccguuagagauccccagacacuggaaauccuggacaucaccccaugcagcuucggcggagugucugugaucaccccuggcaccaacaccagcaaucagguggcagugcuguaccaggacgugaacuguaccgaagugcccguggccauucacgccgaucagcugacaccuacauggcggguguacuccaccggcagcaauguguuucagaccagagccggcugucugaucggagccgagcacgugaacaauagcuacgagugcgacauccccaucggcgcuggcaucugugccagcuaccagacacagacaaacagccccagacgggcuagaagcguggccagccagagcaucauugccuacacaaugucucugggcgccgagaacagcguggccuacuccaacaacucuaucgcuauccccaccaacuucaccaucagcgugaccaccgagauccugccuguguccaugaccaagaccagcguggacugcaccauguacaucugcggcgauuccaccgagugcuccaaccugcugcugcaguacggcagcuucugcacccagcugaauagagcccugacagggaucgccguggaacaggacaagaacacccaagagguguucgcccaagugaagcaaaucuacaagaccccuccuaucaaggacuucggcggcuucaauuucagccagauucugcccgauccuagcaagcccagcaagcggagcuucaucgaggaccugcuguucaacaaagugacacuggccgacgccggcuucaucaagcaguauggcgauugucugggcgacauugccgccagggaucugauuugcgcccagaaguuuaacggacugacagugcugccuccucugcugaccgaugagaugaucgcccaguacacaucugcccugcuggccggcacaaucacaagcggcuggacauuuggagcuggcgccgcucugcagauccccuuugcuaugcagauggccuaccgguucaacggcaucggagugacccagaaugugcuguacgagaaccagaagcugaucgccaaccaguucaacagcgccaucggcaagauccaggacagccugagcagcacagcaagcgcccugggaaagcugcaggacguggucaaccagaaugcccaggcacugaacacccuggucaagcagcuguccuccaacuucggcgccaucagcucugugcugaacgauauccugagcagacuggacccuccugaggccgaggugcagaucgacagacugaucacaggcagacugcagagccuccagacauacgugacccagcagcugaucagagccgccgagauuagagccucugccaaucuggccgccaccaagaugucugagugugugcugggccagagcaagagaguggacuuuugcggcaagggcuaccaccugaugagcuucccucagucugccccucacggcgugguguuucugcacgugacauauguguucgcucaagagaagaauuucaccaccgcuccagccaucugccacgacggcaaagcccacuuuccuagagaaggcguguucguguccaacggcacccauugguucgugacacagcggaacuucuacgagccccagaucaucaccaccgacaacaccuucgugucuggcaacugcgacguugugaucggcauugugaacaauaccguguacgacccucugcagcccgagcuggacagcuucaaagaggaacuggacaaguacuuuaagaaccacacaagccccgacguggaccugggcgauaucagcggaaucaaugccagcgucgugaacauccagaaagagaucgaccggcugaacgagguggccaagaaucugaacgagagccugaucgaccugcaagaacuggggaaguacgagcaguacaucaaguggcccugguacaucuggcugggcuuuaucgccggacugauugccaucgugauggucacaaucaugcuguguugcaugaccagcugcuguagcugccugaagggcuguuguagcuguggcagcugcugcaaguucgacgaggacgauucugagcccgugcugaagggcgugaaacugcacuacaccugaggacuaguuauaagacugacuagcccgaugggccucccaacgggcccuccuccccuccuugcaccgagauuaauaaaaaaaaaaaaaaaaaaaaaaaaaaaaaaaaaaaaaaaaaaaaaaaaaaaaaaaaaaaaaaaaugcaucccccccccccccccccccccccccccccccaaaggcucuuuucagagccaccagaauu

SEQ ID NO: 13016 - RNA, 4039 nt, Artificial Sequence
  SARS-CoV-2/Wuhan/WIV05/2019__EPI_ISL_402128 spike protein mRNA gc mod (1-1273)(K986P_V987P_ H1048Q_H1064N_ H1083N_H1101N)
aggagaaagcuuaccauguucguguuucuggugcugcugccccugguguccagccagugugugaaccugaccaccagaacacagcugccuccagccuacaccaacagcuucaccagaggcguguacuaccccgacaagguguucagauccagcgugcugcacucuacccaggaccuguuccugccuuucuucagcaacgugaccugguuccacgccauccacguguccggcaccaauggcaccaagagauucgacaaccccgugcugcccuucaacgacgggguguacuuugccagcaccgagaaguccaacaucaucagaggcuggaucuucggcaccacacuggacagcaagacccagagccugcugaucgugaacaacgccaccaacguggucaucaaagugugcgaguuccaguucugcaacgaccccuuccugggcgucuacuaccacaagaacaacaagagcuggauggaaagcgaguuccggguguacagcagcgccaacaacugcaccuucgaguacgugucccagccuuuccugauggaccuggaaggcaagcagggcaacuucaagaaccugcgcgaguucguguucaagaacaucgacggcuacuucaaaaucuacagcaagcacaccccuaucaaccucgugcgggaucugccucagggcuucucugcucuggaaccccugguggaucugcccaucggcaucaacaucacccgguuucagacacugcuggcccugcacagaagcuaccugacaccuggcgauagcagcagcggauggacagcuggugccgccgcuuacuaugugggcuaccugcagccuagaaccuuccugcugaaguacaacgagaacggcaccaucaccgacgccguggauugugcucuggauccucugagcgagacaaagugcacccugaaguccuucaccguggaaaagggcaucuaccagaccagcaacuuccgggugcagcccaccgaauccaucgugcgguuccccaauaucaccaaucugugccccuucggcgagguguucaaugccaccagauucgccucuguguacgccuggaaccggaagcggaucagcaauugcguggccgacuacuccgugcuguacaacuccgccagcuucagcaccuucaagugcuacggcguguccccuaccaagcugaacgaccugugcuucacaaacguguacgccgacagcuucgugauccggggagaugaagugcggcagauugccccuggacagacaggcaagaucgccgacuacaacuacaagcugcccgacgacuucaccggcugugugauugccuggaacagcaacaaccuggacuccaaagucggcggcaacuacaauuaccuguaccggcuguuccggaaguccaaucugaagcccuucgagcgggacaucagcaccgaaaucuaucaggccggcagcaccccuugcaacggcguggaaggcuucaacugcuacuucccacugcaguccuacggcuuucagcccacaaauggcgugggcuaucagcccuacagagugguggugcugagcuucgaacugcugcaugcuccugccacagugugcggcccuaagaaaagcaccaaucucgugaagaacaaaugcgugaacuucaacuucaacggccugaccggcaccggcgugcugacagagagcaacaagaaguuccugccauuccagcaguuuggccgggauaucgccgauaccacagacgccguuagagauccccagacacuggaaauccuggacaucaccccaugcagcuucggcggagugucugugaucaccccuggcaccaacaccagcaaucagguggcagugcuguaccaggacgugaacuguaccgaagugcccguggccauucacgccgaucagcugacaccuacauggcggguguacuccaccggcagcaauguguuucagaccagagccggcugucugaucggagccgagcacgugaacaauagcuacgagugcgacauccccaucggcgcuggcaucugugccagcuaccagacacagacaaacagccccagacgggcuagaagcguggccagccagagcaucauugccuacacaaugucucugggcgccgagaacagcguggccuacuccaacaacucuaucgcuauccccaccaacuucaccaucagcgugaccaccgagauccugccuguguccaugaccaagaccagcguggacugcaccauguacaucugcggcgauuccaccgagugcuccaaccugcugcugcaguacggcagcuucugcacccagcugaauagagcccugacagggaucgccguggaacaggacaagaacacccaagagguguucgcccaagugaagcaaaucuacaagaccccuccuaucaaggacuucggcggcuucaauuucagccagauucugcccgauccuagcaagcccagcaagcggagcuucaucgaggaccugcuguucaacaaagugacacuggccgacgccggcuucaucaagcaguauggcgauugucugggcgacauugccgccagggaucugauuugcgcccagaaguuuaacggacugacagugcugccuccucugcugaccgaugagaugaucgcccaguacacaucugcccugcuggccggcacaaucacaagcggcuggacauuuggagcuggcgccgcucugcagauccccuuugcuaugcagauggccuaccgguucaacggcaucggagugacccagaaugugcuguacgagaaccagaagcugaucgccaaccaguucaacagcgccaucggcaagauccaggacagccugagcagcacagcaagcgcccugggaaagcugcaggacguggucaaccagaaugcccaggcacugaacacccuggucaagcagcuguccuccaacuucggcgccaucagcucugugcugaacgauauccugagcagacuggacccuccugaggccgaggugcagaucgacagacugaucacaggcagacugcagagccuccagacauacgugacccagcagcugaucagagccgccgagauuagagccucugccaaucuggccgccaccaagaugucugagugugugcugggccagagcaagagaguggacuuuugcggcaagggcuaccagcugaugagcuucccucagucugccccucacggcgugguguuucugaacgugacauaugugcccgcucaagagaagaauuucaccaccgcuccagccaucugcaacgacggcaaagcccacuuuccuagagaaggcguguucguguccaacggcaccaacugguucgugacacagcggaacuucuacgagccccagaucaucaccaccgacaacaccuucgugucuggcaacugcgacguugugaucggcauugugaacaauaccguguacgacccucugcagcccgagcuggacagcuucaaagaggaacuggacaaguacuuuaagaaccacacaagccccgacguggaccugggcgauaucagcggaaucaaugccagcgucgugaacauccagaaagagaucgaccggcugaacgagguggccaagaaucugaacgagagccugaucgaccugcaagaacuggggaaguacgagcaguacaucaaguggcccugguacaucuggcugggcuuuaucgccggacugauugccaucgugauggucacaaucaugcuguguugcaugaccagcugcuguagcugccugaagggcuguuguagcuguggcagcugcugcaaguucgacgaggacgauucugagcccgugcugaagggcgugaaacugcacuacaccugaggacuaguuauaagacugacuagcccgaugggccucccaacgggcccuccuccccuccuugcaccgagauuaauaaaaaaaaaaaaaaaaaaaaaaaaaaaaaaaaaaaaaaaaaaaaaaaaaaaaaaaaaaaaaaaaugcaucccccccccccccccccccccccccccccccaaaggcucuuuucagagccaccagaauu

SEQ ID NO: 13017 - RNA, 4039 nt, Artificial Sequence
  SARS-CoV-2/Wuhan/WIV05/2019__EPI_ISL_402128 spike protein mRNA gc mod (1-1273)(I712C_T1077C)
aggagaaagcuuaccauguucguguuucuggugcugcugccccugguguccagccagugugugaaccugaccaccagaacacagcugccuccagccuacaccaacagcuucaccagaggcguguacuaccccgacaagguguucagauccagcgugcugcacucuacccaggaccuguuccugccuuucuucagcaacgugaccugguuccacgccauccacguguccggcaccaauggcaccaagagauucgacaaccccgugcugcccuucaacgacgggguguacuuugccagcaccgagaaguccaacaucaucagaggcuggaucuucggcaccacacuggacagcaagacccagagccugcugaucgugaacaacgccaccaacguggucaucaaagugugcgaguuccaguucugcaacgaccccuuccugggcgucuacuaccacaagaacaacaagagcuggauggaaagcgaguuccggguguacagcagcgccaacaacugcaccuucgaguacgugucccagccuuuccugauggaccuggaaggcaagcagggcaacuucaagaaccugcgcgaguucguguucaagaacaucgacggcuacuucaaaaucuacagcaagcacaccccuaucaaccucgugcgggaucugccucagggcuucucugcucuggaaccccugguggaucugcccaucggcaucaacaucacccgguuucagacacugcuggcccugcacagaagcuaccugacaccuggcgauagcagcagcggauggacagcuggugccgccgcuuacuaugugggcuaccugcagccuagaaccuuccugcugaaguacaacgagaacggcaccaucaccgacgccguggauugugcucuggauccucugagcgagacaaagugcacccugaaguccuucaccguggaaaagggcaucuaccagaccagcaacuuccgggugcagcccaccgaauccaucgugcgguuccccaauaucaccaaucugugccccuucggcgagguguucaaugccaccagauucgccucuguguacgccuggaaccggaagcggaucagcaauugcguggccgacuacuccgugcuguacaacuccgccagcuucagcaccuucaagugcuacggcguguccccuaccaagcugaacgaccugugcuucacaaacguguacgccgacagcuucgugauccggggagaugaagugcggcagauugccccuggacagacaggcaagaucgccgacuacaacuacaagcugcccgacgacuucaccggcugugugauugccuggaacagcaacaaccuggacuccaaagucggcggcaacuacaauuaccuguaccggcuguuccggaaguccaaucugaagcccuucgagcgggacaucagcaccgaaaucuaucaggccggcagcaccccuugcaacggcguggaaggcuucaacugcuacuucccacugcaguccuacggcuuucagcccacaaauggcgugggcuaucagcccuacagagugguggugcugagcuucgaacugcugcaugcuccugccacagugugcggcccuaagaaaagcaccaaucucgugaagaacaaaugcgugaacuucaacuucaacggccugaccggcaccggcgugcugacagagagcaacaagaaguuccugccauuccagcaguuuggccgggauaucgccgauaccacagacgccguuagagauccccagacacuggaaauccuggacaucaccccaugcagcuucggcggagugucugugaucaccccuggcaccaacaccagcaaucagguggcagugcuguaccaggacgugaacuguaccgaagugcccguggccauucacgccgaucagcugacaccuacauggcggguguacuccaccggcagcaauguguuucagaccagagccggcugucugaucggagccgagcacgugaacaauagcuacgagugcgacauccccaucggcgcuggcaucugugccagcuaccagacacagacaaacagccccagacgggcuagaagcguggccagccagagcaucauugccuacacaaugucucugggcgccgagaacagcguggccuacuccaacaacucuugcgcuauccccaccaacuucaccaucagcgugaccaccgagauccugccuguguccaugaccaagaccagcguggacugcaccauguacaucugcggcgauuccaccgagugcuccaaccugcugcugcaguacggcagcuucugcacccagcugaauagagcccugacagggaucgccguggaacaggacaagaacacccaagagguguucgcccaagugaagcaaaucuacaagaccccuccuaucaaggacuucggcggcuucaauuucagccagauucugcccgauccuagcaagcccagcaagcggagcuucaucgaggaccugcuguucaacaaagugacacuggccgacgccggcuucaucaagcaguauggcgauugucugggcgacauugccgccagggaucugauuugcgcccagaaguuuaacggacugacagugcugccuccucugcugaccgaugagaugaucgcccaguacacaucugcccugcuggccggcacaaucacaagcggcuggacauuuggagcuggcgccgcucugcagauccccuuugcuaugcagauggccuaccgguucaacggcaucggagugacccagaaugugcuguacgagaaccagaagcugaucgccaaccaguucaacagcgccaucggcaagauccaggacagccugagcagcacagcaagcgcccugggaaagcugcaggacguggucaaccagaaugcccaggcacugaacacccuggucaagcagcuguccuccaacuucggcgccaucagcucugugcugaacgauauccugagcagacuggacaaggucgaggccgaggugcagaucgacagacugaucacaggcagacugcagagccuccagacauacgugacccagcagcugaucagagccgccgagauuagagccucugccaaucuggccgccaccaagaugucugagugugugcugggccagagcaagagaguggacuuuugcggcaagggcuaccaccugaugagcuucccucagucugccccucacggcgugguguuucugcacgugacauaugugcccgcucaagagaagaauuucaccugugcuccagccaucugccacgacggcaaagcccacuuuccuagagaaggcguguucguguccaacggcacccauugguucgugacacagcggaacuucuacgagccccagaucaucaccaccgacaacaccuucgugucuggcaacugcgacguugugaucggcauugugaacaauaccguguacgacccucugcagcccgagcuggacagcuucaaagaggaacuggacaaguacuuuaagaaccacacaagccccgacguggaccugggcgauaucagcggaaucaaugccagcgucgugaacauccagaaagagaucgaccggcugaacgagguggccaagaaucugaacgagagccugaucgaccugcaagaacuggggaaguacgagcaguacaucaaguggcccugguacaucuggcugggcuuuaucgccggacugauugccaucgugauggucacaaucaugcuguguugcaugaccagcugcuguagcugccugaagggcuguuguagcuguggcagcugcugcaaguucgacgaggacgauucugagcccgugcugaagggcgugaaacugcacuacaccugaggacuaguuauaagacugacuagcccgaugggccucccaacgggcccuccuccccuccuugcaccgagauuaauaaaaaaaaaaaaaaaaaaaaaaaaaaaaaaaaaaaaaaaaaaaaaaaaaaaaaaaaaaaaaaaaugcaucccccccccccccccccccccccccccccccaaaggcucuuuucagagccaccagaauu

SEQ ID NO: 13018 - RNA, 4039 nt, Artificial Sequence
  SARS-CoV-2/Wuhan/WIV05/2019__EPI_ISL_402128 spike protein mRNA gc mod (1-1273)(I714C_Y1110C)
aggagaaagcuuaccauguucguguuucuggugcugcugccccugguguccagccagugugugaaccugaccaccagaacacagcugccuccagccuacaccaacagcuucaccagaggcguguacuaccccgacaagguguucagauccagcgugcugcacucuacccaggaccuguuccugccuuucuucagcaacgugaccugguuccacgccauccacguguccggcaccaauggcaccaagagauucgacaaccccgugcugcccuucaacgacgggguguacuuugccagcaccgagaaguccaacaucaucagaggcuggaucuucggcaccacacuggacagcaagacccagagccugcugaucgugaacaacgccaccaacguggucaucaaagugugcgaguuccaguucugcaacgaccccuuccugggcgucuacuaccacaagaacaacaagagcuggauggaaagcgaguuccggguguacagcagcgccaacaacugcaccuucgaguacgugucccagccuuuccugauggaccuggaaggcaagcagggcaacuucaagaaccugcgcgaguucguguucaagaacaucgacggcuacuucaaaaucuacagcaagcacaccccuaucaaccucgugcgggaucugccucagggcuucucugcucuggaaccccugguggaucugcccaucggcaucaacaucacccgguuucagacacugcuggcccugcacagaagcuaccugacaccuggcgauagcagcagcggauggacagcuggugccgccgcuuacuaugugggcuaccugcagccuagaaccuuccugcugaaguacaacgagaacggcaccaucaccgacgccguggauugugcucuggauccucugagcgagacaaagugcacccugaaguccuucaccguggaaaagggcaucuaccagaccagcaacuuccgggugcagcccaccgaauccaucgugcgguuccccaauaucaccaaucugugccccuucggcgagguguucaaugccaccagauucgccucuguguacgccuggaaccggaagcggaucagcaauugcguggccgacuacuccgugcuguacaacuccgccagcuucagcaccuucaagugcuacggcguguccccuaccaagcugaacgaccugugcuucacaaacguguacgccgacagcuucgugauccggggagaugaagugcggcagauugccccuggacagacaggcaagaucgccgacuacaacuacaagcugcccgacgacuucaccggcugugugauugccuggaacagcaacaaccuggacuccaaagucggcggcaacuacaauuaccuguaccggcuguuccggaaguccaaucugaagcccuucgagcgggacaucagcaccgaaaucuaucaggccggcagcaccccuugcaacggcguggaaggcuucaacugcuacuucccacugcaguccuacggcuuucagcccacaaauggcgugggcuaucagcccuacagagugguggugcugagcuucgaacugcugcaugcuccugccacagugugcggcccuaagaaaagcaccaaucucgugaagaacaaaugcgugaacuucaacuucaacggccugaccggcaccggcgugcugacagagagcaacaagaaguuccugccauuccagcaguuuggccgggauaucgccgauaccacagacgccguuagagauccccagacacuggaaauccuggacaucaccccaugcagcuucggcggagugucugugaucaccccuggcaccaacaccagcaaucagguggcagugcuguaccaggacgugaacuguaccgaagugcccguggccauucacgccgaucagcugacaccuacauggcggguguacuccaccggcagcaauguguuucagaccagagccggcugucugaucggagccgagcacgugaacaauagcuacgagugcgacauccccaucggcgcuggcaucugugccagcuaccagacacagacaaacagccccagacgggcuagaagcguggccagccagagcaucauugccuacacaaugucucugggcgccgagaacagcguggccuacuccaacaacucuaucgcuugccccaccaacuucaccaucagcgugaccaccgagauccugccuguguccaugaccaagaccagcguggacugcaccauguacaucugcggcgauuccaccgagugcuccaaccugcugcugcaguacggcagcuucugcacccagcugaauagagcccugacagggaucgccguggaacaggacaagaacacccaagagguguucgcccaagugaagcaaaucuacaagaccccuccuaucaaggacuucggcggcuucaauuucagccagauucugcccgauccuagcaagcccagcaagcggagcuucaucgaggaccugcuguucaacaaagugacacuggccgacgccggcuucaucaagcaguauggcgauugucugggcgacauugccgccagggaucugauuugcgcccagaaguuuaacggacugacagugcugccuccucugcugaccgaugagaugaucgcccaguacacaucugcccugcuggccggcacaaucacaagcggcuggacauuuggagcuggcgccgcucugcagauccccuuugcuaugcagauggccuaccgguucaacggcaucggagugacccagaaugugcuguacgagaaccagaagcugaucgccaaccaguucaacagcgccaucggcaagauccaggacagccugagcagcacagcaagcgcccugggaaagcugcaggacguggucaaccagaaugcccaggcacugaacacccuggucaagcagcuguccuccaacuucggcgccaucagcucugugcugaacgauauccugagcagacuggacaaggucgaggccgaggugcagaucgacagacugaucacaggcagacugcagagccuccagacauacgugacccagcagcugaucagagccgccgagauuagagccucugccaaucuggccgccaccaagaugucugagugugugcugggccagagcaagagaguggacuuuugcggcaagggcuaccaccugaugagcuucccucagucugccccucacggcgugguguuucugcacgugacauaugugcccgcucaagagaagaauuucaccaccgcuccagccaucugccacgacggcaaagcccacuuuccuagagaaggcguguucguguccaacggcacccauugguucgugacacagcggaacuucugugagccccagaucaucaccaccgacaacaccuucgugucuggcaacugcgacguugugaucggcauugugaacaauaccguguacgacccucugcagcccgagcuggacagcuucaaagaggaacuggacaaguacuuuaagaaccacacaagccccgacguggaccugggcgauaucagcggaaucaaugccagcgucgugaacauccagaaagagaucgaccggcugaacgagguggccaagaaucugaacgagagccugaucgaccugcaagaacuggggaaguacgagcaguacaucaaguggcccugguacaucuggcugggcuuuaucgccggacugauugccaucgugauggucacaaucaugcuguguugcaugaccagcugcuguagcugccugaagggcuguuguagcuguggcagcugcugcaaguucgacgaggacgauucugagcccgugcugaagggcgugaaacugcacuacaccugaggacuaguuauaagacugacuagcccgaugggccucccaacgggcccuccuccccuccuugcaccgagauuaauaaaaaaaaaaaaaaaaaaaaaaaaaaaaaaaaaaaaaaaaaaaaaaaaaaaaaaaaaaaaaaaaugcaucccccccccccccccccccccccccccccccaaaggcucuuuucagagccaccagaauu

SEQ ID NO: 13019 - RNA, 4039 nt, Artificial Sequence
  SARS-CoV-2/Wuhan/WIV05/2019__EPI_ISL_402128 spike protein mRNA gc mod (1-1273)(P715C_P1069C)
aggagaaagcuuaccauguucguguuucuggugcugcugccccugguguccagccagugugugaaccugaccaccagaacacagcugccuccagccuacaccaacagcuucaccagaggcguguacuaccccgacaagguguucagauccagcgugcugcacucuacccaggaccuguuccugccuuucuucagcaacgugaccugguuccacgccauccacguguccggcaccaauggcaccaagagauucgacaaccccgugcugcccuucaacgacgggguguacuuugccagcaccgagaaguccaacaucaucagaggcuggaucuucggcaccacacuggacagcaagacccagagccugcugaucgugaacaacgccaccaacguggucaucaaagugugcgaguuccaguucugcaacgaccccuuccugggcgucuacuaccacaagaacaacaagagcuggauggaaagcgaguuccggguguacagcagcgccaacaacugcaccuucgaguacgugucccagccuuuccugauggaccuggaaggcaagcagggcaacuucaagaaccugcgcgaguucguguucaagaacaucgacggcuacuucaaaaucuacagcaagcacaccccuaucaaccucgugcgggaucugccucagggcuucucugcucuggaaccccugguggaucugcccaucggcaucaacaucacccgguuucagacacugcuggcccugcacagaagcuaccugacaccuggcgauagcagcagcggauggacagcuggugccgccgcuuacuaugugggcuaccugcagccuagaaccuuccugcugaaguacaacgagaacggcaccaucaccgacgccguggauugugcucuggauccucugagcgagacaaagugcacccugaaguccuucaccguggaaaagggcaucuaccagaccagcaacuuccgggugcagcccaccgaauccaucgugcgguuccccaauaucaccaaucugugccccuucggcgagguguucaaugccaccagauucgccucuguguacgccuggaaccggaagcggaucagcaauugcguggccgacuacuccgugcuguacaacuccgccagcuucagcaccuucaagugcuacggcguguccccuaccaagcugaacgaccugugcuucacaaacguguacgccgacagcuucgugauccggggagaugaagugcggcagauugccccuggacagacaggcaagaucgccgacuacaacuacaagcugcccgacgacuucaccggcugugugauugccuggaacagcaacaaccuggacuccaaagucggcggcaacuacaauuaccuguaccggcuguuccggaaguccaaucugaagcccuucgagcgggacaucagcaccgaaaucuaucaggccggcagcaccccuugcaacggcguggaaggcuucaacugcuacuucccacugcaguccuacggcuuucagcccacaaauggcgugggcuaucagcccuacagagugguggugcugagcuucgaacugcugcaugcuccugccacagugugcggcccuaagaaaagcaccaaucucgugaagaacaaaugcgugaacuucaacuucaacggccugaccggcaccggcgugcugacagagagcaacaagaaguuccugccauuccagcaguuuggccgggauaucgccgauaccacagacgccguuagagauccccagacacuggaaauccuggacaucaccccaugcagcuucggcggagugucugugaucaccccuggcaccaacaccagcaaucagguggcagugcuguaccaggacgugaacuguaccgaagugcccguggccauucacgccgaucagcugacaccuacauggcggguguacuccaccggcagcaauguguuucagaccagagccggcugucugaucggagccgagcacgugaacaauagcuacgagugcgacauccccaucggcgcuggcaucugugccagcuaccagacacagacaaacagccccagacgggcuagaagcguggccagccagagcaucauugccuacacaaugucucugggcgccgagaacagcguggccuacuccaacaacucuaucgcuaucugcaccaacuucaccaucagcgugaccaccgagauccugccuguguccaugaccaagaccagcguggacugcaccauguacaucugcggcgauuccaccgagugcuccaaccugcugcugcaguacggcagcuucugcacccagcugaauagagcccugacagggaucgccguggaacaggacaagaacacccaagagguguucgcccaagugaagcaaaucuacaagaccccuccuaucaaggacuucggcggcuucaauuucagccagauucugcccgauccuagcaagcccagcaagcggagcuucaucgaggaccugcuguucaacaaagugacacuggccgacgccggcuucaucaagcaguauggcgauugucugggcgacauugccgccagggaucugauuugcgcccagaaguuuaacggacugacagugcugccuccucugcugaccgaugagaugaucgcccaguacacaucugcccugcuggccggcacaaucacaagcggcuggacauuuggagcuggcgccgcucugcagauccccuuugcuaugcagauggccuaccgguucaacggcaucggagugacccagaaugugcuguacgagaaccagaagcugaucgccaaccaguucaacagcgccaucggcaagauccaggacagccugagcagcacagcaagcgcccugggaaagcugcaggacguggucaaccagaaugcccaggcacugaacacccuggucaagcagcuguccuccaacuucggcgccaucagcucugugcugaacgauauccugagcagacuggacaaggucgaggccgaggugcagaucgacagacugaucacaggcagacugcagagccuccagacauacgugacccagcagcugaucagagccgccgagauuagagccucugccaaucuggccgccaccaagaugucugagugugugcugggccagagcaagagaguggacuuuugcggcaagggcuaccaccugaugagcuucccucagucugccccucacggcgugguguuucugcacgugacauaugugugugcucaagagaagaauuucaccaccgcuccagccaucugccacgacggcaaagcccacuuuccuagagaaggcguguucguguccaacggcacccauugguucgugacacagcggaacuucuacgagccccagaucaucaccaccgacaacaccuucgugucuggcaacugcgacguugugaucggcauugugaacaauaccguguacgacccucugcagcccgagcuggacagcuucaaagaggaacuggacaaguacuuuaagaaccacacaagccccgacguggaccugggcgauaucagcggaaucaaugccagcgucgugaacauccagaaagagaucgaccggcugaacgagguggccaagaaucugaacgagagccugaucgaccugcaagaacuggggaaguacgagcaguacaucaaguggcccugguacaucuggcugggcuuuaucgccggacugauugccaucgugauggucacaaucaugcuguguugcaugaccagcugcuguagcugccugaagggcuguuguagcuguggcagcugcugcaaguucgacgaggacgauucugagcccgugcugaagggcgugaaacugcacuacaccugaggacuaguuauaagacugacuagcccgaugggccucccaacgggcccuccuccccuccuugcaccgagauuaauaaaaaaaaaaaaaaaaaaaaaaaaaaaaaaaaaaaaaaaaaaaaaaaaaaaaaaaaaaaaaaaaugcaucccccccccccccccccccccccccccccccaaaggcucuuuucagagccaccagaauu

SEQ ID NO: 13020 - RNA, 4039 nt, Artificial Sequence
  SARS-CoV-2/Wuhan/WIV05/2019__EPI_ISL_402128 spike protein mRNA gc mod (1-1273)(G889C_L1034C)
aggagaaagcuuaccauguucguguuucuggugcugcugccccugguguccagccagugugugaaccugaccaccagaacacagcugccuccagccuacaccaacagcuucaccagaggcguguacuaccccgacaagguguucagauccagcgugcugcacucuacccaggaccuguuccugccuuucuucagcaacgugaccugguuccacgccauccacguguccggcaccaauggcaccaagagauucgacaaccccgugcugcccuucaacgacgggguguacuuugccagcaccgagaaguccaacaucaucagaggcuggaucuucggcaccacacuggacagcaagacccagagccugcugaucgugaacaacgccaccaacguggucaucaaagugugcgaguuccaguucugcaacgaccccuuccugggcgucuacuaccacaagaacaacaagagcuggauggaaagcgaguuccggguguacagcagcgccaacaacugcaccuucgaguacgugucccagccuuuccugauggaccuggaaggcaagcagggcaacuucaagaaccugcgcgaguucguguucaagaacaucgacggcuacuucaaaaucuacagcaagcacaccccuaucaaccucgugcgggaucugccucagggcuucucugcucuggaaccccugguggaucugcccaucggcaucaacaucacccgguuucagacacugcuggcccugcacagaagcuaccugacaccuggcgauagcagcagcggauggacagcuggugccgccgcuuacuaugugggcuaccugcagccuagaaccuuccugcugaaguacaacgagaacggcaccaucaccgacgccguggauugugcucuggauccucugagcgagacaaagugcacccugaaguccuucaccguggaaaagggcaucuaccagaccagcaacuuccgggugcagcccaccgaauccaucgugcgguuccccaauaucaccaaucugugccccuucggcgagguguucaaugccaccagauucgccucuguguacgccuggaaccggaagcggaucagcaauugcguggccgacuacuccgugcuguacaacuccgccagcuucagcaccuucaagugcuacggcguguccccuaccaagcugaacgaccugugcuucacaaacguguacgccgacagcuucgugauccggggagaugaagugcggcagauugccccuggacagacaggcaagaucgccgacuacaacuacaagcugcccgacgacuucaccggcugugugauugccuggaacagcaacaaccuggacuccaaagucggcggcaacuacaauuaccuguaccggcuguuccggaaguccaaucugaagcccuucgagcgggacaucagcaccgaaaucuaucaggccggcagcaccccuugcaacggcguggaaggcuucaacugcuacuucccacugcaguccuacggcuuucagcccacaaauggcgugggcuaucagcccuacagagugguggugcugagcuucgaacugcugcaugcuccugccacagugugcggcccuaagaaaagcaccaaucucgugaagaacaaaugcgugaacuucaacuucaacggccugaccggcaccggcgugcugacagagagcaacaagaaguuccugccauuccagcaguuuggccgggauaucgccgauaccacagacgccguuagagauccccagacacuggaaauccuggacaucaccccaugcagcuucggcggagugucugugaucaccccuggcaccaacaccagcaaucagguggcagugcuguaccaggacgugaacuguaccgaagugcccguggccauucacgccgaucagcugacaccuacauggcggguguacuccaccggcagcaauguguuucagaccagagccggcugucugaucggagccgagcacgugaacaauagcuacgagugcgacauccccaucggcgcuggcaucugugccagcuaccagacacagacaaacagccccagacgggcuagaagcguggccagccagagcaucauugccuacacaaugucucugggcgccgagaacagcguggccuacuccaacaacucuaucgcuauccccaccaacuucaccaucagcgugaccaccgagauccugccuguguccaugaccaagaccagcguggacugcaccauguacaucugcggcgauuccaccgagugcuccaaccugcugcugcaguacggcagcuucugcacccagcugaauagagcccugacagggaucgccguggaacaggacaagaacacccaagagguguucgcccaagugaagcaaaucuacaagaccccuccuaucaaggacuucggcggcuucaauuucagccagauucugcccgauccuagcaagcccagcaagcggagcuucaucgaggaccugcuguucaacaaagugacacuggccgacgccggcuucaucaagcaguauggcgauugucugggcgacauugccgccagggaucugauuugcgcccagaaguuuaacggacugacagugcugccuccucugcugaccgaugagaugaucgcccaguacacaucugcccugcuggccggcacaaucacaagcggcuggacauuuugcgcuggcgccgcucugcagauccccuuugcuaugcagauggccuaccgguucaacggcaucggagugacccagaaugugcuguacgagaaccagaagcugaucgccaaccaguucaacagcgccaucggcaagauccaggacagccugagcagcacagcaagcgcccugggaaagcugcaggacguggucaaccagaaugcccaggcacugaacacccuggucaagcagcuguccuccaacuucggcgccaucagcucugugcugaacgauauccugagcagacuggacaaggucgaggccgaggugcagaucgacagacugaucacaggcagacugcagagccuccagacauacgugacccagcagcugaucagagccgccgagauuagagccucugccaaucuggccgccaccaagaugucugaguguguguguggccagagcaagagaguggacuuuugcggcaagggcuaccaccugaugagcuucccucagucugccccucacggcgugguguuucugcacgugacauaugugcccgcucaagagaagaauuucaccaccgcuccagccaucugccacgacggcaaagcccacuuuccuagagaaggcguguucguguccaacggcacccauugguucgugacacagcggaacuucuacgagccccagaucaucaccaccgacaacaccuucgugucuggcaacugcgacguugugaucggcauugugaacaauaccguguacgacccucugcagcccgagcuggacagcuucaaagaggaacuggacaaguacuuuaagaaccacacaagccccgacguggaccugggcgauaucagcggaaucaaugccagcgucgugaacauccagaaagagaucgaccggcugaacgagguggccaagaaucugaacgagagccugaucgaccugcaagaacuggggaaguacgagcaguacaucaaguggcccugguacaucuggcugggcuuuaucgccggacugauugccaucgugauggucacaaucaugcuguguugcaugaccagcugcuguagcugccugaagggcuguuguagcuguggcagcugcugcaaguucgacgaggacgauucugagcccgugcugaagggcgugaaacugcacuacaccugaggacuaguuauaagacugacuagcccgaugggccucccaacgggcccuccuccccuccuugcaccgagauuaauaaaaaaaaaaaaaaaaaaaaaaaaaaaaaaaaaaaaaaaaaaaaaaaaaaaaaaaaaaaaaaaaugcaucccccccccccccccccccccccccccccccaaaggcucuuuucagagccaccagaauu

SEQ ID NO: 13021 - RNA, 4039 nt, Artificial Sequence
  SARS-CoV-2/Wuhan/WIV05/2019__EPI_ISL_402128 spike protein mRNA gc mod (1-1273)(I909C_Y1047C)
aggagaaagcuuaccauguucguguuucuggugcugcugccccugguguccagccagugugugaaccugaccaccagaacacagcugccuccagccuacaccaacagcuucaccagaggcguguacuaccccgacaagguguucagauccagcgugcugcacucuacccaggaccuguuccugccuuucuucagcaacgugaccugguuccacgccauccacguguccggcaccaauggcaccaagagauucgacaaccccgugcugcccuucaacgacgggguguacuuugccagcaccgagaaguccaacaucaucagaggcuggaucuucggcaccacacuggacagcaagacccagagccugcugaucgugaacaacgccaccaacguggucaucaaagugugcgaguuccaguucugcaacgaccccuuccugggcgucuacuaccacaagaacaacaagagcuggauggaaagcgaguuccggguguacagcagcgccaacaacugcaccuucgaguacgugucccagccuuuccugauggaccuggaaggcaagcagggcaacuucaagaaccugcgcgaguucguguucaagaacaucgacggcuacuucaaaaucuacagcaagcacaccccuaucaaccucgugcgggaucugccucagggcuucucugcucuggaaccccugguggaucugcccaucggcaucaacaucacccgguuucagacacugcuggcccugcacagaagcuaccugacaccuggcgauagcagcagcggauggacagcuggugccgccgcuuacuaugugggcuaccugcagccuagaaccuuccugcugaaguacaacgagaacggcaccaucaccgacgccguggauugugcucuggauccucugagcgagacaaagugcacccugaaguccuucaccguggaaaagggcaucuaccagaccagcaacuuccgggugcagcccaccgaauccaucgugcgguuccccaauaucaccaaucugugccccuucggcgagguguucaaugccaccagauucgccucuguguacgccuggaaccggaagcggaucagcaauugcguggccgacuacuccgugcuguacaacuccgccagcuucagcaccuucaagugcuacggcguguccccuaccaagcugaacgaccugugcuucacaaacguguacgccgacagcuucgugauccggggagaugaagugcggcagauugccccuggacagacaggcaagaucgccgacuacaacuacaagcugcccgacgacuucaccggcugugugauugccuggaacagcaacaaccuggacuccaaagucggcggcaacuacaauuaccuguaccggcuguuccggaaguccaaucugaagcccuucgagcgggacaucagcaccgaaaucuaucaggccggcagcaccccuugcaacggcguggaaggcuucaacugcuacuucccacugcaguccuacggcuuucagcccacaaauggcgugggcuaucagcccuacagagugguggugcugagcuucgaacugcugcaugcuccugccacagugugcggcccuaagaaaagcaccaaucucgugaagaacaaaugcgugaacuucaacuucaacggccugaccggcaccggcgugcugacagagagcaacaagaaguuccugccauuccagcaguuuggccgggauaucgccgauaccacagacgccguuagagauccccagacacuggaaauccuggacaucaccccaugcagcuucggcggagugucugugaucaccccuggcaccaacaccagcaaucagguggcagugcuguaccaggacgugaacuguaccgaagugcccguggccauucacgccgaucagcugacaccuacauggcggguguacuccaccggcagcaauguguuucagaccagagccggcugucugaucggagccgagcacgugaacaauagcuacgagugcgacauccccaucggcgcuggcaucugugccagcuaccagacacagacaaacagccccagacgggcuagaagcguggccagccagagcaucauugccuacacaaugucucugggcgccgagaacagcguggccuacuccaacaacucuaucgcuauccccaccaacuucaccaucagcgugaccaccgagauccugccuguguccaugaccaagaccagcguggacugcaccauguacaucugcggcgauuccaccgagugcuccaaccugcugcugcaguacggcagcuucugcacccagcugaauagagcccugacagggaucgccguggaacaggacaagaacacccaagagguguucgcccaagugaagcaaaucuacaagaccccuccuaucaaggacuucggcggcuucaauuucagccagauucugcccgauccuagcaagcccagcaagcggagcuucaucgaggaccugcuguucaacaaagugacacuggccgacgccggcuucaucaagcaguauggcgauugucugggcgacauugccgccagggaucugauuugcgcccagaaguuuaacggacugacagugcugccuccucugcugaccgaugagaugaucgcccaguacacaucugcccugcuggccggcacaaucacaagcggcuggacauuuggagcuggcgccgcucugcagauccccuuugcuaugcagauggccuaccgguucaacggcugcggagugacccagaaugugcuguacgagaaccagaagcugaucgccaaccaguucaacagcgccaucggcaagauccaggacagccugagcagcacagcaagcgcccugggaaagcugcaggacguggucaaccagaaugcccaggcacugaacacccuggucaagcagcuguccuccaacuucggcgccaucagcucugugcugaacgauauccugagcagacuggacaaggucgaggccgaggugcagaucgacagacugaucacaggcagacugcagagccuccagacauacgugacccagcagcugaucagagccgccgagauuagagccucugccaaucuggccgccaccaagaugucugagugugugcugggccagagcaagagaguggacuuuugcggcaagggcugucaccugaugagcuucccucagucugccccucacggcgugguguuucugcacgugacauaugugcccgcucaagagaagaauuucaccaccgcuccagccaucugccacgacggcaaagcccacuuuccuagagaaggcguguucguguccaacggcacccauugguucgugacacagcggaacuucuacgagccccagaucaucaccaccgacaacaccuucgugucuggcaacugcgacguugugaucggcauugugaacaauaccguguacgacccucugcagcccgagcuggacagcuucaaagaggaacuggacaaguacuuuaagaaccacacaagccccgacguggaccugggcgauaucagcggaaucaaugccagcgucgugaacauccagaaagagaucgaccggcugaacgagguggccaagaaucugaacgagagccugaucgaccugcaagaacuggggaaguacgagcaguacaucaaguggcccugguacaucuggcugggcuuuaucgccggacugauugccaucgugauggucacaaucaugcuguguugcaugaccagcugcuguagcugccugaagggcuguuguagcuguggcagcugcugcaaguucgacgaggacgauucugagcccgugcugaagggcgugaaacugcacuacaccugaggacuaguuauaagacugacuagcccgaugggccucccaacgggcccuccuccccuccuugcaccgagauuaauaaaaaaaaaaaaaaaaaaaaaaaaaaaaaaaaaaaaaaaaaaaaaaaaaaaaaaaaaaaaaaaaugcaucccccccccccccccccccccccccccccccaaaggcucuuuucagagccaccagaauu

SEQ ID NO: 13022 - RNA, 4039 nt, Artificial Sequence
  SARS-CoV-2/Wuhan/WIV05/2019__EPI_ISL_402128 spike protein mRNA gc mod (1-1273)(Q965C_S1003C)
aggagaaagcuuaccauguucguguuucuggugcugcugccccugguguccagccagugugugaaccugaccaccagaacacagcugccuccagccuacaccaacagcuucaccagaggcguguacuaccccgacaagguguucagauccagcgugcugcacucuacccaggaccuguuccugccuuucuucagcaacgugaccugguuccacgccauccacguguccggcaccaauggcaccaagagauucgacaaccccgugcugcccuucaacgacgggguguacuuugccagcaccgagaaguccaacaucaucagaggcuggaucuucggcaccacacuggacagcaagacccagagccugcugaucgugaacaacgccaccaacguggucaucaaagugugcgaguuccaguucugcaacgaccccuuccugggcgucuacuaccacaagaacaacaagagcuggauggaaagcgaguuccggguguacagcagcgccaacaacugcaccuucgaguacgugucccagccuuuccugauggaccuggaaggcaagcagggcaacuucaagaaccugcgcgaguucguguucaagaacaucgacggcuacuucaaaaucuacagcaagcacaccccuaucaaccucgugcgggaucugccucagggcuucucugcucuggaaccccugguggaucugcccaucggcaucaacaucacccgguuucagacacugcuggcccugcacagaagcuaccugacaccuggcgauagcagcagcggauggacagcuggugccgccgcuuacuaugugggcuaccugcagccuagaaccuuccugcugaaguacaacgagaacggcaccaucaccgacgccguggauugugcucuggauccucugagcgagacaaagugcacccugaaguccuucaccguggaaaagggcaucuaccagaccagcaacuuccgggugcagcccaccgaauccaucgugcgguuccccaauaucaccaaucugugccccuucggcgagguguucaaugccaccagauucgccucuguguacgccuggaaccggaagcggaucagcaauugcguggccgacuacuccgugcuguacaacuccgccagcuucagcaccuucaagugcuacggcguguccccuaccaagcugaacgaccugugcuucacaaacguguacgccgacagcuucgugauccggggagaugaagugcggcagauugccccuggacagacaggcaagaucgccgacuacaacuacaagcugcccgacgacuucaccggcugugugauugccuggaacagcaacaaccuggacuccaaagucggcggcaacuacaauuaccuguaccggcuguuccggaaguccaaucugaagcccuucgagcgggacaucagcaccgaaaucuaucaggccggcagcaccccuugcaacggcguggaaggcuucaacugcuacuucccacugcaguccuacggcuuucagcccacaaauggcgugggcuaucagcccuacagagugguggugcugagcuucgaacugcugcaugcuccugccacagugugcggcccuaagaaaagcaccaaucucgugaagaacaaaugcgugaacuucaacuucaacggccugaccggcaccggcgugcugacagagagcaacaagaaguuccugccauuccagcaguuuggccgggauaucgccgauaccacagacgccguuagagauccccagacacuggaaauccuggacaucaccccaugcagcuucggcggagugucugugaucaccccuggcaccaacaccagcaaucagguggcagugcuguaccaggacgugaacuguaccgaagugcccguggccauucacgccgaucagcugacaccuacauggcggguguacuccaccggcagcaauguguuucagaccagagccggcugucugaucggagccgagcacgugaacaauagcuacgagugcgacauccccaucggcgcuggcaucugugccagcuaccagacacagacaaacagccccagacgggcuagaagcguggccagccagagcaucauugccuacacaaugucucugggcgccgagaacagcguggccuacuccaacaacucuaucgcuauccccaccaacuucaccaucagcgugaccaccgagauccugccuguguccaugaccaagaccagcguggacugcaccauguacaucugcggcgauuccaccgagugcuccaaccugcugcugcaguacggcagcuucugcacccagcugaauagagcccugacagggaucgccguggaacaggacaagaacacccaagagguguucgcccaagugaagcaaaucuacaagaccccuccuaucaaggacuucggcggcuucaauuucagccagauucugcccgauccuagcaagcccagcaagcggagcuucaucgaggaccugcuguucaacaaagugacacuggccgacgccggcuucaucaagcaguauggcgauugucugggcgacauugccgccagggaucugauuugcgcccagaaguuuaacggacugacagugcugccuccucugcugaccgaugagaugaucgcccaguacacaucugcccugcuggccggcacaaucacaagcggcuggacauuuggagcuggcgccgcucugcagauccccuuugcuaugcagauggccuaccgguucaacggcaucggagugacccagaaugugcuguacgagaaccagaagcugaucgccaaccaguucaacagcgccaucggcaagauccaggacagccugagcagcacagcaagcgcccugggaaagcugcaggacguggucaaccagaaugcccaggcacugaacacccuggucaagugccuguccuccaacuucggcgccaucagcucugugcugaacgauauccugagcagacuggacaaggucgaggccgaggugcagaucgacagacugaucacaggcagacugcagugucuccagacauacgugacccagcagcugaucagagccgccgagauuagagccucugccaaucuggccgccaccaagaugucugagugugugcugggccagagcaagagaguggacuuuugcggcaagggcuaccaccugaugagcuucccucagucugccccucacggcgugguguuucugcacgugacauaugugcccgcucaagagaagaauuucaccaccgcuccagccaucugccacgacggcaaagcccacuuuccuagagaaggcguguucguguccaacggcacccauugguucgugacacagcggaacuucuacgagccccagaucaucaccaccgacaacaccuucgugucuggcaacugcgacguugugaucggcauugugaacaauaccguguacgacccucugcagcccgagcuggacagcuucaaagaggaacuggacaaguacuuuaagaaccacacaagccccgacguggaccugggcgauaucagcggaaucaaugccagcgucgugaacauccagaaagagaucgaccggcugaacgagguggccaagaaucugaacgagagccugaucgaccugcaagaacuggggaaguacgagcaguacaucaaguggcccugguacaucuggcugggcuuuaucgccggacugauugccaucgugauggucacaaucaugcuguguugcaugaccagcugcuguagcugccugaagggcuguuguagcuguggcagcugcugcaaguucgacgaggacgauucugagcccgugcugaagggcgugaaacugcacuacaccugaggacuaguuauaagacugacuagcccgaugggccucccaacgggcccuccuccccuccuugcaccgagauuaauaaaaaaaaaaaaaaaaaaaaaaaaaaaaaaaaaaaaaaaaaaaaaaaaaaaaaaaaaaaaaaaaugcaucccccccccccccccccccccccccccccccaaaggcucuuuucagagccaccagaauu

SEQ ID NO: 13023 - RNA, 4039 nt, Artificial Sequence
  SARS-CoV-2/Wuhan/WIV05/2019__EPI_ISL_402128 spike protein mRNA gc mod (1-1273)(F970C_G999C)
aggagaaagcuuaccauguucguguuucuggugcugcugccccugguguccagccagugugugaaccugaccaccagaacacagcugccuccagccuacaccaacagcuucaccagaggcguguacuaccccgacaagguguucagauccagcgugcugcacucuacccaggaccuguuccugccuuucuucagcaacgugaccugguuccacgccauccacguguccggcaccaauggcaccaagagauucgacaaccccgugcugcccuucaacgacgggguguacuuugccagcaccgagaaguccaacaucaucagaggcuggaucuucggcaccacacuggacagcaagacccagagccugcugaucgugaacaacgccaccaacguggucaucaaagugugcgaguuccaguucugcaacgaccccuuccugggcgucuacuaccacaagaacaacaagagcuggauggaaagcgaguuccggguguacagcagcgccaacaacugcaccuucgaguacgugucccagccuuuccugauggaccuggaaggcaagcagggcaacuucaagaaccugcgcgaguucguguucaagaacaucgacggcuacuucaaaaucuacagcaagcacaccccuaucaaccucgugcgggaucugccucagggcuucucugcucuggaaccccugguggaucugcccaucggcaucaacaucacccgguuucagacacugcuggcccugcacagaagcuaccugacaccuggcgauagcagcagcggauggacagcuggugccgccgcuuacuaugugggcuaccugcagccuagaaccuuccugcugaaguacaacgagaacggcaccaucaccgacgccguggauugugcucuggauccucugagcgagacaaagugcacccugaaguccuucaccguggaaaagggcaucuaccagaccagcaacuuccgggugcagcccaccgaauccaucgugcgguuccccaauaucaccaaucugugccccuucggcgagguguucaaugccaccagauucgccucuguguacgccuggaaccggaagcggaucagcaauugcguggccgacuacuccgugcuguacaacuccgccagcuucagcaccuucaagugcuacggcguguccccuaccaagcugaacgaccugugcuucacaaacguguacgccgacagcuucgugauccggggagaugaagugcggcagauugccccuggacagacaggcaagaucgccgacuacaacuacaagcugcccgacgacuucaccggcugugugauugccuggaacagcaacaaccuggacuccaaagucggcggcaacuacaauuaccuguaccggcuguuccggaaguccaaucugaagcccuucgagcgggacaucagcaccgaaaucuaucaggccggcagcaccccuugcaacggcguggaaggcuucaacugcuacuucccacugcaguccuacggcuuucagcccacaaauggcgugggcuaucagcccuacagagugguggugcugagcuucgaacugcugcaugcuccugccacagugugcggcccuaagaaaagcaccaaucucgugaagaacaaaugcgugaacuucaacuucaacggccugaccggcaccggcgugcugacagagagcaacaagaaguuccugccauuccagcaguuuggccgggauaucgccgauaccacagacgccguuagagauccccagacacuggaaauccuggacaucaccccaugcagcuucggcggagugucugugaucaccccuggcaccaacaccagcaaucagguggcagugcuguaccaggacgugaacuguaccgaagugcccguggccauucacgccgaucagcugacaccuacauggcggguguacuccaccggcagcaauguguuucagaccagagccggcugucugaucggagccgagcacgugaacaauagcuacgagugcgacauccccaucggcgcuggcaucugugccagcuaccagacacagacaaacagccccagacgggcuagaagcguggccagccagagcaucauugccuacacaaugucucugggcgccgagaacagcguggccuacuccaacaacucuaucgcuauccccaccaacuucaccaucagcgugaccaccgagauccugccuguguccaugaccaagaccagcguggacugcaccauguacaucugcggcgauuccaccgagugcuccaaccugcugcugcaguacggcagcuucugcacccagcugaauagagcccugacagggaucgccguggaacaggacaagaacacccaagagguguucgcccaagugaagcaaaucuacaagaccccuccuaucaaggacuucggcggcuucaauuucagccagauucugcccgauccuagcaagcccagcaagcggagcuucaucgaggaccugcuguucaacaaagugacacuggccgacgccggcuucaucaagcaguauggcgauugucugggcgacauugccgccagggaucugauuugcgcccagaaguuuaacggacugacagugcugccuccucugcugaccgaugagaugaucgcccaguacacaucugcccugcuggccggcacaaucacaagcggcuggacauuuggagcuggcgccgcucugcagauccccuuugcuaugcagauggccuaccgguucaacggcaucggagugacccagaaugugcuguacgagaaccagaagcugaucgccaaccaguucaacagcgccaucggcaagauccaggacagccugagcagcacagcaagcgcccugggaaagcugcaggacguggucaaccagaaugcccaggcacugaacacccuggucaagcagcuguccuccaacugcggcgccaucagcucugugcugaacgauauccugagcagacuggacaaggucgaggccgaggugcagaucgacagacugaucacauguagacugcagagccuccagacauacgugacccagcagcugaucagagccgccgagauuagagccucugccaaucuggccgccaccaagaugucugagugugugcugggccagagcaagagaguggacuuuugcggcaagggcuaccaccugaugagcuucccucagucugccccucacggcgugguguuucugcacgugacauaugugcccgcucaagagaagaauuucaccaccgcuccagccaucugccacgacggcaaagcccacuuuccuagagaaggcguguucguguccaacggcacccauugguucgugacacagcggaacuucuacgagccccagaucaucaccaccgacaacaccuucgugucuggcaacugcgacguugugaucggcauugugaacaauaccguguacgacccucugcagcccgagcuggacagcuucaaagaggaacuggacaaguacuuuaagaaccacacaagccccgacguggaccugggcgauaucagcggaaucaaugccagcgucgugaacauccagaaagagaucgaccggcugaacgagguggccaagaaucugaacgagagccugaucgaccugcaagaacuggggaaguacgagcaguacaucaaguggcccugguacaucuggcugggcuuuaucgccggacugauugccaucgugauggucacaaucaugcuguguugcaugaccagcugcuguagcugccugaagggcuguuguagcuguggcagcugcugcaaguucgacgaggacgauucugagcccgugcugaagggcgugaaacugcacuacaccugaggacuaguuauaagacugacuagcccgaugggccucccaacgggcccuccuccccuccuugcaccgagauuaauaaaaaaaaaaaaaaaaaaaaaaaaaaaaaaaaaaaaaaaaaaaaaaaaaaaaaaaaaaaaaaaaugcaucccccccccccccccccccccccccccccccaaaggcucuuuucagagccaccagaauu

SEQ ID NO: 13024 - RNA, 4039 nt, Artificial Sequence
  SARS-CoV-2/Wuhan/WIV05/2019__EPI_ISL_402128 spike protein mRNA gc mod (1-1273)(A972C_R995C)
aggagaaagcuuaccauguucguguuucuggugcugcugccccugguguccagccagugugugaaccugaccaccagaacacagcugccuccagccuacaccaacagcuucaccagaggcguguacuaccccgacaagguguucagauccagcgugcugcacucuacccaggaccuguuccugccuuucuucagcaacgugaccugguuccacgccauccacguguccggcaccaauggcaccaagagauucgacaaccccgugcugcccuucaacgacgggguguacuuugccagcaccgagaaguccaacaucaucagaggcuggaucuucggcaccacacuggacagcaagacccagagccugcugaucgugaacaacgccaccaacguggucaucaaagugugcgaguuccaguucugcaacgaccccuuccugggcgucuacuaccacaagaacaacaagagcuggauggaaagcgaguuccggguguacagcagcgccaacaacugcaccuucgaguacgugucccagccuuuccugauggaccuggaaggcaagcagggcaacuucaagaaccugcgcgaguucguguucaagaacaucgacggcuacuucaaaaucuacagcaagcacaccccuaucaaccucgugcgggaucugccucagggcuucucugcucuggaaccccugguggaucugcccaucggcaucaacaucacccgguuucagacacugcuggcccugcacagaagcuaccugacaccuggcgauagcagcagcggauggacagcuggugccgccgcuuacuaugugggcuaccugcagccuagaaccuuccugcugaaguacaacgagaacggcaccaucaccgacgccguggauugugcucuggauccucugagcgagacaaagugcacccugaaguccuucaccguggaaaagggcaucuaccagaccagcaacuuccgggugcagcccaccgaauccaucgugcgguuccccaauaucaccaaucugugccccuucggcgagguguucaaugccaccagauucgccucuguguacgccuggaaccggaagcggaucagcaauugcguggccgacuacuccgugcuguacaacuccgccagcuucagcaccuucaagugcuacggcguguccccuaccaagcugaacgaccugugcuucacaaacguguacgccgacagcuucgugauccggggagaugaagugcggcagauugccccuggacagacaggcaagaucgccgacuacaacuacaagcugcccgacgacuucaccggcugugugauugccuggaacagcaacaaccuggacuccaaagucggcggcaacuacaauuaccuguaccggcuguuccggaaguccaaucugaagcccuucgagcgggacaucagcaccgaaaucuaucaggccggcagcaccccuugcaacggcguggaaggcuucaacugcuacuucccacugcaguccuacggcuuucagcccacaaauggcgugggcuaucagcccuacagagugguggugcugagcuucgaacugcugcaugcuccugccacagugugcggcccuaagaaaagcaccaaucucgugaagaacaaaugcgugaacuucaacuucaacggccugaccggcaccggcgugcugacagagagcaacaagaaguuccugccauuccagcaguuuggccgggauaucgccgauaccacagacgccguuagagauccccagacacuggaaauccuggacaucaccccaugcagcuucggcggagugucugugaucaccccuggcaccaacaccagcaaucagguggcagugcuguaccaggacgugaacuguaccgaagugcccguggccauucacgccgaucagcugacaccuacauggcggguguacuccaccggcagcaauguguuucagaccagagccggcugucugaucggagccgagcacgugaacaauagcuacgagugcgacauccccaucggcgcuggcaucugugccagcuaccagacacagacaaacagccccagacgggcuagaagcguggccagccagagcaucauugccuacacaaugucucugggcgccgagaacagcguggccuacuccaacaacucuaucgcuauccccaccaacuucaccaucagcgugaccaccgagauccugccuguguccaugaccaagaccagcguggacugcaccauguacaucugcggcgauuccaccgagugcuccaaccugcugcugcaguacggcagcuucugcacccagcugaauagagcccugacagggaucgccguggaacaggacaagaacacccaagagguguucgcccaagugaagcaaaucuacaagaccccuccuaucaaggacuucggcggcuucaauuucagccagauucugcccgauccuagcaagcccagcaagcggagcuucaucgaggaccugcuguucaacaaagugacacuggccgacgccggcuucaucaagcaguauggcgauugucugggcgacauugccgccagggaucugauuugcgcccagaaguuuaacggacugacagugcugccuccucugcugaccgaugagaugaucgcccaguacacaucugcccugcuggccggcacaaucacaagcggcuggacauuuggagcuggcgccgcucugcagauccccuuugcuaugcagauggccuaccgguucaacggcaucggagugacccagaaugugcuguacgagaaccagaagcugaucgccaaccaguucaacagcgccaucggcaagauccaggacagccugagcagcacagcaagcgcccugggaaagcugcaggacguggucaaccagaaugcccaggcacugaacacccuggucaagcagcuguccuccaacuucggcugcaucagcucugugcugaacgauauccugagcagacuggacaaggucgaggccgaggugcagaucgacugucugaucacaggcagacugcagagccuccagacauacgugacccagcagcugaucagagccgccgagauuagagccucugccaaucuggccgccaccaagaugucugagugugugcugggccagagcaagagaguggacuuuugcggcaagggcuaccaccugaugagcuucccucagucugccccucacggcgugguguuucugcacgugacauaugugcccgcucaagagaagaauuucaccaccgcuccagccaucugccacgacggcaaagcccacuuuccuagagaaggcguguucguguccaacggcacccauugguucgugacacagcggaacuucuacgagccccagaucaucaccaccgacaacaccuucgugucuggcaacugcgacguugugaucggcauugugaacaauaccguguacgacccucugcagcccgagcuggacagcuucaaagaggaacuggacaaguacuuuaagaaccacacaagccccgacguggaccugggcgauaucagcggaaucaaugccagcgucgugaacauccagaaagagaucgaccggcugaacgagguggccaagaaucugaacgagagccugaucgaccugcaagaacuggggaaguacgagcaguacaucaaguggcccugguacaucuggcugggcuuuaucgccggacugauugccaucgugauggucacaaucaugcuguguugcaugaccagcugcuguagcugccugaagggcuguuguagcuguggcagcugcugcaaguucgacgaggacgauucugagcccgugcugaagggcgugaaacugcacuacaccugaggacuaguuauaagacugacuagcccgaugggccucccaacgggcccuccuccccuccuugcaccgagauuaauaaaaaaaaaaaaaaaaaaaaaaaaaaaaaaaaaaaaaaaaaaaaaaaaaaaaaaaaaaaaaaaaugcaucccccccccccccccccccccccccccccccaaaggcucuuuucagagccaccagaauu

SEQ ID NO: 13025 - RNA, 4039 nt, Artificial Sequence
  SARS-CoV-2/Wuhan/WIV05/2019__EPI_ISL_402128 spike protein mRNA gc mod (1-1273)(A890C_V1040C)
aggagaaagcuuaccauguucguguuucuggugcugcugccccugguguccagccagugugugaaccugaccaccagaacacagcugccuccagccuacaccaacagcuucaccagaggcguguacuaccccgacaagguguucagauccagcgugcugcacucuacccaggaccuguuccugccuuucuucagcaacgugaccugguuccacgccauccacguguccggcaccaauggcaccaagagauucgacaaccccgugcugcccuucaacgacgggguguacuuugccagcaccgagaaguccaacaucaucagaggcuggaucuucggcaccacacuggacagcaagacccagagccugcugaucgugaacaacgccaccaacguggucaucaaagugugcgaguuccaguucugcaacgaccccuuccugggcgucuacuaccacaagaacaacaagagcuggauggaaagcgaguuccggguguacagcagcgccaacaacugcaccuucgaguacgugucccagccuuuccugauggaccuggaaggcaagcagggcaacuucaagaaccugcgcgaguucguguucaagaacaucgacggcuacuucaaaaucuacagcaagcacaccccuaucaaccucgugcgggaucugccucagggcuucucugcucuggaaccccugguggaucugcccaucggcaucaacaucacccgguuucagacacugcuggcccugcacagaagcuaccugacaccuggcgauagcagcagcggauggacagcuggugccgccgcuuacuaugugggcuaccugcagccuagaaccuuccugcugaaguacaacgagaacggcaccaucaccgacgccguggauugugcucuggauccucugagcgagacaaagugcacccugaaguccuucaccguggaaaagggcaucuaccagaccagcaacuuccgggugcagcccaccgaauccaucgugcgguuccccaauaucaccaaucugugccccuucggcgagguguucaaugccaccagauucgccucuguguacgccuggaaccggaagcggaucagcaauugcguggccgacuacuccgugcuguacaacuccgccagcuucagcaccuucaagugcuacggcguguccccuaccaagcugaacgaccugugcuucacaaacguguacgccgacagcuucgugauccggggagaugaagugcggcagauugccccuggacagacaggcaagaucgccgacuacaacuacaagcugcccgacgacuucaccggcugugugauugccuggaacagcaacaaccuggacuccaaagucggcggcaacuacaauuaccuguaccggcuguuccggaaguccaaucugaagcccuucgagcgggacaucagcaccgaaaucuaucaggccggcagcaccccuugcaacggcguggaaggcuucaacugcuacuucccacugcaguccuacggcuuucagcccacaaauggcgugggcuaucagcccuacagagugguggugcugagcuucgaacugcugcaugcuccugccacagugugcggcccuaagaaaagcaccaaucucgugaagaacaaaugcgugaacuucaacuucaacggccugaccggcaccggcgugcugacagagagcaacaagaaguuccugccauuccagcaguuuggccgggauaucgccgauaccacagacgccguuagagauccccagacacuggaaauccuggacaucaccccaugcagcuucggcggagugucugugaucaccccuggcaccaacaccagcaaucagguggcagugcuguaccaggacgugaacuguaccgaagugcccguggccauucacgccgaucagcugacaccuacauggcggguguacuccaccggcagcaauguguuucagaccagagccggcugucugaucggagccgagcacgugaacaauagcuacgagugcgacauccccaucggcgcuggcaucugugccagcuaccagacacagacaaacagccccagacgggcuagaagcguggccagccagagcaucauugccuacacaaugucucugggcgccgagaacagcguggccuacuccaacaacucuaucgcuauccccaccaacuucaccaucagcgugaccaccgagauccugccuguguccaugaccaagaccagcguggacugcaccauguacaucugcggcgauuccaccgagugcuccaaccugcugcugcaguacggcagcuucugcacccagcugaauagagcccugacagggaucgccguggaacaggacaagaacacccaagagguguucgcccaagugaagcaaaucuacaagaccccuccuaucaaggacuucggcggcuucaauuucagccagauucugcccgauccuagcaagcccagcaagcggagcuucaucgaggaccugcuguucaacaaagugacacuggccgacgccggcuucaucaagcaguauggcgauugucugggcgacauugccgccagggaucugauuugcgcccagaaguuuaacggacugacagugcugccuccucugcugaccgaugagaugaucgcccaguacacaucugcccugcuggccggcacaaucacaagcggcuggacauuuggaugcggcgccgcucugcagauccccuuugcuaugcagauggccuaccgguucaacggcaucggagugacccagaaugugcuguacgagaaccagaagcugaucgccaaccaguucaacagcgccaucggcaagauccaggacagccugagcagcacagcaagcgcccugggaaagcugcaggacguggucaaccagaaugcccaggcacugaacacccuggucaagcagcuguccuccaacuucggcgccaucagcucugugcugaacgauauccugagcagacuggacaaggucgaggccgaggugcagaucgacagacugaucacaggcagacugcagagccuccagacauacgugacccagcagcugaucagagccgccgagauuagagccucugccaaucuggccgccaccaagaugucugagugugugcugggccagagcaagagaugugacuuuugcggcaagggcuaccaccugaugagcuucccucagucugccccucacggcgugguguuucugcacgugacauaugugcccgcucaagagaagaauuucaccaccgcuccagccaucugccacgacggcaaagcccacuuuccuagagaaggcguguucguguccaacggcacccauugguucgugacacagcggaacuucuacgagccccagaucaucaccaccgacaacaccuucgugucuggcaacugcgacguugugaucggcauugugaacaauaccguguacgacccucugcagcccgagcuggacagcuucaaagaggaacuggacaaguacuuuaagaaccacacaagccccgacguggaccugggcgauaucagcggaaucaaugccagcgucgugaacauccagaaagagaucgaccggcugaacgagguggccaagaaucugaacgagagccugaucgaccugcaagaacuggggaaguacgagcaguacaucaaguggcccugguacaucuggcugggcuuuaucgccggacugauugccaucgugauggucacaaucaugcuguguugcaugaccagcugcuguagcugccugaagggcuguuguagcuguggcagcugcugcaaguucgacgaggacgauucugagcccgugcugaagggcgugaaacugcacuacaccugaggacuaguuauaagacugacuagcccgaugggccucccaacgggcccuccuccccuccuugcaccgagauuaauaaaaaaaaaaaaaaaaaaaaaaaaaaaaaaaaaaaaaaaaaaaaaaaaaaaaaaaaaaaaaaaaugcaucccccccccccccccccccccccccccccccaaaggcucuuuucagagccaccagaauu

SEQ ID NO: 13026 - RNA, 4039 nt, Artificial Sequence
  SARS-CoV-2/Wuhan/WIV05/2019__EPI_ISL_402128 spike protein mRNA gc mod (1-1273)(T874C_S1055C)
aggagaaagcuuaccauguucguguuucuggugcugcugccccugguguccagccagugugugaaccugaccaccagaacacagcugccuccagccuacaccaacagcuucaccagaggcguguacuaccccgacaagguguucagauccagcgugcugcacucuacccaggaccuguuccugccuuucuucagcaacgugaccugguuccacgccauccacguguccggcaccaauggcaccaagagauucgacaaccccgugcugcccuucaacgacgggguguacuuugccagcaccgagaaguccaacaucaucagaggcuggaucuucggcaccacacuggacagcaagacccagagccugcugaucgugaacaacgccaccaacguggucaucaaagugugcgaguuccaguucugcaacgaccccuuccugggcgucuacuaccacaagaacaacaagagcuggauggaaagcgaguuccggguguacagcagcgccaacaacugcaccuucgaguacgugucccagccuuuccugauggaccuggaaggcaagcagggcaacuucaagaaccugcgcgaguucguguucaagaacaucgacggcuacuucaaaaucuacagcaagcacaccccuaucaaccucgugcgggaucugccucagggcuucucugcucuggaaccccugguggaucugcccaucggcaucaacaucacccgguuucagacacugcuggcccugcacagaagcuaccugacaccuggcgauagcagcagcggauggacagcuggugccgccgcuuacuaugugggcuaccugcagccuagaaccuuccugcugaaguacaacgagaacggcaccaucaccgacgccguggauugugcucuggauccucugagcgagacaaagugcacccugaaguccuucaccguggaaaagggcaucuaccagaccagcaacuuccgggugcagcccaccgaauccaucgugcgguuccccaauaucaccaaucugugccccuucggcgagguguucaaugccaccagauucgccucuguguacgccuggaaccggaagcggaucagcaauugcguggccgacuacuccgugcuguacaacuccgccagcuucagcaccuucaagugcuacggcguguccccuaccaagcugaacgaccugugcuucacaaacguguacgccgacagcuucgugauccggggagaugaagugcggcagauugccccuggacagacaggcaagaucgccgacuacaacuacaagcugcccgacgacuucaccggcugugugauugccuggaacagcaacaaccuggacuccaaagucggcggcaacuacaauuaccuguaccggcuguuccggaaguccaaucugaagcccuucgagcgggacaucagcaccgaaaucuaucaggccggcagcaccccuugcaacggcguggaaggcuucaacugcuacuucccacugcaguccuacggcuuucagcccacaaauggcgugggcuaucagcccuacagagugguggugcugagcuucgaacugcugcaugcuccugccacagugugcggcccuaagaaaagcaccaaucucgugaagaacaaaugcgugaacuucaacuucaacggccugaccggcaccggcgugcugacagagagcaacaagaaguuccugccauuccagcaguuuggccgggauaucgccgauaccacagacgccguuagagauccccagacacuggaaauccuggacaucaccccaugcagcuucggcggagugucugugaucaccccuggcaccaacaccagcaaucagguggcagugcuguaccaggacgugaacuguaccgaagugcccguggccauucacgccgaucagcugacaccuacauggcggguguacuccaccggcagcaauguguuucagaccagagccggcugucugaucggagccgagcacgugaacaauagcuacgagugcgacauccccaucggcgcuggcaucugugccagcuaccagacacagacaaacagccccagacgggcuagaagcguggccagccagagcaucauugccuacacaaugucucugggcgccgagaacagcguggccuacuccaacaacucuaucgcuauccccaccaacuucaccaucagcgugaccaccgagauccugccuguguccaugaccaagaccagcguggacugcaccauguacaucugcggcgauuccaccgagugcuccaaccugcugcugcaguacggcagcuucugcacccagcugaauagagcccugacagggaucgccguggaacaggacaagaacacccaagagguguucgcccaagugaagcaaaucuacaagaccccuccuaucaaggacuucggcggcuucaauuucagccagauucugcccgauccuagcaagcccagcaagcggagcuucaucgaggaccugcuguucaacaaagugacacuggccgacgccggcuucaucaagcaguauggcgauugucugggcgacauugccgccagggaucugauuugcgcccagaaguuuaacggacugacagugcugccuccucugcugaccgaugagaugaucgcccaguacugcucugcccugcuggccggcacaaucacaagcggcuggacauuuggagcuggcgccgcucugcagauccccuuugcuaugcagauggccuaccgguucaacggcaucggagugacccagaaugugcuguacgagaaccagaagcugaucgccaaccaguucaacagcgccaucggcaagauccaggacagccugagcagcacagcaagcgcccugggaaagcugcaggacguggucaaccagaaugcccaggcacugaacacccuggucaagcagcuguccuccaacuucggcgccaucagcucugugcugaacgauauccugagcagacuggacaaggucgaggccgaggugcagaucgacagacugaucacaggcagacugcagagccuccagacauacgugacccagcagcugaucagagccgccgagauuagagccucugccaaucuggccgccaccaagaugucugagugugugcugggccagagcaagagaguggacuuuugcggcaagggcuaccaccugaugagcuucccucagugcgccccucacggcgugguguuucugcacgugacauaugugcccgcucaagagaagaauuucaccaccgcuccagccaucugccacgacggcaaagcccacuuuccuagagaaggcguguucguguccaacggcacccauugguucgugacacagcggaacuucuacgagccccagaucaucaccaccgacaacaccuucgugucuggcaacugcgacguugugaucggcauugugaacaauaccguguacgacccucugcagcccgagcuggacagcuucaaagaggaacuggacaaguacuuuaagaaccacacaagccccgacguggaccugggcgauaucagcggaaucaaugccagcgucgugaacauccagaaagagaucgaccggcugaacgagguggccaagaaucugaacgagagccugaucgaccugcaagaacuggggaaguacgagcaguacaucaaguggcccugguacaucuggcugggcuuuaucgccggacugauugccaucgugauggucacaaucaugcuguguugcaugaccagcugcuguagcugccugaagggcuguuguagcuguggcagcugcugcaaguucgacgaggacgauucugagcccgugcugaagggcgugaaacugcacuacaccugaggacuaguuauaagacugacuagcccgaugggccucccaacgggcccuccuccccuccuugcaccgagauuaauaaaaaaaaaaaaaaaaaaaaaaaaaaaaaaaaaaaaaaaaaaaaaaaaaaaaaaaaaaaaaaaaugcaucccccccccccccccccccccccccccccccaaaggcucuuuucagagccaccagaauu

SEQ ID NO: 13027 - RNA, 2263 nt, Artificial Sequence; identical to SEQ ID NO: 168
  SARS-CoV-2/Wuhan/WIV05/2019__EPI_ISL_402128 spike protein mRNA gc mod (1-681) R9518

SEQ ID NO: 13028 - RNA, 4333 nt, Artificial Sequence
  SARS-CoV-2/Wuhan/WIV05/2019__EPI_ISL_402128 spike protein mRNA gc mod (1-1211) LumSynth construct
aggagaaagcuuaccauguucguguuucuggugcugcugccccugguguccagccagugugugaaccugaccaccagaacacagcugccuccagccuacaccaacagcuucaccagaggcguguacuaccccgacaagguguucagauccagcgugcugcacucuacccaggaccuguuccugccuuucuucagcaacgugaccugguuccacgccauccacguguccggcaccaauggcaccaagagauucgacaaccccgugcugcccuucaacgacgggguguacuuugccagcaccgagaaguccaacaucaucagaggcuggaucuucggcaccacacuggacagcaagacccagagccugcugaucgugaacaacgccaccaacguggucaucaaagugugcgaguuccaguucugcaacgaccccuuccugggcgucuacuaccacaagaacaacaagagcuggauggaaagcgaguuccggguguacagcagcgccaacaacugcaccuucgaguacgugucccagccuuuccugauggaccuggaaggcaagcagggcaacuucaagaaccugcgcgaguucguguucaagaacaucgacggcuacuucaaaaucuacagcaagcacaccccuaucaaccucgugcgggaucugccucagggcuucucugcucuggaaccccugguggaucugcccaucggcaucaacaucacccgguuucagacacugcuggcccugcacagaagcuaccugacaccuggcgauagcagcagcggauggacagcuggugccgccgcuuacuaugugggcuaccugcagccuagaaccuuccugcugaaguacaacgagaacggcaccaucaccgacgccguggauugugcucuggauccucugagcgagacaaagugcacccugaaguccuucaccguggaaaagggcaucuaccagaccagcaacuuccgggugcagcccaccgaauccaucgugcgguuccccaauaucaccaaucugugccccuucggcgagguguucaaugccaccagauucgccucuguguacgccuggaaccggaagcggaucagcaauugcguggccgacuacuccgugcuguacaacuccgccagcuucagcaccuucaagugcuacggcguguccccuaccaagcugaacgaccugugcuucacaaacguguacgccgacagcuucgugauccggggagaugaagugcggcagauugccccuggacagacaggcaagaucgccgacuacaacuacaagcugcccgacgacuucaccggcugugugauugccuggaacagcaacaaccuggacuccaaagucggcggcaacuacaauuaccuguaccggcuguuccggaaguccaaucugaagcccuucgagcgggacaucagcaccgaaaucuaucaggccggcagcaccccuugcaacggcguggaaggcuucaacugcuacuucccacugcaguccuacggcuuucagcccacaaauggcgugggcuaucagcccuacagagugguggugcugagcuucgaacugcugcaugcuccugccacagugugcggcccuaagaaaagcaccaaucucgugaagaacaaaugcgugaacuucaacuucaacggccugaccggcaccggcgugcugacagagagcaacaagaaguuccugccauuccagcaguuuggccgggauaucgccgauaccacagacgccguuagagauccccagacacuggaaauccuggacaucaccccaugcagcuucggcggagugucugugaucaccccuggcaccaacaccagcaaucagguggcagugcuguaccaggacgugaacuguaccgaagugcccguggccauucacgccgaucagcugacaccuacauggcggguguacuccaccggcagcaauguguuucagaccagagccggcugucugaucggagccgagcacgugaacaauagcuacgagugcgacauccccaucggcgcuggcaucugugccagcuaccagacacagacaaacagccccagacgggcuagaagcguggccagccagagcaucauugccuacacaaugucucugggcgccgagaacagcguggccuacuccaacaacucuaucgcuauccccaccaacuucaccaucagcgugaccaccgagauccugccuguguccaugaccaagaccagcguggacugcaccauguacaucugcggcgauuccaccgagugcuccaaccugcugcugcaguacggcagcuucugcacccagcugaauagagcccugacagggaucgccguggaacaggacaagaacacccaagagguguucgcccaagugaagcaaaucuacaagaccccuccuaucaaggacuucggcggcuucaauuucagccagauucugcccgauccuagcaagcccagcaagcggagcuucaucgaggaccugcuguucaacaaagugacacuggccgacgccggcuucaucaagcaguauggcgauugucugggcgacauugccgccagggaucugauuugcgcccagaaguuuaacggacugacagugcugccuccucugcugaccgaugagaugaucgcccaguacacaucugcccugcuggccggcacaaucacaagcggcuggacauuuggagcuggcgccgcucugcagauccccuuugcuaugcagauggccuaccgguucaacggcaucggagugacccagaaugugcuguacgagaaccagaagcugaucgccaaccaguucaacagcgccaucggcaagauccaggacagccugagcagcacagcaagcgcccugggaaagcugcaggacguggucaaccagaaugcccaggcacugaacacccuggucaagcagcuguccuccaacuucggcgccaucagcucugugcugaacgauauccugagcagacuggacaaggucgaggccgaggugcagaucgacagacugaucacaggcagacugcagagccuccagacauacgugacccagcagcugaucagagccgccgagauuagagccucugccaaucuggccgccaccaagaugucugagugugugcugggccagagcaagagaguggacuuuugcggcaagggcuaccaccugaugagcuucccucagucugccccucacggcgugguguuucugcacgugacauaugugcccgcucaagagaagaauuucaccaccgcuccagccaucugccacgacggcaaagcccacuuuccuagagaaggcguguucguguccaacggcacccauugguucgugacacagcggaacuucuacgagccccagaucaucaccaccgacaacaccuucgugucuggcaacugcgacguugugaucggcauugugaacaauaccguguacgacccucugcagcccgagcuggacagcuucaaagaggaacuggacaaguacuuuaagaaccacacaagccccgacguggaccugggcgauaucagcggaaucaaugccagcgucgugaacauccagaaagagaucgaccggcugaacgagguggccaagaaucugaacgagagccugaucgaccugcaagaacuggggaaguacgagcaguacaucaagggcggaggaucuggcggaggacagaucuacgagggcaagcugacagccgagggccugagauuuggaaucguggccagccgguucaaucacgcccugguggauagacugguggaaggcgccaucgaugccauugucagacacggcggcagagaagaggacaucacccucguuagagugcccggcucuugggagauuccuguggcugcuggcgagcuggcccggaaagaagauaucgacgccguuaucgccaucggcgugcugaucagaggcgccacaccucacuucgacuauaucgccagcgagguguccaaaggccuggccgaucugagccuggaacugagaaagcccaucaccuucggcgugaucaccgcugacacacuggaacaggccauugagagagccggcaccaagcacggcaacaaaggaugggaagccgcucuguccgccaucgagauggccaaccuguucaagagccugcggugaggacuaguuauaagacugacuagcccgaugggccucccaacgggcccuccuccccuccuugcaccgagauuaauaaaaaaaaaaaaaaaaaaaaaaaaaaaaaaaaaaaaaaaaaaaaaaaaaaaaaaaaaaaaaaaaugcaucccccccccccccccccccccccccccccccaaaggcucuuuucagagccaccagaauu

SEQ ID NO: 13029 - RNA, 4333 nt, Artificial Sequence
  SARS-CoV-2/Wuhan/WIV05/2019__EPI_ISL_402128 spike protein mRNA gc mod (1-1211)(K986P_V987P) LumSynth construct
aggagaaagcuuaccauguucguguuucuggugcugcugccccugguguccagccagugugugaaccugaccaccagaacacagcugccuccagccuacaccaacagcuucaccagaggcguguacuaccccgacaagguguucagauccagcgugcugcacucuacccaggaccuguuccugccuuucuucagcaacgugaccugguuccacgccauccacguguccggcaccaauggcaccaagagauucgacaaccccgugcugcccuucaacgacgggguguacuuugccagcaccgagaaguccaacaucaucagaggcuggaucuucggcaccacacuggacagcaagacccagagccugcugaucgugaacaacgccaccaacguggucaucaaagugugcgaguuccaguucugcaacgaccccuuccugggcgucuacuaccacaagaacaacaagagcuggauggaaagcgaguuccggguguacagcagcgccaacaacugcaccuucgaguacgugucccagccuuuccugauggaccuggaaggcaagcagggcaacuucaagaaccugcgcgaguucguguucaagaacaucgacggcuacuucaaaaucuacagcaagcacaccccuaucaaccucgugcgggaucugccucagggcuucucugcucuggaaccccugguggaucugcccaucggcaucaacaucacccgguuucagacacugcuggcccugcacagaagcuaccugacaccuggcgauagcagcagcggauggacagcuggugccgccgcuuacuaugugggcuaccugcagccuagaaccuuccugcugaaguacaacgagaacggcaccaucaccgacgccguggauugugcucuggauccucugagcgagacaaagugcacccugaaguccuucaccguggaaaagggcaucuaccagaccagcaacuuccgggugcagcccaccgaauccaucgugcgguuccccaauaucaccaaucugugccccuucggcgagguguucaaugccaccagauucgccucuguguacgccuggaaccggaagcggaucagcaauugcguggccgacuacuccgugcuguacaacuccgccagcuucagcaccuucaagugcuacggcguguccccuaccaagcugaacgaccugugcuucacaaacguguacgccgacagcuucgugauccggggagaugaagugcggcagauugccccuggacagacaggcaagaucgccgacuacaacuacaagcugcccgacgacuucaccggcugugugauugccuggaacagcaacaaccuggacuccaaagucggcggcaacuacaauuaccuguaccggcuguuccggaaguccaaucugaagcccuucgagcgggacaucagcaccgaaaucuaucaggccggcagcaccccuugcaacggcguggaaggcuucaacugcuacuucccacugcaguccuacggcuuucagcccacaaauggcgugggcuaucagcccuacagagugguggugcugagcuucgaacugcugcaugcuccugccacagugugcggcccuaagaaaagcaccaaucucgugaagaacaaaugcgugaacuucaacuucaacggccugaccggcaccggcgugcugacagagagcaacaagaaguuccugccauuccagcaguuuggccgggauaucgccgauaccacagacgccguuagagauccccagacacuggaaauccuggacaucaccccaugcagcuucggcggagugucugugaucaccccuggcaccaacaccagcaaucagguggcagugcuguaccaggacgugaacuguaccgaagugcccguggccauucacgccgaucagcugacaccuacauggcggguguacuccaccggcagcaauguguuucagaccagagccggcugucugaucggagccgagcacgugaacaauagcuacgagugcgacauccccaucggcgcuggcaucugugccagcuaccagacacagacaaacagccccagacgggcuagaagcguggccagccagagcaucauugccuacacaaugucucugggcgccgagaacagcguggccuacuccaacaacucuaucgcuauccccaccaacuucaccaucagcgugaccaccgagauccugccuguguccaugaccaagaccagcguggacugcaccauguacaucugcggcgauuccaccgagugcuccaaccugcugcugcaguacggcagcuucugcacccagcugaauagagcccugacagggaucgccguggaacaggacaagaacacccaagagguguucgcccaagugaagcaaaucuacaagaccccuccuaucaaggacuucggcggcuucaauuucagccagauucugcccgauccuagcaagcccagcaagcggagcuucaucgaggaccugcuguucaacaaagugacacuggccgacgccggcuucaucaagcaguauggcgauugucugggcgacauugccgccagggaucugauuugcgcccagaaguuuaacggacugacagugcugccuccucugcugaccgaugagaugaucgcccaguacacaucugcccugcuggccggcacaaucacaagcggcuggacauuuggagcuggcgccgcucugcagauccccuuugcuaugcagauggccuaccgguucaacggcaucggagugacccagaaugugcuguacgagaaccagaagcugaucgccaaccaguucaacagcgccaucggcaagauccaggacagccugagcagcacagcaagcgcccugggaaagcugcaggacguggucaaccagaaugcccaggcacugaacacccuggucaagcagcuguccuccaacuucggcgccaucagcucugugcugaacgauauccugagcagacuggacccuccugaggccgaggugcagaucgacagacugaucacaggcagacugcagagccuccagacauacgugacccagcagcugaucagagccgccgagauuagagccucugccaaucuggccgccaccaagaugucugagugugugcugggccagagcaagagaguggacuuuugcggcaagggcuaccaccugaugagcuucccucagucugccccucacggcgugguguuucugcacgugacauaugugcccgcucaagagaagaauuucaccaccgcuccagccaucugccacgacggcaaagcccacuuuccuagagaaggcguguucguguccaacggcacccauugguucgugacacagcggaacuucuacgagccccagaucaucaccaccgacaacaccuucgugucuggcaacugcgacguugugaucggcauugugaacaauaccguguacgacccucugcagcccgagcuggacagcuucaaagaggaacuggacaaguacuuuaagaaccacacaagccccgacguggaccugggcgauaucagcggaaucaaugccagcgucgugaacauccagaaagagaucgaccggcugaacgagguggccaagaaucugaacgagagccugaucgaccugcaagaacuggggaaguacgagcaguacaucaagggcggaggaucuggcggaggacagaucuacgagggcaagcugacagccgagggccugagauuuggaaucguggccagccgguucaaucacgcccugguggauagacugguggaaggcgccaucgaugccauugucagacacggcggcagagaagaggacaucacccucguuagagugcccggcucuugggagauuccuguggcugcuggcgagcuggcccggaaagaagauaucgacgccguuaucgccaucggcgugcugaucagaggcgccacaccucacuucgacuauaucgccagcgagguguccaaaggccuggccgaucugagccuggaacugagaaagcccaucaccuucggcgugaucaccgcugacacacuggaacaggccauugagagagccggcaccaagcacggcaacaaaggaugggaagccgcucuguccgccaucgagauggccaaccuguucaagagccugcggugaggacuaguuauaagacugacuagcccgaugggccucccaacgggcccuccuccccuccuugcaccgagauuaauaaaaaaaaaaaaaaaaaaaaaaaaaaaaaaaaaaaaaaaaaaaaaaaaaaaaaaaaaaaaaaaaugcaucccccccccccccccccccccccccccccccaaaggcucuuuucagagccaccagaauu

SEQ ID NO: 13030 - RNA, 4333 nt, Artificial Sequence
  SARS-CoV-2/Wuhan/WIV05/2019__EPI_ISL_402128 spike protein mRNA gc mod (1-1211)(K986P_V987P_T887WN_A1020W) LumSynth construct
aggagaaagcuuaccauguucguguuucuggugcugcugccccugguguccagccagugugugaaccugaccaccagaacacagcugccuccagccuacaccaacagcuucaccagaggcguguacuaccccgacaagguguucagauccagcgugcugcacucuacccaggaccuguuccugccuuucuucagcaacgugaccugguuccacgccauccacguguccggcaccaauggcaccaagagauucgacaaccccgugcugcccuucaacgacgggguguacuuugccagcaccgagaaguccaacaucaucagaggcuggaucuucggcaccacacuggacagcaagacccagagccugcugaucgugaacaacgccaccaacguggucaucaaagugugcgaguuccaguucugcaacgaccccuuccugggcgucuacuaccacaagaacaacaagagcuggauggaaagcgaguuccggguguacagcagcgccaacaacugcaccuucgaguacgugucccagccuuuccugauggaccuggaaggcaagcagggcaacuucaagaaccugcgcgaguucguguucaagaacaucgacggcuacuucaaaaucuacagcaagcacaccccuaucaaccucgugcgggaucugccucagggcuucucugcucuggaaccccugguggaucugcccaucggcaucaacaucacccgguuucagacacugcuggcccugcacagaagcuaccugacaccuggcgauagcagcagcggauggacagcuggugccgccgcuuacuaugugggcuaccugcagccuagaaccuuccugcugaaguacaacgagaacggcaccaucaccgacgccguggauugugcucuggauccucugagcgagacaaagugcacccugaaguccuucaccguggaaaagggcaucuaccagaccagcaacuuccgggugcagcccaccgaauccaucgugcgguuccccaauaucaccaaucugugccccuucggcgagguguucaaugccaccagauucgccucuguguacgccuggaaccggaagcggaucagcaauugcguggccgacuacuccgugcuguacaacuccgccagcuucagcaccuucaagugcuacggcguguccccuaccaagcugaacgaccugugcuucacaaacguguacgccgacagcuucgugauccggggagaugaagugcggcagauugccccuggacagacaggcaagaucgccgacuacaacuacaagcugcccgacgacuucaccggcugugugauugccuggaacagcaacaaccuggacuccaaagucggcggcaacuacaauuaccuguaccggcuguuccggaaguccaaucugaagcccuucgagcgggacaucagcaccgaaaucuaucaggccggcagcaccccuugcaacggcguggaaggcuucaacugcuacuucccacugcaguccuacggcuuucagcccacaaauggcgugggcuaucagcccuacagagugguggugcugagcuucgaacugcugcaugcuccugccacagugugcggcccuaagaaaagcaccaaucucgugaagaacaaaugcgugaacuucaacuucaacggccugaccggcaccggcgugcugacagagagcaacaagaaguuccugccauuccagcaguuuggccgggauaucgccgauaccacagacgccguuagagauccccagacacuggaaauccuggacaucaccccaugcagcuucggcggagugucugugaucaccccuggcaccaacaccagcaaucagguggcagugcuguaccaggacgugaacuguaccgaagugcccguggccauucacgccgaucagcugacaccuacauggcggguguacuccaccggcagcaauguguuucagaccagagccggcugucugaucggagccgagcacgugaacaauagcuacgagugcgacauccccaucggcgcuggcaucugugccagcuaccagacacagacaaacagccccagacgggcuagaagcguggccagccagagcaucauugccuacacaaugucucugggcgccgagaacagcguggccuacuccaacaacucuaucgcuauccccaccaacuucaccaucagcgugaccaccgagauccugccuguguccaugaccaagaccagcguggacugcaccauguacaucugcggcgauuccaccgagugcuccaaccugcugcugcaguacggcagcuucugcacccagcugaauagagcccugacagggaucgccguggaacaggacaagaacacccaagagguguucgcccaagugaagcaaaucuacaagaccccuccuaucaaggacuucggcggcuucaauuucagccagauucugcccgauccuagcaagcccagcaagcggagcuucaucgaggaccugcuguucaacaaagugacacuggccgacgccggcuucaucaagcaguauggcgauugucugggcgacauugccgccagggaucugauuugcgcccagaaguuuaacggacugacagugcugccuccucugcugaccgaugagaugaucgcccaguacacaucugcccugcuggccggcacaaucacaagcggcuggugguuuggagcuggcgccgcucugcagauccccuuugcuaugcagauggccuaccgguucaacggcaucggagugacccagaaugugcuguacgagaaccagaagcugaucgccaaccaguucaacagcgccaucggcaagauccaggacagccugagcagcacagcaagcgcccugggaaagcugcaggacguggucaaccagaaugcccaggcacugaacacccuggucaagcagcuguccuccaacuucggcgccaucagcucugugcugaacgauauccugagcagacuggacccuccugaggccgaggugcagaucgacagacugaucacaggcagacugcagagccuccagacauacgugacccagcagcugaucagagccgccgagauuagauggucugccaaucuggccgccaccaagaugucugagugugugcugggccagagcaagagaguggacuuuugcggcaagggcuaccaccugaugagcuucccucagucugccccucacggcgugguguuucugcacgugacauaugugcccgcucaagagaagaauuucaccaccgcuccagccaucugccacgacggcaaagcccacuuuccuagagaaggcguguucguguccaacggcacccauugguucgugacacagcggaacuucuacgagccccagaucaucaccaccgacaacaccuucgugucuggcaacugcgacguugugaucggcauugugaacaauaccguguacgacccucugcagcccgagcuggacagcuucaaagaggaacuggacaaguacuuuaagaaccacacaagccccgacguggaccugggcgauaucagcggaaucaaugccagcgucgugaacauccagaaagagaucgaccggcugaacgagguggccaagaaucugaacgagagccugaucgaccugcaagaacuggggaaguacgagcaguacaucaagggcggaggaucuggcggaggacagaucuacgagggcaagcugacagccgagggccugagauuuggaaucguggccagccgguucaaucacgcccugguggauagacugguggaaggcgccaucgaugccauugucagacacggcggcagagaagaggacaucacccucguuagagugcccggcucuugggagauuccuguggcugcuggcgagcuggcccggaaagaagauaucgacgccguuaucgccaucggcgugcugaucagaggcgccacaccucacuucgacuauaucgccagcgagguguccaaaggccuggccgaucugagccuggaacugagaaagcccaucaccuucggcgugaucaccgcugacacacuggaacaggccauugagagagccggcaccaagcacggcaacaaaggaugggaagccgcucuguccgccaucgagauggccaaccuguucaagagccugcggugaggacuaguuauaagacugacuagcccgaugggccucccaacgggcccuccuccccuccuugcaccgagauuaauaaaaaaaaaaaaaaaaaaaaaaaaaaaaaaaaaaaaaaaaaaaaaaaaaaaaaaaaaaaaaaaaugcaucccccccccccccccccccccccccccccccaaaggcucuuuucagagccaccagaauu

SEQ ID NO: 13031 - RNA, 4333 nt, Artificial Sequence
  SARS-CoV-2/Wuhan/WIV05/2019__EPI_ISL_402128 spike protein mRNA gc mod (1-1211)(K986P_V987P_P1069F) LumSynth construct
aggagaaagcuuaccauguucguguuucuggugcugcugccccugguguccagccagugugugaaccugaccaccagaacacagcugccuccagccuacaccaacagcuucaccagaggcguguacuaccccgacaagguguucagauccagcgugcugcacucuacccaggaccuguuccugccuuucuucagcaacgugaccugguuccacgccauccacguguccggcaccaauggcaccaagagauucgacaaccccgugcugcccuucaacgacgggguguacuuugccagcaccgagaaguccaacaucaucagaggcuggaucuucggcaccacacuggacagcaagacccagagccugcugaucgugaacaacgccaccaacguggucaucaaagugugcgaguuccaguucugcaacgaccccuuccugggcgucuacuaccacaagaacaacaagagcuggauggaaagcgaguuccggguguacagcagcgccaacaacugcaccuucgaguacgugucccagccuuuccugauggaccuggaaggcaagcagggcaacuucaagaaccugcgcgaguucguguucaagaacaucgacggcuacuucaaaaucuacagcaagcacaccccuaucaaccucgugcgggaucugccucagggcuucucugcucuggaaccccugguggaucugcccaucggcaucaacaucacccgguuucagacacugcuggcccugcacagaagcuaccugacaccuggcgauagcagcagcggauggacagcuggugccgccgcuuacuaugugggcuaccugcagccuagaaccuuccugcugaaguacaacgagaacggcaccaucaccgacgccguggauugugcucuggauccucugagcgagacaaagugcacccugaaguccuucaccguggaaaagggcaucuaccagaccagcaacuuccgggugcagcccaccgaauccaucgugcgguuccccaauaucaccaaucugugccccuucggcgagguguucaaugccaccagauucgccucuguguacgccuggaaccggaagcggaucagcaauugcguggccgacuacuccgugcuguacaacuccgccagcuucagcaccuucaagugcuacggcguguccccuaccaagcugaacgaccugugcuucacaaacguguacgccgacagcuucgugauccggggagaugaagugcggcagauugccccuggacagacaggcaagaucgccgacuacaacuacaagcugcccgacgacuucaccggcugugugauugccuggaacagcaacaaccuggacuccaaagucggcggcaacuacaauuaccuguaccggcuguuccggaaguccaaucugaagcccuucgagcgggacaucagcaccgaaaucuaucaggccggcagcaccccuugcaacggcguggaaggcuucaacugcuacuucccacugcaguccuacggcuuucagcccacaaauggcgugggcuaucagcccuacagagugguggugcugagcuucgaacugcugcaugcuccugccacagugugcggcccuaagaaaagcaccaaucucgugaagaacaaaugcgugaacuucaacuucaacggccugaccggcaccggcgugcugacagagagcaacaagaaguuccugccauuccagcaguuuggccgggauaucgccgauaccacagacgccguuagagauccccagacacuggaaauccuggacaucaccccaugcagcuucggcggagugucugugaucaccccuggcaccaacaccagcaaucagguggcagugcuguaccaggacgugaacuguaccgaagugcccguggccauucacgccgaucagcugacaccuacauggcggguguacuccaccggcagcaauguguuucagaccagagccggcugucugaucggagccgagcacgugaacaauagcuacgagugcgacauccccaucggcgcuggcaucugugccagcuaccagacacagacaaacagccccagacgggcuagaagcguggccagccagagcaucauugccuacacaaugucucugggcgccgagaacagcguggccuacuccaacaacucuaucgcuauccccaccaacuucaccaucagcgugaccaccgagauccugccuguguccaugaccaagaccagcguggacugcaccauguacaucugcggcgauuccaccgagugcuccaaccugcugcugcaguacggcagcuucugcacccagcugaauagagcccugacagggaucgccguggaacaggacaagaacacccaagagguguucgcccaagugaagcaaaucuacaagaccccuccuaucaaggacuucggcggcuucaauuucagccagauucugcccgauccuagcaagcccagcaagcggagcuucaucgaggaccugcuguucaacaaagugacacuggccgacgccggcuucaucaagcaguauggcgauugucugggcgacauugccgccagggaucugauuugcgcccagaaguuuaacggacugacagugcugccuccucugcugaccgaugagaugaucgcccaguacacaucugcccugcuggccggcacaaucacaagcggcuggacauuuggagcuggcgccgcucugcagauccccuuugcuaugcagauggccuaccgguucaacggcaucggagugacccagaaugugcuguacgagaaccagaagcugaucgccaaccaguucaacagcgccaucggcaagauccaggacagccugagcagcacagcaagcgcccugggaaagcugcaggacguggucaaccagaaugcccaggcacugaacacccuggucaagcagcuguccuccaacuucggcgccaucagcucugugcugaacgauauccugagcagacuggacccuccugaggccgaggugcagaucgacagacugaucacaggcagacugcagagccuccagacauacgugacccagcagcugaucagagccgccgagauuagagccucugccaaucuggccgccaccaagaugucugagugugugcugggccagagcaagagaguggacuuuugcggcaagggcuaccaccugaugagcuucccucagucugccccucacggcgugguguuucugcacgugacauauguguucgcucaagagaagaauuucaccaccgcuccagccaucugccacgacggcaaagcccacuuuccuagagaaggcguguucguguccaacggcacccauugguucgugacacagcggaacuucuacgagccccagaucaucaccaccgacaacaccuucgugucuggcaacugcgacguugugaucggcauugugaacaauaccguguacgacccucugcagcccgagcuggacagcuucaaagaggaacuggacaaguacuuuaagaaccacacaagccccgacguggaccugggcgauaucagcggaaucaaugccagcgucgugaacauccagaaagagaucgaccggcugaacgagguggccaagaaucugaacgagagccugaucgaccugcaagaacuggggaaguacgagcaguacaucaagggcggaggaucuggcggaggacagaucuacgagggcaagcugacagccgagggccugagauuuggaaucguggccagccgguucaaucacgcccugguggauagacugguggaaggcgccaucgaugccauugucagacacggcggcagagaagaggacaucacccucguuagagugcccggcucuugggagauuccuguggcugcuggcgagcuggcccggaaagaagauaucgacgccguuaucgccaucggcgugcugaucagaggcgccacaccucacuucgacuauaucgccagcgagguguccaaaggccuggccgaucugagccuggaacugagaaagcccaucaccuucggcgugaucaccgcugacacacuggaacaggccauugagagagccggcaccaagcacggcaacaaaggaugggaagccgcucuguccgccaucgagauggccaaccuguucaagagccugcggugaggacuaguuauaagacugacuagcccgaugggccucccaacgggcccuccuccccuccuugcaccgagauuaauaaaaaaaaaaaaaaaaaaaaaaaaaaaaaaaaaaaaaaaaaaaaaaaaaaaaaaaaaaaaaaaaugcaucccccccccccccccccccccccccccccccaaaggcucuuuucagagccaccagaauu

SEQ ID NO: 13032 - RNA, 4333 nt, Artificial Sequence
  SARS-CoV-2/Wuhan/WIV05/2019__EPI_ISL_402128 spike protein mRNA gc mod (1-1211)(K986P_V987P_ H1048Q_H1064N_ H1083N_H1101N) LumSynth construct
aggagaaagcuuaccauguucguguuucuggugcugcugccccugguguccagccagugugugaaccugaccaccagaacacagcugccuccagccuacaccaacagcuucaccagaggcguguacuaccccgacaagguguucagauccagcgugcugcacucuacccaggaccuguuccugccuuucuucagcaacgugaccugguuccacgccauccacguguccggcaccaauggcaccaagagauucgacaaccccgugcugcccuucaacgacgggguguacuuugccagcaccgagaaguccaacaucaucagaggcuggaucuucggcaccacacuggacagcaagacccagagccugcugaucgugaacaacgccaccaacguggucaucaaagugugcgaguuccaguucugcaacgaccccuuccugggcgucuacuaccacaagaacaacaagagcuggauggaaagcgaguuccggguguacagcagcgccaacaacugcaccuucgaguacgugucccagccuuuccugauggaccuggaaggcaagcagggcaacuucaagaaccugcgcgaguucguguucaagaacaucgacggcuacuucaaaaucuacagcaagcacaccccuaucaaccucgugcgggaucugccucagggcuucucugcucuggaaccccugguggaucugcccaucggcaucaacaucacccgguuucagacacugcuggcccugcacagaagcuaccugacaccuggcgauagcagcagcggauggacagcuggugccgccgcuuacuaugugggcuaccugcagccuagaaccuuccugcugaaguacaacgagaacggcaccaucaccgacgccguggauugugcucuggauccucugagcgagacaaagugcacccugaaguccuucaccguggaaaagggcaucuaccagaccagcaacuuccgggugcagcccaccgaauccaucgugcgguuccccaauaucaccaaucugugccccuucggcgagguguucaaugccaccagauucgccucuguguacgccuggaaccggaagcggaucagcaauugcguggccgacuacuccgugcuguacaacuccgccagcuucagcaccuucaagugcuacggcguguccccuaccaagcugaacgaccugugcuucacaaacguguacgccgacagcuucgugauccggggagaugaagugcggcagauugccccuggacagacaggcaagaucgccgacuacaacuacaagcugcccgacgacuucaccggcugugugauugccuggaacagcaacaaccuggacuccaaagucggcggcaacuacaauuaccuguaccggcuguuccggaaguccaaucugaagcccuucgagcgggacaucagcaccgaaaucuaucaggccggcagcaccccuugcaacggcguggaaggcuucaacugcuacuucccacugcaguccuacggcuuucagcccacaaauggcgugggcuaucagcccuacagagugguggugcugagcuucgaacugcugcaugcuccugccacagugugcggcccuaagaaaagcaccaaucucgugaagaacaaaugcgugaacuucaacuucaacggccugaccggcaccggcgugcugacagagagcaacaagaaguuccugccauuccagcaguuuggccgggauaucgccgauaccacagacgccguuagagauccccagacacuggaaauccuggacaucaccccaugcagcuucggcggagugucugugaucaccccuggcaccaacaccagcaaucagguggcagugcuguaccaggacgugaacuguaccgaagugcccguggccauucacgccgaucagcugacaccuacauggcggguguacuccaccggcagcaauguguuucagaccagagccggcugucugaucggagccgagcacgugaacaauagcuacgagugcgacauccccaucggcgcuggcaucugugccagcuaccagacacagacaaacagccccagacgggcuagaagcguggccagccagagcaucauugccuacacaaugucucugggcgccgagaacagcguggccuacuccaacaacucuaucgcuauccccaccaacuucaccaucagcgugaccaccgagauccugccuguguccaugaccaagaccagcguggacugcaccauguacaucugcggcgauuccaccgagugcuccaaccugcugcugcaguacggcagcuucugcacccagcugaauagagcccugacagggaucgccguggaacaggacaagaacacccaagagguguucgcccaagugaagcaaaucuacaagaccccuccuaucaaggacuucggcggcuucaauuucagccagauucugcccgauccuagcaagcccagcaagcggagcuucaucgaggaccugcuguucaacaaagugacacuggccgacgccggcuucaucaagcaguauggcgauugucugggcgacauugccgccagggaucugauuugcgcccagaaguuuaacggacugacagugcugccuccucugcugaccgaugagaugaucgcccaguacacaucugcccugcuggccggcacaaucacaagcggcuggacauuuggagcuggcgccgcucugcagauccccuuugcuaugcagauggccuaccgguucaacggcaucggagugacccagaaugugcuguacgagaaccagaagcugaucgccaaccaguucaacagcgccaucggcaagauccaggacagccugagcagcacagcaagcgcccugggaaagcugcaggacguggucaaccagaaugcccaggcacugaacacccuggucaagcagcuguccuccaacuucggcgccaucagcucugugcugaacgauauccugagcagacuggacccuccugaggccgaggugcagaucgacagacugaucacaggcagacugcagagccuccagacauacgugacccagcagcugaucagagccgccgagauuagagccucugccaaucuggccgccaccaagaugucugagugugugcugggccagagcaagagaguggacuuuugcggcaagggcuaccagcugaugagcuucccucagucugccccucacggcgugguguuucugaacgugacauaugugcccgcucaagagaagaauuucaccaccgcuccagccaucugcaacgacggcaaagcccacuuuccuagagaaggcguguucguguccaacggcaccaacugguucgugacacagcggaacuucuacgagccccagaucaucaccaccgacaacaccuucgugucuggcaacugcgacguugugaucggcauugugaacaauaccguguacgacccucugcagcccgagcuggacagcuucaaagaggaacuggacaaguacuuuaagaaccacacaagccccgacguggaccugggcgauaucagcggaaucaaugccagcgucgugaacauccagaaagagaucgaccggcugaacgagguggccaagaaucugaacgagagccugaucgaccugcaagaacuggggaaguacgagcaguacaucaagggcggaggaucuggcggaggacagaucuacgagggcaagcugacagccgagggccugagauuuggaaucguggccagccgguucaaucacgcccugguggauagacugguggaaggcgccaucgaugccauugucagacacggcggcagagaagaggacaucacccucguuagagugcccggcucuugggagauuccuguggcugcuggcgagcuggcccggaaagaagauaucgacgccguuaucgccaucggcgugcugaucagaggcgccacaccucacuucgacuauaucgccagcgagguguccaaaggccuggccgaucugagccuggaacugagaaagcccaucaccuucggcgugaucaccgcugacacacuggaacaggccauugagagagccggcaccaagcacggcaacaaaggaugggaagccgcucuguccgccaucgagauggccaaccuguucaagagccugcggugaggacuaguuauaagacugacuagcccgaugggccucccaacgggcccuccuccccuccuugcaccgagauuaauaaaaaaaaaaaaaaaaaaaaaaaaaaaaaaaaaaaaaaaaaaaaaaaaaaaaaaaaaaaaaaaaugcaucccccccccccccccccccccccccccccccaaaggcucuuuucagagccaccagaauu

SEQ ID NO: 13033 - RNA, 4333 nt, Artificial Sequence
  SARS-CoV-2/Wuhan/WIV05/2019__EPI_ISL_402128 spike protein mRNA gc mod (1-1211)(I712C_T1077C) LumSynth construct
aggagaaagcuuaccauguucguguuucuggugcugcugccccugguguccagccagugugugaaccugaccaccagaacacagcugccuccagccuacaccaacagcuucaccagaggcguguacuaccccgacaagguguucagauccagcgugcugcacucuacccaggaccuguuccugccuuucuucagcaacgugaccugguuccacgccauccacguguccggcaccaauggcaccaagagauucgacaaccccgugcugcccuucaacgacgggguguacuuugccagcaccgagaaguccaacaucaucagaggcuggaucuucggcaccacacuggacagcaagacccagagccugcugaucgugaacaacgccaccaacguggucaucaaagugugcgaguuccaguucugcaacgaccccuuccugggcgucuacuaccacaagaacaacaagagcuggauggaaagcgaguuccggguguacagcagcgccaacaacugcaccuucgaguacgugucccagccuuuccugauggaccuggaaggcaagcagggcaacuucaagaaccugcgcgaguucguguucaagaacaucgacggcuacuucaaaaucuacagcaagcacaccccuaucaaccucgugcgggaucugccucagggcuucucugcucuggaaccccugguggaucugcccaucggcaucaacaucacccgguuucagacacugcuggcccugcacagaagcuaccugacaccuggcgauagcagcagcggauggacagcuggugccgccgcuuacuaugugggcuaccugcagccuagaaccuuccugcugaaguacaacgagaacggcaccaucaccgacgccguggauugugcucuggauccucugagcgagacaaagugcacccugaaguccuucaccguggaaaagggcaucuaccagaccagcaacuuccgggugcagcccaccgaauccaucgugcgguuccccaauaucaccaaucugugccccuucggcgagguguucaaugccaccagauucgccucuguguacgccuggaaccggaagcggaucagcaauugcguggccgacuacuccgugcuguacaacuccgccagcuucagcaccuucaagugcuacggcguguccccuaccaagcugaacgaccugugcuucacaaacguguacgccgacagcuucgugauccggggagaugaagugcggcagauugccccuggacagacaggcaagaucgccgacuacaacuacaagcugcccgacgacuucaccggcugugugauugccuggaacagcaacaaccuggacuccaaagucggcggcaacuacaauuaccuguaccggcuguuccggaaguccaaucugaagcccuucgagcgggacaucagcaccgaaaucuaucaggccggcagcaccccuugcaacggcguggaaggcuucaacugcuacuucccacugcaguccuacggcuuucagcccacaaauggcgugggcuaucagcccuacagagugguggugcugagcuucgaacugcugcaugcuccugccacagugugcggcccuaagaaaagcaccaaucucgugaagaacaaaugcgugaacuucaacuucaacggccugaccggcaccggcgugcugacagagagcaacaagaaguuccugccauuccagcaguuuggccgggauaucgccgauaccacagacgccguuagagauccccagacacuggaaauccuggacaucaccccaugcagcuucggcggagugucugugaucaccccuggcaccaacaccagcaaucagguggcagugcuguaccaggacgugaacuguaccgaagugcccguggccauucacgccgaucagcugacaccuacauggcggguguacuccaccggcagcaauguguuucagaccagagccggcugucugaucggagccgagcacgugaacaauagcuacgagugcgacauccccaucggcgcuggcaucugugccagcuaccagacacagacaaacagccccagacgggcuagaagcguggccagccagagcaucauugccuacacaaugucucugggcgccgagaacagcguggccuacuccaacaacucuugcgcuauccccaccaacuucaccaucagcgugaccaccgagauccugccuguguccaugaccaagaccagcguggacugcaccauguacaucugcggcgauuccaccgagugcuccaaccugcugcugcaguacggcagcuucugcacccagcugaauagagcccugacagggaucgccguggaacaggacaagaacacccaagagguguucgcccaagugaagcaaaucuacaagaccccuccuaucaaggacuucggcggcuucaauuucagccagauucugcccgauccuagcaagcccagcaagcggagcuucaucgaggaccugcuguucaacaaagugacacuggccgacgccggcuucaucaagcaguauggcgauugucugggcgacauugccgccagggaucugauuugcgcccagaaguuuaacggacugacagugcugccuccucugcugaccgaugagaugaucgcccaguacacaucugcccugcuggccggcacaaucacaagcggcuggacauuuggagcuggcgccgcucugcagauccccuuugcuaugcagauggccuaccgguucaacggcaucggagugacccagaaugugcuguacgagaaccagaagcugaucgccaaccaguucaacagcgccaucggcaagauccaggacagccugagcagcacagcaagcgcccugggaaagcugcaggacguggucaaccagaaugcccaggcacugaacacccuggucaagcagcuguccuccaacuucggcgccaucagcucugugcugaacgauauccugagcagacuggacaaggucgaggccgaggugcagaucgacagacugaucacaggcagacugcagagccuccagacauacgugacccagcagcugaucagagccgccgagauuagagccucugccaaucuggccgccaccaagaugucugagugugugcugggccagagcaagagaguggacuuuugcggcaagggcuaccaccugaugagcuucccucagucugccccucacggcgugguguuucugcacgugacauaugugcccgcucaagagaagaauuucaccugugcuccagccaucugccacgacggcaaagcccacuuuccuagagaaggcguguucguguccaacggcacccauugguucgugacacagcggaacuucuacgagccccagaucaucaccaccgacaacaccuucgugucuggcaacugcgacguugugaucggcauugugaacaauaccguguacgacccucugcagcccgagcuggacagcuucaaagaggaacuggacaaguacuuuaagaaccacacaagccccgacguggaccugggcgauaucagcggaaucaaugccagcgucgugaacauccagaaagagaucgaccggcugaacgagguggccaagaaucugaacgagagccugaucgaccugcaagaacuggggaaguacgagcaguacaucaagggcggaggaucuggcggaggacagaucuacgagggcaagcugacagccgagggccugagauuuggaaucguggccagccgguucaaucacgcccugguggauagacugguggaaggcgccaucgaugccauugucagacacggcggcagagaagaggacaucacccucguuagagugcccggcucuugggagauuccuguggcugcuggcgagcuggcccggaaagaagauaucgacgccguuaucgccaucggcgugcugaucagaggcgccacaccucacuucgacuauaucgccagcgagguguccaaaggccuggccgaucugagccuggaacugagaaagcccaucaccuucggcgugaucaccgcugacacacuggaacaggccauugagagagccggcaccaagcacggcaacaaaggaugggaagccgcucuguccgccaucgagauggccaaccuguucaagagccugcggugaggacuaguuauaagacugacuagcccgaugggccucccaacgggcccuccuccccuccuugcaccgagauuaauaaaaaaaaaaaaaaaaaaaaaaaaaaaaaaaaaaaaaaaaaaaaaaaaaaaaaaaaaaaaaaaaugcaucccccccccccccccccccccccccccccccaaaggcucuuuucagagccaccagaauu

SEQ ID NO: 13034 - RNA, 4333 nt, Artificial Sequence
  SARS-CoV-2/Wuhan/WIV05/2019__EPI_ISL_402128 spike protein mRNA gc mod (1-1211)(I714C_Y1110C) LumSynth construct
aggagaaagcuuaccauguucguguuucuggugcugcugccccugguguccagccagugugugaaccugaccaccagaacacagcugccuccagccuacaccaacagcuucaccagaggcguguacuaccccgacaagguguucagauccagcgugcugcacucuacccaggaccuguuccugccuuucuucagcaacgugaccugguuccacgccauccacguguccggcaccaauggcaccaagagauucgacaaccccgugcugcccuucaacgacgggguguacuuugccagcaccgagaaguccaacaucaucagaggcuggaucuucggcaccacacuggacagcaagacccagagccugcugaucgugaacaacgccaccaacguggucaucaaagugugcgaguuccaguucugcaacgaccccuuccugggcgucuacuaccacaagaacaacaagagcuggauggaaagcgaguuccggguguacagcagcgccaacaacugcaccuucgaguacgugucccagccuuuccugauggaccuggaaggcaagcagggcaacuucaagaaccugcgcgaguucguguucaagaacaucgacggcuacuucaaaaucuacagcaagcacaccccuaucaaccucgugcgggaucugccucagggcuucucugcucuggaaccccugguggaucugcccaucggcaucaacaucacccgguuucagacacugcuggcccugcacagaagcuaccugacaccuggcgauagcagcagcggauggacagcuggugccgccgcuuacuaugugggcuaccugcagccuagaaccuuccugcugaaguacaacgagaacggcaccaucaccgacgccguggauugugcucuggauccucugagcgagacaaagugcacccugaaguccuucaccguggaaaagggcaucuaccagaccagcaacuuccgggugcagcccaccgaauccaucgugcgguuccccaauaucaccaaucugugccccuucggcgagguguucaaugccaccagauucgccucuguguacgccuggaaccggaagcggaucagcaauugcguggccgacuacuccgugcuguacaacuccgccagcuucagcaccuucaagugcuacggcguguccccuaccaagcugaacgaccugugcuucacaaacguguacgccgacagcuucgugauccggggagaugaagugcggcagauugccccuggacagacaggcaagaucgccgacuacaacuacaagcugcccgacgacuucaccggcugugugauugccuggaacagcaacaaccuggacuccaaagucggcggcaacuacaauuaccuguaccggcuguuccggaaguccaaucugaagcccuucgagcgggacaucagcaccgaaaucuaucaggccggcagcaccccuugcaacggcguggaaggcuucaacugcuacuucccacugcaguccuacggcuuucagcccacaaauggcgugggcuaucagcccuacagagugguggugcugagcuucgaacugcugcaugcuccugccacagugugcggcccuaagaaaagcaccaaucucgugaagaacaaaugcgugaacuucaacuucaacggccugaccggcaccggcgugcugacagagagcaacaagaaguuccugccauuccagcaguuuggccgggauaucgccgauaccacagacgccguuagagauccccagacacuggaaauccuggacaucaccccaugcagcuucggcggagugucugugaucaccccuggcaccaacaccagcaaucagguggcagugcuguaccaggacgugaacuguaccgaagugcccguggccauucacgccgaucagcugacaccuacauggcggguguacuccaccggcagcaauguguuucagaccagagccggcugucugaucggagccgagcacgugaacaauagcuacgagugcgacauccccaucggcgcuggcaucugugccagcuaccagacacagacaaacagccccagacgggcuagaagcguggccagccagagcaucauugccuacacaaugucucugggcgccgagaacagcguggccuacuccaacaacucuaucgcuugccccaccaacuucaccaucagcgugaccaccgagauccugccuguguccaugaccaagaccagcguggacugcaccauguacaucugcggcgauuccaccgagugcuccaaccugcugcugcaguacggcagcuucugcacccagcugaauagagcccugacagggaucgccguggaacaggacaagaacacccaagagguguucgcccaagugaagcaaaucuacaagaccccuccuaucaaggacuucggcggcuucaauuucagccagauucugcccgauccuagcaagcccagcaagcggagcuucaucgaggaccugcuguucaacaaagugacacuggccgacgccggcuucaucaagcaguauggcgauugucugggcgacauugccgccagggaucugauuugcgcccagaaguuuaacggacugacagugcugccuccucugcugaccgaugagaugaucgcccaguacacaucugcccugcuggccggcacaaucacaagcggcuggacauuuggagcuggcgccgcucugcagauccccuuugcuaugcagauggccuaccgguucaacggcaucggagugacccagaaugugcuguacgagaaccagaagcugaucgccaaccaguucaacagcgccaucggcaagauccaggacagccugagcagcacagcaagcgcccugggaaagcugcaggacguggucaaccagaaugcccaggcacugaacacccuggucaagcagcuguccuccaacuucggcgccaucagcucugugcugaacgauauccugagcagacuggacaaggucgaggccgaggugcagaucgacagacugaucacaggcagacugcagagccuccagacauacgugacccagcagcugaucagagccgccgagauuagagccucugccaaucuggccgccaccaagaugucugagugugugcugggccagagcaagagaguggacuuuugcggcaagggcuaccaccugaugagcuucccucagucugccccucacggcgugguguuucugcacgugacauaugugcccgcucaagagaagaauuucaccaccgcuccagccaucugccacgacggcaaagcccacuuuccuagagaaggcguguucguguccaacggcacccauugguucgugacacagcggaacuucugugagccccagaucaucaccaccgacaacaccuucgugucuggcaacugcgacguugugaucggcauugugaacaauaccguguacgacccucugcagcccgagcuggacagcuucaaagaggaacuggacaaguacuuuaagaaccacacaagccccgacguggaccugggcgauaucagcggaaucaaugccagcgucgugaacauccagaaagagaucgaccggcugaacgagguggccaagaaucugaacgagagccugaucgaccugcaagaacuggggaaguacgagcaguacaucaagggcggaggaucuggcggaggacagaucuacgagggcaagcugacagccgagggccugagauuuggaaucguggccagccgguucaaucacgcccugguggauagacugguggaaggcgccaucgaugccauugucagacacggcggcagagaagaggacaucacccucguuagagugcccggcucuugggagauuccuguggcugcuggcgagcuggcccggaaagaagauaucgacgccguuaucgccaucggcgugcugaucagaggcgccacaccucacuucgacuauaucgccagcgagguguccaaaggccuggccgaucugagccuggaacugagaaagcccaucaccuucggcgugaucaccgcugacacacuggaacaggccauugagagagccggcaccaagcacggcaacaaaggaugggaagccgcucuguccgccaucgagauggccaaccuguucaagagccugcggugaggacuaguuauaagacugacuagcccgaugggccucccaacgggcccuccuccccuccuugcaccgagauuaauaaaaaaaaaaaaaaaaaaaaaaaaaaaaaaaaaaaaaaaaaaaaaaaaaaaaaaaaaaaaaaaaugcaucccccccccccccccccccccccccccccccaaaggcucuuuucagagccaccagaauu

SEQ ID NO: 13035 - RNA, 4333 nt, Artificial Sequence
  SARS-CoV-2/Wuhan/WIV05/2019__EPI_ISL_402128 spike protein mRNA gc mod (1-1211)(P715C_P1069C) LumSynth construct
aggagaaagcuuaccauguucguguuucuggugcugcugccccugguguccagccagugugugaaccugaccaccagaacacagcugccuccagccuacaccaacagcuucaccagaggcguguacuaccccgacaagguguucagauccagcgugcugcacucuacccaggaccuguuccugccuuucuucagcaacgugaccugguuccacgccauccacguguccggcaccaauggcaccaagagauucgacaaccccgugcugcccuucaacgacgggguguacuuugccagcaccgagaaguccaacaucaucagaggcuggaucuucggcaccacacuggacagcaagacccagagccugcugaucgugaacaacgccaccaacguggucaucaaagugugcgaguuccaguucugcaacgaccccuuccugggcgucuacuaccacaagaacaacaagagcuggauggaaagcgaguuccggguguacagcagcgccaacaacugcaccuucgaguacgugucccagccuuuccugauggaccuggaaggcaagcagggcaacuucaagaaccugcgcgaguucguguucaagaacaucgacggcuacuucaaaaucuacagcaagcacaccccuaucaaccucgugcgggaucugccucagggcuucucugcucuggaaccccugguggaucugcccaucggcaucaacaucacccgguuucagacacugcuggcccugcacagaagcuaccugacaccuggcgauagcagcagcggauggacagcuggugccgccgcuuacuaugugggcuaccugcagccuagaaccuuccugcugaaguacaacgagaacggcaccaucaccgacgccguggauugugcucuggauccucugagcgagacaaagugcacccugaaguccuucaccguggaaaagggcaucuaccagaccagcaacuuccgggugcagcccaccgaauccaucgugcgguuccccaauaucaccaaucugugccccuucggcgagguguucaaugccaccagauucgccucuguguacgccuggaaccggaagcggaucagcaauugcguggccgacuacuccgugcuguacaacuccgccagcuucagcaccuucaagugcuacggcguguccccuaccaagcugaacgaccugugcuucacaaacguguacgccgacagcuucgugauccggggagaugaagugcggcagauugccccuggacagacaggcaagaucgccgacuacaacuacaagcugcccgacgacuucaccggcugugugauugccuggaacagcaacaaccuggacuccaaagucggcggcaacuacaauuaccuguaccggcuguuccggaaguccaaucugaagcccuucgagcgggacaucagcaccgaaaucuaucaggccggcagcaccccuugcaacggcguggaaggcuucaacugcuacuucccacugcaguccuacggcuuucagcccacaaauggcgugggcuaucagcccuacagagugguggugcugagcuucgaacugcugcaugcuccugccacagugugcggcccuaagaaaagcaccaaucucgugaagaacaaaugcgugaacuucaacuucaacggccugaccggcaccggcgugcugacagagagcaacaagaaguuccugccauuccagcaguuuggccgggauaucgccgauaccacagacgccguuagagauccccagacacuggaaauccuggacaucaccccaugcagcuucggcggagugucugugaucaccccuggcaccaacaccagcaaucagguggcagugcuguaccaggacgugaacuguaccgaagugcccguggccauucacgccgaucagcugacaccuacauggcggguguacuccaccggcagcaauguguuucagaccagagccggcugucugaucggagccgagcacgugaacaauagcuacgagugcgacauccccaucggcgcuggcaucugugccagcuaccagacacagacaaacagccccagacgggcuagaagcguggccagccagagcaucauugccuacacaaugucucugggcgccgagaacagcguggccuacuccaacaacucuaucgcuaucugcaccaacuucaccaucagcgugaccaccgagauccugccuguguccaugaccaagaccagcguggacugcaccauguacaucugcggcgauuccaccgagugcuccaaccugcugcugcaguacggcagcuucugcacccagcugaauagagcccugacagggaucgccguggaacaggacaagaacacccaagagguguucgcccaagugaagcaaaucuacaagaccccuccuaucaaggacuucggcggcuucaauuucagccagauucugcccgauccuagcaagcccagcaagcggagcuucaucgaggaccugcuguucaacaaagugacacuggccgacgccggcuucaucaagcaguauggcgauugucugggcgacauugccgccagggaucugauuugcgcccagaaguuuaacggacugacagugcugccuccucugcugaccgaugagaugaucgcccaguacacaucugcccugcuggccggcacaaucacaagcggcuggacauuuggagcuggcgccgcucugcagauccccuuugcuaugcagauggccuaccgguucaacggcaucggagugacccagaaugugcuguacgagaaccagaagcugaucgccaaccaguucaacagcgccaucggcaagauccaggacagccugagcagcacagcaagcgcccugggaaagcugcaggacguggucaaccagaaugcccaggcacugaacacccuggucaagcagcuguccuccaacuucggcgccaucagcucugugcugaacgauauccugagcagacuggacaaggucgaggccgaggugcagaucgacagacugaucacaggcagacugcagagccuccagacauacgugacccagcagcugaucagagccgccgagauuagagccucugccaaucuggccgccaccaagaugucugagugugugcugggccagagcaagagaguggacuuuugcggcaagggcuaccaccugaugagcuucccucagucugccccucacggcgugguguuucugcacgugacauaugugugugcucaagagaagaauuucaccaccgcuccagccaucugccacgacggcaaagcccacuuuccuagagaaggcguguucguguccaacggcacccauugguucgugacacagcggaacuucuacgagccccagaucaucaccaccgacaacaccuucgugucuggcaacugcgacguugugaucggcauugugaacaauaccguguacgacccucugcagcccgagcuggacagcuucaaagaggaacuggacaaguacuuuaagaaccacacaagccccgacguggaccugggcgauaucagcggaaucaaugccagcgucgugaacauccagaaagagaucgaccggcugaacgagguggccaagaaucugaacgagagccugaucgaccugcaagaacuggggaaguacgagcaguacaucaagggcggaggaucuggcggaggacagaucuacgagggcaagcugacagccgagggccugagauuuggaaucguggccagccgguucaaucacgcccugguggauagacugguggaaggcgccaucgaugccauugucagacacggcggcagagaagaggacaucacccucguuagagugcccggcucuugggagauuccuguggcugcuggcgagcuggcccggaaagaagauaucgacgccguuaucgccaucggcgugcugaucagaggcgccacaccucacuucgacuauaucgccagcgagguguccaaaggccuggccgaucugagccuggaacugagaaagcccaucaccuucggcgugaucaccgcugacacacuggaacaggccauugagagagccggcaccaagcacggcaacaaaggaugggaagccgcucuguccgccaucgagauggccaaccuguucaagagccugcggugaggacuaguuauaagacugacuagcccgaugggccucccaacgggcccuccuccccuccuugcaccgagauuaauaaaaaaaaaaaaaaaaaaaaaaaaaaaaaaaaaaaaaaaaaaaaaaaaaaaaaaaaaaaaaaaaugcaucccccccccccccccccccccccccccccccaaaggcucuuuucagagccaccagaauu

SEQ ID NO: 13036 - RNA, 4333 nt, Artificial Sequence
  SARS-CoV-2/Wuhan/WIV05/2019__EPI_ISL_402128 spike protein mRNA gc mod (1-1211)(G889C_L1034C) LumSynth construct
aggagaaagcuuaccauguucguguuucuggugcugcugccccugguguccagccagugugugaaccugaccaccagaacacagcugccuccagccuacaccaacagcuucaccagaggcguguacuaccccgacaagguguucagauccagcgugcugcacucuacccaggaccuguuccugccuuucuucagcaacgugaccugguuccacgccauccacguguccggcaccaauggcaccaagagauucgacaaccccgugcugcccuucaacgacgggguguacuuugccagcaccgagaaguccaacaucaucagaggcuggaucuucggcaccacacuggacagcaagacccagagccugcugaucgugaacaacgccaccaacguggucaucaaagugugcgaguuccaguucugcaacgaccccuuccugggcgucuacuaccacaagaacaacaagagcuggauggaaagcgaguuccggguguacagcagcgccaacaacugcaccuucgaguacgugucccagccuuuccugauggaccuggaaggcaagcagggcaacuucaagaaccugcgcgaguucguguucaagaacaucgacggcuacuucaaaaucuacagcaagcacaccccuaucaaccucgugcgggaucugccucagggcuucucugcucuggaaccccugguggaucugcccaucggcaucaacaucacccgguuucagacacugcuggcccugcacagaagcuaccugacaccuggcgauagcagcagcggauggacagcuggugccgccgcuuacuaugugggcuaccugcagccuagaaccuuccugcugaaguacaacgagaacggcaccaucaccgacgccguggauugugcucuggauccucugagcgagacaaagugcacccugaaguccuucaccguggaaaagggcaucuaccagaccagcaacuuccgggugcagcccaccgaauccaucgugcgguuccccaauaucaccaaucugugccccuucggcgagguguucaaugccaccagauucgccucuguguacgccuggaaccggaagcggaucagcaauugcguggccgacuacuccgugcuguacaacuccgccagcuucagcaccuucaagugcuacggcguguccccuaccaagcugaacgaccugugcuucacaaacguguacgccgacagcuucgugauccggggagaugaagugcggcagauugccccuggacagacaggcaagaucgccgacuacaacuacaagcugcccgacgacuucaccggcugugugauugccuggaacagcaacaaccuggacuccaaagucggcggcaacuacaauuaccuguaccggcuguuccggaaguccaaucugaagcccuucgagcgggacaucagcaccgaaaucuaucaggccggcagcaccccuugcaacggcguggaaggcuucaacugcuacuucccacugcaguccuacggcuuucagcccacaaauggcgugggcuaucagcccuacagagugguggugcugagcuucgaacugcugcaugcuccugccacagugugcggcccuaagaaaagcaccaaucucgugaagaacaaaugcgugaacuucaacuucaacggccugaccggcaccggcgugcugacagagagcaacaagaaguuccugccauuccagcaguuuggccgggauaucgccgauaccacagacgccguuagagauccccagacacuggaaauccuggacaucaccccaugcagcuucggcggagugucugugaucaccccuggcaccaacaccagcaaucagguggcagugcuguaccaggacgugaacuguaccgaagugcccguggccauucacgccgaucagcugacaccuacauggcggguguacuccaccggcagcaauguguuucagaccagagccggcugucugaucggagccgagcacgugaacaauagcuacgagugcgacauccccaucggcgcuggcaucugugccagcuaccagacacagacaaacagccccagacgggcuagaagcguggccagccagagcaucauugccuacacaaugucucugggcgccgagaacagcguggccuacuccaacaacucuaucgcuauccccaccaacuucaccaucagcgugaccaccgagauccugccuguguccaugaccaagaccagcguggacugcaccauguacaucugcggcgauuccaccgagugcuccaaccugcugcugcaguacggcagcuucugcacccagcugaauagagcccugacagggaucgccguggaacaggacaagaacacccaagagguguucgcccaagugaagcaaaucuacaagaccccuccuaucaaggacuucggcggcuucaauuucagccagauucugcccgauccuagcaagcccagcaagcggagcuucaucgaggaccugcuguucaacaaagugacacuggccgacgccggcuucaucaagcaguauggcgauugucugggcgacauugccgccagggaucugauuugcgcccagaaguuuaacggacugacagugcugccuccucugcugaccgaugagaugaucgcccaguacacaucugcccugcuggccggcacaaucacaagcggcuggacauuuugcgcuggcgccgcucugcagauccccuuugcuaugcagauggccuaccgguucaacggcaucggagugacccagaaugugcuguacgagaaccagaagcugaucgccaaccaguucaacagcgccaucggcaagauccaggacagccugagcagcacagcaagcgcccugggaaagcugcaggacguggucaaccagaaugcccaggcacugaacacccuggucaagcagcuguccuccaacuucggcgccaucagcucugugcugaacgauauccugagcagacuggacaaggucgaggccgaggugcagaucgacagacugaucacaggcagacugcagagccuccagacauacgugacccagcagcugaucagagccgccgagauuagagccucugccaaucuggccgccaccaagaugucugaguguguguguggccagagcaagagaguggacuuuugcggcaagggcuaccaccugaugagcuucccucagucugccccucacggcgugguguuucugcacgugacauaugugcccgcucaagagaagaauuucaccaccgcuccagccaucugccacgacggcaaagcccacuuuccuagagaaggcguguucguguccaacggcacccauugguucgugacacagcggaacuucuacgagccccagaucaucaccaccgacaacaccuucgugucuggcaacugcgacguugugaucggcauugugaacaauaccguguacgacccucugcagcccgagcuggacagcuucaaagaggaacuggacaaguacuuuaagaaccacacaagccccgacguggaccugggcgauaucagcggaaucaaugccagcgucgugaacauccagaaagagaucgaccggcugaacgagguggccaagaaucugaacgagagccugaucgaccugcaagaacuggggaaguacgagcaguacaucaagggcggaggaucuggcggaggacagaucuacgagggcaagcugacagccgagggccugagauuuggaaucguggccagccgguucaaucacgcccugguggauagacugguggaaggcgccaucgaugccauugucagacacggcggcagagaagaggacaucacccucguuagagugcccggcucuugggagauuccuguggcugcuggcgagcuggcccggaaagaagauaucgacgccguuaucgccaucggcgugcugaucagaggcgccacaccucacuucgacuauaucgccagcgagguguccaaaggccuggccgaucugagccuggaacugagaaagcccaucaccuucggcgugaucaccgcugacacacuggaacaggccauugagagagccggcaccaagcacggcaacaaaggaugggaagccgcucuguccgccaucgagauggccaaccuguucaagagccugcggugaggacuaguuauaagacugacuagcccgaugggccucccaacgggcccuccuccccuccuugcaccgagauuaauaaaaaaaaaaaaaaaaaaaaaaaaaaaaaaaaaaaaaaaaaaaaaaaaaaaaaaaaaaaaaaaaugcaucccccccccccccccccccccccccccccccaaaggcucuuuucagagccaccagaauu

SEQ ID NO: 13037 - RNA, 4333 nt, Artificial Sequence
  SARS-CoV-2/Wuhan/WIV05/2019__EPI_ISL_402128 spike protein mRNA gc mod (1-1211)(I909C_Y1047C) LumSynth construct
aggagaaagcuuaccauguucguguuucuggugcugcugccccugguguccagccagugugugaaccugaccaccagaacacagcugccuccagccuacaccaacagcuucaccagaggcguguacuaccccgacaagguguucagauccagcgugcugcacucuacccaggaccuguuccugccuuucuucagcaacgugaccugguuccacgccauccacguguccggcaccaauggcaccaagagauucgacaaccccgugcugcccuucaacgacgggguguacuuugccagcaccgagaaguccaacaucaucagaggcuggaucuucggcaccacacuggacagcaagacccagagccugcugaucgugaacaacgccaccaacguggucaucaaagugugcgaguuccaguucugcaacgaccccuuccugggcgucuacuaccacaagaacaacaagagcuggauggaaagcgaguuccggguguacagcagcgccaacaacugcaccuucgaguacgugucccagccuuuccugauggaccuggaaggcaagcagggcaacuucaagaaccugcgcgaguucguguucaagaacaucgacggcuacuucaaaaucuacagcaagcacaccccuaucaaccucgugcgggaucugccucagggcuucucugcucuggaaccccugguggaucugcccaucggcaucaacaucacccgguuucagacacugcuggcccugcacagaagcuaccugacaccuggcgauagcagcagcggauggacagcuggugccgccgcuuacuaugugggcuaccugcagccuagaaccuuccugcugaaguacaacgagaacggcaccaucaccgacgccguggauugugcucuggauccucugagcgagacaaagugcacccugaaguccuucaccguggaaaagggcaucuaccagaccagcaacuuccgggugcagcccaccgaauccaucgugcgguuccccaauaucaccaaucugugccccuucggcgagguguucaaugccaccagauucgccucuguguacgccuggaaccggaagcggaucagcaauugcguggccgacuacuccgugcuguacaacuccgccagcuucagcaccuucaagugcuacggcguguccccuaccaagcugaacgaccugugcuucacaaacguguacgccgacagcuucgugauccggggagaugaagugcggcagauugccccuggacagacaggcaagaucgccgacuacaacuacaagcugcccgacgacuucaccggcugugugauugccuggaacagcaacaaccuggacuccaaagucggcggcaacuacaauuaccuguaccggcuguuccggaaguccaaucugaagcccuucgagcgggacaucagcaccgaaaucuaucaggccggcagcaccccuugcaacggcguggaaggcuucaacugcuacuucccacugcaguccuacggcuuucagcccacaaauggcgugggcuaucagcccuacagagugguggugcugagcuucgaacugcugcaugcuccugccacagugugcggcccuaagaaaagcaccaaucucgugaagaacaaaugcgugaacuucaacuucaacggccugaccggcaccggcgugcugacagagagcaacaagaaguuccugccauuccagcaguuuggccgggauaucgccgauaccacagacgccguuagagauccccagacacuggaaauccuggacaucaccccaugcagcuucggcggagugucugugaucaccccuggcaccaacaccagcaaucagguggcagugcuguaccaggacgugaacuguaccgaagugcccguggccauucacgccgaucagcugacaccuacauggcggguguacuccaccggcagcaauguguuucagaccagagccggcugucugaucggagccgagcacgugaacaauagcuacgagugcgacauccccaucggcgcuggcaucugugccagcuaccagacacagacaaacagccccagacgggcuagaagcguggccagccagagcaucauugccuacacaaugucucugggcgccgagaacagcguggccuacuccaacaacucuaucgcuauccccaccaacuucaccaucagcgugaccaccgagauccugccuguguccaugaccaagaccagcguggacugcaccauguacaucugcggcgauuccaccgagugcuccaaccugcugcugcaguacggcagcuucugcacccagcugaauagagcccugacagggaucgccguggaacaggacaagaacacccaagagguguucgcccaagugaagcaaaucuacaagaccccuccuaucaaggacuucggcggcuucaauuucagccagauucugcccgauccuagcaagcccagcaagcggagcuucaucgaggaccugcuguucaacaaagugacacuggccgacgccggcuucaucaagcaguauggcgauugucugggcgacauugccgccagggaucugauuugcgcccagaaguuuaacggacugacagugcugccuccucugcugaccgaugagaugaucgcccaguacacaucugcccugcuggccggcacaaucacaagcggcuggacauuuggagcuggcgccgcucugcagauccccuuugcuaugcagauggccuaccgguucaacggcugcggagugacccagaaugugcuguacgagaaccagaagcugaucgccaaccaguucaacagcgccaucggcaagauccaggacagccugagcagcacagcaagcgcccugggaaagcugcaggacguggucaaccagaaugcccaggcacugaacacccuggucaagcagcuguccuccaacuucggcgccaucagcucugugcugaacgauauccugagcagacuggacaaggucgaggccgaggugcagaucgacagacugaucacaggcagacugcagagccuccagacauacgugacccagcagcugaucagagccgccgagauuagagccucugccaaucuggccgccaccaagaugucugagugugugcugggccagagcaagagaguggacuuuugcggcaagggcugucaccugaugagcuucccucagucugccccucacggcgugguguuucugcacgugacauaugugcccgcucaagagaagaauuucaccaccgcuccagccaucugccacgacggcaaagcccacuuuccuagagaaggcguguucguguccaacggcacccauugguucgugacacagcggaacuucuacgagccccagaucaucaccaccgacaacaccuucgugucuggcaacugcgacguugugaucggcauugugaacaauaccguguacgacccucugcagcccgagcuggacagcuucaaagaggaacuggacaaguacuuuaagaaccacacaagccccgacguggaccugggcgauaucagcggaaucaaugccagcgucgugaacauccagaaagagaucgaccggcugaacgagguggccaagaaucugaacgagagccugaucgaccugcaagaacuggggaaguacgagcaguacaucaagggcggaggaucuggcggaggacagaucuacgagggcaagcugacagccgagggccugagauuuggaaucguggccagccgguucaaucacgcccugguggauagacugguggaaggcgccaucgaugccauugucagacacggcggcagagaagaggacaucacccucguuagagugcccggcucuugggagauuccuguggcugcuggcgagcuggcccggaaagaagauaucgacgccguuaucgccaucggcgugcugaucagaggcgccacaccucacuucgacuauaucgccagcgagguguccaaaggccuggccgaucugagccuggaacugagaaagcccaucaccuucggcgugaucaccgcugacacacuggaacaggccauugagagagccggcaccaagcacggcaacaaaggaugggaagccgcucuguccgccaucgagauggccaaccuguucaagagccugcggugaggacuaguuauaagacugacuagcccgaugggccucccaacgggcccuccuccccuccuugcaccgagauuaauaaaaaaaaaaaaaaaaaaaaaaaaaaaaaaaaaaaaaaaaaaaaaaaaaaaaaaaaaaaaaaaaugcaucccccccccccccccccccccccccccccccaaaggcucuuuucagagccaccagaauu

SEQ ID NO: 13038 - RNA, 4333 nt, Artificial Sequence
  SARS-CoV-2/Wuhan/WIV05/2019__EPI_ISL_402128 spike protein mRNA gc mod (1-1211)(Q965C_S1003C) LumSynth construct
aggagaaagcuuaccauguucguguuucuggugcugcugccccugguguccagccagugugugaaccugaccaccagaacacagcugccuccagccuacaccaacagcuucaccagaggcguguacuaccccgacaagguguucagauccagcgugcugcacucuacccaggaccuguuccugccuuucuucagcaacgugaccugguuccacgccauccacguguccggcaccaauggcaccaagagauucgacaaccccgugcugcccuucaacgacgggguguacuuugccagcaccgagaaguccaacaucaucagaggcuggaucuucggcaccacacuggacagcaagacccagagccugcugaucgugaacaacgccaccaacguggucaucaaagugugcgaguuccaguucugcaacgaccccuuccugggcgucuacuaccacaagaacaacaagagcuggauggaaagcgaguuccggguguacagcagcgccaacaacugcaccuucgaguacgugucccagccuuuccugauggaccuggaaggcaagcagggcaacuucaagaaccugcgcgaguucguguucaagaacaucgacggcuacuucaaaaucuacagcaagcacaccccuaucaaccucgugcgggaucugccucagggcuucucugcucuggaaccccugguggaucugcccaucggcaucaacaucacccgguuucagacacugcuggcccugcacagaagcuaccugacaccuggcgauagcagcagcggauggacagcuggugccgccgcuuacuaugugggcuaccugcagccuagaaccuuccugcugaaguacaacgagaacggcaccaucaccgacgccguggauugugcucuggauccucugagcgagacaaagugcacccugaaguccuucaccguggaaaagggcaucuaccagaccagcaacuuccgggugcagcccaccgaauccaucgugcgguuccccaauaucaccaaucugugccccuucggcgagguguucaaugccaccagauucgccucuguguacgccuggaaccggaagcggaucagcaauugcguggccgacuacuccgugcuguacaacuccgccagcuucagcaccuucaagugcuacggcguguccccuaccaagcugaacgaccugugcuucacaaacguguacgccgacagcuucgugauccggggagaugaagugcggcagauugccccuggacagacaggcaagaucgccgacuacaacuacaagcugcccgacgacuucaccggcugugugauugccuggaacagcaacaaccuggacuccaaagucggcggcaacuacaauuaccuguaccggcuguuccggaaguccaaucugaagcccuucgagcgggacaucagcaccgaaaucuaucaggccggcagcaccccuugcaacggcguggaaggcuucaacugcuacuucccacugcaguccuacggcuuucagcccacaaauggcgugggcuaucagcccuacagagugguggugcugagcuucgaacugcugcaugcuccugccacagugugcggcccuaagaaaagcaccaaucucgugaagaacaaaugcgugaacuucaacuucaacggccugaccggcaccggcgugcugacagagagcaacaagaaguuccugccauuccagcaguuuggccgggauaucgccgauaccacagacgccguuagagauccccagacacuggaaauccuggacaucaccccaugcagcuucggcggagugucugugaucaccccuggcaccaacaccagcaaucagguggcagugcuguaccaggacgugaacuguaccgaagugcccguggccauucacgccgaucagcugacaccuacauggcggguguacuccaccggcagcaauguguuucagaccagagccggcugucugaucggagccgagcacgugaacaauagcuacgagugcgacauccccaucggcgcuggcaucugugccagcuaccagacacagacaaacagccccagacgggcuagaagcguggccagccagagcaucauugccuacacaaugucucugggcgccgagaacagcguggccuacuccaacaacucuaucgcuauccccaccaacuucaccaucagcgugaccaccgagauccugccuguguccaugaccaagaccagcguggacugcaccauguacaucugcggcgauuccaccgagugcuccaaccugcugcugcaguacggcagcuucugcacccagcugaauagagcccugacagggaucgccguggaacaggacaagaacacccaagagguguucgcccaagugaagcaaaucuacaagaccccuccuaucaaggacuucggcggcuucaauuucagccagauucugcccgauccuagcaagcccagcaagcggagcuucaucgaggaccugcuguucaacaaagugacacuggccgacgccggcuucaucaagcaguauggcgauugucugggcgacauugccgccagggaucugauuugcgcccagaaguuuaacggacugacagugcugccuccucugcugaccgaugagaugaucgcccaguacacaucugcccugcuggccggcacaaucacaagcggcuggacauuuggagcuggcgccgcucugcagauccccuuugcuaugcagauggccuaccgguucaacggcaucggagugacccagaaugugcuguacgagaaccagaagcugaucgccaaccaguucaacagcgccaucggcaagauccaggacagccugagcagcacagcaagcgcccugggaaagcugcaggacguggucaaccagaaugcccaggcacugaacacccuggucaagugccuguccuccaacuucggcgccaucagcucugugcugaacgauauccugagcagacuggacaaggucgaggccgaggugcagaucgacagacugaucacaggcagacugcagugucuccagacauacgugacccagcagcugaucagagccgccgagauuagagccucugccaaucuggccgccaccaagaugucugagugugugcugggccagagcaagagaguggacuuuugcggcaagggcuaccaccugaugagcuucccucagucugccccucacggcgugguguuucugcacgugacauaugugcccgcucaagagaagaauuucaccaccgcuccagccaucugccacgacggcaaagcccacuuuccuagagaaggcguguucguguccaacggcacccauugguucgugacacagcggaacuucuacgagccccagaucaucaccaccgacaacaccuucgugucuggcaacugcgacguugugaucggcauugugaacaauaccguguacgacccucugcagcccgagcuggacagcuucaaagaggaacuggacaaguacuuuaagaaccacacaagccccgacguggaccugggcgauaucagcggaaucaaugccagcgucgugaacauccagaaagagaucgaccggcugaacgagguggccaagaaucugaacgagagccugaucgaccugcaagaacuggggaaguacgagcaguacaucaagggcggaggaucuggcggaggacagaucuacgagggcaagcugacagccgagggccugagauuuggaaucguggccagccgguucaaucacgcccugguggauagacugguggaaggcgccaucgaugccauugucagacacggcggcagagaagaggacaucacccucguuagagugcccggcucuugggagauuccuguggcugcuggcgagcuggcccggaaagaagauaucgacgccguuaucgccaucggcgugcugaucagaggcgccacaccucacuucgacuauaucgccagcgagguguccaaaggccuggccgaucugagccuggaacugagaaagcccaucaccuucggcgugaucaccgcugacacacuggaacaggccauugagagagccggcaccaagcacggcaacaaaggaugggaagccgcucuguccgccaucgagauggccaaccuguucaagagccugcggugaggacuaguuauaagacugacuagcccgaugggccucccaacgggcccuccuccccuccuugcaccgagauuaauaaaaaaaaaaaaaaaaaaaaaaaaaaaaaaaaaaaaaaaaaaaaaaaaaaaaaaaaaaaaaaaaugcaucccccccccccccccccccccccccccccccaaaggcucuuuucagagccaccagaauu

SEQ ID NO: 13039 - RNA, 4333 nt, Artificial Sequence
  SARS-CoV-2/Wuhan/WIV05/2019__EPI_ISL_402128 spike protein mRNA gc mod (1-1211)(F970C_G999C) LumSynth construct
aggagaaagcuuaccauguucguguuucuggugcugcugccccugguguccagccagugugugaaccugaccaccagaacacagcugccuccagccuacaccaacagcuucaccagaggcguguacuaccccgacaagguguucagauccagcgugcugcacucuacccaggaccuguuccugccuuucuucagcaacgugaccugguuccacgccauccacguguccggcaccaauggcaccaagagauucgacaaccccgugcugcccuucaacgacgggguguacuuugccagcaccgagaaguccaacaucaucagaggcuggaucuucggcaccacacuggacagcaagacccagagccugcugaucgugaacaacgccaccaacguggucaucaaagugugcgaguuccaguucugcaacgaccccuuccugggcgucuacuaccacaagaacaacaagagcuggauggaaagcgaguuccggguguacagcagcgccaacaacugcaccuucgaguacgugucccagccuuuccugauggaccuggaaggcaagcagggcaacuucaagaaccugcgcgaguucguguucaagaacaucgacggcuacuucaaaaucuacagcaagcacaccccuaucaaccucgugcgggaucugccucagggcuucucugcucuggaaccccugguggaucugcccaucggcaucaacaucacccgguuucagacacugcuggcccugcacagaagcuaccugacaccuggcgauagcagcagcggauggacagcuggugccgccgcuuacuaugugggcuaccugcagccuagaaccuuccugcugaaguacaacgagaacggcaccaucaccgacgccguggauugugcucuggauccucugagcgagacaaagugcacccugaaguccuucaccguggaaaagggcaucuaccagaccagcaacuuccgggugcagcccaccgaauccaucgugcgguuccccaauaucaccaaucugugccccuucggcgagguguucaaugccaccagauucgccucuguguacgccuggaaccggaagcggaucagcaauugcguggccgacuacuccgugcuguacaacuccgccagcuucagcaccuucaagugcuacggcguguccccuaccaagcugaacgaccugugcuucacaaacguguacgccgacagcuucgugauccggggagaugaagugcggcagauugccccuggacagacaggcaagaucgccgacuacaacuacaagcugcccgacgacuucaccggcugugugauugccuggaacagcaacaaccuggacuccaaagucggcggcaacuacaauuaccuguaccggcuguuccggaaguccaaucugaagcccuucgagcgggacaucagcaccgaaaucuaucaggccggcagcaccccuugcaacggcguggaaggcuucaacugcuacuucccacugcaguccuacggcuuucagcccacaaauggcgugggcuaucagcccuacagagugguggugcugagcuucgaacugcugcaugcuccugccacagugugcggcccuaagaaaagcaccaaucucgugaagaacaaaugcgugaacuucaacuucaacggccugaccggcaccggcgugcugacagagagcaacaagaaguuccugccauuccagcaguuuggccgggauaucgccgauaccacagacgccguuagagauccccagacacuggaaauccuggacaucaccccaugcagcuucggcggagugucugugaucaccccuggcaccaacaccagcaaucagguggcagugcuguaccaggacgugaacuguaccgaagugcccguggccauucacgccgaucagcugacaccuacauggcggguguacuccaccggcagcaauguguuucagaccagagccggcugucugaucggagccgagcacgugaacaauagcuacgagugcgacauccccaucggcgcuggcaucugugccagcuaccagacacagacaaacagccccagacgggcuagaagcguggccagccagagcaucauugccuacacaaugucucugggcgccgagaacagcguggccuacuccaacaacucuaucgcuauccccaccaacuucaccaucagcgugaccaccgagauccugccuguguccaugaccaagaccagcguggacugcaccauguacaucugcggcgauuccaccgagugcuccaaccugcugcugcaguacggcagcuucugcacccagcugaauagagcccugacagggaucgccguggaacaggacaagaacacccaagagguguucgcccaagugaagcaaaucuacaagaccccuccuaucaaggacuucggcggcuucaauuucagccagauucugcccgauccuagcaagcccagcaagcggagcuucaucgaggaccugcuguucaacaaagugacacuggccgacgccggcuucaucaagcaguauggcgauugucugggcgacauugccgccagggaucugauuugcgcccagaaguuuaacggacugacagugcugccuccucugcugaccgaugagaugaucgcccaguacacaucugcccugcuggccggcacaaucacaagcggcuggacauuuggagcuggcgccgcucugcagauccccuuugcuaugcagauggccuaccgguucaacggcaucggagugacccagaaugugcuguacgagaaccagaagcugaucgccaaccaguucaacagcgccaucggcaagauccaggacagccugagcagcacagcaagcgcccugggaaagcugcaggacguggucaaccagaaugcccaggcacugaacacccuggucaagcagcuguccuccaacugcggcgccaucagcucugugcugaacgauauccugagcagacuggacaaggucgaggccgaggugcagaucgacagacugaucacauguagacugcagagccuccagacauacgugacccagcagcugaucagagccgccgagauuagagccucugccaaucuggccgccaccaagaugucugagugugugcugggccagagcaagagaguggacuuuugcggcaagggcuaccaccugaugagcuucccucagucugccccucacggcgugguguuucugcacgugacauaugugcccgcucaagagaagaauuucaccaccgcuccagccaucugccacgacggcaaagcccacuuuccuagagaaggcguguucguguccaacggcacccauugguucgugacacagcggaacuucuacgagccccagaucaucaccaccgacaacaccuucgugucuggcaacugcgacguugugaucggcauugugaacaauaccguguacgacccucugcagcccgagcuggacagcuucaaagaggaacuggacaaguacuuuaagaaccacacaagccccgacguggaccugggcgauaucagcggaaucaaugccagcgucgugaacauccagaaagagaucgaccggcugaacgagguggccaagaaucugaacgagagccugaucgaccugcaagaacuggggaaguacgagcaguacaucaagggcggaggaucuggcggaggacagaucuacgagggcaagcugacagccgagggccugagauuuggaaucguggccagccgguucaaucacgcccugguggauagacugguggaaggcgccaucgaugccauugucagacacggcggcagagaagaggacaucacccucguuagagugcccggcucuugggagauuccuguggcugcuggcgagcuggcccggaaagaagauaucgacgccguuaucgccaucggcgugcugaucagaggcgccacaccucacuucgacuauaucgccagcgagguguccaaaggccuggccgaucugagccuggaacugagaaagcccaucaccuucggcgugaucaccgcugacacacuggaacaggccauugagagagccggcaccaagcacggcaacaaaggaugggaagccgcucuguccgccaucgagauggccaaccuguucaagagccugcggugaggacuaguuauaagacugacuagcccgaugggccucccaacgggcccuccuccccuccuugcaccgagauuaauaaaaaaaaaaaaaaaaaaaaaaaaaaaaaaaaaaaaaaaaaaaaaaaaaaaaaaaaaaaaaaaaugcaucccccccccccccccccccccccccccccccaaaggcucuuuucagagccaccagaauu

SEQ ID NO: 13040 - RNA, 4333 nt, Artificial Sequence
  SARS-CoV-2/Wuhan/WIV05/2019__EPI_ISL_402128 spike protein mRNA gc mod (1-1211)(A972C_R995C) LumSynth construct
aggagaaagcuuaccauguucguguuucuggugcugcugccccugguguccagccagugugugaaccugaccaccagaacacagcugccuccagccuacaccaacagcuucaccagaggcguguacuaccccgacaagguguucagauccagcgugcugcacucuacccaggaccuguuccugccuuucuucagcaacgugaccugguuccacgccauccacguguccggcaccaauggcaccaagagauucgacaaccccgugcugcccuucaacgacgggguguacuuugccagcaccgagaaguccaacaucaucagaggcuggaucuucggcaccacacuggacagcaagacccagagccugcugaucgugaacaacgccaccaacguggucaucaaagugugcgaguuccaguucugcaacgaccccuuccugggcgucuacuaccacaagaacaacaagagcuggauggaaagcgaguuccggguguacagcagcgccaacaacugcaccuucgaguacgugucccagccuuuccugauggaccuggaaggcaagcagggcaacuucaagaaccugcgcgaguucguguucaagaacaucgacggcuacuucaaaaucuacagcaagcacaccccuaucaaccucgugcgggaucugccucagggcuucucugcucuggaaccccugguggaucugcccaucggcaucaacaucacccgguuucagacacugcuggcccugcacagaagcuaccugacaccuggcgauagcagcagcggauggacagcuggugccgccgcuuacuaugugggcuaccugcagccuagaaccuuccugcugaaguacaacgagaacggcaccaucaccgacgccguggauugugcucuggauccucugagcgagacaaagugcacccugaaguccuucaccguggaaaagggcaucuaccagaccagcaacuuccgggugcagcccaccgaauccaucgugcgguuccccaauaucaccaaucugugccccuucggcgagguguucaaugccaccagauucgccucuguguacgccuggaaccggaagcggaucagcaauugcguggccgacuacuccgugcuguacaacuccgccagcuucagcaccuucaagugcuacggcguguccccuaccaagcugaacgaccugugcuucacaaacguguacgccgacagcuucgugauccggggagaugaagugcggcagauugccccuggacagacaggcaagaucgccgacuacaacuacaagcugcccgacgacuucaccggcugugugauugccuggaacagcaacaaccuggacuccaaagucggcggcaacuacaauuaccuguaccggcuguuccggaaguccaaucugaagcccuucgagcgggacaucagcaccgaaaucuaucaggccggcagcaccccuugcaacggcguggaaggcuucaacugcuacuucccacugcaguccuacggcuuucagcccacaaauggcgugggcuaucagcccuacagagugguggugcugagcuucgaacugcugcaugcuccugccacagugugcggcccuaagaaaagcaccaaucucgugaagaacaaaugcgugaacuucaacuucaacggccugaccggcaccggcgugcugacagagagcaacaagaaguuccugccauuccagcaguuuggccgggauaucgccgauaccacagacgccguuagagauccccagacacuggaaauccuggacaucaccccaugcagcuucggcggagugucugugaucaccccuggcaccaacaccagcaaucagguggcagugcuguaccaggacgugaacuguaccgaagugcccguggccauucacgccgaucagcugacaccuacauggcggguguacuccaccggcagcaauguguuucagaccagagccggcugucugaucggagccgagcacgugaacaauagcuacgagugcgacauccccaucggcgcuggcaucugugccagcuaccagacacagacaaacagccccagacgggcuagaagcguggccagccagagcaucauugccuacacaaugucucugggcgccgagaacagcguggccuacuccaacaacucuaucgcuauccccaccaacuucaccaucagcgugaccaccgagauccugccuguguccaugaccaagaccagcguggacugcaccauguacaucugcggcgauuccaccgagugcuccaaccugcugcugcaguacggcagcuucugcacccagcugaauagagcccugacagggaucgccguggaacaggacaagaacacccaagagguguucgcccaagugaagcaaaucuacaagaccccuccuaucaaggacuucggcggcuucaauuucagccagauucugcccgauccuagcaagcccagcaagcggagcuucaucgaggaccugcuguucaacaaagugacacuggccgacgccggcuucaucaagcaguauggcgauugucugggcgacauugccgccagggaucugauuugcgcccagaaguuuaacggacugacagugcugccuccucugcugaccgaugagaugaucgcccaguacacaucugcccugcuggccggcacaaucacaagcggcuggacauuuggagcuggcgccgcucugcagauccccuuugcuaugcagauggccuaccgguucaacggcaucggagugacccagaaugugcuguacgagaaccagaagcugaucgccaaccaguucaacagcgccaucggcaagauccaggacagccugagcagcacagcaagcgcccugggaaagcugcaggacguggucaaccagaaugcccaggcacugaacacccuggucaagcagcuguccuccaacuucggcugcaucagcucugugcugaacgauauccugagcagacuggacaaggucgaggccgaggugcagaucgacugucugaucacaggcagacugcagagccuccagacauacgugacccagcagcugaucagagccgccgagauuagagccucugccaaucuggccgccaccaagaugucugagugugugcugggccagagcaagagaguggacuuuugcggcaagggcuaccaccugaugagcuucccucagucugccccucacggcgugguguuucugcacgugacauaugugcccgcucaagagaagaauuucaccaccgcuccagccaucugccacgacggcaaagcccacuuuccuagagaaggcguguucguguccaacggcacccauugguucgugacacagcggaacuucuacgagccccagaucaucaccaccgacaacaccuucgugucuggcaacugcgacguugugaucggcauugugaacaauaccguguacgacccucugcagcccgagcuggacagcuucaaagaggaacuggacaaguacuuuaagaaccacacaagccccgacguggaccugggcgauaucagcggaaucaaugccagcgucgugaacauccagaaagagaucgaccggcugaacgagguggccaagaaucugaacgagagccugaucgaccugcaagaacuggggaaguacgagcaguacaucaagggcggaggaucuggcggaggacagaucuacgagggcaagcugacagccgagggccugagauuuggaaucguggccagccgguucaaucacgcccugguggauagacugguggaaggcgccaucgaugccauugucagacacggcggcagagaagaggacaucacccucguuagagugcccggcucuugggagauuccuguggcugcuggcgagcuggcccggaaagaagauaucgacgccguuaucgccaucggcgugcugaucagaggcgccacaccucacuucgacuauaucgccagcgagguguccaaaggccuggccgaucugagccuggaacugagaaagcccaucaccuucggcgugaucaccgcugacacacuggaacaggccauugagagagccggcaccaagcacggcaacaaaggaugggaagccgcucuguccgccaucgagauggccaaccuguucaagagccugcggugaggacuaguuauaagacugacuagcccgaugggccucccaacgggcccuccuccccuccuugcaccgagauuaauaaaaaaaaaaaaaaaaaaaaaaaaaaaaaaaaaaaaaaaaaaaaaaaaaaaaaaaaaaaaaaaaugcaucccccccccccccccccccccccccccccccaaaggcucuuuucagagccaccagaauu

SEQ ID NO: 13041 - RNA, 4333 nt, Artificial Sequence
  SARS-CoV-2/Wuhan/WIV05/2019__EPI_ISL_402128 spike protein mRNA gc mod (1-1211)(A890C_V1040C) LumSynth construct
aggagaaagcuuaccauguucguguuucuggugcugcugccccugguguccagccagugugugaaccugaccaccagaacacagcugccuccagccuacaccaacagcuucaccagaggcguguacuaccccgacaagguguucagauccagcgugcugcacucuacccaggaccuguuccugccuuucuucagcaacgugaccugguuccacgccauccacguguccggcaccaauggcaccaagagauucgacaaccccgugcugcccuucaacgacgggguguacuuugccagcaccgagaaguccaacaucaucagaggcuggaucuucggcaccacacuggacagcaagacccagagccugcugaucgugaacaacgccaccaacguggucaucaaagugugcgaguuccaguucugcaacgaccccuuccugggcgucuacuaccacaagaacaacaagagcuggauggaaagcgaguuccggguguacagcagcgccaacaacugcaccuucgaguacgugucccagccuuuccugauggaccuggaaggcaagcagggcaacuucaagaaccugcgcgaguucguguucaagaacaucgacggcuacuucaaaaucuacagcaagcacaccccuaucaaccucgugcgggaucugccucagggcuucucugcucuggaaccccugguggaucugcccaucggcaucaacaucacccgguuucagacacugcuggcccugcacagaagcuaccugacaccuggcgauagcagcagcggauggacagcuggugccgccgcuuacuaugugggcuaccugcagccuagaaccuuccugcugaaguacaacgagaacggcaccaucaccgacgccguggauugugcucuggauccucugagcgagacaaagugcacccugaaguccuucaccguggaaaagggcaucuaccagaccagcaacuuccgggugcagcccaccgaauccaucgugcgguuccccaauaucaccaaucugugccccuucggcgagguguucaaugccaccagauucgccucuguguacgccuggaaccggaagcggaucagcaauugcguggccgacuacuccgugcuguacaacuccgccagcuucagcaccuucaagugcuacggcguguccccuaccaagcugaacgaccugugcuucacaaacguguacgccgacagcuucgugauccggggagaugaagugcggcagauugccccuggacagacaggcaagaucgccgacuacaacuacaagcugcccgacgacuucaccggcugugugauugccuggaacagcaacaaccuggacuccaaagucggcggcaacuacaauuaccuguaccggcuguuccggaaguccaaucugaagcccuucgagcgggacaucagcaccgaaaucuaucaggccggcagcaccccuugcaacggcguggaaggcuucaacugcuacuucccacugcaguccuacggcuuucagcccacaaauggcgugggcuaucagcccuacagagugguggugcugagcuucgaacugcugcaugcuccugccacagugugcggcccuaagaaaagcaccaaucucgugaagaacaaaugcgugaacuucaacuucaacggccugaccggcaccggcgugcugacagagagcaacaagaaguuccugccauuccagcaguuuggccgggauaucgccgauaccacagacgccguuagagauccccagacacuggaaauccuggacaucaccccaugcagcuucggcggagugucugugaucaccccuggcaccaacaccagcaaucagguggcagugcuguaccaggacgugaacuguaccgaagugcccguggccauucacgccgaucagcugacaccuacauggcggguguacuccaccggcagcaauguguuucagaccagagccggcugucugaucggagccgagcacgugaacaauagcuacgagugcgacauccccaucggcgcuggcaucugugccagcuaccagacacagacaaacagccccagacgggcuagaagcguggccagccagagcaucauugccuacacaaugucucugggcgccgagaacagcguggccuacuccaacaacucuaucgcuauccccaccaacuucaccaucagcgugaccaccgagauccugccuguguccaugaccaagaccagcguggacugcaccauguacaucugcggcgauuccaccgagugcuccaaccugcugcugcaguacggcagcuucugcacccagcugaauagagcccugacagggaucgccguggaacaggacaagaacacccaagagguguucgcccaagugaagcaaaucuacaagaccccuccuaucaaggacuucggcggcuucaauuucagccagauucugcccgauccuagcaagcccagcaagcggagcuucaucgaggaccugcuguucaacaaagugacacuggccgacgccggcuucaucaagcaguauggcgauugucugggcgacauugccgccagggaucugauuugcgcccagaaguuuaacggacugacagugcugccuccucugcugaccgaugagaugaucgcccaguacacaucugcccugcuggccggcacaaucacaagcggcuggacauuuggaugcggcgccgcucugcagauccccuuugcuaugcagauggccuaccgguucaacggcaucggagugacccagaaugugcuguacgagaaccagaagcugaucgccaaccaguucaacagcgccaucggcaagauccaggacagccugagcagcacagcaagcgcccugggaaagcugcaggacguggucaaccagaaugcccaggcacugaacacccuggucaagcagcuguccuccaacuucggcgccaucagcucugugcugaacgauauccugagcagacuggacaaggucgaggccgaggugcagaucgacagacugaucacaggcagacugcagagccuccagacauacgugacccagcagcugaucagagccgccgagauuagagccucugccaaucuggccgccaccaagaugucugagugugugcugggccagagcaagagaugugacuuuugcggcaagggcuaccaccugaugagcuucccucagucugccccucacggcgugguguuucugcacgugacauaugugcccgcucaagagaagaauuucaccaccgcuccagccaucugccacgacggcaaagcccacuuuccuagagaaggcguguucguguccaacggcacccauugguucgugacacagcggaacuucuacgagccccagaucaucaccaccgacaacaccuucgugucuggcaacugcgacguugugaucggcauugugaacaauaccguguacgacccucugcagcccgagcuggacagcuucaaagaggaacuggacaaguacuuuaagaaccacacaagccccgacguggaccugggcgauaucagcggaaucaaugccagcgucgugaacauccagaaagagaucgaccggcugaacgagguggccaagaaucugaacgagagccugaucgaccugcaagaacuggggaaguacgagcaguacaucaagggcggaggaucuggcggaggacagaucuacgagggcaagcugacagccgagggccugagauuuggaaucguggccagccgguucaaucacgcccugguggauagacugguggaaggcgccaucgaugccauugucagacacggcggcagagaagaggacaucacccucguuagagugcccggcucuugggagauuccuguggcugcuggcgagcuggcccggaaagaagauaucgacgccguuaucgccaucggcgugcugaucagaggcgccacaccucacuucgacuauaucgccagcgagguguccaaaggccuggccgaucugagccuggaacugagaaagcccaucaccuucggcgugaucaccgcugacacacuggaacaggccauugagagagccggcaccaagcacggcaacaaaggaugggaagccgcucuguccgccaucgagauggccaaccuguucaagagccugcggugaggacuaguuauaagacugacuagcccgaugggccucccaacgggcccuccuccccuccuugcaccgagauuaauaaaaaaaaaaaaaaaaaaaaaaaaaaaaaaaaaaaaaaaaaaaaaaaaaaaaaaaaaaaaaaaaugcaucccccccccccccccccccccccccccccccaaaggcucuuuucagagccaccagaauu

SEQ ID NO: 13042 - RNA, 4333 nt, Artificial Sequence
  SARS-CoV-2/Wuhan/WIV05/2019__EPI_ISL_402128 spike protein mRNA gc mod (1-1211)(T874C_S1055C) LumSynth construct
aggagaaagcuuaccauguucguguuucuggugcugcugccccugguguccagccagugugugaaccugaccaccagaacacagcugccuccagccuacaccaacagcuucaccagaggcguguacuaccccgacaagguguucagauccagcgugcugcacucuacccaggaccuguuccugccuuucuucagcaacgugaccugguuccacgccauccacguguccggcaccaauggcaccaagagauucgacaaccccgugcugcccuucaacgacgggguguacuuugccagcaccgagaaguccaacaucaucagaggcuggaucuucggcaccacacuggacagcaagacccagagccugcugaucgugaacaacgccaccaacguggucaucaaagugugcgaguuccaguucugcaacgaccccuuccugggcgucuacuaccacaagaacaacaagagcuggauggaaagcgaguuccggguguacagcagcgccaacaacugcaccuucgaguacgugucccagccuuuccugauggaccuggaaggcaagcagggcaacuucaagaaccugcgcgaguucguguucaagaacaucgacggcuacuucaaaaucuacagcaagcacaccccuaucaaccucgugcgggaucugccucagggcuucucugcucuggaaccccugguggaucugcccaucggcaucaacaucacccgguuucagacacugcuggcccugcacagaagcuaccugacaccuggcgauagcagcagcggauggacagcuggugccgccgcuuacuaugugggcuaccugcagccuagaaccuuccugcugaaguacaacgagaacggcaccaucaccgacgccguggauugugcucuggauccucugagcgagacaaagugcacccugaaguccuucaccguggaaaagggcaucuaccagaccagcaacuuccgggugcagcccaccgaauccaucgugcgguuccccaauaucaccaaucugugccccuucggcgagguguucaaugccaccagauucgccucuguguacgccuggaaccggaagcggaucagcaauugcguggccgacuacuccgugcuguacaacuccgccagcuucagcaccuucaagugcuacggcguguccccuaccaagcugaacgaccugugcuucacaaacguguacgccgacagcuucgugauccggggagaugaagugcggcagauugccccuggacagacaggcaagaucgccgacuacaacuacaagcugcccgacgacuucaccggcugugugauugccuggaacagcaacaaccuggacuccaaagucggcggcaacuacaauuaccuguaccggcuguuccggaaguccaaucugaagcccuucgagcgggacaucagcaccgaaaucuaucaggccggcagcaccccuugcaacggcguggaaggcuucaacugcuacuucccacugcaguccuacggcuuucagcccacaaauggcgugggcuaucagcccuacagagugguggugcugagcuucgaacugcugcaugcuccugccacagugugcggcccuaagaaaagcaccaaucucgugaagaacaaaugcgugaacuucaacuucaacggccugaccggcaccggcgugcugacagagagcaacaagaaguuccugccauuccagcaguuuggccgggauaucgccgauaccacagacgccguuagagauccccagacacuggaaauccuggacaucaccccaugcagcuucggcggagugucugugaucaccccuggcaccaacaccagcaaucagguggcagugcuguaccaggacgugaacuguaccgaagugcccguggccauucacgccgaucagcugacaccuacauggcggguguacuccaccggcagcaauguguuucagaccagagccggcugucugaucggagccgagcacgugaacaauagcuacgagugcgacauccccaucggcgcuggcaucugugccagcuaccagacacagacaaacagccccagacgggcuagaagcguggccagccagagcaucauugccuacacaaugucucugggcgccgagaacagcguggccuacuccaacaacucuaucgcuauccccaccaacuucaccaucagcgugaccaccgagauccugccuguguccaugaccaagaccagcguggacugcaccauguacaucugcggcgauuccaccgagugcuccaaccugcugcugcaguacggcagcuucugcacccagcugaauagagcccugacagggaucgccguggaacaggacaagaacacccaagagguguucgcccaagugaagcaaaucuacaagaccccuccuaucaaggacuucggcggcuucaauuucagccagauucugcccgauccuagcaagcccagcaagcggagcuucaucgaggaccugcuguucaacaaagugacacuggccgacgccggcuucaucaagcaguauggcgauugucugggcgacauugccgccagggaucugauuugcgcccagaaguuuaacggacugacagugcugccuccucugcugaccgaugagaugaucgcccaguacugcucugcccugcuggccggcacaaucacaagcggcuggacauuuggagcuggcgccgcucugcagauccccuuugcuaugcagauggccuaccgguucaacggcaucggagugacccagaaugugcuguacgagaaccagaagcugaucgccaaccaguucaacagcgccaucggcaagauccaggacagccugagcagcacagcaagcgcccugggaaagcugcaggacguggucaaccagaaugcccaggcacugaacacccuggucaagcagcuguccuccaacuucggcgccaucagcucugugcugaacgauauccugagcagacuggacaaggucgaggccgaggugcagaucgacagacugaucacaggcagacugcagagccuccagacauacgugacccagcagcugaucagagccgccgagauuagagccucugccaaucuggccgccaccaagaugucugagugugugcugggccagagcaagagaguggacuuuugcggcaagggcuaccaccugaugagcuucccucagugcgccccucacggcgugguguuucugcacgugacauaugugcccgcucaagagaagaauuucaccaccgcuccagccaucugccacgacggcaaagcccacuuuccuagagaaggcguguucguguccaacggcacccauugguucgugacacagcggaacuucuacgagccccagaucaucaccaccgacaacaccuucgugucuggcaacugcgacguugugaucggcauugugaacaauaccguguacgacccucugcagcccgagcuggacagcuucaaagaggaacuggacaaguacuuuaagaaccacacaagccccgacguggaccugggcgauaucagcggaaucaaugccagcgucgugaacauccagaaagagaucgaccggcugaacgagguggccaagaaucugaacgagagccugaucgaccugcaagaacuggggaaguacgagcaguacaucaagggcggaggaucuggcggaggacagaucuacgagggcaagcugacagccgagggccugagauuuggaaucguggccagccgguucaaucacgcccugguggauagacugguggaaggcgccaucgaugccauugucagacacggcggcagagaagaggacaucacccucguuagagugcccggcucuugggagauuccuguggcugcuggcgagcuggcccggaaagaagauaucgacgccguuaucgccaucggcgugcugaucagaggcgccacaccucacuucgacuauaucgccagcgagguguccaaaggccuggccgaucugagccuggaacugagaaagcccaucaccuucggcgugaucaccgcugacacacuggaacaggccauugagagagccggcaccaagcacggcaacaaaggaugggaagccgcucuguccgccaucgagauggccaaccuguucaagagccugcggugaggacuaguuauaagacugacuagcccgaugggccucccaacgggcccuccuccccuccuugcaccgagauuaauaaaaaaaaaaaaaaaaaaaaaaaaaaaaaaaaaaaaaaaaaaaaaaaaaaaaaaaaaaaaaaaaugcaucccccccccccccccccccccccccccccccaaaggcucuuuucagagccaccagaauu

SEQ ID NO: 13043 - RNA, 4357 nt, Artificial Sequence
  SARS-CoV-2/Wuhan/WIV05/2019__EPI_ISL_402128 spike protein mRNA gc mod (1-1211) Ferritin construct
aggagaaagcuuaccauguucguguuucuggugcugcugccccugguguccagccagugugugaaccugaccaccagaacacagcugccuccagccuacaccaacagcuucaccagaggcguguacuaccccgacaagguguucagauccagcgugcugcacucuacccaggaccuguuccugccuuucuucagcaacgugaccugguuccacgccauccacguguccggcaccaauggcaccaagagauucgacaaccccgugcugcccuucaacgacgggguguacuuugccagcaccgagaaguccaacaucaucagaggcuggaucuucggcaccacacuggacagcaagacccagagccugcugaucgugaacaacgccaccaacguggucaucaaagugugcgaguuccaguucugcaacgaccccuuccugggcgucuacuaccacaagaacaacaagagcuggauggaaagcgaguuccggguguacagcagcgccaacaacugcaccuucgaguacgugucccagccuuuccugauggaccuggaaggcaagcagggcaacuucaagaaccugcgcgaguucguguucaagaacaucgacggcuacuucaaaaucuacagcaagcacaccccuaucaaccucgugcgggaucugccucagggcuucucugcucuggaaccccugguggaucugcccaucggcaucaacaucacccgguuucagacacugcuggcccugcacagaagcuaccugacaccuggcgauagcagcagcggauggacagcuggugccgccgcuuacuaugugggcuaccugcagccuagaaccuuccugcugaaguacaacgagaacggcaccaucaccgacgccguggauugugcucuggauccucugagcgagacaaagugcacccugaaguccuucaccguggaaaagggcaucuaccagaccagcaacuuccgggugcagcccaccgaauccaucgugcgguuccccaauaucaccaaucugugccccuucggcgagguguucaaugccaccagauucgccucuguguacgccuggaaccggaagcggaucagcaauugcguggccgacuacuccgugcuguacaacuccgccagcuucagcaccuucaagugcuacggcguguccccuaccaagcugaacgaccugugcuucacaaacguguacgccgacagcuucgugauccggggagaugaagugcggcagauugccccuggacagacaggcaagaucgccgacuacaacuacaagcugcccgacgacuucaccggcugugugauugccuggaacagcaacaaccuggacuccaaagucggcggcaacuacaauuaccuguaccggcuguuccggaaguccaaucugaagcccuucgagcgggacaucagcaccgaaaucuaucaggccggcagcaccccuugcaacggcguggaaggcuucaacugcuacuucccacugcaguccuacggcuuucagcccacaaauggcgugggcuaucagcccuacagagugguggugcugagcuucgaacugcugcaugcuccugccacagugugcggcccuaagaaaagcaccaaucucgugaagaacaaaugcgugaacuucaacuucaacggccugaccggcaccggcgugcugacagagagcaacaagaaguuccugccauuccagcaguuuggccgggauaucgccgauaccacagacgccguuagagauccccagacacuggaaauccuggacaucaccccaugcagcuucggcggagugucugugaucaccccuggcaccaacaccagcaaucagguggcagugcuguaccaggacgugaacuguaccgaagugcccguggccauucacgccgaucagcugacaccuacauggcggguguacuccaccggcagcaauguguuucagaccagagccggcugucugaucggagccgagcacgugaacaauagcuacgagugcgacauccccaucggcgcuggcaucugugccagcuaccagacacagacaaacagccccagacgggcuagaagcguggccagccagagcaucauugccuacacaaugucucugggcgccgagaacagcguggccuacuccaacaacucuaucgcuauccccaccaacuucaccaucagcgugaccaccgagauccugccuguguccaugaccaagaccagcguggacugcaccauguacaucugcggcgauuccaccgagugcuccaaccugcugcugcaguacggcagcuucugcacccagcugaauagagcccugacagggaucgccguggaacaggacaagaacacccaagagguguucgcccaagugaagcaaaucuacaagaccccuccuaucaaggacuucggcggcuucaauuucagccagauucugcccgauccuagcaagcccagcaagcggagcuucaucgaggaccugcuguucaacaaagugacacuggccgacgccggcuucaucaagcaguauggcgauugucugggcgacauugccgccagggaucugauuugcgcccagaaguuuaacggacugacagugcugccuccucugcugaccgaugagaugaucgcccaguacacaucugcccugcuggccggcacaaucacaagcggcuggacauuuggagcuggcgccgcucugcagauccccuuugcuaugcagauggccuaccgguucaacggcaucggagugacccagaaugugcuguacgagaaccagaagcugaucgccaaccaguucaacagcgccaucggcaagauccaggacagccugagcagcacagcaagcgcccugggaaagcugcaggacguggucaaccagaaugcccaggcacugaacacccuggucaagcagcuguccuccaacuucggcgccaucagcucugugcugaacgauauccugagcagacuggacaaggucgaggccgaggugcagaucgacagacugaucacaggcagacugcagagccuccagacauacgugacccagcagcugaucagagccgccgagauuagagccucugccaaucuggccgccaccaagaugucugagugugugcugggccagagcaagagaguggacuuuugcggcaagggcuaccaccugaugagcuucccucagucugccccucacggcgugguguuucugcacgugacauaugugcccgcucaagagaagaauuucaccaccgcuccagccaucugccacgacggcaaagcccacuuuccuagagaaggcguguucguguccaacggcacccauugguucgugacacagcggaacuucuacgagccccagaucaucaccaccgacaacaccuucgugucuggcaacugcgacguugugaucggcauugugaacaauaccguguacgacccucugcagcccgagcuggacagcuucaaagaggaacuggacaaguacuuuaagaaccacacaagccccgacguggaccugggcgauaucagcggaaucaaugccagcgucgugaacauccagaaagagaucgaccggcugaacgagguggccaagaaucugaacgagagccugaucgaccugcaagaacuggggaaguacgagcaguacaucaagggaggcggaggaucugacaucaucaagcugcugaacgagcaagugaacaaagagaugcagagcagcaaccuguacaugagcaugagcagcuggugcuacacccacagccuugauggcgccggacuguuccuguuugaucacgccgccgaggaauacgagcacgccaagaagcugaucaucuuccugaacgagaacaacgugcccgugcagcugaccagcauuucugccccugagcacaaguucgagggccugacacagaucuuccagaaggccuacgaacacgagcagcacaucagcgagagcaucaacaacaucguggaccacgccauuaagagcaaggaucacgccaccuucaacuuucugcagugguacguggccgaacagcacgaggaagaggugcuguucaaggacauccuggacaagaucgagcugaucggcaacgagaaccacggccuguaucuggccgaccaguacgugaagggaaucgccaagagcagaaagagcugaggacuaguuauaagacugacuagcccgaugggccucccaacgggcccuccuccccuccuugcaccgagauuaauaaaaaaaaaaaaaaaaaaaaaaaaaaaaaaaaaaaaaaaaaaaaaaaaaaaaaaaaaaaaaaaaugcaucccccccccccccccccccccccccccccccaaaggcucuuuucagagccaccagaauu

SEQ ID NO: 13044 - RNA, 4357 nt, Artificial Sequence
  SARS-CoV-2/Wuhan/WIV05/2019__EPI_ISL_402128 spike protein mRNA gc mod (1-1211)(K986P_V987P) Ferritin construct
aggagaaagcuuaccauguucguguuucuggugcugcugccccugguguccagccagugugugaaccugaccaccagaacacagcugccuccagccuacaccaacagcuucaccagaggcguguacuaccccgacaagguguucagauccagcgugcugcacucuacccaggaccuguuccugccuuucuucagcaacgugaccugguuccacgccauccacguguccggcaccaauggcaccaagagauucgacaaccccgugcugcccuucaacgacgggguguacuuugccagcaccgagaaguccaacaucaucagaggcuggaucuucggcaccacacuggacagcaagacccagagccugcugaucgugaacaacgccaccaacguggucaucaaagugugcgaguuccaguucugcaacgaccccuuccugggcgucuacuaccacaagaacaacaagagcuggauggaaagcgaguuccggguguacagcagcgccaacaacugcaccuucgaguacgugucccagccuuuccugauggaccuggaaggcaagcagggcaacuucaagaaccugcgcgaguucguguucaagaacaucgacggcuacuucaaaaucuacagcaagcacaccccuaucaaccucgugcgggaucugccucagggcuucucugcucuggaaccccugguggaucugcccaucggcaucaacaucacccgguuucagacacugcuggcccugcacagaagcuaccugacaccuggcgauagcagcagcggauggacagcuggugccgccgcuuacuaugugggcuaccugcagccuagaaccuuccugcugaaguacaacgagaacggcaccaucaccgacgccguggauugugcucuggauccucugagcgagacaaagugcacccugaaguccuucaccguggaaaagggcaucuaccagaccagcaacuuccgggugcagcccaccgaauccaucgugcgguuccccaauaucaccaaucugugccccuucggcgagguguucaaugccaccagauucgccucuguguacgccuggaaccggaagcggaucagcaauugcguggccgacuacuccgugcuguacaacuccgccagcuucagcaccuucaagugcuacggcguguccccuaccaagcugaacgaccugugcuucacaaacguguacgccgacagcuucgugauccggggagaugaagugcggcagauugccccuggacagacaggcaagaucgccgacuacaacuacaagcugcccgacgacuucaccggcugugugauugccuggaacagcaacaaccuggacuccaaagucggcggcaacuacaauuaccuguaccggcuguuccggaaguccaaucugaagcccuucgagcgggacaucagcaccgaaaucuaucaggccggcagcaccccuugcaacggcguggaaggcuucaacugcuacuucccacugcaguccuacggcuuucagcccacaaauggcgugggcuaucagcccuacagagugguggugcugagcuucgaacugcugcaugcuccugccacagugugcggcccuaagaaaagcaccaaucucgugaagaacaaaugcgugaacuucaacuucaacggccugaccggcaccggcgugcugacagagagcaacaagaaguuccugccauuccagcaguuuggccgggauaucgccgauaccacagacgccguuagagauccccagacacuggaaauccuggacaucaccccaugcagcuucggcggagugucugugaucaccccuggcaccaacaccagcaaucagguggcagugcuguaccaggacgugaacuguaccgaagugcccguggccauucacgccgaucagcugacaccuacauggcggguguacuccaccggcagcaauguguuucagaccagagccggcugucugaucggagccgagcacgugaacaauagcuacgagugcgacauccccaucggcgcuggcaucugugccagcuaccagacacagacaaacagccccagacgggcuagaagcguggccagccagagcaucauugccuacacaaugucucugggcgccgagaacagcguggccuacuccaacaacucuaucgcuauccccaccaacuucaccaucagcgugaccaccgagauccugccuguguccaugaccaagaccagcguggacugcaccauguacaucugcggcgauuccaccgagugcuccaaccugcugcugcaguacggcagcuucugcacccagcugaauagagcccugacagggaucgccguggaacaggacaagaacacccaagagguguucgcccaagugaagcaaaucuacaagaccccuccuaucaaggacuucggcggcuucaauuucagccagauucugcccgauccuagcaagcccagcaagcggagcuucaucgaggaccugcuguucaacaaagugacacuggccgacgccggcuucaucaagcaguauggcgauugucugggcgacauugccgccagggaucugauuugcgcccagaaguuuaacggacugacagugcugccuccucugcugaccgaugagaugaucgcccaguacacaucugcccugcuggccggcacaaucacaagcggcuggacauuuggagcuggcgccgcucugcagauccccuuugcuaugcagauggccuaccgguucaacggcaucggagugacccagaaugugcuguacgagaaccagaagcugaucgccaaccaguucaacagcgccaucggcaagauccaggacagccugagcagcacagcaagcgcccugggaaagcugcaggacguggucaaccagaaugcccaggcacugaacacccuggucaagcagcuguccuccaacuucggcgccaucagcucugugcugaacgauauccugagcagacuggacccuccugaggccgaggugcagaucgacagacugaucacaggcagacugcagagccuccagacauacgugacccagcagcugaucagagccgccgagauuagagccucugccaaucuggccgccaccaagaugucugagugugugcugggccagagcaagagaguggacuuuugcggcaagggcuaccaccugaugagcuucccucagucugccccucacggcgugguguuucugcacgugacauaugugcccgcucaagagaagaauuucaccaccgcuccagccaucugccacgacggcaaagcccacuuuccuagagaaggcguguucguguccaacggcacccauugguucgugacacagcggaacuucuacgagccccagaucaucaccaccgacaacaccuucgugucuggcaacugcgacguugugaucggcauugugaacaauaccguguacgacccucugcagcccgagcuggacagcuucaaagaggaacuggacaaguacuuuaagaaccacacaagccccgacguggaccugggcgauaucagcggaaucaaugccagcgucgugaacauccagaaagagaucgaccggcugaacgagguggccaagaaucugaacgagagccugaucgaccugcaagaacuggggaaguacgagcaguacaucaagggaggcggaggaucugacaucaucaagcugcugaacgagcaagugaacaaagagaugcagagcagcaaccuguacaugagcaugagcagcuggugcuacacccacagccuugauggcgccggacuguuccuguuugaucacgccgccgaggaauacgagcacgccaagaagcugaucaucuuccugaacgagaacaacgugcccgugcagcugaccagcauuucugccccugagcacaaguucgagggccugacacagaucuuccagaaggccuacgaacacgagcagcacaucagcgagagcaucaacaacaucguggaccacgccauuaagagcaaggaucacgccaccuucaacuuucugcagugguacguggccgaacagcacgaggaagaggugcuguucaaggacauccuggacaagaucgagcugaucggcaacgagaaccacggccuguaucuggccgaccaguacgugaagggaaucgccaagagcagaaagagcugaggacuaguuauaagacugacuagcccgaugggccucccaacgggcccuccuccccuccuugcaccgagauuaauaaaaaaaaaaaaaaaaaaaaaaaaaaaaaaaaaaaaaaaaaaaaaaaaaaaaaaaaaaaaaaaaugcaucccccccccccccccccccccccccccccccaaaggcucuuuucagagccaccagaauu

SEQ ID NO: 13045 - RNA, 4357 nt, Artificial Sequence
  SARS-CoV-2/Wuhan/WIV05/2019__EPI_ISL_402128 spike protein mRNA gc mod (1-1211)(K986P_V987P_T887WN_A1020W) Ferritin construct
aggagaaagcuuaccauguucguguuucuggugcugcugccccugguguccagccagugugugaaccugaccaccagaacacagcugccuccagccuacaccaacagcuucaccagaggcguguacuaccccgacaagguguucagauccagcgugcugcacucuacccaggaccuguuccugccuuucuucagcaacgugaccugguuccacgccauccacguguccggcaccaauggcaccaagagauucgacaaccccgugcugcccuucaacgacgggguguacuuugccagcaccgagaaguccaacaucaucagaggcuggaucuucggcaccacacuggacagcaagacccagagccugcugaucgugaacaacgccaccaacguggucaucaaagugugcgaguuccaguucugcaacgaccccuuccugggcgucuacuaccacaagaacaacaagagcuggauggaaagcgaguuccggguguacagcagcgccaacaacugcaccuucgaguacgugucccagccuuuccugauggaccuggaaggcaagcagggcaacuucaagaaccugcgcgaguucguguucaagaacaucgacggcuacuucaaaaucuacagcaagcacaccccuaucaaccucgugcgggaucugccucagggcuucucugcucuggaaccccugguggaucugcccaucggcaucaacaucacccgguuucagacacugcuggcccugcacagaagcuaccugacaccuggcgauagcagcagcggauggacagcuggugccgccgcuuacuaugugggcuaccugcagccuagaaccuuccugcugaaguacaacgagaacggcaccaucaccgacgccguggauugugcucuggauccucugagcgagacaaagugcacccugaaguccuucaccguggaaaagggcaucuaccagaccagcaacuuccgggugcagcccaccgaauccaucgugcgguuccccaauaucaccaaucugugccccuucggcgagguguucaaugccaccagauucgccucuguguacgccuggaaccggaagcggaucagcaauugcguggccgacuacuccgugcuguacaacuccgccagcuucagcaccuucaagugcuacggcguguccccuaccaagcugaacgaccugugcuucacaaacguguacgccgacagcuucgugauccggggagaugaagugcggcagauugccccuggacagacaggcaagaucgccgacuacaacuacaagcugcccgacgacuucaccggcugugugauugccuggaacagcaacaaccuggacuccaaagucggcggcaacuacaauuaccuguaccggcuguuccggaaguccaaucugaagcccuucgagcgggacaucagcaccgaaaucuaucaggccggcagcaccccuugcaacggcguggaaggcuucaacugcuacuucccacugcaguccuacggcuuucagcccacaaauggcgugggcuaucagcccuacagagugguggugcugagcuucgaacugcugcaugcuccugccacagugugcggcccuaagaaaagcaccaaucucgugaagaacaaaugcgugaacuucaacuucaacggccugaccggcaccggcgugcugacagagagcaacaagaaguuccugccauuccagcaguuuggccgggauaucgccgauaccacagacgccguuagagauccccagacacuggaaauccuggacaucaccccaugcagcuucggcggagugucugugaucaccccuggcaccaacaccagcaaucagguggcagugcuguaccaggacgugaacuguaccgaagugcccguggccauucacgccgaucagcugacaccuacauggcggguguacuccaccggcagcaauguguuucagaccagagccggcugucugaucggagccgagcacgugaacaauagcuacgagugcgacauccccaucggcgcuggcaucugugccagcuaccagacacagacaaacagccccagacgggcuagaagcguggccagccagagcaucauugccuacacaaugucucugggcgccgagaacagcguggccuacuccaacaacucuaucgcuauccccaccaacuucaccaucagcgugaccaccgagauccugccuguguccaugaccaagaccagcguggacugcaccauguacaucugcggcgauuccaccgagugcuccaaccugcugcugcaguacggcagcuucugcacccagcugaauagagcccugacagggaucgccguggaacaggacaagaacacccaagagguguucgcccaagugaagcaaaucuacaagaccccuccuaucaaggacuucggcggcuucaauuucagccagauucugcccgauccuagcaagcccagcaagcggagcuucaucgaggaccugcuguucaacaaagugacacuggccgacgccggcuucaucaagcaguauggcgauugucugggcgacauugccgccagggaucugauuugcgcccagaaguuuaacggacugacagugcugccuccucugcugaccgaugagaugaucgcccaguacacaucugcccugcuggccggcacaaucacaagcggcuggugguuuggagcuggcgccgcucugcagauccccuuugcuaugcagauggccuaccgguucaacggcaucggagugacccagaaugugcuguacgagaaccagaagcugaucgccaaccaguucaacagcgccaucggcaagauccaggacagccugagcagcacagcaagcgcccugggaaagcugcaggacguggucaaccagaaugcccaggcacugaacacccuggucaagcagcuguccuccaacuucggcgccaucagcucugugcugaacgauauccugagcagacuggacccuccugaggccgaggugcagaucgacagacugaucacaggcagacugcagagccuccagacauacgugacccagcagcugaucagagccgccgagauuagauggucugccaaucuggccgccaccaagaugucugagugugugcugggccagagcaagagaguggacuuuugcggcaagggcuaccaccugaugagcuucccucagucugccccucacggcgugguguuucugcacgugacauaugugcccgcucaagagaagaauuucaccaccgcuccagccaucugccacgacggcaaagcccacuuuccuagagaaggcguguucguguccaacggcacccauugguucgugacacagcggaacuucuacgagccccagaucaucaccaccgacaacaccuucgugucuggcaacugcgacguugugaucggcauugugaacaauaccguguacgacccucugcagcccgagcuggacagcuucaaagaggaacuggacaaguacuuuaagaaccacacaagccccgacguggaccugggcgauaucagcggaaucaaugccagcgucgugaacauccagaaagagaucgaccggcugaacgagguggccaagaaucugaacgagagccugaucgaccugcaagaacuggggaaguacgagcaguacaucaagggaggcggaggaucugacaucaucaagcugcugaacgagcaagugaacaaagagaugcagagcagcaaccuguacaugagcaugagcagcuggugcuacacccacagccuugauggcgccggacuguuccuguuugaucacgccgccgaggaauacgagcacgccaagaagcugaucaucuuccugaacgagaacaacgugcccgugcagcugaccagcauuucugccccugagcacaaguucgagggccugacacagaucuuccagaaggccuacgaacacgagcagcacaucagcgagagcaucaacaacaucguggaccacgccauuaagagcaaggaucacgccaccuucaacuuucugcagugguacguggccgaacagcacgaggaagaggugcuguucaaggacauccuggacaagaucgagcugaucggcaacgagaaccacggccuguaucuggccgaccaguacgugaagggaaucgccaagagcagaaagagcugaggacuaguuauaagacugacuagcccgaugggccucccaacgggcccuccuccccuccuugcaccgagauuaauaaaaaaaaaaaaaaaaaaaaaaaaaaaaaaaaaaaaaaaaaaaaaaaaaaaaaaaaaaaaaaaaugcaucccccccccccccccccccccccccccccccaaaggcucuuuucagagccaccagaauu

SEQ ID NO: 13046 - RNA, 4357 nt, Artificial Sequence
  SARS-CoV-2/Wuhan/WIV05/2019__EPI_ISL_402128 spike protein mRNA gc mod (1-1211)(K986P_V987P_P1069F) Ferritin construct
aggagaaagcuuaccauguucguguuucuggugcugcugccccugguguccagccagugugugaaccugaccaccagaacacagcugccuccagccuacaccaacagcuucaccagaggcguguacuaccccgacaagguguucagauccagcgugcugcacucuacccaggaccuguuccugccuuucuucagcaacgugaccugguuccacgccauccacguguccggcaccaauggcaccaagagauucgacaaccccgugcugcccuucaacgacgggguguacuuugccagcaccgagaaguccaacaucaucagaggcuggaucuucggcaccacacuggacagcaagacccagagccugcugaucgugaacaacgccaccaacguggucaucaaagugugcgaguuccaguucugcaacgaccccuuccugggcgucuacuaccacaagaacaacaagagcuggauggaaagcgaguuccggguguacagcagcgccaacaacugcaccuucgaguacgugucccagccuuuccugauggaccuggaaggcaagcagggcaacuucaagaaccugcgcgaguucguguucaagaacaucgacggcuacuucaaaaucuacagcaagcacaccccuaucaaccucgugcgggaucugccucagggcuucucugcucuggaaccccugguggaucugcccaucggcaucaacaucacccgguuucagacacugcuggcccugcacagaagcuaccugacaccuggcgauagcagcagcggauggacagcuggugccgccgcuuacuaugugggcuaccugcagccuagaaccuuccugcugaaguacaacgagaacggcaccaucaccgacgccguggauugugcucuggauccucugagcgagacaaagugcacccugaaguccuucaccguggaaaagggcaucuaccagaccagcaacuuccgggugcagcccaccgaauccaucgugcgguuccccaauaucaccaaucugugccccuucggcgagguguucaaugccaccagauucgccucuguguacgccuggaaccggaagcggaucagcaauugcguggccgacuacuccgugcuguacaacuccgccagcuucagcaccuucaagugcuacggcguguccccuaccaagcugaacgaccugugcuucacaaacguguacgccgacagcuucgugauccggggagaugaagugcggcagauugccccuggacagacaggcaagaucgccgacuacaacuacaagcugcccgacgacuucaccggcugugugauugccuggaacagcaacaaccuggacuccaaagucggcggcaacuacaauuaccuguaccggcuguuccggaaguccaaucugaagcccuucgagcgggacaucagcaccgaaaucuaucaggccggcagcaccccuugcaacggcguggaaggcuucaacugcuacuucccacugcaguccuacggcuuucagcccacaaauggcgugggcuaucagcccuacagagugguggugcugagcuucgaacugcugcaugcuccugccacagugugcggcccuaagaaaagcaccaaucucgugaagaacaaaugcgugaacuucaacuucaacggccugaccggcaccggcgugcugacagagagcaacaagaaguuccugccauuccagcaguuuggccgggauaucgccgauaccacagacgccguuagagauccccagacacuggaaauccuggacaucaccccaugcagcuucggcggagugucugugaucaccccuggcaccaacaccagcaaucagguggcagugcuguaccaggacgugaacuguaccgaagugcccguggccauucacgccgaucagcugacaccuacauggcggguguacuccaccggcagcaauguguuucagaccagagccggcugucugaucggagccgagcacgugaacaauagcuacgagugcgacauccccaucggcgcuggcaucugugccagcuaccagacacagacaaacagccccagacgggcuagaagcguggccagccagagcaucauugccuacacaaugucucugggcgccgagaacagcguggccuacuccaacaacucuaucgcuauccccaccaacuucaccaucagcgugaccaccgagauccugccuguguccaugaccaagaccagcguggacugcaccauguacaucugcggcgauuccaccgagugcuccaaccugcugcugcaguacggcagcuucugcacccagcugaauagagcccugacagggaucgccguggaacaggacaagaacacccaagagguguucgcccaagugaagcaaaucuacaagaccccuccuaucaaggacuucggcggcuucaauuucagccagauucugcccgauccuagcaagcccagcaagcggagcuucaucgaggaccugcuguucaacaaagugacacuggccgacgccggcuucaucaagcaguauggcgauugucugggcgacauugccgccagggaucugauuugcgcccagaaguuuaacggacugacagugcugccuccucugcugaccgaugagaugaucgcccaguacacaucugcccugcuggccggcacaaucacaagcggcuggacauuuggagcuggcgccgcucugcagauccccuuugcuaugcagauggccuaccgguucaacggcaucggagugacccagaaugugcuguacgagaaccagaagcugaucgccaaccaguucaacagcgccaucggcaagauccaggacagccugagcagcacagcaagcgcccugggaaagcugcaggacguggucaaccagaaugcccaggcacugaacacccuggucaagcagcuguccuccaacuucggcgccaucagcucugugcugaacgauauccugagcagacuggacccuccugaggccgaggugcagaucgacagacugaucacaggcagacugcagagccuccagacauacgugacccagcagcugaucagagccgccgagauuagagccucugccaaucuggccgccaccaagaugucugagugugugcugggccagagcaagagaguggacuuuugcggcaagggcuaccaccugaugagcuucccucagucugccccucacggcgugguguuucugcacgugacauauguguucgcucaagagaagaauuucaccaccgcuccagccaucugccacgacggcaaagcccacuuuccuagagaaggcguguucguguccaacggcacccauugguucgugacacagcggaacuucuacgagccccagaucaucaccaccgacaacaccuucgugucuggcaacugcgacguugugaucggcauugugaacaauaccguguacgacccucugcagcccgagcuggacagcuucaaagaggaacuggacaaguacuuuaagaaccacacaagccccgacguggaccugggcgauaucagcggaaucaaugccagcgucgugaacauccagaaagagaucgaccggcugaacgagguggccaagaaucugaacgagagccugaucgaccugcaagaacuggggaaguacgagcaguacaucaagggaggcggaggaucugacaucaucaagcugcugaacgagcaagugaacaaagagaugcagagcagcaaccuguacaugagcaugagcagcuggugcuacacccacagccuugauggcgccggacuguuccuguuugaucacgccgccgaggaauacgagcacgccaagaagcugaucaucuuccugaacgagaacaacgugcccgugcagcugaccagcauuucugccccugagcacaaguucgagggccugacacagaucuuccagaaggccuacgaacacgagcagcacaucagcgagagcaucaacaacaucguggaccacgccauuaagagcaaggaucacgccaccuucaacuuucugcagugguacguggccgaacagcacgaggaagaggugcuguucaaggacauccuggacaagaucgagcugaucggcaacgagaaccacggccuguaucuggccgaccaguacgugaagggaaucgccaagagcagaaagagcugaggacuaguuauaagacugacuagcccgaugggccucccaacgggcccuccuccccuccuugcaccgagauuaauaaaaaaaaaaaaaaaaaaaaaaaaaaaaaaaaaaaaaaaaaaaaaaaaaaaaaaaaaaaaaaaaugcaucccccccccccccccccccccccccccccccaaaggcucuuuucagagccaccagaauu

SEQ ID NO: 13047 - RNA, 4357 nt, Artificial Sequence
  SARS-CoV-2/Wuhan/WIV05/2019__EPI_ISL_402128 spike protein mRNA gc mod (1-1211)(K986P_V987P_ H1048Q_H1064N_ H1083N_H1101N) Ferritin construct
aggagaaagcuuaccauguucguguuucuggugcugcugccccugguguccagccagugugugaaccugaccaccagaacacagcugccuccagccuacaccaacagcuucaccagaggcguguacuaccccgacaagguguucagauccagcgugcugcacucuacccaggaccuguuccugccuuucuucagcaacgugaccugguuccacgccauccacguguccggcaccaauggcaccaagagauucgacaaccccgugcugcccuucaacgacgggguguacuuugccagcaccgagaaguccaacaucaucagaggcuggaucuucggcaccacacuggacagcaagacccagagccugcugaucgugaacaacgccaccaacguggucaucaaagugugcgaguuccaguucugcaacgaccccuuccugggcgucuacuaccacaagaacaacaagagcuggauggaaagcgaguuccggguguacagcagcgccaacaacugcaccuucgaguacgugucccagccuuuccugauggaccuggaaggcaagcagggcaacuucaagaaccugcgcgaguucguguucaagaacaucgacggcuacuucaaaaucuacagcaagcacaccccuaucaaccucgugcgggaucugccucagggcuucucugcucuggaaccccugguggaucugcccaucggcaucaacaucacccgguuucagacacugcuggcccugcacagaagcuaccugacaccuggcgauagcagcagcggauggacagcuggugccgccgcuuacuaugugggcuaccugcagccuagaaccuuccugcugaaguacaacgagaacggcaccaucaccgacgccguggauugugcucuggauccucugagcgagacaaagugcacccugaaguccuucaccguggaaaagggcaucuaccagaccagcaacuuccgggugcagcccaccgaauccaucgugcgguuccccaauaucaccaaucugugccccuucggcgagguguucaaugccaccagauucgccucuguguacgccuggaaccggaagcggaucagcaauugcguggccgacuacuccgugcuguacaacuccgccagcuucagcaccuucaagugcuacggcguguccccuaccaagcugaacgaccugugcuucacaaacguguacgccgacagcuucgugauccggggagaugaagugcggcagauugccccuggacagacaggcaagaucgccgacuacaacuacaagcugcccgacgacuucaccggcugugugauugccuggaacagcaacaaccuggacuccaaagucggcggcaacuacaauuaccuguaccggcuguuccggaaguccaaucugaagcccuucgagcgggacaucagcaccgaaaucuaucaggccggcagcaccccuugcaacggcguggaaggcuucaacugcuacuucccacugcaguccuacggcuuucagcccacaaauggcgugggcuaucagcccuacagagugguggugcugagcuucgaacugcugcaugcuccugccacagugugcggcccuaagaaaagcaccaaucucgugaagaacaaaugcgugaacuucaacuucaacggccugaccggcaccggcgugcugacagagagcaacaagaaguuccugccauuccagcaguuuggccgggauaucgccgauaccacagacgccguuagagauccccagacacuggaaauccuggacaucaccccaugcagcuucggcggagugucugugaucaccccuggcaccaacaccagcaaucagguggcagugcuguaccaggacgugaacuguaccgaagugcccguggccauucacgccgaucagcugacaccuacauggcggguguacuccaccggcagcaauguguuucagaccagagccggcugucugaucggagccgagcacgugaacaauagcuacgagugcgacauccccaucggcgcuggcaucugugccagcuaccagacacagacaaacagccccagacgggcuagaagcguggccagccagagcaucauugccuacacaaugucucugggcgccgagaacagcguggccuacuccaacaacucuaucgcuauccccaccaacuucaccaucagcgugaccaccgagauccugccuguguccaugaccaagaccagcguggacugcaccauguacaucugcggcgauuccaccgagugcuccaaccugcugcugcaguacggcagcuucugcacccagcugaauagagcccugacagggaucgccguggaacaggacaagaacacccaagagguguucgcccaagugaagcaaaucuacaagaccccuccuaucaaggacuucggcggcuucaauuucagccagauucugcccgauccuagcaagcccagcaagcggagcuucaucgaggaccugcuguucaacaaagugacacuggccgacgccggcuucaucaagcaguauggcgauugucugggcgacauugccgccagggaucugauuugcgcccagaaguuuaacggacugacagugcugccuccucugcugaccgaugagaugaucgcccaguacacaucugcccugcuggccggcacaaucacaagcggcuggacauuuggagcuggcgccgcucugcagauccccuuugcuaugcagauggccuaccgguucaacggcaucggagugacccagaaugugcuguacgagaaccagaagcugaucgccaaccaguucaacagcgccaucggcaagauccaggacagccugagcagcacagcaagcgcccugggaaagcugcaggacguggucaaccagaaugcccaggcacugaacacccuggucaagcagcuguccuccaacuucggcgccaucagcucugugcugaacgauauccugagcagacuggacccuccugaggccgaggugcagaucgacagacugaucacaggcagacugcagagccuccagacauacgugacccagcagcugaucagagccgccgagauuagagccucugccaaucuggccgccaccaagaugucugagugugugcugggccagagcaagagaguggacuuuugcggcaagggcuaccagcugaugagcuucccucagucugccccucacggcgugguguuucugaacgugacauaugugcccgcucaagagaagaauuucaccaccgcuccagccaucugcaacgacggcaaagcccacuuuccuagagaaggcguguucguguccaacggcaccaacugguucgugacacagcggaacuucuacgagccccagaucaucaccaccgacaacaccuucgugucuggcaacugcgacguugugaucggcauugugaacaauaccguguacgacccucugcagcccgagcuggacagcuucaaagaggaacuggacaaguacuuuaagaaccacacaagccccgacguggaccugggcgauaucagcggaaucaaugccagcgucgugaacauccagaaagagaucgaccggcugaacgagguggccaagaaucugaacgagagccugaucgaccugcaagaacuggggaaguacgagcaguacaucaagggaggcggaggaucugacaucaucaagcugcugaacgagcaagugaacaaagagaugcagagcagcaaccuguacaugagcaugagcagcuggugcuacacccacagccuugauggcgccggacuguuccuguuugaucacgccgccgaggaauacgagcacgccaagaagcugaucaucuuccugaacgagaacaacgugcccgugcagcugaccagcauuucugccccugagcacaaguucgagggccugacacagaucuuccagaaggccuacgaacacgagcagcacaucagcgagagcaucaacaacaucguggaccacgccauuaagagcaaggaucacgccaccuucaacuuucugcagugguacguggccgaacagcacgaggaagaggugcuguucaaggacauccuggacaagaucgagcugaucggcaacgagaaccacggccuguaucuggccgaccaguacgugaagggaaucgccaagagcagaaagagcugaggacuaguuauaagacugacuagcccgaugggccucccaacgggcccuccuccccuccuugcaccgagauuaauaaaaaaaaaaaaaaaaaaaaaaaaaaaaaaaaaaaaaaaaaaaaaaaaaaaaaaaaaaaaaaaaugcaucccccccccccccccccccccccccccccccaaaggcucuuuucagagccaccagaauu

SEQ ID NO: 13048 - RNA, 4357 nt, Artificial Sequence
  SARS-CoV-2/Wuhan/WIV05/2019__EPI_ISL_402128 spike protein mRNA gc mod (1-1211)(I712C_T1077C) Ferritin construct
aggagaaagcuuaccauguucguguuucuggugcugcugccccugguguccagccagugugugaaccugaccaccagaacacagcugccuccagccuacaccaacagcuucaccagaggcguguacuaccccgacaagguguucagauccagcgugcugcacucuacccaggaccuguuccugccuuucuucagcaacgugaccugguuccacgccauccacguguccggcaccaauggcaccaagagauucgacaaccccgugcugcccuucaacgacgggguguacuuugccagcaccgagaaguccaacaucaucagaggcuggaucuucggcaccacacuggacagcaagacccagagccugcugaucgugaacaacgccaccaacguggucaucaaagugugcgaguuccaguucugcaacgaccccuuccugggcgucuacuaccacaagaacaacaagagcuggauggaaagcgaguuccggguguacagcagcgccaacaacugcaccuucgaguacgugucccagccuuuccugauggaccuggaaggcaagcagggcaacuucaagaaccugcgcgaguucguguucaagaacaucgacggcuacuucaaaaucuacagcaagcacaccccuaucaaccucgugcgggaucugccucagggcuucucugcucuggaaccccugguggaucugcccaucggcaucaacaucacccgguuucagacacugcuggcccugcacagaagcuaccugacaccuggcgauagcagcagcggauggacagcuggugccgccgcuuacuaugugggcuaccugcagccuagaaccuuccugcugaaguacaacgagaacggcaccaucaccgacgccguggauugugcucuggauccucugagcgagacaaagugcacccugaaguccuucaccguggaaaagggcaucuaccagaccagcaacuuccgggugcagcccaccgaauccaucgugcgguuccccaauaucaccaaucugugccccuucggcgagguguucaaugccaccagauucgccucuguguacgccuggaaccggaagcggaucagcaauugcguggccgacuacuccgugcuguacaacuccgccagcuucagcaccuucaagugcuacggcguguccccuaccaagcugaacgaccugugcuucacaaacguguacgccgacagcuucgugauccggggagaugaagugcggcagauugccccuggacagacaggcaagaucgccgacuacaacuacaagcugcccgacgacuucaccggcugugugauugccuggaacagcaacaaccuggacuccaaagucggcggcaacuacaauuaccuguaccggcuguuccggaaguccaaucugaagcccuucgagcgggacaucagcaccgaaaucuaucaggccggcagcaccccuugcaacggcguggaaggcuucaacugcuacuucccacugcaguccuacggcuuucagcccacaaauggcgugggcuaucagcccuacagagugguggugcugagcuucgaacugcugcaugcuccugccacagugugcggcccuaagaaaagcaccaaucucgugaagaacaaaugcgugaacuucaacuucaacggccugaccggcaccggcgugcugacagagagcaacaagaaguuccugccauuccagcaguuuggccgggauaucgccgauaccacagacgccguuagagauccccagacacuggaaauccuggacaucaccccaugcagcuucggcggagugucugugaucaccccuggcaccaacaccagcaaucagguggcagugcuguaccaggacgugaacuguaccgaagugcccguggccauucacgccgaucagcugacaccuacauggcggguguacuccaccggcagcaauguguuucagaccagagccggcugucugaucggagccgagcacgugaacaauagcuacgagugcgacauccccaucggcgcuggcaucugugccagcuaccagacacagacaaacagccccagacgggcuagaagcguggccagccagagcaucauugccuacacaaugucucugggcgccgagaacagcguggccuacuccaacaacucuugcgcuauccccaccaacuucaccaucagcgugaccaccgagauccugccuguguccaugaccaagaccagcguggacugcaccauguacaucugcggcgauuccaccgagugcuccaaccugcugcugcaguacggcagcuucugcacccagcugaauagagcccugacagggaucgccguggaacaggacaagaacacccaagagguguucgcccaagugaagcaaaucuacaagaccccuccuaucaaggacuucggcggcuucaauuucagccagauucugcccgauccuagcaagcccagcaagcggagcuucaucgaggaccugcuguucaacaaagugacacuggccgacgccggcuucaucaagcaguauggcgauugucugggcgacauugccgccagggaucugauuugcgcccagaaguuuaacggacugacagugcugccuccucugcugaccgaugagaugaucgcccaguacacaucugcccugcuggccggcacaaucacaagcggcuggacauuuggagcuggcgccgcucugcagauccccuuugcuaugcagauggccuaccgguucaacggcaucggagugacccagaaugugcuguacgagaaccagaagcugaucgccaaccaguucaacagcgccaucggcaagauccaggacagccugagcagcacagcaagcgcccugggaaagcugcaggacguggucaaccagaaugcccaggcacugaacacccuggucaagcagcuguccuccaacuucggcgccaucagcucugugcugaacgauauccugagcagacuggacaaggucgaggccgaggugcagaucgacagacugaucacaggcagacugcagagccuccagacauacgugacccagcagcugaucagagccgccgagauuagagccucugccaaucuggccgccaccaagaugucugagugugugcugggccagagcaagagaguggacuuuugcggcaagggcuaccaccugaugagcuucccucagucugccccucacggcgugguguuucugcacgugacauaugugcccgcucaagagaagaauuucaccugugcuccagccaucugccacgacggcaaagcccacuuuccuagagaaggcguguucguguccaacggcacccauugguucgugacacagcggaacuucuacgagccccagaucaucaccaccgacaacaccuucgugucuggcaacugcgacguugugaucggcauugugaacaauaccguguacgacccucugcagcccgagcuggacagcuucaaagaggaacuggacaaguacuuuaagaaccacacaagccccgacguggaccugggcgauaucagcggaaucaaugccagcgucgugaacauccagaaagagaucgaccggcugaacgagguggccaagaaucugaacgagagccugaucgaccugcaagaacuggggaaguacgagcaguacaucaagggaggcggaggaucugacaucaucaagcugcugaacgagcaagugaacaaagagaugcagagcagcaaccuguacaugagcaugagcagcuggugcuacacccacagccuugauggcgccggacuguuccuguuugaucacgccgccgaggaauacgagcacgccaagaagcugaucaucuuccugaacgagaacaacgugcccgugcagcugaccagcauuucugccccugagcacaaguucgagggccugacacagaucuuccagaaggccuacgaacacgagcagcacaucagcgagagcaucaacaacaucguggaccacgccauuaagagcaaggaucacgccaccuucaacuuucugcagugguacguggccgaacagcacgaggaagaggugcuguucaaggacauccuggacaagaucgagcugaucggcaacgagaaccacggccuguaucuggccgaccaguacgugaagggaaucgccaagagcagaaagagcugaggacuaguuauaagacugacuagcccgaugggccucccaacgggcccuccuccccuccuugcaccgagauuaauaaaaaaaaaaaaaaaaaaaaaaaaaaaaaaaaaaaaaaaaaaaaaaaaaaaaaaaaaaaaaaaaugcaucccccccccccccccccccccccccccccccaaaggcucuuuucagagccaccagaauu

SEQ ID NO: 13049 - RNA, 4357 nt, Artificial Sequence
  SARS-CoV-2/Wuhan/WIV05/2019__EPI_ISL_402128 spike protein mRNA gc mod (1-1211)(I714C_Y1110C) Ferritin construct
aggagaaagcuuaccauguucguguuucuggugcugcugccccugguguccagccagugugugaaccugaccaccagaacacagcugccuccagccuacaccaacagcuucaccagaggcguguacuaccccgacaagguguucagauccagcgugcugcacucuacccaggaccuguuccugccuuucuucagcaacgugaccugguuccacgccauccacguguccggcaccaauggcaccaagagauucgacaaccccgugcugcccuucaacgacgggguguacuuugccagcaccgagaaguccaacaucaucagaggcuggaucuucggcaccacacuggacagcaagacccagagccugcugaucgugaacaacgccaccaacguggucaucaaagugugcgaguuccaguucugcaacgaccccuuccugggcgucuacuaccacaagaacaacaagagcuggauggaaagcgaguuccggguguacagcagcgccaacaacugcaccuucgaguacgugucccagccuuuccugauggaccuggaaggcaagcagggcaacuucaagaaccugcgcgaguucguguucaagaacaucgacggcuacuucaaaaucuacagcaagcacaccccuaucaaccucgugcgggaucugccucagggcuucucugcucuggaaccccugguggaucugcccaucggcaucaacaucacccgguuucagacacugcuggcccugcacagaagcuaccugacaccuggcgauagcagcagcggauggacagcuggugccgccgcuuacuaugugggcuaccugcagccuagaaccuuccugcugaaguacaacgagaacggcaccaucaccgacgccguggauugugcucuggauccucugagcgagacaaagugcacccugaaguccuucaccguggaaaagggcaucuaccagaccagcaacuuccgggugcagcccaccgaauccaucgugcgguuccccaauaucaccaaucugugccccuucggcgagguguucaaugccaccagauucgccucuguguacgccuggaaccggaagcggaucagcaauugcguggccgacuacuccgugcuguacaacuccgccagcuucagcaccuucaagugcuacggcguguccccuaccaagcugaacgaccugugcuucacaaacguguacgccgacagcuucgugauccggggagaugaagugcggcagauugccccuggacagacaggcaagaucgccgacuacaacuacaagcugcccgacgacuucaccggcugugugauugccuggaacagcaacaaccuggacuccaaagucggcggcaacuacaauuaccuguaccggcuguuccggaaguccaaucugaagcccuucgagcgggacaucagcaccgaaaucuaucaggccggcagcaccccuugcaacggcguggaaggcuucaacugcuacuucccacugcaguccuacggcuuucagcccacaaauggcgugggcuaucagcccuacagagugguggugcugagcuucgaacugcugcaugcuccugccacagugugcggcccuaagaaaagcaccaaucucgugaagaacaaaugcgugaacuucaacuucaacggccugaccggcaccggcgugcugacagagagcaacaagaaguuccugccauuccagcaguuuggccgggauaucgccgauaccacagacgccguuagagauccccagacacuggaaauccuggacaucaccccaugcagcuucggcggagugucugugaucaccccuggcaccaacaccagcaaucagguggcagugcuguaccaggacgugaacuguaccgaagugcccguggccauucacgccgaucagcugacaccuacauggcggguguacuccaccggcagcaauguguuucagaccagagccggcugucugaucggagccgagcacgugaacaauagcuacgagugcgacauccccaucggcgcuggcaucugugccagcuaccagacacagacaaacagccccagacgggcuagaagcguggccagccagagcaucauugccuacacaaugucucugggcgccgagaacagcguggccuacuccaacaacucuaucgcuugccccaccaacuucaccaucagcgugaccaccgagauccugccuguguccaugaccaagaccagcguggacugcaccauguacaucugcggcgauuccaccgagugcuccaaccugcugcugcaguacggcagcuucugcacccagcugaauagagcccugacagggaucgccguggaacaggacaagaacacccaagagguguucgcccaagugaagcaaaucuacaagaccccuccuaucaaggacuucggcggcuucaauuucagccagauucugcccgauccuagcaagcccagcaagcggagcuucaucgaggaccugcuguucaacaaagugacacuggccgacgccggcuucaucaagcaguauggcgauugucugggcgacauugccgccagggaucugauuugcgcccagaaguuuaacggacugacagugcugccuccucugcugaccgaugagaugaucgcccaguacacaucugcccugcuggccggcacaaucacaagcggcuggacauuuggagcuggcgccgcucugcagauccccuuugcuaugcagauggccuaccgguucaacggcaucggagugacccagaaugugcuguacgagaaccagaagcugaucgccaaccaguucaacagcgccaucggcaagauccaggacagccugagcagcacagcaagcgcccugggaaagcugcaggacguggucaaccagaaugcccaggcacugaacacccuggucaagcagcuguccuccaacuucggcgccaucagcucugugcugaacgauauccugagcagacuggacaaggucgaggccgaggugcagaucgacagacugaucacaggcagacugcagagccuccagacauacgugacccagcagcugaucagagccgccgagauuagagccucugccaaucuggccgccaccaagaugucugagugugugcugggccagagcaagagaguggacuuuugcggcaagggcuaccaccugaugagcuucccucagucugccccucacggcgugguguuucugcacgugacauaugugcccgcucaagagaagaauuucaccaccgcuccagccaucugccacgacggcaaagcccacuuuccuagagaaggcguguucguguccaacggcacccauugguucgugacacagcggaacuucugugagccccagaucaucaccaccgacaacaccuucgugucuggcaacugcgacguugugaucggcauugugaacaauaccguguacgacccucugcagcccgagcuggacagcuucaaagaggaacuggacaaguacuuuaagaaccacacaagccccgacguggaccugggcgauaucagcggaaucaaugccagcgucgugaacauccagaaagagaucgaccggcugaacgagguggccaagaaucugaacgagagccugaucgaccugcaagaacuggggaaguacgagcaguacaucaagggaggcggaggaucugacaucaucaagcugcugaacgagcaagugaacaaagagaugcagagcagcaaccuguacaugagcaugagcagcuggugcuacacccacagccuugauggcgccggacuguuccuguuugaucacgccgccgaggaauacgagcacgccaagaagcugaucaucuuccugaacgagaacaacgugcccgugcagcugaccagcauuucugccccugagcacaaguucgagggccugacacagaucuuccagaaggccuacgaacacgagcagcacaucagcgagagcaucaacaacaucguggaccacgccauuaagagcaaggaucacgccaccuucaacuuucugcagugguacguggccgaacagcacgaggaagaggugcuguucaaggacauccuggacaagaucgagcugaucggcaacgagaaccacggccuguaucuggccgaccaguacgugaagggaaucgccaagagcagaaagagcugaggacuaguuauaagacugacuagcccgaugggccucccaacgggcccuccuccccuccuugcaccgagauuaauaaaaaaaaaaaaaaaaaaaaaaaaaaaaaaaaaaaaaaaaaaaaaaaaaaaaaaaaaaaaaaaaugcaucccccccccccccccccccccccccccccccaaaggcucuuuucagagccaccagaauu

SEQ ID NO: 13050 - RNA, 4357 nt, Artificial Sequence
  SARS-CoV-2/Wuhan/WIV05/2019__EPI_ISL_402128 spike protein mRNA gc mod (1-1211)(P715C_P1069C) Ferritin construct
aggagaaagcuuaccauguucguguuucuggugcugcugccccugguguccagccagugugugaaccugaccaccagaacacagcugccuccagccuacaccaacagcuucaccagaggcguguacuaccccgacaagguguucagauccagcgugcugcacucuacccaggaccuguuccugccuuucuucagcaacgugaccugguuccacgccauccacguguccggcaccaauggcaccaagagauucgacaaccccgugcugcccuucaacgacgggguguacuuugccagcaccgagaaguccaacaucaucagaggcuggaucuucggcaccacacuggacagcaagacccagagccugcugaucgugaacaacgccaccaacguggucaucaaagugugcgaguuccaguucugcaacgaccccuuccugggcgucuacuaccacaagaacaacaagagcuggauggaaagcgaguuccggguguacagcagcgccaacaacugcaccuucgaguacgugucccagccuuuccugauggaccuggaaggcaagcagggcaacuucaagaaccugcgcgaguucguguucaagaacaucgacggcuacuucaaaaucuacagcaagcacaccccuaucaaccucgugcgggaucugccucagggcuucucugcucuggaaccccugguggaucugcccaucggcaucaacaucacccgguuucagacacugcuggcccugcacagaagcuaccugacaccuggcgauagcagcagcggauggacagcuggugccgccgcuuacuaugugggcuaccugcagccuagaaccuuccugcugaaguacaacgagaacggcaccaucaccgacgccguggauugugcucuggauccucugagcgagacaaagugcacccugaaguccuucaccguggaaaagggcaucuaccagaccagcaacuuccgggugcagcccaccgaauccaucgugcgguuccccaauaucaccaaucugugccccuucggcgagguguucaaugccaccagauucgccucuguguacgccuggaaccggaagcggaucagcaauugcguggccgacuacuccgugcuguacaacuccgccagcuucagcaccuucaagugcuacggcguguccccuaccaagcugaacgaccugugcuucacaaacguguacgccgacagcuucgugauccggggagaugaagugcggcagauugccccuggacagacaggcaagaucgccgacuacaacuacaagcugcccgacgacuucaccggcugugugauugccuggaacagcaacaaccuggacuccaaagucggcggcaacuacaauuaccuguaccggcuguuccggaaguccaaucugaagcccuucgagcgggacaucagcaccgaaaucuaucaggccggcagcaccccuugcaacggcguggaaggcuucaacugcuacuucccacugcaguccuacggcuuucagcccacaaauggcgugggcuaucagcccuacagagugguggugcugagcuucgaacugcugcaugcuccugccacagugugcggcccuaagaaaagcaccaaucucgugaagaacaaaugcgugaacuucaacuucaacggccugaccggcaccggcgugcugacagagagcaacaagaaguuccugccauuccagcaguuuggccgggauaucgccgauaccacagacgccguuagagauccccagacacuggaaauccuggacaucaccccaugcagcuucggcggagugucugugaucaccccuggcaccaacaccagcaaucagguggcagugcuguaccaggacgugaacuguaccgaagugcccguggccauucacgccgaucagcugacaccuacauggcggguguacuccaccggcagcaauguguuucagaccagagccggcugucugaucggagccgagcacgugaacaauagcuacgagugcgacauccccaucggcgcuggcaucugugccagcuaccagacacagacaaacagccccagacgggcuagaagcguggccagccagagcaucauugccuacacaaugucucugggcgccgagaacagcguggccuacuccaacaacucuaucgcuaucugcaccaacuucaccaucagcgugaccaccgagauccugccuguguccaugaccaagaccagcguggacugcaccauguacaucugcggcgauuccaccgagugcuccaaccugcugcugcaguacggcagcuucugcacccagcugaauagagcccugacagggaucgccguggaacaggacaagaacacccaagagguguucgcccaagugaagcaaaucuacaagaccccuccuaucaaggacuucggcggcuucaauuucagccagauucugcccgauccuagcaagcccagcaagcggagcuucaucgaggaccugcuguucaacaaagugacacuggccgacgccggcuucaucaagcaguauggcgauugucugggcgacauugccgccagggaucugauuugcgcccagaaguuuaacggacugacagugcugccuccucugcugaccgaugagaugaucgcccaguacacaucugcccugcuggccggcacaaucacaagcggcuggacauuuggagcuggcgccgcucugcagauccccuuugcuaugcagauggccuaccgguucaacggcaucggagugacccagaaugugcuguacgagaaccagaagcugaucgccaaccaguucaacagcgccaucggcaagauccaggacagccugagcagcacagcaagcgcccugggaaagcugcaggacguggucaaccagaaugcccaggcacugaacacccuggucaagcagcuguccuccaacuucggcgccaucagcucugugcugaacgauauccugagcagacuggacaaggucgaggccgaggugcagaucgacagacugaucacaggcagacugcagagccuccagacauacgugacccagcagcugaucagagccgccgagauuagagccucugccaaucuggccgccaccaagaugucugagugugugcugggccagagcaagagaguggacuuuugcggcaagggcuaccaccugaugagcuucccucagucugccccucacggcgugguguuucugcacgugacauaugugugugcucaagagaagaauuucaccaccgcuccagccaucugccacgacggcaaagcccacuuuccuagagaaggcguguucguguccaacggcacccauugguucgugacacagcggaacuucuacgagccccagaucaucaccaccgacaacaccuucgugucuggcaacugcgacguugugaucggcauugugaacaauaccguguacgacccucugcagcccgagcuggacagcuucaaagaggaacuggacaaguacuuuaagaaccacacaagccccgacguggaccugggcgauaucagcggaaucaaugccagcgucgugaacauccagaaagagaucgaccggcugaacgagguggccaagaaucugaacgagagccugaucgaccugcaagaacuggggaaguacgagcaguacaucaagggaggcggaggaucugacaucaucaagcugcugaacgagcaagugaacaaagagaugcagagcagcaaccuguacaugagcaugagcagcuggugcuacacccacagccuugauggcgccggacuguuccuguuugaucacgccgccgaggaauacgagcacgccaagaagcugaucaucuuccugaacgagaacaacgugcccgugcagcugaccagcauuucugccccugagcacaaguucgagggccugacacagaucuuccagaaggccuacgaacacgagcagcacaucagcgagagcaucaacaacaucguggaccacgccauuaagagcaaggaucacgccaccuucaacuuucugcagugguacguggccgaacagcacgaggaagaggugcuguucaaggacauccuggacaagaucgagcugaucggcaacgagaaccacggccuguaucuggccgaccaguacgugaagggaaucgccaagagcagaaagagcugaggacuaguuauaagacugacuagcccgaugggccucccaacgggcccuccuccccuccuugcaccgagauuaauaaaaaaaaaaaaaaaaaaaaaaaaaaaaaaaaaaaaaaaaaaaaaaaaaaaaaaaaaaaaaaaaugcaucccccccccccccccccccccccccccccccaaaggcucuuuucagagccaccagaauu

SEQ ID NO: 13051 - RNA, 4357 nt, Artificial Sequence
  SARS-CoV-2/Wuhan/WIV05/2019__EPI_ISL_402128 spike protein mRNA gc mod (1-1211)(G889C_L1034C) Ferritin construct
aggagaaagcuuaccauguucguguuucuggugcugcugccccugguguccagccagugugugaaccugaccaccagaacacagcugccuccagccuacaccaacagcuucaccagaggcguguacuaccccgacaagguguucagauccagcgugcugcacucuacccaggaccuguuccugccuuucuucagcaacgugaccugguuccacgccauccacguguccggcaccaauggcaccaagagauucgacaaccccgugcugcccuucaacgacgggguguacuuugccagcaccgagaaguccaacaucaucagaggcuggaucuucggcaccacacuggacagcaagacccagagccugcugaucgugaacaacgccaccaacguggucaucaaagugugcgaguuccaguucugcaacgaccccuuccugggcgucuacuaccacaagaacaacaagagcuggauggaaagcgaguuccggguguacagcagcgccaacaacugcaccuucgaguacgugucccagccuuuccugauggaccuggaaggcaagcagggcaacuucaagaaccugcgcgaguucguguucaagaacaucgacggcuacuucaaaaucuacagcaagcacaccccuaucaaccucgugcgggaucugccucagggcuucucugcucuggaaccccugguggaucugcccaucggcaucaacaucacccgguuucagacacugcuggcccugcacagaagcuaccugacaccuggcgauagcagcagcggauggacagcuggugccgccgcuuacuaugugggcuaccugcagccuagaaccuuccugcugaaguacaacgagaacggcaccaucaccgacgccguggauugugcucuggauccucugagcgagacaaagugcacccugaaguccuucaccguggaaaagggcaucuaccagaccagcaacuuccgggugcagcccaccgaauccaucgugcgguuccccaauaucaccaaucugugccccuucggcgagguguucaaugccaccagauucgccucuguguacgccuggaaccggaagcggaucagcaauugcguggccgacuacuccgugcuguacaacuccgccagcuucagcaccuucaagugcuacggcguguccccuaccaagcugaacgaccugugcuucacaaacguguacgccgacagcuucgugauccggggagaugaagugcggcagauugccccuggacagacaggcaagaucgccgacuacaacuacaagcugcccgacgacuucaccggcugugugauugccuggaacagcaacaaccuggacuccaaagucggcggcaacuacaauuaccuguaccggcuguuccggaaguccaaucugaagcccuucgagcgggacaucagcaccgaaaucuaucaggccggcagcaccccuugcaacggcguggaaggcuucaacugcuacuucccacugcaguccuacggcuuucagcccacaaauggcgugggcuaucagcccuacagagugguggugcugagcuucgaacugcugcaugcuccugccacagugugcggcccuaagaaaagcaccaaucucgugaagaacaaaugcgugaacuucaacuucaacggccugaccggcaccggcgugcugacagagagcaacaagaaguuccugccauuccagcaguuuggccgggauaucgccgauaccacagacgccguuagagauccccagacacuggaaauccuggacaucaccccaugcagcuucggcggagugucugugaucaccccuggcaccaacaccagcaaucagguggcagugcuguaccaggacgugaacuguaccgaagugcccguggccauucacgccgaucagcugacaccuacauggcggguguacuccaccggcagcaauguguuucagaccagagccggcugucugaucggagccgagcacgugaacaauagcuacgagugcgacauccccaucggcgcuggcaucugugccagcuaccagacacagacaaacagccccagacgggcuagaagcguggccagccagagcaucauugccuacacaaugucucugggcgccgagaacagcguggccuacuccaacaacucuaucgcuauccccaccaacuucaccaucagcgugaccaccgagauccugccuguguccaugaccaagaccagcguggacugcaccauguacaucugcggcgauuccaccgagugcuccaaccugcugcugcaguacggcagcuucugcacccagcugaauagagcccugacagggaucgccguggaacaggacaagaacacccaagagguguucgcccaagugaagcaaaucuacaagaccccuccuaucaaggacuucggcggcuucaauuucagccagauucugcccgauccuagcaagcccagcaagcggagcuucaucgaggaccugcuguucaacaaagugacacuggccgacgccggcuucaucaagcaguauggcgauugucugggcgacauugccgccagggaucugauuugcgcccagaaguuuaacggacugacagugcugccuccucugcugaccgaugagaugaucgcccaguacacaucugcccugcuggccggcacaaucacaagcggcuggacauuuugcgcuggcgccgcucugcagauccccuuugcuaugcagauggccuaccgguucaacggcaucggagugacccagaaugugcuguacgagaaccagaagcugaucgccaaccaguucaacagcgccaucggcaagauccaggacagccugagcagcacagcaagcgcccugggaaagcugcaggacguggucaaccagaaugcccaggcacugaacacccuggucaagcagcuguccuccaacuucggcgccaucagcucugugcugaacgauauccugagcagacuggacaaggucgaggccgaggugcagaucgacagacugaucacaggcagacugcagagccuccagacauacgugacccagcagcugaucagagccgccgagauuagagccucugccaaucuggccgccaccaagaugucugaguguguguguggccagagcaagagaguggacuuuugcggcaagggcuaccaccugaugagcuucccucagucugccccucacggcgugguguuucugcacgugacauaugugcccgcucaagagaagaauuucaccaccgcuccagccaucugccacgacggcaaagcccacuuuccuagagaaggcguguucguguccaacggcacccauugguucgugacacagcggaacuucuacgagccccagaucaucaccaccgacaacaccuucgugucuggcaacugcgacguugugaucggcauugugaacaauaccguguacgacccucugcagcccgagcuggacagcuucaaagaggaacuggacaaguacuuuaagaaccacacaagccccgacguggaccugggcgauaucagcggaaucaaugccagcgucgugaacauccagaaagagaucgaccggcugaacgagguggccaagaaucugaacgagagccugaucgaccugcaagaacuggggaaguacgagcaguacaucaagggaggcggaggaucugacaucaucaagcugcugaacgagcaagugaacaaagagaugcagagcagcaaccuguacaugagcaugagcagcuggugcuacacccacagccuugauggcgccggacuguuccuguuugaucacgccgccgaggaauacgagcacgccaagaagcugaucaucuuccugaacgagaacaacgugcccgugcagcugaccagcauuucugccccugagcacaaguucgagggccugacacagaucuuccagaaggccuacgaacacgagcagcacaucagcgagagcaucaacaacaucguggaccacgccauuaagagcaaggaucacgccaccuucaacuuucugcagugguacguggccgaacagcacgaggaagaggugcuguucaaggacauccuggacaagaucgagcugaucggcaacgagaaccacggccuguaucuggccgaccaguacgugaagggaaucgccaagagcagaaagagcugaggacuaguuauaagacugacuagcccgaugggccucccaacgggcccuccuccccuccuugcaccgagauuaauaaaaaaaaaaaaaaaaaaaaaaaaaaaaaaaaaaaaaaaaaaaaaaaaaaaaaaaaaaaaaaaaugcaucccccccccccccccccccccccccccccccaaaggcucuuuucagagccaccagaauu

SEQ ID NO: 13052 - RNA, 4357 nt, Artificial Sequence
  SARS-CoV-2/Wuhan/WIV05/2019__EPI_ISL_402128 spike protein mRNA gc mod (1-1211)(I909C_Y1047C) Ferritin construct
aggagaaagcuuaccauguucguguuucuggugcugcugccccugguguccagccagugugugaaccugaccaccagaacacagcugccuccagccuacaccaacagcuucaccagaggcguguacuaccccgacaagguguucagauccagcgugcugcacucuacccaggaccuguuccugccuuucuucagcaacgugaccugguuccacgccauccacguguccggcaccaauggcaccaagagauucgacaaccccgugcugcccuucaacgacgggguguacuuugccagcaccgagaaguccaacaucaucagaggcuggaucuucggcaccacacuggacagcaagacccagagccugcugaucgugaacaacgccaccaacguggucaucaaagugugcgaguuccaguucugcaacgaccccuuccugggcgucuacuaccacaagaacaacaagagcuggauggaaagcgaguuccggguguacagcagcgccaacaacugcaccuucgaguacgugucccagccuuuccugauggaccuggaaggcaagcagggcaacuucaagaaccugcgcgaguucguguucaagaacaucgacggcuacuucaaaaucuacagcaagcacaccccuaucaaccucgugcgggaucugccucagggcuucucugcucuggaaccccugguggaucugcccaucggcaucaacaucacccgguuucagacacugcuggcccugcacagaagcuaccugacaccuggcgauagcagcagcggauggacagcuggugccgccgcuuacuaugugggcuaccugcagccuagaaccuuccugcugaaguacaacgagaacggcaccaucaccgacgccguggauugugcucuggauccucugagcgagacaaagugcacccugaaguccuucaccguggaaaagggcaucuaccagaccagcaacuuccgggugcagcccaccgaauccaucgugcgguuccccaauaucaccaaucugugccccuucggcgagguguucaaugccaccagauucgccucuguguacgccuggaaccggaagcggaucagcaauugcguggccgacuacuccgugcuguacaacuccgccagcuucagcaccuucaagugcuacggcguguccccuaccaagcugaacgaccugugcuucacaaacguguacgccgacagcuucgugauccggggagaugaagugcggcagauugccccuggacagacaggcaagaucgccgacuacaacuacaagcugcccgacgacuucaccggcugugugauugccuggaacagcaacaaccuggacuccaaagucggcggcaacuacaauuaccuguaccggcuguuccggaaguccaaucugaagcccuucgagcgggacaucagcaccgaaaucuaucaggccggcagcaccccuugcaacggcguggaaggcuucaacugcuacuucccacugcaguccuacggcuuucagcccacaaauggcgugggcuaucagcccuacagagugguggugcugagcuucgaacugcugcaugcuccugccacagugugcggcccuaagaaaagcaccaaucucgugaagaacaaaugcgugaacuucaacuucaacggccugaccggcaccggcgugcugacagagagcaacaagaaguuccugccauuccagcaguuuggccgggauaucgccgauaccacagacgccguuagagauccccagacacuggaaauccuggacaucaccccaugcagcuucggcggagugucugugaucaccccuggcaccaacaccagcaaucagguggcagugcuguaccaggacgugaacuguaccgaagugcccguggccauucacgccgaucagcugacaccuacauggcggguguacuccaccggcagcaauguguuucagaccagagccggcugucugaucggagccgagcacgugaacaauagcuacgagugcgacauccccaucggcgcuggcaucugugccagcuaccagacacagacaaacagccccagacgggcuagaagcguggccagccagagcaucauugccuacacaaugucucugggcgccgagaacagcguggccuacuccaacaacucuaucgcuauccccaccaacuucaccaucagcgugaccaccgagauccugccuguguccaugaccaagaccagcguggacugcaccauguacaucugcggcgauuccaccgagugcuccaaccugcugcugcaguacggcagcuucugcacccagcugaauagagcccugacagggaucgccguggaacaggacaagaacacccaagagguguucgcccaagugaagcaaaucuacaagaccccuccuaucaaggacuucggcggcuucaauuucagccagauucugcccgauccuagcaagcccagcaagcggagcuucaucgaggaccugcuguucaacaaagugacacuggccgacgccggcuucaucaagcaguauggcgauugucugggcgacauugccgccagggaucugauuugcgcccagaaguuuaacggacugacagugcugccuccucugcugaccgaugagaugaucgcccaguacacaucugcccugcuggccggcacaaucacaagcggcuggacauuuggagcuggcgccgcucugcagauccccuuugcuaugcagauggccuaccgguucaacggcugcggagugacccagaaugugcuguacgagaaccagaagcugaucgccaaccaguucaacagcgccaucggcaagauccaggacagccugagcagcacagcaagcgcccugggaaagcugcaggacguggucaaccagaaugcccaggcacugaacacccuggucaagcagcuguccuccaacuucggcgccaucagcucugugcugaacgauauccugagcagacuggacaaggucgaggccgaggugcagaucgacagacugaucacaggcagacugcagagccuccagacauacgugacccagcagcugaucagagccgccgagauuagagccucugccaaucuggccgccaccaagaugucugagugugugcugggccagagcaagagaguggacuuuugcggcaagggcugucaccugaugagcuucccucagucugccccucacggcgugguguuucugcacgugacauaugugcccgcucaagagaagaauuucaccaccgcuccagccaucugccacgacggcaaagcccacuuuccuagagaaggcguguucguguccaacggcacccauugguucgugacacagcggaacuucuacgagccccagaucaucaccaccgacaacaccuucgugucuggcaacugcgacguugugaucggcauugugaacaauaccguguacgacccucugcagcccgagcuggacagcuucaaagaggaacuggacaaguacuuuaagaaccacacaagccccgacguggaccugggcgauaucagcggaaucaaugccagcgucgugaacauccagaaagagaucgaccggcugaacgagguggccaagaaucugaacgagagccugaucgaccugcaagaacuggggaaguacgagcaguacaucaagggaggcggaggaucugacaucaucaagcugcugaacgagcaagugaacaaagagaugcagagcagcaaccuguacaugagcaugagcagcuggugcuacacccacagccuugauggcgccggacuguuccuguuugaucacgccgccgaggaauacgagcacgccaagaagcugaucaucuuccugaacgagaacaacgugcccgugcagcugaccagcauuucugccccugagcacaaguucgagggccugacacagaucuuccagaaggccuacgaacacgagcagcacaucagcgagagcaucaacaacaucguggaccacgccauuaagagcaaggaucacgccaccuucaacuuucugcagugguacguggccgaacagcacgaggaagaggugcuguucaaggacauccuggacaagaucgagcugaucggcaacgagaaccacggccuguaucuggccgaccaguacgugaagggaaucgccaagagcagaaagagcugaggacuaguuauaagacugacuagcccgaugggccucccaacgggcccuccuccccuccuugcaccgagauuaauaaaaaaaaaaaaaaaaaaaaaaaaaaaaaaaaaaaaaaaaaaaaaaaaaaaaaaaaaaaaaaaaugcaucccccccccccccccccccccccccccccccaaaggcucuuuucagagccaccagaauu

SEQ ID NO: 13053 - RNA, 4357 nt, Artificial Sequence
  SARS-CoV-2/Wuhan/WIV05/2019__EPI_ISL_402128 spike protein mRNA gc mod (1-1211)(Q965C_S1003C) Ferritin construct
aggagaaagcuuaccauguucguguuucuggugcugcugccccugguguccagccagugugugaaccugaccaccagaacacagcugccuccagccuacaccaacagcuucaccagaggcguguacuaccccgacaagguguucagauccagcgugcugcacucuacccaggaccuguuccugccuuucuucagcaacgugaccugguuccacgccauccacguguccggcaccaauggcaccaagagauucgacaaccccgugcugcccuucaacgacgggguguacuuugccagcaccgagaaguccaacaucaucagaggcuggaucuucggcaccacacuggacagcaagacccagagccugcugaucgugaacaacgccaccaacguggucaucaaagugugcgaguuccaguucugcaacgaccccuuccugggcgucuacuaccacaagaacaacaagagcuggauggaaagcgaguuccggguguacagcagcgccaacaacugcaccuucgaguacgugucccagccuuuccugauggaccuggaaggcaagcagggcaacuucaagaaccugcgcgaguucguguucaagaacaucgacggcuacuucaaaaucuacagcaagcacaccccuaucaaccucgugcgggaucugccucagggcuucucugcucuggaaccccugguggaucugcccaucggcaucaacaucacccgguuucagacacugcuggcccugcacagaagcuaccugacaccuggcgauagcagcagcggauggacagcuggugccgccgcuuacuaugugggcuaccugcagccuagaaccuuccugcugaaguacaacgagaacggcaccaucaccgacgccguggauugugcucuggauccucugagcgagacaaagugcacccugaaguccuucaccguggaaaagggcaucuaccagaccagcaacuuccgggugcagcccaccgaauccaucgugcgguuccccaauaucaccaaucugugccccuucggcgagguguucaaugccaccagauucgccucuguguacgccuggaaccggaagcggaucagcaauugcguggccgacuacuccgugcuguacaacuccgccagcuucagcaccuucaagugcuacggcguguccccuaccaagcugaacgaccugugcuucacaaacguguacgccgacagcuucgugauccggggagaugaagugcggcagauugccccuggacagacaggcaagaucgccgacuacaacuacaagcugcccgacgacuucaccggcugugugauugccuggaacagcaacaaccuggacuccaaagucggcggcaacuacaauuaccuguaccggcuguuccggaaguccaaucugaagcccuucgagcgggacaucagcaccgaaaucuaucaggccggcagcaccccuugcaacggcguggaaggcuucaacugcuacuucccacugcaguccuacggcuuucagcccacaaauggcgugggcuaucagcccuacagagugguggugcugagcuucgaacugcugcaugcuccugccacagugugcggcccuaagaaaagcaccaaucucgugaagaacaaaugcgugaacuucaacuucaacggccugaccggcaccggcgugcugacagagagcaacaagaaguuccugccauuccagcaguuuggccgggauaucgccgauaccacagacgccguuagagauccccagacacuggaaauccuggacaucaccccaugcagcuucggcggagugucugugaucaccccuggcaccaacaccagcaaucagguggcagugcuguaccaggacgugaacuguaccgaagugcccguggccauucacgccgaucagcugacaccuacauggcggguguacuccaccggcagcaauguguuucagaccagagccggcugucugaucggagccgagcacgugaacaauagcuacgagugcgacauccccaucggcgcuggcaucugugccagcuaccagacacagacaaacagccccagacgggcuagaagcguggccagccagagcaucauugccuacacaaugucucugggcgccgagaacagcguggccuacuccaacaacucuaucgcuauccccaccaacuucaccaucagcgugaccaccgagauccugccuguguccaugaccaagaccagcguggacugcaccauguacaucugcggcgauuccaccgagugcuccaaccugcugcugcaguacggcagcuucugcacccagcugaauagagcccugacagggaucgccguggaacaggacaagaacacccaagagguguucgcccaagugaagcaaaucuacaagaccccuccuaucaaggacuucggcggcuucaauuucagccagauucugcccgauccuagcaagcccagcaagcggagcuucaucgaggaccugcuguucaacaaagugacacuggccgacgccggcuucaucaagcaguauggcgauugucugggcgacauugccgccagggaucugauuugcgcccagaaguuuaacggacugacagugcugccuccucugcugaccgaugagaugaucgcccaguacacaucugcccugcuggccggcacaaucacaagcggcuggacauuuggagcuggcgccgcucugcagauccccuuugcuaugcagauggccuaccgguucaacggcaucggagugacccagaaugugcuguacgagaaccagaagcugaucgccaaccaguucaacagcgccaucggcaagauccaggacagccugagcagcacagcaagcgcccugggaaagcugcaggacguggucaaccagaaugcccaggcacugaacacccuggucaagugccuguccuccaacuucggcgccaucagcucugugcugaacgauauccugagcagacuggacaaggucgaggccgaggugcagaucgacagacugaucacaggcagacugcagugucuccagacauacgugacccagcagcugaucagagccgccgagauuagagccucugccaaucuggccgccaccaagaugucugagugugugcugggccagagcaagagaguggacuuuugcggcaagggcuaccaccugaugagcuucccucagucugccccucacggcgugguguuucugcacgugacauaugugcccgcucaagagaagaauuucaccaccgcuccagccaucugccacgacggcaaagcccacuuuccuagagaaggcguguucguguccaacggcacccauugguucgugacacagcggaacuucuacgagccccagaucaucaccaccgacaacaccuucgugucuggcaacugcgacguugugaucggcauugugaacaauaccguguacgacccucugcagcccgagcuggacagcuucaaagaggaacuggacaaguacuuuaagaaccacacaagccccgacguggaccugggcgauaucagcggaaucaaugccagcgucgugaacauccagaaagagaucgaccggcugaacgagguggccaagaaucugaacgagagccugaucgaccugcaagaacuggggaaguacgagcaguacaucaagggaggcggaggaucugacaucaucaagcugcugaacgagcaagugaacaaagagaugcagagcagcaaccuguacaugagcaugagcagcuggugcuacacccacagccuugauggcgccggacuguuccuguuugaucacgccgccgaggaauacgagcacgccaagaagcugaucaucuuccugaacgagaacaacgugcccgugcagcugaccagcauuucugccccugagcacaaguucgagggccugacacagaucuuccagaaggccuacgaacacgagcagcacaucagcgagagcaucaacaacaucguggaccacgccauuaagagcaaggaucacgccaccuucaacuuucugcagugguacguggccgaacagcacgaggaagaggugcuguucaaggacauccuggacaagaucgagcugaucggcaacgagaaccacggccuguaucuggccgaccaguacgugaagggaaucgccaagagcagaaagagcugaggacuaguuauaagacugacuagcccgaugggccucccaacgggcccuccuccccuccuugcaccgagauuaauaaaaaaaaaaaaaaaaaaaaaaaaaaaaaaaaaaaaaaaaaaaaaaaaaaaaaaaaaaaaaaaaugcaucccccccccccccccccccccccccccccccaaaggcucuuuucagagccaccagaauu

SEQ ID NO: 13054 - RNA, 4357 nt, Artificial Sequence
  SARS-CoV-2/Wuhan/WIV05/2019__EPI_ISL_402128 spike protein mRNA gc mod (1-1211)(F970C_G999C) Ferritin construct
aggagaaagcuuaccauguucguguuucuggugcugcugccccugguguccagccagugugugaaccugaccaccagaacacagcugccuccagccuacaccaacagcuucaccagaggcguguacuaccccgacaagguguucagauccagcgugcugcacucuacccaggaccuguuccugccuuucuucagcaacgugaccugguuccacgccauccacguguccggcaccaauggcaccaagagauucgacaaccccgugcugcccuucaacgacgggguguacuuugccagcaccgagaaguccaacaucaucagaggcuggaucuucggcaccacacuggacagcaagacccagagccugcugaucgugaacaacgccaccaacguggucaucaaagugugcgaguuccaguucugcaacgaccccuuccugggcgucuacuaccacaagaacaacaagagcuggauggaaagcgaguuccggguguacagcagcgccaacaacugcaccuucgaguacgugucccagccuuuccugauggaccuggaaggcaagcagggcaacuucaagaaccugcgcgaguucguguucaagaacaucgacggcuacuucaaaaucuacagcaagcacaccccuaucaaccucgugcgggaucugccucagggcuucucugcucuggaaccccugguggaucugcccaucggcaucaacaucacccgguuucagacacugcuggcccugcacagaagcuaccugacaccuggcgauagcagcagcggauggacagcuggugccgccgcuuacuaugugggcuaccugcagccuagaaccuuccugcugaaguacaacgagaacggcaccaucaccgacgccguggauugugcucuggauccucugagcgagacaaagugcacccugaaguccuucaccguggaaaagggcaucuaccagaccagcaacuuccgggugcagcccaccgaauccaucgugcgguuccccaauaucaccaaucugugccccuucggcgagguguucaaugccaccagauucgccucuguguacgccuggaaccggaagcggaucagcaauugcguggccgacuacuccgugcuguacaacuccgccagcuucagcaccuucaagugcuacggcguguccccuaccaagcugaacgaccugugcuucacaaacguguacgccgacagcuucgugauccggggagaugaagugcggcagauugccccuggacagacaggcaagaucgccgacuacaacuacaagcugcccgacgacuucaccggcugugugauugccuggaacagcaacaaccuggacuccaaagucggcggcaacuacaauuaccuguaccggcuguuccggaaguccaaucugaagcccuucgagcgggacaucagcaccgaaaucuaucaggccggcagcaccccuugcaacggcguggaaggcuucaacugcuacuucccacugcaguccuacggcuuucagcccacaaauggcgugggcuaucagcccuacagagugguggugcugagcuucgaacugcugcaugcuccugccacagugugcggcccuaagaaaagcaccaaucucgugaagaacaaaugcgugaacuucaacuucaacggccugaccggcaccggcgugcugacagagagcaacaagaaguuccugccauuccagcaguuuggccgggauaucgccgauaccacagacgccguuagagauccccagacacuggaaauccuggacaucaccccaugcagcuucggcggagugucugugaucaccccuggcaccaacaccagcaaucagguggcagugcuguaccaggacgugaacuguaccgaagugcccguggccauucacgccgaucagcugacaccuacauggcggguguacuccaccggcagcaauguguuucagaccagagccggcugucugaucggagccgagcacgugaacaauagcuacgagugcgacauccccaucggcgcuggcaucugugccagcuaccagacacagacaaacagccccagacgggcuagaagcguggccagccagagcaucauugccuacacaaugucucugggcgccgagaacagcguggccuacuccaacaacucuaucgcuauccccaccaacuucaccaucagcgugaccaccgagauccugccuguguccaugaccaagaccagcguggacugcaccauguacaucugcggcgauuccaccgagugcuccaaccugcugcugcaguacggcagcuucugcacccagcugaauagagcccugacagggaucgccguggaacaggacaagaacacccaagagguguucgcccaagugaagcaaaucuacaagaccccuccuaucaaggacuucggcggcuucaauuucagccagauucugcccgauccuagcaagcccagcaagcggagcuucaucgaggaccugcuguucaacaaagugacacuggccgacgccggcuucaucaagcaguauggcgauugucugggcgacauugccgccagggaucugauuugcgcccagaaguuuaacggacugacagugcugccuccucugcugaccgaugagaugaucgcccaguacacaucugcccugcuggccggcacaaucacaagcggcuggacauuuggagcuggcgccgcucugcagauccccuuugcuaugcagauggccuaccgguucaacggcaucggagugacccagaaugugcuguacgagaaccagaagcugaucgccaaccaguucaacagcgccaucggcaagauccaggacagccugagcagcacagcaagcgcccugggaaagcugcaggacguggucaaccagaaugcccaggcacugaacacccuggucaagcagcuguccuccaacugcggcgccaucagcucugugcugaacgauauccugagcagacuggacaaggucgaggccgaggugcagaucgacagacugaucacauguagacugcagagccuccagacauacgugacccagcagcugaucagagccgccgagauuagagccucugccaaucuggccgccaccaagaugucugagugugugcugggccagagcaagagaguggacuuuugcggcaagggcuaccaccugaugagcuucccucagucugccccucacggcgugguguuucugcacgugacauaugugcccgcucaagagaagaauuucaccaccgcuccagccaucugccacgacggcaaagcccacuuuccuagagaaggcguguucguguccaacggcacccauugguucgugacacagcggaacuucuacgagccccagaucaucaccaccgacaacaccuucgugucuggcaacugcgacguugugaucggcauugugaacaauaccguguacgacccucugcagcccgagcuggacagcuucaaagaggaacuggacaaguacuuuaagaaccacacaagccccgacguggaccugggcgauaucagcggaaucaaugccagcgucgugaacauccagaaagagaucgaccggcugaacgagguggccaagaaucugaacgagagccugaucgaccugcaagaacuggggaaguacgagcaguacaucaagggaggcggaggaucugacaucaucaagcugcugaacgagcaagugaacaaagagaugcagagcagcaaccuguacaugagcaugagcagcuggugcuacacccacagccuugauggcgccggacuguuccuguuugaucacgccgccgaggaauacgagcacgccaagaagcugaucaucuuccugaacgagaacaacgugcccgugcagcugaccagcauuucugccccugagcacaaguucgagggccugacacagaucuuccagaaggccuacgaacacgagcagcacaucagcgagagcaucaacaacaucguggaccacgccauuaagagcaaggaucacgccaccuucaacuuucugcagugguacguggccgaacagcacgaggaagaggugcuguucaaggacauccuggacaagaucgagcugaucggcaacgagaaccacggccuguaucuggccgaccaguacgugaagggaaucgccaagagcagaaagagcugaggacuaguuauaagacugacuagcccgaugggccucccaacgggcccuccuccccuccuugcaccgagauuaauaaaaaaaaaaaaaaaaaaaaaaaaaaaaaaaaaaaaaaaaaaaaaaaaaaaaaaaaaaaaaaaaugcaucccccccccccccccccccccccccccccccaaaggcucuuuucagagccaccagaauu

SEQ ID NO: 13055 - RNA, 4357 nt, Artificial Sequence
  SARS-CoV-2/Wuhan/WIV05/2019__EPI_ISL_402128 spike protein mRNA gc mod (1-1211)(A972C_R995C) Ferritin construct
aggagaaagcuuaccauguucguguuucuggugcugcugccccugguguccagccagugugugaaccugaccaccagaacacagcugccuccagccuacaccaacagcuucaccagaggcguguacuaccccgacaagguguucagauccagcgugcugcacucuacccaggaccuguuccugccuuucuucagcaacgugaccugguuccacgccauccacguguccggcaccaauggcaccaagagauucgacaaccccgugcugcccuucaacgacgggguguacuuugccagcaccgagaaguccaacaucaucagaggcuggaucuucggcaccacacuggacagcaagacccagagccugcugaucgugaacaacgccaccaacguggucaucaaagugugcgaguuccaguucugcaacgaccccuuccugggcgucuacuaccacaagaacaacaagagcuggauggaaagcgaguuccggguguacagcagcgccaacaacugcaccuucgaguacgugucccagccuuuccugauggaccuggaaggcaagcagggcaacuucaagaaccugcgcgaguucguguucaagaacaucgacggcuacuucaaaaucuacagcaagcacaccccuaucaaccucgugcgggaucugccucagggcuucucugcucuggaaccccugguggaucugcccaucggcaucaacaucacccgguuucagacacugcuggcccugcacagaagcuaccugacaccuggcgauagcagcagcggauggacagcuggugccgccgcuuacuaugugggcuaccugcagccuagaaccuuccugcugaaguacaacgagaacggcaccaucaccgacgccguggauugugcucuggauccucugagcgagacaaagugcacccugaaguccuucaccguggaaaagggcaucuaccagaccagcaacuuccgggugcagcccaccgaauccaucgugcgguuccccaauaucaccaaucugugccccuucggcgagguguucaaugccaccagauucgccucuguguacgccuggaaccggaagcggaucagcaauugcguggccgacuacuccgugcuguacaacuccgccagcuucagcaccuucaagugcuacggcguguccccuaccaagcugaacgaccugugcuucacaaacguguacgccgacagcuucgugauccggggagaugaagugcggcagauugccccuggacagacaggcaagaucgccgacuacaacuacaagcugcccgacgacuucaccggcugugugauugccuggaacagcaacaaccuggacuccaaagucggcggcaacuacaauuaccuguaccggcuguuccggaaguccaaucugaagcccuucgagcgggacaucagcaccgaaaucuaucaggccggcagcaccccuugcaacggcguggaaggcuucaacugcuacuucccacugcaguccuacggcuuucagcccacaaauggcgugggcuaucagcccuacagagugguggugcugagcuucgaacugcugcaugcuccugccacagugugcggcccuaagaaaagcaccaaucucgugaagaacaaaugcgugaacuucaacuucaacggccugaccggcaccggcgugcugacagagagcaacaagaaguuccugccauuccagcaguuuggccgggauaucgccgauaccacagacgccguuagagauccccagacacuggaaauccuggacaucaccccaugcagcuucggcggagugucugugaucaccccuggcaccaacaccagcaaucagguggcagugcuguaccaggacgugaacuguaccgaagugcccguggccauucacgccgaucagcugacaccuacauggcggguguacuccaccggcagcaauguguuucagaccagagccggcugucugaucggagccgagcacgugaacaauagcuacgagugcgacauccccaucggcgcuggcaucugugccagcuaccagacacagacaaacagccccagacgggcuagaagcguggccagccagagcaucauugccuacacaaugucucugggcgccgagaacagcguggccuacuccaacaacucuaucgcuauccccaccaacuucaccaucagcgugaccaccgagauccugccuguguccaugaccaagaccagcguggacugcaccauguacaucugcggcgauuccaccgagugcuccaaccugcugcugcaguacggcagcuucugcacccagcugaauagagcccugacagggaucgccguggaacaggacaagaacacccaagagguguucgcccaagugaagcaaaucuacaagaccccuccuaucaaggacuucggcggcuucaauuucagccagauucugcccgauccuagcaagcccagcaagcggagcuucaucgaggaccugcuguucaacaaagugacacuggccgacgccggcuucaucaagcaguauggcgauugucugggcgacauugccgccagggaucugauuugcgcccagaaguuuaacggacugacagugcugccuccucugcugaccgaugagaugaucgcccaguacacaucugcccugcuggccggcacaaucacaagcggcuggacauuuggagcuggcgccgcucugcagauccccuuugcuaugcagauggccuaccgguucaacggcaucggagugacccagaaugugcuguacgagaaccagaagcugaucgccaaccaguucaacagcgccaucggcaagauccaggacagccugagcagcacagcaagcgcccugggaaagcugcaggacguggucaaccagaaugcccaggcacugaacacccuggucaagcagcuguccuccaacuucggcugcaucagcucugugcugaacgauauccugagcagacuggacaaggucgaggccgaggugcagaucgacugucugaucacaggcagacugcagagccuccagacauacgugacccagcagcugaucagagccgccgagauuagagccucugccaaucuggccgccaccaagaugucugagugugugcugggccagagcaagagaguggacuuuugcggcaagggcuaccaccugaugagcuucccucagucugccccucacggcgugguguuucugcacgugacauaugugcccgcucaagagaagaauuucaccaccgcuccagccaucugccacgacggcaaagcccacuuuccuagagaaggcguguucguguccaacggcacccauugguucgugacacagcggaacuucuacgagccccagaucaucaccaccgacaacaccuucgugucuggcaacugcgacguugugaucggcauugugaacaauaccguguacgacccucugcagcccgagcuggacagcuucaaagaggaacuggacaaguacuuuaagaaccacacaagccccgacguggaccugggcgauaucagcggaaucaaugccagcgucgugaacauccagaaagagaucgaccggcugaacgagguggccaagaaucugaacgagagccugaucgaccugcaagaacuggggaaguacgagcaguacaucaagggaggcggaggaucugacaucaucaagcugcugaacgagcaagugaacaaagagaugcagagcagcaaccuguacaugagcaugagcagcuggugcuacacccacagccuugauggcgccggacuguuccuguuugaucacgccgccgaggaauacgagcacgccaagaagcugaucaucuuccugaacgagaacaacgugcccgugcagcugaccagcauuucugccccugagcacaaguucgagggccugacacagaucuuccagaaggccuacgaacacgagcagcacaucagcgagagcaucaacaacaucguggaccacgccauuaagagcaaggaucacgccaccuucaacuuucugcagugguacguggccgaacagcacgaggaagaggugcuguucaaggacauccuggacaagaucgagcugaucggcaacgagaaccacggccuguaucuggccgaccaguacgugaagggaaucgccaagagcagaaagagcugaggacuaguuauaagacugacuagcccgaugggccucccaacgggcccuccuccccuccuugcaccgagauuaauaaaaaaaaaaaaaaaaaaaaaaaaaaaaaaaaaaaaaaaaaaaaaaaaaaaaaaaaaaaaaaaaugcaucccccccccccccccccccccccccccccccaaaggcucuuuucagagccaccagaauu

SEQ ID NO: 13056 - RNA, 4357 nt, Artificial Sequence
  SARS-CoV-2/Wuhan/WIV05/2019__EPI_ISL_402128 spike protein mRNA gc mod (1-1211)(A890C_V1040C) Ferritin construct
aggagaaagcuuaccauguucguguuucuggugcugcugccccugguguccagccagugugugaaccugaccaccagaacacagcugccuccagccuacaccaacagcuucaccagaggcguguacuaccccgacaagguguucagauccagcgugcugcacucuacccaggaccuguuccugccuuucuucagcaacgugaccugguuccacgccauccacguguccggcaccaauggcaccaagagauucgacaaccccgugcugcccuucaacgacgggguguacuuugccagcaccgagaaguccaacaucaucagaggcuggaucuucggcaccacacuggacagcaagacccagagccugcugaucgugaacaacgccaccaacguggucaucaaagugugcgaguuccaguucugcaacgaccccuuccugggcgucuacuaccacaagaacaacaagagcuggauggaaagcgaguuccggguguacagcagcgccaacaacugcaccuucgaguacgugucccagccuuuccugauggaccuggaaggcaagcagggcaacuucaagaaccugcgcgaguucguguucaagaacaucgacggcuacuucaaaaucuacagcaagcacaccccuaucaaccucgugcgggaucugccucagggcuucucugcucuggaaccccugguggaucugcccaucggcaucaacaucacccgguuucagacacugcuggcccugcacagaagcuaccugacaccuggcgauagcagcagcggauggacagcuggugccgccgcuuacuaugugggcuaccugcagccuagaaccuuccugcugaaguacaacgagaacggcaccaucaccgacgccguggauugugcucuggauccucugagcgagacaaagugcacccugaaguccuucaccguggaaaagggcaucuaccagaccagcaacuuccgggugcagcccaccgaauccaucgugcgguuccccaauaucaccaaucugugccccuucggcgagguguucaaugccaccagauucgccucuguguacgccuggaaccggaagcggaucagcaauugcguggccgacuacuccgugcuguacaacuccgccagcuucagcaccuucaagugcuacggcguguccccuaccaagcugaacgaccugugcuucacaaacguguacgccgacagcuucgugauccggggagaugaagugcggcagauugccccuggacagacaggcaagaucgccgacuacaacuacaagcugcccgacgacuucaccggcugugugauugccuggaacagcaacaaccuggacuccaaagucggcggcaacuacaauuaccuguaccggcuguuccggaaguccaaucugaagcccuucgagcgggacaucagcaccgaaaucuaucaggccggcagcaccccuugcaacggcguggaaggcuucaacugcuacuucccacugcaguccuacggcuuucagcccacaaauggcgugggcuaucagcccuacagagugguggugcugagcuucgaacugcugcaugcuccugccacagugugcggcccuaagaaaagcaccaaucucgugaagaacaaaugcgugaacuucaacuucaacggccugaccggcaccggcgugcugacagagagcaacaagaaguuccugccauuccagcaguuuggccgggauaucgccgauaccacagacgccguuagagauccccagacacuggaaauccuggacaucaccccaugcagcuucggcggagugucugugaucaccccuggcaccaacaccagcaaucagguggcagugcuguaccaggacgugaacuguaccgaagugcccguggccauucacgccgaucagcugacaccuacauggcggguguacuccaccggcagcaauguguuucagaccagagccggcugucugaucggagccgagcacgugaacaauagcuacgagugcgacauccccaucggcgcuggcaucugugccagcuaccagacacagacaaacagccccagacgggcuagaagcguggccagccagagcaucauugccuacacaaugucucugggcgccgagaacagcguggccuacuccaacaacucuaucgcuauccccaccaacuucaccaucagcgugaccaccgagauccugccuguguccaugaccaagaccagcguggacugcaccauguacaucugcggcgauuccaccgagugcuccaaccugcugcugcaguacggcagcuucugcacccagcugaauagagcccugacagggaucgccguggaacaggacaagaacacccaagagguguucgcccaagugaagcaaaucuacaagaccccuccuaucaaggacuucggcggcuucaauuucagccagauucugcccgauccuagcaagcccagcaagcggagcuucaucgaggaccugcuguucaacaaagugacacuggccgacgccggcuucaucaagcaguauggcgauugucugggcgacauugccgccagggaucugauuugcgcccagaaguuuaacggacugacagugcugccuccucugcugaccgaugagaugaucgcccaguacacaucugcccugcuggccggcacaaucacaagcggcuggacauuuggaugcggcgccgcucugcagauccccuuugcuaugcagauggccuaccgguucaacggcaucggagugacccagaaugugcuguacgagaaccagaagcugaucgccaaccaguucaacagcgccaucggcaagauccaggacagccugagcagcacagcaagcgcccugggaaagcugcaggacguggucaaccagaaugcccaggcacugaacacccuggucaagcagcuguccuccaacuucggcgccaucagcucugugcugaacgauauccugagcagacuggacaaggucgaggccgaggugcagaucgacagacugaucacaggcagacugcagagccuccagacauacgugacccagcagcugaucagagccgccgagauuagagccucugccaaucuggccgccaccaagaugucugagugugugcugggccagagcaagagaugugacuuuugcggcaagggcuaccaccugaugagcuucccucagucugccccucacggcgugguguuucugcacgugacauaugugcccgcucaagagaagaauuucaccaccgcuccagccaucugccacgacggcaaagcccacuuuccuagagaaggcguguucguguccaacggcacccauugguucgugacacagcggaacuucuacgagccccagaucaucaccaccgacaacaccuucgugucuggcaacugcgacguugugaucggcauugugaacaauaccguguacgacccucugcagcccgagcuggacagcuucaaagaggaacuggacaaguacuuuaagaaccacacaagccccgacguggaccugggcgauaucagcggaaucaaugccagcgucgugaacauccagaaagagaucgaccggcugaacgagguggccaagaaucugaacgagagccugaucgaccugcaagaacuggggaaguacgagcaguacaucaagggaggcggaggaucugacaucaucaagcugcugaacgagcaagugaacaaagagaugcagagcagcaaccuguacaugagcaugagcagcuggugcuacacccacagccuugauggcgccggacuguuccuguuugaucacgccgccgaggaauacgagcacgccaagaagcugaucaucuuccugaacgagaacaacgugcccgugcagcugaccagcauuucugccccugagcacaaguucgagggccugacacagaucuuccagaaggccuacgaacacgagcagcacaucagcgagagcaucaacaacaucguggaccacgccauuaagagcaaggaucacgccaccuucaacuuucugcagugguacguggccgaacagcacgaggaagaggugcuguucaaggacauccuggacaagaucgagcugaucggcaacgagaaccacggccuguaucuggccgaccaguacgugaagggaaucgccaagagcagaaagagcugaggacuaguuauaagacugacuagcccgaugggccucccaacgggcccuccuccccuccuugcaccgagauuaauaaaaaaaaaaaaaaaaaaaaaaaaaaaaaaaaaaaaaaaaaaaaaaaaaaaaaaaaaaaaaaaaugcaucccccccccccccccccccccccccccccccaaaggcucuuuucagagccaccagaauu

SEQ ID NO: 13057 - RNA, 4357 nt, Artificial Sequence
  SARS-CoV-2/Wuhan/WIV05/2019__EPI_ISL_402128 spike protein mRNA gc mod (1-1211)(T874C_S1055C) Ferritin construct
aggagaaagcuuaccauguucguguuucuggugcugcugccccugguguccagccagugugugaaccugaccaccagaacacagcugccuccagccuacaccaacagcuucaccagaggcguguacuaccccgacaagguguucagauccagcgugcugcacucuacccaggaccuguuccugccuuucuucagcaacgugaccugguuccacgccauccacguguccggcaccaauggcaccaagagauucgacaaccccgugcugcccuucaacgacgggguguacuuugccagcaccgagaaguccaacaucaucagaggcuggaucuucggcaccacacuggacagcaagacccagagccugcugaucgugaacaacgccaccaacguggucaucaaagugugcgaguuccaguucugcaacgaccccuuccugggcgucuacuaccacaagaacaacaagagcuggauggaaagcgaguuccggguguacagcagcgccaacaacugcaccuucgaguacgugucccagccuuuccugauggaccuggaaggcaagcagggcaacuucaagaaccugcgcgaguucguguucaagaacaucgacggcuacuucaaaaucuacagcaagcacaccccuaucaaccucgugcgggaucugccucagggcuucucugcucuggaaccccugguggaucugcccaucggcaucaacaucacccgguuucagacacugcuggcccugcacagaagcuaccugacaccuggcgauagcagcagcggauggacagcuggugccgccgcuuacuaugugggcuaccugcagccuagaaccuuccugcugaaguacaacgagaacggcaccaucaccgacgccguggauugugcucuggauccucugagcgagacaaagugcacccugaaguccuucaccguggaaaagggcaucuaccagaccagcaacuuccgggugcagcccaccgaauccaucgugcgguuccccaauaucaccaaucugugccccuucggcgagguguucaaugccaccagauucgccucuguguacgccuggaaccggaagcggaucagcaauugcguggccgacuacuccgugcuguacaacuccgccagcuucagcaccuucaagugcuacggcguguccccuaccaagcugaacgaccugugcuucacaaacguguacgccgacagcuucgugauccggggagaugaagugcggcagauugccccuggacagacaggcaagaucgccgacuacaacuacaagcugcccgacgacuucaccggcugugugauugccuggaacagcaacaaccuggacuccaaagucggcggcaacuacaauuaccuguaccggcuguuccggaaguccaaucugaagcccuucgagcgggacaucagcaccgaaaucuaucaggccggcagcaccccuugcaacggcguggaaggcuucaacugcuacuucccacugcaguccuacggcuuucagcccacaaauggcgugggcuaucagcccuacagagugguggugcugagcuucgaacugcugcaugcuccugccacagugugcggcccuaagaaaagcaccaaucucgugaagaacaaaugcgugaacuucaacuucaacggccugaccggcaccggcgugcugacagagagcaacaagaaguuccugccauuccagcaguuuggccgggauaucgccgauaccacagacgccguuagagauccccagacacuggaaauccuggacaucaccccaugcagcuucggcggagugucugugaucaccccuggcaccaacaccagcaaucagguggcagugcuguaccaggacgugaacuguaccgaagugcccguggccauucacgccgaucagcugacaccuacauggcggguguacuccaccggcagcaauguguuucagaccagagccggcugucugaucggagccgagcacgugaacaauagcuacgagugcgacauccccaucggcgcuggcaucugugccagcuaccagacacagacaaacagccccagacgggcuagaagcguggccagccagagcaucauugccuacacaaugucucugggcgccgagaacagcguggccuacuccaacaacucuaucgcuauccccaccaacuucaccaucagcgugaccaccgagauccugccuguguccaugaccaagaccagcguggacugcaccauguacaucugcggcgauuccaccgagugcuccaaccugcugcugcaguacggcagcuucugcacccagcugaauagagcccugacagggaucgccguggaacaggacaagaacacccaagagguguucgcccaagugaagcaaaucuacaagaccccuccuaucaaggacuucggcggcuucaauuucagccagauucugcccgauccuagcaagcccagcaagcggagcuucaucgaggaccugcuguucaacaaagugacacuggccgacgccggcuucaucaagcaguauggcgauugucugggcgacauugccgccagggaucugauuugcgcccagaaguuuaacggacugacagugcugccuccucugcugaccgaugagaugaucgcccaguacugcucugcccugcuggccggcacaaucacaagcggcuggacauuuggagcuggcgccgcucugcagauccccuuugcuaugcagauggccuaccgguucaacggcaucggagugacccagaaugugcuguacgagaaccagaagcugaucgccaaccaguucaacagcgccaucggcaagauccaggacagccugagcagcacagcaagcgcccugggaaagcugcaggacguggucaaccagaaugcccaggcacugaacacccuggucaagcagcuguccuccaacuucggcgccaucagcucugugcugaacgauauccugagcagacuggacaaggucgaggccgaggugcagaucgacagacugaucacaggcagacugcagagccuccagacauacgugacccagcagcugaucagagccgccgagauuagagccucugccaaucuggccgccaccaagaugucugagugugugcugggccagagcaagagaguggacuuuugcggcaagggcuaccaccugaugagcuucccucagugcgccccucacggcgugguguuucugcacgugacauaugugcccgcucaagagaagaauuucaccaccgcuccagccaucugccacgacggcaaagcccacuuuccuagagaaggcguguucguguccaacggcacccauugguucgugacacagcggaacuucuacgagccccagaucaucaccaccgacaacaccuucgugucuggcaacugcgacguugugaucggcauugugaacaauaccguguacgacccucugcagcccgagcuggacagcuucaaagaggaacuggacaaguacuuuaagaaccacacaagccccgacguggaccugggcgauaucagcggaaucaaugccagcgucgugaacauccagaaagagaucgaccggcugaacgagguggccaagaaucugaacgagagccugaucgaccugcaagaacuggggaaguacgagcaguacaucaagggaggcggaggaucugacaucaucaagcugcugaacgagcaagugaacaaagagaugcagagcagcaaccuguacaugagcaugagcagcuggugcuacacccacagccuugauggcgccggacuguuccuguuugaucacgccgccgaggaauacgagcacgccaagaagcugaucaucuuccugaacgagaacaacgugcccgugcagcugaccagcauuucugccccugagcacaaguucgagggccugacacagaucuuccagaaggccuacgaacacgagcagcacaucagcgagagcaucaacaacaucguggaccacgccauuaagagcaaggaucacgccaccuucaacuuucugcagugguacguggccgaacagcacgaggaagaggugcuguucaaggacauccuggacaagaucgagcugaucggcaacgagaaccacggccuguaucuggccgaccaguacgugaagggaaucgccaagagcagaaagagcugaggacuaguuauaagacugacuagcccgaugggccucccaacgggcccuccuccccuccuugcaccgagauuaauaaaaaaaaaaaaaaaaaaaaaaaaaaaaaaaaaaaaaaaaaaaaaaaaaaaaaaaaaaaaaaaaugcaucccccccccccccccccccccccccccccccaaaggcucuuuucagagccaccagaauu

SEQ ID NO: 13058 - RNA, 3943 nt, Artificial Sequence
  SARS-CoV-2/Wuhan/WIV05/2019__EPI_ISL_402128 spike protein mRNA gc mod (1-1211) Foldon construct
aggagaaagcuuaccauguucguguuucuggugcugcugccccugguguccagccagugugugaaccugaccaccagaacacagcugccuccagccuacaccaacagcuucaccagaggcguguacuaccccgacaagguguucagauccagcgugcugcacucuacccaggaccuguuccugccuuucuucagcaacgugaccugguuccacgccauccacguguccggcaccaauggcaccaagagauucgacaaccccgugcugcccuucaacgacgggguguacuuugccagcaccgagaaguccaacaucaucagaggcuggaucuucggcaccacacuggacagcaagacccagagccugcugaucgugaacaacgccaccaacguggucaucaaagugugcgaguuccaguucugcaacgaccccuuccugggcgucuacuaccacaagaacaacaagagcuggauggaaagcgaguuccggguguacagcagcgccaacaacugcaccuucgaguacgugucccagccuuuccugauggaccuggaaggcaagcagggcaacuucaagaaccugcgcgaguucguguucaagaacaucgacggcuacuucaaaaucuacagcaagcacaccccuaucaaccucgugcgggaucugccucagggcuucucugcucuggaaccccugguggaucugcccaucggcaucaacaucacccgguuucagacacugcuggcccugcacagaagcuaccugacaccuggcgauagcagcagcggauggacagcuggugccgccgcuuacuaugugggcuaccugcagccuagaaccuuccugcugaaguacaacgagaacggcaccaucaccgacgccguggauugugcucuggauccucugagcgagacaaagugcacccugaaguccuucaccguggaaaagggcaucuaccagaccagcaacuuccgggugcagcccaccgaauccaucgugcgguuccccaauaucaccaaucugugccccuucggcgagguguucaaugccaccagauucgccucuguguacgccuggaaccggaagcggaucagcaauugcguggccgacuacuccgugcuguacaacuccgccagcuucagcaccuucaagugcuacggcguguccccuaccaagcugaacgaccugugcuucacaaacguguacgccgacagcuucgugauccggggagaugaagugcggcagauugccccuggacagacaggcaagaucgccgacuacaacuacaagcugcccgacgacuucaccggcugugugauugccuggaacagcaacaaccuggacuccaaagucggcggcaacuacaauuaccuguaccggcuguuccggaaguccaaucugaagcccuucgagcgggacaucagcaccgaaaucuaucaggccggcagcaccccuugcaacggcguggaaggcuucaacugcuacuucccacugcaguccuacggcuuucagcccacaaauggcgugggcuaucagcccuacagagugguggugcugagcuucgaacugcugcaugcuccugccacagugugcggcccuaagaaaagcaccaaucucgugaagaacaaaugcgugaacuucaacuucaacggccugaccggcaccggcgugcugacagagagcaacaagaaguuccugccauuccagcaguuuggccgggauaucgccgauaccacagacgccguuagagauccccagacacuggaaauccuggacaucaccccaugcagcuucggcggagugucugugaucaccccuggcaccaacaccagcaaucagguggcagugcuguaccaggacgugaacuguaccgaagugcccguggccauucacgccgaucagcugacaccuacauggcggguguacuccaccggcagcaauguguuucagaccagagccggcugucugaucggagccgagcacgugaacaauagcuacgagugcgacauccccaucggcgcuggcaucugugccagcuaccagacacagacaaacagccccagacgggcuagaagcguggccagccagagcaucauugccuacacaaugucucugggcgccgagaacagcguggccuacuccaacaacucuaucgcuauccccaccaacuucaccaucagcgugaccaccgagauccugccuguguccaugaccaagaccagcguggacugcaccauguacaucugcggcgauuccaccgagugcuccaaccugcugcugcaguacggcagcuucugcacccagcugaauagagcccugacagggaucgccguggaacaggacaagaacacccaagagguguucgcccaagugaagcaaaucuacaagaccccuccuaucaaggacuucggcggcuucaauuucagccagauucugcccgauccuagcaagcccagcaagcggagcuucaucgaggaccugcuguucaacaaagugacacuggccgacgccggcuucaucaagcaguauggcgauugucugggcgacauugccgccagggaucugauuugcgcccagaaguuuaacggacugacagugcugccuccucugcugaccgaugagaugaucgcccaguacacaucugcccugcuggccggcacaaucacaagcggcuggacauuuggagcuggcgccgcucugcagauccccuuugcuaugcagauggccuaccgguucaacggcaucggagugacccagaaugugcuguacgagaaccagaagcugaucgccaaccaguucaacagcgccaucggcaagauccaggacagccugagcagcacagcaagcgcccugggaaagcugcaggacguggucaaccagaaugcccaggcacugaacacccuggucaagcagcuguccuccaacuucggcgccaucagcucugugcugaacgauauccugagcagacuggacaaggucgaggccgaggugcagaucgacagacugaucacaggcagacugcagagccuccagacauacgugacccagcagcugaucagagccgccgagauuagagccucugccaaucuggccgccaccaagaugucugagugugugcugggccagagcaagagaguggacuuuugcggcaagggcuaccaccugaugagcuucccucagucugccccucacggcgugguguuucugcacgugacauaugugcccgcucaagagaagaauuucaccaccgcuccagccaucugccacgacggcaaagcccacuuuccuagagaaggcguguucguguccaacggcacccauugguucgugacacagcggaacuucuacgagccccagaucaucaccaccgacaacaccuucgugucuggcaacugcgacguugugaucggcauugugaacaauaccguguacgacccucugcagcccgagcuggacagcuucaaagaggaacuggacaaguacuuuaagaaccacacaagccccgacguggaccugggcgauaucagcggaaucaaugccagcgucgugaacauccagaaagagaucgaccggcugaacgagguggccaagaaucugaacgagagccugaucgaccugcaagaacuggggaaguacgagcaguacaucaagggaggaucuggcuauauccccgaggcuccuagagauggccaggccuauguucggaaggauggcgaaugggugcugcugagcaccuuccuuugaggacuaguuauaagacugacuagcccgaugggccucccaacgggcccuccuccccuccuugcaccgagauuaauaaaaaaaaaaaaaaaaaaaaaaaaaaaaaaaaaaaaaaaaaaaaaaaaaaaaaaaaaaaaaaaaugcaucccccccccccccccccccccccccccccccaaaggcucuuuucagagccaccagaauu

SEQ ID NO: 13059 - RNA, 3943 nt, Artificial Sequence
  SARS-CoV-2/Wuhan/WIV05/2019__EPI_ISL_402128 spike protein mRNA gc mod (1-1211)(K986P_V987P) Foldon construct
aggagaaagcuuaccauguucguguuucuggugcugcugccccugguguccagccagugugugaaccugaccaccagaacacagcugccuccagccuacaccaacagcuucaccagaggcguguacuaccccgacaagguguucagauccagcgugcugcacucuacccaggaccuguuccugccuuucuucagcaacgugaccugguuccacgccauccacguguccggcaccaauggcaccaagagauucgacaaccccgugcugcccuucaacgacgggguguacuuugccagcaccgagaaguccaacaucaucagaggcuggaucuucggcaccacacuggacagcaagacccagagccugcugaucgugaacaacgccaccaacguggucaucaaagugugcgaguuccaguucugcaacgaccccuuccugggcgucuacuaccacaagaacaacaagagcuggauggaaagcgaguuccggguguacagcagcgccaacaacugcaccuucgaguacgugucccagccuuuccugauggaccuggaaggcaagcagggcaacuucaagaaccugcgcgaguucguguucaagaacaucgacggcuacuucaaaaucuacagcaagcacaccccuaucaaccucgugcgggaucugccucagggcuucucugcucuggaaccccugguggaucugcccaucggcaucaacaucacccgguuucagacacugcuggcccugcacagaagcuaccugacaccuggcgauagcagcagcggauggacagcuggugccgccgcuuacuaugugggcuaccugcagccuagaaccuuccugcugaaguacaacgagaacggcaccaucaccgacgccguggauugugcucuggauccucugagcgagacaaagugcacccugaaguccuucaccguggaaaagggcaucuaccagaccagcaacuuccgggugcagcccaccgaauccaucgugcgguuccccaauaucaccaaucugugccccuucggcgagguguucaaugccaccagauucgccucuguguacgccuggaaccggaagcggaucagcaauugcguggccgacuacuccgugcuguacaacuccgccagcuucagcaccuucaagugcuacggcguguccccuaccaagcugaacgaccugugcuucacaaacguguacgccgacagcuucgugauccggggagaugaagugcggcagauugccccuggacagacaggcaagaucgccgacuacaacuacaagcugcccgacgacuucaccggcugugugauugccuggaacagcaacaaccuggacuccaaagucggcggcaacuacaauuaccuguaccggcuguuccggaaguccaaucugaagcccuucgagcgggacaucagcaccgaaaucuaucaggccggcagcaccccuugcaacggcguggaaggcuucaacugcuacuucccacugcaguccuacggcuuucagcccacaaauggcgugggcuaucagcccuacagagugguggugcugagcuucgaacugcugcaugcuccugccacagugugcggcccuaagaaaagcaccaaucucgugaagaacaaaugcgugaacuucaacuucaacggccugaccggcaccggcgugcugacagagagcaacaagaaguuccugccauuccagcaguuuggccgggauaucgccgauaccacagacgccguuagagauccccagacacuggaaauccuggacaucaccccaugcagcuucggcggagugucugugaucaccccuggcaccaacaccagcaaucagguggcagugcuguaccaggacgugaacuguaccgaagugcccguggccauucacgccgaucagcugacaccuacauggcggguguacuccaccggcagcaauguguuucagaccagagccggcugucugaucggagccgagcacgugaacaauagcuacgagugcgacauccccaucggcgcuggcaucugugccagcuaccagacacagacaaacagccccagacgggcuagaagcguggccagccagagcaucauugccuacacaaugucucugggcgccgagaacagcguggccuacuccaacaacucuaucgcuauccccaccaacuucaccaucagcgugaccaccgagauccugccuguguccaugaccaagaccagcguggacugcaccauguacaucugcggcgauuccaccgagugcuccaaccugcugcugcaguacggcagcuucugcacccagcugaauagagcccugacagggaucgccguggaacaggacaagaacacccaagagguguucgcccaagugaagcaaaucuacaagaccccuccuaucaaggacuucggcggcuucaauuucagccagauucugcccgauccuagcaagcccagcaagcggagcuucaucgaggaccugcuguucaacaaagugacacuggccgacgccggcuucaucaagcaguauggcgauugucugggcgacauugccgccagggaucugauuugcgcccagaaguuuaacggacugacagugcugccuccucugcugaccgaugagaugaucgcccaguacacaucugcccugcuggccggcacaaucacaagcggcuggacauuuggagcuggcgccgcucugcagauccccuuugcuaugcagauggccuaccgguucaacggcaucggagugacccagaaugugcuguacgagaaccagaagcugaucgccaaccaguucaacagcgccaucggcaagauccaggacagccugagcagcacagcaagcgcccugggaaagcugcaggacguggucaaccagaaugcccaggcacugaacacccuggucaagcagcuguccuccaacuucggcgccaucagcucugugcugaacgauauccugagcagacuggacccuccugaggccgaggugcagaucgacagacugaucacaggcagacugcagagccuccagacauacgugacccagcagcugaucagagccgccgagauuagagccucugccaaucuggccgccaccaagaugucugagugugugcugggccagagcaagagaguggacuuuugcggcaagggcuaccaccugaugagcuucccucagucugccccucacggcgugguguuucugcacgugacauaugugcccgcucaagagaagaauuucaccaccgcuccagccaucugccacgacggcaaagcccacuuuccuagagaaggcguguucguguccaacggcacccauugguucgugacacagcggaacuucuacgagccccagaucaucaccaccgacaacaccuucgugucuggcaacugcgacguugugaucggcauugugaacaauaccguguacgacccucugcagcccgagcuggacagcuucaaagaggaacuggacaaguacuuuaagaaccacacaagccccgacguggaccugggcgauaucagcggaaucaaugccagcgucgugaacauccagaaagagaucgaccggcugaacgagguggccaagaaucugaacgagagccugaucgaccugcaagaacuggggaaguacgagcaguacaucaagggaggaucuggcuauauccccgaggcuccuagagauggccaggccuauguucggaaggauggcgaaugggugcugcugagcaccuuccuuugaggacuaguuauaagacugacuagcccgaugggccucccaacgggcccuccuccccuccuugcaccgagauuaauaaaaaaaaaaaaaaaaaaaaaaaaaaaaaaaaaaaaaaaaaaaaaaaaaaaaaaaaaaaaaaaaugcaucccccccccccccccccccccccccccccccaaaggcucuuuucagagccaccagaauu

SEQ ID NO: 13060 - RNA, 3943 nt, Artificial Sequence
  SARS-CoV-2/Wuhan/WIV05/2019__EPI_ISL_402128 spike protein mRNA gc mod (1-1211)(K986P_V987P_T887WN_A1020W) Foldon construct
aggagaaagcuuaccauguucguguuucuggugcugcugccccugguguccagccagugugugaaccugaccaccagaacacagcugccuccagccuacaccaacagcuucaccagaggcguguacuaccccgacaagguguucagauccagcgugcugcacucuacccaggaccuguuccugccuuucuucagcaacgugaccugguuccacgccauccacguguccggcaccaauggcaccaagagauucgacaaccccgugcugcccuucaacgacgggguguacuuugccagcaccgagaaguccaacaucaucagaggcuggaucuucggcaccacacuggacagcaagacccagagccugcugaucgugaacaacgccaccaacguggucaucaaagugugcgaguuccaguucugcaacgaccccuuccugggcgucuacuaccacaagaacaacaagagcuggauggaaagcgaguuccggguguacagcagcgccaacaacugcaccuucgaguacgugucccagccuuuccugauggaccuggaaggcaagcagggcaacuucaagaaccugcgcgaguucguguucaagaacaucgacggcuacuucaaaaucuacagcaagcacaccccuaucaaccucgugcgggaucugccucagggcuucucugcucuggaaccccugguggaucugcccaucggcaucaacaucacccgguuucagacacugcuggcccugcacagaagcuaccugacaccuggcgauagcagcagcggauggacagcuggugccgccgcuuacuaugugggcuaccugcagccuagaaccuuccugcugaaguacaacgagaacggcaccaucaccgacgccguggauugugcucuggauccucugagcgagacaaagugcacccugaaguccuucaccguggaaaagggcaucuaccagaccagcaacuuccgggugcagcccaccgaauccaucgugcgguuccccaauaucaccaaucugugccccuucggcgagguguucaaugccaccagauucgccucuguguacgccuggaaccggaagcggaucagcaauugcguggccgacuacuccgugcuguacaacuccgccagcuucagcaccuucaagugcuacggcguguccccuaccaagcugaacgaccugugcuucacaaacguguacgccgacagcuucgugauccggggagaugaagugcggcagauugccccuggacagacaggcaagaucgccgacuacaacuacaagcugcccgacgacuucaccggcugugugauugccuggaacagcaacaaccuggacuccaaagucggcggcaacuacaauuaccuguaccggcuguuccggaaguccaaucugaagcccuucgagcgggacaucagcaccgaaaucuaucaggccggcagcaccccuugcaacggcguggaaggcuucaacugcuacuucccacugcaguccuacggcuuucagcccacaaauggcgugggcuaucagcccuacagagugguggugcugagcuucgaacugcugcaugcuccugccacagugugcggcccuaagaaaagcaccaaucucgugaagaacaaaugcgugaacuucaacuucaacggccugaccggcaccggcgugcugacagagagcaacaagaaguuccugccauuccagcaguuuggccgggauaucgccgauaccacagacgccguuagagauccccagacacuggaaauccuggacaucaccccaugcagcuucggcggagugucugugaucaccccuggcaccaacaccagcaaucagguggcagugcuguaccaggacgugaacuguaccgaagugcccguggccauucacgccgaucagcugacaccuacauggcggguguacuccaccggcagcaauguguuucagaccagagccggcugucugaucggagccgagcacgugaacaauagcuacgagugcgacauccccaucggcgcuggcaucugugccagcuaccagacacagacaaacagccccagacgggcuagaagcguggccagccagagcaucauugccuacacaaugucucugggcgccgagaacagcguggccuacuccaacaacucuaucgcuauccccaccaacuucaccaucagcgugaccaccgagauccugccuguguccaugaccaagaccagcguggacugcaccauguacaucugcggcgauuccaccgagugcuccaaccugcugcugcaguacggcagcuucugcacccagcugaauagagcccugacagggaucgccguggaacaggacaagaacacccaagagguguucgcccaagugaagcaaaucuacaagaccccuccuaucaaggacuucggcggcuucaauuucagccagauucugcccgauccuagcaagcccagcaagcggagcuucaucgaggaccugcuguucaacaaagugacacuggccgacgccggcuucaucaagcaguauggcgauugucugggcgacauugccgccagggaucugauuugcgcccagaaguuuaacggacugacagugcugccuccucugcugaccgaugagaugaucgcccaguacacaucugcccugcuggccggcacaaucacaagcggcuggugguuuggagcuggcgccgcucugcagauccccuuugcuaugcagauggccuaccgguucaacggcaucggagugacccagaaugugcuguacgagaaccagaagcugaucgccaaccaguucaacagcgccaucggcaagauccaggacagccugagcagcacagcaagcgcccugggaaagcugcaggacguggucaaccagaaugcccaggcacugaacacccuggucaagcagcuguccuccaacuucggcgccaucagcucugugcugaacgauauccugagcagacuggacccuccugaggccgaggugcagaucgacagacugaucacaggcagacugcagagccuccagacauacgugacccagcagcugaucagagccgccgagauuagauggucugccaaucuggccgccaccaagaugucugagugugugcugggccagagcaagagaguggacuuuugcggcaagggcuaccaccugaugagcuucccucagucugccccucacggcgugguguuucugcacgugacauaugugcccgcucaagagaagaauuucaccaccgcuccagccaucugccacgacggcaaagcccacuuuccuagagaaggcguguucguguccaacggcacccauugguucgugacacagcggaacuucuacgagccccagaucaucaccaccgacaacaccuucgugucuggcaacugcgacguugugaucggcauugugaacaauaccguguacgacccucugcagcccgagcuggacagcuucaaagaggaacuggacaaguacuuuaagaaccacacaagccccgacguggaccugggcgauaucagcggaaucaaugccagcgucgugaacauccagaaagagaucgaccggcugaacgagguggccaagaaucugaacgagagccugaucgaccugcaagaacuggggaaguacgagcaguacaucaagggaggaucuggcuauauccccgaggcuccuagagauggccaggccuauguucggaaggauggcgaaugggugcugcugagcaccuuccuuugaggacuaguuauaagacugacuagcccgaugggccucccaacgggcccuccuccccuccuugcaccgagauuaauaaaaaaaaaaaaaaaaaaaaaaaaaaaaaaaaaaaaaaaaaaaaaaaaaaaaaaaaaaaaaaaaugcaucccccccccccccccccccccccccccccccaaaggcucuuuucagagccaccagaauu

SEQ ID NO: 13061 - RNA, 3943 nt, Artificial Sequence
  SARS-CoV-2/Wuhan/WIV05/2019__EPI_ISL_402128 spike protein mRNA gc mod (1-1211)(K986P_V987P_P1069F) Foldon construct
aggagaaagcuuaccauguucguguuucuggugcugcugccccugguguccagccagugugugaaccugaccaccagaacacagcugccuccagccuacaccaacagcuucaccagaggcguguacuaccccgacaagguguucagauccagcgugcugcacucuacccaggaccuguuccugccuuucuucagcaacgugaccugguuccacgccauccacguguccggcaccaauggcaccaagagauucgacaaccccgugcugcccuucaacgacgggguguacuuugccagcaccgagaaguccaacaucaucagaggcuggaucuucggcaccacacuggacagcaagacccagagccugcugaucgugaacaacgccaccaacguggucaucaaagugugcgaguuccaguucugcaacgaccccuuccugggcgucuacuaccacaagaacaacaagagcuggauggaaagcgaguuccggguguacagcagcgccaacaacugcaccuucgaguacgugucccagccuuuccugauggaccuggaaggcaagcagggcaacuucaagaaccugcgcgaguucguguucaagaacaucgacggcuacuucaaaaucuacagcaagcacaccccuaucaaccucgugcgggaucugccucagggcuucucugcucuggaaccccugguggaucugcccaucggcaucaacaucacccgguuucagacacugcuggcccugcacagaagcuaccugacaccuggcgauagcagcagcggauggacagcuggugccgccgcuuacuaugugggcuaccugcagccuagaaccuuccugcugaaguacaacgagaacggcaccaucaccgacgccguggauugugcucuggauccucugagcgagacaaagugcacccugaaguccuucaccguggaaaagggcaucuaccagaccagcaacuuccgggugcagcccaccgaauccaucgugcgguuccccaauaucaccaaucugugccccuucggcgagguguucaaugccaccagauucgccucuguguacgccuggaaccggaagcggaucagcaauugcguggccgacuacuccgugcuguacaacuccgccagcuucagcaccuucaagugcuacggcguguccccuaccaagcugaacgaccugugcuucacaaacguguacgccgacagcuucgugauccggggagaugaagugcggcagauugccccuggacagacaggcaagaucgccgacuacaacuacaagcugcccgacgacuucaccggcugugugauugccuggaacagcaacaaccuggacuccaaagucggcggcaacuacaauuaccuguaccggcuguuccggaaguccaaucugaagcccuucgagcgggacaucagcaccgaaaucuaucaggccggcagcaccccuugcaacggcguggaaggcuucaacugcuacuucccacugcaguccuacggcuuucagcccacaaauggcgugggcuaucagcccuacagagugguggugcugagcuucgaacugcugcaugcuccugccacagugugcggcccuaagaaaagcaccaaucucgugaagaacaaaugcgugaacuucaacuucaacggccugaccggcaccggcgugcugacagagagcaacaagaaguuccugccauuccagcaguuuggccgggauaucgccgauaccacagacgccguuagagauccccagacacuggaaauccuggacaucaccccaugcagcuucggcggagugucugugaucaccccuggcaccaacaccagcaaucagguggcagugcuguaccaggacgugaacuguaccgaagugcccguggccauucacgccgaucagcugacaccuacauggcggguguacuccaccggcagcaauguguuucagaccagagccggcugucugaucggagccgagcacgugaacaauagcuacgagugcgacauccccaucggcgcuggcaucugugccagcuaccagacacagacaaacagccccagacgggcuagaagcguggccagccagagcaucauugccuacacaaugucucugggcgccgagaacagcguggccuacuccaacaacucuaucgcuauccccaccaacuucaccaucagcgugaccaccgagauccugccuguguccaugaccaagaccagcguggacugcaccauguacaucugcggcgauuccaccgagugcuccaaccugcugcugcaguacggcagcuucugcacccagcugaauagagcccugacagggaucgccguggaacaggacaagaacacccaagagguguucgcccaagugaagcaaaucuacaagaccccuccuaucaaggacuucggcggcuucaauuucagccagauucugcccgauccuagcaagcccagcaagcggagcuucaucgaggaccugcuguucaacaaagugacacuggccgacgccggcuucaucaagcaguauggcgauugucugggcgacauugccgccagggaucugauuugcgcccagaaguuuaacggacugacagugcugccuccucugcugaccgaugagaugaucgcccaguacacaucugcccugcuggccggcacaaucacaagcggcuggacauuuggagcuggcgccgcucugcagauccccuuugcuaugcagauggccuaccgguucaacggcaucggagugacccagaaugugcuguacgagaaccagaagcugaucgccaaccaguucaacagcgccaucggcaagauccaggacagccugagcagcacagcaagcgcccugggaaagcugcaggacguggucaaccagaaugcccaggcacugaacacccuggucaagcagcuguccuccaacuucggcgccaucagcucugugcugaacgauauccugagcagacuggacccuccugaggccgaggugcagaucgacagacugaucacaggcagacugcagagccuccagacauacgugacccagcagcugaucagagccgccgagauuagagccucugccaaucuggccgccaccaagaugucugagugugugcugggccagagcaagagaguggacuuuugcggcaagggcuaccaccugaugagcuucccucagucugccccucacggcgugguguuucugcacgugacauauguguucgcucaagagaagaauuucaccaccgcuccagccaucugccacgacggcaaagcccacuuuccuagagaaggcguguucguguccaacggcacccauugguucgugacacagcggaacuucuacgagccccagaucaucaccaccgacaacaccuucgugucuggcaacugcgacguugugaucggcauugugaacaauaccguguacgacccucugcagcccgagcuggacagcuucaaagaggaacuggacaaguacuuuaagaaccacacaagccccgacguggaccugggcgauaucagcggaaucaaugccagcgucgugaacauccagaaagagaucgaccggcugaacgagguggccaagaaucugaacgagagccugaucgaccugcaagaacuggggaaguacgagcaguacaucaagggaggaucuggcuauauccccgaggcuccuagagauggccaggccuauguucggaaggauggcgaaugggugcugcugagcaccuuccuuugaggacuaguuauaagacugacuagcccgaugggccucccaacgggcccuccuccccuccuugcaccgagauuaauaaaaaaaaaaaaaaaaaaaaaaaaaaaaaaaaaaaaaaaaaaaaaaaaaaaaaaaaaaaaaaaaugcaucccccccccccccccccccccccccccccccaaaggcucuuuucagagccaccagaauu

SEQ ID NO: 13062 - RNA, 3943 nt, Artificial Sequence
  SARS-CoV-2/Wuhan/WIV05/2019__EPI_ISL_402128 spike protein mRNA gc mod (1-1211)(K986P_V987P_ H1048Q_H1064N_ H1083N_H1101N) Foldon construct
aggagaaagcuuaccauguucguguuucuggugcugcugccccugguguccagccagugugugaaccugaccaccagaacacagcugccuccagccuacaccaacagcuucaccagaggcguguacuaccccgacaagguguucagauccagcgugcugcacucuacccaggaccuguuccugccuuucuucagcaacgugaccugguuccacgccauccacguguccggcaccaauggcaccaagagauucgacaaccccgugcugcccuucaacgacgggguguacuuugccagcaccgagaaguccaacaucaucagaggcuggaucuucggcaccacacuggacagcaagacccagagccugcugaucgugaacaacgccaccaacguggucaucaaagugugcgaguuccaguucugcaacgaccccuuccugggcgucuacuaccacaagaacaacaagagcuggauggaaagcgaguuccggguguacagcagcgccaacaacugcaccuucgaguacgugucccagccuuuccugauggaccuggaaggcaagcagggcaacuucaagaaccugcgcgaguucguguucaagaacaucgacggcuacuucaaaaucuacagcaagcacaccccuaucaaccucgugcgggaucugccucagggcuucucugcucuggaaccccugguggaucugcccaucggcaucaacaucacccgguuucagacacugcuggcccugcacagaagcuaccugacaccuggcgauagcagcagcggauggacagcuggugccgccgcuuacuaugugggcuaccugcagccuagaaccuuccugcugaaguacaacgagaacggcaccaucaccgacgccguggauugugcucuggauccucugagcgagacaaagugcacccugaaguccuucaccguggaaaagggcaucuaccagaccagcaacuuccgggugcagcccaccgaauccaucgugcgguuccccaauaucaccaaucugugccccuucggcgagguguucaaugccaccagauucgccucuguguacgccuggaaccggaagcggaucagcaauugcguggccgacuacuccgugcuguacaacuccgccagcuucagcaccuucaagugcuacggcguguccccuaccaagcugaacgaccugugcuucacaaacguguacgccgacagcuucgugauccggggagaugaagugcggcagauugccccuggacagacaggcaagaucgccgacuacaacuacaagcugcccgacgacuucaccggcugugugauugccuggaacagcaacaaccuggacuccaaagucggcggcaacuacaauuaccuguaccggcuguuccggaaguccaaucugaagcccuucgagcgggacaucagcaccgaaaucuaucaggccggcagcaccccuugcaacggcguggaaggcuucaacugcuacuucccacugcaguccuacggcuuucagcccacaaauggcgugggcuaucagcccuacagagugguggugcugagcuucgaacugcugcaugcuccugccacagugugcggcccuaagaaaagcaccaaucucgugaagaacaaaugcgugaacuucaacuucaacggccugaccggcaccggcgugcugacagagagcaacaagaaguuccugccauuccagcaguuuggccgggauaucgccgauaccacagacgccguuagagauccccagacacuggaaauccuggacaucaccccaugcagcuucggcggagugucugugaucaccccuggcaccaacaccagcaaucagguggcagugcuguaccaggacgugaacuguaccgaagugcccguggccauucacgccgaucagcugacaccuacauggcggguguacuccaccggcagcaauguguuucagaccagagccggcugucugaucggagccgagcacgugaacaauagcuacgagugcgacauccccaucggcgcuggcaucugugccagcuaccagacacagacaaacagccccagacgggcuagaagcguggccagccagagcaucauugccuacacaaugucucugggcgccgagaacagcguggccuacuccaacaacucuaucgcuauccccaccaacuucaccaucagcgugaccaccgagauccugccuguguccaugaccaagaccagcguggacugcaccauguacaucugcggcgauuccaccgagugcuccaaccugcugcugcaguacggcagcuucugcacccagcugaauagagcccugacagggaucgccguggaacaggacaagaacacccaagagguguucgcccaagugaagcaaaucuacaagaccccuccuaucaaggacuucggcggcuucaauuucagccagauucugcccgauccuagcaagcccagcaagcggagcuucaucgaggaccugcuguucaacaaagugacacuggccgacgccggcuucaucaagcaguauggcgauugucugggcgacauugccgccagggaucugauuugcgcccagaaguuuaacggacugacagugcugccuccucugcugaccgaugagaugaucgcccaguacacaucugcccugcuggccggcacaaucacaagcggcuggacauuuggagcuggcgccgcucugcagauccccuuugcuaugcagauggccuaccgguucaacggcaucggagugacccagaaugugcuguacgagaaccagaagcugaucgccaaccaguucaacagcgccaucggcaagauccaggacagccugagcagcacagcaagcgcccugggaaagcugcaggacguggucaaccagaaugcccaggcacugaacacccuggucaagcagcuguccuccaacuucggcgccaucagcucugugcugaacgauauccugagcagacuggacccuccugaggccgaggugcagaucgacagacugaucacaggcagacugcagagccuccagacauacgugacccagcagcugaucagagccgccgagauuagagccucugccaaucuggccgccaccaagaugucugagugugugcugggccagagcaagagaguggacuuuugcggcaagggcuaccagcugaugagcuucccucagucugccccucacggcgugguguuucugaacgugacauaugugcccgcucaagagaagaauuucaccaccgcuccagccaucugcaacgacggcaaagcccacuuuccuagagaaggcguguucguguccaacggcaccaacugguucgugacacagcggaacuucuacgagccccagaucaucaccaccgacaacaccuucgugucuggcaacugcgacguugugaucggcauugugaacaauaccguguacgacccucugcagcccgagcuggacagcuucaaagaggaacuggacaaguacuuuaagaaccacacaagccccgacguggaccugggcgauaucagcggaaucaaugccagcgucgugaacauccagaaagagaucgaccggcugaacgagguggccaagaaucugaacgagagccugaucgaccugcaagaacuggggaaguacgagcaguacaucaagggaggaucuggcuauauccccgaggcuccuagagauggccaggccuauguucggaaggauggcgaaugggugcugcugagcaccuuccuuugaggacuaguuauaagacugacuagcccgaugggccucccaacgggcccuccuccccuccuugcaccgagauuaauaaaaaaaaaaaaaaaaaaaaaaaaaaaaaaaaaaaaaaaaaaaaaaaaaaaaaaaaaaaaaaaaugcaucccccccccccccccccccccccccccccccaaaggcucuuuucagagccaccagaauu

SEQ ID NO: 13063 - RNA, 3943 nt, Artificial Sequence
  SARS-CoV-2/Wuhan/WIV05/2019__EPI_ISL_402128 spike protein mRNA gc mod (1-1211)(I712C_T1077C) Foldon construct
aggagaaagcuuaccauguucguguuucuggugcugcugccccugguguccagccagugugugaaccugaccaccagaacacagcugccuccagccuacaccaacagcuucaccagaggcguguacuaccccgacaagguguucagauccagcgugcugcacucuacccaggaccuguuccugccuuucuucagcaacgugaccugguuccacgccauccacguguccggcaccaauggcaccaagagauucgacaaccccgugcugcccuucaacgacgggguguacuuugccagcaccgagaaguccaacaucaucagaggcuggaucuucggcaccacacuggacagcaagacccagagccugcugaucgugaacaacgccaccaacguggucaucaaagugugcgaguuccaguucugcaacgaccccuuccugggcgucuacuaccacaagaacaacaagagcuggauggaaagcgaguuccggguguacagcagcgccaacaacugcaccuucgaguacgugucccagccuuuccugauggaccuggaaggcaagcagggcaacuucaagaaccugcgcgaguucguguucaagaacaucgacggcuacuucaaaaucuacagcaagcacaccccuaucaaccucgugcgggaucugccucagggcuucucugcucuggaaccccugguggaucugcccaucggcaucaacaucacccgguuucagacacugcuggcccugcacagaagcuaccugacaccuggcgauagcagcagcggauggacagcuggugccgccgcuuacuaugugggcuaccugcagccuagaaccuuccugcugaaguacaacgagaacggcaccaucaccgacgccguggauugugcucuggauccucugagcgagacaaagugcacccugaaguccuucaccguggaaaagggcaucuaccagaccagcaacuuccgggugcagcccaccgaauccaucgugcgguuccccaauaucaccaaucugugccccuucggcgagguguucaaugccaccagauucgccucuguguacgccuggaaccggaagcggaucagcaauugcguggccgacuacuccgugcuguacaacuccgccagcuucagcaccuucaagugcuacggcguguccccuaccaagcugaacgaccugugcuucacaaacguguacgccgacagcuucgugauccggggagaugaagugcggcagauugccccuggacagacaggcaagaucgccgacuacaacuacaagcugcccgacgacuucaccggcugugugauugccuggaacagcaacaaccuggacuccaaagucggcggcaacuacaauuaccuguaccggcuguuccggaaguccaaucugaagcccuucgagcgggacaucagcaccgaaaucuaucaggccggcagcaccccuugcaacggcguggaaggcuucaacugcuacuucccacugcaguccuacggcuuucagcccacaaauggcgugggcuaucagcccuacagagugguggugcugagcuucgaacugcugcaugcuccugccacagugugcggcccuaagaaaagcaccaaucucgugaagaacaaaugcgugaacuucaacuucaacggccugaccggcaccggcgugcugacagagagcaacaagaaguuccugccauuccagcaguuuggccgggauaucgccgauaccacagacgccguuagagauccccagacacuggaaauccuggacaucaccccaugcagcuucggcggagugucugugaucaccccuggcaccaacaccagcaaucagguggcagugcuguaccaggacgugaacuguaccgaagugcccguggccauucacgccgaucagcugacaccuacauggcggguguacuccaccggcagcaauguguuucagaccagagccggcugucugaucggagccgagcacgugaacaauagcuacgagugcgacauccccaucggcgcuggcaucugugccagcuaccagacacagacaaacagccccagacgggcuagaagcguggccagccagagcaucauugccuacacaaugucucugggcgccgagaacagcguggccuacuccaacaacucuugcgcuauccccaccaacuucaccaucagcgugaccaccgagauccugccuguguccaugaccaagaccagcguggacugcaccauguacaucugcggcgauuccaccgagugcuccaaccugcugcugcaguacggcagcuucugcacccagcugaauagagcccugacagggaucgccguggaacaggacaagaacacccaagagguguucgcccaagugaagcaaaucuacaagaccccuccuaucaaggacuucggcggcuucaauuucagccagauucugcccgauccuagcaagcccagcaagcggagcuucaucgaggaccugcuguucaacaaagugacacuggccgacgccggcuucaucaagcaguauggcgauugucugggcgacauugccgccagggaucugauuugcgcccagaaguuuaacggacugacagugcugccuccucugcugaccgaugagaugaucgcccaguacacaucugcccugcuggccggcacaaucacaagcggcuggacauuuggagcuggcgccgcucugcagauccccuuugcuaugcagauggccuaccgguucaacggcaucggagugacccagaaugugcuguacgagaaccagaagcugaucgccaaccaguucaacagcgccaucggcaagauccaggacagccugagcagcacagcaagcgcccugggaaagcugcaggacguggucaaccagaaugcccaggcacugaacacccuggucaagcagcuguccuccaacuucggcgccaucagcucugugcugaacgauauccugagcagacuggacaaggucgaggccgaggugcagaucgacagacugaucacaggcagacugcagagccuccagacauacgugacccagcagcugaucagagccgccgagauuagagccucugccaaucuggccgccaccaagaugucugagugugugcugggccagagcaagagaguggacuuuugcggcaagggcuaccaccugaugagcuucccucagucugccccucacggcgugguguuucugcacgugacauaugugcccgcucaagagaagaauuucaccugugcuccagccaucugccacgacggcaaagcccacuuuccuagagaaggcguguucguguccaacggcacccauugguucgugacacagcggaacuucuacgagccccagaucaucaccaccgacaacaccuucgugucuggcaacugcgacguugugaucggcauugugaacaauaccguguacgacccucugcagcccgagcuggacagcuucaaagaggaacuggacaaguacuuuaagaaccacacaagccccgacguggaccugggcgauaucagcggaaucaaugccagcgucgugaacauccagaaagagaucgaccggcugaacgagguggccaagaaucugaacgagagccugaucgaccugcaagaacuggggaaguacgagcaguacaucaagggaggaucuggcuauauccccgaggcuccuagagauggccaggccuauguucggaaggauggcgaaugggugcugcugagcaccuuccuuugaggacuaguuauaagacugacuagcccgaugggccucccaacgggcccuccuccccuccuugcaccgagauuaauaaaaaaaaaaaaaaaaaaaaaaaaaaaaaaaaaaaaaaaaaaaaaaaaaaaaaaaaaaaaaaaaugcaucccccccccccccccccccccccccccccccaaaggcucuuuucagagccaccagaauu

SEQ ID NO: 13064 - RNA, 3943 nt, Artificial Sequence
  SARS-CoV-2/Wuhan/WIV05/2019__EPI_ISL_402128 spike protein mRNA gc mod (1-1211)(I714C_Y1110C) Foldon construct
aggagaaagcuuaccauguucguguuucuggugcugcugccccugguguccagccagugugugaaccugaccaccagaacacagcugccuccagccuacaccaacagcuucaccagaggcguguacuaccccgacaagguguucagauccagcgugcugcacucuacccaggaccuguuccugccuuucuucagcaacgugaccugguuccacgccauccacguguccggcaccaauggcaccaagagauucgacaaccccgugcugcccuucaacgacgggguguacuuugccagcaccgagaaguccaacaucaucagaggcuggaucuucggcaccacacuggacagcaagacccagagccugcugaucgugaacaacgccaccaacguggucaucaaagugugcgaguuccaguucugcaacgaccccuuccugggcgucuacuaccacaagaacaacaagagcuggauggaaagcgaguuccggguguacagcagcgccaacaacugcaccuucgaguacgugucccagccuuuccugauggaccuggaaggcaagcagggcaacuucaagaaccugcgcgaguucguguucaagaacaucgacggcuacuucaaaaucuacagcaagcacaccccuaucaaccucgugcgggaucugccucagggcuucucugcucuggaaccccugguggaucugcccaucggcaucaacaucacccgguuucagacacugcuggcccugcacagaagcuaccugacaccuggcgauagcagcagcggauggacagcuggugccgccgcuuacuaugugggcuaccugcagccuagaaccuuccugcugaaguacaacgagaacggcaccaucaccgacgccguggauugugcucuggauccucugagcgagacaaagugcacccugaaguccuucaccguggaaaagggcaucuaccagaccagcaacuuccgggugcagcccaccgaauccaucgugcgguuccccaauaucaccaaucugugccccuucggcgagguguucaaugccaccagauucgccucuguguacgccuggaaccggaagcggaucagcaauugcguggccgacuacuccgugcuguacaacuccgccagcuucagcaccuucaagugcuacggcguguccccuaccaagcugaacgaccugugcuucacaaacguguacgccgacagcuucgugauccggggagaugaagugcggcagauugccccuggacagacaggcaagaucgccgacuacaacuacaagcugcccgacgacuucaccggcugugugauugccuggaacagcaacaaccuggacuccaaagucggcggcaacuacaauuaccuguaccggcuguuccggaaguccaaucugaagcccuucgagcgggacaucagcaccgaaaucuaucaggccggcagcaccccuugcaacggcguggaaggcuucaacugcuacuucccacugcaguccuacggcuuucagcccacaaauggcgugggcuaucagcccuacagagugguggugcugagcuucgaacugcugcaugcuccugccacagugugcggcccuaagaaaagcaccaaucucgugaagaacaaaugcgugaacuucaacuucaacggccugaccggcaccggcgugcugacagagagcaacaagaaguuccugccauuccagcaguuuggccgggauaucgccgauaccacagacgccguuagagauccccagacacuggaaauccuggacaucaccccaugcagcuucggcggagugucugugaucaccccuggcaccaacaccagcaaucagguggcagugcuguaccaggacgugaacuguaccgaagugcccguggccauucacgccgaucagcugacaccuacauggcggguguacuccaccggcagcaauguguuucagaccagagccggcugucugaucggagccgagcacgugaacaauagcuacgagugcgacauccccaucggcgcuggcaucugugccagcuaccagacacagacaaacagccccagacgggcuagaagcguggccagccagagcaucauugccuacacaaugucucugggcgccgagaacagcguggccuacuccaacaacucuaucgcuugccccaccaacuucaccaucagcgugaccaccgagauccugccuguguccaugaccaagaccagcguggacugcaccauguacaucugcggcgauuccaccgagugcuccaaccugcugcugcaguacggcagcuucugcacccagcugaauagagcccugacagggaucgccguggaacaggacaagaacacccaagagguguucgcccaagugaagcaaaucuacaagaccccuccuaucaaggacuucggcggcuucaauuucagccagauucugcccgauccuagcaagcccagcaagcggagcuucaucgaggaccugcuguucaacaaagugacacuggccgacgccggcuucaucaagcaguauggcgauugucugggcgacauugccgccagggaucugauuugcgcccagaaguuuaacggacugacagugcugccuccucugcugaccgaugagaugaucgcccaguacacaucugcccugcuggccggcacaaucacaagcggcuggacauuuggagcuggcgccgcucugcagauccccuuugcuaugcagauggccuaccgguucaacggcaucggagugacccagaaugugcuguacgagaaccagaagcugaucgccaaccaguucaacagcgccaucggcaagauccaggacagccugagcagcacagcaagcgcccugggaaagcugcaggacguggucaaccagaaugcccaggcacugaacacccuggucaagcagcuguccuccaacuucggcgccaucagcucugugcugaacgauauccugagcagacuggacaaggucgaggccgaggugcagaucgacagacugaucacaggcagacugcagagccuccagacauacgugacccagcagcugaucagagccgccgagauuagagccucugccaaucuggccgccaccaagaugucugagugugugcugggccagagcaagagaguggacuuuugcggcaagggcuaccaccugaugagcuucccucagucugccccucacggcgugguguuucugcacgugacauaugugcccgcucaagagaagaauuucaccaccgcuccagccaucugccacgacggcaaagcccacuuuccuagagaaggcguguucguguccaacggcacccauugguucgugacacagcggaacuucugugagccccagaucaucaccaccgacaacaccuucgugucuggcaacugcgacguugugaucggcauugugaacaauaccguguacgacccucugcagcccgagcuggacagcuucaaagaggaacuggacaaguacuuuaagaaccacacaagccccgacguggaccugggcgauaucagcggaaucaaugccagcgucgugaacauccagaaagagaucgaccggcugaacgagguggccaagaaucugaacgagagccugaucgaccugcaagaacuggggaaguacgagcaguacaucaagggaggaucuggcuauauccccgaggcuccuagagauggccaggccuauguucggaaggauggcgaaugggugcugcugagcaccuuccuuugaggacuaguuauaagacugacuagcccgaugggccucccaacgggcccuccuccccuccuugcaccgagauuaauaaaaaaaaaaaaaaaaaaaaaaaaaaaaaaaaaaaaaaaaaaaaaaaaaaaaaaaaaaaaaaaaugcaucccccccccccccccccccccccccccccccaaaggcucuuuucagagccaccagaauu

SEQ ID NO: 13065 - RNA, 3943 nt, Artificial Sequence
  SARS-CoV-2/Wuhan/WIV05/2019__EPI_ISL_402128 spike protein mRNA gc mod (1-1211)(P715C_P1069C) Foldon construct
aggagaaagcuuaccauguucguguuucuggugcugcugccccugguguccagccagugugugaaccugaccaccagaacacagcugccuccagccuacaccaacagcuucaccagaggcguguacuaccccgacaagguguucagauccagcgugcugcacucuacccaggaccuguuccugccuuucuucagcaacgugaccugguuccacgccauccacguguccggcaccaauggcaccaagagauucgacaaccccgugcugcccuucaacgacgggguguacuuugccagcaccgagaaguccaacaucaucagaggcuggaucuucggcaccacacuggacagcaagacccagagccugcugaucgugaacaacgccaccaacguggucaucaaagugugcgaguuccaguucugcaacgaccccuuccugggcgucuacuaccacaagaacaacaagagcuggauggaaagcgaguuccggguguacagcagcgccaacaacugcaccuucgaguacgugucccagccuuuccugauggaccuggaaggcaagcagggcaacuucaagaaccugcgcgaguucguguucaagaacaucgacggcuacuucaaaaucuacagcaagcacaccccuaucaaccucgugcgggaucugccucagggcuucucugcucuggaaccccugguggaucugcccaucggcaucaacaucacccgguuucagacacugcuggcccugcacagaagcuaccugacaccuggcgauagcagcagcggauggacagcuggugccgccgcuuacuaugugggcuaccugcagccuagaaccuuccugcugaaguacaacgagaacggcaccaucaccgacgccguggauugugcucuggauccucugagcgagacaaagugcacccugaaguccuucaccguggaaaagggcaucuaccagaccagcaacuuccgggugcagcccaccgaauccaucgugcgguuccccaauaucaccaaucugugccccuucggcgagguguucaaugccaccagauucgccucuguguacgccuggaaccggaagcggaucagcaauugcguggccgacuacuccgugcuguacaacuccgccagcuucagcaccuucaagugcuacggcguguccccuaccaagcugaacgaccugugcuucacaaacguguacgccgacagcuucgugauccggggagaugaagugcggcagauugccccuggacagacaggcaagaucgccgacuacaacuacaagcugcccgacgacuucaccggcugugugauugccuggaacagcaacaaccuggacuccaaagucggcggcaacuacaauuaccuguaccggcuguuccggaaguccaaucugaagcccuucgagcgggacaucagcaccgaaaucuaucaggccggcagcaccccuugcaacggcguggaaggcuucaacugcuacuucccacugcaguccuacggcuuucagcccacaaauggcgugggcuaucagcccuacagagugguggugcugagcuucgaacugcugcaugcuccugccacagugugcggcccuaagaaaagcaccaaucucgugaagaacaaaugcgugaacuucaacuucaacggccugaccggcaccggcgugcugacagagagcaacaagaaguuccugccauuccagcaguuuggccgggauaucgccgauaccacagacgccguuagagauccccagacacuggaaauccuggacaucaccccaugcagcuucggcggagugucugugaucaccccuggcaccaacaccagcaaucagguggcagugcuguaccaggacgugaacuguaccgaagugcccguggccauucacgccgaucagcugacaccuacauggcggguguacuccaccggcagcaauguguuucagaccagagccggcugucugaucggagccgagcacgugaacaauagcuacgagugcgacauccccaucggcgcuggcaucugugccagcuaccagacacagacaaacagccccagacgggcuagaagcguggccagccagagcaucauugccuacacaaugucucugggcgccgagaacagcguggccuacuccaacaacucuaucgcuaucugcaccaacuucaccaucagcgugaccaccgagauccugccuguguccaugaccaagaccagcguggacugcaccauguacaucugcggcgauuccaccgagugcuccaaccugcugcugcaguacggcagcuucugcacccagcugaauagagcccugacagggaucgccguggaacaggacaagaacacccaagagguguucgcccaagugaagcaaaucuacaagaccccuccuaucaaggacuucggcggcuucaauuucagccagauucugcccgauccuagcaagcccagcaagcggagcuucaucgaggaccugcuguucaacaaagugacacuggccgacgccggcuucaucaagcaguauggcgauugucugggcgacauugccgccagggaucugauuugcgcccagaaguuuaacggacugacagugcugccuccucugcugaccgaugagaugaucgcccaguacacaucugcccugcuggccggcacaaucacaagcggcuggacauuuggagcuggcgccgcucugcagauccccuuugcuaugcagauggccuaccgguucaacggcaucggagugacccagaaugugcuguacgagaaccagaagcugaucgccaaccaguucaacagcgccaucggcaagauccaggacagccugagcagcacagcaagcgcccugggaaagcugcaggacguggucaaccagaaugcccaggcacugaacacccuggucaagcagcuguccuccaacuucggcgccaucagcucugugcugaacgauauccugagcagacuggacaaggucgaggccgaggugcagaucgacagacugaucacaggcagacugcagagccuccagacauacgugacccagcagcugaucagagccgccgagauuagagccucugccaaucuggccgccaccaagaugucugagugugugcugggccagagcaagagaguggacuuuugcggcaagggcuaccaccugaugagcuucccucagucugccccucacggcgugguguuucugcacgugacauaugugugugcucaagagaagaauuucaccaccgcuccagccaucugccacgacggcaaagcccacuuuccuagagaaggcguguucguguccaacggcacccauugguucgugacacagcggaacuucuacgagccccagaucaucaccaccgacaacaccuucgugucuggcaacugcgacguugugaucggcauugugaacaauaccguguacgacccucugcagcccgagcuggacagcuucaaagaggaacuggacaaguacuuuaagaaccacacaagccccgacguggaccugggcgauaucagcggaaucaaugccagcgucgugaacauccagaaagagaucgaccggcugaacgagguggccaagaaucugaacgagagccugaucgaccugcaagaacuggggaaguacgagcaguacaucaagggaggaucuggcuauauccccgaggcuccuagagauggccaggccuauguucggaaggauggcgaaugggugcugcugagcaccuuccuuugaggacuaguuauaagacugacuagcccgaugggccucccaacgggcccuccuccccuccuugcaccgagauuaauaaaaaaaaaaaaaaaaaaaaaaaaaaaaaaaaaaaaaaaaaaaaaaaaaaaaaaaaaaaaaaaaugcaucccccccccccccccccccccccccccccccaaaggcucuuuucagagccaccagaauu

SEQ ID NO: 13066 - RNA, 3943 nt, Artificial Sequence
  SARS-CoV-2/Wuhan/WIV05/2019__EPI_ISL_402128 spike protein mRNA gc mod (1-1211)(G889C_L1034C) Foldon construct
aggagaaagcuuaccauguucguguuucuggugcugcugccccugguguccagccagugugugaaccugaccaccagaacacagcugccuccagccuacaccaacagcuucaccagaggcguguacuaccccgacaagguguucagauccagcgugcugcacucuacccaggaccuguuccugccuuucuucagcaacgugaccugguuccacgccauccacguguccggcaccaauggcaccaagagauucgacaaccccgugcugcccuucaacgacgggguguacuuugccagcaccgagaaguccaacaucaucagaggcuggaucuucggcaccacacuggacagcaagacccagagccugcugaucgugaacaacgccaccaacguggucaucaaagugugcgaguuccaguucugcaacgaccccuuccugggcgucuacuaccacaagaacaacaagagcuggauggaaagcgaguuccggguguacagcagcgccaacaacugcaccuucgaguacgugucccagccuuuccugauggaccuggaaggcaagcagggcaacuucaagaaccugcgcgaguucguguucaagaacaucgacggcuacuucaaaaucuacagcaagcacaccccuaucaaccucgugcgggaucugccucagggcuucucugcucuggaaccccugguggaucugcccaucggcaucaacaucacccgguuucagacacugcuggcccugcacagaagcuaccugacaccuggcgauagcagcagcggauggacagcuggugccgccgcuuacuaugugggcuaccugcagccuagaaccuuccugcugaaguacaacgagaacggcaccaucaccgacgccguggauugugcucuggauccucugagcgagacaaagugcacccugaaguccuucaccguggaaaagggcaucuaccagaccagcaacuuccgggugcagcccaccgaauccaucgugcgguuccccaauaucaccaaucugugccccuucggcgagguguucaaugccaccagauucgccucuguguacgccuggaaccggaagcggaucagcaauugcguggccgacuacuccgugcuguacaacuccgccagcuucagcaccuucaagugcuacggcguguccccuaccaagcugaacgaccugugcuucacaaacguguacgccgacagcuucgugauccggggagaugaagugcggcagauugccccuggacagacaggcaagaucgccgacuacaacuacaagcugcccgacgacuucaccggcugugugauugccuggaacagcaacaaccuggacuccaaagucggcggcaacuacaauuaccuguaccggcuguuccggaaguccaaucugaagcccuucgagcgggacaucagcaccgaaaucuaucaggccggcagcaccccuugcaacggcguggaaggcuucaacugcuacuucccacugcaguccuacggcuuucagcccacaaauggcgugggcuaucagcccuacagagugguggugcugagcuucgaacugcugcaugcuccugccacagugugcggcccuaagaaaagcaccaaucucgugaagaacaaaugcgugaacuucaacuucaacggccugaccggcaccggcgugcugacagagagcaacaagaaguuccugccauuccagcaguuuggccgggauaucgccgauaccacagacgccguuagagauccccagacacuggaaauccuggacaucaccccaugcagcuucggcggagugucugugaucaccccuggcaccaacaccagcaaucagguggcagugcuguaccaggacgugaacuguaccgaagugcccguggccauucacgccgaucagcugacaccuacauggcggguguacuccaccggcagcaauguguuucagaccagagccggcugucugaucggagccgagcacgugaacaauagcuacgagugcgacauccccaucggcgcuggcaucugugccagcuaccagacacagacaaacagccccagacgggcuagaagcguggccagccagagcaucauugccuacacaaugucucugggcgccgagaacagcguggccuacuccaacaacucuaucgcuauccccaccaacuucaccaucagcgugaccaccgagauccugccuguguccaugaccaagaccagcguggacugcaccauguacaucugcggcgauuccaccgagugcuccaaccugcugcugcaguacggcagcuucugcacccagcugaauagagcccugacagggaucgccguggaacaggacaagaacacccaagagguguucgcccaagugaagcaaaucuacaagaccccuccuaucaaggacuucggcggcuucaauuucagccagauucugcccgauccuagcaagcccagcaagcggagcuucaucgaggaccugcuguucaacaaagugacacuggccgacgccggcuucaucaagcaguauggcgauugucugggcgacauugccgccagggaucugauuugcgcccagaaguuuaacggacugacagugcugccuccucugcugaccgaugagaugaucgcccaguacacaucugcccugcuggccggcacaaucacaagcggcuggacauuuugcgcuggcgccgcucugcagauccccuuugcuaugcagauggccuaccgguucaacggcaucggagugacccagaaugugcuguacgagaaccagaagcugaucgccaaccaguucaacagcgccaucggcaagauccaggacagccugagcagcacagcaagcgcccugggaaagcugcaggacguggucaaccagaaugcccaggcacugaacacccuggucaagcagcuguccuccaacuucggcgccaucagcucugugcugaacgauauccugagcagacuggacaaggucgaggccgaggugcagaucgacagacugaucacaggcagacugcagagccuccagacauacgugacccagcagcugaucagagccgccgagauuagagccucugccaaucuggccgccaccaagaugucugaguguguguguggccagagcaagagaguggacuuuugcggcaagggcuaccaccugaugagcuucccucagucugccccucacggcgugguguuucugcacgugacauaugugcccgcucaagagaagaauuucaccaccgcuccagccaucugccacgacggcaaagcccacuuuccuagagaaggcguguucguguccaacggcacccauugguucgugacacagcggaacuucuacgagccccagaucaucaccaccgacaacaccuucgugucuggcaacugcgacguugugaucggcauugugaacaauaccguguacgacccucugcagcccgagcuggacagcuucaaagaggaacuggacaaguacuuuaagaaccacacaagccccgacguggaccugggcgauaucagcggaaucaaugccagcgucgugaacauccagaaagagaucgaccggcugaacgagguggccaagaaucugaacgagagccugaucgaccugcaagaacuggggaaguacgagcaguacaucaagggaggaucuggcuauauccccgaggcuccuagagauggccaggccuauguucggaaggauggcgaaugggugcugcugagcaccuuccuuugaggacuaguuauaagacugacuagcccgaugggccucccaacgggcccuccuccccuccuugcaccgagauuaauaaaaaaaaaaaaaaaaaaaaaaaaaaaaaaaaaaaaaaaaaaaaaaaaaaaaaaaaaaaaaaaaugcaucccccccccccccccccccccccccccccccaaaggcucuuuucagagccaccagaauu

SEQ ID NO: 13067 - RNA, 3943 nt, Artificial Sequence
  SARS-CoV-2/Wuhan/WIV05/2019__EPI_ISL_402128 spike protein mRNA gc mod (1-1211)(I909C_Y1047C) Foldon construct
aggagaaagcuuaccauguucguguuucuggugcugcugccccugguguccagccagugugugaaccugaccaccagaacacagcugccuccagccuacaccaacagcuucaccagaggcguguacuaccccgacaagguguucagauccagcgugcugcacucuacccaggaccuguuccugccuuucuucagcaacgugaccugguuccacgccauccacguguccggcaccaauggcaccaagagauucgacaaccccgugcugcccuucaacgacgggguguacuuugccagcaccgagaaguccaacaucaucagaggcuggaucuucggcaccacacuggacagcaagacccagagccugcugaucgugaacaacgccaccaacguggucaucaaagugugcgaguuccaguucugcaacgaccccuuccugggcgucuacuaccacaagaacaacaagagcuggauggaaagcgaguuccggguguacagcagcgccaacaacugcaccuucgaguacgugucccagccuuuccugauggaccuggaaggcaagcagggcaacuucaagaaccugcgcgaguucguguucaagaacaucgacggcuacuucaaaaucuacagcaagcacaccccuaucaaccucgugcgggaucugccucagggcuucucugcucuggaaccccugguggaucugcccaucggcaucaacaucacccgguuucagacacugcuggcccugcacagaagcuaccugacaccuggcgauagcagcagcggauggacagcuggugccgccgcuuacuaugugggcuaccugcagccuagaaccuuccugcugaaguacaacgagaacggcaccaucaccgacgccguggauugugcucuggauccucugagcgagacaaagugcacccugaaguccuucaccguggaaaagggcaucuaccagaccagcaacuuccgggugcagcccaccgaauccaucgugcgguuccccaauaucaccaaucugugccccuucggcgagguguucaaugccaccagauucgccucuguguacgccuggaaccggaagcggaucagcaauugcguggccgacuacuccgugcuguacaacuccgccagcuucagcaccuucaagugcuacggcguguccccuaccaagcugaacgaccugugcuucacaaacguguacgccgacagcuucgugauccggggagaugaagugcggcagauugccccuggacagacaggcaagaucgccgacuacaacuacaagcugcccgacgacuucaccggcugugugauugccuggaacagcaacaaccuggacuccaaagucggcggcaacuacaauuaccuguaccggcuguuccggaaguccaaucugaagcccuucgagcgggacaucagcaccgaaaucuaucaggccggcagcaccccuugcaacggcguggaaggcuucaacugcuacuucccacugcaguccuacggcuuucagcccacaaauggcgugggcuaucagcccuacagagugguggugcugagcuucgaacugcugcaugcuccugccacagugugcggcccuaagaaaagcaccaaucucgugaagaacaaaugcgugaacuucaacuucaacggccugaccggcaccggcgugcugacagagagcaacaagaaguuccugccauuccagcaguuuggccgggauaucgccgauaccacagacgccguuagagauccccagacacuggaaauccuggacaucaccccaugcagcuucggcggagugucugugaucaccccuggcaccaacaccagcaaucagguggcagugcuguaccaggacgugaacuguaccgaagugcccguggccauucacgccgaucagcugacaccuacauggcggguguacuccaccggcagcaauguguuucagaccagagccggcugucugaucggagccgagcacgugaacaauagcuacgagugcgacauccccaucggcgcuggcaucugugccagcuaccagacacagacaaacagccccagacgggcuagaagcguggccagccagagcaucauugccuacacaaugucucugggcgccgagaacagcguggccuacuccaacaacucuaucgcuauccccaccaacuucaccaucagcgugaccaccgagauccugccuguguccaugaccaagaccagcguggacugcaccauguacaucugcggcgauuccaccgagugcuccaaccugcugcugcaguacggcagcuucugcacccagcugaauagagcccugacagggaucgccguggaacaggacaagaacacccaagagguguucgcccaagugaagcaaaucuacaagaccccuccuaucaaggacuucggcggcuucaauuucagccagauucugcccgauccuagcaagcccagcaagcggagcuucaucgaggaccugcuguucaacaaagugacacuggccgacgccggcuucaucaagcaguauggcgauugucugggcgacauugccgccagggaucugauuugcgcccagaaguuuaacggacugacagugcugccuccucugcugaccgaugagaugaucgcccaguacacaucugcccugcuggccggcacaaucacaagcggcuggacauuuggagcuggcgccgcucugcagauccccuuugcuaugcagauggccuaccgguucaacggcugcggagugacccagaaugugcuguacgagaaccagaagcugaucgccaaccaguucaacagcgccaucggcaagauccaggacagccugagcagcacagcaagcgcccugggaaagcugcaggacguggucaaccagaaugcccaggcacugaacacccuggucaagcagcuguccuccaacuucggcgccaucagcucugugcugaacgauauccugagcagacuggacaaggucgaggccgaggugcagaucgacagacugaucacaggcagacugcagagccuccagacauacgugacccagcagcugaucagagccgccgagauuagagccucugccaaucuggccgccaccaagaugucugagugugugcugggccagagcaagagaguggacuuuugcggcaagggcugucaccugaugagcuucccucagucugccccucacggcgugguguuucugcacgugacauaugugcccgcucaagagaagaauuucaccaccgcuccagccaucugccacgacggcaaagcccacuuuccuagagaaggcguguucguguccaacggcacccauugguucgugacacagcggaacuucuacgagccccagaucaucaccaccgacaacaccuucgugucuggcaacugcgacguugugaucggcauugugaacaauaccguguacgacccucugcagcccgagcuggacagcuucaaagaggaacuggacaaguacuuuaagaaccacacaagccccgacguggaccugggcgauaucagcggaaucaaugccagcgucgugaacauccagaaagagaucgaccggcugaacgagguggccaagaaucugaacgagagccugaucgaccugcaagaacuggggaaguacgagcaguacaucaagggaggaucuggcuauauccccgaggcuccuagagauggccaggccuauguucggaaggauggcgaaugggugcugcugagcaccuuccuuugaggacuaguuauaagacugacuagcccgaugggccucccaacgggcccuccuccccuccuugcaccgagauuaauaaaaaaaaaaaaaaaaaaaaaaaaaaaaaaaaaaaaaaaaaaaaaaaaaaaaaaaaaaaaaaaaugcaucccccccccccccccccccccccccccccccaaaggcucuuuucagagccaccagaauu

SEQ ID NO: 13068 - RNA, 3943 nt, Artificial Sequence
  SARS-CoV-2/Wuhan/WIV05/2019__EPI_ISL_402128 spike protein mRNA gc mod (1-1211)(Q965C_S1003C) Foldon construct
aggagaaagcuuaccauguucguguuucuggugcugcugccccugguguccagccagugugugaaccugaccaccagaacacagcugccuccagccuacaccaacagcuucaccagaggcguguacuaccccgacaagguguucagauccagcgugcugcacucuacccaggaccuguuccugccuuucuucagcaacgugaccugguuccacgccauccacguguccggcaccaauggcaccaagagauucgacaaccccgugcugcccuucaacgacgggguguacuuugccagcaccgagaaguccaacaucaucagaggcuggaucuucggcaccacacuggacagcaagacccagagccugcugaucgugaacaacgccaccaacguggucaucaaagugugcgaguuccaguucugcaacgaccccuuccugggcgucuacuaccacaagaacaacaagagcuggauggaaagcgaguuccggguguacagcagcgccaacaacugcaccuucgaguacgugucccagccuuuccugauggaccuggaaggcaagcagggcaacuucaagaaccugcgcgaguucguguucaagaacaucgacggcuacuucaaaaucuacagcaagcacaccccuaucaaccucgugcgggaucugccucagggcuucucugcucuggaaccccugguggaucugcccaucggcaucaacaucacccgguuucagacacugcuggcccugcacagaagcuaccugacaccuggcgauagcagcagcggauggacagcuggugccgccgcuuacuaugugggcuaccugcagccuagaaccuuccugcugaaguacaacgagaacggcaccaucaccgacgccguggauugugcucuggauccucugagcgagacaaagugcacccugaaguccuucaccguggaaaagggcaucuaccagaccagcaacuuccgggugcagcccaccgaauccaucgugcgguuccccaauaucaccaaucugugccccuucggcgagguguucaaugccaccagauucgccucuguguacgccuggaaccggaagcggaucagcaauugcguggccgacuacuccgugcuguacaacuccgccagcuucagcaccuucaagugcuacggcguguccccuaccaagcugaacgaccugugcuucacaaacguguacgccgacagcuucgugauccggggagaugaagugcggcagauugccccuggacagacaggcaagaucgccgacuacaacuacaagcugcccgacgacuucaccggcugugugauugccuggaacagcaacaaccuggacuccaaagucggcggcaacuacaauuaccuguaccggcuguuccggaaguccaaucugaagcccuucgagcgggacaucagcaccgaaaucuaucaggccggcagcaccccuugcaacggcguggaaggcuucaacugcuacuucccacugcaguccuacggcuuucagcccacaaauggcgugggcuaucagcccuacagagugguggugcugagcuucgaacugcugcaugcuccugccacagugugcggcccuaagaaaagcaccaaucucgugaagaacaaaugcgugaacuucaacuucaacggccugaccggcaccggcgugcugacagagagcaacaagaaguuccugccauuccagcaguuuggccgggauaucgccgauaccacagacgccguuagagauccccagacacuggaaauccuggacaucaccccaugcagcuucggcggagugucugugaucaccccuggcaccaacaccagcaaucagguggcagugcuguaccaggacgugaacuguaccgaagugcccguggccauucacgccgaucagcugacaccuacauggcggguguacuccaccggcagcaauguguuucagaccagagccggcugucugaucggagccgagcacgugaacaauagcuacgagugcgacauccccaucggcgcuggcaucugugccagcuaccagacacagacaaacagccccagacgggcuagaagcguggccagccagagcaucauugccuacacaaugucucugggcgccgagaacagcguggccuacuccaacaacucuaucgcuauccccaccaacuucaccaucagcgugaccaccgagauccugccuguguccaugaccaagaccagcguggacugcaccauguacaucugcggcgauuccaccgagugcuccaaccugcugcugcaguacggcagcuucugcacccagcugaauagagcccugacagggaucgccguggaacaggacaagaacacccaagagguguucgcccaagugaagcaaaucuacaagaccccuccuaucaaggacuucggcggcuucaauuucagccagauucugcccgauccuagcaagcccagcaagcggagcuucaucgaggaccugcuguucaacaaagugacacuggccgacgccggcuucaucaagcaguauggcgauugucugggcgacauugccgccagggaucugauuugcgcccagaaguuuaacggacugacagugcugccuccucugcugaccgaugagaugaucgcccaguacacaucugcccugcuggccggcacaaucacaagcggcuggacauuuggagcuggcgccgcucugcagauccccuuugcuaugcagauggccuaccgguucaacggcaucggagugacccagaaugugcuguacgagaaccagaagcugaucgccaaccaguucaacagcgccaucggcaagauccaggacagccugagcagcacagcaagcgcccugggaaagcugcaggacguggucaaccagaaugcccaggcacugaacacccuggucaagugccuguccuccaacuucggcgccaucagcucugugcugaacgauauccugagcagacuggacaaggucgaggccgaggugcagaucgacagacugaucacaggcagacugcagugucuccagacauacgugacccagcagcugaucagagccgccgagauuagagccucugccaaucuggccgccaccaagaugucugagugugugcugggccagagcaagagaguggacuuuugcggcaagggcuaccaccugaugagcuucccucagucugccccucacggcgugguguuucugcacgugacauaugugcccgcucaagagaagaauuucaccaccgcuccagccaucugccacgacggcaaagcccacuuuccuagagaaggcguguucguguccaacggcacccauugguucgugacacagcggaacuucuacgagccccagaucaucaccaccgacaacaccuucgugucuggcaacugcgacguugugaucggcauugugaacaauaccguguacgacccucugcagcccgagcuggacagcuucaaagaggaacuggacaaguacuuuaagaaccacacaagccccgacguggaccugggcgauaucagcggaaucaaugccagcgucgugaacauccagaaagagaucgaccggcugaacgagguggccaagaaucugaacgagagccugaucgaccugcaagaacuggggaaguacgagcaguacaucaagggaggaucuggcuauauccccgaggcuccuagagauggccaggccuauguucggaaggauggcgaaugggugcugcugagcaccuuccuuugaggacuaguuauaagacugacuagcccgaugggccucccaacgggcccuccuccccuccuugcaccgagauuaauaaaaaaaaaaaaaaaaaaaaaaaaaaaaaaaaaaaaaaaaaaaaaaaaaaaaaaaaaaaaaaaaugcaucccccccccccccccccccccccccccccccaaaggcucuuuucagagccaccagaauu

SEQ ID NO: 13069 - RNA, 3943 nt, Artificial Sequence
  SARS-CoV-2/Wuhan/WIV05/2019__EPI_ISL_402128 spike protein mRNA gc mod (1-1211)(F970C_G999C) Foldon construct
aggagaaagcuuaccauguucguguuucuggugcugcugccccugguguccagccagugugugaaccugaccaccagaacacagcugccuccagccuacaccaacagcuucaccagaggcguguacuaccccgacaagguguucagauccagcgugcugcacucuacccaggaccuguuccugccuuucuucagcaacgugaccugguuccacgccauccacguguccggcaccaauggcaccaagagauucgacaaccccgugcugcccuucaacgacgggguguacuuugccagcaccgagaaguccaacaucaucagaggcuggaucuucggcaccacacuggacagcaagacccagagccugcugaucgugaacaacgccaccaacguggucaucaaagugugcgaguuccaguucugcaacgaccccuuccugggcgucuacuaccacaagaacaacaagagcuggauggaaagcgaguuccggguguacagcagcgccaacaacugcaccuucgaguacgugucccagccuuuccugauggaccuggaaggcaagcagggcaacuucaagaaccugcgcgaguucguguucaagaacaucgacggcuacuucaaaaucuacagcaagcacaccccuaucaaccucgugcgggaucugccucagggcuucucugcucuggaaccccugguggaucugcccaucggcaucaacaucacccgguuucagacacugcuggcccugcacagaagcuaccugacaccuggcgauagcagcagcggauggacagcuggugccgccgcuuacuaugugggcuaccugcagccuagaaccuuccugcugaaguacaacgagaacggcaccaucaccgacgccguggauugugcucuggauccucugagcgagacaaagugcacccugaaguccuucaccguggaaaagggcaucuaccagaccagcaacuuccgggugcagcccaccgaauccaucgugcgguuccccaauaucaccaaucugugccccuucggcgagguguucaaugccaccagauucgccucuguguacgccuggaaccggaagcggaucagcaauugcguggccgacuacuccgugcuguacaacuccgccagcuucagcaccuucaagugcuacggcguguccccuaccaagcugaacgaccugugcuucacaaacguguacgccgacagcuucgugauccggggagaugaagugcggcagauugccccuggacagacaggcaagaucgccgacuacaacuacaagcugcccgacgacuucaccggcugugugauugccuggaacagcaacaaccuggacuccaaagucggcggcaacuacaauuaccuguaccggcuguuccggaaguccaaucugaagcccuucgagcgggacaucagcaccgaaaucuaucaggccggcagcaccccuugcaacggcguggaaggcuucaacugcuacuucccacugcaguccuacggcuuucagcccacaaauggcgugggcuaucagcccuacagagugguggugcugagcuucgaacugcugcaugcuccugccacagugugcggcccuaagaaaagcaccaaucucgugaagaacaaaugcgugaacuucaacuucaacggccugaccggcaccggcgugcugacagagagcaacaagaaguuccugccauuccagcaguuuggccgggauaucgccgauaccacagacgccguuagagauccccagacacuggaaauccuggacaucaccccaugcagcuucggcggagugucugugaucaccccuggcaccaacaccagcaaucagguggcagugcuguaccaggacgugaacuguaccgaagugcccguggccauucacgccgaucagcugacaccuacauggcggguguacuccaccggcagcaauguguuucagaccagagccggcugucugaucggagccgagcacgugaacaauagcuacgagugcgacauccccaucggcgcuggcaucugugccagcuaccagacacagacaaacagccccagacgggcuagaagcguggccagccagagcaucauugccuacacaaugucucugggcgccgagaacagcguggccuacuccaacaacucuaucgcuauccccaccaacuucaccaucagcgugaccaccgagauccugccuguguccaugaccaagaccagcguggacugcaccauguacaucugcggcgauuccaccgagugcuccaaccugcugcugcaguacggcagcuucugcacccagcugaauagagcccugacagggaucgccguggaacaggacaagaacacccaagagguguucgcccaagugaagcaaaucuacaagaccccuccuaucaaggacuucggcggcuucaauuucagccagauucugcccgauccuagcaagcccagcaagcggagcuucaucgaggaccugcuguucaacaaagugacacuggccgacgccggcuucaucaagcaguauggcgauugucugggcgacauugccgccagggaucugauuugcgcccagaaguuuaacggacugacagugcugccuccucugcugaccgaugagaugaucgcccaguacacaucugcccugcuggccggcacaaucacaagcggcuggacauuuggagcuggcgccgcucugcagauccccuuugcuaugcagauggccuaccgguucaacggcaucggagugacccagaaugugcuguacgagaaccagaagcugaucgccaaccaguucaacagcgccaucggcaagauccaggacagccugagcagcacagcaagcgcccugggaaagcugcaggacguggucaaccagaaugcccaggcacugaacacccuggucaagcagcuguccuccaacugcggcgccaucagcucugugcugaacgauauccugagcagacuggacaaggucgaggccgaggugcagaucgacagacugaucacauguagacugcagagccuccagacauacgugacccagcagcugaucagagccgccgagauuagagccucugccaaucuggccgccaccaagaugucugagugugugcugggccagagcaagagaguggacuuuugcggcaagggcuaccaccugaugagcuucccucagucugccccucacggcgugguguuucugcacgugacauaugugcccgcucaagagaagaauuucaccaccgcuccagccaucugccacgacggcaaagcccacuuuccuagagaaggcguguucguguccaacggcacccauugguucgugacacagcggaacuucuacgagccccagaucaucaccaccgacaacaccuucgugucuggcaacugcgacguugugaucggcauugugaacaauaccguguacgacccucugcagcccgagcuggacagcuucaaagaggaacuggacaaguacuuuaagaaccacacaagccccgacguggaccugggcgauaucagcggaaucaaugccagcgucgugaacauccagaaagagaucgaccggcugaacgagguggccaagaaucugaacgagagccugaucgaccugcaagaacuggggaaguacgagcaguacaucaagggaggaucuggcuauauccccgaggcuccuagagauggccaggccuauguucggaaggauggcgaaugggugcugcugagcaccuuccuuugaggacuaguuauaagacugacuagcccgaugggccucccaacgggcccuccuccccuccuugcaccgagauuaauaaaaaaaaaaaaaaaaaaaaaaaaaaaaaaaaaaaaaaaaaaaaaaaaaaaaaaaaaaaaaaaaugcaucccccccccccccccccccccccccccccccaaaggcucuuuucagagccaccagaauu

SEQ ID NO: 13070 - RNA, 3943 nt, Artificial Sequence
  SARS-CoV-2/Wuhan/WIV05/2019__EPI_ISL_402128 spike protein mRNA gc mod (1-1211)(A972C_R995C) Foldon construct
aggagaaagcuuaccauguucguguuucuggugcugcugccccugguguccagccagugugugaaccugaccaccagaacacagcugccuccagccuacaccaacagcuucaccagaggcguguacuaccccgacaagguguucagauccagcgugcugcacucuacccaggaccuguuccugccuuucuucagcaacgugaccugguuccacgccauccacguguccggcaccaauggcaccaagagauucgacaaccccgugcugcccuucaacgacgggguguacuuugccagcaccgagaaguccaacaucaucagaggcuggaucuucggcaccacacuggacagcaagacccagagccugcugaucgugaacaacgccaccaacguggucaucaaagugugcgaguuccaguucugcaacgaccccuuccugggcgucuacuaccacaagaacaacaagagcuggauggaaagcgaguuccggguguacagcagcgccaacaacugcaccuucgaguacgugucccagccuuuccugauggaccuggaaggcaagcagggcaacuucaagaaccugcgcgaguucguguucaagaacaucgacggcuacuucaaaaucuacagcaagcacaccccuaucaaccucgugcgggaucugccucagggcuucucugcucuggaaccccugguggaucugcccaucggcaucaacaucacccgguuucagacacugcuggcccugcacagaagcuaccugacaccuggcgauagcagcagcggauggacagcuggugccgccgcuuacuaugugggcuaccugcagccuagaaccuuccugcugaaguacaacgagaacggcaccaucaccgacgccguggauugugcucuggauccucugagcgagacaaagugcacccugaaguccuucaccguggaaaagggcaucuaccagaccagcaacuuccgggugcagcccaccgaauccaucgugcgguuccccaauaucaccaaucugugccccuucggcgagguguucaaugccaccagauucgccucuguguacgccuggaaccggaagcggaucagcaauugcguggccgacuacuccgugcuguacaacuccgccagcuucagcaccuucaagugcuacggcguguccccuaccaagcugaacgaccugugcuucacaaacguguacgccgacagcuucgugauccggggagaugaagugcggcagauugccccuggacagacaggcaagaucgccgacuacaacuacaagcugcccgacgacuucaccggcugugugauugccuggaacagcaacaaccuggacuccaaagucggcggcaacuacaauuaccuguaccggcuguuccggaaguccaaucugaagcccuucgagcgggacaucagcaccgaaaucuaucaggccggcagcaccccuugcaacggcguggaaggcuucaacugcuacuucccacugcaguccuacggcuuucagcccacaaauggcgugggcuaucagcccuacagagugguggugcugagcuucgaacugcugcaugcuccugccacagugugcggcccuaagaaaagcaccaaucucgugaagaacaaaugcgugaacuucaacuucaacggccugaccggcaccggcgugcugacagagagcaacaagaaguuccugccauuccagcaguuuggccgggauaucgccgauaccacagacgccguuagagauccccagacacuggaaauccuggacaucaccccaugcagcuucggcggagugucugugaucaccccuggcaccaacaccagcaaucagguggcagugcuguaccaggacgugaacuguaccgaagugcccguggccauucacgccgaucagcugacaccuacauggcggguguacuccaccggcagcaauguguuucagaccagagccggcugucugaucggagccgagcacgugaacaauagcuacgagugcgacauccccaucggcgcuggcaucugugccagcuaccagacacagacaaacagccccagacgggcuagaagcguggccagccagagcaucauugccuacacaaugucucugggcgccgagaacagcguggccuacuccaacaacucuaucgcuauccccaccaacuucaccaucagcgugaccaccgagauccugccuguguccaugaccaagaccagcguggacugcaccauguacaucugcggcgauuccaccgagugcuccaaccugcugcugcaguacggcagcuucugcacccagcugaauagagcccugacagggaucgccguggaacaggacaagaacacccaagagguguucgcccaagugaagcaaaucuacaagaccccuccuaucaaggacuucggcggcuucaauuucagccagauucugcccgauccuagcaagcccagcaagcggagcuucaucgaggaccugcuguucaacaaagugacacuggccgacgccggcuucaucaagcaguauggcgauugucugggcgacauugccgccagggaucugauuugcgcccagaaguuuaacggacugacagugcugccuccucugcugaccgaugagaugaucgcccaguacacaucugcccugcuggccggcacaaucacaagcggcuggacauuuggagcuggcgccgcucugcagauccccuuugcuaugcagauggccuaccgguucaacggcaucggagugacccagaaugugcuguacgagaaccagaagcugaucgccaaccaguucaacagcgccaucggcaagauccaggacagccugagcagcacagcaagcgcccugggaaagcugcaggacguggucaaccagaaugcccaggcacugaacacccuggucaagcagcuguccuccaacuucggcugcaucagcucugugcugaacgauauccugagcagacuggacaaggucgaggccgaggugcagaucgacugucugaucacaggcagacugcagagccuccagacauacgugacccagcagcugaucagagccgccgagauuagagccucugccaaucuggccgccaccaagaugucugagugugugcugggccagagcaagagaguggacuuuugcggcaagggcuaccaccugaugagcuucccucagucugccccucacggcgugguguuucugcacgugacauaugugcccgcucaagagaagaauuucaccaccgcuccagccaucugccacgacggcaaagcccacuuuccuagagaaggcguguucguguccaacggcacccauugguucgugacacagcggaacuucuacgagccccagaucaucaccaccgacaacaccuucgugucuggcaacugcgacguugugaucggcauugugaacaauaccguguacgacccucugcagcccgagcuggacagcuucaaagaggaacuggacaaguacuuuaagaaccacacaagccccgacguggaccugggcgauaucagcggaaucaaugccagcgucgugaacauccagaaagagaucgaccggcugaacgagguggccaagaaucugaacgagagccugaucgaccugcaagaacuggggaaguacgagcaguacaucaagggaggaucuggcuauauccccgaggcuccuagagauggccaggccuauguucggaaggauggcgaaugggugcugcugagcaccuuccuuugaggacuaguuauaagacugacuagcccgaugggccucccaacgggcccuccuccccuccuugcaccgagauuaauaaaaaaaaaaaaaaaaaaaaaaaaaaaaaaaaaaaaaaaaaaaaaaaaaaaaaaaaaaaaaaaaugcaucccccccccccccccccccccccccccccccaaaggcucuuuucagagccaccagaauu

SEQ ID NO: 13071 - RNA, 3943 nt, Artificial Sequence
  SARS-CoV-2/Wuhan/WIV05/2019__EPI_ISL_402128 spike protein mRNA gc mod (1-1211)(A890C_V1040C) Foldon construct
aggagaaagcuuaccauguucguguuucuggugcugcugccccugguguccagccagugugugaaccugaccaccagaacacagcugccuccagccuacaccaacagcuucaccagaggcguguacuaccccgacaagguguucagauccagcgugcugcacucuacccaggaccuguuccugccuuucuucagcaacgugaccugguuccacgccauccacguguccggcaccaauggcaccaagagauucgacaaccccgugcugcccuucaacgacgggguguacuuugccagcaccgagaaguccaacaucaucagaggcuggaucuucggcaccacacuggacagcaagacccagagccugcugaucgugaacaacgccaccaacguggucaucaaagugugcgaguuccaguucugcaacgaccccuuccugggcgucuacuaccacaagaacaacaagagcuggauggaaagcgaguuccggguguacagcagcgccaacaacugcaccuucgaguacgugucccagccuuuccugauggaccuggaaggcaagcagggcaacuucaagaaccugcgcgaguucguguucaagaacaucgacggcuacuucaaaaucuacagcaagcacaccccuaucaaccucgugcgggaucugccucagggcuucucugcucuggaaccccugguggaucugcccaucggcaucaacaucacccgguuucagacacugcuggcccugcacagaagcuaccugacaccuggcgauagcagcagcggauggacagcuggugccgccgcuuacuaugugggcuaccugcagccuagaaccuuccugcugaaguacaacgagaacggcaccaucaccgacgccguggauugugcucuggauccucugagcgagacaaagugcacccugaaguccuucaccguggaaaagggcaucuaccagaccagcaacuuccgggugcagcccaccgaauccaucgugcgguuccccaauaucaccaaucugugccccuucggcgagguguucaaugccaccagauucgccucuguguacgccuggaaccggaagcggaucagcaauugcguggccgacuacuccgugcuguacaacuccgccagcuucagcaccuucaagugcuacggcguguccccuaccaagcugaacgaccugugcuucacaaacguguacgccgacagcuucgugauccggggagaugaagugcggcagauugccccuggacagacaggcaagaucgccgacuacaacuacaagcugcccgacgacuucaccggcugugugauugccuggaacagcaacaaccuggacuccaaagucggcggcaacuacaauuaccuguaccggcuguuccggaaguccaaucugaagcccuucgagcgggacaucagcaccgaaaucuaucaggccggcagcaccccuugcaacggcguggaaggcuucaacugcuacuucccacugcaguccuacggcuuucagcccacaaauggcgugggcuaucagcccuacagagugguggugcugagcuucgaacugcugcaugcuccugccacagugugcggcccuaagaaaagcaccaaucucgugaagaacaaaugcgugaacuucaacuucaacggccugaccggcaccggcgugcugacagagagcaacaagaaguuccugccauuccagcaguuuggccgggauaucgccgauaccacagacgccguuagagauccccagacacuggaaauccuggacaucaccccaugcagcuucggcggagugucugugaucaccccuggcaccaacaccagcaaucagguggcagugcuguaccaggacgugaacuguaccgaagugcccguggccauucacgccgaucagcugacaccuacauggcggguguacuccaccggcagcaauguguuucagaccagagccggcugucugaucggagccgagcacgugaacaauagcuacgagugcgacauccccaucggcgcuggcaucugugccagcuaccagacacagacaaacagccccagacgggcuagaagcguggccagccagagcaucauugccuacacaaugucucugggcgccgagaacagcguggccuacuccaacaacucuaucgcuauccccaccaacuucaccaucagcgugaccaccgagauccugccuguguccaugaccaagaccagcguggacugcaccauguacaucugcggcgauuccaccgagugcuccaaccugcugcugcaguacggcagcuucugcacccagcugaauagagcccugacagggaucgccguggaacaggacaagaacacccaagagguguucgcccaagugaagcaaaucuacaagaccccuccuaucaaggacuucggcggcuucaauuucagccagauucugcccgauccuagcaagcccagcaagcggagcuucaucgaggaccugcuguucaacaaagugacacuggccgacgccggcuucaucaagcaguauggcgauugucugggcgacauugccgccagggaucugauuugcgcccagaaguuuaacggacugacagugcugccuccucugcugaccgaugagaugaucgcccaguacacaucugcccugcuggccggcacaaucacaagcggcuggacauuuggaugcggcgccgcucugcagauccccuuugcuaugcagauggccuaccgguucaacggcaucggagugacccagaaugugcuguacgagaaccagaagcugaucgccaaccaguucaacagcgccaucggcaagauccaggacagccugagcagcacagcaagcgcccugggaaagcugcaggacguggucaaccagaaugcccaggcacugaacacccuggucaagcagcuguccuccaacuucggcgccaucagcucugugcugaacgauauccugagcagacuggacaaggucgaggccgaggugcagaucgacagacugaucacaggcagacugcagagccuccagacauacgugacccagcagcugaucagagccgccgagauuagagccucugccaaucuggccgccaccaagaugucugagugugugcugggccagagcaagagaugugacuuuugcggcaagggcuaccaccugaugagcuucccucagucugccccucacggcgugguguuucugcacgugacauaugugcccgcucaagagaagaauuucaccaccgcuccagccaucugccacgacggcaaagcccacuuuccuagagaaggcguguucguguccaacggcacccauugguucgugacacagcggaacuucuacgagccccagaucaucaccaccgacaacaccuucgugucuggcaacugcgacguugugaucggcauugugaacaauaccguguacgacccucugcagcccgagcuggacagcuucaaagaggaacuggacaaguacuuuaagaaccacacaagccccgacguggaccugggcgauaucagcggaaucaaugccagcgucgugaacauccagaaagagaucgaccggcugaacgagguggccaagaaucugaacgagagccugaucgaccugcaagaacuggggaaguacgagcaguacaucaagggaggaucuggcuauauccccgaggcuccuagagauggccaggccuauguucggaaggauggcgaaugggugcugcugagcaccuuccuuugaggacuaguuauaagacugacuagcccgaugggccucccaacgggcccuccuccccuccuugcaccgagauuaauaaaaaaaaaaaaaaaaaaaaaaaaaaaaaaaaaaaaaaaaaaaaaaaaaaaaaaaaaaaaaaaaugcaucccccccccccccccccccccccccccccccaaaggcucuuuucagagccaccagaauu

SEQ ID NO: 13072 - RNA, 3943 nt, Artificial Sequence
  SARS-CoV-2/Wuhan/WIV05/2019__EPI_ISL_402128 spike protein mRNA gc mod (1-1211)(T874C_S1055C) Foldon construct
aggagaaagcuuaccauguucguguuucuggugcugcugccccugguguccagccagugugugaaccugaccaccagaacacagcugccuccagccuacaccaacagcuucaccagaggcguguacuaccccgacaagguguucagauccagcgugcugcacucuacccaggaccuguuccugccuuucuucagcaacgugaccugguuccacgccauccacguguccggcaccaauggcaccaagagauucgacaaccccgugcugcccuucaacgacgggguguacuuugccagcaccgagaaguccaacaucaucagaggcuggaucuucggcaccacacuggacagcaagacccagagccugcugaucgugaacaacgccaccaacguggucaucaaagugugcgaguuccaguucugcaacgaccccuuccugggcgucuacuaccacaagaacaacaagagcuggauggaaagcgaguuccggguguacagcagcgccaacaacugcaccuucgaguacgugucccagccuuuccugauggaccuggaaggcaagcagggcaacuucaagaaccugcgcgaguucguguucaagaacaucgacggcuacuucaaaaucuacagcaagcacaccccuaucaaccucgugcgggaucugccucagggcuucucugcucuggaaccccugguggaucugcccaucggcaucaacaucacccgguuucagacacugcuggcccugcacagaagcuaccugacaccuggcgauagcagcagcggauggacagcuggugccgccgcuuacuaugugggcuaccugcagccuagaaccuuccugcugaaguacaacgagaacggcaccaucaccgacgccguggauugugcucuggauccucugagcgagacaaagugcacccugaaguccuucaccguggaaaagggcaucuaccagaccagcaacuuccgggugcagcccaccgaauccaucgugcgguuccccaauaucaccaaucugugccccuucggcgagguguucaaugccaccagauucgccucuguguacgccuggaaccggaagcggaucagcaauugcguggccgacuacuccgugcuguacaacuccgccagcuucagcaccuucaagugcuacggcguguccccuaccaagcugaacgaccugugcuucacaaacguguacgccgacagcuucgugauccggggagaugaagugcggcagauugccccuggacagacaggcaagaucgccgacuacaacuacaagcugcccgacgacuucaccggcugugugauugccuggaacagcaacaaccuggacuccaaagucggcggcaacuacaauuaccuguaccggcuguuccggaaguccaaucugaagcccuucgagcgggacaucagcaccgaaaucuaucaggccggcagcaccccuugcaacggcguggaaggcuucaacugcuacuucccacugcaguccuacggcuuucagcccacaaauggcgugggcuaucagcccuacagagugguggugcugagcuucgaacugcugcaugcuccugccacagugugcggcccuaagaaaagcaccaaucucgugaagaacaaaugcgugaacuucaacuucaacggccugaccggcaccggcgugcugacagagagcaacaagaaguuccugccauuccagcaguuuggccgggauaucgccgauaccacagacgccguuagagauccccagacacuggaaauccuggacaucaccccaugcagcuucggcggagugucugugaucaccccuggcaccaacaccagcaaucagguggcagugcuguaccaggacgugaacuguaccgaagugcccguggccauucacgccgaucagcugacaccuacauggcggguguacuccaccggcagcaauguguuucagaccagagccggcugucugaucggagccgagcacgugaacaauagcuacgagugcgacauccccaucggcgcuggcaucugugccagcuaccagacacagacaaacagccccagacgggcuagaagcguggccagccagagcaucauugccuacacaaugucucugggcgccgagaacagcguggccuacuccaacaacucuaucgcuauccccaccaacuucaccaucagcgugaccaccgagauccugccuguguccaugaccaagaccagcguggacugcaccauguacaucugcggcgauuccaccgagugcuccaaccugcugcugcaguacggcagcuucugcacccagcugaauagagcccugacagggaucgccguggaacaggacaagaacacccaagagguguucgcccaagugaagcaaaucuacaagaccccuccuaucaaggacuucggcggcuucaauuucagccagauucugcccgauccuagcaagcccagcaagcggagcuucaucgaggaccugcuguucaacaaagugacacuggccgacgccggcuucaucaagcaguauggcgauugucugggcgacauugccgccagggaucugauuugcgcccagaaguuuaacggacugacagugcugccuccucugcugaccgaugagaugaucgcccaguacugcucugcccugcuggccggcacaaucacaagcggcuggacauuuggagcuggcgccgcucugcagauccccuuugcuaugcagauggccuaccgguucaacggcaucggagugacccagaaugugcuguacgagaaccagaagcugaucgccaaccaguucaacagcgccaucggcaagauccaggacagccugagcagcacagcaagcgcccugggaaagcugcaggacguggucaaccagaaugcccaggcacugaacacccuggucaagcagcuguccuccaacuucggcgccaucagcucugugcugaacgauauccugagcagacuggacaaggucgaggccgaggugcagaucgacagacugaucacaggcagacugcagagccuccagacauacgugacccagcagcugaucagagccgccgagauuagagccucugccaaucuggccgccaccaagaugucugagugugugcugggccagagcaagagaguggacuuuugcggcaagggcuaccaccugaugagcuucccucagugcgccccucacggcgugguguuucugcacgugacauaugugcccgcucaagagaagaauuucaccaccgcuccagccaucugccacgacggcaaagcccacuuuccuagagaaggcguguucguguccaacggcacccauugguucgugacacagcggaacuucuacgagccccagaucaucaccaccgacaacaccuucgugucuggcaacugcgacguugugaucggcauugugaacaauaccguguacgacccucugcagcccgagcuggacagcuucaaagaggaacuggacaaguacuuuaagaaccacacaagccccgacguggaccugggcgauaucagcggaaucaaugccagcgucgugaacauccagaaagagaucgaccggcugaacgagguggccaagaaucugaacgagagccugaucgaccugcaagaacuggggaaguacgagcaguacaucaagggaggaucuggcuauauccccgaggcuccuagagauggccaggccuauguucggaaggauggcgaaugggugcugcugagcaccuuccuuugaggacuaguuauaagacugacuagcccgaugggccucccaacgggcccuccuccccuccuugcaccgagauuaauaaaaaaaaaaaaaaaaaaaaaaaaaaaaaaaaaaaaaaaaaaaaaaaaaaaaaaaaaaaaaaaaugcaucccccccccccccccccccccccccccccccaaaggcucuuuucagagccaccagaauu

SEQ ID NO: 13073 - RNA, 4315 nt, Artificial Sequence
  SARS-CoV-2/Wuhan/WIV05/2019__EPI_ISL_402128 spike protein mRNA gc mod (1-1211) WhcAg construct
aggagaaagcuuaccauguucguguuucuggugcugcugccccugguguccagccagugugugaaccugaccaccagaacacagcugccuccagccuacaccaacagcuucaccagaggcguguacuaccccgacaagguguucagauccagcgugcugcacucuacccaggaccuguuccugccuuucuucagcaacgugaccugguuccacgccauccacguguccggcaccaauggcaccaagagauucgacaaccccgugcugcccuucaacgacgggguguacuuugccagcaccgagaaguccaacaucaucagaggcuggaucuucggcaccacacuggacagcaagacccagagccugcugaucgugaacaacgccaccaacguggucaucaaagugugcgaguuccaguucugcaacgaccccuuccugggcgucuacuaccacaagaacaacaagagcuggauggaaagcgaguuccggguguacagcagcgccaacaacugcaccuucgaguacgugucccagccuuuccugauggaccuggaaggcaagcagggcaacuucaagaaccugcgcgaguucguguucaagaacaucgacggcuacuucaaaaucuacagcaagcacaccccuaucaaccucgugcgggaucugccucagggcuucucugcucuggaaccccugguggaucugcccaucggcaucaacaucacccgguuucagacacugcuggcccugcacagaagcuaccugacaccuggcgauagcagcagcggauggacagcuggugccgccgcuuacuaugugggcuaccugcagccuagaaccuuccugcugaaguacaacgagaacggcaccaucaccgacgccguggauugugcucuggauccucugagcgagacaaagugcacccugaaguccuucaccguggaaaagggcaucuaccagaccagcaacuuccgggugcagcccaccgaauccaucgugcgguuccccaauaucaccaaucugugccccuucggcgagguguucaaugccaccagauucgccucuguguacgccuggaaccggaagcggaucagcaauugcguggccgacuacuccgugcuguacaacuccgccagcuucagcaccuucaagugcuacggcguguccccuaccaagcugaacgaccugugcuucacaaacguguacgccgacagcuucgugauccggggagaugaagugcggcagauugccccuggacagacaggcaagaucgccgacuacaacuacaagcugcccgacgacuucaccggcugugugauugccuggaacagcaacaaccuggacuccaaagucggcggcaacuacaauuaccuguaccggcuguuccggaaguccaaucugaagcccuucgagcgggacaucagcaccgaaaucuaucaggccggcagcaccccuugcaacggcguggaaggcuucaacugcuacuucccacugcaguccuacggcuuucagcccacaaauggcgugggcuaucagcccuacagagugguggugcugagcuucgaacugcugcaugcuccugccacagugugcggcccuaagaaaagcaccaaucucgugaagaacaaaugcgugaacuucaacuucaacggccugaccggcaccggcgugcugacagagagcaacaagaaguuccugccauuccagcaguuuggccgggauaucgccgauaccacagacgccguuagagauccccagacacuggaaauccuggacaucaccccaugcagcuucggcggagugucugugaucaccccuggcaccaacaccagcaaucagguggcagugcuguaccaggacgugaacuguaccgaagugcccguggccauucacgccgaucagcugacaccuacauggcggguguacuccaccggcagcaauguguuucagaccagagccggcugucugaucggagccgagcacgugaacaauagcuacgagugcgacauccccaucggcgcuggcaucugugccagcuaccagacacagacaaacagccccagacgggcuagaagcguggccagccagagcaucauugccuacacaaugucucugggcgccgagaacagcguggccuacuccaacaacucuaucgcuauccccaccaacuucaccaucagcgugaccaccgagauccugccuguguccaugaccaagaccagcguggacugcaccauguacaucugcggcgauuccaccgagugcuccaaccugcugcugcaguacggcagcuucugcacccagcugaauagagcccugacagggaucgccguggaacaggacaagaacacccaagagguguucgcccaagugaagcaaaucuacaagaccccuccuaucaaggacuucggcggcuucaauuucagccagauucugcccgauccuagcaagcccagcaagcggagcuucaucgaggaccugcuguucaacaaagugacacuggccgacgccggcuucaucaagcaguauggcgauugucugggcgacauugccgccagggaucugauuugcgcccagaaguuuaacggacugacagugcugccuccucugcugaccgaugagaugaucgcccaguacacaucugcccugcuggccggcacaaucacaagcggcuggacauuuggagcuggcgccgcucugcagauccccuuugcuaugcagauggccuaccgguucaacggcaucggagugacccagaaugugcuguacgagaaccagaagcugaucgccaaccaguucaacagcgccaucggcaagauccaggacagccugagcagcacagcaagcgcccugggaaagcugcaggacguggucaaccagaaugcccaggcacugaacacccuggucaagcagcuguccuccaacuucggcgccaucagcucugugcugaacgauauccugagcagacuggacaaggucgaggccgaggugcagaucgacagacugaucacaggcagacugcagagccuccagacauacgugacccagcagcugaucagagccgccgagauuagagccucugccaaucuggccgccaccaagaugucugagugugugcugggccagagcaagagaguggacuuuugcggcaagggcuaccaccugaugagcuucccucagucugccccucacggcgugguguuucugcacgugacauaugugcccgcucaagagaagaauuucaccaccgcuccagccaucugccacgacggcaaagcccacuuuccuagagaaggcguguucguguccaacggcacccauugguucgugacacagcggaacuucuacgagccccagaucaucaccaccgacaacaccuucgugucuggcaacugcgacguugugaucggcauugugaacaauaccguguacgacccucugcagcccgagcuggacagcuucaaagaggaacuggacaaguacuuuaagaaccacacaagccccgacguggaccugggcgauaucagcggaaucaaugccagcgucgugaacauccagaaagagaucgaccggcugaacgagguggccaagaaucugaacgagagccugaucgaccugcaagaacuggggaaguacgagcaguacaucaagggaggcggaggaucugacaucgaccccuacaaagaguucggcagcagcuaccagcugcugaacuuccugccucuggacuucuuccccgaccugaacgcccugguggauacagccacagcucuguacgaggaagaacugaccggcagagagcacugcagcccucaccacacagccauuagacaggcccucgugugcugggacgagcugacaaaacugaucgccuggaugagcagcaacaucaccagcgagcaagugcggaccaucaucgugaaccacgugaacgauaccuggggccugaaagugcggcagagccugugguuucaccugagcugucugaccuucggccagcacaccgugcaagaguuucugguguccuucggcguguggaucagaaccccugcuccauacagaccuccaaacgcucccauccugagcacccugccugagcacacagugaucuguugaggacuaguuauaagacugacuagcccgaugggccucccaacgggcccuccuccccuccuugcaccgagauuaauaaaaaaaaaaaaaaaaaaaaaaaaaaaaaaaaaaaaaaaaaaaaaaaaaaaaaaaaaaaaaaaaugcaucccccccccccccccccccccccccccccccaaaggcucuuuucagagccaccagaauu

SEQ ID NO: 13074 - RNA, 4315 nt, Artificial Sequence
  SARS-CoV-2/Wuhan/WIV05/2019__EPI_ISL_402128 spike protein mRNA gc mod (1-1211)(K986P_V987P) WhcAg construct
aggagaaagcuuaccauguucguguuucuggugcugcugccccugguguccagccagugugugaaccugaccaccagaacacagcugccuccagccuacaccaacagcuucaccagaggcguguacuaccccgacaagguguucagauccagcgugcugcacucuacccaggaccuguuccugccuuucuucagcaacgugaccugguuccacgccauccacguguccggcaccaauggcaccaagagauucgacaaccccgugcugcccuucaacgacgggguguacuuugccagcaccgagaaguccaacaucaucagaggcuggaucuucggcaccacacuggacagcaagacccagagccugcugaucgugaacaacgccaccaacguggucaucaaagugugcgaguuccaguucugcaacgaccccuuccugggcgucuacuaccacaagaacaacaagagcuggauggaaagcgaguuccggguguacagcagcgccaacaacugcaccuucgaguacgugucccagccuuuccugauggaccuggaaggcaagcagggcaacuucaagaaccugcgcgaguucguguucaagaacaucgacggcuacuucaaaaucuacagcaagcacaccccuaucaaccucgugcgggaucugccucagggcuucucugcucuggaaccccugguggaucugcccaucggcaucaacaucacccgguuucagacacugcuggcccugcacagaagcuaccugacaccuggcgauagcagcagcggauggacagcuggugccgccgcuuacuaugugggcuaccugcagccuagaaccuuccugcugaaguacaacgagaacggcaccaucaccgacgccguggauugugcucuggauccucugagcgagacaaagugcacccugaaguccuucaccguggaaaagggcaucuaccagaccagcaacuuccgggugcagcccaccgaauccaucgugcgguuccccaauaucaccaaucugugccccuucggcgagguguucaaugccaccagauucgccucuguguacgccuggaaccggaagcggaucagcaauugcguggccgacuacuccgugcuguacaacuccgccagcuucagcaccuucaagugcuacggcguguccccuaccaagcugaacgaccugugcuucacaaacguguacgccgacagcuucgugauccggggagaugaagugcggcagauugccccuggacagacaggcaagaucgccgacuacaacuacaagcugcccgacgacuucaccggcugugugauugccuggaacagcaacaaccuggacuccaaagucggcggcaacuacaauuaccuguaccggcuguuccggaaguccaaucugaagcccuucgagcgggacaucagcaccgaaaucuaucaggccggcagcaccccuugcaacggcguggaaggcuucaacugcuacuucccacugcaguccuacggcuuucagcccacaaauggcgugggcuaucagcccuacagagugguggugcugagcuucgaacugcugcaugcuccugccacagugugcggcccuaagaaaagcaccaaucucgugaagaacaaaugcgugaacuucaacuucaacggccugaccggcaccggcgugcugacagagagcaacaagaaguuccugccauuccagcaguuuggccgggauaucgccgauaccacagacgccguuagagauccccagacacuggaaauccuggacaucaccccaugcagcuucggcggagugucugugaucaccccuggcaccaacaccagcaaucagguggcagugcuguaccaggacgugaacuguaccgaagugcccguggccauucacgccgaucagcugacaccuacauggcggguguacuccaccggcagcaauguguuucagaccagagccggcugucugaucggagccgagcacgugaacaauagcuacgagugcgacauccccaucggcgcuggcaucugugccagcuaccagacacagacaaacagccccagacgggcuagaagcguggccagccagagcaucauugccuacacaaugucucugggcgccgagaacagcguggccuacuccaacaacucuaucgcuauccccaccaacuucaccaucagcgugaccaccgagauccugccuguguccaugaccaagaccagcguggacugcaccauguacaucugcggcgauuccaccgagugcuccaaccugcugcugcaguacggcagcuucugcacccagcugaauagagcccugacagggaucgccguggaacaggacaagaacacccaagagguguucgcccaagugaagcaaaucuacaagaccccuccuaucaaggacuucggcggcuucaauuucagccagauucugcccgauccuagcaagcccagcaagcggagcuucaucgaggaccugcuguucaacaaagugacacuggccgacgccggcuucaucaagcaguauggcgauugucugggcgacauugccgccagggaucugauuugcgcccagaaguuuaacggacugacagugcugccuccucugcugaccgaugagaugaucgcccaguacacaucugcccugcuggccggcacaaucacaagcggcuggacauuuggagcuggcgccgcucugcagauccccuuugcuaugcagauggccuaccgguucaacggcaucggagugacccagaaugugcuguacgagaaccagaagcugaucgccaaccaguucaacagcgccaucggcaagauccaggacagccugagcagcacagcaagcgcccugggaaagcugcaggacguggucaaccagaaugcccaggcacugaacacccuggucaagcagcuguccuccaacuucggcgccaucagcucugugcugaacgauauccugagcagacuggacccuccugaggccgaggugcagaucgacagacugaucacaggcagacugcagagccuccagacauacgugacccagcagcugaucagagccgccgagauuagagccucugccaaucuggccgccaccaagaugucugagugugugcugggccagagcaagagaguggacuuuugcggcaagggcuaccaccugaugagcuucccucagucugccccucacggcgugguguuucugcacgugacauaugugcccgcucaagagaagaauuucaccaccgcuccagccaucugccacgacggcaaagcccacuuuccuagagaaggcguguucguguccaacggcacccauugguucgugacacagcggaacuucuacgagccccagaucaucaccaccgacaacaccuucgugucuggcaacugcgacguugugaucggcauugugaacaauaccguguacgacccucugcagcccgagcuggacagcuucaaagaggaacuggacaaguacuuuaagaaccacacaagccccgacguggaccugggcgauaucagcggaaucaaugccagcgucgugaacauccagaaagagaucgaccggcugaacgagguggccaagaaucugaacgagagccugaucgaccugcaagaacuggggaaguacgagcaguacaucaagggaggcggaggaucugacaucgaccccuacaaagaguucggcagcagcuaccagcugcugaacuuccugccucuggacuucuuccccgaccugaacgcccugguggauacagccacagcucuguacgaggaagaacugaccggcagagagcacugcagcccucaccacacagccauuagacaggcccucgugugcugggacgagcugacaaaacugaucgccuggaugagcagcaacaucaccagcgagcaagugcggaccaucaucgugaaccacgugaacgauaccuggggccugaaagugcggcagagccugugguuucaccugagcugucugaccuucggccagcacaccgugcaagaguuucugguguccuucggcguguggaucagaaccccugcuccauacagaccuccaaacgcucccauccugagcacccugccugagcacacagugaucuguugaggacuaguuauaagacugacuagcccgaugggccucccaacgggcccuccuccccuccuugcaccgagauuaauaaaaaaaaaaaaaaaaaaaaaaaaaaaaaaaaaaaaaaaaaaaaaaaaaaaaaaaaaaaaaaaaugcaucccccccccccccccccccccccccccccccaaaggcucuuuucagagccaccagaauu

SEQ ID NO: 13075 - RNA, 4315 nt, Artificial Sequence
  SARS-CoV-2/Wuhan/WIV05/2019__EPI_ISL_402128 spike protein mRNA gc mod (1-1211)(K986P_V987P_T887WN_A1020W) WhcAg construct
aggagaaagcuuaccauguucguguuucuggugcugcugccccugguguccagccagugugugaaccugaccaccagaacacagcugccuccagccuacaccaacagcuucaccagaggcguguacuaccccgacaagguguucagauccagcgugcugcacucuacccaggaccuguuccugccuuucuucagcaacgugaccugguuccacgccauccacguguccggcaccaauggcaccaagagauucgacaaccccgugcugcccuucaacgacgggguguacuuugccagcaccgagaaguccaacaucaucagaggcuggaucuucggcaccacacuggacagcaagacccagagccugcugaucgugaacaacgccaccaacguggucaucaaagugugcgaguuccaguucugcaacgaccccuuccugggcgucuacuaccacaagaacaacaagagcuggauggaaagcgaguuccggguguacagcagcgccaacaacugcaccuucgaguacgugucccagccuuuccugauggaccuggaaggcaagcagggcaacuucaagaaccugcgcgaguucguguucaagaacaucgacggcuacuucaaaaucuacagcaagcacaccccuaucaaccucgugcgggaucugccucagggcuucucugcucuggaaccccugguggaucugcccaucggcaucaacaucacccgguuucagacacugcuggcccugcacagaagcuaccugacaccuggcgauagcagcagcggauggacagcuggugccgccgcuuacuaugugggcuaccugcagccuagaaccuuccugcugaaguacaacgagaacggcaccaucaccgacgccguggauugugcucuggauccucugagcgagacaaagugcacccugaaguccuucaccguggaaaagggcaucuaccagaccagcaacuuccgggugcagcccaccgaauccaucgugcgguuccccaauaucaccaaucugugccccuucggcgagguguucaaugccaccagauucgccucuguguacgccuggaaccggaagcggaucagcaauugcguggccgacuacuccgugcuguacaacuccgccagcuucagcaccuucaagugcuacggcguguccccuaccaagcugaacgaccugugcuucacaaacguguacgccgacagcuucgugauccggggagaugaagugcggcagauugccccuggacagacaggcaagaucgccgacuacaacuacaagcugcccgacgacuucaccggcugugugauugccuggaacagcaacaaccuggacuccaaagucggcggcaacuacaauuaccuguaccggcuguuccggaaguccaaucugaagcccuucgagcgggacaucagcaccgaaaucuaucaggccggcagcaccccuugcaacggcguggaaggcuucaacugcuacuucccacugcaguccuacggcuuucagcccacaaauggcgugggcuaucagcccuacagagugguggugcugagcuucgaacugcugcaugcuccugccacagugugcggcccuaagaaaagcaccaaucucgugaagaacaaaugcgugaacuucaacuucaacggccugaccggcaccggcgugcugacagagagcaacaagaaguuccugccauuccagcaguuuggccgggauaucgccgauaccacagacgccguuagagauccccagacacuggaaauccuggacaucaccccaugcagcuucggcggagugucugugaucaccccuggcaccaacaccagcaaucagguggcagugcuguaccaggacgugaacuguaccgaagugcccguggccauucacgccgaucagcugacaccuacauggcggguguacuccaccggcagcaauguguuucagaccagagccggcugucugaucggagccgagcacgugaacaauagcuacgagugcgacauccccaucggcgcuggcaucugugccagcuaccagacacagacaaacagccccagacgggcuagaagcguggccagccagagcaucauugccuacacaaugucucugggcgccgagaacagcguggccuacuccaacaacucuaucgcuauccccaccaacuucaccaucagcgugaccaccgagauccugccuguguccaugaccaagaccagcguggacugcaccauguacaucugcggcgauuccaccgagugcuccaaccugcugcugcaguacggcagcuucugcacccagcugaauagagcccugacagggaucgccguggaacaggacaagaacacccaagagguguucgcccaagugaagcaaaucuacaagaccccuccuaucaaggacuucggcggcuucaauuucagccagauucugcccgauccuagcaagcccagcaagcggagcuucaucgaggaccugcuguucaacaaagugacacuggccgacgccggcuucaucaagcaguauggcgauugucugggcgacauugccgccagggaucugauuugcgcccagaaguuuaacggacugacagugcugccuccucugcugaccgaugagaugaucgcccaguacacaucugcccugcuggccggcacaaucacaagcggcuggugguuuggagcuggcgccgcucugcagauccccuuugcuaugcagauggccuaccgguucaacggcaucggagugacccagaaugugcuguacgagaaccagaagcugaucgccaaccaguucaacagcgccaucggcaagauccaggacagccugagcagcacagcaagcgcccugggaaagcugcaggacguggucaaccagaaugcccaggcacugaacacccuggucaagcagcuguccuccaacuucggcgccaucagcucugugcugaacgauauccugagcagacuggacccuccugaggccgaggugcagaucgacagacugaucacaggcagacugcagagccuccagacauacgugacccagcagcugaucagagccgccgagauuagauggucugccaaucuggccgccaccaagaugucugagugugugcugggccagagcaagagaguggacuuuugcggcaagggcuaccaccugaugagcuucccucagucugccccucacggcgugguguuucugcacgugacauaugugcccgcucaagagaagaauuucaccaccgcuccagccaucugccacgacggcaaagcccacuuuccuagagaaggcguguucguguccaacggcacccauugguucgugacacagcggaacuucuacgagccccagaucaucaccaccgacaacaccuucgugucuggcaacugcgacguugugaucggcauugugaacaauaccguguacgacccucugcagcccgagcuggacagcuucaaagaggaacuggacaaguacuuuaagaaccacacaagccccgacguggaccugggcgauaucagcggaaucaaugccagcgucgugaacauccagaaagagaucgaccggcugaacgagguggccaagaaucugaacgagagccugaucgaccugcaagaacuggggaaguacgagcaguacaucaagggaggcggaggaucugacaucgaccccuacaaagaguucggcagcagcuaccagcugcugaacuuccugccucuggacuucuuccccgaccugaacgcccugguggauacagccacagcucuguacgaggaagaacugaccggcagagagcacugcagcccucaccacacagccauuagacaggcccucgugugcugggacgagcugacaaaacugaucgccuggaugagcagcaacaucaccagcgagcaagugcggaccaucaucgugaaccacgugaacgauaccuggggccugaaagugcggcagagccugugguuucaccugagcugucugaccuucggccagcacaccgugcaagaguuucugguguccuucggcguguggaucagaaccccugcuccauacagaccuccaaacgcucccauccugagcacccugccugagcacacagugaucuguugaggacuaguuauaagacugacuagcccgaugggccucccaacgggcccuccuccccuccuugcaccgagauuaauaaaaaaaaaaaaaaaaaaaaaaaaaaaaaaaaaaaaaaaaaaaaaaaaaaaaaaaaaaaaaaaaugcaucccccccccccccccccccccccccccccccaaaggcucuuuucagagccaccagaauu

SEQ ID NO: 13076 - RNA, 4315 nt, Artificial Sequence
  SARS-CoV-2/Wuhan/WIV05/2019__EPI_ISL_402128 spike protein mRNA gc mod (1-1211)(K986P_V987P_P1069F) WhcAg construct
aggagaaagcuuaccauguucguguuucuggugcugcugccccugguguccagccagugugugaaccugaccaccagaacacagcugccuccagccuacaccaacagcuucaccagaggcguguacuaccccgacaagguguucagauccagcgugcugcacucuacccaggaccuguuccugccuuucuucagcaacgugaccugguuccacgccauccacguguccggcaccaauggcaccaagagauucgacaaccccgugcugcccuucaacgacgggguguacuuugccagcaccgagaaguccaacaucaucagaggcuggaucuucggcaccacacuggacagcaagacccagagccugcugaucgugaacaacgccaccaacguggucaucaaagugugcgaguuccaguucugcaacgaccccuuccugggcgucuacuaccacaagaacaacaagagcuggauggaaagcgaguuccggguguacagcagcgccaacaacugcaccuucgaguacgugucccagccuuuccugauggaccuggaaggcaagcagggcaacuucaagaaccugcgcgaguucguguucaagaacaucgacggcuacuucaaaaucuacagcaagcacaccccuaucaaccucgugcgggaucugccucagggcuucucugcucuggaaccccugguggaucugcccaucggcaucaacaucacccgguuucagacacugcuggcccugcacagaagcuaccugacaccuggcgauagcagcagcggauggacagcuggugccgccgcuuacuaugugggcuaccugcagccuagaaccuuccugcugaaguacaacgagaacggcaccaucaccgacgccguggauugugcucuggauccucugagcgagacaaagugcacccugaaguccuucaccguggaaaagggcaucuaccagaccagcaacuuccgggugcagcccaccgaauccaucgugcgguuccccaauaucaccaaucugugccccuucggcgagguguucaaugccaccagauucgccucuguguacgccuggaaccggaagcggaucagcaauugcguggccgacuacuccgugcuguacaacuccgccagcuucagcaccuucaagugcuacggcguguccccuaccaagcugaacgaccugugcuucacaaacguguacgccgacagcuucgugauccggggagaugaagugcggcagauugccccuggacagacaggcaagaucgccgacuacaacuacaagcugcccgacgacuucaccggcugugugauugccuggaacagcaacaaccuggacuccaaagucggcggcaacuacaauuaccuguaccggcuguuccggaaguccaaucugaagcccuucgagcgggacaucagcaccgaaaucuaucaggccggcagcaccccuugcaacggcguggaaggcuucaacugcuacuucccacugcaguccuacggcuuucagcccacaaauggcgugggcuaucagcccuacagagugguggugcugagcuucgaacugcugcaugcuccugccacagugugcggcccuaagaaaagcaccaaucucgugaagaacaaaugcgugaacuucaacuucaacggccugaccggcaccggcgugcugacagagagcaacaagaaguuccugccauuccagcaguuuggccgggauaucgccgauaccacagacgccguuagagauccccagacacuggaaauccuggacaucaccccaugcagcuucggcggagugucugugaucaccccuggcaccaacaccagcaaucagguggcagugcuguaccaggacgugaacuguaccgaagugcccguggccauucacgccgaucagcugacaccuacauggcggguguacuccaccggcagcaauguguuucagaccagagccggcugucugaucggagccgagcacgugaacaauagcuacgagugcgacauccccaucggcgcuggcaucugugccagcuaccagacacagacaaacagccccagacgggcuagaagcguggccagccagagcaucauugccuacacaaugucucugggcgccgagaacagcguggccuacuccaacaacucuaucgcuauccccaccaacuucaccaucagcgugaccaccgagauccugccuguguccaugaccaagaccagcguggacugcaccauguacaucugcggcgauuccaccgagugcuccaaccugcugcugcaguacggcagcuucugcacccagcugaauagagcccugacagggaucgccguggaacaggacaagaacacccaagagguguucgcccaagugaagcaaaucuacaagaccccuccuaucaaggacuucggcggcuucaauuucagccagauucugcccgauccuagcaagcccagcaagcggagcuucaucgaggaccugcuguucaacaaagugacacuggccgacgccggcuucaucaagcaguauggcgauugucugggcgacauugccgccagggaucugauuugcgcccagaaguuuaacggacugacagugcugccuccucugcugaccgaugagaugaucgcccaguacacaucugcccugcuggccggcacaaucacaagcggcuggacauuuggagcuggcgccgcucugcagauccccuuugcuaugcagauggccuaccgguucaacggcaucggagugacccagaaugugcuguacgagaaccagaagcugaucgccaaccaguucaacagcgccaucggcaagauccaggacagccugagcagcacagcaagcgcccugggaaagcugcaggacguggucaaccagaaugcccaggcacugaacacccuggucaagcagcuguccuccaacuucggcgccaucagcucugugcugaacgauauccugagcagacuggacccuccugaggccgaggugcagaucgacagacugaucacaggcagacugcagagccuccagacauacgugacccagcagcugaucagagccgccgagauuagagccucugccaaucuggccgccaccaagaugucugagugugugcugggccagagcaagagaguggacuuuugcggcaagggcuaccaccugaugagcuucccucagucugccccucacggcgugguguuucugcacgugacauauguguucgcucaagagaagaauuucaccaccgcuccagccaucugccacgacggcaaagcccacuuuccuagagaaggcguguucguguccaacggcacccauugguucgugacacagcggaacuucuacgagccccagaucaucaccaccgacaacaccuucgugucuggcaacugcgacguugugaucggcauugugaacaauaccguguacgacccucugcagcccgagcuggacagcuucaaagaggaacuggacaaguacuuuaagaaccacacaagccccgacguggaccugggcgauaucagcggaaucaaugccagcgucgugaacauccagaaagagaucgaccggcugaacgagguggccaagaaucugaacgagagccugaucgaccugcaagaacuggggaaguacgagcaguacaucaagggaggcggaggaucugacaucgaccccuacaaagaguucggcagcagcuaccagcugcugaacuuccugccucuggacuucuuccccgaccugaacgcccugguggauacagccacagcucuguacgaggaagaacugaccggcagagagcacugcagcccucaccacacagccauuagacaggcccucgugugcugggacgagcugacaaaacugaucgccuggaugagcagcaacaucaccagcgagcaagugcggaccaucaucgugaaccacgugaacgauaccuggggccugaaagugcggcagagccugugguuucaccugagcugucugaccuucggccagcacaccgugcaagaguuucugguguccuucggcguguggaucagaaccccugcuccauacagaccuccaaacgcucccauccugagcacccugccugagcacacagugaucuguugaggacuaguuauaagacugacuagcccgaugggccucccaacgggcccuccuccccuccuugcaccgagauuaauaaaaaaaaaaaaaaaaaaaaaaaaaaaaaaaaaaaaaaaaaaaaaaaaaaaaaaaaaaaaaaaaugcaucccccccccccccccccccccccccccccccaaaggcucuuuucagagccaccagaauu

SEQ ID NO: 13077 - RNA, 4315 nt, Artificial Sequence
  SARS-CoV-2/Wuhan/WIV05/2019__EPI_ISL_402128 spike protein mRNA gc mod (1-1211)(K986P_V987P_ H1048Q_H1064N_ H1083N_H1101N) WhcAg construct
aggagaaagcuuaccauguucguguuucuggugcugcugccccugguguccagccagugugugaaccugaccaccagaacacagcugccuccagccuacaccaacagcuucaccagaggcguguacuaccccgacaagguguucagauccagcgugcugcacucuacccaggaccuguuccugccuuucuucagcaacgugaccugguuccacgccauccacguguccggcaccaauggcaccaagagauucgacaaccccgugcugcccuucaacgacgggguguacuuugccagcaccgagaaguccaacaucaucagaggcuggaucuucggcaccacacuggacagcaagacccagagccugcugaucgugaacaacgccaccaacguggucaucaaagugugcgaguuccaguucugcaacgaccccuuccugggcgucuacuaccacaagaacaacaagagcuggauggaaagcgaguuccggguguacagcagcgccaacaacugcaccuucgaguacgugucccagccuuuccugauggaccuggaaggcaagcagggcaacuucaagaaccugcgcgaguucguguucaagaacaucgacggcuacuucaaaaucuacagcaagcacaccccuaucaaccucgugcgggaucugccucagggcuucucugcucuggaaccccugguggaucugcccaucggcaucaacaucacccgguuucagacacugcuggcccugcacagaagcuaccugacaccuggcgauagcagcagcggauggacagcuggugccgccgcuuacuaugugggcuaccugcagccuagaaccuuccugcugaaguacaacgagaacggcaccaucaccgacgccguggauugugcucuggauccucugagcgagacaaagugcacccugaaguccuucaccguggaaaagggcaucuaccagaccagcaacuuccgggugcagcccaccgaauccaucgugcgguuccccaauaucaccaaucugugccccuucggcgagguguucaaugccaccagauucgccucuguguacgccuggaaccggaagcggaucagcaauugcguggccgacuacuccgugcuguacaacuccgccagcuucagcaccuucaagugcuacggcguguccccuaccaagcugaacgaccugugcuucacaaacguguacgccgacagcuucgugauccggggagaugaagugcggcagauugccccuggacagacaggcaagaucgccgacuacaacuacaagcugcccgacgacuucaccggcugugugauugccuggaacagcaacaaccuggacuccaaagucggcggcaacuacaauuaccuguaccggcuguuccggaaguccaaucugaagcccuucgagcgggacaucagcaccgaaaucuaucaggccggcagcaccccuugcaacggcguggaaggcuucaacugcuacuucccacugcaguccuacggcuuucagcccacaaauggcgugggcuaucagcccuacagagugguggugcugagcuucgaacugcugcaugcuccugccacagugugcggcccuaagaaaagcaccaaucucgugaagaacaaaugcgugaacuucaacuucaacggccugaccggcaccggcgugcugacagagagcaacaagaaguuccugccauuccagcaguuuggccgggauaucgccgauaccacagacgccguuagagauccccagacacuggaaauccuggacaucaccccaugcagcuucggcggagugucugugaucaccccuggcaccaacaccagcaaucagguggcagugcuguaccaggacgugaacuguaccgaagugcccguggccauucacgccgaucagcugacaccuacauggcggguguacuccaccggcagcaauguguuucagaccagagccggcugucugaucggagccgagcacgugaacaauagcuacgagugcgacauccccaucggcgcuggcaucugugccagcuaccagacacagacaaacagccccagacgggcuagaagcguggccagccagagcaucauugccuacacaaugucucugggcgccgagaacagcguggccuacuccaacaacucuaucgcuauccccaccaacuucaccaucagcgugaccaccgagauccugccuguguccaugaccaagaccagcguggacugcaccauguacaucugcggcgauuccaccgagugcuccaaccugcugcugcaguacggcagcuucugcacccagcugaauagagcccugacagggaucgccguggaacaggacaagaacacccaagagguguucgcccaagugaagcaaaucuacaagaccccuccuaucaaggacuucggcggcuucaauuucagccagauucugcccgauccuagcaagcccagcaagcggagcuucaucgaggaccugcuguucaacaaagugacacuggccgacgccggcuucaucaagcaguauggcgauugucugggcgacauugccgccagggaucugauuugcgcccagaaguuuaacggacugacagugcugccuccucugcugaccgaugagaugaucgcccaguacacaucugcccugcuggccggcacaaucacaagcggcuggacauuuggagcuggcgccgcucugcagauccccuuugcuaugcagauggccuaccgguucaacggcaucggagugacccagaaugugcuguacgagaaccagaagcugaucgccaaccaguucaacagcgccaucggcaagauccaggacagccugagcagcacagcaagcgcccugggaaagcugcaggacguggucaaccagaaugcccaggcacugaacacccuggucaagcagcuguccuccaacuucggcgccaucagcucugugcugaacgauauccugagcagacuggacccuccugaggccgaggugcagaucgacagacugaucacaggcagacugcagagccuccagacauacgugacccagcagcugaucagagccgccgagauuagagccucugccaaucuggccgccaccaagaugucugagugugugcugggccagagcaagagaguggacuuuugcggcaagggcuaccagcugaugagcuucccucagucugccccucacggcgugguguuucugaacgugacauaugugcccgcucaagagaagaauuucaccaccgcuccagccaucugcaacgacggcaaagcccacuuuccuagagaaggcguguucguguccaacggcaccaacugguucgugacacagcggaacuucuacgagccccagaucaucaccaccgacaacaccuucgugucuggcaacugcgacguugugaucggcauugugaacaauaccguguacgacccucugcagcccgagcuggacagcuucaaagaggaacuggacaaguacuuuaagaaccacacaagccccgacguggaccugggcgauaucagcggaaucaaugccagcgucgugaacauccagaaagagaucgaccggcugaacgagguggccaagaaucugaacgagagccugaucgaccugcaagaacuggggaaguacgagcaguacaucaagggaggcggaggaucugacaucgaccccuacaaagaguucggcagcagcuaccagcugcugaacuuccugccucuggacuucuuccccgaccugaacgcccugguggauacagccacagcucuguacgaggaagaacugaccggcagagagcacugcagcccucaccacacagccauuagacaggcccucgugugcugggacgagcugacaaaacugaucgccuggaugagcagcaacaucaccagcgagcaagugcggaccaucaucgugaaccacgugaacgauaccuggggccugaaagugcggcagagccugugguuucaccugagcugucugaccuucggccagcacaccgugcaagaguuucugguguccuucggcguguggaucagaaccccugcuccauacagaccuccaaacgcucccauccugagcacccugccugagcacacagugaucuguugaggacuaguuauaagacugacuagcccgaugggccucccaacgggcccuccuccccuccuugcaccgagauuaauaaaaaaaaaaaaaaaaaaaaaaaaaaaaaaaaaaaaaaaaaaaaaaaaaaaaaaaaaaaaaaaaugcaucccccccccccccccccccccccccccccccaaaggcucuuuucagagccaccagaauu

SEQ ID NO: 13078 - RNA, 4315 nt, Artificial Sequence
  SARS-CoV-2/Wuhan/WIV05/2019__EPI_ISL_402128 spike protein mRNA gc mod (1-1211)(I712C_T1077C) WhcAg construct
aggagaaagcuuaccauguucguguuucuggugcugcugccccugguguccagccagugugugaaccugaccaccagaacacagcugccuccagccuacaccaacagcuucaccagaggcguguacuaccccgacaagguguucagauccagcgugcugcacucuacccaggaccuguuccugccuuucuucagcaacgugaccugguuccacgccauccacguguccggcaccaauggcaccaagagauucgacaaccccgugcugcccuucaacgacgggguguacuuugccagcaccgagaaguccaacaucaucagaggcuggaucuucggcaccacacuggacagcaagacccagagccugcugaucgugaacaacgccaccaacguggucaucaaagugugcgaguuccaguucugcaacgaccccuuccugggcgucuacuaccacaagaacaacaagagcuggauggaaagcgaguuccggguguacagcagcgccaacaacugcaccuucgaguacgugucccagccuuuccugauggaccuggaaggcaagcagggcaacuucaagaaccugcgcgaguucguguucaagaacaucgacggcuacuucaaaaucuacagcaagcacaccccuaucaaccucgugcgggaucugccucagggcuucucugcucuggaaccccugguggaucugcccaucggcaucaacaucacccgguuucagacacugcuggcccugcacagaagcuaccugacaccuggcgauagcagcagcggauggacagcuggugccgccgcuuacuaugugggcuaccugcagccuagaaccuuccugcugaaguacaacgagaacggcaccaucaccgacgccguggauugugcucuggauccucugagcgagacaaagugcacccugaaguccuucaccguggaaaagggcaucuaccagaccagcaacuuccgggugcagcccaccgaauccaucgugcgguuccccaauaucaccaaucugugccccuucggcgagguguucaaugccaccagauucgccucuguguacgccuggaaccggaagcggaucagcaauugcguggccgacuacuccgugcuguacaacuccgccagcuucagcaccuucaagugcuacggcguguccccuaccaagcugaacgaccugugcuucacaaacguguacgccgacagcuucgugauccggggagaugaagugcggcagauugccccuggacagacaggcaagaucgccgacuacaacuacaagcugcccgacgacuucaccggcugugugauugccuggaacagcaacaaccuggacuccaaagucggcggcaacuacaauuaccuguaccggcuguuccggaaguccaaucugaagcccuucgagcgggacaucagcaccgaaaucuaucaggccggcagcaccccuugcaacggcguggaaggcuucaacugcuacuucccacugcaguccuacggcuuucagcccacaaauggcgugggcuaucagcccuacagagugguggugcugagcuucgaacugcugcaugcuccugccacagugugcggcccuaagaaaagcaccaaucucgugaagaacaaaugcgugaacuucaacuucaacggccugaccggcaccggcgugcugacagagagcaacaagaaguuccugccauuccagcaguuuggccgggauaucgccgauaccacagacgccguuagagauccccagacacuggaaauccuggacaucaccccaugcagcuucggcggagugucugugaucaccccuggcaccaacaccagcaaucagguggcagugcuguaccaggacgugaacuguaccgaagugcccguggccauucacgccgaucagcugacaccuacauggcggguguacuccaccggcagcaauguguuucagaccagagccggcugucugaucggagccgagcacgugaacaauagcuacgagugcgacauccccaucggcgcuggcaucugugccagcuaccagacacagacaaacagccccagacgggcuagaagcguggccagccagagcaucauugccuacacaaugucucugggcgccgagaacagcguggccuacuccaacaacucuugcgcuauccccaccaacuucaccaucagcgugaccaccgagauccugccuguguccaugaccaagaccagcguggacugcaccauguacaucugcggcgauuccaccgagugcuccaaccugcugcugcaguacggcagcuucugcacccagcugaauagagcccugacagggaucgccguggaacaggacaagaacacccaagagguguucgcccaagugaagcaaaucuacaagaccccuccuaucaaggacuucggcggcuucaauuucagccagauucugcccgauccuagcaagcccagcaagcggagcuucaucgaggaccugcuguucaacaaagugacacuggccgacgccggcuucaucaagcaguauggcgauugucugggcgacauugccgccagggaucugauuugcgcccagaaguuuaacggacugacagugcugccuccucugcugaccgaugagaugaucgcccaguacacaucugcccugcuggccggcacaaucacaagcggcuggacauuuggagcuggcgccgcucugcagauccccuuugcuaugcagauggccuaccgguucaacggcaucggagugacccagaaugugcuguacgagaaccagaagcugaucgccaaccaguucaacagcgccaucggcaagauccaggacagccugagcagcacagcaagcgcccugggaaagcugcaggacguggucaaccagaaugcccaggcacugaacacccuggucaagcagcuguccuccaacuucggcgccaucagcucugugcugaacgauauccugagcagacuggacaaggucgaggccgaggugcagaucgacagacugaucacaggcagacugcagagccuccagacauacgugacccagcagcugaucagagccgccgagauuagagccucugccaaucuggccgccaccaagaugucugagugugugcugggccagagcaagagaguggacuuuugcggcaagggcuaccaccugaugagcuucccucagucugccccucacggcgugguguuucugcacgugacauaugugcccgcucaagagaagaauuucaccugugcuccagccaucugccacgacggcaaagcccacuuuccuagagaaggcguguucguguccaacggcacccauugguucgugacacagcggaacuucuacgagccccagaucaucaccaccgacaacaccuucgugucuggcaacugcgacguugugaucggcauugugaacaauaccguguacgacccucugcagcccgagcuggacagcuucaaagaggaacuggacaaguacuuuaagaaccacacaagccccgacguggaccugggcgauaucagcggaaucaaugccagcgucgugaacauccagaaagagaucgaccggcugaacgagguggccaagaaucugaacgagagccugaucgaccugcaagaacuggggaaguacgagcaguacaucaagggaggcggaggaucugacaucgaccccuacaaagaguucggcagcagcuaccagcugcugaacuuccugccucuggacuucuuccccgaccugaacgcccugguggauacagccacagcucuguacgaggaagaacugaccggcagagagcacugcagcccucaccacacagccauuagacaggcccucgugugcugggacgagcugacaaaacugaucgccuggaugagcagcaacaucaccagcgagcaagugcggaccaucaucgugaaccacgugaacgauaccuggggccugaaagugcggcagagccugugguuucaccugagcugucugaccuucggccagcacaccgugcaagaguuucugguguccuucggcguguggaucagaaccccugcuccauacagaccuccaaacgcucccauccugagcacccugccugagcacacagugaucuguugaggacuaguuauaagacugacuagcccgaugggccucccaacgggcccuccuccccuccuugcaccgagauuaauaaaaaaaaaaaaaaaaaaaaaaaaaaaaaaaaaaaaaaaaaaaaaaaaaaaaaaaaaaaaaaaaugcaucccccccccccccccccccccccccccccccaaaggcucuuuucagagccaccagaauu

SEQ ID NO: 13079 - RNA, 4315 nt, Artificial Sequence
  SARS-CoV-2/Wuhan/WIV05/2019__EPI_ISL_402128 spike protein mRNA gc mod (1-1211)(I714C_Y1110C) WhcAg construct
aggagaaagcuuaccauguucguguuucuggugcugcugccccugguguccagccagugugugaaccugaccaccagaacacagcugccuccagccuacaccaacagcuucaccagaggcguguacuaccccgacaagguguucagauccagcgugcugcacucuacccaggaccuguuccugccuuucuucagcaacgugaccugguuccacgccauccacguguccggcaccaauggcaccaagagauucgacaaccccgugcugcccuucaacgacgggguguacuuugccagcaccgagaaguccaacaucaucagaggcuggaucuucggcaccacacuggacagcaagacccagagccugcugaucgugaacaacgccaccaacguggucaucaaagugugcgaguuccaguucugcaacgaccccuuccugggcgucuacuaccacaagaacaacaagagcuggauggaaagcgaguuccggguguacagcagcgccaacaacugcaccuucgaguacgugucccagccuuuccugauggaccuggaaggcaagcagggcaacuucaagaaccugcgcgaguucguguucaagaacaucgacggcuacuucaaaaucuacagcaagcacaccccuaucaaccucgugcgggaucugccucagggcuucucugcucuggaaccccugguggaucugcccaucggcaucaacaucacccgguuucagacacugcuggcccugcacagaagcuaccugacaccuggcgauagcagcagcggauggacagcuggugccgccgcuuacuaugugggcuaccugcagccuagaaccuuccugcugaaguacaacgagaacggcaccaucaccgacgccguggauugugcucuggauccucugagcgagacaaagugcacccugaaguccuucaccguggaaaagggcaucuaccagaccagcaacuuccgggugcagcccaccgaauccaucgugcgguuccccaauaucaccaaucugugccccuucggcgagguguucaaugccaccagauucgccucuguguacgccuggaaccggaagcggaucagcaauugcguggccgacuacuccgugcuguacaacuccgccagcuucagcaccuucaagugcuacggcguguccccuaccaagcugaacgaccugugcuucacaaacguguacgccgacagcuucgugauccggggagaugaagugcggcagauugccccuggacagacaggcaagaucgccgacuacaacuacaagcugcccgacgacuucaccggcugugugauugccuggaacagcaacaaccuggacuccaaagucggcggcaacuacaauuaccuguaccggcuguuccggaaguccaaucugaagcccuucgagcgggacaucagcaccgaaaucuaucaggccggcagcaccccuugcaacggcguggaaggcuucaacugcuacuucccacugcaguccuacggcuuucagcccacaaauggcgugggcuaucagcccuacagagugguggugcugagcuucgaacugcugcaugcuccugccacagugugcggcccuaagaaaagcaccaaucucgugaagaacaaaugcgugaacuucaacuucaacggccugaccggcaccggcgugcugacagagagcaacaagaaguuccugccauuccagcaguuuggccgggauaucgccgauaccacagacgccguuagagauccccagacacuggaaauccuggacaucaccccaugcagcuucggcggagugucugugaucaccccuggcaccaacaccagcaaucagguggcagugcuguaccaggacgugaacuguaccgaagugcccguggccauucacgccgaucagcugacaccuacauggcggguguacuccaccggcagcaauguguuucagaccagagccggcugucugaucggagccgagcacgugaacaauagcuacgagugcgacauccccaucggcgcuggcaucugugccagcuaccagacacagacaaacagccccagacgggcuagaagcguggccagccagagcaucauugccuacacaaugucucugggcgccgagaacagcguggccuacuccaacaacucuaucgcuugccccaccaacuucaccaucagcgugaccaccgagauccugccuguguccaugaccaagaccagcguggacugcaccauguacaucugcggcgauuccaccgagugcuccaaccugcugcugcaguacggcagcuucugcacccagcugaauagagcccugacagggaucgccguggaacaggacaagaacacccaagagguguucgcccaagugaagcaaaucuacaagaccccuccuaucaaggacuucggcggcuucaauuucagccagauucugcccgauccuagcaagcccagcaagcggagcuucaucgaggaccugcuguucaacaaagugacacuggccgacgccggcuucaucaagcaguauggcgauugucugggcgacauugccgccagggaucugauuugcgcccagaaguuuaacggacugacagugcugccuccucugcugaccgaugagaugaucgcccaguacacaucugcccugcuggccggcacaaucacaagcggcuggacauuuggagcuggcgccgcucugcagauccccuuugcuaugcagauggccuaccgguucaacggcaucggagugacccagaaugugcuguacgagaaccagaagcugaucgccaaccaguucaacagcgccaucggcaagauccaggacagccugagcagcacagcaagcgcccugggaaagcugcaggacguggucaaccagaaugcccaggcacugaacacccuggucaagcagcuguccuccaacuucggcgccaucagcucugugcugaacgauauccugagcagacuggacaaggucgaggccgaggugcagaucgacagacugaucacaggcagacugcagagccuccagacauacgugacccagcagcugaucagagccgccgagauuagagccucugccaaucuggccgccaccaagaugucugagugugugcugggccagagcaagagaguggacuuuugcggcaagggcuaccaccugaugagcuucccucagucugccccucacggcgugguguuucugcacgugacauaugugcccgcucaagagaagaauuucaccaccgcuccagccaucugccacgacggcaaagcccacuuuccuagagaaggcguguucguguccaacggcacccauugguucgugacacagcggaacuucugugagccccagaucaucaccaccgacaacaccuucgugucuggcaacugcgacguugugaucggcauugugaacaauaccguguacgacccucugcagcccgagcuggacagcuucaaagaggaacuggacaaguacuuuaagaaccacacaagccccgacguggaccugggcgauaucagcggaaucaaugccagcgucgugaacauccagaaagagaucgaccggcugaacgagguggccaagaaucugaacgagagccugaucgaccugcaagaacuggggaaguacgagcaguacaucaagggaggcggaggaucugacaucgaccccuacaaagaguucggcagcagcuaccagcugcugaacuuccugccucuggacuucuuccccgaccugaacgcccugguggauacagccacagcucuguacgaggaagaacugaccggcagagagcacugcagcccucaccacacagccauuagacaggcccucgugugcugggacgagcugacaaaacugaucgccuggaugagcagcaacaucaccagcgagcaagugcggaccaucaucgugaaccacgugaacgauaccuggggccugaaagugcggcagagccugugguuucaccugagcugucugaccuucggccagcacaccgugcaagaguuucugguguccuucggcguguggaucagaaccccugcuccauacagaccuccaaacgcucccauccugagcacccugccugagcacacagugaucuguugaggacuaguuauaagacugacuagcccgaugggccucccaacgggcccuccuccccuccuugcaccgagauuaauaaaaaaaaaaaaaaaaaaaaaaaaaaaaaaaaaaaaaaaaaaaaaaaaaaaaaaaaaaaaaaaaugcaucccccccccccccccccccccccccccccccaaaggcucuuuucagagccaccagaauu

SEQ ID NO: 13080 - RNA, 4315 nt, Artificial Sequence
  SARS-CoV-2/Wuhan/WIV05/2019__EPI_ISL_402128 spike protein mRNA gc mod (1-1211)(P715C_P1069C) WhcAg construct
aggagaaagcuuaccauguucguguuucuggugcugcugccccugguguccagccagugugugaaccugaccaccagaacacagcugccuccagccuacaccaacagcuucaccagaggcguguacuaccccgacaagguguucagauccagcgugcugcacucuacccaggaccuguuccugccuuucuucagcaacgugaccugguuccacgccauccacguguccggcaccaauggcaccaagagauucgacaaccccgugcugcccuucaacgacgggguguacuuugccagcaccgagaaguccaacaucaucagaggcuggaucuucggcaccacacuggacagcaagacccagagccugcugaucgugaacaacgccaccaacguggucaucaaagugugcgaguuccaguucugcaacgaccccuuccugggcgucuacuaccacaagaacaacaagagcuggauggaaagcgaguuccggguguacagcagcgccaacaacugcaccuucgaguacgugucccagccuuuccugauggaccuggaaggcaagcagggcaacuucaagaaccugcgcgaguucguguucaagaacaucgacggcuacuucaaaaucuacagcaagcacaccccuaucaaccucgugcgggaucugccucagggcuucucugcucuggaaccccugguggaucugcccaucggcaucaacaucacccgguuucagacacugcuggcccugcacagaagcuaccugacaccuggcgauagcagcagcggauggacagcuggugccgccgcuuacuaugugggcuaccugcagccuagaaccuuccugcugaaguacaacgagaacggcaccaucaccgacgccguggauugugcucuggauccucugagcgagacaaagugcacccugaaguccuucaccguggaaaagggcaucuaccagaccagcaacuuccgggugcagcccaccgaauccaucgugcgguuccccaauaucaccaaucugugccccuucggcgagguguucaaugccaccagauucgccucuguguacgccuggaaccggaagcggaucagcaauugcguggccgacuacuccgugcuguacaacuccgccagcuucagcaccuucaagugcuacggcguguccccuaccaagcugaacgaccugugcuucacaaacguguacgccgacagcuucgugauccggggagaugaagugcggcagauugccccuggacagacaggcaagaucgccgacuacaacuacaagcugcccgacgacuucaccggcugugugauugccuggaacagcaacaaccuggacuccaaagucggcggcaacuacaauuaccuguaccggcuguuccggaaguccaaucugaagcccuucgagcgggacaucagcaccgaaaucuaucaggccggcagcaccccuugcaacggcguggaaggcuucaacugcuacuucccacugcaguccuacggcuuucagcccacaaauggcgugggcuaucagcccuacagagugguggugcugagcuucgaacugcugcaugcuccugccacagugugcggcccuaagaaaagcaccaaucucgugaagaacaaaugcgugaacuucaacuucaacggccugaccggcaccggcgugcugacagagagcaacaagaaguuccugccauuccagcaguuuggccgggauaucgccgauaccacagacgccguuagagauccccagacacuggaaauccuggacaucaccccaugcagcuucggcggagugucugugaucaccccuggcaccaacaccagcaaucagguggcagugcuguaccaggacgugaacuguaccgaagugcccguggccauucacgccgaucagcugacaccuacauggcggguguacuccaccggcagcaauguguuucagaccagagccggcugucugaucggagccgagcacgugaacaauagcuacgagugcgacauccccaucggcgcuggcaucugugccagcuaccagacacagacaaacagccccagacgggcuagaagcguggccagccagagcaucauugccuacacaaugucucugggcgccgagaacagcguggccuacuccaacaacucuaucgcuaucugcaccaacuucaccaucagcgugaccaccgagauccugccuguguccaugaccaagaccagcguggacugcaccauguacaucugcggcgauuccaccgagugcuccaaccugcugcugcaguacggcagcuucugcacccagcugaauagagcccugacagggaucgccguggaacaggacaagaacacccaagagguguucgcccaagugaagcaaaucuacaagaccccuccuaucaaggacuucggcggcuucaauuucagccagauucugcccgauccuagcaagcccagcaagcggagcuucaucgaggaccugcuguucaacaaagugacacuggccgacgccggcuucaucaagcaguauggcgauugucugggcgacauugccgccagggaucugauuugcgcccagaaguuuaacggacugacagugcugccuccucugcugaccgaugagaugaucgcccaguacacaucugcccugcuggccggcacaaucacaagcggcuggacauuuggagcuggcgccgcucugcagauccccuuugcuaugcagauggccuaccgguucaacggcaucggagugacccagaaugugcuguacgagaaccagaagcugaucgccaaccaguucaacagcgccaucggcaagauccaggacagccugagcagcacagcaagcgcccugggaaagcugcaggacguggucaaccagaaugcccaggcacugaacacccuggucaagcagcuguccuccaacuucggcgccaucagcucugugcugaacgauauccugagcagacuggacaaggucgaggccgaggugcagaucgacagacugaucacaggcagacugcagagccuccagacauacgugacccagcagcugaucagagccgccgagauuagagccucugccaaucuggccgccaccaagaugucugagugugugcugggccagagcaagagaguggacuuuugcggcaagggcuaccaccugaugagcuucccucagucugccccucacggcgugguguuucugcacgugacauaugugugugcucaagagaagaauuucaccaccgcuccagccaucugccacgacggcaaagcccacuuuccuagagaaggcguguucguguccaacggcacccauugguucgugacacagcggaacuucuacgagccccagaucaucaccaccgacaacaccuucgugucuggcaacugcgacguugugaucggcauugugaacaauaccguguacgacccucugcagcccgagcuggacagcuucaaagaggaacuggacaaguacuuuaagaaccacacaagccccgacguggaccugggcgauaucagcggaaucaaugccagcgucgugaacauccagaaagagaucgaccggcugaacgagguggccaagaaucugaacgagagccugaucgaccugcaagaacuggggaaguacgagcaguacaucaagggaggcggaggaucugacaucgaccccuacaaagaguucggcagcagcuaccagcugcugaacuuccugccucuggacuucuuccccgaccugaacgcccugguggauacagccacagcucuguacgaggaagaacugaccggcagagagcacugcagcccucaccacacagccauuagacaggcccucgugugcugggacgagcugacaaaacugaucgccuggaugagcagcaacaucaccagcgagcaagugcggaccaucaucgugaaccacgugaacgauaccuggggccugaaagugcggcagagccugugguuucaccugagcugucugaccuucggccagcacaccgugcaagaguuucugguguccuucggcguguggaucagaaccccugcuccauacagaccuccaaacgcucccauccugagcacccugccugagcacacagugaucuguugaggacuaguuauaagacugacuagcccgaugggccucccaacgggcccuccuccccuccuugcaccgagauuaauaaaaaaaaaaaaaaaaaaaaaaaaaaaaaaaaaaaaaaaaaaaaaaaaaaaaaaaaaaaaaaaaugcaucccccccccccccccccccccccccccccccaaaggcucuuuucagagccaccagaauu

SEQ ID NO: 13081 - RNA, 4315 nt, Artificial Sequence
  SARS-CoV-2/Wuhan/WIV05/2019__EPI_ISL_402128 spike protein mRNA gc mod (1-1211)(G889C_L1034C) WhcAg construct
aggagaaagcuuaccauguucguguuucuggugcugcugccccugguguccagccagugugugaaccugaccaccagaacacagcugccuccagccuacaccaacagcuucaccagaggcguguacuaccccgacaagguguucagauccagcgugcugcacucuacccaggaccuguuccugccuuucuucagcaacgugaccugguuccacgccauccacguguccggcaccaauggcaccaagagauucgacaaccccgugcugcccuucaacgacgggguguacuuugccagcaccgagaaguccaacaucaucagaggcuggaucuucggcaccacacuggacagcaagacccagagccugcugaucgugaacaacgccaccaacguggucaucaaagugugcgaguuccaguucugcaacgaccccuuccugggcgucuacuaccacaagaacaacaagagcuggauggaaagcgaguuccggguguacagcagcgccaacaacugcaccuucgaguacgugucccagccuuuccugauggaccuggaaggcaagcagggcaacuucaagaaccugcgcgaguucguguucaagaacaucgacggcuacuucaaaaucuacagcaagcacaccccuaucaaccucgugcgggaucugccucagggcuucucugcucuggaaccccugguggaucugcccaucggcaucaacaucacccgguuucagacacugcuggcccugcacagaagcuaccugacaccuggcgauagcagcagcggauggacagcuggugccgccgcuuacuaugugggcuaccugcagccuagaaccuuccugcugaaguacaacgagaacggcaccaucaccgacgccguggauugugcucuggauccucugagcgagacaaagugcacccugaaguccuucaccguggaaaagggcaucuaccagaccagcaacuuccgggugcagcccaccgaauccaucgugcgguuccccaauaucaccaaucugugccccuucggcgagguguucaaugccaccagauucgccucuguguacgccuggaaccggaagcggaucagcaauugcguggccgacuacuccgugcuguacaacuccgccagcuucagcaccuucaagugcuacggcguguccccuaccaagcugaacgaccugugcuucacaaacguguacgccgacagcuucgugauccggggagaugaagugcggcagauugccccuggacagacaggcaagaucgccgacuacaacuacaagcugcccgacgacuucaccggcugugugauugccuggaacagcaacaaccuggacuccaaagucggcggcaacuacaauuaccuguaccggcuguuccggaaguccaaucugaagcccuucgagcgggacaucagcaccgaaaucuaucaggccggcagcaccccuugcaacggcguggaaggcuucaacugcuacuucccacugcaguccuacggcuuucagcccacaaauggcgugggcuaucagcccuacagagugguggugcugagcuucgaacugcugcaugcuccugccacagugugcggcccuaagaaaagcaccaaucucgugaagaacaaaugcgugaacuucaacuucaacggccugaccggcaccggcgugcugacagagagcaacaagaaguuccugccauuccagcaguuuggccgggauaucgccgauaccacagacgccguuagagauccccagacacuggaaauccuggacaucaccccaugcagcuucggcggagugucugugaucaccccuggcaccaacaccagcaaucagguggcagugcuguaccaggacgugaacuguaccgaagugcccguggccauucacgccgaucagcugacaccuacauggcggguguacuccaccggcagcaauguguuucagaccagagccggcugucugaucggagccgagcacgugaacaauagcuacgagugcgacauccccaucggcgcuggcaucugugccagcuaccagacacagacaaacagccccagacgggcuagaagcguggccagccagagcaucauugccuacacaaugucucugggcgccgagaacagcguggccuacuccaacaacucuaucgcuauccccaccaacuucaccaucagcgugaccaccgagauccugccuguguccaugaccaagaccagcguggacugcaccauguacaucugcggcgauuccaccgagugcuccaaccugcugcugcaguacggcagcuucugcacccagcugaauagagcccugacagggaucgccguggaacaggacaagaacacccaagagguguucgcccaagugaagcaaaucuacaagaccccuccuaucaaggacuucggcggcuucaauuucagccagauucugcccgauccuagcaagcccagcaagcggagcuucaucgaggaccugcuguucaacaaagugacacuggccgacgccggcuucaucaagcaguauggcgauugucugggcgacauugccgccagggaucugauuugcgcccagaaguuuaacggacugacagugcugccuccucugcugaccgaugagaugaucgcccaguacacaucugcccugcuggccggcacaaucacaagcggcuggacauuuugcgcuggcgccgcucugcagauccccuuugcuaugcagauggccuaccgguucaacggcaucggagugacccagaaugugcuguacgagaaccagaagcugaucgccaaccaguucaacagcgccaucggcaagauccaggacagccugagcagcacagcaagcgcccugggaaagcugcaggacguggucaaccagaaugcccaggcacugaacacccuggucaagcagcuguccuccaacuucggcgccaucagcucugugcugaacgauauccugagcagacuggacaaggucgaggccgaggugcagaucgacagacugaucacaggcagacugcagagccuccagacauacgugacccagcagcugaucagagccgccgagauuagagccucugccaaucuggccgccaccaagaugucugaguguguguguggccagagcaagagaguggacuuuugcggcaagggcuaccaccugaugagcuucccucagucugccccucacggcgugguguuucugcacgugacauaugugcccgcucaagagaagaauuucaccaccgcuccagccaucugccacgacggcaaagcccacuuuccuagagaaggcguguucguguccaacggcacccauugguucgugacacagcggaacuucuacgagccccagaucaucaccaccgacaacaccuucgugucuggcaacugcgacguugugaucggcauugugaacaauaccguguacgacccucugcagcccgagcuggacagcuucaaagaggaacuggacaaguacuuuaagaaccacacaagccccgacguggaccugggcgauaucagcggaaucaaugccagcgucgugaacauccagaaagagaucgaccggcugaacgagguggccaagaaucugaacgagagccugaucgaccugcaagaacuggggaaguacgagcaguacaucaagggaggcggaggaucugacaucgaccccuacaaagaguucggcagcagcuaccagcugcugaacuuccugccucuggacuucuuccccgaccugaacgcccugguggauacagccacagcucuguacgaggaagaacugaccggcagagagcacugcagcccucaccacacagccauuagacaggcccucgugugcugggacgagcugacaaaacugaucgccuggaugagcagcaacaucaccagcgagcaagugcggaccaucaucgugaaccacgugaacgauaccuggggccugaaagugcggcagagccugugguuucaccugagcugucugaccuucggccagcacaccgugcaagaguuucugguguccuucggcguguggaucagaaccccugcuccauacagaccuccaaacgcucccauccugagcacccugccugagcacacagugaucuguugaggacuaguuauaagacugacuagcccgaugggccucccaacgggcccuccuccccuccuugcaccgagauuaauaaaaaaaaaaaaaaaaaaaaaaaaaaaaaaaaaaaaaaaaaaaaaaaaaaaaaaaaaaaaaaaaugcaucccccccccccccccccccccccccccccccaaaggcucuuuucagagccaccagaauu

SEQ ID NO: 13082 - RNA, 4315 nt, Artificial Sequence
  SARS-CoV-2/Wuhan/WIV05/2019__EPI_ISL_402128 spike protein mRNA gc mod (1-1211)(I909C_Y1047C) WhcAg construct
aggagaaagcuuaccauguucguguuucuggugcugcugccccugguguccagccagugugugaaccugaccaccagaacacagcugccuccagccuacaccaacagcuucaccagaggcguguacuaccccgacaagguguucagauccagcgugcugcacucuacccaggaccuguuccugccuuucuucagcaacgugaccugguuccacgccauccacguguccggcaccaauggcaccaagagauucgacaaccccgugcugcccuucaacgacgggguguacuuugccagcaccgagaaguccaacaucaucagaggcuggaucuucggcaccacacuggacagcaagacccagagccugcugaucgugaacaacgccaccaacguggucaucaaagugugcgaguuccaguucugcaacgaccccuuccugggcgucuacuaccacaagaacaacaagagcuggauggaaagcgaguuccggguguacagcagcgccaacaacugcaccuucgaguacgugucccagccuuuccugauggaccuggaaggcaagcagggcaacuucaagaaccugcgcgaguucguguucaagaacaucgacggcuacuucaaaaucuacagcaagcacaccccuaucaaccucgugcgggaucugccucagggcuucucugcucuggaaccccugguggaucugcccaucggcaucaacaucacccgguuucagacacugcuggcccugcacagaagcuaccugacaccuggcgauagcagcagcggauggacagcuggugccgccgcuuacuaugugggcuaccugcagccuagaaccuuccugcugaaguacaacgagaacggcaccaucaccgacgccguggauugugcucuggauccucugagcgagacaaagugcacccugaaguccuucaccguggaaaagggcaucuaccagaccagcaacuuccgggugcagcccaccgaauccaucgugcgguuccccaauaucaccaaucugugccccuucggcgagguguucaaugccaccagauucgccucuguguacgccuggaaccggaagcggaucagcaauugcguggccgacuacuccgugcuguacaacuccgccagcuucagcaccuucaagugcuacggcguguccccuaccaagcugaacgaccugugcuucacaaacguguacgccgacagcuucgugauccggggagaugaagugcggcagauugccccuggacagacaggcaagaucgccgacuacaacuacaagcugcccgacgacuucaccggcugugugauugccuggaacagcaacaaccuggacuccaaagucggcggcaacuacaauuaccuguaccggcuguuccggaaguccaaucugaagcccuucgagcgggacaucagcaccgaaaucuaucaggccggcagcaccccuugcaacggcguggaaggcuucaacugcuacuucccacugcaguccuacggcuuucagcccacaaauggcgugggcuaucagcccuacagagugguggugcugagcuucgaacugcugcaugcuccugccacagugugcggcccuaagaaaagcaccaaucucgugaagaacaaaugcgugaacuucaacuucaacggccugaccggcaccggcgugcugacagagagcaacaagaaguuccugccauuccagcaguuuggccgggauaucgccgauaccacagacgccguuagagauccccagacacuggaaauccuggacaucaccccaugcagcuucggcggagugucugugaucaccccuggcaccaacaccagcaaucagguggcagugcuguaccaggacgugaacuguaccgaagugcccguggccauucacgccgaucagcugacaccuacauggcggguguacuccaccggcagcaauguguuucagaccagagccggcugucugaucggagccgagcacgugaacaauagcuacgagugcgacauccccaucggcgcuggcaucugugccagcuaccagacacagacaaacagccccagacgggcuagaagcguggccagccagagcaucauugccuacacaaugucucugggcgccgagaacagcguggccuacuccaacaacucuaucgcuauccccaccaacuucaccaucagcgugaccaccgagauccugccuguguccaugaccaagaccagcguggacugcaccauguacaucugcggcgauuccaccgagugcuccaaccugcugcugcaguacggcagcuucugcacccagcugaauagagcccugacagggaucgccguggaacaggacaagaacacccaagagguguucgcccaagugaagcaaaucuacaagaccccuccuaucaaggacuucggcggcuucaauuucagccagauucugcccgauccuagcaagcccagcaagcggagcuucaucgaggaccugcuguucaacaaagugacacuggccgacgccggcuucaucaagcaguauggcgauugucugggcgacauugccgccagggaucugauuugcgcccagaaguuuaacggacugacagugcugccuccucugcugaccgaugagaugaucgcccaguacacaucugcccugcuggccggcacaaucacaagcggcuggacauuuggagcuggcgccgcucugcagauccccuuugcuaugcagauggccuaccgguucaacggcugcggagugacccagaaugugcuguacgagaaccagaagcugaucgccaaccaguucaacagcgccaucggcaagauccaggacagccugagcagcacagcaagcgcccugggaaagcugcaggacguggucaaccagaaugcccaggcacugaacacccuggucaagcagcuguccuccaacuucggcgccaucagcucugugcugaacgauauccugagcagacuggacaaggucgaggccgaggugcagaucgacagacugaucacaggcagacugcagagccuccagacauacgugacccagcagcugaucagagccgccgagauuagagccucugccaaucuggccgccaccaagaugucugagugugugcugggccagagcaagagaguggacuuuugcggcaagggcugucaccugaugagcuucccucagucugccccucacggcgugguguuucugcacgugacauaugugcccgcucaagagaagaauuucaccaccgcuccagccaucugccacgacggcaaagcccacuuuccuagagaaggcguguucguguccaacggcacccauugguucgugacacagcggaacuucuacgagccccagaucaucaccaccgacaacaccuucgugucuggcaacugcgacguugugaucggcauugugaacaauaccguguacgacccucugcagcccgagcuggacagcuucaaagaggaacuggacaaguacuuuaagaaccacacaagccccgacguggaccugggcgauaucagcggaaucaaugccagcgucgugaacauccagaaagagaucgaccggcugaacgagguggccaagaaucugaacgagagccugaucgaccugcaagaacuggggaaguacgagcaguacaucaagggaggcggaggaucugacaucgaccccuacaaagaguucggcagcagcuaccagcugcugaacuuccugccucuggacuucuuccccgaccugaacgcccugguggauacagccacagcucuguacgaggaagaacugaccggcagagagcacugcagcccucaccacacagccauuagacaggcccucgugugcugggacgagcugacaaaacugaucgccuggaugagcagcaacaucaccagcgagcaagugcggaccaucaucgugaaccacgugaacgauaccuggggccugaaagugcggcagagccugugguuucaccugagcugucugaccuucggccagcacaccgugcaagaguuucugguguccuucggcguguggaucagaaccccugcuccauacagaccuccaaacgcucccauccugagcacccugccugagcacacagugaucuguugaggacuaguuauaagacugacuagcccgaugggccucccaacgggcccuccuccccuccuugcaccgagauuaauaaaaaaaaaaaaaaaaaaaaaaaaaaaaaaaaaaaaaaaaaaaaaaaaaaaaaaaaaaaaaaaaugcaucccccccccccccccccccccccccccccccaaaggcucuuuucagagccaccagaauu

SEQ ID NO: 13083 - RNA, 4315 nt, Artificial Sequence
  SARS-CoV-2/Wuhan/WIV05/2019__EPI_ISL_402128 spike protein mRNA gc mod (1-1211)(Q965C_S1003C) WhcAg construct
aggagaaagcuuaccauguucguguuucuggugcugcugccccugguguccagccagugugugaaccugaccaccagaacacagcugccuccagccuacaccaacagcuucaccagaggcguguacuaccccgacaagguguucagauccagcgugcugcacucuacccaggaccuguuccugccuuucuucagcaacgugaccugguuccacgccauccacguguccggcaccaauggcaccaagagauucgacaaccccgugcugcccuucaacgacgggguguacuuugccagcaccgagaaguccaacaucaucagaggcuggaucuucggcaccacacuggacagcaagacccagagccugcugaucgugaacaacgccaccaacguggucaucaaagugugcgaguuccaguucugcaacgaccccuuccugggcgucuacuaccacaagaacaacaagagcuggauggaaagcgaguuccggguguacagcagcgccaacaacugcaccuucgaguacgugucccagccuuuccugauggaccuggaaggcaagcagggcaacuucaagaaccugcgcgaguucguguucaagaacaucgacggcuacuucaaaaucuacagcaagcacaccccuaucaaccucgugcgggaucugccucagggcuucucugcucuggaaccccugguggaucugcccaucggcaucaacaucacccgguuucagacacugcuggcccugcacagaagcuaccugacaccuggcgauagcagcagcggauggacagcuggugccgccgcuuacuaugugggcuaccugcagccuagaaccuuccugcugaaguacaacgagaacggcaccaucaccgacgccguggauugugcucuggauccucugagcgagacaaagugcacccugaaguccuucaccguggaaaagggcaucuaccagaccagcaacuuccgggugcagcccaccgaauccaucgugcgguuccccaauaucaccaaucugugccccuucggcgagguguucaaugccaccagauucgccucuguguacgccuggaaccggaagcggaucagcaauugcguggccgacuacuccgugcuguacaacuccgccagcuucagcaccuucaagugcuacggcguguccccuaccaagcugaacgaccugugcuucacaaacguguacgccgacagcuucgugauccggggagaugaagugcggcagauugccccuggacagacaggcaagaucgccgacuacaacuacaagcugcccgacgacuucaccggcugugugauugccuggaacagcaacaaccuggacuccaaagucggcggcaacuacaauuaccuguaccggcuguuccggaaguccaaucugaagcccuucgagcgggacaucagcaccgaaaucuaucaggccggcagcaccccuugcaacggcguggaaggcuucaacugcuacuucccacugcaguccuacggcuuucagcccacaaauggcgugggcuaucagcccuacagagugguggugcugagcuucgaacugcugcaugcuccugccacagugugcggcccuaagaaaagcaccaaucucgugaagaacaaaugcgugaacuucaacuucaacggccugaccggcaccggcgugcugacagagagcaacaagaaguuccugccauuccagcaguuuggccgggauaucgccgauaccacagacgccguuagagauccccagacacuggaaauccuggacaucaccccaugcagcuucggcggagugucugugaucaccccuggcaccaacaccagcaaucagguggcagugcuguaccaggacgugaacuguaccgaagugcccguggccauucacgccgaucagcugacaccuacauggcggguguacuccaccggcagcaauguguuucagaccagagccggcugucugaucggagccgagcacgugaacaauagcuacgagugcgacauccccaucggcgcuggcaucugugccagcuaccagacacagacaaacagccccagacgggcuagaagcguggccagccagagcaucauugccuacacaaugucucugggcgccgagaacagcguggccuacuccaacaacucuaucgcuauccccaccaacuucaccaucagcgugaccaccgagauccugccuguguccaugaccaagaccagcguggacugcaccauguacaucugcggcgauuccaccgagugcuccaaccugcugcugcaguacggcagcuucugcacccagcugaauagagcccugacagggaucgccguggaacaggacaagaacacccaagagguguucgcccaagugaagcaaaucuacaagaccccuccuaucaaggacuucggcggcuucaauuucagccagauucugcccgauccuagcaagcccagcaagcggagcuucaucgaggaccugcuguucaacaaagugacacuggccgacgccggcuucaucaagcaguauggcgauugucugggcgacauugccgccagggaucugauuugcgcccagaaguuuaacggacugacagugcugccuccucugcugaccgaugagaugaucgcccaguacacaucugcccugcuggccggcacaaucacaagcggcuggacauuuggagcuggcgccgcucugcagauccccuuugcuaugcagauggccuaccgguucaacggcaucggagugacccagaaugugcuguacgagaaccagaagcugaucgccaaccaguucaacagcgccaucggcaagauccaggacagccugagcagcacagcaagcgcccugggaaagcugcaggacguggucaaccagaaugcccaggcacugaacacccuggucaagugccuguccuccaacuucggcgccaucagcucugugcugaacgauauccugagcagacuggacaaggucgaggccgaggugcagaucgacagacugaucacaggcagacugcagugucuccagacauacgugacccagcagcugaucagagccgccgagauuagagccucugccaaucuggccgccaccaagaugucugagugugugcugggccagagcaagagaguggacuuuugcggcaagggcuaccaccugaugagcuucccucagucugccccucacggcgugguguuucugcacgugacauaugugcccgcucaagagaagaauuucaccaccgcuccagccaucugccacgacggcaaagcccacuuuccuagagaaggcguguucguguccaacggcacccauugguucgugacacagcggaacuucuacgagccccagaucaucaccaccgacaacaccuucgugucuggcaacugcgacguugugaucggcauugugaacaauaccguguacgacccucugcagcccgagcuggacagcuucaaagaggaacuggacaaguacuuuaagaaccacacaagccccgacguggaccugggcgauaucagcggaaucaaugccagcgucgugaacauccagaaagagaucgaccggcugaacgagguggccaagaaucugaacgagagccugaucgaccugcaagaacuggggaaguacgagcaguacaucaagggaggcggaggaucugacaucgaccccuacaaagaguucggcagcagcuaccagcugcugaacuuccugccucuggacuucuuccccgaccugaacgcccugguggauacagccacagcucuguacgaggaagaacugaccggcagagagcacugcagcccucaccacacagccauuagacaggcccucgugugcugggacgagcugacaaaacugaucgccuggaugagcagcaacaucaccagcgagcaagugcggaccaucaucgugaaccacgugaacgauaccuggggccugaaagugcggcagagccugugguuucaccugagcugucugaccuucggccagcacaccgugcaagaguuucugguguccuucggcguguggaucagaaccccugcuccauacagaccuccaaacgcucccauccugagcacccugccugagcacacagugaucuguugaggacuaguuauaagacugacuagcccgaugggccucccaacgggcccuccuccccuccuugcaccgagauuaauaaaaaaaaaaaaaaaaaaaaaaaaaaaaaaaaaaaaaaaaaaaaaaaaaaaaaaaaaaaaaaaaugcaucccccccccccccccccccccccccccccccaaaggcucuuuucagagccaccagaauu

SEQ ID NO: 13084 - RNA, 4315 nt, Artificial Sequence
  SARS-CoV-2/Wuhan/WIV05/2019__EPI_ISL_402128 spike protein mRNA gc mod (1-1211)(F970C_G999C) WhcAg construct
aggagaaagcuuaccauguucguguuucuggugcugcugccccugguguccagccagugugugaaccugaccaccagaacacagcugccuccagccuacaccaacagcuucaccagaggcguguacuaccccgacaagguguucagauccagcgugcugcacucuacccaggaccuguuccugccuuucuucagcaacgugaccugguuccacgccauccacguguccggcaccaauggcaccaagagauucgacaaccccgugcugcccuucaacgacgggguguacuuugccagcaccgagaaguccaacaucaucagaggcuggaucuucggcaccacacuggacagcaagacccagagccugcugaucgugaacaacgccaccaacguggucaucaaagugugcgaguuccaguucugcaacgaccccuuccugggcgucuacuaccacaagaacaacaagagcuggauggaaagcgaguuccggguguacagcagcgccaacaacugcaccuucgaguacgugucccagccuuuccugauggaccuggaaggcaagcagggcaacuucaagaaccugcgcgaguucguguucaagaacaucgacggcuacuucaaaaucuacagcaagcacaccccuaucaaccucgugcgggaucugccucagggcuucucugcucuggaaccccugguggaucugcccaucggcaucaacaucacccgguuucagacacugcuggcccugcacagaagcuaccugacaccuggcgauagcagcagcggauggacagcuggugccgccgcuuacuaugugggcuaccugcagccuagaaccuuccugcugaaguacaacgagaacggcaccaucaccgacgccguggauugugcucuggauccucugagcgagacaaagugcacccugaaguccuucaccguggaaaagggcaucuaccagaccagcaacuuccgggugcagcccaccgaauccaucgugcgguuccccaauaucaccaaucugugccccuucggcgagguguucaaugccaccagauucgccucuguguacgccuggaaccggaagcggaucagcaauugcguggccgacuacuccgugcuguacaacuccgccagcuucagcaccuucaagugcuacggcguguccccuaccaagcugaacgaccugugcuucacaaacguguacgccgacagcuucgugauccggggagaugaagugcggcagauugccccuggacagacaggcaagaucgccgacuacaacuacaagcugcccgacgacuucaccggcugugugauugccuggaacagcaacaaccuggacuccaaagucggcggcaacuacaauuaccuguaccggcuguuccggaaguccaaucugaagcccuucgagcgggacaucagcaccgaaaucuaucaggccggcagcaccccuugcaacggcguggaaggcuucaacugcuacuucccacugcaguccuacggcuuucagcccacaaauggcgugggcuaucagcccuacagagugguggugcugagcuucgaacugcugcaugcuccugccacagugugcggcccuaagaaaagcaccaaucucgugaagaacaaaugcgugaacuucaacuucaacggccugaccggcaccggcgugcugacagagagcaacaagaaguuccugccauuccagcaguuuggccgggauaucgccgauaccacagacgccguuagagauccccagacacuggaaauccuggacaucaccccaugcagcuucggcggagugucugugaucaccccuggcaccaacaccagcaaucagguggcagugcuguaccaggacgugaacuguaccgaagugcccguggccauucacgccgaucagcugacaccuacauggcggguguacuccaccggcagcaauguguuucagaccagagccggcugucugaucggagccgagcacgugaacaauagcuacgagugcgacauccccaucggcgcuggcaucugugccagcuaccagacacagacaaacagccccagacgggcuagaagcguggccagccagagcaucauugccuacacaaugucucugggcgccgagaacagcguggccuacuccaacaacucuaucgcuauccccaccaacuucaccaucagcgugaccaccgagauccugccuguguccaugaccaagaccagcguggacugcaccauguacaucugcggcgauuccaccgagugcuccaaccugcugcugcaguacggcagcuucugcacccagcugaauagagcccugacagggaucgccguggaacaggacaagaacacccaagagguguucgcccaagugaagcaaaucuacaagaccccuccuaucaaggacuucggcggcuucaauuucagccagauucugcccgauccuagcaagcccagcaagcggagcuucaucgaggaccugcuguucaacaaagugacacuggccgacgccggcuucaucaagcaguauggcgauugucugggcgacauugccgccagggaucugauuugcgcccagaaguuuaacggacugacagugcugccuccucugcugaccgaugagaugaucgcccaguacacaucugcccugcuggccggcacaaucacaagcggcuggacauuuggagcuggcgccgcucugcagauccccuuugcuaugcagauggccuaccgguucaacggcaucggagugacccagaaugugcuguacgagaaccagaagcugaucgccaaccaguucaacagcgccaucggcaagauccaggacagccugagcagcacagcaagcgcccugggaaagcugcaggacguggucaaccagaaugcccaggcacugaacacccuggucaagcagcuguccuccaacugcggcgccaucagcucugugcugaacgauauccugagcagacuggacaaggucgaggccgaggugcagaucgacagacugaucacauguagacugcagagccuccagacauacgugacccagcagcugaucagagccgccgagauuagagccucugccaaucuggccgccaccaagaugucugagugugugcugggccagagcaagagaguggacuuuugcggcaagggcuaccaccugaugagcuucccucagucugccccucacggcgugguguuucugcacgugacauaugugcccgcucaagagaagaauuucaccaccgcuccagccaucugccacgacggcaaagcccacuuuccuagagaaggcguguucguguccaacggcacccauugguucgugacacagcggaacuucuacgagccccagaucaucaccaccgacaacaccuucgugucuggcaacugcgacguugugaucggcauugugaacaauaccguguacgacccucugcagcccgagcuggacagcuucaaagaggaacuggacaaguacuuuaagaaccacacaagccccgacguggaccugggcgauaucagcggaaucaaugccagcgucgugaacauccagaaagagaucgaccggcugaacgagguggccaagaaucugaacgagagccugaucgaccugcaagaacuggggaaguacgagcaguacaucaagggaggcggaggaucugacaucgaccccuacaaagaguucggcagcagcuaccagcugcugaacuuccugccucuggacuucuuccccgaccugaacgcccugguggauacagccacagcucuguacgaggaagaacugaccggcagagagcacugcagcccucaccacacagccauuagacaggcccucgugugcugggacgagcugacaaaacugaucgccuggaugagcagcaacaucaccagcgagcaagugcggaccaucaucgugaaccacgugaacgauaccuggggccugaaagugcggcagagccugugguuucaccugagcugucugaccuucggccagcacaccgugcaagaguuucugguguccuucggcguguggaucagaaccccugcuccauacagaccuccaaacgcucccauccugagcacccugccugagcacacagugaucuguugaggacuaguuauaagacugacuagcccgaugggccucccaacgggcccuccuccccuccuugcaccgagauuaauaaaaaaaaaaaaaaaaaaaaaaaaaaaaaaaaaaaaaaaaaaaaaaaaaaaaaaaaaaaaaaaaugcaucccccccccccccccccccccccccccccccaaaggcucuuuucagagccaccagaauu

SEQ ID NO: 13085 - RNA, 4315 nt, Artificial Sequence
  SARS-CoV-2/Wuhan/WIV05/2019__EPI_ISL_402128 spike protein mRNA gc mod (1-1211)(A972C_R995C) WhcAg construct
aggagaaagcuuaccauguucguguuucuggugcugcugccccugguguccagccagugugugaaccugaccaccagaacacagcugccuccagccuacaccaacagcuucaccagaggcguguacuaccccgacaagguguucagauccagcgugcugcacucuacccaggaccuguuccugccuuucuucagcaacgugaccugguuccacgccauccacguguccggcaccaauggcaccaagagauucgacaaccccgugcugcccuucaacgacgggguguacuuugccagcaccgagaaguccaacaucaucagaggcuggaucuucggcaccacacuggacagcaagacccagagccugcugaucgugaacaacgccaccaacguggucaucaaagugugcgaguuccaguucugcaacgaccccuuccugggcgucuacuaccacaagaacaacaagagcuggauggaaagcgaguuccggguguacagcagcgccaacaacugcaccuucgaguacgugucccagccuuuccugauggaccuggaaggcaagcagggcaacuucaagaaccugcgcgaguucguguucaagaacaucgacggcuacuucaaaaucuacagcaagcacaccccuaucaaccucgugcgggaucugccucagggcuucucugcucuggaaccccugguggaucugcccaucggcaucaacaucacccgguuucagacacugcuggcccugcacagaagcuaccugacaccuggcgauagcagcagcggauggacagcuggugccgccgcuuacuaugugggcuaccugcagccuagaaccuuccugcugaaguacaacgagaacggcaccaucaccgacgccguggauugugcucuggauccucugagcgagacaaagugcacccugaaguccuucaccguggaaaagggcaucuaccagaccagcaacuuccgggugcagcccaccgaauccaucgugcgguuccccaauaucaccaaucugugccccuucggcgagguguucaaugccaccagauucgccucuguguacgccuggaaccggaagcggaucagcaauugcguggccgacuacuccgugcuguacaacuccgccagcuucagcaccuucaagugcuacggcguguccccuaccaagcugaacgaccugugcuucacaaacguguacgccgacagcuucgugauccggggagaugaagugcggcagauugccccuggacagacaggcaagaucgccgacuacaacuacaagcugcccgacgacuucaccggcugugugauugccuggaacagcaacaaccuggacuccaaagucggcggcaacuacaauuaccuguaccggcuguuccggaaguccaaucugaagcccuucgagcgggacaucagcaccgaaaucuaucaggccggcagcaccccuugcaacggcguggaaggcuucaacugcuacuucccacugcaguccuacggcuuucagcccacaaauggcgugggcuaucagcccuacagagugguggugcugagcuucgaacugcugcaugcuccugccacagugugcggcccuaagaaaagcaccaaucucgugaagaacaaaugcgugaacuucaacuucaacggccugaccggcaccggcgugcugacagagagcaacaagaaguuccugccauuccagcaguuuggccgggauaucgccgauaccacagacgccguuagagauccccagacacuggaaauccuggacaucaccccaugcagcuucggcggagugucugugaucaccccuggcaccaacaccagcaaucagguggcagugcuguaccaggacgugaacuguaccgaagugcccguggccauucacgccgaucagcugacaccuacauggcggguguacuccaccggcagcaauguguuucagaccagagccggcugucugaucggagccgagcacgugaacaauagcuacgagugcgacauccccaucggcgcuggcaucugugccagcuaccagacacagacaaacagccccagacgggcuagaagcguggccagccagagcaucauugccuacacaaugucucugggcgccgagaacagcguggccuacuccaacaacucuaucgcuauccccaccaacuucaccaucagcgugaccaccgagauccugccuguguccaugaccaagaccagcguggacugcaccauguacaucugcggcgauuccaccgagugcuccaaccugcugcugcaguacggcagcuucugcacccagcugaauagagcccugacagggaucgccguggaacaggacaagaacacccaagagguguucgcccaagugaagcaaaucuacaagaccccuccuaucaaggacuucggcggcuucaauuucagccagauucugcccgauccuagcaagcccagcaagcggagcuucaucgaggaccugcuguucaacaaagugacacuggccgacgccggcuucaucaagcaguauggcgauugucugggcgacauugccgccagggaucugauuugcgcccagaaguuuaacggacugacagugcugccuccucugcugaccgaugagaugaucgcccaguacacaucugcccugcuggccggcacaaucacaagcggcuggacauuuggagcuggcgccgcucugcagauccccuuugcuaugcagauggccuaccgguucaacggcaucggagugacccagaaugugcuguacgagaaccagaagcugaucgccaaccaguucaacagcgccaucggcaagauccaggacagccugagcagcacagcaagcgcccugggaaagcugcaggacguggucaaccagaaugcccaggcacugaacacccuggucaagcagcuguccuccaacuucggcugcaucagcucugugcugaacgauauccugagcagacuggacaaggucgaggccgaggugcagaucgacugucugaucacaggcagacugcagagccuccagacauacgugacccagcagcugaucagagccgccgagauuagagccucugccaaucuggccgccaccaagaugucugagugugugcugggccagagcaagagaguggacuuuugcggcaagggcuaccaccugaugagcuucccucagucugccccucacggcgugguguuucugcacgugacauaugugcccgcucaagagaagaauuucaccaccgcuccagccaucugccacgacggcaaagcccacuuuccuagagaaggcguguucguguccaacggcacccauugguucgugacacagcggaacuucuacgagccccagaucaucaccaccgacaacaccuucgugucuggcaacugcgacguugugaucggcauugugaacaauaccguguacgacccucugcagcccgagcuggacagcuucaaagaggaacuggacaaguacuuuaagaaccacacaagccccgacguggaccugggcgauaucagcggaaucaaugccagcgucgugaacauccagaaagagaucgaccggcugaacgagguggccaagaaucugaacgagagccugaucgaccugcaagaacuggggaaguacgagcaguacaucaagggaggcggaggaucugacaucgaccccuacaaagaguucggcagcagcuaccagcugcugaacuuccugccucuggacuucuuccccgaccugaacgcccugguggauacagccacagcucuguacgaggaagaacugaccggcagagagcacugcagcccucaccacacagccauuagacaggcccucgugugcugggacgagcugacaaaacugaucgccuggaugagcagcaacaucaccagcgagcaagugcggaccaucaucgugaaccacgugaacgauaccuggggccugaaagugcggcagagccugugguuucaccugagcugucugaccuucggccagcacaccgugcaagaguuucugguguccuucggcguguggaucagaaccccugcuccauacagaccuccaaacgcucccauccugagcacccugccugagcacacagugaucuguugaggacuaguuauaagacugacuagcccgaugggccucccaacgggcccuccuccccuccuugcaccgagauuaauaaaaaaaaaaaaaaaaaaaaaaaaaaaaaaaaaaaaaaaaaaaaaaaaaaaaaaaaaaaaaaaaugcaucccccccccccccccccccccccccccccccaaaggcucuuuucagagccaccagaauu

SEQ ID NO: 13086 - RNA, 4315 nt, Artificial Sequence
  SARS-CoV-2/Wuhan/WIV05/2019__EPI_ISL_402128 spike protein mRNA gc mod (1-1211)(A890C_V1040C) WhcAg construct
aggagaaagcuuaccauguucguguuucuggugcugcugccccugguguccagccagugugugaaccugaccaccagaacacagcugccuccagccuacaccaacagcuucaccagaggcguguacuaccccgacaagguguucagauccagcgugcugcacucuacccaggaccuguuccugccuuucuucagcaacgugaccugguuccacgccauccacguguccggcaccaauggcaccaagagauucgacaaccccgugcugcccuucaacgacgggguguacuuugccagcaccgagaaguccaacaucaucagaggcuggaucuucggcaccacacuggacagcaagacccagagccugcugaucgugaacaacgccaccaacguggucaucaaagugugcgaguuccaguucugcaacgaccccuuccugggcgucuacuaccacaagaacaacaagagcuggauggaaagcgaguuccggguguacagcagcgccaacaacugcaccuucgaguacgugucccagccuuuccugauggaccuggaaggcaagcagggcaacuucaagaaccugcgcgaguucguguucaagaacaucgacggcuacuucaaaaucuacagcaagcacaccccuaucaaccucgugcgggaucugccucagggcuucucugcucuggaaccccugguggaucugcccaucggcaucaacaucacccgguuucagacacugcuggcccugcacagaagcuaccugacaccuggcgauagcagcagcggauggacagcuggugccgccgcuuacuaugugggcuaccugcagccuagaaccuuccugcugaaguacaacgagaacggcaccaucaccgacgccguggauugugcucuggauccucugagcgagacaaagugcacccugaaguccuucaccguggaaaagggcaucuaccagaccagcaacuuccgggugcagcccaccgaauccaucgugcgguuccccaauaucaccaaucugugccccuucggcgagguguucaaugccaccagauucgccucuguguacgccuggaaccggaagcggaucagcaauugcguggccgacuacuccgugcuguacaacuccgccagcuucagcaccuucaagugcuacggcguguccccuaccaagcugaacgaccugugcuucacaaacguguacgccgacagcuucgugauccggggagaugaagugcggcagauugccccuggacagacaggcaagaucgccgacuacaacuacaagcugcccgacgacuucaccggcugugugauugccuggaacagcaacaaccuggacuccaaagucggcggcaacuacaauuaccuguaccggcuguuccggaaguccaaucugaagcccuucgagcgggacaucagcaccgaaaucuaucaggccggcagcaccccuugcaacggcguggaaggcuucaacugcuacuucccacugcaguccuacggcuuucagcccacaaauggcgugggcuaucagcccuacagagugguggugcugagcuucgaacugcugcaugcuccugccacagugugcggcccuaagaaaagcaccaaucucgugaagaacaaaugcgugaacuucaacuucaacggccugaccggcaccggcgugcugacagagagcaacaagaaguuccugccauuccagcaguuuggccgggauaucgccgauaccacagacgccguuagagauccccagacacuggaaauccuggacaucaccccaugcagcuucggcggagugucugugaucaccccuggcaccaacaccagcaaucagguggcagugcuguaccaggacgugaacuguaccgaagugcccguggccauucacgccgaucagcugacaccuacauggcggguguacuccaccggcagcaauguguuucagaccagagccggcugucugaucggagccgagcacgugaacaauagcuacgagugcgacauccccaucggcgcuggcaucugugccagcuaccagacacagacaaacagccccagacgggcuagaagcguggccagccagagcaucauugccuacacaaugucucugggcgccgagaacagcguggccuacuccaacaacucuaucgcuauccccaccaacuucaccaucagcgugaccaccgagauccugccuguguccaugaccaagaccagcguggacugcaccauguacaucugcggcgauuccaccgagugcuccaaccugcugcugcaguacggcagcuucugcacccagcugaauagagcccugacagggaucgccguggaacaggacaagaacacccaagagguguucgcccaagugaagcaaaucuacaagaccccuccuaucaaggacuucggcggcuucaauuucagccagauucugcccgauccuagcaagcccagcaagcggagcuucaucgaggaccugcuguucaacaaagugacacuggccgacgccggcuucaucaagcaguauggcgauugucugggcgacauugccgccagggaucugauuugcgcccagaaguuuaacggacugacagugcugccuccucugcugaccgaugagaugaucgcccaguacacaucugcccugcuggccggcacaaucacaagcggcuggacauuuggaugcggcgccgcucugcagauccccuuugcuaugcagauggccuaccgguucaacggcaucggagugacccagaaugugcuguacgagaaccagaagcugaucgccaaccaguucaacagcgccaucggcaagauccaggacagccugagcagcacagcaagcgcccugggaaagcugcaggacguggucaaccagaaugcccaggcacugaacacccuggucaagcagcuguccuccaacuucggcgccaucagcucugugcugaacgauauccugagcagacuggacaaggucgaggccgaggugcagaucgacagacugaucacaggcagacugcagagccuccagacauacgugacccagcagcugaucagagccgccgagauuagagccucugccaaucuggccgccaccaagaugucugagugugugcugggccagagcaagagaugugacuuuugcggcaagggcuaccaccugaugagcuucccucagucugccccucacggcgugguguuucugcacgugacauaugugcccgcucaagagaagaauuucaccaccgcuccagccaucugccacgacggcaaagcccacuuuccuagagaaggcguguucguguccaacggcacccauugguucgugacacagcggaacuucuacgagccccagaucaucaccaccgacaacaccuucgugucuggcaacugcgacguugugaucggcauugugaacaauaccguguacgacccucugcagcccgagcuggacagcuucaaagaggaacuggacaaguacuuuaagaaccacacaagccccgacguggaccugggcgauaucagcggaaucaaugccagcgucgugaacauccagaaagagaucgaccggcugaacgagguggccaagaaucugaacgagagccugaucgaccugcaagaacuggggaaguacgagcaguacaucaagggaggcggaggaucugacaucgaccccuacaaagaguucggcagcagcuaccagcugcugaacuuccugccucuggacuucuuccccgaccugaacgcccugguggauacagccacagcucuguacgaggaagaacugaccggcagagagcacugcagcccucaccacacagccauuagacaggcccucgugugcugggacgagcugacaaaacugaucgccuggaugagcagcaacaucaccagcgagcaagugcggaccaucaucgugaaccacgugaacgauaccuggggccugaaagugcggcagagccugugguuucaccugagcugucugaccuucggccagcacaccgugcaagaguuucugguguccuucggcguguggaucagaaccccugcuccauacagaccuccaaacgcucccauccugagcacccugccugagcacacagugaucuguugaggacuaguuauaagacugacuagcccgaugggccucccaacgggcccuccuccccuccuugcaccgagauuaauaaaaaaaaaaaaaaaaaaaaaaaaaaaaaaaaaaaaaaaaaaaaaaaaaaaaaaaaaaaaaaaaugcaucccccccccccccccccccccccccccccccaaaggcucuuuucagagccaccagaauu

SEQ ID NO: 13087 - RNA, 4315 nt, Artificial Sequence
  SARS-CoV-2/Wuhan/WIV05/2019__EPI_ISL_402128 spike protein mRNA gc mod (1-1211)(T874C_S1055C) WhcAg construct
aggagaaagcuuaccauguucguguuucuggugcugcugccccugguguccagccagugugugaaccugaccaccagaacacagcugccuccagccuacaccaacagcuucaccagaggcguguacuaccccgacaagguguucagauccagcgugcugcacucuacccaggaccuguuccugccuuucuucagcaacgugaccugguuccacgccauccacguguccggcaccaauggcaccaagagauucgacaaccccgugcugcccuucaacgacgggguguacuuugccagcaccgagaaguccaacaucaucagaggcuggaucuucggcaccacacuggacagcaagacccagagccugcugaucgugaacaacgccaccaacguggucaucaaagugugcgaguuccaguucugcaacgaccccuuccugggcgucuacuaccacaagaacaacaagagcuggauggaaagcgaguuccggguguacagcagcgccaacaacugcaccuucgaguacgugucccagccuuuccugauggaccuggaaggcaagcagggcaacuucaagaaccugcgcgaguucguguucaagaacaucgacggcuacuucaaaaucuacagcaagcacaccccuaucaaccucgugcgggaucugccucagggcuucucugcucuggaaccccugguggaucugcccaucggcaucaacaucacccgguuucagacacugcuggcccugcacagaagcuaccugacaccuggcgauagcagcagcggauggacagcuggugccgccgcuuacuaugugggcuaccugcagccuagaaccuuccugcugaaguacaacgagaacggcaccaucaccgacgccguggauugugcucuggauccucugagcgagacaaagugcacccugaaguccuucaccguggaaaagggcaucuaccagaccagcaacuuccgggugcagcccaccgaauccaucgugcgguuccccaauaucaccaaucugugccccuucggcgagguguucaaugccaccagauucgccucuguguacgccuggaaccggaagcggaucagcaauugcguggccgacuacuccgugcuguacaacuccgccagcuucagcaccuucaagugcuacggcguguccccuaccaagcugaacgaccugugcuucacaaacguguacgccgacagcuucgugauccggggagaugaagugcggcagauugccccuggacagacaggcaagaucgccgacuacaacuacaagcugcccgacgacuucaccggcugugugauugccuggaacagcaacaaccuggacuccaaagucggcggcaacuacaauuaccuguaccggcuguuccggaaguccaaucugaagcccuucgagcgggacaucagcaccgaaaucuaucaggccggcagcaccccuugcaacggcguggaaggcuucaacugcuacuucccacugcaguccuacggcuuucagcccacaaauggcgugggcuaucagcccuacagagugguggugcugagcuucgaacugcugcaugcuccugccacagugugcggcccuaagaaaagcaccaaucucgugaagaacaaaugcgugaacuucaacuucaacggccugaccggcaccggcgugcugacagagagcaacaagaaguuccugccauuccagcaguuuggccgggauaucgccgauaccacagacgccguuagagauccccagacacuggaaauccuggacaucaccccaugcagcuucggcggagugucugugaucaccccuggcaccaacaccagcaaucagguggcagugcuguaccaggacgugaacuguaccgaagugcccguggccauucacgccgaucagcugacaccuacauggcggguguacuccaccggcagcaauguguuucagaccagagccggcugucugaucggagccgagcacgugaacaauagcuacgagugcgacauccccaucggcgcuggcaucugugccagcuaccagacacagacaaacagccccagacgggcuagaagcguggccagccagagcaucauugccuacacaaugucucugggcgccgagaacagcguggccuacuccaacaacucuaucgcuauccccaccaacuucaccaucagcgugaccaccgagauccugccuguguccaugaccaagaccagcguggacugcaccauguacaucugcggcgauuccaccgagugcuccaaccugcugcugcaguacggcagcuucugcacccagcugaauagagcccugacagggaucgccguggaacaggacaagaacacccaagagguguucgcccaagugaagcaaaucuacaagaccccuccuaucaaggacuucggcggcuucaauuucagccagauucugcccgauccuagcaagcccagcaagcggagcuucaucgaggaccugcuguucaacaaagugacacuggccgacgccggcuucaucaagcaguauggcgauugucugggcgacauugccgccagggaucugauuugcgcccagaaguuuaacggacugacagugcugccuccucugcugaccgaugagaugaucgcccaguacugcucugcccugcuggccggcacaaucacaagcggcuggacauuuggagcuggcgccgcucugcagauccccuuugcuaugcagauggccuaccgguucaacggcaucggagugacccagaaugugcuguacgagaaccagaagcugaucgccaaccaguucaacagcgccaucggcaagauccaggacagccugagcagcacagcaagcgcccugggaaagcugcaggacguggucaaccagaaugcccaggcacugaacacccuggucaagcagcuguccuccaacuucggcgccaucagcucugugcugaacgauauccugagcagacuggacaaggucgaggccgaggugcagaucgacagacugaucacaggcagacugcagagccuccagacauacgugacccagcagcugaucagagccgccgagauuagagccucugccaaucuggccgccaccaagaugucugagugugugcugggccagagcaagagaguggacuuuugcggcaagggcuaccaccugaugagcuucccucagugcgccccucacggcgugguguuucugcacgugacauaugugcccgcucaagagaagaauuucaccaccgcuccagccaucugccacgacggcaaagcccacuuuccuagagaaggcguguucguguccaacggcacccauugguucgugacacagcggaacuucuacgagccccagaucaucaccaccgacaacaccuucgugucuggcaacugcgacguugugaucggcauugugaacaauaccguguacgacccucugcagcccgagcuggacagcuucaaagaggaacuggacaaguacuuuaagaaccacacaagccccgacguggaccugggcgauaucagcggaaucaaugccagcgucgugaacauccagaaagagaucgaccggcugaacgagguggccaagaaucugaacgagagccugaucgaccugcaagaacuggggaaguacgagcaguacaucaagggaggcggaggaucugacaucgaccccuacaaagaguucggcagcagcuaccagcugcugaacuuccugccucuggacuucuuccccgaccugaacgcccugguggauacagccacagcucuguacgaggaagaacugaccggcagagagcacugcagcccucaccacacagccauuagacaggcccucgugugcugggacgagcugacaaaacugaucgccuggaugagcagcaacaucaccagcgagcaagugcggaccaucaucgugaaccacgugaacgauaccuggggccugaaagugcggcagagccugugguuucaccugagcugucugaccuucggccagcacaccgugcaagaguuucugguguccuucggcguguggaucagaaccccugcuccauacagaccuccaaacgcucccauccugagcacccugccugagcacacagugaucuguugaggacuaguuauaagacugacuagcccgaugggccucccaacgggcccuccuccccuccuugcaccgagauuaauaaaaaaaaaaaaaaaaaaaaaaaaaaaaaaaaaaaaaaaaaaaaaaaaaaaaaaaaaaaaaaaaugcaucccccccccccccccccccccccccccccccaaaggcucuuuucagagccaccagaauu

SEQ ID NO: 13088 - RNA, 4141 nt, Artificial Sequence
  SARS-CoV-2/Wuhan/WIV05/2019__EPI_ISL_402128 spike protein mRNA gc mod (1-1147) LumSynth construct
aggagaaagcuuaccauguucguguuucuggugcugcugccccugguguccagccagugugugaaccugaccaccagaacacagcugccuccagccuacaccaacagcuucaccagaggcguguacuaccccgacaagguguucagauccagcgugcugcacucuacccaggaccuguuccugccuuucuucagcaacgugaccugguuccacgccauccacguguccggcaccaauggcaccaagagauucgacaaccccgugcugcccuucaacgacgggguguacuuugccagcaccgagaaguccaacaucaucagaggcuggaucuucggcaccacacuggacagcaagacccagagccugcugaucgugaacaacgccaccaacguggucaucaaagugugcgaguuccaguucugcaacgaccccuuccugggcgucuacuaccacaagaacaacaagagcuggauggaaagcgaguuccggguguacagcagcgccaacaacugcaccuucgaguacgugucccagccuuuccugauggaccuggaaggcaagcagggcaacuucaagaaccugcgcgaguucguguucaagaacaucgacggcuacuucaaaaucuacagcaagcacaccccuaucaaccucgugcgggaucugccucagggcuucucugcucuggaaccccugguggaucugcccaucggcaucaacaucacccgguuucagacacugcuggcccugcacagaagcuaccugacaccuggcgauagcagcagcggauggacagcuggugccgccgcuuacuaugugggcuaccugcagccuagaaccuuccugcugaaguacaacgagaacggcaccaucaccgacgccguggauugugcucuggauccucugagcgagacaaagugcacccugaaguccuucaccguggaaaagggcaucuaccagaccagcaacuuccgggugcagcccaccgaauccaucgugcgguuccccaauaucaccaaucugugccccuucggcgagguguucaaugccaccagauucgccucuguguacgccuggaaccggaagcggaucagcaauugcguggccgacuacuccgugcuguacaacuccgccagcuucagcaccuucaagugcuacggcguguccccuaccaagcugaacgaccugugcuucacaaacguguacgccgacagcuucgugauccggggagaugaagugcggcagauugccccuggacagacaggcaagaucgccgacuacaacuacaagcugcccgacgacuucaccggcugugugauugccuggaacagcaacaaccuggacuccaaagucggcggcaacuacaauuaccuguaccggcuguuccggaaguccaaucugaagcccuucgagcgggacaucagcaccgaaaucuaucaggccggcagcaccccuugcaacggcguggaaggcuucaacugcuacuucccacugcaguccuacggcuuucagcccacaaauggcgugggcuaucagcccuacagagugguggugcugagcuucgaacugcugcaugcuccugccacagugugcggcccuaagaaaagcaccaaucucgugaagaacaaaugcgugaacuucaacuucaacggccugaccggcaccggcgugcugacagagagcaacaagaaguuccugccauuccagcaguuuggccgggauaucgccgauaccacagacgccguuagagauccccagacacuggaaauccuggacaucaccccaugcagcuucggcggagugucugugaucaccccuggcaccaacaccagcaaucagguggcagugcuguaccaggacgugaacuguaccgaagugcccguggccauucacgccgaucagcugacaccuacauggcggguguacuccaccggcagcaauguguuucagaccagagccggcugucugaucggagccgagcacgugaacaauagcuacgagugcgacauccccaucggcgcuggcaucugugccagcuaccagacacagacaaacagccccagacgggcuagaagcguggccagccagagcaucauugccuacacaaugucucugggcgccgagaacagcguggccuacuccaacaacucuaucgcuauccccaccaacuucaccaucagcgugaccaccgagauccugccuguguccaugaccaagaccagcguggacugcaccauguacaucugcggcgauuccaccgagugcuccaaccugcugcugcaguacggcagcuucugcacccagcugaauagagcccugacagggaucgccguggaacaggacaagaacacccaagagguguucgcccaagugaagcaaaucuacaagaccccuccuaucaaggacuucggcggcuucaauuucagccagauucugcccgauccuagcaagcccagcaagcggagcuucaucgaggaccugcuguucaacaaagugacacuggccgacgccggcuucaucaagcaguauggcgauugucugggcgacauugccgccagggaucugauuugcgcccagaaguuuaacggacugacagugcugccuccucugcugaccgaugagaugaucgcccaguacacaucugcccugcuggccggcacaaucacaagcggcuggacauuuggagcuggcgccgcucugcagauccccuuugcuaugcagauggccuaccgguucaacggcaucggagugacccagaaugugcuguacgagaaccagaagcugaucgccaaccaguucaacagcgccaucggcaagauccaggacagccugagcagcacagcaagcgcccugggaaagcugcaggacguggucaaccagaaugcccaggcacugaacacccuggucaagcagcuguccuccaacuucggcgccaucagcucugugcugaacgauauccugagcagacuggacaaggucgaggccgaggugcagaucgacagacugaucacaggcagacugcagagccuccagacauacgugacccagcagcugaucagagccgccgagauuagagccucugccaaucuggccgccaccaagaugucugagugugugcugggccagagcaagagaguggacuuuugcggcaagggcuaccaccugaugagcuucccucagucugccccucacggcgugguguuucugcacgugacauaugugcccgcucaagagaagaauuucaccaccgcuccagccaucugccacgacggcaaagcccacuuuccuagagaaggcguguucguguccaacggcacccauugguucgugacacagcggaacuucuacgagccccagaucaucaccaccgacaacaccuucgugucuggcaacugcgacguugugaucggcauugugaacaauaccguguacgacccucugcagcccgagcuggacagcggcggaggaucuggcggaggacagaucuacgagggcaagcugacagccgagggccugagauuuggaaucguggccagccgguucaaucacgcccugguggauagacugguggaaggcgccaucgaugccauugucagacacggcggcagagaagaggacaucacccucguuagagugcccggcucuugggagauuccuguggcugcuggcgagcuggcccggaaagaagauaucgacgccguuaucgccaucggcgugcugaucagaggcgccacaccucacuucgacuauaucgccagcgagguguccaaaggccuggccgaucugagccuggaacugagaaagcccaucaccuucggcgugaucaccgcugacacacuggaacaggccauugagagagccggcaccaagcacggcaacaaaggaugggaagccgcucuguccgccaucgagauggccaaccuguucaagagccugcggugaggacuaguuauaagacugacuagcccgaugggccucccaacgggcccuccuccccuccuugcaccgagauuaauaaaaaaaaaaaaaaaaaaaaaaaaaaaaaaaaaaaaaaaaaaaaaaaaaaaaaaaaaaaaaaaaugcaucccccccccccccccccccccccccccccccaaaggcucuuuucagagccaccagaauu

SEQ ID NO: 13089 - RNA, 4141 nt, Artificial Sequence
  SARS-CoV-2/Wuhan/WIV05/2019__EPI_ISL_402128 spike protein mRNA gc mod (1-1147)(K986P_V987P) LumSynth construct
aggagaaagcuuaccauguucguguuucuggugcugcugccccugguguccagccagugugugaaccugaccaccagaacacagcugccuccagccuacaccaacagcuucaccagaggcguguacuaccccgacaagguguucagauccagcgugcugcacucuacccaggaccuguuccugccuuucuucagcaacgugaccugguuccacgccauccacguguccggcaccaauggcaccaagagauucgacaaccccgugcugcccuucaacgacgggguguacuuugccagcaccgagaaguccaacaucaucagaggcuggaucuucggcaccacacuggacagcaagacccagagccugcugaucgugaacaacgccaccaacguggucaucaaagugugcgaguuccaguucugcaacgaccccuuccugggcgucuacuaccacaagaacaacaagagcuggauggaaagcgaguuccggguguacagcagcgccaacaacugcaccuucgaguacgugucccagccuuuccugauggaccuggaaggcaagcagggcaacuucaagaaccugcgcgaguucguguucaagaacaucgacggcuacuucaaaaucuacagcaagcacaccccuaucaaccucgugcgggaucugccucagggcuucucugcucuggaaccccugguggaucugcccaucggcaucaacaucacccgguuucagacacugcuggcccugcacagaagcuaccugacaccuggcgauagcagcagcggauggacagcuggugccgccgcuuacuaugugggcuaccugcagccuagaaccuuccugcugaaguacaacgagaacggcaccaucaccgacgccguggauugugcucuggauccucugagcgagacaaagugcacccugaaguccuucaccguggaaaagggcaucuaccagaccagcaacuuccgggugcagcccaccgaauccaucgugcgguuccccaauaucaccaaucugugccccuucggcgagguguucaaugccaccagauucgccucuguguacgccuggaaccggaagcggaucagcaauugcguggccgacuacuccgugcuguacaacuccgccagcuucagcaccuucaagugcuacggcguguccccuaccaagcugaacgaccugugcuucacaaacguguacgccgacagcuucgugauccggggagaugaagugcggcagauugccccuggacagacaggcaagaucgccgacuacaacuacaagcugcccgacgacuucaccggcugugugauugccuggaacagcaacaaccuggacuccaaagucggcggcaacuacaauuaccuguaccggcuguuccggaaguccaaucugaagcccuucgagcgggacaucagcaccgaaaucuaucaggccggcagcaccccuugcaacggcguggaaggcuucaacugcuacuucccacugcaguccuacggcuuucagcccacaaauggcgugggcuaucagcccuacagagugguggugcugagcuucgaacugcugcaugcuccugccacagugugcggcccuaagaaaagcaccaaucucgugaagaacaaaugcgugaacuucaacuucaacggccugaccggcaccggcgugcugacagagagcaacaagaaguuccugccauuccagcaguuuggccgggauaucgccgauaccacagacgccguuagagauccccagacacuggaaauccuggacaucaccccaugcagcuucggcggagugucugugaucaccccuggcaccaacaccagcaaucagguggcagugcuguaccaggacgugaacuguaccgaagugcccguggccauucacgccgaucagcugacaccuacauggcggguguacuccaccggcagcaauguguuucagaccagagccggcugucugaucggagccgagcacgugaacaauagcuacgagugcgacauccccaucggcgcuggcaucugugccagcuaccagacacagacaaacagccccagacgggcuagaagcguggccagccagagcaucauugccuacacaaugucucugggcgccgagaacagcguggccuacuccaacaacucuaucgcuauccccaccaacuucaccaucagcgugaccaccgagauccugccuguguccaugaccaagaccagcguggacugcaccauguacaucugcggcgauuccaccgagugcuccaaccugcugcugcaguacggcagcuucugcacccagcugaauagagcccugacagggaucgccguggaacaggacaagaacacccaagagguguucgcccaagugaagcaaaucuacaagaccccuccuaucaaggacuucggcggcuucaauuucagccagauucugcccgauccuagcaagcccagcaagcggagcuucaucgaggaccugcuguucaacaaagugacacuggccgacgccggcuucaucaagcaguauggcgauugucugggcgacauugccgccagggaucugauuugcgcccagaaguuuaacggacugacagugcugccuccucugcugaccgaugagaugaucgcccaguacacaucugcccugcuggccggcacaaucacaagcggcuggacauuuggagcuggcgccgcucugcagauccccuuugcuaugcagauggccuaccgguucaacggcaucggagugacccagaaugugcuguacgagaaccagaagcugaucgccaaccaguucaacagcgccaucggcaagauccaggacagccugagcagcacagcaagcgcccugggaaagcugcaggacguggucaaccagaaugcccaggcacugaacacccuggucaagcagcuguccuccaacuucggcgccaucagcucugugcugaacgauauccugagcagacuggacccuccugaggccgaggugcagaucgacagacugaucacaggcagacugcagagccuccagacauacgugacccagcagcugaucagagccgccgagauuagagccucugccaaucuggccgccaccaagaugucugagugugugcugggccagagcaagagaguggacuuuugcggcaagggcuaccaccugaugagcuucccucagucugccccucacggcgugguguuucugcacgugacauaugugcccgcucaagagaagaauuucaccaccgcuccagccaucugccacgacggcaaagcccacuuuccuagagaaggcguguucguguccaacggcacccauugguucgugacacagcggaacuucuacgagccccagaucaucaccaccgacaacaccuucgugucuggcaacugcgacguugugaucggcauugugaacaauaccguguacgacccucugcagcccgagcuggacagcggcggaggaucuggcggaggacagaucuacgagggcaagcugacagccgagggccugagauuuggaaucguggccagccgguucaaucacgcccugguggauagacugguggaaggcgccaucgaugccauugucagacacggcggcagagaagaggacaucacccucguuagagugcccggcucuugggagauuccuguggcugcuggcgagcuggcccggaaagaagauaucgacgccguuaucgccaucggcgugcugaucagaggcgccacaccucacuucgacuauaucgccagcgagguguccaaaggccuggccgaucugagccuggaacugagaaagcccaucaccuucggcgugaucaccgcugacacacuggaacaggccauugagagagccggcaccaagcacggcaacaaaggaugggaagccgcucuguccgccaucgagauggccaaccuguucaagagccugcggugaggacuaguuauaagacugacuagcccgaugggccucccaacgggcccuccuccccuccuugcaccgagauuaauaaaaaaaaaaaaaaaaaaaaaaaaaaaaaaaaaaaaaaaaaaaaaaaaaaaaaaaaaaaaaaaaugcaucccccccccccccccccccccccccccccccaaaggcucuuuucagagccaccagaauu

SEQ ID NO: 13090 - RNA, 4141 nt, Artificial Sequence
  SARS-CoV-2/Wuhan/WIV05/2019__EPI_ISL_402128 spike protein mRNA gc mod (1-1147)(K986P_V987P_T887WN_A1020W) LumSynth construct
aggagaaagcuuaccauguucguguuucuggugcugcugccccugguguccagccagugugugaaccugaccaccagaacacagcugccuccagccuacaccaacagcuucaccagaggcguguacuaccccgacaagguguucagauccagcgugcugcacucuacccaggaccuguuccugccuuucuucagcaacgugaccugguuccacgccauccacguguccggcaccaauggcaccaagagauucgacaaccccgugcugcccuucaacgacgggguguacuuugccagcaccgagaaguccaacaucaucagaggcuggaucuucggcaccacacuggacagcaagacccagagccugcugaucgugaacaacgccaccaacguggucaucaaagugugcgaguuccaguucugcaacgaccccuuccugggcgucuacuaccacaagaacaacaagagcuggauggaaagcgaguuccggguguacagcagcgccaacaacugcaccuucgaguacgugucccagccuuuccugauggaccuggaaggcaagcagggcaacuucaagaaccugcgcgaguucguguucaagaacaucgacggcuacuucaaaaucuacagcaagcacaccccuaucaaccucgugcgggaucugccucagggcuucucugcucuggaaccccugguggaucugcccaucggcaucaacaucacccgguuucagacacugcuggcccugcacagaagcuaccugacaccuggcgauagcagcagcggauggacagcuggugccgccgcuuacuaugugggcuaccugcagccuagaaccuuccugcugaaguacaacgagaacggcaccaucaccgacgccguggauugugcucuggauccucugagcgagacaaagugcacccugaaguccuucaccguggaaaagggcaucuaccagaccagcaacuuccgggugcagcccaccgaauccaucgugcgguuccccaauaucaccaaucugugccccuucggcgagguguucaaugccaccagauucgccucuguguacgccuggaaccggaagcggaucagcaauugcguggccgacuacuccgugcuguacaacuccgccagcuucagcaccuucaagugcuacggcguguccccuaccaagcugaacgaccugugcuucacaaacguguacgccgacagcuucgugauccggggagaugaagugcggcagauugccccuggacagacaggcaagaucgccgacuacaacuacaagcugcccgacgacuucaccggcugugugauugccuggaacagcaacaaccuggacuccaaagucggcggcaacuacaauuaccuguaccggcuguuccggaaguccaaucugaagcccuucgagcgggacaucagcaccgaaaucuaucaggccggcagcaccccuugcaacggcguggaaggcuucaacugcuacuucccacugcaguccuacggcuuucagcccacaaauggcgugggcuaucagcccuacagagugguggugcugagcuucgaacugcugcaugcuccugccacagugugcggcccuaagaaaagcaccaaucucgugaagaacaaaugcgugaacuucaacuucaacggccugaccggcaccggcgugcugacagagagcaacaagaaguuccugccauuccagcaguuuggccgggauaucgccgauaccacagacgccguuagagauccccagacacuggaaauccuggacaucaccccaugcagcuucggcggagugucugugaucaccccuggcaccaacaccagcaaucagguggcagugcuguaccaggacgugaacuguaccgaagugcccguggccauucacgccgaucagcugacaccuacauggcggguguacuccaccggcagcaauguguuucagaccagagccggcugucugaucggagccgagcacgugaacaauagcuacgagugcgacauccccaucggcgcuggcaucugugccagcuaccagacacagacaaacagccccagacgggcuagaagcguggccagccagagcaucauugccuacacaaugucucugggcgccgagaacagcguggccuacuccaacaacucuaucgcuauccccaccaacuucaccaucagcgugaccaccgagauccugccuguguccaugaccaagaccagcguggacugcaccauguacaucugcggcgauuccaccgagugcuccaaccugcugcugcaguacggcagcuucugcacccagcugaauagagcccugacagggaucgccguggaacaggacaagaacacccaagagguguucgcccaagugaagcaaaucuacaagaccccuccuaucaaggacuucggcggcuucaauuucagccagauucugcccgauccuagcaagcccagcaagcggagcuucaucgaggaccugcuguucaacaaagugacacuggccgacgccggcuucaucaagcaguauggcgauugucugggcgacauugccgccagggaucugauuugcgcccagaaguuuaacggacugacagugcugccuccucugcugaccgaugagaugaucgcccaguacacaucugcccugcuggccggcacaaucacaagcggcuggugguuuggagcuggcgccgcucugcagauccccuuugcuaugcagauggccuaccgguucaacggcaucggagugacccagaaugugcuguacgagaaccagaagcugaucgccaaccaguucaacagcgccaucggcaagauccaggacagccugagcagcacagcaagcgcccugggaaagcugcaggacguggucaaccagaaugcccaggcacugaacacccuggucaagcagcuguccuccaacuucggcgccaucagcucugugcugaacgauauccugagcagacuggacccuccugaggccgaggugcagaucgacagacugaucacaggcagacugcagagccuccagacauacgugacccagcagcugaucagagccgccgagauuagauggucugccaaucuggccgccaccaagaugucugagugugugcugggccagagcaagagaguggacuuuugcggcaagggcuaccaccugaugagcuucccucagucugccccucacggcgugguguuucugcacgugacauaugugcccgcucaagagaagaauuucaccaccgcuccagccaucugccacgacggcaaagcccacuuuccuagagaaggcguguucguguccaacggcacccauugguucgugacacagcggaacuucuacgagccccagaucaucaccaccgacaacaccuucgugucuggcaacugcgacguugugaucggcauugugaacaauaccguguacgacccucugcagcccgagcuggacagcggcggaggaucuggcggaggacagaucuacgagggcaagcugacagccgagggccugagauuuggaaucguggccagccgguucaaucacgcccugguggauagacugguggaaggcgccaucgaugccauugucagacacggcggcagagaagaggacaucacccucguuagagugcccggcucuugggagauuccuguggcugcuggcgagcuggcccggaaagaagauaucgacgccguuaucgccaucggcgugcugaucagaggcgccacaccucacuucgacuauaucgccagcgagguguccaaaggccuggccgaucugagccuggaacugagaaagcccaucaccuucggcgugaucaccgcugacacacuggaacaggccauugagagagccggcaccaagcacggcaacaaaggaugggaagccgcucuguccgccaucgagauggccaaccuguucaagagccugcggugaggacuaguuauaagacugacuagcccgaugggccucccaacgggcccuccuccccuccuugcaccgagauuaauaaaaaaaaaaaaaaaaaaaaaaaaaaaaaaaaaaaaaaaaaaaaaaaaaaaaaaaaaaaaaaaaugcaucccccccccccccccccccccccccccccccaaaggcucuuuucagagccaccagaauu

SEQ ID NO: 13091 - RNA, 4141 nt, Artificial Sequence
  SARS-CoV-2/Wuhan/WIV05/2019__EPI_ISL_402128 spike protein mRNA gc mod (1-1147)(K986P_V987P_P1069F) LumSynth construct
aggagaaagcuuaccauguucguguuucuggugcugcugccccugguguccagccagugugugaaccugaccaccagaacacagcugccuccagccuacaccaacagcuucaccagaggcguguacuaccccgacaagguguucagauccagcgugcugcacucuacccaggaccuguuccugccuuucuucagcaacgugaccugguuccacgccauccacguguccggcaccaauggcaccaagagauucgacaaccccgugcugcccuucaacgacgggguguacuuugccagcaccgagaaguccaacaucaucagaggcuggaucuucggcaccacacuggacagcaagacccagagccugcugaucgugaacaacgccaccaacguggucaucaaagugugcgaguuccaguucugcaacgaccccuuccugggcgucuacuaccacaagaacaacaagagcuggauggaaagcgaguuccggguguacagcagcgccaacaacugcaccuucgaguacgugucccagccuuuccugauggaccuggaaggcaagcagggcaacuucaagaaccugcgcgaguucguguucaagaacaucgacggcuacuucaaaaucuacagcaagcacaccccuaucaaccucgugcgggaucugccucagggcuucucugcucuggaaccccugguggaucugcccaucggcaucaacaucacccgguuucagacacugcuggcccugcacagaagcuaccugacaccuggcgauagcagcagcggauggacagcuggugccgccgcuuacuaugugggcuaccugcagccuagaaccuuccugcugaaguacaacgagaacggcaccaucaccgacgccguggauugugcucuggauccucugagcgagacaaagugcacccugaaguccuucaccguggaaaagggcaucuaccagaccagcaacuuccgggugcagcccaccgaauccaucgugcgguuccccaauaucaccaaucugugccccuucggcgagguguucaaugccaccagauucgccucuguguacgccuggaaccggaagcggaucagcaauugcguggccgacuacuccgugcuguacaacuccgccagcuucagcaccuucaagugcuacggcguguccccuaccaagcugaacgaccugugcuucacaaacguguacgccgacagcuucgugauccggggagaugaagugcggcagauugccccuggacagacaggcaagaucgccgacuacaacuacaagcugcccgacgacuucaccggcugugugauugccuggaacagcaacaaccuggacuccaaagucggcggcaacuacaauuaccuguaccggcuguuccggaaguccaaucugaagcccuucgagcgggacaucagcaccgaaaucuaucaggccggcagcaccccuugcaacggcguggaaggcuucaacugcuacuucccacugcaguccuacggcuuucagcccacaaauggcgugggcuaucagcccuacagagugguggugcugagcuucgaacugcugcaugcuccugccacagugugcggcccuaagaaaagcaccaaucucgugaagaacaaaugcgugaacuucaacuucaacggccugaccggcaccggcgugcugacagagagcaacaagaaguuccugccauuccagcaguuuggccgggauaucgccgauaccacagacgccguuagagauccccagacacuggaaauccuggacaucaccccaugcagcuucggcggagugucugugaucaccccuggcaccaacaccagcaaucagguggcagugcuguaccaggacgugaacuguaccgaagugcccguggccauucacgccgaucagcugacaccuacauggcggguguacuccaccggcagcaauguguuucagaccagagccggcugucugaucggagccgagcacgugaacaauagcuacgagugcgacauccccaucggcgcuggcaucugugccagcuaccagacacagacaaacagccccagacgggcuagaagcguggccagccagagcaucauugccuacacaaugucucugggcgccgagaacagcguggccuacuccaacaacucuaucgcuauccccaccaacuucaccaucagcgugaccaccgagauccugccuguguccaugaccaagaccagcguggacugcaccauguacaucugcggcgauuccaccgagugcuccaaccugcugcugcaguacggcagcuucugcacccagcugaauagagcccugacagggaucgccguggaacaggacaagaacacccaagagguguucgcccaagugaagcaaaucuacaagaccccuccuaucaaggacuucggcggcuucaauuucagccagauucugcccgauccuagcaagcccagcaagcggagcuucaucgaggaccugcuguucaacaaagugacacuggccgacgccggcuucaucaagcaguauggcgauugucugggcgacauugccgccagggaucugauuugcgcccagaaguuuaacggacugacagugcugccuccucugcugaccgaugagaugaucgcccaguacacaucugcccugcuggccggcacaaucacaagcggcuggacauuuggagcuggcgccgcucugcagauccccuuugcuaugcagauggccuaccgguucaacggcaucggagugacccagaaugugcuguacgagaaccagaagcugaucgccaaccaguucaacagcgccaucggcaagauccaggacagccugagcagcacagcaagcgcccugggaaagcugcaggacguggucaaccagaaugcccaggcacugaacacccuggucaagcagcuguccuccaacuucggcgccaucagcucugugcugaacgauauccugagcagacuggacccuccugaggccgaggugcagaucgacagacugaucacaggcagacugcagagccuccagacauacgugacccagcagcugaucagagccgccgagauuagagccucugccaaucuggccgccaccaagaugucugagugugugcugggccagagcaagagaguggacuuuugcggcaagggcuaccaccugaugagcuucccucagucugccccucacggcgugguguuucugcacgugacauauguguucgcucaagagaagaauuucaccaccgcuccagccaucugccacgacggcaaagcccacuuuccuagagaaggcguguucguguccaacggcacccauugguucgugacacagcggaacuucuacgagccccagaucaucaccaccgacaacaccuucgugucuggcaacugcgacguugugaucggcauugugaacaauaccguguacgacccucugcagcccgagcuggacagcggcggaggaucuggcggaggacagaucuacgagggcaagcugacagccgagggccugagauuuggaaucguggccagccgguucaaucacgcccugguggauagacugguggaaggcgccaucgaugccauugucagacacggcggcagagaagaggacaucacccucguuagagugcccggcucuugggagauuccuguggcugcuggcgagcuggcccggaaagaagauaucgacgccguuaucgccaucggcgugcugaucagaggcgccacaccucacuucgacuauaucgccagcgagguguccaaaggccuggccgaucugagccuggaacugagaaagcccaucaccuucggcgugaucaccgcugacacacuggaacaggccauugagagagccggcaccaagcacggcaacaaaggaugggaagccgcucuguccgccaucgagauggccaaccuguucaagagccugcggugaggacuaguuauaagacugacuagcccgaugggccucccaacgggcccuccuccccuccuugcaccgagauuaauaaaaaaaaaaaaaaaaaaaaaaaaaaaaaaaaaaaaaaaaaaaaaaaaaaaaaaaaaaaaaaaaugcaucccccccccccccccccccccccccccccccaaaggcucuuuucagagccaccagaauu

SEQ ID NO: 13092 - RNA, 4141 nt, Artificial Sequence
  SARS-CoV-2/Wuhan/WIV05/2019__EPI_ISL_402128 spike protein mRNA gc mod (1-1147)(K986P_V987P_ H1048Q_H1064N_ H1083N_H1101N) LumSynth construct
aggagaaagcuuaccauguucguguuucuggugcugcugccccugguguccagccagugugugaaccugaccaccagaacacagcugccuccagccuacaccaacagcuucaccagaggcguguacuaccccgacaagguguucagauccagcgugcugcacucuacccaggaccuguuccugccuuucuucagcaacgugaccugguuccacgccauccacguguccggcaccaauggcaccaagagauucgacaaccccgugcugcccuucaacgacgggguguacuuugccagcaccgagaaguccaacaucaucagaggcuggaucuucggcaccacacuggacagcaagacccagagccugcugaucgugaacaacgccaccaacguggucaucaaagugugcgaguuccaguucugcaacgaccccuuccugggcgucuacuaccacaagaacaacaagagcuggauggaaagcgaguuccggguguacagcagcgccaacaacugcaccuucgaguacgugucccagccuuuccugauggaccuggaaggcaagcagggcaacuucaagaaccugcgcgaguucguguucaagaacaucgacggcuacuucaaaaucuacagcaagcacaccccuaucaaccucgugcgggaucugccucagggcuucucugcucuggaaccccugguggaucugcccaucggcaucaacaucacccgguuucagacacugcuggcccugcacagaagcuaccugacaccuggcgauagcagcagcggauggacagcuggugccgccgcuuacuaugugggcuaccugcagccuagaaccuuccugcugaaguacaacgagaacggcaccaucaccgacgccguggauugugcucuggauccucugagcgagacaaagugcacccugaaguccuucaccguggaaaagggcaucuaccagaccagcaacuuccgggugcagcccaccgaauccaucgugcgguuccccaauaucaccaaucugugccccuucggcgagguguucaaugccaccagauucgccucuguguacgccuggaaccggaagcggaucagcaauugcguggccgacuacuccgugcuguacaacuccgccagcuucagcaccuucaagugcuacggcguguccccuaccaagcugaacgaccugugcuucacaaacguguacgccgacagcuucgugauccggggagaugaagugcggcagauugccccuggacagacaggcaagaucgccgacuacaacuacaagcugcccgacgacuucaccggcugugugauugccuggaacagcaacaaccuggacuccaaagucggcggcaacuacaauuaccuguaccggcuguuccggaaguccaaucugaagcccuucgagcgggacaucagcaccgaaaucuaucaggccggcagcaccccuugcaacggcguggaaggcuucaacugcuacuucccacugcaguccuacggcuuucagcccacaaauggcgugggcuaucagcccuacagagugguggugcugagcuucgaacugcugcaugcuccugccacagugugcggcccuaagaaaagcaccaaucucgugaagaacaaaugcgugaacuucaacuucaacggccugaccggcaccggcgugcugacagagagcaacaagaaguuccugccauuccagcaguuuggccgggauaucgccgauaccacagacgccguuagagauccccagacacuggaaauccuggacaucaccccaugcagcuucggcggagugucugugaucaccccuggcaccaacaccagcaaucagguggcagugcuguaccaggacgugaacuguaccgaagugcccguggccauucacgccgaucagcugacaccuacauggcggguguacuccaccggcagcaauguguuucagaccagagccggcugucugaucggagccgagcacgugaacaauagcuacgagugcgacauccccaucggcgcuggcaucugugccagcuaccagacacagacaaacagccccagacgggcuagaagcguggccagccagagcaucauugccuacacaaugucucugggcgccgagaacagcguggccuacuccaacaacucuaucgcuauccccaccaacuucaccaucagcgugaccaccgagauccugccuguguccaugaccaagaccagcguggacugcaccauguacaucugcggcgauuccaccgagugcuccaaccugcugcugcaguacggcagcuucugcacccagcugaauagagcccugacagggaucgccguggaacaggacaagaacacccaagagguguucgcccaagugaagcaaaucuacaagaccccuccuaucaaggacuucggcggcuucaauuucagccagauucugcccgauccuagcaagcccagcaagcggagcuucaucgaggaccugcuguucaacaaagugacacuggccgacgccggcuucaucaagcaguauggcgauugucugggcgacauugccgccagggaucugauuugcgcccagaaguuuaacggacugacagugcugccuccucugcugaccgaugagaugaucgcccaguacacaucugcccugcuggccggcacaaucacaagcggcuggacauuuggagcuggcgccgcucugcagauccccuuugcuaugcagauggccuaccgguucaacggcaucggagugacccagaaugugcuguacgagaaccagaagcugaucgccaaccaguucaacagcgccaucggcaagauccaggacagccugagcagcacagcaagcgcccugggaaagcugcaggacguggucaaccagaaugcccaggcacugaacacccuggucaagcagcuguccuccaacuucggcgccaucagcucugugcugaacgauauccugagcagacuggacccuccugaggccgaggugcagaucgacagacugaucacaggcagacugcagagccuccagacauacgugacccagcagcugaucagagccgccgagauuagagccucugccaaucuggccgccaccaagaugucugagugugugcugggccagagcaagagaguggacuuuugcggcaagggcuaccagcugaugagcuucccucagucugccccucacggcgugguguuucugaacgugacauaugugcccgcucaagagaagaauuucaccaccgcuccagccaucugcaacgacggcaaagcccacuuuccuagagaaggcguguucguguccaacggcaccaacugguucgugacacagcggaacuucuacgagccccagaucaucaccaccgacaacaccuucgugucuggcaacugcgacguugugaucggcauugugaacaauaccguguacgacccucugcagcccgagcuggacagcggcggaggaucuggcggaggacagaucuacgagggcaagcugacagccgagggccugagauuuggaaucguggccagccgguucaaucacgcccugguggauagacugguggaaggcgccaucgaugccauugucagacacggcggcagagaagaggacaucacccucguuagagugcccggcucuugggagauuccuguggcugcuggcgagcuggcccggaaagaagauaucgacgccguuaucgccaucggcgugcugaucagaggcgccacaccucacuucgacuauaucgccagcgagguguccaaaggccuggccgaucugagccuggaacugagaaagcccaucaccuucggcgugaucaccgcugacacacuggaacaggccauugagagagccggcaccaagcacggcaacaaaggaugggaagccgcucuguccgccaucgagauggccaaccuguucaagagccugcggugaggacuaguuauaagacugacuagcccgaugggccucccaacgggcccuccuccccuccuugcaccgagauuaauaaaaaaaaaaaaaaaaaaaaaaaaaaaaaaaaaaaaaaaaaaaaaaaaaaaaaaaaaaaaaaaaugcaucccccccccccccccccccccccccccccccaaaggcucuuuucagagccaccagaauu

SEQ ID NO: 13093 - RNA, 4141 nt, Artificial Sequence
  SARS-CoV-2/Wuhan/WIV05/2019__EPI_ISL_402128 spike protein mRNA gc mod (1-1147)(I712C_T1077C) LumSynth construct
aggagaaagcuuaccauguucguguuucuggugcugcugccccugguguccagccagugugugaaccugaccaccagaacacagcugccuccagccuacaccaacagcuucaccagaggcguguacuaccccgacaagguguucagauccagcgugcugcacucuacccaggaccuguuccugccuuucuucagcaacgugaccugguuccacgccauccacguguccggcaccaauggcaccaagagauucgacaaccccgugcugcccuucaacgacgggguguacuuugccagcaccgagaaguccaacaucaucagaggcuggaucuucggcaccacacuggacagcaagacccagagccugcugaucgugaacaacgccaccaacguggucaucaaagugugcgaguuccaguucugcaacgaccccuuccugggcgucuacuaccacaagaacaacaagagcuggauggaaagcgaguuccggguguacagcagcgccaacaacugcaccuucgaguacgugucccagccuuuccugauggaccuggaaggcaagcagggcaacuucaagaaccugcgcgaguucguguucaagaacaucgacggcuacuucaaaaucuacagcaagcacaccccuaucaaccucgugcgggaucugccucagggcuucucugcucuggaaccccugguggaucugcccaucggcaucaacaucacccgguuucagacacugcuggcccugcacagaagcuaccugacaccuggcgauagcagcagcggauggacagcuggugccgccgcuuacuaugugggcuaccugcagccuagaaccuuccugcugaaguacaacgagaacggcaccaucaccgacgccguggauugugcucuggauccucugagcgagacaaagugcacccugaaguccuucaccguggaaaagggcaucuaccagaccagcaacuuccgggugcagcccaccgaauccaucgugcgguuccccaauaucaccaaucugugccccuucggcgagguguucaaugccaccagauucgccucuguguacgccuggaaccggaagcggaucagcaauugcguggccgacuacuccgugcuguacaacuccgccagcuucagcaccuucaagugcuacggcguguccccuaccaagcugaacgaccugugcuucacaaacguguacgccgacagcuucgugauccggggagaugaagugcggcagauugccccuggacagacaggcaagaucgccgacuacaacuacaagcugcccgacgacuucaccggcugugugauugccuggaacagcaacaaccuggacuccaaagucggcggcaacuacaauuaccuguaccggcuguuccggaaguccaaucugaagcccuucgagcgggacaucagcaccgaaaucuaucaggccggcagcaccccuugcaacggcguggaaggcuucaacugcuacuucccacugcaguccuacggcuuucagcccacaaauggcgugggcuaucagcccuacagagugguggugcugagcuucgaacugcugcaugcuccugccacagugugcggcccuaagaaaagcaccaaucucgugaagaacaaaugcgugaacuucaacuucaacggccugaccggcaccggcgugcugacagagagcaacaagaaguuccugccauuccagcaguuuggccgggauaucgccgauaccacagacgccguuagagauccccagacacuggaaauccuggacaucaccccaugcagcuucggcggagugucugugaucaccccuggcaccaacaccagcaaucagguggcagugcuguaccaggacgugaacuguaccgaagugcccguggccauucacgccgaucagcugacaccuacauggcggguguacuccaccggcagcaauguguuucagaccagagccggcugucugaucggagccgagcacgugaacaauagcuacgagugcgacauccccaucggcgcuggcaucugugccagcuaccagacacagacaaacagccccagacgggcuagaagcguggccagccagagcaucauugccuacacaaugucucugggcgccgagaacagcguggccuacuccaacaacucuugcgcuauccccaccaacuucaccaucagcgugaccaccgagauccugccuguguccaugaccaagaccagcguggacugcaccauguacaucugcggcgauuccaccgagugcuccaaccugcugcugcaguacggcagcuucugcacccagcugaauagagcccugacagggaucgccguggaacaggacaagaacacccaagagguguucgcccaagugaagcaaaucuacaagaccccuccuaucaaggacuucggcggcuucaauuucagccagauucugcccgauccuagcaagcccagcaagcggagcuucaucgaggaccugcuguucaacaaagugacacuggccgacgccggcuucaucaagcaguauggcgauugucugggcgacauugccgccagggaucugauuugcgcccagaaguuuaacggacugacagugcugccuccucugcugaccgaugagaugaucgcccaguacacaucugcccugcuggccggcacaaucacaagcggcuggacauuuggagcuggcgccgcucugcagauccccuuugcuaugcagauggccuaccgguucaacggcaucggagugacccagaaugugcuguacgagaaccagaagcugaucgccaaccaguucaacagcgccaucggcaagauccaggacagccugagcagcacagcaagcgcccugggaaagcugcaggacguggucaaccagaaugcccaggcacugaacacccuggucaagcagcuguccuccaacuucggcgccaucagcucugugcugaacgauauccugagcagacuggacaaggucgaggccgaggugcagaucgacagacugaucacaggcagacugcagagccuccagacauacgugacccagcagcugaucagagccgccgagauuagagccucugccaaucuggccgccaccaagaugucugagugugugcugggccagagcaagagaguggacuuuugcggcaagggcuaccaccugaugagcuucccucagucugccccucacggcgugguguuucugcacgugacauaugugcccgcucaagagaagaauuucaccugugcuccagccaucugccacgacggcaaagcccacuuuccuagagaaggcguguucguguccaacggcacccauugguucgugacacagcggaacuucuacgagccccagaucaucaccaccgacaacaccuucgugucuggcaacugcgacguugugaucggcauugugaacaauaccguguacgacccucugcagcccgagcuggacagcggcggaggaucuggcggaggacagaucuacgagggcaagcugacagccgagggccugagauuuggaaucguggccagccgguucaaucacgcccugguggauagacugguggaaggcgccaucgaugccauugucagacacggcggcagagaagaggacaucacccucguuagagugcccggcucuugggagauuccuguggcugcuggcgagcuggcccggaaagaagauaucgacgccguuaucgccaucggcgugcugaucagaggcgccacaccucacuucgacuauaucgccagcgagguguccaaaggccuggccgaucugagccuggaacugagaaagcccaucaccuucggcgugaucaccgcugacacacuggaacaggccauugagagagccggcaccaagcacggcaacaaaggaugggaagccgcucuguccgccaucgagauggccaaccuguucaagagccugcggugaggacuaguuauaagacugacuagcccgaugggccucccaacgggcccuccuccccuccuugcaccgagauuaauaaaaaaaaaaaaaaaaaaaaaaaaaaaaaaaaaaaaaaaaaaaaaaaaaaaaaaaaaaaaaaaaugcaucccccccccccccccccccccccccccccccaaaggcucuuuucagagccaccagaauu

SEQ ID NO: 13094 - RNA, 4141 nt, Artificial Sequence
  SARS-CoV-2/Wuhan/WIV05/2019__EPI_ISL_402128 spike protein mRNA gc mod (1-1147)(I714C_Y1110C) LumSynth construct
aggagaaagcuuaccauguucguguuucuggugcugcugccccugguguccagccagugugugaaccugaccaccagaacacagcugccuccagccuacaccaacagcuucaccagaggcguguacuaccccgacaagguguucagauccagcgugcugcacucuacccaggaccuguuccugccuuucuucagcaacgugaccugguuccacgccauccacguguccggcaccaauggcaccaagagauucgacaaccccgugcugcccuucaacgacgggguguacuuugccagcaccgagaaguccaacaucaucagaggcuggaucuucggcaccacacuggacagcaagacccagagccugcugaucgugaacaacgccaccaacguggucaucaaagugugcgaguuccaguucugcaacgaccccuuccugggcgucuacuaccacaagaacaacaagagcuggauggaaagcgaguuccggguguacagcagcgccaacaacugcaccuucgaguacgugucccagccuuuccugauggaccuggaaggcaagcagggcaacuucaagaaccugcgcgaguucguguucaagaacaucgacggcuacuucaaaaucuacagcaagcacaccccuaucaaccucgugcgggaucugccucagggcuucucugcucuggaaccccugguggaucugcccaucggcaucaacaucacccgguuucagacacugcuggcccugcacagaagcuaccugacaccuggcgauagcagcagcggauggacagcuggugccgccgcuuacuaugugggcuaccugcagccuagaaccuuccugcugaaguacaacgagaacggcaccaucaccgacgccguggauugugcucuggauccucugagcgagacaaagugcacccugaaguccuucaccguggaaaagggcaucuaccagaccagcaacuuccgggugcagcccaccgaauccaucgugcgguuccccaauaucaccaaucugugccccuucggcgagguguucaaugccaccagauucgccucuguguacgccuggaaccggaagcggaucagcaauugcguggccgacuacuccgugcuguacaacuccgccagcuucagcaccuucaagugcuacggcguguccccuaccaagcugaacgaccugugcuucacaaacguguacgccgacagcuucgugauccggggagaugaagugcggcagauugccccuggacagacaggcaagaucgccgacuacaacuacaagcugcccgacgacuucaccggcugugugauugccuggaacagcaacaaccuggacuccaaagucggcggcaacuacaauuaccuguaccggcuguuccggaaguccaaucugaagcccuucgagcgggacaucagcaccgaaaucuaucaggccggcagcaccccuugcaacggcguggaaggcuucaacugcuacuucccacugcaguccuacggcuuucagcccacaaauggcgugggcuaucagcccuacagagugguggugcugagcuucgaacugcugcaugcuccugccacagugugcggcccuaagaaaagcaccaaucucgugaagaacaaaugcgugaacuucaacuucaacggccugaccggcaccggcgugcugacagagagcaacaagaaguuccugccauuccagcaguuuggccgggauaucgccgauaccacagacgccguuagagauccccagacacuggaaauccuggacaucaccccaugcagcuucggcggagugucugugaucaccccuggcaccaacaccagcaaucagguggcagugcuguaccaggacgugaacuguaccgaagugcccguggccauucacgccgaucagcugacaccuacauggcggguguacuccaccggcagcaauguguuucagaccagagccggcugucugaucggagccgagcacgugaacaauagcuacgagugcgacauccccaucggcgcuggcaucugugccagcuaccagacacagacaaacagccccagacgggcuagaagcguggccagccagagcaucauugccuacacaaugucucugggcgccgagaacagcguggccuacuccaacaacucuaucgcuugccccaccaacuucaccaucagcgugaccaccgagauccugccuguguccaugaccaagaccagcguggacugcaccauguacaucugcggcgauuccaccgagugcuccaaccugcugcugcaguacggcagcuucugcacccagcugaauagagcccugacagggaucgccguggaacaggacaagaacacccaagagguguucgcccaagugaagcaaaucuacaagaccccuccuaucaaggacuucggcggcuucaauuucagccagauucugcccgauccuagcaagcccagcaagcggagcuucaucgaggaccugcuguucaacaaagugacacuggccgacgccggcuucaucaagcaguauggcgauugucugggcgacauugccgccagggaucugauuugcgcccagaaguuuaacggacugacagugcugccuccucugcugaccgaugagaugaucgcccaguacacaucugcccugcuggccggcacaaucacaagcggcuggacauuuggagcuggcgccgcucugcagauccccuuugcuaugcagauggccuaccgguucaacggcaucggagugacccagaaugugcuguacgagaaccagaagcugaucgccaaccaguucaacagcgccaucggcaagauccaggacagccugagcagcacagcaagcgcccugggaaagcugcaggacguggucaaccagaaugcccaggcacugaacacccuggucaagcagcuguccuccaacuucggcgccaucagcucugugcugaacgauauccugagcagacuggacaaggucgaggccgaggugcagaucgacagacugaucacaggcagacugcagagccuccagacauacgugacccagcagcugaucagagccgccgagauuagagccucugccaaucuggccgccaccaagaugucugagugugugcugggccagagcaagagaguggacuuuugcggcaagggcuaccaccugaugagcuucccucagucugccccucacggcgugguguuucugcacgugacauaugugcccgcucaagagaagaauuucaccaccgcuccagccaucugccacgacggcaaagcccacuuuccuagagaaggcguguucguguccaacggcacccauugguucgugacacagcggaacuucugugagccccagaucaucaccaccgacaacaccuucgugucuggcaacugcgacguugugaucggcauugugaacaauaccguguacgacccucugcagcccgagcuggacagcggcggaggaucuggcggaggacagaucuacgagggcaagcugacagccgagggccugagauuuggaaucguggccagccgguucaaucacgcccugguggauagacugguggaaggcgccaucgaugccauugucagacacggcggcagagaagaggacaucacccucguuagagugcccggcucuugggagauuccuguggcugcuggcgagcuggcccggaaagaagauaucgacgccguuaucgccaucggcgugcugaucagaggcgccacaccucacuucgacuauaucgccagcgagguguccaaaggccuggccgaucugagccuggaacugagaaagcccaucaccuucggcgugaucaccgcugacacacuggaacaggccauugagagagccggcaccaagcacggcaacaaaggaugggaagccgcucuguccgccaucgagauggccaaccuguucaagagccugcggugaggacuaguuauaagacugacuagcccgaugggccucccaacgggcccuccuccccuccuugcaccgagauuaauaaaaaaaaaaaaaaaaaaaaaaaaaaaaaaaaaaaaaaaaaaaaaaaaaaaaaaaaaaaaaaaaugcaucccccccccccccccccccccccccccccccaaaggcucuuuucagagccaccagaauu

SEQ ID NO: 13095 - RNA, 4141 nt, Artificial Sequence
  SARS-CoV-2/Wuhan/WIV05/2019__EPI_ISL_402128 spike protein mRNA gc mod (1-1147)(P715C_P1069C) LumSynth construct
aggagaaagcuuaccauguucguguuucuggugcugcugccccugguguccagccagugugugaaccugaccaccagaacacagcugccuccagccuacaccaacagcuucaccagaggcguguacuaccccgacaagguguucagauccagcgugcugcacucuacccaggaccuguuccugccuuucuucagcaacgugaccugguuccacgccauccacguguccggcaccaauggcaccaagagauucgacaaccccgugcugcccuucaacgacgggguguacuuugccagcaccgagaaguccaacaucaucagaggcuggaucuucggcaccacacuggacagcaagacccagagccugcugaucgugaacaacgccaccaacguggucaucaaagugugcgaguuccaguucugcaacgaccccuuccugggcgucuacuaccacaagaacaacaagagcuggauggaaagcgaguuccggguguacagcagcgccaacaacugcaccuucgaguacgugucccagccuuuccugauggaccuggaaggcaagcagggcaacuucaagaaccugcgcgaguucguguucaagaacaucgacggcuacuucaaaaucuacagcaagcacaccccuaucaaccucgugcgggaucugccucagggcuucucugcucuggaaccccugguggaucugcccaucggcaucaacaucacccgguuucagacacugcuggcccugcacagaagcuaccugacaccuggcgauagcagcagcggauggacagcuggugccgccgcuuacuaugugggcuaccugcagccuagaaccuuccugcugaaguacaacgagaacggcaccaucaccgacgccguggauugugcucuggauccucugagcgagacaaagugcacccugaaguccuucaccguggaaaagggcaucuaccagaccagcaacuuccgggugcagcccaccgaauccaucgugcgguuccccaauaucaccaaucugugccccuucggcgagguguucaaugccaccagauucgccucuguguacgccuggaaccggaagcggaucagcaauugcguggccgacuacuccgugcuguacaacuccgccagcuucagcaccuucaagugcuacggcguguccccuaccaagcugaacgaccugugcuucacaaacguguacgccgacagcuucgugauccggggagaugaagugcggcagauugccccuggacagacaggcaagaucgccgacuacaacuacaagcugcccgacgacuucaccggcugugugauugccuggaacagcaacaaccuggacuccaaagucggcggcaacuacaauuaccuguaccggcuguuccggaaguccaaucugaagcccuucgagcgggacaucagcaccgaaaucuaucaggccggcagcaccccuugcaacggcguggaaggcuucaacugcuacuucccacugcaguccuacggcuuucagcccacaaauggcgugggcuaucagcccuacagagugguggugcugagcuucgaacugcugcaugcuccugccacagugugcggcccuaagaaaagcaccaaucucgugaagaacaaaugcgugaacuucaacuucaacggccugaccggcaccggcgugcugacagagagcaacaagaaguuccugccauuccagcaguuuggccgggauaucgccgauaccacagacgccguuagagauccccagacacuggaaauccuggacaucaccccaugcagcuucggcggagugucugugaucaccccuggcaccaacaccagcaaucagguggcagugcuguaccaggacgugaacuguaccgaagugcccguggccauucacgccgaucagcugacaccuacauggcggguguacuccaccggcagcaauguguuucagaccagagccggcugucugaucggagccgagcacgugaacaauagcuacgagugcgacauccccaucggcgcuggcaucugugccagcuaccagacacagacaaacagccccagacgggcuagaagcguggccagccagagcaucauugccuacacaaugucucugggcgccgagaacagcguggccuacuccaacaacucuaucgcuaucugcaccaacuucaccaucagcgugaccaccgagauccugccuguguccaugaccaagaccagcguggacugcaccauguacaucugcggcgauuccaccgagugcuccaaccugcugcugcaguacggcagcuucugcacccagcugaauagagcccugacagggaucgccguggaacaggacaagaacacccaagagguguucgcccaagugaagcaaaucuacaagaccccuccuaucaaggacuucggcggcuucaauuucagccagauucugcccgauccuagcaagcccagcaagcggagcuucaucgaggaccugcuguucaacaaagugacacuggccgacgccggcuucaucaagcaguauggcgauugucugggcgacauugccgccagggaucugauuugcgcccagaaguuuaacggacugacagugcugccuccucugcugaccgaugagaugaucgcccaguacacaucugcccugcuggccggcacaaucacaagcggcuggacauuuggagcuggcgccgcucugcagauccccuuugcuaugcagauggccuaccgguucaacggcaucggagugacccagaaugugcuguacgagaaccagaagcugaucgccaaccaguucaacagcgccaucggcaagauccaggacagccugagcagcacagcaagcgcccugggaaagcugcaggacguggucaaccagaaugcccaggcacugaacacccuggucaagcagcuguccuccaacuucggcgccaucagcucugugcugaacgauauccugagcagacuggacaaggucgaggccgaggugcagaucgacagacugaucacaggcagacugcagagccuccagacauacgugacccagcagcugaucagagccgccgagauuagagccucugccaaucuggccgccaccaagaugucugagugugugcugggccagagcaagagaguggacuuuugcggcaagggcuaccaccugaugagcuucccucagucugccccucacggcgugguguuucugcacgugacauaugugugugcucaagagaagaauuucaccaccgcuccagccaucugccacgacggcaaagcccacuuuccuagagaaggcguguucguguccaacggcacccauugguucgugacacagcggaacuucuacgagccccagaucaucaccaccgacaacaccuucgugucuggcaacugcgacguugugaucggcauugugaacaauaccguguacgacccucugcagcccgagcuggacagcggcggaggaucuggcggaggacagaucuacgagggcaagcugacagccgagggccugagauuuggaaucguggccagccgguucaaucacgcccugguggauagacugguggaaggcgccaucgaugccauugucagacacggcggcagagaagaggacaucacccucguuagagugcccggcucuugggagauuccuguggcugcuggcgagcuggcccggaaagaagauaucgacgccguuaucgccaucggcgugcugaucagaggcgccacaccucacuucgacuauaucgccagcgagguguccaaaggccuggccgaucugagccuggaacugagaaagcccaucaccuucggcgugaucaccgcugacacacuggaacaggccauugagagagccggcaccaagcacggcaacaaaggaugggaagccgcucuguccgccaucgagauggccaaccuguucaagagccugcggugaggacuaguuauaagacugacuagcccgaugggccucccaacgggcccuccuccccuccuugcaccgagauuaauaaaaaaaaaaaaaaaaaaaaaaaaaaaaaaaaaaaaaaaaaaaaaaaaaaaaaaaaaaaaaaaaugcaucccccccccccccccccccccccccccccccaaaggcucuuuucagagccaccagaauu

SEQ ID NO: 13096 - RNA, 4141 nt, Artificial Sequence
  SARS-CoV-2/Wuhan/WIV05/2019__EPI_ISL_402128 spike protein mRNA gc mod (1-1147)(G889C_L1034C) LumSynth construct
aggagaaagcuuaccauguucguguuucuggugcugcugccccugguguccagccagugugugaaccugaccaccagaacacagcugccuccagccuacaccaacagcuucaccagaggcguguacuaccccgacaagguguucagauccagcgugcugcacucuacccaggaccuguuccugccuuucuucagcaacgugaccugguuccacgccauccacguguccggcaccaauggcaccaagagauucgacaaccccgugcugcccuucaacgacgggguguacuuugccagcaccgagaaguccaacaucaucagaggcuggaucuucggcaccacacuggacagcaagacccagagccugcugaucgugaacaacgccaccaacguggucaucaaagugugcgaguuccaguucugcaacgaccccuuccugggcgucuacuaccacaagaacaacaagagcuggauggaaagcgaguuccggguguacagcagcgccaacaacugcaccuucgaguacgugucccagccuuuccugauggaccuggaaggcaagcagggcaacuucaagaaccugcgcgaguucguguucaagaacaucgacggcuacuucaaaaucuacagcaagcacaccccuaucaaccucgugcgggaucugccucagggcuucucugcucuggaaccccugguggaucugcccaucggcaucaacaucacccgguuucagacacugcuggcccugcacagaagcuaccugacaccuggcgauagcagcagcggauggacagcuggugccgccgcuuacuaugugggcuaccugcagccuagaaccuuccugcugaaguacaacgagaacggcaccaucaccgacgccguggauugugcucuggauccucugagcgagacaaagugcacccugaaguccuucaccguggaaaagggcaucuaccagaccagcaacuuccgggugcagcccaccgaauccaucgugcgguuccccaauaucaccaaucugugccccuucggcgagguguucaaugccaccagauucgccucuguguacgccuggaaccggaagcggaucagcaauugcguggccgacuacuccgugcuguacaacuccgccagcuucagcaccuucaagugcuacggcguguccccuaccaagcugaacgaccugugcuucacaaacguguacgccgacagcuucgugauccggggagaugaagugcggcagauugccccuggacagacaggcaagaucgccgacuacaacuacaagcugcccgacgacuucaccggcugugugauugccuggaacagcaacaaccuggacuccaaagucggcggcaacuacaauuaccuguaccggcuguuccggaaguccaaucugaagcccuucgagcgggacaucagcaccgaaaucuaucaggccggcagcaccccuugcaacggcguggaaggcuucaacugcuacuucccacugcaguccuacggcuuucagcccacaaauggcgugggcuaucagcccuacagagugguggugcugagcuucgaacugcugcaugcuccugccacagugugcggcccuaagaaaagcaccaaucucgugaagaacaaaugcgugaacuucaacuucaacggccugaccggcaccggcgugcugacagagagcaacaagaaguuccugccauuccagcaguuuggccgggauaucgccgauaccacagacgccguuagagauccccagacacuggaaauccuggacaucaccccaugcagcuucggcggagugucugugaucaccccuggcaccaacaccagcaaucagguggcagugcuguaccaggacgugaacuguaccgaagugcccguggccauucacgccgaucagcugacaccuacauggcggguguacuccaccggcagcaauguguuucagaccagagccggcugucugaucggagccgagcacgugaacaauagcuacgagugcgacauccccaucggcgcuggcaucugugccagcuaccagacacagacaaacagccccagacgggcuagaagcguggccagccagagcaucauugccuacacaaugucucugggcgccgagaacagcguggccuacuccaacaacucuaucgcuauccccaccaacuucaccaucagcgugaccaccgagauccugccuguguccaugaccaagaccagcguggacugcaccauguacaucugcggcgauuccaccgagugcuccaaccugcugcugcaguacggcagcuucugcacccagcugaauagagcccugacagggaucgccguggaacaggacaagaacacccaagagguguucgcccaagugaagcaaaucuacaagaccccuccuaucaaggacuucggcggcuucaauuucagccagauucugcccgauccuagcaagcccagcaagcggagcuucaucgaggaccugcuguucaacaaagugacacuggccgacgccggcuucaucaagcaguauggcgauugucugggcgacauugccgccagggaucugauuugcgcccagaaguuuaacggacugacagugcugccuccucugcugaccgaugagaugaucgcccaguacacaucugcccugcuggccggcacaaucacaagcggcuggacauuuugcgcuggcgccgcucugcagauccccuuugcuaugcagauggccuaccgguucaacggcaucggagugacccagaaugugcuguacgagaaccagaagcugaucgccaaccaguucaacagcgccaucggcaagauccaggacagccugagcagcacagcaagcgcccugggaaagcugcaggacguggucaaccagaaugcccaggcacugaacacccuggucaagcagcuguccuccaacuucggcgccaucagcucugugcugaacgauauccugagcagacuggacaaggucgaggccgaggugcagaucgacagacugaucacaggcagacugcagagccuccagacauacgugacccagcagcugaucagagccgccgagauuagagccucugccaaucuggccgccaccaagaugucugaguguguguguggccagagcaagagaguggacuuuugcggcaagggcuaccaccugaugagcuucccucagucugccccucacggcgugguguuucugcacgugacauaugugcccgcucaagagaagaauuucaccaccgcuccagccaucugccacgacggcaaagcccacuuuccuagagaaggcguguucguguccaacggcacccauugguucgugacacagcggaacuucuacgagccccagaucaucaccaccgacaacaccuucgugucuggcaacugcgacguugugaucggcauugugaacaauaccguguacgacccucugcagcccgagcuggacagcggcggaggaucuggcggaggacagaucuacgagggcaagcugacagccgagggccugagauuuggaaucguggccagccgguucaaucacgcccugguggauagacugguggaaggcgccaucgaugccauugucagacacggcggcagagaagaggacaucacccucguuagagugcccggcucuugggagauuccuguggcugcuggcgagcuggcccggaaagaagauaucgacgccguuaucgccaucggcgugcugaucagaggcgccacaccucacuucgacuauaucgccagcgagguguccaaaggccuggccgaucugagccuggaacugagaaagcccaucaccuucggcgugaucaccgcugacacacuggaacaggccauugagagagccggcaccaagcacggcaacaaaggaugggaagccgcucuguccgccaucgagauggccaaccuguucaagagccugcggugaggacuaguuauaagacugacuagcccgaugggccucccaacgggcccuccuccccuccuugcaccgagauuaauaaaaaaaaaaaaaaaaaaaaaaaaaaaaaaaaaaaaaaaaaaaaaaaaaaaaaaaaaaaaaaaaugcaucccccccccccccccccccccccccccccccaaaggcucuuuucagagccaccagaauu

SEQ ID NO: 13097 - RNA, 4141 nt, Artificial Sequence
  SARS-CoV-2/Wuhan/WIV05/2019__EPI_ISL_402128 spike protein mRNA gc mod (1-1147)(I909C_Y1047C) LumSynth construct
aggagaaagcuuaccauguucguguuucuggugcugcugccccugguguccagccagugugugaaccugaccaccagaacacagcugccuccagccuacaccaacagcuucaccagaggcguguacuaccccgacaagguguucagauccagcgugcugcacucuacccaggaccuguuccugccuuucuucagcaacgugaccugguuccacgccauccacguguccggcaccaauggcaccaagagauucgacaaccccgugcugcccuucaacgacgggguguacuuugccagcaccgagaaguccaacaucaucagaggcuggaucuucggcaccacacuggacagcaagacccagagccugcugaucgugaacaacgccaccaacguggucaucaaagugugcgaguuccaguucugcaacgaccccuuccugggcgucuacuaccacaagaacaacaagagcuggauggaaagcgaguuccggguguacagcagcgccaacaacugcaccuucgaguacgugucccagccuuuccugauggaccuggaaggcaagcagggcaacuucaagaaccugcgcgaguucguguucaagaacaucgacggcuacuucaaaaucuacagcaagcacaccccuaucaaccucgugcgggaucugccucagggcuucucugcucuggaaccccugguggaucugcccaucggcaucaacaucacccgguuucagacacugcuggcccugcacagaagcuaccugacaccuggcgauagcagcagcggauggacagcuggugccgccgcuuacuaugugggcuaccugcagccuagaaccuuccugcugaaguacaacgagaacggcaccaucaccgacgccguggauugugcucuggauccucugagcgagacaaagugcacccugaaguccuucaccguggaaaagggcaucuaccagaccagcaacuuccgggugcagcccaccgaauccaucgugcgguuccccaauaucaccaaucugugccccuucggcgagguguucaaugccaccagauucgccucuguguacgccuggaaccggaagcggaucagcaauugcguggccgacuacuccgugcuguacaacuccgccagcuucagcaccuucaagugcuacggcguguccccuaccaagcugaacgaccugugcuucacaaacguguacgccgacagcuucgugauccggggagaugaagugcggcagauugccccuggacagacaggcaagaucgccgacuacaacuacaagcugcccgacgacuucaccggcugugugauugccuggaacagcaacaaccuggacuccaaagucggcggcaacuacaauuaccuguaccggcuguuccggaaguccaaucugaagcccuucgagcgggacaucagcaccgaaaucuaucaggccggcagcaccccuugcaacggcguggaaggcuucaacugcuacuucccacugcaguccuacggcuuucagcccacaaauggcgugggcuaucagcccuacagagugguggugcugagcuucgaacugcugcaugcuccugccacagugugcggcccuaagaaaagcaccaaucucgugaagaacaaaugcgugaacuucaacuucaacggccugaccggcaccggcgugcugacagagagcaacaagaaguuccugccauuccagcaguuuggccgggauaucgccgauaccacagacgccguuagagauccccagacacuggaaauccuggacaucaccccaugcagcuucggcggagugucugugaucaccccuggcaccaacaccagcaaucagguggcagugcuguaccaggacgugaacuguaccgaagugcccguggccauucacgccgaucagcugacaccuacauggcggguguacuccaccggcagcaauguguuucagaccagagccggcugucugaucggagccgagcacgugaacaauagcuacgagugcgacauccccaucggcgcuggcaucugugccagcuaccagacacagacaaacagccccagacgggcuagaagcguggccagccagagcaucauugccuacacaaugucucugggcgccgagaacagcguggccuacuccaacaacucuaucgcuauccccaccaacuucaccaucagcgugaccaccgagauccugccuguguccaugaccaagaccagcguggacugcaccauguacaucugcggcgauuccaccgagugcuccaaccugcugcugcaguacggcagcuucugcacccagcugaauagagcccugacagggaucgccguggaacaggacaagaacacccaagagguguucgcccaagugaagcaaaucuacaagaccccuccuaucaaggacuucggcggcuucaauuucagccagauucugcccgauccuagcaagcccagcaagcggagcuucaucgaggaccugcuguucaacaaagugacacuggccgacgccggcuucaucaagcaguauggcgauugucugggcgacauugccgccagggaucugauuugcgcccagaaguuuaacggacugacagugcugccuccucugcugaccgaugagaugaucgcccaguacacaucugcccugcuggccggcacaaucacaagcggcuggacauuuggagcuggcgccgcucugcagauccccuuugcuaugcagauggccuaccgguucaacggcugcggagugacccagaaugugcuguacgagaaccagaagcugaucgccaaccaguucaacagcgccaucggcaagauccaggacagccugagcagcacagcaagcgcccugggaaagcugcaggacguggucaaccagaaugcccaggcacugaacacccuggucaagcagcuguccuccaacuucggcgccaucagcucugugcugaacgauauccugagcagacuggacaaggucgaggccgaggugcagaucgacagacugaucacaggcagacugcagagccuccagacauacgugacccagcagcugaucagagccgccgagauuagagccucugccaaucuggccgccaccaagaugucugagugugugcugggccagagcaagagaguggacuuuugcggcaagggcugucaccugaugagcuucccucagucugccccucacggcgugguguuucugcacgugacauaugugcccgcucaagagaagaauuucaccaccgcuccagccaucugccacgacggcaaagcccacuuuccuagagaaggcguguucguguccaacggcacccauugguucgugacacagcggaacuucuacgagccccagaucaucaccaccgacaacaccuucgugucuggcaacugcgacguugugaucggcauugugaacaauaccguguacgacccucugcagcccgagcuggacagcggcggaggaucuggcggaggacagaucuacgagggcaagcugacagccgagggccugagauuuggaaucguggccagccgguucaaucacgcccugguggauagacugguggaaggcgccaucgaugccauugucagacacggcggcagagaagaggacaucacccucguuagagugcccggcucuugggagauuccuguggcugcuggcgagcuggcccggaaagaagauaucgacgccguuaucgccaucggcgugcugaucagaggcgccacaccucacuucgacuauaucgccagcgagguguccaaaggccuggccgaucugagccuggaacugagaaagcccaucaccuucggcgugaucaccgcugacacacuggaacaggccauugagagagccggcaccaagcacggcaacaaaggaugggaagccgcucuguccgccaucgagauggccaaccuguucaagagccugcggugaggacuaguuauaagacugacuagcccgaugggccucccaacgggcccuccuccccuccuugcaccgagauuaauaaaaaaaaaaaaaaaaaaaaaaaaaaaaaaaaaaaaaaaaaaaaaaaaaaaaaaaaaaaaaaaaugcaucccccccccccccccccccccccccccccccaaaggcucuuuucagagccaccagaauu

SEQ ID NO: 13098 - RNA, 4141 nt, Artificial Sequence
  SARS-CoV-2/Wuhan/WIV05/2019__EPI_ISL_402128 spike protein mRNA gc mod (1-1147)(Q965C_S1003C) LumSynth construct
aggagaaagcuuaccauguucguguuucuggugcugcugccccugguguccagccagugugugaaccugaccaccagaacacagcugccuccagccuacaccaacagcuucaccagaggcguguacuaccccgacaagguguucagauccagcgugcugcacucuacccaggaccuguuccugccuuucuucagcaacgugaccugguuccacgccauccacguguccggcaccaauggcaccaagagauucgacaaccccgugcugcccuucaacgacgggguguacuuugccagcaccgagaaguccaacaucaucagaggcuggaucuucggcaccacacuggacagcaagacccagagccugcugaucgugaacaacgccaccaacguggucaucaaagugugcgaguuccaguucugcaacgaccccuuccugggcgucuacuaccacaagaacaacaagagcuggauggaaagcgaguuccggguguacagcagcgccaacaacugcaccuucgaguacgugucccagccuuuccugauggaccuggaaggcaagcagggcaacuucaagaaccugcgcgaguucguguucaagaacaucgacggcuacuucaaaaucuacagcaagcacaccccuaucaaccucgugcgggaucugccucagggcuucucugcucuggaaccccugguggaucugcccaucggcaucaacaucacccgguuucagacacugcuggcccugcacagaagcuaccugacaccuggcgauagcagcagcggauggacagcuggugccgccgcuuacuaugugggcuaccugcagccuagaaccuuccugcugaaguacaacgagaacggcaccaucaccgacgccguggauugugcucuggauccucugagcgagacaaagugcacccugaaguccuucaccguggaaaagggcaucuaccagaccagcaacuuccgggugcagcccaccgaauccaucgugcgguuccccaauaucaccaaucugugccccuucggcgagguguucaaugccaccagauucgccucuguguacgccuggaaccggaagcggaucagcaauugcguggccgacuacuccgugcuguacaacuccgccagcuucagcaccuucaagugcuacggcguguccccuaccaagcugaacgaccugugcuucacaaacguguacgccgacagcuucgugauccggggagaugaagugcggcagauugccccuggacagacaggcaagaucgccgacuacaacuacaagcugcccgacgacuucaccggcugugugauugccuggaacagcaacaaccuggacuccaaagucggcggcaacuacaauuaccuguaccggcuguuccggaaguccaaucugaagcccuucgagcgggacaucagcaccgaaaucuaucaggccggcagcaccccuugcaacggcguggaaggcuucaacugcuacuucccacugcaguccuacggcuuucagcccacaaauggcgugggcuaucagcccuacagagugguggugcugagcuucgaacugcugcaugcuccugccacagugugcggcccuaagaaaagcaccaaucucgugaagaacaaaugcgugaacuucaacuucaacggccugaccggcaccggcgugcugacagagagcaacaagaaguuccugccauuccagcaguuuggccgggauaucgccgauaccacagacgccguuagagauccccagacacuggaaauccuggacaucaccccaugcagcuucggcggagugucugugaucaccccuggcaccaacaccagcaaucagguggcagugcuguaccaggacgugaacuguaccgaagugcccguggccauucacgccgaucagcugacaccuacauggcggguguacuccaccggcagcaauguguuucagaccagagccggcugucugaucggagccgagcacgugaacaauagcuacgagugcgacauccccaucggcgcuggcaucugugccagcuaccagacacagacaaacagccccagacgggcuagaagcguggccagccagagcaucauugccuacacaaugucucugggcgccgagaacagcguggccuacuccaacaacucuaucgcuauccccaccaacuucaccaucagcgugaccaccgagauccugccuguguccaugaccaagaccagcguggacugcaccauguacaucugcggcgauuccaccgagugcuccaaccugcugcugcaguacggcagcuucugcacccagcugaauagagcccugacagggaucgccguggaacaggacaagaacacccaagagguguucgcccaagugaagcaaaucuacaagaccccuccuaucaaggacuucggcggcuucaauuucagccagauucugcccgauccuagcaagcccagcaagcggagcuucaucgaggaccugcuguucaacaaagugacacuggccgacgccggcuucaucaagcaguauggcgauugucugggcgacauugccgccagggaucugauuugcgcccagaaguuuaacggacugacagugcugccuccucugcugaccgaugagaugaucgcccaguacacaucugcccugcuggccggcacaaucacaagcggcuggacauuuggagcuggcgccgcucugcagauccccuuugcuaugcagauggccuaccgguucaacggcaucggagugacccagaaugugcuguacgagaaccagaagcugaucgccaaccaguucaacagcgccaucggcaagauccaggacagccugagcagcacagcaagcgcccugggaaagcugcaggacguggucaaccagaaugcccaggcacugaacacccuggucaagugccuguccuccaacuucggcgccaucagcucugugcugaacgauauccugagcagacuggacaaggucgaggccgaggugcagaucgacagacugaucacaggcagacugcagugucuccagacauacgugacccagcagcugaucagagccgccgagauuagagccucugccaaucuggccgccaccaagaugucugagugugugcugggccagagcaagagaguggacuuuugcggcaagggcuaccaccugaugagcuucccucagucugccccucacggcgugguguuucugcacgugacauaugugcccgcucaagagaagaauuucaccaccgcuccagccaucugccacgacggcaaagcccacuuuccuagagaaggcguguucguguccaacggcacccauugguucgugacacagcggaacuucuacgagccccagaucaucaccaccgacaacaccuucgugucuggcaacugcgacguugugaucggcauugugaacaauaccguguacgacccucugcagcccgagcuggacagcggcggaggaucuggcggaggacagaucuacgagggcaagcugacagccgagggccugagauuuggaaucguggccagccgguucaaucacgcccugguggauagacugguggaaggcgccaucgaugccauugucagacacggcggcagagaagaggacaucacccucguuagagugcccggcucuugggagauuccuguggcugcuggcgagcuggcccggaaagaagauaucgacgccguuaucgccaucggcgugcugaucagaggcgccacaccucacuucgacuauaucgccagcgagguguccaaaggccuggccgaucugagccuggaacugagaaagcccaucaccuucggcgugaucaccgcugacacacuggaacaggccauugagagagccggcaccaagcacggcaacaaaggaugggaagccgcucuguccgccaucgagauggccaaccuguucaagagccugcggugaggacuaguuauaagacugacuagcccgaugggccucccaacgggcccuccuccccuccuugcaccgagauuaauaaaaaaaaaaaaaaaaaaaaaaaaaaaaaaaaaaaaaaaaaaaaaaaaaaaaaaaaaaaaaaaaugcaucccccccccccccccccccccccccccccccaaaggcucuuuucagagccaccagaauu

SEQ ID NO: 13099 - RNA, 4141 nt, Artificial Sequence
  SARS-CoV-2/Wuhan/WIV05/2019__EPI_ISL_402128 spike protein mRNA gc mod (1-1147)(F970C_G999C) LumSynth construct
aggagaaagcuuaccauguucguguuucuggugcugcugccccugguguccagccagugugugaaccugaccaccagaacacagcugccuccagccuacaccaacagcuucaccagaggcguguacuaccccgacaagguguucagauccagcgugcugcacucuacccaggaccuguuccugccuuucuucagcaacgugaccugguuccacgccauccacguguccggcaccaauggcaccaagagauucgacaaccccgugcugcccuucaacgacgggguguacuuugccagcaccgagaaguccaacaucaucagaggcuggaucuucggcaccacacuggacagcaagacccagagccugcugaucgugaacaacgccaccaacguggucaucaaagugugcgaguuccaguucugcaacgaccccuuccugggcgucuacuaccacaagaacaacaagagcuggauggaaagcgaguuccggguguacagcagcgccaacaacugcaccuucgaguacgugucccagccuuuccugauggaccuggaaggcaagcagggcaacuucaagaaccugcgcgaguucguguucaagaacaucgacggcuacuucaaaaucuacagcaagcacaccccuaucaaccucgugcgggaucugccucagggcuucucugcucuggaaccccugguggaucugcccaucggcaucaacaucacccgguuucagacacugcuggcccugcacagaagcuaccugacaccuggcgauagcagcagcggauggacagcuggugccgccgcuuacuaugugggcuaccugcagccuagaaccuuccugcugaaguacaacgagaacggcaccaucaccgacgccguggauugugcucuggauccucugagcgagacaaagugcacccugaaguccuucaccguggaaaagggcaucuaccagaccagcaacuuccgggugcagcccaccgaauccaucgugcgguuccccaauaucaccaaucugugccccuucggcgagguguucaaugccaccagauucgccucuguguacgccuggaaccggaagcggaucagcaauugcguggccgacuacuccgugcuguacaacuccgccagcuucagcaccuucaagugcuacggcguguccccuaccaagcugaacgaccugugcuucacaaacguguacgccgacagcuucgugauccggggagaugaagugcggcagauugccccuggacagacaggcaagaucgccgacuacaacuacaagcugcccgacgacuucaccggcugugugauugccuggaacagcaacaaccuggacuccaaagucggcggcaacuacaauuaccuguaccggcuguuccggaaguccaaucugaagcccuucgagcgggacaucagcaccgaaaucuaucaggccggcagcaccccuugcaacggcguggaaggcuucaacugcuacuucccacugcaguccuacggcuuucagcccacaaauggcgugggcuaucagcccuacagagugguggugcugagcuucgaacugcugcaugcuccugccacagugugcggcccuaagaaaagcaccaaucucgugaagaacaaaugcgugaacuucaacuucaacggccugaccggcaccggcgugcugacagagagcaacaagaaguuccugccauuccagcaguuuggccgggauaucgccgauaccacagacgccguuagagauccccagacacuggaaauccuggacaucaccccaugcagcuucggcggagugucugugaucaccccuggcaccaacaccagcaaucagguggcagugcuguaccaggacgugaacuguaccgaagugcccguggccauucacgccgaucagcugacaccuacauggcggguguacuccaccggcagcaauguguuucagaccagagccggcugucugaucggagccgagcacgugaacaauagcuacgagugcgacauccccaucggcgcuggcaucugugccagcuaccagacacagacaaacagccccagacgggcuagaagcguggccagccagagcaucauugccuacacaaugucucugggcgccgagaacagcguggccuacuccaacaacucuaucgcuauccccaccaacuucaccaucagcgugaccaccgagauccugccuguguccaugaccaagaccagcguggacugcaccauguacaucugcggcgauuccaccgagugcuccaaccugcugcugcaguacggcagcuucugcacccagcugaauagagcccugacagggaucgccguggaacaggacaagaacacccaagagguguucgcccaagugaagcaaaucuacaagaccccuccuaucaaggacuucggcggcuucaauuucagccagauucugcccgauccuagcaagcccagcaagcggagcuucaucgaggaccugcuguucaacaaagugacacuggccgacgccggcuucaucaagcaguauggcgauugucugggcgacauugccgccagggaucugauuugcgcccagaaguuuaacggacugacagugcugccuccucugcugaccgaugagaugaucgcccaguacacaucugcccugcuggccggcacaaucacaagcggcuggacauuuggagcuggcgccgcucugcagauccccuuugcuaugcagauggccuaccgguucaacggcaucggagugacccagaaugugcuguacgagaaccagaagcugaucgccaaccaguucaacagcgccaucggcaagauccaggacagccugagcagcacagcaagcgcccugggaaagcugcaggacguggucaaccagaaugcccaggcacugaacacccuggucaagcagcuguccuccaacugcggcgccaucagcucugugcugaacgauauccugagcagacuggacaaggucgaggccgaggugcagaucgacagacugaucacauguagacugcagagccuccagacauacgugacccagcagcugaucagagccgccgagauuagagccucugccaaucuggccgccaccaagaugucugagugugugcugggccagagcaagagaguggacuuuugcggcaagggcuaccaccugaugagcuucccucagucugccccucacggcgugguguuucugcacgugacauaugugcccgcucaagagaagaauuucaccaccgcuccagccaucugccacgacggcaaagcccacuuuccuagagaaggcguguucguguccaacggcacccauugguucgugacacagcggaacuucuacgagccccagaucaucaccaccgacaacaccuucgugucuggcaacugcgacguugugaucggcauugugaacaauaccguguacgacccucugcagcccgagcuggacagcggcggaggaucuggcggaggacagaucuacgagggcaagcugacagccgagggccugagauuuggaaucguggccagccgguucaaucacgcccugguggauagacugguggaaggcgccaucgaugccauugucagacacggcggcagagaagaggacaucacccucguuagagugcccggcucuugggagauuccuguggcugcuggcgagcuggcccggaaagaagauaucgacgccguuaucgccaucggcgugcugaucagaggcgccacaccucacuucgacuauaucgccagcgagguguccaaaggccuggccgaucugagccuggaacugagaaagcccaucaccuucggcgugaucaccgcugacacacuggaacaggccauugagagagccggcaccaagcacggcaacaaaggaugggaagccgcucuguccgccaucgagauggccaaccuguucaagagccugcggugaggacuaguuauaagacugacuagcccgaugggccucccaacgggcccuccuccccuccuugcaccgagauuaauaaaaaaaaaaaaaaaaaaaaaaaaaaaaaaaaaaaaaaaaaaaaaaaaaaaaaaaaaaaaaaaaugcaucccccccccccccccccccccccccccccccaaaggcucuuuucagagccaccagaauu

SEQ ID NO: 13100 - RNA, 4141 nt, Artificial Sequence
  SARS-CoV-2/Wuhan/WIV05/2019__EPI_ISL_402128 spike protein mRNA gc mod (1-1147)(A972C_R995C) LumSynth construct
aggagaaagcuuaccauguucguguuucuggugcugcugccccugguguccagccagugugugaaccugaccaccagaacacagcugccuccagccuacaccaacagcuucaccagaggcguguacuaccccgacaagguguucagauccagcgugcugcacucuacccaggaccuguuccugccuuucuucagcaacgugaccugguuccacgccauccacguguccggcaccaauggcaccaagagauucgacaaccccgugcugcccuucaacgacgggguguacuuugccagcaccgagaaguccaacaucaucagaggcuggaucuucggcaccacacuggacagcaagacccagagccugcugaucgugaacaacgccaccaacguggucaucaaagugugcgaguuccaguucugcaacgaccccuuccugggcgucuacuaccacaagaacaacaagagcuggauggaaagcgaguuccggguguacagcagcgccaacaacugcaccuucgaguacgugucccagccuuuccugauggaccuggaaggcaagcagggcaacuucaagaaccugcgcgaguucguguucaagaacaucgacggcuacuucaaaaucuacagcaagcacaccccuaucaaccucgugcgggaucugccucagggcuucucugcucuggaaccccugguggaucugcccaucggcaucaacaucacccgguuucagacacugcuggcccugcacagaagcuaccugacaccuggcgauagcagcagcggauggacagcuggugccgccgcuuacuaugugggcuaccugcagccuagaaccuuccugcugaaguacaacgagaacggcaccaucaccgacgccguggauugugcucuggauccucugagcgagacaaagugcacccugaaguccuucaccguggaaaagggcaucuaccagaccagcaacuuccgggugcagcccaccgaauccaucgugcgguuccccaauaucaccaaucugugccccuucggcgagguguucaaugccaccagauucgccucuguguacgccuggaaccggaagcggaucagcaauugcguggccgacuacuccgugcuguacaacuccgccagcuucagcaccuucaagugcuacggcguguccccuaccaagcugaacgaccugugcuucacaaacguguacgccgacagcuucgugauccggggagaugaagugcggcagauugccccuggacagacaggcaagaucgccgacuacaacuacaagcugcccgacgacuucaccggcugugugauugccuggaacagcaacaaccuggacuccaaagucggcggcaacuacaauuaccuguaccggcuguuccggaaguccaaucugaagcccuucgagcgggacaucagcaccgaaaucuaucaggccggcagcaccccuugcaacggcguggaaggcuucaacugcuacuucccacugcaguccuacggcuuucagcccacaaauggcgugggcuaucagcccuacagagugguggugcugagcuucgaacugcugcaugcuccugccacagugugcggcccuaagaaaagcaccaaucucgugaagaacaaaugcgugaacuucaacuucaacggccugaccggcaccggcgugcugacagagagcaacaagaaguuccugccauuccagcaguuuggccgggauaucgccgauaccacagacgccguuagagauccccagacacuggaaauccuggacaucaccccaugcagcuucggcggagugucugugaucaccccuggcaccaacaccagcaaucagguggcagugcuguaccaggacgugaacuguaccgaagugcccguggccauucacgccgaucagcugacaccuacauggcggguguacuccaccggcagcaauguguuucagaccagagccggcugucugaucggagccgagcacgugaacaauagcuacgagugcgacauccccaucggcgcuggcaucugugccagcuaccagacacagacaaacagccccagacgggcuagaagcguggccagccagagcaucauugccuacacaaugucucugggcgccgagaacagcguggccuacuccaacaacucuaucgcuauccccaccaacuucaccaucagcgugaccaccgagauccugccuguguccaugaccaagaccagcguggacugcaccauguacaucugcggcgauuccaccgagugcuccaaccugcugcugcaguacggcagcuucugcacccagcugaauagagcccugacagggaucgccguggaacaggacaagaacacccaagagguguucgcccaagugaagcaaaucuacaagaccccuccuaucaaggacuucggcggcuucaauuucagccagauucugcccgauccuagcaagcccagcaagcggagcuucaucgaggaccugcuguucaacaaagugacacuggccgacgccggcuucaucaagcaguauggcgauugucugggcgacauugccgccagggaucugauuugcgcccagaaguuuaacggacugacagugcugccuccucugcugaccgaugagaugaucgcccaguacacaucugcccugcuggccggcacaaucacaagcggcuggacauuuggagcuggcgccgcucugcagauccccuuugcuaugcagauggccuaccgguucaacggcaucggagugacccagaaugugcuguacgagaaccagaagcugaucgccaaccaguucaacagcgccaucggcaagauccaggacagccugagcagcacagcaagcgcccugggaaagcugcaggacguggucaaccagaaugcccaggcacugaacacccuggucaagcagcuguccuccaacuucggcugcaucagcucugugcugaacgauauccugagcagacuggacaaggucgaggccgaggugcagaucgacugucugaucacaggcagacugcagagccuccagacauacgugacccagcagcugaucagagccgccgagauuagagccucugccaaucuggccgccaccaagaugucugagugugugcugggccagagcaagagaguggacuuuugcggcaagggcuaccaccugaugagcuucccucagucugccccucacggcgugguguuucugcacgugacauaugugcccgcucaagagaagaauuucaccaccgcuccagccaucugccacgacggcaaagcccacuuuccuagagaaggcguguucguguccaacggcacccauugguucgugacacagcggaacuucuacgagccccagaucaucaccaccgacaacaccuucgugucuggcaacugcgacguugugaucggcauugugaacaauaccguguacgacccucugcagcccgagcuggacagcggcggaggaucuggcggaggacagaucuacgagggcaagcugacagccgagggccugagauuuggaaucguggccagccgguucaaucacgcccugguggauagacugguggaaggcgccaucgaugccauugucagacacggcggcagagaagaggacaucacccucguuagagugcccggcucuugggagauuccuguggcugcuggcgagcuggcccggaaagaagauaucgacgccguuaucgccaucggcgugcugaucagaggcgccacaccucacuucgacuauaucgccagcgagguguccaaaggccuggccgaucugagccuggaacugagaaagcccaucaccuucggcgugaucaccgcugacacacuggaacaggccauugagagagccggcaccaagcacggcaacaaaggaugggaagccgcucuguccgccaucgagauggccaaccuguucaagagccugcggugaggacuaguuauaagacugacuagcccgaugggccucccaacgggcccuccuccccuccuugcaccgagauuaauaaaaaaaaaaaaaaaaaaaaaaaaaaaaaaaaaaaaaaaaaaaaaaaaaaaaaaaaaaaaaaaaugcaucccccccccccccccccccccccccccccccaaaggcucuuuucagagccaccagaauu

SEQ ID NO: 13101 - RNA, 4141 nt, Artificial Sequence
  SARS-CoV-2/Wuhan/WIV05/2019__EPI_ISL_402128 spike protein mRNA gc mod (1-1147)(A890C_V1040C) LumSynth construct
aggagaaagcuuaccauguucguguuucuggugcugcugccccugguguccagccagugugugaaccugaccaccagaacacagcugccuccagccuacaccaacagcuucaccagaggcguguacuaccccgacaagguguucagauccagcgugcugcacucuacccaggaccuguuccugccuuucuucagcaacgugaccugguuccacgccauccacguguccggcaccaauggcaccaagagauucgacaaccccgugcugcccuucaacgacgggguguacuuugccagcaccgagaaguccaacaucaucagaggcuggaucuucggcaccacacuggacagcaagacccagagccugcugaucgugaacaacgccaccaacguggucaucaaagugugcgaguuccaguucugcaacgaccccuuccugggcgucuacuaccacaagaacaacaagagcuggauggaaagcgaguuccggguguacagcagcgccaacaacugcaccuucgaguacgugucccagccuuuccugauggaccuggaaggcaagcagggcaacuucaagaaccugcgcgaguucguguucaagaacaucgacggcuacuucaaaaucuacagcaagcacaccccuaucaaccucgugcgggaucugccucagggcuucucugcucuggaaccccugguggaucugcccaucggcaucaacaucacccgguuucagacacugcuggcccugcacagaagcuaccugacaccuggcgauagcagcagcggauggacagcuggugccgccgcuuacuaugugggcuaccugcagccuagaaccuuccugcugaaguacaacgagaacggcaccaucaccgacgccguggauugugcucuggauccucugagcgagacaaagugcacccugaaguccuucaccguggaaaagggcaucuaccagaccagcaacuuccgggugcagcccaccgaauccaucgugcgguuccccaauaucaccaaucugugccccuucggcgagguguucaaugccaccagauucgccucuguguacgccuggaaccggaagcggaucagcaauugcguggccgacuacuccgugcuguacaacuccgccagcuucagcaccuucaagugcuacggcguguccccuaccaagcugaacgaccugugcuucacaaacguguacgccgacagcuucgugauccggggagaugaagugcggcagauugccccuggacagacaggcaagaucgccgacuacaacuacaagcugcccgacgacuucaccggcugugugauugccuggaacagcaacaaccuggacuccaaagucggcggcaacuacaauuaccuguaccggcuguuccggaaguccaaucugaagcccuucgagcgggacaucagcaccgaaaucuaucaggccggcagcaccccuugcaacggcguggaaggcuucaacugcuacuucccacugcaguccuacggcuuucagcccacaaauggcgugggcuaucagcccuacagagugguggugcugagcuucgaacugcugcaugcuccugccacagugugcggcccuaagaaaagcaccaaucucgugaagaacaaaugcgugaacuucaacuucaacggccugaccggcaccggcgugcugacagagagcaacaagaaguuccugccauuccagcaguuuggccgggauaucgccgauaccacagacgccguuagagauccccagacacuggaaauccuggacaucaccccaugcagcuucggcggagugucugugaucaccccuggcaccaacaccagcaaucagguggcagugcuguaccaggacgugaacuguaccgaagugcccguggccauucacgccgaucagcugacaccuacauggcggguguacuccaccggcagcaauguguuucagaccagagccggcugucugaucggagccgagcacgugaacaauagcuacgagugcgacauccccaucggcgcuggcaucugugccagcuaccagacacagacaaacagccccagacgggcuagaagcguggccagccagagcaucauugccuacacaaugucucugggcgccgagaacagcguggccuacuccaacaacucuaucgcuauccccaccaacuucaccaucagcgugaccaccgagauccugccuguguccaugaccaagaccagcguggacugcaccauguacaucugcggcgauuccaccgagugcuccaaccugcugcugcaguacggcagcuucugcacccagcugaauagagcccugacagggaucgccguggaacaggacaagaacacccaagagguguucgcccaagugaagcaaaucuacaagaccccuccuaucaaggacuucggcggcuucaauuucagccagauucugcccgauccuagcaagcccagcaagcggagcuucaucgaggaccugcuguucaacaaagugacacuggccgacgccggcuucaucaagcaguauggcgauugucugggcgacauugccgccagggaucugauuugcgcccagaaguuuaacggacugacagugcugccuccucugcugaccgaugagaugaucgcccaguacacaucugcccugcuggccggcacaaucacaagcggcuggacauuuggaugcggcgccgcucugcagauccccuuugcuaugcagauggccuaccgguucaacggcaucggagugacccagaaugugcuguacgagaaccagaagcugaucgccaaccaguucaacagcgccaucggcaagauccaggacagccugagcagcacagcaagcgcccugggaaagcugcaggacguggucaaccagaaugcccaggcacugaacacccuggucaagcagcuguccuccaacuucggcgccaucagcucugugcugaacgauauccugagcagacuggacaaggucgaggccgaggugcagaucgacagacugaucacaggcagacugcagagccuccagacauacgugacccagcagcugaucagagccgccgagauuagagccucugccaaucuggccgccaccaagaugucugagugugugcugggccagagcaagagaugugacuuuugcggcaagggcuaccaccugaugagcuucccucagucugccccucacggcgugguguuucugcacgugacauaugugcccgcucaagagaagaauuucaccaccgcuccagccaucugccacgacggcaaagcccacuuuccuagagaaggcguguucguguccaacggcacccauugguucgugacacagcggaacuucuacgagccccagaucaucaccaccgacaacaccuucgugucuggcaacugcgacguugugaucggcauugugaacaauaccguguacgacccucugcagcccgagcuggacagcggcggaggaucuggcggaggacagaucuacgagggcaagcugacagccgagggccugagauuuggaaucguggccagccgguucaaucacgcccugguggauagacugguggaaggcgccaucgaugccauugucagacacggcggcagagaagaggacaucacccucguuagagugcccggcucuugggagauuccuguggcugcuggcgagcuggcccggaaagaagauaucgacgccguuaucgccaucggcgugcugaucagaggcgccacaccucacuucgacuauaucgccagcgagguguccaaaggccuggccgaucugagccuggaacugagaaagcccaucaccuucggcgugaucaccgcugacacacuggaacaggccauugagagagccggcaccaagcacggcaacaaaggaugggaagccgcucuguccgccaucgagauggccaaccuguucaagagccugcggugaggacuaguuauaagacugacuagcccgaugggccucccaacgggcccuccuccccuccuugcaccgagauuaauaaaaaaaaaaaaaaaaaaaaaaaaaaaaaaaaaaaaaaaaaaaaaaaaaaaaaaaaaaaaaaaaugcaucccccccccccccccccccccccccccccccaaaggcucuuuucagagccaccagaauu

SEQ ID NO: 13102 - RNA, 4141 nt, Artificial Sequence
  SARS-CoV-2/Wuhan/WIV05/2019__EPI_ISL_402128 spike protein mRNA gc mod (1-1147)(T874C_S1055C) LumSynth construct
aggagaaagcuuaccauguucguguuucuggugcugcugccccugguguccagccagugugugaaccugaccaccagaacacagcugccuccagccuacaccaacagcuucaccagaggcguguacuaccccgacaagguguucagauccagcgugcugcacucuacccaggaccuguuccugccuuucuucagcaacgugaccugguuccacgccauccacguguccggcaccaauggcaccaagagauucgacaaccccgugcugcccuucaacgacgggguguacuuugccagcaccgagaaguccaacaucaucagaggcuggaucuucggcaccacacuggacagcaagacccagagccugcugaucgugaacaacgccaccaacguggucaucaaagugugcgaguuccaguucugcaacgaccccuuccugggcgucuacuaccacaagaacaacaagagcuggauggaaagcgaguuccggguguacagcagcgccaacaacugcaccuucgaguacgugucccagccuuuccugauggaccuggaaggcaagcagggcaacuucaagaaccugcgcgaguucguguucaagaacaucgacggcuacuucaaaaucuacagcaagcacaccccuaucaaccucgugcgggaucugccucagggcuucucugcucuggaaccccugguggaucugcccaucggcaucaacaucacccgguuucagacacugcuggcccugcacagaagcuaccugacaccuggcgauagcagcagcggauggacagcuggugccgccgcuuacuaugugggcuaccugcagccuagaaccuuccugcugaaguacaacgagaacggcaccaucaccgacgccguggauugugcucuggauccucugagcgagacaaagugcacccugaaguccuucaccguggaaaagggcaucuaccagaccagcaacuuccgggugcagcccaccgaauccaucgugcgguuccccaauaucaccaaucugugccccuucggcgagguguucaaugccaccagauucgccucuguguacgccuggaaccggaagcggaucagcaauugcguggccgacuacuccgugcuguacaacuccgccagcuucagcaccuucaagugcuacggcguguccccuaccaagcugaacgaccugugcuucacaaacguguacgccgacagcuucgugauccggggagaugaagugcggcagauugccccuggacagacaggcaagaucgccgacuacaacuacaagcugcccgacgacuucaccggcugugugauugccuggaacagcaacaaccuggacuccaaagucggcggcaacuacaauuaccuguaccggcuguuccggaaguccaaucugaagcccuucgagcgggacaucagcaccgaaaucuaucaggccggcagcaccccuugcaacggcguggaaggcuucaacugcuacuucccacugcaguccuacggcuuucagcccacaaauggcgugggcuaucagcccuacagagugguggugcugagcuucgaacugcugcaugcuccugccacagugugcggcccuaagaaaagcaccaaucucgugaagaacaaaugcgugaacuucaacuucaacggccugaccggcaccggcgugcugacagagagcaacaagaaguuccugccauuccagcaguuuggccgggauaucgccgauaccacagacgccguuagagauccccagacacuggaaauccuggacaucaccccaugcagcuucggcggagugucugugaucaccccuggcaccaacaccagcaaucagguggcagugcuguaccaggacgugaacuguaccgaagugcccguggccauucacgccgaucagcugacaccuacauggcggguguacuccaccggcagcaauguguuucagaccagagccggcugucugaucggagccgagcacgugaacaauagcuacgagugcgacauccccaucggcgcuggcaucugugccagcuaccagacacagacaaacagccccagacgggcuagaagcguggccagccagagcaucauugccuacacaaugucucugggcgccgagaacagcguggccuacuccaacaacucuaucgcuauccccaccaacuucaccaucagcgugaccaccgagauccugccuguguccaugaccaagaccagcguggacugcaccauguacaucugcggcgauuccaccgagugcuccaaccugcugcugcaguacggcagcuucugcacccagcugaauagagcccugacagggaucgccguggaacaggacaagaacacccaagagguguucgcccaagugaagcaaaucuacaagaccccuccuaucaaggacuucggcggcuucaauuucagccagauucugcccgauccuagcaagcccagcaagcggagcuucaucgaggaccugcuguucaacaaagugacacuggccgacgccggcuucaucaagcaguauggcgauugucugggcgacauugccgccagggaucugauuugcgcccagaaguuuaacggacugacagugcugccuccucugcugaccgaugagaugaucgcccaguacugcucugcccugcuggccggcacaaucacaagcggcuggacauuuggagcuggcgccgcucugcagauccccuuugcuaugcagauggccuaccgguucaacggcaucggagugacccagaaugugcuguacgagaaccagaagcugaucgccaaccaguucaacagcgccaucggcaagauccaggacagccugagcagcacagcaagcgcccugggaaagcugcaggacguggucaaccagaaugcccaggcacugaacacccuggucaagcagcuguccuccaacuucggcgccaucagcucugugcugaacgauauccugagcagacuggacaaggucgaggccgaggugcagaucgacagacugaucacaggcagacugcagagccuccagacauacgugacccagcagcugaucagagccgccgagauuagagccucugccaaucuggccgccaccaagaugucugagugugugcugggccagagcaagagaguggacuuuugcggcaagggcuaccaccugaugagcuucccucagugcgccccucacggcgugguguuucugcacgugacauaugugcccgcucaagagaagaauuucaccaccgcuccagccaucugccacgacggcaaagcccacuuuccuagagaaggcguguucguguccaacggcacccauugguucgugacacagcggaacuucuacgagccccagaucaucaccaccgacaacaccuucgugucuggcaacugcgacguugugaucggcauugugaacaauaccguguacgacccucugcagcccgagcuggacagcggcggaggaucuggcggaggacagaucuacgagggcaagcugacagccgagggccugagauuuggaaucguggccagccgguucaaucacgcccugguggauagacugguggaaggcgccaucgaugccauugucagacacggcggcagagaagaggacaucacccucguuagagugcccggcucuugggagauuccuguggcugcuggcgagcuggcccggaaagaagauaucgacgccguuaucgccaucggcgugcugaucagaggcgccacaccucacuucgacuauaucgccagcgagguguccaaaggccuggccgaucugagccuggaacugagaaagcccaucaccuucggcgugaucaccgcugacacacuggaacaggccauugagagagccggcaccaagcacggcaacaaaggaugggaagccgcucuguccgccaucgagauggccaaccuguucaagagccugcggugaggacuaguuauaagacugacuagcccgaugggccucccaacgggcccuccuccccuccuugcaccgagauuaauaaaaaaaaaaaaaaaaaaaaaaaaaaaaaaaaaaaaaaaaaaaaaaaaaaaaaaaaaaaaaaaaugcaucccccccccccccccccccccccccccccccaaaggcucuuuucagagccaccagaauu

SEQ ID NO: 13103 - RNA, 4165 nt, Artificial Sequence
  SARS-CoV-2/Wuhan/WIV05/2019__EPI_ISL_402128 spike protein mRNA gc mod (1-1147) Ferritin construct
aggagaaagcuuaccauguucguguuucuggugcugcugccccugguguccagccagugugugaaccugaccaccagaacacagcugccuccagccuacaccaacagcuucaccagaggcguguacuaccccgacaagguguucagauccagcgugcugcacucuacccaggaccuguuccugccuuucuucagcaacgugaccugguuccacgccauccacguguccggcaccaauggcaccaagagauucgacaaccccgugcugcccuucaacgacgggguguacuuugccagcaccgagaaguccaacaucaucagaggcuggaucuucggcaccacacuggacagcaagacccagagccugcugaucgugaacaacgccaccaacguggucaucaaagugugcgaguuccaguucugcaacgaccccuuccugggcgucuacuaccacaagaacaacaagagcuggauggaaagcgaguuccggguguacagcagcgccaacaacugcaccuucgaguacgugucccagccuuuccugauggaccuggaaggcaagcagggcaacuucaagaaccugcgcgaguucguguucaagaacaucgacggcuacuucaaaaucuacagcaagcacaccccuaucaaccucgugcgggaucugccucagggcuucucugcucuggaaccccugguggaucugcccaucggcaucaacaucacccgguuucagacacugcuggcccugcacagaagcuaccugacaccuggcgauagcagcagcggauggacagcuggugccgccgcuuacuaugugggcuaccugcagccuagaaccuuccugcugaaguacaacgagaacggcaccaucaccgacgccguggauugugcucuggauccucugagcgagacaaagugcacccugaaguccuucaccguggaaaagggcaucuaccagaccagcaacuuccgggugcagcccaccgaauccaucgugcgguuccccaauaucaccaaucugugccccuucggcgagguguucaaugccaccagauucgccucuguguacgccuggaaccggaagcggaucagcaauugcguggccgacuacuccgugcuguacaacuccgccagcuucagcaccuucaagugcuacggcguguccccuaccaagcugaacgaccugugcuucacaaacguguacgccgacagcuucgugauccggggagaugaagugcggcagauugccccuggacagacaggcaagaucgccgacuacaacuacaagcugcccgacgacuucaccggcugugugauugccuggaacagcaacaaccuggacuccaaagucggcggcaacuacaauuaccuguaccggcuguuccggaaguccaaucugaagcccuucgagcgggacaucagcaccgaaaucuaucaggccggcagcaccccuugcaacggcguggaaggcuucaacugcuacuucccacugcaguccuacggcuuucagcccacaaauggcgugggcuaucagcccuacagagugguggugcugagcuucgaacugcugcaugcuccugccacagugugcggcccuaagaaaagcaccaaucucgugaagaacaaaugcgugaacuucaacuucaacggccugaccggcaccggcgugcugacagagagcaacaagaaguuccugccauuccagcaguuuggccgggauaucgccgauaccacagacgccguuagagauccccagacacuggaaauccuggacaucaccccaugcagcuucggcggagugucugugaucaccccuggcaccaacaccagcaaucagguggcagugcuguaccaggacgugaacuguaccgaagugcccguggccauucacgccgaucagcugacaccuacauggcggguguacuccaccggcagcaauguguuucagaccagagccggcugucugaucggagccgagcacgugaacaauagcuacgagugcgacauccccaucggcgcuggcaucugugccagcuaccagacacagacaaacagccccagacgggcuagaagcguggccagccagagcaucauugccuacacaaugucucugggcgccgagaacagcguggccuacuccaacaacucuaucgcuauccccaccaacuucaccaucagcgugaccaccgagauccugccuguguccaugaccaagaccagcguggacugcaccauguacaucugcggcgauuccaccgagugcuccaaccugcugcugcaguacggcagcuucugcacccagcugaauagagcccugacagggaucgccguggaacaggacaagaacacccaagagguguucgcccaagugaagcaaaucuacaagaccccuccuaucaaggacuucggcggcuucaauuucagccagauucugcccgauccuagcaagcccagcaagcggagcuucaucgaggaccugcuguucaacaaagugacacuggccgacgccggcuucaucaagcaguauggcgauugucugggcgacauugccgccagggaucugauuugcgcccagaaguuuaacggacugacagugcugccuccucugcugaccgaugagaugaucgcccaguacacaucugcccugcuggccggcacaaucacaagcggcuggacauuuggagcuggcgccgcucugcagauccccuuugcuaugcagauggccuaccgguucaacggcaucggagugacccagaaugugcuguacgagaaccagaagcugaucgccaaccaguucaacagcgccaucggcaagauccaggacagccugagcagcacagcaagcgcccugggaaagcugcaggacguggucaaccagaaugcccaggcacugaacacccuggucaagcagcuguccuccaacuucggcgccaucagcucugugcugaacgauauccugagcagacuggacaaggucgaggccgaggugcagaucgacagacugaucacaggcagacugcagagccuccagacauacgugacccagcagcugaucagagccgccgagauuagagccucugccaaucuggccgccaccaagaugucugagugugugcugggccagagcaagagaguggacuuuugcggcaagggcuaccaccugaugagcuucccucagucugccccucacggcgugguguuucugcacgugacauaugugcccgcucaagagaagaauuucaccaccgcuccagccaucugccacgacggcaaagcccacuuuccuagagaaggcguguucguguccaacggcacccauugguucgugacacagcggaacuucuacgagccccagaucaucaccaccgacaacaccuucgugucuggcaacugcgacguugugaucggcauugugaacaauaccguguacgacccucugcagcccgagcuggacagcggaggcggaggaucugacaucaucaagcugcugaacgagcaagugaacaaagagaugcagagcagcaaccuguacaugagcaugagcagcuggugcuacacccacagccuugauggcgccggacuguuccuguuugaucacgccgccgaggaauacgagcacgccaagaagcugaucaucuuccugaacgagaacaacgugcccgugcagcugaccagcauuucugccccugagcacaaguucgagggccugacacagaucuuccagaaggccuacgaacacgagcagcacaucagcgagagcaucaacaacaucguggaccacgccauuaagagcaaggaucacgccaccuucaacuuucugcagugguacguggccgaacagcacgaggaagaggugcuguucaaggacauccuggacaagaucgagcugaucggcaacgagaaccacggccuguaucuggccgaccaguacgugaagggaaucgccaagagcagaaagagcugaggacuaguuauaagacugacuagcccgaugggccucccaacgggcccuccuccccuccuugcaccgagauuaauaaaaaaaaaaaaaaaaaaaaaaaaaaaaaaaaaaaaaaaaaaaaaaaaaaaaaaaaaaaaaaaaugcaucccccccccccccccccccccccccccccccaaaggcucuuuucagagccaccagaauu

SEQ ID NO: 13104 - RNA, 4165 nt, Artificial Sequence
  SARS-CoV-2/Wuhan/WIV05/2019__EPI_ISL_402128 spike protein mRNA gc mod (1-1147)(K986P_V987P) Ferritin construct
aggagaaagcuuaccauguucguguuucuggugcugcugccccugguguccagccagugugugaaccugaccaccagaacacagcugccuccagccuacaccaacagcuucaccagaggcguguacuaccccgacaagguguucagauccagcgugcugcacucuacccaggaccuguuccugccuuucuucagcaacgugaccugguuccacgccauccacguguccggcaccaauggcaccaagagauucgacaaccccgugcugcccuucaacgacgggguguacuuugccagcaccgagaaguccaacaucaucagaggcuggaucuucggcaccacacuggacagcaagacccagagccugcugaucgugaacaacgccaccaacguggucaucaaagugugcgaguuccaguucugcaacgaccccuuccugggcgucuacuaccacaagaacaacaagagcuggauggaaagcgaguuccggguguacagcagcgccaacaacugcaccuucgaguacgugucccagccuuuccugauggaccuggaaggcaagcagggcaacuucaagaaccugcgcgaguucguguucaagaacaucgacggcuacuucaaaaucuacagcaagcacaccccuaucaaccucgugcgggaucugccucagggcuucucugcucuggaaccccugguggaucugcccaucggcaucaacaucacccgguuucagacacugcuggcccugcacagaagcuaccugacaccuggcgauagcagcagcggauggacagcuggugccgccgcuuacuaugugggcuaccugcagccuagaaccuuccugcugaaguacaacgagaacggcaccaucaccgacgccguggauugugcucuggauccucugagcgagacaaagugcacccugaaguccuucaccguggaaaagggcaucuaccagaccagcaacuuccgggugcagcccaccgaauccaucgugcgguuccccaauaucaccaaucugugccccuucggcgagguguucaaugccaccagauucgccucuguguacgccuggaaccggaagcggaucagcaauugcguggccgacuacuccgugcuguacaacuccgccagcuucagcaccuucaagugcuacggcguguccccuaccaagcugaacgaccugugcuucacaaacguguacgccgacagcuucgugauccggggagaugaagugcggcagauugccccuggacagacaggcaagaucgccgacuacaacuacaagcugcccgacgacuucaccggcugugugauugccuggaacagcaacaaccuggacuccaaagucggcggcaacuacaauuaccuguaccggcuguuccggaaguccaaucugaagcccuucgagcgggacaucagcaccgaaaucuaucaggccggcagcaccccuugcaacggcguggaaggcuucaacugcuacuucccacugcaguccuacggcuuucagcccacaaauggcgugggcuaucagcccuacagagugguggugcugagcuucgaacugcugcaugcuccugccacagugugcggcccuaagaaaagcaccaaucucgugaagaacaaaugcgugaacuucaacuucaacggccugaccggcaccggcgugcugacagagagcaacaagaaguuccugccauuccagcaguuuggccgggauaucgccgauaccacagacgccguuagagauccccagacacuggaaauccuggacaucaccccaugcagcuucggcggagugucugugaucaccccuggcaccaacaccagcaaucagguggcagugcuguaccaggacgugaacuguaccgaagugcccguggccauucacgccgaucagcugacaccuacauggcggguguacuccaccggcagcaauguguuucagaccagagccggcugucugaucggagccgagcacgugaacaauagcuacgagugcgacauccccaucggcgcuggcaucugugccagcuaccagacacagacaaacagccccagacgggcuagaagcguggccagccagagcaucauugccuacacaaugucucugggcgccgagaacagcguggccuacuccaacaacucuaucgcuauccccaccaacuucaccaucagcgugaccaccgagauccugccuguguccaugaccaagaccagcguggacugcaccauguacaucugcggcgauuccaccgagugcuccaaccugcugcugcaguacggcagcuucugcacccagcugaauagagcccugacagggaucgccguggaacaggacaagaacacccaagagguguucgcccaagugaagcaaaucuacaagaccccuccuaucaaggacuucggcggcuucaauuucagccagauucugcccgauccuagcaagcccagcaagcggagcuucaucgaggaccugcuguucaacaaagugacacuggccgacgccggcuucaucaagcaguauggcgauugucugggcgacauugccgccagggaucugauuugcgcccagaaguuuaacggacugacagugcugccuccucugcugaccgaugagaugaucgcccaguacacaucugcccugcuggccggcacaaucacaagcggcuggacauuuggagcuggcgccgcucugcagauccccuuugcuaugcagauggccuaccgguucaacggcaucggagugacccagaaugugcuguacgagaaccagaagcugaucgccaaccaguucaacagcgccaucggcaagauccaggacagccugagcagcacagcaagcgcccugggaaagcugcaggacguggucaaccagaaugcccaggcacugaacacccuggucaagcagcuguccuccaacuucggcgccaucagcucugugcugaacgauauccugagcagacuggacccuccugaggccgaggugcagaucgacagacugaucacaggcagacugcagagccuccagacauacgugacccagcagcugaucagagccgccgagauuagagccucugccaaucuggccgccaccaagaugucugagugugugcugggccagagcaagagaguggacuuuugcggcaagggcuaccaccugaugagcuucccucagucugccccucacggcgugguguuucugcacgugacauaugugcccgcucaagagaagaauuucaccaccgcuccagccaucugccacgacggcaaagcccacuuuccuagagaaggcguguucguguccaacggcacccauugguucgugacacagcggaacuucuacgagccccagaucaucaccaccgacaacaccuucgugucuggcaacugcgacguugugaucggcauugugaacaauaccguguacgacccucugcagcccgagcuggacagcggaggcggaggaucugacaucaucaagcugcugaacgagcaagugaacaaagagaugcagagcagcaaccuguacaugagcaugagcagcuggugcuacacccacagccuugauggcgccggacuguuccuguuugaucacgccgccgaggaauacgagcacgccaagaagcugaucaucuuccugaacgagaacaacgugcccgugcagcugaccagcauuucugccccugagcacaaguucgagggccugacacagaucuuccagaaggccuacgaacacgagcagcacaucagcgagagcaucaacaacaucguggaccacgccauuaagagcaaggaucacgccaccuucaacuuucugcagugguacguggccgaacagcacgaggaagaggugcuguucaaggacauccuggacaagaucgagcugaucggcaacgagaaccacggccuguaucuggccgaccaguacgugaagggaaucgccaagagcagaaagagcugaggacuaguuauaagacugacuagcccgaugggccucccaacgggcccuccuccccuccuugcaccgagauuaauaaaaaaaaaaaaaaaaaaaaaaaaaaaaaaaaaaaaaaaaaaaaaaaaaaaaaaaaaaaaaaaaugcaucccccccccccccccccccccccccccccccaaaggcucuuuucagagccaccagaauu

SEQ ID NO: 13105 - RNA, 4165 nt, Artificial Sequence
  SARS-CoV-2/Wuhan/WIV05/2019__EPI_ISL_402128 spike protein mRNA gc mod (1-1147)(K986P_V987P_T887WN_A1020W) Ferritin construct
aggagaaagcuuaccauguucguguuucuggugcugcugccccugguguccagccagugugugaaccugaccaccagaacacagcugccuccagccuacaccaacagcuucaccagaggcguguacuaccccgacaagguguucagauccagcgugcugcacucuacccaggaccuguuccugccuuucuucagcaacgugaccugguuccacgccauccacguguccggcaccaauggcaccaagagauucgacaaccccgugcugcccuucaacgacgggguguacuuugccagcaccgagaaguccaacaucaucagaggcuggaucuucggcaccacacuggacagcaagacccagagccugcugaucgugaacaacgccaccaacguggucaucaaagugugcgaguuccaguucugcaacgaccccuuccugggcgucuacuaccacaagaacaacaagagcuggauggaaagcgaguuccggguguacagcagcgccaacaacugcaccuucgaguacgugucccagccuuuccugauggaccuggaaggcaagcagggcaacuucaagaaccugcgcgaguucguguucaagaacaucgacggcuacuucaaaaucuacagcaagcacaccccuaucaaccucgugcgggaucugccucagggcuucucugcucuggaaccccugguggaucugcccaucggcaucaacaucacccgguuucagacacugcuggcccugcacagaagcuaccugacaccuggcgauagcagcagcggauggacagcuggugccgccgcuuacuaugugggcuaccugcagccuagaaccuuccugcugaaguacaacgagaacggcaccaucaccgacgccguggauugugcucuggauccucugagcgagacaaagugcacccugaaguccuucaccguggaaaagggcaucuaccagaccagcaacuuccgggugcagcccaccgaauccaucgugcgguuccccaauaucaccaaucugugccccuucggcgagguguucaaugccaccagauucgccucuguguacgccuggaaccggaagcggaucagcaauugcguggccgacuacuccgugcuguacaacuccgccagcuucagcaccuucaagugcuacggcguguccccuaccaagcugaacgaccugugcuucacaaacguguacgccgacagcuucgugauccggggagaugaagugcggcagauugccccuggacagacaggcaagaucgccgacuacaacuacaagcugcccgacgacuucaccggcugugugauugccuggaacagcaacaaccuggacuccaaagucggcggcaacuacaauuaccuguaccggcuguuccggaaguccaaucugaagcccuucgagcgggacaucagcaccgaaaucuaucaggccggcagcaccccuugcaacggcguggaaggcuucaacugcuacuucccacugcaguccuacggcuuucagcccacaaauggcgugggcuaucagcccuacagagugguggugcugagcuucgaacugcugcaugcuccugccacagugugcggcccuaagaaaagcaccaaucucgugaagaacaaaugcgugaacuucaacuucaacggccugaccggcaccggcgugcugacagagagcaacaagaaguuccugccauuccagcaguuuggccgggauaucgccgauaccacagacgccguuagagauccccagacacuggaaauccuggacaucaccccaugcagcuucggcggagugucugugaucaccccuggcaccaacaccagcaaucagguggcagugcuguaccaggacgugaacuguaccgaagugcccguggccauucacgccgaucagcugacaccuacauggcggguguacuccaccggcagcaauguguuucagaccagagccggcugucugaucggagccgagcacgugaacaauagcuacgagugcgacauccccaucggcgcuggcaucugugccagcuaccagacacagacaaacagccccagacgggcuagaagcguggccagccagagcaucauugccuacacaaugucucugggcgccgagaacagcguggccuacuccaacaacucuaucgcuauccccaccaacuucaccaucagcgugaccaccgagauccugccuguguccaugaccaagaccagcguggacugcaccauguacaucugcggcgauuccaccgagugcuccaaccugcugcugcaguacggcagcuucugcacccagcugaauagagcccugacagggaucgccguggaacaggacaagaacacccaagagguguucgcccaagugaagcaaaucuacaagaccccuccuaucaaggacuucggcggcuucaauuucagccagauucugcccgauccuagcaagcccagcaagcggagcuucaucgaggaccugcuguucaacaaagugacacuggccgacgccggcuucaucaagcaguauggcgauugucugggcgacauugccgccagggaucugauuugcgcccagaaguuuaacggacugacagugcugccuccucugcugaccgaugagaugaucgcccaguacacaucugcccugcuggccggcacaaucacaagcggcuggugguuuggagcuggcgccgcucugcagauccccuuugcuaugcagauggccuaccgguucaacggcaucggagugacccagaaugugcuguacgagaaccagaagcugaucgccaaccaguucaacagcgccaucggcaagauccaggacagccugagcagcacagcaagcgcccugggaaagcugcaggacguggucaaccagaaugcccaggcacugaacacccuggucaagcagcuguccuccaacuucggcgccaucagcucugugcugaacgauauccugagcagacuggacccuccugaggccgaggugcagaucgacagacugaucacaggcagacugcagagccuccagacauacgugacccagcagcugaucagagccgccgagauuagauggucugccaaucuggccgccaccaagaugucugagugugugcugggccagagcaagagaguggacuuuugcggcaagggcuaccaccugaugagcuucccucagucugccccucacggcgugguguuucugcacgugacauaugugcccgcucaagagaagaauuucaccaccgcuccagccaucugccacgacggcaaagcccacuuuccuagagaaggcguguucguguccaacggcacccauugguucgugacacagcggaacuucuacgagccccagaucaucaccaccgacaacaccuucgugucuggcaacugcgacguugugaucggcauugugaacaauaccguguacgacccucugcagcccgagcuggacagcggaggcggaggaucugacaucaucaagcugcugaacgagcaagugaacaaagagaugcagagcagcaaccuguacaugagcaugagcagcuggugcuacacccacagccuugauggcgccggacuguuccuguuugaucacgccgccgaggaauacgagcacgccaagaagcugaucaucuuccugaacgagaacaacgugcccgugcagcugaccagcauuucugccccugagcacaaguucgagggccugacacagaucuuccagaaggccuacgaacacgagcagcacaucagcgagagcaucaacaacaucguggaccacgccauuaagagcaaggaucacgccaccuucaacuuucugcagugguacguggccgaacagcacgaggaagaggugcuguucaaggacauccuggacaagaucgagcugaucggcaacgagaaccacggccuguaucuggccgaccaguacgugaagggaaucgccaagagcagaaagagcugaggacuaguuauaagacugacuagcccgaugggccucccaacgggcccuccuccccuccuugcaccgagauuaauaaaaaaaaaaaaaaaaaaaaaaaaaaaaaaaaaaaaaaaaaaaaaaaaaaaaaaaaaaaaaaaaugcaucccccccccccccccccccccccccccccccaaaggcucuuuucagagccaccagaauu

SEQ ID NO: 13106 - RNA, 4165 nt, Artificial Sequence
  SARS-CoV-2/Wuhan/WIV05/2019__EPI_ISL_402128 spike protein mRNA gc mod (1-1147)(K986P_V987P_P1069F) Ferritin construct
aggagaaagcuuaccauguucguguuucuggugcugcugccccugguguccagccagugugugaaccugaccaccagaacacagcugccuccagccuacaccaacagcuucaccagaggcguguacuaccccgacaagguguucagauccagcgugcugcacucuacccaggaccuguuccugccuuucuucagcaacgugaccugguuccacgccauccacguguccggcaccaauggcaccaagagauucgacaaccccgugcugcccuucaacgacgggguguacuuugccagcaccgagaaguccaacaucaucagaggcuggaucuucggcaccacacuggacagcaagacccagagccugcugaucgugaacaacgccaccaacguggucaucaaagugugcgaguuccaguucugcaacgaccccuuccugggcgucuacuaccacaagaacaacaagagcuggauggaaagcgaguuccggguguacagcagcgccaacaacugcaccuucgaguacgugucccagccuuuccugauggaccuggaaggcaagcagggcaacuucaagaaccugcgcgaguucguguucaagaacaucgacggcuacuucaaaaucuacagcaagcacaccccuaucaaccucgugcgggaucugccucagggcuucucugcucuggaaccccugguggaucugcccaucggcaucaacaucacccgguuucagacacugcuggcccugcacagaagcuaccugacaccuggcgauagcagcagcggauggacagcuggugccgccgcuuacuaugugggcuaccugcagccuagaaccuuccugcugaaguacaacgagaacggcaccaucaccgacgccguggauugugcucuggauccucugagcgagacaaagugcacccugaaguccuucaccguggaaaagggcaucuaccagaccagcaacuuccgggugcagcccaccgaauccaucgugcgguuccccaauaucaccaaucugugccccuucggcgagguguucaaugccaccagauucgccucuguguacgccuggaaccggaagcggaucagcaauugcguggccgacuacuccgugcuguacaacuccgccagcuucagcaccuucaagugcuacggcguguccccuaccaagcugaacgaccugugcuucacaaacguguacgccgacagcuucgugauccggggagaugaagugcggcagauugccccuggacagacaggcaagaucgccgacuacaacuacaagcugcccgacgacuucaccggcugugugauugccuggaacagcaacaaccuggacuccaaagucggcggcaacuacaauuaccuguaccggcuguuccggaaguccaaucugaagcccuucgagcgggacaucagcaccgaaaucuaucaggccggcagcaccccuugcaacggcguggaaggcuucaacugcuacuucccacugcaguccuacggcuuucagcccacaaauggcgugggcuaucagcccuacagagugguggugcugagcuucgaacugcugcaugcuccugccacagugugcggcccuaagaaaagcaccaaucucgugaagaacaaaugcgugaacuucaacuucaacggccugaccggcaccggcgugcugacagagagcaacaagaaguuccugccauuccagcaguuuggccgggauaucgccgauaccacagacgccguuagagauccccagacacuggaaauccuggacaucaccccaugcagcuucggcggagugucugugaucaccccuggcaccaacaccagcaaucagguggcagugcuguaccaggacgugaacuguaccgaagugcccguggccauucacgccgaucagcugacaccuacauggcggguguacuccaccggcagcaauguguuucagaccagagccggcugucugaucggagccgagcacgugaacaauagcuacgagugcgacauccccaucggcgcuggcaucugugccagcuaccagacacagacaaacagccccagacgggcuagaagcguggccagccagagcaucauugccuacacaaugucucugggcgccgagaacagcguggccuacuccaacaacucuaucgcuauccccaccaacuucaccaucagcgugaccaccgagauccugccuguguccaugaccaagaccagcguggacugcaccauguacaucugcggcgauuccaccgagugcuccaaccugcugcugcaguacggcagcuucugcacccagcugaauagagcccugacagggaucgccguggaacaggacaagaacacccaagagguguucgcccaagugaagcaaaucuacaagaccccuccuaucaaggacuucggcggcuucaauuucagccagauucugcccgauccuagcaagcccagcaagcggagcuucaucgaggaccugcuguucaacaaagugacacuggccgacgccggcuucaucaagcaguauggcgauugucugggcgacauugccgccagggaucugauuugcgcccagaaguuuaacggacugacagugcugccuccucugcugaccgaugagaugaucgcccaguacacaucugcccugcuggccggcacaaucacaagcggcuggacauuuggagcuggcgccgcucugcagauccccuuugcuaugcagauggccuaccgguucaacggcaucggagugacccagaaugugcuguacgagaaccagaagcugaucgccaaccaguucaacagcgccaucggcaagauccaggacagccugagcagcacagcaagcgcccugggaaagcugcaggacguggucaaccagaaugcccaggcacugaacacccuggucaagcagcuguccuccaacuucggcgccaucagcucugugcugaacgauauccugagcagacuggacccuccugaggccgaggugcagaucgacagacugaucacaggcagacugcagagccuccagacauacgugacccagcagcugaucagagccgccgagauuagagccucugccaaucuggccgccaccaagaugucugagugugugcugggccagagcaagagaguggacuuuugcggcaagggcuaccaccugaugagcuucccucagucugccccucacggcgugguguuucugcacgugacauauguguucgcucaagagaagaauuucaccaccgcuccagccaucugccacgacggcaaagcccacuuuccuagagaaggcguguucguguccaacggcacccauugguucgugacacagcggaacuucuacgagccccagaucaucaccaccgacaacaccuucgugucuggcaacugcgacguugugaucggcauugugaacaauaccguguacgacccucugcagcccgagcuggacagcggaggcggaggaucugacaucaucaagcugcugaacgagcaagugaacaaagagaugcagagcagcaaccuguacaugagcaugagcagcuggugcuacacccacagccuugauggcgccggacuguuccuguuugaucacgccgccgaggaauacgagcacgccaagaagcugaucaucuuccugaacgagaacaacgugcccgugcagcugaccagcauuucugccccugagcacaaguucgagggccugacacagaucuuccagaaggccuacgaacacgagcagcacaucagcgagagcaucaacaacaucguggaccacgccauuaagagcaaggaucacgccaccuucaacuuucugcagugguacguggccgaacagcacgaggaagaggugcuguucaaggacauccuggacaagaucgagcugaucggcaacgagaaccacggccuguaucuggccgaccaguacgugaagggaaucgccaagagcagaaagagcugaggacuaguuauaagacugacuagcccgaugggccucccaacgggcccuccuccccuccuugcaccgagauuaauaaaaaaaaaaaaaaaaaaaaaaaaaaaaaaaaaaaaaaaaaaaaaaaaaaaaaaaaaaaaaaaaugcaucccccccccccccccccccccccccccccccaaaggcucuuuucagagccaccagaauu

SEQ ID NO: 13107 - RNA, 4165 nt, Artificial Sequence
  SARS-CoV-2/Wuhan/WIV05/2019__EPI_ISL_402128 spike protein mRNA gc mod (1-1147)(K986P_V987P_ H1048Q_H1064N_ H1083N_H1101N) Ferritin construct
aggagaaagcuuaccauguucguguuucuggugcugcugccccugguguccagccagugugugaaccugaccaccagaacacagcugccuccagccuacaccaacagcuucaccagaggcguguacuaccccgacaagguguucagauccagcgugcugcacucuacccaggaccuguuccugccuuucuucagcaacgugaccugguuccacgccauccacguguccggcaccaauggcaccaagagauucgacaaccccgugcugcccuucaacgacgggguguacuuugccagcaccgagaaguccaacaucaucagaggcuggaucuucggcaccacacuggacagcaagacccagagccugcugaucgugaacaacgccaccaacguggucaucaaagugugcgaguuccaguucugcaacgaccccuuccugggcgucuacuaccacaagaacaacaagagcuggauggaaagcgaguuccggguguacagcagcgccaacaacugcaccuucgaguacgugucccagccuuuccugauggaccuggaaggcaagcagggcaacuucaagaaccugcgcgaguucguguucaagaacaucgacggcuacuucaaaaucuacagcaagcacaccccuaucaaccucgugcgggaucugccucagggcuucucugcucuggaaccccugguggaucugcccaucggcaucaacaucacccgguuucagacacugcuggcccugcacagaagcuaccugacaccuggcgauagcagcagcggauggacagcuggugccgccgcuuacuaugugggcuaccugcagccuagaaccuuccugcugaaguacaacgagaacggcaccaucaccgacgccguggauugugcucuggauccucugagcgagacaaagugcacccugaaguccuucaccguggaaaagggcaucuaccagaccagcaacuuccgggugcagcccaccgaauccaucgugcgguuccccaauaucaccaaucugugccccuucggcgagguguucaaugccaccagauucgccucuguguacgccuggaaccggaagcggaucagcaauugcguggccgacuacuccgugcuguacaacuccgccagcuucagcaccuucaagugcuacggcguguccccuaccaagcugaacgaccugugcuucacaaacguguacgccgacagcuucgugauccggggagaugaagugcggcagauugccccuggacagacaggcaagaucgccgacuacaacuacaagcugcccgacgacuucaccggcugugugauugccuggaacagcaacaaccuggacuccaaagucggcggcaacuacaauuaccuguaccggcuguuccggaaguccaaucugaagcccuucgagcgggacaucagcaccgaaaucuaucaggccggcagcaccccuugcaacggcguggaaggcuucaacugcuacuucccacugcaguccuacggcuuucagcccacaaauggcgugggcuaucagcccuacagagugguggugcugagcuucgaacugcugcaugcuccugccacagugugcggcccuaagaaaagcaccaaucucgugaagaacaaaugcgugaacuucaacuucaacggccugaccggcaccggcgugcugacagagagcaacaagaaguuccugccauuccagcaguuuggccgggauaucgccgauaccacagacgccguuagagauccccagacacuggaaauccuggacaucaccccaugcagcuucggcggagugucugugaucaccccuggcaccaacaccagcaaucagguggcagugcuguaccaggacgugaacuguaccgaagugcccguggccauucacgccgaucagcugacaccuacauggcggguguacuccaccggcagcaauguguuucagaccagagccggcugucugaucggagccgagcacgugaacaauagcuacgagugcgacauccccaucggcgcuggcaucugugccagcuaccagacacagacaaacagccccagacgggcuagaagcguggccagccagagcaucauugccuacacaaugucucugggcgccgagaacagcguggccuacuccaacaacucuaucgcuauccccaccaacuucaccaucagcgugaccaccgagauccugccuguguccaugaccaagaccagcguggacugcaccauguacaucugcggcgauuccaccgagugcuccaaccugcugcugcaguacggcagcuucugcacccagcugaauagagcccugacagggaucgccguggaacaggacaagaacacccaagagguguucgcccaagugaagcaaaucuacaagaccccuccuaucaaggacuucggcggcuucaauuucagccagauucugcccgauccuagcaagcccagcaagcggagcuucaucgaggaccugcuguucaacaaagugacacuggccgacgccggcuucaucaagcaguauggcgauugucugggcgacauugccgccagggaucugauuugcgcccagaaguuuaacggacugacagugcugccuccucugcugaccgaugagaugaucgcccaguacacaucugcccugcuggccggcacaaucacaagcggcuggacauuuggagcuggcgccgcucugcagauccccuuugcuaugcagauggccuaccgguucaacggcaucggagugacccagaaugugcuguacgagaaccagaagcugaucgccaaccaguucaacagcgccaucggcaagauccaggacagccugagcagcacagcaagcgcccugggaaagcugcaggacguggucaaccagaaugcccaggcacugaacacccuggucaagcagcuguccuccaacuucggcgccaucagcucugugcugaacgauauccugagcagacuggacccuccugaggccgaggugcagaucgacagacugaucacaggcagacugcagagccuccagacauacgugacccagcagcugaucagagccgccgagauuagagccucugccaaucuggccgccaccaagaugucugagugugugcugggccagagcaagagaguggacuuuugcggcaagggcuaccagcugaugagcuucccucagucugccccucacggcgugguguuucugaacgugacauaugugcccgcucaagagaagaauuucaccaccgcuccagccaucugcaacgacggcaaagcccacuuuccuagagaaggcguguucguguccaacggcaccaacugguucgugacacagcggaacuucuacgagccccagaucaucaccaccgacaacaccuucgugucuggcaacugcgacguugugaucggcauugugaacaauaccguguacgacccucugcagcccgagcuggacagcggaggcggaggaucugacaucaucaagcugcugaacgagcaagugaacaaagagaugcagagcagcaaccuguacaugagcaugagcagcuggugcuacacccacagccuugauggcgccggacuguuccuguuugaucacgccgccgaggaauacgagcacgccaagaagcugaucaucuuccugaacgagaacaacgugcccgugcagcugaccagcauuucugccccugagcacaaguucgagggccugacacagaucuuccagaaggccuacgaacacgagcagcacaucagcgagagcaucaacaacaucguggaccacgccauuaagagcaaggaucacgccaccuucaacuuucugcagugguacguggccgaacagcacgaggaagaggugcuguucaaggacauccuggacaagaucgagcugaucggcaacgagaaccacggccuguaucuggccgaccaguacgugaagggaaucgccaagagcagaaagagcugaggacuaguuauaagacugacuagcccgaugggccucccaacgggcccuccuccccuccuugcaccgagauuaauaaaaaaaaaaaaaaaaaaaaaaaaaaaaaaaaaaaaaaaaaaaaaaaaaaaaaaaaaaaaaaaaugcaucccccccccccccccccccccccccccccccaaaggcucuuuucagagccaccagaauu

SEQ ID NO: 13108 - RNA, 4165 nt, Artificial Sequence
  SARS-CoV-2/Wuhan/WIV05/2019__EPI_ISL_402128 spike protein mRNA gc mod (1-1147)(I712C_T1077C) Ferritin construct
aggagaaagcuuaccauguucguguuucuggugcugcugccccugguguccagccagugugugaaccugaccaccagaacacagcugccuccagccuacaccaacagcuucaccagaggcguguacuaccccgacaagguguucagauccagcgugcugcacucuacccaggaccuguuccugccuuucuucagcaacgugaccugguuccacgccauccacguguccggcaccaauggcaccaagagauucgacaaccccgugcugcccuucaacgacgggguguacuuugccagcaccgagaaguccaacaucaucagaggcuggaucuucggcaccacacuggacagcaagacccagagccugcugaucgugaacaacgccaccaacguggucaucaaagugugcgaguuccaguucugcaacgaccccuuccugggcgucuacuaccacaagaacaacaagagcuggauggaaagcgaguuccggguguacagcagcgccaacaacugcaccuucgaguacgugucccagccuuuccugauggaccuggaaggcaagcagggcaacuucaagaaccugcgcgaguucguguucaagaacaucgacggcuacuucaaaaucuacagcaagcacaccccuaucaaccucgugcgggaucugccucagggcuucucugcucuggaaccccugguggaucugcccaucggcaucaacaucacccgguuucagacacugcuggcccugcacagaagcuaccugacaccuggcgauagcagcagcggauggacagcuggugccgccgcuuacuaugugggcuaccugcagccuagaaccuuccugcugaaguacaacgagaacggcaccaucaccgacgccguggauugugcucuggauccucugagcgagacaaagugcacccugaaguccuucaccguggaaaagggcaucuaccagaccagcaacuuccgggugcagcccaccgaauccaucgugcgguuccccaauaucaccaaucugugccccuucggcgagguguucaaugccaccagauucgccucuguguacgccuggaaccggaagcggaucagcaauugcguggccgacuacuccgugcuguacaacuccgccagcuucagcaccuucaagugcuacggcguguccccuaccaagcugaacgaccugugcuucacaaacguguacgccgacagcuucgugauccggggagaugaagugcggcagauugccccuggacagacaggcaagaucgccgacuacaacuacaagcugcccgacgacuucaccggcugugugauugccuggaacagcaacaaccuggacuccaaagucggcggcaacuacaauuaccuguaccggcuguuccggaaguccaaucugaagcccuucgagcgggacaucagcaccgaaaucuaucaggccggcagcaccccuugcaacggcguggaaggcuucaacugcuacuucccacugcaguccuacggcuuucagcccacaaauggcgugggcuaucagcccuacagagugguggugcugagcuucgaacugcugcaugcuccugccacagugugcggcccuaagaaaagcaccaaucucgugaagaacaaaugcgugaacuucaacuucaacggccugaccggcaccggcgugcugacagagagcaacaagaaguuccugccauuccagcaguuuggccgggauaucgccgauaccacagacgccguuagagauccccagacacuggaaauccuggacaucaccccaugcagcuucggcggagugucugugaucaccccuggcaccaacaccagcaaucagguggcagugcuguaccaggacgugaacuguaccgaagugcccguggccauucacgccgaucagcugacaccuacauggcggguguacuccaccggcagcaauguguuucagaccagagccggcugucugaucggagccgagcacgugaacaauagcuacgagugcgacauccccaucggcgcuggcaucugugccagcuaccagacacagacaaacagccccagacgggcuagaagcguggccagccagagcaucauugccuacacaaugucucugggcgccgagaacagcguggccuacuccaacaacucuugcgcuauccccaccaacuucaccaucagcgugaccaccgagauccugccuguguccaugaccaagaccagcguggacugcaccauguacaucugcggcgauuccaccgagugcuccaaccugcugcugcaguacggcagcuucugcacccagcugaauagagcccugacagggaucgccguggaacaggacaagaacacccaagagguguucgcccaagugaagcaaaucuacaagaccccuccuaucaaggacuucggcggcuucaauuucagccagauucugcccgauccuagcaagcccagcaagcggagcuucaucgaggaccugcuguucaacaaagugacacuggccgacgccggcuucaucaagcaguauggcgauugucugggcgacauugccgccagggaucugauuugcgcccagaaguuuaacggacugacagugcugccuccucugcugaccgaugagaugaucgcccaguacacaucugcccugcuggccggcacaaucacaagcggcuggacauuuggagcuggcgccgcucugcagauccccuuugcuaugcagauggccuaccgguucaacggcaucggagugacccagaaugugcuguacgagaaccagaagcugaucgccaaccaguucaacagcgccaucggcaagauccaggacagccugagcagcacagcaagcgcccugggaaagcugcaggacguggucaaccagaaugcccaggcacugaacacccuggucaagcagcuguccuccaacuucggcgccaucagcucugugcugaacgauauccugagcagacuggacaaggucgaggccgaggugcagaucgacagacugaucacaggcagacugcagagccuccagacauacgugacccagcagcugaucagagccgccgagauuagagccucugccaaucuggccgccaccaagaugucugagugugugcugggccagagcaagagaguggacuuuugcggcaagggcuaccaccugaugagcuucccucagucugccccucacggcgugguguuucugcacgugacauaugugcccgcucaagagaagaauuucaccugugcuccagccaucugccacgacggcaaagcccacuuuccuagagaaggcguguucguguccaacggcacccauugguucgugacacagcggaacuucuacgagccccagaucaucaccaccgacaacaccuucgugucuggcaacugcgacguugugaucggcauugugaacaauaccguguacgacccucugcagcccgagcuggacagcggaggcggaggaucugacaucaucaagcugcugaacgagcaagugaacaaagagaugcagagcagcaaccuguacaugagcaugagcagcuggugcuacacccacagccuugauggcgccggacuguuccuguuugaucacgccgccgaggaauacgagcacgccaagaagcugaucaucuuccugaacgagaacaacgugcccgugcagcugaccagcauuucugccccugagcacaaguucgagggccugacacagaucuuccagaaggccuacgaacacgagcagcacaucagcgagagcaucaacaacaucguggaccacgccauuaagagcaaggaucacgccaccuucaacuuucugcagugguacguggccgaacagcacgaggaagaggugcuguucaaggacauccuggacaagaucgagcugaucggcaacgagaaccacggccuguaucuggccgaccaguacgugaagggaaucgccaagagcagaaagagcugaggacuaguuauaagacugacuagcccgaugggccucccaacgggcccuccuccccuccuugcaccgagauuaauaaaaaaaaaaaaaaaaaaaaaaaaaaaaaaaaaaaaaaaaaaaaaaaaaaaaaaaaaaaaaaaaugcaucccccccccccccccccccccccccccccccaaaggcucuuuucagagccaccagaauu

SEQ ID NO: 13109 - RNA, 4165 nt, Artificial Sequence
  SARS-CoV-2/Wuhan/WIV05/2019__EPI_ISL_402128 spike protein mRNA gc mod (1-1147)(I714C_Y1110C) Ferritin construct
aggagaaagcuuaccauguucguguuucuggugcugcugccccugguguccagccagugugugaaccugaccaccagaacacagcugccuccagccuacaccaacagcuucaccagaggcguguacuaccccgacaagguguucagauccagcgugcugcacucuacccaggaccuguuccugccuuucuucagcaacgugaccugguuccacgccauccacguguccggcaccaauggcaccaagagauucgacaaccccgugcugcccuucaacgacgggguguacuuugccagcaccgagaaguccaacaucaucagaggcuggaucuucggcaccacacuggacagcaagacccagagccugcugaucgugaacaacgccaccaacguggucaucaaagugugcgaguuccaguucugcaacgaccccuuccugggcgucuacuaccacaagaacaacaagagcuggauggaaagcgaguuccggguguacagcagcgccaacaacugcaccuucgaguacgugucccagccuuuccugauggaccuggaaggcaagcagggcaacuucaagaaccugcgcgaguucguguucaagaacaucgacggcuacuucaaaaucuacagcaagcacaccccuaucaaccucgugcgggaucugccucagggcuucucugcucuggaaccccugguggaucugcccaucggcaucaacaucacccgguuucagacacugcuggcccugcacagaagcuaccugacaccuggcgauagcagcagcggauggacagcuggugccgccgcuuacuaugugggcuaccugcagccuagaaccuuccugcugaaguacaacgagaacggcaccaucaccgacgccguggauugugcucuggauccucugagcgagacaaagugcacccugaaguccuucaccguggaaaagggcaucuaccagaccagcaacuuccgggugcagcccaccgaauccaucgugcgguuccccaauaucaccaaucugugccccuucggcgagguguucaaugccaccagauucgccucuguguacgccuggaaccggaagcggaucagcaauugcguggccgacuacuccgugcuguacaacuccgccagcuucagcaccuucaagugcuacggcguguccccuaccaagcugaacgaccugugcuucacaaacguguacgccgacagcuucgugauccggggagaugaagugcggcagauugccccuggacagacaggcaagaucgccgacuacaacuacaagcugcccgacgacuucaccggcugugugauugccuggaacagcaacaaccuggacuccaaagucggcggcaacuacaauuaccuguaccggcuguuccggaaguccaaucugaagcccuucgagcgggacaucagcaccgaaaucuaucaggccggcagcaccccuugcaacggcguggaaggcuucaacugcuacuucccacugcaguccuacggcuuucagcccacaaauggcgugggcuaucagcccuacagagugguggugcugagcuucgaacugcugcaugcuccugccacagugugcggcccuaagaaaagcaccaaucucgugaagaacaaaugcgugaacuucaacuucaacggccugaccggcaccggcgugcugacagagagcaacaagaaguuccugccauuccagcaguuuggccgggauaucgccgauaccacagacgccguuagagauccccagacacuggaaauccuggacaucaccccaugcagcuucggcggagugucugugaucaccccuggcaccaacaccagcaaucagguggcagugcuguaccaggacgugaacuguaccgaagugcccguggccauucacgccgaucagcugacaccuacauggcggguguacuccaccggcagcaauguguuucagaccagagccggcugucugaucggagccgagcacgugaacaauagcuacgagugcgacauccccaucggcgcuggcaucugugccagcuaccagacacagacaaacagccccagacgggcuagaagcguggccagccagagcaucauugccuacacaaugucucugggcgccgagaacagcguggccuacuccaacaacucuaucgcuugccccaccaacuucaccaucagcgugaccaccgagauccugccuguguccaugaccaagaccagcguggacugcaccauguacaucugcggcgauuccaccgagugcuccaaccugcugcugcaguacggcagcuucugcacccagcugaauagagcccugacagggaucgccguggaacaggacaagaacacccaagagguguucgcccaagugaagcaaaucuacaagaccccuccuaucaaggacuucggcggcuucaauuucagccagauucugcccgauccuagcaagcccagcaagcggagcuucaucgaggaccugcuguucaacaaagugacacuggccgacgccggcuucaucaagcaguauggcgauugucugggcgacauugccgccagggaucugauuugcgcccagaaguuuaacggacugacagugcugccuccucugcugaccgaugagaugaucgcccaguacacaucugcccugcuggccggcacaaucacaagcggcuggacauuuggagcuggcgccgcucugcagauccccuuugcuaugcagauggccuaccgguucaacggcaucggagugacccagaaugugcuguacgagaaccagaagcugaucgccaaccaguucaacagcgccaucggcaagauccaggacagccugagcagcacagcaagcgcccugggaaagcugcaggacguggucaaccagaaugcccaggcacugaacacccuggucaagcagcuguccuccaacuucggcgccaucagcucugugcugaacgauauccugagcagacuggacaaggucgaggccgaggugcagaucgacagacugaucacaggcagacugcagagccuccagacauacgugacccagcagcugaucagagccgccgagauuagagccucugccaaucuggccgccaccaagaugucugagugugugcugggccagagcaagagaguggacuuuugcggcaagggcuaccaccugaugagcuucccucagucugccccucacggcgugguguuucugcacgugacauaugugcccgcucaagagaagaauuucaccaccgcuccagccaucugccacgacggcaaagcccacuuuccuagagaaggcguguucguguccaacggcacccauugguucgugacacagcggaacuucugugagccccagaucaucaccaccgacaacaccuucgugucuggcaacugcgacguugugaucggcauugugaacaauaccguguacgacccucugcagcccgagcuggacagcggaggcggaggaucugacaucaucaagcugcugaacgagcaagugaacaaagagaugcagagcagcaaccuguacaugagcaugagcagcuggugcuacacccacagccuugauggcgccggacuguuccuguuugaucacgccgccgaggaauacgagcacgccaagaagcugaucaucuuccugaacgagaacaacgugcccgugcagcugaccagcauuucugccccugagcacaaguucgagggccugacacagaucuuccagaaggccuacgaacacgagcagcacaucagcgagagcaucaacaacaucguggaccacgccauuaagagcaaggaucacgccaccuucaacuuucugcagugguacguggccgaacagcacgaggaagaggugcuguucaaggacauccuggacaagaucgagcugaucggcaacgagaaccacggccuguaucuggccgaccaguacgugaagggaaucgccaagagcagaaagagcugaggacuaguuauaagacugacuagcccgaugggccucccaacgggcccuccuccccuccuugcaccgagauuaauaaaaaaaaaaaaaaaaaaaaaaaaaaaaaaaaaaaaaaaaaaaaaaaaaaaaaaaaaaaaaaaaugcaucccccccccccccccccccccccccccccccaaaggcucuuuucagagccaccagaauu

SEQ ID NO: 13110 - RNA, 4165 nt, Artificial Sequence
  SARS-CoV-2/Wuhan/WIV05/2019__EPI_ISL_402128 spike protein mRNA gc mod (1-1147)(P715C_P1069C) Ferritin construct
aggagaaagcuuaccauguucguguuucuggugcugcugccccugguguccagccagugugugaaccugaccaccagaacacagcugccuccagccuacaccaacagcuucaccagaggcguguacuaccccgacaagguguucagauccagcgugcugcacucuacccaggaccuguuccugccuuucuucagcaacgugaccugguuccacgccauccacguguccggcaccaauggcaccaagagauucgacaaccccgugcugcccuucaacgacgggguguacuuugccagcaccgagaaguccaacaucaucagaggcuggaucuucggcaccacacuggacagcaagacccagagccugcugaucgugaacaacgccaccaacguggucaucaaagugugcgaguuccaguucugcaacgaccccuuccugggcgucuacuaccacaagaacaacaagagcuggauggaaagcgaguuccggguguacagcagcgccaacaacugcaccuucgaguacgugucccagccuuuccugauggaccuggaaggcaagcagggcaacuucaagaaccugcgcgaguucguguucaagaacaucgacggcuacuucaaaaucuacagcaagcacaccccuaucaaccucgugcgggaucugccucagggcuucucugcucuggaaccccugguggaucugcccaucggcaucaacaucacccgguuucagacacugcuggcccugcacagaagcuaccugacaccuggcgauagcagcagcggauggacagcuggugccgccgcuuacuaugugggcuaccugcagccuagaaccuuccugcugaaguacaacgagaacggcaccaucaccgacgccguggauugugcucuggauccucugagcgagacaaagugcacccugaaguccuucaccguggaaaagggcaucuaccagaccagcaacuuccgggugcagcccaccgaauccaucgugcgguuccccaauaucaccaaucugugccccuucggcgagguguucaaugccaccagauucgccucuguguacgccuggaaccggaagcggaucagcaauugcguggccgacuacuccgugcuguacaacuccgccagcuucagcaccuucaagugcuacggcguguccccuaccaagcugaacgaccugugcuucacaaacguguacgccgacagcuucgugauccggggagaugaagugcggcagauugccccuggacagacaggcaagaucgccgacuacaacuacaagcugcccgacgacuucaccggcugugugauugccuggaacagcaacaaccuggacuccaaagucggcggcaacuacaauuaccuguaccggcuguuccggaaguccaaucugaagcccuucgagcgggacaucagcaccgaaaucuaucaggccggcagcaccccuugcaacggcguggaaggcuucaacugcuacuucccacugcaguccuacggcuuucagcccacaaauggcgugggcuaucagcccuacagagugguggugcugagcuucgaacugcugcaugcuccugccacagugugcggcccuaagaaaagcaccaaucucgugaagaacaaaugcgugaacuucaacuucaacggccugaccggcaccggcgugcugacagagagcaacaagaaguuccugccauuccagcaguuuggccgggauaucgccgauaccacagacgccguuagagauccccagacacuggaaauccuggacaucaccccaugcagcuucggcggagugucugugaucaccccuggcaccaacaccagcaaucagguggcagugcuguaccaggacgugaacuguaccgaagugcccguggccauucacgccgaucagcugacaccuacauggcggguguacuccaccggcagcaauguguuucagaccagagccggcugucugaucggagccgagcacgugaacaauagcuacgagugcgacauccccaucggcgcuggcaucugugccagcuaccagacacagacaaacagccccagacgggcuagaagcguggccagccagagcaucauugccuacacaaugucucugggcgccgagaacagcguggccuacuccaacaacucuaucgcuaucugcaccaacuucaccaucagcgugaccaccgagauccugccuguguccaugaccaagaccagcguggacugcaccauguacaucugcggcgauuccaccgagugcuccaaccugcugcugcaguacggcagcuucugcacccagcugaauagagcccugacagggaucgccguggaacaggacaagaacacccaagagguguucgcccaagugaagcaaaucuacaagaccccuccuaucaaggacuucggcggcuucaauuucagccagauucugcccgauccuagcaagcccagcaagcggagcuucaucgaggaccugcuguucaacaaagugacacuggccgacgccggcuucaucaagcaguauggcgauugucugggcgacauugccgccagggaucugauuugcgcccagaaguuuaacggacugacagugcugccuccucugcugaccgaugagaugaucgcccaguacacaucugcccugcuggccggcacaaucacaagcggcuggacauuuggagcuggcgccgcucugcagauccccuuugcuaugcagauggccuaccgguucaacggcaucggagugacccagaaugugcuguacgagaaccagaagcugaucgccaaccaguucaacagcgccaucggcaagauccaggacagccugagcagcacagcaagcgcccugggaaagcugcaggacguggucaaccagaaugcccaggcacugaacacccuggucaagcagcuguccuccaacuucggcgccaucagcucugugcugaacgauauccugagcagacuggacaaggucgaggccgaggugcagaucgacagacugaucacaggcagacugcagagccuccagacauacgugacccagcagcugaucagagccgccgagauuagagccucugccaaucuggccgccaccaagaugucugagugugugcugggccagagcaagagaguggacuuuugcggcaagggcuaccaccugaugagcuucccucagucugccccucacggcgugguguuucugcacgugacauaugugugugcucaagagaagaauuucaccaccgcuccagccaucugccacgacggcaaagcccacuuuccuagagaaggcguguucguguccaacggcacccauugguucgugacacagcggaacuucuacgagccccagaucaucaccaccgacaacaccuucgugucuggcaacugcgacguugugaucggcauugugaacaauaccguguacgacccucugcagcccgagcuggacagcggaggcggaggaucugacaucaucaagcugcugaacgagcaagugaacaaagagaugcagagcagcaaccuguacaugagcaugagcagcuggugcuacacccacagccuugauggcgccggacuguuccuguuugaucacgccgccgaggaauacgagcacgccaagaagcugaucaucuuccugaacgagaacaacgugcccgugcagcugaccagcauuucugccccugagcacaaguucgagggccugacacagaucuuccagaaggccuacgaacacgagcagcacaucagcgagagcaucaacaacaucguggaccacgccauuaagagcaaggaucacgccaccuucaacuuucugcagugguacguggccgaacagcacgaggaagaggugcuguucaaggacauccuggacaagaucgagcugaucggcaacgagaaccacggccuguaucuggccgaccaguacgugaagggaaucgccaagagcagaaagagcugaggacuaguuauaagacugacuagcccgaugggccucccaacgggcccuccuccccuccuugcaccgagauuaauaaaaaaaaaaaaaaaaaaaaaaaaaaaaaaaaaaaaaaaaaaaaaaaaaaaaaaaaaaaaaaaaugcaucccccccccccccccccccccccccccccccaaaggcucuuuucagagccaccagaauu

SEQ ID NO: 13111 - RNA, 4165 nt, Artificial Sequence
  SARS-CoV-2/Wuhan/WIV05/2019__EPI_ISL_402128 spike protein mRNA gc mod (1-1147)(G889C_L1034C) Ferritin construct
aggagaaagcuuaccauguucguguuucuggugcugcugccccugguguccagccagugugugaaccugaccaccagaacacagcugccuccagccuacaccaacagcuucaccagaggcguguacuaccccgacaagguguucagauccagcgugcugcacucuacccaggaccuguuccugccuuucuucagcaacgugaccugguuccacgccauccacguguccggcaccaauggcaccaagagauucgacaaccccgugcugcccuucaacgacgggguguacuuugccagcaccgagaaguccaacaucaucagaggcuggaucuucggcaccacacuggacagcaagacccagagccugcugaucgugaacaacgccaccaacguggucaucaaagugugcgaguuccaguucugcaacgaccccuuccugggcgucuacuaccacaagaacaacaagagcuggauggaaagcgaguuccggguguacagcagcgccaacaacugcaccuucgaguacgugucccagccuuuccugauggaccuggaaggcaagcagggcaacuucaagaaccugcgcgaguucguguucaagaacaucgacggcuacuucaaaaucuacagcaagcacaccccuaucaaccucgugcgggaucugccucagggcuucucugcucuggaaccccugguggaucugcccaucggcaucaacaucacccgguuucagacacugcuggcccugcacagaagcuaccugacaccuggcgauagcagcagcggauggacagcuggugccgccgcuuacuaugugggcuaccugcagccuagaaccuuccugcugaaguacaacgagaacggcaccaucaccgacgccguggauugugcucuggauccucugagcgagacaaagugcacccugaaguccuucaccguggaaaagggcaucuaccagaccagcaacuuccgggugcagcccaccgaauccaucgugcgguuccccaauaucaccaaucugugccccuucggcgagguguucaaugccaccagauucgccucuguguacgccuggaaccggaagcggaucagcaauugcguggccgacuacuccgugcuguacaacuccgccagcuucagcaccuucaagugcuacggcguguccccuaccaagcugaacgaccugugcuucacaaacguguacgccgacagcuucgugauccggggagaugaagugcggcagauugccccuggacagacaggcaagaucgccgacuacaacuacaagcugcccgacgacuucaccggcugugugauugccuggaacagcaacaaccuggacuccaaagucggcggcaacuacaauuaccuguaccggcuguuccggaaguccaaucugaagcccuucgagcgggacaucagcaccgaaaucuaucaggccggcagcaccccuugcaacggcguggaaggcuucaacugcuacuucccacugcaguccuacggcuuucagcccacaaauggcgugggcuaucagcccuacagagugguggugcugagcuucgaacugcugcaugcuccugccacagugugcggcccuaagaaaagcaccaaucucgugaagaacaaaugcgugaacuucaacuucaacggccugaccggcaccggcgugcugacagagagcaacaagaaguuccugccauuccagcaguuuggccgggauaucgccgauaccacagacgccguuagagauccccagacacuggaaauccuggacaucaccccaugcagcuucggcggagugucugugaucaccccuggcaccaacaccagcaaucagguggcagugcuguaccaggacgugaacuguaccgaagugcccguggccauucacgccgaucagcugacaccuacauggcggguguacuccaccggcagcaauguguuucagaccagagccggcugucugaucggagccgagcacgugaacaauagcuacgagugcgacauccccaucggcgcuggcaucugugccagcuaccagacacagacaaacagccccagacgggcuagaagcguggccagccagagcaucauugccuacacaaugucucugggcgccgagaacagcguggccuacuccaacaacucuaucgcuauccccaccaacuucaccaucagcgugaccaccgagauccugccuguguccaugaccaagaccagcguggacugcaccauguacaucugcggcgauuccaccgagugcuccaaccugcugcugcaguacggcagcuucugcacccagcugaauagagcccugacagggaucgccguggaacaggacaagaacacccaagagguguucgcccaagugaagcaaaucuacaagaccccuccuaucaaggacuucggcggcuucaauuucagccagauucugcccgauccuagcaagcccagcaagcggagcuucaucgaggaccugcuguucaacaaagugacacuggccgacgccggcuucaucaagcaguauggcgauugucugggcgacauugccgccagggaucugauuugcgcccagaaguuuaacggacugacagugcugccuccucugcugaccgaugagaugaucgcccaguacacaucugcccugcuggccggcacaaucacaagcggcuggacauuuugcgcuggcgccgcucugcagauccccuuugcuaugcagauggccuaccgguucaacggcaucggagugacccagaaugugcuguacgagaaccagaagcugaucgccaaccaguucaacagcgccaucggcaagauccaggacagccugagcagcacagcaagcgcccugggaaagcugcaggacguggucaaccagaaugcccaggcacugaacacccuggucaagcagcuguccuccaacuucggcgccaucagcucugugcugaacgauauccugagcagacuggacaaggucgaggccgaggugcagaucgacagacugaucacaggcagacugcagagccuccagacauacgugacccagcagcugaucagagccgccgagauuagagccucugccaaucuggccgccaccaagaugucugaguguguguguggccagagcaagagaguggacuuuugcggcaagggcuaccaccugaugagcuucccucagucugccccucacggcgugguguuucugcacgugacauaugugcccgcucaagagaagaauuucaccaccgcuccagccaucugccacgacggcaaagcccacuuuccuagagaaggcguguucguguccaacggcacccauugguucgugacacagcggaacuucuacgagccccagaucaucaccaccgacaacaccuucgugucuggcaacugcgacguugugaucggcauugugaacaauaccguguacgacccucugcagcccgagcuggacagcggaggcggaggaucugacaucaucaagcugcugaacgagcaagugaacaaagagaugcagagcagcaaccuguacaugagcaugagcagcuggugcuacacccacagccuugauggcgccggacuguuccuguuugaucacgccgccgaggaauacgagcacgccaagaagcugaucaucuuccugaacgagaacaacgugcccgugcagcugaccagcauuucugccccugagcacaaguucgagggccugacacagaucuuccagaaggccuacgaacacgagcagcacaucagcgagagcaucaacaacaucguggaccacgccauuaagagcaaggaucacgccaccuucaacuuucugcagugguacguggccgaacagcacgaggaagaggugcuguucaaggacauccuggacaagaucgagcugaucggcaacgagaaccacggccuguaucuggccgaccaguacgugaagggaaucgccaagagcagaaagagcugaggacuaguuauaagacugacuagcccgaugggccucccaacgggcccuccuccccuccuugcaccgagauuaauaaaaaaaaaaaaaaaaaaaaaaaaaaaaaaaaaaaaaaaaaaaaaaaaaaaaaaaaaaaaaaaaugcaucccccccccccccccccccccccccccccccaaaggcucuuuucagagccaccagaauu

SEQ ID NO: 13112 - RNA, 4165 nt, Artificial Sequence
  SARS-CoV-2/Wuhan/WIV05/2019__EPI_ISL_402128 spike protein mRNA gc mod (1-1147)(I909C_Y1047C) Ferritin construct
aggagaaagcuuaccauguucguguuucuggugcugcugccccugguguccagccagugugugaaccugaccaccagaacacagcugccuccagccuacaccaacagcuucaccagaggcguguacuaccccgacaagguguucagauccagcgugcugcacucuacccaggaccuguuccugccuuucuucagcaacgugaccugguuccacgccauccacguguccggcaccaauggcaccaagagauucgacaaccccgugcugcccuucaacgacgggguguacuuugccagcaccgagaaguccaacaucaucagaggcuggaucuucggcaccacacuggacagcaagacccagagccugcugaucgugaacaacgccaccaacguggucaucaaagugugcgaguuccaguucugcaacgaccccuuccugggcgucuacuaccacaagaacaacaagagcuggauggaaagcgaguuccggguguacagcagcgccaacaacugcaccuucgaguacgugucccagccuuuccugauggaccuggaaggcaagcagggcaacuucaagaaccugcgcgaguucguguucaagaacaucgacggcuacuucaaaaucuacagcaagcacaccccuaucaaccucgugcgggaucugccucagggcuucucugcucuggaaccccugguggaucugcccaucggcaucaacaucacccgguuucagacacugcuggcccugcacagaagcuaccugacaccuggcgauagcagcagcggauggacagcuggugccgccgcuuacuaugugggcuaccugcagccuagaaccuuccugcugaaguacaacgagaacggcaccaucaccgacgccguggauugugcucuggauccucugagcgagacaaagugcacccugaaguccuucaccguggaaaagggcaucuaccagaccagcaacuuccgggugcagcccaccgaauccaucgugcgguuccccaauaucaccaaucugugccccuucggcgagguguucaaugccaccagauucgccucuguguacgccuggaaccggaagcggaucagcaauugcguggccgacuacuccgugcuguacaacuccgccagcuucagcaccuucaagugcuacggcguguccccuaccaagcugaacgaccugugcuucacaaacguguacgccgacagcuucgugauccggggagaugaagugcggcagauugccccuggacagacaggcaagaucgccgacuacaacuacaagcugcccgacgacuucaccggcugugugauugccuggaacagcaacaaccuggacuccaaagucggcggcaacuacaauuaccuguaccggcuguuccggaaguccaaucugaagcccuucgagcgggacaucagcaccgaaaucuaucaggccggcagcaccccuugcaacggcguggaaggcuucaacugcuacuucccacugcaguccuacggcuuucagcccacaaauggcgugggcuaucagcccuacagagugguggugcugagcuucgaacugcugcaugcuccugccacagugugcggcccuaagaaaagcaccaaucucgugaagaacaaaugcgugaacuucaacuucaacggccugaccggcaccggcgugcugacagagagcaacaagaaguuccugccauuccagcaguuuggccgggauaucgccgauaccacagacgccguuagagauccccagacacuggaaauccuggacaucaccccaugcagcuucggcggagugucugugaucaccccuggcaccaacaccagcaaucagguggcagugcuguaccaggacgugaacuguaccgaagugcccguggccauucacgccgaucagcugacaccuacauggcggguguacuccaccggcagcaauguguuucagaccagagccggcugucugaucggagccgagcacgugaacaauagcuacgagugcgacauccccaucggcgcuggcaucugugccagcuaccagacacagacaaacagccccagacgggcuagaagcguggccagccagagcaucauugccuacacaaugucucugggcgccgagaacagcguggccuacuccaacaacucuaucgcuauccccaccaacuucaccaucagcgugaccaccgagauccugccuguguccaugaccaagaccagcguggacugcaccauguacaucugcggcgauuccaccgagugcuccaaccugcugcugcaguacggcagcuucugcacccagcugaauagagcccugacagggaucgccguggaacaggacaagaacacccaagagguguucgcccaagugaagcaaaucuacaagaccccuccuaucaaggacuucggcggcuucaauuucagccagauucugcccgauccuagcaagcccagcaagcggagcuucaucgaggaccugcuguucaacaaagugacacuggccgacgccggcuucaucaagcaguauggcgauugucugggcgacauugccgccagggaucugauuugcgcccagaaguuuaacggacugacagugcugccuccucugcugaccgaugagaugaucgcccaguacacaucugcccugcuggccggcacaaucacaagcggcuggacauuuggagcuggcgccgcucugcagauccccuuugcuaugcagauggccuaccgguucaacggcugcggagugacccagaaugugcuguacgagaaccagaagcugaucgccaaccaguucaacagcgccaucggcaagauccaggacagccugagcagcacagcaagcgcccugggaaagcugcaggacguggucaaccagaaugcccaggcacugaacacccuggucaagcagcuguccuccaacuucggcgccaucagcucugugcugaacgauauccugagcagacuggacaaggucgaggccgaggugcagaucgacagacugaucacaggcagacugcagagccuccagacauacgugacccagcagcugaucagagccgccgagauuagagccucugccaaucuggccgccaccaagaugucugagugugugcugggccagagcaagagaguggacuuuugcggcaagggcugucaccugaugagcuucccucagucugccccucacggcgugguguuucugcacgugacauaugugcccgcucaagagaagaauuucaccaccgcuccagccaucugccacgacggcaaagcccacuuuccuagagaaggcguguucguguccaacggcacccauugguucgugacacagcggaacuucuacgagccccagaucaucaccaccgacaacaccuucgugucuggcaacugcgacguugugaucggcauugugaacaauaccguguacgacccucugcagcccgagcuggacagcggaggcggaggaucugacaucaucaagcugcugaacgagcaagugaacaaagagaugcagagcagcaaccuguacaugagcaugagcagcuggugcuacacccacagccuugauggcgccggacuguuccuguuugaucacgccgccgaggaauacgagcacgccaagaagcugaucaucuuccugaacgagaacaacgugcccgugcagcugaccagcauuucugccccugagcacaaguucgagggccugacacagaucuuccagaaggccuacgaacacgagcagcacaucagcgagagcaucaacaacaucguggaccacgccauuaagagcaaggaucacgccaccuucaacuuucugcagugguacguggccgaacagcacgaggaagaggugcuguucaaggacauccuggacaagaucgagcugaucggcaacgagaaccacggccuguaucuggccgaccaguacgugaagggaaucgccaagagcagaaagagcugaggacuaguuauaagacugacuagcccgaugggccucccaacgggcccuccuccccuccuugcaccgagauuaauaaaaaaaaaaaaaaaaaaaaaaaaaaaaaaaaaaaaaaaaaaaaaaaaaaaaaaaaaaaaaaaaugcaucccccccccccccccccccccccccccccccaaaggcucuuuucagagccaccagaauu

SEQ ID NO: 13113 - RNA, 4165 nt, Artificial Sequence
  SARS-CoV-2/Wuhan/WIV05/2019__EPI_ISL_402128 spike protein mRNA gc mod (1-1147)(Q965C_S1003C) Ferritin construct
aggagaaagcuuaccauguucguguuucuggugcugcugccccugguguccagccagugugugaaccugaccaccagaacacagcugccuccagccuacaccaacagcuucaccagaggcguguacuaccccgacaagguguucagauccagcgugcugcacucuacccaggaccuguuccugccuuucuucagcaacgugaccugguuccacgccauccacguguccggcaccaauggcaccaagagauucgacaaccccgugcugcccuucaacgacgggguguacuuugccagcaccgagaaguccaacaucaucagaggcuggaucuucggcaccacacuggacagcaagacccagagccugcugaucgugaacaacgccaccaacguggucaucaaagugugcgaguuccaguucugcaacgaccccuuccugggcgucuacuaccacaagaacaacaagagcuggauggaaagcgaguuccggguguacagcagcgccaacaacugcaccuucgaguacgugucccagccuuuccugauggaccuggaaggcaagcagggcaacuucaagaaccugcgcgaguucguguucaagaacaucgacggcuacuucaaaaucuacagcaagcacaccccuaucaaccucgugcgggaucugccucagggcuucucugcucuggaaccccugguggaucugcccaucggcaucaacaucacccgguuucagacacugcuggcccugcacagaagcuaccugacaccuggcgauagcagcagcggauggacagcuggugccgccgcuuacuaugugggcuaccugcagccuagaaccuuccugcugaaguacaacgagaacggcaccaucaccgacgccguggauugugcucuggauccucugagcgagacaaagugcacccugaaguccuucaccguggaaaagggcaucuaccagaccagcaacuuccgggugcagcccaccgaauccaucgugcgguuccccaauaucaccaaucugugccccuucggcgagguguucaaugccaccagauucgccucuguguacgccuggaaccggaagcggaucagcaauugcguggccgacuacuccgugcuguacaacuccgccagcuucagcaccuucaagugcuacggcguguccccuaccaagcugaacgaccugugcuucacaaacguguacgccgacagcuucgugauccggggagaugaagugcggcagauugccccuggacagacaggcaagaucgccgacuacaacuacaagcugcccgacgacuucaccggcugugugauugccuggaacagcaacaaccuggacuccaaagucggcggcaacuacaauuaccuguaccggcuguuccggaaguccaaucugaagcccuucgagcgggacaucagcaccgaaaucuaucaggccggcagcaccccuugcaacggcguggaaggcuucaacugcuacuucccacugcaguccuacggcuuucagcccacaaauggcgugggcuaucagcccuacagagugguggugcugagcuucgaacugcugcaugcuccugccacagugugcggcccuaagaaaagcaccaaucucgugaagaacaaaugcgugaacuucaacuucaacggccugaccggcaccggcgugcugacagagagcaacaagaaguuccugccauuccagcaguuuggccgggauaucgccgauaccacagacgccguuagagauccccagacacuggaaauccuggacaucaccccaugcagcuucggcggagugucugugaucaccccuggcaccaacaccagcaaucagguggcagugcuguaccaggacgugaacuguaccgaagugcccguggccauucacgccgaucagcugacaccuacauggcggguguacuccaccggcagcaauguguuucagaccagagccggcugucugaucggagccgagcacgugaacaauagcuacgagugcgacauccccaucggcgcuggcaucugugccagcuaccagacacagacaaacagccccagacgggcuagaagcguggccagccagagcaucauugccuacacaaugucucugggcgccgagaacagcguggccuacuccaacaacucuaucgcuauccccaccaacuucaccaucagcgugaccaccgagauccugccuguguccaugaccaagaccagcguggacugcaccauguacaucugcggcgauuccaccgagugcuccaaccugcugcugcaguacggcagcuucugcacccagcugaauagagcccugacagggaucgccguggaacaggacaagaacacccaagagguguucgcccaagugaagcaaaucuacaagaccccuccuaucaaggacuucggcggcuucaauuucagccagauucugcccgauccuagcaagcccagcaagcggagcuucaucgaggaccugcuguucaacaaagugacacuggccgacgccggcuucaucaagcaguauggcgauugucugggcgacauugccgccagggaucugauuugcgcccagaaguuuaacggacugacagugcugccuccucugcugaccgaugagaugaucgcccaguacacaucugcccugcuggccggcacaaucacaagcggcuggacauuuggagcuggcgccgcucugcagauccccuuugcuaugcagauggccuaccgguucaacggcaucggagugacccagaaugugcuguacgagaaccagaagcugaucgccaaccaguucaacagcgccaucggcaagauccaggacagccugagcagcacagcaagcgcccugggaaagcugcaggacguggucaaccagaaugcccaggcacugaacacccuggucaagugccuguccuccaacuucggcgccaucagcucugugcugaacgauauccugagcagacuggacaaggucgaggccgaggugcagaucgacagacugaucacaggcagacugcagugucuccagacauacgugacccagcagcugaucagagccgccgagauuagagccucugccaaucuggccgccaccaagaugucugagugugugcugggccagagcaagagaguggacuuuugcggcaagggcuaccaccugaugagcuucccucagucugccccucacggcgugguguuucugcacgugacauaugugcccgcucaagagaagaauuucaccaccgcuccagccaucugccacgacggcaaagcccacuuuccuagagaaggcguguucguguccaacggcacccauugguucgugacacagcggaacuucuacgagccccagaucaucaccaccgacaacaccuucgugucuggcaacugcgacguugugaucggcauugugaacaauaccguguacgacccucugcagcccgagcuggacagcggaggcggaggaucugacaucaucaagcugcugaacgagcaagugaacaaagagaugcagagcagcaaccuguacaugagcaugagcagcuggugcuacacccacagccuugauggcgccggacuguuccuguuugaucacgccgccgaggaauacgagcacgccaagaagcugaucaucuuccugaacgagaacaacgugcccgugcagcugaccagcauuucugccccugagcacaaguucgagggccugacacagaucuuccagaaggccuacgaacacgagcagcacaucagcgagagcaucaacaacaucguggaccacgccauuaagagcaaggaucacgccaccuucaacuuucugcagugguacguggccgaacagcacgaggaagaggugcuguucaaggacauccuggacaagaucgagcugaucggcaacgagaaccacggccuguaucuggccgaccaguacgugaagggaaucgccaagagcagaaagagcugaggacuaguuauaagacugacuagcccgaugggccucccaacgggcccuccuccccuccuugcaccgagauuaauaaaaaaaaaaaaaaaaaaaaaaaaaaaaaaaaaaaaaaaaaaaaaaaaaaaaaaaaaaaaaaaaugcaucccccccccccccccccccccccccccccccaaaggcucuuuucagagccaccagaauu

SEQ ID NO: 13114 - RNA, 4165 nt, Artificial Sequence
  SARS-CoV-2/Wuhan/WIV05/2019__EPI_ISL_402128 spike protein mRNA gc mod (1-1147)(F970C_G999C) Ferritin construct
aggagaaagcuuaccauguucguguuucuggugcugcugccccugguguccagccagugugugaaccugaccaccagaacacagcugccuccagccuacaccaacagcuucaccagaggcguguacuaccccgacaagguguucagauccagcgugcugcacucuacccaggaccuguuccugccuuucuucagcaacgugaccugguuccacgccauccacguguccggcaccaauggcaccaagagauucgacaaccccgugcugcccuucaacgacgggguguacuuugccagcaccgagaaguccaacaucaucagaggcuggaucuucggcaccacacuggacagcaagacccagagccugcugaucgugaacaacgccaccaacguggucaucaaagugugcgaguuccaguucugcaacgaccccuuccugggcgucuacuaccacaagaacaacaagagcuggauggaaagcgaguuccggguguacagcagcgccaacaacugcaccuucgaguacgugucccagccuuuccugauggaccuggaaggcaagcagggcaacuucaagaaccugcgcgaguucguguucaagaacaucgacggcuacuucaaaaucuacagcaagcacaccccuaucaaccucgugcgggaucugccucagggcuucucugcucuggaaccccugguggaucugcccaucggcaucaacaucacccgguuucagacacugcuggcccugcacagaagcuaccugacaccuggcgauagcagcagcggauggacagcuggugccgccgcuuacuaugugggcuaccugcagccuagaaccuuccugcugaaguacaacgagaacggcaccaucaccgacgccguggauugugcucuggauccucugagcgagacaaagugcacccugaaguccuucaccguggaaaagggcaucuaccagaccagcaacuuccgggugcagcccaccgaauccaucgugcgguuccccaauaucaccaaucugugccccuucggcgagguguucaaugccaccagauucgccucuguguacgccuggaaccggaagcggaucagcaauugcguggccgacuacuccgugcuguacaacuccgccagcuucagcaccuucaagugcuacggcguguccccuaccaagcugaacgaccugugcuucacaaacguguacgccgacagcuucgugauccggggagaugaagugcggcagauugccccuggacagacaggcaagaucgccgacuacaacuacaagcugcccgacgacuucaccggcugugugauugccuggaacagcaacaaccuggacuccaaagucggcggcaacuacaauuaccuguaccggcuguuccggaaguccaaucugaagcccuucgagcgggacaucagcaccgaaaucuaucaggccggcagcaccccuugcaacggcguggaaggcuucaacugcuacuucccacugcaguccuacggcuuucagcccacaaauggcgugggcuaucagcccuacagagugguggugcugagcuucgaacugcugcaugcuccugccacagugugcggcccuaagaaaagcaccaaucucgugaagaacaaaugcgugaacuucaacuucaacggccugaccggcaccggcgugcugacagagagcaacaagaaguuccugccauuccagcaguuuggccgggauaucgccgauaccacagacgccguuagagauccccagacacuggaaauccuggacaucaccccaugcagcuucggcggagugucugugaucaccccuggcaccaacaccagcaaucagguggcagugcuguaccaggacgugaacuguaccgaagugcccguggccauucacgccgaucagcugacaccuacauggcggguguacuccaccggcagcaauguguuucagaccagagccggcugucugaucggagccgagcacgugaacaauagcuacgagugcgacauccccaucggcgcuggcaucugugccagcuaccagacacagacaaacagccccagacgggcuagaagcguggccagccagagcaucauugccuacacaaugucucugggcgccgagaacagcguggccuacuccaacaacucuaucgcuauccccaccaacuucaccaucagcgugaccaccgagauccugccuguguccaugaccaagaccagcguggacugcaccauguacaucugcggcgauuccaccgagugcuccaaccugcugcugcaguacggcagcuucugcacccagcugaauagagcccugacagggaucgccguggaacaggacaagaacacccaagagguguucgcccaagugaagcaaaucuacaagaccccuccuaucaaggacuucggcggcuucaauuucagccagauucugcccgauccuagcaagcccagcaagcggagcuucaucgaggaccugcuguucaacaaagugacacuggccgacgccggcuucaucaagcaguauggcgauugucugggcgacauugccgccagggaucugauuugcgcccagaaguuuaacggacugacagugcugccuccucugcugaccgaugagaugaucgcccaguacacaucugcccugcuggccggcacaaucacaagcggcuggacauuuggagcuggcgccgcucugcagauccccuuugcuaugcagauggccuaccgguucaacggcaucggagugacccagaaugugcuguacgagaaccagaagcugaucgccaaccaguucaacagcgccaucggcaagauccaggacagccugagcagcacagcaagcgcccugggaaagcugcaggacguggucaaccagaaugcccaggcacugaacacccuggucaagcagcuguccuccaacugcggcgccaucagcucugugcugaacgauauccugagcagacuggacaaggucgaggccgaggugcagaucgacagacugaucacauguagacugcagagccuccagacauacgugacccagcagcugaucagagccgccgagauuagagccucugccaaucuggccgccaccaagaugucugagugugugcugggccagagcaagagaguggacuuuugcggcaagggcuaccaccugaugagcuucccucagucugccccucacggcgugguguuucugcacgugacauaugugcccgcucaagagaagaauuucaccaccgcuccagccaucugccacgacggcaaagcccacuuuccuagagaaggcguguucguguccaacggcacccauugguucgugacacagcggaacuucuacgagccccagaucaucaccaccgacaacaccuucgugucuggcaacugcgacguugugaucggcauugugaacaauaccguguacgacccucugcagcccgagcuggacagcggaggcggaggaucugacaucaucaagcugcugaacgagcaagugaacaaagagaugcagagcagcaaccuguacaugagcaugagcagcuggugcuacacccacagccuugauggcgccggacuguuccuguuugaucacgccgccgaggaauacgagcacgccaagaagcugaucaucuuccugaacgagaacaacgugcccgugcagcugaccagcauuucugccccugagcacaaguucgagggccugacacagaucuuccagaaggccuacgaacacgagcagcacaucagcgagagcaucaacaacaucguggaccacgccauuaagagcaaggaucacgccaccuucaacuuucugcagugguacguggccgaacagcacgaggaagaggugcuguucaaggacauccuggacaagaucgagcugaucggcaacgagaaccacggccuguaucuggccgaccaguacgugaagggaaucgccaagagcagaaagagcugaggacuaguuauaagacugacuagcccgaugggccucccaacgggcccuccuccccuccuugcaccgagauuaauaaaaaaaaaaaaaaaaaaaaaaaaaaaaaaaaaaaaaaaaaaaaaaaaaaaaaaaaaaaaaaaaugcaucccccccccccccccccccccccccccccccaaaggcucuuuucagagccaccagaauu

SEQ ID NO: 13115 - RNA, 4165 nt, Artificial Sequence
  SARS-CoV-2/Wuhan/WIV05/2019__EPI_ISL_402128 spike protein mRNA gc mod (1-1147)(A972C_R995C) Ferritin construct
aggagaaagcuuaccauguucguguuucuggugcugcugccccugguguccagccagugugugaaccugaccaccagaacacagcugccuccagccuacaccaacagcuucaccagaggcguguacuaccccgacaagguguucagauccagcgugcugcacucuacccaggaccuguuccugccuuucuucagcaacgugaccugguuccacgccauccacguguccggcaccaauggcaccaagagauucgacaaccccgugcugcccuucaacgacgggguguacuuugccagcaccgagaaguccaacaucaucagaggcuggaucuucggcaccacacuggacagcaagacccagagccugcugaucgugaacaacgccaccaacguggucaucaaagugugcgaguuccaguucugcaacgaccccuuccugggcgucuacuaccacaagaacaacaagagcuggauggaaagcgaguuccggguguacagcagcgccaacaacugcaccuucgaguacgugucccagccuuuccugauggaccuggaaggcaagcagggcaacuucaagaaccugcgcgaguucguguucaagaacaucgacggcuacuucaaaaucuacagcaagcacaccccuaucaaccucgugcgggaucugccucagggcuucucugcucuggaaccccugguggaucugcccaucggcaucaacaucacccgguuucagacacugcuggcccugcacagaagcuaccugacaccuggcgauagcagcagcggauggacagcuggugccgccgcuuacuaugugggcuaccugcagccuagaaccuuccugcugaaguacaacgagaacggcaccaucaccgacgccguggauugugcucuggauccucugagcgagacaaagugcacccugaaguccuucaccguggaaaagggcaucuaccagaccagcaacuuccgggugcagcccaccgaauccaucgugcgguuccccaauaucaccaaucugugccccuucggcgagguguucaaugccaccagauucgccucuguguacgccuggaaccggaagcggaucagcaauugcguggccgacuacuccgugcuguacaacuccgccagcuucagcaccuucaagugcuacggcguguccccuaccaagcugaacgaccugugcuucacaaacguguacgccgacagcuucgugauccggggagaugaagugcggcagauugccccuggacagacaggcaagaucgccgacuacaacuacaagcugcccgacgacuucaccggcugugugauugccuggaacagcaacaaccuggacuccaaagucggcggcaacuacaauuaccuguaccggcuguuccggaaguccaaucugaagcccuucgagcgggacaucagcaccgaaaucuaucaggccggcagcaccccuugcaacggcguggaaggcuucaacugcuacuucccacugcaguccuacggcuuucagcccacaaauggcgugggcuaucagcccuacagagugguggugcugagcuucgaacugcugcaugcuccugccacagugugcggcccuaagaaaagcaccaaucucgugaagaacaaaugcgugaacuucaacuucaacggccugaccggcaccggcgugcugacagagagcaacaagaaguuccugccauuccagcaguuuggccgggauaucgccgauaccacagacgccguuagagauccccagacacuggaaauccuggacaucaccccaugcagcuucggcggagugucugugaucaccccuggcaccaacaccagcaaucagguggcagugcuguaccaggacgugaacuguaccgaagugcccguggccauucacgccgaucagcugacaccuacauggcggguguacuccaccggcagcaauguguuucagaccagagccggcugucugaucggagccgagcacgugaacaauagcuacgagugcgacauccccaucggcgcuggcaucugugccagcuaccagacacagacaaacagccccagacgggcuagaagcguggccagccagagcaucauugccuacacaaugucucugggcgccgagaacagcguggccuacuccaacaacucuaucgcuauccccaccaacuucaccaucagcgugaccaccgagauccugccuguguccaugaccaagaccagcguggacugcaccauguacaucugcggcgauuccaccgagugcuccaaccugcugcugcaguacggcagcuucugcacccagcugaauagagcccugacagggaucgccguggaacaggacaagaacacccaagagguguucgcccaagugaagcaaaucuacaagaccccuccuaucaaggacuucggcggcuucaauuucagccagauucugcccgauccuagcaagcccagcaagcggagcuucaucgaggaccugcuguucaacaaagugacacuggccgacgccggcuucaucaagcaguauggcgauugucugggcgacauugccgccagggaucugauuugcgcccagaaguuuaacggacugacagugcugccuccucugcugaccgaugagaugaucgcccaguacacaucugcccugcuggccggcacaaucacaagcggcuggacauuuggagcuggcgccgcucugcagauccccuuugcuaugcagauggccuaccgguucaacggcaucggagugacccagaaugugcuguacgagaaccagaagcugaucgccaaccaguucaacagcgccaucggcaagauccaggacagccugagcagcacagcaagcgcccugggaaagcugcaggacguggucaaccagaaugcccaggcacugaacacccuggucaagcagcuguccuccaacuucggcugcaucagcucugugcugaacgauauccugagcagacuggacaaggucgaggccgaggugcagaucgacugucugaucacaggcagacugcagagccuccagacauacgugacccagcagcugaucagagccgccgagauuagagccucugccaaucuggccgccaccaagaugucugagugugugcugggccagagcaagagaguggacuuuugcggcaagggcuaccaccugaugagcuucccucagucugccccucacggcgugguguuucugcacgugacauaugugcccgcucaagagaagaauuucaccaccgcuccagccaucugccacgacggcaaagcccacuuuccuagagaaggcguguucguguccaacggcacccauugguucgugacacagcggaacuucuacgagccccagaucaucaccaccgacaacaccuucgugucuggcaacugcgacguugugaucggcauugugaacaauaccguguacgacccucugcagcccgagcuggacagcggaggcggaggaucugacaucaucaagcugcugaacgagcaagugaacaaagagaugcagagcagcaaccuguacaugagcaugagcagcuggugcuacacccacagccuugauggcgccggacuguuccuguuugaucacgccgccgaggaauacgagcacgccaagaagcugaucaucuuccugaacgagaacaacgugcccgugcagcugaccagcauuucugccccugagcacaaguucgagggccugacacagaucuuccagaaggccuacgaacacgagcagcacaucagcgagagcaucaacaacaucguggaccacgccauuaagagcaaggaucacgccaccuucaacuuucugcagugguacguggccgaacagcacgaggaagaggugcuguucaaggacauccuggacaagaucgagcugaucggcaacgagaaccacggccuguaucuggccgaccaguacgugaagggaaucgccaagagcagaaagagcugaggacuaguuauaagacugacuagcccgaugggccucccaacgggcccuccuccccuccuugcaccgagauuaauaaaaaaaaaaaaaaaaaaaaaaaaaaaaaaaaaaaaaaaaaaaaaaaaaaaaaaaaaaaaaaaaugcaucccccccccccccccccccccccccccccccaaaggcucuuuucagagccaccagaauu

SEQ ID NO: 13116 - RNA, 4165 nt, Artificial Sequence
  SARS-CoV-2/Wuhan/WIV05/2019__EPI_ISL_402128 spike protein mRNA gc mod (1-1147)(A890C_V1040C) Ferritin construct
aggagaaagcuuaccauguucguguuucuggugcugcugccccugguguccagccagugugugaaccugaccaccagaacacagcugccuccagccuacaccaacagcuucaccagaggcguguacuaccccgacaagguguucagauccagcgugcugcacucuacccaggaccuguuccugccuuucuucagcaacgugaccugguuccacgccauccacguguccggcaccaauggcaccaagagauucgacaaccccgugcugcccuucaacgacgggguguacuuugccagcaccgagaaguccaacaucaucagaggcuggaucuucggcaccacacuggacagcaagacccagagccugcugaucgugaacaacgccaccaacguggucaucaaagugugcgaguuccaguucugcaacgaccccuuccugggcgucuacuaccacaagaacaacaagagcuggauggaaagcgaguuccggguguacagcagcgccaacaacugcaccuucgaguacgugucccagccuuuccugauggaccuggaaggcaagcagggcaacuucaagaaccugcgcgaguucguguucaagaacaucgacggcuacuucaaaaucuacagcaagcacaccccuaucaaccucgugcgggaucugccucagggcuucucugcucuggaaccccugguggaucugcccaucggcaucaacaucacccgguuucagacacugcuggcccugcacagaagcuaccugacaccuggcgauagcagcagcggauggacagcuggugccgccgcuuacuaugugggcuaccugcagccuagaaccuuccugcugaaguacaacgagaacggcaccaucaccgacgccguggauugugcucuggauccucugagcgagacaaagugcacccugaaguccuucaccguggaaaagggcaucuaccagaccagcaacuuccgggugcagcccaccgaauccaucgugcgguuccccaauaucaccaaucugugccccuucggcgagguguucaaugccaccagauucgccucuguguacgccuggaaccggaagcggaucagcaauugcguggccgacuacuccgugcuguacaacuccgccagcuucagcaccuucaagugcuacggcguguccccuaccaagcugaacgaccugugcuucacaaacguguacgccgacagcuucgugauccggggagaugaagugcggcagauugccccuggacagacaggcaagaucgccgacuacaacuacaagcugcccgacgacuucaccggcugugugauugccuggaacagcaacaaccuggacuccaaagucggcggcaacuacaauuaccuguaccggcuguuccggaaguccaaucugaagcccuucgagcgggacaucagcaccgaaaucuaucaggccggcagcaccccuugcaacggcguggaaggcuucaacugcuacuucccacugcaguccuacggcuuucagcccacaaauggcgugggcuaucagcccuacagagugguggugcugagcuucgaacugcugcaugcuccugccacagugugcggcccuaagaaaagcaccaaucucgugaagaacaaaugcgugaacuucaacuucaacggccugaccggcaccggcgugcugacagagagcaacaagaaguuccugccauuccagcaguuuggccgggauaucgccgauaccacagacgccguuagagauccccagacacuggaaauccuggacaucaccccaugcagcuucggcggagugucugugaucaccccuggcaccaacaccagcaaucagguggcagugcuguaccaggacgugaacuguaccgaagugcccguggccauucacgccgaucagcugacaccuacauggcggguguacuccaccggcagcaauguguuucagaccagagccggcugucugaucggagccgagcacgugaacaauagcuacgagugcgacauccccaucggcgcuggcaucugugccagcuaccagacacagacaaacagccccagacgggcuagaagcguggccagccagagcaucauugccuacacaaugucucugggcgccgagaacagcguggccuacuccaacaacucuaucgcuauccccaccaacuucaccaucagcgugaccaccgagauccugccuguguccaugaccaagaccagcguggacugcaccauguacaucugcggcgauuccaccgagugcuccaaccugcugcugcaguacggcagcuucugcacccagcugaauagagcccugacagggaucgccguggaacaggacaagaacacccaagagguguucgcccaagugaagcaaaucuacaagaccccuccuaucaaggacuucggcggcuucaauuucagccagauucugcccgauccuagcaagcccagcaagcggagcuucaucgaggaccugcuguucaacaaagugacacuggccgacgccggcuucaucaagcaguauggcgauugucugggcgacauugccgccagggaucugauuugcgcccagaaguuuaacggacugacagugcugccuccucugcugaccgaugagaugaucgcccaguacacaucugcccugcuggccggcacaaucacaagcggcuggacauuuggaugcggcgccgcucugcagauccccuuugcuaugcagauggccuaccgguucaacggcaucggagugacccagaaugugcuguacgagaaccagaagcugaucgccaaccaguucaacagcgccaucggcaagauccaggacagccugagcagcacagcaagcgcccugggaaagcugcaggacguggucaaccagaaugcccaggcacugaacacccuggucaagcagcuguccuccaacuucggcgccaucagcucugugcugaacgauauccugagcagacuggacaaggucgaggccgaggugcagaucgacagacugaucacaggcagacugcagagccuccagacauacgugacccagcagcugaucagagccgccgagauuagagccucugccaaucuggccgccaccaagaugucugagugugugcugggccagagcaagagaugugacuuuugcggcaagggcuaccaccugaugagcuucccucagucugccccucacggcgugguguuucugcacgugacauaugugcccgcucaagagaagaauuucaccaccgcuccagccaucugccacgacggcaaagcccacuuuccuagagaaggcguguucguguccaacggcacccauugguucgugacacagcggaacuucuacgagccccagaucaucaccaccgacaacaccuucgugucuggcaacugcgacguugugaucggcauugugaacaauaccguguacgacccucugcagcccgagcuggacagcggaggcggaggaucugacaucaucaagcugcugaacgagcaagugaacaaagagaugcagagcagcaaccuguacaugagcaugagcagcuggugcuacacccacagccuugauggcgccggacuguuccuguuugaucacgccgccgaggaauacgagcacgccaagaagcugaucaucuuccugaacgagaacaacgugcccgugcagcugaccagcauuucugccccugagcacaaguucgagggccugacacagaucuuccagaaggccuacgaacacgagcagcacaucagcgagagcaucaacaacaucguggaccacgccauuaagagcaaggaucacgccaccuucaacuuucugcagugguacguggccgaacagcacgaggaagaggugcuguucaaggacauccuggacaagaucgagcugaucggcaacgagaaccacggccuguaucuggccgaccaguacgugaagggaaucgccaagagcagaaagagcugaggacuaguuauaagacugacuagcccgaugggccucccaacgggcccuccuccccuccuugcaccgagauuaauaaaaaaaaaaaaaaaaaaaaaaaaaaaaaaaaaaaaaaaaaaaaaaaaaaaaaaaaaaaaaaaaugcaucccccccccccccccccccccccccccccccaaaggcucuuuucagagccaccagaauu

SEQ ID NO: 13117 - RNA, 4165 nt, Artificial Sequence
  SARS-CoV-2/Wuhan/WIV05/2019__EPI_ISL_402128 spike protein mRNA gc mod (1-1147)(T874C_S1055C) Ferritin construct
aggagaaagcuuaccauguucguguuucuggugcugcugccccugguguccagccagugugugaaccugaccaccagaacacagcugccuccagccuacaccaacagcuucaccagaggcguguacuaccccgacaagguguucagauccagcgugcugcacucuacccaggaccuguuccugccuuucuucagcaacgugaccugguuccacgccauccacguguccggcaccaauggcaccaagagauucgacaaccccgugcugcccuucaacgacgggguguacuuugccagcaccgagaaguccaacaucaucagaggcuggaucuucggcaccacacuggacagcaagacccagagccugcugaucgugaacaacgccaccaacguggucaucaaagugugcgaguuccaguucugcaacgaccccuuccugggcgucuacuaccacaagaacaacaagagcuggauggaaagcgaguuccggguguacagcagcgccaacaacugcaccuucgaguacgugucccagccuuuccugauggaccuggaaggcaagcagggcaacuucaagaaccugcgcgaguucguguucaagaacaucgacggcuacuucaaaaucuacagcaagcacaccccuaucaaccucgugcgggaucugccucagggcuucucugcucuggaaccccugguggaucugcccaucggcaucaacaucacccgguuucagacacugcuggcccugcacagaagcuaccugacaccuggcgauagcagcagcggauggacagcuggugccgccgcuuacuaugugggcuaccugcagccuagaaccuuccugcugaaguacaacgagaacggcaccaucaccgacgccguggauugugcucuggauccucugagcgagacaaagugcacccugaaguccuucaccguggaaaagggcaucuaccagaccagcaacuuccgggugcagcccaccgaauccaucgugcgguuccccaauaucaccaaucugugccccuucggcgagguguucaaugccaccagauucgccucuguguacgccuggaaccggaagcggaucagcaauugcguggccgacuacuccgugcuguacaacuccgccagcuucagcaccuucaagugcuacggcguguccccuaccaagcugaacgaccugugcuucacaaacguguacgccgacagcuucgugauccggggagaugaagugcggcagauugccccuggacagacaggcaagaucgccgacuacaacuacaagcugcccgacgacuucaccggcugugugauugccuggaacagcaacaaccuggacuccaaagucggcggcaacuacaauuaccuguaccggcuguuccggaaguccaaucugaagcccuucgagcgggacaucagcaccgaaaucuaucaggccggcagcaccccuugcaacggcguggaaggcuucaacugcuacuucccacugcaguccuacggcuuucagcccacaaauggcgugggcuaucagcccuacagagugguggugcugagcuucgaacugcugcaugcuccugccacagugugcggcccuaagaaaagcaccaaucucgugaagaacaaaugcgugaacuucaacuucaacggccugaccggcaccggcgugcugacagagagcaacaagaaguuccugccauuccagcaguuuggccgggauaucgccgauaccacagacgccguuagagauccccagacacuggaaauccuggacaucaccccaugcagcuucggcggagugucugugaucaccccuggcaccaacaccagcaaucagguggcagugcuguaccaggacgugaacuguaccgaagugcccguggccauucacgccgaucagcugacaccuacauggcggguguacuccaccggcagcaauguguuucagaccagagccggcugucugaucggagccgagcacgugaacaauagcuacgagugcgacauccccaucggcgcuggcaucugugccagcuaccagacacagacaaacagccccagacgggcuagaagcguggccagccagagcaucauugccuacacaaugucucugggcgccgagaacagcguggccuacuccaacaacucuaucgcuauccccaccaacuucaccaucagcgugaccaccgagauccugccuguguccaugaccaagaccagcguggacugcaccauguacaucugcggcgauuccaccgagugcuccaaccugcugcugcaguacggcagcuucugcacccagcugaauagagcccugacagggaucgccguggaacaggacaagaacacccaagagguguucgcccaagugaagcaaaucuacaagaccccuccuaucaaggacuucggcggcuucaauuucagccagauucugcccgauccuagcaagcccagcaagcggagcuucaucgaggaccugcuguucaacaaagugacacuggccgacgccggcuucaucaagcaguauggcgauugucugggcgacauugccgccagggaucugauuugcgcccagaaguuuaacggacugacagugcugccuccucugcugaccgaugagaugaucgcccaguacugcucugcccugcuggccggcacaaucacaagcggcuggacauuuggagcuggcgccgcucugcagauccccuuugcuaugcagauggccuaccgguucaacggcaucggagugacccagaaugugcuguacgagaaccagaagcugaucgccaaccaguucaacagcgccaucggcaagauccaggacagccugagcagcacagcaagcgcccugggaaagcugcaggacguggucaaccagaaugcccaggcacugaacacccuggucaagcagcuguccuccaacuucggcgccaucagcucugugcugaacgauauccugagcagacuggacaaggucgaggccgaggugcagaucgacagacugaucacaggcagacugcagagccuccagacauacgugacccagcagcugaucagagccgccgagauuagagccucugccaaucuggccgccaccaagaugucugagugugugcugggccagagcaagagaguggacuuuugcggcaagggcuaccaccugaugagcuucccucagugcgccccucacggcgugguguuucugcacgugacauaugugcccgcucaagagaagaauuucaccaccgcuccagccaucugccacgacggcaaagcccacuuuccuagagaaggcguguucguguccaacggcacccauugguucgugacacagcggaacuucuacgagccccagaucaucaccaccgacaacaccuucgugucuggcaacugcgacguugugaucggcauugugaacaauaccguguacgacccucugcagcccgagcuggacagcggaggcggaggaucugacaucaucaagcugcugaacgagcaagugaacaaagagaugcagagcagcaaccuguacaugagcaugagcagcuggugcuacacccacagccuugauggcgccggacuguuccuguuugaucacgccgccgaggaauacgagcacgccaagaagcugaucaucuuccugaacgagaacaacgugcccgugcagcugaccagcauuucugccccugagcacaaguucgagggccugacacagaucuuccagaaggccuacgaacacgagcagcacaucagcgagagcaucaacaacaucguggaccacgccauuaagagcaaggaucacgccaccuucaacuuucugcagugguacguggccgaacagcacgaggaagaggugcuguucaaggacauccuggacaagaucgagcugaucggcaacgagaaccacggccuguaucuggccgaccaguacgugaagggaaucgccaagagcagaaagagcugaggacuaguuauaagacugacuagcccgaugggccucccaacgggcccuccuccccuccuugcaccgagauuaauaaaaaaaaaaaaaaaaaaaaaaaaaaaaaaaaaaaaaaaaaaaaaaaaaaaaaaaaaaaaaaaaugcaucccccccccccccccccccccccccccccccaaaggcucuuuucagagccaccagaauu

SEQ ID NO: 13118 - RNA, 3751 nt, Artificial Sequence
  SARS-CoV-2/Wuhan/WIV05/2019__EPI_ISL_402128 spike protein mRNA gc mod (1-1147) Foldon construct
aggagaaagcuuaccauguucguguuucuggugcugcugccccugguguccagccagugugugaaccugaccaccagaacacagcugccuccagccuacaccaacagcuucaccagaggcguguacuaccccgacaagguguucagauccagcgugcugcacucuacccaggaccuguuccugccuuucuucagcaacgugaccugguuccacgccauccacguguccggcaccaauggcaccaagagauucgacaaccccgugcugcccuucaacgacgggguguacuuugccagcaccgagaaguccaacaucaucagaggcuggaucuucggcaccacacuggacagcaagacccagagccugcugaucgugaacaacgccaccaacguggucaucaaagugugcgaguuccaguucugcaacgaccccuuccugggcgucuacuaccacaagaacaacaagagcuggauggaaagcgaguuccggguguacagcagcgccaacaacugcaccuucgaguacgugucccagccuuuccugauggaccuggaaggcaagcagggcaacuucaagaaccugcgcgaguucguguucaagaacaucgacggcuacuucaaaaucuacagcaagcacaccccuaucaaccucgugcgggaucugccucagggcuucucugcucuggaaccccugguggaucugcccaucggcaucaacaucacccgguuucagacacugcuggcccugcacagaagcuaccugacaccuggcgauagcagcagcggauggacagcuggugccgccgcuuacuaugugggcuaccugcagccuagaaccuuccugcugaaguacaacgagaacggcaccaucaccgacgccguggauugugcucuggauccucugagcgagacaaagugcacccugaaguccuucaccguggaaaagggcaucuaccagaccagcaacuuccgggugcagcccaccgaauccaucgugcgguuccccaauaucaccaaucugugccccuucggcgagguguucaaugccaccagauucgccucuguguacgccuggaaccggaagcggaucagcaauugcguggccgacuacuccgugcuguacaacuccgccagcuucagcaccuucaagugcuacggcguguccccuaccaagcugaacgaccugugcuucacaaacguguacgccgacagcuucgugauccggggagaugaagugcggcagauugccccuggacagacaggcaagaucgccgacuacaacuacaagcugcccgacgacuucaccggcugugugauugccuggaacagcaacaaccuggacuccaaagucggcggcaacuacaauuaccuguaccggcuguuccggaaguccaaucugaagcccuucgagcgggacaucagcaccgaaaucuaucaggccggcagcaccccuugcaacggcguggaaggcuucaacugcuacuucccacugcaguccuacggcuuucagcccacaaauggcgugggcuaucagcccuacagagugguggugcugagcuucgaacugcugcaugcuccugccacagugugcggcccuaagaaaagcaccaaucucgugaagaacaaaugcgugaacuucaacuucaacggccugaccggcaccggcgugcugacagagagcaacaagaaguuccugccauuccagcaguuuggccgggauaucgccgauaccacagacgccguuagagauccccagacacuggaaauccuggacaucaccccaugcagcuucggcggagugucugugaucaccccuggcaccaacaccagcaaucagguggcagugcuguaccaggacgugaacuguaccgaagugcccguggccauucacgccgaucagcugacaccuacauggcggguguacuccaccggcagcaauguguuucagaccagagccggcugucugaucggagccgagcacgugaacaauagcuacgagugcgacauccccaucggcgcuggcaucugugccagcuaccagacacagacaaacagccccagacgggcuagaagcguggccagccagagcaucauugccuacacaaugucucugggcgccgagaacagcguggccuacuccaacaacucuaucgcuauccccaccaacuucaccaucagcgugaccaccgagauccugccuguguccaugaccaagaccagcguggacugcaccauguacaucugcggcgauuccaccgagugcuccaaccugcugcugcaguacggcagcuucugcacccagcugaauagagcccugacagggaucgccguggaacaggacaagaacacccaagagguguucgcccaagugaagcaaaucuacaagaccccuccuaucaaggacuucggcggcuucaauuucagccagauucugcccgauccuagcaagcccagcaagcggagcuucaucgaggaccugcuguucaacaaagugacacuggccgacgccggcuucaucaagcaguauggcgauugucugggcgacauugccgccagggaucugauuugcgcccagaaguuuaacggacugacagugcugccuccucugcugaccgaugagaugaucgcccaguacacaucugcccugcuggccggcacaaucacaagcggcuggacauuuggagcuggcgccgcucugcagauccccuuugcuaugcagauggccuaccgguucaacggcaucggagugacccagaaugugcuguacgagaaccagaagcugaucgccaaccaguucaacagcgccaucggcaagauccaggacagccugagcagcacagcaagcgcccugggaaagcugcaggacguggucaaccagaaugcccaggcacugaacacccuggucaagcagcuguccuccaacuucggcgccaucagcucugugcugaacgauauccugagcagacuggacaaggucgaggccgaggugcagaucgacagacugaucacaggcagacugcagagccuccagacauacgugacccagcagcugaucagagccgccgagauuagagccucugccaaucuggccgccaccaagaugucugagugugugcugggccagagcaagagaguggacuuuugcggcaagggcuaccaccugaugagcuucccucagucugccccucacggcgugguguuucugcacgugacauaugugcccgcucaagagaagaauuucaccaccgcuccagccaucugccacgacggcaaagcccacuuuccuagagaaggcguguucguguccaacggcacccauugguucgugacacagcggaacuucuacgagccccagaucaucaccaccgacaacaccuucgugucuggcaacugcgacguugugaucggcauugugaacaauaccguguacgacccucugcagcccgagcuggacagcggaggaucuggcuauauccccgaggcuccuagagauggccaggccuauguucggaaggauggcgaaugggugcugcugagcaccuuccuuugaggacuaguuauaagacugacuagcccgaugggccucccaacgggcccuccuccccuccuugcaccgagauuaauaaaaaaaaaaaaaaaaaaaaaaaaaaaaaaaaaaaaaaaaaaaaaaaaaaaaaaaaaaaaaaaaugcaucccccccccccccccccccccccccccccccaaaggcucuuuucagagccaccagaauu

SEQ ID NO: 13119 - RNA, 3751 nt, Artificial Sequence
  SARS-CoV-2/Wuhan/WIV05/2019__EPI_ISL_402128 spike protein mRNA gc mod (1-1147)(K986P_V987P) Foldon construct
aggagaaagcuuaccauguucguguuucuggugcugcugccccugguguccagccagugugugaaccugaccaccagaacacagcugccuccagccuacaccaacagcuucaccagaggcguguacuaccccgacaagguguucagauccagcgugcugcacucuacccaggaccuguuccugccuuucuucagcaacgugaccugguuccacgccauccacguguccggcaccaauggcaccaagagauucgacaaccccgugcugcccuucaacgacgggguguacuuugccagcaccgagaaguccaacaucaucagaggcuggaucuucggcaccacacuggacagcaagacccagagccugcugaucgugaacaacgccaccaacguggucaucaaagugugcgaguuccaguucugcaacgaccccuuccugggcgucuacuaccacaagaacaacaagagcuggauggaaagcgaguuccggguguacagcagcgccaacaacugcaccuucgaguacgugucccagccuuuccugauggaccuggaaggcaagcagggcaacuucaagaaccugcgcgaguucguguucaagaacaucgacggcuacuucaaaaucuacagcaagcacaccccuaucaaccucgugcgggaucugccucagggcuucucugcucuggaaccccugguggaucugcccaucggcaucaacaucacccgguuucagacacugcuggcccugcacagaagcuaccugacaccuggcgauagcagcagcggauggacagcuggugccgccgcuuacuaugugggcuaccugcagccuagaaccuuccugcugaaguacaacgagaacggcaccaucaccgacgccguggauugugcucuggauccucugagcgagacaaagugcacccugaaguccuucaccguggaaaagggcaucuaccagaccagcaacuuccgggugcagcccaccgaauccaucgugcgguuccccaauaucaccaaucugugccccuucggcgagguguucaaugccaccagauucgccucuguguacgccuggaaccggaagcggaucagcaauugcguggccgacuacuccgugcuguacaacuccgccagcuucagcaccuucaagugcuacggcguguccccuaccaagcugaacgaccugugcuucacaaacguguacgccgacagcuucgugauccggggagaugaagugcggcagauugccccuggacagacaggcaagaucgccgacuacaacuacaagcugcccgacgacuucaccggcugugugauugccuggaacagcaacaaccuggacuccaaagucggcggcaacuacaauuaccuguaccggcuguuccggaaguccaaucugaagcccuucgagcgggacaucagcaccgaaaucuaucaggccggcagcaccccuugcaacggcguggaaggcuucaacugcuacuucccacugcaguccuacggcuuucagcccacaaauggcgugggcuaucagcccuacagagugguggugcugagcuucgaacugcugcaugcuccugccacagugugcggcccuaagaaaagcaccaaucucgugaagaacaaaugcgugaacuucaacuucaacggccugaccggcaccggcgugcugacagagagcaacaagaaguuccugccauuccagcaguuuggccgggauaucgccgauaccacagacgccguuagagauccccagacacuggaaauccuggacaucaccccaugcagcuucggcggagugucugugaucaccccuggcaccaacaccagcaaucagguggcagugcuguaccaggacgugaacuguaccgaagugcccguggccauucacgccgaucagcugacaccuacauggcggguguacuccaccggcagcaauguguuucagaccagagccggcugucugaucggagccgagcacgugaacaauagcuacgagugcgacauccccaucggcgcuggcaucugugccagcuaccagacacagacaaacagccccagacgggcuagaagcguggccagccagagcaucauugccuacacaaugucucugggcgccgagaacagcguggccuacuccaacaacucuaucgcuauccccaccaacuucaccaucagcgugaccaccgagauccugccuguguccaugaccaagaccagcguggacugcaccauguacaucugcggcgauuccaccgagugcuccaaccugcugcugcaguacggcagcuucugcacccagcugaauagagcccugacagggaucgccguggaacaggacaagaacacccaagagguguucgcccaagugaagcaaaucuacaagaccccuccuaucaaggacuucggcggcuucaauuucagccagauucugcccgauccuagcaagcccagcaagcggagcuucaucgaggaccugcuguucaacaaagugacacuggccgacgccggcuucaucaagcaguauggcgauugucugggcgacauugccgccagggaucugauuugcgcccagaaguuuaacggacugacagugcugccuccucugcugaccgaugagaugaucgcccaguacacaucugcccugcuggccggcacaaucacaagcggcuggacauuuggagcuggcgccgcucugcagauccccuuugcuaugcagauggccuaccgguucaacggcaucggagugacccagaaugugcuguacgagaaccagaagcugaucgccaaccaguucaacagcgccaucggcaagauccaggacagccugagcagcacagcaagcgcccugggaaagcugcaggacguggucaaccagaaugcccaggcacugaacacccuggucaagcagcuguccuccaacuucggcgccaucagcucugugcugaacgauauccugagcagacuggacccuccugaggccgaggugcagaucgacagacugaucacaggcagacugcagagccuccagacauacgugacccagcagcugaucagagccgccgagauuagagccucugccaaucuggccgccaccaagaugucugagugugugcugggccagagcaagagaguggacuuuugcggcaagggcuaccaccugaugagcuucccucagucugccccucacggcgugguguuucugcacgugacauaugugcccgcucaagagaagaauuucaccaccgcuccagccaucugccacgacggcaaagcccacuuuccuagagaaggcguguucguguccaacggcacccauugguucgugacacagcggaacuucuacgagccccagaucaucaccaccgacaacaccuucgugucuggcaacugcgacguugugaucggcauugugaacaauaccguguacgacccucugcagcccgagcuggacagcggaggaucuggcuauauccccgaggcuccuagagauggccaggccuauguucggaaggauggcgaaugggugcugcugagcaccuuccuuugaggacuaguuauaagacugacuagcccgaugggccucccaacgggcccuccuccccuccuugcaccgagauuaauaaaaaaaaaaaaaaaaaaaaaaaaaaaaaaaaaaaaaaaaaaaaaaaaaaaaaaaaaaaaaaaaugcaucccccccccccccccccccccccccccccccaaaggcucuuuucagagccaccagaauu

SEQ ID NO: 13120 - RNA, 3751 nt, Artificial Sequence
  SARS-CoV-2/Wuhan/WIV05/2019__EPI_ISL_402128 spike protein mRNA gc mod (1-1147)(K986P_V987P_T887WN_A1020W) Foldon construct
aggagaaagcuuaccauguucguguuucuggugcugcugccccugguguccagccagugugugaaccugaccaccagaacacagcugccuccagccuacaccaacagcuucaccagaggcguguacuaccccgacaagguguucagauccagcgugcugcacucuacccaggaccuguuccugccuuucuucagcaacgugaccugguuccacgccauccacguguccggcaccaauggcaccaagagauucgacaaccccgugcugcccuucaacgacgggguguacuuugccagcaccgagaaguccaacaucaucagaggcuggaucuucggcaccacacuggacagcaagacccagagccugcugaucgugaacaacgccaccaacguggucaucaaagugugcgaguuccaguucugcaacgaccccuuccugggcgucuacuaccacaagaacaacaagagcuggauggaaagcgaguuccggguguacagcagcgccaacaacugcaccuucgaguacgugucccagccuuuccugauggaccuggaaggcaagcagggcaacuucaagaaccugcgcgaguucguguucaagaacaucgacggcuacuucaaaaucuacagcaagcacaccccuaucaaccucgugcgggaucugccucagggcuucucugcucuggaaccccugguggaucugcccaucggcaucaacaucacccgguuucagacacugcuggcccugcacagaagcuaccugacaccuggcgauagcagcagcggauggacagcuggugccgccgcuuacuaugugggcuaccugcagccuagaaccuuccugcugaaguacaacgagaacggcaccaucaccgacgccguggauugugcucuggauccucugagcgagacaaagugcacccugaaguccuucaccguggaaaagggcaucuaccagaccagcaacuuccgggugcagcccaccgaauccaucgugcgguuccccaauaucaccaaucugugccccuucggcgagguguucaaugccaccagauucgccucuguguacgccuggaaccggaagcggaucagcaauugcguggccgacuacuccgugcuguacaacuccgccagcuucagcaccuucaagugcuacggcguguccccuaccaagcugaacgaccugugcuucacaaacguguacgccgacagcuucgugauccggggagaugaagugcggcagauugccccuggacagacaggcaagaucgccgacuacaacuacaagcugcccgacgacuucaccggcugugugauugccuggaacagcaacaaccuggacuccaaagucggcggcaacuacaauuaccuguaccggcuguuccggaaguccaaucugaagcccuucgagcgggacaucagcaccgaaaucuaucaggccggcagcaccccuugcaacggcguggaaggcuucaacugcuacuucccacugcaguccuacggcuuucagcccacaaauggcgugggcuaucagcccuacagagugguggugcugagcuucgaacugcugcaugcuccugccacagugugcggcccuaagaaaagcaccaaucucgugaagaacaaaugcgugaacuucaacuucaacggccugaccggcaccggcgugcugacagagagcaacaagaaguuccugccauuccagcaguuuggccgggauaucgccgauaccacagacgccguuagagauccccagacacuggaaauccuggacaucaccccaugcagcuucggcggagugucugugaucaccccuggcaccaacaccagcaaucagguggcagugcuguaccaggacgugaacuguaccgaagugcccguggccauucacgccgaucagcugacaccuacauggcggguguacuccaccggcagcaauguguuucagaccagagccggcugucugaucggagccgagcacgugaacaauagcuacgagugcgacauccccaucggcgcuggcaucugugccagcuaccagacacagacaaacagccccagacgggcuagaagcguggccagccagagcaucauugccuacacaaugucucugggcgccgagaacagcguggccuacuccaacaacucuaucgcuauccccaccaacuucaccaucagcgugaccaccgagauccugccuguguccaugaccaagaccagcguggacugcaccauguacaucugcggcgauuccaccgagugcuccaaccugcugcugcaguacggcagcuucugcacccagcugaauagagcccugacagggaucgccguggaacaggacaagaacacccaagagguguucgcccaagugaagcaaaucuacaagaccccuccuaucaaggacuucggcggcuucaauuucagccagauucugcccgauccuagcaagcccagcaagcggagcuucaucgaggaccugcuguucaacaaagugacacuggccgacgccggcuucaucaagcaguauggcgauugucugggcgacauugccgccagggaucugauuugcgcccagaaguuuaacggacugacagugcugccuccucugcugaccgaugagaugaucgcccaguacacaucugcccugcuggccggcacaaucacaagcggcuggugguuuggagcuggcgccgcucugcagauccccuuugcuaugcagauggccuaccgguucaacggcaucggagugacccagaaugugcuguacgagaaccagaagcugaucgccaaccaguucaacagcgccaucggcaagauccaggacagccugagcagcacagcaagcgcccugggaaagcugcaggacguggucaaccagaaugcccaggcacugaacacccuggucaagcagcuguccuccaacuucggcgccaucagcucugugcugaacgauauccugagcagacuggacccuccugaggccgaggugcagaucgacagacugaucacaggcagacugcagagccuccagacauacgugacccagcagcugaucagagccgccgagauuagauggucugccaaucuggccgccaccaagaugucugagugugugcugggccagagcaagagaguggacuuuugcggcaagggcuaccaccugaugagcuucccucagucugccccucacggcgugguguuucugcacgugacauaugugcccgcucaagagaagaauuucaccaccgcuccagccaucugccacgacggcaaagcccacuuuccuagagaaggcguguucguguccaacggcacccauugguucgugacacagcggaacuucuacgagccccagaucaucaccaccgacaacaccuucgugucuggcaacugcgacguugugaucggcauugugaacaauaccguguacgacccucugcagcccgagcuggacagcggaggaucuggcuauauccccgaggcuccuagagauggccaggccuauguucggaaggauggcgaaugggugcugcugagcaccuuccuuugaggacuaguuauaagacugacuagcccgaugggccucccaacgggcccuccuccccuccuugcaccgagauuaauaaaaaaaaaaaaaaaaaaaaaaaaaaaaaaaaaaaaaaaaaaaaaaaaaaaaaaaaaaaaaaaaugcaucccccccccccccccccccccccccccccccaaaggcucuuuucagagccaccagaauu

SEQ ID NO: 13121 - RNA, 3751 nt, Artificial Sequence
  SARS-CoV-2/Wuhan/WIV05/2019__EPI_ISL_402128 spike protein mRNA gc mod (1-1147)(K986P_V987P_P1069F) Foldon construct
aggagaaagcuuaccauguucguguuucuggugcugcugccccugguguccagccagugugugaaccugaccaccagaacacagcugccuccagccuacaccaacagcuucaccagaggcguguacuaccccgacaagguguucagauccagcgugcugcacucuacccaggaccuguuccugccuuucuucagcaacgugaccugguuccacgccauccacguguccggcaccaauggcaccaagagauucgacaaccccgugcugcccuucaacgacgggguguacuuugccagcaccgagaaguccaacaucaucagaggcuggaucuucggcaccacacuggacagcaagacccagagccugcugaucgugaacaacgccaccaacguggucaucaaagugugcgaguuccaguucugcaacgaccccuuccugggcgucuacuaccacaagaacaacaagagcuggauggaaagcgaguuccggguguacagcagcgccaacaacugcaccuucgaguacgugucccagccuuuccugauggaccuggaaggcaagcagggcaacuucaagaaccugcgcgaguucguguucaagaacaucgacggcuacuucaaaaucuacagcaagcacaccccuaucaaccucgugcgggaucugccucagggcuucucugcucuggaaccccugguggaucugcccaucggcaucaacaucacccgguuucagacacugcuggcccugcacagaagcuaccugacaccuggcgauagcagcagcggauggacagcuggugccgccgcuuacuaugugggcuaccugcagccuagaaccuuccugcugaaguacaacgagaacggcaccaucaccgacgccguggauugugcucuggauccucugagcgagacaaagugcacccugaaguccuucaccguggaaaagggcaucuaccagaccagcaacuuccgggugcagcccaccgaauccaucgugcgguuccccaauaucaccaaucugugccccuucggcgagguguucaaugccaccagauucgccucuguguacgccuggaaccggaagcggaucagcaauugcguggccgacuacuccgugcuguacaacuccgccagcuucagcaccuucaagugcuacggcguguccccuaccaagcugaacgaccugugcuucacaaacguguacgccgacagcuucgugauccggggagaugaagugcggcagauugccccuggacagacaggcaagaucgccgacuacaacuacaagcugcccgacgacuucaccggcugugugauugccuggaacagcaacaaccuggacuccaaagucggcggcaacuacaauuaccuguaccggcuguuccggaaguccaaucugaagcccuucgagcgggacaucagcaccgaaaucuaucaggccggcagcaccccuugcaacggcguggaaggcuucaacugcuacuucccacugcaguccuacggcuuucagcccacaaauggcgugggcuaucagcccuacagagugguggugcugagcuucgaacugcugcaugcuccugccacagugugcggcccuaagaaaagcaccaaucucgugaagaacaaaugcgugaacuucaacuucaacggccugaccggcaccggcgugcugacagagagcaacaagaaguuccugccauuccagcaguuuggccgggauaucgccgauaccacagacgccguuagagauccccagacacuggaaauccuggacaucaccccaugcagcuucggcggagugucugugaucaccccuggcaccaacaccagcaaucagguggcagugcuguaccaggacgugaacuguaccgaagugcccguggccauucacgccgaucagcugacaccuacauggcggguguacuccaccggcagcaauguguuucagaccagagccggcugucugaucggagccgagcacgugaacaauagcuacgagugcgacauccccaucggcgcuggcaucugugccagcuaccagacacagacaaacagccccagacgggcuagaagcguggccagccagagcaucauugccuacacaaugucucugggcgccgagaacagcguggccuacuccaacaacucuaucgcuauccccaccaacuucaccaucagcgugaccaccgagauccugccuguguccaugaccaagaccagcguggacugcaccauguacaucugcggcgauuccaccgagugcuccaaccugcugcugcaguacggcagcuucugcacccagcugaauagagcccugacagggaucgccguggaacaggacaagaacacccaagagguguucgcccaagugaagcaaaucuacaagaccccuccuaucaaggacuucggcggcuucaauuucagccagauucugcccgauccuagcaagcccagcaagcggagcuucaucgaggaccugcuguucaacaaagugacacuggccgacgccggcuucaucaagcaguauggcgauugucugggcgacauugccgccagggaucugauuugcgcccagaaguuuaacggacugacagugcugccuccucugcugaccgaugagaugaucgcccaguacacaucugcccugcuggccggcacaaucacaagcggcuggacauuuggagcuggcgccgcucugcagauccccuuugcuaugcagauggccuaccgguucaacggcaucggagugacccagaaugugcuguacgagaaccagaagcugaucgccaaccaguucaacagcgccaucggcaagauccaggacagccugagcagcacagcaagcgcccugggaaagcugcaggacguggucaaccagaaugcccaggcacugaacacccuggucaagcagcuguccuccaacuucggcgccaucagcucugugcugaacgauauccugagcagacuggacccuccugaggccgaggugcagaucgacagacugaucacaggcagacugcagagccuccagacauacgugacccagcagcugaucagagccgccgagauuagagccucugccaaucuggccgccaccaagaugucugagugugugcugggccagagcaagagaguggacuuuugcggcaagggcuaccaccugaugagcuucccucagucugccccucacggcgugguguuucugcacgugacauauguguucgcucaagagaagaauuucaccaccgcuccagccaucugccacgacggcaaagcccacuuuccuagagaaggcguguucguguccaacggcacccauugguucgugacacagcggaacuucuacgagccccagaucaucaccaccgacaacaccuucgugucuggcaacugcgacguugugaucggcauugugaacaauaccguguacgacccucugcagcccgagcuggacagcggaggaucuggcuauauccccgaggcuccuagagauggccaggccuauguucggaaggauggcgaaugggugcugcugagcaccuuccuuugaggacuaguuauaagacugacuagcccgaugggccucccaacgggcccuccuccccuccuugcaccgagauuaauaaaaaaaaaaaaaaaaaaaaaaaaaaaaaaaaaaaaaaaaaaaaaaaaaaaaaaaaaaaaaaaaugcaucccccccccccccccccccccccccccccccaaaggcucuuuucagagccaccagaauu

SEQ ID NO: 13122 - RNA, 3751 nt, Artificial Sequence
  SARS-CoV-2/Wuhan/WIV05/2019__EPI_ISL_402128 spike protein mRNA gc mod (1-1147)(K986P_V987P_ H1048Q_H1064N_ H1083N_H1101N) Foldon construct
aggagaaagcuuaccauguucguguuucuggugcugcugccccugguguccagccagugugugaaccugaccaccagaacacagcugccuccagccuacaccaacagcuucaccagaggcguguacuaccccgacaagguguucagauccagcgugcugcacucuacccaggaccuguuccugccuuucuucagcaacgugaccugguuccacgccauccacguguccggcaccaauggcaccaagagauucgacaaccccgugcugcccuucaacgacgggguguacuuugccagcaccgagaaguccaacaucaucagaggcuggaucuucggcaccacacuggacagcaagacccagagccugcugaucgugaacaacgccaccaacguggucaucaaagugugcgaguuccaguucugcaacgaccccuuccugggcgucuacuaccacaagaacaacaagagcuggauggaaagcgaguuccggguguacagcagcgccaacaacugcaccuucgaguacgugucccagccuuuccugauggaccuggaaggcaagcagggcaacuucaagaaccugcgcgaguucguguucaagaacaucgacggcuacuucaaaaucuacagcaagcacaccccuaucaaccucgugcgggaucugccucagggcuucucugcucuggaaccccugguggaucugcccaucggcaucaacaucacccgguuucagacacugcuggcccugcacagaagcuaccugacaccuggcgauagcagcagcggauggacagcuggugccgccgcuuacuaugugggcuaccugcagccuagaaccuuccugcugaaguacaacgagaacggcaccaucaccgacgccguggauugugcucuggauccucugagcgagacaaagugcacccugaaguccuucaccguggaaaagggcaucuaccagaccagcaacuuccgggugcagcccaccgaauccaucgugcgguuccccaauaucaccaaucugugccccuucggcgagguguucaaugccaccagauucgccucuguguacgccuggaaccggaagcggaucagcaauugcguggccgacuacuccgugcuguacaacuccgccagcuucagcaccuucaagugcuacggcguguccccuaccaagcugaacgaccugugcuucacaaacguguacgccgacagcuucgugauccggggagaugaagugcggcagauugccccuggacagacaggcaagaucgccgacuacaacuacaagcugcccgacgacuucaccggcugugugauugccuggaacagcaacaaccuggacuccaaagucggcggcaacuacaauuaccuguaccggcuguuccggaaguccaaucugaagcccuucgagcgggacaucagcaccgaaaucuaucaggccggcagcaccccuugcaacggcguggaaggcuucaacugcuacuucccacugcaguccuacggcuuucagcccacaaauggcgugggcuaucagcccuacagagugguggugcugagcuucgaacugcugcaugcuccugccacagugugcggcccuaagaaaagcaccaaucucgugaagaacaaaugcgugaacuucaacuucaacggccugaccggcaccggcgugcugacagagagcaacaagaaguuccugccauuccagcaguuuggccgggauaucgccgauaccacagacgccguuagagauccccagacacuggaaauccuggacaucaccccaugcagcuucggcggagugucugugaucaccccuggcaccaacaccagcaaucagguggcagugcuguaccaggacgugaacuguaccgaagugcccguggccauucacgccgaucagcugacaccuacauggcggguguacuccaccggcagcaauguguuucagaccagagccggcugucugaucggagccgagcacgugaacaauagcuacgagugcgacauccccaucggcgcuggcaucugugccagcuaccagacacagacaaacagccccagacgggcuagaagcguggccagccagagcaucauugccuacacaaugucucugggcgccgagaacagcguggccuacuccaacaacucuaucgcuauccccaccaacuucaccaucagcgugaccaccgagauccugccuguguccaugaccaagaccagcguggacugcaccauguacaucugcggcgauuccaccgagugcuccaaccugcugcugcaguacggcagcuucugcacccagcugaauagagcccugacagggaucgccguggaacaggacaagaacacccaagagguguucgcccaagugaagcaaaucuacaagaccccuccuaucaaggacuucggcggcuucaauuucagccagauucugcccgauccuagcaagcccagcaagcggagcuucaucgaggaccugcuguucaacaaagugacacuggccgacgccggcuucaucaagcaguauggcgauugucugggcgacauugccgccagggaucugauuugcgcccagaaguuuaacggacugacagugcugccuccucugcugaccgaugagaugaucgcccaguacacaucugcccugcuggccggcacaaucacaagcggcuggacauuuggagcuggcgccgcucugcagauccccuuugcuaugcagauggccuaccgguucaacggcaucggagugacccagaaugugcuguacgagaaccagaagcugaucgccaaccaguucaacagcgccaucggcaagauccaggacagccugagcagcacagcaagcgcccugggaaagcugcaggacguggucaaccagaaugcccaggcacugaacacccuggucaagcagcuguccuccaacuucggcgccaucagcucugugcugaacgauauccugagcagacuggacccuccugaggccgaggugcagaucgacagacugaucacaggcagacugcagagccuccagacauacgugacccagcagcugaucagagccgccgagauuagagccucugccaaucuggccgccaccaagaugucugagugugugcugggccagagcaagagaguggacuuuugcggcaagggcuaccagcugaugagcuucccucagucugccccucacggcgugguguuucugaacgugacauaugugcccgcucaagagaagaauuucaccaccgcuccagccaucugcaacgacggcaaagcccacuuuccuagagaaggcguguucguguccaacggcaccaacugguucgugacacagcggaacuucuacgagccccagaucaucaccaccgacaacaccuucgugucuggcaacugcgacguugugaucggcauugugaacaauaccguguacgacccucugcagcccgagcuggacagcggaggaucuggcuauauccccgaggcuccuagagauggccaggccuauguucggaaggauggcgaaugggugcugcugagcaccuuccuuugaggacuaguuauaagacugacuagcccgaugggccucccaacgggcccuccuccccuccuugcaccgagauuaauaaaaaaaaaaaaaaaaaaaaaaaaaaaaaaaaaaaaaaaaaaaaaaaaaaaaaaaaaaaaaaaaugcaucccccccccccccccccccccccccccccccaaaggcucuuuucagagccaccagaauu

SEQ ID NO: 13123 - RNA, 3751 nt, Artificial Sequence
  SARS-CoV-2/Wuhan/WIV05/2019__EPI_ISL_402128 spike protein mRNA gc mod (1-1147)(I712C_T1077C) Foldon construct
aggagaaagcuuaccauguucguguuucuggugcugcugccccugguguccagccagugugugaaccugaccaccagaacacagcugccuccagccuacaccaacagcuucaccagaggcguguacuaccccgacaagguguucagauccagcgugcugcacucuacccaggaccuguuccugccuuucuucagcaacgugaccugguuccacgccauccacguguccggcaccaauggcaccaagagauucgacaaccccgugcugcccuucaacgacgggguguacuuugccagcaccgagaaguccaacaucaucagaggcuggaucuucggcaccacacuggacagcaagacccagagccugcugaucgugaacaacgccaccaacguggucaucaaagugugcgaguuccaguucugcaacgaccccuuccugggcgucuacuaccacaagaacaacaagagcuggauggaaagcgaguuccggguguacagcagcgccaacaacugcaccuucgaguacgugucccagccuuuccugauggaccuggaaggcaagcagggcaacuucaagaaccugcgcgaguucguguucaagaacaucgacggcuacuucaaaaucuacagcaagcacaccccuaucaaccucgugcgggaucugccucagggcuucucugcucuggaaccccugguggaucugcccaucggcaucaacaucacccgguuucagacacugcuggcccugcacagaagcuaccugacaccuggcgauagcagcagcggauggacagcuggugccgccgcuuacuaugugggcuaccugcagccuagaaccuuccugcugaaguacaacgagaacggcaccaucaccgacgccguggauugugcucuggauccucugagcgagacaaagugcacccugaaguccuucaccguggaaaagggcaucuaccagaccagcaacuuccgggugcagcccaccgaauccaucgugcgguuccccaauaucaccaaucugugccccuucggcgagguguucaaugccaccagauucgccucuguguacgccuggaaccggaagcggaucagcaauugcguggccgacuacuccgugcuguacaacuccgccagcuucagcaccuucaagugcuacggcguguccccuaccaagcugaacgaccugugcuucacaaacguguacgccgacagcuucgugauccggggagaugaagugcggcagauugccccuggacagacaggcaagaucgccgacuacaacuacaagcugcccgacgacuucaccggcugugugauugccuggaacagcaacaaccuggacuccaaagucggcggcaacuacaauuaccuguaccggcuguuccggaaguccaaucugaagcccuucgagcgggacaucagcaccgaaaucuaucaggccggcagcaccccuugcaacggcguggaaggcuucaacugcuacuucccacugcaguccuacggcuuucagcccacaaauggcgugggcuaucagcccuacagagugguggugcugagcuucgaacugcugcaugcuccugccacagugugcggcccuaagaaaagcaccaaucucgugaagaacaaaugcgugaacuucaacuucaacggccugaccggcaccggcgugcugacagagagcaacaagaaguuccugccauuccagcaguuuggccgggauaucgccgauaccacagacgccguuagagauccccagacacuggaaauccuggacaucaccccaugcagcuucggcggagugucugugaucaccccuggcaccaacaccagcaaucagguggcagugcuguaccaggacgugaacuguaccgaagugcccguggccauucacgccgaucagcugacaccuacauggcggguguacuccaccggcagcaauguguuucagaccagagccggcugucugaucggagccgagcacgugaacaauagcuacgagugcgacauccccaucggcgcuggcaucugugccagcuaccagacacagacaaacagccccagacgggcuagaagcguggccagccagagcaucauugccuacacaaugucucugggcgccgagaacagcguggccuacuccaacaacucuugcgcuauccccaccaacuucaccaucagcgugaccaccgagauccugccuguguccaugaccaagaccagcguggacugcaccauguacaucugcggcgauuccaccgagugcuccaaccugcugcugcaguacggcagcuucugcacccagcugaauagagcccugacagggaucgccguggaacaggacaagaacacccaagagguguucgcccaagugaagcaaaucuacaagaccccuccuaucaaggacuucggcggcuucaauuucagccagauucugcccgauccuagcaagcccagcaagcggagcuucaucgaggaccugcuguucaacaaagugacacuggccgacgccggcuucaucaagcaguauggcgauugucugggcgacauugccgccagggaucugauuugcgcccagaaguuuaacggacugacagugcugccuccucugcugaccgaugagaugaucgcccaguacacaucugcccugcuggccggcacaaucacaagcggcuggacauuuggagcuggcgccgcucugcagauccccuuugcuaugcagauggccuaccgguucaacggcaucggagugacccagaaugugcuguacgagaaccagaagcugaucgccaaccaguucaacagcgccaucggcaagauccaggacagccugagcagcacagcaagcgcccugggaaagcugcaggacguggucaaccagaaugcccaggcacugaacacccuggucaagcagcuguccuccaacuucggcgccaucagcucugugcugaacgauauccugagcagacuggacaaggucgaggccgaggugcagaucgacagacugaucacaggcagacugcagagccuccagacauacgugacccagcagcugaucagagccgccgagauuagagccucugccaaucuggccgccaccaagaugucugagugugugcugggccagagcaagagaguggacuuuugcggcaagggcuaccaccugaugagcuucccucagucugccccucacggcgugguguuucugcacgugacauaugugcccgcucaagagaagaauuucaccugugcuccagccaucugccacgacggcaaagcccacuuuccuagagaaggcguguucguguccaacggcacccauugguucgugacacagcggaacuucuacgagccccagaucaucaccaccgacaacaccuucgugucuggcaacugcgacguugugaucggcauugugaacaauaccguguacgacccucugcagcccgagcuggacagcggaggaucuggcuauauccccgaggcuccuagagauggccaggccuauguucggaaggauggcgaaugggugcugcugagcaccuuccuuugaggacuaguuauaagacugacuagcccgaugggccucccaacgggcccuccuccccuccuugcaccgagauuaauaaaaaaaaaaaaaaaaaaaaaaaaaaaaaaaaaaaaaaaaaaaaaaaaaaaaaaaaaaaaaaaaugcaucccccccccccccccccccccccccccccccaaaggcucuuuucagagccaccagaauu

SEQ ID NO: 13124 - RNA, 3751 nt, Artificial Sequence
  SARS-CoV-2/Wuhan/WIV05/2019__EPI_ISL_402128 spike protein mRNA gc mod (1-1147)(I714C_Y1110C) Foldon construct
aggagaaagcuuaccauguucguguuucuggugcugcugccccugguguccagccagugugugaaccugaccaccagaacacagcugccuccagccuacaccaacagcuucaccagaggcguguacuaccccgacaagguguucagauccagcgugcugcacucuacccaggaccuguuccugccuuucuucagcaacgugaccugguuccacgccauccacguguccggcaccaauggcaccaagagauucgacaaccccgugcugcccuucaacgacgggguguacuuugccagcaccgagaaguccaacaucaucagaggcuggaucuucggcaccacacuggacagcaagacccagagccugcugaucgugaacaacgccaccaacguggucaucaaagugugcgaguuccaguucugcaacgaccccuuccugggcgucuacuaccacaagaacaacaagagcuggauggaaagcgaguuccggguguacagcagcgccaacaacugcaccuucgaguacgugucccagccuuuccugauggaccuggaaggcaagcagggcaacuucaagaaccugcgcgaguucguguucaagaacaucgacggcuacuucaaaaucuacagcaagcacaccccuaucaaccucgugcgggaucugccucagggcuucucugcucuggaaccccugguggaucugcccaucggcaucaacaucacccgguuucagacacugcuggcccugcacagaagcuaccugacaccuggcgauagcagcagcggauggacagcuggugccgccgcuuacuaugugggcuaccugcagccuagaaccuuccugcugaaguacaacgagaacggcaccaucaccgacgccguggauugugcucuggauccucugagcgagacaaagugcacccugaaguccuucaccguggaaaagggcaucuaccagaccagcaacuuccgggugcagcccaccgaauccaucgugcgguuccccaauaucaccaaucugugccccuucggcgagguguucaaugccaccagauucgccucuguguacgccuggaaccggaagcggaucagcaauugcguggccgacuacuccgugcuguacaacuccgccagcuucagcaccuucaagugcuacggcguguccccuaccaagcugaacgaccugugcuucacaaacguguacgccgacagcuucgugauccggggagaugaagugcggcagauugccccuggacagacaggcaagaucgccgacuacaacuacaagcugcccgacgacuucaccggcugugugauugccuggaacagcaacaaccuggacuccaaagucggcggcaacuacaauuaccuguaccggcuguuccggaaguccaaucugaagcccuucgagcgggacaucagcaccgaaaucuaucaggccggcagcaccccuugcaacggcguggaaggcuucaacugcuacuucccacugcaguccuacggcuuucagcccacaaauggcgugggcuaucagcccuacagagugguggugcugagcuucgaacugcugcaugcuccugccacagugugcggcccuaagaaaagcaccaaucucgugaagaacaaaugcgugaacuucaacuucaacggccugaccggcaccggcgugcugacagagagcaacaagaaguuccugccauuccagcaguuuggccgggauaucgccgauaccacagacgccguuagagauccccagacacuggaaauccuggacaucaccccaugcagcuucggcggagugucugugaucaccccuggcaccaacaccagcaaucagguggcagugcuguaccaggacgugaacuguaccgaagugcccguggccauucacgccgaucagcugacaccuacauggcggguguacuccaccggcagcaauguguuucagaccagagccggcugucugaucggagccgagcacgugaacaauagcuacgagugcgacauccccaucggcgcuggcaucugugccagcuaccagacacagacaaacagccccagacgggcuagaagcguggccagccagagcaucauugccuacacaaugucucugggcgccgagaacagcguggccuacuccaacaacucuaucgcuugccccaccaacuucaccaucagcgugaccaccgagauccugccuguguccaugaccaagaccagcguggacugcaccauguacaucugcggcgauuccaccgagugcuccaaccugcugcugcaguacggcagcuucugcacccagcugaauagagcccugacagggaucgccguggaacaggacaagaacacccaagagguguucgcccaagugaagcaaaucuacaagaccccuccuaucaaggacuucggcggcuucaauuucagccagauucugcccgauccuagcaagcccagcaagcggagcuucaucgaggaccugcuguucaacaaagugacacuggccgacgccggcuucaucaagcaguauggcgauugucugggcgacauugccgccagggaucugauuugcgcccagaaguuuaacggacugacagugcugccuccucugcugaccgaugagaugaucgcccaguacacaucugcccugcuggccggcacaaucacaagcggcuggacauuuggagcuggcgccgcucugcagauccccuuugcuaugcagauggccuaccgguucaacggcaucggagugacccagaaugugcuguacgagaaccagaagcugaucgccaaccaguucaacagcgccaucggcaagauccaggacagccugagcagcacagcaagcgcccugggaaagcugcaggacguggucaaccagaaugcccaggcacugaacacccuggucaagcagcuguccuccaacuucggcgccaucagcucugugcugaacgauauccugagcagacuggacaaggucgaggccgaggugcagaucgacagacugaucacaggcagacugcagagccuccagacauacgugacccagcagcugaucagagccgccgagauuagagccucugccaaucuggccgccaccaagaugucugagugugugcugggccagagcaagagaguggacuuuugcggcaagggcuaccaccugaugagcuucccucagucugccccucacggcgugguguuucugcacgugacauaugugcccgcucaagagaagaauuucaccaccgcuccagccaucugccacgacggcaaagcccacuuuccuagagaaggcguguucguguccaacggcacccauugguucgugacacagcggaacuucugugagccccagaucaucaccaccgacaacaccuucgugucuggcaacugcgacguugugaucggcauugugaacaauaccguguacgacccucugcagcccgagcuggacagcggaggaucuggcuauauccccgaggcuccuagagauggccaggccuauguucggaaggauggcgaaugggugcugcugagcaccuuccuuugaggacuaguuauaagacugacuagcccgaugggccucccaacgggcccuccuccccuccuugcaccgagauuaauaaaaaaaaaaaaaaaaaaaaaaaaaaaaaaaaaaaaaaaaaaaaaaaaaaaaaaaaaaaaaaaaugcaucccccccccccccccccccccccccccccccaaaggcucuuuucagagccaccagaauu

SEQ ID NO: 13125 - RNA, 3751 nt, Artificial Sequence
  SARS-CoV-2/Wuhan/WIV05/2019__EPI_ISL_402128 spike protein mRNA gc mod (1-1147)(P715C_P1069C) Foldon construct
aggagaaagcuuaccauguucguguuucuggugcugcugccccugguguccagccagugugugaaccugaccaccagaacacagcugccuccagccuacaccaacagcuucaccagaggcguguacuaccccgacaagguguucagauccagcgugcugcacucuacccaggaccuguuccugccuuucuucagcaacgugaccugguuccacgccauccacguguccggcaccaauggcaccaagagauucgacaaccccgugcugcccuucaacgacgggguguacuuugccagcaccgagaaguccaacaucaucagaggcuggaucuucggcaccacacuggacagcaagacccagagccugcugaucgugaacaacgccaccaacguggucaucaaagugugcgaguuccaguucugcaacgaccccuuccugggcgucuacuaccacaagaacaacaagagcuggauggaaagcgaguuccggguguacagcagcgccaacaacugcaccuucgaguacgugucccagccuuuccugauggaccuggaaggcaagcagggcaacuucaagaaccugcgcgaguucguguucaagaacaucgacggcuacuucaaaaucuacagcaagcacaccccuaucaaccucgugcgggaucugccucagggcuucucugcucuggaaccccugguggaucugcccaucggcaucaacaucacccgguuucagacacugcuggcccugcacagaagcuaccugacaccuggcgauagcagcagcggauggacagcuggugccgccgcuuacuaugugggcuaccugcagccuagaaccuuccugcugaaguacaacgagaacggcaccaucaccgacgccguggauugugcucuggauccucugagcgagacaaagugcacccugaaguccuucaccguggaaaagggcaucuaccagaccagcaacuuccgggugcagcccaccgaauccaucgugcgguuccccaauaucaccaaucugugccccuucggcgagguguucaaugccaccagauucgccucuguguacgccuggaaccggaagcggaucagcaauugcguggccgacuacuccgugcuguacaacuccgccagcuucagcaccuucaagugcuacggcguguccccuaccaagcugaacgaccugugcuucacaaacguguacgccgacagcuucgugauccggggagaugaagugcggcagauugccccuggacagacaggcaagaucgccgacuacaacuacaagcugcccgacgacuucaccggcugugugauugccuggaacagcaacaaccuggacuccaaagucggcggcaacuacaauuaccuguaccggcuguuccggaaguccaaucugaagcccuucgagcgggacaucagcaccgaaaucuaucaggccggcagcaccccuugcaacggcguggaaggcuucaacugcuacuucccacugcaguccuacggcuuucagcccacaaauggcgugggcuaucagcccuacagagugguggugcugagcuucgaacugcugcaugcuccugccacagugugcggcccuaagaaaagcaccaaucucgugaagaacaaaugcgugaacuucaacuucaacggccugaccggcaccggcgugcugacagagagcaacaagaaguuccugccauuccagcaguuuggccgggauaucgccgauaccacagacgccguuagagauccccagacacuggaaauccuggacaucaccccaugcagcuucggcggagugucugugaucaccccuggcaccaacaccagcaaucagguggcagugcuguaccaggacgugaacuguaccgaagugcccguggccauucacgccgaucagcugacaccuacauggcggguguacuccaccggcagcaauguguuucagaccagagccggcugucugaucggagccgagcacgugaacaauagcuacgagugcgacauccccaucggcgcuggcaucugugccagcuaccagacacagacaaacagccccagacgggcuagaagcguggccagccagagcaucauugccuacacaaugucucugggcgccgagaacagcguggccuacuccaacaacucuaucgcuaucugcaccaacuucaccaucagcgugaccaccgagauccugccuguguccaugaccaagaccagcguggacugcaccauguacaucugcggcgauuccaccgagugcuccaaccugcugcugcaguacggcagcuucugcacccagcugaauagagcccugacagggaucgccguggaacaggacaagaacacccaagagguguucgcccaagugaagcaaaucuacaagaccccuccuaucaaggacuucggcggcuucaauuucagccagauucugcccgauccuagcaagcccagcaagcggagcuucaucgaggaccugcuguucaacaaagugacacuggccgacgccggcuucaucaagcaguauggcgauugucugggcgacauugccgccagggaucugauuugcgcccagaaguuuaacggacugacagugcugccuccucugcugaccgaugagaugaucgcccaguacacaucugcccugcuggccggcacaaucacaagcggcuggacauuuggagcuggcgccgcucugcagauccccuuugcuaugcagauggccuaccgguucaacggcaucggagugacccagaaugugcuguacgagaaccagaagcugaucgccaaccaguucaacagcgccaucggcaagauccaggacagccugagcagcacagcaagcgcccugggaaagcugcaggacguggucaaccagaaugcccaggcacugaacacccuggucaagcagcuguccuccaacuucggcgccaucagcucugugcugaacgauauccugagcagacuggacaaggucgaggccgaggugcagaucgacagacugaucacaggcagacugcagagccuccagacauacgugacccagcagcugaucagagccgccgagauuagagccucugccaaucuggccgccaccaagaugucugagugugugcugggccagagcaagagaguggacuuuugcggcaagggcuaccaccugaugagcuucccucagucugccccucacggcgugguguuucugcacgugacauaugugugugcucaagagaagaauuucaccaccgcuccagccaucugccacgacggcaaagcccacuuuccuagagaaggcguguucguguccaacggcacccauugguucgugacacagcggaacuucuacgagccccagaucaucaccaccgacaacaccuucgugucuggcaacugcgacguugugaucggcauugugaacaauaccguguacgacccucugcagcccgagcuggacagcggaggaucuggcuauauccccgaggcuccuagagauggccaggccuauguucggaaggauggcgaaugggugcugcugagcaccuuccuuugaggacuaguuauaagacugacuagcccgaugggccucccaacgggcccuccuccccuccuugcaccgagauuaauaaaaaaaaaaaaaaaaaaaaaaaaaaaaaaaaaaaaaaaaaaaaaaaaaaaaaaaaaaaaaaaaugcaucccccccccccccccccccccccccccccccaaaggcucuuuucagagccaccagaauu

SEQ ID NO: 13126 - RNA, 3751 nt, Artificial Sequence
  SARS-CoV-2/Wuhan/WIV05/2019__EPI_ISL_402128 spike protein mRNA gc mod (1-1147)(G889C_L1034C) Foldon construct
aggagaaagcuuaccauguucguguuucuggugcugcugccccugguguccagccagugugugaaccugaccaccagaacacagcugccuccagccuacaccaacagcuucaccagaggcguguacuaccccgacaagguguucagauccagcgugcugcacucuacccaggaccuguuccugccuuucuucagcaacgugaccugguuccacgccauccacguguccggcaccaauggcaccaagagauucgacaaccccgugcugcccuucaacgacgggguguacuuugccagcaccgagaaguccaacaucaucagaggcuggaucuucggcaccacacuggacagcaagacccagagccugcugaucgugaacaacgccaccaacguggucaucaaagugugcgaguuccaguucugcaacgaccccuuccugggcgucuacuaccacaagaacaacaagagcuggauggaaagcgaguuccggguguacagcagcgccaacaacugcaccuucgaguacgugucccagccuuuccugauggaccuggaaggcaagcagggcaacuucaagaaccugcgcgaguucguguucaagaacaucgacggcuacuucaaaaucuacagcaagcacaccccuaucaaccucgugcgggaucugccucagggcuucucugcucuggaaccccugguggaucugcccaucggcaucaacaucacccgguuucagacacugcuggcccugcacagaagcuaccugacaccuggcgauagcagcagcggauggacagcuggugccgccgcuuacuaugugggcuaccugcagccuagaaccuuccugcugaaguacaacgagaacggcaccaucaccgacgccguggauugugcucuggauccucugagcgagacaaagugcacccugaaguccuucaccguggaaaagggcaucuaccagaccagcaacuuccgggugcagcccaccgaauccaucgugcgguuccccaauaucaccaaucugugccccuucggcgagguguucaaugccaccagauucgccucuguguacgccuggaaccggaagcggaucagcaauugcguggccgacuacuccgugcuguacaacuccgccagcuucagcaccuucaagugcuacggcguguccccuaccaagcugaacgaccugugcuucacaaacguguacgccgacagcuucgugauccggggagaugaagugcggcagauugccccuggacagacaggcaagaucgccgacuacaacuacaagcugcccgacgacuucaccggcugugugauugccuggaacagcaacaaccuggacuccaaagucggcggcaacuacaauuaccuguaccggcuguuccggaaguccaaucugaagcccuucgagcgggacaucagcaccgaaaucuaucaggccggcagcaccccuugcaacggcguggaaggcuucaacugcuacuucccacugcaguccuacggcuuucagcccacaaauggcgugggcuaucagcccuacagagugguggugcugagcuucgaacugcugcaugcuccugccacagugugcggcccuaagaaaagcaccaaucucgugaagaacaaaugcgugaacuucaacuucaacggccugaccggcaccggcgugcugacagagagcaacaagaaguuccugccauuccagcaguuuggccgggauaucgccgauaccacagacgccguuagagauccccagacacuggaaauccuggacaucaccccaugcagcuucggcggagugucugugaucaccccuggcaccaacaccagcaaucagguggcagugcuguaccaggacgugaacuguaccgaagugcccguggccauucacgccgaucagcugacaccuacauggcggguguacuccaccggcagcaauguguuucagaccagagccggcugucugaucggagccgagcacgugaacaauagcuacgagugcgacauccccaucggcgcuggcaucugugccagcuaccagacacagacaaacagccccagacgggcuagaagcguggccagccagagcaucauugccuacacaaugucucugggcgccgagaacagcguggccuacuccaacaacucuaucgcuauccccaccaacuucaccaucagcgugaccaccgagauccugccuguguccaugaccaagaccagcguggacugcaccauguacaucugcggcgauuccaccgagugcuccaaccugcugcugcaguacggcagcuucugcacccagcugaauagagcccugacagggaucgccguggaacaggacaagaacacccaagagguguucgcccaagugaagcaaaucuacaagaccccuccuaucaaggacuucggcggcuucaauuucagccagauucugcccgauccuagcaagcccagcaagcggagcuucaucgaggaccugcuguucaacaaagugacacuggccgacgccggcuucaucaagcaguauggcgauugucugggcgacauugccgccagggaucugauuugcgcccagaaguuuaacggacugacagugcugccuccucugcugaccgaugagaugaucgcccaguacacaucugcccugcuggccggcacaaucacaagcggcuggacauuuugcgcuggcgccgcucugcagauccccuuugcuaugcagauggccuaccgguucaacggcaucggagugacccagaaugugcuguacgagaaccagaagcugaucgccaaccaguucaacagcgccaucggcaagauccaggacagccugagcagcacagcaagcgcccugggaaagcugcaggacguggucaaccagaaugcccaggcacugaacacccuggucaagcagcuguccuccaacuucggcgccaucagcucugugcugaacgauauccugagcagacuggacaaggucgaggccgaggugcagaucgacagacugaucacaggcagacugcagagccuccagacauacgugacccagcagcugaucagagccgccgagauuagagccucugccaaucuggccgccaccaagaugucugaguguguguguggccagagcaagagaguggacuuuugcggcaagggcuaccaccugaugagcuucccucagucugccccucacggcgugguguuucugcacgugacauaugugcccgcucaagagaagaauuucaccaccgcuccagccaucugccacgacggcaaagcccacuuuccuagagaaggcguguucguguccaacggcacccauugguucgugacacagcggaacuucuacgagccccagaucaucaccaccgacaacaccuucgugucuggcaacugcgacguugugaucggcauugugaacaauaccguguacgacccucugcagcccgagcuggacagcggaggaucuggcuauauccccgaggcuccuagagauggccaggccuauguucggaaggauggcgaaugggugcugcugagcaccuuccuuugaggacuaguuauaagacugacuagcccgaugggccucccaacgggcccuccuccccuccuugcaccgagauuaauaaaaaaaaaaaaaaaaaaaaaaaaaaaaaaaaaaaaaaaaaaaaaaaaaaaaaaaaaaaaaaaaugcaucccccccccccccccccccccccccccccccaaaggcucuuuucagagccaccagaauu

SEQ ID NO: 13127 - RNA, 3751 nt, Artificial Sequence
  SARS-CoV-2/Wuhan/WIV05/2019__EPI_ISL_402128 spike protein mRNA gc mod (1-1147)(I909C_Y1047C) Foldon construct
aggagaaagcuuaccauguucguguuucuggugcugcugccccugguguccagccagugugugaaccugaccaccagaacacagcugccuccagccuacaccaacagcuucaccagaggcguguacuaccccgacaagguguucagauccagcgugcugcacucuacccaggaccuguuccugccuuucuucagcaacgugaccugguuccacgccauccacguguccggcaccaauggcaccaagagauucgacaaccccgugcugcccuucaacgacgggguguacuuugccagcaccgagaaguccaacaucaucagaggcuggaucuucggcaccacacuggacagcaagacccagagccugcugaucgugaacaacgccaccaacguggucaucaaagugugcgaguuccaguucugcaacgaccccuuccugggcgucuacuaccacaagaacaacaagagcuggauggaaagcgaguuccggguguacagcagcgccaacaacugcaccuucgaguacgugucccagccuuuccugauggaccuggaaggcaagcagggcaacuucaagaaccugcgcgaguucguguucaagaacaucgacggcuacuucaaaaucuacagcaagcacaccccuaucaaccucgugcgggaucugccucagggcuucucugcucuggaaccccugguggaucugcccaucggcaucaacaucacccgguuucagacacugcuggcccugcacagaagcuaccugacaccuggcgauagcagcagcggauggacagcuggugccgccgcuuacuaugugggcuaccugcagccuagaaccuuccugcugaaguacaacgagaacggcaccaucaccgacgccguggauugugcucuggauccucugagcgagacaaagugcacccugaaguccuucaccguggaaaagggcaucuaccagaccagcaacuuccgggugcagcccaccgaauccaucgugcgguuccccaauaucaccaaucugugccccuucggcgagguguucaaugccaccagauucgccucuguguacgccuggaaccggaagcggaucagcaauugcguggccgacuacuccgugcuguacaacuccgccagcuucagcaccuucaagugcuacggcguguccccuaccaagcugaacgaccugugcuucacaaacguguacgccgacagcuucgugauccggggagaugaagugcggcagauugccccuggacagacaggcaagaucgccgacuacaacuacaagcugcccgacgacuucaccggcugugugauugccuggaacagcaacaaccuggacuccaaagucggcggcaacuacaauuaccuguaccggcuguuccggaaguccaaucugaagcccuucgagcgggacaucagcaccgaaaucuaucaggccggcagcaccccuugcaacggcguggaaggcuucaacugcuacuucccacugcaguccuacggcuuucagcccacaaauggcgugggcuaucagcccuacagagugguggugcugagcuucgaacugcugcaugcuccugccacagugugcggcccuaagaaaagcaccaaucucgugaagaacaaaugcgugaacuucaacuucaacggccugaccggcaccggcgugcugacagagagcaacaagaaguuccugccauuccagcaguuuggccgggauaucgccgauaccacagacgccguuagagauccccagacacuggaaauccuggacaucaccccaugcagcuucggcggagugucugugaucaccccuggcaccaacaccagcaaucagguggcagugcuguaccaggacgugaacuguaccgaagugcccguggccauucacgccgaucagcugacaccuacauggcggguguacuccaccggcagcaauguguuucagaccagagccggcugucugaucggagccgagcacgugaacaauagcuacgagugcgacauccccaucggcgcuggcaucugugccagcuaccagacacagacaaacagccccagacgggcuagaagcguggccagccagagcaucauugccuacacaaugucucugggcgccgagaacagcguggccuacuccaacaacucuaucgcuauccccaccaacuucaccaucagcgugaccaccgagauccugccuguguccaugaccaagaccagcguggacugcaccauguacaucugcggcgauuccaccgagugcuccaaccugcugcugcaguacggcagcuucugcacccagcugaauagagcccugacagggaucgccguggaacaggacaagaacacccaagagguguucgcccaagugaagcaaaucuacaagaccccuccuaucaaggacuucggcggcuucaauuucagccagauucugcccgauccuagcaagcccagcaagcggagcuucaucgaggaccugcuguucaacaaagugacacuggccgacgccggcuucaucaagcaguauggcgauugucugggcgacauugccgccagggaucugauuugcgcccagaaguuuaacggacugacagugcugccuccucugcugaccgaugagaugaucgcccaguacacaucugcccugcuggccggcacaaucacaagcggcuggacauuuggagcuggcgccgcucugcagauccccuuugcuaugcagauggccuaccgguucaacggcugcggagugacccagaaugugcuguacgagaaccagaagcugaucgccaaccaguucaacagcgccaucggcaagauccaggacagccugagcagcacagcaagcgcccugggaaagcugcaggacguggucaaccagaaugcccaggcacugaacacccuggucaagcagcuguccuccaacuucggcgccaucagcucugugcugaacgauauccugagcagacuggacaaggucgaggccgaggugcagaucgacagacugaucacaggcagacugcagagccuccagacauacgugacccagcagcugaucagagccgccgagauuagagccucugccaaucuggccgccaccaagaugucugagugugugcugggccagagcaagagaguggacuuuugcggcaagggcugucaccugaugagcuucccucagucugccccucacggcgugguguuucugcacgugacauaugugcccgcucaagagaagaauuucaccaccgcuccagccaucugccacgacggcaaagcccacuuuccuagagaaggcguguucguguccaacggcacccauugguucgugacacagcggaacuucuacgagccccagaucaucaccaccgacaacaccuucgugucuggcaacugcgacguugugaucggcauugugaacaauaccguguacgacccucugcagcccgagcuggacagcggaggaucuggcuauauccccgaggcuccuagagauggccaggccuauguucggaaggauggcgaaugggugcugcugagcaccuuccuuugaggacuaguuauaagacugacuagcccgaugggccucccaacgggcccuccuccccuccuugcaccgagauuaauaaaaaaaaaaaaaaaaaaaaaaaaaaaaaaaaaaaaaaaaaaaaaaaaaaaaaaaaaaaaaaaaugcaucccccccccccccccccccccccccccccccaaaggcucuuuucagagccaccagaauu

SEQ ID NO: 13128 - RNA, 3751 nt, Artificial Sequence
  SARS-CoV-2/Wuhan/WIV05/2019__EPI_ISL_402128 spike protein mRNA gc mod (1-1147)(Q965C_S1003C) Foldon construct
aggagaaagcuuaccauguucguguuucuggugcugcugccccugguguccagccagugugugaaccugaccaccagaacacagcugccuccagccuacaccaacagcuucaccagaggcguguacuaccccgacaagguguucagauccagcgugcugcacucuacccaggaccuguuccugccuuucuucagcaacgugaccugguuccacgccauccacguguccggcaccaauggcaccaagagauucgacaaccccgugcugcccuucaacgacgggguguacuuugccagcaccgagaaguccaacaucaucagaggcuggaucuucggcaccacacuggacagcaagacccagagccugcugaucgugaacaacgccaccaacguggucaucaaagugugcgaguuccaguucugcaacgaccccuuccugggcgucuacuaccacaagaacaacaagagcuggauggaaagcgaguuccggguguacagcagcgccaacaacugcaccuucgaguacgugucccagccuuuccugauggaccuggaaggcaagcagggcaacuucaagaaccugcgcgaguucguguucaagaacaucgacggcuacuucaaaaucuacagcaagcacaccccuaucaaccucgugcgggaucugccucagggcuucucugcucuggaaccccugguggaucugcccaucggcaucaacaucacccgguuucagacacugcuggcccugcacagaagcuaccugacaccuggcgauagcagcagcggauggacagcuggugccgccgcuuacuaugugggcuaccugcagccuagaaccuuccugcugaaguacaacgagaacggcaccaucaccgacgccguggauugugcucuggauccucugagcgagacaaagugcacccugaaguccuucaccguggaaaagggcaucuaccagaccagcaacuuccgggugcagcccaccgaauccaucgugcgguuccccaauaucaccaaucugugccccuucggcgagguguucaaugccaccagauucgccucuguguacgccuggaaccggaagcggaucagcaauugcguggccgacuacuccgugcuguacaacuccgccagcuucagcaccuucaagugcuacggcguguccccuaccaagcugaacgaccugugcuucacaaacguguacgccgacagcuucgugauccggggagaugaagugcggcagauugccccuggacagacaggcaagaucgccgacuacaacuacaagcugcccgacgacuucaccggcugugugauugccuggaacagcaacaaccuggacuccaaagucggcggcaacuacaauuaccuguaccggcuguuccggaaguccaaucugaagcccuucgagcgggacaucagcaccgaaaucuaucaggccggcagcaccccuugcaacggcguggaaggcuucaacugcuacuucccacugcaguccuacggcuuucagcccacaaauggcgugggcuaucagcccuacagagugguggugcugagcuucgaacugcugcaugcuccugccacagugugcggcccuaagaaaagcaccaaucucgugaagaacaaaugcgugaacuucaacuucaacggccugaccggcaccggcgugcugacagagagcaacaagaaguuccugccauuccagcaguuuggccgggauaucgccgauaccacagacgccguuagagauccccagacacuggaaauccuggacaucaccccaugcagcuucggcggagugucugugaucaccccuggcaccaacaccagcaaucagguggcagugcuguaccaggacgugaacuguaccgaagugcccguggccauucacgccgaucagcugacaccuacauggcggguguacuccaccggcagcaauguguuucagaccagagccggcugucugaucggagccgagcacgugaacaauagcuacgagugcgacauccccaucggcgcuggcaucugugccagcuaccagacacagacaaacagccccagacgggcuagaagcguggccagccagagcaucauugccuacacaaugucucugggcgccgagaacagcguggccuacuccaacaacucuaucgcuauccccaccaacuucaccaucagcgugaccaccgagauccugccuguguccaugaccaagaccagcguggacugcaccauguacaucugcggcgauuccaccgagugcuccaaccugcugcugcaguacggcagcuucugcacccagcugaauagagcccugacagggaucgccguggaacaggacaagaacacccaagagguguucgcccaagugaagcaaaucuacaagaccccuccuaucaaggacuucggcggcuucaauuucagccagauucugcccgauccuagcaagcccagcaagcggagcuucaucgaggaccugcuguucaacaaagugacacuggccgacgccggcuucaucaagcaguauggcgauugucugggcgacauugccgccagggaucugauuugcgcccagaaguuuaacggacugacagugcugccuccucugcugaccgaugagaugaucgcccaguacacaucugcccugcuggccggcacaaucacaagcggcuggacauuuggagcuggcgccgcucugcagauccccuuugcuaugcagauggccuaccgguucaacggcaucggagugacccagaaugugcuguacgagaaccagaagcugaucgccaaccaguucaacagcgccaucggcaagauccaggacagccugagcagcacagcaagcgcccugggaaagcugcaggacguggucaaccagaaugcccaggcacugaacacccuggucaagugccuguccuccaacuucggcgccaucagcucugugcugaacgauauccugagcagacuggacaaggucgaggccgaggugcagaucgacagacugaucacaggcagacugcagugucuccagacauacgugacccagcagcugaucagagccgccgagauuagagccucugccaaucuggccgccaccaagaugucugagugugugcugggccagagcaagagaguggacuuuugcggcaagggcuaccaccugaugagcuucccucagucugccccucacggcgugguguuucugcacgugacauaugugcccgcucaagagaagaauuucaccaccgcuccagccaucugccacgacggcaaagcccacuuuccuagagaaggcguguucguguccaacggcacccauugguucgugacacagcggaacuucuacgagccccagaucaucaccaccgacaacaccuucgugucuggcaacugcgacguugugaucggcauugugaacaauaccguguacgacccucugcagcccgagcuggacagcggaggaucuggcuauauccccgaggcuccuagagauggccaggccuauguucggaaggauggcgaaugggugcugcugagcaccuuccuuugaggacuaguuauaagacugacuagcccgaugggccucccaacgggcccuccuccccuccuugcaccgagauuaauaaaaaaaaaaaaaaaaaaaaaaaaaaaaaaaaaaaaaaaaaaaaaaaaaaaaaaaaaaaaaaaaugcaucccccccccccccccccccccccccccccccaaaggcucuuuucagagccaccagaauu

SEQ ID NO: 13129 - RNA, 3751 nt, Artificial Sequence
  SARS-CoV-2/Wuhan/WIV05/2019__EPI_ISL_402128 spike protein mRNA gc mod (1-1147)(F970C_G999C) Foldon construct
aggagaaagcuuaccauguucguguuucuggugcugcugccccugguguccagccagugugugaaccugaccaccagaacacagcugccuccagccuacaccaacagcuucaccagaggcguguacuaccccgacaagguguucagauccagcgugcugcacucuacccaggaccuguuccugccuuucuucagcaacgugaccugguuccacgccauccacguguccggcaccaauggcaccaagagauucgacaaccccgugcugcccuucaacgacgggguguacuuugccagcaccgagaaguccaacaucaucagaggcuggaucuucggcaccacacuggacagcaagacccagagccugcugaucgugaacaacgccaccaacguggucaucaaagugugcgaguuccaguucugcaacgaccccuuccugggcgucuacuaccacaagaacaacaagagcuggauggaaagcgaguuccggguguacagcagcgccaacaacugcaccuucgaguacgugucccagccuuuccugauggaccuggaaggcaagcagggcaacuucaagaaccugcgcgaguucguguucaagaacaucgacggcuacuucaaaaucuacagcaagcacaccccuaucaaccucgugcgggaucugccucagggcuucucugcucuggaaccccugguggaucugcccaucggcaucaacaucacccgguuucagacacugcuggcccugcacagaagcuaccugacaccuggcgauagcagcagcggauggacagcuggugccgccgcuuacuaugugggcuaccugcagccuagaaccuuccugcugaaguacaacgagaacggcaccaucaccgacgccguggauugugcucuggauccucugagcgagacaaagugcacccugaaguccuucaccguggaaaagggcaucuaccagaccagcaacuuccgggugcagcccaccgaauccaucgugcgguuccccaauaucaccaaucugugccccuucggcgagguguucaaugccaccagauucgccucuguguacgccuggaaccggaagcggaucagcaauugcguggccgacuacuccgugcuguacaacuccgccagcuucagcaccuucaagugcuacggcguguccccuaccaagcugaacgaccugugcuucacaaacguguacgccgacagcuucgugauccggggagaugaagugcggcagauugccccuggacagacaggcaagaucgccgacuacaacuacaagcugcccgacgacuucaccggcugugugauugccuggaacagcaacaaccuggacuccaaagucggcggcaacuacaauuaccuguaccggcuguuccggaaguccaaucugaagcccuucgagcgggacaucagcaccgaaaucuaucaggccggcagcaccccuugcaacggcguggaaggcuucaacugcuacuucccacugcaguccuacggcuuucagcccacaaauggcgugggcuaucagcccuacagagugguggugcugagcuucgaacugcugcaugcuccugccacagugugcggcccuaagaaaagcaccaaucucgugaagaacaaaugcgugaacuucaacuucaacggccugaccggcaccggcgugcugacagagagcaacaagaaguuccugccauuccagcaguuuggccgggauaucgccgauaccacagacgccguuagagauccccagacacuggaaauccuggacaucaccccaugcagcuucggcggagugucugugaucaccccuggcaccaacaccagcaaucagguggcagugcuguaccaggacgugaacuguaccgaagugcccguggccauucacgccgaucagcugacaccuacauggcggguguacuccaccggcagcaauguguuucagaccagagccggcugucugaucggagccgagcacgugaacaauagcuacgagugcgacauccccaucggcgcuggcaucugugccagcuaccagacacagacaaacagccccagacgggcuagaagcguggccagccagagcaucauugccuacacaaugucucugggcgccgagaacagcguggccuacuccaacaacucuaucgcuauccccaccaacuucaccaucagcgugaccaccgagauccugccuguguccaugaccaagaccagcguggacugcaccauguacaucugcggcgauuccaccgagugcuccaaccugcugcugcaguacggcagcuucugcacccagcugaauagagcccugacagggaucgccguggaacaggacaagaacacccaagagguguucgcccaagugaagcaaaucuacaagaccccuccuaucaaggacuucggcggcuucaauuucagccagauucugcccgauccuagcaagcccagcaagcggagcuucaucgaggaccugcuguucaacaaagugacacuggccgacgccggcuucaucaagcaguauggcgauugucugggcgacauugccgccagggaucugauuugcgcccagaaguuuaacggacugacagugcugccuccucugcugaccgaugagaugaucgcccaguacacaucugcccugcuggccggcacaaucacaagcggcuggacauuuggagcuggcgccgcucugcagauccccuuugcuaugcagauggccuaccgguucaacggcaucggagugacccagaaugugcuguacgagaaccagaagcugaucgccaaccaguucaacagcgccaucggcaagauccaggacagccugagcagcacagcaagcgcccugggaaagcugcaggacguggucaaccagaaugcccaggcacugaacacccuggucaagcagcuguccuccaacugcggcgccaucagcucugugcugaacgauauccugagcagacuggacaaggucgaggccgaggugcagaucgacagacugaucacauguagacugcagagccuccagacauacgugacccagcagcugaucagagccgccgagauuagagccucugccaaucuggccgccaccaagaugucugagugugugcugggccagagcaagagaguggacuuuugcggcaagggcuaccaccugaugagcuucccucagucugccccucacggcgugguguuucugcacgugacauaugugcccgcucaagagaagaauuucaccaccgcuccagccaucugccacgacggcaaagcccacuuuccuagagaaggcguguucguguccaacggcacccauugguucgugacacagcggaacuucuacgagccccagaucaucaccaccgacaacaccuucgugucuggcaacugcgacguugugaucggcauugugaacaauaccguguacgacccucugcagcccgagcuggacagcggaggaucuggcuauauccccgaggcuccuagagauggccaggccuauguucggaaggauggcgaaugggugcugcugagcaccuuccuuugaggacuaguuauaagacugacuagcccgaugggccucccaacgggcccuccuccccuccuugcaccgagauuaauaaaaaaaaaaaaaaaaaaaaaaaaaaaaaaaaaaaaaaaaaaaaaaaaaaaaaaaaaaaaaaaaugcaucccccccccccccccccccccccccccccccaaaggcucuuuucagagccaccagaauu

SEQ ID NO: 13130 - RNA, 3751 nt, Artificial Sequence
  SARS-CoV-2/Wuhan/WIV05/2019__EPI_ISL_402128 spike protein mRNA gc mod (1-1147)(A972C_R995C) Foldon construct
aggagaaagcuuaccauguucguguuucuggugcugcugccccugguguccagccagugugugaaccugaccaccagaacacagcugccuccagccuacaccaacagcuucaccagaggcguguacuaccccgacaagguguucagauccagcgugcugcacucuacccaggaccuguuccugccuuucuucagcaacgugaccugguuccacgccauccacguguccggcaccaauggcaccaagagauucgacaaccccgugcugcccuucaacgacgggguguacuuugccagcaccgagaaguccaacaucaucagaggcuggaucuucggcaccacacuggacagcaagacccagagccugcugaucgugaacaacgccaccaacguggucaucaaagugugcgaguuccaguucugcaacgaccccuuccugggcgucuacuaccacaagaacaacaagagcuggauggaaagcgaguuccggguguacagcagcgccaacaacugcaccuucgaguacgugucccagccuuuccugauggaccuggaaggcaagcagggcaacuucaagaaccugcgcgaguucguguucaagaacaucgacggcuacuucaaaaucuacagcaagcacaccccuaucaaccucgugcgggaucugccucagggcuucucugcucuggaaccccugguggaucugcccaucggcaucaacaucacccgguuucagacacugcuggcccugcacagaagcuaccugacaccuggcgauagcagcagcggauggacagcuggugccgccgcuuacuaugugggcuaccugcagccuagaaccuuccugcugaaguacaacgagaacggcaccaucaccgacgccguggauugugcucuggauccucugagcgagacaaagugcacccugaaguccuucaccguggaaaagggcaucuaccagaccagcaacuuccgggugcagcccaccgaauccaucgugcgguuccccaauaucaccaaucugugccccuucggcgagguguucaaugccaccagauucgccucuguguacgccuggaaccggaagcggaucagcaauugcguggccgacuacuccgugcuguacaacuccgccagcuucagcaccuucaagugcuacggcguguccccuaccaagcugaacgaccugugcuucacaaacguguacgccgacagcuucgugauccggggagaugaagugcggcagauugccccuggacagacaggcaagaucgccgacuacaacuacaagcugcccgacgacuucaccggcugugugauugccuggaacagcaacaaccuggacuccaaagucggcggcaacuacaauuaccuguaccggcuguuccggaaguccaaucugaagcccuucgagcgggacaucagcaccgaaaucuaucaggccggcagcaccccuugcaacggcguggaaggcuucaacugcuacuucccacugcaguccuacggcuuucagcccacaaauggcgugggcuaucagcccuacagagugguggugcugagcuucgaacugcugcaugcuccugccacagugugcggcccuaagaaaagcaccaaucucgugaagaacaaaugcgugaacuucaacuucaacggccugaccggcaccggcgugcugacagagagcaacaagaaguuccugccauuccagcaguuuggccgggauaucgccgauaccacagacgccguuagagauccccagacacuggaaauccuggacaucaccccaugcagcuucggcggagugucugugaucaccccuggcaccaacaccagcaaucagguggcagugcuguaccaggacgugaacuguaccgaagugcccguggccauucacgccgaucagcugacaccuacauggcggguguacuccaccggcagcaauguguuucagaccagagccggcugucugaucggagccgagcacgugaacaauagcuacgagugcgacauccccaucggcgcuggcaucugugccagcuaccagacacagacaaacagccccagacgggcuagaagcguggccagccagagcaucauugccuacacaaugucucugggcgccgagaacagcguggccuacuccaacaacucuaucgcuauccccaccaacuucaccaucagcgugaccaccgagauccugccuguguccaugaccaagaccagcguggacugcaccauguacaucugcggcgauuccaccgagugcuccaaccugcugcugcaguacggcagcuucugcacccagcugaauagagcccugacagggaucgccguggaacaggacaagaacacccaagagguguucgcccaagugaagcaaaucuacaagaccccuccuaucaaggacuucggcggcuucaauuucagccagauucugcccgauccuagcaagcccagcaagcggagcuucaucgaggaccugcuguucaacaaagugacacuggccgacgccggcuucaucaagcaguauggcgauugucugggcgacauugccgccagggaucugauuugcgcccagaaguuuaacggacugacagugcugccuccucugcugaccgaugagaugaucgcccaguacacaucugcccugcuggccggcacaaucacaagcggcuggacauuuggagcuggcgccgcucugcagauccccuuugcuaugcagauggccuaccgguucaacggcaucggagugacccagaaugugcuguacgagaaccagaagcugaucgccaaccaguucaacagcgccaucggcaagauccaggacagccugagcagcacagcaagcgcccugggaaagcugcaggacguggucaaccagaaugcccaggcacugaacacccuggucaagcagcuguccuccaacuucggcugcaucagcucugugcugaacgauauccugagcagacuggacaaggucgaggccgaggugcagaucgacugucugaucacaggcagacugcagagccuccagacauacgugacccagcagcugaucagagccgccgagauuagagccucugccaaucuggccgccaccaagaugucugagugugugcugggccagagcaagagaguggacuuuugcggcaagggcuaccaccugaugagcuucccucagucugccccucacggcgugguguuucugcacgugacauaugugcccgcucaagagaagaauuucaccaccgcuccagccaucugccacgacggcaaagcccacuuuccuagagaaggcguguucguguccaacggcacccauugguucgugacacagcggaacuucuacgagccccagaucaucaccaccgacaacaccuucgugucuggcaacugcgacguugugaucggcauugugaacaauaccguguacgacccucugcagcccgagcuggacagcggaggaucuggcuauauccccgaggcuccuagagauggccaggccuauguucggaaggauggcgaaugggugcugcugagcaccuuccuuugaggacuaguuauaagacugacuagcccgaugggccucccaacgggcccuccuccccuccuugcaccgagauuaauaaaaaaaaaaaaaaaaaaaaaaaaaaaaaaaaaaaaaaaaaaaaaaaaaaaaaaaaaaaaaaaaugcaucccccccccccccccccccccccccccccccaaaggcucuuuucagagccaccagaauu

SEQ ID NO: 13131 - RNA, 3751 nt, Artificial Sequence
  SARS-CoV-2/Wuhan/WIV05/2019__EPI_ISL_402128 spike protein mRNA gc mod (1-1147)(A890C_V1040C) Foldon construct
aggagaaagcuuaccauguucguguuucuggugcugcugccccugguguccagccagugugugaaccugaccaccagaacacagcugccuccagccuacaccaacagcuucaccagaggcguguacuaccccgacaagguguucagauccagcgugcugcacucuacccaggaccuguuccugccuuucuucagcaacgugaccugguuccacgccauccacguguccggcaccaauggcaccaagagauucgacaaccccgugcugcccuucaacgacgggguguacuuugccagcaccgagaaguccaacaucaucagaggcuggaucuucggcaccacacuggacagcaagacccagagccugcugaucgugaacaacgccaccaacguggucaucaaagugugcgaguuccaguucugcaacgaccccuuccugggcgucuacuaccacaagaacaacaagagcuggauggaaagcgaguuccggguguacagcagcgccaacaacugcaccuucgaguacgugucccagccuuuccugauggaccuggaaggcaagcagggcaacuucaagaaccugcgcgaguucguguucaagaacaucgacggcuacuucaaaaucuacagcaagcacaccccuaucaaccucgugcgggaucugccucagggcuucucugcucuggaaccccugguggaucugcccaucggcaucaacaucacccgguuucagacacugcuggcccugcacagaagcuaccugacaccuggcgauagcagcagcggauggacagcuggugccgccgcuuacuaugugggcuaccugcagccuagaaccuuccugcugaaguacaacgagaacggcaccaucaccgacgccguggauugugcucuggauccucugagcgagacaaagugcacccugaaguccuucaccguggaaaagggcaucuaccagaccagcaacuuccgggugcagcccaccgaauccaucgugcgguuccccaauaucaccaaucugugccccuucggcgagguguucaaugccaccagauucgccucuguguacgccuggaaccggaagcggaucagcaauugcguggccgacuacuccgugcuguacaacuccgccagcuucagcaccuucaagugcuacggcguguccccuaccaagcugaacgaccugugcuucacaaacguguacgccgacagcuucgugauccggggagaugaagugcggcagauugccccuggacagacaggcaagaucgccgacuacaacuacaagcugcccgacgacuucaccggcugugugauugccuggaacagcaacaaccuggacuccaaagucggcggcaacuacaauuaccuguaccggcuguuccggaaguccaaucugaagcccuucgagcgggacaucagcaccgaaaucuaucaggccggcagcaccccuugcaacggcguggaaggcuucaacugcuacuucccacugcaguccuacggcuuucagcccacaaauggcgugggcuaucagcccuacagagugguggugcugagcuucgaacugcugcaugcuccugccacagugugcggcccuaagaaaagcaccaaucucgugaagaacaaaugcgugaacuucaacuucaacggccugaccggcaccggcgugcugacagagagcaacaagaaguuccugccauuccagcaguuuggccgggauaucgccgauaccacagacgccguuagagauccccagacacuggaaauccuggacaucaccccaugcagcuucggcggagugucugugaucaccccuggcaccaacaccagcaaucagguggcagugcuguaccaggacgugaacuguaccgaagugcccguggccauucacgccgaucagcugacaccuacauggcggguguacuccaccggcagcaauguguuucagaccagagccggcugucugaucggagccgagcacgugaacaauagcuacgagugcgacauccccaucggcgcuggcaucugugccagcuaccagacacagacaaacagccccagacgggcuagaagcguggccagccagagcaucauugccuacacaaugucucugggcgccgagaacagcguggccuacuccaacaacucuaucgcuauccccaccaacuucaccaucagcgugaccaccgagauccugccuguguccaugaccaagaccagcguggacugcaccauguacaucugcggcgauuccaccgagugcuccaaccugcugcugcaguacggcagcuucugcacccagcugaauagagcccugacagggaucgccguggaacaggacaagaacacccaagagguguucgcccaagugaagcaaaucuacaagaccccuccuaucaaggacuucggcggcuucaauuucagccagauucugcccgauccuagcaagcccagcaagcggagcuucaucgaggaccugcuguucaacaaagugacacuggccgacgccggcuucaucaagcaguauggcgauugucugggcgacauugccgccagggaucugauuugcgcccagaaguuuaacggacugacagugcugccuccucugcugaccgaugagaugaucgcccaguacacaucugcccugcuggccggcacaaucacaagcggcuggacauuuggaugcggcgccgcucugcagauccccuuugcuaugcagauggccuaccgguucaacggcaucggagugacccagaaugugcuguacgagaaccagaagcugaucgccaaccaguucaacagcgccaucggcaagauccaggacagccugagcagcacagcaagcgcccugggaaagcugcaggacguggucaaccagaaugcccaggcacugaacacccuggucaagcagcuguccuccaacuucggcgccaucagcucugugcugaacgauauccugagcagacuggacaaggucgaggccgaggugcagaucgacagacugaucacaggcagacugcagagccuccagacauacgugacccagcagcugaucagagccgccgagauuagagccucugccaaucuggccgccaccaagaugucugagugugugcugggccagagcaagagaugugacuuuugcggcaagggcuaccaccugaugagcuucccucagucugccccucacggcgugguguuucugcacgugacauaugugcccgcucaagagaagaauuucaccaccgcuccagccaucugccacgacggcaaagcccacuuuccuagagaaggcguguucguguccaacggcacccauugguucgugacacagcggaacuucuacgagccccagaucaucaccaccgacaacaccuucgugucuggcaacugcgacguugugaucggcauugugaacaauaccguguacgacccucugcagcccgagcuggacagcggaggaucuggcuauauccccgaggcuccuagagauggccaggccuauguucggaaggauggcgaaugggugcugcugagcaccuuccuuugaggacuaguuauaagacugacuagcccgaugggccucccaacgggcccuccuccccuccuugcaccgagauuaauaaaaaaaaaaaaaaaaaaaaaaaaaaaaaaaaaaaaaaaaaaaaaaaaaaaaaaaaaaaaaaaaugcaucccccccccccccccccccccccccccccccaaaggcucuuuucagagccaccagaauu

SEQ ID NO: 13132 - RNA, 3751 nt, Artificial Sequence
  SARS-CoV-2/Wuhan/WIV05/2019__EPI_ISL_402128 spike protein mRNA gc mod (1-1147)(T874C_S1055C) Foldon construct
aggagaaagcuuaccauguucguguuucuggugcugcugccccugguguccagccagugugugaaccugaccaccagaacacagcugccuccagccuacaccaacagcuucaccagaggcguguacuaccccgacaagguguucagauccagcgugcugcacucuacccaggaccuguuccugccuuucuucagcaacgugaccugguuccacgccauccacguguccggcaccaauggcaccaagagauucgacaaccccgugcugcccuucaacgacgggguguacuuugccagcaccgagaaguccaacaucaucagaggcuggaucuucggcaccacacuggacagcaagacccagagccugcugaucgugaacaacgccaccaacguggucaucaaagugugcgaguuccaguucugcaacgaccccuuccugggcgucuacuaccacaagaacaacaagagcuggauggaaagcgaguuccggguguacagcagcgccaacaacugcaccuucgaguacgugucccagccuuuccugauggaccuggaaggcaagcagggcaacuucaagaaccugcgcgaguucguguucaagaacaucgacggcuacuucaaaaucuacagcaagcacaccccuaucaaccucgugcgggaucugccucagggcuucucugcucuggaaccccugguggaucugcccaucggcaucaacaucacccgguuucagacacugcuggcccugcacagaagcuaccugacaccuggcgauagcagcagcggauggacagcuggugccgccgcuuacuaugugggcuaccugcagccuagaaccuuccugcugaaguacaacgagaacggcaccaucaccgacgccguggauugugcucuggauccucugagcgagacaaagugcacccugaaguccuucaccguggaaaagggcaucuaccagaccagcaacuuccgggugcagcccaccgaauccaucgugcgguuccccaauaucaccaaucugugccccuucggcgagguguucaaugccaccagauucgccucuguguacgccuggaaccggaagcggaucagcaauugcguggccgacuacuccgugcuguacaacuccgccagcuucagcaccuucaagugcuacggcguguccccuaccaagcugaacgaccugugcuucacaaacguguacgccgacagcuucgugauccggggagaugaagugcggcagauugccccuggacagacaggcaagaucgccgacuacaacuacaagcugcccgacgacuucaccggcugugugauugccuggaacagcaacaaccuggacuccaaagucggcggcaacuacaauuaccuguaccggcuguuccggaaguccaaucugaagcccuucgagcgggacaucagcaccgaaaucuaucaggccggcagcaccccuugcaacggcguggaaggcuucaacugcuacuucccacugcaguccuacggcuuucagcccacaaauggcgugggcuaucagcccuacagagugguggugcugagcuucgaacugcugcaugcuccugccacagugugcggcccuaagaaaagcaccaaucucgugaagaacaaaugcgugaacuucaacuucaacggccugaccggcaccggcgugcugacagagagcaacaagaaguuccugccauuccagcaguuuggccgggauaucgccgauaccacagacgccguuagagauccccagacacuggaaauccuggacaucaccccaugcagcuucggcggagugucugugaucaccccuggcaccaacaccagcaaucagguggcagugcuguaccaggacgugaacuguaccgaagugcccguggccauucacgccgaucagcugacaccuacauggcggguguacuccaccggcagcaauguguuucagaccagagccggcugucugaucggagccgagcacgugaacaauagcuacgagugcgacauccccaucggcgcuggcaucugugccagcuaccagacacagacaaacagccccagacgggcuagaagcguggccagccagagcaucauugccuacacaaugucucugggcgccgagaacagcguggccuacuccaacaacucuaucgcuauccccaccaacuucaccaucagcgugaccaccgagauccugccuguguccaugaccaagaccagcguggacugcaccauguacaucugcggcgauuccaccgagugcuccaaccugcugcugcaguacggcagcuucugcacccagcugaauagagcccugacagggaucgccguggaacaggacaagaacacccaagagguguucgcccaagugaagcaaaucuacaagaccccuccuaucaaggacuucggcggcuucaauuucagccagauucugcccgauccuagcaagcccagcaagcggagcuucaucgaggaccugcuguucaacaaagugacacuggccgacgccggcuucaucaagcaguauggcgauugucugggcgacauugccgccagggaucugauuugcgcccagaaguuuaacggacugacagugcugccuccucugcugaccgaugagaugaucgcccaguacugcucugcccugcuggccggcacaaucacaagcggcuggacauuuggagcuggcgccgcucugcagauccccuuugcuaugcagauggccuaccgguucaacggcaucggagugacccagaaugugcuguacgagaaccagaagcugaucgccaaccaguucaacagcgccaucggcaagauccaggacagccugagcagcacagcaagcgcccugggaaagcugcaggacguggucaaccagaaugcccaggcacugaacacccuggucaagcagcuguccuccaacuucggcgccaucagcucugugcugaacgauauccugagcagacuggacaaggucgaggccgaggugcagaucgacagacugaucacaggcagacugcagagccuccagacauacgugacccagcagcugaucagagccgccgagauuagagccucugccaaucuggccgccaccaagaugucugagugugugcugggccagagcaagagaguggacuuuugcggcaagggcuaccaccugaugagcuucccucagugcgccccucacggcgugguguuucugcacgugacauaugugcccgcucaagagaagaauuucaccaccgcuccagccaucugccacgacggcaaagcccacuuuccuagagaaggcguguucguguccaacggcacccauugguucgugacacagcggaacuucuacgagccccagaucaucaccaccgacaacaccuucgugucuggcaacugcgacguugugaucggcauugugaacaauaccguguacgacccucugcagcccgagcuggacagcggaggaucuggcuauauccccgaggcuccuagagauggccaggccuauguucggaaggauggcgaaugggugcugcugagcaccuuccuuugaggacuaguuauaagacugacuagcccgaugggccucccaacgggcccuccuccccuccuugcaccgagauuaauaaaaaaaaaaaaaaaaaaaaaaaaaaaaaaaaaaaaaaaaaaaaaaaaaaaaaaaaaaaaaaaaugcaucccccccccccccccccccccccccccccccaaaggcucuuuucagagccaccagaauu

SEQ ID NO: 13133 - RNA, 4123 nt, Artificial Sequence
  SARS-CoV-2/Wuhan/WIV05/2019__EPI_ISL_402128 spike protein mRNA gc mod (1-1147) WhcAg construct
aggagaaagcuuaccauguucguguuucuggugcugcugccccugguguccagccagugugugaaccugaccaccagaacacagcugccuccagccuacaccaacagcuucaccagaggcguguacuaccccgacaagguguucagauccagcgugcugcacucuacccaggaccuguuccugccuuucuucagcaacgugaccugguuccacgccauccacguguccggcaccaauggcaccaagagauucgacaaccccgugcugcccuucaacgacgggguguacuuugccagcaccgagaaguccaacaucaucagaggcuggaucuucggcaccacacuggacagcaagacccagagccugcugaucgugaacaacgccaccaacguggucaucaaagugugcgaguuccaguucugcaacgaccccuuccugggcgucuacuaccacaagaacaacaagagcuggauggaaagcgaguuccggguguacagcagcgccaacaacugcaccuucgaguacgugucccagccuuuccugauggaccuggaaggcaagcagggcaacuucaagaaccugcgcgaguucguguucaagaacaucgacggcuacuucaaaaucuacagcaagcacaccccuaucaaccucgugcgggaucugccucagggcuucucugcucuggaaccccugguggaucugcccaucggcaucaacaucacccgguuucagacacugcuggcccugcacagaagcuaccugacaccuggcgauagcagcagcggauggacagcuggugccgccgcuuacuaugugggcuaccugcagccuagaaccuuccugcugaaguacaacgagaacggcaccaucaccgacgccguggauugugcucuggauccucugagcgagacaaagugcacccugaaguccuucaccguggaaaagggcaucuaccagaccagcaacuuccgggugcagcccaccgaauccaucgugcgguuccccaauaucaccaaucugugccccuucggcgagguguucaaugccaccagauucgccucuguguacgccuggaaccggaagcggaucagcaauugcguggccgacuacuccgugcuguacaacuccgccagcuucagcaccuucaagugcuacggcguguccccuaccaagcugaacgaccugugcuucacaaacguguacgccgacagcuucgugauccggggagaugaagugcggcagauugccccuggacagacaggcaagaucgccgacuacaacuacaagcugcccgacgacuucaccggcugugugauugccuggaacagcaacaaccuggacuccaaagucggcggcaacuacaauuaccuguaccggcuguuccggaaguccaaucugaagcccuucgagcgggacaucagcaccgaaaucuaucaggccggcagcaccccuugcaacggcguggaaggcuucaacugcuacuucccacugcaguccuacggcuuucagcccacaaauggcgugggcuaucagcccuacagagugguggugcugagcuucgaacugcugcaugcuccugccacagugugcggcccuaagaaaagcaccaaucucgugaagaacaaaugcgugaacuucaacuucaacggccugaccggcaccggcgugcugacagagagcaacaagaaguuccugccauuccagcaguuuggccgggauaucgccgauaccacagacgccguuagagauccccagacacuggaaauccuggacaucaccccaugcagcuucggcggagugucugugaucaccccuggcaccaacaccagcaaucagguggcagugcuguaccaggacgugaacuguaccgaagugcccguggccauucacgccgaucagcugacaccuacauggcggguguacuccaccggcagcaauguguuucagaccagagccggcugucugaucggagccgagcacgugaacaauagcuacgagugcgacauccccaucggcgcuggcaucugugccagcuaccagacacagacaaacagccccagacgggcuagaagcguggccagccagagcaucauugccuacacaaugucucugggcgccgagaacagcguggccuacuccaacaacucuaucgcuauccccaccaacuucaccaucagcgugaccaccgagauccugccuguguccaugaccaagaccagcguggacugcaccauguacaucugcggcgauuccaccgagugcuccaaccugcugcugcaguacggcagcuucugcacccagcugaauagagcccugacagggaucgccguggaacaggacaagaacacccaagagguguucgcccaagugaagcaaaucuacaagaccccuccuaucaaggacuucggcggcuucaauuucagccagauucugcccgauccuagcaagcccagcaagcggagcuucaucgaggaccugcuguucaacaaagugacacuggccgacgccggcuucaucaagcaguauggcgauugucugggcgacauugccgccagggaucugauuugcgcccagaaguuuaacggacugacagugcugccuccucugcugaccgaugagaugaucgcccaguacacaucugcccugcuggccggcacaaucacaagcggcuggacauuuggagcuggcgccgcucugcagauccccuuugcuaugcagauggccuaccgguucaacggcaucggagugacccagaaugugcuguacgagaaccagaagcugaucgccaaccaguucaacagcgccaucggcaagauccaggacagccugagcagcacagcaagcgcccugggaaagcugcaggacguggucaaccagaaugcccaggcacugaacacccuggucaagcagcuguccuccaacuucggcgccaucagcucugugcugaacgauauccugagcagacuggacaaggucgaggccgaggugcagaucgacagacugaucacaggcagacugcagagccuccagacauacgugacccagcagcugaucagagccgccgagauuagagccucugccaaucuggccgccaccaagaugucugagugugugcugggccagagcaagagaguggacuuuugcggcaagggcuaccaccugaugagcuucccucagucugccccucacggcgugguguuucugcacgugacauaugugcccgcucaagagaagaauuucaccaccgcuccagccaucugccacgacggcaaagcccacuuuccuagagaaggcguguucguguccaacggcacccauugguucgugacacagcggaacuucuacgagccccagaucaucaccaccgacaacaccuucgugucuggcaacugcgacguugugaucggcauugugaacaauaccguguacgacccucugcagcccgagcuggacagcggaggcggaggaucugacaucgaccccuacaaagaguucggcagcagcuaccagcugcugaacuuccugccucuggacuucuuccccgaccugaacgcccugguggauacagccacagcucuguacgaggaagaacugaccggcagagagcacugcagcccucaccacacagccauuagacaggcccucgugugcugggacgagcugacaaaacugaucgccuggaugagcagcaacaucaccagcgagcaagugcggaccaucaucgugaaccacgugaacgauaccuggggccugaaagugcggcagagccugugguuucaccugagcugucugaccuucggccagcacaccgugcaagaguuucugguguccuucggcguguggaucagaaccccugcuccauacagaccuccaaacgcucccauccugagcacccugccugagcacacagugaucuguugaggacuaguuauaagacugacuagcccgaugggccucccaacgggcccuccuccccuccuugcaccgagauuaauaaaaaaaaaaaaaaaaaaaaaaaaaaaaaaaaaaaaaaaaaaaaaaaaaaaaaaaaaaaaaaaaugcaucccccccccccccccccccccccccccccccaaaggcucuuuucagagccaccagaauu

SEQ ID NO: 13134 - RNA, 4123 nt, Artificial Sequence
  SARS-CoV-2/Wuhan/WIV05/2019__EPI_ISL_402128 spike protein mRNA gc mod (1-1147)(K986P_V987P) WhcAg construct
aggagaaagcuuaccauguucguguuucuggugcugcugccccugguguccagccagugugugaaccugaccaccagaacacagcugccuccagccuacaccaacagcuucaccagaggcguguacuaccccgacaagguguucagauccagcgugcugcacucuacccaggaccuguuccugccuuucuucagcaacgugaccugguuccacgccauccacguguccggcaccaauggcaccaagagauucgacaaccccgugcugcccuucaacgacgggguguacuuugccagcaccgagaaguccaacaucaucagaggcuggaucuucggcaccacacuggacagcaagacccagagccugcugaucgugaacaacgccaccaacguggucaucaaagugugcgaguuccaguucugcaacgaccccuuccugggcgucuacuaccacaagaacaacaagagcuggauggaaagcgaguuccggguguacagcagcgccaacaacugcaccuucgaguacgugucccagccuuuccugauggaccuggaaggcaagcagggcaacuucaagaaccugcgcgaguucguguucaagaacaucgacggcuacuucaaaaucuacagcaagcacaccccuaucaaccucgugcgggaucugccucagggcuucucugcucuggaaccccugguggaucugcccaucggcaucaacaucacccgguuucagacacugcuggcccugcacagaagcuaccugacaccuggcgauagcagcagcggauggacagcuggugccgccgcuuacuaugugggcuaccugcagccuagaaccuuccugcugaaguacaacgagaacggcaccaucaccgacgccguggauugugcucuggauccucugagcgagacaaagugcacccugaaguccuucaccguggaaaagggcaucuaccagaccagcaacuuccgggugcagcccaccgaauccaucgugcgguuccccaauaucaccaaucugugccccuucggcgagguguucaaugccaccagauucgccucuguguacgccuggaaccggaagcggaucagcaauugcguggccgacuacuccgugcuguacaacuccgccagcuucagcaccuucaagugcuacggcguguccccuaccaagcugaacgaccugugcuucacaaacguguacgccgacagcuucgugauccggggagaugaagugcggcagauugccccuggacagacaggcaagaucgccgacuacaacuacaagcugcccgacgacuucaccggcugugugauugccuggaacagcaacaaccuggacuccaaagucggcggcaacuacaauuaccuguaccggcuguuccggaaguccaaucugaagcccuucgagcgggacaucagcaccgaaaucuaucaggccggcagcaccccuugcaacggcguggaaggcuucaacugcuacuucccacugcaguccuacggcuuucagcccacaaauggcgugggcuaucagcccuacagagugguggugcugagcuucgaacugcugcaugcuccugccacagugugcggcccuaagaaaagcaccaaucucgugaagaacaaaugcgugaacuucaacuucaacggccugaccggcaccggcgugcugacagagagcaacaagaaguuccugccauuccagcaguuuggccgggauaucgccgauaccacagacgccguuagagauccccagacacuggaaauccuggacaucaccccaugcagcuucggcggagugucugugaucaccccuggcaccaacaccagcaaucagguggcagugcuguaccaggacgugaacuguaccgaagugcccguggccauucacgccgaucagcugacaccuacauggcggguguacuccaccggcagcaauguguuucagaccagagccggcugucugaucggagccgagcacgugaacaauagcuacgagugcgacauccccaucggcgcuggcaucugugccagcuaccagacacagacaaacagccccagacgggcuagaagcguggccagccagagcaucauugccuacacaaugucucugggcgccgagaacagcguggccuacuccaacaacucuaucgcuauccccaccaacuucaccaucagcgugaccaccgagauccugccuguguccaugaccaagaccagcguggacugcaccauguacaucugcggcgauuccaccgagugcuccaaccugcugcugcaguacggcagcuucugcacccagcugaauagagcccugacagggaucgccguggaacaggacaagaacacccaagagguguucgcccaagugaagcaaaucuacaagaccccuccuaucaaggacuucggcggcuucaauuucagccagauucugcccgauccuagcaagcccagcaagcggagcuucaucgaggaccugcuguucaacaaagugacacuggccgacgccggcuucaucaagcaguauggcgauugucugggcgacauugccgccagggaucugauuugcgcccagaaguuuaacggacugacagugcugccuccucugcugaccgaugagaugaucgcccaguacacaucugcccugcuggccggcacaaucacaagcggcuggacauuuggagcuggcgccgcucugcagauccccuuugcuaugcagauggccuaccgguucaacggcaucggagugacccagaaugugcuguacgagaaccagaagcugaucgccaaccaguucaacagcgccaucggcaagauccaggacagccugagcagcacagcaagcgcccugggaaagcugcaggacguggucaaccagaaugcccaggcacugaacacccuggucaagcagcuguccuccaacuucggcgccaucagcucugugcugaacgauauccugagcagacuggacccuccugaggccgaggugcagaucgacagacugaucacaggcagacugcagagccuccagacauacgugacccagcagcugaucagagccgccgagauuagagccucugccaaucuggccgccaccaagaugucugagugugugcugggccagagcaagagaguggacuuuugcggcaagggcuaccaccugaugagcuucccucagucugccccucacggcgugguguuucugcacgugacauaugugcccgcucaagagaagaauuucaccaccgcuccagccaucugccacgacggcaaagcccacuuuccuagagaaggcguguucguguccaacggcacccauugguucgugacacagcggaacuucuacgagccccagaucaucaccaccgacaacaccuucgugucuggcaacugcgacguugugaucggcauugugaacaauaccguguacgacccucugcagcccgagcuggacagcggaggcggaggaucugacaucgaccccuacaaagaguucggcagcagcuaccagcugcugaacuuccugccucuggacuucuuccccgaccugaacgcccugguggauacagccacagcucuguacgaggaagaacugaccggcagagagcacugcagcccucaccacacagccauuagacaggcccucgugugcugggacgagcugacaaaacugaucgccuggaugagcagcaacaucaccagcgagcaagugcggaccaucaucgugaaccacgugaacgauaccuggggccugaaagugcggcagagccugugguuucaccugagcugucugaccuucggccagcacaccgugcaagaguuucugguguccuucggcguguggaucagaaccccugcuccauacagaccuccaaacgcucccauccugagcacccugccugagcacacagugaucuguugaggacuaguuauaagacugacuagcccgaugggccucccaacgggcccuccuccccuccuugcaccgagauuaauaaaaaaaaaaaaaaaaaaaaaaaaaaaaaaaaaaaaaaaaaaaaaaaaaaaaaaaaaaaaaaaaugcaucccccccccccccccccccccccccccccccaaaggcucuuuucagagccaccagaauu

SEQ ID NO: 13135 - RNA, 4123 nt, Artificial Sequence
  SARS-CoV-2/Wuhan/WIV05/2019__EPI_ISL_402128 spike protein mRNA gc mod (1-1147)(K986P_V987P_T887WN_A1020W) WhcAg construct
aggagaaagcuuaccauguucguguuucuggugcugcugccccugguguccagccagugugugaaccugaccaccagaacacagcugccuccagccuacaccaacagcuucaccagaggcguguacuaccccgacaagguguucagauccagcgugcugcacucuacccaggaccuguuccugccuuucuucagcaacgugaccugguuccacgccauccacguguccggcaccaauggcaccaagagauucgacaaccccgugcugcccuucaacgacgggguguacuuugccagcaccgagaaguccaacaucaucagaggcuggaucuucggcaccacacuggacagcaagacccagagccugcugaucgugaacaacgccaccaacguggucaucaaagugugcgaguuccaguucugcaacgaccccuuccugggcgucuacuaccacaagaacaacaagagcuggauggaaagcgaguuccggguguacagcagcgccaacaacugcaccuucgaguacgugucccagccuuuccugauggaccuggaaggcaagcagggcaacuucaagaaccugcgcgaguucguguucaagaacaucgacggcuacuucaaaaucuacagcaagcacaccccuaucaaccucgugcgggaucugccucagggcuucucugcucuggaaccccugguggaucugcccaucggcaucaacaucacccgguuucagacacugcuggcccugcacagaagcuaccugacaccuggcgauagcagcagcggauggacagcuggugccgccgcuuacuaugugggcuaccugcagccuagaaccuuccugcugaaguacaacgagaacggcaccaucaccgacgccguggauugugcucuggauccucugagcgagacaaagugcacccugaaguccuucaccguggaaaagggcaucuaccagaccagcaacuuccgggugcagcccaccgaauccaucgugcgguuccccaauaucaccaaucugugccccuucggcgagguguucaaugccaccagauucgccucuguguacgccuggaaccggaagcggaucagcaauugcguggccgacuacuccgugcuguacaacuccgccagcuucagcaccuucaagugcuacggcguguccccuaccaagcugaacgaccugugcuucacaaacguguacgccgacagcuucgugauccggggagaugaagugcggcagauugccccuggacagacaggcaagaucgccgacuacaacuacaagcugcccgacgacuucaccggcugugugauugccuggaacagcaacaaccuggacuccaaagucggcggcaacuacaauuaccuguaccggcuguuccggaaguccaaucugaagcccuucgagcgggacaucagcaccgaaaucuaucaggccggcagcaccccuugcaacggcguggaaggcuucaacugcuacuucccacugcaguccuacggcuuucagcccacaaauggcgugggcuaucagcccuacagagugguggugcugagcuucgaacugcugcaugcuccugccacagugugcggcccuaagaaaagcaccaaucucgugaagaacaaaugcgugaacuucaacuucaacggccugaccggcaccggcgugcugacagagagcaacaagaaguuccugccauuccagcaguuuggccgggauaucgccgauaccacagacgccguuagagauccccagacacuggaaauccuggacaucaccccaugcagcuucggcggagugucugugaucaccccuggcaccaacaccagcaaucagguggcagugcuguaccaggacgugaacuguaccgaagugcccguggccauucacgccgaucagcugacaccuacauggcggguguacuccaccggcagcaauguguuucagaccagagccggcugucugaucggagccgagcacgugaacaauagcuacgagugcgacauccccaucggcgcuggcaucugugccagcuaccagacacagacaaacagccccagacgggcuagaagcguggccagccagagcaucauugccuacacaaugucucugggcgccgagaacagcguggccuacuccaacaacucuaucgcuauccccaccaacuucaccaucagcgugaccaccgagauccugccuguguccaugaccaagaccagcguggacugcaccauguacaucugcggcgauuccaccgagugcuccaaccugcugcugcaguacggcagcuucugcacccagcugaauagagcccugacagggaucgccguggaacaggacaagaacacccaagagguguucgcccaagugaagcaaaucuacaagaccccuccuaucaaggacuucggcggcuucaauuucagccagauucugcccgauccuagcaagcccagcaagcggagcuucaucgaggaccugcuguucaacaaagugacacuggccgacgccggcuucaucaagcaguauggcgauugucugggcgacauugccgccagggaucugauuugcgcccagaaguuuaacggacugacagugcugccuccucugcugaccgaugagaugaucgcccaguacacaucugcccugcuggccggcacaaucacaagcggcuggugguuuggagcuggcgccgcucugcagauccccuuugcuaugcagauggccuaccgguucaacggcaucggagugacccagaaugugcuguacgagaaccagaagcugaucgccaaccaguucaacagcgccaucggcaagauccaggacagccugagcagcacagcaagcgcccugggaaagcugcaggacguggucaaccagaaugcccaggcacugaacacccuggucaagcagcuguccuccaacuucggcgccaucagcucugugcugaacgauauccugagcagacuggacccuccugaggccgaggugcagaucgacagacugaucacaggcagacugcagagccuccagacauacgugacccagcagcugaucagagccgccgagauuagauggucugccaaucuggccgccaccaagaugucugagugugugcugggccagagcaagagaguggacuuuugcggcaagggcuaccaccugaugagcuucccucagucugccccucacggcgugguguuucugcacgugacauaugugcccgcucaagagaagaauuucaccaccgcuccagccaucugccacgacggcaaagcccacuuuccuagagaaggcguguucguguccaacggcacccauugguucgugacacagcggaacuucuacgagccccagaucaucaccaccgacaacaccuucgugucuggcaacugcgacguugugaucggcauugugaacaauaccguguacgacccucugcagcccgagcuggacagcggaggcggaggaucugacaucgaccccuacaaagaguucggcagcagcuaccagcugcugaacuuccugccucuggacuucuuccccgaccugaacgcccugguggauacagccacagcucuguacgaggaagaacugaccggcagagagcacugcagcccucaccacacagccauuagacaggcccucgugugcugggacgagcugacaaaacugaucgccuggaugagcagcaacaucaccagcgagcaagugcggaccaucaucgugaaccacgugaacgauaccuggggccugaaagugcggcagagccugugguuucaccugagcugucugaccuucggccagcacaccgugcaagaguuucugguguccuucggcguguggaucagaaccccugcuccauacagaccuccaaacgcucccauccugagcacccugccugagcacacagugaucuguugaggacuaguuauaagacugacuagcccgaugggccucccaacgggcccuccuccccuccuugcaccgagauuaauaaaaaaaaaaaaaaaaaaaaaaaaaaaaaaaaaaaaaaaaaaaaaaaaaaaaaaaaaaaaaaaaugcaucccccccccccccccccccccccccccccccaaaggcucuuuucagagccaccagaauu

SEQ ID NO: 13136 - RNA, 4123 nt, Artificial Sequence
  SARS-CoV-2/Wuhan/WIV05/2019__EPI_ISL_402128 spike protein mRNA gc mod (1-1147)(K986P_V987P_P1069F) WhcAg construct
aggagaaagcuuaccauguucguguuucuggugcugcugccccugguguccagccagugugugaaccugaccaccagaacacagcugccuccagccuacaccaacagcuucaccagaggcguguacuaccccgacaagguguucagauccagcgugcugcacucuacccaggaccuguuccugccuuucuucagcaacgugaccugguuccacgccauccacguguccggcaccaauggcaccaagagauucgacaaccccgugcugcccuucaacgacgggguguacuuugccagcaccgagaaguccaacaucaucagaggcuggaucuucggcaccacacuggacagcaagacccagagccugcugaucgugaacaacgccaccaacguggucaucaaagugugcgaguuccaguucugcaacgaccccuuccugggcgucuacuaccacaagaacaacaagagcuggauggaaagcgaguuccggguguacagcagcgccaacaacugcaccuucgaguacgugucccagccuuuccugauggaccuggaaggcaagcagggcaacuucaagaaccugcgcgaguucguguucaagaacaucgacggcuacuucaaaaucuacagcaagcacaccccuaucaaccucgugcgggaucugccucagggcuucucugcucuggaaccccugguggaucugcccaucggcaucaacaucacccgguuucagacacugcuggcccugcacagaagcuaccugacaccuggcgauagcagcagcggauggacagcuggugccgccgcuuacuaugugggcuaccugcagccuagaaccuuccugcugaaguacaacgagaacggcaccaucaccgacgccguggauugugcucuggauccucugagcgagacaaagugcacccugaaguccuucaccguggaaaagggcaucuaccagaccagcaacuuccgggugcagcccaccgaauccaucgugcgguuccccaauaucaccaaucugugccccuucggcgagguguucaaugccaccagauucgccucuguguacgccuggaaccggaagcggaucagcaauugcguggccgacuacuccgugcuguacaacuccgccagcuucagcaccuucaagugcuacggcguguccccuaccaagcugaacgaccugugcuucacaaacguguacgccgacagcuucgugauccggggagaugaagugcggcagauugccccuggacagacaggcaagaucgccgacuacaacuacaagcugcccgacgacuucaccggcugugugauugccuggaacagcaacaaccuggacuccaaagucggcggcaacuacaauuaccuguaccggcuguuccggaaguccaaucugaagcccuucgagcgggacaucagcaccgaaaucuaucaggccggcagcaccccuugcaacggcguggaaggcuucaacugcuacuucccacugcaguccuacggcuuucagcccacaaauggcgugggcuaucagcccuacagagugguggugcugagcuucgaacugcugcaugcuccugccacagugugcggcccuaagaaaagcaccaaucucgugaagaacaaaugcgugaacuucaacuucaacggccugaccggcaccggcgugcugacagagagcaacaagaaguuccugccauuccagcaguuuggccgggauaucgccgauaccacagacgccguuagagauccccagacacuggaaauccuggacaucaccccaugcagcuucggcggagugucugugaucaccccuggcaccaacaccagcaaucagguggcagugcuguaccaggacgugaacuguaccgaagugcccguggccauucacgccgaucagcugacaccuacauggcggguguacuccaccggcagcaauguguuucagaccagagccggcugucugaucggagccgagcacgugaacaauagcuacgagugcgacauccccaucggcgcuggcaucugugccagcuaccagacacagacaaacagccccagacgggcuagaagcguggccagccagagcaucauugccuacacaaugucucugggcgccgagaacagcguggccuacuccaacaacucuaucgcuauccccaccaacuucaccaucagcgugaccaccgagauccugccuguguccaugaccaagaccagcguggacugcaccauguacaucugcggcgauuccaccgagugcuccaaccugcugcugcaguacggcagcuucugcacccagcugaauagagcccugacagggaucgccguggaacaggacaagaacacccaagagguguucgcccaagugaagcaaaucuacaagaccccuccuaucaaggacuucggcggcuucaauuucagccagauucugcccgauccuagcaagcccagcaagcggagcuucaucgaggaccugcuguucaacaaagugacacuggccgacgccggcuucaucaagcaguauggcgauugucugggcgacauugccgccagggaucugauuugcgcccagaaguuuaacggacugacagugcugccuccucugcugaccgaugagaugaucgcccaguacacaucugcccugcuggccggcacaaucacaagcggcuggacauuuggagcuggcgccgcucugcagauccccuuugcuaugcagauggccuaccgguucaacggcaucggagugacccagaaugugcuguacgagaaccagaagcugaucgccaaccaguucaacagcgccaucggcaagauccaggacagccugagcagcacagcaagcgcccugggaaagcugcaggacguggucaaccagaaugcccaggcacugaacacccuggucaagcagcuguccuccaacuucggcgccaucagcucugugcugaacgauauccugagcagacuggacccuccugaggccgaggugcagaucgacagacugaucacaggcagacugcagagccuccagacauacgugacccagcagcugaucagagccgccgagauuagagccucugccaaucuggccgccaccaagaugucugagugugugcugggccagagcaagagaguggacuuuugcggcaagggcuaccaccugaugagcuucccucagucugccccucacggcgugguguuucugcacgugacauauguguucgcucaagagaagaauuucaccaccgcuccagccaucugccacgacggcaaagcccacuuuccuagagaaggcguguucguguccaacggcacccauugguucgugacacagcggaacuucuacgagccccagaucaucaccaccgacaacaccuucgugucuggcaacugcgacguugugaucggcauugugaacaauaccguguacgacccucugcagcccgagcuggacagcggaggcggaggaucugacaucgaccccuacaaagaguucggcagcagcuaccagcugcugaacuuccugccucuggacuucuuccccgaccugaacgcccugguggauacagccacagcucuguacgaggaagaacugaccggcagagagcacugcagcccucaccacacagccauuagacaggcccucgugugcugggacgagcugacaaaacugaucgccuggaugagcagcaacaucaccagcgagcaagugcggaccaucaucgugaaccacgugaacgauaccuggggccugaaagugcggcagagccugugguuucaccugagcugucugaccuucggccagcacaccgugcaagaguuucugguguccuucggcguguggaucagaaccccugcuccauacagaccuccaaacgcucccauccugagcacccugccugagcacacagugaucuguugaggacuaguuauaagacugacuagcccgaugggccucccaacgggcccuccuccccuccuugcaccgagauuaauaaaaaaaaaaaaaaaaaaaaaaaaaaaaaaaaaaaaaaaaaaaaaaaaaaaaaaaaaaaaaaaaugcaucccccccccccccccccccccccccccccccaaaggcucuuuucagagccaccagaauu

SEQ ID NO: 13137 - RNA, 4123 nt, Artificial Sequence
  SARS-CoV-2/Wuhan/WIV05/2019__EPI_ISL_402128 spike protein mRNA gc mod (1-1147)(K986P_V987P_ H1048Q_H1064N_ H1083N_H1101N) WhcAg construct
aggagaaagcuuaccauguucguguuucuggugcugcugccccugguguccagccagugugugaaccugaccaccagaacacagcugccuccagccuacaccaacagcuucaccagaggcguguacuaccccgacaagguguucagauccagcgugcugcacucuacccaggaccuguuccugccuuucuucagcaacgugaccugguuccacgccauccacguguccggcaccaauggcaccaagagauucgacaaccccgugcugcccuucaacgacgggguguacuuugccagcaccgagaaguccaacaucaucagaggcuggaucuucggcaccacacuggacagcaagacccagagccugcugaucgugaacaacgccaccaacguggucaucaaagugugcgaguuccaguucugcaacgaccccuuccugggcgucuacuaccacaagaacaacaagagcuggauggaaagcgaguuccggguguacagcagcgccaacaacugcaccuucgaguacgugucccagccuuuccugauggaccuggaaggcaagcagggcaacuucaagaaccugcgcgaguucguguucaagaacaucgacggcuacuucaaaaucuacagcaagcacaccccuaucaaccucgugcgggaucugccucagggcuucucugcucuggaaccccugguggaucugcccaucggcaucaacaucacccgguuucagacacugcuggcccugcacagaagcuaccugacaccuggcgauagcagcagcggauggacagcuggugccgccgcuuacuaugugggcuaccugcagccuagaaccuuccugcugaaguacaacgagaacggcaccaucaccgacgccguggauugugcucuggauccucugagcgagacaaagugcacccugaaguccuucaccguggaaaagggcaucuaccagaccagcaacuuccgggugcagcccaccgaauccaucgugcgguuccccaauaucaccaaucugugccccuucggcgagguguucaaugccaccagauucgccucuguguacgccuggaaccggaagcggaucagcaauugcguggccgacuacuccgugcuguacaacuccgccagcuucagcaccuucaagugcuacggcguguccccuaccaagcugaacgaccugugcuucacaaacguguacgccgacagcuucgugauccggggagaugaagugcggcagauugccccuggacagacaggcaagaucgccgacuacaacuacaagcugcccgacgacuucaccggcugugugauugccuggaacagcaacaaccuggacuccaaagucggcggcaacuacaauuaccuguaccggcuguuccggaaguccaaucugaagcccuucgagcgggacaucagcaccgaaaucuaucaggccggcagcaccccuugcaacggcguggaaggcuucaacugcuacuucccacugcaguccuacggcuuucagcccacaaauggcgugggcuaucagcccuacagagugguggugcugagcuucgaacugcugcaugcuccugccacagugugcggcccuaagaaaagcaccaaucucgugaagaacaaaugcgugaacuucaacuucaacggccugaccggcaccggcgugcugacagagagcaacaagaaguuccugccauuccagcaguuuggccgggauaucgccgauaccacagacgccguuagagauccccagacacuggaaauccuggacaucaccccaugcagcuucggcggagugucugugaucaccccuggcaccaacaccagcaaucagguggcagugcuguaccaggacgugaacuguaccgaagugcccguggccauucacgccgaucagcugacaccuacauggcggguguacuccaccggcagcaauguguuucagaccagagccggcugucugaucggagccgagcacgugaacaauagcuacgagugcgacauccccaucggcgcuggcaucugugccagcuaccagacacagacaaacagccccagacgggcuagaagcguggccagccagagcaucauugccuacacaaugucucugggcgccgagaacagcguggccuacuccaacaacucuaucgcuauccccaccaacuucaccaucagcgugaccaccgagauccugccuguguccaugaccaagaccagcguggacugcaccauguacaucugcggcgauuccaccgagugcuccaaccugcugcugcaguacggcagcuucugcacccagcugaauagagcccugacagggaucgccguggaacaggacaagaacacccaagagguguucgcccaagugaagcaaaucuacaagaccccuccuaucaaggacuucggcggcuucaauuucagccagauucugcccgauccuagcaagcccagcaagcggagcuucaucgaggaccugcuguucaacaaagugacacuggccgacgccggcuucaucaagcaguauggcgauugucugggcgacauugccgccagggaucugauuugcgcccagaaguuuaacggacugacagugcugccuccucugcugaccgaugagaugaucgcccaguacacaucugcccugcuggccggcacaaucacaagcggcuggacauuuggagcuggcgccgcucugcagauccccuuugcuaugcagauggccuaccgguucaacggcaucggagugacccagaaugugcuguacgagaaccagaagcugaucgccaaccaguucaacagcgccaucggcaagauccaggacagccugagcagcacagcaagcgcccugggaaagcugcaggacguggucaaccagaaugcccaggcacugaacacccuggucaagcagcuguccuccaacuucggcgccaucagcucugugcugaacgauauccugagcagacuggacccuccugaggccgaggugcagaucgacagacugaucacaggcagacugcagagccuccagacauacgugacccagcagcugaucagagccgccgagauuagagccucugccaaucuggccgccaccaagaugucugagugugugcugggccagagcaagagaguggacuuuugcggcaagggcuaccagcugaugagcuucccucagucugccccucacggcgugguguuucugaacgugacauaugugcccgcucaagagaagaauuucaccaccgcuccagccaucugcaacgacggcaaagcccacuuuccuagagaaggcguguucguguccaacggcaccaacugguucgugacacagcggaacuucuacgagccccagaucaucaccaccgacaacaccuucgugucuggcaacugcgacguugugaucggcauugugaacaauaccguguacgacccucugcagcccgagcuggacagcggaggcggaggaucugacaucgaccccuacaaagaguucggcagcagcuaccagcugcugaacuuccugccucuggacuucuuccccgaccugaacgcccugguggauacagccacagcucuguacgaggaagaacugaccggcagagagcacugcagcccucaccacacagccauuagacaggcccucgugugcugggacgagcugacaaaacugaucgccuggaugagcagcaacaucaccagcgagcaagugcggaccaucaucgugaaccacgugaacgauaccuggggccugaaagugcggcagagccugugguuucaccugagcugucugaccuucggccagcacaccgugcaagaguuucugguguccuucggcguguggaucagaaccccugcuccauacagaccuccaaacgcucccauccugagcacccugccugagcacacagugaucuguugaggacuaguuauaagacugacuagcccgaugggccucccaacgggcccuccuccccuccuugcaccgagauuaauaaaaaaaaaaaaaaaaaaaaaaaaaaaaaaaaaaaaaaaaaaaaaaaaaaaaaaaaaaaaaaaaugcaucccccccccccccccccccccccccccccccaaaggcucuuuucagagccaccagaauu

SEQ ID NO: 13138 - RNA, 4123 nt, Artificial Sequence
  SARS-CoV-2/Wuhan/WIV05/2019__EPI_ISL_402128 spike protein mRNA gc mod (1-1147)(I712C_T1077C) WhcAg construct
aggagaaagcuuaccauguucguguuucuggugcugcugccccugguguccagccagugugugaaccugaccaccagaacacagcugccuccagccuacaccaacagcuucaccagaggcguguacuaccccgacaagguguucagauccagcgugcugcacucuacccaggaccuguuccugccuuucuucagcaacgugaccugguuccacgccauccacguguccggcaccaauggcaccaagagauucgacaaccccgugcugcccuucaacgacgggguguacuuugccagcaccgagaaguccaacaucaucagaggcuggaucuucggcaccacacuggacagcaagacccagagccugcugaucgugaacaacgccaccaacguggucaucaaagugugcgaguuccaguucugcaacgaccccuuccugggcgucuacuaccacaagaacaacaagagcuggauggaaagcgaguuccggguguacagcagcgccaacaacugcaccuucgaguacgugucccagccuuuccugauggaccuggaaggcaagcagggcaacuucaagaaccugcgcgaguucguguucaagaacaucgacggcuacuucaaaaucuacagcaagcacaccccuaucaaccucgugcgggaucugccucagggcuucucugcucuggaaccccugguggaucugcccaucggcaucaacaucacccgguuucagacacugcuggcccugcacagaagcuaccugacaccuggcgauagcagcagcggauggacagcuggugccgccgcuuacuaugugggcuaccugcagccuagaaccuuccugcugaaguacaacgagaacggcaccaucaccgacgccguggauugugcucuggauccucugagcgagacaaagugcacccugaaguccuucaccguggaaaagggcaucuaccagaccagcaacuuccgggugcagcccaccgaauccaucgugcgguuccccaauaucaccaaucugugccccuucggcgagguguucaaugccaccagauucgccucuguguacgccuggaaccggaagcggaucagcaauugcguggccgacuacuccgugcuguacaacuccgccagcuucagcaccuucaagugcuacggcguguccccuaccaagcugaacgaccugugcuucacaaacguguacgccgacagcuucgugauccggggagaugaagugcggcagauugccccuggacagacaggcaagaucgccgacuacaacuacaagcugcccgacgacuucaccggcugugugauugccuggaacagcaacaaccuggacuccaaagucggcggcaacuacaauuaccuguaccggcuguuccggaaguccaaucugaagcccuucgagcgggacaucagcaccgaaaucuaucaggccggcagcaccccuugcaacggcguggaaggcuucaacugcuacuucccacugcaguccuacggcuuucagcccacaaauggcgugggcuaucagcccuacagagugguggugcugagcuucgaacugcugcaugcuccugccacagugugcggcccuaagaaaagcaccaaucucgugaagaacaaaugcgugaacuucaacuucaacggccugaccggcaccggcgugcugacagagagcaacaagaaguuccugccauuccagcaguuuggccgggauaucgccgauaccacagacgccguuagagauccccagacacuggaaauccuggacaucaccccaugcagcuucggcggagugucugugaucaccccuggcaccaacaccagcaaucagguggcagugcuguaccaggacgugaacuguaccgaagugcccguggccauucacgccgaucagcugacaccuacauggcggguguacuccaccggcagcaauguguuucagaccagagccggcugucugaucggagccgagcacgugaacaauagcuacgagugcgacauccccaucggcgcuggcaucugugccagcuaccagacacagacaaacagccccagacgggcuagaagcguggccagccagagcaucauugccuacacaaugucucugggcgccgagaacagcguggccuacuccaacaacucuugcgcuauccccaccaacuucaccaucagcgugaccaccgagauccugccuguguccaugaccaagaccagcguggacugcaccauguacaucugcggcgauuccaccgagugcuccaaccugcugcugcaguacggcagcuucugcacccagcugaauagagcccugacagggaucgccguggaacaggacaagaacacccaagagguguucgcccaagugaagcaaaucuacaagaccccuccuaucaaggacuucggcggcuucaauuucagccagauucugcccgauccuagcaagcccagcaagcggagcuucaucgaggaccugcuguucaacaaagugacacuggccgacgccggcuucaucaagcaguauggcgauugucugggcgacauugccgccagggaucugauuugcgcccagaaguuuaacggacugacagugcugccuccucugcugaccgaugagaugaucgcccaguacacaucugcccugcuggccggcacaaucacaagcggcuggacauuuggagcuggcgccgcucugcagauccccuuugcuaugcagauggccuaccgguucaacggcaucggagugacccagaaugugcuguacgagaaccagaagcugaucgccaaccaguucaacagcgccaucggcaagauccaggacagccugagcagcacagcaagcgcccugggaaagcugcaggacguggucaaccagaaugcccaggcacugaacacccuggucaagcagcuguccuccaacuucggcgccaucagcucugugcugaacgauauccugagcagacuggacaaggucgaggccgaggugcagaucgacagacugaucacaggcagacugcagagccuccagacauacgugacccagcagcugaucagagccgccgagauuagagccucugccaaucuggccgccaccaagaugucugagugugugcugggccagagcaagagaguggacuuuugcggcaagggcuaccaccugaugagcuucccucagucugccccucacggcgugguguuucugcacgugacauaugugcccgcucaagagaagaauuucaccugugcuccagccaucugccacgacggcaaagcccacuuuccuagagaaggcguguucguguccaacggcacccauugguucgugacacagcggaacuucuacgagccccagaucaucaccaccgacaacaccuucgugucuggcaacugcgacguugugaucggcauugugaacaauaccguguacgacccucugcagcccgagcuggacagcggaggcggaggaucugacaucgaccccuacaaagaguucggcagcagcuaccagcugcugaacuuccugccucuggacuucuuccccgaccugaacgcccugguggauacagccacagcucuguacgaggaagaacugaccggcagagagcacugcagcccucaccacacagccauuagacaggcccucgugugcugggacgagcugacaaaacugaucgccuggaugagcagcaacaucaccagcgagcaagugcggaccaucaucgugaaccacgugaacgauaccuggggccugaaagugcggcagagccugugguuucaccugagcugucugaccuucggccagcacaccgugcaagaguuucugguguccuucggcguguggaucagaaccccugcuccauacagaccuccaaacgcucccauccugagcacccugccugagcacacagugaucuguugaggacuaguuauaagacugacuagcccgaugggccucccaacgggcccuccuccccuccuugcaccgagauuaauaaaaaaaaaaaaaaaaaaaaaaaaaaaaaaaaaaaaaaaaaaaaaaaaaaaaaaaaaaaaaaaaugcaucccccccccccccccccccccccccccccccaaaggcucuuuucagagccaccagaauu

SEQ ID NO: 13139 - RNA, 4123 nt, Artificial Sequence
  SARS-CoV-2/Wuhan/WIV05/2019__EPI_ISL_402128 spike protein mRNA gc mod (1-1147)(I714C_Y1110C) WhcAg construct
aggagaaagcuuaccauguucguguuucuggugcugcugccccugguguccagccagugugugaaccugaccaccagaacacagcugccuccagccuacaccaacagcuucaccagaggcguguacuaccccgacaagguguucagauccagcgugcugcacucuacccaggaccuguuccugccuuucuucagcaacgugaccugguuccacgccauccacguguccggcaccaauggcaccaagagauucgacaaccccgugcugcccuucaacgacgggguguacuuugccagcaccgagaaguccaacaucaucagaggcuggaucuucggcaccacacuggacagcaagacccagagccugcugaucgugaacaacgccaccaacguggucaucaaagugugcgaguuccaguucugcaacgaccccuuccugggcgucuacuaccacaagaacaacaagagcuggauggaaagcgaguuccggguguacagcagcgccaacaacugcaccuucgaguacgugucccagccuuuccugauggaccuggaaggcaagcagggcaacuucaagaaccugcgcgaguucguguucaagaacaucgacggcuacuucaaaaucuacagcaagcacaccccuaucaaccucgugcgggaucugccucagggcuucucugcucuggaaccccugguggaucugcccaucggcaucaacaucacccgguuucagacacugcuggcccugcacagaagcuaccugacaccuggcgauagcagcagcggauggacagcuggugccgccgcuuacuaugugggcuaccugcagccuagaaccuuccugcugaaguacaacgagaacggcaccaucaccgacgccguggauugugcucuggauccucugagcgagacaaagugcacccugaaguccuucaccguggaaaagggcaucuaccagaccagcaacuuccgggugcagcccaccgaauccaucgugcgguuccccaauaucaccaaucugugccccuucggcgagguguucaaugccaccagauucgccucuguguacgccuggaaccggaagcggaucagcaauugcguggccgacuacuccgugcuguacaacuccgccagcuucagcaccuucaagugcuacggcguguccccuaccaagcugaacgaccugugcuucacaaacguguacgccgacagcuucgugauccggggagaugaagugcggcagauugccccuggacagacaggcaagaucgccgacuacaacuacaagcugcccgacgacuucaccggcugugugauugccuggaacagcaacaaccuggacuccaaagucggcggcaacuacaauuaccuguaccggcuguuccggaaguccaaucugaagcccuucgagcgggacaucagcaccgaaaucuaucaggccggcagcaccccuugcaacggcguggaaggcuucaacugcuacuucccacugcaguccuacggcuuucagcccacaaauggcgugggcuaucagcccuacagagugguggugcugagcuucgaacugcugcaugcuccugccacagugugcggcccuaagaaaagcaccaaucucgugaagaacaaaugcgugaacuucaacuucaacggccugaccggcaccggcgugcugacagagagcaacaagaaguuccugccauuccagcaguuuggccgggauaucgccgauaccacagacgccguuagagauccccagacacuggaaauccuggacaucaccccaugcagcuucggcggagugucugugaucaccccuggcaccaacaccagcaaucagguggcagugcuguaccaggacgugaacuguaccgaagugcccguggccauucacgccgaucagcugacaccuacauggcggguguacuccaccggcagcaauguguuucagaccagagccggcugucugaucggagccgagcacgugaacaauagcuacgagugcgacauccccaucggcgcuggcaucugugccagcuaccagacacagacaaacagccccagacgggcuagaagcguggccagccagagcaucauugccuacacaaugucucugggcgccgagaacagcguggccuacuccaacaacucuaucgcuugccccaccaacuucaccaucagcgugaccaccgagauccugccuguguccaugaccaagaccagcguggacugcaccauguacaucugcggcgauuccaccgagugcuccaaccugcugcugcaguacggcagcuucugcacccagcugaauagagcccugacagggaucgccguggaacaggacaagaacacccaagagguguucgcccaagugaagcaaaucuacaagaccccuccuaucaaggacuucggcggcuucaauuucagccagauucugcccgauccuagcaagcccagcaagcggagcuucaucgaggaccugcuguucaacaaagugacacuggccgacgccggcuucaucaagcaguauggcgauugucugggcgacauugccgccagggaucugauuugcgcccagaaguuuaacggacugacagugcugccuccucugcugaccgaugagaugaucgcccaguacacaucugcccugcuggccggcacaaucacaagcggcuggacauuuggagcuggcgccgcucugcagauccccuuugcuaugcagauggccuaccgguucaacggcaucggagugacccagaaugugcuguacgagaaccagaagcugaucgccaaccaguucaacagcgccaucggcaagauccaggacagccugagcagcacagcaagcgcccugggaaagcugcaggacguggucaaccagaaugcccaggcacugaacacccuggucaagcagcuguccuccaacuucggcgccaucagcucugugcugaacgauauccugagcagacuggacaaggucgaggccgaggugcagaucgacagacugaucacaggcagacugcagagccuccagacauacgugacccagcagcugaucagagccgccgagauuagagccucugccaaucuggccgccaccaagaugucugagugugugcugggccagagcaagagaguggacuuuugcggcaagggcuaccaccugaugagcuucccucagucugccccucacggcgugguguuucugcacgugacauaugugcccgcucaagagaagaauuucaccaccgcuccagccaucugccacgacggcaaagcccacuuuccuagagaaggcguguucguguccaacggcacccauugguucgugacacagcggaacuucugugagccccagaucaucaccaccgacaacaccuucgugucuggcaacugcgacguugugaucggcauugugaacaauaccguguacgacccucugcagcccgagcuggacagcggaggcggaggaucugacaucgaccccuacaaagaguucggcagcagcuaccagcugcugaacuuccugccucuggacuucuuccccgaccugaacgcccugguggauacagccacagcucuguacgaggaagaacugaccggcagagagcacugcagcccucaccacacagccauuagacaggcccucgugugcugggacgagcugacaaaacugaucgccuggaugagcagcaacaucaccagcgagcaagugcggaccaucaucgugaaccacgugaacgauaccuggggccugaaagugcggcagagccugugguuucaccugagcugucugaccuucggccagcacaccgugcaagaguuucugguguccuucggcguguggaucagaaccccugcuccauacagaccuccaaacgcucccauccugagcacccugccugagcacacagugaucuguugaggacuaguuauaagacugacuagcccgaugggccucccaacgggcccuccuccccuccuugcaccgagauuaauaaaaaaaaaaaaaaaaaaaaaaaaaaaaaaaaaaaaaaaaaaaaaaaaaaaaaaaaaaaaaaaaugcaucccccccccccccccccccccccccccccccaaaggcucuuuucagagccaccagaauu

SEQ ID NO: 13140 - RNA, 4123 nt, Artificial Sequence
  SARS-CoV-2/Wuhan/WIV05/2019__EPI_ISL_402128 spike protein mRNA gc mod (1-1147)(P715C_P1069C) WhcAg construct
aggagaaagcuuaccauguucguguuucuggugcugcugccccugguguccagccagugugugaaccugaccaccagaacacagcugccuccagccuacaccaacagcuucaccagaggcguguacuaccccgacaagguguucagauccagcgugcugcacucuacccaggaccuguuccugccuuucuucagcaacgugaccugguuccacgccauccacguguccggcaccaauggcaccaagagauucgacaaccccgugcugcccuucaacgacgggguguacuuugccagcaccgagaaguccaacaucaucagaggcuggaucuucggcaccacacuggacagcaagacccagagccugcugaucgugaacaacgccaccaacguggucaucaaagugugcgaguuccaguucugcaacgaccccuuccugggcgucuacuaccacaagaacaacaagagcuggauggaaagcgaguuccggguguacagcagcgccaacaacugcaccuucgaguacgugucccagccuuuccugauggaccuggaaggcaagcagggcaacuucaagaaccugcgcgaguucguguucaagaacaucgacggcuacuucaaaaucuacagcaagcacaccccuaucaaccucgugcgggaucugccucagggcuucucugcucuggaaccccugguggaucugcccaucggcaucaacaucacccgguuucagacacugcuggcccugcacagaagcuaccugacaccuggcgauagcagcagcggauggacagcuggugccgccgcuuacuaugugggcuaccugcagccuagaaccuuccugcugaaguacaacgagaacggcaccaucaccgacgccguggauugugcucuggauccucugagcgagacaaagugcacccugaaguccuucaccguggaaaagggcaucuaccagaccagcaacuuccgggugcagcccaccgaauccaucgugcgguuccccaauaucaccaaucugugccccuucggcgagguguucaaugccaccagauucgccucuguguacgccuggaaccggaagcggaucagcaauugcguggccgacuacuccgugcuguacaacuccgccagcuucagcaccuucaagugcuacggcguguccccuaccaagcugaacgaccugugcuucacaaacguguacgccgacagcuucgugauccggggagaugaagugcggcagauugccccuggacagacaggcaagaucgccgacuacaacuacaagcugcccgacgacuucaccggcugugugauugccuggaacagcaacaaccuggacuccaaagucggcggcaacuacaauuaccuguaccggcuguuccggaaguccaaucugaagcccuucgagcgggacaucagcaccgaaaucuaucaggccggcagcaccccuugcaacggcguggaaggcuucaacugcuacuucccacugcaguccuacggcuuucagcccacaaauggcgugggcuaucagcccuacagagugguggugcugagcuucgaacugcugcaugcuccugccacagugugcggcccuaagaaaagcaccaaucucgugaagaacaaaugcgugaacuucaacuucaacggccugaccggcaccggcgugcugacagagagcaacaagaaguuccugccauuccagcaguuuggccgggauaucgccgauaccacagacgccguuagagauccccagacacuggaaauccuggacaucaccccaugcagcuucggcggagugucugugaucaccccuggcaccaacaccagcaaucagguggcagugcuguaccaggacgugaacuguaccgaagugcccguggccauucacgccgaucagcugacaccuacauggcggguguacuccaccggcagcaauguguuucagaccagagccggcugucugaucggagccgagcacgugaacaauagcuacgagugcgacauccccaucggcgcuggcaucugugccagcuaccagacacagacaaacagccccagacgggcuagaagcguggccagccagagcaucauugccuacacaaugucucugggcgccgagaacagcguggccuacuccaacaacucuaucgcuaucugcaccaacuucaccaucagcgugaccaccgagauccugccuguguccaugaccaagaccagcguggacugcaccauguacaucugcggcgauuccaccgagugcuccaaccugcugcugcaguacggcagcuucugcacccagcugaauagagcccugacagggaucgccguggaacaggacaagaacacccaagagguguucgcccaagugaagcaaaucuacaagaccccuccuaucaaggacuucggcggcuucaauuucagccagauucugcccgauccuagcaagcccagcaagcggagcuucaucgaggaccugcuguucaacaaagugacacuggccgacgccggcuucaucaagcaguauggcgauugucugggcgacauugccgccagggaucugauuugcgcccagaaguuuaacggacugacagugcugccuccucugcugaccgaugagaugaucgcccaguacacaucugcccugcuggccggcacaaucacaagcggcuggacauuuggagcuggcgccgcucugcagauccccuuugcuaugcagauggccuaccgguucaacggcaucggagugacccagaaugugcuguacgagaaccagaagcugaucgccaaccaguucaacagcgccaucggcaagauccaggacagccugagcagcacagcaagcgcccugggaaagcugcaggacguggucaaccagaaugcccaggcacugaacacccuggucaagcagcuguccuccaacuucggcgccaucagcucugugcugaacgauauccugagcagacuggacaaggucgaggccgaggugcagaucgacagacugaucacaggcagacugcagagccuccagacauacgugacccagcagcugaucagagccgccgagauuagagccucugccaaucuggccgccaccaagaugucugagugugugcugggccagagcaagagaguggacuuuugcggcaagggcuaccaccugaugagcuucccucagucugccccucacggcgugguguuucugcacgugacauaugugugugcucaagagaagaauuucaccaccgcuccagccaucugccacgacggcaaagcccacuuuccuagagaaggcguguucguguccaacggcacccauugguucgugacacagcggaacuucuacgagccccagaucaucaccaccgacaacaccuucgugucuggcaacugcgacguugugaucggcauugugaacaauaccguguacgacccucugcagcccgagcuggacagcggaggcggaggaucugacaucgaccccuacaaagaguucggcagcagcuaccagcugcugaacuuccugccucuggacuucuuccccgaccugaacgcccugguggauacagccacagcucuguacgaggaagaacugaccggcagagagcacugcagcccucaccacacagccauuagacaggcccucgugugcugggacgagcugacaaaacugaucgccuggaugagcagcaacaucaccagcgagcaagugcggaccaucaucgugaaccacgugaacgauaccuggggccugaaagugcggcagagccugugguuucaccugagcugucugaccuucggccagcacaccgugcaagaguuucugguguccuucggcguguggaucagaaccccugcuccauacagaccuccaaacgcucccauccugagcacccugccugagcacacagugaucuguugaggacuaguuauaagacugacuagcccgaugggccucccaacgggcccuccuccccuccuugcaccgagauuaauaaaaaaaaaaaaaaaaaaaaaaaaaaaaaaaaaaaaaaaaaaaaaaaaaaaaaaaaaaaaaaaaugcaucccccccccccccccccccccccccccccccaaaggcucuuuucagagccaccagaauu

SEQ ID NO: 13141 - RNA, 4123 nt, Artificial Sequence
  SARS-CoV-2/Wuhan/WIV05/2019__EPI_ISL_402128 spike protein mRNA gc mod (1-1147)(G889C_L1034C) WhcAg construct
aggagaaagcuuaccauguucguguuucuggugcugcugccccugguguccagccagugugugaaccugaccaccagaacacagcugccuccagccuacaccaacagcuucaccagaggcguguacuaccccgacaagguguucagauccagcgugcugcacucuacccaggaccuguuccugccuuucuucagcaacgugaccugguuccacgccauccacguguccggcaccaauggcaccaagagauucgacaaccccgugcugcccuucaacgacgggguguacuuugccagcaccgagaaguccaacaucaucagaggcuggaucuucggcaccacacuggacagcaagacccagagccugcugaucgugaacaacgccaccaacguggucaucaaagugugcgaguuccaguucugcaacgaccccuuccugggcgucuacuaccacaagaacaacaagagcuggauggaaagcgaguuccggguguacagcagcgccaacaacugcaccuucgaguacgugucccagccuuuccugauggaccuggaaggcaagcagggcaacuucaagaaccugcgcgaguucguguucaagaacaucgacggcuacuucaaaaucuacagcaagcacaccccuaucaaccucgugcgggaucugccucagggcuucucugcucuggaaccccugguggaucugcccaucggcaucaacaucacccgguuucagacacugcuggcccugcacagaagcuaccugacaccuggcgauagcagcagcggauggacagcuggugccgccgcuuacuaugugggcuaccugcagccuagaaccuuccugcugaaguacaacgagaacggcaccaucaccgacgccguggauugugcucuggauccucugagcgagacaaagugcacccugaaguccuucaccguggaaaagggcaucuaccagaccagcaacuuccgggugcagcccaccgaauccaucgugcgguuccccaauaucaccaaucugugccccuucggcgagguguucaaugccaccagauucgccucuguguacgccuggaaccggaagcggaucagcaauugcguggccgacuacuccgugcuguacaacuccgccagcuucagcaccuucaagugcuacggcguguccccuaccaagcugaacgaccugugcuucacaaacguguacgccgacagcuucgugauccggggagaugaagugcggcagauugccccuggacagacaggcaagaucgccgacuacaacuacaagcugcccgacgacuucaccggcugugugauugccuggaacagcaacaaccuggacuccaaagucggcggcaacuacaauuaccuguaccggcuguuccggaaguccaaucugaagcccuucgagcgggacaucagcaccgaaaucuaucaggccggcagcaccccuugcaacggcguggaaggcuucaacugcuacuucccacugcaguccuacggcuuucagcccacaaauggcgugggcuaucagcccuacagagugguggugcugagcuucgaacugcugcaugcuccugccacagugugcggcccuaagaaaagcaccaaucucgugaagaacaaaugcgugaacuucaacuucaacggccugaccggcaccggcgugcugacagagagcaacaagaaguuccugccauuccagcaguuuggccgggauaucgccgauaccacagacgccguuagagauccccagacacuggaaauccuggacaucaccccaugcagcuucggcggagugucugugaucaccccuggcaccaacaccagcaaucagguggcagugcuguaccaggacgugaacuguaccgaagugcccguggccauucacgccgaucagcugacaccuacauggcggguguacuccaccggcagcaauguguuucagaccagagccggcugucugaucggagccgagcacgugaacaauagcuacgagugcgacauccccaucggcgcuggcaucugugccagcuaccagacacagacaaacagccccagacgggcuagaagcguggccagccagagcaucauugccuacacaaugucucugggcgccgagaacagcguggccuacuccaacaacucuaucgcuauccccaccaacuucaccaucagcgugaccaccgagauccugccuguguccaugaccaagaccagcguggacugcaccauguacaucugcggcgauuccaccgagugcuccaaccugcugcugcaguacggcagcuucugcacccagcugaauagagcccugacagggaucgccguggaacaggacaagaacacccaagagguguucgcccaagugaagcaaaucuacaagaccccuccuaucaaggacuucggcggcuucaauuucagccagauucugcccgauccuagcaagcccagcaagcggagcuucaucgaggaccugcuguucaacaaagugacacuggccgacgccggcuucaucaagcaguauggcgauugucugggcgacauugccgccagggaucugauuugcgcccagaaguuuaacggacugacagugcugccuccucugcugaccgaugagaugaucgcccaguacacaucugcccugcuggccggcacaaucacaagcggcuggacauuuugcgcuggcgccgcucugcagauccccuuugcuaugcagauggccuaccgguucaacggcaucggagugacccagaaugugcuguacgagaaccagaagcugaucgccaaccaguucaacagcgccaucggcaagauccaggacagccugagcagcacagcaagcgcccugggaaagcugcaggacguggucaaccagaaugcccaggcacugaacacccuggucaagcagcuguccuccaacuucggcgccaucagcucugugcugaacgauauccugagcagacuggacaaggucgaggccgaggugcagaucgacagacugaucacaggcagacugcagagccuccagacauacgugacccagcagcugaucagagccgccgagauuagagccucugccaaucuggccgccaccaagaugucugaguguguguguggccagagcaagagaguggacuuuugcggcaagggcuaccaccugaugagcuucccucagucugccccucacggcgugguguuucugcacgugacauaugugcccgcucaagagaagaauuucaccaccgcuccagccaucugccacgacggcaaagcccacuuuccuagagaaggcguguucguguccaacggcacccauugguucgugacacagcggaacuucuacgagccccagaucaucaccaccgacaacaccuucgugucuggcaacugcgacguugugaucggcauugugaacaauaccguguacgacccucugcagcccgagcuggacagcggaggcggaggaucugacaucgaccccuacaaagaguucggcagcagcuaccagcugcugaacuuccugccucuggacuucuuccccgaccugaacgcccugguggauacagccacagcucuguacgaggaagaacugaccggcagagagcacugcagcccucaccacacagccauuagacaggcccucgugugcugggacgagcugacaaaacugaucgccuggaugagcagcaacaucaccagcgagcaagugcggaccaucaucgugaaccacgugaacgauaccuggggccugaaagugcggcagagccugugguuucaccugagcugucugaccuucggccagcacaccgugcaagaguuucugguguccuucggcguguggaucagaaccccugcuccauacagaccuccaaacgcucccauccugagcacccugccugagcacacagugaucuguugaggacuaguuauaagacugacuagcccgaugggccucccaacgggcccuccuccccuccuugcaccgagauuaauaaaaaaaaaaaaaaaaaaaaaaaaaaaaaaaaaaaaaaaaaaaaaaaaaaaaaaaaaaaaaaaaugcaucccccccccccccccccccccccccccccccaaaggcucuuuucagagccaccagaauu

SEQ ID NO: 13142 - RNA, 4123 nt, Artificial Sequence
  SARS-CoV-2/Wuhan/WIV05/2019__EPI_ISL_402128 spike protein mRNA gc mod (1-1147)(I909C_Y1047C) WhcAg construct
aggagaaagcuuaccauguucguguuucuggugcugcugccccugguguccagccagugugugaaccugaccaccagaacacagcugccuccagccuacaccaacagcuucaccagaggcguguacuaccccgacaagguguucagauccagcgugcugcacucuacccaggaccuguuccugccuuucuucagcaacgugaccugguuccacgccauccacguguccggcaccaauggcaccaagagauucgacaaccccgugcugcccuucaacgacgggguguacuuugccagcaccgagaaguccaacaucaucagaggcuggaucuucggcaccacacuggacagcaagacccagagccugcugaucgugaacaacgccaccaacguggucaucaaagugugcgaguuccaguucugcaacgaccccuuccugggcgucuacuaccacaagaacaacaagagcuggauggaaagcgaguuccggguguacagcagcgccaacaacugcaccuucgaguacgugucccagccuuuccugauggaccuggaaggcaagcagggcaacuucaagaaccugcgcgaguucguguucaagaacaucgacggcuacuucaaaaucuacagcaagcacaccccuaucaaccucgugcgggaucugccucagggcuucucugcucuggaaccccugguggaucugcccaucggcaucaacaucacccgguuucagacacugcuggcccugcacagaagcuaccugacaccuggcgauagcagcagcggauggacagcuggugccgccgcuuacuaugugggcuaccugcagccuagaaccuuccugcugaaguacaacgagaacggcaccaucaccgacgccguggauugugcucuggauccucugagcgagacaaagugcacccugaaguccuucaccguggaaaagggcaucuaccagaccagcaacuuccgggugcagcccaccgaauccaucgugcgguuccccaauaucaccaaucugugccccuucggcgagguguucaaugccaccagauucgccucuguguacgccuggaaccggaagcggaucagcaauugcguggccgacuacuccgugcuguacaacuccgccagcuucagcaccuucaagugcuacggcguguccccuaccaagcugaacgaccugugcuucacaaacguguacgccgacagcuucgugauccggggagaugaagugcggcagauugccccuggacagacaggcaagaucgccgacuacaacuacaagcugcccgacgacuucaccggcugugugauugccuggaacagcaacaaccuggacuccaaagucggcggcaacuacaauuaccuguaccggcuguuccggaaguccaaucugaagcccuucgagcgggacaucagcaccgaaaucuaucaggccggcagcaccccuugcaacggcguggaaggcuucaacugcuacuucccacugcaguccuacggcuuucagcccacaaauggcgugggcuaucagcccuacagagugguggugcugagcuucgaacugcugcaugcuccugccacagugugcggcccuaagaaaagcaccaaucucgugaagaacaaaugcgugaacuucaacuucaacggccugaccggcaccggcgugcugacagagagcaacaagaaguuccugccauuccagcaguuuggccgggauaucgccgauaccacagacgccguuagagauccccagacacuggaaauccuggacaucaccccaugcagcuucggcggagugucugugaucaccccuggcaccaacaccagcaaucagguggcagugcuguaccaggacgugaacuguaccgaagugcccguggccauucacgccgaucagcugacaccuacauggcggguguacuccaccggcagcaauguguuucagaccagagccggcugucugaucggagccgagcacgugaacaauagcuacgagugcgacauccccaucggcgcuggcaucugugccagcuaccagacacagacaaacagccccagacgggcuagaagcguggccagccagagcaucauugccuacacaaugucucugggcgccgagaacagcguggccuacuccaacaacucuaucgcuauccccaccaacuucaccaucagcgugaccaccgagauccugccuguguccaugaccaagaccagcguggacugcaccauguacaucugcggcgauuccaccgagugcuccaaccugcugcugcaguacggcagcuucugcacccagcugaauagagcccugacagggaucgccguggaacaggacaagaacacccaagagguguucgcccaagugaagcaaaucuacaagaccccuccuaucaaggacuucggcggcuucaauuucagccagauucugcccgauccuagcaagcccagcaagcggagcuucaucgaggaccugcuguucaacaaagugacacuggccgacgccggcuucaucaagcaguauggcgauugucugggcgacauugccgccagggaucugauuugcgcccagaaguuuaacggacugacagugcugccuccucugcugaccgaugagaugaucgcccaguacacaucugcccugcuggccggcacaaucacaagcggcuggacauuuggagcuggcgccgcucugcagauccccuuugcuaugcagauggccuaccgguucaacggcugcggagugacccagaaugugcuguacgagaaccagaagcugaucgccaaccaguucaacagcgccaucggcaagauccaggacagccugagcagcacagcaagcgcccugggaaagcugcaggacguggucaaccagaaugcccaggcacugaacacccuggucaagcagcuguccuccaacuucggcgccaucagcucugugcugaacgauauccugagcagacuggacaaggucgaggccgaggugcagaucgacagacugaucacaggcagacugcagagccuccagacauacgugacccagcagcugaucagagccgccgagauuagagccucugccaaucuggccgccaccaagaugucugagugugugcugggccagagcaagagaguggacuuuugcggcaagggcugucaccugaugagcuucccucagucugccccucacggcgugguguuucugcacgugacauaugugcccgcucaagagaagaauuucaccaccgcuccagccaucugccacgacggcaaagcccacuuuccuagagaaggcguguucguguccaacggcacccauugguucgugacacagcggaacuucuacgagccccagaucaucaccaccgacaacaccuucgugucuggcaacugcgacguugugaucggcauugugaacaauaccguguacgacccucugcagcccgagcuggacagcggaggcggaggaucugacaucgaccccuacaaagaguucggcagcagcuaccagcugcugaacuuccugccucuggacuucuuccccgaccugaacgcccugguggauacagccacagcucuguacgaggaagaacugaccggcagagagcacugcagcccucaccacacagccauuagacaggcccucgugugcugggacgagcugacaaaacugaucgccuggaugagcagcaacaucaccagcgagcaagugcggaccaucaucgugaaccacgugaacgauaccuggggccugaaagugcggcagagccugugguuucaccugagcugucugaccuucggccagcacaccgugcaagaguuucugguguccuucggcguguggaucagaaccccugcuccauacagaccuccaaacgcucccauccugagcacccugccugagcacacagugaucuguugaggacuaguuauaagacugacuagcccgaugggccucccaacgggcccuccuccccuccuugcaccgagauuaauaaaaaaaaaaaaaaaaaaaaaaaaaaaaaaaaaaaaaaaaaaaaaaaaaaaaaaaaaaaaaaaaugcaucccccccccccccccccccccccccccccccaaaggcucuuuucagagccaccagaauu

SEQ ID NO: 13143 - RNA, 4123 nt, Artificial Sequence
  SARS-CoV-2/Wuhan/WIV05/2019__EPI_ISL_402128 spike protein mRNA gc mod (1-1147)(Q965C_S1003C) WhcAg construct
aggagaaagcuuaccauguucguguuucuggugcugcugccccugguguccagccagugugugaaccugaccaccagaacacagcugccuccagccuacaccaacagcuucaccagaggcguguacuaccccgacaagguguucagauccagcgugcugcacucuacccaggaccuguuccugccuuucuucagcaacgugaccugguuccacgccauccacguguccggcaccaauggcaccaagagauucgacaaccccgugcugcccuucaacgacgggguguacuuugccagcaccgagaaguccaacaucaucagaggcuggaucuucggcaccacacuggacagcaagacccagagccugcugaucgugaacaacgccaccaacguggucaucaaagugugcgaguuccaguucugcaacgaccccuuccugggcgucuacuaccacaagaacaacaagagcuggauggaaagcgaguuccggguguacagcagcgccaacaacugcaccuucgaguacgugucccagccuuuccugauggaccuggaaggcaagcagggcaacuucaagaaccugcgcgaguucguguucaagaacaucgacggcuacuucaaaaucuacagcaagcacaccccuaucaaccucgugcgggaucugccucagggcuucucugcucuggaaccccugguggaucugcccaucggcaucaacaucacccgguuucagacacugcuggcccugcacagaagcuaccugacaccuggcgauagcagcagcggauggacagcuggugccgccgcuuacuaugugggcuaccugcagccuagaaccuuccugcugaaguacaacgagaacggcaccaucaccgacgccguggauugugcucuggauccucugagcgagacaaagugcacccugaaguccuucaccguggaaaagggcaucuaccagaccagcaacuuccgggugcagcccaccgaauccaucgugcgguuccccaauaucaccaaucugugccccuucggcgagguguucaaugccaccagauucgccucuguguacgccuggaaccggaagcggaucagcaauugcguggccgacuacuccgugcuguacaacuccgccagcuucagcaccuucaagugcuacggcguguccccuaccaagcugaacgaccugugcuucacaaacguguacgccgacagcuucgugauccggggagaugaagugcggcagauugccccuggacagacaggcaagaucgccgacuacaacuacaagcugcccgacgacuucaccggcugugugauugccuggaacagcaacaaccuggacuccaaagucggcggcaacuacaauuaccuguaccggcuguuccggaaguccaaucugaagcccuucgagcgggacaucagcaccgaaaucuaucaggccggcagcaccccuugcaacggcguggaaggcuucaacugcuacuucccacugcaguccuacggcuuucagcccacaaauggcgugggcuaucagcccuacagagugguggugcugagcuucgaacugcugcaugcuccugccacagugugcggcccuaagaaaagcaccaaucucgugaagaacaaaugcgugaacuucaacuucaacggccugaccggcaccggcgugcugacagagagcaacaagaaguuccugccauuccagcaguuuggccgggauaucgccgauaccacagacgccguuagagauccccagacacuggaaauccuggacaucaccccaugcagcuucggcggagugucugugaucaccccuggcaccaacaccagcaaucagguggcagugcuguaccaggacgugaacuguaccgaagugcccguggccauucacgccgaucagcugacaccuacauggcggguguacuccaccggcagcaauguguuucagaccagagccggcugucugaucggagccgagcacgugaacaauagcuacgagugcgacauccccaucggcgcuggcaucugugccagcuaccagacacagacaaacagccccagacgggcuagaagcguggccagccagagcaucauugccuacacaaugucucugggcgccgagaacagcguggccuacuccaacaacucuaucgcuauccccaccaacuucaccaucagcgugaccaccgagauccugccuguguccaugaccaagaccagcguggacugcaccauguacaucugcggcgauuccaccgagugcuccaaccugcugcugcaguacggcagcuucugcacccagcugaauagagcccugacagggaucgccguggaacaggacaagaacacccaagagguguucgcccaagugaagcaaaucuacaagaccccuccuaucaaggacuucggcggcuucaauuucagccagauucugcccgauccuagcaagcccagcaagcggagcuucaucgaggaccugcuguucaacaaagugacacuggccgacgccggcuucaucaagcaguauggcgauugucugggcgacauugccgccagggaucugauuugcgcccagaaguuuaacggacugacagugcugccuccucugcugaccgaugagaugaucgcccaguacacaucugcccugcuggccggcacaaucacaagcggcuggacauuuggagcuggcgccgcucugcagauccccuuugcuaugcagauggccuaccgguucaacggcaucggagugacccagaaugugcuguacgagaaccagaagcugaucgccaaccaguucaacagcgccaucggcaagauccaggacagccugagcagcacagcaagcgcccugggaaagcugcaggacguggucaaccagaaugcccaggcacugaacacccuggucaagugccuguccuccaacuucggcgccaucagcucugugcugaacgauauccugagcagacuggacaaggucgaggccgaggugcagaucgacagacugaucacaggcagacugcagugucuccagacauacgugacccagcagcugaucagagccgccgagauuagagccucugccaaucuggccgccaccaagaugucugagugugugcugggccagagcaagagaguggacuuuugcggcaagggcuaccaccugaugagcuucccucagucugccccucacggcgugguguuucugcacgugacauaugugcccgcucaagagaagaauuucaccaccgcuccagccaucugccacgacggcaaagcccacuuuccuagagaaggcguguucguguccaacggcacccauugguucgugacacagcggaacuucuacgagccccagaucaucaccaccgacaacaccuucgugucuggcaacugcgacguugugaucggcauugugaacaauaccguguacgacccucugcagcccgagcuggacagcggaggcggaggaucugacaucgaccccuacaaagaguucggcagcagcuaccagcugcugaacuuccugccucuggacuucuuccccgaccugaacgcccugguggauacagccacagcucuguacgaggaagaacugaccggcagagagcacugcagcccucaccacacagccauuagacaggcccucgugugcugggacgagcugacaaaacugaucgccuggaugagcagcaacaucaccagcgagcaagugcggaccaucaucgugaaccacgugaacgauaccuggggccugaaagugcggcagagccugugguuucaccugagcugucugaccuucggccagcacaccgugcaagaguuucugguguccuucggcguguggaucagaaccccugcuccauacagaccuccaaacgcucccauccugagcacccugccugagcacacagugaucuguugaggacuaguuauaagacugacuagcccgaugggccucccaacgggcccuccuccccuccuugcaccgagauuaauaaaaaaaaaaaaaaaaaaaaaaaaaaaaaaaaaaaaaaaaaaaaaaaaaaaaaaaaaaaaaaaaugcaucccccccccccccccccccccccccccccccaaaggcucuuuucagagccaccagaauu

SEQ ID NO: 13144 - RNA, 4123 nt, Artificial Sequence
  SARS-CoV-2/Wuhan/WIV05/2019__EPI_ISL_402128 spike protein mRNA gc mod (1-1147)(F970C_G999C) WhcAg construct
aggagaaagcuuaccauguucguguuucuggugcugcugccccugguguccagccagugugugaaccugaccaccagaacacagcugccuccagccuacaccaacagcuucaccagaggcguguacuaccccgacaagguguucagauccagcgugcugcacucuacccaggaccuguuccugccuuucuucagcaacgugaccugguuccacgccauccacguguccggcaccaauggcaccaagagauucgacaaccccgugcugcccuucaacgacgggguguacuuugccagcaccgagaaguccaacaucaucagaggcuggaucuucggcaccacacuggacagcaagacccagagccugcugaucgugaacaacgccaccaacguggucaucaaagugugcgaguuccaguucugcaacgaccccuuccugggcgucuacuaccacaagaacaacaagagcuggauggaaagcgaguuccggguguacagcagcgccaacaacugcaccuucgaguacgugucccagccuuuccugauggaccuggaaggcaagcagggcaacuucaagaaccugcgcgaguucguguucaagaacaucgacggcuacuucaaaaucuacagcaagcacaccccuaucaaccucgugcgggaucugccucagggcuucucugcucuggaaccccugguggaucugcccaucggcaucaacaucacccgguuucagacacugcuggcccugcacagaagcuaccugacaccuggcgauagcagcagcggauggacagcuggugccgccgcuuacuaugugggcuaccugcagccuagaaccuuccugcugaaguacaacgagaacggcaccaucaccgacgccguggauugugcucuggauccucugagcgagacaaagugcacccugaaguccuucaccguggaaaagggcaucuaccagaccagcaacuuccgggugcagcccaccgaauccaucgugcgguuccccaauaucaccaaucugugccccuucggcgagguguucaaugccaccagauucgccucuguguacgccuggaaccggaagcggaucagcaauugcguggccgacuacuccgugcuguacaacuccgccagcuucagcaccuucaagugcuacggcguguccccuaccaagcugaacgaccugugcuucacaaacguguacgccgacagcuucgugauccggggagaugaagugcggcagauugccccuggacagacaggcaagaucgccgacuacaacuacaagcugcccgacgacuucaccggcugugugauugccuggaacagcaacaaccuggacuccaaagucggcggcaacuacaauuaccuguaccggcuguuccggaaguccaaucugaagcccuucgagcgggacaucagcaccgaaaucuaucaggccggcagcaccccuugcaacggcguggaaggcuucaacugcuacuucccacugcaguccuacggcuuucagcccacaaauggcgugggcuaucagcccuacagagugguggugcugagcuucgaacugcugcaugcuccugccacagugugcggcccuaagaaaagcaccaaucucgugaagaacaaaugcgugaacuucaacuucaacggccugaccggcaccggcgugcugacagagagcaacaagaaguuccugccauuccagcaguuuggccgggauaucgccgauaccacagacgccguuagagauccccagacacuggaaauccuggacaucaccccaugcagcuucggcggagugucugugaucaccccuggcaccaacaccagcaaucagguggcagugcuguaccaggacgugaacuguaccgaagugcccguggccauucacgccgaucagcugacaccuacauggcggguguacuccaccggcagcaauguguuucagaccagagccggcugucugaucggagccgagcacgugaacaauagcuacgagugcgacauccccaucggcgcuggcaucugugccagcuaccagacacagacaaacagccccagacgggcuagaagcguggccagccagagcaucauugccuacacaaugucucugggcgccgagaacagcguggccuacuccaacaacucuaucgcuauccccaccaacuucaccaucagcgugaccaccgagauccugccuguguccaugaccaagaccagcguggacugcaccauguacaucugcggcgauuccaccgagugcuccaaccugcugcugcaguacggcagcuucugcacccagcugaauagagcccugacagggaucgccguggaacaggacaagaacacccaagagguguucgcccaagugaagcaaaucuacaagaccccuccuaucaaggacuucggcggcuucaauuucagccagauucugcccgauccuagcaagcccagcaagcggagcuucaucgaggaccugcuguucaacaaagugacacuggccgacgccggcuucaucaagcaguauggcgauugucugggcgacauugccgccagggaucugauuugcgcccagaaguuuaacggacugacagugcugccuccucugcugaccgaugagaugaucgcccaguacacaucugcccugcuggccggcacaaucacaagcggcuggacauuuggagcuggcgccgcucugcagauccccuuugcuaugcagauggccuaccgguucaacggcaucggagugacccagaaugugcuguacgagaaccagaagcugaucgccaaccaguucaacagcgccaucggcaagauccaggacagccugagcagcacagcaagcgcccugggaaagcugcaggacguggucaaccagaaugcccaggcacugaacacccuggucaagcagcuguccuccaacugcggcgccaucagcucugugcugaacgauauccugagcagacuggacaaggucgaggccgaggugcagaucgacagacugaucacauguagacugcagagccuccagacauacgugacccagcagcugaucagagccgccgagauuagagccucugccaaucuggccgccaccaagaugucugagugugugcugggccagagcaagagaguggacuuuugcggcaagggcuaccaccugaugagcuucccucagucugccccucacggcgugguguuucugcacgugacauaugugcccgcucaagagaagaauuucaccaccgcuccagccaucugccacgacggcaaagcccacuuuccuagagaaggcguguucguguccaacggcacccauugguucgugacacagcggaacuucuacgagccccagaucaucaccaccgacaacaccuucgugucuggcaacugcgacguugugaucggcauugugaacaauaccguguacgacccucugcagcccgagcuggacagcggaggcggaggaucugacaucgaccccuacaaagaguucggcagcagcuaccagcugcugaacuuccugccucuggacuucuuccccgaccugaacgcccugguggauacagccacagcucuguacgaggaagaacugaccggcagagagcacugcagcccucaccacacagccauuagacaggcccucgugugcugggacgagcugacaaaacugaucgccuggaugagcagcaacaucaccagcgagcaagugcggaccaucaucgugaaccacgugaacgauaccuggggccugaaagugcggcagagccugugguuucaccugagcugucugaccuucggccagcacaccgugcaagaguuucugguguccuucggcguguggaucagaaccccugcuccauacagaccuccaaacgcucccauccugagcacccugccugagcacacagugaucuguugaggacuaguuauaagacugacuagcccgaugggccucccaacgggcccuccuccccuccuugcaccgagauuaauaaaaaaaaaaaaaaaaaaaaaaaaaaaaaaaaaaaaaaaaaaaaaaaaaaaaaaaaaaaaaaaaugcaucccccccccccccccccccccccccccccccaaaggcucuuuucagagccaccagaauu

SEQ ID NO: 13145 - RNA, 4123 nt, Artificial Sequence
  SARS-CoV-2/Wuhan/WIV05/2019__EPI_ISL_402128 spike protein mRNA gc mod (1-1147)(A972C_R995C) WhcAg construct
aggagaaagcuuaccauguucguguuucuggugcugcugccccugguguccagccagugugugaaccugaccaccagaacacagcugccuccagccuacaccaacagcuucaccagaggcguguacuaccccgacaagguguucagauccagcgugcugcacucuacccaggaccuguuccugccuuucuucagcaacgugaccugguuccacgccauccacguguccggcaccaauggcaccaagagauucgacaaccccgugcugcccuucaacgacgggguguacuuugccagcaccgagaaguccaacaucaucagaggcuggaucuucggcaccacacuggacagcaagacccagagccugcugaucgugaacaacgccaccaacguggucaucaaagugugcgaguuccaguucugcaacgaccccuuccugggcgucuacuaccacaagaacaacaagagcuggauggaaagcgaguuccggguguacagcagcgccaacaacugcaccuucgaguacgugucccagccuuuccugauggaccuggaaggcaagcagggcaacuucaagaaccugcgcgaguucguguucaagaacaucgacggcuacuucaaaaucuacagcaagcacaccccuaucaaccucgugcgggaucugccucagggcuucucugcucuggaaccccugguggaucugcccaucggcaucaacaucacccgguuucagacacugcuggcccugcacagaagcuaccugacaccuggcgauagcagcagcggauggacagcuggugccgccgcuuacuaugugggcuaccugcagccuagaaccuuccugcugaaguacaacgagaacggcaccaucaccgacgccguggauugugcucuggauccucugagcgagacaaagugcacccugaaguccuucaccguggaaaagggcaucuaccagaccagcaacuuccgggugcagcccaccgaauccaucgugcgguuccccaauaucaccaaucugugccccuucggcgagguguucaaugccaccagauucgccucuguguacgccuggaaccggaagcggaucagcaauugcguggccgacuacuccgugcuguacaacuccgccagcuucagcaccuucaagugcuacggcguguccccuaccaagcugaacgaccugugcuucacaaacguguacgccgacagcuucgugauccggggagaugaagugcggcagauugccccuggacagacaggcaagaucgccgacuacaacuacaagcugcccgacgacuucaccggcugugugauugccuggaacagcaacaaccuggacuccaaagucggcggcaacuacaauuaccuguaccggcuguuccggaaguccaaucugaagcccuucgagcgggacaucagcaccgaaaucuaucaggccggcagcaccccuugcaacggcguggaaggcuucaacugcuacuucccacugcaguccuacggcuuucagcccacaaauggcgugggcuaucagcccuacagagugguggugcugagcuucgaacugcugcaugcuccugccacagugugcggcccuaagaaaagcaccaaucucgugaagaacaaaugcgugaacuucaacuucaacggccugaccggcaccggcgugcugacagagagcaacaagaaguuccugccauuccagcaguuuggccgggauaucgccgauaccacagacgccguuagagauccccagacacuggaaauccuggacaucaccccaugcagcuucggcggagugucugugaucaccccuggcaccaacaccagcaaucagguggcagugcuguaccaggacgugaacuguaccgaagugcccguggccauucacgccgaucagcugacaccuacauggcggguguacuccaccggcagcaauguguuucagaccagagccggcugucugaucggagccgagcacgugaacaauagcuacgagugcgacauccccaucggcgcuggcaucugugccagcuaccagacacagacaaacagccccagacgggcuagaagcguggccagccagagcaucauugccuacacaaugucucugggcgccgagaacagcguggccuacuccaacaacucuaucgcuauccccaccaacuucaccaucagcgugaccaccgagauccugccuguguccaugaccaagaccagcguggacugcaccauguacaucugcggcgauuccaccgagugcuccaaccugcugcugcaguacggcagcuucugcacccagcugaauagagcccugacagggaucgccguggaacaggacaagaacacccaagagguguucgcccaagugaagcaaaucuacaagaccccuccuaucaaggacuucggcggcuucaauuucagccagauucugcccgauccuagcaagcccagcaagcggagcuucaucgaggaccugcuguucaacaaagugacacuggccgacgccggcuucaucaagcaguauggcgauugucugggcgacauugccgccagggaucugauuugcgcccagaaguuuaacggacugacagugcugccuccucugcugaccgaugagaugaucgcccaguacacaucugcccugcuggccggcacaaucacaagcggcuggacauuuggagcuggcgccgcucugcagauccccuuugcuaugcagauggccuaccgguucaacggcaucggagugacccagaaugugcuguacgagaaccagaagcugaucgccaaccaguucaacagcgccaucggcaagauccaggacagccugagcagcacagcaagcgcccugggaaagcugcaggacguggucaaccagaaugcccaggcacugaacacccuggucaagcagcuguccuccaacuucggcugcaucagcucugugcugaacgauauccugagcagacuggacaaggucgaggccgaggugcagaucgacugucugaucacaggcagacugcagagccuccagacauacgugacccagcagcugaucagagccgccgagauuagagccucugccaaucuggccgccaccaagaugucugagugugugcugggccagagcaagagaguggacuuuugcggcaagggcuaccaccugaugagcuucccucagucugccccucacggcgugguguuucugcacgugacauaugugcccgcucaagagaagaauuucaccaccgcuccagccaucugccacgacggcaaagcccacuuuccuagagaaggcguguucguguccaacggcacccauugguucgugacacagcggaacuucuacgagccccagaucaucaccaccgacaacaccuucgugucuggcaacugcgacguugugaucggcauugugaacaauaccguguacgacccucugcagcccgagcuggacagcggaggcggaggaucugacaucgaccccuacaaagaguucggcagcagcuaccagcugcugaacuuccugccucuggacuucuuccccgaccugaacgcccugguggauacagccacagcucuguacgaggaagaacugaccggcagagagcacugcagcccucaccacacagccauuagacaggcccucgugugcugggacgagcugacaaaacugaucgccuggaugagcagcaacaucaccagcgagcaagugcggaccaucaucgugaaccacgugaacgauaccuggggccugaaagugcggcagagccugugguuucaccugagcugucugaccuucggccagcacaccgugcaagaguuucugguguccuucggcguguggaucagaaccccugcuccauacagaccuccaaacgcucccauccugagcacccugccugagcacacagugaucuguugaggacuaguuauaagacugacuagcccgaugggccucccaacgggcccuccuccccuccuugcaccgagauuaauaaaaaaaaaaaaaaaaaaaaaaaaaaaaaaaaaaaaaaaaaaaaaaaaaaaaaaaaaaaaaaaaugcaucccccccccccccccccccccccccccccccaaaggcucuuuucagagccaccagaauu

SEQ ID NO: 13146 - RNA, 4123 nt, Artificial Sequence
  SARS-CoV-2/Wuhan/WIV05/2019__EPI_ISL_402128 spike protein mRNA gc mod (1-1147)(A890C_V1040C) WhcAg construct
aggagaaagcuuaccauguucguguuucuggugcugcugccccugguguccagccagugugugaaccugaccaccagaacacagcugccuccagccuacaccaacagcuucaccagaggcguguacuaccccgacaagguguucagauccagcgugcugcacucuacccaggaccuguuccugccuuucuucagcaacgugaccugguuccacgccauccacguguccggcaccaauggcaccaagagauucgacaaccccgugcugcccuucaacgacgggguguacuuugccagcaccgagaaguccaacaucaucagaggcuggaucuucggcaccacacuggacagcaagacccagagccugcugaucgugaacaacgccaccaacguggucaucaaagugugcgaguuccaguucugcaacgaccccuuccugggcgucuacuaccacaagaacaacaagagcuggauggaaagcgaguuccggguguacagcagcgccaacaacugcaccuucgaguacgugucccagccuuuccugauggaccuggaaggcaagcagggcaacuucaagaaccugcgcgaguucguguucaagaacaucgacggcuacuucaaaaucuacagcaagcacaccccuaucaaccucgugcgggaucugccucagggcuucucugcucuggaaccccugguggaucugcccaucggcaucaacaucacccgguuucagacacugcuggcccugcacagaagcuaccugacaccuggcgauagcagcagcggauggacagcuggugccgccgcuuacuaugugggcuaccugcagccuagaaccuuccugcugaaguacaacgagaacggcaccaucaccgacgccguggauugugcucuggauccucugagcgagacaaagugcacccugaaguccuucaccguggaaaagggcaucuaccagaccagcaacuuccgggugcagcccaccgaauccaucgugcgguuccccaauaucaccaaucugugccccuucggcgagguguucaaugccaccagauucgccucuguguacgccuggaaccggaagcggaucagcaauugcguggccgacuacuccgugcuguacaacuccgccagcuucagcaccuucaagugcuacggcguguccccuaccaagcugaacgaccugugcuucacaaacguguacgccgacagcuucgugauccggggagaugaagugcggcagauugccccuggacagacaggcaagaucgccgacuacaacuacaagcugcccgacgacuucaccggcugugugauugccuggaacagcaacaaccuggacuccaaagucggcggcaacuacaauuaccuguaccggcuguuccggaaguccaaucugaagcccuucgagcgggacaucagcaccgaaaucuaucaggccggcagcaccccuugcaacggcguggaaggcuucaacugcuacuucccacugcaguccuacggcuuucagcccacaaauggcgugggcuaucagcccuacagagugguggugcugagcuucgaacugcugcaugcuccugccacagugugcggcccuaagaaaagcaccaaucucgugaagaacaaaugcgugaacuucaacuucaacggccugaccggcaccggcgugcugacagagagcaacaagaaguuccugccauuccagcaguuuggccgggauaucgccgauaccacagacgccguuagagauccccagacacuggaaauccuggacaucaccccaugcagcuucggcggagugucugugaucaccccuggcaccaacaccagcaaucagguggcagugcuguaccaggacgugaacuguaccgaagugcccguggccauucacgccgaucagcugacaccuacauggcggguguacuccaccggcagcaauguguuucagaccagagccggcugucugaucggagccgagcacgugaacaauagcuacgagugcgacauccccaucggcgcuggcaucugugccagcuaccagacacagacaaacagccccagacgggcuagaagcguggccagccagagcaucauugccuacacaaugucucugggcgccgagaacagcguggccuacuccaacaacucuaucgcuauccccaccaacuucaccaucagcgugaccaccgagauccugccuguguccaugaccaagaccagcguggacugcaccauguacaucugcggcgauuccaccgagugcuccaaccugcugcugcaguacggcagcuucugcacccagcugaauagagcccugacagggaucgccguggaacaggacaagaacacccaagagguguucgcccaagugaagcaaaucuacaagaccccuccuaucaaggacuucggcggcuucaauuucagccagauucugcccgauccuagcaagcccagcaagcggagcuucaucgaggaccugcuguucaacaaagugacacuggccgacgccggcuucaucaagcaguauggcgauugucugggcgacauugccgccagggaucugauuugcgcccagaaguuuaacggacugacagugcugccuccucugcugaccgaugagaugaucgcccaguacacaucugcccugcuggccggcacaaucacaagcggcuggacauuuggaugcggcgccgcucugcagauccccuuugcuaugcagauggccuaccgguucaacggcaucggagugacccagaaugugcuguacgagaaccagaagcugaucgccaaccaguucaacagcgccaucggcaagauccaggacagccugagcagcacagcaagcgcccugggaaagcugcaggacguggucaaccagaaugcccaggcacugaacacccuggucaagcagcuguccuccaacuucggcgccaucagcucugugcugaacgauauccugagcagacuggacaaggucgaggccgaggugcagaucgacagacugaucacaggcagacugcagagccuccagacauacgugacccagcagcugaucagagccgccgagauuagagccucugccaaucuggccgccaccaagaugucugagugugugcugggccagagcaagagaugugacuuuugcggcaagggcuaccaccugaugagcuucccucagucugccccucacggcgugguguuucugcacgugacauaugugcccgcucaagagaagaauuucaccaccgcuccagccaucugccacgacggcaaagcccacuuuccuagagaaggcguguucguguccaacggcacccauugguucgugacacagcggaacuucuacgagccccagaucaucaccaccgacaacaccuucgugucuggcaacugcgacguugugaucggcauugugaacaauaccguguacgacccucugcagcccgagcuggacagcggaggcggaggaucugacaucgaccccuacaaagaguucggcagcagcuaccagcugcugaacuuccugccucuggacuucuuccccgaccugaacgcccugguggauacagccacagcucuguacgaggaagaacugaccggcagagagcacugcagcccucaccacacagccauuagacaggcccucgugugcugggacgagcugacaaaacugaucgccuggaugagcagcaacaucaccagcgagcaagugcggaccaucaucgugaaccacgugaacgauaccuggggccugaaagugcggcagagccugugguuucaccugagcugucugaccuucggccagcacaccgugcaagaguuucugguguccuucggcguguggaucagaaccccugcuccauacagaccuccaaacgcucccauccugagcacccugccugagcacacagugaucuguugaggacuaguuauaagacugacuagcccgaugggccucccaacgggcccuccuccccuccuugcaccgagauuaauaaaaaaaaaaaaaaaaaaaaaaaaaaaaaaaaaaaaaaaaaaaaaaaaaaaaaaaaaaaaaaaaugcaucccccccccccccccccccccccccccccccaaaggcucuuuucagagccaccagaauu

SEQ ID NO: 13147 - RNA, 4123 nt, Artificial Sequence
  SARS-CoV-2/Wuhan/WIV05/2019__EPI_ISL_402128 spike protein mRNA gc mod (1-1147)(T874C_S1055C) WhcAg construct
aggagaaagcuuaccauguucguguuucuggugcugcugccccugguguccagccagugugugaaccugaccaccagaacacagcugccuccagccuacaccaacagcuucaccagaggcguguacuaccccgacaagguguucagauccagcgugcugcacucuacccaggaccuguuccugccuuucuucagcaacgugaccugguuccacgccauccacguguccggcaccaauggcaccaagagauucgacaaccccgugcugcccuucaacgacgggguguacuuugccagcaccgagaaguccaacaucaucagaggcuggaucuucggcaccacacuggacagcaagacccagagccugcugaucgugaacaacgccaccaacguggucaucaaagugugcgaguuccaguucugcaacgaccccuuccugggcgucuacuaccacaagaacaacaagagcuggauggaaagcgaguuccggguguacagcagcgccaacaacugcaccuucgaguacgugucccagccuuuccugauggaccuggaaggcaagcagggcaacuucaagaaccugcgcgaguucguguucaagaacaucgacggcuacuucaaaaucuacagcaagcacaccccuaucaaccucgugcgggaucugccucagggcuucucugcucuggaaccccugguggaucugcccaucggcaucaacaucacccgguuucagacacugcuggcccugcacagaagcuaccugacaccuggcgauagcagcagcggauggacagcuggugccgccgcuuacuaugugggcuaccugcagccuagaaccuuccugcugaaguacaacgagaacggcaccaucaccgacgccguggauugugcucuggauccucugagcgagacaaagugcacccugaaguccuucaccguggaaaagggcaucuaccagaccagcaacuuccgggugcagcccaccgaauccaucgugcgguuccccaauaucaccaaucugugccccuucggcgagguguucaaugccaccagauucgccucuguguacgccuggaaccggaagcggaucagcaauugcguggccgacuacuccgugcuguacaacuccgccagcuucagcaccuucaagugcuacggcguguccccuaccaagcugaacgaccugugcuucacaaacguguacgccgacagcuucgugauccggggagaugaagugcggcagauugccccuggacagacaggcaagaucgccgacuacaacuacaagcugcccgacgacuucaccggcugugugauugccuggaacagcaacaaccuggacuccaaagucggcggcaacuacaauuaccuguaccggcuguuccggaaguccaaucugaagcccuucgagcgggacaucagcaccgaaaucuaucaggccggcagcaccccuugcaacggcguggaaggcuucaacugcuacuucccacugcaguccuacggcuuucagcccacaaauggcgugggcuaucagcccuacagagugguggugcugagcuucgaacugcugcaugcuccugccacagugugcggcccuaagaaaagcaccaaucucgugaagaacaaaugcgugaacuucaacuucaacggccugaccggcaccggcgugcugacagagagcaacaagaaguuccugccauuccagcaguuuggccgggauaucgccgauaccacagacgccguuagagauccccagacacuggaaauccuggacaucaccccaugcagcuucggcggagugucugugaucaccccuggcaccaacaccagcaaucagguggcagugcuguaccaggacgugaacuguaccgaagugcccguggccauucacgccgaucagcugacaccuacauggcggguguacuccaccggcagcaauguguuucagaccagagccggcugucugaucggagccgagcacgugaacaauagcuacgagugcgacauccccaucggcgcuggcaucugugccagcuaccagacacagacaaacagccccagacgggcuagaagcguggccagccagagcaucauugccuacacaaugucucugggcgccgagaacagcguggccuacuccaacaacucuaucgcuauccccaccaacuucaccaucagcgugaccaccgagauccugccuguguccaugaccaagaccagcguggacugcaccauguacaucugcggcgauuccaccgagugcuccaaccugcugcugcaguacggcagcuucugcacccagcugaauagagcccugacagggaucgccguggaacaggacaagaacacccaagagguguucgcccaagugaagcaaaucuacaagaccccuccuaucaaggacuucggcggcuucaauuucagccagauucugcccgauccuagcaagcccagcaagcggagcuucaucgaggaccugcuguucaacaaagugacacuggccgacgccggcuucaucaagcaguauggcgauugucugggcgacauugccgccagggaucugauuugcgcccagaaguuuaacggacugacagugcugccuccucugcugaccgaugagaugaucgcccaguacugcucugcccugcuggccggcacaaucacaagcggcuggacauuuggagcuggcgccgcucugcagauccccuuugcuaugcagauggccuaccgguucaacggcaucggagugacccagaaugugcuguacgagaaccagaagcugaucgccaaccaguucaacagcgccaucggcaagauccaggacagccugagcagcacagcaagcgcccugggaaagcugcaggacguggucaaccagaaugcccaggcacugaacacccuggucaagcagcuguccuccaacuucggcgccaucagcucugugcugaacgauauccugagcagacuggacaaggucgaggccgaggugcagaucgacagacugaucacaggcagacugcagagccuccagacauacgugacccagcagcugaucagagccgccgagauuagagccucugccaaucuggccgccaccaagaugucugagugugugcugggccagagcaagagaguggacuuuugcggcaagggcuaccaccugaugagcuucccucagugcgccccucacggcgugguguuucugcacgugacauaugugcccgcucaagagaagaauuucaccaccgcuccagccaucugccacgacggcaaagcccacuuuccuagagaaggcguguucguguccaacggcacccauugguucgugacacagcggaacuucuacgagccccagaucaucaccaccgacaacaccuucgugucuggcaacugcgacguugugaucggcauugugaacaauaccguguacgacccucugcagcccgagcuggacagcggaggcggaggaucugacaucgaccccuacaaagaguucggcagcagcuaccagcugcugaacuuccugccucuggacuucuuccccgaccugaacgcccugguggauacagccacagcucuguacgaggaagaacugaccggcagagagcacugcagcccucaccacacagccauuagacaggcccucgugugcugggacgagcugacaaaacugaucgccuggaugagcagcaacaucaccagcgagcaagugcggaccaucaucgugaaccacgugaacgauaccuggggccugaaagugcggcagagccugugguuucaccugagcugucugaccuucggccagcacaccgugcaagaguuucugguguccuucggcguguggaucagaaccccugcuccauacagaccuccaaacgcucccauccugagcacccugccugagcacacagugaucuguugaggacuaguuauaagacugacuagcccgaugggccucccaacgggcccuccuccccuccuugcaccgagauuaauaaaaaaaaaaaaaaaaaaaaaaaaaaaaaaaaaaaaaaaaaaaaaaaaaaaaaaaaaaaaaaaaugcaucccccccccccccccccccccccccccccccaaaggcucuuuucagagccaccagaauu

SEQ ID NO: 13148 - protein, 3 aa, Artificial Sequence
  Linker GGS
GGS

SEQ ID NO: 13149 - RNA, 9 nt, Artificial Sequence
  Linker GGS CDS gc
ggcgggagc

SEQ ID NO: 13150 - RNA, 9 nt, Artificial Sequence
  Linker GGS CDS human
ggcgggagc

SEQ ID NO: 13151 - RNA, 9 nt, Artificial Sequence
  Linker GGS CDS gc mod
ggaggaucu

SEQ ID NO: 13152 - protein, 5 aa, Artificial Sequence
  Linker GGGGS
GGGGS

SEQ ID NO: 13153 - RNA, 15 nt, Artificial Sequence
  Linker GGGGS CDS gc
ggcgggggcgggagc

SEQ ID NO: 13154 - RNA, 15 nt, Artificial Sequence
  Linker GGGGS CDS human
ggcgggggagguagc

SEQ ID NO: 13155 - RNA, 15 nt, Artificial Sequence
  Linker GGGGS CDS gc mod
ggaggcggaggaucu

SEQ ID NO: 13156 - RNA, 21 nt, Artificial Sequence
  Linker GGGSGGG CDS gc
ggcggcgggagcgggggcggg

SEQ ID NO: 13157 - RNA, 21 nt, Artificial Sequence
  Linker GGGSGGG CDS human
ggcgggggcagcgggggcggg

SEQ ID NO: 13158 - RNA, 21 nt, Artificial Sequence
  Linker GGGSGGG CDS gc mod
ggcggaggaucuggcggagga

SEQ ID NO: 13159 - RNA, 459 nt, Artificial Sequence
  Aa/VF5_ribH(C37A_N102D) Lumazine Synthase (LumSynth) CDS gc
cagaucuacgagggcaagcugaccgccgaggggcuccgcuucggcaucguggccagccgguucaaccacgcgcuggucgaccgccugguggagggggccaucgacgccaucgugcggcacggcgggcgcgaggaggacaucacccucguccgggugcccggcuccugggagaucccgguggccgccggcgagcuggcccgcaaggaggacaucgacgcggucaucgccaucggggugcugauccggggcgccacgccccacuucgacuacaucgccagcgagguguccaaggggcucgcggaccugagccuggagcuccgcaagcccaucaccuucggcgucaucaccgccgacacccuggagcaggccaucgagcgggccgggacgaagcacggcaacaagggcugggaggccgcgcuguccgccaucgagauggccaaccucuucaagagccugcgc

SEQ ID NO: 13160 - RNA, 459 nt, Artificial Sequence
  Aa/VF5_ribH(C37A_N102D) Lumazine Synthase (LumSynth) CDS gc
cagaucuacgagggcaagcugaccgccgaggggcuccgcuucggcaucguggccagccgguucaaccacgcgcuggucgaccgccugguggagggggccaucgacgccaucgugcggcacggcgggcgcgaggaggacaucacccucguccgggugcccggcuccugggagaucccgguggccgccggcgagcuggcgcgcaaggaggacaucgacgccgucaucgccaucggggugcugauccggggcgccacgccccacuucgacuacaucgcgagcgagguguccaaggggcucgccgaccugagccuggagcuccgcaagcccaucaccuucggcgucaucaccgccgacacccuggagcaggccaucgagcgggccgggacgaagcacggcaacaagggcugggaggcggcccuguccgccaucgagauggccaaccucuucaagagccugcgc

SEQ ID NO: 13161 - RNA, 459 nt, Artificial Sequence
  Aa/VF5_ribH(C37A_N102D) Lumazine Synthase (LumSynth) CDS human
cagaucuacgagggcaagcugaccgccgaagggcucagauucggaauuguggcuagcagguuuaaccacgcacuugucgaccggcugguugagggugccauagaugcgaucgugcgccauggcgggcgagaagaggacauuacauugguacgugugcccggauccugggaaaucccugucgcugccggcgaguuagcaagaaaagaggauauugacgccgugaucgcuauagguguucugaucaggggagcaacuccacacuucgauuauauugccucugaagugucaaaggggcuagcugaccucagucuggagcuucggaaaccgaucacguuuggcgucauuaccgccgauacacuggaacaagcgaucgagcgcgcaggcacuaagcaugggaauaaaggaugggaggccgcuuugagcgccauagaaauggcaaaccucuucaagucccugaga

SEQ ID NO: 13162 - RNA, 459 nt, Artificial Sequence
  Aa/VF5_ribH(C37A_N102D) Lumazine Synthase (LumSynth) CDS gc mod
cagaucuacgagggcaagcugacagccgagggccugagauuuggaaucguggccagccgguucaaucacgcccugguggauagacugguggaaggcgccaucgaugccauugucagacacggcggcagagaagaggacaucacccucguuagagugcccggcucuugggagauuccuguggcugcuggcgagcuggcccggaaagaagauaucgacgccguuaucgccaucggcgugcugaucagaggcgccacaccucacuucgacuauaucgccagcgagguguccaaaggccuggccgaucugagccuggaacugagaaagcccaucaccuucggcgugaucaccgcugacacacuggaacaggccauugagagagccggcaccaagcacggcaacaaaggaugggaagccgcucuguccgccaucgagauggccaaccuguucaagagccugcgg

SEQ ID NO: 13163 - RNA, 489 nt, Artificial Sequence
  Hp/J99_pfr(5-167_N19Q) Ferritin CDS gc
gacaucaucaagcuccugaacgagcaggucaacaaggagaugcaguccagcaaccuguacauguccaugagcuccuggugcuacacccacagccucgacggcgccgggcuguuccuguucgaccacgccgcggaggaguacgagcacgccaagaagcucaucaucuuccugaacgagaacaacgugcccgugcagcugaccuccaucagcgccccggagcacaaguucgagggccucacgcagaucuuccagaaggccuacgagcacgagcagcacaucuccgagagcaucaacaacaucguggaccacgccaucaaguccaaggaccacgcgaccuucaacuuccugcagugguacgucgccgagcagcacgaggaggaggugcuguucaaggacauccucgacaagaucgagcugaucgggaacgagaaccacggccuguaccucgccgaccaguacgugaaggggaucgccaagagccgcaagucc

SEQ ID NO: 13164 - RNA, 489 nt, Artificial Sequence
  Hp/J99_pfr(5-167_N19Q) Ferritin CDS gc
gacaucaucaagcuccugaacgagcaggugaacaaggagaugcaguccagcaaccuguacauguccaugagcuccuggugcuacacccacagccucgacggcgccgggcuguuccuguucgaccacgccgcggaggaguacgagcacgccaagaagcucaucaucuuccugaacgagaacaacguccccgugcagcugaccuccaucagcgccccggagcacaaguucgagggccucacgcagaucuuccagaaggccuacgagcacgagcagcacaucuccgagagcaucaacaacaucguggaccacgccaucaaguccaaggaccacgcgaccuucaacuuccugcagugguacgucgccgagcagcacgaggaggaggugcuguucaaggacauccucgacaagaucgagcugaucgggaacgagaaccacggccuguaccucgccgaccaguacgugaaggggaucgccaagagccgcaagucc

SEQ ID NO: 13165 - RNA, 489 nt, Artificial Sequence
  Hp/J99_pfr(5-167_N19Q) Ferritin CDS gc
gacaucaucaagcugcucaacgagcaggucaacaaggagaugcagagcuccaaccuguacaugagcauguccagcuggugcuacacccacucccuggacggcgccggccucuuccuguucgaccacgccgcggaggaguacgagcacgccaagaagcugaucaucuuccucaacgagaacaacgugcccgugcagcugaccagcaucuccgccccggagcacaaguucgaggggcugacgcagaucuuccagaaggccuacgagcacgagcagcacaucagcgaguccaucaacaacaucguggaccacgccaucaagagcaaggaccacgcgaccuucaacuuccuccagugguacgucgccgagcagcacgaggaggaggugcuguucaaggacauccuggacaagaucgagcucaucgggaacgagaaccacggccuguaccuggccgaccaguacgugaaggggaucgccaagucccgcaagagc

SEQ ID NO: 13166 - RNA, 489 nt, Artificial Sequence
  Hp/J99_pfr(5-167_N19Q) Ferritin CDS human
gacaucauuaagcugcucaacgaacaggugaauaaagagaugcaaagcuccaaccuuuacaugucuaugucaaguuggugcuauacccacagccuggauggcgccggguuguucuuauuugaccaugcugcagaggaauacgagcacgccaagaaacugauaaucuuccuaaaugaaaacaauguccccguucagcucacauccauuucugcgccugagcauaaguuugagggacugacucagaucuuccagaaggcuuaugaacacgagcaacauauuucggaaucaaucaacaauauaguggaucacgccaucaaaagcaaggaccacgcaacguuuaacuuccuucagugguacguagccgagcagcaugaggaagaggugcuguuuaaagauauuuuggacaagaucgaacucauugguaaugagaaccacggccuguaucuggcugaucaguacgucaaagggaucgcaaagaguagaaaaucc

SEQ ID NO: 13167 - RNA, 489 nt, Artificial Sequence
  Hp/J99_pfr(5-167_N19Q) Ferritin CDS gc mod
gacaucaucaagcugcugaacgagcaagugaacaaagagaugcagagcagcaaccuguacaugagcaugagcagcuggugcuacacccacagccuugauggcgccggacuguuccuguuugaucacgccgccgaggaauacgagcacgccaagaagcugaucaucuuccugaacgagaacaacgugcccgugcagcugaccagcauuucugccccugagcacaaguucgagggccugacacagaucuuccagaaggccuacgaacacgagcagcacaucagcgagagcaucaacaacaucguggaccacgccauuaagagcaaggaucacgccaccuucaacuuucugcagugguacguggccgaacagcacgaggaagaggugcuguucaaggacauccuggacaagaucgagcugaucggcaacgagaaccacggccuguaucuggccgaccaguacgugaagggaaucgccaagagcagaaagagc

SEQ ID NO: 13168 - RNA, 81 nt, Artificial Sequence
  BPT4_wac(458-484) Foldon CDS gc
ggcuacauccccgaggccccgcgcgacgggcaggccuacgugcggaaggacggcgaguggguccugcucagcaccuuccug

SEQ ID NO: 13169 - RNA, 81 nt, Artificial Sequence
  BPT4_wac(458-484) Foldon CDS human
ggcuacauccccgaggccccuagagacgggcaggcuuaugugaggaaggauggagaauggguccugcucagcaccuuccuu

SEQ ID NO: 13170 - RNA, 81 nt, Artificial Sequence
  BPT4_wac(458-484) Foldon CDS gc mod
ggcuauauccccgaggcuccuagagauggccaggccuauguucggaaggauggcgaaugggugcugcugagcaccuuccuu

SEQ ID NO: 13171 - protein, 149 aa, Artificial Sequence
  WHV_WhBvgp4(1-149_C150) WhcAg VLP
DIDPYKEFGSSYQLLNFLPLDFFPDLNALVDTATALYEEELTGREHCSPHHTAIRQALVCWDELTKLIAWMSSNITSEQVRTIIVNHVNDTWGLKVRQSLWFHLSCLTFGQHTVQEFLVSFGVWIRTPAPYRPPNAPILSTLPEHTVIC

SEQ ID NO: 13172 - RNA, 447 nt, Artificial Sequence
  WHV_WhBvgp4(1-149_C150) WhcAg VLP CDS gc
gacaucgaccccuacaaggaguucggcagcuccuaccagcugcucaacuuccugccccuggacuucuuccccgaccucaacgcccugguggacaccgccaccgcgcuguacgaggaggagcucacggggcgcgagcacugcagcccccaccacaccgccauccggcaggcccuggucugcugggacgagcugaccaagcucaucgccuggauguccagcaacaucaccuccgagcagguccgcacgaucaucgugaaccacgucaacgacaccuggggccugaaggugcggcagagccugugguuccaccucuccugccugaccuucgggcagcacaccgugcaggaguuccuggucagcuucggcguguggauccgcacgcccgccccguaccggccgcccaacgcgccgauccucuccacccugccggagcacaccgugaucugc

SEQ ID NO: 13173 - RNA, 447 nt, Artificial Sequence
  WHV_WhBvgp4(1-149_C150) WhcAg VLP CDS gc
gacaucgaccccuacaaggaguucggcagcuccuaccagcugcucaacuuccugccgcuggacuucuuccccgaccucaacgcccugguggacaccgccaccgcgcuguacgaggaggagcucacggggcgcgagcacugcagcccccaccacaccgccauccggcaggcccuggucugcugggacgagcugaccaagcucaucgccuggauguccagcaacaucaccuccgagcagguccgcacgaucaucgugaaccacgugaacgacaccuggggccugaaggugcggcagagccugugguuccaccucuccugccugaccuucgggcagcacaccgugcaggaguuccuggucagcuucggcguguggauccgcacgcccgccccguaccggccgcccaacgcgcccauccucuccacccugcccgagcacaccgugaucugc

SEQ ID NO: 13174 - RNA, 447 nt, Artificial Sequence
  WHV_WhBvgp4(1-149_C150) WhcAg VLP CDS human
gacaucgaucccuacaaggaguucggcagcuccuaucagcugcucaacuuucuuccucuggacuucuuuccagauuugaaugccuuaguggacaccgcuacagcacuguacgaagaggaacuaacugggagagagcacugcucuccgcaucacacggccauuaggcaagcgcucgucuguugggaugaacugaccaaacuuauagcuuggaugucaaguaacaucacaagcgagcagguucggacuauuaucgugaaucauguaaacgacaccuggggacugaaggugcgccaguccuugugguuccaccucucuugccugacauuuggucagcauaccguccaagaguuccuggugucguuuggcguuuggauucgaacucccgccccuuaucguccacccaaugcaccuauccucucaacauuaccagaacacaccgugauaugu

SEQ ID NO: 13175 - RNA, 447 nt, Artificial Sequence
  WHV_WhBvgp4(1-149_C150) WhcAg VLP CDS gc mod
gacaucgaccccuacaaagaguucggcagcagcuaccagcugcugaacuuccugccucuggacuucuuccccgaccugaacgcccugguggauacagccacagcucuguacgaggaagaacugaccggcagagagcacugcagcccucaccacacagccauuagacaggcccucgugugcugggacgagcugacaaaacugaucgccuggaugagcagcaacaucaccagcgagcaagugcggaccaucaucgugaaccacgugaacgauaccuggggccugaaagugcggcagagccugugguuucaccugagcugucugaccuucggccagcacaccgugcaagaguuucugguguccuucggcguguggaucagaaccccugcuccauacagaccuccaaacgcucccauccugagcacccugccugagcacacagugaucugu

SEQ ID NO: 13176 - protein, 126 aa, Artificial Sequence
  SARS-CoV-2/Wuhan/WIV05/2019__EPI_ISL_402128 spike protein (1148-1273)
FKEELDKYFKNHTSPDVDLGDISGINASVVNIQKEIDRLNEVAKNLNESLIDLQELGKYEQYIKWPWYIWLGFIAGLIAIVMVTIMLCCMTSCCSCLKGCCSCGSCCKFDEDDSEPVLKGVKLHYT

SEQ ID NO: 13177 - protein, 126 aa, Artificial Sequence
  SARS-CoV-2/bat/Yunnan/RaTG13/2013__EPI_ISL_402131 spike protein (1144-1269)
FKEELDKYFKNHTSPDVDLGDISGINASVVNIQKEIDRLNEVAKNLNESLIDLQELGKYEQYIKWPWYIWLGFIAGLIAIIMVTIMLCCMTSCCSCLKGCCSCGSCCKFDEDDSEPVLKGVKLHYT

SEQ ID NO: 13178 - protein, 126 aa, Artificial Sequence; identical to SEQ ID NO: 13176
  SARS-CoV-2/Wuhan/HBCDC-HB-01/2019__EPI_ISL_402132 spike protein (1148-1273)

SEQ ID NO: 13179 - protein, 126 aa, Artificial Sequence; identical to SEQ ID NO: 13176
  SARS-CoV-2/Guangdong/20SF028/2020__EPI_ISL_403936 spike protein (1148-1273)

SEQ ID NO: 13180 - protein, 126 aa, Artificial Sequence
  SARS-CoV-2/Shenzhen/SZTH-001/2020__EPI_ISL_406592 spike protein (1148-1273)
FKEELDKYFKNHTSPDVDLGDISGINASVVNIQKEIDRLNEVAKNLNESLIDLQELGKYEQYIKWPWYIWLGFIAGLIAIVMVTIMLCCMTSCCSCLKGCCSCGSCCKFDEDDSGPVLKGVKLHYT

SEQ ID NO: 13181 - protein, 126 aa, Artificial Sequence; identical to SEQ ID NO: 13176
  SARS-CoV-2/Shenzhen/SZTH-004/2020__EPI_ISL_406595 spike protein (1148-1273)

SEQ ID NO: 13182 - protein, 126 aa, Artificial Sequence; identical to SEQ ID NO: 13176
  SARS-CoV-2/France/IDF0372/2020__EPI_ISL_406596 spike protein (1148-1273)

SEQ ID NO: 13183 - protein, 126 aa, Artificial Sequence; identical to SEQ ID NO: 13176
  SARS-CoV-2/Australia/VIC01/2020__EPI_ISL_406844 spike protein (1148-1273)

SEQ ID NO: 13184 - protein, 126 aa, Artificial Sequence; identical to SEQ ID NO: 13176
  SARS-CoV-2/Germany/BavPat1/2020__EPI_ISL_406862 spike protein (1148-1273)

SEQ ID NO: 13185 - protein, 126 aa, Artificial Sequence; identical to SEQ ID NO: 13176
  SARS-CoV-2/Wuhan/HBCDC-HB-02/2020__EPI_ISL_412978 spike protein (1148-1273)

SEQ ID NO: 13186 - protein, 126 aa, Artificial Sequence; identical to SEQ ID NO: 13176
  SARS-CoV-2/Australia/QLD02/2020__EPI_ISL_407896 spike protein (1148-1273)

SEQ ID NO: 13187 - protein, 126 aa, Artificial Sequence; identical to SEQ ID NO: 13176
  SARS-CoV-2/India/1-31/2020__EPI_ISL_413523 spike protein (1148-1273)

SEQ ID NO: 13188 - protein, 126 aa, Artificial Sequence; identical to SEQ ID NO: 13176
  SARS-CoV-2/Guangdong/GD2020087-P0008/2020__EPI_ISL_413863 spike protein (1148-1273)

SEQ ID NO: 13189 - protein, 126 aa, Artificial Sequence; identical to SEQ ID NO: 13176
  SARS-CoV-2/Sweden/01/2020__EPI_ISL_411951 spike protein (1148-1273)

SEQ ID NO: 13190 - protein, 126 aa, Artificial Sequence; identical to SEQ ID NO: 13176
  SARS-CoV-2/Tianmen/HBCDC-HB-07/2020__EPI_ISL_412983 spike protein (1148-1273)

SEQ ID NO: 13191 - protein, 126 aa, Artificial Sequence; identical to SEQ ID NO: 13176
  SARS-CoV-2/Hong Kong/case42_VM20002493/2020__EPI_ISL_414527 spike protein (1148-1273)

SEQ ID NO: 13192 - protein, 126 aa, Artificial Sequence; identical to SEQ ID NO: 13176
  SARS-CoV-2/USA/CruiseA-23/2020__EPI_ISL_414482 spike protein (1148-1273)

SEQ ID NO: 13193 - protein, 126 aa, Artificial Sequence; identical to SEQ ID NO: 13176
  SARS-CoV-2/Hong Kong/case85_VM20002868/2020__EPI_ISL_414519 spike protein (1148-1273)

SEQ ID NO: 13194 - protein, 126 aa, Artificial Sequence
  SARS-CoV-2/England/200990660/2020__EPI_ISL_414523 spike protein (1148-1273)
FKEELDKYFKNHTSPDVDLGDISGINASVVNIQKEIDRLNEVAKNLNESLIDLQELGKYEQYIKWPWYIWLGFIAGLIAIVMVTIMLCCMTSCCSCLKGCCSCGSCCKFDEDDSELVLKGVKLHYT

SEQ ID NO: 13195 - protein, 126 aa, Artificial Sequence; identical to SEQ ID NO: 13176
  SARS-CoV-2/Australia/NSW09/2020__EPI_ISL_413595 spike protein (1148-1273)

SEQ ID NO: 13196 - protein, 126 aa, Artificial Sequence
  SARS-CoV-2/Australia/NSW10/2020__EPI_ISL_413596 spike protein (1148-1273)
FKEELDKYFKNHTSPDVDLGDISGINASVVNIQKEIDRLNEVAKNLNESLIDLQELGKYEQYIKWPWYIWLGFIAGLIAIVMVTIMLCCMTSCCSCLKGCCSCGSCFKFDEDDSEPVLKGVKLHYT

SEQ ID NO: 13197 - protein, 126 aa, Artificial Sequence; identical to SEQ ID NO: 13176
  SARS-CoV-2/Switzerland/1000477797/2020__EPI_ISL_413023 spike protein (1148-1273)

SEQ ID NO: 13198 - protein, 126 aa, Artificial Sequence; identical to SEQ ID NO: 13176
  SARS-CoV-2/Belgium/BA-02291/2020__EPI_ISL_415159 spike protein (1148-1273)

SEQ ID NO: 13199 - protein, 126 aa, Artificial Sequence; identical to SEQ ID NO: 13176
  SARS-CoV-2/USA/WA8-UW5/2020__EPI_ISL_413486 spike protein (1148-1273)

SEQ ID NO: 13200 - protein, 126 aa, Artificial Sequence; identical to SEQ ID NO: 13176
  SARS-CoV-2/England/20102000506/2020__EPI_ISL_415147 spike protein (1148-1273)

SEQ ID NO: 13201 - protein, 126 aa, Artificial Sequence; identical to SEQ ID NO: 13176
  SARS-CoV-2/Belgium/VAG-03013/2020__EPI_ISL_415155 spike protein (1148-1273)

SEQ ID NO: 13202 - protein, 126 aa, Artificial Sequence; identical to SEQ ID NO: 13176
  SARS-CoV-2/Belgium/BC-03016/2020__EPI_ISL_415157 spike protein (1148-1273)

SEQ ID NO: 13203 - protein, 126 aa, Artificial Sequence; identical to SEQ ID NO: 13176
  SARS-CoV-2/Germany/BavPat3/2020__EPI_ISL_414521 spike protein (1148-1273)

SEQ ID NO: 13204 - protein, 126 aa, Artificial Sequence; identical to SEQ ID NO: 13176
  SARS-CoV-2/France/HF1805/2020__EPI_ISL_414628 spike protein (1148-1273)

SEQ ID NO: 13205 - protein, 126 aa, Artificial Sequence; identical to SEQ ID NO: 13176
  SARS-CoV-2/Netherlands/ZuidHolland_9/2020__EPI_ISL_414445 spike protein (1148-1273)

SEQ ID NO: 13206 - protein, 126 aa, Artificial Sequence; identical to SEQ ID NO: 13176
  SARS-CoV-2/Finland/FIN03032020A/2020__EPI_ISL_413602 spike protein (1148-1273)

SEQ ID NO: 13207 - protein, 126 aa, Artificial Sequence; identical to SEQ ID NO: 13176
  SARS-CoV-2/France/GE1977/2020__EPI_ISL_414632 spike protein (1148-1273)

SEQ ID NO: 13208 - protein, 126 aa, Artificial Sequence; identical to SEQ ID NO: 13176
  SARS-CoV-2/Finland/FIN-313/2020__EPI_ISL_414641 spike protein (1148-1273)

SEQ ID NO: 13209 - protein, 126 aa, Artificial Sequence; identical to SEQ ID NO: 13176
  SARS-CoV-2/Netherlands/ZuidHolland_2/2020__EPI_ISL_414556 spike protein (1148-1273)

SEQ ID NO: 13210 - protein, 126 aa, Artificial Sequence; identical to SEQ ID NO: 13176
  SARS-CoV-2/USA/WA-UW31/2020__EPI_ISL_414618 spike protein (1148-1273)

SEQ ID NO: 13211 - protein, 126 aa, Artificial Sequence; identical to SEQ ID NO: 13176
  SARS-CoV-2/South Korea/SNU01/2020__EPI_ISL_411929 spike protein (1148-1273)

SEQ ID NO: 13212 - protein, 126 aa, Artificial Sequence; identical to SEQ ID NO: 13176
  SARS-CoV-2/China/WF0004/2020__EPI_ISL_413694 spike protein (1148-1273)

SEQ ID NO: 13213 - protein, 126 aa, Artificial Sequence; identical to SEQ ID NO: 13176
  SARS-CoV-2/China/WF0028/2020__EPI_ISL_413791 spike protein (1148-1273)

SEQ ID NO: 13214 - protein, 126 aa, Artificial Sequence; identical to SEQ ID NO: 13176
  SARS-CoV-2/2019-nCoV/USA-CruiseA-18/2020__MT159716.1 spike protein (1148-1273)

SEQ ID NO: 13215 - protein, 126 aa, Artificial Sequence; identical to SEQ ID NO: 13176
  SARS-CoV-2/SARS-CoV-2/Yunnan-01/human/2020/CHN__MT049951.1 spike protein (1148-1273)

SEQ ID NO: 13216 - protein, 126 aa, Artificial Sequence; identical to SEQ ID NO: 13176
  SARS-CoV-2/USA/WA-UW292/2020__EPI_ISL_418077 spike protein (1148-1273)

SEQ ID NO: 13217 - protein, 126 aa, Artificial Sequence; identical to SEQ ID NO: 13176
  SARS-CoV-2/Iceland/192/2020__EPI_ISL_417819 spike protein (1148-1273)

SEQ ID NO: 13218 - protein, 126 aa, Artificial Sequence; identical to SEQ ID NO: 13176
  SARS-CoV-2/Belgium/ULG-6939/2020__EPI_ISL_417020 spike protein (1148-1273)

SEQ ID NO: 13219 - protein, 126 aa, Artificial Sequence; identical to SEQ ID NO: 13176
  SARS-CoV-2/France/HF2496/2020__EPI_ISL_418231 spike protein (1148-1273)

SEQ ID NO: 13220 - protein, 126 aa, Artificial Sequence; identical to SEQ ID NO: 13176
  SARS-CoV-2/USA/WA-UW291/2020__EPI_ISL_418076 spike protein (1148-1273)

SEQ ID NO: 13221 - protein, 126 aa, Artificial Sequence
  SARS-CoV-2/Portugal/PT0034/2020__EPI_ISL_418019 spike protein (1148-1273)
FKEELDKYFKNHTSPDVDLGDISGINASVVNIQKEIDRLNEVAKNLNESLIDLQELGKYEQYIKWPWYIWLGFIAGLIAIVMVTIMLCCITSCCSCLKGCCSCGSCCKFDEDDSEPVLKGVKLHYT

SEQ ID NO: 13222 - protein, 126 aa, Artificial Sequence
  SARS-CoV-2/Iceland/202/2020__EPI_ISL_417750 spike protein (1148-1273)
FKEELDKYFKNHTSPDVDLGDIPGINASVVNIQKEIDRLNEVAKNLNESLIDLQELGKYEQYIKWPWYIWLGFIAGLIAIVMVTIMLCCMTSCCSCLKGCCSCGSCCKFDEDDSEPVLKGVKLHYT

SEQ ID NO: 13223 - protein, 126 aa, Artificial Sequence; identical to SEQ ID NO: 13176
  SARS-CoV-2/USA/WA-UW261/2020__EPI_ISL_418046 spike protein (1148-1273)

SEQ ID NO: 13224 - protein, 126 aa, Artificial Sequence; identical to SEQ ID NO: 13176
  SARS-CoV-2/Portugal/PT0035/2020__EPI_ISL_418020 spike protein (1148-1273)

SEQ ID NO: 13225 - protein, 126 aa, Artificial Sequence; identical to SEQ ID NO: 13176
  SARS-CoV-2/USA/NY-NYUMC7/2020__EPI_ISL_418192 spike protein (1148-1273)

SEQ ID NO: 13226 - protein, 126 aa, Artificial Sequence; identical to SEQ ID NO: 13176
  SARS-CoV-2/Iceland/189/2020__EPI_ISL_417709 spike protein (1148-1273)

SEQ ID NO: 13227 - protein, 126 aa, Artificial Sequence; identical to SEQ ID NO: 13176
  SARS-CoV-2/Australia/NSW56/2020__EPI_ISL_417408 spike protein (1148-1273)

SEQ ID NO: 13228 - protein, 126 aa, Artificial Sequence; identical to SEQ ID NO: 13176
  SARS-CoV-2/Iceland/280/2020__EPI_ISL_417608 spike protein (1148-1273)

SEQ ID NO: 13229 - protein, 126 aa, Artificial Sequence
  SARS-CoV-2/Iceland/247/2020__EPI_ISL_417575 spike protein (1148-1273)
FKEELDKYFKNHTSPDVDLGDISGINASVVNIQKEIDRLNEVAKNLNESLIDLQELGKYEQYIKWPWYIWLGFIAGLIAIVIVTIMLCCMTSCCSCLKGCCSCGSCCKFDEDDSEPVLKGVKLHYT

SEQ ID NO: 13230 - protein, 126 aa, Artificial Sequence; identical to SEQ ID NO: 13176
  SARS-CoV-2/Iceland/238/2020__EPI_ISL_417566 spike protein (1148-1273)

SEQ ID NO: 13231 - protein, 126 aa, Artificial Sequence; identical to SEQ ID NO: 13176
  SARS-CoV-2/Greece/16/2020__EPI_ISL_418265 spike protein (1148-1273)

SEQ ID NO: 13232 - protein, 126 aa, Artificial Sequence; identical to SEQ ID NO: 13176
  SARS-CoV-2/Iceland/319/2020__EPI_ISL_417648 spike protein (1148-1273)

SEQ ID NO: 13233 - protein, 126 aa, Artificial Sequence; identical to SEQ ID NO: 13176
  SARS-CoV-2/Congo/94/2020__EPI_ISL_417947 spike protein (1148-1273)

SEQ ID NO: 13234 - protein, 126 aa, Artificial Sequence; identical to SEQ ID NO: 13176
  SARS-CoV-2/Congo/158/2020__EPI_ISL_417950 spike protein (1148-1273)

SEQ ID NO: 13235 - protein, 126 aa, Artificial Sequence; identical to SEQ ID NO: 13176
  SARS-CoV-2/USA/UT-00034/2020__EPI_ISL_417977 spike protein (1148-1273)

SEQ ID NO: 13236 - protein, 126 aa, Artificial Sequence; identical to SEQ ID NO: 13176
  SARS-CoV-2/USA/UT-00033/2020__EPI_ISL_417976 spike protein (1148-1273)

SEQ ID NO: 13237 - protein, 126 aa, Artificial Sequence; identical to SEQ ID NO: 13176
  SARS-CoV-2/USA/WI-13/2020__EPI_ISL_417516 spike protein (1148-1273)

SEQ ID NO: 13238 - protein, 126 aa, Artificial Sequence; identical to SEQ ID NO: 13176
  SARS-CoV-2/India/1-27/2020__EPI_ISL_413522 spike protein (1147-1272)

SEQ ID NO: 13239 - protein, 126 aa, Artificial Sequence
  SARS-CoV-2/pangolin/Guangxi/P4L/2017__EPI_ISL_410538 spike protein (1142-1267)
FKEELDKYFKNHTSPDVDLGDISGINASVVNIQKEIDRLNEVAKNLNESPIDLQELGKYEQYIKWPWYIWLGFIAGLIAIIMVTIMLCCMTSCCSCLKGCCSCGSCCKFDEDDSEPVLKGVKLHYT

SEQ ID NO: 13240 - protein, 126 aa, Artificial Sequence; identical to SEQ ID NO: 13177
  SARS-CoV-2/pangolin/Guangxi/P5L/2017__EPI_ISL_410540 spike protein (1142-1267)

SEQ ID NO: 13241 - protein, 126 aa, Artificial Sequence; identical to SEQ ID NO: 13177
  SARS-CoV-2/pangolin/Guangxi/P5E/2017__EPI_ISL_410541 spike protein (1142-1267)

SEQ ID NO: 13242 - protein, 126 aa, Artificial Sequence; identical to SEQ ID NO: 13177
  SARS-CoV-2/pangolin/Guangxi/P1E/2017__EPI_ISL_410539 spike protein (1140-1265)

SEQ ID NO: 13243 - protein, 223 aa, Artificial Sequence
  SARS-CoV-2/Wuhan/WIV05/2019__EPI_ISL_402128 spike protein (319-541)
RVQPTESIVRFPNITNLCPFGEVFNATRFASVYAWNRKRISNCVADYSVLYNSASFSTFKCYGVSPTKLNDLCFTNVYADSFVIRGDEVRQIAPGQTGKIADYNYKLPDDFTGCVIAWNSNNLDSKVGGNYNYLYRLFRKSNLKPFERDISTEIYQAGSTPCNGVEGFNCYFPLQSYGFQPTNGVGYQPYRVVVLSFELLHAPATVCGPKKSTNLVKNKCVNF

SEQ ID NO: 13244 - protein, 223 aa, Artificial Sequence
  SARS-CoV-2/bat/Yunnan/RaTG13/2013__EPI_ISL_402131 spike protein (315-537)
RVQPTDSIVRFPNITNLCPFGEVFNATTFASVYAWNRKRISNCVADYSVLYNSTSFSTFKCYGVSPTKLNDLCFTNVYADSFVITGDEVRQIAPGQTGKIADYNYKLPDDFTGCVIAWNSKHIDAKEGGNFNYLYRLFRKANLKPFERDISTEIYQAGSKPCNGQTGLNCYYPLYRYGFYPTDGVGHQPYRVVVLSFELLNAPATVCGPKKSTNLVKNKCVNF

SEQ ID NO: 13245 - protein, 223 aa, Artificial Sequence; identical to SEQ ID NO: 13243
  SARS-CoV-2/Wuhan/HBCDC-HB-01/2019__EPI_ISL_402132 spike protein (319-541)

SEQ ID NO: 13246 - protein, 223 aa, Artificial Sequence; identical to SEQ ID NO: 13243
  SARS-CoV-2/Guangdong/20SF028/2020__EPI_ISL_403936 spike protein (319-541)

SEQ ID NO: 13247 - protein, 223 aa, Artificial Sequence; identical to SEQ ID NO: 13243
  SARS-CoV-2/Shenzhen/SZTH-001/2020__EPI_ISL_406592 spike protein (319-541)

SEQ ID NO: 13248 - protein, 223 aa, Artificial Sequence
  SARS-CoV-2/Shenzhen/SZTH-004/2020__EPI_ISL_406595 spike protein (319-541)
RVQPTESIVRFPNITNLCPFGEVFNATRFASVYAWDRKRISNCVAYYSVLYNSASFSTFKCYGVSPTKLNDLCFTNVYADSFVIRGDEVRQIAPGQTGKIADYNYKLPDDFTGCVIAWNSNNLDSKVGGNYNYLYRLFRKSNLKPFERDISTEIYQAGSTPCNGVEGFNCYFPLQSYGFQPTNGVGYQPYRVVVLSFELLHAPATVCGPKKSTNLVKNKCVNF

SEQ ID NO: 13249 - protein, 223 aa, Artificial Sequence
  SARS-CoV-2/France/IDF0372/2020__EPI_ISL_406596 spike protein (319-541)
RVQPTESIVRFPNITNLCPFGEVFNATRFASVYAWNRKRISNCVADYSFLYNSASFSTFKCYGVSPTKLNDLCFTNVYADSFVIRGDEVRQIAPGQTGKIADYNYKLPDDFTGCVIAWNSNNLDSKVGGNYNYLYRLFRKSNLKPFERDISTEIYQAGSTPCNGVEGFNCYFPLQSYGFQPTNGVGYQPYRVVVLSFELLHAPATVCGPKKSTNLVKNKCVNF

SEQ ID NO: 13250 - protein, 223 aa, Artificial Sequence; identical to SEQ ID NO: 13243
  SARS-CoV-2/Australia/VIC01/2020__EPI_ISL_406844 spike protein (319-541)

SEQ ID NO: 13251 - protein, 223 aa, Artificial Sequence; identical to SEQ ID NO: 13243
  SARS-CoV-2/Germany/BavPat1/2020__EPI_ISL_406862 spike protein (319-541)

SEQ ID NO: 13252 - protein, 223 aa, Artificial Sequence; identical to SEQ ID NO: 13243
  SARS-CoV-2/Wuhan/HBCDC-HB-02/2020__EPI_ISL_412978 spike protein (319-541)

SEQ ID NO: 13253 - protein, 223 aa, Artificial Sequence; identical to SEQ ID NO: 13243
  SARS-CoV-2/Australia/QLD02/2020__EPI_ISL_407896 spike protein (319-541)

SEQ ID NO: 13254 - protein, 223 aa, Artificial Sequence; identical to SEQ ID NO: 13243
  SARS-CoV-2/India/1-31/2020__EPI_ISL_413523 spike protein (319-541)

SEQ ID NO: 13255 - protein, 223 aa, Artificial Sequence
  SARS-CoV-2/Guangdong/GD2020087-P0008/2020__EPI_ISL_413863 spike protein (319-541)
RVQPTESIVRFPNITNLCPFGEVFNATRFASVYAWNRKRISNCVADYSVLYNSASFSTFKCYGVSPTKLNDLCFTNVYADSFVIRGDEVREIAPGQTGKIADYNYKLPDDFTGCVIAWNSNNLDSKVGGNYNYLYRLFRKSNLKPFERDISTEIYQAGSTPCNGVEGFNCYFPLQSYGFQPTNGVGYQPYRVVVLSFELLHAPATVCGPKKSTNLVKNKCVNF

SEQ ID NO: 13256 - protein, 223 aa, Artificial Sequence; identical to SEQ ID NO: 13243
  SARS-CoV-2/Sweden/01/2020__EPI_ISL_411951 spike protein (319-541)

SEQ ID NO: 13257 - protein, 223 aa, Artificial Sequence; identical to SEQ ID NO: 13243
  SARS-CoV-2/Tianmen/HBCDC-HB-07/2020__EPI_ISL_412983 spike protein (319-541)

SEQ ID NO: 13258 - protein, 223 aa, Artificial Sequence; identical to SEQ ID NO: 13243
  SARS-CoV-2/Hong Kong/case42_VM20002493/2020__EPI_ISL_414527 spike protein (319-541)

SEQ ID NO: 13259 - protein, 223 aa, Artificial Sequence; identical to SEQ ID NO: 13243
  SARS-CoV-2/USA/CruiseA-23/2020__EPI_ISL_414482 spike protein (319-541)

SEQ ID NO: 13260 - protein, 223 aa, Artificial Sequence; identical to SEQ ID NO: 13243
  SARS-CoV-2/Hong Kong/case85_VM20002868/2020__EPI_ISL_414519 spike protein (319-541)

SEQ ID NO: 13261 - protein, 223 aa, Artificial Sequence; identical to SEQ ID NO: 13243
  SARS-CoV-2/England/200990660/2020__EPI_ISL_414523 spike protein (319-541)

SEQ ID NO: 13262 - protein, 223 aa, Artificial Sequence; identical to SEQ ID NO: 13243
  SARS-CoV-2/Australia/NSW09/2020__EPI_ISL_413595 spike protein (319-541)

SEQ ID NO: 13263 - protein, 223 aa, Artificial Sequence; identical to SEQ ID NO: 13243
  SARS-CoV-2/Australia/NSW10/2020__EPI_ISL_413596 spike protein (319-541)

SEQ ID NO: 13264 - protein, 223 aa, Artificial Sequence; identical to SEQ ID NO: 13243
  SARS-CoV-2/Switzerland/1000477797/2020__EPI_ISL_413023 spike protein (319-541)

SEQ ID NO: 13265 - protein, 223 aa, Artificial Sequence
  SARS-CoV-2/Belgium/BA-02291/2020__EPI_ISL_415159 spike protein (319-541)
RVQPTESIVRFPNITNLCPFGEVFNATRFASVYAWNRKRISNCVADYSVLYNSASFSTFKCYGVSPTKLNDLCFTNVYADSFVIRGDEVRQIAPGQTGKIADYNYKLPDDFTGCVIAWNSNNLDSKVGGNYNYLYRLFRRSNLKPFERDISTEIYQAGSTPCNGVEGFNCYFPLQSYGFQPTNGVGYQPYRVVVLSFELLPAPATVCGPKKSTNLVKNKCVNF

SEQ ID NO: 13266 - protein, 223 aa, Artificial Sequence; identical to SEQ ID NO: 13243
  SARS-CoV-2/USA/WA8-UW5/2020__EPI_ISL_413486 spike protein (319-541)

SEQ ID NO: 13267 - protein, 223 aa, Artificial Sequence; identical to SEQ ID NO: 13243
  SARS-CoV-2/England/20102000506/2020__EPI_ISL_415147 spike protein (319-541)

SEQ ID NO: 13268 - protein, 223 aa, Artificial Sequence; identical to SEQ ID NO: 13243
  SARS-CoV-2/Belgium/VAG-03013/2020__EPI_ISL_415155 spike protein (319-541)

SEQ ID NO: 13269 - protein, 223 aa, Artificial Sequence; identical to SEQ ID NO: 13243
  SARS-CoV-2/Belgium/BC-03016/2020__EPI_ISL_415157 spike protein (319-541)

SEQ ID NO: 13270 - protein, 223 aa, Artificial Sequence; identical to SEQ ID NO: 13243
  SARS-CoV-2/Germany/BavPat3/2020__EPI_ISL_414521 spike protein (319-541)

SEQ ID NO: 13271 - protein, 223 aa, Artificial Sequence; identical to SEQ ID NO: 13243
  SARS-CoV-2/France/HF1805/2020__EPI_ISL_414628 spike protein (319-541)

SEQ ID NO: 13272 - protein, 223 aa, Artificial Sequence; identical to SEQ ID NO: 13243
  SARS-CoV-2/Netherlands/ZuidHolland_9/2020__EPI_ISL_414445 spike protein (319-541)

SEQ ID NO: 13273 - protein, 223 aa, Artificial Sequence
  SARS-CoV-2/Finland/FIN03032020A/2020__EPI_ISL_413602 spike protein (319-541)
RVQPTESIVRFPNITNLCPFGEVFNATRFASVYAWNRKRISNCVADYSVLYNSASFSTFKCYGVSPTKLNDLCFTNVYADSFVIRGDEVRQIAPGQTGKIADYNYKLPDDFTGCVISWNSNNLDSKVGGNYNYLYRLFRKSNLKPFERDISTEIYQAGSTPCNGVEGFNCYFPLQSYGFQPTNGVGYQPYRVVVLSFELLHAPATVCGPKKSTNLVKNKCVNF

SEQ ID NO: 13274 - protein, 223 aa, Artificial Sequence; identical to SEQ ID NO: 13243
  SARS-CoV-2/France/GE1977/2020__EPI_ISL_414632 spike protein (319-541)

SEQ ID NO: 13275 - protein, 223 aa, Artificial Sequence; identical to SEQ ID NO: 13243
  SARS-CoV-2/Finland/FIN-313/2020__EPI_ISL_414641 spike protein (319-541)

SEQ ID NO: 13276 - protein, 223 aa, Artificial Sequence; identical to SEQ ID NO: 13243
  SARS-CoV-2/Netherlands/ZuidHolland_2/2020__EPI_ISL_414556 spike protein (319-541)

SEQ ID NO: 13277 - protein, 223 aa, Artificial Sequence
  SARS-CoV-2/USA/WA-UW31/2020__EPI_ISL_414618 spike protein (319-541)
RVQPTESIVRFPNITNLCPFGEVFNATRFASVYAWNRKRISNCVADYSVLYNSASFSTFKCYGVSPTKLNDLCFTNVYADSFVIRGDEVRQIAPGQTGKIADYNYKLPDDFTGCVIAWNSNNLDSKVGGNYNYLYRLFRKSNLKPFERDISTEIYQAGSTPCNGAEGFNCYFPLQSYGFQPTNGVGYQPYRVVVLSFELLHAPATVCGPKKSTNLVKNKCVNF

SEQ ID NO: 13278 - protein, 223 aa, Artificial Sequence; identical to SEQ ID NO: 13243
  SARS-CoV-2/South Korea/SNU01/2020__EPI_ISL_411929 spike protein (319-541)

SEQ ID NO: 13279 - protein, 223 aa, Artificial Sequence; identical to SEQ ID NO: 13243
  SARS-CoV-2/China/WF0004/2020__EPI_ISL_413694 spike protein (319-541)

SEQ ID NO: 13280 - protein, 223 aa, Artificial Sequence; identical to SEQ ID NO: 13243
  SARS-CoV-2/China/WF0028/2020__EPI_ISL_413791 spike protein (319-541)

SEQ ID NO: 13281 - protein, 223 aa, Artificial Sequence; identical to SEQ ID NO: 13243
  SARS-CoV-2/2019-nCoV/USA-CruiseA-18/2020__MT159716.1 spike protein (319-541)

SEQ ID NO: 13282 - protein, 223 aa, Artificial Sequence; identical to SEQ ID NO: 13243
  SARS-CoV-2/SARS-CoV-2/Yunnan-01/human/2020/CHN__MT049951.1 spike protein (319-541)

SEQ ID NO: 13283 - protein, 223 aa, Artificial Sequence
  SARS-CoV-2/USA/WA-UW292/2020__EPI_ISL_418077 spike protein (319-541)
RVQPTESIVRFPNITNLCPFGEVFNATRFASVYAWNRKRISNCVADYSVLYNSASFSTFKCYGVSPTKLNDLCFTNVYADSFVIRGDEVRQIAPGQTGKIADYNYKLPDDFTGCVIAWNSNNLDSKVGGNYNYLYRLFRKSNLKPFERDISTEIYQASSTPCNGVEGFNCYFPLQSYGFQPTNGVGYQPYRVVVLSFELLHAPATVCGPKKSTNLVKNKCVNF

SEQ ID NO: 13284 - protein, 223 aa, Artificial Sequence; identical to SEQ ID NO: 13243
  SARS-CoV-2/Iceland/192/2020__EPI_ISL_417819 spike protein (319-541)

SEQ ID NO: 13285 - protein, 223 aa, Artificial Sequence; identical to SEQ ID NO: 13243
  SARS-CoV-2/Belgium/ULG-6939/2020__EPI_ISL_417020 spike protein (319-541)

SEQ ID NO: 13286 - protein, 223 aa, Artificial Sequence; identical to SEQ ID NO: 13243
  SARS-CoV-2/France/HF2496/2020__EPI_ISL_418231 spike protein (319-541)

SEQ ID NO: 13287 - protein, 223 aa, Artificial Sequence; identical to SEQ ID NO: 13243
  SARS-CoV-2/USA/WA-UW291/2020__EPI_ISL_418076 spike protein (319-541)

SEQ ID NO: 13288 - protein, 223 aa, Artificial Sequence; identical to SEQ ID NO: 13243
  SARS-CoV-2/Portugal/PT0034/2020__EPI_ISL_418019 spike protein (319-541)

SEQ ID NO: 13289 - protein, 223 aa, Artificial Sequence; identical to SEQ ID NO: 13243
  SARS-CoV-2/Iceland/202/2020__EPI_ISL_417750 spike protein (319-541)

SEQ ID NO: 13290 - protein, 223 aa, Artificial Sequence
  SARS-CoV-2/USA/WA-UW261/2020__EPI_ISL_418046 spike protein (319-541)
RVQPTESIVRFPNITNLCPFGEVFNATRFTSVYAWNRKRISNCVADYSVLYNSASFSTFKCYGVSPTKLNDLCFTNVYADSFVIRGDEVRQIAPGQTGKIADYNYKLPDDFTGCVIAWNSNNLDSKVGGNYNYLYRLFRKSNLKPFERDISTEIYQAGSTPCNGVEGFNCYFPLQSYGFQPTNGVGYQPYRVVVLSFELLHAPATVCGPKKSTNLVKNKCVNF

SEQ ID NO: 13291 - protein, 223 aa, Artificial Sequence; identical to SEQ ID NO: 13243
  SARS-CoV-2/Portugal/PT0035/2020__EPI_ISL_418020 spike protein (319-541)

SEQ ID NO: 13292 - protein, 223 aa, Artificial Sequence; identical to SEQ ID NO: 13243
  SARS-CoV-2/USA/NY-NYUMC7/2020__EPI_ISL_418192 spike protein (319-541)

SEQ ID NO: 13293 - protein, 223 aa, Artificial Sequence; identical to SEQ ID NO: 13243
  SARS-CoV-2/Iceland/189/2020__EPI_ISL_417709 spike protein (319-541)

SEQ ID NO: 13294 - protein, 223 aa, Artificial Sequence; identical to SEQ ID NO: 13243
  SARS-CoV-2/Australia/NSW56/2020__EPI_ISL_417408 spike protein (319-541)

SEQ ID NO: 13295 - protein, 223 aa, Artificial Sequence; identical to SEQ ID NO: 13243
  SARS-CoV-2/Iceland/280/2020__EPI_ISL_417608 spike protein (319-541)

SEQ ID NO: 13296 - protein, 223 aa, Artificial Sequence; identical to SEQ ID NO: 13243
  SARS-CoV-2/Iceland/247/2020__EPI_ISL_417575 spike protein (319-541)

SEQ ID NO: 13297 - protein, 223 aa, Artificial Sequence; identical to SEQ ID NO: 13243
  SARS-CoV-2/Iceland/238/2020__EPI_ISL_417566 spike protein (319-541)

SEQ ID NO: 13298 - protein, 223 aa, Artificial Sequence; identical to SEQ ID NO: 13243
  SARS-CoV-2/Greece/16/2020__EPI_ISL_418265 spike protein (319-541)

SEQ ID NO: 13299 - protein, 223 aa, Artificial Sequence; identical to SEQ ID NO: 13243
  SARS-CoV-2/Iceland/319/2020__EPI_ISL_417648 spike protein (319-541)

SEQ ID NO: 13300 - protein, 223 aa, Artificial Sequence; identical to SEQ ID NO: 13243
  SARS-CoV-2/Congo/94/2020__EPI_ISL_417947 spike protein (319-541)

SEQ ID NO: 13301 - protein, 223 aa, Artificial Sequence; identical to SEQ ID NO: 13243
  SARS-CoV-2/Congo/158/2020__EPI_ISL_417950 spike protein (319-541)

SEQ ID NO: 13302 - protein, 223 aa, Artificial Sequence; identical to SEQ ID NO: 13243
  SARS-CoV-2/USA/UT-00034/2020__EPI_ISL_417977 spike protein (319-541)

SEQ ID NO: 13303 - protein, 223 aa, Artificial Sequence; identical to SEQ ID NO: 13243
  SARS-CoV-2/USA/UT-00033/2020__EPI_ISL_417976 spike protein (319-541)

SEQ ID NO: 13304 - protein, 223 aa, Artificial Sequence
  SARS-CoV-2/USA/WI-13/2020__EPI_ISL_417516 spike protein (319-541)
RVLPTESIVRFPNITNLCPFGEVFNATRFASVYAWNRKRISNCVADYSVLYNSASFSTFKCYGVSPTKLNDLCFTNVYADSFVIRGDEVRQIAPGQTGKIADYNYKLPDDFTGCVIAWNSNNLDSKVGGNYNYLYRLFRKSNLKPFERDISTEIYQAGSTPCNGVEGFNCYFPLQSYGFQPTNGVGYQPYRVVVLSFELLHAPATVCGPKKSTNLVKNKCVNF

SEQ ID NO: 13305 - protein, 223 aa, Artificial Sequence
  SARS-CoV-2/India/1-27/2020__EPI_ISL_413522 spike protein (318-540)
RVQPTESIVRFPNITNLCPFGEVFNATRFASVYAWNRKRISNCVADYSVLYNSASFSTFKCYGVSPTKLNDLCFTNVYADSFVIRGDEVIQIAPGQTGKIADYNYKLPDDFTGCVIAWNSNNLDSKVGGNYNYLYRLFRKSNLKPFERDISTEIYQAGSTPCNGVEGFNCYFPLQSYGFQPTNGVGYQPYRVVVLSFELLHAPATVCGPKKSTNLVKNKCVNF

SEQ ID NO: 13306 - protein, 223 aa, Artificial Sequence
  SARS-CoV-2/pangolin/Guangxi/P4L/2017__EPI_ISL_410538 spike protein (313-535)
RVQPTISIVRFPNITNLCPFGEVFNASKFASVYAWNRKRISNCVADYSVLYNSTSFSTFKCYGVSPTKLNDLCFTNVYADSFVVKGDEVRQIAPGQTGVIADYNYKLPDDFTGCVIAWNSVKQDALTGGNYGYLYRLFRKSKLKPFERDISTEIYQAGSTPCNGQVGLNCYYPLERYGFHPTTGVNYQPFRVVVLSFELLNGPATVCGPKLSTTLVKDKCVNF

SEQ ID NO: 13307 - protein, 223 aa, Artificial Sequence; identical to SEQ ID NO: 13306
  SARS-CoV-2/pangolin/Guangxi/P5L/2017__EPI_ISL_410540 spike protein (313-535)

SEQ ID NO: 13308 - protein, 223 aa, Artificial Sequence
  SARS-CoV-2/pangolin/Guangxi/P5E/2017__EPI_ISL_410541 spike protein (313-535)
RVQPTISIVRFPNITNLCPFGEVFNASKFASVYAWNRKRISNCVADYSVLYNSTSFSTFKCYGVSPTKLNDLCFTNVYADSFVVKGDEVRQIAPGQTGVIADYNYKLPDDFTGCVIAWNSVKQDALTGDNYGYLYRLFRKSKLKPFERDISTEIYQAGSTPCNGQVGLNCYYPLERYGFHPTTGVNYQPFRVVVLSFELLNGPATVCGPKLSTTLVKDKCVNF

SEQ ID NO: 13309 - protein, 221 aa, Artificial Sequence
  SARS-CoV-2/pangolin/Guangxi/P1E/2017__EPI_ISL_410539 spike protein (311-533)
RVQPTISIVRFPNITNLCPFGEVFNASKFASVYAWNRKRISNCVADYSVLYNSTSFSTFKCYGVSPTKLNDLCFTNVYADSFVVKGDEVRQIAPGQTGVIADYNYKLPDDFTGCVIAWNSVKQDALTGGNYLYRLFRKSKLKPFERDISTEIYQAGSTPCNGQVGLNCYYPLERYGFHPTTGVNYQPFRVVVLSFELLNGPATVCGPKLSTTLVKDKCVNF

SEQ ID NO: 13310 - protein, 201 aa, Artificial Sequence
  SARS-CoV-2/Wuhan/WIV05/2019__EPI_ISL_402128 spike protein (329-529)
FPNITNLCPFGEVFNATRFASVYAWNRKRISNCVADYSVLYNSASFSTFKCYGVSPTKLNDLCFTNVYADSFVIRGDEVRQIAPGQTGKIADYNYKLPDDFTGCVIAWNSNNLDSKVGGNYNYLYRLFRKSNLKPFERDISTEIYQAGSTPCNGVEGFNCYFPLQSYGFQPTNGVGYQPYRVVVLSFELLHAPATVCGPKK

SEQ ID NO: 13311 - protein, 201 aa, Artificial Sequence; identical to SEQ ID NO: 13310
  SARS-CoV-2/bat/Yunnan/RaTG13/2013__EPI_ISL_402131 spike protein (325-525)

SEQ ID NO: 13312 - protein, 201 aa, Artificial Sequence; identical to SEQ ID NO: 13310
  SARS-CoV-2/Wuhan/HBCDC-HB-01/2019__EPI_ISL_402132 spike protein (329-529)

SEQ ID NO: 13313 - protein, 201 aa, Artificial Sequence; identical to SEQ ID NO: 13310
  SARS-CoV-2/Guangdong/20SF028/2020__EPI_ISL_403936 spike protein (329-529)

SEQ ID NO: 13314 - protein, 201 aa, Artificial Sequence; identical to SEQ ID NO: 13310
  SARS-CoV-2/Shenzhen/SZTH-001/2020__EPI_ISL_406592 spike protein (329-529)

SEQ ID NO: 13315 - protein, 201 aa, Artificial Sequence; identical to SEQ ID NO: 13310
  SARS-CoV-2/Shenzhen/SZTH-004/2020__EPI_ISL_406595 spike protein (329-529)

SEQ ID NO: 13316 - protein, 201 aa, Artificial Sequence; identical to SEQ ID NO: 13310
  SARS-CoV-2/France/IDF0372/2020__EPI_ISL_406596 spike protein (329-529)

SEQ ID NO: 13317 - protein, 201 aa, Artificial Sequence; identical to SEQ ID NO: 13310
  SARS-CoV-2/Australia/VIC01/2020__EPI_ISL_406844 spike protein (329-529)

SEQ ID NO: 13318 - protein, 201 aa, Artificial Sequence; identical to SEQ ID NO: 13310
  SARS-CoV-2/Germany/BavPat1/2020__EPI_ISL_406862 spike protein (329-529)

SEQ ID NO: 13319 - protein, 201 aa, Artificial Sequence; identical to SEQ ID NO: 13310
  SARS-CoV-2/Wuhan/HBCDC-HB-02/2020__EPI_ISL_412978 spike protein (329-529)

SEQ ID NO: 13320 - protein, 201 aa, Artificial Sequence; identical to SEQ ID NO: 13310
  SARS-CoV-2/Australia/QLD02/2020__EPI_ISL_407896 spike protein (329-529)

SEQ ID NO: 13321 - protein, 201 aa, Artificial Sequence; identical to SEQ ID NO: 13310
  SARS-CoV-2/India/1-31/2020__EPI_ISL_413523 spike protein (329-529)

SEQ ID NO: 13322 - protein, 201 aa, Artificial Sequence; identical to SEQ ID NO: 13310
  SARS-CoV-2/Guangdong/GD2020087-P0008/2020__EPI_ISL_413863 spike protein (329-529)

SEQ ID NO: 13323 - protein, 201 aa, Artificial Sequence; identical to SEQ ID NO: 13310
  SARS-CoV-2/Sweden/01/2020__EPI_ISL_411951 spike protein (329-529)

SEQ ID NO: 13324 - protein, 201 aa, Artificial Sequence; identical to SEQ ID NO: 13310
  SARS-CoV-2/Tianmen/HBCDC-HB-07/2020__EPI_ISL_412983 spike protein (329-529)

SEQ ID NO: 13325 - protein, 201 aa, Artificial Sequence; identical to SEQ ID NO: 13310
  SARS-CoV-2/Hong Kong/case42_VM20002493/2020__EPI_ISL_414527 spike protein (329-529)

SEQ ID NO: 13326 - protein, 201 aa, Artificial Sequence; identical to SEQ ID NO: 13310
  SARS-CoV-2/USA/CruiseA-23/2020__EPI_ISL_414482 spike protein (329-529)

SEQ ID NO: 13327 - protein, 201 aa, Artificial Sequence; identical to SEQ ID NO: 13310
  SARS-CoV-2/Hong Kong/case85_VM20002868/2020__EPI_ISL_414519 spike protein (329-529)

SEQ ID NO: 13328 - protein, 201 aa, Artificial Sequence; identical to SEQ ID NO: 13310
  SARS-CoV-2/England/200990660/2020__EPI_ISL_414523 spike protein (329-529)

SEQ ID NO: 13329 - protein, 201 aa, Artificial Sequence; identical to SEQ ID NO: 13310
  SARS-CoV-2/Australia/NSW09/2020__EPI_ISL_413595 spike protein (329-529)

SEQ ID NO: 13330 - protein, 201 aa, Artificial Sequence; identical to SEQ ID NO: 13310
  SARS-CoV-2/Australia/NSW10/2020__EPI_ISL_413596 spike protein (329-529)

SEQ ID NO: 13331 - protein, 201 aa, Artificial Sequence; identical to SEQ ID NO: 13310
  SARS-CoV-2/Switzerland/1000477797/2020__EPI_ISL_413023 spike protein (329-529)

SEQ ID NO: 13332 - protein, 201 aa, Artificial Sequence; identical to SEQ ID NO: 13310
  SARS-CoV-2/Belgium/BA-02291/2020__EPI_ISL_415159 spike protein (329-529)

SEQ ID NO: 13333 - protein, 201 aa, Artificial Sequence; identical to SEQ ID NO: 13310
  SARS-CoV-2/USA/WA8-UW5/2020__EPI_ISL_413486 spike protein (329-529)

SEQ ID NO: 13334 - protein, 201 aa, Artificial Sequence; identical to SEQ ID NO: 13310
  SARS-CoV-2/England/20102000506/2020__EPI_ISL_415147 spike protein (329-529)

SEQ ID NO: 13335 - protein, 201 aa, Artificial Sequence; identical to SEQ ID NO: 13310
  SARS-CoV-2/Belgium/VAG-03013/2020__EPI_ISL_415155 spike protein (329-529)

SEQ ID NO: 13336 - protein, 201 aa, Artificial Sequence; identical to SEQ ID NO: 13310
  SARS-CoV-2/Belgium/BC-03016/2020__EPI_ISL_415157 spike protein (329-529)

SEQ ID NO: 13337 - protein, 201 aa, Artificial Sequence; identical to SEQ ID NO: 13310
  SARS-CoV-2/Germany/BavPat3/2020__EPI_ISL_414521 spike protein (329-529)
